United States Patent Application Publication US 2022/0096574 A1 - sequence listing, part 5

SEQ ID NO: 15966 - protein, 216 aa, Thermosporothrix hazakensis
  misc_feature (1)..(216): tr|A0A326UDL0|A0A326UDL0_9CHLR GTP cyclohydrolase 1 OS= Thermosporothrix hazakensis OX=644383 GN=folE PE=3 SV=1
MTLNIDLDDLDFQEAIHLKHRHISVEDMQKFEGYIAEIFAAMGMDVNTPSTRETPQRFLKAMFDATEGYDGDPKLIKVFDAEYPDGVDGRRSQVIEGPIPFFSLCEHHAFPFFGHAYVGYIANQHIIGLSKLTRLVRVFAKRFSVQERLTQQIASTLETILQPHGVAVYLEANHLCMAMRGVRETSALTRTTSWRGEYEANPELRSEFFSACQIRS

SEQ ID NO: 15967 - protein, 216 aa, Thermosporothrix sp.; identical to SEQ ID NO: 15966
  misc_feature (1)..(216): tr|A0A455SXI8|A0A455SXI8_9CHLR GTP cyclohydrolase 1 OS= Thermosporothrix sp. COM3 OX=2490863 GN=folE_2 PE=3 SV= 1

SEQ ID NO: 15968 - protein, 203 aa, Thermostaphylospora chromogena
  misc_feature (1)..(203): tr|A0A1H1C638|A0A1H1C638_9ACTN GTP cyclohydrolase 1 OS= Thermostaphylospora chromogena OX=35622 GN=folE PE=3 SV =1
MQSPETVIPDVTEPLKVDSARIEKAVREILLAIGEDPDRDGLRDTPARVARAYAEQFAGLGQTPEDVLTTVFDADHDEMVLVKDIEVYSTCEHHLVPFYGVAHVGYIPNEKGQITGLSKLARLIDVYARRPQVQERMTSQVADALDRVLEPRGVIVVIEAEHLCMTMRGVRKPGAKTITSAVRGSFRTSEKTRAEAMSLILGQ

SEQ ID NO: 15969 - protein, 258 aa, Thermosulfidibacter takaii
  misc_feature (1)..(258): tr|A0A0S3QUX0|A0A0S3QUX0_THET7 GTP cyclohydrolase FolE2 OS=Thermosulfidibacter takaii (strain DSM 17441 / JCM 13301 / NBRC 103674 / ABI70S6) OX=1298851 GN=folE2 PE=3 SV=1
MRDLQNERDYRNIPIDRVGIKGLKYPITVLDRHHKEQPTVAEIDIAVGLPKEFRGTHMSRFVEILNNYRWKIHTARVLEILNKVMEKLPSHSAYLRINFPYFLEKQAPVSKEESLMNYNVSMEATLYENGKKEMLLTVEVPVMTLCPCSKEISDKNAHNQRALVKISVKMNKLVWIEELIETAESCASAQLYSLLKREDEKYITEYAYEHPVFVEDLVRDIALKLKKDERISWFRIEAESMESIHNHNAFAVVEAKNR

SEQ ID NO: 15970 - protein, 259 aa, Thermosulfurimonas dismutans
  misc_feature (1)..(259): tr|A0A179D4P3|A0A179D4P3_9BACT GTP cyclohydrolase FolE2 OS=Thermosulfurimonas dismutans OX=999894 GN=folE2 PE= 3 SV=1
MELKDVQSLYDPREISIDKVGIKGIRYPVSVLDKRRGVQHTVAEINMYVDLPREFKGTHMSRFIEILNEFREEIYIKNIPFILDRMREKLSAKVAHLEISFPYFLKKEAPVTQAPSLMEYQCFISGAKSEEELDIVLGVRVPVMTVCPCSQAISEIGAHNQRGEVTLKVRFKRFVWLEELIEIVEASASSPVYPLLKRPDEKYVTEWAHQRPRFVEDVVREVGRRLLDHPDIIWFAVSAENLESIHAHNAYAYLERWKD

SEQ ID NO: 15971 - protein, 229 aa, Thermosynechococcus elongatus
  misc_feature (1)..(229): sp|Q8DJB8|GCH1_THEEB GTP cyclohydrolase 1 OS=Thermosyne chococcus elongatus (strain BP-1) OX=197221 GN=folE PE= 3 SV=1
MTTFPMPDSIINGKATTPAVLPDRNTHQGKEPIPHPPPPEVAKEEMMAAVRTILLNVGEDPDREGLLKTPKRVAEAMQFLTSGYSQSLETLVNGAIFDEGHDEMVLVRDINFFSLCEHHMLPFIGKAHVAYIPNQRVIGLSKLARVVEMYARRLQVQERLTRQVAEAIETVLDPKGVAVVMEATHMCMVMRGVQKPGSWTVTSSMLGVFREDQKTREEFLNLIRHQPNF

SEQ ID NO: 15972 - protein, 216 aa, Thermosynechococcus sp.
  misc_feature (1)..(216): tr|A0A5C2MAX8|A0A5C2MAX8_9CYAN GTP cyclohydrolase 1 OS= Thermosynechococcus sp. CL-1 OX=2583530 GN=folE PE=3 SV =1
MSQQSRNQLLTVQSSLESIPTCVSTQVSDAEMEQAVRTLLIGLGENPDREGLRDTPKRVVQALKFLTSGYRQSLDDLLNDAVFYEDTNEMVLVRDIDLFSCCEHHILPIIGRAHVAYIPNGRVIGLSKIARICEMYARRLQVQERLTQQIADALQGLLKPQGVAVVVEATHMCMVMRGVQKPGSWTVTSSMQGVFAEDARTRQEFLDLIRHQPSFR

SEQ ID NO: 15973 - protein, 184 aa, Thermosynechococcus sp.
  misc_feature (1)..(184): tr|V5V3M4|V5V3M4_9CYAN GTP cyclohydrolase 1 OS=Thermosy nechococcus sp. NK55a OX=1394889 GN=folE PE=3 SV=1
MMAAVRTILLNVGEDPDREGLLKTPKRVAEAMQFLTSGYSQSLETLVNGAIFDEGHDEMVLVRDINFFSLCEHHMLPFIGKAHVAYIPNQRVIGLSKLARVVEMYARRLQVQERLTRQVAEAIETVLDPKGVAVVMEATHMCMVMRGVQKPGSWTVTSSMLGVFREDQKTREEFLNLIRHQPNF

SEQ ID NO: 15974 - protein, 192 aa, Thermosyntropha lipolytica
  misc_feature (1)..(192): tr|A0A1M5Q8Y7|A0A1M5Q8Y7_9FIRM GTP cyclohydrolase 1 OS= Thermosyntropha lipolytica DSM 11003 OX=1123382 GN=folE PE=3 SV=1
MACKEIDKPKIEQAFRMILEAIGEDPDREGLRDTPKRVARMYEEIFSGLWCEPREFLQVSFSEFHDELVLVKDIPLYSMCEHHFLPFYGKAHVAYIPRGGKVIGISKLARVAEAYAKRPQLQERLTSQIADCIYETLNPHGVGVVIEAEHMCMTMRGIRKPGSITVTSALRGLFETRHQTREELLSLILNKR

SEQ ID NO: 15975 - protein, 188 aa, Thermotalea metallivorans
  misc_feature (1)..(188): tr|A0A140L377|A0A140L377_9CLOT GTP cyclohydrolase 1 OS= Thermotalea metallivorans OX=520762 GN=folE PE=3 SV=1
MDKKRIEKAIREILEAIGENPDREGLIDTPKRIANMYEEIFSGLKEDPQEHLEVYFQQEQHEELVLVKDIPFYSMCEHHLVPFFGKCHVGYIPKKGKLTGLSKLARVVETVARRPQLQERLTTMIADAIMEKLSPHGVIVVVEAEHMCMTMRGVKKPGSQTITSAVRGLFNKDAKARAEAMALINLGK

SEQ ID NO: 15976 - protein, 259 aa, Thermotoga maritima
  misc_feature (1)..(259): sp|Q9WXP6|GCH4_THEMA GTP cyclohydrolase FolE2 OS=Thermo toga maritima (strain ATCC 43589 / MSB8 / DSM 3109 / JC M 10099) OX=243274 GN=folE2 PE=1 SV=1
MKDVQNEKDPRMVPLKKVGIKDLHWPLKVILKEDGYQSTVAQISCSVDLHREKRGIHMSRFIEVLNKLEVITPQIFEEILDDLIEIMEAKRAHLEIHFPYFIWKESPVSRKKSPLKVDCFVEAEKEKNFSFKIGVRTPVHTLCPCSKEISDYGAHNQRAFVEITVKTRKFIWFEDLVEIAEKNASSPLYTLLKRPDEKFVTEKAYENPRFVEDVARDVALELEKDPRITWYRVYVESMESIHNHNAFACVEKGDFVLEG

SEQ ID NO: 15977 - protein, 259 aa, Thermotoga maritima; identical to SEQ ID NO: 15976
  misc_feature (1)..(259): tr|G4FGV6|G4FGV6_THEMA GTP cyclohydrolase FolE2 OS=Ther motoga maritima (strain ATCC 43589 / MSB8 / DSM 3109 / JCM 10099) OX=243274 GN=folE2 PE=3 SV=1

SEQ ID NO: 15978 - protein, 259 aa, Thermotoga naphthophila; identical to SEQ ID NO: 15976
  misc_feature (1)..(259): tr|D2C730|D2C730_THENR GTP cyclohydrolase FolE2 OS=Ther motoga naphthophila (strain ATCC BAA-489 / DSM 13996 / JCM 10882 / RKU-10) OX=590168 GN=folE2 PE=3 SV=1

SEQ ID NO: 15979 - protein, 259 aa, Thermotoga naphthophila
  misc_feature (1)..(259): tr|A0A101EQT0|A0A101EQT0_9THEM GTP cyclohydrolase FolE2 OS=Thermotoga naphthophila OX=93930 GN=folE2 PE=3 SV=1
MKDVQNEKDPRMVPLKKVGIKDLHWPLKVILKEDGYQSTVAQISCSVDLHREKRGIHMSRFIEVLNKLEVITPQIFEEILDDLIEIMEAKRAHLEIHFPYFIWKESPVSRKKSPLKVDCFVEAEKEKNFSFKIGVRTPVHTLCPCSKEISDYGAHNQRAFVEITVKTRKFIWFEDLVEIAEKNASSPLYTLLKRPDEKFVTEKAYENPRFVEDVARDVALELEKDPRITWYRVYVESMESIHNHNAFACLEKEDFVLEG

SEQ ID NO: 15980 - protein, 259 aa, Thermotoga neapolitana
  misc_feature (1)..(259): sp|B9K795|GCH4_THENN GTP cyclohydrolase FolE2 OS=Thermo toga neapolitana (strain ATCC 49049 / DSM 4359 / NS-E) OX=309803 GN=folE2 PE=3 SV=1
MKDVQNEKDTRMVPLKKVGIKDLSWPLKILLKGDGYQPTVAQISCSVDLHREKRGIHMSRFIEVLNGLEEITPHIFEKVLDDLIVTMEAKRAHLEIRFPYFVWKESPVTRKVSPLKVDCFVEAEKEKNFSFKIGVRVPVHNLCPCSKEISDYGAHNQRAFVEIHVRTRKFIWFEDLVEIAERNASVPLYTLLKRPDEKFVTERAYENPKFVEDVARDVALDLEKDPRITWYRVYVESMESIHNHNAFACVEKGDFVLEG

SEQ ID NO: 15981 - protein, 259 aa, Thermotoga petrophila
  misc_feature (1)..(259): sp|A5IL29|GCH4_THEP1 GTP cyclohydrolase FolE2 OS=Thermo toga petrophila (strain RKU-1 / ATCC BAA-488 / DSM 1399 5) OX=390874 GN=folE2 PE=3 SV=1
MKDVQNEKDPRMVPLKKVGIKDLHWPLKVILKEDGYQSTVAQISCSVDLHREKRGIHMSRFIEVLNKLEVITPQIFEEILDDLIEIMEAKRAHLEIHFPYFTWKESPVSRKKSPLKVDCFVEAEKEKNFSFKIGVRTPVHTLCPCSKEISDYGAHNQRAFVEITVKTRKFIWFEDLVEIAEKNASSPLYTLLKRPDEKFVTEKAYENPRFVEDVARDVALKLEKDPRITWYRVYVESMESIHNHNAFACVEKGDFVLEG

SEQ ID NO: 15982 - protein, 259 aa, Thermotoga sp.; identical to SEQ ID NO: 15976
  misc_feature (1)..(259): sp|B1LAA9|GCH4_THESQ GTP cyclohydrolase FolE2 OS=Thermo toga sp. (strain RQ2) OX=126740 GN=folE2 PE=3 SV=1

SEQ ID NO: 15983 - protein, 259 aa, Thermotoga sp.
  misc_feature (1)..(259): tr|A0A0A6N339|A0A0A6N339_9THEM GTP cyclohydrolase FolE2 OS=Thermotoga sp. Mc24 OX=1231241 GN=folE2 PE=3 SV=1
MKDVQNEKDPRMVPLKKVGIKDLHWPLKVILKEDGYQSTVAQISCSVDLHREKRGIHMSRFIEVLNKLEVITPQIFEEILDDLIEIMEAKRAHLEIRFPYFIWKESPVSRKKSPLKVDCFVEAEKEKNFSFKIGVRTPVHTLCPCSKEISDYGAHNQRAFVEITVKTKKFIWFEDLVEIAERNASSPLYTLLKRPDEKFVTEKAYENPRFVEDVARDVALELEKEPRITWYRVYVESMESIHNHNAFACVEKGDFVLEG

SEQ ID NO: 15984 - protein, 263 aa, Thermotogae bacterium
  misc_feature (1)..(263): tr|A0A496QF43|A0A496QF43_9BACT GTP cyclohydrolase FolE2 OS=Thermotogae bacterium OX=2053689 GN=folE2 PE=3 SV=1
MEKRKAFLRDVQNEKDERNVPIDMVGIRGLKYPIVVLDRAKGRQNTVGTFDLFVDLPRDFRGTHMSRFVEVLDRHNNRITPRNMESILSDMRAFLKADVAHINVFFPYFLRKNAPVSGISSYSSFECGFIARLNSGFDFILEVNVPVMTVCPCSKEISERGAHNQRANAKVRIRMKSLVWIEEIIEVAETSASAPIFSLLKREDEKYITELSYDNPRFVEDLSREIVLHLEKDRRITWYRVEVASQESIHNHEAYACIEKREL

SEQ ID NO: 15985 - protein, 259 aa, Thermotogae bacterium
  misc_feature (1)..(259): tr|A0A1V6GZ71|A0A1V6GZ71_9BACT GTP cyclohydrolase FolE2 OS=Thermotogae bacterium ADurb.Bin062 OX=1852923 GN=fo lE2 PE=3 SV=1
MLDVQSEQDHRNLPLDRVGIKKMKYPIALRGKEKGTQHTIAEVTMSVDLPLHFRGTHMSRFVEVLHSHAHNMELKNLKTILSDMKQKLSASRAHLDLEFPYTIEKMAPVTGILSYMVIPCQFNATLDETDRFELVYGAKVPIQTVCPCSKAISSRGAHNQRANVTILLISKKIIWIEDIVKIAEQGASSPVFPLLKREDEKFVTENGYDHAKFVEDVARDIGVVLRESESVSWYSVEVSSMESIHDHDAFAYLEGGQRT

SEQ ID NO: 15986 - protein, 256 aa, Thermotogales bacterium
  misc_feature (1)..(256): tr|A0A124G2T2|A0A124G2T2_9BACT GTP cyclohydrolase FolE2 OS=Thermotogales bacterium 46_20 OX=1635293 GN=folE2 P E=3 SV=1
MRDVQNDRDKRNIPVDMVGVRSVMYPIVVLDKENQNQNTVGSFNICVDLPKDFRGTHMSRFIEVLDSHNKKITPRNMKHILDDILRSLDAAVAHLKVEFPYFIRKQAPVSRVESYSSYKCSFTATKNNHFDFVLGVSVPVMTVCPCSREISDRGAHNQRAETHVQLRMNSLVWIEDVVQIVEDSASSPVFSLLKREDEKFVTENSYDNPRFVEDLSREIVQKLEMDRRISWYKVEVTSMESIHNHEAYACIERKDD

SEQ ID NO: 15987 - protein, 256 aa, Thermovenabulum gondwanense
  misc_feature (1)..(256): tr|A0A162MKJ8|A0A162MKJ8_9FIRM GTP cyclohydrolase FolE2 OS=Thermovenabulum gondwanense OX=520767 GN=folE2 PE=3 SV=1
MKDVQSEKDERMVPLKKVGIKGLKWPLKVQDKKRGFQYTVANITISADLHRDLRGTHMSRFVEVLKNFEILSPKGIEDILIEIKEKLGANSAHIELLIPYFIWKESPVTKSESPLEVCAKIYAELSDSYKIYTGVKVPVHTLCPCSKEISQEGAHNQRAEVDILTRSKKMIWFEDLIEIAESSASCPIYTLLKRPDEKYITEKAFENPKFVEDVTRDAALRLEEDERIEWYRVEVTSFESIHNHQAFACVEKGWMN

SEQ ID NO: 15988 - protein, 186 aa, Thermovibrio ammonificans
  misc_feature (1)..(186): tr|E8T3S0|E8T3S0_THEA1 GTP cyclohydrolase 1 OS=Thermovi brio ammonificans (strain DSM 15698 / JCM 12110 / HB-1) OX=648996 GN=folE PE=3 SV=1
MAFDRERIERAVREILLAIGEDPDREGLRDTPKRVAKMYEEVLSGYGDSPENHMVLFTERYDEMIIVRDIPIYSMCEHHMLPFFGKAHVAYIPGNDKVTGLSKLARIVDVYAKRLQLQERMTQQIADAIMEKLGAKGVMVVVEAQHLCMIMRGVKKPGSFTVTSAVKGVMRHEPTRMEALFLIKGR

SEQ ID NO: 15989 - protein, 187 aa, Thermovibrio guaymasensis
  misc_feature (1)..(187): tr|A0A420W6I2|A0A420W6I2_9BACT GTP cyclohydrolase 1 OS= Thermovibrio guaymasensis OX=240167 GN=folE PE=3 SV=1
MAFDSERIEKAVREILIAIGEDPDREGLKDTPKRVAKLYEEILSGYNDSPENHLVLFTEKYDEMIIVKDIPFYSMCEHHMLPFFGKAHVAYIPDNSKVTGLSKLARIVDVYAKRFQLQERMTEQIADAVMAKLNAKGVMVVVEAQHLCMIMRGVKKPGSYTVTSAVKGIMREEPTRMEALFLLKGRS

SEQ ID NO: 15990 - protein, 257 aa, Thermovirga lienii
  misc_feature (1)..(257): tr|G7V650|G7V650_THELD GTP cyclohydrolase FolE2 OS=Ther movirga lienii (strain ATCC BAA-1197 / DSM 17291 / Cas6 0314) OX=580340 GN=folE2 PE=3 SV=1
MKDVQNEKDTRNIPIDRVGVTSVSYPIVVLDPKENLQHTVANVTMAVSLPRKFRGTHMSRFLEVLNEFKGRVTLESLEQVTVDLKRKLNASGSEVKIEFPYFINRKAPVSGSTSYTRYDVVFWASYDEHFDFTMKVTVPVQTLCPCSKEISEYGAHNQRAKVSIEVRMNKRIWIEELVDVAESCASSPVYTLLKRKDEKFVTEQAYSNPRFVEDVVRDVALKLDQDDRVDWFSVSVVSQESIHNHDAFASLVRDKRS

SEQ ID NO: 15991 - protein, 204 aa, Thermus aquaticus
  misc_feature (1)..(204): tr|B7A8L3|B7A8L3_THEAQ GTP cyclohydrolase 1 OS=Thermus aquaticus Y51MC23 OX=498848 GN=folE PE=3 SV=1
MERKMVEIEETGLTFETELDLGRLEGLAAEWLQVIGEDPNREGLLKTPERVAKAWAFLTRGYRQSLEEIVNGAVFRAEGSEMVVVKGIEFYSLCEHHMLPFFGQVHIGYIPGEKILGLSKFARIVDLFARRLQVQERLAVQIAEAIQQVLEPRGVGVVVEGVHLCMMMRGVEKQHSRTVTSAMLGVFREDARTREEFLSHLKGA

SEQ ID NO: 15992 - protein, 242 aa, Thermus aquaticus
  misc_feature (1)..(242): tr|A0A0M9ADQ4|A0A0M9ADQ4_THEAQ Putative GTP cyclohydrol ase 1 type 2 OS=Thermus aquaticus OX=271 GN=ybgI PE=4 S V=1
MDRDELVRYLNGYLDLEAFPQDPSLNGLQVEGKPRVTKVGAAVDAGEAIFRKALEEGVDFLLVHHGLFWGRPFPIVGHHKRRLALLFQGGINLYAAHLPLDAHPEVGNNFVLARDLGLLDLTPWDVGVRGRFPLPTPLLQVADRLGQLTGMQPLVHQGGLDQVETVIIVSGSGTGLLPKVDADLFITGEPKHAVFHETFERGLNVIYAGHYDTETFGVKALAQHLYERFGLPWVFLDHPTGL

SEQ ID NO: 15993 - protein, 198 aa, Thermus arciformis
  misc_feature (1)..(198): tr|A0A1G7DCQ8|A0A1G7DCQ8_9DEIN GTP cyclohydrolase 1 OS= Thermus arciformis OX=482827 GN=folE PE=3 SV=1
MVEIEETGLTFATEVDLDRLQSLAAEWLQAIGEDPNREGLLKTPERVAKAWAFLTRGYRQDLKELVNGAVFQAEGSEMVVVKGIEFYSMCEHHMLPFFGQVHIGYIPDGKILGLSKFARIVDMFARRLQVQERLAVQIAEAIQEVLEPQGVGVVVEGVHLCMMMRGVEKQHSRTVTSAMLGVFRESQKTREEFLSHLK

SEQ ID NO: 15994 - protein, 202 aa, Thermus brockianus
  misc_feature (1)..(202): tr|A0A1J0LRP1|A0A1J0LRP1_THEBO GTP cyclohydrolase 1 OS= Thermus brockianus OX=56956 GN=folE PE=3 SV=1
MERKMVEIEETGLSFETELDLDRLKALAADWLLAIGEDPNREGLLKTPERVAKAWAFLTRGYRQDLKEIVNGAIFQAEGSEMVVVKGIEFYSLCEHHLLPFFGQVHIGYIPNGKILGLSKFARIVDLFARRLQVQERLAVQIAEAIQEVLEPQGVGVVVEGVHLCMMMRGVEKQHSRTVTSAMLGVFRESQKTREEFLSHLR

SEQ ID NO: 15995 - protein, 202 aa, Thermus filiformis
  misc_feature (1)..(202): tr|A0A0A2WQB3|A0A0A2WQB3_THEFI GTP cyclohydrolase 1 OS= Thermus filiformis OX=276 GN=folE PE=3 SV=1
MERKMVKLEDTGLTFETEVDLERLKGLALGWLEAIGEDPAREGLRKTPERVAKAWAFLTRGYRQNLKEIVNEAVFQAEGSELVVVKGIEFYSMCEHHLLPFFGQVHIGYIPDGKILGLSKFARIVDMFARRLQVQERLAVQIAEAIQEVLSPRGVGVVIEGVHLCMMMRGVEKQHSRTTTSAMLGVFREDQKTREEFLSLIR

SEQ ID NO: 15996 - protein, 202 aa, Thermus oshimai
  misc_feature (1)..(202): tr|K7QXP7|K7QXP7_THEOS GTP cyclohydrolase 1 OS=Thermus oshimai JL-2 OX=751945 GN=folE PE=3 SV=1
MERRMVEIEETGLSFVTEVDLERLQALSEEWLRLIGEDPEREGLKKTPERVAKAWAFLTRGYRQSLEEIVNGAIFQAEGSEMVVVKGIEFYSLCEHHMLPFFGQVHIGYIPNQKILGLSKFARIVDMFARRLQVQERLAVQIAEAIQEVLEPQGVGVVVEGVHLCMMMRGVEKQHSRTVTSAMLGVFRESAKTREEFLDHLK

SEQ ID NO: 15997 - protein, 206 aa, Thermus parvatiensis
  misc_feature (1)..(206): tr|H7GIK3|H7GIK3_9DEIN GTP cyclohydrolase 1 OS=Thermus parvatiensis OX=456163 GN=folE PE=3 SV=1
MERKMVELEDTGLTFATEVDLERLQALAAEWLQVIGEDPGREGLLKTPERVAKAWAFLTRGYRQRLEEVVGGAVFPAEGSEMVVVKGVEFYSMCEHHLLPFFGKVHIGYIPDGKILGLSKFARIVDMFARRLQVQERLAVQIAEAIQEVLEPQGVGVVVEGVHLCMMMRGVEKQHSRTVTSAMLGVFRENQKTREEFLSHLRDGTA

SEQ ID NO: 15998 - protein, 202 aa, Thermus scotoductus
  misc_feature (1)..(202): tr|E8PQG2|E8PQG2_THESS GTP cyclohydrolase 1 OS=Thermus scotoductus (strain ATCC 700910 / SA-01) OX=743525 GN=f olE PE=3 SV=1
MERKMVELEDTGLTFETHVDLGRLKRLAAEWLEVIGEDPSREGLLKTPERVAKAWAFLTRGYRQDLKAIVNGALFPAEGSEMVVVKGIEFYSMCEHHLLPFFGQVHIGYIPGEKILGLSKFARIVDMFARRLQVQERLAVQIAEAIQEILEPQGVGVVVEGVHLCMMMRGVEKQHSRTTTSAMLGVFRESQKTREEFLSHLK

SEQ ID NO: 15999 - protein, 202 aa, Thermus scotoductus
  misc_feature (1)..(202): tr|A0A430UVN9|A0A430UVN9_THESC GTP cyclohydrolase 1 OS= Thermus scotoductus OX=37636 GN=folE PE=3 SV=1
MERKMVEIEETGLTFETEMDLERLQRLAAEWLQVIGEDPARQGLLKTPERVAKAWAFLTRGYRQDLKAIVNGALFPAEGSEMVVVKGIEFYSMCEHHLLPFFGQVHIGYIPGEKILGLSKFARIVDMFARRLQVQERLAVQIAEAVQEILEPQGVGVVVEGVHLCMMMRGVEKQHSRTTTSAMLGVFRESQKTREEFLSHLK

SEQ ID NO: 16000 - protein, 202 aa, Thermus sp.
  misc_feature (1)..(202): tr|G8NC50|G8NC50_9DEIN GTP cyclohydrolase 1 OS=Thermus sp. CCB_US3_UF1 OX=1111069 GN=folE PE=3 SV=1
MSRKMVEIEETGLSFATEVDLERLQHLSAEWLAVIGEDPAREGLRKTPERVAKAWAFLTRGYRQDLKEIVNGAVFQAEGSEMVVVKGVEFYSLCEHHLLPFFGQVHIGYIPNGKILGLSKFARIVDMFARRLQVQERLAVQVAEAIQEVLEPQGVGVVVEGVHLCMMMRGVEKQHSRTITSAMLGVFRESQKTREEFLSHLK

SEQ ID NO: 16001 - protein, 204 aa, Thermus sp.
  misc_feature (1)..(204): tr|A0A4V2IUK6|A0A4V2IUK6_9DEIN GTP cyclohydrolase 1 OS= Thermus sp. CFH 72773T OX=2509362 GN=folE PE=3 SV=1
MDPKMVEVEETGLTFATEMDLERLQRLAAEWLEVIGEDPTREGLVKTPERVAKAWAFLTRGYRQDLQEIVNGAVFQAEGSEMVVVKGIEFYSLCEHHLLPFFGQVHVGYIPDGKILGLSKFARIVDMFARRLQVQERLAVQVAEAIQEILEPQGVGVVVEGVHLCMMMRGVEKQHSRTVTSAMLGVFRESQKTREEFLSHLRAG

SEQ ID NO: 16002 - protein, 202 aa, Thermus tengchongensis
  misc_feature (1)..(202): tr|A0A4Y9EVB0|A0A4Y9EVB0_9DEIN GTP cyclohydrolase 1 OS= Thermus tengchongensis OX=1214928 GN=folE PE=3 SV=1
MEGRMVEIEETGLTFETEVDLDRLQRLAAEWLEVIGEEPSREGLLKTPERVAKAWAFLTRGYRQSLQEIVNGAVFQAEGSEMVVVKGIEFYSMCEHHLLPFFGQVHIGYIPDGKILGLSKFARIVDMFARRLQVQERLAVQIAEAIQEVLQPQGVGVVVEGVHLCMMMRGVEKQHSRTVTSAMLGAFRESQKTREEFLSHLK

SEQ ID NO: 16003 - protein, 202 aa, Thermus tengchongensis
  misc_feature (1)..(202): tr|A0A4Y9FB64|A0A4Y9FB64_9DEIN GTP cyclohydrolase 1 OS= Thermus tengchongensis OX=1214928 GN=folE PE=3 SV=1
MEGRMVEIEETELTFETEVDLDRLQRLAAEWLEVIGEEPSREGLLKTPERVAKAWAFLTRGYRQSLQEIVNGAVFQAEGSEMVVVKGIEFYSMCEHHMLPFFGQVHIGYIPDGKILGLSKFARIVDMFARRLQVQERLAVQIAEAIQEVLQPQGVGVVVEGVHLCMMMRGVEKQHSRTVTSAMLGVFRESQKTREEFLSHLK

SEQ ID NO: 16004 - protein, 220 aa, Thermus thermophilus
  misc_feature (1)..(220): tr|Q5SH52|Q5SH52_THET8 GTP cyclohydrolase 1 OS=Thermus thermophilus (strain HB8 / ATCC 27634 / DSM 579) OX=300 852 GN=folE PE=1 SV=1
MSPGPQSGGQERGSMERKMVELEDTGLTFATEVDLERLQALAAEWLQVIGEDPGREGLLKTPERVAKAWAFLTRGYRQRLEEVVGGAVFPAEGSEMVVVKGVEFYSMCEHHLLPFFGKVHIGYIPDGKILGLSKFARIVDMFARRLQVQERLAVQIAEAIQEVLEPQGVGVVVEGVHLCMMMRGVEKQHSRTVTSAMLGVFRENQKTREEFLSHLRDGTA

SEQ ID NO: 16005 - protein, 207 aa, Thermus thermophilus
  misc_feature (1)..(207): tr|A0A510I0I3|A0A510I0I3_THETH GTP cyclohydrolase 1 OS= Thermus thermophilus OX=274 GN=folE PE=3 SV=1
MERKMVELEDTGLTFATEVDLERLQALAAEWLQVIGEDPGREGLLKTPERVAKAWAFLTRGYRQRLEEVVGGAVFPAEGSEMVVVKGVEFYSMCEHHLLPFFGKVHIGYIPDGKILGLSKFARIVDMFARRLQVQERLAVQIAEAIQEVLEPQGVGVVVEGVHLCMMMRGVEKQHSRTVTSAMLGVFRENQKTREEFLSHLKDPLGL

SEQ ID NO: 16006 - protein, 269 aa, Thioalbus denitrificans
  misc_feature (1)..(269): tr|A0A369C3E8|A0A369C3E8_9GAMM GTP cyclohydrolase FolE2 OS=Thioalbus denitrificans OX=547122 GN=folE2 PE=3 SV= 1
MNRPEKSIADVQSSQDTRRIAIDKVGIKDIRHPIRVADRDGGEQHTVAMFNMYVNLPHNFKGTHMSRFVEILNLHEREITVDSFKEMLVEVTQRLEAESGHIEMTFPYFVNKKAPISGVQSLMDYEVSFIGEAHNGEISMDLKVVVPVTSLCPCSKKISDYGAHNQRSHVTVAARTRGFIWIEDIIDLVEQEASCELYGLLKRPDEKHVTERAYDNPKFVEDMVRDVAARLNADERISAYVVESENFESIHNHSAYALISMDKERAAQG

SEQ ID NO: 16007 - protein, 212 aa, Thioalbus denitrificans
  misc_feature (1)..(212): tr|A0A369CED2|A0A369CED2_9GAMM GTP cyclohydrolase 1 OS= Thioalbus denitrificans OX=547122 GN=folE PE=3 SV=1
MDSNKRLKTDIVKGGHYAANLDAEADETYDEQFESLVHGMLVRLGEDPRREGLTRTPLRVAKAMDFLTSGYGVTAEEVVKGALFEDDCKEMVLVKDIEFYSLCEHHVLPFFGRAHVAYLPNGKIIGLSKIARIVDVFARRLQVQERMTNQIADALMEIMNAHGVAVVTEASHFCMMMRGVQKQNSSTITSAMRGTFERNASTRAEFLDLIRR

SEQ ID NO: 16008 - protein, 270 aa, Thioalkalivibrio denitrificans
  misc_feature (1)..(270): tr|A0A1V3NDE4|A0A1V3NDE4_9GAMM GTP cyclohydrolase FolE2 OS=Thioalkalivibrio denitrificans OX=108003 GN=folE2 P E=3 SV=1
MSTVAPKVISSGMPDVQASADTRRIPINKVGIKDIRHPVRVSDRDGGEQHTVARFNMYVNLPHDFKGTHMSRFVEILNNHEREITVQSFKQMLHEMAERLEAGSGHIEMSFPYFVNKRAPVSGVMSLMDYDVTFIGEIHDGAAQMNIKVVVPVTSLCPCSKGISERGAHNQRSHVTVNARVRDFVWIEEIIDLVESEASCELYGLLKRPDEKHVTERAYDNPKFVEDMVRDVAARLNADERITAYSVESENFESIHNHSAYALIEKDKEG

SEQ ID NO: 16009 - protein, 202 aa, Thioalkalivibrio denitrificans
  misc_feature (1)..(202): tr|A0A1V3NHK9|A0A1V3NHK9_9GAMM GTP cyclohydrolase 1 OS= Thioalkalivibrio denitrificans OX=108003 GN=folE PE=3 S V=1
MTEHQCHSDDDDFPRAESEQRMAEQFTRIIAGLGEDPERHGLAGTPLRAARAMAYLTRGYEQSLEELVNGALFDTDNDEMVLVRDIEFYSLCEHHLLPFLGKCHVAYLPKGRVVGLSKIARIVDMFSRRLQIQETLTRQIADAIESVTDARGVAVVMEAKHLCMMMRGVEKQNATMTTSMMLGTFREDARTRAEFMGLIRGG

SEQ ID NO: 16010 - protein, 207 aa, Thioalkalivibrio halophilus
  misc_feature (1)..(207): tr|A0A1V2ZZK4|A0A1V2ZZK4_9GAMM GTP cyclohydrolase 1 OS= Thioalkalivibrio halophilus OX=252474 GN=folE PE=3 SV=1
MDAASHSDSHSDEEPDNRTPASELAGHYREILAGLGEDPEREGLKDTPLRAAKAMQYLTRGYEQDLDTIVNGALFTSDNDEMVLLRDIELYSLCEHHVLPIIGKVHVAYLPDGKVIGLSKIARIVDMFAARLQIQENLTRQIAEALQQVTQAKGVGVVVDARHMCMTMRGVEKQHSSMATSVMLGAFREDSRTRREFLNLIGRGGRD

SEQ ID NO: 16011 - protein, 207 aa, Thioalkalivibrio nitratireducens
  misc_feature (1)..(207): tr|L0DYC4|L0DYC4_THIND GTP cyclohydrolase 1 OS=Thioalka livibrio nitratireducens (strain DSM 14787 / UNIQEM 213 / ALEN2) OX=1255043 GN=folE1 [H] PE=3 SV=1
MTAVTRPIKIEQNETEPMTVPLASVETLSEHYRQLLRGLGEDVEREGLLDTPARAVKAMKYLTRGYHQNLDEIVNNALFTSENDEMVLLKDIELYSLCEHHVLPIIGKAHVAYLPNGRVIGLSKIARIVDMFAARLQIQENLTRQVAEALMKVTNARGVGVVIDAKHMCMTMRGVEKQNSSMATSVMLGAFREDQRTREEFLDLIRR

SEQ ID NO: 16012 - protein, 207 aa, Thioalkalivibrio paradoxus
  misc_feature (1)..(207): tr|W0DL08|W0DL08_9GAMM GTP cyclohydrolase 1 OS=Thioalka livibrio paradoxus ARh 1 OX=713585 GN=folE PE=3 SV=1
MTAVSRPIKIEQNETEPMTVPLASVETLSEHYRQLLRGLGEDVEREGLLDTPARAVKAMKYLTRGYHQNLDEIVNNALFTSENDEMVLLKDIELYSLCEHHVLPIIGKAHVAYLPNGRVIGLSKIARIVDMFAARLQIQENLTRQIAEALMQVTDARGVGVVIDAKHMCMTMRGVEKQNSSMATSVMLGAFRDDQRTREEFLDLIRR

SEQ ID NO: 16013 - protein, 198 aa, Thioalkalivibrio sp.
  misc_feature (1)..(198): tr|D3SB85|D3SB85_THISK GTP cyclohydrolase 1 OS=Thioalka livibrio sp. (strain K90mix) OX=396595 GN=folE PE=3 SV= 1
MTSAADGRPLPAPEALARHYREILAGLNEDPNREGLLDTPMRAAKAMQYLTRGYHQDLDTIVNGALFSSDNDEMVLLRDIELYSLCEHHLLPIIGKVHVAYLPNGKVIGLSKIARIVDMFAARLQIQENMTRQIAEALMQVTDAKGVGVVVDAKHMCMTMRGVEKQHSSMATSVMLGAFRKDARTRREFLNLIHGSRD

SEQ ID NO: 16014 - protein, 304 aa, Thioalkalivibrio sp.
  misc_feature (1)..(304): tr|A0A318VUM8|A0A318VUM8_9GAMM GTP cyclohydrolase FolE2 OS=Thioalkalivibrio sp. ALE21 OX=1158175 GN=folE2 PE=3 SV=1
MDSASDHRSTDLPDVATGTSRRASTLDWVGMERIALPLQVAGQPVAAHADAGVSLDDPEARGIHMSRLYLALRMLIHRELDCARLGHVLDAFLESHEGLSGRAALSLEGEALLERPAMVSPLAGWKAYPFRVDTEKDDRGTQIRLGIEIGYSSTCPCSAALARQAIQERYDQDFGTAPPDPDRLREWLGSEAGIMATPHSQRSRAWVEVGVRPDAETFPFRFLVDRVEQALGTALQTAVKRADEQAFAVANGGNPMFCEDAARRLDEALEAPFGARGYRIHVRHEESLHAHDAVARVERPPRGA

SEQ ID NO: 16015 - protein, 200 aa, Thioalkalivibrio sulfidiphilus
  misc_feature (1)..(200): tr|B8GR58|B8GR58_THISH GTP cyclohydrolase 1 OS=Thioalka livibrio sulfidiphilus (strain HL-EbGR7) OX=396588 GN=f olE PE=3 SV=1
MSHHDCCEQEDDFPGADAEQRMAEDYTRIIRGLGEDPDRNGLIGTPLRAARAMSYLTRGYHQSLDELVNGALFETDNDEMVLVRDIEFYSLCEHHLLPFLGRCHVAYLPKGRVIGLSKIARIVDMFARRLQIQETLTRQIAEAIESVTDARGVAVVMEAKHMCMMMRGVEKQNSTMTTSMMTGTFRNDARTRAEFMGLIR

SEQ ID NO: 16016 - protein, 270 aa, Thioalkalivibrio sulfidiphilus
  misc_feature (1)..(270): tr|B8GN60|B8GN60_THISH GTP cyclohydrolase FolE2 OS=Thio alkalivibrio sulfidiphilus (strain HL-EbGR7) OX=396588 GN=folE2 PE=3 SV=1
MSNIAPKAISGGMPDVQASADTRQIPINKVGIKDIRHPVRVSDRTGSEQHTVARFNMYVNLPHNFKGTHMSRFVEILNNHEYEITVQSFKQMLHEMAERLEAGSGHIEMSFPFFVNKRAPVSGVMSLMDYDVSFIGEIHDGVAQMNIKVVVPVTSLCPCSKKISDYGAHNQRSHVTINARVGEFVWIEELIDLVESEASCELYGLLKRPDEKHVTERAYDNPKFVEDMVRDVAARLNADERIRAYAVESENFESIHNHSAYALIEKDKDA

SEQ ID NO: 16017 - protein, 217 aa, Thioalkalivibrio versutus
  misc_feature (1)..(217): tr|A0A1V3BT54|A0A1V3BT54_9GAMM GTP cyclohydrolase 1 OS= Thioalkalivibrio versutus OX=106634 GN=folE PE=3 SV=1
MNENKEPSMNADARMADEPTATPASGQPLAAPEQLAEHYREILAGLGENPQREGLRDTPMRAAKAMQYLTRGYQQDLDTIVNDALFSSDNDEMVLLRDIELYSLCEHHLLPIIGKVHVAYLPDGKVIGLSKIARIVDMFAARLQIQESLTREIAEALMQVTGAKGVGVVVDAKHMCMTMRGVEKQHSSMATSVMLGAFREDGRTRREFLNLIGRTGN

SEQ ID NO: 16018 - protein, 217 aa, Thioalkalivibrio versutus
  misc_feature (1)..(217): tr|A0A0G3G849|A0A0G3G849_9GAMM GTP cyclohydrolase 1 OS= Thioalkalivibrio versutus OX=106634 GN=folE PE=3 SV=1
MNENKEPSMNADARMADEPTATPASGQPLAAPEQLAEHYREILAGLGENPQREGLRDTPMRAAKAMQYLTRGYQQDLDTIVNDALFSSDNDEMVLLRDIELYSLCEHHLLPIIGKVHVAYLPDGKVIGLSKIARIVDMFAARLQIQESLTREIAEALMQVTGAKGVGVVVDAKHMCMTMRGVEKQHSSMATSVMLGAFREDGRTRREFLNLIRGSRD

SEQ ID NO: 16019 - protein, 283 aa, Thiobaca trueperi
  misc_feature (1)..(283): tr|A0A4V2V126|A0A4V2V126_9GAMM GTP cyclohydrolase FolE2 OS=Thiobaca trueperi OX=127458 GN=folE2 PE=3 SV=1
MEQSLEPTCRVTAANAIADVQGSADTRRIAIDRVGIKDIRHPVRIRDRSGLEQHTVATFNMSVYLPHDFKGTHMSRFVQILNSHEREISVSSFQDMLAEMSRRLESEAGHIEMRFPFFVNKKAPVSGVSSLLDYEVTFIGEIRDGQPNLEVKVVIPVTSLCPCSKEISAYGAHNQRSHVTVRVQTDGFIWLEELIELVEREASSELFGLLKRPDEKFVTERAYNNPKFVEDMVRDVASRLNEDRRILAYVVEAENFESIHNHSAYAMIERDKAREAQIAEATL

SEQ ID NO: 16020 - protein, 212 aa, Thiobaca trueperi
  misc_feature (1)..(212): tr|A0A4V2V1W8|A0A4V2V1W8_9GAMM GTP cyclohydrolase 1 OS= Thiobaca trueperi OX=127458 GN=folE PE=3 SV=1
MSEKPKLSQVLTHGRYATSFDAESAEEVYDPRKESLVRSMLTEIGEDPEREGLRRTPLRVAKAMDFLTSGYSLSAEEILKGAIFKEDVKEMVVVRDIEFYSMCEHHMLPFFGHAHVGYLPNGQVVGLSKVARVVDVFARRLQVQERLTNQVADALMEHLSAHGVAVVMEASHTCMMMRGVQKQRSTTVSSAMRGAFDANPSTRAEFMSFIRN

SEQ ID NO: 16021 - protein, 260 aa, Thiobacillaceae bacterium
  misc_feature (1)..(260): tr|A0A4V2NVZ5|A0A4V2NVZ5_9PROT GTP cyclohydrolase FolE2 OS=Thiobacillaceae bacterium LSR1 OX=2528202 GN=folE2 PE=3 SV=1
MPDVQNYHDARRIAIDKVGIKAIRHPIRVADQNGGVQHTIATFNMYVYLPHHFKGTHMSRFVEILNSYEREFSVESFEAMMRQMVERLEAESGHVEMNFPYFISKKAPVSGVESMIDYDITFIGEIRNGEYIQTIRAVVPVTSLCPCSKKISDYGAHNQRSHVTLTVRTNSFVWIEDLVRFAEDNASCELYGLLKRPDEKFVTERAYDNPKFVEDLVRDVAAALNSDERIDAYVVEAENFESIHNHSAYALIERDKQAKA

SEQ ID NO: 16022 - protein, 213 aa, Thiobacillaceae bacterium
  misc_feature (1)..(213): tr|A0A4R1BC84|A0A4R1BC84_9PROT GTP cyclohydrolase 1 OS= Thiobacillaceae bacterium LSR1 OX=2528202 GN=folE PE=3 SV=1
MSDSCDHDCQPPYRPGHLGIPQVRRFDGEAFERAVTDLLLACGIEPDSNHTGRTARRVRELWERRLLGGYDMDPGEALGDGFEDCRDDMVVVRGIAIHGVCPHHLVPFRGVAHVAYIPGGRLHGFGRIARMVDAIGHRFTYQEWMTRDIAEALISHGRARGAACVIEAEQLCLLLGEDRRGDERVVTQAFSGCFRDDAQARSEFLRAINGQMP

SEQ ID NO: 16023 - protein, 269 aa, Thiobacillus denitrificans
  misc_feature (1)..(269): sp|Q3SKF2|GCH4_THIDA GTP cyclohydrolase FolE2 OS=Thioba cillus denitrificans (strain ATCC 25259) OX=292415 GN=f olE2 PE=3 SV=1
MNEICDTAVCMPDVQSSADTRQIAIDKVGIKSIRHPVRVADKADGVQHTIANFNMYVFLPHNFKGTHMSRFIEILNTREREISVENFEGMLRQMVERLEAESGYIEMTFPYFINKSAPVSGVQSMLDYEVTFVGAIENGQYTHTTKVVVPVTSLCPCSKKISEYGAHNQRSHVTVTAKTRGFLWIEDLVRKVEDQASCELFGLLKRPDEKYVTERAYDNPKFVEDIVRDVAAAMNAEPLIDAYVVEAENFESIHNHSAYALIEHDKRKK

SEQ ID NO: 16024 - protein, 214 aa, Thiobacillus denitrificans
  misc_feature (1)..(214): tr|A0A106BVX5|A0A106BVX5_THIDE GTP cyclohydrolase 1 OS= Thiobacillus denitrificans OX=36861 GN=ABW22_00175 PE=3 SV=1
MIDACDHDCHTPHVSGSFGIPQVGAFDPAAFEQAVNAMLAACGVAPDSVHTGRTAQRVRELWQRRLLGGYAIEPAEALGEGFADARDDMVVVRGIAVHGVCPHHLVPFRGVAHVAYIPGGRLHGFGRIARMVDAIGHRFTYQEWMTRDIAEALVTHGLAQGAACIIEAEQLCLLLGEDRRGDERVVTQAFTGCFKTSDQMRNEFLRAVTHSDLK

SEQ ID NO: 16025 - protein, 273 aa, Thiobacillus sp.
  misc_feature (1)..(273): tr|A0A1Q4EI66|A0A1Q4EI66_9PROT GTP cyclohydrolase FolE2 OS=Thiobacillus sp. 0-1251 OX=1895858 GN=folE2 PE=3 SV =1
MPDRKSARSVDTAIPDVQNTPDVRRIAIDKVGIKAIRHPVKVRDKSSGTQHTIATFGMYVHLPHHFKGTHMSRFIEILNSQEREITVESFESMLRQMVERLEARSGYIEMSFPYFINKQAPVSGVKSLLDYEVTFIGEIRDGAYHQTVRILVPCTSLCPCSKGISKYGAHNQRSHITITVKTNDFIWIEDLIHIAEVNASSQLYGLLKRPDEKYVTEKAYENPKFVEDLVRDVAAALNEDARIESYVVESENFESIHNHSAYALIERTAPLSA

SEQ ID NO: 16026 - protein, 195 aa, Thiobacillus sp.
  misc_feature (1)..(195): tr|A0A358C4V3|A0A358C4V3_9PROT GTP cyclohydrolase 1 OS= Thiobacillus sp. OX=924 GN=DEB56_04460 PE=3 SV=1
MPQVGAFDPAAFEQAVNAMLAACGVAPDSVHTGRTAERVRELWQKRLLGGYAIEPAAALGEGFTDDRDDMVVVRGIAVHGVCPHHLVPFRGVAHVAYIPGGRLHGFGRIARMVDAIGHRFTYQEWMTRDIAEALVTHGRAQGAACIIEAEQLCLLLGEDRRGDERVVTQAFTGCFRTSDQQRNEFLRAVAQSDLR

SEQ ID NO: 16027 - protein, 212 aa, Thiocapsa marina
  misc_feature (1)..(212): tr|F9UEU5|F9UEU5_9GAMM GTP cyclohydrolase 1 OS=Thiocaps a marina 5811 OX=768671 GN=folE PE=3 SV=1
MAEKPKLTQVFTHSHYATSFEAESDEEVYDARKEALVKSMLGEIGEDPNREGLRRTPLRVAKAMDFLTSGYSMSAEEIIKKALFEEDVREMVVVRDIEFYSMCEHHMLPFFGHAHVGYLPNGKVVGLSKIARVVDVFARRLQVQERLTSQVADALMEHLGAHGVAVVMEASHTCMMMRGVQKQRSSTVSSAMRGTFETDPRTRSEFMSFIKG

SEQ ID NO: 16028 - protein, 284 aa, Thiocapsa marina
  misc_feature (1)..(284): tr|F9U519|F9U519_9GAMM GTP cyclohydrolase FolE2 OS=Thio capsa marina 5811 OX=768671 GN=folE2 PE=3 SV=1
MEQVLEPNCCAAPDNAEIADVQASADSRRIAIDKVGIKDIRHPVRVSDRNGTEQHTVANFNMYVYLPHDFKGTHMSRFVQILNNHEREIGVASFKEMLAEMSQLLESEAGHIEMRFPFFVNKKAPVTGVESLLDYEVTFIGEIRRGVPTLEIKVVVPVTSLCPCSKKISAYGAHNQRSHVTVQVRSHGHIWIEELIEMVEAEASSELFGLLKRPDEKYVTEHAYDNPKFVEDLVRDVATRLNEDDRVAAYVVEAENFESIHNHSAYALIERDKDREARIAEATL

SEQ ID NO: 16029 - protein, 284 aa, Thiocapsa rosea
  misc_feature (1)..(284): tr|A0A495VEM8|A0A495VEM8_9GAMM GTP cyclohydrolase FolE2 OS=Thiocapsa rosea OX=69360 GN=folE2 PE=3 SV=1
MEHALEPNCCAAPDSIDIADVQGSADSRRIAIDKVGIKDIRHPVRVSDRSGTEQHTVANFNMYVYLPHDFKGTHMSRFVQILNNHEREIGVSSFKEMLTEMSQRLESEAGHIEMRFPFFVNKKAPVTGVESLLDYEVTFIGEIQQGLPSLEIKVVVPVTSLCPCSKKISAYGAHNQRSHVTVQVRSQGHIWIEELIEMVEAEASSELFGLLKRPDEKYVTEHAYDNPKFVEDLVRDVATRLNEDDRVTAYVVEAENFESIHNHSAYALIERDKDREARIVEATL

SEQ ID NO: 16030 - protein, 212 aa, Thiocapsa rosea
  misc_feature (1)..(212): tr|A0A495V962|A0A495V962_9GAMM GTP cyclohydrolase 1 OS= Thiocapsa rosea OX=69360 GN=folE PE=3 SV=1
MAKKPNLTQVFTHSHYASSFEAESDDEVYDERKEALVKSMLGEIGEDPDREGLRRTPLRVAKAMDFLTSGYSMSAEEIIKKALFAEDVKEMVVVRDIEFYSMCEHHMLPFFGHAHVGYLPNGKVVGLSKIARVVDVFARRLQVQERLTSQVADSLMEHLGAHGVAVVMEASHTCMMMRGVQKQRSSTVSSAMRGTFETDPRTRSEFMSFIKG

SEQ ID NO: 16031 - protein, 212 aa, Thiocapsa roseopersicina
  misc_feature (1)..(212): tr|A0A1H2SWF9|A0A1H2SWF9_THIRO GTP cyclohydrolase 1 OS= Thiocapsa roseopersicina OX=1058 GN=folE PE=3 SV=1
MAEKPKLTQVFTNSHYATSFEAESDDEVYDARKEALVKSMLGEIGEDPDREGLRRTPLRVAKAMDFLTSGYSMSAEEIIKKALFAEDVKEMVVVRDIEFYSMCEHHMLPFFGHAHVGYLPDGKVVGLSKIARVVDVFARRLQVQERLTSQVADALMEHLGAHGVAVVMEASHTCMMMRGVQKQRSSTVSSAMRGTFETDPRTRSEFMSFIKG

SEQ ID NO: 16032 - protein, 284 aa, Thiocapsa roseopersicina
  misc_feature (1)..(284): tr|A0A1H2SS23|A0A1H2SS23_THIRO GTP cyclohydrolase FolE2 OS=Thiocapsa roseopersicina OX=1058 GN=folE2 PE=3 SV=1
MEQVLEPNCCAAPDSAEIADVQGSADSRRIAIDKVGIKDIRHPVRVSDRSGAEQHTVANFNMYVYLPHDFKGTHMSRFVQILNNHEREIGVASFKEMLTEMSQRLESEAGHIEMRFPFFVNKKAPVTGVESLLDYEVTFIGEIQQGLPSLEIKVVVPVTSLCPCSKKISAYGAHNQRSHVTVQVRSLGHIWIEELIEMVEAEASSELFGLLKRPDEKYVTEHAYDNPKFVEDLVRDVATRLNEDDRVTAYVVEAENFESIHNHSAYALIERDKDHEARIAEATL

SEQ ID NO: 16033 - protein, 273 aa, Thiocapsa sp.
  misc_feature (1)..(273): tr|A0A0U5IL78|A0A0U5IL78_9GAMM GTP cyclohydrolase 1 OS= Thiocapsa sp. KS1 OX=610332 GN=folE PE=3 SV=1
MPRRVIACAPLTTRPTRYRRNVSEAPGSICPRRPHSGVQELFTSKADTLPVHFVEDPLGNTMAEKPKLTQVFANSHYAASFEAESEDEVYDARKEALVKSMLGEIGEDPNREGLRRTPLRVAKAMDFLTSGYSMSAEEIIKKALFEEDVREMVVVRDIEFYSMCEHHMLPFFGHAHVGYLPNGKVVGLSKIARVVDVFARRLQVQERLTSQVADALMEHLGAHGVAVVMEASHTCMMMRGVQKQRSSTVSSAMRGTFETDPRTRSEFMSFIKG

SEQ ID NO: 16034 - protein, 281 aa, Thiocapsa sp.
  misc_feature (1)..(281): tr|A0A0U5I8I4|A0A0U5I8I4_9GAMM GTP cyclohydrolase FolE2 OS=Thiocapsa sp. KS1 OX=610332 GN=folE2 PE=3 SV=1
MEQVLEPNCCATPEIADVQGSADSRRIAIDKVGIKDIRHPVRVSDRSGIDQHTVANFNMYVYLPHDFKGTHMSRFVQILNNHEREIGVASFKEMLVEMSHRLESEAGHIEMRFPFFVSKKAPVTGVESLLDYEVTFIGEIRHGEPTLEIKVVVPVTSLCPCSKQISAYGAHNQRSHVTVQVRTQGYIWIEELIEMVEKEASSELFGLLKRPDEKYVTERAYDNPKFVEDLVRDVATRLNEDDRIGAYVVEAENFESIHNHSAYALIERDKDREARIAEATL

SEQ ID NO: 16035 - protein, 364 aa, Thioclava arenosa
  misc_feature (1)..(364): tr|A0A2A4CTP6|A0A2A4CTP6_9RHOB GTP cyclohydrolase FolE2 OS=Thioclava arenosa OX=1795308 GN=folE2 PE=3 SV=1
MNHLDKISPPDMAQAKSALDVLRDWAASASPEEVAALDPAIARLLPGTPLSNYPDLKRDYDADFTVDAAYKASLPDLQNGPASLIVGAKTRIEHVGISNFRLPIRYRLKDGGEVTLETSVTGTVSLEAEKKGINMSRIMRSFYAHAERDFSAEVMAHAVDDYKDHLESFDARLQMRFSFPVKIESLRSGLAGWQYYDIALEQLDQAGTRRQIIHLDYVYSSTCPCSLELSEHARRARGQLATPHSQRSVARISVVAEEGDCLWFEDLIAIARAAVPTETQVMVKREDEQAFAELNAANPIFVEDAVRAFAAGLLADPRVGDFRVVASHQESLHSHDAVALLTEGPTFAAESLDPRLFASLVHPG

SEQ ID NO: 16036 - protein, 364 aa, Thioclava atlantica
  misc_feature (1)..(364): tr|A0A085TSS9|A0A085TSS9_9RHOB GTP cyclohydrolase FolE2 OS=Thioclava atlantica OX=1317124 GN=folE2 PE=3 SV=1
MNVQGRIETPDSDEAKEALETLRAWAAKADPVEVARLDPAIARLLPDHALSNYPDLSRDYDAAFTVDETYKASMPDLQNGPASLIVGARTRIEHVGISNFRLPVRFRTRDNGDLTLEASITGTVSLEADKKGINMSRVMRSFYTHAEKSFSFEVMEAALDDYKDDLESFDARLMMRFSFPVKRQSLRSGLEGWQYYDIALELADVAGERTKVIHLDYVYSSTCPCSLELSEHARSARGRLATPHSQRSVARISTVVEPGECLWFEDLIDLARLAVPTETQVMVKREDEQAFAELNASNPIFVEDAVRAFAERLLAEPRVGDFRIVASHQESLHSHDAVAVLTEGPTFTAASLDPKLFGTLIHQG

SEQ ID NO: 16037 - protein, 364 aa, Thioclava dalianensis
  misc_feature (1)..(364): tr|A0A074TGG1|A0A074TGG1_9RHOB GTP cyclohydrolase FolE2 OS=Thioclava dalianensis OX=1185766 GN=folE2 PE=3 SV=1
MNVHGQIDTPDEQDARAALDTLRAWAAQADPVEVARLDPAIARLLPGHEVANYPDLSRSFDPDFKVDAAYKASLPDLQNGPSSLIVGAKTRIEHVGISNFRLPIRLRTRDGGDLTLEASVTGTVSLEAEKKGINMSRVMRSFYSHAEERFSFEVMEAALDDYKDDLDSFDARLMMRFSFPVKRPSLRSGLSGWQYYDIALELSEVAGQRCKIVHLDYVYSSTCPCSLELSEHARATRGQLATPHSQRSVARISTVIEPGEVLWFEDLIDLARAAVPTETQVMVKREDEQAFAELNAANPIFVEDAVRVFAQGLLAEARVGDFRIVASHQESLHSHDAVAVLTEGDTFAQASLDPKLFSTLIHQG

SEQ ID NO: 16038 - protein, 364 aa, Thioclava electrotropha
  misc_feature (1)..(364): tr|A0A1W9XU73|A0A1W9XU73_9RHOB GTP cyclohydrolase FolE2 OS=Thioclava electrotropha OX=1549850 GN=folE2 PE=3 SV =1
MNVQGRIETPDNDDARAALDVLRAWAAKADPVEVAQLDPAIARLLPGHEVSNYPDLSRDYDADFEADETYKATMPDLQNGPSSLIVGAHTRIEHVGISNFRLPVRFHTRDNGDLTLEASVTGTVSLEAEKKGINMSRVMRSFYVHAEKTFSFEVMEAALDDYMDDLESFDARLMMRVSFPVKRPSLRSGLEGWQYYDIALELIETAGVRTKVIHLDYVYSSTCPCSLELSEHARASRGQLATPHSQRSVARISAVVEPGEVLWFEDMIDLARAAVPTETQVMVKREDEQAFAELNAANPIFVEDAVRAFAERLLADARIGDFRIVASHQESLHSHDAVAMLTEGETFASASVDPKLFATLIHQG

SEQ ID NO: 16039 - protein, 364 aa, Thioclava indica
  misc_feature (1)..(364): tr|A0A074KFZ6|A0A074KFZ6_9RHOB GTP cyclohydrolase FolE2 OS=Thioclava indica OX=1353528 GN=folE2 PE=3 SV=1
MNVHGKIDTPDANEAKTALETLRAWAALADPVEVARLDPAIARLLPGHAVANYPDLSRQFDPDFKVDEAYKASLPDLQNGPASLIVGAKTRIEHVGISNFRLPVRFRTRDNGDLTLEASITGTVSLEAEKKGINMSRVMRSFYSHAEESFSFEVMEAALDDYLDDLESFDARLMMRFSFPVKRPSLRSGLEGWQYYDIALELIDMGGARTKVIHLDYVYSSTCPCSLELSEHARATRGQLATPHSQRSVARISAVVEPGECLWFEDLIELARAAVPTETQVMVKREDEQAFAELNAANPIFVEDAVRVFAQRLLAEPRIGDFRVLASHQESLHSHDAVAVLTEGQTFGSASLDPQLFASLVHRG

SEQ ID NO: 16040 - protein, 364 aa, Thioclava pacifica
  misc_feature (1)..(364): tr|A0A074JAX3|A0A074JAX3_9RHOB GTP cyclohydrolase FolE2 OS=Thioclava pacifica DSM 10166 OX=1353537 GN=folE2 PE =3 SV=1
MNVQGRIETPDNDEAREALETLRAWAAQADPVEVAQLDPAIARLLPGHAVSNYPDLSREYDESFTVDPAYKASLPDLQNGPSSLIVGAHTRIEHVGISNFRLPVRFKTRDNGDLTLETSVTGTVSLEADKKGINMSRVMRSFYAHAEKSFSFEVMEAALDDYKDDLESFDARLMMRVSFPVKRPSLRSGLEGWQYYDLALEVIDVAGVRTKVLHLDYVYSSTCPCSLELSEHARATRGQLATPHSQRSVARISAVVEPGNILWFEDLIDLARAAVPTETQVMVKREDEQAFAELNAANPIFVEDAVRAFAERLLAEPRVGDFRVVASHQESLHSHDAVAVLTEGPTFASASLDPKLFGTLIHQG

SEQ ID NO: 16041 - protein, 364 aa, Thioclava sp.
  misc_feature (1)..(364): tr|A0A4R7KI10|A0A4R7KI10_9RHOB GTP cyclohydrolase FolE2 OS=Thioclava sp. ES.032 OX=1798206 GN=folE2 PE=3 SV=1
MNVQGRIDTPDDNDARAALDVLRAWAAKADPVEVAQLDPAIARLLPGHEVSNYPDLSRDYDADFEADETYKATMPDLQNGPSSLIVGAHTRIEHVGISNFRLPVRFHTRDNGDLTLEASVTGTVSLEAEKKGINMSRVMRSFYVHAEKTFSFEVMEAALDDYMDDLESFDARLMMRVSFPVKRPSLRSGLEGWQYYDIALELIETGGVRTKVIHLDYVYSSTCPCSLELSEHARASRGQLATPHSQRSVARISAVVEPGEVLWFEDMIDLARAAVPTETQVMVKREDEQAFAELNAANPIFVEDAVRAFAERLLADARIGDFRIVASHQESLHSHDAVAMLTEGETFASASVDPKLFATLIHQG

SEQ ID NO: 16042 - protein, 364 aa, Thioclava sp.
  misc_feature (1)..(364): tr|A0A1T2B566|A0A1T2B566_9RHOB GTP cyclohydrolase FolE2 OS=Thioclava sp. DLFJ4-1 OX=1915313 GN=folE2 PE=3 SV=1
MNVQGRIETPDNDDARAALDVLRAWASKADPVEVAQLDPAIARLLPGHEVSNYPDLSRDYDADFEADETYKATMPDLQNGPSSLIVGAHTRIEHVGISNFRLPVRFHTRDNGDLTLEASVTGTVSLEAEKKGINMSRVMRSFYVHAEKTFSFEVMEAALDDYMDDLESFDARLMMRVSFPVKRPSLRSGLEGWQYYDIALELIETAGVRTKVIHLDYVYSSTCPCSLELSEHARASRGQLATPHSQRSVARISAVVEPGEVLWFEDMIDLARAAVPTETQVMVKREDEQAFAELNAANPIFVEDAVRAFAERLLADARIGDFRIVASHQESLHSHDAVAMLTEGETFASASVDPKLFATLIHQG

SEQ ID NO: 16043 - protein, 284 aa, Thiocystis violascens
  misc_feature (1)..(284): tr|I3YFS9|I3YFS9_THIV6 GTP cyclohydrolase FolE2 OS=Thio cystis violascens (strain ATCC 17096 / DSM 198 / 6111) OX=765911 GN=folE2 PE=3 SV=1
MEQLLEPNCRATPTGLDIADVQGSADTRRIAIDKVGIKDIRHPVRVRERGGAEQHTVATFNMYVYLPHDFKGTHMSRFVQILNNHEREISVDSFKEMLTEMSQLLESEAGHIEMRFPYFVNKKAPVSGVASLLDYDVTFIGEIRHGRPTLEIKVLVPVTSLCPCSKKISAYGAHNQRSHVTVQVRTQGFIWLEEIIEMIEREASSELFGLLKRPDEKFVTERAYNNPKFVEDMVRDVAKCLNADARIAAYVVEAENFESIHNHSAYALIERDKTREAKIAEASL

SEQ ID NO: 16044 - protein, 211 aa, Thiocystis violascens
  misc_feature (1)..(211): tr|I3Y7Q9|I3Y7Q9_THIV6 GTP cyclohydrolase 1 OS=Thiocyst is violascens (strain ATCC 17096 / DSM 198 / 6111) OX=7 65911 GN=folE PE=3 SV=1
MEKPKLSRVLAHSHYAASFEAESEEEIYDAPKEALVRSMLTEIGEDPEREGLRRTPLRVAKAMDFLTSGYGLSAEEIIKGAVFEENVKEMVVVRDIEFYSLCEHHLLPFFGHAHVGYLPNGKVVGLSKIARVVDVFARRLQVQERLANQVADALMEHLGAHGVAVVMEASHTCMMMRGVQKQRSSTVTSAMRGTFEEDPRTRAEFMSFIRG

SEQ ID NO: 16045 - protein, 278 aa, Thioflavicoccus mobilis
  misc_feature (1)..(278): tr|L0GUY1|L0GUY1_9GAMM GTP cyclohydrolase FolE2 OS=Thio flavicoccus mobilis 8321 OX=765912 GN=folE2 PE=3 SV=1
MEAVRKSTPVTAPIADVQSSQDSRRIAIDKVGIKDIRHPVRVRDRTNGEQHTIATFNMYVYLPHNFKGTHMSRFVQILNGHEEEISVASFKEILEEMAQRLESEAGHIEMRFPYFVAKRAPITGVRSLLDYDVTFIGEIRDGEPEMHIKVVVPVTSLCPCSKEISAYGAHNQRSHVTVQVRNRGFIWVEEIIELIEQEASCEIFGLLKRPDEKYVTERAYDNPKFVEDLVRDVAARLNADERVGGYVVEAENFESIHNHSAYALVERDKEAERAGTQG

SEQ ID NO: 16046 - protein, 212 aa, Thioflavicoccus mobilis
  misc_feature (1)..(212): tr|L0GYW5|L0GYW5_9GAMM GTP cyclohydrolase 1 OS=Thioflav icoccus mobilis 8321 OX=765912 GN=folE PE=3 SV=1
MYDSSKAPRVSANGHYAESLDADSEDEVYDSHKESLVEALLCALGEDPGRDGLKRTPLRVAKAMDFLTSGYQMSAEDVIKQALFEEDCTEMVVVRDIEFYSLCEHHMLPFFGHAHVGYLPNGKVVGLSKIARVVDVFARRLQVQERLTNQVADALMTHLGAHGVAVVMEASHTCMMMRGVQKQRSMTISSAMRGSFHEDPRTRAEFMSFIRS

SEQ ID NO: 16047 - protein, 273 aa, Thioflexothrix psekupsii
  misc_feature (1)..(273): tr|A0A251XBJ5|A0A251XBJ5_9GAMM GTP cyclohydrolase FolE2 OS=Thioflexothrix psekupsii OX=1570016 GN=folE2 PE=3 S V=1
MNKPLSLIPDVQSSIDTRRLTINKVGIKALKHPLQVLNREGKAQSTVAICNMSVELAHHQKGTHMSRFIELLNADEQMLSMEAFKQLLSAMVQRLEAQRGYIEFTFPYFIRKQAPVSGVASYLDYEITLLGEINEGIPAVVLKTVIPVTSLCPCSKKISAYGAHNQRSHVTVSVRPSGPIWIEDLIELVEQQASSELFGLLKRSDEKLVTERAYENPKFVEDMVRDVAAQLNHHPHIAAYCVEAENFESIHNHSAYAIIEKDKLSPCGSVISS

SEQ ID NO: 16048 - protein, 222 aa, Thioflexothrix psekupsii
  misc_feature (1)..(222): tr|A0A251X452|A0A251X452_9GAMM GTP cyclohydrolase 1 OS= Thioflexothrix psekupsii OX=1570016 GN=folE PE=3 SV=1
MAKVDIELGKQVHEYLVSKGVETPVIEEKLRVSDEVKIAAIKTHITAIMETLGMDLADDSLIETPTRIAKMYVNEIFRGLDYSFFPKCTTVENKMHYDEMVLEKDIAAISSCEHHFVTIDQRVSIGYIPKKRVLGLSKLNRIAKFFAQRPQIQERYAEQLFYALECILQTSDIAIFVRGKHYCVAQRGVEDTSSYTITSKLGGTFKTNAALRNEFMNLINSH

SEQ ID NO: 16049 - protein, 276 aa, Thiogranum longum
  misc_feature (1)..(276): tr|A0A4R1HAB3|A0A4R1HAB3_9GAMM GTP cyclohydrolase FolE2 OS=Thiogranum longum OX=1537524 GN=folE2 PE=3 SV=1
MSKSTAATVNNPIADVQNSADTRHIAIDKVGIKDIRHPVRVKDRSEGEQHTIANFNMYVNLPHNFKGTHMSRFVEILNLHEREIGVESFKEMLGEMAERLEAEAGHIEMSFPYFINKTAPISGVQSLLDYEVSFIGEISDGKPKMKIKVIVPVTSLCPCSKKISERGAHNQRSHVTVTATTRDFVWIEELIDMVEGQASCELYGLLKRPDEKYVTEKAYDNPKFVEDMVRDIAAALNTDDRISAYIVESENFESIHNHSAYALIERDKEKDQLVDS

SEQ ID NO: 16050 - protein, 272 aa, Thiohalobacter thiocyanaticus
  misc_feature (1)..(272): tr|A0A426QHA1|A0A426QHA1_9GAMM GTP cyclohydrolase FolE2 OS=Thiohalobacter thiocyanaticus OX=585455 GN=folE2 PE =3 SV=1
MKPASAKVSKEIEDVQSSPDTRHIAIDKVGIKDIRHPVRVRDRSDGEQHTIANFNMYVSLPHNFKGTHMSRFVDILNRHEKEITVKSFKDMLGEMTELLDAESGHIEMNFPYFVMKAAPVSGVQSLMDYDVSFIGEIHEGHPQMNIKVVIPVTSLCPCSKKISDYGAHNQRSHVTVSVRTKGFIWIEELIELVEKEASCELYGLLKRPDEKHVTERAYDNPKFVEDMVRDVAARLNADERVSSYVVESENFESIHNHSAYAMIIKDEEAEKA

SEQ ID NO: 16051 - protein, 275 aa, Thiohalobacter thiocyanaticus
  misc_feature (1)..(275): tr|A0A1Z4VPP0|A0A1Z4VPP0_9GAMM GTP cyclohydrolase FolE2 OS=Thiohalobacter thiocyanaticus OX=585455 GN=folE2 PE =3 SV=1
MSQMKPASAKVSKEIEDVQSSPDTRHIAIDKVGIKDIRHPVRVRDRSDGEQHTIANFNMYVSLPHNFKGTHMSRFVDILNRHEKEITVKSFKDMLGEMTELLDAESGHIEMNFPYFVMKAAPVSGVQSLMDYDVSFIGEIHDGQPQMNIKVVVPVTSLCPCSKKISDYGAHNQRSHVTVSVRTTGFIWIEELIELVEQEASCELYGLLKRPDEKAVTERAYDNPKFVEDMVRDVAARLNADERVSSYVVESENFESIHNHSAYAMIIKDEESEQA

SEQ ID NO: 16052 - protein, 265 aa, Thiohalomonas denitrificans
  misc_feature (1)..(265): tr|A0A1G5PZP6|A0A1G5PZP6_9GAMM GTP cyclohydrolase FolE2 OS=Thiohalomonas denitrificans OX=415747 GN=folE2 PE=3 SV=1
MNKPCQPIADVQSSEDTRRIPINKVGIKDIRHPVRIRDRSGGEQHTIANFNMYVNLPHNFKGTHMSRFVEIINRHERELSVESFKDMLSEMTELLEAEAGHIEMVFPYFVNKKAPISGVESLMDYDVTFIGEVANGEPKLKVKVIVPVTSLCPCSKKISERGAHNQRSHVTVAVETRGFVWIEDIIDLVESEASCELYGLLKRPDEKMVTERAYDNPKFVEDIVRDIAVRLNADDRIAQYVVESENFESIHNHSAYALIEKDKRL

SEQ ID NO: 16053 - protein, 265 aa, Thiohalophilus thiocyanatoxydans
  misc_feature (1)..(265): tr|A0A4R8IQZ8|A0A4R8IQZ8_9GAMM GTP cyclohydrolase FolE2 OS=Thiohalophilus thiocyanatoxydans OX=381308 GN=folE2 PE=3 SV=1
MNAVTDPIEDVQSSADTRRIPINKVGIKDIRHPVRIRDRNEGEQHTVASFNMYVNLPHNFKGTHMSRFVDILNNHEREISVQSFKEMLAEMAEKLEADSGHIEMAFPYFINKKAPISGVESLMDYDVSFIGEVHDGKVQMTLKVIVPVTSLCPCSKNISDYGAHNQRSHVTVAARIEEFVWVEELIELVESEASCELYGLLKRPDEKNVTERAYDNPKFVEDMVRDVAARLNADKRVSYYVVESENFESIHNHSAYALIEKDKKA

SEQ ID NO: 16054 - protein, 283 aa, Thiohalorhabdus denitrificans
  misc_feature (1)..(283): tr|A0A0P9C5I4|A0A0P9C5I4_9GAMM GTP cyclohydrolase FolE2 OS=Thiohalorhabdus denitrificans OX=381306 GN=folE2 PE =3 SV=1
MAVHDRTVSEQELPDCASEIQDTQGLPDQRRIPINKVGIKDIRHPVRVKDRTQGEQHTLAHFNAYVDLPQHFKGTHMSRFVEILNDHEREISVESFRSILEEMRARLEAEQAHLEMAFPYFIMKQAPVSGVESQMDYEVTLRGHLTPEDYQITIQVQVPVTSLCPCSKSISEYGAHNQRSHVDLQVRARDFVWIEDLVELAEAEASCDLYGVLKRPDEKYVTEHAYENPKFVEDLVRDIARRLEDDERIVWYTVGAENFESIHNHSAYAWIERDKRTPLPDGA

SEQ ID NO: 16055 - protein, 269 aa, Thiohalospira halophila
  misc_feature (1)..(269): tr|A0A1I1U366|A0A1I1U366_9GAMM GTP cyclohydrolase FolE2 OS=Thiohalospira halophila DSM 15071 OX=1123397 GN=fol E2 PE=3 SV=1
MNDTTKPTIADVQASADTRNIPINKVGVKDVRHPVRVRDRSGGEQHTVANFNMYVNLPHNFKGTHMSRFVAILNNHDYEITTHSFKEMLREMTHTLEAEAGHIEMSFPYFVNKAAPVSGVQSLMDYAVTFQGDFRAGEPELTIKVQVPVTSLCPCSKEISDYGAHNQRSHVTVAARTRDFVWIEELIDLVESEASSELWGLLKRPDEKHVTERAYDNPKFVEDMVRDVAARLNADHRIAGYTVESENFESIHNHSAYARIEIDKEAHGA

SEQ ID NO: 16056 - protein, 229 aa, Thiolapillus brandeum
  misc_feature (1)..(229): tr|W0TL66|W0TL66_9GAMM GTP cyclohydrolase FolE2 OS=Thio lapillus brandeum OX=1076588 GN=folE2 PE=3 SV=1
MRVKDRSEGEQHTIANFNMYVFLPHNFKGTHMSRFVGILNNHEREISISSFEDMLLEMVELLESEAGHIEMAFPFFVNKTAPVSGVQSLMDYDVTLIGEVEDGRPSIFTKVVVPVTSLCPCSKSISDRGAHNQRSHVTVTVSTRDFMWIEEIIELVEAEASSELYSLLKRPDEKFITERAYDNPKFVEDVVRDVAGRLNADTRIESYVVEAENFESIHNHSAYARIEKP

SEQ ID NO: 16057 - protein, 180 aa, Thiolapillus brandeum
  misc_feature (1)..(180): tr|W0TPB3|W0TPB3_9GAMM GTP cyclohydrolase 1 OS=Thiolapi llus brandeum OX=1076588 GN=folE PE=3 SV=1
MADCYQEIIRGVGEDISREGLLKTPQRAAKAMEFLTQGYEQRLEDIVNDAIFPSDNDEMVIVKDIELYSLCEHHMLPFIGKAHVAYLPKGKVIGLSKIARIVDMYARRLQIQEQLTTQVAYAIQDAIGAAGVAVVIEASHLCMMMRGVQKQNSSTTTSMMLGAFRNNHRTRDEFLTLIKL

SEQ ID NO: 16058 - protein, 316 aa, Thiomicrorhabdus sp.
  misc_feature (1)..(316): tr|A0A4P9K972|A0A4P9K972_9GAMM GTP cyclohydrolase FolE2 OS=Thiomicrorhabdus sp. G1 OX=2580412 GN=folE2 PE=3 SV =1
MTKHMPDIACQPHHGPQGKLNWVGMSGIELPIQIQQGLSQDNPIQISSKAQAYVNLNDPESKGIHMSRLYLILDQMATQQPLTSSRVKTILEAFIDSHQNLSTQAFVEFKFDYYERRNSLLSQNSGWKHYPATIRGEMRDGEFSCEVSIEVPYSSTCPCSAALSRQLIQEAFEKQFAGQSLDYQQVMDWLGTPEGICATPHSQRSYAQVKVKVNESDLLELSALINDIEAALQTPVQAAVKREDEQEFARLNAANLMFCEDASRRLQQALNSKPNYLDFWVRVNHLESLHPHDAVAIVTKGIANGYIDDPNLMDPM

SEQ ID NO: 16059 - protein, 316 aa, Thiomicrospira aerophila
  misc_feature (1)..(316): tr|W0DV04|W0DV04_9GAMM GTP cyclohydrolase FolE2 OS=Thio microspira aerophila AL3 OX=717772 GN=folE2 PE=3 SV=1
MTKHMPDIACQPHSIPQPKLNWVGMSGIELPILINSAHSPIRLSSTTQAYVNLVDPTSKGIHMSRLYLLLDQMATEQTLTPARVKTILEKFVSSHELLSDQAFVEFRFDYYERRSSLLSSNAGWKHYPATLRGELNQGQFHCEISLEVPYSSTCPCSAALSRQLIQQAFETQFKAQASLDYEQVFNWLGTPEGICATPHSQRSYAQVKLAITDHDDLDFSRWISLIENSLQTPVQAAVKREDEQEFARLNASNLMFCEDAARRLQTTLNAEPHLTDFWVRVNHLESLHPHDAVAIVTKGIDKGYIAEPNLMGLFHR

SEQ ID NO: 16060 - protein, 316 aa, Thiomicrospira cyclica
  misc_feature (1)..(316): tr|F6DAE8|F6DAE8_THICA GTP cyclohydrolase FolE2 OS=Thio microspira cyclica (strain DSM 14477 / JCM 11371 / ALM1 ) OX=717773 GN=folE2 PE=3 SV=1
MTKHMPDIACQPHSIPQPKLNWVGMSGIELPILINSAHSPIRLSSSTQAYVNLVDPTSKGIHMSRLYLLLDQLATEQTLTPARVKTILEKFVSSHETLSDHAFVEFRFDYYERRSSLLSSNAGWKHYPATLRGELNQGQFHCEISLEVPYSSTCPCSAALSRQLIQQAFETQFKSTDALDYADVLEWLGTPEGICATPHSQRSYAQVKLAITDHDDLDFSRWISLIERSLQTPVQAAVKREDEQEFARLNASNLMFCEDAARRLQTTLNAEPHLSDFWVRVNHLESLHPHDAVAIVTKSVDGGYIAEPNLMGLFHR

SEQ ID NO: 16061 - protein, 316 aa, Thiomicrospira sp.
  misc_feature (1)..(316): tr|A0A0X3T741|A0A0X3T741_9GAMM GTP cyclohydrolase FolE2 OS=Thiomicrospira sp. WB1 OX=1685380 GN=folE2 PE=3 SV= 1
MTKHMPDIACQPHKNPQGKLNWVGMSGIELPIQIRQTQDQTLTVSSQVQAYVSLEDPLSKGIHMSRLYLILDEQGAQEPLSPKRLQHLLERFIESHEGLSRNAFLEFRFDYYERRRSLKSDNAGWKHYPCTLRGEMRQGQFECEVSLTVPYSSTCPCSAALSRQLIQEAFEKQFQAGELDFDSVYNWLGTPEGINATPHSQRSYAQVKLKVSAEHTLSLSEVINQIEDSLKTPVQSTVKRADEQEFARLNASNLMFCEDAARRLQKTLDSQSEYEDFWVRVNHLESLHPHDAVAIVTKGIENGYSDEPNFMDRFEY

SEQ ID NO: 16062 - protein, 316 aa, Thiomicrospira sp.
  misc_feature (1)..(316): tr|A0A3S9TLC5|A0A3S9TLC5_9GAMM GTP cyclohydrolase FolE2 OS=Thiomicrospira sp. S5 OX=1803865 GN=folE2 PE=3 SV=1
MTKHMPDIACQPHQDPQGKLNWVGMSGIELPIQLQQDSQNTLTLSSQVQAYVSLDDPLSKGIHMSRLYLILDETGSKAPLTPASIQSMLQAFIESHQGLSQNAFVEFRFDYYERRRSLKSDNSGWKHYPCTMRGEMRDGQYECEVSISVPYSSTCPCSAALSRQLIQEAFEQQFNGQALDYNQVLEWLGTPEGICATPHSQRSYAQIKLKVDASHDLNLSTVINQIEDAVKTPVQSTVKREDEQEFARLNATNLMFCEDAARRMQAKLESCTEYQDYWVRVNHLESLHPHDAVAIVTKNVPGGYTDEPNFMDRFEH

SEQ ID NO: 16063 - protein, 271 aa, Thiomonas arsenitoxydans
  misc_feature (1)..(271): tr|D6CLT1|D6CLT1_THIA3 GTP cyclohydrolase FolE2 OS=Thio monas arsenitoxydans (strain DSM 22701 / CIP 110005 / 3 As) OX=426114 GN=folE2 PE=3 SV=1
MNAPEKLFAQAAAATLPDVQATPDRRNIAIQQVGVRSVRYPVQIRSAQGVQPSVGTFEMTVALPPEVKGTHMSRFIEMLEAHREPLDAQQLGVLLQHMLTRLQASEGAITAQFTYFARKTAPVSGVESLMDYEVTLHAAQKAGALTLTQKVQVPVTSLCPCSKEISNYGAHNQRSHVTIGATLRGEMGLDEQIRIAETAASCELWGLLKRPDEKYVTERAYDHPKFVEDLVRDVAVALERDERVAAYTVESENFESIHNHSAYALVEGRKT

SEQ ID NO: 16064 - protein, 280 aa, Thiomonas arsenitoxydans
  misc_feature (1)..(280): tr|D6CT47|D6CT47_THIA3 GTP cyclohydrolase FolE2 OS=Thio monas arsenitoxydans (strain DSM 22701 / CIP 110005 / 3 As) OX=426114 GN=folE2 PE=3 SV=1
MPRAGDTEPHRRSPTRHSMNKPFEAIPDIQSTVDERHIAIQRVGVKGLRYPLNVRLRDGSIHPSIAQVTADVALPAEKKGTHMSRFVELLEAMPEAMDAQAFAALTRQMLPKLNATAGRLEFAFTLFLRKTAPVSGVQSLLDYEAGWIAEARGDQLKLTAKVMVPVKSLCPCSKEISDYGAHNQRSHITITAELLQPVALEELIRIAEEEASCEIWGLLKRPDEKYVTEHAYENPKFVEDLVRDVAARLNADPRIGHYVAEAENFESIHNHSAYALIERV

SEQ ID NO: 16065 - protein, 262 aa, Thiomonas bhubaneswarensis
  misc_feature (1)..(262): tr|A0A0K6I6W7|A0A0K6I6W7_9BURK GTP cyclohydrolase FolE2 OS=Thiomonas bhubaneswarensis OX=339866 GN=folE2 PE=3 SV=1
MNKPFDAIPDIQSTVDERHIAIQRVGVKGLRYPVNVCLRDGSVHPSIAQVTADVALPAEKKGTHMSRFVELLEAMPEAMDAQAFAALTRQMLPKLNATAGRLEFAFTLFLRKTAPVSGVQSLLDYEAGWIAEARGDQVKLTARVMVPVKSLCPCSKEISDYGAHNQRSNITITAELLQPVALEELIRIAEEEASCEIWGLLKRPDEKYVTEHAYENPKFVEDLVRDVAARLNADARIGHYVAEAENFESIHNHSAYALIERA

SEQ ID NO: 16066 - protein, 272 aa, Thiomonas bhubaneswarensis
  misc_feature (1)..(272): tr|A0A0K6HQ05|A0A0K6HQ05_9BURK GTP cyclohydrolase FolE2 OS=Thiomonas bhubaneswarensis OX=339866 GN=folE2 PE=3 SV=1
MNAPEKLFTQAAAAAILPDVQATPDLRHIAIQQVGVRDVRYPVQIRSAQGAQPSVGTFEMTVALPPEVKGTHMSRFIEMLEAHPEPLDARQLGVLLQHMLVRLQATEGAITARFTYFARKAAPVSGVESLMDYEVTLRAEQKAGATTLVQKVQVPVTSLCPCSKEISNYGAHNQRSHVTIGATLRGDLGLDEQIRIAETAASCELWGLLKRPDEKYVTERAYDHPKFVEDLVRDVAVALERDDRVAAYTVESENFESIHNHSAYALVEGRKL

SEQ ID NO: 16067 - protein, 288 aa, Thiomonas delicata
  misc_feature (1)..(288): tr|A0A238D1S3|A0A238D1S3_THIDL GTP cyclohydrolase FolE2 OS=Thiomonas delicata OX=364030 GN=folE PE=3 SV=1
MELPARCRFLKGQQMNAPEHFFASEPRALPDIQSAGDRRNLPIQRVGVKGVRHPVLIRTVDGGTQPSVATFDMFVALPSDVKGTHMSRFVEILEAHAGVPLDPATLRGMFDRMLERLGAQRGEIALTFTYFMRKTAPVSGVSSLMDYEASFHVTGRVGAPAQVHMALQVPVTSLCPCSREISNYGAHNQRSHLTLKIETKAPMHLDDIVRVAESSASCELWGLLKRPDEKYVTERAYDNPKFVEDLVRDVALALRSDARVDAFTVESENFESIHNHSAYARIDFVRGA

SEQ ID NO: 16068 - protein, 275 aa, Thiomonas delicata
  misc_feature (1)..(275): tr|A0A238DA05|A0A238DA05_THIDL GTP cyclohydrolase FolE2 OS=Thiomonas delicata OX=364030 GN=folE PE=3 SV=1
MSLSSMIRQGSTMNKPFEAIPDIQSATDHRHMAIQRVGVKSLRYPLSVRTADGGSQPTVAVIDADVALAAEKKGTHMSRFVEILEGVDAPLDHGGLVALAQVMLRRLQADAGRIEFRFPLFVRKSAPVSGVPSLMDYEAGWIAQAQGGGVQVTARVQVPVKALCPCSKEISDYGAHNQRSHITITAQLKEPVPFEQLIRMAEEEASCELWGLLKRPDEKYVTEHAYENPKFVEDLVRDVAARVQRDARIGSYVVEAENFESIHNHSAYARIEGAG

SEQ ID NO: 16069 - protein, 271 aa, Thiomonas intermedia
  misc_feature (1)..(271): tr|D5X5F0|D5X5F0_THIK1 GTP cyclohydrolase FolE2 OS=Thio monas intermedia (strain K12) OX=75379 GN=folE2 PE=3 SV =1
MNAPEKLFAQAAAATLPDVQATPDRRNIAIQQVGVRGVRYPVQIRSAQGVQPSVGTFEMTVALPPEVKGTHMSRFIEMLEAHREPLDAQQLGVLLQHMLTRLQASEGAITAQFTYFARKTAPVSGVESLMDYEVTLHAAQKAGALTLTQKVQVPVTSLCPCSKEISNYGAHNQRSHVTIGATLRGEMGLDEQIRIAETAASCELWGLLKRPDEKYVTERAYDHPKFVEDLVRDVAVALERDERVAAYTVESENFESIHNHSAYALVEGRKT

SEQ ID NO: 16070 - protein, 262 aa, Thiomonas intermedia
  misc_feature (1)..(262): tr|D5X1I7|D5X1I7_THIK1 GTP cyclohydrolase FolE2 OS=Thio monas intermedia (strain K12) OX=75379 GN=folE2 PE=3 SV =1
MNKPFEAIPDIQSTVDERHIAIQRVGVKGLRYPLNVRLRDGSIHPSIAQVTADVALPAEKKGTHMSRFVELLEAMPEAMDAQAFAALTRQMLPKLNATAGRLEFAFTLFLRKTAPVSGVQSLLDYEAGWIAEARGDQLKLTAKVMVPVKSLCPCSKEISDYGAHNQRSHITITAELLQPVALEELIRIAEEEASCEIWGLLKRPDEKYVTEHAYENPKFVEDLVRDVAARLNADPRIGHYVAEAENFESIHNHSAYALIERV

SEQ ID NO: 16071 - protein, 92 aa, Thiomonas sp.
  misc_feature (1)..(92): tr|A0A259PJ86|A0A259PJ86_9BURK GTP cyclohydrolase 1 (Fr agment) OS=Thiomonas sp. 14-66-4 OX=1970450 GN=B7X42_05 660 PE=3 SV=1
MKTMTEPIPVTREQAEDAIRTLLRWAGDDPAREGLRDTPRRVAKAYKEWFAGYAQDPTAYLARTFEEVAGYDEIIVLRNIEFESHCEHHMAP

SEQ ID NO: 16072 - protein, 263 aa, Thiomonas sp.
  misc_feature (1)..(263): tr|A0A259QU30|A0A259QU30_9BURK GTP cyclohydrolase FolE2 OS=Thiomonas sp. 13-66-29 OX=1970448 GN=folE2 PE=3 SV= 1
MNKPFEAIPDIQSATDHRHMAIQRVGVKSLRYPLSVRTADGGSQPTVAVIDADVALAAEKKGTHMSRFVEILEGVDAPLDHGGLVALAQVMLRRLQADVGRIEFRFPLFVRKSAPVSGVPSLMDYEAGWIAQAQGGGVQVTARVQVPVKALCPCSKEISDYGAHNQRSHITITAQLKEPVPFEQLIRMAEEEASCELWGLLKRPDEKYVTEHAYENPKFVEDLVRDVAARVQRDARIGSYVVEAENFESIHNHSAYARIEGAG

SEQ ID NO: 16073 - protein, 262 aa, Thioploca ingrica
  misc_feature (1)..(262): tr|A0A090AD64|A0A090AD64_9GAMM GTP cyclohydrolase FolE2 OS=Thioploca ingrica OX=40754 GN=folE2 PE=3 SV=1
MNKAVTVMPDVQGSADTRHIAIDKVGIKDIKHPIRVKDRSGREQHTIANFNMYVSLPHNFKGTHMSRFVEILNEHEYEITVDSFKDMLVEMTKRLEARAGHIEMAFTYFVIKLAPVSSVRSLLDYEVTFIGEITDDKPVITVKVIVPVTSLCPCSKEISQYGAHNQRSHVTVTAKTNGFLWIEDLIDLVEKEASCQLYGLLKRPDEKYVTEYAYEHPKFVEDMVRDIATKLNKDPRVTAYVVESENFESIHNHSAYAMIHKA

SEQ ID NO: 16074 - protein, 185 aa, Thiopseudomonas denitrificans
  misc_feature (1)..(185): tr|A0A4R6U0X3|A0A4R6U0X3_9GAMM GTP cyclohydrolase 1 OS= Thiopseudomonas denitrificans OX=1501432 GN=folE PE=3 S V=1
MCEELAKHYHAILEGLGEDPQREGLLDTPMRAAKAMQYLCNGYEKNLDEVVNNALFESSSEEMVIVRDIELYSLCEHHLLPFIGKAHVAYIPTGKVIGLSKVARIVDMYARRLQIQENLTRQIADAVMSVTQASGVGVVIEAKHMCMMMRGVEKQNSVMTSSAMLGSFRSSVNTRQEFLQLIRGH

SEQ ID NO: 16075 - protein, 212 aa, Thiorhodococcus drewsii
  misc_feature (1)..(212): tr|G2E4W0|G2E4W0_9GAMM GTP cyclohydrolase 1 OS=Thiorhod ococcus drewsii AZ1 OX=765913 GN=folE PE=3 SV=1
MSEKSKLSQVLAHSHYATSFEPESNEEVYDPLKEDLVRRMLVEIGEDADREGLKRTPLRVAKAMDFLTSGYGLSAEDIIKGAVFAEDVKQMVVVRDIEFYSMCEHHMLPFFGHAHVGYLPNGKVVGLSKIARVVDVFARRLQVQERLTNQVADALMEHLGAHGVAVVLEASHTCMMMRGVQKQRSTTVSSAMRGAFDEDPRTRAEFMSFIKA

SEQ ID NO: 16076 - protein, 284 aa, Thiorhodococcus drewsii
  misc_feature (1)..(284): tr|G2DZK0|G2DZK0_9GAMM GTP cyclohydrolase FolE2 OS=Thio rhodococcus drewsii AZ1 OX=765913 GN=folE2 PE=3 SV=1
MEQALEPNCCAARAATDIADVQGSADTRRIAIDKVGIKDIRHPVRVRERGGSEQHTVATFNMNVYLPHDFKGTHMSRFVQVLNNHERDISVSSFKEMLTEMSHRLESEAGHIEMRFPFFISKKAPVSGVESLLDYDVTFIGEIRHGEPRLEIKVVVPVTSLCPCSKEISAYGAHNQRSHVTVQVRMQGLMWLEELIELIEHEASSELFGLLKRPDEKYVTEHAYDNPKFVEDLVRDVAKRLNQDDRILSYVVEAENFESIHNHSAYALIERDKQAEARMAEASL

SEQ ID NO: 16077 - protein, 273 aa, Thiorhodospira sibirica
  misc_feature (1)..(273): tr|G4E4P1|G4E4P1_9GAMM GTP cyclohydrolase FolE2 OS=Thio rhodospira sibirica ATCC 700588 OX=765914 GN=folE2 PE=3 SV=1
MISTAAPSCERSDAMADVQASLDTRSIPINKVGIKDIRHPVRISDRSGGEQHTVARFNMYVNLPHNFKGTHMSRFVEILNQHERELTVSSFQQMLSEMALRLEAASGHIEMSFPYFVNKRAPVSGVASLLDYDVTFIGEIHDQQIIMNIKVVVPVTSLCPCSKTIAAYGAHNQRSHVTVNARINTFVWIEELIDLVEQEASCELFGLLKRPDEKYVTERAYDNPKFVEDMVRDVAARLNADTRISAYSVESENFESIHNHSAYAMIAFDKSSR

SEQ ID NO: 16078 - protein, 291 aa, Thiorhodovibrio sp.
  misc_feature (1)..(291): tr|H8Z6L8|H8Z6L8_9GAMM GTP cyclohydrolase FolE2 OS=Thio rhodovibrio sp. 970 OX=631362 GN=folE2 PE=3 SV=1
MESTLRSTAAAAAAPSPQAASQNTPSRQTMADVQASADSRRIAIDRVGIKDIRHPVRIQDRSGLEQHTVATFNMYVHLPHDFKGTHMSRFVAILNNHQPEISVRTFKDMLREMAERLESEAGHIEMRFPFFINKLAPVTGVASLLDYDVTFIGEVKQGQPSLSIRVVVPVTSLCPCSKQISAYGAHNQRSHVTVTVRTRGFLWLEELIDLVESQASCELFGLLKRADEKFVTEHAYDNPKFVEDTVRDIAGLLNQDERIAAYVVESENFESIHNHSAYAMIERDKDAEAAG

SEQ ID NO: 16079 - protein, 329 aa, Thiothrix caldifontis
  misc_feature (1)..(329): tr|A0A1H4BMR2|A0A1H4BMR2_9GAMM GTP cyclohydrolase FolE2 OS=Thiothrix caldifontis OX=525918 GN=folE2 PE=3 SV=1
MMSTNACQELPCAVAAMPDVAKQPLAGAKGTLNWVGMSQIELPVFLRSAKGDRVQTLARVQAYVNLIDPNSKGIHMSRLYVALDTILGMNDLTPEVLRGTITQFVDTHGGLSDAAYLECRFDYFERRNSLLSDNSGWKNYPVKVAATLRHGQIDTEVSVEVPYSSTCPCSAALARQLIQEGFRETFGDASVVDANTVFDWLGTTNGIRATPHSQRSIAQVRVKLAEKVRTLPITSLIDQVEEALKTPVQATVKREDEQEFARLNAANLMFCEDAARRLKNALNDDISVRDFWLRVNHMESLHAHDAVAVVVKGVEGGYRDDPREYVHPT

SEQ ID NO: 16080 - protein, 183 aa, Thiothrix caldifontis
  misc_feature (1)..(183): tr|A0A1H3XN15|A0A1H3XN15_9GAMM GTP cyclohydrolase 1 OS= Thiothrix caldifontis OX=525918 GN=folE PE=3 SV=1
MTDTSQLYADLITSIGEDITRDGLLKTPERAAKAFSFLTQGYQQSLEAIVNEAVFDSSNDEMVVVKDIEFYSLCEHHMLPFVGKAHVAYLPKGKVLGLSKIARITDMYARRLQIQENMTKQIADAVQQVTGAAGVGVVLEAQHFCMMMRGVQKQHSSTVTSMMLGEFRDNSRTRQEFLQLIKG

SEQ ID NO: 16081 - protein, 325 aa, Thiothrix eikelboomii
  misc_feature (1)..(325): tr|A0A1T4VUR3|A0A1T4VUR3_9GAMM GTP cyclohydrolase FolE2 OS=Thiothrix eikelboomii OX=92487 GN=folE2 PE=3 SV=1
MSATNACTDLSCNILPDIASQPHAGPKGTLNWVGMSAIEIPVFVLNATGEKIQTLARVQAYVNLMDPHSKGIHMSRLYLALDNLLSMHELTPELLRKTVTQFVESHGSLSTAAYLECRFNYFEKRSSLVSDNRGWKNYPVRVAATLRGQQFDLEVQVEVPYSSTCPCSAALARQLIQEGFRDQFGEAVVNAQQVYDWLGTTQGISATPHSQRSMAQVKVKLAEKIRNLPLTSLIDRIENALQTPVQAAVKREDEQEFARLNAANLMFCEDAARRLKVAMSEDISVRDFWIRVNHLESLHAHNAVSVAIKGIEGGYQDDPHDYMTC

SEQ ID NO: 16082 - protein, 182 aa, Thiothrix lacustris
  misc_feature (1)..(182): tr|A0A1Y1QH22|A0A1Y1QH22_9GAMM GTP cyclohydrolase 1 OS= Thiothrix lacustris OX=525917 GN=folE PE=3 SV=1
MTDASQLYAELITSIGEDITRDGLQKTPERAAKAFGFLTQGYQQSLETIVNGAVFASDNDEMVVVKDIEFYSLCEHHLLPFVGRAHIAYLPQGKVLGLSKIARITDMYARRLQIQENMTKQIADAIQSVTGAAGVGVVLEAQHFCMMMRGVQKQHSSTVTSMMLGEFRENSRTRQEFLHLIK

SEQ ID NO: 16083 - protein, 225 aa, Thiothrix lacustris
  misc_feature (1)..(225): tr|A0A1Y1QEI7|A0A1Y1QEI7_9GAMM GTP cyclohydrolase 1 OS= Thiothrix lacustris OX=525917 GN=folE PE=3 SV=1
MNTKLAYLPERPELSPEAIQVRAALLAAGLETPMQETGLNPQQKYERIKGLMTEVVRTLGLDLHDDSLVETPHRIAKMYVHEIFSGLDYNHFPKLALIDNKMGTDEMVLVRNIGLLSTCEHHFVTIDGKAKVAYIPGDKILGLSKINRVVRFFAQRPQVQERLTRQILVALQTVLETDDVAVSIDAVHYCVKSRGVMDSESETSTLALGGRFRTDAQQRAAFLQG

SEQ ID NO: 16084 - protein, 224 aa, Thiothrix nivea
  misc_feature (1)..(224): tr|A0A2G6HR81|A0A2G6HR81_9GAMM GTP cyclohydrolase 1 OS= Thiothrix nivea OX=1031 GN=folE PE=3 SV=1
MSTYPPRSAALALSAEAELVRKALIKKGLETPMLDNGLDSQQKYDRIKALMGEVVSTLGLDLKDDSLAETPHRIAKMYVHEIFSGLDYQHFPRLSLIENKMGAREMVKVRNIDLTSTCEHHFVTIDGKAKVAYIPGDKIIGLSKINRIVRFFAQRPQVQERLTRQILVALQTLLSTENVAVSIDAVHYCVKSRGIMDANSQTSTTALGGCFRENIHTRAEFLNP

SEQ ID NO: 16085 - protein, 325 aa, Thiothrix sp.
  misc_feature (1)..(325): tr|A0A5C7RTS8|A0A5C7RTS8_9GAMM GTP cyclohydrolase FolE2 OS=Thiothrix sp. OX=1032 GN=folE2 PE=3 SV=1
MSATNACTDLSCSVLPDIASQPHAGPKGSLNWVGMSAIEIPVLVLNSTGEKIQTLARVQAYVNLIDPNSKGIHMSRLYLALDNLLSMHELTPELLRKTVAQFVESHGSLSNSAYLECRFNYFEKRSSLVSDNRGWKNYPVRVAATLRGQQFDLEVQVEVPYSSTCPCSAALARQLIQEGFRDQFGEGSVNANTVYEWLGTTQGISATPHSQRSMAQVKVKLAEKIRNLPITSLIDRIENALQTPVQAAVKREDEQEFARLNAANLMFCEDAARRLKLAMSEDISVRDFWIRVNHLESLHAHDAVSVAVKGVDGGYQDDPHDYMSC

SEQ ID NO: 16086 - protein, 263 aa, Thiothrix sp.
  misc_feature (1)..(263): tr|A0A432UY60|A0A432UY60_9GAMM GTP cyclohydrolase FolE2 OS=Thiothrix sp. OX=1032 GN=folE2 PE=3 SV=1
MSESNIPDVQSSQDTRKIPIDKVGIKAIKHPVRIKERNGGEQHTIAEFNMYVNLPHNFKGTHMSRFVQILNEHEREISVDTFRIMLGEMTERLEAQSGHIEMNFPYFINKTAPVSGVKSLMDYDLTFIGEIHDGQPTTNVKVVVPVASLCPCSKKISDRGAHNQRSHITINARLKKFIWIEELIELVENEASCELYGLLKRPDEKYVTERAYDNPKFVEDTVRDIATRLNAEDRISAYTLECENFESIHNHSAYAYIEKDKLA

SEQ ID NO: 16087 - protein, 264 aa, Thiotrichaceae bacterium
  misc_feature (1)..(264): tr|A0A2A4WDT9|A0A2A4WDT9_9GAMM GTP cyclohydrolase FolE2 OS=Thiotrichaceae bacterium OX=2030882 GN=folE2 PE=3 S V=1
MNDTDTTQIADVQNSPDNRQIPINKVGIKDIRHPVRVKDRSEGEQHTIATFNMYVDLPHNFKGTHMSRFVKLLNSNEREISVESFDEIMESMITLLDAESGHIEMSFPYFINKEAPVSKVKSLLDYDVTLIGEITGGKTVMTIKVVVPVTSLCPCSKEISDYGAHNQRSHVTVTAKTEGFVWIEDLIDIVEQEASCEIFGLLKRPDEKFVTERAYDNPKFVEDMVRDVAARLNADDRITAYTLESENFESIHNHSAYALIEKVK

SEQ ID NO: 16088 - protein, 271 aa, Thiotrichaceae bacterium
  misc_feature (1)..(271): tr|A0A2A5FYT0|A0A2A5FYT0_9GAMM GTP cyclohydrolase FolE2 OS=Thiotrichaceae bacterium OX=2030882 GN=folE2 PE=3 S V=1
MTDILDKTNQPGSTLPDVQNSQDTRAIAINKVGIKDIRHPVQVKSRAGHTQHTIANFNMYVDLPHEFKGTHMSRFVEILNNHEWEITVESFKTMLTEMTSRLDAECGHIEMTFHYFINKTAPASGVQSLLDYEVTFIGERVRGKNIINIKVVVPVTSLCPCSKKISDRGAHNQRSHVTVNIETESFIWVEEIIDMVEAQASCELYGLLKRPDEKIVTERAYDNPKFVEDMVRDIAHQLNIDERVLAYTVESENFESIHNHSAYALIEKKRN

SEQ ID NO: 16089 - protein, 315 aa, Thiotrichales bacterium
  misc_feature (1)..(315): tr|A0A259K8Q6|A0A259K8Q6_9GAMM GTP cyclohydrolase FolE2 OS=Thiotrichales bacterium 34-46-19 OX=1970605 GN=folE 2 PE=3 SV=1
MTKPFMPDIANMPLSTPMGTLDWVGMSQIEMPIMLAQAGVEPVRSLARVQAYVNLIDPQSKGIHMSRLYLMLDKASTQAVTPASVSAMLSEFVQSHTGLSNAAFVEYKFDYYERRGSLLSGNSGWKNYPCLIRGHLQEGDLRLELQVEVPYSSTCPCSAALARQLIQEQFSSDFTGREQLSQAEVYAWLGTSQGICATPHSQRSFAKVRVTLSNTQMESFEVSQLINRIEDALQTAVQAAVKREDEQEFARLNGANLMFCEDAARRLQAQLDAQSDYSDFWLRVDHLESLHPHDAVSIVSKGVAGGYQPLPSLGG

SEQ ID NO: 16090 - protein, 189 aa, Thiotrichales bacterium
  misc_feature (1)..(189): tr|A0A2D7KME0|A0A2D7KME0_9GAMM GTP cyclohydrolase 1 OS= Thiotrichales bacterium OX=2026796 GN=folE PE=3 SV=1
  misc_feature (153)..(153): Xaa can be any naturally occurring amino acid
MEPMMRDLFLSLLKSIGEDPERDGLLKTPDRAAKALSFLTKGSKESLEEIVNDALFESDSREMVIVKDIEIYSMCEHHMLPFFGRCHIGYIPDGKVLGLSKLARISDMFSRRLQIQEQLTHEIATAVFETVKPLGVGVVIEARHLCMMMRGVXKQNSSTVSSAMLGTFLTSDRTRSEFLQLIGPRSTSV

SEQ ID NO: 16091 - protein, 263 aa, Bathymodiolus puteoserpentis
  misc_feature (1)..(263): tr|A0A483ANB1|A0A483ANB1_9BACT GTP cyclohydrolase FolE2 OS=thiotrophic endosymbiont of Bathymodiolus puteoserp entis (Logatchev) OX=343240 GN=folE2 PE=3 SV=1
MSAANLPDTQNNADTRQIVIDKVGIKDISHPITFIDRDGNKNPTIGNFTMTVTLPEHVKGTHMSRFIEILNDGPCEFNSGNFDKIIDKVRERLESDTAHITLDFPFFRKKKAPSSGVESLMDYQVTLYGILNQGTSEVMIKVVVPVTSLCPCSKSISKYGAHNQRSHITIKARVVKGKTLHLEDLIELAEQKASCELYAILKRDDEKVVTERAYDNPAFVEDLVRDIAVGLNANDNIDYYRLESENFESIHNHSAYALIENKY

SEQ ID NO: 16092 - protein, 182 aa, Thiovulum sp.
  misc_feature (1)..(182): tr|J0L8B0|J0L8B0_9HELI GTP cyclohydrolase 1 OS=Thiovulu m sp. ES OX=1177931 GN=folE PE=3 SV=1
MESGKIEESVKEILHAIGENPAREGLVKTPHRVAKAFGHILGGYTKDPEKILNSALFETTNDEMVVVKNIEFYSMCEHHMLPIIGTASIGYIPNGKVTGLSKLPRVVDVFARRLQIQENMTEQIANAIQNAISPKGVGVVVTARHMCMEMRGVEKCGSQTTTSSYKGDFKLSEVKREFLSQI

SEQ ID NO: 16093 - protein, 222 aa, Thorsellia anophelis
  misc_feature (1)..(222): tr|A0A1H9ZT82|A0A1H9ZT82_9GAMM GTP cyclohydrolase 1 OS= Thorsellia anophelis DSM 18579 OX=1123402 GN=folE PE=3 SV=1
MNTQIKQLSLEAQLVKSALLSEGLETPLIHLEQDKHTRQKMIETHMASIMNLLGLDLTDDSLAETPRRIAKMYVEEIFSGLNYEHFPKITVIENKMRVDEMVTVRDITLTSTCEHHFVTIDGKATVAYLPKDKVIGLSKINRIVQFFSQRPQVQERLTQQILLALQTLLGTKNVAVSIDAVHYCVKARGVRDATSTTTTTALGGIFKSNPTTRHEFLSLLSR

SEQ ID NO: 16094 - protein, 188 aa, Tindallia californiensis
  misc_feature (1)..(188): tr|A0A1H3QHP0|A0A1H3QHP0_9CLOT GTP cyclohydrolase 1 OS= Tindallia californiensis OX=159292 GN=folE PE=3 SV=1
MDKKRIENAVREILHAIGEDPDREGLLGTPDRIARMYEEIFSGMNEDPQKHLEVFFQEEKHEELVIVKDIAFYSVCEHHLVPFFGVAHVGYIPKNGKLTGLSKLARVVDTIAKRPQLQERLTSTIADTIQEKLEPYGVIVVVEAEHMCMTMRGIKKPGSKTVSSAVRGIFKHDAKSRAEAITLIEFGR

SEQ ID NO: 16095 - protein, 188 aa, Tindallia magadiensis
  misc_feature (1)..(188): tr|A0A1I3GIW7|A0A1I3GIW7_9CLOT GTP cyclohydrolase 1 OS= Tindallia magadiensis OX=69895 GN=folE PE=3 SV=1
MDKKRIENAVREILHAIGEDPDREGLLGTPDRIARMYEEIFSGMNEDPQKHLEVFFQEEKHEELVIVKDIAFYSVCEHHLVPFFGVAHVGYIPKNGKLTGLSKLARVVDTIAKRPQLQERLTSTIADTIQEKLEPYGVIVVVEAEHMCMTMRGVKKPGSKTVSSAVRGIFKHDAKSRAEAITLIEFGR

SEQ ID NO: 16096 - protein, 186 aa, Tissierella creatinini
  misc_feature (1)..(186): tr|A0A4T9WHU7|A0A4T9WHU7_9FIRM GTP cyclohydrolase 1 OS= Tissierella creatinini OX=43143 GN=folE PE=3 SV=1
MDKVRIEKAVREILYAIGEDPDREGLLDTPKRMAKMYEEIFAGLQEDPKKHLEVYFQEEKYEELVLIKDIPFYSVCEHHLVPFFGKAHVGYLPRDGRLTGLSKLARVVDTVAKRPQLQERLTSTVADAIVEKLDPYGVIVVVEAEHMCMTMRGVKKPGSKTVTSAVRGSFATDSKSRAEVLSMINK

SEQ ID NO: 16097 - protein, 186 aa, Tissierella creatinophila
  misc_feature (1)..(186): tr|A0A1U7M3P5|A0A1U7M3P5_TISCR GTP cyclohydrolase 1 OS= Tissierella creatinophila DSM 6911 OX=1123403 GN=folE P E=3 SV=1
MDKARIEKAVREILYAIGEDPDREGLLDTPNRVARMYEEIFSGLNEDPKKHLEVYFQEEQYEELVLIKDIPFHSVCEHHLVPFFGKAHIGYLPKEGRLTGLSKLARVVDSVSKKPQLQERLTATIANVITEKLDPYGVIVVIEAEHMCMTMRGVKKPGSKTITSAIRGVFTSDSKSRAEVLSMINK

SEQ ID NO: 16098 - protein, 266 aa, Tissierella creatinophila
  misc_feature (1)..(266): tr|A0A1U7M819|A0A1U7M819_TISCR Putative GTP cyclohydrol ase 1 type 2 OS=Tissierella creatinophila DSM 6911 OX=1 123403 GN=TICRE_05890 PE=4 SV=1
MKLKNIIDYIEDWAPKSLIDTWDNTGFQIGSEKKDIKSILIALDLDEDILKKAIEDKFDLIITHHPIIFKPLKNIISTNPKEKLILDIIKNDIAVYNAHSNLDLAIGGVNDELAKLLNIKNTINLKEIFKREINGESISYGYGRIGEISETGLEEFIGVIKSSLNIENLILYGSIHKTIRKVAVCGGSGSDFIENAIEGKADLYITADIKYHEAQDAYERGLTLIDVGHFHSEKIILPVIKRYLEKEFKTLSIEVVMQQSLPKKIY

SEQ ID NO: 16099 - protein, 185 aa, Tissierella praeacuta
  misc_feature (1)..(185): tr|A0A3F3S4L8|A0A3F3S4L8_9FIRM GTP cyclohydrolase 1 OS= Tissierella praeacuta OX=43131 GN=folE PE=3 SV=1
MVNIEKTESAIRMLLEAIGENPNREGLIDTPKRVAKMYNEIVGGYQEDASVHLSKTFKCEDAELVLEKGIVFHSICEHHLLPFYGKVHIAYIPNEKVVGLSKLCRAVEVYARRLQIQEQLCKQIANAIYESLNAKGVMVIIEAEHTCMTMRGIKKYGSKTVTISTCGILREDILKQKYILEMVRE

SEQ ID NO: 16100 - protein, 185 aa, Tissierella praeacuta; identical to SEQ ID NO: 16099
  misc_feature (1)..(185): tr|A0A1M4ZV17|A0A1M4ZV17_9FIRM GTP cyclohydrolase 1 OS= Tissierella praeacuta DSM 18095 OX=1123404 GN=folE PE=3 SV=1

SEQ ID NO: 16101 - protein, 184 aa, Tissierellia bacterium
  misc_feature (1)..(184): tr|A0A133YVJ9|A0A133YVJ9_9FIRM GTP cyclohydrolase 1 OS= Tissierellia bacterium KA00581 OX=1588751 GN=folE PE=3 SV=1
MDKEKIEKAVSMIIEAIGEDPKREGLLETPKRVCKMYEEIFSGLGKDAKEHLSKTFELVDTSMVVEKDINFFSICEHHFLPFYGKVNIAYIPNGRVVGLSKLARCVEVYSKKPQLQERLTMEIADAIMKFLQAKACLVVISAEHMCMTIRGVKKPKTLTVTSTCKGLFNTDLKLKDEAYRLMGM

SEQ ID NO: 16102 - protein, 196 aa, Tissierellia bacterium
  misc_feature (1)..(196): tr|A0A095ZUQ6|A0A095ZUQ6_9FIRM GTP cyclohydrolase 1 OS= Tissierellia bacterium S5-A11 OX=1230730 GN=folE PE=3 S V=1
MNEKAARAYRAFLEAYGLDLQALGMEKTPARVAELYEALLAGVGQRTKPIWGEVFESDYHGLLTVTGLHFHSLCEHHMLPFFGTADIIYDPREGMVAGLSKMEKLVQMLSRRPQLQERLTEEIARAVMDDLRARGVFVRVRAAHLCMTMKGDSSPDTKITTVRGLGTLAPGGQNEARVLALLGGTDGGTTDVCTEE

SEQ ID NO: 16103 - protein, 205 aa, Tistlia consotensis
  misc_feature (1)..(205): tr|A0A1Y6B7Z0|A0A1Y6B7Z0_9PROT GTP cyclohydrolase 1 OS= Tistlia consotensis USBA 355 OX=560819 GN=folE PE=3 SV= 1
MDVPHVTSIAQSDSDARPSREEAEAAVRTLLRWAGDDPGREGLRDTPKRVAKAFEEWFGGYGVDPQDYLSRTFEEVDGYDEIVVLRDIDFISHCEHHLAPIIGKAHVAYLPDRRVVGISKLARVVEGYARRLQIQERLTSQIAKAIETTLQPLGVGVVIEATHQCMTTRGVRKSGVSMVTSCVLGSFRSDRRTRQEFLRLIGHGG

SEQ ID NO: 16104 - protein, 208 aa, Tistrella mobilis
  misc_feature (1)..(208): tr|A0A3B9IQA3|A0A3B9IQA3_9PROT GTP cyclohydrolase 1 OS= Tistrella mobilis OX=171437 GN=folE PE=3 SV=1
MPDAVSAALDARPTVAEAEEAVRTLLRWAGDDPDREGLLGTPGRVVRAYGEFFAGYAMEPQEILARTFEEIDGYDEIVALRDIRFESHCEHHMVPVVGTAHVAYLPRTRVVGISKLARVVEGSAKRFTIQERMTAQIANAITTVLDPRGVAVVVQASHQCMTTRGVHKPGVAMITSRMTGVFREDPGARLELFSLLGMRPGAGPEGAC

SEQ ID NO: 16105 - protein, 211 aa, Tistrella mobilis
  misc_feature (1)..(211): tr|A0A162KCW5|A0A162KCW5_9PROT GTP cyclohydrolase 1 OS= Tistrella mobilis OX=171437 GN=folE PE=3 SV=1
MGGPAEVGASEAPKAAAPEGRPSRAEAEAAVRTLIRWAGDDPDREGLLSTPDRVVRSYEEFFAGYVQDPVEILQRTFEETDGYDEVVALRGIRIESYCEHHMVPIIGVAHVAYLPRSRVVGISKLARVVEAFSKRLQIQEKLTSQIANAIEEVLQPKGVAVVIEAEHQCMSTRGVHKPGVSMVTSRMLGEFRHNPTLRREFLTLIGNPAGF

SEQ ID NO: 16106 - protein, 208 aa, Tistrella sp.
  misc_feature (1)..(208): tr|A0A2D8Q823|A0A2D8Q823_9PROT GTP cyclohydrolase 1 OS= Tistrella sp. OX=2024861 GN=folE PE=3 SV=1
MPDAVSAALDARPTVAEAEEAVRTLLRWAGDDPDREGLLGTPNRVVRAYGEFFAGYAMEPQEILARTFEEIDGYDEIVALRDIRFESHCEHHMVPVVGTAHVAYLPRTRVVGISKLARVVEGYAKRFTIQERMTAQIANAISTVLDPRGVAVVVQASHQCMTTRGVHKPGVAMITSRMTGVFRKDPGARLELFSLLGMRPGAGPEGAC

SEQ ID NO: 16107 - protein, 211 aa, Tistrella sp.; identical to SEQ ID NO: 16105
  misc_feature (1)..(211): tr|A0A2D8Q8R9|A0A2D8Q8R9_9PROT GTP cyclohydrolase 1 OS= Tistrella sp. OX=2024861 GN=folE PE=3 SV=1

SEQ ID NO: 16108 - protein, 183 aa, Unknown
  misc_feature (1)..(183): tr|A0A563CE39|A0A563CE39_9BACT GTP cyclohydrolase 1 OS= TM7 phylum sp. oral taxon 353 OX=713055 GN=folE PE=3 SV =1
MGNKSIKTKDIESAAKDILIALGEDANREGLLETPHRYAKFFREFFDTEEFRVTTFKNEGSGMIIQTGIPFYSLCEHHMVPFFGEAAIAYIPDEKIVGLSKLARILEHFSRCLQNQERITKQVADFIDENLNPKGVAVSLQARHMCMEMRGVKKLGATTTTNVKGAFLNNAQTRNEFLSFINK

SEQ ID NO: 16109 - protein, 188 aa, Unknown
  misc_feature (1)..(188): tr|A0A563CNF1|A0A563CNF1_9BACT GTP cyclohydrolase 1 OS= TM7 phylum sp. oral taxon 348 OX=671231 GN=folE PE=3 SV =1
MANNKEIESVIEKLLKELVEDYNRAGLKETPMRVAKSWSRLLEGYERKFEDEAKTFDNTHNYSDIVLSGKINFTSVCEHHLLPFWGEAYIAYIPKDRIIGLSKLARAVDIYSRRLQDQERITQQVAQAINGYLKPRGVAVLLKAQHFCNIARGVEKIQSNMVTSTFSGEFTNDNTRKRFYEMVAFAND

SEQ ID NO: 16110 - protein, 216 aa, Tolumonas auensis
  misc_feature (1)..(216): sp|C4LDE6|GCH1_TOLAT GTP cyclohydrolase 1 OS=Tolumonas auensis (strain DSM 9187 / TA4) OX=595494 GN=folE PE=3 SV=1
MTHLSKEAVIVRSALEAKGLETPMQHSSLSAQEKKQQIEQHMTSIMTLLGLDLADDSLAETPHRIAKMYVDEIFSGLDYGSFPKITLIENKMGTDEMIKVQDIGLTSTCEHHFVTIDGKATVAYIPKDKIIGLSKINRIVNFFAKRPQVQERLTQQILVALQVLLGTDNVAITVTATHYCVKSRGVMDASSQTTTTALGGVFKSSAATRHEFLSRA

SEQ ID NO: 16111 - protein, 216 aa, Tolumonas sp.
  misc_feature (1)..(216): tr|A0A5C7QSZ3|A0A5C7QSZ3_9GAMM GTP cyclohydrolase 1 OS= Tolumonas sp. OX=1978237 GN=folE PE=3 SV=1
MTQLSKEAIIVRSALEAKGLETPMQNTVLSSHEKKQQIEQHMTSIMNLLGLDLADDSLAETPHRIAKMYVDELFSGLDYASFPKITLIDNKMGTDEMIKVQDIGVTSTCEHHFVTIDGKATVAYIPKDKIIGLSKINRIVNFFAKRPQVQERLTQQILVALQVLLGTDNVAITMTAVHYCVKSRGVMDASSQTTTTALGGIFKSNAATRHEFLSRA

SEQ ID NO: 16112 - protein, 235 aa, Tolypothrix bouteillei
  misc_feature (1)..(235): tr|A0A0C1N6U2|A0A0C1N6U2_9CYAN GTP cyclohydrolase 1 OS= Tolypothrix bouteillei VB521301 OX=1479485 GN=folE PE=3 SV=1
MTIASSNGANRSQSPLIPDLTESITPRPDRNTHDGREPILHPQTEEQMEQMMEAVRTLLVGVGEDPEREGLLKTPKRVAEAMRFLTSGYNQSLEDLVNGAIFDEGHNEMVLVRDINLFSLCEHHMLPFMGRAHVAYIPNQKVVGLSKLARIVEMYSRRLQVQERLTRQIAEAVHQILEPQGVAVVIEASHMCMVMRGVQKPGSWTVTSALLGVFQEEQKTREEYFNLIRHQASFF

SEQ ID NO: 16113 - protein, 235 aa, Tolypothrix campylonemoides
  misc_feature (1)..(235): tr|A0A0C2PYR1|A0A0C2PYR1_9CYAN GTP cyclohydrolase 1 OS= Tolypothrix campylonemoides VB511288 OX=1245935 GN=folE PE=3 SV=1
MTIARSNGINRSQSPLIPDLTEAITPRPDRNTHDGRQADLHPQTEEQMEQMTDAVRTLLVGVGEDPEREGLLKTPKRVAEAMRFLTSGYNQSLEEIVNGAIFDEGHNEMVLVRDINFFSMCEHHMLPFMGKAHVAYIPNQKVVGLSKLARIVEMYSRRLQVQERLTRQIAEAIQTILEPQGVAVVMEATHMCMVMRGVQKPGSWTVTSAMLGVFQEEQKTREEFFNLIRHQSSFF

SEQ ID NO: 16114 - protein, 235 aa, Tolypothrix sp.; identical to SEQ ID NO: 8366
  misc_feature (1)..(235): tr|A0A0D6KVL4|A0A0D6KVL4_9CYAN GTP cyclohydrolase 1 OS= Tolypothrix sp. PCC 7601 OX=1188 GN=folE PE=3 SV=1

SEQ ID NO: 16115 - protein, 234 aa, Tolypothrix sp.
  misc_feature (1)..(234): tr|A0A218QGK9|A0A218QGK9_9CYAN GTP cyclohydrolase 1 OS= Tolypothrix sp. NIES-4075 OX=2005459 GN=folE PE=3 SV=1
MTTARSNGSNVSQSPLIPDLSEAINPRPDRNTRDGREPDLHDPSDEHIKQMKDAVRSILVGVGEDPEREGLLKTPKRVAEAMRFLTSGYNQSLEDLVNDAIFDEGHNEMVLVRDINFFSLCEHHMLPFMGRAHVAYIPNQKVVGLSKLARIVEMYSRRLQVQERLTRQIAEAVQTILEPQGVAVVMEASHMCMVMRGVQKPGSWTVTSAMLGVFQEQKTREEFFSLIHHQAAFF

SEQ ID NO: 16116 - protein, 235 aa, Tolypothrix tenuis; identical to SEQ ID NO: 4873
  misc_feature (1)..(235): tr|A0A1Z4MSU8|A0A1Z4MSU8_9CYAN GTP cyclohydrolase 1 OS= Tolypothrix tenuis PCC 7101 OX=231146 GN=folE PE=3 SV=1

SEQ ID NO: 16117 - protein, 207 aa, Tomitella sp.
  misc_feature (1)..(207): tr|A0A516X7I7|A0A516X7I7_9ACTN GTP cyclohydrolase 1 OS= Tomitella sp. HY188 OX=2597660 GN=folE PE=3 SV=1
MAQDSPAQDGAAVKYGAVGPFDAARAEAAVRELLIAVGEDPDREGLRETPARVARAYREVFDGLFSEPDSVLNTVFDEGHQEMILVRDIPVYSTCEHHLVPFHGVAHVGYIPGTSGKVTGLSKLARVVDLYAKRPQVQERLTSDIADALVRKLQPRAAIVVIEAEHLCMSMRGIRKPGATTTTSAVRGLFKTSAVSRGEVLDLILRK

SEQ ID NO: 16118 - protein, 222 aa, Trabulsiella guamensis
  misc_feature (1)..(222): tr|A0A085AG64|A0A085AG64_9ENTR GTP cyclohydrolase 1 OS= Trabulsiella guamensis ATCC 49490 OX=1005994 GN=folE PE =3 SV=1
MSSLSKEAALVHEALVARGLETPLRPPVHDMDNETRKRLIAGHMTEIMELLNLDLSDDSLMETPHRIAKMYVDEIFSGLDYANFPKITVIENKMKVDEMVTVRDITLTSTCEHHFVTIDGKATVAYIPKDTVIGLSKINRIVQFFAQRPQVQERLTQQILTALQTLLGTNNVAVSIDAVHYCVKARGVRDATSATTTTSLGGLFKSSQNTRQEFLRAVRHLS

SEQ ID NO: 16119 - protein, 222 aa, Trabulsiella odontotermitis; identical to SEQ ID NO: 16118
  misc_feature (1)..(222): tr|A0A0L0GGY0|A0A0L0GGY0_9ENTR GTP cyclohydrolase 1 OS= Trabulsiella odontotermitis OX=379893 GN=folE PE=3 SV=1

SEQ ID NO: 16120 - protein, 367 aa, Tranquillimonas alkanivorans
  misc_feature (1)..(367): tr|A0A1I5KLH8|A0A1I5KLH8_9RHOB GTP cyclohydrolase FolE2 OS=Tranquillimonas alkanivorans OX=441119 GN=folE2 PE= 3 SV=1
MNVHTPEIERDTDREDAAQALKVLRDWAAKASAEEVAALDPAVARLLPGADAAPYPALSRTYPEGFEADAAYRQTLPDLQNGPQSLIRGAKRQIQHVGISNFRLPIKFHTRDNGDLTLETSVTGTVSLEAEKKGINMSRIMRTFYRHAERTFSFEVIEAALDDYKSDLESFDARIQMRFSFPVKKPSLRSGLEGYQYYDIALELVETAGVRRKVMHLDYVYSSTCPCSLELSEHARMTRGQLATPHSQRSVARVSVELNRNADCMWFEDLVDLCRAAVPTETQVMVKREDEQAFAELNAANPIFVEDAARLFAQALHDEPRIGDFRVVASHQESLHSHDAVSVLTEGETFSQASLDPRLFTTLFHVG

SEQ ID NO: 16121 - protein, 367 aa, Tranquillimonas sp.
  misc_feature (1)..(367): tr|A0A438AJB7|A0A438AJB7_9RHOB GTP cyclohydrolase FolE2 OS=Tranquillimonas sp. M0103 OX=2486419 GN=folE2 PE=3 SV=1
MNVYSKDFDETPKREEAEDALRRLRAWAETATPEEVADLDPAISRLLPDRPLPNYPELSRRYPEGFEVDDAYRATLPDLQNGPQSLIRGARRLIQHVGISHFRLPIRFHTRDGDDLTLETSVTGTVSLAAEKKGINMSRIMRSFYRHAERTFSFEVIEAALDDYLSDLGSLDARIQMRFSFPMKRPSLRSGLEGYQYYDIALELVDRGGVRHKITHLDYVYSSTCPCSLELSEHARQYRGQLATPHSQRSVARISVAADTSGETLWFEDIIDHCRAAVPTETQVMVKREDEQAFAELNGANPIFVEDAARLFAQELQGDARIQDYRIIASHQESLHSHDAVSVLTEGATFDQLSFDPQLFSTLHHPG

SEQ ID NO: 16122 - protein, 274 aa, Treponema azotonutricium
  misc_feature (1)..(274): tr|F5Y8J0|F5Y8J0_TREAZ GTP cyclohydrolase FolE2 OS=Trep onema azotonutricium (strain ATCC BAA-888 / DSM 13862 / ZAS-9) OX=545695 GN=folE2 PE=3 SV=1
MKDLKTIPDVQNQADHRDVPLAKVGIKGLEYPITVLDRENKIQHTSAKVDLYADLPRHFKGTHMSRFIEIFHQYREDLSMPRFLDMLNAIRKELEAESAFGSLNFPYFIEKKAPISGLPGIMSYQCRYQGWVNRQDSGNSSRKGKHFTVAVSVPVTTVCPCSKAISDRGAHNQRGIVTVELELGPFFWIEDIIALVEKAASSPVYSLLKREDEKFITEQAYDNPKFVEDLVRDVYIDIKGLNQFPRFSVEAENFESIHNHSAFAYAEFGEHNRE

SEQ ID NO: 16123 - protein, 260 aa, Treponema berlinense
  misc_feature (1)..(260): tr|A0A1T4PRH9|A0A1T4PRH9_9SPIO GTP cyclohydrolase FolE2 OS=Treponema berlinense OX=225004 GN=folE2 PE=3 SV=1
MIDVQNSPDTREVPLQKVGVKNVKYPVQVLDKNNKVQNTTACVNLFVNLPHDFKGTHMSRFIEVFHKYHSDISMKNFLEMLEEIRAKLDAQRAFGRISFPYFIEKNAPVTGASGFMQYNCTYEGESERLEKGVDSKFFVGIEVPVATLCPCSKAISEFGAHNQRGCVKVKVLYSDFFWIEDIIEMIENCASTPLYSVLKRQDEKFVTEHAYENPRFVEDMVREVYLGLKKMGFAWFKVECTNYESIHFHDAYACAEFGSC

SEQ ID NO: 16124 - protein, 278 aa, Treponema brennaborense
  misc_feature (1)..(278): tr|F4LPX7|F4LPX7_TREBD GTP cyclohydrolase FolE2 OS=Trep onema brennaborense (strain DSM 12168 / CIP 105900 / DD 5/3) OX=906968 GN=folE2 PE=3 SV=1
MIDIQNQTDTRDVPLKKVGVRGLKYPVQVLDKRRKTQTTSAVADLFVDLPHHFKGTHMSRFIEIFHAYHTDVSMKRFLAMLNEIRCKLDAECAFGTLTFPFFIEKNAPVSGQPGMMSYECTYEGSVSGTGSSFFVSVAVPVTTVCPCSKAISDRGAHNQRGVVRVKLQSSAFFWIEDVIALVEAAASSGLYSILKRSDEKFVTEAAYDNPRFVEDVVREVYIALRNFRVGDSRDANAPLSETAGRKTGTAAFRWFSVEAENFESIHNHNAYAYTEFDG

SEQ ID NO: 16125 - protein, 256 aa, Treponema bryantii
  misc_feature (1)..(256): tr|A0A1I3KRY4|A0A1I3KRY4_9SPIO GTP cyclohydrolase FolE2 OS=Treponema bryantii OX=163 GN=folE2 PE=3 SV=1
MIDIQSEEDTRAVPLQKVGVKGVKYPVVVLDKTATKQHTTASVDLFVNLPHNYKGTHMSRFIEVFHKYHSDISMHHFLDMLEEMRTKLSAQKAFGRIEFPYFIEKKAPVTEAAGIMQYKCSYEGEVSEDGTRKFYISIQVPVATLCPCSKAISEYGAHNQRGIVSVRLLYKEFFWIEDVIATIESCASTPLYSLLKRKDEKYVTEHAYENPRFVEDVVREVYLGLKKLGFTQFSVEAENDESIHNHNAYAFAEYSE

SEQ ID NO: 16126 - protein, 256 aa, Treponema bryantii
  misc_feature (1)..(256): tr|A0A1H9EJ95|A0A1H9EJ95_9SPIO GTP cyclohydrolase FolE2 OS=Treponema bryantii OX=163 GN=folE2 PE=3 SV=1
MRDIQNEEDTRAVPLQKVGVKGVKYPVVVLDKTASKQHTTATVDLYVNLPHNYKGTHMSRFIEVFHKYHTDISMHHFLDMLEEIRVKLDAQKSFGRIEFPYFIEKKAPVTEASGIMQYKCSYEGEVSEDGDRKFYISIQVPVATLCPCSKAISEYGAHNQRGLVSVRLLYKEFFWIEDVITTIENCASTPLYSLLKRKDEKYVTEHAYENPRFVEDVVREVYLGLKKLGFTSFSVEAENDESIHNHNAYAFAEYSI

SEQ ID NO: 16127 - protein, 271 aa, Treponema caldarium
  misc_feature (1)..(271): tr|F8EZ49|F8EZ49_TRECH GTP cyclohydrolase FolE2 OS=Trep onema caldarium (strain ATCC 51460 / DSM 7334 / H1) OX= 744872 GN=folE2 PE=3 SV=1
MAETCSCLMEDVQNQRDDRDVPLSKVGIKGVRYPIRVLDKAKSVQHTTATVDLYADLPRHFKGTHMSRFIEVLERHKADLSMPRFLQMLDEIRTDLEAESAFGAIAFPYFIEKAAPVSGLTSSMVYECRYEGSVNSREKHFIVQVSVPVTTVCPCSKAISDRGAHNQRGIVRVEVELGPFFWIEDLIDIVEQSASSPVYTLLKREDEKFITEQAYDNPKFVEDLVRDVYIGIKALNKFPRFSVEAENFESIHNHSAFAYAEYGRQKEQNHE

SEQ ID NO: 16128 - protein, 269 aa, Treponema phagedenis
  misc_feature (1)..(269): tr|A0A0B7GTX7|A0A0B7GTX7_TREPH GTP cyclohydrolase FolE2 OS=Treponema phagedenis OX=162 GN=folE PE=3 SV=1
MLPDIQSGKETRQILLQQVGISDLLYPLRIGLSKETEKILAEIDFSVQVESTQRGTHMSRFIETLNEFTEPLAMENFQKLLESGRNKLHAQAASAKIRFPYIVLKKAPASEKPSYMTYYCVLSGTNYANPEKNTEQITLFVPVQTLCPCSKEISAYGAHNQRSKVEVTLQLGSVFQIEDLITCIEKAASAPLHSLLKREDEKYVTEQAYANPKFAEDLVRDICLSLPALGNFPYARVKTTNYESIHNHNAFAAAHGECKDGQFLQPASI

SEQ ID NO: 16129 - protein, 269 aa, Treponema phagedenis; identical to SEQ ID NO: 16128
  misc_feature (1)..(269): tr|E7NX56|E7NX56_TREPH GTP cyclohydrolase FolE2 OS=Trep onema phagedenis F0421 OX=754027 GN=folE2 PE=3 SV=1

SEQ ID NO: 16130 - protein, 263 aa, Treponema porcinum
  misc_feature (1)..(263): tr|A0A1T4MPH5|A0A1T4MPH5_9SPIO GTP cyclohydrolase FolE2 OS=Treponema porcinum OX=261392 GN=folE2 PE=3 SV=1
MRDIQNETDTRKIPLQKVGVRNVKYPVTVLDKTNKLQLTTATVDLYVNLPHNFKGTHMSRFIEIFHKYHTDISMQHFLEMLEEIRSRLSAQKAYGTIRFPYFIEKSAPVSESKGIMEYTCSYEASAGEDERVFYVNIEVPVATLCPCSKAISDYGAHNQRGIVKVRLLYSDFFWIEDVISVIESCASTQLYSVLKRKDEKFVTEHAYNNPMFVEDVVREVYLGLKQMKFKWFSVEAETEESIHFHNAYAYAEYNENEKKVYSH

SEQ ID NO: 16131 - protein, 262 aa, Treponema saccharophilum
  misc_feature (1)..(262): tr|H7EIQ9|H7EIQ9_9SPIO GTP cyclohydrolase FolE2 OS=Trep onema saccharophilum DSM 2985 OX=907348 GN=folE2 PE=3 S V=1
MIDIQNTPDTREVPLQKVGIKDLEYPVTVLDKKNGTQSTTAKIDLFVNLPHNYKGTHMSRFIEIFHKHHENLGMSKFLEMLGEIRKTLDAEKSFGTMTFPFFVEKNAPVTGAPGIMRYECKYEGVVSENASDFFVSISIPVTTVCPCSKAISEYGAHNQRGIVNVRLKNSGMFWIEDVIKAVEDSASCGLFSALKRPDEKWVTEHAYDNPRFVEDVVREVYLSLKNFKSGKPFSYFSVECTNFESIHNHNAYAFTEYDGSGV

SEQ ID NO: 16132 - protein, 273 aa, Treponema socranskii
  misc_feature (1)..(273): tr|U2L6P7|U2L6P7_TRESO GTP cyclohydrolase FolE2 OS=Trep onema socranskii subsp. socranskii VPI DR56BR1116 = ATC C 35536 OX=1125725 GN=folE2 PE=3 SV=1
MSADEKTSRAALRDIQSEKDTRGVPLQKVGVKGLHYPVTVRDKINKTQNTTATVDLFVDLPADCKGTHMSRFIEVFHKYRFDISMHRFFDMLDEIRSTLCAARAYGTVSFPFFIEKSAPVTGTKSMMSYMCAYEGSVGKTERDFFISVSVPVATLCPCSKAISDYGAHNQRGTVRVKLLYSDFFWIEDVIAVIENASSGGLYAALKRRDEKWVTEHAYDNPRFAEDIVRETYLALRSFQISKPFAWFSVEAENYESIHNHNAYACAEYGSQTE

SEQ ID NO: 16133 - protein, 273 aa, Treponema socranskii
  misc_feature (1)..(273): tr|S3JNT6|S3JNT6_TRESO GTP cyclohydrolase FolE2 OS=Trep onema socranskii subsp. paredis ATCC 35535 OX=1125701 G N=folE2 PE=3 SV=1
MSADVKKSCNAMHDMQSEKDTRGVPLQKAGVKGLEYPVTVLDKINKTQNTTATVDLFVDLPAGCKGTHMSRFIEIFHKYRFDISMHRFFDMLDEIRSKLFAARAYGTVSFPFFIEKSAPVTGTKSMMRYTCAYEGSVGKDERNFFVSISVPVATLCPCSKAISDYGAHNQRGTVRVKLLYSDFFWIEDVIAAVENASSGGLYAALKRRDEKWVTEHAYDNPRFAEDVVRETYLALRSFPIAKPFAWFSVEAENYESIHNHNAYAYAEYGAQTE

SEQ ID NO: 16134 - protein, 262 aa, Treponema sp.
  misc_feature (1)..(262): tr|A0A3D3FI21|A0A3D3FI21_9SPIO GTP cyclohydrolase FolE2 OS=Treponema sp. OX=166 GN=folE2 PE=3 SV=1
MIDVQNFADDRDVPLGKVGVKGVRYPITVLDKARGTQRTVASVDLFANLPHHFKGTHMSRFIEAFQRHRDDLSMPRFLEMLTEIRADLEADSAFALVSFPYFMDKSAPVSGLPSAMVYECRYEGSVSAGGKDFRVSVAVPVQTVCPCSKAISDRGAHNQRGVVRVEVELGPFFWIEDLIAIVENAASSPVFTLLKREDEKYLTERAYDNPKFVEDLVRDVYIGIRSLERFPRFSVEAENFESIHNHSAFAYAEYGPRKGANT

SEQ ID NO: 16135 - protein, 262 aa, Treponema sp.
  misc_feature (1)..(262): tr|A0A352TAN3|A0A352TAN3_9SPIO GTP cyclohydrolase FolE2 OS=Treponema sp. OX=166 GN=folE2 PE=3 SV=1
MIDVQSSPDTREIPLEKVGVKRLQYPVQVLDKVNGKQSTTATVDLFVNLPHHFKGTHMSRFVEIFHRHSQDLGRRQFLDMLKEIRTSLDAERAFGTMHFLFFMNKKAPVTGENGIMSYECEYEAEVSSDSERFRLKISVPVTTVCPCSKAISQYGAHNQRGVVTVTLENTSLFWMEDVIALIEASASCGLYSVLKRPDEKFVTEHAYENPRFVEDVVREVYLALEHFDGAEKPFSWFSVECENFESIHNHNAYSMTSKITSV

SEQ ID NO: 16136 - protein, 261 aa, Treponema succinifaciens
  misc_feature (1)..(261): tr|F2NSW9|F2NSW9_TRES6 GTP cyclohydrolase FolE2 OS=Trep onema succinifaciens (strain ATCC 33096 / DSM 2489 / 60 91) OX=869209 GN=folE2 PE=3 SV=1
MIDIQNSKDTREIPLQKVGVTDLSYPVQVLDKAEGSQKTCAKVNLFVNLPHNYKGTHMSRFIEIFHRHRENLGMKQFLFMLEEIRKSLDAERAFGSMEFPFFMKKQAPVSHAESIMCYECTYEGEVSSASSSFFIKIKIPVTTLCPCSKAISQYGAHNQRGIVTVKLKNSSLFWIEDVIEEVEKSASGGLYSILKRPDEKFVTEHAYENPRFVEDVVREVFIALKNFSKSEKPFSWFSVECKNFESIHNHNAYAYTEFSEA

SEQ ID NO: 16137 - protein, 203 aa, Trichococcus collinsii
  misc_feature (1)..(203): tr|A0A143YYF2|A0A143YYF2_9LACT GTP cyclohydrolase 1 OS= Trichococcus collinsii OX=157076 GN=folE PE=3 SV=1
MAIDVQAIEEHIKGILIALGDNPEREGLKDTPKRVAKMYEDVYKGMCYTNDEIAEMLNTTFEDDLALGNAENDLVFMKDIEIFSHCEHHLALMYNMKVAVAYVPKQKVIGLSKIARIADMAGRRLQLQERIGSDIAEILENITESEDVAVIIQGEHGCMTTRGIQKPGAKTITTTLRGRFNTDPMLNNKLMMLYTKDSSNQFG

SEQ ID NO: 16138 - protein, 185 aa, Trichococcus collinsii
  misc_feature (1)..(185): tr|A0A143YDH1|A0A143YDH1_9LACT GTP cyclohydrolase 1 OS= Trichococcus collinsii OX=157076 GN=folE PE=3 SV=1
MDLKKIETAVQMILEAIGEDPNRSGLQDTPKRVARMYAEIFSGVEKDPADHAKVVFHEDTDEIVLVKDIPFYSTCEHHLVPFFGVGHIAYMPKDGQVIGLSKLARILDEVSKKPQIQERITTTVADILMEHLQPQGVMVVLEAEHMCMTMRGVKKPGSKTVTSAVRGAFKQSFKSRSEVLELIKL

SEQ ID NO: 16139 - protein, 185 aa, Trichococcus flocculiformis
  misc_feature (1)..(185): tr|A0A143YEU0|A0A143YEU0_9LACT GTP cyclohydrolase 1 OS= Trichococcus flocculiformis OX=82803 GN=folE PE=3 SV=1
MDLEKIEVAVQMILEAIGEDPKRSGLQDTPKRVARMYAEIFSGLEKDPADHAKVIFHEDTDEIVLVKDIPFYSTCEHHLVPFFGVGHIAYMPKDGQVIGLSKLARILDEVSKKPQIQERITTTVADILMEHLEPQGVMVILEAEHMCMTMRGVKKPGSKTVTSAVRGGFKQSFKSRSEVLELIKL

SEQ ID NO: 16140 - protein, 185 aa, Trichococcus ilyis
  misc_feature (1)..(185): tr|A0A143YAG4|A0A143YAG4_9LACT GTP cyclohydrolase 1 OS= Trichococcus ilyis OX=640938 GN=folE PE=3 SV=1
MDLEKIESAVQMILEAIGEDPNRSGIKDTPKRVARMYAEIFSGIEKDPTRHAKVVFHEETDEIVLVKDIPFYSTCEHHLVPFFGVGHIAYMPKDGQVIGLSKLARILDDVSKRPQIQERITTTVADILMEFLEPQGVMVVLEAEHMCMTMRGVKKPGSKTVTSAVRGAFENSSKSRSEVLELIKL

SEQ ID NO: 16141 - protein, 203 aa, Trichococcus ilyis
  misc_feature (1)..(203): tr|A0A143YK04|A0A143YK04_9LACT GTP cyclohydrolase 1 OS= Trichococcus ilyis OX=640938 GN=folE PE=3 SV=1
MAIDIAAIEKHIRGILIALGDDPEREGLKDTPKRVARMYEDVYKGMCYTNDEIAEMLNTTFEDDLALGSAGNDLVFMKDIEIFSHCEHHLALMYNMKVAVAYVPKQKVIGLSKIARIADMASRRLQLQERIGTDIAEILQKITDSEDVAVLIQGEHGCMTTRGIQKPGAKTITTTLRGRFNTDPMLNHKLMMLYMKDGSNPLG

SEQ ID NO: 16142 - protein, 203 aa, Trichococcus palustris
  misc_feature (1)..(203): tr|A0A143YDK2|A0A143YDK2_9LACT GTP cyclohydrolase 1 OS= Trichococcus palustris OX=140314 GN=folE PE=3 SV=1
MAIDVQAIEEHIRGILIALGDDPEREGLKDTPKRVAKMYEEVYMGMCYTNDEISEMLNTTFEDDLALNNNGNDLVFMKDIEIFSHCEHHLALMYNMKVAVAYVPKQKVIGLSKIARIADMVGRRLQLQERIGSDIAEILQKITESEDVAVLIQGEHGCMTTRGIQKPGTKTITTTLRGRFNTDHLLNNKLMMLYTKDSANQRA

SEQ ID NO: 16143 - protein, 185 aa, Trichococcus palustris
  misc_feature (1)..(185): tr|A0A143YIQ3|A0A143YIQ3_9LACT GTP cyclohydrolase 1 OS= Trichococcus palustris OX=140314 GN=folE PE=3 SV=1
MDLEKIESAVYQILEAIGEDPNRSGLQDTPKRVARMYAEIFSGVEKDPAEHAKVVFHEDTDEIVLVKDIPFYSTCEHHLVPFFGVGHIAYMPKDGQVIGLSKLARILDEVSKKPQIQERITTTVADILMEHLDPQGVMVVLEAEHMCMTMRGVKKPGSKTVTSAVRGAFKQSFKSRSEVLELIKL

SEQ ID NO: 16144 - protein, 185 aa, Trichococcus pasteurii
  misc_feature (1)..(185): tr|A0A1W1II14|A0A1W1II14_9LACT GTP cyclohydrolase 1 OS= Trichococcus pasteurii OX=43064 GN=folE PE=3 SV=1
MDLEKIETAVQMILEAIGEDPNRSGLQDTPKRVARMYAEIFSGVEKDPADHAKVVFHEDTDEIVLVKDIPFYSTCEHHLVPFFGVGHIAYMPKDGQVIGLSKLARILDEVSKKPQIQERITTTVADILMEHLEPQGVMVVLEAEHMCMTMRGVKKPGSKTVTSAVRGAFKQSFKSRSEVLELIKL

SEQ ID NO: 16145 - protein, 203 aa, Trichococcus pasteurii
  misc_feature (1)..(203): tr|A0A1W1IFV2|A0A1W1IFV2_9LACT GTP cyclohydrolase 1 OS= Trichococcus pasteurii OX=43064 GN=folE PE=3 SV=1
MAIDVQAIEEHIRGILIALGDDPEREGLKDTPKRVAKMYEDIYKGMCYTNDEIAEMLNTTFEDDLAFGNAENDLVFMKDIEIFSHCEHHLALMYNMKVAVAYIPKQKVIGLSKIARIADMAGRRLQLQERIGSDIAEILEKITESEDVAVIIQGEHGCMTTRGIQKPGAKTITTTLRGRFNTDPMLNNKLMMLYTKDSSNQFG

SEQ ID NO: 16146 - protein, 185 aa, Trichococcus patagoniensis
  misc_feature (1)..(185): tr|A0A2T5IQW0|A0A2T5IQW0_9LACT GTP cyclohydrolase 1 OS= Trichococcus patagoniensis OX=382641 GN=folE PE=3 SV=1
MDLEKIETAVQMILEAIGEDPNRSGLQDTPKRVARMYAEIFSGVEKDPADHAKVVFHEDTDEIVLVKDIPFYSTCEHHLVPFFGVGHIAYMPKDGQVIGLSKLARILDEVSKKPQIQERITTTVADILMEHLQPQGVMVVLEAEHMCMTMRGVKKPGSKTVTSAVRGAFKQSFKSRSEVLELIKL

SEQ ID NO: 16147 - protein, 185 aa, Trichococcus sp.
  misc_feature (1)..(185): tr|A0A5C5E891|A0A5C5E891_9LACT GTP cyclohydrolase 1 OS= Trichococcus sp. SKBG OX=2585775 GN=folE PE=3 SV=1
MDLEKIETAVHMILEAIGEDPNRSGLQDTPKRVARMYAEIFSGVEKDPADHAKVVFHEDTDEIVLVKDIPFYSTCEHHLVPFFGVGHIAYMPKDGQVIGLSKLARILDEVSKKPQIQERITTTVADILMEHLQPQGVMVVLEAEHMCMTMRGVKKPGSKTVTSAVRGAFKQSFKSRSEVLELIKL

SEQ ID NO: 16148 - protein, 185 aa, Trichococcus sp.
  misc_feature (1)..(185): tr|A0A143YI81|A0A143YI81_9LACT GTP cyclohydrolase 1 OS= Trichococcus sp. ES5 OX=872292 GN=folE PE=3 SV=1
MDLEKIEVAVQMILEAIGEDPKRSGLQDTPKRVARMYAEIFSGLEKDPADHAKVIFHEDTDEIVLVKDIPFYSTCEHHLVPFFGVGHIAYMPKDGQVIGLSKLARILDEVSKKPQIQERITTTVADILMEHLEPKGVMVVLEAEHMCMTMRGVKKPGSKTVTSAVRGGFKQSFKSRSEVLELIKL

SEQ ID NO: 16149 - protein, 243 aa, Trichodesmium erythraeum
  misc_feature (1)..(243): tr|Q117H2|Q117H2_TRIEI GTP cyclohydrolase 1 OS=Trichode smium erythraeum (strain IMS101) OX=203124 GN=folE PE=3 SV=1
MTQSSSNRSNSKNTLNMNGVKTSDANMTSQISYRPERISSSNGQSIKQKLSTEDSNERMKEAVRTILLSVEENPEREGLLNTPKRFAEAMQFLTSGYSQSLEEIVNGAIFDEGHNEMVLVRDINFFSLCEHHMLPFMGKAHIAYIPNQKVVGLSKLARVVDMYSRRLQVQERLNRQIAEAIQTILEPKGVAVVIEATHISMVMRGVQKPGSWTVTSAMVGLFKEDQKTREEYLNLIRHQPTFF

SEQ ID NO: 16150 - protein, 212 aa, Trichodesmium erythraeum
  misc_feature (1)..(212): tr|Q10VY5|Q10VY5_TRIEI GTP cyclohydrolase 1 OS=Trichode smium erythraeum (strain IMS101) OX=203124 GN=folE PE=3 SV=1
MNLPTVPDFVSPNDLKTKYQTSVTEAEMVQAVRTLLIGLGENPDREGLLDTPKRVVKALKFLTSGYNQSLDELLNGAVFSEDTSEMVLVRDIDLFSSCEHHILPIIGRAHVAYIPNGKVIGLSKIARICEMYARRLQVQERLTAQIADALQGLLRPLGVAVVVEATHMCMVMRGVQKTGSWTTTSAMRGVFADDVKTRQEFMSLIKHSHNFH

SEQ ID NO: 16151 - protein, 235 aa, Trichormus variabilis
  misc_feature (1)..(235): tr|Q3MA34|Q3MA34_TRIV2 GTP cyclohydrolase 1 OS=Trichorm us variabilis (strain ATCC 29413 / PCC 7937) OX=240292 GN=folE PE=3 SV=1
MTIASSNGSNRAQSPLIPDLAEAINTRPDRNTHNGREPELHQPSEQDMDSMMDAVRSILVGVGEDPEREGLLKTPKRVAEAMRFLTSGYNQSLEELLNGAVFDEGHNEMVLVRDINFFSLCEHHMLPFMGRAHVAYIPNQKVVGLSKLARIVEMYSRRLQVQERLTRQIAEAVQTILEPQGVAVVMEASHMCMVMRGVQKPGSWTVTSAMLGVFQEEQKTREEFFNLIRHQPSFF

SEQ ID NO: 16152 - protein, 216 aa, Trichormus variabilis; identical to SEQ ID NO: 4554
  misc_feature (1)..(216): tr|Q3MBR5|Q3MBR5_TRIV2 GTP cyclohydrolase 1 OS=Trichorm us variabilis (strain ATCC 29413 / PCC 7937) OX=240292 GN=folE PE=3 SV=1

SEQ ID NO: 16153 - protein, 269 aa, Trinickia caryophylli
  misc_feature (1)..(269): tr|A0A1X7EGN8|A0A1X7EGN8_TRICW GTP cyclohydrolase FolE2 OS=Trinickia caryophylli OX=28094 GN=folE2 PE=3 SV=1
MNHMNPAFVMPDVQSSVDTRQIAIQRVGVKGVRHPLTVRTLRGDAQPTVGTWNLDVHLPADQKGTHMSRFVALLEDGCAPLDSATMRAMLAAMLEKLEASAGRIEVTFPYFVSKTAPVSGVSSLLDYEVTMTGELRDGALRAFLQVLVPVTSLCPCSKEISQYGAHNQRSHVTIRAELAADMPAEELIRIAEEEASCELWGLLKRPDEKFVTERAYENPKFVEDLVRDVARRLDADERVAAYVLEAENFESIHNHSAYAVIERDKRHPA

SEQ ID NO: 16154 - protein, 233 aa, Trinickia caryophylli
  misc_feature (1)..(233): tr|A0A1X7FMY6|A0A1X7FMY6_TRICW GTP cyclohydrolase 1 OS= Trinickia caryophylli OX=28094 GN=folE PE=3 SV=1
MSSGSRTKDKGEPKAKTKARANRAIDTAGEAAGEAAKRPTREQAEDAVRVLLRWAGDDPEREGLRDTPARVARAYEEFFSGYGLDPREILARTFSEVDGYDEMVVLKDIRFESYCEHHMVPIIGRAHVAYLPKHRVVGISKLARLVDAFAKRLQIQEKMTVQIADTLNEILQPRGVGVILEAAHQCITTRGIHKPGVAMVTSRMLGSFRTDPSTRREFLAIVGNPGSLAVPNS

SEQ ID NO: 16155 - protein, 198 aa, Trinickia soli
  misc_feature (1)..(198): tr|A0A2N7WA65|A0A2N7WA65_9BURK GTP cyclohydrolase 1 OS= Trinickia soli OX=380675 GN=folE PE=3 SV=1
MVRPTRSEAEDAVRVLLRWAGDDPAREGLLDTPARVVRAYEEFFKGYSHDPREILARTFSEVDGYDEMVVLKDIRFESYCEHHMVPIIGRAHVAYLPDHRVVGISKLARLVDAFAKRLQIQEKMTVQIADTLNEILQPKGVGVILEAAHQCISTRGVHKPGVQMVTSRMLGSFRDDPSTRREFLAIVGNLTGTGIPNT

SEQ ID NO: 16156 - protein, 272 aa, Trinickia soli
  misc_feature (1)..(272): tr|A0A2N7VI12|A0A2N7VI12_9BURK GTP cyclohydrolase FolE2 OS=Trinickia soli OX=380675 GN=folE2 PE=3 SV=1
MNQMNPAFVMPDVQSTVDTRQIPIQRVGVKGVRHPLMVRTPSGDAQPTVGTWNLDVHLPAHQKGTHMSRFVALLEGNKAPLEAATFRALLAEMLEKLEATSGRIEVTFPYFVSKTAPVSGVSSLLDYEVTLAGQARDGDVRTFLRVLVPVTSLCPCSKEISQYGAHNQRSHVTIEVELLADLPVEELIRMAEEEASCELWGLLKRPDEKFVTERAYENPKFVEDLVRDVAQRLNRDERIVSYVLEAENFESIHNHSAYAVIEHDKRGAMAAV

SEQ ID NO: 16157 - protein, 212 aa, Trinickia sp.
  misc_feature (1)..(212): tr|A0A4V5PGE4|A0A4V5PGE4_9BURK GTP cyclohydrolase 1 OS= Trinickia sp. 7GSK02 OX=2571161 GN=folE PE=3 SV=1
MTKGSGADQDQSEATSRPTREEAEAAVRVLLRWAGDDPNREGLLETPSRVVRSYEEFFSGYAQDPREILARTFSEVDGYDEMIVLKDIRFESYCEHHMVPIIGRAHVAYLPEHRVVGISKLARLVDAFAKRLQIQEKMTAQIADTLNEILQPKGVGVILEAAHQCMSTRGVHKPGVEMVTSRMLGTFRTDPSTRREFLSIVSNSTAYNVPNT

SEQ ID NO: 16158 - protein, 272 aa, Trinickia sp.
  misc_feature (1)..(272): tr|A0A4U1IER4|A0A4U1IER4_9BURK GTP cyclohydrolase FolE2 OS=Trinickia sp. 7GSK02 OX=2571161 GN=folE2 PE=3 SV=1
MNQMNPAFVMPDVQSTVDTRQIPIQRVGVKAVRHPLTVRTPDGEIQPTVGTWNLDVHLPAEQKGTHMSRFVALLEENKAPLEPAVFRTMLASMLERLEAKAGRIEVTFPYFVSKVAPVSGVKSLLDYEVTLTGDTRNGMTRLFLRVLVPVTSLCPCSKKISQYGAHNQRSHVTINAELSGDLPVEELIRIAEEEASCELWGLLKRPDEKFVTERAYENPKFVEDLVRDVAKRLNDEGRVVAYVLEAENFESIHNHSAYAVIEHDKRDAIDGV

SEQ ID NO: 16159 - protein, 270 aa, Trinickia symbiotica
  misc_feature (1)..(270): tr|A0A2N7X636|A0A2N7X636_9BURK GTP cyclohydrolase FolE2 OS=Trinickia symbiotica OX=863227 GN=folE2 PE=3 SV=1
MNLMNPAFAMPDVQSSPDTRQISIQRVGVKGVRHPLSVRTANGDAQATVGTWNLDVHLPADQKGTHMSRFVALLEESKAPLESATFRAMLAAMLAKLEAPAGRIEVSFPYFVSKTAPVSGVSSLLDYEVTMTGEMRDGALRTFVQVLVPVTSLCPCSKEISEYGAHNQRSHVTIRAELTGDMSAEELIRIAEDEASCELWGLLKRPDEKFVTERAYENPKFVEDLVRDVAQRLNADERIVAYTLEAENFESIHNHSAYAVIEHDKRQPAA

SEQ ID NO: 16160 - protein, 211 aa, Trinickia symbiotica
  misc_feature (1)..(211): tr|A0A2T3XQM5|A0A2T3XQM5_9BURK GTP cyclohydrolase 1 OS= Trinickia symbiotica OX=863227 GN=folE PE=3 SV=1
MNKRDNDLAPEEASARPTRMDAEEAVRTLIRWAGDDPDREGLIQTPARVVRAYREFFSGYQSDPMQILATTFSEVDGYDEMVVLKDIRFESYCEHHMVPIIGRAHVAYLPEHRVVGISKLARLVDVYAKRLQIQEKMTVQIADALNTVLQPKGVAVILEAAHQCMSTRGVHKPGASLVTSRMLGAFRDDPSTRREFLAIVGNGTIMPLPNS

SEQ ID NO: 16161 - protein, 367 aa, Tritonibacter horizontis
  misc_feature (1)..(367): tr|A0A132C183|A0A132C183_9RHOB GTP cyclohydrolase FolE2 OS=Tritonibacter horizontis OX=1768241 GN=folE2 PE=3 S V=1
MNIHSRDVNGTPDRTEAEEALAVLRHWAAKASETEVAQLDPAIARLLPGRADDAYPDLKRQYPDSFDADDAYRASLPDLQNGPASLIRGAREQIQHVGISNFRLPIRFHTRDNGDLALETSVTGTVSLDAEKKGINMSRIMRSFYRHAEKVFSFRVMEAALEDYLADLDSGDARLQMRFSFPVKVDSLRSGLMGYQYYDVALELVQTGGQRHKIVHLDYVYSSTCPCSLELSEHARQTRGQLATPHSQRSVARISIQLEPDAPCLWFEDLIDHCRRAVPTETQVMVKREDEQAFAELNAANPMFVEDAARLFCEALQSDPRIGDFRVVASHQESLHSHDAVSVLTRGAMFANQSLDPQLFATLIHRG

SEQ ID NO: 16162 - protein, 181 aa, Tropheryma whipplei
  misc_feature (1)..(181): tr|Q83FV8|Q83FV8_TROWT GTP cyclohydrolase I OS=Trophery ma whipplei (strain Twist) OX=203267 GN=folE PE=4 SV=1
MTKLCRFESGSAQSAVANLLSALGQDVGRLKETPSIASSGLESLISGSETNPADCLVDLIPNTQKGIVILRDIPFRSICEHHLLPFVGTANLLYEPGKFLAGLGNLTSLVRCAARRLSIQERVTDQIADAIYTGLCARRVLVSLAARHTCILDEAGNTEVTTFAHRGIGDADIISFMTIIR

SEQ ID NO: 16163 - protein, 366 aa, Tropicibacter naphthalenivorans
  misc_feature (1)..(366): tr|A0A0P1G366|A0A0P1G366_9RHOB GTP cyclohydrolase FolE2 OS=Tropicibacter naphthalenivorans OX=441103 GN=folE2 PE=3 SV=1
MNMHTPDIDRKPGRGDAEAALAVLREWAQGAASEEIETLDPALRQFVRDAEPSDYPALRREYPEDFVVEPAYKDSLPDLQNGPASLIKGANRAIQHVGISNFRLPIQYHTRDNGDLTLETSVTGTVSLEADKKGINMSRIMRSFYAHAEKTFSFEVIEAALDDYKTDLESFDARINMRFSFPMKVQSLRSGLSGYQYYDIALELVETAGVRRKIVHLDFVYSSTCPCSLELSEHARRERGQLATPHSQRSVARISVELVGPTCLWFEDLIEMCRAQVPTETQVMVKREDEQAFAELNAANPIFVEDAARLFAEALEDDPRIGDFRVLASHQESLHSHDAVSVLTEGDTFAADSLDPRLFASLFHVG

SEQ ID NO: 16164 - protein, 351 aa, Tropicibacter phthalicicus
  misc_feature (1)..(351): tr|A0A238JB34|A0A238JB34_9RHOB GTP cyclohydrolase FolE2 OS=Tropicibacter phthalicicus OX=1037362 GN=folE2 PE=3 SV=1
MNIQSDIGEKPSREEAEQALALLRRYAGNPAALAELTGAYPELHNVYPDNFVVDAAYKETLPDLQNGPASLIRGAKRIIQHVGISNFRLPIGYHTRDNGDLTLETSVTGTVSLEADKKGINMSRIMRSFYAHSEKTFSFEVMEAALDDYKSDLESFDARIQMRFSFPMKVDSLRSGLSGFQYYDIALELVEVAGLRRKILHLDYVYSSTCPCSLELSEHARRERGQLATPHSQRSVARISVEVLPGECLWFEDLIDLCRRAVPTETQVMVKREDEQAFAELNAANPIFVEDAARLFAQGLEDDPRIGDFRVVASHQESLHSHDAVSVLTEGELFSNDSLDPKLFSTLFHVG

SEQ ID NO: 16165 - protein, 367 aa, Tropicimonas sediminicola
  misc_feature (1)..(367): tr|A0A239FN56|A0A239FN56_9RHOB GTP cyclohydrolase FolE2 OS=Tropicimonas sediminicola OX=1031541 GN=folE2 PE=3 SV=1
MNYITADFDRDPTREDARRALEILRQWADAASDVEISDLDPAVVRLKAGGAVDAYPDLSRSYPADFEADAAYKAGMPDLQNGPESLIRGARRQIQHVGISNFRLPIRFHSREGADVALDTSVTGSVSLDADKKGINMSRIMRSFYRSAERTFSFEVIEETLEAYKSDLESFDARIIMRFAFPMKVQSLRSGLEGYQYYDMALEVVDRDGVRTKILHLDYVYSSTCPCSLELSEHARRTRGQLATPHSQRSVARISMVVDPEAGCLWFEDIVEMCRRAVPTETQVMVKREDEQAFAELNAANPIFVEDAARLFAEALQADARIGDFRVVASHQESLHSHDAISVLTEGPTFDGVGLEPHLFTSMIHAR

SEQ ID NO: 16166 - protein, 205 aa, Truepera radiovictrix
  misc_feature (1)..(205): tr|D7CRJ9|D7CRJ9_TRURR GTP cyclohydrolase 1 OS=Truepera radiovictrix (strain DSM 17093 / CIP 108686 / LMG 2292 5 / RQ-24) OX=649638 GN=folE PE=3 SV=1
MHQIPPPAPSPLELDDPSPLPEAQALEATVARLIAQLGEDVTREGLQRTPARVARSLRFLTSGYAQDAQSVVRGALFRAEGAELVVVKGLEFYSLCEHHLLPFFGRVHIGYVPGEHILGLSKFARVVDVFARRLQVQERLTVQVADALEGVLRPRGVGVVVEASHLCMMMRGVQQQGSSTRTSVLRGVLGDPGVREEFLRAINTP

SEQ ID NO: 16167 - protein, 197 aa, Trueperaceae bacterium
  misc_feature (1)..(197): tr|A0A2E2ULU2|A0A2E2ULU2_9DEIN GTP cyclohydrolase 1 OS= Trueperaceae bacterium OX=2026798 GN=folE PE=3 SV=1
MNSYLPETDDFDETGECSLGHLVAELIAGLGEDISREGLAKTPQRVERSLRYLTSGYRVKIDDVINGALFAAEGSEMVVVKGIEFYSMCEHHMLPFFGKAHIAYIPNERILGLSKFARVIDLYARRMQVQERLTLQIADILIEVLEPQGLAVVMEASHLCMMMRGVEKQGGTTRTSAMRGVFKNDARTRQEFLEAIS

SEQ ID NO: 16168 - protein, 260 aa, Trueperella bernardiae
  misc_feature (1)..(260): tr|A0A0W1KLE9|A0A0W1KLE9_9ACTO Putative GTP cyclohydrol ase 1 type 2 OS=Trueperella bernardiae OX=59561 GN=AQZ5 9_00175 PE=4 SV=1
MDIVSVMNEHFPPALAEDWDRVGLVVGDPADEVTKVGFAVDPCGAVVDEAIERGAQMLITHHPLYLRGTSSVATDTAKGAWVHKLIRNGVALFAAHTNADSAANGSAVALAELLGLCDTRPIEPNAEHPELGLGRVGELELTMSVRELALRLQVLLPETPAGITIGGDPERIVKTVAVSPGSGDSFLSAANRAGADVYITADLRHHPATDHLWAGGCALIGATHFASEWPVLPKMRDAVAAAGVDTYISTLITDPWIERL

SEQ ID NO: 16169 - protein, 186 aa, Trueperella bernardiae
  misc_feature (1)..(186): tr|A0A0W1KJR7|A0A0W1KJR7_9ACTO GTP cyclohydrolase 1 OS= Trueperella bernardiae OX=59561 GN=folE PE=3 SV=1
MSVDVERVQAAVRELLLAIGEDPDRDGLIDTPARVARSYAEIFSGLDEDPGEHLEKVFDVGHQEMVLVRDIPVYSMCEHHLLPFHGVAHVGYIPGADGRVTGLSKLARLVEGYAHRPQVQERLTTQVAEAIYERLGATGVIVVVEAEHLCMSMRGVRKPGSRTVTSAVRGTMHDPATRAEAMSLVR

SEQ ID NO: 16170 - protein, 195 aa, Trueperella bialowiezensis
  misc_feature (1)..(195): tr|A0A448PFH9|A0A448PFH9_9ACTO GTP cyclohydrolase 1 OS= Trueperella bialowiezensis OX=312285 GN=folE PE=3 SV=1
MTSKYDAERVENAVRELLYGIGEDPDRDGLRDTPSRVARSYAEIFGGLHDDPAEHLDKVFDVGHQEMVLVRDIPMYSMCEHHLLPFHGVAHVGYIPAGDGRVTGLSKLARLVEGYARRPQVQERLTSNIADAIDSRLGASGVIVVVEAEHLCMSMRGVRKPGSKTVTSAVRGSMHDPATRSEAMSLIMAGTSHRG

SEQ ID NO: 16171 - protein, 187 aa, Trueperella pyogenes
  misc_feature (1)..(187): tr|X4RBK7|X4RBK7_9ACTO GTP cyclohydrolase 1 OS=Truepere lla pyogenes OX=1661 GN=folE PE=3 SV=1
MIDSARAQAAVRELLLAIGEDPDRDGLKDTPARVARSYAEIFSGLGEDPGSHLEKVFDVGHQELVLVRDIPVYSMCEHHLLPFHGVAHVGYIPGPDGRVTGLSKLARLVEGFAHRPQVQERLTTQVADTLAERIGADGVIVVVEAEHLCMSMRGVRKPGSRTVTSAVRGSLHDPATRAEAMSLIMAG

SEQ ID NO: 16172 - protein, 187 aa, Trueperella pyogenes
  misc_feature (1)..(187): tr|A0A380MF76|A0A380MF76_9ACTO GTP cyclohydrolase 1 OS= Trueperella pyogenes OX=1661 GN=folE PE=3 SV=1
MIDSTRAQAAVRELLLAIGEDPDRDGLKDTPARVARSYAEIFSGLGEDPGSHLEKVFDVGHQELVLVRDIPVYSMCEHHLLPFHGVAHVGYIPGPDGRVTGLSKLARLVEGFAHRPQVQERLTTQVADTLAERIGADGVIVVVEAEHLCMSMRGVRKPGSRTVTSAVRGSLHDPATRAEAMSLIMAG

SEQ ID NO: 16173 - protein, 198 aa, Tsukamurella paurometabola
  misc_feature (1)..(198): tr|A0A3P8MCL4|A0A3P8MCL4_TSUPA GTP cyclohydrolase 1 OS= Tsukamurella paurometabola OX=2061 GN=folE PE=3 SV=1
MGKDSGAAVAPFDHARAVAAVRELLIAVGEDPDREGLQKTPERVARAFQEVFAGLHTDPDTVLDTTFGEDHDELVLVKDIPMYSTCEHHLVSFHGVAHVGYLPGESGRVTGLSKLARVVDLYAKRPQVQERLTAQIADALVRKLDPRGVIVVIEAEHLCMAMRGIRKPGASTTTSAVRGAFKDSATSRAEALELILRR

SEQ ID NO: 16174 - protein, 198 aa, Tsukamurella paurometabola
  misc_feature (1)..(198): tr|D5USD3|D5USD3_TSUPD GTP cyclohydrolase 1 OS=Tsukamur ella paurometabola (strain ATCC 8368 / DSM 20162 / JCM 10117 / NBRC 16120 / NCTC 13040) OX=521096 GN=folE PE=3 SV=1
MAAGDGAAIAPFDHERAVAAVRELLIAVGEDPEREGLKKTPERVARAFQEVFGGLHTDPDSVLDTTFGEDHDELVLVKDIPMYSTCEHHLVSFHGVAHVGYLPGPSGRVTGLSKLARVVDLYAKRPQVQERLTAQIADAVVRKLDPRGVIVVIEAEHLCMAMRGIRKPGASTTTSAVRGAFKDSATSRAEALELILRR

SEQ ID NO: 16175 - protein, 196 aa, Tsukamurella pseudospumae
  misc_feature (1)..(196): tr|A0A137ZYV1|A0A137ZYV1_9ACTN GTP cyclohydrolase 1 OS= Tsukamurella pseudospumae OX=239498 GN=folE PE=3 SV=1
MGEGAAIAAFDHERAVAAVRELLIAVGEDPDREGLLKTPERVARAFEEVFGGLHVDPDAVLDTTFGEDHDELVLVKDIPMYSTCEHHLVSFHGVAHVGYLPGESGRVTGLSKLARVVDLYAKRPQVQERLTAQIADALVRKLDPRGVIVVIEAEHLCMAMRGIRKPGASTTTSAVRGAFKDSATSRAEALELILRR

SEQ ID NO: 16176 - protein, 198 aa, Tsukamurella pulmonis
  misc_feature (1)..(198): tr|A0A1H1HIR8|A0A1H1HIR8_9ACTN GTP cyclohydrolase 1 OS= Tsukamurella pulmonis OX=47312 GN=folE PE=3 SV=1
MGRNSGAAIAPFDHERAVAAVRELLIAVGEDPDREGLQKTPERVARAFREVFGGLHVDPDTVLDTTFGEDHDELVLVKDIPMYSTCEHHLVSFHGVAHVGYLPGESGRVTGLSKLARVVDLYAKRPQVQERLTAQIADALMRKLDPRGVIVVIEAEHLCMAMRGIRKPGASTTTSAVRGAFKDSATSRAEALDLILRR

SEQ ID NO: 16177 - protein, 198 aa, Tsukamurella sp.
  misc_feature (1)..(198): tr|A0A5C5S553|A0A5C5S553_9ACTN GTP cyclohydrolase 1 OS= Tsukamurella sp. HKU72 OX=2592068 GN=folE PE=3 SV=1
MGDHRGAAVAPFDHERAVAAVRELLIAVGEDPDREGLKKTPERVARAFQEVFGGLHTDPDTVLDTTFGEDHDELVLVKDIPMYSTCEHHLVSFHGVAHVGYLPGESGRVTGLSKLARVVDLYAKRPQVQERLTAQIADALVRKLDPRGVIVVIEAEHLCMAMRGIRKPGASTTTSAVRGAFKDSATSRAEALELILRR

SEQ ID NO: 16178 - protein, 198 aa, Tsukamurella sp.
  misc_feature (1)..(198): tr|A0A5C5RII3|A0A5C5RII3_9ACTN GTP cyclohydrolase 1 OS= Tsukamurella sp. HKU70 OX=2591848 GN=folE PE=3 SV=1
MAHDNGAAIAPFDHERAVAAVRELLIAVGEDPDREGLQKTPERVAKAFQEVFSGLHTDPDEVLNTTFGEDHDELVLVKDIPMYSTCEHHLVSFHGVAHVGYLPGASGRVTGLSKLARVVDLYAKRPQVQERLTAQIADALVRKLDPRGVIVVIEAEHLCMAMRGIRKPGASTTTSAVRGAFKDSATSRAEALELILRR

SEQ ID NO: 16179 - protein, 198 aa, Tsukamurella tyrosinosolvens
  misc_feature (1)..(198): tr|A0A1H4M9I2|A0A1H4M9I2_TSUTY GTP cyclohydrolase 1 OS= Tsukamurella tyrosinosolvens OX=57704 GN=folE PE=3 SV=1
MGKDSGAAVAPFDHERAAAAVRELLIAVGEDPDREGLQKTPERVAKAFAEMFGGLHTDPDDVLNTTFGEDHDELVLVKDIPMYSTCEHHLVSFHGVAHVGYLPGTSGRVTGLSKLARVVDLYAKRPQVQERLTAQIADALVRKLDPRGVIVVIEAEHLCMAMRGIRKPGASTTTSAVRGAFKDSATSRAEALELILRR

SEQ ID NO: 16180 - protein, 187 aa, Tumebacillus algifaecis
  misc_feature (1)..(187): tr|A0A223D1B3|A0A223D1B3_9BACL GTP cyclohydrolase 1 OS= Tumebacillus algifaecis OX=1214604 GN=folE PE=3 SV=1
MAFDYDKLQSAVRMLLEAVGENPDREGLLDTPKRVAKMYAEVFEGLGKNPEDELSAIFNEMHEEVVIVKDIPFFSMCEHHLVPFYGKAHVAYIPRNGQVTGLSKLARVVETVARQPQLQERITSTVADTLVNKLNPHGVAVIVEAEHMCMTMRGVKKPGASTITTSVRGIYQESAGARAEVFSLMRG

SEQ ID NO: 16181 - protein, 187 aa, Tumebacillus avium
  misc_feature (1)..(187): tr|A0A1Y0IR55|A0A1Y0IR55_9BACL GTP cyclohydrolase 1 OS= Tumebacillus avium OX=1903704 GN=folE PE=3 SV=1
MAFDFDKAQTAVRMLLEAVGEDPDREGLLDTPKRVAKMYAEVFEGLGKNPEDELSAIFNEMHEEVVIVKDIPFFSMCEHHLVPFYGKAHVAYIPRNGQVTGLSKLARVVETVARQPQLQERITSTVADTLVNKLNPHGVAVIVEAEHMCMTMRGVKKPGASTITTSVRGIYQASSEARAEVFSLMRG

SEQ ID NO: 16182 - protein, 188 aa, Tumebacillus flagellatus
  misc_feature (1)..(188): tr|A0A074MF83|A0A074MF83_9BACL GTP cyclohydrolase 1 OS= Tumebacillus flagellatus OX=1157490 GN=folE PE=3 SV=1
MKEVNLGQIEEAVRMILAAVGEDPNREGLLDTPKRVAKMYAEVFEGLGKNPEDELTALFNEMHEEVVIVKDIPFFSMCEHHLVPFYGKAHVAYIPRGGRVTGLSKLARVVETVARQPQLQERITATIADTLVNKIQPHGVAVIVEAEHMCMTMRGVKKPGASTITTAVRGLYHEDPQARAEVFSLMRG

SEQ ID NO: 16183 - protein, 189 aa, Tumebacillus permanentifrigoris
  misc_feature (1)..(189): tr|A0A316DBS1|A0A316DBS1_9BACL GTP cyclohydrolase 1 OS= Tumebacillus permanentifrigoris OX=378543 GN=folE PE=3 SV=1
MMKDVNFNQIEEAVRMILEAVGEDPNREGLLDTPKRVAKMYAEVFSGLGKNPEDELSALFNEMHEEVVIVKDIPFFSMCEHHLVPFYGKAHVAYIPRGGRVTGLSKLARVVETVARQPQLQERITSTIADSLVNKIDPHGVAVIVEAEHMCMTMRGVRKPGASTITTSVRGIYQADPQARAEVFSLMRG

SEQ ID NO: 16184 - protein, 187 aa, Tumebacillus sp.
  misc_feature (1)..(187): tr|A0A4R2R8F5|A0A4R2R8F5_9BACL GTP cyclohydrolase 1 OS= Tumebacillus sp. BK434 OX=2512169 GN=folE PE=3 SV=1
MAFDFDKAQVAVRMLLEAVGEDPNREGLLDTPKRVAKMYAEVFEGLGKNPEDELSAIFNEMHEEVVIVKDIPFFSMCEHHLVPFYGKAHVAYIPRNGQVTGLSKLARVVETVARQPQLQERITSTVADTLVNKLNPHGVAVIVEAEHMCMTMRGVKKPGASTITTSVRGIYQESSEARAEVFSLMRG

SEQ ID NO: 16185 - protein, 187 aa, Turicibacter sanguinis
  misc_feature (1)..(187): tr|A0A173T2I4|A0A173T2I4_9FIRM GTP cyclohydrolase 1 OS= Turicibacter sanguinis OX=154288 GN=folE_2 PE=3 SV=1
MSVDKNKIEEAVKMILEAIGENPSREGLIDTPARVARMYEEVFSGLHDDPKKHLQVYFSEEYDQYVLVQDIVFHSMCEHHLLPFFGRVHVAYYPENDAVVGLSKIPRVVDIVSKRPQLQERMGKQIGDAIVETLQSKGVMVVIEAEHMCMVMRGIKKPGAITKTIYSTGVFKEEIALRQEVLNLIKG

SEQ ID NO: 16186 - protein, 187 aa, Turicibacter sanguinis
  misc_feature (1)..(187): tr|A0A174EFU2|A0A174EFU2_9FIRM GTP cyclohydrolase 1 OS= Turicibacter sanguinis OX=154288 GN=folE_2 PE=3 SV=1
MSVDKNKIETAVRMILEAVGENPDREGIVDTPARVARMYEEVFGGLHEDPSKHLQVYFSEEYDQYVLVQDIVFHSMCEHHLLPFFGKVHVAYYPENNEVVGLSKIARVTDVVSRRPQLQERMGKQIGDTIANAIKSKGVMVVIEAEHMCMVMRGIKKPGAMTKTIYSTGIFKEDLAMRQEVLNLIKG

SEQ ID NO: 16187 - protein, 187 aa, Turicibacter sp.
  misc_feature (1)..(187): tr|A0A120IDN5|A0A120IDN5_9FIRM GTP cyclohydrolase 1 OS= Turicibacter sp. H121 OX=1712675 GN=folE PE=3 SV=1
MSVDKNKIETAVRMILEAVGENPDREGIVDTPARVARMYEEVFGGLHEDPSKHLQVYFSEEYDQYVLVQDIVFHSMCEHHLLPFFGKVHVAYYPENNEVVGLSKIARVTEVVSRRPQLQERMGKQIGDTIANAIKSKGVMVVIEAEHMCMVMRGIKKPGAMTKTIYSTGIFKEDLAMRQEVLNLIKG

SEQ ID NO: 16188 - protein, 198 aa, Turicibacter sp.
  misc_feature (1)..(198): tr|A0A109RMM7|A0A109RMM7_9FIRM GTP cyclohydrolase 1 OS= Turicibacter sp. H121 OX=1712675 GN=folE PE=3 SV=1
MKRQIDIEKISSCIREILIALGDDPDREGLRDTPKRVAKMYEEVFAGMTLSNDEIAQLFGTTFDEEDMVEQSSNRCVIVRDIPIFSYCEHHLALMYNMKVSVAYLPKEKMIGLSKIARIADMVGRRLQLQERIGEEIAEIVEKITESDAIIVMIHGEHSCMTSRGIKKPGTLTTTVTYRGERINHDSDLRQELLMLMK

SEQ ID NO: 16189 - protein, 267 aa, Turicimonas muris
  misc_feature (1)..(267): tr|A0A227KP93|A0A227KP93_9BURK GTP cyclohydrolase FolE2 OS=Turicimonas muris OX=1796652 GN=folE2 PE=3 SV=1
MTSNDLMVLPDVQSSLDRRNIPIEKVGVKGIKTPILVKTVLGSQHTVADVEMYVSLPADKKGTHMSRFWTLLESINKPFCPTLLTDVMAQMLSSLKADGGYISLTFPFFMEKAAPVSELHSTMNYQVRLVAEAKNGHIKINQKVEAPVTSLCPCSKEISKYGAHNQRSLVSINAELETNFAIEKQIEMIESSASCPVWGLLKRSDEKYVTEHAYENPKFVEDLVRDVAILCQDEPAILSFTVEAENFESIHNHSAFASITFSKKAEE

SEQ ID NO: 16190 - protein, 275 aa, Turneriella parva
  misc_feature (1)..(275): tr|I4B1W4|I4B1W4_TURPD GTP cyclohydrolase FolE2 OS=Turn eriella parva (strain ATCC BAA-1111 / DSM 21527 / NCTC 11395 / H) OX=869212 GN=folE2 PE=3 SV=1
MSSVQTVATGATAPLVDVQSSADTRRIAIDKVGIKSIRYPIQIRDKTGDTQTTVAELNMYVYLPQHFKGTHMSRFVEILERKKHLDVPAFKALLPEMLERLESRAGQIEMRFTYFVNKTAPVSGVQSLMDYDVTFIGKCEEGITDLQIKVAVPVTSLCPCSKEISQYGAHNQRSHITITARLSEFAEGHNTLWIEDIIRIAEESASCELYGLLKRPDEKYVTEKAYENPKFVEDLVRDVAHRLNLDDRISHYIAEAENFESIHNHSAYALIEKQK

SEQ ID NO: 16191 - protein, 181 aa, Turneriella parva
  misc_feature (1)..(181): tr|I4B1X1|I4B1X1_TURPD GTP cyclohydrolase I OS=Turnerie lla parva (strain ATCC BAA-1111 / DSM 21527 / NCTC 1139 5 / H) OX=869212 GN=Turpa_0626 PE=4 SV=1
MLIKDWLAANITKDVRALDWFDDAEAEPRIRKAYQELLSGYSIDPSTLLKTTREIGKNEKFTGSVTVRDINYFSICAHHFLPFYGKVDITYEPGEIIIGLGKFPRLVQAYSRRFQIQEDMVKEIAEEIMTSGKARGVYVKSTGRHMCMCSRGPSDHTAETDTEFAMGTLLERYLQPPGRAR

SEQ ID NO: 16192 - protein, 244 aa, Tychonema bourrellyi
  misc_feature (1)..(244): tr|A0A2G4F199|A0A2G4F199_9CYAN GTP cyclohydrolase 1 OS= Tychonema bourrellyi FEM_GT703 OX=2040638 GN=folE PE=3 SV=1
MTITSNNGSNGSNTLSTDSMKLLETPDKNLPCITTRPDRNSSNGQESSVPIPTEVGQEEMMEAVRTMLLGIGENPEREGLLKTPKRVAEAMRFLTSGYSQSLEELLNGAIFDEGHNEMVLVRDISVFSMCEHHMLPFMGRVHVAYIPNQKVVGLSKLARIVEMYSRRLQVQERLTRQVAEAVQTILEPKGVAVVMEASHMCMTMRGVQKPGSWTVTSAMLGVFQEEQKTREEFLSLIRHQPAFF

SEQ ID NO: 16193 - protein, 187 aa, Tyzzerella sp.
  misc_feature (1)..(187): tr|A0A1Y4UES1|A0A1Y4UES1_9FIRM GTP cyclohydrolase 1 OS= Tyzzerella sp. An114 OX=1965545 GN=folE PE=3 SV=1
MIDEKAIEEHIHGILVALGDNPDREGLIDTPKRVAKMYTEIFAGMQYTNHDIAEMFGKVFDEERVSSNNVVVMKDIDFFSYCEHHLALMYDMKATVAYIPKGKVIGLSKIARICDMVGRRLQLQERIGCDIADIISEITGSEDIAVILEGYHSCVTARGIQKTNTKTVTVERRGKFLEDATLQIYLR

SEQ ID NO: 16194 - protein, 270 aa, Uliginosibacterium sp.
  misc_feature (1)..(270): tr|A0A2N4XSA0|A0A2N4XSA0_9RHOO GTP cyclohydrolase FolE2 OS=Uliginosibacterium sp. TH139 OX=2067453 GN=folE2 PE =3 SV=1
MSTQHAPIPDVQGFEDRRQLAINKVGIKSIRHPVRVLDRASSGVQHTIASFNMYVGLPHNFKGTHMSRFVEILNTQEREISVESFEPMLREMVKRLEADTGLIEMRFPYFINKKAPVSGVESLMDYDVCFTGEIDATGNYSLTMQVVVPVTSLCPCSKKISEYGAHNQRSHVTITARTNTPVWIEDLVAIAESEGSCELYGLLKRPDEKFVTERAYDNPKFVEDLVRDVAGRLNADSRVVAYIVESENFESIHNHSAYALIERDKRLQPA

SEQ ID NO: 16195 - protein, 225 aa, Ulvibacter antarcticus
  misc_feature (1)..(225): tr|A0A3L9YGL2|A0A3L9YGL2_9FLAO GTP cyclohydrolase 1 OS= Ulvibacter antarcticus OX=442714 GN=folE PE=3 SV=1
MDLEKQLKDIEALGNDHVGTATETPLRHDAFELSDIEKISSIKKDVQNIMHTLGLDLTDDSLKGTPSRVAKMFVQEIFSGLHPDRKPKASTFDNKYKYNEMLVEKNITLYSTCEHHLLPIVGRAHIAYISNGTVVGLSKMNRIVDYFAKRPQVQERLTMQIVKELQHVLNTEDVACVIDAKHLCVNSRGIRDIDSSTVTSEFGGKFKNPEVRREFLDYIQLDTEF

SEQ ID NO: 16196 - protein, 199 aa, Ulvibacter antarcticus
  misc_feature (1)..(199): tr|A0A3L9YVF5|A0A3L9YVF5_9FLAO GTP cyclohydrolase 1 OS= Ulvibacter antarcticus OX=442714 GN=folE PE=3 SV=1
MSSYRFFEEYEHEVTDQLKENYSQILSSIGEDINREGVVKTPERAAKAMQFLTSGNCMDPNEILRSAMFAEGYNDMVIIKDIELYSLCEHHMLPFFGKAHIAYIPNGHIVGLSKIPRVVDVFARRLQVQERLTHDILECINNTLKPLGVAVVIEASHMCMMMRGVQKQNSVTTTSGFRGQFEKIETRNEFLKLISSDLS

SEQ ID NO: 16197 - protein, 225 aa, Ulvibacter litoralis
  misc_feature (1)..(225): tr|A0A1G7BTB6|A0A1G7BTB6_9FLAO GTP cyclohydrolase 1 OS= Ulvibacter litoralis OX=227084 GN=folE PE=3 SV=1
MDLEKQLKAIEALGDDHVGTASDTPLRSDAFDLSDIEKIALIKKDVHNIMQTLGLDLTDDSLKGTPTRVAKMFVQEIFSGLHPDRKPKASTFDNKYKYNEMLVEKNITLYSTCEHHLLPIVGKAHIAYISNGTVVGLSKMNRIVDYYAKRPQVQERLTIQIVKELQQVLNTEDVACVIDAKHLCVNSRGIRDIDSSTVTSEFGGVFKNPETRSEFLDYIQLTTEF

SEQ ID NO: 16198 - protein, 199 aa, Ulvibacter litoralis
  misc_feature (1)..(199): tr|A0A1G7FAP9|A0A1G7FAP9_9FLAO GTP cyclohydrolase 1 OS= Ulvibacter litoralis OX=227084 GN=folE PE=3 SV=1
MGSYKFFEEYNHEVTDDLKNNYSDILKGIGEDVTREGIVKTPERAAKAMQFLTSGHCQDPAEILKSAMFAESYNDMVIIKDIELYSLCEHHILPFFGKAHIAYIPNGHIVGLSKIPRVVDVFARRLQVQERLTHDILECINDTLKPKGVAVVIEASHMCMMMRGVQKQNSMTTTSGFRGQFEKIETRNEFLKLISSDLS

SEQ ID NO: 16199 - protein, 225 aa, Ulvibacter sp.
  misc_feature (1)..(225): tr|A0A2N0ETY4|A0A2N0ETY4_9FLAO GTP cyclohydrolase 1 OS= Ulvibacter sp. MAR_2010_11 OX=1250229 GN=folE PE=3 SV=1
MDLEKQLKAIEAQGDNHIGSSTNTPLRSDAFELSDIEKIALIKKDVQNIMNTLGLDLTDDSLKGTPTRVAKMFVQEIFGGLHPDRKPKASTFENKYKYGEMLVEKNITLYSTCEHHLLPIVGKAHIAYISSGTVVGLSKMNRVVDYFAKRPQVQERLTMQIVEELQRVLGTEDVACVIDAKHLCVNSRGIRDIDSSTVTSEFGGKFKDLQTRREFLDYINLDTEF

SEQ ID NO: 16200 - protein, 199 aa, Ulvibacter sp.
  misc_feature (1)..(199): tr|A0A167H1Y9|A0A167H1Y9_9FLAO GTP cyclohydrolase 1 OS= Ulvibacter sp. LPB0005 OX=1763537 GN=folE PE=3 SV=1
MGSYNFSEEYDEIVTNKLKDNFTNILTGIGEDIDREGIVKTPERAAKAMQFLTSGHGEDPEAILRGAMFAEDYKDMVVIKDIELYSLCEHHILPFFGKAHIAYIPNGHIVGLSKIPRVVDVFARRLQVQERLTHDILECINNTLKPQGVAVVIEASHMCMMMRGVQKQNSVTTTSGFRGQFEKIETRNEFMKLISSDLS

SEQ ID NO: 16201 - protein, 180 aa, Umboniibacter marinipuniceus
  misc_feature (1)..(180): tr|A0A3M0A7Z2|A0A3M0A7Z2_9GAMM GTP cyclohydrolase 1 OS= Umboniibacter marinipuniceus OX=569599 GN=folE PE=3 SV= 1
MEKAFASIIEAIGEDLNRPGLQDTPKRAAKAFEFLNQGYTQDLETVINGALFPSDSREMVIVKDIELYSLCEHHLLPFIGKAHIAYLPTGKVLGLSKLARIVDMFARRLQIQESLTHQIATTIQEVTGADGVAVVVEAKHMCMMMRGVEKQNSSMKTSAMLGKFKERSETRAEFLSLIAN

SEQ ID NO: 16202 - protein, 214 aa, Umezawaea tangerina
  misc_feature (1)..(214): tr|A0A2T0TKN9|A0A2T0TKN9_9PSEU GTP cyclohydrolase 1 OS= Umezawaea tangerina OX=84725 GN=folE PE=3 SV=1
MTEIDHHDDAGLPSSNGEAGVARRVFDHARAERAVRELLIACGEDPEREGLRDTPARVARAYRELFAGLYTDPDSVLAKTFDESHEELVLVTDIPMYSFCEHHLLPFHGVAHVGYIPNEQGRVTGLSKLARLVDLYAKRPQVQERLTSQIAEALVRRLEPRGVIVVVEAEHLCMGMRGVRKPGSRTTTSAVRGILRSSASSRSEAINLIRGRLR

SEQ ID NO: 16203 - protein, 215 aa, Unknown
  misc_feature (1)..(215): tr|Q5UF29|Q5UF29_9PROT GTP cyclohydrolase 1 OS=uncultur ed alpha proteobacterium EBAC2C11 OX=295349 GN=folE PE= 3 SV=1
MMTPYDTGDPKEATDAKDAVLNSSTTRTPSRQEAEQAVDVLLRWIGEDPSREGLAGTPSRVVRAWKEFCSGYQENPAQLLERTFEEVEGYDDMVMLRNIRLESHCEHHLVPILGIAHIAYLPNRRVVGISKLARVLDGFSRRLQTQETLTAQVADCIQNVLQPKGVAVLIDAQHQCMTTRGVRKPDVSMITSRFTGIFKADESLSRRFLDQTKIS

SEQ ID NO: 16204 - protein, 214 aa, Alphaproteobacteria bacterium
  misc_feature (1)..(214): tr|A0A212JN23|A0A212JN23_9PROT GTP cyclohydrolase 1 OS= uncultured Alphaproteobacteria bacterium OX=91750 GN=fo lE PE=3 SV=1
MNTLSKSAKPELAANHAATRPTREEAEEAIRTLLRWAGDDPSREGLIDTPARVARAYEEFFAGYDVDPDEYLRRTFEEVEGYDEMVMLRDIRVESYCEHHMVPIIGRAHVAYMPKKRVVGISKLARVVEAYAKRLQIQEKLTVQIADTINKVLEPSGVAVVIEASHQCMTTRGVHKPGVSMITSHMIGVFRSNSDTRKEFMALLAASGGNPLHP

SEQ ID NO: 16205 - protein, 218 aa, Avibacterium sp.
  misc_feature (1)..(218): tr|A0A486X9J1|A0A486X9J1_9PAST GTP cyclohydrolase 1 OS= uncultured Avibacterium sp. OX=1936169 GN=folE PE=3 SV= 1
MNKISPEAEKVRQALVSKGIETPMVDTQLTKSQRREGIEQHMREVMKLIGLDLRDDSLEETPVRLAKMFVDEIFSGLDYANFPKITNIENQMKVSEMVLVNDVTLTSTCEHHFVTIDGKVSVAYYPKKWVIGLSKINRVVAFFAQRPQVQERLTEQILLAFQTILETEDVAVYVKATHFCVKCRGIKDTNSYTVTSAFGGVFLDDRETRKEFLTLINK

SEQ ID NO: 16206 - protein, 317 aa, Unknown
  misc_feature (1)..(317): tr|B1N6H2|B1N6H2_9BACT GTP cyclohydrolase FolE2 OS=uncu ltured bacterium CBNPD1 BAC clone 142 OX=417307 GN=folE 2 PE=3 SV=1
MQSTDLGEFMPTAMPDVANHSCATTEGVLDWVGMSNIEVPLMLAIAGEAPRQVSAHVEAFVNLKDPKAKGIHMSRLYLLLDDLSRESTLSHASLCDLLDGFITSHEDLSNQAFVKFDFDLHLRRKALITEKQGWKAYPVTVTGQVLDKNLSVELAVKVPYSSTCPCSAALARQLIQEAFVAKFAGQQQISSELVVDWLGTTQGIVATPHSQRSVAEIKVKLHHNVTEFPIVALIDAIEDALKTPVQAAVKRADEQEFARLNGQNLMFCEDAARRLKHALNQLSEFDDFWLRVNHYESLHAHDAVAVTVKGLEGGYRA

SEQ ID NO: 16207 - protein, 189 aa, Unknown
  misc_feature (1)..(189): tr|A0A068LCM8|A0A068LCM8_9BACT GTP cyclohydrolase 1 OS= uncultured bacterium OX=77133 GN=folE PE=3 SV=1
MNQRAKDGIKKFLEALSVDTEAPELEKTPSRVTELYSELFSGVGLDTKSAWGETFSTDYKGLVAVTGIPFYSMCEHHLLPFFGTVDIVYQPKDGCVAGLSKFQDIVNILSRRPQLQERLASELADAIMNDLSAHGVFVRITATQLCMLIKGTMQQDSKVITLESRGVLAETGTLRDEALAMLGGGQANV

SEQ ID NO: 16208 - protein, 195 aa, Bacteroides sp.; identical to SEQ ID NO: 5348
  misc_feature (1)..(195): tr|A0A1C5L3Y0|A0A1C5L3Y0_9BACE GTP cyclohydrolase 1 OS= uncultured Bacteroides sp. OX=162156 GN=folE PE=3 SV=1

SEQ ID NO: 16209 - protein, 198 aa, Bacteroides sp.
  misc_feature (1)..(198): tr|A0A1C5UVW3|A0A1C5UVW3_9BACE GTP cyclohydrolase 1 OS= uncultured Bacteroides sp. OX=162156 GN=folE PE=3 SV=1
MMTDTNSINWPQEKVEKLMGHYKEILSLLGEDPEREGLLKTPERVAKAMLTLTRGYEMDPREVLNAAKFKEPYSQMVIVKDIDFFSMCEHHMLPFYGKAHVAYIPNGYITGLSKIARVVDIFSHRLQVQERMTLQIKECIQETLNPLGVMVVVEAKHMCMQMRGVEKQNSVTTTSDFTGAFNQAKTREEFMNLIRAKY

SEQ ID NO: 16210 - protein, 164 aa, Bacteroidetes bacterium
  misc_feature (1)..(164): tr|H5SK67|H5SK67_9BACT GTP cyclohydrolase 1 (Fragment) OS=uncultured Bacteroidetes bacterium OX=152509 GN=HGMM _F40B03C41 PE=3 SV=1
MEKVQLNGNGHDLCFCGEDLPEEQAAPPSQEEREAAIAEHFAAIMKLLGLDLNDPSLAGTPHRVAKMYLRELFTGLDPKNAPVLRTFPNTAGYHQMVVEKEIRVRSVCEHHFVPIIGVAHVAYIPKDTIVGLSKLNRVVDYFARRPQVQERLTRQIADFLRDHL

SEQ ID NO: 16211 - protein, 230 aa, Unknown
  misc_feature (1)..(230): tr|Q2Z094|Q2Z094_9PROT GTP cyclohydrolase 1 OS=uncultur ed beta proteobacterium OX=86027 GN=folE PE=3 SV=1
MDADAGVPQVDAEPAAMSGACDHDCHTPHDSGSIGIPQVGSFDPVAFERAINDMLAACGVAPDSVHTGRTAERVRDLWQKRLLGGYAVSPADALGEGFADDGDDMVVVRGIAVHGVCPHHLVPFRGVAHVAYIPGGRLHGFGRVARMVDAIGHRFTYQEWMTRDIAEALVTHGQAKGAACMIEAEQLCLLLGEDRRGDERVVTQAFTGNFKTSDQLRNEFLRATLQRELR

SEQ ID NO: 16212 - protein, 185 aa, Blautia sp.
  misc_feature (1)..(185): tr|A0A1C6K7U5|A0A1C6K7U5_9FIRM GTP cyclohydrolase 1 OS= uncultured Blautia sp. OX=765821 GN=folE PE=3 SV=1
MVDKQKVEQAIRLLLEGIGEDITREGLIDTPDRIARMCEEIYGGLDQEADHHLLKQFPVENNEIVLEKDITFYSMCEHHLMPFYGKAHLAYIPDGKVTGLSKLARTVEVYARRPQIQERLTVQIADALERALSPKGIMVMLEAEHTCMTMRGVKKPGSKTITTVTRGAFKEDKELQKMFLSMVGK

SEQ ID NO: 16213 - protein, 185 aa, Blautia sp.; identical to SEQ ID NO: 5598
  misc_feature (1)..(185): tr|A0A1C5WX50|A0A1C5WX50_9FIRM GTP cyclohydrolase 1 OS= uncultured Blautia sp. OX=765821 GN=folE PE=3 SV=1

SEQ ID NO: 16214 - protein, 215 aa, Chloroflexi bacterium
  misc_feature (1)..(215): tr|H5S9B0|H5S9B0_9CHLR GTP cyclohydrolase 1 OS=uncultur ed Chloroflexi bacterium OX=166587 GN=folE PE=3 SV=1
MENMNEEIDFDDGLSAEQIAAIRFDYQAIESAVEQILRAVGEDPQREGLRNTPRRVARAYAELLSGYSTDVEAMINGAIFNISYDEVVIVRDIEFHSLCEHHMLPFIGRAHVAYLPRGKVIGLSKIPRIVDMFAHRLQVQERMTRQIADFLQELLQPRGVAVVVEALHLCSMIRGVKKHDARMVTSAMYGAFRTNSATRQEFLDNISRASVPLHI

SEQ ID NO: 16215 - protein, 222 aa, Citrobacter sp.; identical to SEQ ID NO: 6754
  misc_feature (1)..(222): tr|A0A212IQ43|A0A212IQ43_9ENTR GTP cyclohydrolase 1 OS= uncultured Citrobacter sp. OX=200446 GN=folE PE=3 SV=1

SEQ ID NO: 16216 - protein, 184 aa, Clostridium sp.
  misc_feature (1)..(184): tr|A0A1C5Z8I7|A0A1C5Z8I7_9CLOT GTP cyclohydrolase 1 OS= uncultured Clostridium sp. OX=59620 GN=folE PE=3 SV=1
MIDKEKVEAAVRLLLEGIGEDIHREGLVETPARIARMYEEIYGGMDEDAAFHLSKTFQVDSHEMVLEKDITFYSTCEHHLMPFYGKAHVAYIPDGRVLGLSKLARTVETFARRLQIQEQLTVQIADALMEHLAPRGVMVMMEAEHMCMTMRGIKKPGSRTVSIATRGVFEGDMQLQNTFFQMIR

SEQ ID NO: 16217 - protein, 192 aa, Clostridium sp.; identical to SEQ ID NO: 8091
  misc_feature (1)..(192): tr|A0A1C5UB87|A0A1C5UB87_9CLOT GTP cyclohydrolase 1 OS= uncultured Clostridium sp. OX=59620 GN=folE PE=3 SV=1

SEQ ID NO: 16218 - protein, 188 aa, Collinsella sp.
  misc_feature (1)..(188): tr|A0A1C5LLD4|A0A1C5LLD4_9ACTN GTP cyclohydrolase 1 OS= uncultured Collinsella sp. OX=165190 GN=folE PE=3 SV=1
MAVDKARAEAAIREFLIAVGEDPDRPGLLETPDRVARAAQEVLGGYDEDPSLHLRKQFHENENEEMVIVRDIPFSSLCEHHILPFTGKAHVAYIPHEGRITGLSKIARCVNGYARRLQLQERLTAQIADAMMAELRPRGVLVVLEAEHMCMTMRGVRAAGALTTTSAVRGTFRSDIRTREEALRLLGL

SEQ ID NO: 16219 - protein, 184 aa, Coprococcus sp.
  misc_feature (1)..(184): tr|A0A1C5SDN4|A0A1C5SDN4_9FIRM GTP cyclohydrolase 1 OS= uncultured Coprococcus sp. OX=458253 GN=folE PE=3 SV=1
MVDHKKVEQAIRLLLEGIGEDPDREGLAETPDRIARMYEEICGGMNEDAEEHLKKTFTAENNEMVVEKDITFYSMCEHHMLPFYGKVHIAYIPDGKVVGLSKLARTVEVFARRLQLQEQMTAQIADALMENLHPKGVMVLAEAEHMCMTMRGIKKPGSKTVSVVTRGAFEENEKLQNMFFRMIG

SEQ ID NO: 16220 - protein, 193 aa, Coprococcus sp.
  misc_feature (1)..(193): tr|A0A1C5RZ30|A0A1C5RZ30_9FIRM GTP cyclohydrolase 1 OS= uncultured Coprococcus sp. OX=458253 GN=folE PE=3 SV=1
MAIDKEAIKEHIRGILVALGDDPDREGLKETPDRVARMYEEVFEGMNYTNDEIAEMFGKTFKEEDAAHTSDMVFVKDIEVFSYCEHHMALMYDMKVSVAYIPHGRVLGLSKIARIADMVAKRLQLQERIGSDIAYVVGKAAGSPDVAVLIEANHSCMTARGIKKPGTKTYTTTFRGAFENDVNLQNKVLMMNR

SEQ ID NO: 16221 - protein, 267 aa, Unknown
  misc_feature (1)..(267): tr|A0A212IT66|A0A212IT66_9DELT GTP cyclohydrolase FolE2 OS=uncultured delta proteobacterium OX=34034 GN=folE P E=3 SV=1
MTVKMNPLQMADVQNGPAGVPLSIDTVGVKGLKLPLVVSDRARGAQHTVALVDLGVDLPGEFKGTHMSRFVEALEGWNEELSFKTMRTLLEDMKTRLMARKAYARFSFPYFIRKAAPVSGVSGLMPYECTLSGELEEGKPEMLLEVTVPVMTVCPCSKAISREGAHSQRTEIRFAVRMNAFCWIEECVDMAEKAGSSPVYPVLKREDEKFVTESAFARPMFVEDVVREVARQLDEHPLITCYAVEVESQESIHGHNAFARMSRDKRA

SEQ ID NO: 16222 - protein, 257 aa, Desulfobacteraceae bacterium
  misc_feature (1)..(257): tr|A0A484HKT5|A0A484HKT5_9DELT GTP cyclohydrolase FolE2 OS=uncultured Desulfobacteraceae bacterium OX=218296 G N=folE PE=3 SV=1
MKDIQNQRDHRNIPIDKVGIKNIRYPIKVLDRKNRVQHTVASVNMYVDLPHKTKGTHMSRFVEILNLIKSEVSLQNISAALDQMKTHLKARSAHIELTFPYFIEKKAPVSGSPGLMDYLCRIEGSSDPDGKLDIISEVRAPISSVCPCSKEISDAGAHNQRGEARLRIRFKKFIWIEDMIELVESSSSCEVFSVLKRVDEKEVTEKGYENPKFVEDIVRDIAEKIKDDENITWFSVSAENFESIHNHSAYAHICGGR

SEQ ID NO: 16223 - protein, 269 aa, Desulfobacterium sp.
  misc_feature (1)..(269): tr|A0A445MTL7|A0A445MTL7_9DELT Putative GTP cyclohydrol ase 1 type 2 OS=uncultured Desulfobacterium sp. OX=2010 89 GN=PITCH_A1530036 PE=4 SV=1
MLPKTSDVLDLIESIAPKRLAETWDNPGIQVGSTDQGIKKILVALDPTVEALSYAINAHADLLFTHHPLIFTPLSQVVADGYPGNVITRAIKNGISIIAAHTNLDIAPEGINKVLSDMISLRQVEVLEENPLMEGSGLGRLGYLPEPVGLQKIVEQIMQTFGCKRPHLVHSNSDVLIHRIAVVGGSGGGLIPLAAKKKADLMITGDIGHHHALTAKTLGIALVDAGHFNLERAAFFGFAKLFGQMAARLKWDIEVTTYPDEENPMILYG

SEQ ID NO: 16224 - protein, 261 aa, Desulfobacterium sp.
  misc_feature (1)..(261): tr|A0A445N3A0|A0A445N3A0_9DELT GTP cyclohydrolase FolE2 OS=uncultured Desulfobacterium sp. OX=201089 GN=folE P E=3 SV=1
MLDIQNKKDFRNIDIDQVGVKGIRYPITVRDKDQGSQQTVAEINMYVNLPRYYKGTHMSRFVEILNEHSRRISLQNFTEILEEMKERLNAESAHMEISFPYFINKAAPVSGSQGLMEYQCAFKGSLNKGSDLVIIIHVPISTLCPCSKEISDFGAHNQRGEVRLQARFKKFVWIEDLIRLVEESASSDVYSVLKREDEKYVTERAYQNPKFVEDIVRDIAVKLNEDPNITWFSVESENFESIHNHNAYAYIEKRKTDKEIA

SEQ ID NO: 16225 - protein, 258 aa, Desulfovibrio sp.
  misc_feature (1)..(258): tr|A0A212L0K7|A0A212L0K7_9DELT GTP cyclohydrolase FolE2 OS=uncultured Desulfovibrio sp. OX=167968 GN=folE PE=3 SV=1
MEDVQSHAPLVALNIDRVGVRELRLPLLVRDRTKGTQQTVASVDLGVDLPSAFKGTHMSRFVETLEEWNAEISYQSVRRLLLDIKQRLEARRAYARFCFPYFIKKCAPASGIPALVSYQCRLTGELDDEGQHFCLEVDVPVMTVCPCSKAISDEGAHSQRAMVRMSLRMKVFSWLEDFIDIAEASGSSAVYTLLKREDEKFVTEHAFAHPTFVEDVVRNVAQRLSEHGQVEWFSVEVESMESIHNHNAFARIERCMSD

SEQ ID NO: 16226 - protein, 263 aa, Desulfovibrio sp.
  misc_feature (1)..(263): tr|A0A212KXC9|A0A212KXC9_9DELT Putative GTP cyclohydrol ase 1 type 2 OS=uncultured Desulfovibrio sp. OX=167968 GN=KL86DES1_10075 PE=4 SV=1
MQVAELINTIEEVAPLKAAAPWDISGLQVASLRHEVNSIAVCLDPTPHSVRQCLDLGAQFILSHHPLTLKPSLPAKLDAYHDVLRLLLRADVPLYAAHTSLDVNPRGPAGWLATDLRLDNLTVLEPVAPADADGHMLGYGLAGDLPQPQTVEHIIRALESILDLSTATLSGPPPGKIDRLAYCTGSGSSLLAAAHEAGAQLFITGDVKYHTALDAEIPLLDVGHHSLEEEMMRRMCHVLQQRAHGVAVHFVPSASPFRTVALS

SEQ ID NO: 16227 - protein, 185 aa, Dorea sp.
  misc_feature (1)..(185): tr|A0A1C5S244|A0A1C5S244_9FIRM GTP cyclohydrolase 1 OS= uncultured Dorea sp. OX=286138 GN=folE PE=3 SV=1
MIDHEKVEQAVRLLLEGIGEDVNREGLIDTPDRIARMYEEIYGGIEEDAATHLSRTFTVDSSEMVVEKDITFYSTCEHHLLPFYGKVHIGYIPDGKVVGLSKLARTVEVFARRLQLQEQLTGQIADALMEHMQAKGAIVMIEAEHMCMTMRGIKKPGSQTVTLARRGVFETDPALEERFFRMLER

SEQ ID NO: 16228 - protein, 187 aa, Dysgonomonas sp.; identical to SEQ ID NO: 7727
  misc_feature (1)..(187): tr|A0A212K301|A0A212K301_9BACT GTP cyclohydrolase 1 OS= uncultured Dysgonomonas sp. OX=206096 GN=folE PE=3 SV=1

SEQ ID NO: 16229 - protein, 187 aa, Dysgonomonas sp.
  misc_feature (1)..(187): tr|A0A212JBL3|A0A212JBL3_9BACT GTP cyclohydrolase 1 OS= uncultured Dysgonomonas sp. OX=206096 GN=folE PE=3 SV=1
MQEEQNIELLAKHYKEIINLLGENADREGLLSTPVRVAKAMQFLTKGYHEDPEEILRKAFFKEDYRQMVIVKDIDFYSMCEHHMLPFWGKAHVAYIPNGYITGLSKIARVVDVFARRLQVQERMTLQIKECIQKTLNPLGVMVVIEAQHMCMQMRGVEKQNSTTTTSDFTGVFNQAKTREEFINLIR

SEQ ID NO: 16230 - protein, 192 aa, Eggerthella sp.
  misc_feature (1)..(192): tr|H6WNT4|H6WNT4_9ACTN GTP cyclohydrolase 1 OS=uncultur ed Eggerthella sp. SMG5 OX=1131820 GN=folE PE=3 SV=1
MASNDMDLAKIEQGVRLILEGVGEDPNREGLLETPARVARMYEECFAGLHQDPAVHFETLFDEHHDEMVIVHDIPFFSMCEHHLVPFFGKAHIAYLPSESGKICGISKLARLVEVYARRPQVQERLTSQVADTLVEQLNPRGVAVVMEAEHLCMSMRGVKKPGAKTVTNAMRGIFKEDAATRAEALSLLMGR

SEQ ID NO: 16231 - protein, 192 aa, Eubacterium sp.
  misc_feature (1)..(192): tr|A0A1C6FLQ6|A0A1C6FLQ6_9FIRM GTP cyclohydrolase 1 OS= uncultured Eubacterium sp. OX=165185 GN=folE_1 PE=3 SV= 1
MAIDSEAIKEHIRGILIALGENPDREGLKDTPERVAKMYQEVFEGMNYTNAEIAEMFNKTFEDDLEFESESDDMIVVKDIDIFSYCEHHMALMYDMKVTVAYIPHGKVIGLSKIARIADMVGKRLQLQERIGTDIADIMTIVTGSEDIAILIEGCHSCMSARGIKKTNAKTFSSTLRGKFKENMSLLMRLYS

SEQ ID NO: 16232 - protein, 196 aa, Eubacterium sp.; identical to SEQ ID NO: 4566
  misc_feature (1)..(196): tr|A0A1C5WPN6|A0A1C5WPN6_9FIRM GTP cyclohydrolase 1 OS= uncultured Eubacterium sp. OX=165185 GN=folE PE=3 SV=1

SEQ ID NO: 16233 - protein, 184 aa, Gammaproteobacteria bacterium
  misc_feature (1)..(184): tr|H5SHR3|H5SHR3_9GAMM GTP cyclohydrolase 1 OS=uncultur ed Gammaproteobacteria bacterium OX=86473 GN=folE PE=3 SV=1
MKLEEIFAELIQAIGEDLNREGLVDTPKRTAAAFRYLTSGYHQSLESVLNNAIFEADTEDMVIVRDIELYSLCEHHLLPFIGKCHIGYLPAGKVIGLSKTARIVEMYARRLQIQERLTKQIADAIQTAIRPRGVAVVIEAKHLCMMMRGVEKQNSVMTTSAMLGLFRERISTRSEFLNLIGRKI

SEQ ID NO: 16234 - protein, 264 aa, Gammaproteobacteria bacterium
  misc_feature (1)..(264): tr|A0A5E5QBE8|A0A5E5QBE8_9GAMM GTP cyclohydrolase FolE2 OS=uncultured Gammaproteobacteria bacterium OX=86473 G N=folE2 PE=3 SV=1
MSAANLPDTQNNADTRQIVIDKVGIKDISHPITFIDRDGNKNPTIGNFTMTVTLPEHVKGTHMSRFIEILNEGSCEFNSGNFDKIIDKVREKLESDTAHITLEFPFFRKKKAPSSGVESLMDYQVTLYGILNQGASEVMIKVVVPVTSLCPCSKSISKYGAHNQRSHITIKARIAKGKTLHLEDLIELAEQKASCELYAILKRDDEKVVTERAYDNPAFVEDLVRDIAVGLNANDNIDYYRLESENFESIHNHSAYAVIENNKH

SEQ ID NO: 16235 - protein, 183 aa, Lachnospira sp.
  misc_feature (1)..(183): tr|A0A1C6JSW4|A0A1C6JSW4_9FIRM GTP cyclohydrolase 1 OS= uncultured Lachnospira sp. OX=446043 GN=folE PE=3 SV=1
MDKEKIEQAVRLFLEGIGEDPNREGLLGTPDRVARMCSEIYGGLGQDAGQYLHTTFEAKNNELILEKDIDLYSVCEHHLLPFYGKAHIAYIPDGRVAGLSKLARTIEVFAKRPQIQEQLTAQTADALMEHLKPKGVMVVIEAEHMCMTMRGVRKPGTKTLTYVCRGVFENNDELINRVLMMVR

SEQ ID NO: 16236 - protein, 223 aa, Unknown
  misc_feature (1)..(223): tr|A4GJ71|A4GJ71_9BACT GTP cyclohydrolase 1 OS=uncultur ed marine bacterium EB0_49D07 OX=415439 GN=folE PE=3 SV =1
MSFDKTKTDPVLGQKVHEHLISVGVETPVVDNGLSRKEKIEKIEGHFDQIVSTLGLDLRDDSLTDTPKRVAKMYVNEIFWGLDYDAFPKATVVENKMQYNEMVVEKGVSVQSYCEHHFVNIDGLATVAYVPNKKVLGLSKMNRIVEYFSRRPQIQERLTEQIYHALSFILETENVAVMIDAKHFCVKSRGVEDTQCSTVTSRLGGSFKAHPEVRAEFLALLKM

SEQ ID NO: 16237 - protein, 192 aa, Unknown
  misc_feature (1)..(192): tr|A4GHX1|A4GHX1_9BACT GTP cyclohydrolase 1 OS=uncultur ed marine bacterium EB0_39H12 OX=415437 GN=folE PE=3 SV =1
MNKKPSREEAEEAVRTLISWAGDNPEREGLIETPKRVVKSYEEFYQGYDQNPDEILSKVFEEIEGYDEIVLVKDIPLHSHCEHHMVPIIGKAHVAYLPDQRVVGLSKLARVVDMFGKRLQTQETMTAQIADTINDVLKPRGVAVIIDAEHQCMSSRGVSKHGASTITSRMLGVFRENQKSRMELLNLISGNI

SEQ ID NO: 16238 - protein, 210 aa, Megasphaera sp.
  misc_feature (1)..(210): tr|A0A1C5R904|A0A1C5R904_9FIRM GTP cyclohydrolase 1 OS= uncultured Megasphaera sp. OX=165188 GN=folE_2 PE=3 SV= 1
MTTTTSSYPVNPEAVQAMKRFLEALGLDLTALGMEKTPYRVAEAFGQFFSGLWENPDDEWAAPILSQTNGLVAVRNIRFQSMCEHHLLPFFGTAHIAYYPQDGRIAGFGHFARAVGVLARRPQLQERLTEDLCQSLCRGLQPKGVLVVVKATHLCLTMREGMAADADIVTAATSGCLQAGTKEYDQAWKLLMGDAGAGTILMKEEESWTP

SEQ ID NO: 16239 - protein, 185 aa, Megasphaera sp.
  misc_feature (1)..(185): tr|A0A1C5MAI7|A0A1C5MAI7_9FIRM GTP cyclohydrolase 1 OS= uncultured Megasphaera sp. OX=165188 GN=folE_1 PE=3 SV= 1
MDREKLKQAAALILEAIGQDGRDGTKETPERFAKMMEERLAYAGVSNEEIAKEFDKVFPCDDGNMVVVKDIDVFSFCEHHIALMYDMKIAIGYIPKGCVIGLSKLARIADAVCRRLQLQERIGADIYDVLRRIVKTDDIIVCIQGEHSCMTARGIKKPGSQTRTLYAGGVFDDPLRRNEFFNLIR

SEQ ID NO: 16240 - protein, 196 aa, Microbacterium sp.
  misc_feature (1)..(196): tr|A0A1Y5P0P3|A0A1Y5P0P3_9MICO GTP cyclohydrolase 1 OS= uncultured Microbacterium sp. OX=191216 GN=folE PE=3 SV =1
MAVDRDRVAALVRELLEAIGEDPDRPGLKLTPQRVAEAYAEFFAGVGEDAAAPLAHTISVARGPAPDTLPSGAVMLRDVRFRSVCEHHLLPFAGHAHIAYLPGEQVVGLGALPRVVDVLSARPQVQERLGEQIADVIAASLDTRGVLVILDAVHECVTMRGGRQPDASTVTIAARGELAEPAARAEIIALLAGGAA

SEQ ID NO: 16241 - protein, 200 aa, Mycobacterium sp.
  misc_feature (1)..(200): tr|A0A1Y5PBJ5|A0A1Y5PBJ5_9MYCO GTP cyclohydrolase 1 OS= uncultured Mycobacterium sp. OX=171292 GN=folE PE=3 SV= 1
MPQQDSVTLDTPVFDQPRAEAAVRELLLAVGEDPDRQGLVDTPARVARAFQEMFAGLYTNPDAVLETTFDEHHDELVLVKQIPMYSTCEHHLVAFHGMAHVGYIPGEDGRITGLSKLARVVDLYAKRPQVQERLTGQIADAIMRKLNPRGVIVVIEAEHLCMAMRGVRKAGAITTTSAVRGQFKTDNASRSEALDLILRK

SEQ ID NO: 16242 - protein, 150 aa, Nitrospirae bacterium
  misc_feature (1)..(150): tr|D9MP89|D9MP89_9BACT GTP cyclohydrolase 1 OS=uncultur ed Nitrospirae bacterium MY4-5C OX=798580 GN=LW5_0200 P E=3 SV=1
MYEEILSGHETSIEEILRPIEGESHEEMVILKDISFYSMCEHHLLPFFGAVNIAYVPNAGKIVGIGSLARAVDILARRLQVQERLTTELADLIMAKLRPKGAMVIIDAEHLCMSMRGTKKNGARVVTSAVRGIFRNKQSTREEMLALIKK

SEQ ID NO: 16243 - protein, 214 aa, Unknown
  misc_feature (1)..(214): tr|E7C7M4|E7C7M4_9BACT GTP cyclohydrolase 1 OS=uncultur ed nuHF1 cluster bacterium HF0770_35I22 OX=723586 GN=fo lE PE=3 SV=1
MRTDKSVSSLDNKKASRNRPTRSEAEEAVRVLIRWAGDDPSREGLIETPARVVRSYEEFFSGYSLCPKSFLERTFEETGGYDEIVLLRDIRFESHCEHHMAPIIGRVHVAYLPDKRVVGISKLARLVETYAKRLQIQEKMTADIASTINNVLAPKGVAVVIEGAHQCMTTRGVQKSGVTMVTSQMLGAFRTNSSTRREFLSMISSPATGKSNFE

SEQ ID NO: 16244 - protein, 213 aa, Unknown
  misc_feature (1)..(213): tr|E0XTJ6|E0XTJ6_9BACT GTP cyclohydrolase 1 OS=uncultur ed nuHF1 cluster bacterium HF0130_31E21 OX=710728 GN=fo lE PE=3 SV=1
MSIDKTVTLLENDEMTRKPSREEAEEAVKTLIRWAGDNPTREGLVETPSRVVRAYEEFFTGYSICPKSFLKRTFEETAGYDEIVLLRDIRFESHCEHHMVPIIGKIHIAYLPDQRVVGISKLARLVDVYAKRLQIQEKMTAEIASTINEVLSPKGVAVVIEGVHQCMTTRGVFKPGVSMVTSQMLGAFRTDPSTRREFLSMIGNPASKSATFV

SEQ ID NO: 16245 - protein, 221 aa, Unknown
  misc_feature (1)..(221): tr|A9LH52|A9LH52_9BACT GTP cyclohydrolase 1 OS=uncultur ed planctomycete 13FN OX=455065 GN=folE PE=3 SV=1
MSIASPETISDESEVDYQCVNIKTESSTPKRPAALPEVDLDAIGGAVRTIFKAVGEDPDRDGLLETPRRAAKMYAEMFGGLHADSGRHLNVTFEEGYDELVLVRDIEFTSMCEHHLLPFRGVAHVAYIPNGRVTGLSKLARVVEEVSRRPQVQERMTQTIADLIEDRLKSSAVGVIVKAEHSCMSIRGIRKPGSMTVTSSMRGSFRNDPASRAELMSLINQ

SEQ ID NO: 16246 - protein, 204 aa, Pleomorphomonas sp.; identical to SEQ ID NO: 12785
  misc_feature (1)..(204): tr|A0A212L8G4|A0A212L8G4_9RHIZ GTP cyclohydrolase 1 OS= uncultured Pleomorphomonas sp. OX=442121 GN=folE PE=3 S V=1

SEQ ID NO: 16247 - protein, 193 aa, Roseburia sp.
  misc_feature (1)..(193): tr|A0A1C5VYS4|A0A1C5VYS4_9FIRM GTP cyclohydrolase 1 OS= uncultured Roseburia sp. OX=512314 GN=folE PE=3 SV=1
MAIDQKAVEEHIKGLLAALGDNPDREGLKDTPKRVARMYAEVFEGMNYTNHEIAQMFDKTFEEDLTFSRENSDFVIVKDIDIFSYCEHHMALMYDMKVTVAYVPRGKVIGLSKIARIADMVSKRLQLQERIGTDIAEIIQEVTGSEDVAVLIEGCHSCMTARGIKKTDAKTYTSTLRGRFQTDVMLQMRLNVK

SEQ ID NO: 16248 - protein, 184 aa, Roseburia sp.
  misc_feature (1)..(184): tr|A0A1C5R6C5|A0A1C5R6C5_9FIRM GTP cyclohydrolase 1 OS= uncultured Roseburia sp. OX=512314 GN=folE PE=3 SV=1
MIDKEKVEAGVRLILEGIGEDVNREGLLETPDRIARMYEEIFGGMDMDAAEPLKKRFHASNNEMVVEKDITFYSTCEHHMLPFYGKAHVAYIPNGEVVGISKLARTVEIYARRLQIQEQLTAQVADALMEQLKPKGVMVMMEAEHMCMTMRGIKKPGSRTVTYVTRGIFNEDERLVNKFFQMVR

SEQ ID NO: 16249 - protein, 361 aa, Roseobacter sp.
  misc_feature (1)..(361): tr|B3VUL4|B3VUL4_9RHOB GTP cyclohydrolase FolE2 OS=uncu ltured Roseobacter sp. OX=114847 GN=folE2 PE=3 SV=1
MHRKKLKSCPMIPKITGIRPAPLKGEIAVNIHLPSMDDAASNVDCSDETQDLSRDYAQDFVADADYIRTLPDLQNGPTSLIRGAQKFIQHVGISNFRLPIRFHTRDSDPLVLEASVTGSVSLDAEKKGINMSRIMRTFYRQAEETFSFDVMARTLDDYKADLESFDARLQMRLSFPMQVQSLRSGLSGFQYYNIALEVVERAGQRHKIVHLDYVYSSTCPCSLELSEHARRERGQLATPHSQRSVARISVVLAEGQPRLWFEDLVELCRKAVATETQVMVKREDEQAFAELNAANPIFVEDAARLFCEQLQSDPRIGDFRVIASHQESLHSHDAISVLTEGATFAQTSMDPSTFANLFHVG

SEQ ID NO: 16250 - protein, 185 aa, Ruminococcus sp.
  misc_feature (1)..(185): tr|A0A1C5UHZ3|A0A1C5UHZ3_9FIRM GTP cyclohydrolase 1 OS= uncultured Ruminococcus sp. OX=165186 GN=folE PE=3 SV=1
MVDKQKVEQAIRLLLEGIGEDTEREGLKDTPDRIARMCMEIYGGLDEEADQHLAKQFEVENNEMVLEKDITFYSMCEHHLMPFYGKAHIAYIPNGRVTGLSKLARTVDVYARRPQIQERLTVQIADALERTLNPRGVMVMLEAEHTCMTMRGIKKPGSKTITTVTRGDFKTDRELQKQFLSMVKD

SEQ ID NO: 16251 - protein, 188 aa, Ruminococcus sp.
  misc_feature (1)..(188): tr|A0A1C6CD19|A0A1C6CD19_9FIRM GTP cyclohydrolase 1 OS= uncultured Ruminococcus sp. OX=165186 GN=folE PE=3 SV=1
MIDKQRVEAAVKELLSAVGEDVDREGLLETPKRVANMYEEIFAGLDDDPKKYLKIFNVPEQEQELVIVRDIPMYSVCEHHLLPFVGVAHIAYIPKNGKIIGLSKFARIVSCFAKKPQVQERLTTEIADFLYDNLEPLGVAVVIEAEHLCMTMRGARAAGAKTMTSALRGAIRTDAKTRAEVMSLLTNK

SEQ ID NO: 16252 - protein, 227 aa, Sphingobacterium sp.
  misc_feature (1)..(227): tr|E0Y0P7|E0Y0P7_9SPHI GTP cyclohydrolase 1 OS=uncultur ed Sphingobacterium sp. EB080_L08E11 OX=710992 GN=folE PE=3 SV=1
MSDTINQLLADEIGDAHESFTAVTPLRKDAFDLSNEEKIATIAEHVKGILTTLGMDLEDDSLKGTPMRVAKLYVNEAFGGLDPSRKPGMSTFDNSYRYNEMLVEKNIVVYSTCEHHLLPIVGRAHVAYISKGKVVGLSKMNRIVDYYAKRPQVQERLTRQVVQALQESLGTDDVACVIDAKHLCVNSRGIRDIESSTVTAEFGGVFKDEVKKREFLDYINLSTDFGV

SEQ ID NO: 16253 - protein, 199 aa, Sphingopyxis sp.
  misc_feature (1)..(199): tr|A0A1Y5PTH7|A0A1Y5PTH7_9SPHN GTP cyclohydrolase 1 OS= uncultured Sphingopyxis sp. OX=310581 GN=folE PE=3 SV=1
MSDKVELGPDGKVVVPDHVAAAVRTLIEWAGDDPAREGLLDTPRRVARAWKEYCQGYGEDPSVHLSRTFEEVGGYDEIVLLRDIPFQSHCEHHMAPIIGKAAIAYLPRDRVVGISKLARVLNGYARRLQVQERLTAEVARCIWDNLHPHGVAVVIDAQHGCMTGRGVRTPGVGMVTSRLLGCFLDDERSRKEVLSLMGY

SEQ ID NO: 16254 - protein, 276 aa, Unknown
  misc_feature (1)..(276): tr|A0A3P3XGY4|A0A3P3XGY4_9SPIR GTP cyclohydrolase FolE2 OS=uncultured spirochete OX=156406 GN=folE PE=3 SV=1
MVDVQSFQDDRHIAIQKVGVKGLRYPITLLDKTEKYQHTTAVVNLYANLPRELKGTHMSRFIEVFDEYRHDLSMPNVIRMLRKIRTELDAQSAYTDIHFPYFINKAAPVSGQTAIMSYDCFYEASCSEKGHRFIAGVIVPVQTVCPCSKAISDGGAHNQRGLVTLQVSLGPFFWFEDLIRIVEESGSSELFTLLKREDEKFITEKAYSQPRFVEDVVREVYLKVDALNRFPWFSVEAENFESIHNHSAYAYVEKSERSKIEPVHEGHGKIDTFMLD

SEQ ID NO: 16255 - protein, 276 aa, Unknown
  misc_feature (1)..(276): tr|A0A3P3XT69|A0A3P3XT69_9SPIR GTP cyclohydrolase FolE2 OS=uncultured spirochete OX=156406 GN=folE PE=3 SV=1
MVDVQSFQDDRHIAIQKVGVKGLRYPITLLDRSEKYQHTTALVNLYADLPHEFKGTHMSRFIEVFEEYRQDLSMPNVLRMLKKIRIELDAQTAYTDIHFPYFIKKAAPVSGQTAIMSYDCFYEASSSEKGHRFIAGVTVPVQTVCPCSKAISDGGAHNQRGVVTLQVSLGPFFWFEDLIRIVEESGSSELFTLLKREDEKFITEKAYGQPRFVEDVVREVYSKVDALHRFPWFSVEAENYESIHNHSAYAYVEKSERSKIEPVNGDYGKFDTLGPM

SEQ ID NO: 16256 - protein, 272 aa, Sporomusa sp.; identical to SEQ ID NO: 15009
  misc_feature (1)..(272): tr|A0A212LT11|A0A212LT11_9FIRM GTP cyclohydrolase FolE2 OS=uncultured Sporomusa sp. OX=307249 GN=folE PE=3 SV= 1

SEQ ID NO: 16257 - protein, 242 aa, Stenotrophomonas sp.
  misc_feature (1)..(242): tr|A0A1Y5Q500|A0A1Y5Q500_9GAMM GTP cyclohydrolase I, Fo lE OS=uncultured Stenotrophomonas sp. OX=165438 GN=STPY R_12233 PE=4 SV=1
MTNTVLAPVVHEGTIAAMKISDRIRLRLEAAGSSHRANDNIADFIEDGELDALRMEVEARMKELLHALVIDTDNDHNTADTARRVARMFIDEAFSGRYRAAPAVTAFPNAARFDELMVVGPMTVRSACSHHLCPIMGRVWIGVLPDASSDVIGLSKYARLCDWIMCRPQIQEEAVVMLADELERRIKPDGLAVVMEASHFCMQWRGIKDERSLMTSSVMRGAFRQDTALRREFLSLIGRGTR

SEQ ID NO: 16258 - protein, 199 aa, Stenotrophomonas sp.
  misc_feature (1)..(199): tr|A0A1Y5Q8F0|A0A1Y5Q8F0_9GAMM GTP cyclohydrolase 1 OS= uncultured Stenotrophomonas sp. OX=165438 GN=folE PE=3 SV=1
MADPENPSVTQAQAEEAVRTLLRWAGEDPAREGLLDTPRRVAEAYGDWFKGYHDDPREYLERTFEEVAGYDEMIVLRDIEYESHCEHHMAPIIGRVHVGYVPDGRVVGISKLARVVEAYARRFQVQEKMTAQIADCIQDVLQPLGVGVVVEGAHECMTTRGIHKRGVSMVTSRMRGTFHDDARTRAEFLRFIEVGHARR

SEQ ID NO: 16259 - protein, 263 aa, Unknown
  misc_feature (1)..(263): tr|A0A482ZSU9|A0A482ZSU9_9GAMM GTP cyclohydrolase FolE2 OS=uncultured SUP05 cluster bacterium OX=655186 GN=fol E2 PE=3 SV=1
MKSCDLPDTQNNEDLRQIVIDKVGIKDIAHPITYVSRDGGKIATVGNFTMTVELPEHIKGTHMSRFIEILNQGDCEFNSGNFDKIIDKVRQKLESDTAHIIVDFPFFRKKKAPSSGVESLMDYQVTLYGELEKGKSEVMMKVVVPVTSLCPCSKSISKYGAHNQRSHITIKAKPTLGKQLHVEDLIDLAERMASCELYAILKREDEKLVTERAYDNPAFVEDLVRDIAVELNKDDRINYYRLESENFESIHNHSAYAVIEHQK

SEQ ID NO: 16260 - protein, 263 aa, Unknown
  misc_feature (1)..(263): tr|D1KEB3|D1KEB3_9GAMM GTP cyclohydrolase FolE2 OS=uncu ltured SUP05 cluster bacterium OX=655186 GN=folE2 PE=3 SV=1
MNAAHLPDTQNSKDTRQIIIDKVGIKDIAHPITYIDRDGNKMPTIGRFTMTVSLPEHVKGTHMSRFIEILNDGPCEFNSSNFDKIINKVCEKLKSDTAHIVLEFPFFRKKKAPSSGVESMMDYQVTLYGSFAKGESEVMMKVVVPVTSLCPCSKSISKYGAHNQRSHITIKAKVSEGHKLDIEDLIDLAERKASCELYAILKRDDEKVVTERAYDNPAFVEDLVRDIALDLNLDERINYYRLESENFESIHNHSAYALIENQK

SEQ ID NO: 16261 - protein, 190 aa, Unknown
  misc_feature (1)..(190): tr|B1GZK8|B1GZK8_UNCTG GTP cyclohydrolase 1 OS=Uncultur ed termite group 1 bacterium phylotype Rs-D17 OX=471821 GN=folE PE=3 SV=1
MQIFNFDEKKAQRAVKLLLESFGEDLNREGIKRTPERVAEFYKEVLSGNKIDPLKFIPVHYATEDHEEIVLVKDITFYSLCEHHLLPFFGKMHIAYIPKKDRIIGVSKLIKLVEIFANRLQLQERLTKQLADIVMKFVKPHGVMVVVEAEHLCMTMRGVKKTGSKIITSAMRGIFLKDVRTRSEAMSLLR

SEQ ID NO: 16262 - protein, 305 aa, Thiohalocapsa sp.
  misc_feature (1)..(305): tr|V4JE38|V4JE38_9GAMM GTP cyclohydrolase FolE2 OS=uncu ltured Thiohalocapsa sp. PB-PSB1 OX=1385625 GN=folE2 PE =3 SV=1
MPDALTYMDVLQQTLLEDESMDRTVLTATVPATTTIADVQSRADTRRIPIDKVGIKDIRHPVRIKDRGGQEQHTVATFNMYVYLPHHFKGTHMSRFVAILNGHEHEIGVSTFREMLSEMAERLESEAGHIEMRFPFFIDKKAPISGVASLLDYDVTLIGDIHDGKPKMSIKVVVPVTSLCPCSKQISDYGAHNQRSHVTVEARTRGFLWIEELIEMVEAEASCELYGLLKRPDEKYVTERAYDNPKFVEDTVRDVARRLNDDERISAYIVEAENFESIHNHSAYALIECDKEIEARKAGSAPDCD

SEQ ID NO: 16263 - protein, 111 aa, Thiohalocapsa sp.
  misc_feature (1)..(111): tr|V4LH66|V4LH66_9GAMM GTP cyclohydrolase 1 (Fragment) OS=uncultured Thiohalocapsa sp. PB-PSB1 OX=1385625 GN=N 838_06750 PE=3 SV=1
MTGKIPRISAHTRYEDEDRFEPSDSQDVYDPDKEALIREMLVRLGEDPEREGLKRTPLRVAKAMDFLTQGYHLSAEDIIKKAMFDEDVTEMVVVRDIEFYSLCEHHMLPFF

SEQ ID NO: 16264 - protein, 225 aa, Unknown
  misc_feature (1)..(225): tr|A6EMF5|A6EMF5_9BACT GTP cyclohydrolase 1 OS=unidenti fied eubacterium SCB49 OX=50743 GN=folE PE=3 SV=1
MDLEKELENIEAIGDAHVATSGDTPLRSDAFELSDEEKINSIKSDVQNIMQTLGLDLTDDSLKGTPNRVAKMFVKEIFGGLHPDRKPKASTFDNKYKYNEMLVEKNITLYSTCEHHLLPIVGRAHIAYISKGTVVGLSKMNRIVDYYAKRPQVQERLTMQIVKELQEVLGTDDVACVIDAKHLCVNSRGIRDIDSSTVTSEFCGAFKSPDVRREFLEYIKLETTY

SEQ ID NO: 16265 - protein, 199 aa, Unknown
  misc_feature (1)..(199): tr|A6EU75|A6EU75_9BACT GTP cyclohydrolase 1 OS=unidenti fied eubacterium SCB49 OX=50743 GN=folE PE=3 SV=1
MSSYKKYETYNDKITDDLKDNFTNILKGIGEDVDREGIVKTPERAAKAMQFLTSGHNQDPAEILKSAMFAEDYNDMVIIKDIELYSLCEHHILPFFGKAHIAYIPNGHIVGLSKIPRVVDIFARRLQVQERLTHDILECINETLKPQGVAVVIEASHMCMMMRGVQKQNSVTTTSGFRGQFEKIETRNEFLKLISSSLS

SEQ ID NO: 16266 - protein, 189 aa, Ureibacillus terrenus
  misc_feature (1)..(189): tr|A0A540V6L2|A0A540V6L2_9BACL GTP cyclohydrolase 1 OS= Ureibacillus terrenus OX=118246 GN=folE PE=3 SV=1
MSNIDLKKIEEAVKMILEAIGEDVNREGLIDTPKRVSKMYEEMFSGLKEDPRCLFETVFHEEHEELVLVKDIPFYSMCEHHLIPFYGKAHVAYIPQNGRVAGLSKIGRLVESVSHRPQLQERLTTTIADILMEKLEPQGVFVMIEAEHMCMTMRGLKKPGTKTVTSCARGIYEEDDVKRQEVISFIQMS

SEQ ID NO: 16267 - protein, 189 aa, Ureibacillus thermophilus
  misc_feature (1)..(189): tr|A0A4P6UTI3|A0A4P6UTI3_9BACL GTP cyclohydrolase 1 OS= Ureibacillus thermophilus OX=367743 GN=folE PE=3 SV=1
MSNVDLKKIEEAVKMILEAVGEDVNREGLIDTPKRVSKMYEEMFKGLNEDPRSLFDTVFHENHDELVLVKDIPFYSMCEHHLVPFYGKAHVAYIPQHGRVAGLSKIGRLVESVSHRPQLQERITTTIADILMEKLEPQGVFVMIEAEHMCMTMRGLKKPGTKTVTSCARGIYEVDDVKRQEVISFIQMS

SEQ ID NO: 16268 - protein, 257 aa, Uruburuella suis
  misc_feature (1)..(257): tr|A0A4R2MQS9|A0A4R2MQS9_9NEIS GTP cyclohydrolase FolE2 OS=Uruburuella suis OX=252130 GN=folE2 PE=3 SV=1
MNAIADVQSSPDLRNMPINQVGIKDLRFPIAITSAEGTQHTVGRLSMTVFLPADQKGTHMSRFVALMERQSEPLSFGRLKTLTEEMVQLLDSHSGKISVSFPFFRQKSAPVSGIKSLLDYDVTLTGEIKEGAYSCTLKVLTPVTSLCPCSKEISQYGAHNQRSHVTVTLTCCDEVGIEEIIDCVEKQASCQLYGLLKRPDEKFVTEQAYENPKFVEDMVRDVAVALRGDARIRAFVVESENFESIHNHSAYAYIAYP

SEQ ID NO: 16269 - protein, 187 aa, Vagococcus acidifermentans
  misc_feature (1)..(187): tr|A0A430AVI5|A0A430AVI5_9ENTE GTP cyclohydrolase 1 OS= Vagococcus acidifermentans OX=564710 GN=folE PE=3 SV=1
MNSEQKKIIQESVKNILRAIGEDVTREGLIETPERVAKMYEEIFSSVTETDFNNCKVFTSLSDDDIVLVKDIPFYSMCEHHLLPFYGKAHVAYIPSNKQIIGLSKIPRMVDYCAKRPNVQENLTIQIARLLEEKVSPQGIAVAIEAEHMCMSMRGIKKPGSTTKTFHYSGCFKTDRDLKREFLEALT

SEQ ID NO: 16270 - protein, 186 aa, Vagococcus elongatus
  misc_feature (1)..(186): tr|A0A430AZS7|A0A430AZS7_9ENTE GTP cyclohydrolase 1 OS= Vagococcus elongatus OX=180344 GN=folE PE=3 SV=1
MMDEKKIKTAVKMLLEGMGEDIQRPGLLETPERVAKSYKEIFGGLYEDAAVHLTKTFPVESNEFVLEKDIPFYSTCEHHLIPFFGVAHVAYVPTDKVVGLSKLARTVDIFARRPQIQEQLTNQIADAITEHLEPAGVMVIIEAEHLCMSMRGVKKPGAKTLTMVSRGVLQTDSELKNTILSMVGIK

SEQ ID NO: 16271 - protein, 187 aa, Vagococcus fluvialis
  misc_feature (1)..(187): tr|A0A1X6WQQ0|A0A1X6WQQ0_9ENTE GTP cyclohydrolase 1 OS= Vagococcus fluvialis bH819 OX=1255619 GN=folE PE=3 SV=1
MDLENKQIIEDAVKQILKAIGENPDREGLKNTPKRVAKMYDEVFGSLTGPEFDDYALFDSRNEDDMVLVKDIQFYSMCEHHLLPFFGKAHVAYIPDGNKVLGLSKLPRLVEYCAKRPSVQEDLTVMIVEQLVKHVPVKGVAVSIEAEHMCMTMRGIKSPHSSTKTFHYTGVFKEDRDVKNDFLRAID

SEQ ID NO: 16272 - protein, 187 aa, Vagococcus humatus
  misc_feature (1)..(187): tr|A0A3S0ADQ5|A0A3S0ADQ5_9ENTE GTP cyclohydrolase 1 OS= Vagococcus humatus OX=1889241 GN=folE PE=3 SV=1
MDLERIEAAVKEILIAVGEDPERTGLQETPKRVARMYQEVFAGLENDPTVHLKVFDEGQDEEMVIVRDIPLHSMCEHHLLPFVGKAHIAYIPRNGKIIGLSKFARIVDHFSKRPQVQERLTSQIADFLDENLDPVGVAVVIEAEHMCMTMRGAKAAGSGTLTSALRGSMRSDAKTRAEVMSLLRGRI

SEQ ID NO: 16273 - protein, 187 aa, Vagococcus martis
  misc_feature (1)..(187): tr|A0A1V4DK19|A0A1V4DK19_9ENTE GTP cyclohydrolase 1 OS= Vagococcus martis OX=1768210 GN=folE PE=3 SV=1
MELEKQMQIEEAVKTILTAIGEDVDRDGLKETPKRVAKMYAEVFSSVQEKEFTNYKVFPSLNEDDMVLVKDIEFYSMCEHHLLPFFGKAHVAYIPSDNKVLGLSKVARMVEFCAKRPNVQEDLTIQIANLINEKVKTKGVAVSIEAEHMCMAMRGVKARGSVTKTFHYQGVFKEDKDVKNDFLRALD

SEQ ID NO: 16274 - protein, 187 aa, Vagococcus penaei
  misc_feature (1)..(187): tr|A0A1Q2D923|A0A1Q2D923_9ENTE GTP cyclohydrolase 1 OS= Vagococcus penaei OX=633807 GN=folE PE=3 SV=1
MNQENYQAIEEAVKVILEAIGEDVNRDGLKETPKRVAKMYAEVFSSVREKEFTNYKVFPSMNDDDMVLVKDIEFYSMCEHHLLPFYGKAHVAYIPSDNKVLGLSKVARMVDFCAKRPNVQEDLTIQIANLLNEKVNTKGVAVSIEAEHMCMSMRGAKARGSVTKTFHYQGAFKSDRELKNDFLRALD

SEQ ID NO: 16275 - protein, 193 aa, Vagococcus sp.
  misc_feature (1)..(193): tr|A0A414XCD9|A0A414XCD9_9ENTE GTP cyclohydrolase 1 OS= Vagococcus sp. AM17-17 OX=2292077 GN=folE PE=3 SV=1
MKVGIRMEQEKQLQIEEAVKTILTAIGEDVDRDGLKETPKRVAKMYAEVFSSVQEKEFTNYKVFPSLNEDDIVLVKDIEFYSMCEHHLLPFFGKAHVAYIPSDNKVLGLSKVARMVEFCAKRPNVQEDLTIQIANLINEKVKTKGVAVSIEAEHMCMAMRGVKARGSVTKTFHYQGVFKEDKDVKNDFLRALD

SEQ ID NO: 16276 - protein, 187 aa, Vagococcus sp.
  misc_feature (1)..(187): tr|A0A429ZF01|A0A429ZF01_9ENTE GTP cyclohydrolase 1 OS= Vagococcus sp. SS1994 OX=1977868 GN=folE PE=3 SV=1
MEQDKQLQIEEAVKTILTAIGEDIDRDGLKETPKRVAKMYAEVFSSVREKEFTNYKVFPSLNEDDMVLVKDIEFYSMCEHHLLPFFGKAHVAYIPSDNKVLGLSKVARMVDFCAKRPNVQEDLTIQIANLINEKVKTKGVAVSIEAEHMCMAMRGVKARGSVTKTFHYQGVFKEDKDVKNDFLRALD

SEQ ID NO: 16277 - protein, 187 aa, Vagococcus teuberi
  misc_feature (1)..(187): tr|A0A1J0A8G4|A0A1J0A8G4_9ENTE GTP cyclohydrolase 1 OS= Vagococcus teuberi OX=519472 GN=folE PE=3 SV=1
MEQEKQLQIEEAVKTILTAIGEDVDRDGLKETPKRVAKMYAEVFSSVQEKEFTNYKVFPSLNEDDMVLVKDIEFYSMCEHHLLPFFGKAHVAYIPSDHKVLGLSKVARMVEFCAKRPNVQEDLTIQIANLINEKVKTKGVAVSIEAEHMCMAMRGVKARGSVTKTFHYQGVFKEDKDVKNDFLRALD

SEQ ID NO: 16278 - protein, 187 aa, Vampirococcus sp.
  misc_feature (1)..(187): tr|A0A410P655|A0A410P655_9BACT GTP cyclohydrolase 1 OS= Vampirococcus sp. LiM OX=1930593 GN=folE PE=3 SV=1
MNKQKLIKAVKMILEAVGEDPKRQDLLETPERVADMYAEILSGLSADPKKELEVVLDQKHEEIVLLKDIPLYSICEHHLLPFIGRAHVAYIPKGGRVTGLSKIARVVEILSRRPQVQERLTTQIATVIMETLKPLGVMVVIEAEHLCMSMRGIKKPGITTVTSAVRGVFKENEKTRSETLALMKGGR

SEQ ID NO: 16279 - protein, 188 aa, Varibaculum cambriense
  misc_feature (1)..(188): tr|A0A2I1YBY5|A0A2I1YBY5_9ACTO GTP cyclohydrolase 1 OS= Varibaculum cambriense OX=184870 GN=folE PE=3 SV=1
MGYNQAGVEKAIRDLLIAIGEDPDREGLQETPARMGRAWKEVMSGMRSDPAAPLEKQFHVDDEEMVMVRGIPFYSLCEHHLLPFFGVAHVAYIPRDGRITGLSKLARVVEGFSHRLQVQERLTAQVADALMEKLEPQGAAVVIEGEHLCMSMRGIKKPGARTTTSALRGVMRSDPRSRAEVLSLIREN

SEQ ID NO: 16280 - protein, 188 aa, Varibaculum cambriense
  misc_feature (1)..(188): tr|W1TNB2|W1TNB2_9ACTO GTP cyclohydrolase 1 OS=Varibacu lum cambriense DORA_20 OX=1403948 GN=folE PE=3 SV=1
MGYNQDGVEKAIRDLLIAIGENPDREGLQETPARMGRAWKEVISGMHSDPAAPLEKQFHVDDEEMVMVRGIPFYSLCEHHLLPFFGVAHVAYIPREGRITGLSKLARVVEGFSHRLQVQERLTAQVADALMEKLDPRGAAVVIEGEHLCMSMRGIKKPGARTTTSALRGVMRSDPRSRAEVLSLIRSN

SEQ ID NO: 16281 - protein, 207 aa, Variibacter gotjawalensis
  misc_feature (1)..(207): tr|A0A0S3PW82|A0A0S3PW82_9BRAD GTP cyclohydrolase 1 OS= Variibacter gotjawalensis OX=1333996 GN=folE PE=3 SV=1
MDAIIKPFSRTPSESSRTQRPTRDEAEAAVRTLIAYAGDDPAREGLLDTPKRVVRAYDELFGGYRLDPADVLQRTFSEIDTYDDLVLVRDIPFASHCEHHMIPFTGKAHIAYVPVGEVVGLSKLARLIDIFAKRLQTQEHLTAQIAGAIEEGLKPRGIAVMIEAEHMCMSLRGVQKHGSSTVTTKFTGSFRDDPAEQVRFMTLIRQR

SEQ ID NO: 16282 - protein, 243 aa, Variovorax paradoxus
  misc_feature (1)..(243): tr|E6UYP5|E6UYP5_VARPE GTP cyclohydrolase I OS=Variovor ax paradoxus (strain EPS) OX=595537 GN=Varpa_4787 PE=4 SV=1
MLRKTDVEPLPDRKDDDEGTPVSVKIRERLNAARKRFNANDNIAEFIQPGELESLLDEVEVKMKAVLESLVIDVENDHNTDNTARRVAKMYLNEVFRGRYVPPPPLTEFPNAEHLNELMIVGPITVRSACSHHFCPIIGKLWIGVMPNEHTNVIGLSKYARLAEWVMGRPQIQEEAIVQLADLIQEKTRPDGLALVMEAEHFCMAWRGVKEMDSKMINSVMRGVFLKDPSLRREFLSLLPRKS

SEQ ID NO: 16283 - protein, 243 aa, Variovorax paradoxus
  misc_feature (1)..(243): tr|C5CWX5|C5CWX5_VARPS GTP cyclohydrolase I OS=Variovor ax paradoxus (strain S110) OX=543728 GN=Vapar_4119 PE=4 SV=1
MLRKTDVEPRPDGNNDDEGTPVSVKIRERLTAARRRFNANDNIAEFIEPGELESLLDEVEVKMKGVLESLVIDLENDHNTGNTARRVAKMYLNEVFKGRYVAPPSLTEFPNAEHLNELMIVGPITVRSACSHHFCPIIGKLWIGIMPNEHTNVIGLSKYARLAEWVMGRPQIQEEAVVQLADLIQEKTQPDGLALVMEAEHFCMAWRGVKEMDSKMINSVMRGVFLKDPSLRREFLSLLPRRS

SEQ ID NO: 16284 - protein, 243 aa, Variovorax sp.
  misc_feature (1)..(243): tr|A0A120D5J2|A0A120D5J2_9BURK GTP cyclohydrolase I typ e 1 OS=Variovorax sp. WDL1 OX=207745 GN=APY03_4360 PE=4 SV=1
MLRKIDTAERPEPDAGDEGTPVSVKIRERLLAARQRFHANDNIAEFIEPGELESLLDEVEHKMKDVLEALVIDLDNDHNTGNTARRVAKMYLNEVFKGRYVAPPSLTEFPNAEHLNELMIVGPITVRSACSHHFCPIIGKLWIGVMPNEKTNVIGLSKYARLAEWVMSRPQIQEEAVVQLADLIQERTQPDGLALVMEAEHFCMQWRGVKEMDSKMINSVMRGVFLKDSNLRREFLALIPRRS

SEQ ID NO: 16285 - protein, 306 aa, Variovorax sp.
  misc_feature (1)..(306): tr|A0A1G4ZTJ2|A0A1G4ZTJ2_9BURK GTP cyclohydrolase FolE2 OS=Variovorax sp. EL159 OX=1566270 GN=folE2 PE=3 SV=1
MTARLPDIALTEASPMPLPLDGVGMRGVELPIWPDDPGVRHPVHARADVEVDLPDPQVKGIHMSRLYRLLCDSAESQKLGAASLQKLLRAMVESHADCGSARARLVLSFELLCKRAALVTPGLHGWNAYPVRLEALWRDGSFTLDAQVRVTYASTCPCSAALSRQLIAQAFDARFATHKTMATADALAWLQDNATLATPHSQRSIADIQVRLPHDAPDLGLLRLIDLAEAALGTPAQGAVKRADEQAFARLNGQNLMYVEDAARRLQAALAGSFAVTRIDVRHLESLHPHDAFARVSNASAGEVFA

SEQ ID NO: 16286 - protein, 209 aa, Varunaivibrio sulfuroxidans
  misc_feature (1)..(209): tr|A0A4R3JI83|A0A4R3JI83_9PROT GTP cyclohydrolase 1 OS= Varunaivibrio sulfuroxidans OX=1773489 GN=folE PE=3 SV= 1
MSANSPENTDQKPTREEAEEAVRTLLRWAGDDPRREGLLDTPGRVVRAYGEFFRGYDEDPEDILKRTFEEVEGYDELVLLRDIRFESHCEHHLAPIIGKAHVGYLPDRRVVGISKLARVIEAYAKRLQIQEKMTAQIANTIDEVLQPLGVAVVIEAAHQCMTTRGVHKPGVTMVTSRMLGAFRNDPSTRREFLAMVANAPSRTVDGANT

SEQ ID NO: 16287 - protein, 187 aa, Veillonella atypica
  misc_feature (1)..(187): tr|A0A133S2I1|A0A133S2I1_9FIRM GTP cyclohydrolase 1 OS= Veillonella atypica OX=39777 GN=folE PE=3 SV=1
MNQLAKEGIEQFLRALSVDTKAPELEKTPTRVTELYEELFSGVGKETKELWGELFSTDYNGLVAVTDIPFYSMCEHHLLPFFGTVDVIYQPHSGCVAGLSKFNDVITVLSRKPQLQERLTREIADAIERDLSAEGVFVRLKATQLCMLMKGTLQQGSQVVTIESRGLLREAGSLRDEALAMLGGTNV

SEQ ID NO: 16288 - protein, 187 aa, Veillonella atypica
  misc_feature (1)..(187): tr|A0A3A6WF36|A0A3A6WF36_9FIRM GTP cyclohydrolase 1 OS= Veillonella atypica OX=39777 GN=folE PE=3 SV=1
MDTKRIESLVYQLLEALGENPDREGLVETPKRVAQMMEEMFEGIQYTNADIADMFGKTFDVDTNQMVIVKDITCFSHCEHHMALMYDMNISIGYIPRGRVIGLSKMPRIAEMCCKRLQLQEKIGEDIAEVISIATGTDDVIVHITSSHSCVSARGVKSANSKTTTLATKGAFQQEDMINRFLTLKNA

SEQ ID NO: 16289 - protein, 193 aa, Veillonella criceti
  misc_feature (1)..(193): tr|A0A380NJN1|A0A380NJN1_9FIRM GTP cyclohydrolase 1 OS= Veillonella criceti OX=103891 GN=folE PE=3 SV=1
MKEQASEGIAQFLTALGIDLKAAAMEKTPNRVASLYEELFAGMNVQSADIWGEIFPTEYKGLVAVTDIPFYSVCEHHLMPFFGTVDIVYQPKEGRVAGLSKLSDLVNVFARRPQLQERMTRQIATALETDLLAEGVVVRIKATHLCMLIKGELQQGTAVVTMECRGVLSKTGQLREEAMAILGGTTDVQTTQL

SEQ ID NO: 16290 - protein, 189 aa, Veillonella denticariosi
  misc_feature (1)..(189): tr|A0A2S7Z8H4|A0A2S7Z8H4_9FIRM GTP cyclohydrolase 1 OS= Veillonella denticariosi JCM 15641 OX=1298594 GN=folE P E=3 SV=1
MNQRAKDGIKQFLQALSVDTEAPELEKTPSRVTELYGELFSGVGMDTKSAWGDTFTADYKGLVALSGIPFYSMCEHHLLPFFGTVDIVYQPKDGCVAGLSKFQDVVNILSRRPQLQERLTSELADAIMNDLSAHGVFVRITSTQLCMLIKGTMQQDSKVITLESRGVLDETGTLRDEALAMLGGGQADV

SEQ ID NO: 16291 - protein, 187 aa, Veillonella denticariosi
  misc_feature (1)..(187): tr|A0A2S7Z7U7|A0A2S7Z7U7_9FIRM GTP cyclohydrolase 1 OS= Veillonella denticariosi JCM 15641 OX=1298594 GN=folE P E=3 SV=1
MDTEKIESLVYQLLEALGEDPDRAGLVETPKRVAQMMAEVYEGIRYTNAEIAEMYGKTFPVDTDQMVVVKNITCFSHCEHHMALMYDMSISIGYIPKGRVIGLSKVPRIAEMCCKRLQLQEKIGEDIAEVISMATGSEDVIVHITSSHSCMSARGIKSTDSKTTTLATKGVFNEDGMIQRFMLIKES

SEQ ID NO: 16292 - protein, 187 aa, Veillonella dispar
  misc_feature (1)..(187): tr|C4FPL0|C4FPL0_9FIRM GTP cyclohydrolase 1 OS=Veillone lla dispar ATCC 17748 OX=546273 GN=folE PE=3 SV=1
MDTEKIESLVYQLLEALGEDPNREGLVETPKRVAQMMAEVYEGIQYTNAEIAEMYGKTFEVDTNQMVVVKDITCFSHCEHHMALMYDMSISIGYIPKGRVIGLSKIPRIAEMCCKRLQLQEKIGEDIAEVISLATGSEDVIVHITSSHSCMSARGIKSTDSQTTTLATKGVFNEDNMIHRFMLMKQS

SEQ ID NO: 16293 - protein, 189 aa, Veillonella dispar
  misc_feature (1)..(189): tr|C4FRH1|C4FRH1_9FIRM GTP cyclohydrolase 1 OS=Veillone lla dispar ATCC 17748 OX=546273 GN=folE PE=3 SV=1
MNQRAKDGIKQFLAALSVDTEAPELEKTPSRVTELYSELFSGVGLDTKSAWGETFSTDYKGLVAVTGIPFYSMCEHHLLPFFGTVDIVYQPKDGCVAGLSKFQDIVNILSRRPQLQERLASELADAIMNDLSAHGVFVRITSTQLCMLIKGTMQQDSKVITLESRGVLAETGTLRDEALAMLGGGQANV

SEQ ID NO: 16294 - protein, 187 aa, Veillonella montpellierensis
  misc_feature (1)..(187): tr|A0A096ALW7|A0A096ALW7_9FIRM GTP cyclohydrolase 1 OS= Veillonella montpellierensis DNF00314 OX=1401067 GN=fol E PE=3 SV=1
MNKDLIEQGIKLLLQGIGENLEREGIIETPKRAAKMYIELLEGMNYTNKEIAEKFGKSFKVDTTQMVIVKDIEAFSMCEHHLALMYDMNIAVGYIPNGKVIGLSKIPRIAEMCCKRLQLQEKIGEDIAEVISIATGSEDVIVHITAKHSCVTARGIKSRNSNTVTITKKGIFKDNYDITREFINNIQ

SEQ ID NO: 16295 - protein, 194 aa, Veillonella montpellierensis
  misc_feature (1)..(194): tr|A0A096AN32|A0A096AN32_9FIRM GTP cyclohydrolase 1 OS= Veillonella montpellierensis DNF00314 OX=1401067 GN=fol E PE=3 SV=1
MKQEINEERVAALIRELLIELGENPNRPGLLETPDRVARMYQEVFEGIRYSNHEIAEKFGKVFEEVKTGSLVTVTHIPIFSYCEHHLALMYNMDVSVGYIPNNKVIGLSKVARIADLVGKRLQLQERIGDDIREILEEVLDTKDIIVVIRGEHACMTSRGIRKPGTITKTASLGGIFETDIPLRQEFYSLLTMG

SEQ ID NO: 16296 - protein, 189 aa, Veillonella parvula
  misc_feature (1)..(189): tr|A0A413E8L0|A0A413E8L0_9FIRM GTP cyclohydrolase 1 OS= Veillonella parvula OX=29466 GN=folE PE=3 SV=1
MNQRANDGIKQFLEALSVDTEAPELEKTPSRVTELYSELFSGVGVETKSVWGETFSTDYKGLIAVTGIPFYSMCEHHLLPFFGTVDIVYQPKDGCVAGLSKFQDVVNILSRRPQLQERLASELADAIMNDLSAHGVFVRITSTQLCMLIKGTMQQDSKVITLESRGVLAETGTVRDEALAMLGGGQVNV

SEQ ID NO: 16297 - protein, 189 aa, Veillonella parvula
  misc_feature (1)..(189): tr|D1BLB9|D1BLB9_VEIPT GTP cyclohydrolase 1 OS=Veillone lla parvula (strain ATCC 10790 / DSM 2008 / JCM 12972 / Te3) OX=479436 GN=folE PE=3 SV=1
MNQRAKDGIKQFLEALSVDTEAPELEKTPSRVTELYSELFSGVGLDTKAAWGETFSTDYKGLVAVTGIPFYSMCEHHLLPFFGTVDIVYQPKDGCVAGLSKFQDIVNILSRRPQLQERLASELADAIMNDLFAHGVFVRITSTQLCMLIKGTMQQDSKVITLESRGVLAEKGTLRDEALAMLGGGQVNV

SEQ ID NO: 16298 - protein, 187 aa, Veillonella rodentium
  misc_feature (1)..(187): tr|A0A239ZDX2|A0A239ZDX2_9FIRM GTP cyclohydrolase 1 OS= Veillonella rodentium OX=248315 GN=folE_2 PE=3 SV=1
MDTEKIESLVYQLLEALGEDPDRAGLVETPKRVAQMMAEVYEGIRYTNAEIAEMYGKTFPVDTDQMVVVKNITCFSHCEHHMALMYDMSISIGYIPKGRVIGLSKVPRIAEMCCKRLQLQEKIGEDIAEVISMATGSEDVIVHITSSHSCMSARGIKSTDSKTTTLATKGVFNEDGMIQRFMLMKES

SEQ ID NO: 16299 - protein, 189 aa, Veillonella rodentium; identical to SEQ ID NO: 16290
  misc_feature (1)..(189): tr|A0A239YM55|A0A239YM55_9FIRM GTP cyclohydrolase 1 OS= Veillonella rodentium OX=248315 GN=folE_1 PE=3 SV=1

SEQ ID NO: 16300 - protein, 189 aa, Veillonella rogosae
  misc_feature (1)..(189): tr|A0A2S7YZ80|A0A2S7YZ80_9FIRM GTP cyclohydrolase 1 OS= Veillonella rogosae JCM 15642 OX=1298595 GN=folE PE=3 S V=1
MNQRAKDGIKQFLEALSVDTEAPELEKTPSRVTELYSELFSGVGLDTKSAWGETFSTDYKGLVAVTGIPFYSMCEHHLLPFFGTVDIVYQPKDGCVAGLSKFQDIVNILSRRPQLQERLASELADAIMNDLSAHGVFVRITSTQLCMLIKGTMQQDSKVITLESRGVLAEKGTLRDEALAMLGGGQANV

SEQ ID NO: 16301 - protein, 193 aa, Veillonella seminalis
  misc_feature (1)..(193): tr|K9D067|K9D067_9FIRM GTP cyclohydrolase 1 OS=Veillone lla seminalis ACS-216-V-Col6b OX=883156 GN=folE PE=3 SV =1
MKEQASEGVAQFLTALGIDLKAADMENTPQRVAGLYEELFAGMNKSSADIWGDIFPTDYKGLVAVTSIPFYSVCEHHLMPFFGTADIVYQPKDGRVAGLSKLSDLVNLFARRPQLQERMTREIATALENDLEAEGVMVRIKATHLCMLIKGELQQGTAVVTMECRGVLSRTGQLREEALTILGGSTDVQTTQL

SEQ ID NO: 16302 - protein, 187 aa, Veillonella sp.
  misc_feature (1)..(187): tr|A0A2S7Z9G8|A0A2S7Z9G8_9FIRM GTP cyclohydrolase 1 OS= Veillonella sp. T34266-5 OX=2027457 GN=folE PE=3 SV=1
MDTKRIESLVYQLLEALGENPDREGLVETPKRVAQMMEEMFEGIQYTNADIADMFGKTFDVDTNQMVIVKDITCFSHCEHHMALMYDMNISIGYIPRGCVIGLSKMPRIAEMCCKRLQLQEKIGEDIAEVISIATGTDDVIVHITSSHSCVSARGVKSANSKTTTLATKGVFEQDDMINRFLTLKNA

SEQ ID NO: 16303 - protein, 188 aa, Veillonella sp.
  misc_feature (1)..(188): tr|F9N411|F9N411_9FIRM GTP cyclohydrolase 1 OS=Veillone lla sp. oral taxon 780 str. F0422 OX=944564 GN=folE PE= 3 SV=1
MKEQAIMGVRQLLEGLDINLETKGMTDTPKRVATLFEGLFSGCHSTGKEALGDVYPTEHTGLVSVNHIPFYSICEHHLMPFYGKVHIVYQPRDGKVFGLGRLKALVDVYAKRPQLQERLTHDIATSLVEDGDVLGAMVMVEATHLCMLMKGEVAQETVAKTILATGILEPMGTLREEALVLLGGNDHV

SEQ ID NO: 16304 - protein, 187 aa, Veillonella tobetsuensis
  misc_feature (1)..(187): tr|A0A480B4W5|A0A480B4W5_9FIRM GTP cyclohydrolase 1 OS= Veillonella tobetsuensis OX=1110546 GN=folE_1 PE=3 SV=1
MDTKRIESLVHQLLEALGENPNREGLVETPKRVAQMMEEMFEGIQYTNADIADMFGKTFEVDTNQMVVVKDITCFSHCEHHMALMYDMNISIGYIPRGRVIGLSKMPRIAEMCCKRLQLQEKIGEDIAEVISIATGTDDVIVHITSSHSCVSARGVKSTNSKTTTLATKGIFEQDDMINRFLTLKNA

SEQ ID NO: 16305 - protein, 187 aa, Veillonella tobetsuensis
  misc_feature (1)..(187): tr|A0A480B8V7|A0A480B8V7_9FIRM GTP cyclohydrolase 1 OS= Veillonella tobetsuensis OX=1110546 GN=folE_1 PE=3 SV=1
MDTNRIESLVYQLLEALGENPNREGLVETPKRVAQMMEEMFEGIQYTNADIADMFGKTFEVDTNQMVVVKDITCFSHCEHHMALMYDMNISIGYIPRGRVIGLSKMPRIAEMCCKRLQLQEKIGEDIAEVISIATGTDDVIVHITSSHSCVSARGVKSTNSKTTTLATKGIFEQDDMINRFLTLKNA

SEQ ID NO: 16306 - protein, 188 aa, Veillonellaceae bacterium
  misc_feature (1)..(188): tr|A0A134CB19|A0A134CB19_9FIRM GTP cyclohydrolase 1 OS= Veillonellaceae bacterium DNF00626 OX=1588754 GN=folE P E=3 SV=1
MDIKKLEEAGRLILEAIGEDPLREGLVETPGRFASMMAEQMAYTEKSNEDIAKEFDKTFVSPGSDVVIVKDISLFSHCEHHLALMYHMTASIGYIPKGRVIGLSKVARIAEAVSKRLQIQERIGSDIRDIMERITGAEDIIVYIEGEHSCMTARGIKKPGSVTQTLSSSGRYRTDPVLRQEFLQTIGL

SEQ ID NO: 16307 - protein, 186 aa, Veillonellaceae bacterium
  misc_feature (1)..(186): tr|A0A316LDX3|A0A316LDX3_9FIRM GTP cyclohydrolase 1 OS= Veillonellaceae bacterium OX=2049049 GN=folE PE=3 SV=1
MADRKKLEQAARLILEAIGEDPNREGLLETPRRFAEMMEEQMAYTTVSNEEIARQFGKTFTSSEEGPVVVKDISIFSHCEHHLALMYHMHVSVGYIPSGRVIGLSKVARIADAVSRRLQIQERIGADIRTIIEKVTGSQDVIVRIDGEHSCMTARGIKKPGAVTTTISSSGKFNTPEYRQLFKEML

SEQ ID NO: 16308 - protein, 181 aa, Ventosimonas gracilis
  misc_feature (1)..(181): tr|A0A139SHD3|A0A139SHD3_9GAMM GTP cyclohydrolase 1 OS= Ventosimonas gracilis OX=1680762 GN=folE PE=3 SV=1
MNLQSHYHGILEALGEDPCREGLADTPKRAAKAMQYLCRGYQQTLEEVTNGALFATSSSEMVLVKNIELYSLCEHHLLPFIGKAHVAYLPNGKVLGLSKVARIVDMYARRLQIQENLSRQIAEAVQQVTNAFGVAVVIEAQHMCMMMRGVEKQNSSMVTSVMLGQFRKNAATRSEFLSLLD

SEQ ID NO: 16309 - protein, 267 aa, Verminephrobacter eiseniae
  misc_feature (1)..(267): tr|A1WHI9|A1WHI9_VEREI GTP cyclohydrolase OS=Verminephr obacter eiseniae (strain EF01-2) OX=391735 GN=Veis_1329 PE=4 SV=1
MTYDWLAPGAKTIAPVRGPFTGTMRAMSSPPAGAMAPLPPDPGSPVSVKIRERLVAARKRFHANDNIAQFIEPGELAQLLDEVEVKIEGMLDSLVIDTEDDHNTRHTARRMAKMYLNEVFKGRYVPAPPITEFPNVERLNELMIVGPLTVRSACSHHFCPVVGRIWIGVLPSEHTNVIGLSKYARLVDWIMGRPQIQEEAVVQLADLIMEKTQPDGLAIMMEASHFCMSWRGVREMDSKMINSVMRGVFLKDSALRREFLALLPGRN

SEQ ID NO: 16310 - protein, 173 aa, Verrucomicrobia bacterium
  misc_feature (1)..(173): tr|A0A1Q6V6I5|A0A1Q6V6I5_9BACT GTP cyclohydrolase 1 OS= Verrucomicrobia bacterium 13_2_20CM_55_10 OX=1805420 GN =folE PE=3 SV=1
MLDGIGEDLDREGLRRTPDRAARALEFLTQGYRQDLDEIINDAVFESDASEIILVKDIELYSLCEHHLLPFIGRAHVAYIPNGKVIGLSKVARIVDVFARRLQIQENLTTRIAESLMTCLEPSGVAVVVEAKHLCMMMRGVEKQNSIMKTSCLLGVFKEDARTRSEFLSLLKD

SEQ ID NO: 16311 - protein, 209 aa, Verrucomicrobia bacterium
  misc_feature (1)..(209): tr|A0A2V5RJB5|A0A2V5RJB5_9BACT GTP cyclohydrolase 1 OS= Verrucomicrobia bacterium OX=2026799 GN=folE PE=3 SV=1
MIQRGNSNFDLEERFTRDRNRLGEKDLDRIAKAYRELLHGVGEDLDREGLRRTPDRAARALEFLTQGYRQDLDEIINDAVFESDASEIILVKDIELYSLCEHHLLPFIGRAHVAYIPNGKVIGLSKVARIVDVFARRLQIQENLTTQIAESLMGCLEPAGVAVVVEAKHLCMMMRGVEKQNSVMKTSCLLGVFKEDARTRSEFLSLLKD

SEQ ID NO: 16312 - protein, 279 aa, Verrucomicrobia subdivision
  misc_feature (1)..(279): tr|A0A5C9DUD9|A0A5C9DUD9_9BACT GTP cyclohydrolase FolE2 OS=Verrucomicrobia subdivision 3 bacterium OX=2052186 GN=folE2 PE=3 SV=1
MIRASDSAAGTTVAKQSDPPAKAPLHDVQSGRDHRELRIDKVGVRGLRFPIQIRDKAHSHQNTIATIAMCVDLPKEFKGTHMSRFIEVLNAHGSVVHVENIEDILHAMQAKLHAATAHLEMEFPFFLTKKAPVTGMEGVMDYTARFAATACGKEIDFVLTVIVGVTTLCPCSKAISQYGAHNQRGNVTVSIRSDEVVWIEDLIALVEASASSELYSLLKRQDEKAVTERAYENPVFVEDLVRNVALKLNAHDDVTWYRVEAENFESIHNHNAYACIEKG

SEQ ID NO: 16313 - protein, 268 aa, Verrucomicrobia subdivision
  misc_feature (1)..(268): tr|A0A520RJL7|A0A520RJL7_9BACT GTP cyclohydrolase FolE2 OS=Verrucomicrobia subdivision 3 bacterium OX=2052186 GN=folE2 PE=3 SV=1
MPKSGALVDTQNQKDERCIPIDKVGVRGLRFPIQVRDRARHHQDTIASVGMYVDLPHEFKGTHMSRFVEVLSSHGNLVHVEIIPQILQEMQSKLHAKNAHLEMEFPYFLEKTAPVTRKKSLMDYTVSFDASADGDDLDFVLKVVVPVTTLCPCSKAISRYGAHNQRGEVTVAVRFNDIVWIEDLIEQVESSASSELYALLKRPDEKAVTEAAYENPVFVEDLVRNVVMRLKAMPQVTWYRVEAENFESIHNHNAYASIEAHSDSMDFV

SEQ ID NO: 16314 - protein, 261 aa, Verrucomicrobiaceae bacterium
  misc_feature (1)..(261): tr|A0A4Q2XZU6|A0A4Q2XZU6_9BACT GTP cyclohydrolase FolE2 OS=Verrucomicrobiaceae bacterium OX=2026800 GN=folE2 P E=3 SV=1
MSELTDTQNEIDDRLIPIDRVGIKGLRFPVEVREKDGGTQRTVATAALTVDLAAHLKGTHMSRFVEALHEHGTLLDVATVEDLPRNLLDRLFARRAHVEFQFPFFISKAAPVTGKPGLVDYEVKFTVEVDVDNGCDFILTVIVPVATLCPCSKAISERGAHNQRGTITYSVRSSAPLAIEELIRIAEESASCELYSMLKRPDEKAVTERAYDNPVFVEDVVRNVAKFSDARPEITWYRIEVENFESIHNHSAYAVIEKQVR

SEQ ID NO: 16315 - protein, 278 aa, Verrucomicrobiaceae bacterium
  misc_feature (1)..(278): tr|A0A1Z8ZUT8|A0A1Z8ZUT8_9BACT GTP cyclohydrolase FolE2 OS=Verrucomicrobiaceae bacterium TMED86 OX=1986881 GN= folE2 PE=3 SV=1
MSKTSPTAPQADPQSGEDTRGIPLEQVGISKVSYPVTIRGWQTDSNFQKEVEGLFDLTVSLASENRGIHMSRLIESLHHWQEPLGPSSLQDFLGKLRKQQEAAVASMNCHFTWFVNRPAPESGRPAWLGIPTTWHGTQSDDGGSSGYTLRIPVTTLCPCSKAISEYGAHSQRSWISVKIEWPLSVDIVPPEQIFEKLQHAGSAPIYPLLKRIDERHVTMKAYEQPAFVEDAARRAALSLQEDSRISNFRIEVRNEESIHTHDAVARFTSGEVSEDNFS

SEQ ID NO: 16316 - protein, 260 aa, Verrucomicrobiae bacterium
  misc_feature (1)..(260): tr|A0A2A2PYY4|A0A2A2PYY4_9BACT GTP cyclohydrolase FolE2 OS=Verrucomicrobiae bacterium Tous-C2TDCM OX=1982329 G N=folE2 PE=3 SV=1
METLTDTQNQPDSRNLAIDRVGVKNLRFPLRIRDKANSEQGTVATISMAVDLPKHYKGTHMSRFVEVLNSHGPVLDVHTISGIPAELLERLDAQQAHVEFRFPFFLKKEAPVTKREGMLDYEVIFDVDASRERTDFTVTVLVPVTTLCPCSKAISARGAHNQRGIVTYAVKFSGEPIWIEDLIRLVERCASCELYSVLKRPDEKHVTEQAYDNPVFVEDLVRNVAAASNLQEGIAWYRVEAENFESIHNHNAYAVIEKIP

SEQ ID NO: 16317 - protein, 327 aa, Verrucomicrobiae bacterium
  misc_feature (1)..(327): tr|B5JE74|B5JE74_9BACT GTP cyclohydrolase FolE2 OS=Verr ucomicrobiae bacterium DG1235 OX=382464 GN=folE2 PE=3 S V=1
MSIKNKPKMYLHKTDPAEAAPVERKYDADFKPSEDYRDSMPDIMDAVESEQGAAVPIQQVGVSNFKLPLTFRAADGKLLTLEASVTGSVSLEANLKGINMSRIMRSFYELKEEVFTIDTVHTVLDLFREKVESFDARIIIRFNYPIMQPSLRSGLEGYQYYKCAFEGRLSKSGLFERLIHFDFVYSSSCPCSAELSEHARDLRDAYSIPHSQRSKARVFVKLAAGASLGIEDLQRHLSLALKTETQVMVKREDEQAFAELNGVYIKFVEDAARLVYEQLASDERISDFQVACSHLESLHSHDAVSVICKGVPGGFAADFSDFDSLIC

SEQ ID NO: 16318 - protein, 261 aa, Verrucomicrobiales bacterium
  misc_feature (1)..(261): tr|A0A355S6A1|A0A355S6A1_9BACT GTP cyclohydrolase FolE2 OS=Verrucomicrobiales bacterium OX=2026801 GN=folE2 PE =3 SV=1
MQELTDTQNERDDRNLPIDRVGIKSLKHPVDVLGRDGELQHTVADVSLAVDLPHEKRGTHMSRFVEALNEHGNYLDVSDPGEVPRQLQKRLEAERAWVTYQFPFFCSKEAPVTGKRSRLSYEVRLEVEAGKAERESLVLTVIVPVTTLCPCSKAISERGAHNQRGIVTFSIRSSKVIWIEDAIEIVEESASSELYSLLKRPDEKAVTERAYDHPVFVEDLVRNVAQRSEKQGSILWYRVEAENFESIHNHSAYAEIENEVG

SEQ ID NO: 16319 - protein, 193 aa, Verrucomicrobiales bacterium
  misc_feature (1)..(193): tr|A0A3B9GAM8|A0A3B9GAM8_9BACT GTP cyclohydrolase 1 OS= Verrucomicrobiales bacterium OX=2026801 GN=folE PE=3 SV =1
MSDSKDIDFDRIENAVRELLGAIGEDPERDGLLDTPARVARMYGEICSGLREEPADHLEKTFQVEHDEIIVVRDISFYSICEHHLIPFFGKAHVAYLPEKDGRITGLSKLARLVDGFARRPQVQERLTGQIADAIDEKLSPRGAAVVLEAEHLCMSMRGIRKPGARTVTSSMRGIFRSNSASREEVLNLIQRS

SEQ ID NO: 16320 - protein, 285 aa, Verrucomicrobium sp.
  misc_feature (1)..(285): tr|A0A1H2EY79|A0A1H2EY79_9BACT GTP cyclohydrolase FolE2 OS=Verrucomicrobium sp. GAS474 OX=1882831 GN=folE2 PE= 3 SV=1
MTASAASIPDRQGERDTRNIPIDRVGVKGLRYPIEVKDRAHATQSTVATFAMTVDLPHQFKGTHMSRFVEILNAHGRLIHVENVEKMLRALQKRLHAERAHIEMEFPYFIGKKAPATGAVGLVDYVVKFETTVDGPKRDFVLTVIVPVTTLCPCSKAISAYGAHNQRGYVSLAVRFEKTVWIEELIALIEASASSEIFSLLKRPDEKAVTERAYDNPVFVEDLVRNVALRVNAHPQVTWYKVEAENMESIHNHAAYALIEKRKDAPKRKPAAKKAALKKAAMKRK

SEQ ID NO: 16321 - protein, 155 aa, Verrucosispora maris
  misc_feature (1)..(155): tr|F4FHW2|F4FHW2_VERMA GTP cyclohydrolase 1 OS=Verrucos ispora maris (strain AB-18-032) OX=263358 GN=folE PE=3 SV=1
MARAYAELFAGLRVDPATVLTTTFEANHEELVLVRDIDVMSLCEHHLLPFRGSAHIGYIPGPDGRITGLSKLARLVEVYARRPQVQERLTSQIADLLMDRLAPRGVVVVLECEHMCMAMRGIQKSGAKTITSAVRGTLQRDAKSRAEAMALIHPR

SEQ ID NO: 16322 - protein, 187 aa, Verrucosispora sediminis
  misc_feature (1)..(187): tr|A0A1I1TE78|A0A1I1TE78_9ACTN GTP cyclohydrolase 1 OS= Verrucosispora sediminis OX=547162 GN=folE PE=3 SV=1
MDLGRIEKAVREILIAVGEDPDRDGLQQTPARVARAYAELFAGLRVDPGTVLTTTFEANHEELVLVRDIDVMSLCEHHLLPFRGSAHIGYIPGPDGRITGLSKLARLVEVFARRPQVQERLTSQIADLLMTRLAPRGVVVVLECEHMCMAMRGIQKSGAKTITSAVRGTLQHDAKSRAEAMALIIPR

SEQ ID NO: 16323 - protein, 205 aa, Verrucosispora sp.
  misc_feature (1)..(205): tr|A0A4Q9CS55|A0A4Q9CS55_9ACTN GTP cyclohydrolase 1 OS= Verrucosispora sp. SN26_14.1 OX=2527879 GN=folE PE=3 SV =1
MAARLVNGRLTGRPVEDTMDLGRIEKAVREILIAVGEDPDRDGLQQTPARVARAYAELFAGLRVDPATVLTTTFEANHEELVLVRDIDVMSLCEHHLLPFRGSAHIGYIPGPDGRITGLSKLARLVEVFARRPQVQERLTSQIADLLMERLAPRGVVVVLECEHMCMAMRGIQKSGAKTITSAVRGTLQRDAKSRAEAMALIIPR

SEQ ID NO: 16324 - protein, 234 aa, Verrucosispora sp.
  misc_feature (1)..(234): tr|A0A2G7DC64|A0A2G7DC64_9ACTN GTP cyclohydrolase 1 OS= Verrucosispora sp. CNZ293 OX=2035249 GN=folE PE=3 SV=1
MSTDDTAASFPQRGLAASATEPDTDGLDYIAARLINGRLTGRPVEDTMDLGRIERAVREILIAVGEDPDRDGLQQTPARVARAYAELFAGLRVDPATVLTTTFEANHEELVLVRDIDVMSLCEHHLLPFRGSAHIGYIPGPDGRITGLSKLARLVEVFARRPQVQERLTSQIADLLMKRLDPRGVVVVLECEHMCMAMRGIQKSGAKTITSAVRGTLQRDAKSRAEAMALIIPR

SEQ ID NO: 16325 - protein, 181 aa, Verticiella sediminum
  misc_feature (1)..(181): tr|A0A556ACL3|A0A556ACL3_9BURK GTP cyclohydrolase 1 OS= Verticiella sediminum OX=1247510 GN=folE PE=3 SV=1
MTLEEHYAAILTELGEDVTREGLARTPHRAAKAMQYLCKGYHEDLETIINGALFTSSTREMVLVKNIELYSLCEHHLLPFIGKAHVAYLPNGKVLGLSKVARIVDMYARRLQIQENLCREIAEAVQQVTDALGVAVVIEAQHMCMMMRGVEKQNSVMVSSMMLGAFHDSPATRSEFLSLIR

SEQ ID NO: 16326 - protein, 267 aa, Verticiella sediminum
  misc_feature (1)..(267): tr|A0A556ACD0|A0A556ACD0_9BURK GTP cyclohydrolase FolE2 OS=Verticiella sediminum OX=1247510 GN=folE2 PE=3 SV=1
MNSPLDSALAMPDVQSSYDPRQIAIQRVGIRGVRHPFIVAGEDGEAMPTVADWTLTVALPADQKGTHMSRFVALLEKHRRTPADLDGFSAMAAEMLGLLNAQRGELIASFPYFINKTAPISGVQSLLDYAVTWTARATTGGVQREVKVVVPVTSLCPCSKTISQYGAHNQRSHVTVAVVLEEGEAFSMDGLIRAIESEGSCELWGLLKRTDEKFVTEHAYDNPKFVEDLVRDVAARIAIHPGVASYVVEAENFESIHNHSAYAVVEG

SEQ ID NO: 16327 - protein, 264 aa, Vesicomyosocius okutanii
  misc_feature (1)..(264): sp|A5CXA1|GCH4_VESOH GTP cyclohydrolase FolE2 OS=Vesico myosocius okutanii subsp. Calyptogena okutanii (strain HA) OX=412965 GN=folE2 PE=3 SV=1
MSATHLPDTQNSADTRHIIIDKVGIKDIIHPITYIDCDGNKMPTIGMFTMTVSLPEHVKGTHMSRFIEILNENSCEFSAHNFDQIIDKVKEKLESDTAHITLNFPFFRKKEAPSSGVKSMMDYQVTLYGTLNKGEVQVMIKVVVPVTSLCPCSKSISKYGAHNQRSHITIKAKVSKGRTLHIEDLIDLAERKASCELYALLKRDDEKMVTERAYDNPAFVEDLVRDIAVDLNADDKISYYCLESENFESIHNHSAYALIENLKC

SEQ ID NO: 16328 - protein, 218 aa, Vespertiliibacter pulmonis
  misc_feature (1)..(218): tr|A0A3N4VWU7|A0A3N4VWU7_9PAST GTP cyclohydrolase 1 OS= Vespertiliibacter pulmonis OX=1443036 GN=folE PE=3 SV=1
MNKISPEAQGVRAALLAKGIETPTVEQNKDKALRREEIQQHMRSVLELLGLDLRDDSLEETPKRLAKMYVDEIFSGLDYETFPKITKIQNRMKVSEMVLVDDITLTSTCEHHFVTIDGKVAVAYYPKDWVIGLSKINRVVQFFAQRPQVQERFTEQILTAFQTILETEDVAVYVKATHFCVKCRGVKDTNSQTLTSAFGGVFLQDRETRKEFLSLLSR

SEQ ID NO: 16329 - protein, 218 aa, Vibrio aerogenes
  misc_feature (1)..(218): tr|A0A1M5ZLG1|A0A1M5ZLG1_9VIBR GTP cyclohydrolase 1 OS= Vibrio aerogenes CECT 7868 OX=1216006 GN=folE PE=3 SV=1
MSGLSEAALLVKNALESRGLETPMCPNTVGRSEKKDKIEYHMREILHLLGLDLTDDSLEETPHRIAKMYVDEVFSGLDYHNFPKITVIENKMNVSEMVRVKDITVTSTCEHHLVTIDGKAAVAYIPRGKIIGLSKINRIVRFFAQRPQVQERMTQQILVALQTLLESDDVAVTMDATHYCVKSRGVMDATSETTTTALGGLFKTNPATRAEFLHGLKS

SEQ ID NO: 16330 - protein, 250 aa, Vibrio aerogenes
  misc_feature (1)..(250): tr|A0A1M5W338|A0A1M5W338_9VIBR Putative GTP cyclohydrol ase 1 type 2 OS=Vibrio aerogenes CECT 7868 OX=1216006 G N=VA7868_00578 PE=4 SV=1
MNNLTLESILNEKLCPEMVKDYCPNGLQIEGKSEVKRIITGVTASQALIEKAIELEADALLVHHGYFWKGEPESIRGMKGKRIRALIRHDINLYAYHLPLDIHPELGNNARLADLLDIHVEGGLEGHPQSVAMYGHLSQPLKAEVFGQIIERVLDRKPLHISAGDQLIRTVGWCTGGGQDYIELAAAKGLDAFISGEISERTTYSAREQGVHFFSAGHHATERYGVKALGEWLAEHHALDVTFIDIDNPV

SEQ ID NO: 16331 - protein, 217 aa, Vibrio agarivorans
  misc_feature (1)..(217): tr|A0A2K1CF51|A0A2K1CF51_9VIBR GTP cyclohydrolase 1 OS= Vibrio agarivorans OX=153622 GN=folE PE=3 SV=1
MSGLSQSAKIVKEALELRGLETPMSPNQVSREEKKQKIEYHMREILTLLELDLTDDSLEETPHRIAKMYVDEIFSGLDYANFPKITVIENKMNVSEMVRVRDITVTSTCEHHLVTIDGKTAVAYIPRGKIIGLSKINRIVRFFAQRPQVQERMTQQILVALQTLLESEDVAVTMDATHYCVKSRGVMDATSSTTTTALGGIFKSNPATRAEFLHGLR

SEQ ID NO: 16332 - protein, 217 aa, Vibrio alfacsensis
  misc_feature (1)..(217): tr|A0A347UVE3|A0A347UVE3_9VIBR GTP cyclohydrolase 1 OS= Vibrio alfacsensis OX=1074311 GN=folE PE=3 SV=1
MSDLSESAKLVKEALEQRGLETPMCPNNVSREEKKEKIEYHMREILGLLQLDLTDDSLEETPHRIAKMYVDEIFSGLDYANFPKITVIENKMNVSEMVRVKDITVTSTCEHHLVTIDGKAAVAYIPRGKIIGLSKINRIVRFFAQRPQVQERMTQQILVALQTLLESDDVAVTIDATHYCVKSRGVMDATSETTTTALGGIFKTNPATRAEFLHGLR

SEQ ID NO: 16333 - protein, 217 aa, Vibrio alginolyticus
  misc_feature (1)..(217): tr|D0X0S6|D0X0S6_VIBAL GTP cyclohydrolase 1 OS=Vibrio a lginolyticus 40B OX=674977 GN=folE PE=3 SV=1
MSGLSESAKLVKEALEQRGLETPMRPNNVSREEKKEKIEHHMREILGLLQLDLTDDSLEETPHRIAKMYVDEIFSGLDYSNFPKITVIENKMNVSEMVRVKDITVTSTCEHHLVTIDGKAAVAYIPRGKIIGLSKINRIVRFFAQRPQVQERMTQQILVALQTLLESDDVAVTIDATHYCVKSRGVMDATSETTTTALGGIFKSNPATRAEFLHGLR

SEQ ID NO: 16334 - protein, 217 aa, Vibrio alginolyticus
  misc_feature (1)..(217): tr|A0A0L7YNR2|A0A0L7YNR2_VIBAL GTP cyclohydrolase 1 OS= Vibrio alginolyticus OX=663 GN=folE PE=3 SV=1
MLGLSESAKLVKDALESRGLETPMCPNAVTREEKKEKIEHHMREILTLLGLDLTDDSLEETPHRIAKMYVDEVFSGLDYQNFPKITVIENKMNVSEMVRVKDITVTSTCEHHLVTIDGKAAVAYIPRGKIIGLSKINRIVRFFAQRPQVQERMTQQILVALQTLLESDDVAVTIDATHYCVKSRGVMDATSETTTTALGGIFKSNPATRAEFLHGLR

SEQ ID NO: 16335 - protein, 227 aa, Vibrio algivorus
  misc_feature (1)..(227): tr|A0A557PFB7|A0A557PFB7_9VIBR GTP cyclohydrolase 1 OS= Vibrio algivorus OX=1667024 GN=folE PE=3 SV=1
MANLETHAVANSELSEAALLVQNALAKRGIETPMYPNDVSREEKKERIEYHMREILSLLELDLADDSLEETPRRIAKMYVDEVFSGLDYKNFPKITVIENKMSCSEMVRVKDITVTSTCEHHLVTIDGQAAVAYIPRSKIIGLSKINRIVRFFAQRPQVQERMTQQILVALQALLETDDVAITMDATHYCVKSRGVMDATSVTTTTALGGIFKSNPATRAEFLHGLR

SEQ ID NO: 16336 - protein, 217 aa, Vibrio anguillarum
  misc_feature (1)..(217): tr|A0A191W7W5|A0A191W7W5_VIBAN GTP cyclohydrolase 1 OS= Vibrio anguillarum OX=55601 GN=folE PE=3 SV=1
MLGLSESAKLVKDALESRGLETPMRPNEVTREEKKEKIEHHMREILTLLGLDLTDDSLEETPHRIAKMYVDEVFSGLDYQNFPKITVIENKMNVSEMVRVKEITVTSTCEHHLVTIDGKAAVAYIPRGKIIGLSKINRIVRFFAQRPQVQERMTQQILVALQTLLGSDDVAVTIDATHYCVKSRGVMDATSETTTTALGGIFKSNPATRAEFFHGLH

SEQ ID NO: 16337 - protein, 217 aa, Vibrio anguillarum; identical to SEQ ID NO: 16336
  misc_feature (1)..(217): tr|F7YRZ1|F7YRZ1_VIBA7 GTP cyclohydrolase 1 OS=Vibrio a nguillarum (strain ATCC 68554 / 775) OX=882102 GN=folE PE=3 SV=1

SEQ ID NO: 16338 - protein, 217 aa, Vibrio antiquarius
  misc_feature (1)..(217): tr|A7JYL2|A7JYL2_VIBAE GTP cyclohydrolase 1 OS=Vibrio a ntiquarius (strain Ex25) OX=150340 GN=folE PE=3 SV=1
MSGLSESAKLVKEALEQRGLETPMRPNAVSREEKKEKIEYHMREILGLLQLDLTDDSLEETPHRIAKMYVDEIFSGLDYSNFPKITVIENKMNVSEMVRVKDITVTSTCEHHLVTIDGKAAVAYIPRGKIIGLSKINRIVRFFAQRPQVQERMTQQILVALQTLLESDDVAVTIDATHYCVKSRGVMDATSETTTTALGGIFKSNPATRAEFLHGLR

SEQ ID NO: 16339 - protein, 212 aa, Vibrio atlanticus
  misc_feature (1)..(212): tr|A0A1C3IMY7|A0A1C3IMY7_9VIBR GTP cyclohydrolase 1 OS= Vibrio atlanticus OX=693153 GN=folE_1 PE=3 SV=1
MLNTEAEKVREALLARGLETPMTPSEMNPNQKYNRIKGLLTEVVSTLGLDLTDDSLAETPHRIAKMYVHEIFSGLDYDNFPKISVIENKMSVDEMVKVSDIDLTSTCEHHFITIDGLAEVAYIPENKILGLSKINRIVRFFAQRPQVQERLTQQILVAIQTLVETENVAVTIKATHYCVKSRGVMDANSETSTTALGGIFKTNPQTRAEFLR

SEQ ID NO: 16340 - protein, 217 aa, Vibrio atlanticus
  misc_feature (1)..(217): tr|A0A1C3J0F8|A0A1C3J0F8_9VIBR GTP cyclohydrolase 1 OS= Vibrio atlanticus OX=693153 GN=folE_2 PE=3 SV=1
MSGLSESAKLVKDALASRGLETPMRPNQVSREEKKERIEHHMREILTLLELDLADDSLEETPQRIAKMYVDEIFSGLDYANFPKITVIENKMGVREMVRVKDITVTSTCEHHLVTIDGKTAVAYIPQGKIIGLSKINRIVRFFAQRPQVQERMTQQILVALQTLLETDDVAVTMDAVHYCVKSRGVMDATSETTTTALGGIFRSNPATRHEFLHGLR

SEQ ID NO: 16341 - protein, 223 aa, Vibrio azureus
  misc_feature (1)..(223): tr|U3AW66|U3AW66_9VIBR GTP cyclohydrolase 1 OS=Vibrio a zureus NBRC 104587 OX=1219077 GN=folE PE=3 SV=1
MSGLSQSTKLSESARIVKEALESRGLETPMNPNQFSREEKKQKIEHHMREILTLLELDLTDDSLEETPHRIAKMYVDEIFSGLDYANFPKITVIENKMNVSEMVRVKDITVTSTCEHHLVTIDGKTAVAYIPRGKIIGLSKINRIVRFFAQRPQVQERMTQQILVALQTLLESEDVAVTMDATHYCVKSRGVMDATSSTTTTALGGLFKSNPATRAEFLHGLR

SEQ ID NO: 16342 - protein, 217 aa, Vibrio barjaei
  misc_feature (1)..(217): tr|A0A1J4QTZ1|A0A1J4QTZ1_9VIBR GTP cyclohydrolase 1 OS= Vibrio barjaei OX=1676683 GN=folE PE=3 SV=1
MSGLSESAKMVKAALSERGLETPMLPNEVSREEKKERIEHHMREILTLLQLDLQDDSLMETPHRIAKMYVDEIFSGLDYENFPKITVIENKMDVSEMVRVKDITVTSTCEHHLVTIDGKAAVAYIPRGKIIGLSKINRIVRFFAQRPQVQERMTQQILVALQALLETDDVAVTIDAVHYCVKSRGVMDATSETTTTALGGIFKSKPATRHEFLHGLR

SEQ ID NO: 16343 - protein, 217 aa, Vibrio bivalvicida
  misc_feature (1)..(217): tr|A0A177Y4C1|A0A177Y4C1_9VIBR GTP cyclohydrolase 1 OS= Vibrio bivalvicida OX=1276888 GN=folE PE=3 SV=1
MSGLSESAKLVKDALEQRGLETPMAPNQFSREEKKEKIQHHMREILSLLELDLTDDSLEETPHRIAKMYVDEIFSGLDYSNFPKITVIENKMNVSEMVRVKDITVTSTCEHHLVTIDGRAAVAYIPRGKIIGLSKINRIVRFFAQRPQVQERMTQQILVALQTLLESDDVAVTIDATHYCVKSRGVMDATSETTTTALGGIFKSIPATRHEFLHGIR

SEQ ID NO: 16344 - protein, 217 aa, Vibrio brasiliensis
  misc_feature (1)..(217): tr|E8LWE4|E8LWE4_9VIBR GTP cyclohydrolase 1 OS=Vibrio b rasiliensis LMG 20546 OX=945543 GN=folE PE=3 SV=1
MSGLSESAKLVKDALEQRGLETPMAPNSFSREEKKEKIQHHMREILSLLELDLTDDSLEETPHRIAKMYVDEIFSGLDYSNFPKITVIENKMNVSEMVRVKDITVTSTCEHHLVTIDGRAAVAYIPRGKIIGLSKINRIVRFFAQRPQVQERMTQQILVALQTLLESDDVAVTIDATHYCVKSRGVMDATSETTTTALGGIFKSNPATRHEFLHGIR

SEQ ID NO: 16345 - protein, 217 aa, Vibrio breoganii
  misc_feature (1)..(217): tr|A0A193KGD6|A0A193KGD6_9VIBR GTP cyclohydrolase 1 OS= Vibrio breoganii OX=553239 GN=folE PE=3 SV=1
MSGLSESALLVKEALANRGLETPMVASDLTAEDKKQQIEHHMREILGLLQLDLTDDSLQDTPKRIAKMYVDEVFSGLDYARFPKITVIENKMDVSEMVRVKDITLTSTCEHHLVTIDGRAAVAYIPRTKIIGLSKINRIVRFFAQRPQVQERMTQQILIALQTLLESEDVAVTIDATHYCVKSRGVMDATSETTTTALGGIFKSNAATRHEFLHGLR

SEQ ID NO: 16346 - protein, 217 aa, Vibrio campbellii; identical to SEQ ID NO: 16333
  misc_feature (1)..(217): sp|A7N6L2|GCH1_VIBCB GTP cyclohydrolase 1 OS=Vibrio cam pbellii (strain ATCC BAA-1116 / BB120) OX=338187 GN=fol E PE=3 SV=1

SEQ ID NO: 16347 - protein, 217 aa, Vibrio campbellii; identical to SEQ ID NO: 16333
  misc_feature (1)..(217): tr|A0A0A3FL89|A0A0A3FL89_9VIBR GTP cyclohydrolase 1 OS= Vibrio campbellii OX=680 GN=folE PE=3 SV=1

SEQ ID NO: 16348 - protein, 217 aa, Vibrio caribbeanicus
  misc_feature (1)..(217): tr|E3BKK0|E3BKK0_9VIBR GTP cyclohydrolase 1 OS=Vibrio c aribbeanicus ATCC BAA-2122 OX=796620 GN=folE PE=3 SV=1
MSELSESAKLVKAALESRGLETPMLPNQYSREEKKEKIQYHMREILSLLALDLSDDSLEETPQRIAKMYVDEIFSGLDYKNFPKVTMIENKMNVNEMVRVKGITLTSTCEHHLVTIDGMATVAYIPRGKIIGLSKINRIVRFFSQRPQVQERMTQQILVALQTLLETDDVAVTMDATHYCVKSRGVMDATSETTTTALGGIFKSNPATRHEFLHGIR

SEQ ID NO: 16349 - protein, 217 aa, Vibrio caribbeanicus
  misc_feature (1)..(217): tr|A0A0A6QS85|A0A0A6QS85_9VIBR GTP cyclohydrolase 1 OS= Vibrio caribbeanicus OX=701175 GN=folE PE=3 SV=1
MSGLSESAKLVKDALESRGLETPMVPNQFTREEKKQKIEHHMHEILSLLELDLTDDSLEETPRRIAKMYVDEIFSGLDYSNFPKITVIENKMNVSEMVRVKDITVTSTCEHHLVTIDGRAAVAYIPRGKIIGLSKINRIVRFFAQRPQVQERMTQQILVALQTLLESDDVAVTIDATHYCVKSRGVMDATSETTTTALGGIFKSNPATRHEFLHGIR

SEQ ID NO: 16350 - protein, 227 aa, Vibrio casei
  misc_feature (1)..(227): tr|A0A368LHS7|A0A368LHS7_9VIBR GTP cyclohydrolase 1 OS= Vibrio casei OX=673372 GN=folE PE=3 SV=1
MAKLEIQSQNNPELSESAALVQSALETRGIETPMQPNEITKEEKKERIEHHMREILTLLELDLADDSLEETPRRIAKMYVDEVFSGLDYKNFPKITVIENKMSCSEMVRVKDITLTSTCEHHLVTIDGQAAVAYIPRSKIIGLSKINRIVRFFAQRPQVQERMTQQILVALQTLLESDDVAVTIDATHYCVKSRGVMDATSVTTTTALGGIFKSNPATRAEFLHGLR

SEQ ID NO: 16351 - protein, 217 aa, Vibrio celticus
  misc_feature (1)..(217): tr|A0A1C3JD50|A0A1C3JD50_9VIBR GTP cyclohydrolase 1 OS= Vibrio celticus OX=446372 GN=folE_2 PE=3 SV=1
MSGLSESAKLVKDALASRGLETPMSPNQVSREEKKERIEHHMREILTLLELDLTDDSLEETPQRIAKMYVDEIFSGLDYANFPKITVIENKMGVREMVRVKDITVTSTCEHHLVTIDGKTAVAYIPRGKIIGLSKINRIVRFFAQRPQVQERMTQQILVALQTLLETDDVAVTMDAVHYCVKSRGVMDATSETTTTALGGIFRSNPATRHEFLHGLR

SEQ ID NO: 16352 - protein, 252 aa, Vibrio celticus
  misc_feature (1)..(252): tr|A0A1C3JBE2|A0A1C3JBE2_9VIBR Putative GTP cyclohydrol ase 1 type 2 OS=Vibrio celticus OX=446372 GN=VCE7224_01 224 PE=4 SV=1
MNNLQLEKLLNEKLQPQQIKDYCPNGLQVEGATEVKRIVTGVTASQALIDKAVELNADALLVHHGFFWKGESEAIRGMKGKRIRTLIKNDINLLGYHLPLDIHPELGNNAKLAELLEIEVEGGLEGHPQSVAMFGKLKTPMTGTEFAAKIDKVLNRKPLHIAPENQDKMITTVGWCTGGGQDYIELAASQGIDAFISGEVSERTTYSAREQDIHYFAAGHHATERYGVKALGEWLAREHGLDVEFIDIDNPV

SEQ ID NO: 16353 - protein, 217 aa, Vibrio chagasii
  misc_feature (1)..(217): tr|A0A2S7VQ53|A0A2S7VQ53_9VIBR GTP cyclohydrolase 1 OS= Vibrio chagasii OX=170679 GN=folE PE=3 SV=1
MSGLSESAKLVKDALASRGLETPMSPNQVSREEKKERIEHHMREILTLLELDLTDDSLEETPHRIAKMYVDEIFSGLDYANFPKITVIENKMGVREMVRVKDITVTSTCEHHLVTIDGKTAVAYIPRGKIIGLSKINRIVRFFAQRPQVQERMTQQILVALQTLLETEDVAVTMDAVHYCVKSRGVMDATSETTTTALGGIFKSNPATRHEFLHGLR

SEQ ID NO: 16354 - protein, 212 aa, Vibrio chagasii
  misc_feature (1)..(212): tr|A0A2S7VDP1|A0A2S7VDP1_9VIBR GTP cyclohydrolase 1 OS= Vibrio chagasii OX=170679 GN=folE PE=3 SV=1
MLSTEAEQVRTALLARGLETPMTASEMNSDQKYNRIKGLLTEVVSTLGLDLTDDSLAETPHRIAKMYVHEIFSGLDYNNFPKISVIENKMSVDEMVKVSDIDLTSTCEHHFITIDGLAQVAYIPESKILGLSKINRIVRFFAQRPQVQERLTQQVLIAIQTLVETENVAVTIKATHYCVKSRGVMDANSETTTTALGGIFKTNPQTRAEFLR

SEQ ID NO: 16355 - protein, 217 aa, Vibrio cholerae
  misc_feature (1)..(217): sp|Q9KLX5|GCH1_VIBCH GTP cyclohydrolase 1 OS=Vibrio cho lerae serotype O1 (strain ATCC 39315 / El Tor Inaba N16 961) OX=243277 GN=folE PE=3 SV=2
MSGLSESAKLVKDALERRGLETPMQPNLATPAEKKEKIEQHMREILNLLGLDLTDDSLEETPQRIAKMYVDEIFSGLDYANFPKITVIENKMKVSEMVKVKDITLTSTCEHHLVTIDGTAAVAYIPRGKIIGLSKINRIVRFFAQRPQVQERMTQQILVALQTLLESDDVAVTIDATHYCVKSRGVMDATSVTTTTALGGIFKSNPATRAEFLHGLR

SEQ ID NO: 16356 - protein, 217 aa, Vibrio cholerae; identical to SEQ ID NO: 16355
  misc_feature (1)..(217): tr|A0A085SY41|A0A085SY41_VIBCL GTP cyclohydrolase 1 OS= Vibrio cholerae OX=666 GN=folE PE=3 SV=1

SEQ ID NO: 16357 - protein, 217 aa, Vibrio cidicii
  misc_feature (1)..(217): tr|A0A151KSP2|A0A151KSP2_9VIBR GTP cyclohydrolase 1 OS= Vibrio cidicii OX=1763883 GN=folE PE=3 SV=1
MSGLSESAKLVKDALEKRGLETPMVPNQFSREEKKEKIEHHMREILALLELDLTDDSLEETPRRIAKMYVDEVFSGLDYQNFPKITVIENKMNVSEMVRVKDITLTSTCEHHLVTIDGKAAVAYIPRGKIIGLSKINRIVRFFAQRPQVQERMTQQILVALQTLLESDDVAVTIDATHYCVKSRGVMDATSETTTTALGGIFKSNPATRAEFLHGLR

SEQ ID NO: 16358 - protein, 217 aa, Vibrio cincinnatiensis
  misc_feature (1)..(217): tr|A0A1T4LIP6|A0A1T4LIP6_VIBCI GTP cyclohydrolase 1 OS= Vibrio cincinnatiensis DSM 19608 OX=1123491 GN=folE PE= 3 SV=1
MSGLSESAQLVKTALESRGQETPMQPNTISREEKKTQIEHHMREILNLLGLDLTDDSLEETPHRIAKMYVDEIFSGLDYKNFPKITVIENKMKVSEMVCVKDITLTSTCEHHLVTIDGKAAVAYIPRGKIIGLSKINRIVRFFAQRPQVQERLTQQILVALQTLLESDDVAVTIDATHYCVKSRGVMDATSMTTTTALGGIFKSNASTRAEFLHSIR

SEQ ID NO: 16359 - protein, 217 aa, Vibrio comitans
  misc_feature (1)..(217): tr|A0A4Y3IR45|A0A4Y3IR45_9VIBR GTP cyclohydrolase 1 OS= Vibrio comitans NBRC 102076 OX=1219078 GN=folE PE=3 SV= 1
MSGLSESALLVKEALANRGLETPMVASDLTAEDKKQQIEYHMREILGLLQLDLTDDSLQDTPKRIAKMYVDEVFSGLDYARFPKITVIENKMDVSEMVRVKDITLTSTCEHHLVTIDGRAAVAYIPRTKIIGLSKINRIVRFFAQRPQVQERMTQQILVALQTLLESEDVAVTIDATHYCVKSRGVMDATSETTTTALGGIFKSNAATRHEFLHGLR

SEQ ID NO: 16360 - protein, 217 aa, Vibrio coralliilyticus
  misc_feature (1)..(217): tr|A0A0A0T4A3|A0A0A0T4A3_9VIBR GTP cyclohydrolase 1 OS= Vibrio coralliilyticus OX=190893 GN=folE PE=3 SV=1
MSGLSESAKLVKDALESRGLETPMSPNQISREEKKEKIQHHMREILSLLELDLTDDSLEETPHRIAKMYVDEIFSGLDYANFPKITVIENKMDVSEMVRVKGITLTSTCEHHLVTIDGRATVAYIPRGKIIGLSKINRIVRFFAQRPQVQERMTQQILVALQTLLESDDVAVTIDATHYCVKSRGVMDATSETTTTALGGIFKSNPATRHEFLHGIR

SEQ ID NO: 16361 - protein, 212 aa, Vibrio coralliilyticus
  misc_feature (1)..(212): tr|A0A1V0I9B5|A0A1V0I9B5_9VIBR GTP cyclohydrolase 1 OS= Vibrio coralliilyticus OX=190893 GN=folE PE=3 SV=1
MISPEAQKVQEALIARGLETPLVPSEMTADEKYQRIRGLLTEVISTLGLDLTDDSLAETPHRISKMYVHEIFSGLEYQNFPKISVIENKMAVDEMVKVSDVNITSTCEHHFITIDGLAQVAYIPSNKIIGLSKINRIVRFFAQRPQVQERLTQQILVAIQTLTETENVAVSIKATHYCVKSRGVMDTSSETSTTALGGIFKTNPQTRAEFLG

SEQ ID NO: 16362 - protein, 217 aa, Vibrio crassostreae
  misc_feature (1)..(217): tr|A0A4R3PCX5|A0A4R3PCX5_9VIBR GTP cyclohydrolase 1 OS= Vibrio crassostreae OX=246167 GN=folE PE=3 SV=1
MSGLSESAKLVKDALASRGLETPMRPNQVSREEKKERIEHHMREILTLLELDLTDDSLEETPQRIAKMYVDEIFSGLDYANFPKITVIENKMGVREMVRVKDITVTSTCEHHLVTIDGKTAVAYIPRGKIIGLSKINRIVRFFAQRPQVQERMTQQILVALQTLLETDDVAVTMDAVHYCVKSRGVMDATSETTTTALGGIFRSNPATRHEFLHGLR

SEQ ID NO: 16363 - protein, 212 aa, Vibrio crassostreae
  misc_feature (1)..(212): tr|A0A4R2FPL0|A0A4R2FPL0_9VIBR GTP cyclohydrolase 1 OS= Vibrio crassostreae OX=246167 GN=folE PE=3 SV=1
MLNTEAEKVREALLEKGLETPMTPSEMNPNQKYNRIKGLLTEVVSTLGLDLTDDSLAETPHRIAKMYVHEIFSGLDYDNFPKISVIENKMSVDEMVKVSNIDLTSTCEHHFITIDGLAEVAYIPETKILGLSKINRIVRFFAQRPQVQERLTQQILVAIQTLVETENVAVTIKATHYCVKSRGVMDANSETSTTALGGIFKTNPQTRAEFLR

SEQ ID NO: 16364 - protein, 217 aa, Vibrio diabolicus; identical to SEQ ID NO: 16338
  misc_feature (1)..(217): tr|A0A0T7DYN3|A0A0T7DYN3_9VIBR GTP cyclohydrolase 1 OS= Vibrio diabolicus OX=50719 GN=folE PE=3 SV=1

SEQ ID NO: 16365 - protein, 218 aa, Vibrio diazotrophicus
  misc_feature (1)..(218): tr|A0A2J8HJ92|A0A2J8HJ92_VIBDI GTP cyclohydrolase 1 OS= Vibrio diazotrophicus OX=685 GN=folE PE=3 SV=1
MSSGLSESAKLVKDALERRGLETPMQPNTVSREEKKEKIESHMREILNLLGLDLTDDSLEETPHRIAKMYVDEIFSGLDYSNFPKITVIENKMNVSEMVKVKDITVTSTCEHHLVTIDGKAAVAYIPRGKIIGLSKINRIVRFFAQRPQVQERMTQQILVALQALLESDDVAVTIDATHYCVKSRGVMDATSVTTTTALGGIFKSNPATRAEFLHGLR

SEQ ID NO: 16366 - protein, 218 aa, Vibrio diazotrophicus
  misc_feature (1)..(218): tr|A0A2J8GJY3|A0A2J8GJY3_VIBDI GTP cyclohydrolase 1 OS= Vibrio diazotrophicus OX=685 GN=folE PE=3 SV=1
MSSGLSESAKLVKDALERRGLETPMQPNTVSREEKKEKIENHMREILNLLGLDLTDDSLEETPHRIAKMYVDEIFSGLDYSNFPKITVIENKMKVSEMVKVKDITVTSTCEHHLVTIDGKAAVAYIPRGKIIGLSKINRIVRFFAQRPQVQERMTQQILVALQALLESDDVAVTIDATHYCVKSRGVMDATSVTTTTALGGIFKSNPATRAEFLHGLR

SEQ ID NO: 16367 - protein, 217 aa, Vibrio europaeus
  misc_feature (1)..(217): tr|A0A178J8K7|A0A178J8K7_9VIBR GTP cyclohydrolase 1 OS= Vibrio europaeus OX=300876 GN=folE PE=3 SV=1
MSGLSESAKLVKDALERRGLETPMAPNQFNREEKKEKIQHHMREILSLLELDLTDDSLEETPHRIAKMYVDEIFSGLDYSNFPKITVIENKMDVSEMVRVKDITVTSTCEHHLVTIDGRAAVAYIPRGKIIGLSKINRIVRFFAQRPQVQERMTQQILVALQTLLESDDVAVTIDATHYCVKSRGVMDATSETTTTALGGIFKSNSATRHEFLHGIR

SEQ ID NO: 16368 - protein, 217 aa, Vibrio ezurae
  misc_feature (1)..(217): tr|U3B379|U3B379_9VIBR GTP cyclohydrolase 1 OS=Vibrio e zurae NBRC 102218 OX=1219080 GN=folE PE=3 SV=1
MSALSESALLVKQALADRGLETPMVANELTAEDKKRKIEHHMREVLEILQLDLTDDSLQDTPKRIAKMYVDEVFSGLDYARFPKITVIENKMDVSEMVRVKDITLTSTCEHHLVTIDGRVTVAYIPRTKIIGLSKINRIVRFFAQRPQVQERMTQQILVAMQTLLESDDVAVKIDATHYCVKSRGVMDATSETTTTALGGIFKSNPATRHEFLHGLS

SEQ ID NO: 16369 - protein, 217 aa, Vibrio fluvialis
  misc_feature (1)..(217): tr|A0A1L9KXS7|A0A1L9KXS7_VIBFL GTP cyclohydrolase 1 OS= Vibrio fluvialis OX=676 GN=folE PE=3 SV=1
MSGLSESAQLVKQALEKRGLETPMVPNQFSREEKKEKIEHHMREILSLLELDLTDDSLEETPRRIAKMYVDEVFSGLDYQNFPKITVIENKMNVSEMVRVKDITLTSTCEHHLVTIDGKAAVAYIPRGKIIGLSKINRIVRFFAQRPQVQERMTQQILVALQTLLESDDVAVTIDATHYCVKSRGVMDATSETTTTALGGIFKSNPATRAEFLHGLR

SEQ ID NO: 16370 - protein, 217 aa, Vibrio fluvialis
  misc_feature (1)..(217): tr|S7I8H3|S7I8H3_VIBFL GTP cyclohydrolase 1 OS=Vibrio f luvialis PG41 OX=1336752 GN=folE PE=3 SV=1
MSGLSESAKLVKDALERRGLETPMQPNTISRDEKKERIEHHMREILTLLGLDLTDDSLEETPHRISKMYVDEIFSGLDYQNFPKITVIENKMNVSEMVRVKDITVTSTCEHHLVTIDGKAAVAYIPRGKIIGLSKINRIVRFFAQRPQVQERMTQQILVALQTLLESEDVAVTIDATHYCVKSRGVMDATSETTTTALGGIFKSNPATRAEFLHGLR

SEQ ID NO: 16371 - protein, 217 aa, Vibrio fortis
  misc_feature (1)..(217): tr|A0A066UTC0|A0A066UTC0_9VIBR GTP cyclohydrolase 1 OS= Vibrio fortis OX=212667 GN=folE PE=3 SV=1
MSGLSESAKLVKDALASRGLETPMSPNQVSREEKKERIEHHMREILTLLELDLTDDSLEETPHRIAKMYVDEIFSGLDYANFPKITVIENKMGVREMVRVKDITVTSTCEHHLVTIDGKTAVAYIPRGKIIGLSKINRIVRFFAQRPQVQERMTQQILVALQILLETDDVAVTMDAVHYCVKSRGVMDATSETTTTALGGIFKSNPATRHEFLHGLR

SEQ ID NO: 16372 - protein, 212 aa, Vibrio fortis
  misc_feature (1)..(212): tr|A0A066UN67|A0A066UN67_9VIBR GTP cyclohydrolase 1 OS= Vibrio fortis OX=212667 GN=folE PE=3 SV=1
MLSTEAEKVREALLAKGLETPMTPSEMNSDQKYNRIKGLLTEVVSTLGLNLTDDSLAETPHRIAKMYVHEIFSGLDYNNFPKISMIDNKMSVDEMVKVSDIDLTSTCEHHFITIDGMAQVAYIPESKILGLSKINRIVRFFAQRPQVQERLTQQILVAIQALVETENVAVTIKATHYCVKSRGVMDANSETTTTALGGIFKTNPQTRAEFLR

SEQ ID NO: 16373 - protein, 217 aa, Vibrio furnissii
  misc_feature (1)..(217): tr|A0A0Q2MIH0|A0A0Q2MIH0_VIBFU GTP cyclohydrolase 1 OS= Vibrio furnissii OX=29494 GN=folE PE=3 SV=1
MSGLSESAKLVKDALERRGLETPMQPNTISRDEKKERIEHHMREILTLLGLDLTDDSLEETPHRISKMYVDEIFSGLDYHNFPKITVIENKMNVSEMVRVKDITVTSTCEHHLVTIDGKAAVAYIPRGKIIGLSKINRIVRFFAQRPQVQERMTQQILVALQTLLESEDVAVTIDATHYCVKSRGVMDATSETTTTALGGIFKSNPATRAEFLHGLR

SEQ ID NO: 16374 - protein, 214 aa, Vibrio furnissii
  misc_feature (1)..(214): tr|F0M0L7|F0M0L7_VIBFN GTP cyclohydrolase 1 OS=Vibrio f urnissii (strain DSM 14383 / NCTC 11218 / VL 6966) OX=9 03510 GN=folE PE=3 SV=1
MSESAKLVKDALERRGLETPMQPNTISRDEKKERIEHHMREILTLLGLDLTDDSLEETPHRISKMYVDEIFSGLDYHNFPKITVIENKMNVSEMVRVKDITVTSTCEHHLVTIDGKAAVAYIPRGKIIGLSKINRIVRFFAQRPQVQERMTQQILVALQTLLESEDVAVTIDATHYCVKSRGVMDATSETTTTALGGIFKSNPATRAEFLHGLR

SEQ ID NO: 16375 - protein, 217 aa, Vibrio galatheae
  misc_feature (1)..(217): tr|A0A0F4NLT5|A0A0F4NLT5_9VIBR GTP cyclohydrolase 1 OS= Vibrio galatheae OX=579748 GN=folE PE=3 SV=1
MSGLSESAKLVKDALERRGLETPMAPNPFSREEKKEKIQHHMREILSLLELDLTDDSLEETPHRIAKMYVDEIFSGLDYSNFPKITVIENKMNVSEMVRVKDITVTSTCEHHLVTIDGRAAVAYIPRGKIIGLSKINRIVRFFAQRPQVQERMTQQILVALQTLLESDDVAVTIDATHYCVKSRGVMDATSETTTTALGGIFKSNPATRHEFLHGIR

SEQ ID NO: 16376 - protein, 218 aa, Vibrio gazogenes
  misc_feature (1)..(218): tr|A0A1Z2SK62|A0A1Z2SK62_VIBGA GTP cyclohydrolase 1 OS= Vibrio gazogenes OX=687 GN=folE PE=3 SV=1
MSGLSESALLVKNALENRGLETPMRPNPIGREEKKEKIEYHMREILNLLGLDLTDDSLEETPHRIAKMYVDEVFSGLDYHNFPKITLIENKMKVSEMVRVKDITVTSTCEHHLVTIDGKAAVAYIPRGKIIGLSKINRIVRFFSQRPQVQERMTQQILVALQALLETDDVAVTIDATHYCVKARGVMDATSETTTTALGGLFKSNPATRSEFLHGLLG

SEQ ID NO: 16377 - protein, 218 aa, Vibrio gazogenes
  misc_feature (1)..(218): tr|A0A1M5C851|A0A1M5C851_VIBGA GTP cyclohydrolase 1 OS= Vibrio gazogenes DSM 21264 = NBRC 103151 OX=1123492 GN= folE PE=3 SV=1
MSGLSESALLVKNALENRGLETPMRPNPIGREEKKEKIEYHMREILNLLGLDLTDDSLEETPHRIAKMYVDEVFSGLDYHNFPKITLIENKMKVSEMVRVKDITVTSTCEHHLVTIDGKAAVAYIPRGKIIGLSKINRIVRFFSQRPQVQERMTQQILVALQALLETDDVAVTIDATHYCVKARGVMDATSETTTTALGGLFKSNPSTRSEFLHGLLG

SEQ ID NO: 16378 - protein, 217 aa, Vibrio genomosp.
  misc_feature (1)..(217): tr|A0A1E5CLY4|A0A1E5CLY4_9VIBR GTP cyclohydrolase 1 OS= Vibrio genomosp. F6 str. FF-238 OX=1191298 GN=folE PE=3 SV=1
MSGLSESALLVKDALSSRGLETPMRPNDVSREEKKEKIEHHMREILSLLELDLTDDSLEETPQRIAKMYVDEVFSGLDYTNFPKITVIENKMNVSEMVRVKDITVTSTCEHHLVTIDGKAAVAYIPRGKIIGLSKINRIVRFFAQRPQVQERMTQQILVALQTLLETEDVAVTMDAVHYCVKSRGVMDATSETTTTALGGIFKSNPATRHEFLSGLR

SEQ ID NO: 16379 - protein, 217 aa, Vibrio genomosp.; identical to SEQ ID NO: 16378
  misc_feature (1)..(217): tr|A0A4U1YLC3|A0A4U1YLC3_9VIBR GTP cyclohydrolase 1 OS= Vibrio genomosp. F6 OX=723172 GN=folE PE=3 SV=1

SEQ ID NO: 16380 - protein, 217 aa, Vibrio halioticoli
  misc_feature (1)..(217): tr|V5F0H9|V5F0H9_9VIBR GTP cyclohydrolase 1 OS=Vibrio h alioticoli NBRC 102217 OX=1219072 GN=folE PE=3 SV=1
MSALSESALLVKQALADRGLETPMVANELTAEDKKRKIEHHMREVLEILQLDLTDDSLQDTPKRIAKMYVDEVFSGLDYARFPKITVIENKMDVSEMVRVKDITLTSTCEHHLVTIDGRVAVAYIPRTKIIGLSKINRIVRFFAQRPQVQERMTQQILVALQTLLESDDVAVKIDATHYCVKSRGVMDATSETTTTALGGIFKSNPATRHEFLHGLS

SEQ ID NO: 16381 - protein, 217 aa, Vibrio hangzhouensis
  misc_feature (1)..(217): tr|A0A1H6C7D7|A0A1H6C7D7_9VIBR GTP cyclohydrolase 1 OS= Vibrio hangzhouensis OX=462991 GN=folE PE=3 SV=1
MSGLSESAKLVKAALAERGLETPMLPNQVSREEKKERIEHHMREILSLLQLDLADDSLMETPHRIAKMYVDEIFSGLDYENFPKITVIENKMNVSEMVRVKDITVTSTCEHHLVTIDGKAAVAYIPRGKIIGLSKINRIVRFFAQRPQVQERMTQQILVALQTLLESEDVAVTMDAVHYCVKSRGVMDATSETTTTALGGIFKSNPATRHEFLHGLR

SEQ ID NO: 16382 - protein, 217 aa, Vibrio harveyi
  misc_feature (1)..(217): tr|A0A1E3EAW7|A0A1E3EAW7_VIBHA GTP cyclohydrolase 1 OS= Vibrio harveyi OX=669 GN=folE PE=3 SV=1
MSGLSESAKLVKEALEQRGLETPMRPNNVSREEKKEKIEHHMREILSLLQLDLTDDSLEETPHRIAKMYVDEIFSGLDYANFPKITVIENKMNVSEMVRVKDITVTSTCEHHLVTIDGKAAVAYIPRGKIIGLSKINRIVRFFAQRPQVQERMTQQILVALQTLLGSDDVAVTIDATHYCVKSRGVMDATSETTTTALGGIFKSNPATRAEFLHGLR

SEQ ID NO: 16383 - protein, 217 aa, Vibrio harveyi; identical to SEQ ID NO: 16333
  misc_feature (1)..(217): tr|A0A0D0J8D9|A0A0D0J8D9_VIBHA GTP cyclohydrolase 1 OS= Vibrio harveyi OX=669 GN=folE PE=3 SV=1

SEQ ID NO: 16384 - protein, 217 aa, Vibrio hepatarius
  misc_feature (1)..(217): tr|A0A0M0I4U8|A0A0M0I4U8_9VIBR GTP cyclohydrolase 1 OS= Vibrio hepatarius OX=171383 GN=folE PE=3 SV=1
MSGLSESAKLVKDALERRGLETPMVPNQFSREVKKEKIQHHMREILSLLELDLSDDSLEETPHRIAKMYVDEIFSGLDYSNFPKITVIENKMDVSEMVRVKDITVTSTCEHHLVTIDGRAAVAYIPRGKIIGLSKINRIVRFFAQRPQVQERMTQQILVALQTLLESDDVAVTIDATHYCVKSRGVMDATSETTTTALGGIFKSNPATRHEFLHGIR

SEQ ID NO: 16385 - protein, 217 aa, Vibrio ichthyoenteri
  misc_feature (1)..(217): tr|F9S673|F9S673_9VIBR GTP cyclohydrolase 1 OS=Vibrio i chthyoenteri ATCC 700023 OX=870968 GN=folE PE=3 SV=1
MSGLSESALLVKDALESRGLETPMVPSQFSREEKKEKIQHHMREILSLLDLDLTDDSLEETPHRIAKMYVDEIFSGLDYQNFPKITVIENKMNVSEMVRVKDITLTSTCEHHLVTIDGKAAVAYIPRGKIIGLSKINRIVRFFAQRPQVQERLTQQILVALQTLLESDDVAVTIDATHYCVKSRGVMDATSQTTTTALGGIFKSIPATRAEFLHGLR

SEQ ID NO: 16386 - protein, 217 aa, Vibrio inusitatus
  misc_feature (1)..(217): tr|A0A4Y3I1B6|A0A4Y3I1B6_9VIBR GTP cyclohydrolase 1 OS= Vibrio inusitatus NBRC 102082 OX=1219070 GN=folE PE=3 S V=1
MSGLSESALLVKEALANRGLETPMIDSDLTAEDKKQQIEYHMREILGLLQLDLTDDSLQDTPKRIAKMYVDEVFSGLDYARFPKITVIENKMNVSEMVRVKDITLTSTCEHHLVTIDGRAAVAYIPRTKIIGLSKINRIVRFFAQRPQVQERMTQQILVALQTLLESEDVAVTIDATHYCVKSRGVMDATSETTTTALGGIFKSNAATRHEFLHGLR

SEQ ID NO: 16387 - protein, 65 aa, Vibrio ishigakensis
  misc_feature (1)..(65): tr|A0A0B8NXT2|A0A0B8NXT2_9VIBR GTP cyclohydrolase I typ e 1 OS=Vibrio ishigakensis OX=1481914 GN=JCM19231_5025 PE=4 SV=1
MTQQILVALQTLLGSDDVAVTIDATHYCVKSRGVMDATSETTTTALGGIFKSNAATRHEFLHGLR

SEQ ID NO: 16388 - protein, 212 aa, Vibrio ishigakensis
  misc_feature (1)..(212): tr|A0A0B8NMM5|A0A0B8NMM5_9VIBR GTP cyclohydrolase 1 OS= Vibrio ishigakensis OX=1481914 GN=folE PE=3 SV=1
MLSKEAEIVKEALLAKGLETPMTPSEMNSDQKYNRIKGLLTEVVSTLGLDLTDDSLAETPHRIAKMYVHEIFSGLDYANFPKISVIDNKMSVDEMVKVSEIDLTSTCEHHFITIDGLAQVAYIPESKILGLSKINRIVRFFAQRPQVQERLTQQILVAIQALVETENVAVTITATHYCVKSRGVMDANSETTTTALGGIFKTNPQTRAEFLR

SEQ ID NO: 16389 - protein, 217 aa, Vibrio jasicida
  misc_feature (1)..(217): tr|A0A2S7W7I0|A0A2S7W7I0_9VIBR GTP cyclohydrolase 1 OS= Vibrio jasicida OX=766224 GN=folE PE=3 SV=1
MSGLSESAKLVKEALEQRGLETPMRPNNVSREEKKEKIEHHMREILGLLQLDLTDDSLEETPHRIAKMYVDEIFSGLDYTNFPKITVIENKMNVSEMVRVKDITVTSTCEHHLVTIDGKAAVAYIPRGKIIGLSKINRIVRFFAQRPQVQERMTQQILVALQTLLESDDVAVTIDATHYCVKSRGVMDATSETTTTALGGIFKSNPATRAEFLHGLR

SEQ ID NO: 16390 - protein, 217 aa, Vibrio kanaloae
  misc_feature (1)..(217): tr|A0A1E5DVG9|A0A1E5DVG9_9VIBR GTP cyclohydrolase 1 OS= Vibrio kanaloae 5S-149 OX=1191299 GN=folE PE=3 SV=1
MSGLSESAKLVKDALASRGLETPMSPNQISREEKKERIEHHMREILTLLELDLTDDSLEETPQRIAKMYVDEIFSGLDYANFPKITVIENKMGVREMVRVKDITVTSTCEHHLVTIDGKTAVAYIPQGKIIGLSKINRIVRFFAQRPQVQERMTQQVLVALQTLLETDDVAVTMDAVHYCVKSRGVMDATSETTTTALGGIFRSNPATRHEFLHGLR

SEQ ID NO: 16391 - protein, 217 aa, Vibrio kanaloae; identical to SEQ ID NO: 16390
  misc_feature (1)..(217): tr|A0A2N7J7M4|A0A2N7J7M4_9VIBR GTP cyclohydrolase 1 OS= Vibrio kanaloae OX=170673 GN=folE PE=3 SV=1

SEQ ID NO: 16392 - protein, 212 aa, Vibrio lentus
  misc_feature (1)..(212): tr|A0A4U2AKB6|A0A4U2AKB6_9VIBR GTP cyclohydrolase 1 OS= Vibrio lentus OX=136468 GN=folE PE=3 SV=1
MLNTEAEKVREALLARGLETPMTESEMNPNQKYNRIKGLLTEVVSTLGLDLTDDSLAETPHRIAKMYVHEIFSGLDYDNFPKISVIENKMSVDEMVKVSDIDLTSTCEHHFITIDGLAEVAYIPENKILGLSKINRIVRFFAQRPQVQERLTQQILVAIQTLVETENVAVTIKATHYCVKSRGVMDANSETSTTALGGIFKTNPQTRAEFLR

SEQ ID NO: 16393 - protein, 212 aa, Vibrio lentus
  misc_feature (1)..(212): tr|A0A4U2AW31|A0A4U2AW31_9VIBR GTP cyclohydrolase 1 OS= Vibrio lentus OX=136468 GN=folE PE=3 SV=1
MLNTEAEKVREALLAKGLETPMTPSEMNPNQKYNRIKGLLTEVVSTLGLDLTDDSLAETPHRIAKMYVHEIFSGLDYDNFPKISVIENKMSVDEMVKVSNIDLTSTCEHHFITIDGLAEVAYIPETKILGLSKINRIVRFFAQRPQVQERLTQQILVAIQTLVETENVAVTIKATHYCVKSRGVMDANSETSTTALGGIFKTNPQTRAEFLR

SEQ ID NO: 16394 - protein, 218 aa, Vibrio mangrovi
  misc_feature (1)..(218): tr|A0A1Y6IUL1|A0A1Y6IUL1_9VIBR GTP cyclohydrolase 1 OS= Vibrio mangrovi OX=474394 GN=folE PE=3 SV=1
MSGLSESALLVKNALEHRGLETPMYPNPVGREEKKERIEYHMREILNLLGLDLTDDSLEETPHRIAKMYVDEVFSGLDYHNFPKITLIENKMKVSEMVRVKDITVTSTCEHHLVTIDGKAAVAYIPRGKIIGLSKINRIVRFFSQRPQVQERMTQQILVALQVLLETDDVAVTIDATHYCVKARGVMDATSETTTTALGGLFKSNPATRAEFLHGLLN

SEQ ID NO: 16395 - protein, 251 aa, Vibrio mangrovi
  misc_feature (1)..(251): tr|A0A1Y6IWS6|A0A1Y6IWS6_9VIBR Putative GTP cyclohydrol ase 1 type 2 OS=Vibrio mangrovi OX=474394 GN=VIM7927_01 759 PE=4 SV=1
MNNFELEALLHEKLRPDLIQDYSPNGLQIEGKSEIRKVVTGVTASQALIEKAIALQADAILVHHGYFWKREPEPIRGMKGKRIRTLIQHDINLYAYHLPLDIHPELGNNACLARLLGIDVTGGLEGHEQSVAMYGSFREPVSSTDLSQRIAAVLQRAPLHIPSGEEQLISTVGWCTGGGQDFIDLAAAKGLDAFISGEISERTTYSAREQGIHYFSAGHHATERYGVKALGEWLAQTQDLEVEFVDIDNPV

SEQ ID NO: 16396 - protein, 217 aa, Vibrio maritimus
  misc_feature (1)..(217): tr|A0A090RRX3|A0A090RRX3_9VIBR GTP cyclohydrolase 1 OS= Vibrio maritimus OX=990268 GN=folE PE=3 SV=1
MSGLSESAKLVKEALSERGLETPMLPNEVTREEKKERIEHHMREILTLLQLDLADDSLMETPHRIAKMYVDEIFSGLDYSNFPKITVIENKMDVSEMVRVKDITVTSTCEHHLVTIDGKAAVAYIPRGKIIGLSKINRIVRFFAQRPQVQERMTQQILVALQTLLETDDVAVTMDAVHYCVKSRGVMDATSETTTTALGGIFKSNPATRHEFLHGLR

SEQ ID NO: 16397 - protein, 152 aa, Vibrio maritimus
  misc_feature (1)..(152): tr|A0A090TLB9|A0A090TLB9_9VIBR GTP cyclohydrolase 1 OS= Vibrio maritimus OX=990268 GN=JCM19240_5528 PE=3 SV=1
MSGLSESAKLVKAALSERGLETPMLPNEVSREEKKERIEHHMREILTLLQLDLADDSLMETPQRIAKMYVDEIFSGLDYQNFPKITVIENKMDVSEMVRVKDITVTSTCEHHLVTIDGKAAVAYIHVEKSSAYRRSTALSDFSLSAHKCKSA

SEQ ID NO: 16398 - protein, 217 aa, Vibrio mediterranei
  misc_feature (1)..(217): tr|A0A3G4VHR0|A0A3G4VHR0_9VIBR GTP cyclohydrolase 1 OS= Vibrio mediterranei OX=689 GN=folE PE=3 SV=1
MSGLSESAKLVKAALSKRGLETPMLPNEVSREEKKERIEHHMREILTLLQLDLQDDSLMETPHRIAKMYVDEIFSGLDYENFPKITVIENKMDVSEMVRVKDITVTSTCEHHLVTIDGKAAVAYIPRGKIIGLSKINRIVRFFAQRPQVQERMTQQILVALQALLETDDVAVTIDAVHYCVKSRGVMDATSETTTTALGGIFKSKPATRHEFLHGLR

SEQ ID NO: 16399 - protein, 217 aa, Vibrio mediterranei
  misc_feature (1)..(217): tr|A0A241TAP6|A0A241TAP6_9VIBR GTP cyclohydrolase 1 OS= Vibrio mediterranei OX=689 GN=folE PE=3 SV=1
MSGLSESAKLVKAALSERGLETPMLPNEVSREEKKERIEHHMREILTLLQLDLQDDSLMETPHRIAKMYVDEIFSGLDYENFPKITVIENKMDVSEMVRVKDITVTSTCEHHLVTIDGKAAVAYIPRGKIIGLSKINRIVRFFAQRPQVQERMTQQILVALQALLETDDVAVTIDAVHYCVKSRGVMDATSETTTTALGGIFKSKPATRHEFLHGLR

SEQ ID NO: 16400 - protein, 217 aa, Vibrio metoecus
  misc_feature (1)..(217): tr|A0A0Q0VN51|A0A0Q0VN51_9VIBR GTP cyclohydrolase 1 OS= Vibrio metoecus OX=1481663 GN=folE PE=3 SV=1
MSGLSESAKLVKDALERRGLETPMQPSLASPAEKKDKIEHHMREILNLLGLDLTDDSLEETPQRIAKMYVDEIFSGLDYANFPKITVIENKMKVSEMVKVKDITLTSTCEHHLVTIDGTAAVAYIPRGKIIGLSKINRIVRFFAQRPQVQERMTQQILVALQALLESDDVAVTIDATHYCVKSRGVMDATSVTTTTALGGIFKSNPATRAEFLHGLR

SEQ ID NO: 16401 - protein, 217 aa, Vibrio metschnikovii
  misc_feature (1)..(217): tr|C9P754|C9P754_VIBME GTP cyclohydrolase 1 OS=Vibrio m etschnikovii CIP 69.14 OX=675813 GN=folE PE=3 SV=1
MSILSESAQLVKAALESRGQETPMQPNAISREEKKAQIEFHMREVLTLLGLDLADDSLQETPHRIAKMYVDEIFSGLDYKNFPKITVIENKMKVSEMVRVKDITVTSTCEHHLVTIDGKAAVAYIPRGKIIGLSKINRIVRFFAQRPQVQERLTQQILVALQTLLESDDVAVTIDATHYCVKSRGVMDATSVTTTTALGGIFKSNPATRAEFLHGLR

SEQ ID NO: 16402 - protein, 126 aa, Vibrio metschnikovii
  misc_feature (1)..(126): tr|A0A380NRS9|A0A380NRS9_VIBME GTP cyclohydrolase 1 OS= Vibrio metschnikovii OX=28172 GN=folE_1 PE=3 SV=1
MKVSEMVRVKDITVTSTCEHHLVTIDGKAAVAYIPRGKIIGLSKINRIVRFFAQRPQVQERLTQQILVALQTLLESDDVAVTIDATHYCVKSRGVMDATSVTTTTALGGIFKSNPATRAEFLHGLR

SEQ ID NO: 16403 - protein, 221 aa, Vibrio mimicus
  misc_feature (1)..(221): tr|D2YGZ7|D2YGZ7_VIBMI GTP cyclohydrolase 1 OS=Vibrio m imicus VM603 OX=671074 GN=folE PE=3 SV=1
MSGLSESAKLVKDALERRGLETPMQPSLASPAEKKDKIEHHMREILNLLGLDLTDDSLEETPQRIAKMYVDEIFSGLDYANFPKITVIENKMKVSEMVKVKDITLTSTCEHHLVTIDGTAAVAYIPRGKIIGLSKINRIVRFFAQRPQVQERMTQQILVALQALLESDDVAVTIDATHYCVKSRGVMDATSVTTTTALGVFSNLTQRRVLNSYTVCVNSLS

SEQ ID NO: 16404 - protein, 217 aa, Vibrio mimicus
  misc_feature (1)..(217): tr|A0A5B6XJI6|A0A5B6XJI6_VIBMI GTP cyclohydrolase 1 OS= Vibrio mimicus OX=674 GN=folE PE=3 SV=1
MSGLSESVKLVKDALERRGLETPMQPSLASPAEKKDKIEHHMREILNLLGLDLTDDSLEETPQRIAKMYVDEIFSGLDYANFPKITVIENKMKVSEMVKVKDITLTSTCEHHLVTIDGTAAVAYIPRGKIIGLSKINRIVRFFAQRPQVQERMTQQILVALQALLESDDVAVTIDATHYCVKSRGVMDATSVTTTTALGGIFKSNPATRAEFLHGLR

SEQ ID NO: 16405 - protein, 217 aa, Vibrio mytili
  misc_feature (1)..(217): tr|A0A0C3DMA1|A0A0C3DMA1_9VIBR GTP cyclohydrolase 1 OS= Vibrio mytili OX=50718 GN=folE PE=3 SV=1
MSGLSESAKLVKEALEERGLETPMRPNNASREEKKEKIEYHMREILGLLQLDLTDDSLEETPHRIAKMYVDEIFSGLDYSNFPKITVIENKMNVSEMVRVKDITVTSTCEHHLVTIDGKAAVAYIPRGKIIGLSKINRIVRFFAQRPQVQERMTQQILTALQTLLESDDVAVTIDATHYCVKSRGVMDATSETTTTALGGIFKSNPATRAEFLHGLR

SEQ ID NO: 16406 - protein, 217 aa, Vibrio natriegens
  misc_feature (1)..(217): tr|A0A1B1EH20|A0A1B1EH20_VIBNA GTP cyclohydrolase 1 OS= Vibrio natriegens OX=691 GN=folE PE=3 SV=1
MSGLSESAKLVKEALEQRGLETPMRPNNVSREEKKEKIEYHMREILGLLQLDLTDDSLEETPHRIAKMYVDEIFSGLDYSNFPKITVIENKMNVSEMVRVKDITVTSTCEHHLVTIDGKAAVAYIPRGKIIGLSKINRIVRFFAQRPQVQERMTQQILIALQTLLESDDVAVTIDATHYCVKSRGVMDATSETTTTALGGIFKSNPATRAEFLHGLR

SEQ ID NO: 16407 - protein, 217 aa, Vibrio navarrensis
  misc_feature (1)..(217): tr|A0A099MF64|A0A099MF64_9VIBR GTP cyclohydrolase 1 OS= Vibrio navarrensis OX=29495 GN=folE PE=3 SV=1
MSGLSESAKLVKDALEKRGLETPMVPNQFSREEKKEKIEHHMREILALLELDLTDDSLEETPRRIAKMYVDEIFSGLDYQNFPKITVIENKMNVSEMVRVKDITLTSTCEHHLVTIDGKAAVAYIPRGKIIGLSKINRIVRFFAQRPQVQERMTQQILVALQTLLESDDVAVTIDATHYCVKSRGVMDATSETTTTALGGIFKSNPATRAEFLHGLR

SEQ ID NO: 16408 - protein, 217 aa, Vibrio neocaledonicus; identical to SEQ ID NO: 16333
  misc_feature (1)..(217): tr|A0A4P8G689|A0A4P8G689_9VIBR GTP cyclohydrolase 1 OS= Vibrio neocaledonicus OX=1208308 GN=folE PE=3 SV=1

SEQ ID NO: 16409 - protein, 217 aa, Vibrio neptunius
  misc_feature (1)..(217): tr|A0A0F4NX20|A0A0F4NX20_9VIBR GTP cyclohydrolase 1 OS= Vibrio neptunius OX=170651 GN=folE PE=3 SV=1
MSGLSESAKLVKDALESRGLETPMSPNQISREEKKEKIQYHMREILSLLELDLTDDSLEETPHRIAKMYVDEIFSGLDYTNFPKITVIENKMDVSEMVRVKDITLTSTCEHHLVTIDGRATVAYIPRGKIIGLSKINRIVRFFAQRPQVQERMTQQILIALQTLLESDDVAVTIDATHYCVKSRGVMDATSETTTTALGGIFKSNPATRHEFLHGIR

SEQ ID NO: 16410 - protein, 212 aa, Vibrio neptunius
  misc_feature (1)..(212): tr|A0A0F4P9M6|A0A0F4P9M6_9VIBR GTP cyclohydrolase 1 OS= Vibrio neptunius OX=170651 GN=folE PE=3 SV=1
MISPEAHKVQQALIARGLETPLVPSDMTPDEKYHRIRGLLTEVVSTLGLDLTDDSLSETPHRIAKMYVHEIFSGLDYQNFPKISVIENKMAVDEMVKVSDVNLTSTCEHHFITIDGLAQVAYIPDNKILGLSKINRIVRFFAQRPQVQERLTQQVLVAIQTLTETENVAVSIKATHYCVKSRGVMDTSSETSTTALGGIFKTNPQTRAEFLG

SEQ ID NO: 16411 - protein, 217 aa, Vibrio nereis
  misc_feature (1)..(217): tr|A0A0M0HQI8|A0A0M0HQI8_VIBNE GTP cyclohydrolase 1 OS= Vibrio nereis OX=693 GN=folE PE=3 SV=1
MSGLSESAMLVKDALERRGLETPMVPNQFSREEKKEKIQYHMREILSLLELDLTDDSLEETPHRIAKMYVDEIFSGLDYSNFPKITVIENKMDVSEMVRVKDITVTSTCEHHLVTIDGRAAVAYIPRGKIIGLSKINRIVRFFAQRPQVQERMTQQILVALQTLLESDDVAVTIDATHYCVKSRGVMDATSETTTTALGGIFKSNSATRHEFLHGIR

SEQ ID NO: 16412 - protein, 217 aa, Vibrio nigripulchritudo
  misc_feature (1)..(217): tr|U4K699|U4K699_9VIBR GTP cyclohydrolase 1 OS=Vibrio n igripulchritudo OX=28173 GN=folE PE=3 SV=1
MPGLSESALLVQQALVEKGIETPMAPNSVSREEKKERIEHHMREILQLLELDLSDDSLEETPHRIAKMYVDEIFSGLDYKNFPKITVIDNKMACSEMVRVKDITVTSTCEHHLVTIDGKAAVAYIPRKKIIGLSKINRIVRFFAQRPQVQERMTQQILVALQTLLETDDVAITMDAVHYCVKSRGVMDATSETTTTALGGIFKSNPATRHEFLHGLR

SEQ ID NO: 16413 - protein, 217 aa, Vibrio nigripulchritudo; identical to SEQ ID NO: 16412
  misc_feature (1)..(217): tr|U4DUC1|U4DUC1_9VIBR GTP cyclohydrolase 1 OS=Vibrio n igripulchritudo FTn2 OX=1238441 GN=folE PE=3 SV=1

SEQ ID NO: 16414 - protein, 217 aa, Vibrio orientalis
  misc_feature (1)..(217): tr|C9QDY8|C9QDY8_VIBOR GTP cyclohydrolase 1 OS=Vibrio o rientalis CIP 102891 = ATCC 33934 OX=675816 GN=folE PE= 3 SV=1
MSGLSESAKLVKDALEQRGLETPMAPNQFSRDEKKEKIQHHMREILSLLELDLTDDSLEETPQRIAKMYVDEIFSGLDYSNFPKITVIENKMNVSEMVRVKDITVTSTCEHHLVTIDGRAAVAYIPRGKIIGLSKINRIVRFFAQRPQVQERMTQQILVALQTLLESDDVAVTIDATHYCVKSRGVMDATSETTTTALGGIFKSNSATRHEFLHGIR

SEQ ID NO: 16415 - protein, 217 aa, Vibrio owensii; identical to SEQ ID NO: 16333
  misc_feature (1)..(217): tr|A0A0C1W176|A0A0C1W176_9VIBR GTP cyclohydrolase 1 OS= Vibrio owensii CAIM 1854 = LMG 25443 OX=1229493 GN=folE PE=3 SV=1

SEQ ID NO: 16416 - protein, 217 aa, Vibrio owensii; identical to SEQ ID NO: 16333
  misc_feature (1)..(217): tr|A0A3G2Q2V4|A0A3G2Q2V4_9VIBR GTP cyclohydrolase 1 OS= Vibrio owensii OX=696485 GN=folE PE=3 SV=1

SEQ ID NO: 16417 - protein, 299 aa, Vibrio palustris
  misc_feature (1)..(299): tr|A0A1R4B396|A0A1R4B396_9VIBR GTP cyclohydrolase FolE2 OS=Vibrio palustris OX=1918946 GN=folE2 PE=4 SV=1
MKQDLNLPDVMKTAKTSMPANLQWVGMSDISVPFYVKNHNNTIGVTGHANVYVSLDAEEEKGIHMSRLYTSLYQQLSQQILLQERIEAFLLELVSSQAGISHNARLELAFELPIHKPALLSGKMGYQTYSIEWNLMLEDDQWRTEVVLHIPYSSTCPCSASLSRQLLSQAIDQRFNEPLVDKATLLAWIESEQGSIATPHSQRSLAHIHLTWTGIYCPDFEHLLRYFEQAIGTPVQTAVKRADEQEFARLNAKNLMFCEDAARKLKQALVMMSSLQDYWFKVEHQESLHAHNAVVIDRK

SEQ ID NO: 16418 - protein, 217 aa, Vibrio palustris
  misc_feature (1)..(217): tr|A0A1R4B706|A0A1R4B706_9VIBR GTP cyclohydrolase 1 OS= Vibrio palustris OX=1918946 GN=folE PE=3 SV=1
MSGLSDSAKKVIAALESRGLETPMAPNEFGRAEKKEKIEHHMGEILNVLGLDLTDDSLEETPRRIAKMYVDEIFSGLDYQNFPKITVIENKMNVSEMVRVKDITVTSTCEHHLVTIDGKAAVAYIPRGKIIGLSKINRIVRFFAQRPQVQERMTQQILVALQTLLESDDVAVTIDATHYCVKSRGVMDATSETTTTALGGIFKSNASTRAEFLSGLR

SEQ ID NO: 16419 - protein, 217 aa, Vibrio panuliri
  misc_feature (1)..(217): tr|A0A1Q9HLF4|A0A1Q9HLF4_9VIBR GTP cyclohydrolase 1 OS= Vibrio panuliri OX=1381081 GN=folE PE=3 SV=1
MSGLSESAKLVKDALESRGLETPMVPSEFTREEKKEKIQHHMREILSLLDLDLTDDSLEETPHRIAKMYVDEIFSGLDYQNFPKITVIENKMNVSEMVRVKDITLTSTCEHHLVTIDGKAAVAYIPRGKIIGLSKINRIVRFFSQRPQVQERLTQQILVALQTLLESEDVAVTIDATHYCVKSRGVMDATSETTTTALGGIFKSIPATRAEFLHGLR

SEQ ID NO: 16420 - protein, 217 aa, Vibrio parahaemolyticus
  misc_feature (1)..(217): sp|Q87GZ6|GCH1_VIBPA GTP cyclohydrolase 1 OS=Vibrio par ahaemolyticus serotype O3:K6 (strain RIMD 2210633) OX=2 23926 GN=folE PE=3 SV=1
MSGLSESAKLVKEALEQRGLETPMRPNAVSREEKKEKIEHHMREILTLLQLDLTDDSLEETPHRIAKMYVDEIFSGLDYSNFPKITVIENKMNVSEMVRVKDITVTSTCEHHLVTIDGKAAVAYIPRGKIIGLSKINRIVRFFAQRPQVQERMTQQILVALQTLLESDDVAVTIDATHYCVKSRGVMDATSETTTTALGGIFKSNPATRAEFLHGLR

SEQ ID NO: 16421 - protein, 217 aa, Vibrio parahaemolyticus; identical to SEQ ID NO: 16420
  misc_feature (1)..(217): tr|A0A072FSE1|A0A072FSE1_VIBPH GTP cyclohydrolase 1 OS= Vibrio parahaemolyticus OX=670 GN=folE PE=3 SV=1

SEQ ID NO: 16422 - protein, 217 aa, Vibrio pectenicida
  misc_feature (1)..(217): tr|A0A427TVW1|A0A427TVW1_9VIBR GTP cyclohydrolase 1 OS= Vibrio pectenicida OX=62763 GN=folE PE=3 SV=1
MSDLSESAILVKKALENRGLETPMQPNQISREEKKEKIQHHMREILTLLELDLTDDSLEETPHRIAKMYVDEIFSGLDYSNFPKITVIENKMDMSEMVRVKDITVTSTCEHHLVTIDGRATVAYIPRGKIIGLSKINRIVRFFAQRPQVQERMTQQILVALQTLLESDDVAVTIDATHYCVKSRGVMDATSETTTTALGGIFKSNPATRYEFLHGIR

SEQ ID NO: 16423 - protein, 212 aa, Vibrio pectenicida
  misc_feature (1)..(212): tr|A0A3R9FQY9|A0A3R9FQY9_9VIBR GTP cyclohydrolase 1 OS= Vibrio pectenicida OX=62763 GN=folE PE=3 SV=1
MISDEAKRVKEVLIEQGLETPLVDSFMSPEQKYERLKGLLTEMISVIGLDLNDDSLAETPHRIAKMYVNEIFSGLDYMNFPKITVIENKMNVDEMVKVSNINLTSTCEHHFVTIDGLAKVAYLPKLKVIGLSKINRIVRFFAQRPQVQERLTQQILIAIQTLAETKNVAVTIDATHYCVKSRGVMDVNSNTTTTALGGCFKTDPQTRAEFLQ

SEQ ID NO: 16424 - protein, 217 aa, Vibrio penaeicida
  misc_feature (1)..(217): tr|A0A3S0MRM6|A0A3S0MRM6_9VIBR GTP cyclohydrolase 1 OS= Vibrio penaeicida OX=104609 GN=folE PE=3 SV=1
MPGLSESALLVQKALVEKGIETPMLPNKVSREEKKARIENHMREILQLLELDLSDDSLEETPRRIAKMYVDEVFSGLDYKNFPKITVIENKMACSEMVRVKDITVTSTCEHHLVTIDGKAAVAYIPRKKIIGLSKINRIVRFFAQRPQVQERMTQQVLVALQTLLETDDVAITMDAVHYCVKSRGVMDATSETTTTALGGIFKSNPATRHEFLHGLR

SEQ ID NO: 16425 - protein, 65 aa, Vibrio ponticus
  misc_feature (1)..(65): tr|A0A090P715|A0A090P715_9VIBR GTP cyclohydrolase I typ e 1 OS=Vibrio ponticus OX=265668 GN=JCM19238_2462 PE=4 SV=1
MTQQILVALQTLLESDDVAVTIDATHYCVKSRGVMDATSETTTTALGGIFKSNPATRAEFLHGLR

SEQ ID NO: 16426 - protein, 217 aa, Vibrio ponticus
  misc_feature (1)..(217): tr|A0A3N3DZD4|A0A3N3DZD4_9VIBR GTP cyclohydrolase 1 OS= Vibrio ponticus OX=265668 GN=folE PE=3 SV=1
MSGLSESAKLVKDALESRGLETPMVPSEFSREEKKEKIQYHMREILSLLDLDLTDDSLEETPHRIAKMYVDEIFSGLDYQNFPKITVIENKMNVSEMVRVKDITLTSTCEHHLVTIDGKAAVAYIPRGKIIGLSKINRIVRFFSQRPQVQERLTQQILVALQTLLESDDVAVTIDATHYCVKSRGVMDATSETTTTALGGIFKSNPATRAEFLHGLR

SEQ ID NO: 16427 - protein, 217 aa, Vibrio proteolyticus
  misc_feature (1)..(217): tr|U3A149|U3A149_VIBPR GTP cyclohydrolase 1 OS=Vibrio p roteolyticus NBRC 13287 OX=1219065 GN=folE PE=3 SV=1
MSGLSESAKLVKEALERRGLETPMRPNSISREEKKEKIEHHMREILNLLALDLTDDSLEETPHRIAKMYVDEIFSGLDYQNFPKITVIENKMNVSEMVRVKDITVTSTCEHHLVTIDGKAAVAYIPRGKIIGLSKINRIVRFFAQRPQVQERMTQQILVALQTLLESDDVAVTIDATHYCVKSRGVMDATSETTTTALGGIFKSNPATRHEFLHGLR

SEQ ID NO: 16428 - protein, 217 aa, Vibrio qinghaiensis
  misc_feature (1)..(217): tr|A0A223N2D5|A0A223N2D5_9VIBR GTP cyclohydrolase 1 OS= Vibrio qinghaiensis OX=2025808 GN=folE PE=3 SV=1
MLGLSESAKLVKDALESRGLETPMRPNEVTREEKKEKIEHHMREILTLLGLDLTDDSLEETPHRIAKMYVDEVFSGLDYQNFPKITVIENKMNVSEMVRVKEITVTSTCEHHLVTIDGKAAVAYIPRGKIIGLSKINRIVRFFAQRPQVQERMTQQILVALQTLLGSADVAVTIDATHYCVKSRGVMDATSETTTTALGGIFKSNPATRAEFFHGLH

SEQ ID NO: 16429 - protein, 218 aa, Vibrio quintilis
  misc_feature (1)..(218): tr|A0A1M7Z327|A0A1M7Z327_9VIBR GTP cyclohydrolase 1 OS= Vibrio quintilis OX=1117707 GN=folE PE=3 SV=1
MSGLSEAALLVKNALESRGLETPMCPNTVGRSEKKEKIEYHMREILHLLGLDLTDDSLEETPHRIAKMYVDEVFSGLDYHNFPKITVIENKMNVSEMVRVKDITVTSTCEHHLVTIDGKAAVAYIPRGKIIGLSKINRIVRFFAQRPQVQERMTQQILVALQTLLESDDVAVTMDATHYCVKSRGVMDATSETTTTALGGLFKSNPATRAEFLHGLKS

SEQ ID NO: 16430 - protein, 250 aa, Vibrio quintilis
  misc_feature (1)..(250): tr|A0A1M7YTJ5|A0A1M7YTJ5_9VIBR Putative GTP cyclohydrol ase 1 type 2 OS=Vibrio quintilis OX=1117707 GN=VQ7734_0 1652 PE=4 SV=1
MNHLTLEALLNEKLRPEMVKDYCPNGLQIEGKAEVKRVITGVTASQALIEKAIELEADALLVHHGYFWKGEPEPVRGMKGKRIRSLVKHDINLYAYHLPLDIHPELGNNARLADLLGIQVAGGLEEHPQSVAMYGTLSQPLDAEVFGQKIEQVLERKPLHISAGHKVIHTIGWCTGGGQDYIELAAAKGLDAFISGEISERTTYSAREQGVHFFSAGHHATERYGVKALGEWLAEHHELDVTFIDIDNPV

SEQ ID NO: 16431 - protein, 217 aa, Vibrio renipiscarius; identical to SEQ ID NO: 16385
  misc_feature (1)..(217): tr|A0A0C2NSA8|A0A0C2NSA8_9VIBR GTP cyclohydrolase 1 OS= Vibrio renipiscarius OX=1461322 GN=folE PE=3 SV=1

SEQ ID NO: 16432 - protein, 217 aa, Vibrio rotiferianus
  misc_feature (1)..(217): tr|A0A2K7SS23|A0A2K7SS23_9VIBR GTP cyclohydrolase 1 OS= Vibrio rotiferianus OX=190895 GN=folE PE=3 SV=1
MSGLSESAKLVKEALEQRGLETPMRPNSVSREEKKEKIEHHMREILGLLQLDLTDDSLEETPHRIAKMYVDEIFSGLDYSNFPKITVIENKMNVSEMVRVKDITVTSTCEHHLVTIDGKAAVAYIPRGKIIGLSKINRIVRFFAQRPQVQERMTQQILVALQTLLESDDVAVTIDATHYCVKSRGVMDATSETTTTALGGIFKSNPATRAEFLHGLR

SEQ ID NO: 16433 - protein, 217 aa, Vibrio rotiferianus; identical to SEQ ID NO: 16333
  misc_feature (1)..(217): tr|A0A510IBF7|A0A510IBF7_9VIBR GTP cyclohydrolase 1 OS= Vibrio rotiferianus OX=190895 GN=folE PE=3 SV=1

SEQ ID NO: 16434 - protein, 251 aa, Vibrio ruber
  misc_feature (1)..(251): tr|A0A1R4LED3|A0A1R4LED3_9VIBR Putative GTP cyclohydrol ase 1 type 2 OS=Vibrio ruber DSM 16370 OX=1123498 GN=VR 7878_00925 PE=4 SV=1
MNNLELEALLNEKLRPDLIQDYSPNGLQIEGRSEIKKIVTGVTASQALIEKAIDLQADAILVHHGYFWKREPEPIRGMKGKRIRRLIQQDINLYAYHLPLDIHPELGNNACLARLLGIDVMGGLEGHAQSVAMYGTFKEPMSGADLRQRISTVLQREPLHIASGENQLISTVGWCTGGGQDFIDLAASKGMDAFISGEVSERTTHSAREQGIHYFAAGHHATERYGVKALGEWLSQTHNLTVEFVDIDNPV

SEQ ID NO: 16435 - protein, 218 aa, Vibrio ruber
  misc_feature (1)..(218): tr|A0A1R4LTP2|A0A1R4LTP2_9VIBR GTP cyclohydrolase 1 OS= Vibrio ruber DSM 16370 OX=1123498 GN=folE PE=3 SV=1
MSGLSESALLVKNALEHRGLETPMRLNSIGREEKKEKIEYHMREILNLLGLDLTDDSLEETPHRIAKMYVDEVFSGLDYQNFPKITLIENKMKVSEMVRVKDITVTSTCEHHLVTIDGKAAVAYIPRGKIIGLSKINRIVRFFSQRPQVQERMTQQILVALQVLLETDDVAVTIDATHYCVKARGVMDATSETTTTALGGLFKSNPATRSEFLHGLLG

SEQ ID NO: 16436 - protein, 233 aa, Vibrio rumoiensis
  misc_feature (1)..(233): tr|A0A1E5DZF1|A0A1E5DZF1_9VIBR GTP cyclohydrolase 1 OS= Vibrio rumoiensis 1S-45 OX=1188252 GN=folE PE=3 SV=1
MANLNSQVLGDQAVANDQTLSESAQLVKAALQQRGIETPMRLNDTPRAEKKERIEHHMREILTLLELDLTDDSLEETPRRIAKMYVDEVFSGLDYKNFPKITVIENKMSCSEMVRVKNITVTSTCEHHLVTIDGQAAVAYIPRGKIIGLSKINRIVRFFAQRPQVQERMTQQILVALQALLETDDVAITMDATHYCVKSRGVMDATSVTTTTALGGIFKSNPATRAEFLHGLR

SEQ ID NO: 16437 - protein, 217 aa, Vibrio sagamiensis; identical to SEQ ID NO: 16331
  misc_feature (1)..(217): tr|A0A511QJ53|A0A511QJ53_9VIBR GTP cyclohydrolase 1 OS= Vibrio sagamiensis NBRC 104589 OX=1219064 GN=folE PE=3 SV=1

SEQ ID NO: 16438 - protein, 217 aa, Vibrio scophthalmi; identical to SEQ ID NO: 16385
  misc_feature (1)..(217): tr|F9RUM4|F9RUM4_9VIBR GTP cyclohydrolase 1 OS=Vibrio s cophthalmi LMG 19158 OX=870967 GN=folE PE=3 SV=1

SEQ ID NO: 16439 - protein, 217 aa, Vibrio scophthalmi; identical to SEQ ID NO: 16385
  misc_feature (1)..(217): tr|A0A1B1NV07|A0A1B1NV07_9VIBR GTP cyclohydrolase 1 OS= Vibrio scophthalmi OX=45658 GN=gch1 PE=3 SV=1

SEQ ID NO: 16440 - protein, 217 aa, Vibrio shilonii; identical to SEQ ID NO: 16398
  misc_feature (1)..(217): tr|A6CYY2|A6CYY2_9VIBR GTP cyclohydrolase 1 OS=Vibrio s hilonii AK1 OX=391591 GN=folE PE=3 SV=1

SEQ ID NO: 16441 - protein, 217 aa, Vibrio sinaloensis
  misc_feature (1)..(217): tr|E8M5F3|E8M5F3_9VIBR GTP cyclohydrolase 1 OS=Vibrio s inaloensis DSM 21326 OX=945550 GN=folE PE=3 SV=1
MSGLSESAKLVKDALERRGLETPMVPNQFSREEKKEKIQHHMREILTLLELDLTDDSLEETPHRIAKMYVDEIFSGLDYSNFPKITVIENKMDVSEMVRVKDITVTSTCEHHLVTIDGRAAVAYIPRGKIIGLSKINRIVRFFAQRPQVQERMTQQILVALQTLLESDDVAVTIDATHYCVKSRGVMDATSETTTTALGGIFKSNPATRHEFLHGIR

SEQ ID NO: 16442 - protein, 217 aa, Vibrio sinaloensis; identical to SEQ ID NO: 16349
  misc_feature (1)..(217): tr|A0A0A5I3T0|A0A0A5I3T0_9VIBR GTP cyclohydrolase 1 OS= Vibrio sinaloensis OX=379097 GN=folE PE=3 SV=1

SEQ ID NO: 16443 - protein, 217 aa, Vibrio sp.
  misc_feature (1)..(217): tr|A0A3N9TLU7|A0A3N9TLU7_9VIBR GTP cyclohydrolase 1 OS= Vibrio sp. LJC006 OX=2487322 GN=folE PE=3 SV=1
MSGLSESAVLVKNALESRGLETPMKPNDISQQEKKEKIEHHMREILNLLGLDLTDDSLEETPHRIAKMYVDEVFSGLDYRNFPKITVIENKMNVSEMVRVKDITVTSTCEHHLVTIDGKAAVAYIPRGKIIGLSKINRIVRFFAQRPQVQERMTQQILVALQTLLESDDVAVTIDATHYCVKSRGVMDATSETTTTALGGIFKSNPSTRSEFLSGLK

SEQ ID NO: 16444 - protein, 217 aa, Vibrio sp.; identical to SEQ ID NO: 16399
  misc_feature (1)..(217): tr|A0A084TAB2|A0A084TAB2_9VIBR GTP cyclohydrolase 1 OS= Vibrio sp. ER1A OX=1517681 GN=folE PE=3 SV=1

SEQ ID NO: 16445 - protein, 251 aa, Vibrio spartinae
  misc_feature (1)..(251): tr|A0A1N6M0Q0|A0A1N6M0Q0_9VIBR Putative GTP cyclohydrol ase 1 type 2 OS=Vibrio spartinae OX=1918945 GN=VSP9026_ 00579 PE=4 SV=1
MNNLELEALLDEKLRPDLIQDYSPNGLQIEGRSDIRKIVTGVTASQALIEKAITLQADAILVHHGYFWKREPEPIRGMKGKRIRRLIQHDINLYAYHLPLDIHPELGNNACLARLLGIDVMGGLEGHAQSVAMYGAFKAPISGADLSRKIATVLQREPLHIASGEEQLIATVGWCTGGGQDFIDLAAAKGLDAFISGEISERTTHSAREQGIHYFSAGHHATERYGVKALGEWLSQTQNIAVEFVDIDNPA

SEQ ID NO: 16446 - protein, 218 aa, Vibrio spartinae
  misc_feature (1)..(218): tr|A0A1N6MAH1|A0A1N6MAH1_9VIBR GTP cyclohydrolase 1 OS= Vibrio spartinae OX=1918945 GN=folE PE=3 SV=1
MSGLSESALLVKNALENRGLETPMRPNPIGREEKKEKIEYHMREILNLLGLDLTDDSLEETPHRIAKMYVDEVFSGLDYYNFPKITLIENKMKVSEMVRVKDITVTSTCEHHLVTIDGKAAVAYIPRGKIIGLSKINRIVRFFSQRPQVQERMTQQILVALQALLETDDVAVTVDATHYCVKARGVMDATSETTTTALGGLFKSNPATRSEFLHGLLG

SEQ ID NO: 16447 - protein, 212 aa, Vibrio splendidus
  misc_feature (1)..(212): tr|A0A0P6YF07|A0A0P6YF07_VIBSP GTP cyclohydrolase 1 OS= Vibrio splendidus OX=29497 GN=folE_2 PE=3 SV=1
MLNTEAEKVREALLAKGLETPMTPSEMNPNQKYNRIKGLLTEVVSTLGLDLTDDSLAETPHRIAKMYVHEIFSGLDYDNFPKISVIENKMSVDEMVKVSNIDLTSTCEHHFITIDGLAEVAYIPESKILGLSKINRIVRFFAQRPQVQERLTQQILVAIQTLVETENVAVTIKATHYCVKSRGVMDANSETSTTALGGIFKTNPQTRAEFLR

SEQ ID NO: 16448 - protein, 217 aa, Vibrio splendidus; identical to SEQ ID NO: 16340
  misc_feature (1)..(217): tr|A0A0P6Z385|A0A0P6Z385_VIBSP GTP cyclohydrolase 1 OS= Vibrio splendidus OX=29497 GN=folE_1 PE=3 SV=1

SEQ ID NO: 16449 - protein, 217 aa, Vibrio superstes; identical to SEQ ID NO: 16345
  misc_feature (1)..(217): tr|A0A511QKT1|A0A511QKT1_9VIBR GTP cyclohydrolase 1 OS= Vibrio superstes NBRC 103154 OX=1219062 GN=folE PE=3 SV =1

SEQ ID NO: 16450 - protein, 217 aa, Vibrio tapetis
  misc_feature (1)..(217): tr|A0A2N8ZLF6|A0A2N8ZLF6_9VIBR GTP cyclohydrolase 1 OS= Vibrio tapetis subsp. tapetis OX=1671868 GN=folE PE=3 S V=1
MSGLSESAKLVKSALAQNGIETPLRPNNIGRDEKKEKIEHHMREILNLLELDLSDDSLEETPRRIAKMYVDEVFSGLDYANFPKITVIENKMSCSEMVRVKDITVTSTCEHHLVTIDGRAAVAYIPRSKIIGLSKINRIVRFFAQRPQVQERMTQQVLVALQTLLETDDVAITMDAVHYCVKSRGVMDATSVTTTTALGGIFKSNPATRHEFLHGIR

SEQ ID NO: 16451 - protein, 212 aa, Vibrio tasmaniensis
  misc_feature (1)..(212): tr|B7VPI4|B7VPI4_VIBTL GTP cyclohydrolase 1 OS=Vibrio t asmaniensis (strain LGP32) OX=575788 GN=folE PE=3 SV=1
MLNTEAEKVREALLARGLETPMTPSEMNPNQKYNRIKGLLTEVVSTLGLDLNDDSLAETPHRIAKMYVHEIFSGLDYDNFPKISVIENKMSVDEMVKVSDIDLTSTCEHHFITIDGLAEVAYIPENKILGLSKINRIVRFFAQRPQVQERLTQQILVAIQTLVETENVAVTIKASHYCVKSRGVMDANSETSTTALGGIFKTNPQTRAEFLR

SEQ ID NO: 16452 - protein, 217 aa, Vibrio tasmaniensis; identical to SEQ ID NO: 16340
  misc_feature (1)..(217): tr|A0A1A6L599|A0A1A6L599_9VIBR GTP cyclohydrolase 1 OS= Vibrio tasmaniensis OX=212663 GN=folE PE=3 SV=1

SEQ ID NO: 16453 - protein, 252 aa, Vibrio thalassae
  misc_feature (1)..(252): tr|A0A240EGC5|A0A240EGC5_9VIBR GTP cyclohydrolase 1 typ e 2 OS=Vibrio thalassae OX=1243014 GN=VTH8203_00934 PE= 4 SV=1
MNNLQLEAVLNDKLSPQLIKDYSPNGLQIEGTSEIKKMVTGVTASQALIDYAVSVNADALLVHHGYFWKGEPEPIRGMKGKRIRTLIKNDLNLYGYHLPLDIHPELGNNARLADLLGIEVIDGLEGHPQSVAMFGKLANPMSGEALAQKIAQVLAREPLHITPDQANKMIETVGWCTGGGQDYIELAASKGLDAFISGEISERTTYTARELNIHYFAAGHHATERYGIKALGEWLASEHGLDVEFIDIDNPV

SEQ ID NO: 16454 - protein, 217 aa, Vibrio thalassae; identical to SEQ ID NO: 16399
  misc_feature (1)..(217): tr|A0A240EIQ6|A0A240EIQ6_9VIBR GTP cyclohydrolase 1 OS= Vibrio thalassae OX=1243014 GN=folE PE=3 SV=1

SEQ ID NO: 16455 - protein, 212 aa, Vibrio toranzoniae
  misc_feature (1)..(212): tr|A0A109D9F3|A0A109D9F3_9VIBR GTP cyclohydrolase 1 OS= Vibrio toranzoniae OX=1194427 GN=folE PE=3 SV=1
MLNTEAEKVREALLAKGLETPMTSSEMNPNQKYNRIKGLLTEVVSTLGLDLTDDSLAETPHRIAKMYVHEIFSGLDYNNFPKVSVIDNKMSVDEMVKVSDINLTSTCEHHFITIDGLAEVAYIPENKILGLSKINRIVRFFAQRPQVQERLTQQILVAIQTLVETENVAVTIKATHYCVKSRGVMDANSETSTTALGGIFKTNPQTRAEFLR

SEQ ID NO: 16456 - protein, 217 aa, Vibrio toranzoniae; identical to SEQ ID NO: 16390
  misc_feature (1)..(217): tr|A0A109D5B4|A0A109D5B4_9VIBR GTP cyclohydrolase 1 OS= Vibrio toranzoniae OX=1194427 GN=folE PE=3 SV=1

SEQ ID NO: 16457 - protein, 217 aa, Vibrio tubiashii
  misc_feature (1)..(217): tr|F9TA08|F9TA08_9VIBR GTP cyclohydrolase 1 OS=Vibrio t ubiashii ATCC 19109 OX=1051646 GN=folE PE=3 SV=1
MSGLSESAKLVKDALERRGLETPMAPNQFNREEKKEKIQHHMREILSLLELDLTDDSLEETPHRIAKMYVDEIFSGLDYSNFPKITVIENKMDVSEMVRVKDITVTSTCEHHLVTIDGRAAVAYIPRGKIIGLSKINRIVRFFAQRPQVQERMTQQILVALQTLLESDDVAVTIDATHYCVKSRGVMDATSETTTTALGGIFKSNPATRHEFLHGIR

SEQ ID NO: 16458 - protein, 217 aa, Vibrio tubiashii
  misc_feature (1)..(217): tr|A0A0A5I6A5|A0A0A5I6A5_9VIBR GTP cyclohydrolase 1 OS= Vibrio tubiashii OX=29498 GN=folE PE=3 SV=1
MSGLSESAKLVKDALEQRGLETPMAPNSFSREEKKEKIQHHMREILSLLELDLTDDSLEETPHRIAKMYVDEIFSGLDYSNFPKITVIENKMNVSEMVRVKDITVTSTCEHHLVTIDGRAAVAYIPRGKIIGLSKINRIVRFFAQRPQVQERMTQQILVALQTLLESDDVAVTMDATHYCVKSRGVMDATSETTTTALGGIFKSNPATRHEFLHGIR

SEQ ID NO: 16459 - protein, 191 aa, Vibrio variabilis
  misc_feature (1)..(191): tr|A0A090ST61|A0A090ST61_9VIBR GTP cyclohydrolase 1 OS= Vibrio variabilis OX=990271 GN=folE PE=3 SV=1
MTSSEMSSDQKYNRIKGLLTEVVSTLGLDLTDDSLAETPHRIAKMYVHEIFSGLDYDNFPKISVIDNKMSVDEMVNVSDIDLTSTCEHHFITIDGLAQVAYIPKSKILGLSKINRIVRFFAQRPQVQERLTQQILVAIQTLVETENVAVTIKATHYCVKSRGVMDANSETTTTALGGTFKTNPQTRAEFLR

SEQ ID NO: 16460 - protein, 217 aa, Vibrio variabilis; identical to SEQ ID NO: 16396
  misc_feature (1)..(217): tr|A0A090SNT7|A0A090SNT7_9VIBR GTP cyclohydrolase 1 OS= Vibrio variabilis OX=990271 GN=folE PE=3 SV=1

SEQ ID NO: 16461 - protein, 217 aa, Vibrio vulnificus
  misc_feature (1)..(217): sp|Q8D6I7|GCH1_VIBVU GTP cyclohydrolase 1 OS=Vibrio vul nificus (strain CMCP6) OX=216895 GN=folE PE=3 SV=1
MSGLSESAQLVKQALEKRGLETPMVPNQFSREEKKEKIEHHMREILSLLELDLTDDSLEETPRRIAKMYVDEVFSGLDYQNFPKITVIENKMNVSEMVRVKEITLTSTCEHHLVTIDGKAAVAYIPRGKIIGLSKINRIVRFFAQRPQVQERMTQQILVALQTLLESDDVAVTIDATHYCVKSRGVMDATSETTTTALGGIFKSNPATRAEFLHGLR

SEQ ID NO: 16462 - protein, 217 aa, Vibrio vulnificus; identical to SEQ ID NO: 16461
  misc_feature (1)..(217): tr|A0A087IB10|A0A087IB10_VIBVL GTP cyclohydrolase 1 OS= Vibrio vulnificus OX=672 GN=folE PE=3 SV=1

SEQ ID NO: 16463 - protein, 304 aa, Vibrio xiamenensis
  misc_feature (1)..(304): tr|A0A1G7XFT1|A0A1G7XFT1_9VIBR GTP cyclohydrolase FolE2 OS=Vibrio xiamenensis OX=861298 GN=folE2 PE=3 SV=1
MNQSHSLPDITMADKARNPSTLQWVGMSDIAVPFFVAISAVDSTQVAAKADIYVSLDKADAKGIHMSRLYRLLYQQLAHSHLSAGQITDLLDTGIKTQHGISQSAQLKLSFDLTLRKTSLLSQQAGYQAYHVALTFTQTPNASFSDVEITIPYSSTCPCSASLSQQLLAQAIDQQFDQDAIDKETLLKWIESAQGSIATPHSQRSFANLQLRWNGIVCPDLRELIEYFEAAIGTPVQTAVKREDEQAFAKLNAENLLFCEDAARRLKNALNEFSGLIGYRFKVDHQESLHAHNAVAFDQYGFDG

SEQ ID NO: 16464 - protein, 217 aa, Vibrio xiamenensis
  misc_feature (1)..(217): tr|A0A1G8CUX5|A0A1G8CUX5_9VIBR GTP cyclohydrolase 1 OS= Vibrio xiamenensis OX=861298 GN=folE PE=3 SV=1
MSGLSDSAKLVKDALESRGLETPMSPNNIGRDEKKQKIEHHMREILTLLELDLTDDSLEETPHRIAKMYVDEIFSGLNYQNFPKITVIENKMKVSEMVCVKDITVTSTCEHHLVTIDGKAAVAYIPRGKIIGLSKINRIVRFFAQRPQVQERMTQQILVALQTLLESDDVAVTIDATHYCVKSRGVMDATSATTTTALGGIFKSNPSTRAEFLHGLR

SEQ ID NO: 16465 - protein, 217 aa, Vibrionales bacterium; identical to SEQ ID NO: 16378
  misc_feature (1)..(217): tr|A0A366XJU4|A0A366XJU4_9GAMM GTP cyclohydrolase 1 OS= Vibrionales bacterium C3R12 OX=2267228 GN=folE PE=3 SV= 1

SEQ ID NO: 16466 - protein, 212 aa, Vibrionales bacterium
  misc_feature (1)..(212): tr|A5L767|A5L767_VIBBS GTP cyclohydrolase 1 OS=Vibriona les bacterium (strain SWAT-3) OX=391574 GN=folE PE=3 SV =1
MLTTEAEKVREALLGKGLETPMTSSEMNNDQKYNRIKGLLTEVVSTLGLDLTDDSLAETPHRIAKMYVHEIFSGLDYNNFPKISVIDNKMSVDEMVKVSDIDLTSTCEHHFITIDGLAQVAYIPKSKILGLSKINRIVRFFAQRPQVQERLTQQILVAIQTLVETENVAVTIKATHYCVKSRGVMDANSETTTTALGGSFKTNPQTRAEFLR

SEQ ID NO: 16467 - protein, 198 aa, Vibrionimonas magnilacihabitans; identical to SEQ ID NO: 9065
  misc_feature (1)..(198): tr|A0A2S8SIE0|A0A2S8SIE0_9BACT GTP cyclohydrolase 1 OS= Vibrionimonas magnilacihabitans OX=669455 GN=folE PE=3 SV=1

SEQ ID NO: 16468 - protein, 255 aa, Vibrionimonas magnilacihabitans
  misc_feature (1)..(255): tr|A0A2S8SKW3|A0A2S8SKW3_9BACT GTP cyclohydrolase 1 OS= Vibrionimonas magnilacihabitans OX=669455 GN=folE PE=3 SV=1
MARYFFMTNFFIFLVRQNRTSFMFQITQNIMQIQYQRALACQMASVSGEEDHFSNGSQTPLRPDAFAMSAEEKVHDIAYHFRSIMHTLGLDLSDDSLKDTPMRVAKMYVRELFSGLDPVNKPAISLFNNSYGYGQLLLEKNIPFVSQCEHHFVPIRGKAHVAYFAGDKVIGLSKLNRIVDYFARRPQVQERLTVQIGQELQQVLSTEDVAVIIDAEHMCVSMRGIRQDGCSTVSSFYGGRFNNASVKNELLLQLK

SEQ ID NO: 16469 - protein, 205 aa, Vicingus serpentipes
  misc_feature (1)..(205): tr|A0A5C6RWH9|A0A5C6RWH9_9FLAO GTP cyclohydrolase 1 OS= Vicingus serpentipes OX=1926625 GN=folE PE=3 SV=1
MMKENNMDGYEKVEQYNEKKIESLSKHYENIITELGEDINREGLQKTPERVAKAMQYLTHGYDLDPAEILKGAMFAENHDHMVIVKDIELYSMCEHHMLPFFGKAHIAYIPNGHIVGLSKIPRVVDAFARRLQVQERLTDQIMNCIQETLNPKGVAVVIEAKHMCMQMRGIQKQNSTTTTSSFTGAFEKDSTRKEFIALISHKMS

SEQ ID NO: 16470 - protein, 235 aa, Vicingus serpentipes
  misc_feature (1)..(235): tr|A0A5C6RWZ7|A0A5C6RWZ7_9FLAO GTP cyclohydrolase 1 OS= Vicingus serpentipes OX=1926625 GN=folE PE=3 SV=1
MKLEKTMLNTQSINDNPLNGYTFEDIGDDHLFTNLDTPLKEGAFDISDKEKKEKIEGLFAEIMDVLGLDLTDDSLKGTPKRVAKMYIEEIFSGLNPANKPKIALFDNKYQYNQMLVEKNITFYSNCEHHFVPIIGKAHVAYISSGKVIGLSKLNRIVQYYAKRPQVQERLTNQIGKDLQNILNTEDVAIIIDAKHLCVSSRGVQDDNSATVTTFYGGQFNSPEKIRELQSYITNK

SEQ ID NO: 16471 - protein, 179 aa, Victivallales bacterium
  misc_feature (1)..(179): tr|A0A2S0KSC3|A0A2S0KSC3_9BACT GTP cyclohydrolase 1 OS= Victivallales bacterium CCUG 44730 OX=2094242 GN=folE P E=3 SV=1
MQQQIHDILVEMGEDPSREGLLDTPKRVEKSLRFLTRGYGQTLEEVVNGALFEAESDDMVIVRDIEFFSLCEHHMLPFFGKCHVGYIPKGKIIGVSKVARIVDMFARRLQVQERLTKQVSEALMKILGAEGVGVVVEAQHLCMQMRGVEKQHSVMTTSSMVGSFRRELATRNEFTRLIR

SEQ ID NO: 16472 - protein, 179 aa, Victivallis vadensis
  misc_feature (1)..(179): tr|A0A2U1AUJ4|A0A2U1AUJ4_9BACT GTP cyclohydrolase 1 OS= Victivallis vadensis OX=172901 GN=folE PE=3 SV=1
MQQQIRDILVEIGEDPEREGLLDTPKRVEKSLKFLTRGYRQTLEEVVNGALFEAESDDMVIVRDIEFFSMCEHHMLPFFGKCHVGYIPKGKILGVSKVARIVDMFARRLQIQERLTRQISGALMEILGAEGVGVVMEARHLCMQMRGVEKQHSVMTTSSMVGSFRRELATRNEFTRLIR

SEQ ID NO: 16473 - protein, 310 aa, Virgibacillus chiguensis
  misc_feature (1)..(310): tr|A0A1M5L906|A0A1M5L906_9BACI GTP cyclohydrolase FolE2 OS=Virgibacillus chiguensis OX=411959 GN=folE2 PE=3 SV =1
MKHQAKALPVKQLPSKEKRHQLFGSVKPAPKTKPVDKMHMADLQNTKKDFLFDLDAVGVTKVKHPILIYSFMPPYTQTSVAEFTFTSSLKQTNKGTNMSRFIEQLASYQKNGFSTDLELLKKFTKDMAKRVEQQDATIEVSFPWFFERQAPDTSLIGLNHANASIKMEYHETKGFHIQLSLGVSITTLCPCSKEISEYSAHNQRGNVTMEIRVSDDYQEEDLDWKKVLLEAAESNASARLHPILKRTDEKFVTEQAYENPRFVEDMVRLIAADLYETPFIEKFKVTCQNEESIHMHDAIAEITYDKTKGI

SEQ ID NO: 16474 - protein, 310 aa, Virgibacillus dokdonensis
  misc_feature (1)..(310): tr|A0A3E0WZK4|A0A3E0WZK4_9BACI GTP cyclohydrolase FolE2 OS=Virgibacillus dokdonensis OX=302167 GN=folE2 PE=3 S V=1
MKHQAKAFPVKQLPSKEKRHQLFGSVKPAPKTKPVDKMHMADLQNTKKDFLFDLDAVGVTKVKHPILIYSFMPPYTQTSVAEFTFTSSLKQTSKGTNMSRFIEQLASYQKNGFSTDLELLKKFTKDMAKRVEQQDATIEVSFPWFFERQAPDTSLIGLNHANASIKMEYHETKGFHIQLSLGVSITTLCPCSKEISEYSAHNQRGNVTMEIRVSDDYQEEDLDWKKVLLEAAESNASARLHPILKRTDEKFVTEQAYENPRFVEDMVRLIAADLYETPFIEKFKVTCQNEESIHMHDAIAEITYDKTKGI

SEQ ID NO: 16475 - protein, 310 aa, Virgibacillus dokdonensis
  misc_feature (1)..(310): tr|A0A2K9J467|A0A2K9J467_9BACI GTP cyclohydrolase FolE2 OS=Virgibacillus dokdonensis OX=302167 GN=folE2 PE=3 S V=1
MKHQAKAFPVKQLPSKEKRHQLFGSVKPAPKTKPVDKMHMADLQNTKKDFLFDLDAVGVTKVKHPILIYSFMPPYTQTSIAEFTLTSSLKQTNKGTNMSRFIEQLASYQKNGFSTDLELLKKFTKDMAKRVEQQDATIEVNFPWFFERQAPDTSLIGLNHANASIKMEYHETKGFHIQLSLGVSITTLCPCSKEISEYSAHNQRGNVTMEIRVSDDYQEEDLDWKKVLLEAAESNASARLHPILKRTDEKFVTEQAYENPRFVEDMVRLIAADLYETPFIEKFKVTCQNEESIHMHDAIAEITYDKTKGI

SEQ ID NO: 16476 - protein, 312 aa, Virgibacillus halodenitrificans
  misc_feature (1)..(312): tr|A0A1J0H213|A0A1J0H213_VIRHA GTP cyclohydrolase FolE2 OS=Virgibacillus halodenitrificans OX=1482 GN=folE2 PE =3 SV=1
MGNTKTFPSRKLPNKKERHKLFGSVTPVLKTKPVEKSEMADLQNTKKDFLFDLDAVGVANVKHPVTIYSKLEPHVQTSVGEIQFTSSLKNTSKGTNMSRFTEQLAYYHEKGFTAEFSTLKQFVKELTERLEQSDATIEMEFPWFYERKGPQTELAGMNHANVAMRVTYDQHTGFSLGASLSVFVTTLCPCSKEISEYSAHNQRGEVSIDVELDELEAVNVDDWKQMLLEAAESNASSRLHPVLKRPDEKMVTEQAYENPRFVEDMVRLVAADLYEMDLVTKFKVQCRNEESIHMHDAIASITYDKNNMTFPS

SEQ ID NO: 16477 - protein, 312 aa, Virgibacillus indicus
  misc_feature (1)..(312): tr|A0A265NDY4|A0A265NDY4_9BACI GTP cyclohydrolase FolE2 OS=Virgibacillus indicus OX=2024554 GN=folE2 PE=3 SV=1
MEQTKTFPLKQLPNKEQRHKLFGSVQPIKKTKPVIKEKMADLQNIKRDFLFDLDAVGISNVKHPITVYSSLTPSTQTSIGTFHFSSSLNSTSKGTNMSRFTEQLSHYHKKGFIVDLKTLKKFTKELAERLEQKDAAITVTFPWFFERKGPDSGLTGMNHANCTITVSYDIDKGYSIQASLSALITTLCPCSKEISEYSAHNQRGEVTMEVSLAEDFNDINLDWKEMLLEAAESNASARLHPVLKRPDEKYVTEQAYENPRFVEDIVRLVAADLYEMSFVTKFKVSCRNEESIHLHDAIASVTYDKKLEGTRG

SEQ ID NO: 16478 - protein, 308 aa, Virgibacillus massiliensis
  misc_feature (1)..(308): tr|A0A024QCH1|A0A024QCH1_9BACI GTP cyclohydrolase FolE2 OS=Virgibacillus massiliensis OX=1462526 GN=folE2 PE=3 SV=1
MENTKTFPQKKLPSKAQRHKLFGSVMPVPRSKPVDKVHMADLQNTKKDFLFDLDAVGITKVKHPITIYSSIAPTVQTSIGEFTFSSSLSHSNKGTNMSRFNEQLAKYHRQGFSTDLTTLKTFTKELAERLDQQDASLRVDYTWFYERNAPDTQLAGLNHADVSISVNYDKQQGYDIRLSLSVSITTLCPCSKEISEYSAHNQRGNVTMDVKIIEDFDETTSDWKEILLEAAESNASARLHPILKRTDEKMVTEQAYENPRFVEDMVRLVAADLYEVSEIRQFKVTCQNEESIHMHDAVASVTYDKDNE

SEQ ID NO: 16479 - protein, 311 aa, Virgibacillus necropolis
  misc_feature (1)..(311): tr|A0A221MDF4|A0A221MDF4_9BACI GTP cyclohydrolase FolE2 OS=Virgibacillus necropolis OX=163877 GN=folE2 PE=3 SV =1
MNNTQTSLNVNLPNKEKRHQLFGSVAPGPRTKPTEKEKMADLQNAKKDFLFDLDQVGITNVKYPITVESNIAPFSQSTIGTFTFSSSIKKNSKGTNMSRFMEQLNMYHQNGFVANLSTLKAFTKELAIRLNQDDAELQLTFPWFYERTGPQSAIPGMNHATISLKITYDMEKGFTVRTSLSALITTLCPCSKEISEYSAHNQRGSVSMDVSISDDFDEEKVDWKEMLLEAAESNASARLHPVLKRTDEKIVTEKAYENPRFVEDMVRLVAADLFEMPFVTKFKVSCRNEESIHMHDALASVTIDKMDYTTQ

SEQ ID NO: 16480 - protein, 310 aa, Virgibacillus pantothenticus
  misc_feature (1)..(310): tr|A0A0L0QPX9|A0A0L0QPX9_VIRPA GTP cyclohydrolase FolE2 OS=Virgibacillus pantothenticus OX=1473 GN=folE2 PE=3 SV=1
MGHQTKAFPIKQLPSKEKRHQLFGSVKPAPRTKPVDKMHMADLQNTKKDFLFDLDAVGVTKVKNPIMIYSSIAPYTQTSIGEFTFTSSLKQTNKGTNMSRFMEQLANYQKNGFSTELDVLKKFTKEIAKRVEQQDAALEVNFPWFFERQAPDTGLTGLNHADAGIRIEYHELKGFCIYLSLSAAITTLCPCSKEISEYSAHNQRGNVIMEISVSEDYQEADLDWKKVLLEAAESNASARLHPILKRTDEKMVTEQAYENPRFVEDMVRLIAADLYETSFITKFKVTCQNEESIHMHDAIAAVTYDKTKEV

SEQ ID NO: 16481 - protein, 311 aa, Virgibacillus phasianinus
  misc_feature (1)..(311): tr|A0A220U5Q8|A0A220U5Q8_9BACI GTP cyclohydrolase FolE2 OS=Virgibacillus phasianinus OX=2017483 GN=folE2 PE=3 SV=1
MTYTPTSLTVNLPNKEERHQLFGSVAPGPRTKPEEKDKMADLQNTKKDFLFDLDEVGISNVKHPITVKSHIEPLTQSTIGTFSFTSSIKKTNKGTNMSRFMEQLNAYYHNGSVTSLSTLKQFTKDLATRLNQEDAEVQISFPWFYERTGPKSNIAGMNHADVSITVSYDNKNGFDIYATLSASITTLCPCSKEISEYSAHNQRGLVSMEVSIADDFDEEKTDWKLMLLEAAESNASARLHPVLKRTDEKTITEQAYENPRFVEDIVRLVAADLFEMPFVTKFKVACRNEESIHMHDAIASVTIDKADYISQ

SEQ ID NO: 16482 - protein, 310 aa, Virgibacillus profundi
  misc_feature (1)..(310): tr|A0A2A2IE29|A0A2A2IE29_9BACI GTP cyclohydrolase FolE2 OS=Virgibacillus profundi OX=2024555 GN=folE2 PE=3 SV= 1
MDQIKTFPLKQLPNKEQRHLLFGSVKPIEKTKPVDKSKMADLQNIKKDFLFDLDAVGIANVKHPITVYSNLNPTTQTSIGTIQFSSSLDNTSKGTNMSRFTEQLNYYHEQGFIVDFATLKKFTKELAERLEQKDATIIVDFPWFFERKGPESGLSGMNHADISITVDYHIEHGFSINAALSALITTLCPCSKEISEYSAHNQRGEVSMEVSFTDDFNDLNIDWKEALLEAAESNASARLHPVLKRPDEKLVTEQAYENPRFVEDIVRLVAADLYEMAFVTKFKVSCRNEESIHLHDAIASVTYDKNHECK

SEQ ID NO: 16483 - protein, 313 aa, Virgibacillus salinus
  misc_feature (1)..(313): tr|A0A1H1C2W7|A0A1H1C2W7_9BACI GTP cyclohydrolase FolE2 OS=Virgibacillus salinus OX=553311 GN=folE2 PE=3 SV=1
MDKIKSFPKKQLPNKIQRHKLFGSVQPGPRTKPSEKKEMADLQNTKKDFLFDLDEVGIENVKHPITVKSSLVPNEQTTIGTFKFSSSIDKASKGTNMSRFTEQLQSYYQKGFTVDLLTLKTFTKDLADRLKQSDAEVEVSFPWFYERKGPQSNLPGMNHADITLNVKYDDVKGYTIQASLASLITTLCPCSKEISEYSAHNQRGLVKMTVSLADDFDERLLDWKETLLEAAESNASSRLHPVLKRPDEKMVTEQAYENPRFVEDMVRLVAADIYEMPFVTKFSVKCRNEESIHMHDAIASVTYDKLQNEMNEG

SEQ ID NO: 16484 - protein, 211 aa, Virgibacillus soli; identical to SEQ ID NO: 5024
  misc_feature (1)..(211): tr|A0A0Q9YIC1|A0A0Q9YIC1_9BACI GTP cyclohydrolase 1 OS= Virgibacillus soli OX=480284 GN=folE PE=3 SV=1

SEQ ID NO: 16485 - protein, 312 aa, Virgibacillus sp.
  misc_feature (1)..(312): tr|A0A075JQC1|A0A075JQC1_9BACI GTP cyclohydrolase FolE2 OS=Virgibacillus sp. SK37 OX=403957 GN=folE2 PE=3 SV=1
MGNTKTFPSRKLPNKEERHKLFGSVTPVLKTKPIEKSEMADLQNTKKDFLFDLDAVGVANVKHPVTIYSNLKPLVQTSVGKIQFTSSLKNTSKGTNMSRFTEQLAYYHEKGFTADFSTLKQFVKELTERLEQSDATIEMEFPWFYERKGPQTELAGMNHANVSMRVTYDQINGFSLGASLSVFVTTLCPCSKEISEYSAHNQRGEVSIEVELDDLEFDNVDDWKQMLLEAAESNASSRLHPVLKRPDEKMVTEQAYENPRFVEDMVRLVAADLYEMELVTKFKVQCRNEESIHMHDAIASITYDKNSMTFPS

SEQ ID NO: 16486 - protein, 310 aa, Virgibacillus sp.
  misc_feature (1)..(310): tr|A0A268I2G0|A0A268I2G0_9BACI GTP cyclohydrolase FolE2 OS=Virgibacillus sp. 7505 OX=2022548 GN=folE2 PE=3 SV= 1
MQHLHTPTKKQLPSKAERHKLFGSVAPGKKTKPENKADMADLQNTKKNFLFHIDAVGIAKVKHPIQVISNTRPAMQTTIGTFEFTSSIQQDSKGTNMSRFTEQLDLYHKNGFTVSVKSLQLFVAELADRLKQEDARVKVTFPWFFERSGPASGMTGLNHADATLEVAYDKQTGFRTTAKLSGTVTTLCPCSKEISEYSAHNQRGIVSMEVQLTDAFDEDVRDWKEDLLEAAESNASARIHPVLKRPDEKMVTETAYENPRFVEDMVRLVAADLYELDYVEKFTVSCSNEESIHLHDAVATLSYDKRDEEE

SEQ ID NO: 16487 - protein, 189 aa, Viridibacillus arenosi
  misc_feature (1)..(189): tr|W4EKP4|W4EKP4_9BACL GTP cyclohydrolase 1 OS=Viridiba cillus arenosi FSL R5-213 OX=1227360 GN=folE PE=3 SV=1
MTTTDLNKIEQAIKMILEAVGEDPNREGLLDTPKRVAKMYQEMFSGLHEDPKKYFETVFHEGHDEVVLVKDIPFYSMCEHHLVPFYGKAHIAYIPKDGVVAGLSKLARTVETVSHRPQLQERITATIADTLMEMLKPQGVYVVVEAEHMCMTMRGIKKPGAKTITSVSKGIFEEDDIKRSEILSFIQMS

SEQ ID NO: 16488 - protein, 190 aa, Viridibacillus arvi
  misc_feature (1)..(190): tr|A0A0M0LDA8|A0A0M0LDA8_9BACL GTP cyclohydrolase 1 OS= Viridibacillus arvi OX=263475 GN=folE PE=3 SV=1
MLTTTDLNKIEQAIKMILEAVGEDPNREGLLDTPKRVAKMYQEMFSGLHEDPKKYFETVFHEGHDEVVLVKDIPFFSMCEHHLVPFYGKAHIAYIPKDGVVAGLSKLARTVETVSHRPQLQERITATIADTLMEMLNPQGVYVVVEAEHMCMTMRGIKKPGAKTITSVAKGIFEEDDVKRSEILSFIQMS

SEQ ID NO: 16489 - protein, 189 aa, Viridibacillus sp.
  misc_feature (1)..(189): tr|A0A2N0F583|A0A2N0F583_9BACL GTP cyclohydrolase 1 OS= Viridibacillus sp. OK051 OX=1884360 GN=folE PE=3 SV=1
MTTMDLNKIEQAIKLILEAVGEDPNREGLLDTPKRVSKMYQEMFAGLHEDPKKYFETVFHEGHDEVVLVKDIPFFSMCEHHLVPFYGKAHIAYIPKDGVVAGLSKLARTVETVSHRPQLQERITATIADTLMEMLNPQGVYVVVEAEHMCMTMRGIKKPGAKTITSVAKGIFEENDVKRSEILSFIQMS

SEQ ID NO: 16490 - protein, 199 aa, Vitellibacter aquimaris
  misc_feature (1)..(199): tr|A0A137RJF1|A0A137RJF1_9FLAO GTP cyclohydrolase 1 OS= Vitellibacter aquimaris OX=1548749 GN=folE PE=3 SV=1
MASYRYFEEYDQPVTDTLIENYSKILHTVGEDISRDGIVKTPERAAKAIQFLTSGNCQDPAEILKSAMFAEAYHDMVIIKDIELYSLCEHHMLPFFGKAHIAYIPDGHIVGLSKIPRVVDVFARRLQVQERLTHDILECINNTLKPKGVAVVIEASHMCMMMRGVQKQNSVTTTSGFRGQFEAIETRSEFLKLISSDLG

SEQ ID NO: 16491 - protein, 225 aa, Vitellibacter aquimaris; identical to SEQ ID NO: 4095
  misc_feature (1)..(225): tr|A0A137REN0|A0A137REN0_9FLAO GTP cyclohydrolase 1 OS= Vitellibacter aquimaris OX=1548749 GN=folE PE=3 SV=1

SEQ ID NO: 16492 - protein, 266 aa, Vitreoscilla filiformis
  misc_feature (1)..(266): tr|A0A221KEL8|A0A221KEL8_VITFI GTP cyclohydrolase FolE2 OS=Vitreoscilla filiformis OX=63 GN=folE2 PE=3 SV=1
MTHLTEALHIPDTQSERDERHVAIQRVGVKGVRYPLTVRVGGAEQSTAARWTLDVALPAEQKGTHMSRFVAWLEALDAPMDAAELHRQLAVMLDKLHASEGSIEARFAFFIKKRAPVSGLQSLLDHEGAFVAERRNGRDAIWLEVGVPVKSLCPCSKEISDYGAHNQRSLVTIRVELADPLGAPIQWHELVRYAEESASSEIWPMLKRADEKWITERAYENPKFVEDLVRDVALRLNADVRIGRYRVEVENFESIHNHSAWACIER

SEQ ID NO: 16493 - protein, 233 aa, Vitreoscilla sp.
  misc_feature (1)..(233): tr|A0A2L0PIN3|A0A2L0PIN3_VITS1 GTP cyclohydrolase FolE2 OS=Vitreoscilla sp. (strain C1) OX=96942 GN=folE2 PE=3 SV=1
MRFPIHIATASGPQTTVANLTMTVFLPADQKGTHMSRFVQLMEDEAQTVLDAAQLQRLTQDMLQRLDSHSGRLDMSFPYFRSKTAPISGIKSLLDYDVRVVGEIKDGQYQSQLQVLIPVTSLCPCSKEISQYGAHNQRSHVTINLTHTGGIQVDELIDIVEEQASCQLYGLLKRPDEKYVTERAYENPKFVEDMVRDVAATLRDDERVLAFTVESENFESIHNHSAYAVIQYP

SEQ ID NO: 16494 - protein, 218 aa, Volucribacter psittacicida
  misc_feature (1)..(218): tr|A0A4R1G0S9|A0A4R1G0S9_9PAST GTP cyclohydrolase 1 OS= Volucribacter psittacicida OX=203482 GN=folE PE=3 SV=1
MAQISPEALKVRQALLDKGIETPMIDLTKDKDQRRGEIEHHMREVMHLIGLDLTDDSLEETPKRIAKMFIDEIFSGLDYTNFPKITNIQNRMQVSEMVLVNDVTLTSTCEHHFVTIDGLVSVAYYPKNWVIGLSKINRIISFFAQRPQVQERFTEQVLLAFQTILETEDVAVYVKATHFCVKCRGIKDSNSYTVTSAFGGVFLNDRETRKEFLTAINR

SEQ ID NO: 16495 - protein, 198 aa, Vulcanibacillus modesticaldus
  misc_feature (1)..(198): tr|A0A1D2YW02|A0A1D2YW02_9BACI GTP cyclohydrolase 1 OS= Vulcanibacillus modesticaldus OX=337097 GN=folE PE=3 SV =1
MAIDKKAIEEHIRGILIALGENPDREGLRETPKRVANMYEEVFEGISYTNDDIAGMFNKTFEEDISLSEENKDIVIVRDIEIFSHCEHHIALMYNMKVTVAYLPNRKIIGLSKIARIADMVGKRLQLQERIGSDIAEIMQKITETEDVAVIIEGEHACMTTRGIKKINSKTVTTTLRGKFNTDPFLNNKLMMLYYNGK

SEQ ID NO: 16496 - protein, 196 aa, Vulcaniibacterium tengchongense
  misc_feature (1)..(196): tr|A0A3N4W4M4|A0A3N4W4M4_9GAMM GTP cyclohydrolase 1 OS= Vulcaniibacterium tengchongense OX=1273429 GN=folE PE=3 SV=1
MADTDKPTREQAEAAVRTLLRWAGDDPQREGLLDTPKRVVEAYADWFSGYAEDPGEYLKRTFEEVEGYDEMIVLRDISFESHCEHHMAPIIGKAHVGYLPDGKVVGISKLARVVETYARRLQVQEKMTAQIAQVIQDVLHPRGVGVVVEAAHECMTTRGVHKRGVSMITSKMLGSFRDDARTRAEFLRFIDVGQGR

SEQ ID NO: 16497 - protein, 310 aa, Vulcaniibacterium tengchongense
  misc_feature (1)..(310): tr|A0A3N4W9V3|A0A3N4W9V3_9GAMM GTP cyclohydrolase FolE2 OS=Vulcaniibacterium tengchongense OX=1273429 GN=folE2 PE=3 SV=1
MSTLPLPPRRLPDVAFDAAAAARPLDWVGMANIALPLRVAGSDGEVLTVAASVDVAVDLKDADTRGIHMSRMYLQLQHAFASETVTPAGLRRVLQTLIDNQGGISSAARLALRYEMLLLRPALASANAGWKRYPVEIEATLREGHLHLALRFAVEYSSTCPASAALSRQLNAERFAGDFAAARPLSAAVVAEWLASERGLAATPHAQRSRADVRVELRPSFDELPLTALIDAIERALGTPVQTAVKREDEQAFARLNAENLMFCEDAARRVAAALSADPRVERFEAEVAHFESLHPHDAVARVAGRGASA

SEQ ID NO: 16498 - protein, 206 aa, Vulgatibacter incomptus
  misc_feature (1)..(206): tr|A0A0K1PCY4|A0A0K1PCY4_9DELT GTP cyclohydrolase 1 OS= Vulgatibacter incomptus OX=1391653 GN=folE PE=3 SV=1
MGADRDAAPGETPRIAPPDPEKMAAGIRLFLEGCGVDLSDANVRETPHRVAKAWAEEFLDGYDRSAREVLGDFYEERKPAADEMVVVTSIDFQSMCPHHLLPYRGVAHVAYLPAGRVVGFSRLARLVDAFAHRLILQETLAREIAEAIRRELGSAGAAVVLEAEQTCMTTRGERRSQARAITEAFTGEFASRPELRERFVGRISGR

SEQ ID NO: 16499 - protein, 221 aa, Waddlia chondrophila
  misc_feature (1)..(221): tr|D6YRV5|D6YRV5_WADCW GTP cyclohydrolase 1 OS=Waddlia chondrophila (strain ATCC VR-1470 / WSU 86-1044) OX=716 544 GN=folE PE=3 SV=1
MHQSKIDQQAITTNFPSPVKAPPQMSDEERIHYIAVRFKEIMEALGLDLNDKSLERTPQRVARMYVKEVFSGLNPSTFPPISYIEDQYKTLNRSNMLFMKVFVTSFCEHHFVPMIGTAYVAYLPNKKLIGLSKIPRIVRFFARRPQVQERLTAQIADSLSRILETEDVAVSINCQHFCIAARGIEDQNGWCTTQVLRGKFHDEALQRQEFFDAIKRSSLNP

SEQ ID NO: 16500 - protein, 221 aa, Waddlia chondrophila
  misc_feature (1)..(221): tr|F8LBX3|F8LBX3_9BACT GTP cyclohydrolase 1 OS=Waddlia chondrophila 2032/99 OX=765953 GN=folE PE=3 SV=1
MHQSKIDQQAITTNFPSPVKAPPQMSDEERIHYIAVRFKEIMEALGLDLSDKSLERTPQRVARMYVKEVFSGLNPSTFPPISYIEDQYKTLDRSNMLFMKVFVTSFCEHHFVPMIGTAYVAYLPNKKLIGLSKIPRIVRFFARRPQVQERLTAQIADSLSRILETEDVAVSINCQHFCIAARGIEDQNGWCTTQVLRGKFHDEALQRQEFFDAIKRSSLNP

SEQ ID NO: 16501 - protein, 200 aa, Waddliaceae bacterium
  misc_feature (1)..(200): tr|A0A2E3LXK7|A0A2E3LXK7_9BACT GTP cyclohydrolase 1 OS= Waddliaceae bacterium OX=2026802 GN=folE PE=3 SV=1
MTYQTTEFSDFSSELTSSKEMTDAVLTLLRGMGEDPNREGLLDTPKRVVKMYKELTAGYSKSEVEVINGAIFTVEHHDIVVVEDIPFYSLCEHHMLPFFGTCTIAYLPNGRVLGLSKFARVVELFARGLQVQERMTEEIADCIQRHLEAEGVAVFVEAQHLCMAMRGVQKPHAKMRTRTYRGCFVNDQLKKNDLIQAMRS

SEQ ID NO: 16502 - protein, 224 aa, Weeksella virosa
  misc_feature (1)..(224): tr|F0P2Y7|F0P2Y7_WEEVC GTP cyclohydrolase 1 OS=Weeksell a virosa (strain ATCC 43766 / DSM 16922 / JCM 21250 / N BRC 16016 / NCTC 11634 / CL345/78) OX=865938 GN=folE PE =3 SV=1
MCDKHIDELADEHIMTNLETPLRADAFDLAVDEKVKLIEDDFKKIMLTLGLDLTDDSLKGTPKRVAKMFVKEIFGGLLPENRPGMSTFENKYNYNQMLVEKDIVVYSTCEHHFLPIVGRAHVAYISKGRVIGLSKMNRIVDYFAKRPQVQERLTMQVVKALQDALGTEDVACVIDAKHLCVNSRGIRDIESSTVTAEYGGQFKKDENLRKEFLSYLRLNTTFNV

SEQ ID NO: 16503 - protein, 181 aa, Weissella cibaria
  misc_feature (1)..(181): tr|A0A0D1K9D8|A0A0D1K9D8_9LACT GTP cyclohydrolase 1 OS= Weissella cibaria OX=137591 GN=folE PE=3 SV=1
MQTSEEDVRRLLTAIGDDPSRPGLIETPARVVKANAEIFAHTGESTFTDYKLFEVATDTDMVVVADIPFYSMCEHHLLPFFGTVTVAYQPKQQVIGLSKIPRLVDWAARRPSVQEGLTTLIADELSRIVSAEGVAVHISARHMCMEMRGINRPGTTTTTQVTRGIFKTDAMLRQEFQQQVH

SEQ ID NO: 16504 - protein, 181 aa, Weissella cibaria
  misc_feature (1)..(181): tr|A0A3R6C002|A0A3R6C002_9LACT GTP cyclohydrolase 1 OS= Weissella cibaria OX=137591 GN=folE PE=3 SV=1
MQTSEEDVRRLLTAIGDDPSRSGLIETPARVVKANAEIFAHTGETTFTDYKLFEVATDTDMVVVTDIPFYSMCEHHLLPFFGTVTVAYQPKQQVIGLSKIPRLVDWAARRPSVQEGLTTLIADELSRIVSAEGVAVHISARHMCMEMRGINRPGTTTTTQVTRGIFKTDAVLRQEFQQQVH

SEQ ID NO: 16505 - protein, 182 aa, Weissella confusa
  misc_feature (1)..(182): tr|A0A482PQT6|A0A482PQT6_WEICO GTP cyclohydrolase 1 OS= Weissella confusa OX=1583 GN=folE PE=3 SV=1
MNEMKEAAVRQFLLAIGDDPQRAGLVDTPGRVVKANAEIFAHTGEKHFANYKLFDVDTDAEMVVLADIPFYSMCEHHLLPFFGTATIAYQPKQHVIGLSKLPRLVEWAARRPNMQEELTTLIADELERILGAEGIGVHLSARHMCMEMRGINQPGTTTTSYVTRGSLKTDHGLRREFMEQVN

SEQ ID NO: 16506 - protein, 186 aa, Weissella minor
  misc_feature (1)..(186): tr|A0A0R2JIA0|A0A0R2JIA0_9LACT GTP cyclohydrolase 1 OS= Weissella minor OX=1620 GN=folE PE=3 SV=1
MDQALIEESIRNIFKAIGEDANRPGIQETPTRVARMYEEIFSTLETPDFINYKLFDTDDSINGEMITVADIPFYSMCEHHLLPFFGTVSVGYIPKNNKVIGLSKIPRLVDYATKKPTLQEEVTSTIGNTLMDILDPAGVAVFVKARHMCVEMRGVKKSNSMTKSSFYRGGFTNIDTQQEFFNTLNN

SEQ ID NO: 16507 - protein, 350 aa, Weissella oryzae
  misc_feature (1)..(350): tr|A0A069CS36|A0A069CS36_WEIOS GTP cyclohydrolase 1 OS= Weissella oryzae (strain DSM 25784 / JCM 18191 / SG25) OX=1329250 GN=folE PE=3 SV=1
METVYLSLGSNLGDRQHYLEQALTLLGTNQKVMVSKQSSFYETSPVGGVVQDNFINLAIEIMTTLSAQELLDLIHTIEKQLNRQRLVHWGPRTIDIDIIFYGEQQIDQANLKVPHPEAFNRYFVLQPLAEIMEDSAPVKAQVNTALEQLAKTVTDQRLEKVAVDLTPKEKIAAAVKTILSAVGEDPQREGLVETPQRVAKMYEEILASQTKGPFEDYKLFETSPDERNQLIVMKDIPFYSMCEHHMLPFFGQVHVAYLPQAGKIIGLSKIPRLVEYVSQKLQVQENLTREIAETLVEILAPLGVAVVVEARHMCVEMRGIKKLNSHTKTSYYTGVFETDANMRQEFLAGL

SEQ ID NO: 16508 - protein, 196 aa, Weissella sp.
  misc_feature (1)..(196): tr|A0A4P6YRJ7|A0A4P6YRJ7_9LACT GTP cyclohydrolase 1 OS= Weissella sp. 26KH-42 OX=2506420 GN=folE PE=3 SV=1
MKEFNEEQLTTLAHGTTDLLQVIGDDVNRSGVIETPGRVAQAYAEIFAHTGETEFTNYKLFPAEKNADMVVIRDIPFYSMCEHHLLPFFGTVDVAYIPTGEIIGLSKVPRLVDWVARRPQVQENITTMIGDELQRILNPAGIAIYVKARHMCMEMRGINQPGDQTVTNYYLGKFKDDANSRLEFLLNSGVLAQLDK

SEQ ID NO: 16509 - protein, 105 aa, Weissella sp.
  misc_feature (1)..(105): tr|A0A139QHC1|A0A139QHC1_9LACT GTP cyclohydrolase I typ e 1 OS=Weissella sp. DD23 OX=1777865 GN=WEIDD23_02112 P E=4 SV=1
MLPFFGTVTVAYQPKQQVIGLSKIPRLVDWAARRPSVQEGLTTLIADELSRIVSAEGVAVHISARHMCMEMRGINRPGTTTTTQVTRGIFKTDAMLRQEFQQQVH

SEQ ID NO: 16510 - protein, 186 aa, Weissella viridescens
  misc_feature (1)..(186): tr|A0A0R2H258|A0A0R2H258_WEIVI GTP cyclohydrolase 1 OS= Weissella viridescens OX=1629 GN=folE PE=3 SV=1
MDHELIEASVRNIFKAIGEDPDRPGIQETPKRVANMYEEIFSSLQQPKFEAYKLFETDDSINGELITVADIPFYSMCEHHLLPFFGTVSVGYIPQNGQVIGLSKIPRLVDYAAKRPTLQEAVTSTIGQTLMDILEPSGVGVIVKARHMCVEMRGVNKSNSVTKTSFYRGTFKEQAVRQEFLDTLKQ

SEQ ID NO: 16511 - protein, 103 aa, Weissella viridescens
  misc_feature (1)..(103): tr|A0A380P199|A0A380P199_WEIVI GTP cyclohydrolase 1 OS= Weissella viridescens OX=1629 GN=folE PE=4 SV=1
MSITYYHFWYRVGRLYPTNGQVIGLSKIPRLVDYAAKRPTLQEAVTSTIGQTLMDILEPSGVGVIVKARHMCVEMRGVNKSNSVTKTSFYRGTFKEQAVRQEF

SEQ ID NO: 16512 - protein, 365 aa, Wenxinia marina
  misc_feature (1)..(365): tr|A0A0D0Q0Q3|A0A0D0Q0Q3_9RHOB GTP cyclohydrolase FolE2 OS=Wenxinia marina DSM 24838 OX=1123501 GN=folE2 PE=3 SV=1
MDQMTKERTPDRAAAERALNVLRDWVASSTPEEVAQLDPLVSRLIPGQEVSNYPALARAYPEEFEVDEAYRASMPDLQNGPTSLIRGAKRMIQHVGISNFRLPIRFHTRDDGDLTLETSVTGTVSLDAGRKGINMSRIMRSFYRYAGETFSFDVIERALDDYMTDHASFDARIQMRFSFPMKLRSLRSGLEGFQYYDIALELVDKGGVRKKIFHLDYVYSSTCPCSLELSEHARQFRGQLATPHSQRSVARISVVAPEGHPTLWFEDLVDLARRAVPTETQVMVKREDEQAFAELNAANPIFVEDAARLFCAELLADPRVGDFRVIASHQESLHSHDAVSVLTEGPTFEADSLDPKLFHTLFHVG

SEQ ID NO: 16513 - protein, 222 aa, Wenyingzhuangia fucanilytica
  misc_feature (1)..(222): tr|A0A1B1Y9J7|A0A1B1Y9J7_9FLAO GTP cyclohydrolase 1 OS= Wenyingzhuangia fucanilytica OX=1790137 GN=folE PE=3 SV =1
MMNYEEIDDIGDNHIGDVTKTPMRADAFELSDAEKIEKIQANVKEIMETLGLDLTDDSLQGTPRRVAKAYVKELFGGLNPENRPKLSTFNNSYQYGEMLVEKNIVVYSTCEHHLLPIIGRAHVAYISKGTVVGLSKMNRIVDHYAKRPQVQERLTRQIVKALQEALGTDDVACIIDAKHLCVNSRGVKDIESSTVTAEFGGAFKNVDKQKEFRDYIKLETKF

SEQ ID NO: 16514 - protein, 228 aa, Wenyingzhuangia marina
  misc_feature (1)..(228): tr|A0A1M5W3P5|A0A1M5W3P5_9FLAO GTP cyclohydrolase 1 OS= Wenyingzhuangia marina OX=1195760 GN=folE PE=3 SV=1
MSQEIDIMNYEEIDDIGDNHIGDVTKTPMRADAFELSDAEKIEKIQENVKEIMETLGLDLTDDSLQGTPRRVAKAYVKELFGGLNPENKPKLSTFNNSYQYGEMLVEKNIVVYSTCEHHLLPIIGRAHVAYISKGTVVGLSKMNRIVDHFAKRPQVQERLTRQVVKALQEALGTEDVACIIDAKHLCVNSRGVKDIESSTVTAEFGGAFKNVEKQKEFRDYIKLETKF

SEQ ID NO: 16515 - protein, 326 aa, Wenzhouxiangella marina
  misc_feature (1)..(326): tr|A0A0K0XWH6|A0A0K0XWH6_9GAMM GTP cyclohydrolase FolE2 OS=Wenzhouxiangella marina OX=1579979 GN=folE2 PE=3 SV =1
MVPMTKPTKTAEMPDIASHAKAQVAGRLDWVGMNHIEMPLLLDTGGGHPVQTTARISAFVDLDEPDTRGIHMSRLYLHLDRTLGEQTLTPLTLRRVLKDFLGSHEGLSTQAMVRIDFDYLIKRKSLVSDNSGWKRYPFSLIASLQGKNFELEMAYQVIYSSTCPCSAALARQLIQDQFRKDFAGQDSLDPQAVVDWLGSEQGIVATPHSQRSAADVRLQLSPSYEAFPFVEMIDAIEDALKTPVQAAVKREDEQAFALLNGQNLMFCEDAARRVQAALESRDRVLDFWARCSHFESLHPHNAVSIVTKGVEGGYEPIDGHPSAWAE

SEQ ID NO: 16516 - protein, 337 aa, Wenzhouxiangella sediminis
  misc_feature (1)..(337): tr|A0A3E1KC06|A0A3E1KC06_9GAMM GTP cyclohydrolase FolE2 OS=Wenzhouxiangella sediminis OX=1792836 GN=folE2 PE=3 SV=1
MQGVYRLNAAESLMKNRSKVANMPDVASHARAQVAGQLDWVGMNTIEMPILLDATDGKHVQTTAHISAFVDLERPEKRGIHMSRLYLHLDRALAEHTVTPALLRHLLRDFLASHEDLSSTAMVRLDFDYMLRRKSLVSDNSGWKRYPISLIASLDDREFQVEMALQIAYSSTCPCSAALARQLIQDQFRRDFGDDGPVDIEAVIEWLGSEEGIVATPHSQRSAADIRLQLAPSFEAFPFVEMIDSVEGALKTPVQAAVKREDEQAFALLNGQNLMFCEDAARRVQTVLESEERVIDFWARCRHFESLHPHNAVAIVTKGVEGGYQPIDGQPSGWRHD

SEQ ID NO: 16517 - protein, 324 aa, Wenzhouxiangella sp.
  misc_feature (1)..(324): tr|A0A372BX88|A0A372BX88_9GAMM GTP cyclohydrolase FolE2 OS=Wenzhouxiangella sp. 15181 OX=2301224 GN=folE2 PE=3 SV=1
MKNRPKTANMPDVATHAQAQVAGQLDWVGMNSIEMPILLDATDGTHTQTTAHVNAFVDLERPEKRGIHMSRLYLHLDQALAEHTVTPALLRHLLRDFLASHEDLSSRAMIRLDFDYMLRRKALVSDNSGWRRYPISIIASLDDREFELEMALQIAYSSTCPCSAALARQLIQDQFRKDFGDEGSLDAQAVLEWLGSEEGIVATPHSQRSAADIRLQLAPSFEAFPFVEMIDAVEGALKTPVQAAVKREDEQAFALLNGQNLMFCEDAARRVQTALESQERVIDFWARCRHFESLHPHNAVAIVTKGVEGGYEPIDGQPSGWRHD

SEQ ID NO: 16518 - protein, 233 aa, Westiellopsis prolifica
  misc_feature (1)..(233): tr|A0A4Q9J403|A0A4Q9J403_9CYAN GTP cyclohydrolase 1 OS= Westiellopsis prolifica IICB1 OX=1970206 GN=folE PE=3 S V=1
MTVRNSKHFANAVPVVVGDSNSLEIVDKNRKIHDSHEKQDSSESSNSQIALAVEEILQAVGEDPEREGLLKTPKRVAEAMRFLTSGYSHSLEDLINGAIFDEDHNEMVLVRDINVFSLCEHHMLPFIGKAHVAYIPNRKVVGLSKLARIVEMYSRRLQVQERLTRQIAEAIQVALNPKGVAVVVEASHMCMVMRGVQKSGSSTITNTMLGVFQEDHRVREEVFSLIRNKQIFF

SEQ ID NO: 16519 - protein, 235 aa, Westiellopsis prolifica; identical to SEQ ID NO: 10479
  misc_feature (1)..(235): tr|A0A4Q9J4T8|A0A4Q9J4T8_9CYAN GTP cyclohydrolase 1 OS= Westiellopsis prolifica IICB1 OX=1970206 GN=folE PE=3 S V=1

SEQ ID NO: 16520 - protein, 216 aa, Wigglesworthia glossinidia
  misc_feature (1)..(216): sp|Q8D2N7|GCH1_WIGBR GTP cyclohydrolase 1 OS=Wiggleswor thia glossinidia brevipalpis OX=36870 GN=folE PE=3 SV=1
MEVLTKEALLVKNALLNKGIETPFKKIYEKNKPDIHKISKYIKKIMDLLNLDLNNDSLSKTPNRIAYMYIEEIFSGLNYNNFPKITLIKNTSKINDLITVNNIVLNSTCEHHFLIFEGKAIVSYIPDKILIGLSKINRIVDFFSKRPQIQERLTNQILVAIQILLDTKNVAVAIKAKHLCVKARGIKDSHSKTLTLSLGGVFKSKQNIKKEFLKDF

SEQ ID NO: 16521 - protein, 221 aa, Wigglesworthia glossinidia
  misc_feature (1)..(221): tr|H6Q500|H6Q500_WIGGL GTP cyclohydrolase 1 OS=Wigglesw orthia glossinidia endosymbiont of Glossina morsitans m orsitans (Yale colony) OX=1142511 GN=folE PE=3 SV=1
MSKFTKEALQVKHALISQGLENPFFNCFKDIKQKKVLIAKYIQKIMKLLNLNLTNDSLSQTPLRIARMYIEEIFSGLNYANFPKITVIKNITKINEMIIIDDIIFHSICEHHFLVFEGKATVAYIPEYVLIGLSKINRIVNFFSKRPQIQERLTRQILIALQILLSTKNVAVSIRARHFCVRARGIKDSESNTKTLAFGGKFRDQLHLRNEFLQITNNSKL

SEQ ID NO: 16522 - protein, 200 aa, Williamsia limnetica
  misc_feature (1)..(200): tr|A0A318S695|A0A318S695_9NOCA GTP cyclohydrolase 1 OS= Williamsia limnetica OX=882452 GN=folE PE=3 SV=1
MTSREKLTAITPFDADRAERAVRELLIAVGEDPDRDGLKETPARVARAYQEMFGGLHSDPDEVLATTFDVGHDELVLVKDIPMYSTCEHHLVSFHGVAHVGYIPGASGQVTGLSKLARVVDLYARRPQVQERLTTQIADAIVRKLEPRGVIVVIEAEHLCMAMRGIRKPGASTTTSAVRGQFKTSAVSRGEALDLISRRS

SEQ ID NO: 16523 - protein, 203 aa, Williamsia marianensis
  misc_feature (1)..(203): tr|A0A315S3A3|A0A315S3A3_9NOCA GTP cyclohydrolase 1 OS= Williamsia marianensis OX=322609 GN=folE PE=3 SV=1
MTQETSGTPAKNGAIAPFDAERAERAVRELLIAVGEDPDRDGLKETPARVARAYVEMFGGLHVNPDDVLATTFDVGHDELVLVKDIPMYSTCEHHLVSFHGVAHVGYIPGPTGQVTGLSKLARLVDLYAKRPQVQERLTTQIADAIVRKLDPRGVIVVIEAEHLCMAMRGIRKPGATTTTSAVRGQFKTSAVSRGEALDLISR

SEQ ID NO: 16524 - protein, 203 aa, Williamsia marianensis
  misc_feature (1)..(203): tr|A0A2G3PHB1|A0A2G3PHB1_9NOCA GTP cyclohydrolase 1 OS= Williamsia marianensis OX=322609 GN=folE PE=3 SV=1
MTQETSGAPAKNGAIAPFDAERAERAVRELLIAVGEDPDRDGLKETPARVARAYVEMFGGLHVNPDDVLATTFDVGHDELVLVKDIPMYSTCEHHLVSFHGVAHVGYIPGPTGQVTGLSKLARLVDLYAKRPQVQERLTTQIADAIVRKLDPRGVIVVIEAEHLCMAMRGIRKPGATTTTSAVRGQFKTSAVSRGEALDLISR

SEQ ID NO: 16525 - protein, 203 aa, Williamsia muralis; identical to SEQ ID NO: 16523
  misc_feature (1)..(203): tr|A0A495JYB7|A0A495JYB7_9NOCA GTP cyclohydrolase 1 OS= Williamsia muralis OX=85044 GN=folE PE=3 SV=1

SEQ ID NO: 16526 - protein, 200 aa, Williamsia sp.
  misc_feature (1)..(200): tr|A0A261CZW9|A0A261CZW9_9NOCA GTP cyclohydrolase 1 OS= Williamsia sp. 1138 OX=1903117 GN=folE PE=3 SV=1
MTSREKLTAVNPFDADRAERAVRELLIAVGEDPDRDGLKETPARVARAYQEMFGGLHSDPDEVLATTFDVGHDELVLVKDIPMYSTCEHHLVSFHGVAHVGYIPGASGQVTGLSKLARVVDLYARRPQVQERLTTQIADALVRKLDPRGVIVVIEAEHLCMAMRGIRKPGASTTTSAVRGQFKTSAVSRGEALDLISRRS

SEQ ID NO: 16527 - protein, 204 aa, Williamsia sp.
  misc_feature (1)..(204): tr|A0A0Q5QBE7|A0A0Q5QBE7_9NOCA GTP cyclohydrolase 1 OS= Williamsia sp. Leaf354 OX=1736349 GN=folE PE=3 SV=1
MTRTEENRAAIAPFDQPRAEAAVRELLVAIGEDPDRDGLKETPARVARAYQEMFGGLHVEPDEVLATTFDVGHDELVLVKDIPMYSTCEHHLVSFHGVAHVGYIPGKDGQVTGLSKLARVVDLYAKRPQVQERLTTQIADALVRKLDPRGVIVVIEAEHLCMAMRGIRKPGASTTTSAVRGIFKTSAVSRGEALDLIARRSAVR

SEQ ID NO: 16528 - protein, 230 aa, Williamsia sterculiae
  misc_feature (1)..(230): tr|A0A1N7CRQ3|A0A1N7CRQ3_9NOCA GTP cyclohydrolase 1 OS= Williamsia sterculiae OX=1344003 GN=folE PE=3 SV=1
MTVTDHGSRPGHDTVHAGSERTRPDGNGPDVTDATDGTGPTAFDRPRAEAAVRELLIALGEDPGRDGLRDTPARVARAYEEMFAGLFVDPDEVLATTFDVGHDELVLVKDIPMYSTCEHHLVSFHGVAHVGYIPGESGQVTGLSKLARVVDLYAKRPQVQERLTSQIADAIVRRLEPRGVIVVIEAEHLCMAMRGIRKPGATTTTSAVRGLFKTSAVSRGEALDLISRTK

SEQ ID NO: 16529 - protein, 212 aa, Williamwhitmania taraxaci
  misc_feature (1)..(212): tr|A0A1G6HPK5|A0A1G6HPK5_9BACT GTP cyclohydrolase 1 OS= Williamwhitmania taraxaci OX=1640674 GN=folE PE=3 SV=1
MEIINNGTSINENEGYAKIERWNPEKTRLIAEHYKSILSLIGEDPDREGLLDTPVRVAKAMQFLAQGYNTDPTEILRKAKFKEDYQQMVIVKDIELYSMCEHHMIPFYGKAHVAYIPNGYITGLSKIARVVDAFARRLQVQERLTVQIRDAIQETLKPLGVAVVIEASHMCMQMRGVQKQNSSTTTSAFTGAFLSHNKTREEFIHLIGVKLH

SEQ ID NO: 16530 - protein, 230 aa, Winogradskyella arenosi
  misc_feature (1)..(230): tr|A0A368ZDF2|A0A368ZDF2_9FLAO GTP cyclohydrolase 1 OS= Winogradskyella arenosi OX=533325 GN=folE PE=3 SV=1
MTLKATSQLTETTLESFSSDAIGDDHLFTSLDTPMRANAFEMSHEDKKDRISLLFSEIMDVLGLDLTDDSLSGTPDRVAKMYIDEVFSSLDPRNKPKVSLFDNKYQYHQMVVEKNITFYSYCEHHFVPIIGKAHVAYKSSGKVIGLSKLNRIVQYYAKRPQVQERLTNQIAHELKTVLETKDVAIIIDAKHLCVASRGVKDDASATVTTYYGGEFNTPSKIIELQNYINH

SEQ ID NO: 16531 - protein, 225 aa, Winogradskyella arenosi
  misc_feature (1)..(225): tr|A0A368ZDT0|A0A368ZDT0_9FLAO GTP cyclohydrolase 1 OS= Winogradskyella arenosi OX=533325 GN=folE PE=3 SV=1
MKIESDFNDVDAIGDDHIGTSSDTPLRADAFKLSNAEKIDSIKADVTHILETLGLDLNDDSLKGTPNRVAKMFVNEIFGGLDPQKKPNASTFDNKYKYGEMLVEKNITVYSTCEHHLLPIVGRAHIAYISNGTVVGLSKMNRIVDYYAKRPQVQERLTIQIVKELQEVLGTDDVACIIDAKHLCVNSRGIRDIESSTVTSEFGGKFNETNTRRELLEYIKLETKF

SEQ ID NO: 16532 - protein, 225 aa, Winogradskyella aurantia
  misc_feature (1)..(225): tr|A0A265UN81|A0A265UN81_9FLAO GTP cyclohydrolase 1 OS= Winogradskyella aurantia OX=1915063 GN=folE PE=3 SV=1
MKIDSDFNDIDAIGNDHLGSSSDTPMRPDAFKLSNTDKIDIIKDDVRHIMETLGLDLKDDSLKGTPDRVAKMFINEIFAGLDPAKKPSASTFENKYKYGEMLVEKNITVYSTCEHHLLPIVGRAHVAYISNGSVVGLSKMNRIVDYFAKRPQVQERLTIQIVKELQNVLGTQDVACVIDAKHLCVNSRGIRDIESSTVTSEFGGKFKQKEVKREFLDYIQLDTQF

SEQ ID NO: 16533 - protein, 230 aa, Winogradskyella aurantia
  misc_feature (1)..(230): tr|A0A265UWR4|A0A265UWR4_9FLAO GTP cyclohydrolase 1 OS= Winogradskyella aurantia OX=1915063 GN=folE PE=3 SV=1
MKTETLTKKNGHKLNGFSIDDIGDDHLFTGLDTPMKPNAFEMSNEEKKERISILFSEIMDVLGLDLTDDSLKGTPDRVAKMYIEEIFSGLDPKNKPKVALFDNKYQYNQMLVEKDITFYSNCEHHFVPIIGKAHVAYISSGKVIGLSKLNRIVQYYAKRPQVQERLTEQIANELKTILGTEDVAVIIDAKHLCVSSRGIKDDTSATVTTHYSGAFNTPEKINELQNYINN

SEQ ID NO: 16534 - protein, 230 aa, Winogradskyella epiphytica
  misc_feature (1)..(230): tr|A0A2V4YB33|A0A2V4YB33_9FLAO GTP cyclohydrolase 1 OS= Winogradskyella epiphytica OX=262005 GN=folE PE=3 SV=1
MNTVTIPNKNGHTINDFSNEEIGDDHLFTSLDTPIKPSAFELSDEEKKERISILFSEIMDVLGLDLTDDSLQGTPKRVAKMYIDEIFSGLDPKNKPKIALFDNKYQYNQMLVEKNITFYSNCEHHFVPIIGKAHVAYKSSGKVIGLSKLNRIVQYYAKRPQVQERLTNQIANELKTVLNTEDVAVIIDAKHLCVASRGVQDDTSATVTTYYGGEFNTPAKIAELQNYLNN

SEQ ID NO: 16535 - protein, 225 aa, Winogradskyella epiphytica
  misc_feature (1)..(225): tr|A0A2V4WUK4|A0A2V4WUK4_9FLAO GTP cyclohydrolase 1 OS= Winogradskyella epiphytica OX=262005 GN=folE PE=3 SV=1
MKIESDFNDIDAIGDDHVGSSSDTPLRADAFKLSSNEKIDIIKDDVRHILETLGLDLNDDSLKGTPNRVAKMFVNEIFGGLDPKKKPSASTFDNKYKYGEMLVEKNITVYSTCEHHLLPIVGRAHIAYISNGTVVGLSKMNRIVDYFAKRPQVQERLTIQVVKELQKVLNTEDVACVIDAKHLCVNSRGIRDIESSTVTSEFGGKFKDNQTKREFLDYIQLDTQF

SEQ ID NO: 16536 - protein, 230 aa, Winogradskyella eximia
  misc_feature (1)..(230): tr|A0A3D9H068|A0A3D9H068_9FLAO GTP cyclohydrolase 1 OS= Winogradskyella eximia OX=262006 GN=folE PE=3 SV=1
MNTETISKKNGHQLKGFSAEDIGDDHLFTGLETPMKPNAFEMSNTEKKERISILFSEIMDVIGLDLTDDSLQGTPDRVAKMYIEEIFSGLDPKNKPKVALFDNKYQYNQMLVEKNITFYSNCEHHFVPIIGKAHIAYKSSGKVIGLSKLNRIVQYYARRPQVQERLTNQIANELKTVLETEDVAVIIDAKHLCVSSRGIQDDTSTTVTTYYGGEFNKASKIAELQNYINN

SEQ ID NO: 16537 - protein, 225 aa, Winogradskyella eximia
  misc_feature (1)..(225): tr|A0A3D9H0P6|A0A3D9H0P6_9FLAO GTP cyclohydrolase 1 OS= Winogradskyella eximia OX=262006 GN=folE PE=3 SV=1
MKIENDFNDIDALGEDHLSSSSETPLRADAFELSSSEKINIIKDDVKHILETLGLDLTDDSLKGTPNRVAKMFVNEIFSGLDPDKKPSASTFDNKYKYGEMLVEKNITVYSTCEHHLLPIVGRAHIAYISNGTVVGLSKMNRIVDYYSKRPQVQERLTIQIVKELQKVLNTDDVACVIDAKHLCVNSRGIRDIESSTVTSEFGGKFKESDTRRELLEYIKLETQF

SEQ ID NO: 16538 - protein, 224 aa, Winogradskyella jejuensis
  misc_feature (1)..(224): tr|A0A1M5RYX9|A0A1M5RYX9_9FLAO GTP cyclohydrolase 1 OS= Winogradskyella jejuensis OX=1089305 GN=folE PE=3 SV=1
MKIENDFDIDAIGDDHVSSSSETPLRDDAFTLSNSEKIDSIKADVKHIMETLGLDLTDDSLKGTPNRVAKMFVNEIFAGLHPDNKPSASTFDNKYKYGEMLVEKNITVYSTCEHHLLPIVGKAHVAYISNGSVVGLSKMNRIVDYYAKRPQVQERLTIQIVKELQDVLGTKDVACVIDAKHLCVNSRGIRDIASSTVTSEFGGKFKTKETRREFLDYIKLDTEF

SEQ ID NO: 16539 - protein, 230 aa, Winogradskyella jejuensis
  misc_feature (1)..(230): tr|A0A1M5V2W6|A0A1M5V2W6_9FLAO GTP cyclohydrolase 1 OS= Winogradskyella jejuensis OX=1089305 GN=folE PE=3 SV=1
MKTETLKTKNGHALNGFSIEDIGDDHLFTSLDTPMKANAFDMPDSEKKERISILFSEIMDVLGLDLTDDSLKGTPDRVAKMYVEEIFSGLDPKNKPKVALFDNKYQYNQMLVEKDITFYSNCEHHFVPIIGKAHVAYISSGKVIGLSKLNRIVQYYAKRPQVQERLTQQIANELKTVLETEDVAVIIDAKHLCVSSRGVKDDTSATVTTYYGGVFNTPEKINELQNYINS

SEQ ID NO: 16540 - protein, 227 aa, Winogradskyella pacifica
  misc_feature (1)..(227): tr|A0A3D9N0F5|A0A3D9N0F5_9FLAO GTP cyclohydrolase 1 OS= Winogradskyella pacifica OX=664642 GN=folE PE=3 SV=1
MITEKISKTNGHNLSIDEMGDDHLFTGLDTPMKANAFEMSNTEKKERISILFSEIMDVLGLDLTDDSLQGTPDRVAKMYIEEIFSGLDPKNKPQVALFDNKYQYNQMLVEKNITFYSNCEHHFVPIIGKAHIAYKSSGKVIGLSKLNRIVQYYAKRPQVQERLTNQIANELKTVLETEDVAVIIDAKHLCVSSRGIQDDTSTTVTTYYGGEFNNASKILELQNYINN

SEQ ID NO: 16541 - protein, 225 aa, Winogradskyella pacifica
  misc_feature (1)..(225): tr|A0A3D9LMI6|A0A3D9LMI6_9FLAO GTP cyclohydrolase 1 OS= Winogradskyella pacifica OX=664642 GN=folE PE=3 SV=1
MKIESDFNDIDALGDDHIGSSSDTPLRPDAFKLSNAEKIESIKGDVKHILETLGLDLNDDSLKGTPNRVAKMFVNEIFGGLDPDKKPSASTFDNKYKYGEMLVEKNITVYSTCEHHLLPIVGRAHIAYISNGTVVGLSKMNRIVDYYAKRPQVQERLTIQVVKELQAVLGTDDVACIIDAKHLCVNSRGIRDIESSTVTSEFGGKFNEKETRRELLDYIKLDTQF

SEQ ID NO: 16542 - protein, 227 aa, Winogradskyella psychrotolerans
  misc_feature (1)..(227): tr|S7VTS4|S7VTS4_9FLAO GTP cyclohydrolase 1 OS=Winograd skyella psychrotolerans RS-3 OX=641526 GN=folE PE=3 SV= 1
MITEKISKTNGHKLSIDEIGDDHLFSGLDTPMKASAFEMSDTEKKERISILFSEIMDVLGLDLTDDSLQGTPDRVAKMYIEEIFSGLDPKNKPKVALFDNKYQYNQMLVEKNITFYSNCEHHFVPIIGKAHIAYKSSGKVIGLSKLNRIVQYYAKRPQVQERLTNQIANELKTVLETEDVAVIIDAKHLCVSSRGIQDDTSTTVTTYYGGEFNNASKILELQNYINN

SEQ ID NO: 16543 - protein, 225 aa, Winogradskyella psychrotolerans
  misc_feature (1)..(225): tr|S7WUN5|S7WUN5_9FLAO GTP cyclohydrolase 1 OS=Winograd skyella psychrotolerans RS-3 OX=641526 GN=folE PE=3 SV= 1
MKIESDFNDIDALGDDHIGSSSDTPLRPDAFKLSNAEKIESIKGDVKHILETLGLDLTDDSLKGTPNRVAKMFVNEIFGGLDPNKKPTASTFDNKYKYGEMLVEKNITVYSTCEHHLLPIVGRAHIAYISNGTVVGLSKMNRIVDYYAKRPQVQERLTIQVVKELQDVLGTADVACIIDAKHLCVNSRGIRDIESSTVTSEFGGKFNEKETRRELLDYIKLDTQF

SEQ ID NO: 16544 - protein, 230 aa, Winogradskyella sp.
  misc_feature (1)..(230): tr|A0A368MEU0|A0A368MEU0_9FLAO GTP cyclohydrolase 1 OS= Winogradskyella sp. KYW1333 OX=2282123 GN=folE PE=3 SV= 1
MNTEAISKTNGHKLNGFTHEDIGDDHLFTSLETPMKANAFDMSNHEKKNRISILFSEIMDVLGLDLTDDSLKGTPDRVAKMYVEEIFSGLDPENKPKVALFDNKYQYNQMLVEKNITFYSNCEHHFVPIIGKAHIAYKSSGKVIGLSKLNRIVQYYAKRPQVQERLTNQIANELKTVLETEDVAVIIDAKHLCVSSRGVKDDTSATVTTYYGGEFNTPEKISELQNYINN

SEQ ID NO: 16545 - protein, 225 aa, Winogradskyella sp.
  misc_feature (1)..(225): tr|A0A368MHV8|A0A368MHV8_9FLAO GTP cyclohydrolase 1 OS= Winogradskyella sp. KYW1333 OX=2282123 GN=folE PE=3 SV= 1
MRIDSDFNDIDALGDDHISSSSETPMRADAFKLSNEEKMDIIKDDVRHIMETLGLDLSDDSLSGTPRRVAKMFVNEIFGGLDPAKKPSASTFENKYKYGEMLVEKNITVYSTCEHHLLPIVGKAHVAYISNGSVVGLSKMNRIVDYFAKRPQVQERLTIQIVKELQKVLNTEDVACVIDAKHLCVNSRGIRDVESSTVTSEFGGKFKEKETKREFLDYIQLDTKF

SEQ ID NO: 16546 - protein, 225 aa, Winogradskyella thalassocola
  misc_feature (1)..(225): tr|A0A1G8ICA5|A0A1G8ICA5_9FLAO GTP cyclohydrolase 1 OS= Winogradskyella thalassocola OX=262004 GN=folE PE=3 SV= 1
MKIESDFNDIDALGEDHISSSSETPLRADAFKLSSNEKINIIKDDVKHILETLGLDLNDDSLKGTPNRVAKMFVNEIFGGLDPDKKPSASTFDNKYKYGEMLVEKNITVYSTCEHHLLPIVGRAHIAYISNGTVVGLSKMNRIVDYYAKRPQVQERLTIQIVKELQAVLNTEDVACVIDAKHLCVNSRGIRDIESSTVTSEFGGKFKENETRRELLDYIKLDTQF

SEQ ID NO: 16547 - protein, 230 aa, Winogradskyella thalassocola
  misc_feature (1)..(230): tr|A0A1G8BAM5|A0A1G8BAM5_9FLAO GTP cyclohydrolase 1 OS= Winogradskyella thalassocola OX=262004 GN=folE PE=3 SV= 1
MITEKNSKINGLTLNGFNKEDIGDDHLFTSLDTPMKPNAFEMSNSDKKERISILFSEIMDVLGLDLTDDSLQGTPDRVAKMYVEEIFSGLDPENKPKVTLFDNKYQYNQMLVEKNITFYSNCEHHFVPIIGKAHIAYKSSGKVIGLSKLNRIVQYYAKRPQVQERLTNQIANELKTVLETEDVAVIIDAKHLCVSSRGVQDDTSTTVTTYYGGEFSNASKILELQNYINN

SEQ ID NO: 16548 - protein, 224 aa, Winogradskyella wandonensis
  misc_feature (1)..(224): tr|A0A4R1KU16|A0A4R1KU16_9FLAO GTP cyclohydrolase 1 OS= Winogradskyella wandonensis OX=1442586 GN=folE PE=3 SV= 1
MKIENDFDIDAIGDDHVSSSSETPLRDDAFVLSNSEKIKSIKADVQHIMETLGLDLTDDSLKGTPNRVAKMFVNEIFGGLHPDNKPSASTFENKYKYGEMLVEKNITVYSTCEHHLLPIVGKAHVAYISNGSVVGLSKMNRIVDYYAKRPQVQERLTIQIVKELQDVLGTEDVACVIDAKHLCVNSRGIRDIASSTVTSEFGGKFKTKETRREFLDYIKLDTEF

SEQ ID NO: 16549 - protein, 230 aa, Winogradskyella wandonensis
  misc_feature (1)..(230): tr|A0A4R1KKE8|A0A4R1KKE8_9FLAO GTP cyclohydrolase 1 OS= Winogradskyella wandonensis OX=1442586 GN=folE PE=3 SV= 1
MKTETLTKTNGHALNGFTIEDIGDDHLFTSLDTPMKPNAFDMSNEEKKERISILFSEIMDVLGLDLTDDSLKGTPDRVAKMYIEEIFSGLDPKNKPKVALFDNKYQYNQMLVEKDITFYSNCEHHFVPIIGKAHVAYVSSGKVIGLSKLNRIVQYYAKRPQVQERLTQQIANELKTVLGTEDVAVIIDAKHLCVSSRGVKDNTSATVTTYYGGIFNTSEKINELQNYINS

SEQ ID NO: 16550 - protein, 199 aa, Woeseia oceani
  misc_feature (1)..(199): tr|A0A193LIF2|A0A193LIF2_9GAMM GTP cyclohydrolase 1 OS= Woeseia oceani OX=1548547 GN=folE PE=3 SV=1
MATRTPRKPKKPSRKQAEEAVSTLLLWAGDDPRREGLLDTPKRVARAYEDWFSGYNDDPVNYLKRTFEEVEGYDEMIVLRDISFESHCEHHMAPIIGCAHVGYLPNDKVVGISKLARVVETFARRFQVQEKMTAQIAHCIQDVLKPKGVGVVISASHQCMTTRGVHKSGVSMVTSQMLGTFRKDARTRAEFLNMIGPAR

SEQ ID NO: 16551 - protein, 197 aa, Woeseia sp.
  misc_feature (1)..(197): tr|A0A2E6EBF9|A0A2E6EBF9_9GAMM GTP cyclohydrolase 1 OS= Woeseia sp. OX=1980636 GN=folE PE=3 SV=1
MTKKNDLKRPSRKEAEDAISTLLLWAGEDPQREGLVDTPARVATAYEDWFSGYGQDPVRFLTRTFEEVEGYDEMIVLRDIKFESHCEHHMAPIIGVAHVGYLPSNKVVGISKLARVVDTFARRFQVQEKLTAQIANCIEEVLKPRGVGVVIDASHQCMTTRGIHKPGVSMVTSQMLGAFRKDARTRAEFLNMIGKNV

SEQ ID NO: 16552 - protein, 223 aa, Woeseiaceae bacterium
  misc_feature (1)..(223): tr|A0A2E8TN67|A0A2E8TN67_9GAMM GTP cyclohydrolase 1 OS= Woeseiaceae bacterium OX=2026806 GN=folE PE=3 SV=1
MAFNKIKTDPDLGKKVHEHLVSVGVETPVINNGLSSTEKIDKIQDNFSQILDTLGLDLSDDSLINSPKRIAKMYINEIFWGLDYEAFPKATVVENKMRYNEMVVVKNISVQSYCEHHFVVIDGLAAVAYVPKGKVLGLSKINRIVEYFSKRPQIQERLTEQIYHALSFILETEDVAVMIDGDHYCVKSRGVEDTGSSTITSRLGGGFKSDHKARAEFLALAKS

SEQ ID NO: 16553 - protein, 223 aa, Woeseiaceae bacterium
  misc_feature (1)..(223): tr|A0A2E5CFH5|A0A2E5CFH5_9GAMM GTP cyclohydrolase 1 OS= Woeseiaceae bacterium OX=2026806 GN=folE PE=3 SV=1
MSFNKIKTDPDLGQKVHEYLVSVGVETPVIANGLSNNEKINKIQNNFSQILGTLGLDLSDDSLINSPKRIAKMYINEIFWGLDYEAFPKATVVENKMKYNEMVIVKNISVQSYCEHHFVVIDGLAAVAYVPKEKVLGLSKINRIVEYFSKRPQIQERLTEQIYHALSFILETKDVAVMIDGDHYCVKSRGVEDTGSSTITSRLGGAFKSDHKARAEFLTLAKS

SEQ ID NO: 16554 - protein, 182 aa, Wohlfahrtiimonas chitiniclastica
  misc_feature (1)..(182): tr|L8Y199|L8Y199_9GAMM GTP cyclohydrolase 1 OS=Wohlfahr tiimonas chitiniclastica SH04 OX=1261130 GN=folE PE=3 S V=1
MSDLEKNYRAILTEIGEDPEREGLVDTPKRAAKAMQYLCRGYEQTLEEVVGGAIFSSDSNEMVLVKDIELYSLCEHHILPFIGKAHVAYLPNGKVLGLSKIARIVDMFARRLQIQEALTSEIANAIQEVTDAKGVAVVIEAKHMCMMMRGVEKQNSHMVTSAMLGAFRNNPATRAEFLSFIK

SEQ ID NO: 16555 - protein, 182 aa, Wohlfahrtiimonas chitiniclastica; identical to SEQ ID NO: 16554
  misc_feature (1)..(182): tr|A0A162TW91|A0A162TW91_9GAMM GTP cyclohydrolase 1 OS= Wohlfahrtiimonas chitiniclastica OX=400946 GN=folE PE=3 SV=1

SEQ ID NO: 16556 - protein, 182 aa, Wohlfahrtiimonas sp.; identical to SEQ ID NO: 16554
  misc_feature (1)..(182): tr|A0A256CAZ9|A0A256CAZ9_9GAMM GTP cyclohydrolase 1 OS= Wohlfahrtiimonas sp. G9077 OX=1980118 GN=folE PE=3 SV=1

SEQ ID NO: 16557 - protein, 187 aa, Wolinella succinogenes
  misc_feature (1)..(187): sp|Q7M933|GCH1_WOLSU GTP cyclohydrolase 1 OS=Wolinella succinogenes (strain ATCC 29543 / DSM 1740 / LMG 7466 / NCTC 11488 / FDC 602W) OX=273121 GN=folE PE=3 SV=1
MEDKKIAMEETIRSIFDFIGDDRHREGLLDTPKRVVKSWDKLYSGYTQDPREILGTVFEDGACDEMVVLKNIEFYSMCEHHMLPFFGKVSIGYIPDQKVVGISKLARLVEVFARRLQIQEKMTGQIADTLMEVLQPKGAMVVAEATHMCMVMRGVEKQQSVMVTSAVRGLFKRDARTREEFMGHIRH

SEQ ID NO: 16558 - protein, 242 aa, Xanthobacter autotrophicus
  misc_feature (1)..(242): tr|A7IFV1|A7IFV1_XANP2 GTP cyclohydrolase 1 OS=Xanthoba cter autotrophicus (strain ATCC BAA-1158 / Py2) OX=7824 5 GN=folE PE=3 SV=1
MDAVVKLFKAQAENEERERKLKAEAKAASKAAARPDGAPPAPKIHPPLPDGTPRPSRQEAEAAVRTLLAYIGEDPAREGLLDTPKRVVKAYDELFSGYGEDSEELLERTFGEIGTFDDFVLVRDIPFHSHCEHHMVPFVGKAHIAYFPVERVVGLSKIARVVDIFARRLQTQEHLTSQITTTLDEGLRPRGVAVMIEAEHMCMSMRGITKQGVSTLTTQFTGVFRDDPAEQVRFITLVRSKS

SEQ ID NO: 16559 - protein, 181 aa, Xanthobacter sp.
  misc_feature (1)..(181): tr|A0A259BJ47|A0A259BJ47_9RHIZ GTP cyclohydrolase 1 (Fr agment) OS=Xanthobacter sp. 17-67-6 OX=1971593 GN=B7Y01 _03765 PE=3 SV=1
MDAVVKLLRAQAENEAKARKHVKHLQAQAKRHDDAPLDAAEAHDPARPSKREAEAAVRTLLAYIGEDPDREGLLETPHRVVKAYGELFSGYRHDAAEALDRTFGEIGNFDDFVLVRDIPFYSHCEHHMVPFVGKAHVAYFPVERVVGLSKIARVVDIYAKRLQTQEHLTSQIISALDETLK

SEQ ID NO: 16560 - protein, 236 aa, Xanthobacter tagetidis
  misc_feature (1)..(236): tr|A0A3L7A8T9|A0A3L7A8T9_9RHIZ GTP cyclohydrolase 1 OS= Xanthobacter tagetidis OX=60216 GN=folE PE=3 SV=1
MAQAEQEAKARAEEAARRAKIGTEAEEPGTTAVLHQTIAPLLPDGTPRPSRGEAEAAVRTLLAYIGEDPAREGLLDTPRRVVAAYDELFSGYGEDATALLDRTFGEIGSFDDFVLVRDIPFHSHCEHHMVPFVGKAHVAYFPVERVVGLSKIARVVEIYARRLQTQEHLTSQVITALDEGLRPRGVAVMIEAEHMCMSMRGIAKQGVSTITTQFTGIFRDDPAEQVRFITLLRGGR

SEQ ID NO: 16561 - protein, 218 aa, Xanthobacteraceae bacterium
  misc_feature (1)..(218): tr|A0A521VZ85|A0A521VZ85_9RHIZ GTP cyclohydrolase 1 OS= Xanthobacteraceae bacterium OX=2021379 GN=folE PE=3 SV= 1
MDAVIKPLRAQLSLDPHGAADRLLPGLPRPTRAEAEAAVRTLLGYIGESPDREGLIDTPRRVVEAYDELFRGYNEDPVELLDRTFGETAGYDDFVLIRDIAFNSHCEHHMMPFYGKAHVAYAPVDRVVGLSKLARLVDVFALRLQTQEHLTGQIAAAIEATLRPRGVAVLVEAEHTCMSVRGVAKQGALTVTTRFTGLFRDDRETQARFLDLVRAGAR

SEQ ID NO: 16562 - protein, 237 aa, Xanthomarina gelatinilytica
  misc_feature (1)..(237): tr|M7MG34|M7MG34_9FLAO GTP cyclohydrolase 1 OS=Xanthoma rina gelatinilytica OX=1137281 GN=folE PE=3 SV=1
MTAPKKDTMKTNTLKQKTNPLNGFSHEDIGDEHLYTGLKTPLRADAFKLSDTEKKERIAILFEEIMDVMGLDLTDDSLKGTPKRVAKMYVDEIFSGLNPKNKPKVALFDNKYQYNQMLVEKNITFYSNCEHHFVPIIGTAHVAYISSGTVIGLSKLNRIVQYYAKRPQVQERLTNQIAEELKAILNTSDVAVIIDAKHLCVSSRGIQDDTSATVTTYYGGQFNTAQKISELQNYLKQ

SEQ ID NO: 16563 - protein, 212 aa, Xanthomarina gelatinilytica
  misc_feature (1)..(212): tr|M7NAH0|M7NAH0_9FLAO GTP cyclohydrolase 1 OS=Xanthoma rina gelatinilytica OX=1137281 GN=folE PE=3 SV=1
MNGKEQQEINIFSNNEIKNLETISKHQEKLKTIEYHFAKIMEALGLKLDDPSLKETPKRVAKMYINEVFKGLNEENFPSISFFENVSGYREMVLVDNIKVYSYCEHHFVPFFGKAAVAYIPKDRVIGLSKINRIVQFYASKPQIQEKLTVEIGLKLKELLETDDIAIHIEANHLCVASRGVEDEKSYTKTNFFSGKFLKEKEKSRFLNSISS

SEQ ID NO: 16564 - protein, 225 aa, Xanthomarina sp.
  misc_feature (1)..(225): tr|A0A2D8CUP2|A0A2D8CUP2_9FLAO GTP cyclohydrolase 1 OS= Xanthomarina sp. OX=1931211 GN=folE PE=3 SV=1
  misc_feature (42)..(42): Xaa can be any naturally occurring amino acid
  misc_feature (50)..(51): Xaa can be any naturally occurring amino acid
  misc_feature (56)..(56): Xaa can be any naturally occurring amino acid
  misc_feature (59)..(59): Xaa can be any naturally occurring amino acid
  misc_feature (67)..(68): Xaa can be any naturally occurring amino acid
  misc_feature (88)..(88): Xaa can be any naturally occurring amino acid
  misc_feature (115)..(115): Xaa can be any naturally occurring amino acid
  misc_feature (120)..(120): Xaa can be any naturally occurring amino acid
  misc_feature (196)..(196): Xaa can be any naturally occurring amino acid
  misc_feature (209)..(209): Xaa can be any naturally occurring amino acid
  misc_feature (224)..(224): Xaa can be any naturally occurring amino acid
MKFDEKLEEFESLGDNHVGSSSDTPMREDAFKLTNEEKIDIXKDDVQHIXXTLGLXLTXDSLKGTPXXVAKMFVKELFGGLNPDKKPXASTFENKYQYGEMLVEKNITVYSTCEXHLLPXVGKAHVAYISNGTVVGLSKMNRIVDYYAKRPQVQERLTIQIVKELQEVLNTEDVACVIDAKHLCVNSRGIRDTESXTITSEFGGKFKDXETKREFLDYIKMDTXF

SEQ ID NO: 16565 - protein, 229 aa, Xanthomarina sp.
  misc_feature (1)..(229): tr|A0A2D8CUF5|A0A2D8CUF5_9FLAO GTP cyclohydrolase 1 OS= Xanthomarina sp. OX=1931211 GN=folE PE=3 SV=1
MKTNTLKQKTNPLNGFSHEDIGDEHLYTGLKTPLRADAFKLSDTEKKERIAILFEEIMDVMGLDLTDDSLKGTPKRVAKMYVDEIFSGLNPKNKPKVALFDNKYQYNQMLVEKNITFYSNCEHHFVPIIGTAHVAYISSGTVIGLSKLNRIVQYYAKRPQVQERLTNQIAEELKAILNTPDVAVIIDAKHLCVSSRGIQDDTSATVTTYYGGQFNTAQKISELQNYLKQ

SEQ ID NO: 16566 - protein, 300 aa, Xanthomonadaceae bacterium
  misc_feature (1)..(300): tr|A0A2M9EJ43|A0A2M9EJ43_9GAMM GTP cyclohydrolase FolE2 OS=Xanthomonadaceae bacterium NML95-0200 OX=2032577 GN =folE2 PE=3 SV=1
MSSPRPLPDVAFEAAQLARPLDWVGMDNIALPLRLDERLQVPAQVDVAVSLDDADKRGIHMSRLYLHTQTALPETRLDAASLGALMQALIASQQGLANRARLRLRFERLLLRPALLSDNQGWRRYPVSLMLEANADGELDARLQVAVEYSSTCPASAALSRQLNADAFAAAFARESVSVDEAKAWLASKAGLAATPHAQRSVAEVNVQLAADFDNLPIETLVNALEQALGTPVQTAVKREDEQAFARANAENLMFCEDAARRVGAALSALPIGQWQARVAHLESLHAHDAVASVSGCGKG

SEQ ID NO: 16567 - protein, 304 aa, Xanthomonadaceae bacterium
  misc_feature (1)..(304): tr|A0A2A3LJ55|A0A2A3LJ55_9GAMM GTP cyclohydrolase FolE2 OS=Xanthomonadaceae bacterium NML93-0399 OX=2032565 GN =folE2 PE=3 SV=1
MSTAPLSDRLPDVAGDQAQAARLLDWVGMGNIALPLRIEDADGGAVTVPASADIGVNLVDPDARGIHMSRLYLHLQDALSSRTLDRASLERVLRDCIESQRGLADRVQLTLRYGQLLRRPALASAHSGWKTYPVEIDAILSPAGLALTLSLSVEYSSTCPASAALSRQLNAARFAGDFTAATAGYDAVRDWLESPRGLAATPHAQRSRADVRLQLAEDVETFPILAIVDALEHALGTPVQTAVKREDEQAFASLNAENLMFCEDAARRVAAALSADPRIARFDATVSHFESLHAHDAVARVSGP

SEQ ID NO: 16568 - protein, 290 aa, Xanthomonadales bacterium
  misc_feature (1)..(290): tr|A0A1Q4FNP2|A0A1Q4FNP2_9GAMM GTP cyclohydrolase FolE2 OS=Xanthomonadales bacterium 63-13 OX=1895867 GN=folE2 PE=3 SV=1
MNALTAMQLLPDVQAQADFRKQRIDAVGVKGVRYPVVIHSGRHAIATIATFSMTVALAAEIKGTHMSRFIELIEARAGHLDQAGFRAMVFEMLERLDARSGSITLHFPYFVSKAAPVSGVNSLLDHDVEWCGSVDADGQFALRLRVVVPATSLCPCSKEISAYGAHNQRSHISIAANLLESMSMEELIAIAEASASCEVYGLLKRADEKFVTERAYDNPKFVEDLVRDVAHALDQDARIGGYLIEAENFESIHNHSAFARIERILPAPAAPSANRHLRAAPPCSLNGVSS

SEQ ID NO: 16569 - protein, 317 aa, Xanthomonadales bacterium
  misc_feature (1)..(317): tr|A0A1Q4FHI8|A0A1Q4FHI8_9GAMM GTP cyclohydrolase FolE2 OS=Xanthomonadales bacterium 63-13 OX=1895867 GN=folE2 PE=3 SV=1
MTMSPTSARAMPDIASDAEPGAAGQLDWVGMDEIAVPVRLANPDGSIVQSPARVAAYVNLKRADARGIHMSRLYLHVDRHLSSEPLTPCSLRRLLRDFLDSHADLSDRARIGIRFDHMIRRRALASDNSGWKTYPVTINASMDASGFAVEVETEVLYSSTCPCSAALARQLIQEQFDADFPEGQALDRQQVVAWLGSESGIRATPHSQRSSARVRVRLAAGFDLPIIDLIDLIESALQTPVQTAVKREDEQAFALLNGQNLMFCEDAARRMQEALDADERIVDFWLRAAHLESLHPHDAVAYASKGVEGGYSADSRL

SEQ ID NO: 16570 - protein, 200 aa, Xanthomonas albilineans
  misc_feature (1)..(200): tr|D2UGU7|D2UGU7_XANAP GTP cyclohydrolase 1 OS=Xanthomo nas albilineans (strain GPE PC73 / CFBP 7063) OX=380358 GN=folE PE=3 SV=1
MADSKHTPVPCVTQAQAEEAVRTLLRWSGDDPTREGLLDTPRRVVEAYGDWFSGYREDPREYMLRTFEEVAGYDELIVLRDIDYESHCEHHMAPIIGKVHVGYLPRGKVVGISKLARVVDAYARRFQVQEKMTAQIAECIQDALEPLGVGVVVEGSHECMTTRGVHKRGVSMVTSKMLGTFREDARTRAEFLRFIDCGAR

SEQ ID NO: 16571 - protein, 311 aa, Xanthomonas albilineans
  misc_feature (1)..(311): tr|D2U9Y3|D2U9Y3_XANAP GTP cyclohydrolase FolE2 OS=Xant homonas albilineans (strain GPE PC73 / CFBP 7063) OX=38 0358 GN=folE2 PE=3 SV=1
MNLPIRLPLPDVATDEPSAIAAPLRWVGMDGIAMPIRFDEGQSSAPLAALAALYVDLPSTQAKGIHMSRLYRLLDAHAQQPLTPSRLAQLLREMVDSHADCASTAARLSLRSSLLRRSPALRSEGLAGWKAYPLRIDSEFCQGMVRITLGVEVLYSSTCPCSAALARQLLSEAFLRDHAEQVLLSREAVADWLAQYGSYATPHSQRSVAAVQVGVSTLALGFDVEALIDLVEQALATPVQAAVRRADEQEFARRNGANLMYVEDAARRLQQALGARHAEVQVQVRHLESLHAHDAVAEAALTSSRPVEAMR

SEQ ID NO: 16572 - protein, 200 aa, Xanthomonas alfalfae
  misc_feature (1)..(200): tr|A0A1S1XKT2|A0A1S1XKT2_9XANT GTP cyclohydrolase 1 OS= Xanthomonas alfalfae OX=366650 GN=folE PE=3 SV=1
MSQSNQPDSSVTQTQAEEAVRTLLRWAGEDPTREGLLDTPRRVAEAYGDWFSGYREEPREYLERTFEEVAGYDELIVLRDISYESHCEHHMAPIIGKVHVGYLPRGKVVGISKLARVVESYARRFQVQEKMTAQIAQCIQDVLQPLGVGVVVEGAHECMTTRGIHKRGVSMVTSKMLGTFREDARTRAEFLQFIEVGGKR

SEQ ID NO: 16573 - protein, 305 aa, Xanthomonas alfalfae
  misc_feature (1)..(305): tr|A0A1S1XKA7|A0A1S1XKA7_9XANT GTP cyclohydrolase FolE2 OS=Xanthomonas alfalfae OX=366650 GN=folE2 PE=3 SV=1
MSATLPDVAVTEPSTLSAPLRWVGMQDIAIPVQLEAGGGQLAARASVQVDLPRAELKGIHMSRLYRLLDTQLQQPVSPAMLSGLLQALIDSHADCASRAARLTLSFELMLRTPALRSEGLSGWRAYPVHIAAQCSAGRTTIQLQVEVLYASTCPCSAALSRQLLSDAFVQQHAGRDALALDEVAQWLQDHGSYATPHSQRSVAQVRVELPADAQRLAIRQLVGLCEQALATPVQAAVRRPDEQAFARLNGANLMYVEDAARRLRQQLAEHYAAFHVAVRHLESLHAHDAVAETDSDDAVLGPTTM

SEQ ID NO: 16574 - protein, 307 aa, Xanthomonas arboricola
  misc_feature (1)..(307): tr|W4SGV6|W4SGV6_9XANT GTP cyclohydrolase FolE2 OS=Xant homonas arboricola pv. pruni MAFF 301420 OX=1418095 GN= folE2 PE=3 SV=1
MSATLPDVAVTEPSPLSAPLRWVGMQDIAVPLRLADAGPSGSVAARASVQVDLPRPELKGIHMSRLYRLLDRHLEQPVSPAMVSQLLQALIDSHADCGSRAARLALNFELMLRMPALRSEGLSGWRAYPVRIDAQSRAGRTEMQLQVDVLYASTCPCSAALSRQLLSDAFLQQHQGRDALPVAEVAQWLQHNGSYATPHSQRSVAQVRVELSACVQRLDIRELVGLCEQALATPVQAAVRRIDEQAFARLNGANLMYVEDAARRLRKVLAERHAVFHVAVRHLESLHAHDAIAETDSDAGAFHPLAD

SEQ ID NO: 16575 - protein, 200 aa, Xanthomonas arboricola
  misc_feature (1)..(200): tr|A0A2S6Y1I6|A0A2S6Y1I6_9XANT GTP cyclohydrolase 1 OS= Xanthomonas arboricola OX=56448 GN=folE PE=3 SV=1
MSQSDQPDSPVTQAQAEDAVRTLLRWAGEDPAREGLLDTPRRVAEAYGDWFSGYREEPREYLERTFEEVAGYDELIVLRDISYESHCEHHMAPIIGKVHVGYLPRGKVVGISKLARVVESYARRFQVQEKMTAQIAQCIQDVLQPRGVGVVVEGAHECMTTRGIHKRGVSMVTSKMLGSFREDARTRAEFLQFIEVGGKR

SEQ ID NO: 16576 - protein, 200 aa, Xanthomonas axonopodis
  misc_feature (1)..(200): sp|Q8PEP3|GCH1_XANAC GTP cyclohydrolase 1 OS=Xanthomona s axonopodis pv. citri (strain 306) OX=190486 GN=folE P E=3 SV=2
MSQSNQPDSPVTQTQAEEAVRTLLRWAGEDPTREGLLDTPRRVAEAYGDWFSGYRDEPREYLERTFEEVAGYDELIVLRDISYESHCEHHMAPIIGKVHVGYLPRGKVVGISKLARVVESYARRFQVQEKMTAQIAQCIQDVLQPLGVGVVVEGAHECMTTRGIHKRGVSMVTSKMLGSFREDARTRAEFLQFIEVGGKR

SEQ ID NO: 16577 - protein, 305 aa, Xanthomonas axonopodis
  misc_feature (1)..(305): tr|A0A1T1NKY7|A0A1T1NKY7_9XANT GTP cyclohydrolase FolE2 OS=Xanthomonas axonopodis pv. melhusii OX=487834 GN=fo lE2 PE=3 SV=1
MSPTLPDVAVTEPSTLSAPLRWVGMQDIAIPVQLETGSSQLAARAGVQVDLPRAELKGIHMSRLYRLLDTHLQQPLSPAMLSQLLQALIDSHADCASRAARLTLSFELMLRTPALRSEGLSGWRAYPVHIAAQCRAGRTTIQLQIEVLYASTCPCSAALSRQLLSDAFVQQHAGRDTLPLRDVVQWLQDHGTYATPHSQRSVAQVRVELPADAQRLAIQQLVGLCEQALATPVQAAVRRPDEQAFARLNGANLMYVEDAARRLRKPLAEHYAAFHVAVRHLESLHAHDAVAETGSDDAVLGPTTM

SEQ ID NO: 16578 - protein, 223 aa, Xanthomonas bromi
  misc_feature (1)..(223): tr|A0A1C3NR34|A0A1C3NR34_9XANT GTP cyclohydrolase 1 OS= Xanthomonas bromi OX=56449 GN=folE PE=3 SV=1
MQPHLGAAGLSSGTMLAPFGCTCMSQSDQPDSTVTQTQAEEAVRTLLRWAGEDPSREGLLDTPRRVAEAYGDWFSGYRKEPREYLERTFEEVAGYDELIVLRDISYESHCEHHMAPIIGKVHVGYLPRGKVVGISKLARVVEGYARRFQVQEKMTAQIAQCIQDVLQPRGVGVVVEGAHECMTTRGIHKRGVSMVTSMMLGSFRDDARTRAEFLQFIEVGGKR

SEQ ID NO: 16579 - protein, 305 aa, Xanthomonas bromi
  misc_feature (1)..(305): tr|A0A1C3NQM0|A0A1C3NQM0_9XANT GTP cyclohydrolase FolE2 OS=Xanthomonas bromi OX=56449 GN=folE2 PE=3 SV=1
MSATLPDIAVTEPSTLSAPLRWVGMQDIAIPVHLDVGGSALAARAGVQVDLPRAELKGIHMSRLYRLLDLHLQQPLSPAMLSQLLQALIESHADCASRAARLTLGFEVMLRTPALRSEGLSGWRAYPVQIAAQCRAGHTTIQLHVDVLYASTCPCSAALSRQLLSDAFVQQHAGRDALPLQDVAQWLQEHGSYATPHSQRSVAQVRVDLPADAPRFAIPQLIGRCEQALATPVQAAVRRPDEQAFARLNGANLMYVEDAARRLRKQLAEHYPVFHVAVRHLESLHAHDAVAETGSDNETSFQVTD

SEQ ID NO: 16580 - protein, 200 aa, Xanthomonas campestris; identical to SEQ ID NO: 16572
  misc_feature (1)..(200): sp|Q3BM80|GCH1_XANC5 GTP cyclohydrolase 1 OS=Xanthomona s campestris pv. vesicatoria (strain 85-10) OX=316273 G N=folE PE=3 SV=1

SEQ ID NO: 16581 - protein, 200 aa, Xanthomonas campestris
  misc_feature (1)..(200): tr|A0A2S4JR55|A0A2S4JR55_XANCA GTP cyclohydrolase 1 OS= Xanthomonas campestris OX=339 GN=folE PE=3 SV=1
MSQSDQPDSSVTQAQAEEAVRTLLRWAGEDPAREGLLDTPRRVAEAYGDWFSGYREEPRAYLERTFEEVAGYDELIVLRDISYESHCEHHMAPIIGKVHVGYLPRGKVVGISKLARVVESYARRFQVQEKMTAQIAQCIQDVLQPRGVGVVVEGAHECMTTRGIHKRGVSMVTSKMLGSFREDARTRAEFLQFIEVGGKR

SEQ ID NO: 16582 - protein, 200 aa, Xanthomonas cannabis
  misc_feature (1)..(200): tr|A0A0B2CHV9|A0A0B2CHV9_9XANT GTP cyclohydrolase 1 OS= Xanthomonas cannabis pv. cannabis OX=1885894 GN=folE PE =3 SV=1
MSQSDQPDSSVTQAQAEEAVRTLLRWAGEDPFREGLLDTPRRVAEAYGDWFSGYREEPRAYLERTFEEVAGYDELIVLRDISYESHCEHHMAPIIGKVHVGYLPRGKVVGISKLARVVESYARRFQVQEKMTAQIAQCIQDVLQPRGVGVVVEGAHECMTTRGIHKRGVSMVTSKMLGSFREDARTRAEFLQFIEVGGKR

SEQ ID NO: 16583 - protein, 307 aa, Xanthomonas cannabis
  misc_feature (1)..(307): tr|A0A0B2CSE3|A0A0B2CSE3_9XANT GTP cyclohydrolase FolE2 OS=Xanthomonas cannabis pv. cannabis OX=1885894 GN=fol E2 PE=3 SV=1
MSATLPDVAVSETSTLSAPLRWVGMHDIAIPVRLDEAEPGATVGARASVQVDLPRPELKGIHMSRLYRLLDRHLEQPVSPAMMSRLLQALIDSHADCGSRAARVSLAFEVMLRTPALLSEGLAGWRAYPVRLEAQCRAGQCHLQLQIDVLYASTCPCSAALSRQLLSDAFLQQHAGRETLEREDVAQWLRVNGSHATPHSQRSIAQVRVDLLARQQRLEIRELIGVCERALATQVQAAVRRIDEQAFARLNGANLMYVEDAARRLRQALAERYAAFHVAVRHLESLHAHDAVAETDSDVADLHAFAR

SEQ ID NO: 16584 - protein, 200 aa, Xanthomonas citri; identical to SEQ ID NO: 16576
  misc_feature (1)..(200): tr|A0A2D2SIU7|A0A2D2SIU7_XANCI GTP cyclohydrolase 1 OS= Xanthomonas citri pv. phaseoli var. fuscans OX=473423 G N=folE PE=3 SV=1

SEQ ID NO: 16585 - protein, 200 aa, Xanthomonas citri; identical to SEQ ID NO: 16576
  misc_feature (1)..(200): tr|A0A220WBZ2|A0A220WBZ2_XANCI GTP cyclohydrolase 1 OS= Xanthomonas citri pv. vignicola OX=473426 GN=folE PE=3 SV=1

SEQ ID NO: 16586 - protein, 200 aa, Xanthomonas codiaei; identical to SEQ ID NO: 16575
  misc_feature (1)..(200): tr|A0A2S7C8W8|A0A2S7C8W8_9XANT GTP cyclohydrolase 1 OS= Xanthomonas codiaei OX=56463 GN=folE PE=3 SV=1

SEQ ID NO: 16587 - protein, 307 aa, Xanthomonas codiaei
  misc_feature (1)..(307): tr|A0A2S7CTC9|A0A2S7CTC9_9XANT GTP cyclohydrolase FolE2 OS=Xanthomonas codiaei OX=56463 GN=folE2 PE=3 SV=1
MSATLPDVAVSEPSVPGAPLRWVGMHDIAIPVRLDEAAPSGTVNARASVQVDLPRADLRGIHMSRLYRLLDRHLEQPVAPAMLSQLLQVLIDSHADCGSRAARVSLACEVMLRTPALLSEGLSGWRAYPVRIDAQRVAGRCQLQLQIEVLYASTCPCSAALSRQLLSEAFVQHHHGRTAMPLDEIAQWLQAHGSYATPHSQRSVAQVRVDLDDSASQLDIRALVMLCERALATPVQAAVRRIDEQAFARLNGANLMYVEDAARRLRAALAERHAAFHVAVRHLESLHAHDAVAETGSDRADIHPLSS

SEQ ID NO: 16588 - protein, 200 aa, Xanthomonas cucurbitae
  misc_feature (1)..(200): tr|A0A2S7DS34|A0A2S7DS34_9XANT GTP cyclohydrolase 1 OS= Xanthomonas cucurbitae OX=56453 GN=folE PE=3 SV=1
MSQSDQPDSSVTQAQAEDAVRTLLRWAGEDPAREGLLDTPRRVAEAYGDWFSGYREEPREYLERTFEEVAGYDELIVLRDISYESHCEHHMAPIIGKVHVGYLPSGKVVGISKLARVVESYARRFQVQEKMTAQIAQCIQDVLQPRGVGVVVEGAHECMTTRGIHKRGVSMVTSKMLGSFREDARTRAEFLQFLEVGGKR

SEQ ID NO: 16589 - protein, 306 aa, Xanthomonas cucurbitae
  misc_feature (1)..(306): tr|A0A2S7DKC4|A0A2S7DKC4_9XANT GTP cyclohydrolase FolE2 OS=Xanthomonas cucurbitae OX=56453 GN=folE2 PE=3 SV=1
MSATLPDVAVTEPALLGAPLRWVGMHDIAIPVRLGQDGSSASLAARASVQVDLPRPECKGIHMSRLYRLLDRHLEHPVSPAMVSQLLQALIDSHEDCGSRAARLTLTFEVMLRVPALLSEGLAGWRAYPVRLEAQCSAGHSRIQLQVEVLYASTCPCSAALSRQLLSEAFLQQHAGRAAVPPEAVAQWLQVHGSYATPHSQRSIAQVRVDLEASTPQLDVGALVALCERALATPVQAAVRRIDEQAFARLNGANLMYVEDAARRLRQVLVAHYTTFDVAVRHLESLHAHDAVAETGSEVEGAFTAL

SEQ ID NO: 16590 - protein, 200 aa, Xanthomonas cynarae
  misc_feature (1)..(200): tr|A0A2S7AUM8|A0A2S7AUM8_9XANT GTP cyclohydrolase 1 OS= Xanthomonas cynarae OX=109214 GN=folE PE=3 SV=1
MSQSDQPDSSVTQAQAEEAVRTLLRWAGEDPAREGLLDTPRRVAEAYGDWFSGYREEPRAYLERTFEEVAGYDELIVLRDISYESHCEHHMAPIIGKVHVGYLPRGKVVGISKLARVVESYARRFQVQEKMTAQIAQCIQDVLQPRGVGVVVEGSHECMTTRGIHKRGVSMVTSKMLGSFREDARTRAEFLQFIEVGGKR

SEQ ID NO: 16591 - protein, 307 aa, Xanthomonas cynarae
  misc_feature (1)..(307): tr|A0A2S7ARI7|A0A2S7ARI7_9XANT GTP cyclohydrolase FolE2 OS=Xanthomonas cynarae OX=109214 GN=folE2 PE=3 SV=1
MSATLPDVAVTELSTLSAPLRWVGMQDIAMPVRLDEAEPGGTVAARATVQVDLPQPERKGIHMSRLYRLLDQHLEQPLSPAMLSHLLQSMIDSHADCGSRAARASLAFELMLRMPALLSEGLAGWRAYPVRIDAQCRAGRSHVRLQIDVLYASTCPCSAALSRQLLSEAFLQQHAGREALPPEDVAHWLQHHGSYATPHSQRSVAQVRVDLIACTQRFDIRELVALCEQALATPVQAAVRRIDEQAFARLNGANLMYVEDAARRLRKMLAERYANFHVAVRHFESLHAHDAVAETDSAAEGFHPFAD

SEQ ID NO: 16592 - protein, 307 aa, Xanthomonas dyei
  misc_feature (1)..(307): tr|A0A2S7BYT0|A0A2S7BYT0_9XANT GTP cyclohydrolase FolE2 OS=Xanthomonas dyei OX=743699 GN=folE2 PE=3 SV=1
MSATLPDVAVTEPPALSAPLRWVGMHDIAIPVRLDEAEPSGTVAARASVQVDLPRPEIKGIHMSRLYRLLDRYLEQPVSPAMLSQLLQALIDSHADCGSRAARVTLSFEVMLRTPALLSEGLAGWRAYPVRIDAQCRAGRSQVQLQIDVLYASTCPCSAALSRQLLSEAFVQQHAGRAAVPLDDIAQWLQVHGSYATPHSQRSLARVRVDLLACLQRLDIRALIGVCEQALATPVQAAVRRIDEQAFARLNGANLMYVEDAARRLRMALAERYTSFDVAVRHLESLHAHDAVAETGSDGDRIHPFAS

SEQ ID NO: 16593 - protein, 200 aa, Xanthomonas dyei
  misc_feature (1)..(200): tr|A0A2S7BY22|A0A2S7BY22_9XANT GTP cyclohydrolase 1 OS= Xanthomonas dyei OX=743699 GN=folE PE=3 SV=1
MSQSDQPDSSVTQAQAEDAVRTLLRWAGEDPSREGLLDTPRRVAEAYGDWFSGYREEPRDYLERTFEEVAGYDELIVLRDISYESHCEHHMAPIIGKVHVGYLPSVKVVGISKLARVVESYARRFQVQEKMTAQIAQCIQDVLQPRGVGVVVEGSHECMTTRGIHKRGVSMVTSKMLGSFREDARTRAEFLQFLEVGGKR

SEQ ID NO: 16594 - protein, 200 aa, Xanthomonas euvesicatoria; identical to SEQ ID NO: 16572
  misc_feature (1)..(200): tr|A0A2S7E8J1|A0A2S7E8J1_XANEU GTP cyclohydrolase 1 OS= Xanthomonas euvesicatoria pv. citrumelonis OX=189396 GN =folE PE=3 SV=1

SEQ ID NO: 16595 - protein, 305 aa, Xanthomonas euvesicatoria
  misc_feature (1)..(305): tr|A0A2S7E947|A0A2S7E947_XANEU GTP cyclohydrolase FolE2 OS=Xanthomonas euvesicatoria pv. citrumelonis OX=18939 6 GN=folE2 PE=3 SV=1
MSATLPDVAVTEPSTLSAPLRWVGMQDIAIPVQLEAGGGQLAARASVQVDLPRAELKGIHMSRLYRLLDTQLQQPVSPAMLSGLLQALIDSHADCASRAARLTLSGELMLRTPALRSEGLSGWRAYPVHIAAQCSAGRTTIQLQVEVLYASTCPCSAALSRQLLSDAFVQQHAGRDALALDEVAQWLQDHGSYATPHSQRSVAQVRVELPADAQRLAIRQLVGLCEQALATPVQAAVRRPDEQAFARLNGANLMYVEDAARRLRQQLAEHYAAFHVAVRHLESLHAHDAVAETDSDDAVLGPTTM

SEQ ID NO: 16596 - protein, 200 aa, Xanthomonas floridensis
  misc_feature (1)..(200): tr|A0A1A9MGX4|A0A1A9MGX4_9XANT GTP cyclohydrolase 1 OS= Xanthomonas floridensis OX=1843580 GN=folE PE=3 SV=1
MSQSDQPDSTVTQAQAEDAVRTLLRWAGEDPAREGLLDTPRRVAEAYGDWFSGYREEPREYLERTFEEVAGYDELIVLRDISYESHCEHHMAPIIGKVHVGYLPRGKVVGISKLARVVESYARRFQVQEKMTAQIAQCIQDVLQPRGVGVVVEGAHECMTTRGIHKRGVSMVTSKMLGSFREDARTRAEFLQFIEVGGKR

SEQ ID NO: 16597 - protein, 307 aa, Xanthomonas floridensis
  misc_feature (1)..(307): tr|A0A1A9M8M7|A0A1A9M8M7_9XANT GTP cyclohydrolase FolE2 OS=Xanthomonas floridensis OX=1843580 GN=folE2 PE=3 SV =1
MSVTLPDVAVTELPTLSAPLRWVGMHDIAIPVRLDEAEPGATVGARASVQVDLPRPELKGIHMSRLYRLLDRHLEQPISPAMVSQLLQALIDSHADCGSRAARVSLAFEVMLRTPALLSEGLAGWRAYPVRLEAQCRAGQCHLQLQIDVLYASTCPCSAALSRQLLSDAFLQQHAGRQTLEREDVAQWLRVNGSHATPHSQRSIAQVRVDLLARQQRLEIRELIGVCERALATPVQAAVRRIDEQAFARLNGANLMYVEDAARRLRQALAERYTAFHVAVRHLESLHAHDAIAETDSDVSGVHSFAR

SEQ ID NO: 16598 - protein, 199 aa, Xanthomonas fragariae
  misc_feature (1)..(199): tr|A0A1Y6H138|A0A1Y6H138_9XANT GTP cyclohydrolase 1 OS= Xanthomonas fragariae OX=48664 GN=folE PE=3 SV=1
MSHDQPDSSVTQAQAEDAVRTLLRWAGEDPAREGLLDTPRRVAEAYGDWFSGYREEPRAYLERTFEEVAAYDELIVLRDISYESHCEHHMAPIIGKVHVGYLPRGKVVGISKLARVVESYARRFQVQEKMTAQIAQCIQEVLQPRGVGVVVVGAHECMTTRGIHKRGVSMVTSKMLGSFREDARTRAEFLQFIEVGGKR

SEQ ID NO: 16599 - protein, 200 aa, Xanthomonas gardneri
  misc_feature (1)..(200): tr|F0CB70|F0CB70_9XANT GTP cyclohydrolase 1 OS=Xanthomo nas gardneri ATCC 19865 OX=925777 GN=folE PE=3 SV=1
MSQSDQPDSSVTQAQAEEAVRTLLRWAGEDPAREGLLDTPRRVAEAYGDWFSGYREEPRAYLERTFEEVAGYDELIVLRDISYESHCEHHMAPIIGKVHVGYLPSGKVVGISKLARVVESYARRFQVQEKMTAQIAQCIQDVLQPRGVGVVVEGSHECMTTRGIHKRGVSMVTSKMLGSFREDARTRAEFLQFIEVGGKR

SEQ ID NO: 16600 - protein, 307 aa, Xanthomonas gardneri
  misc_feature (1)..(307): tr|A0A1L5Y3Q0|A0A1L5Y3Q0_9XANT GTP cyclohydrolase FolE2 OS=Xanthomonas gardneri OX=90270 GN=folE2 PE=3 SV=1
MSATLPDVAVTELSTLSAPLRWVGMQDIAMPVRLDEAEPGGTVAARATVQVDLPQPERKGIHMSRLYRLLDQHLEQPLSPAMLSHLLQAMIDSHADCGSRAARASLAFELMLRMPALLSEGLAGWRAYPVRIDAQCRAGRSHVRLQIDVLYASTCPCSAALSRQLLSEAFLQQHAGREALPPEDVAHWLQHHGSYATPHSQRSVAQVRVDLIACTQRFDIRELVGLCEQALATPVQAAVRRIDEQAFARLNGANLMYVEDAARRLRKVLAERYANFHVAVRHFESLHAHDAVAETDSAAEGFHPFAD

SEQ ID NO: 16601 - protein, 200 aa, Xanthomonas hortorum; identical to SEQ ID NO: 16590
  misc_feature (1)..(200): tr|A0A2S7E138|A0A2S7E138_9XANT GTP cyclohydrolase 1 OS= Xanthomonas hortorum pv. hederae OX=453603 GN=folE PE=3 SV=1

SEQ ID NO: 16602 - protein, 307 aa, Xanthomonas hortorum; identical to SEQ ID NO: 16600
  misc_feature (1)..(307): tr|A0A248Y619|A0A248Y619_9XANT GTP cyclohydrolase FolE2 OS=Xanthomonas hortorum OX=56454 GN=folE2 PE=3 SV=1

SEQ ID NO: 16603 - protein, 200 aa, Xanthomonas hyacinthi
  misc_feature (1)..(200): tr|A0A2S7EXV0|A0A2S7EXV0_9XANT GTP cyclohydrolase 1 OS= Xanthomonas hyacinthi OX=56455 GN=folE PE=3 SV=1
MADSKKTPDAPVTQDQAEAAVRTLLRWAGEDPEREGLLDTPRRVAEAYGDWFSGYRADPREYLLRTFEEVAGYDELIVLRDIEYESHCEHHMAPIIGKVHVGYLPRGKVVGISKLARVVEAYARRFQVQEKMTAQIAQCIQDVLQPLGVGVVVEGAHECMTTRGIHKRGVSMVTSKMLGTFREDARTRAEFLRFIDGGKR

SEQ ID NO: 16604 - protein, 305 aa, Xanthomonas manihotis
  misc_feature (1)..(305): tr|A0A0W7XCA3|A0A0W7XCA3_XANMN GTP cyclohydrolase FolE2 OS=Xanthomonas manihotis OX=43353 GN=folE2 PE=3 SV=1
MSATLPDVAVTEPSALSAPLRWVGMQDIAIPVQLETGGSQLAARASVQVDLPRAELKGIHMSRLYRLLDTHLQQPLSPAMLSQLLQALIDSHADCASRAARLTLRFELMLRTPALRSEGLSGWRAYPVHIAAQCRAGRTTVQLQVEVLYASTCPCSAALSRQLLGDAFAQQHAGRDALALHDVVQWLQAHGSYATPHSQRSVAQVRVELPADTQRLAIQKLVGVCEQALATPVQAAVRRPDEQAFARLNGANLMYVEDAARRLRKVLAEHYAVFHVAVRHLESLHAHDAVAETGSEAADTHPFAE

SEQ ID NO: 16605 - protein, 200 aa, Xanthomonas manihotis
  misc_feature (1)..(200): tr|A0A0W7XLQ6|A0A0W7XLQ6_XANMN GTP cyclohydrolase 1 OS= Xanthomonas manihotis OX=43353 GN=folE PE=3 SV=1
MSQSNQPDSSVTQTQAEEAVRTLLRWAGEDPTREGLLDTPRRVAEAYGDWFSGYREEPREYLERTFEEVAGYDELIVLRDISYESHCEHHMAPIIGKVHVGYLPRGKVVGISKLARVVESYARRFQVQEKMTAQIAQCIQDVLQPLGVGVVVEGAHECMTTRGIHKRGVSMVTSKMLGSFREDARTRAEFLQFIAVGGKR

SEQ ID NO: 16606 - protein, 209 aa, Xanthomonas melonis
  misc_feature (1)..(209): tr|A0A2S7DCI4|A0A2S7DCI4_9XANT GTP cyclohydrolase 1 OS= Xanthomonas melonis OX=56456 GN=folE PE=3 SV=1
MLAPFGCTCMSQSDQPDSPVTQAQAEDAVRTLLRWAGEDPAREGLLDTPRRVAEAYGDWFSGYREEPREYLERTFEEVAGYDELIVLRDISYESHCEHHMAPIIGKVHVGYLPRGKVVGISKLARVVESYARRFQVQEKMTAQIAQCIQDVLQPRGVGVVVEGAHECMTTRGIHKRGVSMVTSKMLGSFREDARTRAEFLQFIEVGGKR

SEQ ID NO: 16607 - protein, 307 aa, Xanthomonas melonis
  misc_feature (1)..(307): tr|A0A2S7DJZ6|A0A2S7DJZ6_9XANT GTP cyclohydrolase FolE2 OS=Xanthomonas melonis OX=56456 GN=folE2 PE=3 SV=1
MSATLPDVAVSEPSTLSAPLRWVGMHDIAIPVRLDDAEPGATVGARASVQVDLPRADLKGIHMSRLYRLLDRHLEQPLSPAMLSQLLQALIDSHDDCGSRAARVSLAFEVMLRVPALLSEGLAGWRAYPVRLEAQCVEGRSRVQLQVDVLYASTCPCSAALSRQLLSEAFVRQHAGRDVLSAEAVAAWLQVNGSYATPHSQRSIAQVRVDLMGRMQRLEIRDLVGVCEQALATPVQAAVRRIDEQAFARLNGANLMYVEDAARRLRQALAERYTAFHVAVRHLESLHAHDAVAETGCDVGQSPVAIV

SEQ ID NO: 16608 - protein, 305 aa, Xanthomonas nasturtii
  misc_feature (1)..(305): tr|A0A3E1KHB2|A0A3E1KHB2_9XANT GTP cyclohydrolase FolE2 OS=Xanthomonas nasturtii OX=1843581 GN=folE2 PE=3 SV=1
MSATLPDVAVTELSALSAPLRWVGMQDIAIPVHLQAGGAGLAARASVQVDLPRPELKGIHMSRLYRLLDLHLQQPVSPAMLSQLLQALVASHADCGSRAARLTLCFDMLLRMPALRSEGLSGWRAYPVHIVAHRRAGHTTIQLQVDVLYASTCPCSAALSRQLLSDAFVQQHAGREALPLQEVAQWLQEHGSYATPHSQRSVAQVRIELGAETQRFAIRELLDLCEQALATPVQAAVRRTDEQEFARLNGANLMYVEDAARRLRKALAEHHATFDVAVRHLESLHAHDAVAETGSDAELPSLAAV

SEQ ID NO: 16609 - protein, 200 aa, Xanthomonas nasturtii
  misc_feature (1)..(200): tr|A0A3E1KEM8|A0A3E1KEM8_9XANT GTP cyclohydrolase 1 OS= Xanthomonas nasturtii OX=1843581 GN=folE PE=3 SV=1
MSQSDQPDSSVTQTQAEEAVRTLLRWAGEDPTREGLLDTPRRVAEAYGDWFSGYREEPREYLERTFEEVAGYDELIVLRDISYESHCEHHMAPIIGKVHVGYLPRGKVVGISKLARVVESYARRFQVQEKMTAQIAQCIQDVLQPRGVGVVVEGAHECMTTRGIHKRGVSMVTSKMLGSFREDARTRAEFLQFLEVGGKR

SEQ ID NO: 16610 - protein, 306 aa, Xanthomonas oryzae
  misc_feature (1)..(306): sp|Q5H0A0|GCH4_XANOR GTP cyclohydrolase FolE2 OS=Xantho monas oryzae pv. oryzae (strain KACC10331 / KXO85) OX=2 91331 GN=folE2 PE=3 SV=2
MSATLPDVAVTEAFTLSAPLRWVGMQDIAIPVHLDAASGSGLAARASVQVDLPRAELKGIHMSRLYRLLDLHLQRPLSPAMLPQLLQALIESHADCASRAARLTLSFALMLRMPALRSEGLSGWRAYPVRIAAQCRAGRTTIQLQVEVLYASTCPCSAALSRQLLSDAFVQQHAWCDALPLQDVAQWLQDHGSYATPHSQRSVAQVCVDLPADTQGFAIQELIGLCEQALATPVQAAVRRPDEQAFARLNGANLMYVEDAARRLRKQLAEHYATFHVAVRHLESLHAHDAVAETGSDDETFFPAAL

SEQ ID NO: 16611 - protein, 200 aa, Xanthomonas oryzae
  misc_feature (1)..(200): tr|A0A0C5UQW6|A0A0C5UQW6_9XANT GTP cyclohydrolase 1 OS= Xanthomonas oryzae pv. oryzicola OX=129394 GN=folE PE=3 SV=1
MSQSDQPDSSVTQTQAEDAVRILLRWAGEDPTREGLLDTPRRVAEAYGDWFSGYREEPREYLERTFEEVAGYDELIVLRDISYASHCEHHMAPIIGKVHVGYLPRCKVVGISKLARVVESYARRFQVQEKMTAQIAQCIQDVLQPRGVGVVVEGAHECMTTRGIHKRGVSMVTSKMLGSFREDARTRAEFLQFIEVGGKR

SEQ ID NO: 16612 - protein, 305 aa, Xanthomonas perforans; identical to SEQ ID NO: 16573
  misc_feature (1)..(305): tr|A0A0G9B5B5|A0A0G9B5B5_9XANT GTP cyclohydrolase FolE2 OS=Xanthomonas perforans OX=442694 GN=folE2 PE=3 SV=1

SEQ ID NO: 16613 - protein, 200 aa, Xanthomonas perforans; identical to SEQ ID NO: 16572
  misc_feature (1)..(200): tr|A0A0G8Y0Q9|A0A0G8Y0Q9_9XANT GTP cyclohydrolase 1 OS= Xanthomonas perforans OX=442694 GN=folE PE=3 SV=1

SEQ ID NO: 16614 - protein, 200 aa, Xanthomonas phaseoli; identical to SEQ ID NO: 16605
  misc_feature (1)..(200): tr|A0A1V9H086|A0A1V9H086_9XANT GTP cyclohydrolase 1 OS= Xanthomonas phaseoli pv. syngonii LMG 9055 OX=1437878 G N=folE PE=3 SV=1

SEQ ID NO: 16615 - protein, 200 aa, Xanthomonas phaseoli; identical to SEQ ID NO: 16605
  misc_feature (1)..(200): tr|A0A1V9HI46|A0A1V9HI46_9XANT GTP cyclohydrolase 1 OS= Xanthomonas phaseoli pv. dieffenbachiae OX=92828 GN=fol E PE=3 SV=1

SEQ ID NO: 16616 - protein, 326 aa, Xanthomonas pisi
  misc_feature (1)..(326): tr|A0A2S7D7F2|A0A2S7D7F2_9XANT GTP cyclohydrolase FolE2 OS=Xanthomonas pisi OX=56457 GN=folE2 PE=3 SV=1
MSATLPDVAVTELPTLSAPLRWVGMHDIAIPVRLEEAEPSGTVAARASVQVDLPRAEIKGIHMSRLYRLLDRHLEQPVSPAMLSQLLQALIDSHADCGSRAARVTLSLEVMLRTPALLSDGLAGWRAYPVRIDAQCREGRSQVRLQIDVLYASTCPCSAALSRQLLSEAFVQQHAGRAMLQVDDIAQWLQVHGSYATPHSQRSVAQVRVDLLACLQRLDIRALIGICEQALATPVQAAVRRIDEQAFARLNGANLMYVEDAARRLRMALAERYTGFDVAVRHLESLHAHDAVAETGSDEDGAHPFASESADHALQISKAAVAGVAR

SEQ ID NO: 16617 - protein, 200 aa, Xanthomonas pisi
  misc_feature (1)..(200): tr|A0A2S7CXF7|A0A2S7CXF7_9XANT GTP cyclohydrolase 1 OS= Xanthomonas pisi OX=56457 GN=folE PE=3 SV=1
MSQSDQPDSSVTQAQAEDAVRTLLRWAGEDPAREGLLDTPRRVAEAYGDWFSGYREEPREYLERTFEEVAGYDELIVLRDISYESHCEHHMAPIIGKVHVGYLPRGKVVGISKLARVVESYARRFQVQEKMTAQIAQCIQDVLQPRGVGVVVEGSHECMTTRGIHKRGVSMVTSKMLGSFREDARTRAEFLQFIEVGGKR

SEQ ID NO: 16618 - protein, 200 aa, Xanthomonas populi
  misc_feature (1)..(200): tr|A0A2S7EQZ1|A0A2S7EQZ1_9XANT GTP cyclohydrolase 1 OS= Xanthomonas populi OX=53414 GN=folE PE=3 SV=1
MSQSDHPDSSVTQAQAEEALRTLLRWAGEDPARDGLLDTPRRVAEAYGDWFSGYREEPREYLERTFEEVAGYDELIVLRDISYESHCEHHMAPIIGKVHVGYLPRDKVVGISKLARVVESYARRFQVQEKMTAQIAQCIQDVLQPRGVGVVVEGAHECMTTRGIHKRGVSMVTSKMLGSFREDARTRAEFLQFIEVGGKR

SEQ ID NO: 16619 - protein, 305 aa, Xanthomonas prunicola
  misc_feature (1)..(305): tr|A0A2N3RE38|A0A2N3RE38_9XANT GTP cyclohydrolase FolE2 OS=Xanthomonas prunicola OX=2053930 GN=folE2 PE=3 SV=1
MSATLPDVAVTEPSTLSAPLRWVGMQDIAIPVHLDAGAGDLAARASVQVDLPRAELKGIHMSRLYRLLDLHLQRPLSPAMLSQLLQALIESHADCASRAARLTLSFERLLRMPALRSEGLSGWRAYPVHIAAQCRAGHTTIQLQVEVLYASTCPCSAALSRQLLSDAFVQQHAGRGALPLQDVAQWLQDHGSYATPHSQRSVAQVCVDLPVDAQGFAIQQLIGLCEQALATPVQAAVRRPDEQAFARLNGANLMYVEDAARRLRKVLGEHYAAFHVAVRHLESLHAHDAVAETGSDDETPFPVAV

SEQ ID NO: 16620 - protein, 209 aa, Xanthomonas prunicola
  misc_feature (1)..(209): tr|A0A2N3RDQ8|A0A2N3RDQ8_9XANT GTP cyclohydrolase 1 OS= Xanthomonas prunicola OX=2053930 GN=folE PE=3 SV=1
MLAPFGCTCMSQSDQPDSSVTQTQAEEAVRTLLRWAGEDPTREGLLDTPRRVAEAYGDWFSGYREEPREYLERTFEEVAGYDELIVLRDISYESHCEHHMAPIIGKVHVGYLPRGKVVGISKLARVVESYARRFQVQEKMTAQIAQCIQDVLQPLGVGVVVEGAHECMTTRGIHKRGVSMVTSKMLGSFRDDARTRAEFLQFIEVGGKR

SEQ ID NO: 16621 - protein, 320 aa, Xanthomonas sacchari
  misc_feature (1)..(320): tr|A0A0A8DS69|A0A0A8DS69_9XANT GTP cyclohydrolase FolE2 OS=Xanthomonas sacchari OX=56458 GN=folE2 PE=3 SV=1
MNLQISPPLPDVAADEPSQIAAPLNWVGMDGIALPICLEAGQGAMPAHVPAQAALAVDLPSAQVKGIHMSRLYRLLDECAQQPLSPSRLSQLLRAMVHSHADCASTAARVSLRLELLRRSPALRSPGLAGWRAYPLRIDAELRGGVVRLGLGVDLLYSSTCPCSAALARQLLSEAFVQQHPEQASLSREAVADWLLRHGSHATPHSQRSVASVRVGVSARAVRFDAEGVIALAEQALATPVQAAVRRADEQAFARRNGENLMYVEDAARRLQQALGARYAEVQVQVRHLESLHAHDAVAETASAPVAVMAGEAAPDLAQA

SEQ ID NO: 16622 - protein, 320 aa, Xanthomonas sacchari
  misc_feature (1)..(320): tr|A0A5D1A352|A0A5D1A352_9XANT GTP cyclohydrolase FolE2 OS=Xanthomonas sacchari OX=56458 GN=folE2 PE=3 SV=1
MTLQIPPPLPDVAADEPSQIAAPLNWVGMDGIALPICLEAGQGAMPAHVPAQAALAVDLPSAQVKGIHMSRLYRLLDECAQQPLSPSRLSQLLRAMVHSHADCASTAARVSLRLELLRRSPALRSPGLAGWRAYPLRIDAELRGGVVRLGLGVDLLYSSTCPCSAALARQLLSEAFVQQHPEQASLSREAVADWLLRHGSHATPHSQRSVASVRVGVSARAVRFDAEGVIALAEQALATPVQAAVRRADEQAFARRNGENLMYVEDAARRLQQALGARYAEVQVQVRHLESLHAHDAVAETASAPVAVMAGEAAPDLAQA

SEQ ID NO: 16623 - protein, 200 aa, Xanthomonas sp.
  misc_feature (1)..(200): tr|A0A3A5ED65|A0A3A5ED65_9XANT GTP cyclohydrolase 1 OS= Xanthomonas sp. CFBP 7698 OX=2082399 GN=folE PE=3 SV=1
MSQSDQPDSSVTQAQAEEAVRTLLRWAGEDPSREGLLDTPRRVAEAYGDWFSGYREEPRAYLERTFEEVAGYDELIVLRDISYESHCEHHMAPIIGKVHVGYLPRGKVVGISKLARVVESYARRFQVQEKMTAQIAQCIQDVLQPRGVGVVVEGAHECMTTRGIHKRGVSMVTSKMLGSFREDARTRAEFLQFIEVGGKR

SEQ ID NO: 16624 - protein, 304 aa, Xanthomonas sp.
  misc_feature (1)..(304): tr|A0A0P7GP62|A0A0P7GP62_9XANT GTP cyclohydrolase FolE2 OS=Xanthomonas sp. Mitacek01 OX=1732019 GN=folE2 PE=3 SV=1
MSTASNTDRLPDVAGDQAQSARLLDWVGMGNIALPLRIEDAKGGAVTVPASADIGVNLIDPDARGIHMSRLYLHLQDALSSRTLDRDALQTVLRDCIESQRGLADRVQLTLRYGQLLRRPALASAHSGWKTYPVEIDAVLGPDGLALTLSLSVEYSSTCPASAALSRQLNAARFAGDFNADTSGYDAVRDWLESPRGLAATPHAQRSRADVRLQLADDVDTFPILAIVDALEHALGTPVQTAVKREDEQAFASLNAENLMFCEDAARRVAAALSADPRIARFDAKVSHFESLHAHDAVARVSGP

SEQ ID NO: 16625 - protein, 200 aa, Xanthomonas theicola
  misc_feature (1)..(200): tr|A0A2S6ZCA7|A0A2S6ZCA7_9XANT GTP cyclohydrolase 1 OS= Xanthomonas theicola OX=56464 GN=folE PE=3 SV=1
MADSKKTPESPVTQAQAEAAVRTLLRWAGEDPDREGLLDTPRRVAEAYGDWFSGYRADPREYLLRTFEEVAGYDELIVLRDIEYESHCEHHMAPIIGKVHVGYLPRGKVVGISKLARVVEAYARRFQVQEKMTAQIAQCIQDVLQPLGVGVVVEGAHECMTTRGIHKRGVSMVTSKMLGTFREDARTRAEFLRFIDGGVR

SEQ ID NO: 16626 - protein, 200 aa, Xanthomonas translucens
  misc_feature (1)..(200): tr|A0A1M4L7S8|A0A1M4L7S8_XANCT GTP cyclohydrolase 1 OS= Xanthomonas translucens pv. graminis OX=134874 GN=folE PE=3 SV=1
MADSKKTPDTPVTQDQAEAAVRTLLRWAGEDPDREGLLDTPRRVAEAYGDWFSGYQADPRQYLLRTFEEVADYDEMIVLRDIEYESHCEHHMAPIIGKVHVGYLPRGKVVGISKLARVVDVYARRFQVQEKMTAQIAQCIQDVLQPLGVAVVVEGAHECMTTRGIHKRGVSMVTSKMLGTFREDARTRAEFLRFIDGGVR

SEQ ID NO: 16627 - protein, 319 aa, Xanthomonas translucens
  misc_feature (1)..(319): tr|A0A514EAR9|A0A514EAR9_XANCT GTP cyclohydrolase FolE2 OS=Xanthomonas translucens pv. cerealis OX=152263 GN=f olE2 PE=3 SV=1
MHLPMQSPLPDVASSEPSTIAAPLQWVGMDGIALPIRLCDAAATDALPAQAALHVDLPAVQVKGIHMSRLYRLLDDYAQQPLSPSLLAQLLRAMVHSHADCASSAARVSLRLSLLRRSPALRSEGLAGWKAYPLRIDAVLRGASVRVEVAVDVLYSSTCPCSAALARQLLSAAFLQQHAAQPSLQREAVAAWLLQHGSHATAHSQRSIATLQVAVSPRALRFDLSALIELAEQALATPVQAAVRRADEQAFARLNGANLMYVEDAARRLQQALGARYQGVRVQVRHLESLHPHDAVAEAGAPESGSGAPDPFAAGEGAR

SEQ ID NO: 16628 - protein, 209 aa, Xanthomonas vasicola
  misc_feature (1)..(209): tr|A0A2P5ZLG8|A0A2P5ZLG8_XANVA GTP cyclohydrolase 1 OS= Xanthomonas vasicola OX=56459 GN=folE PE=3 SV=1
MLAPFGCTCMSQSDQPDSSVTQAQAEEAVRTLLRWAGEDPTREGLLDTPRRVAEAYGDWFSGYRIEPREYLERTFEEVAGYDELIVLRDISYESHCEHHMAPIIGKVHVGYLPRGKVVGISKLARVVESYARRFQVQEKMTAQIAQCIQDVLQPLGVGVVVEGAHECMTTRGIHKRDVSMVTSKMLGSFREDARTRAEFLQFIDVGGKR

SEQ ID NO: 16629 - protein, 302 aa, Xanthomonas vasicola
  misc_feature (1)..(302): tr|A0A2P5ZS98|A0A2P5ZS98_XANVA GTP cyclohydrolase FolE2 OS=Xanthomonas vasicola OX=56459 GN=folE2 PE=3 SV=1
MSATLPDVAVTEPSTLSAPLRWVGMQDIAIPVHLDTDGGDLAARASVQVDLPRVELKGIHMSRLYRLLDLHLQQPLSPAMLSQLLQALVESHSDCASRAARLTLSFEVMLRVPALRSEGLSGWRAYPVHIAAQCRAGRATIQLQVEVLYASTCPCSAALSRQLLRDAFVQQYAGRDALPLQEVAQWLQDRGSFATPHSQRSVAQVRVDLPVDAQGFAIQQLIGLCEQALATPVQAAVRRPDEQAFARLNGANLMYVEDAARRLRQVLVEHYARFHVAVRHLESLHAHDAVAESGSDDETPSQ

SEQ ID NO: 16630 - protein, 200 aa, Xanthomonas vesicatoria
  misc_feature (1)..(200): tr|F0BJ23|F0BJ23_9XANT GTP cyclohydrolase 1 OS=Xanthomo nas vesicatoria ATCC 35937 OX=925775 GN=folE PE=3 SV=1
MSQSDQPDSTVTQAQAEDAVRTLLRWAGEDPSREGLLDTPRRVAEAYGDWFSGYREEPREYLERTFEEVAGYDELIVLRDISYESHCEHHMAPIIGKVHVGYLPRGKVVGISKLARVVESYARRFQVQEKMTAQIAQCIQDVLQPRGVGVVVEGSHECMTTRGIHKRGVSMVTSKMLGSFREDARTRAEFLQFLEVGGKR

SEQ ID NO: 16631 - protein, 307 aa, Xanthomonas vesicatoria
  misc_feature (1)..(307): tr|F0BEQ0|F0BEQ0_9XANT GTP cyclohydrolase FolE2 OS=Xant homonas vesicatoria ATCC 35937 OX=925775 GN=folE2 PE=3 SV=1
MSATLPDVAVTELPTLSAPLRWVGMHDIAIPVRLDEAEPSGTVGARASMQVDLPRPEIKGIHMSRLYRLLDRHLEQPVSPAMVSQLLQALIDSHADCGSRAARVTLSFEVMLRTPALLSEGLAGWRAYPVRIDAQCREGRSQVQLQIDVLYASTCPCSAALSRQLLSDAFVQHHAGRAMVPVDEIAQWLQLHGSHATPHSQRSVAQVRVDLLACLQRLEIRTLIGVCEQALATPVQAAVRRIDEQAFARLNGANLMYVEDAARRLRMALAERYTAFDVAVRHLESLHAHDAVAETGSDGDRLHPFAS

SEQ ID NO: 16632 - protein, 249 aa, Xenococcus sp.
  misc_feature (1)..(249): tr|L8M3R3|L8M3R3_9CYAN GTP cyclohydrolase 1 OS=Xenococc us sp. PCC 7305 OX=102125 GN=folE PE=3 SV=1
MTTAFSNGSNSSTNGFKSKNGADASLDSLKASLIEQVVTRPDRNTSDGKEAVIQTSSPEKSQERLQDAVRVMLESLGEDPNREGLLKTPKRVAEAMQFLTQGYNQSLETIINGAIFDEGHNEMVLVRDINFFSLCEHHMLPFMGRAHVAYIPNQKVVGLSKLARIVEMYARRLQVQERLTRQVAEALQEALEPQGVAVVMEATHMCMSMRGVQKPGSWTVTSAMLGVFQEEQKTREEFLNLIRHQPSFM

SEQ ID NO: 16633 - protein, 218 aa, Xenococcus sp.
  misc_feature (1)..(218): tr|L8M850|L8M850_9CYAN GTP cyclohydrolase 1 OS=Xenococc us sp. PCC 7305 OX=102125 GN=folE PE=3 SV=1
MTLAKSKPDRVEKIDNKLPLLTTTQKPPVSEEEMRQAVRTLLLGLGEDPDREGLRDTPKRVVKALKFLTSGYHQSLDELLNGAVFHEDANEMVLVRDIDLFSSCEHHILPILGRAHVAYIPDGKVIGLSKIARICEMYGRRLQVQERLTAQIADALQGLLQPKGVAVVVEASHMCMVMRGVQKPGSWTSTSAVRGVFADDAKTRQEFMSLVRHNPALL

SEQ ID NO: 16634 - protein, 222 aa, Xenorhabdus beddingii
  misc_feature (1)..(222): tr|A0A1Y2SRV1|A0A1Y2SRV1_9GAMM GTP cyclohydrolase 1 OS= Xenorhabdus beddingii OX=40578 GN=folE PE=3 SV=1
MSSLSTEAALVHSTLVARGLETPLREQTLEPEVRKIRIEAHMTEIMKLLNLDLSDDSLADTPSRIAKMYVDEIFSGLDYNNFPKITLIENKMKVDEMVTVRDITLTSTCEHHFVTIDGKATVAYIPKDKVIGLSKINRIVQFFAQRPQVQERLTQQILIALQALLGTNNVAVSIDAVHYCVKARGIRDATSTTTTTSLGGLFKTSQNTRQEFLRAVRHLHLS

SEQ ID NO: 16635 - protein, 222 aa, Xenorhabdus bovienii
  misc_feature (1)..(222): tr|A0A077P9P4|A0A077P9P4_XENBV GTP cyclohydrolase 1 OS= Xenorhabdus bovienii str. oregonense OX=1398202 GN=folE PE=3 SV=1
MSSLSTEAALVHSALVSRGLETPLHEQTLEPEVRKVLIQEHMTEIMKLLNLDLSDDSLADTPSRIAKMYVDEIFSGLDYNNFPKITLIENKMKVDEMVTVRDITLTSTCEHHFVTIDGKATVAYIPKDKVIGLSKINRIVQFFAQRPQVQERLTQQILIALQTLLGTNNVAISIDAVHYCVKARGIRDATSTTTTTSLGGLFKSSQNTRQEFLRAVRHLHLS

SEQ ID NO: 16636 - protein, 222 aa, Xenorhabdus bovienii
  misc_feature (1)..(222): tr|D3UX40|D3UX40_XENBS GTP cyclohydrolase 1 OS=Xenorhab dus bovienii (strain SS-2004) OX=406818 GN=folE PE=3 SV =1
MSSLSTEAALVHSALVSRGLETPLREQTLKPEVRKVLIQEHMTEIMKLLNLDLSDDSLADTPSRIAKMYVDEIFSGLDYNNFPKITLIENKMKVDEMVTVRDITLTSTCEHHFVTIDGKATVAYIPKDKVIGLSKINRIVQFFAQRPQVQERLTQQILIALQTLLGTNNVAISIDAVHYCVKARGIRDATSTTTTTSLGGLFKSSQNTRQEFLRAVRHLHLS

SEQ ID NO: 16637 - protein, 222 aa, Xenorhabdus budapestensis
  misc_feature (1)..(222): tr|A0A2D0J6H7|A0A2D0J6H7_XENBU GTP cyclohydrolase 1 OS= Xenorhabdus budapestensis OX=290110 GN=folE PE=3 SV=1
MSSLSTEAALVHSALVAHGLETPLREQILEPEVRKARIEEHMTEIMKLLNLDLSDDSLADTPGRIAKMYVDEIFSGLDYRNFPKITLIENKMKVDEMVTVRDITLTSTCEHHFVTIDGKATVAYIPKDKVIGLSKINRIVQFFAQRPQVQERLTQQILIALQTLLGTNNVAISIDAVHYCVKARGIRDATSTTTTTSLGGLFKSSQNTRQEFLRAVRHLHLS

SEQ ID NO: 16638 - protein, 222 aa, Xenorhabdus cabanillasii; identical to SEQ ID NO: 16637
  misc_feature (1)..(222): tr|A0A3D9UQ81|A0A3D9UQ81_9GAMM GTP cyclohydrolase 1 OS= Xenorhabdus cabanillasii OX=351673 GN=folE PE=3 SV=1

SEQ ID NO: 16639 - protein, 222 aa, Xenorhabdus cabanillasii; identical to SEQ ID NO: 16637
  misc_feature (1)..(222): tr|W1J519|W1J519_9GAMM GTP cyclohydrolase 1 OS=Xenorhab dus cabanillasii JM26 OX=1427517 GN=folE PE=3 SV=1

SEQ ID NO: 16640 - protein, 222 aa, Xenorhabdus doucetiae
  misc_feature (1)..(222): tr|A0A068QQ18|A0A068QQ18_9GAMM GTP cyclohydrolase 1 OS= Xenorhabdus doucetiae OX=351671 GN=folE PE=3 SV=1
MSSLSTEAELVHSALVARGLETPLREQTLEPEVRKVRIEEHMTEIMKLLNLDLSDDSLADTPSRIAKMYVDEIFSGLNYKNFPKITLIENKMKVDEMVTVRDITMTSTCEHHFVTIDGKATVAYIPKDKVIGLSKINRIVQFFAQRPQVQERLTQQILIALQTLLGTNNVAVSIDAVHYCVKARGIRDATSTTTTTSLGGLFKTSQNTRQEFLRAVRPLHLP

SEQ ID NO: 16641 - protein, 222 aa, Xenorhabdus eapokensis
  misc_feature (1)..(222): tr|A0A1Q5TYG6|A0A1Q5TYG6_9GAMM GTP cyclohydrolase 1 OS= Xenorhabdus eapokensis OX=1873482 GN=folE PE=3 SV=1
MSSLSTEAALVHSALVERGLETPLRGPTLAPEVRKARIEEHMTEIMKLLNLDLSDDSLADTPGRIAKMYVDEIFSGLDYNNFPKITLIENKMKVDEMVTVRDITMTSTCEHHFVTIDGKATVAYIPKDKVIGLSKINRIVQFFAQRPQVQERLTQQILIALQTLLGTNNVAVSIDAVHYCVKARGIRDATSTTTTTSLGGLFKTSQNTRQEFLRAVRHLHLS

SEQ ID NO: 16642 - protein, 222 aa, Xenorhabdus ehlersii
  misc_feature (1)..(222): tr|A0A2D0ITV6|A0A2D0ITV6_9GAMM GTP cyclohydrolase 1 OS= Xenorhabdus ehlersii OX=290111 GN=folE PE=3 SV=1
MSSLSTEAALVHSALVDRGLETPLRGPTLAPEVRKARIEEHMTEIMKLLNLDLSDDSLADTPGRIAKMYVDEIFSGLDYNNFPKITLIENKMKVDEMVTVRDITMTSTCEHHFVTIDGKATVAYIPKDKVIGLSKINRIVQFFAQRPQVQERLTQQILIALQILLGTNNVAVSIDAVHYCVKARGIRDATSTTTTTSLGGLFKTSQNTRQEFLRAVRHLHLS

SEQ ID NO: 16643 - protein, 221 aa, Xenorhabdus hominickii
  misc_feature (1)..(221): tr|A0A2G0QAP2|A0A2G0QAP2_9GAMM GTP cyclohydrolase 1 OS= Xenorhabdus hominickii OX=351679 GN=folE PE=3 SV=1
MSPLSTEAALVHSALVARGLETPLREQTLEPEVRKVRIEEHMTEIMKLLNLDLSDDSLADTPGRIAKMYVDEIFSGLNYHNFPKITLIENKMKVDEMVTVRDITMTSTCEHHFVIIDGKATVSYIPKDKVIGLSKINRIVQFFAQRPQVQERLTQQILIALQTLLGTNNVAVSIDAVHYCVKARGIRDATSTTTTTSLGGLFKSSQNTRQEFLRAVRHLEL

SEQ ID NO: 16644 - protein, 222 aa, Xenorhabdus innexi
  misc_feature (1)..(222): tr|A0A1N6MZU9|A0A1N6MZU9_9GAMM GTP cyclohydrolase 1 OS= Xenorhabdus innexi OX=290109 GN=folE PE=3 SV=1
MSSLSTEAALVHSALVERGLETPLREQTLEPEVRKVRIEEHMTEIMKLLNLDLSDDSLADTPCRIAKMYVDEIFSGLDYRNFPKITLIENKMKVDEMVTVRDITLTSTCEHHFVTIDGKATVAYIPKDKVIGLSKINRIVQFFAQRPQVQERLTQQILIALQALLGTNNVAVSIDAVHYCVKARGIRDATSTTTTTSLGGLFKSSQNTRQEFLRAVRHLHLS

SEQ ID NO: 16645 - protein, 222 aa, Xenorhabdus ishibashii
  misc_feature (1)..(222): tr|A0A2D0KD61|A0A2D0KD61_9GAMM GTP cyclohydrolase 1 OS= Xenorhabdus ishibashii OX=1034471 GN=folE PE=3 SV=1
MSSLSTEAALVHSALVDRGLETPLRGATLAPEVRKARIEEHMTEIMKLLNLDLRDDSLADTPGRIAKMYVDEIFSGLDYNNFPKITLIENKMKVDEMVTVRDITMTSTCEHHFVTIDGKATVAYIPKDKVIGLSKINRIVQFFAQRPQVQERLTQQILIALQTLLGTNNVAVSIDAVHYCVKARGIRDATSTTTTTSLGGLFKTSQNTRQEFLRAVRHLHLS

SEQ ID NO: 16646 - protein, 222 aa, Xenorhabdus japonica
  misc_feature (1)..(222): tr|A0A1I5D6G7|A0A1I5D6G7_9GAMM GTP cyclohydrolase 1 OS= Xenorhabdus japonica OX=53341 GN=folE PE=3 SV=1
MSSLSTEAALVHSALIARGLETPLREQTLEPEVRKVRIEEHMTEIMKLLNLDLSDDSLADTPGRIAKMYVDEIFSGLDYSNFPKITLIENKMKVDEMVTVRDITMTSTCEHHFVIIDGKATVAYIPKDKVIGLSKINRIVQFFAQRPQVQERLTQQILIALQTLLGTNNVAVSIDAVHYCVKARGIRDATSTTTTTSLGGLFKTSQNTRQEFLRAVRHLHLS

SEQ ID NO: 16647 - protein, 222 aa, Xenorhabdus khoisanae
  misc_feature (1)..(222): tr|A0A0J5ITR8|A0A0J5ITR8_9GAMM GTP cyclohydrolase 1 OS= Xenorhabdus khoisanae OX=880157 GN=folE PE=3 SV=1
MSSLSTEAALVHSALAARGLETPLREQTLEPEVRKARIEEHMTEIMKLLNLDLSDDSLADTPGRIAKMYVDEIFSGLDYNNFPKITLIENKMKVDEMVTVRDITLTSTCEHHFVIIDGKATVAYIPKDKVIGLSKINRIVQFFAQRPQVQERLTQQILIALQALLGTNNVAVSIDAVHYCVKARGIRDATSTTTTTSLGGLFKTSQNTRQEFLRAVRHLQLS

SEQ ID NO: 16648 - protein, 222 aa, Xenorhabdus koppenhoeferi
  misc_feature (1)..(222): tr|A0A1I7HAG0|A0A1I7HAG0_9GAMM GTP cyclohydrolase 1 OS= Xenorhabdus koppenhoeferi OX=351659 GN=folE PE=3 SV=1
MSSLSTEAALVHSALVARGLETPLREQTLEPEARKVRIEEHMAEIMKLLNLDLSDDSLADTPGRIAKMYVDEIFSGLDYHNFPKITLIENKMKVDEMVTVRDITLTSTCEHHFVTIDGKATVAYIPKDKVIGLSKINRIVQFFAQRPQVQERLTQQILIALQTLLGTCNVAISIDAVHYCVKARGIRDATSTTTTTSLGGLFKSSQNTRQEFLRAVRHLHLS

SEQ ID NO: 16649 - protein, 222 aa, Xenorhabdus kozodoii
  misc_feature (1)..(222): tr|A0A2D0LG35|A0A2D0LG35_9GAMM GTP cyclohydrolase 1 OS= Xenorhabdus kozodoii OX=351676 GN=folE PE=3 SV=1
MSSLSTEAALVHSALVDRGLETPLREQTLEPAVRKVRIEEHMTEIMKLLNLDLSDDSLADTPGRIAKMYVDEIFSGLDYHNFPKITLIENKMKVDEMVTVRDITMTSTCEHHFVTIDGKATVAYIPKDKVIGLSKINRIVQFFAQRPQVQERLTQQILIALQTLLGTNNVAVSIDAVHYCVKARGIRDATSTTTTTSLGGLFKTSQNTRQEFLRAVRNLYLS

SEQ ID NO: 16650 - protein, 222 aa, Xenorhabdus mauleonii
  misc_feature (1)..(222): tr|A0A1I3I825|A0A1I3I825_9GAMM GTP cyclohydrolase 1 OS= Xenorhabdus mauleonii OX=351675 GN=folE PE=3 SV=1
MSSLSTEAALVHSALVARGLETPLREQTLEPEVRKARIEEHMTEIMKLLSLDLSDDSLADTPSRIAKMYVDEIFSGLDYRNFPKITLIENKMKVDEMVTVRDITLTSTCEHHFVTIDGKATVAYIPKDKVIGLSKINRIVQFFAQRPQVQERLTQQILLALQTLLGTSNVAVSIDAVHYCVKARGIRDATSTTTTTSLGGLFKSSQNTRQEFLRAVRHLQLS

SEQ ID NO: 16651 - protein, 222 aa, Xenorhabdus miraniensis
  misc_feature (1)..(222): tr|A0A2D0JQG6|A0A2D0JQG6_9GAMM GTP cyclohydrolase 1 OS= Xenorhabdus miraniensis OX=351674 GN=folE PE=3 SV=1
MSSLSTEAALVHSALIARGLETPLREQTLEPEVRKARIEEHMTEIMKLLNLDLSDDSLADTPGRIAKMYVDEIFSGLDYNNFPKITLIENKMKVDEMVTVRDITLTSTCEHHFVIIDGKATVAYIPKDKVIGLSKINRIVQFFAQRPQVQERLTQQILIALQALLGTNNVAVSIDAVHYCVKARGIRDATSTTTTTSLGGLFKTSQNTRQEFLRAVRHLQLS

SEQ ID NO: 16652 - protein, 222 aa, Xenorhabdus nematophila
  misc_feature (1)..(222): tr|D3VBB3|D3VBB3_XENNA GTP cyclohydrolase 1 OS=Xenorhab dus nematophila (strain ATCC 19061 / DSM 3370 / LMG 103 6 / NCIB 9965 / AN6) OX=406817 GN=folE PE=3 SV=1
MSSLSTEAVLVHSALVARGLETPLHEQTLAPEVRKVRIEEHMTEIMKLLNLDLSDDSLADTPGRIAKMYVDEIFSGLDYHNFPKITLIENKMKVDEMVTVRDITLTSTCEHHFVIIDGKATVAYIPKDKVIGLSKINRIVQFFAQRPQVQERLTQQILIALQTLLGTNNVAVSIDAVHYCVKARGIRDATSTTTTTSLGGLFKSSQNTRQEFLRAVRHLQLS

SEQ ID NO: 16653 - protein, 222 aa, Xenorhabdus nematophila; identical to SEQ ID NO: 16652
  misc_feature (1)..(222): tr|A0A0A8NNF6|A0A0A8NNF6_XENNE GTP cyclohydrolase 1 OS= Xenorhabdus nematophila str. Websteri OX=1437826 GN=fol E PE=3 SV=1

SEQ ID NO: 16654 - protein, 222 aa, Xenorhabdus poinarii
  misc_feature (1)..(222): tr|A0A068R3S3|A0A068R3S3_9GAMM GTP cyclohydrolase 1 OS= Xenorhabdus poinarii G6 OX=1354304 GN=folE PE=3 SV=1
MSSLSTEAELVHSALIARGLETPLREQTLEPEIRKVRIEEHMTEIMKLLNLDLSDDSLADTPNRIAKMYVDEIFSGLDYNNFPKITLIENKMKVDEMVTVRDITMTSTCEHHFVTIDGKATVAYIPKDKVIGLSKINRIVQFFAQRPQVQERLTQQILIALQTLLGTNNVAVSIDAIHYCVKARGIRDATSTTTTTSLGGLFKTSQNTRQEFLRAVRHLHLS

SEQ ID NO: 16655 - protein, 222 aa, Xenorhabdus sp.
  misc_feature (1)..(222): tr|A0A2D0L782|A0A2D0L782_9GAMM GTP cyclohydrolase 1 OS= Xenorhabdus sp. KJ12.1 OX=1851571 GN=folE PE=3 SV=1
MSSLSTEAALVHSALVERGLETPLREQTLEPEVRKVRIEEHMTEIMKLLNLDLSDDSLADTPSRIAKMYVDEIFSGLDYRNFPKITLIENKMKVDEMVTVRDITLTSTCEHHFVTIDGKATVAYIPKDKVIGLSKINRIVQFFAQRPQVQERLTQQILIALQALLGTNNVAVSIDAVHYCVKARGIRDATSTTTTTSLGGLFKSSQNTRQEFLRAVRHLHLS

SEQ ID NO: 16656 - protein, 222 aa, Xenorhabdus sp.
  misc_feature (1)..(222): tr|A0A0M0T8E3|A0A0M0T8E3_9GAMM GTP cyclohydrolase 1 OS= Xenorhabdus sp. GDc328 OX=742178 GN=folE PE=3 SV=1
MSSLSTEAALVHSALAERGLETPLREQTLEPEVRKVRIKAHMTEIMKLLNLDLSDDSLADTPGRIAKMYVDEIFSGLDYNNFPKITLIENKMKVDEMVTVRDITMTSTCEHHFVTIDGKATVAYIPKDKVIGLSKINRIVQFFAQRPQVQERLTQQILIALQTLLGTNNVAVSIDAVHYCVKARGIRDATSTTTTTSLGGLFKTSQNTRQEFLRAVRHLHLS

SEQ ID NO: 16657 - protein, 222 aa, Xenorhabdus stockiae; identical to SEQ ID NO: 16655
  misc_feature (1)..(222): tr|A0A2D0KRI7|A0A2D0KRI7_9GAMM GTP cyclohydrolase 1 OS= Xenorhabdus stockiae OX=351614 GN=folE PE=3 SV=1

SEQ ID NO: 16658 - protein, 222 aa, Xenorhabdus szentirmaii
  misc_feature (1)..(222): tr|W1IXA5|W1IXA5_9GAMM GTP cyclohydrolase 1 OS=Xenorhab dus szentirmaii DSM 16338 OX=1427518 GN=folE PE=3 SV=1
MSSLSTEAALVHSALVARGLETPLREQTLEPEVRKVRIEEHMTEIMKLLNLDLSDDSLVDTPSRIAKMYVDEIFSGLDYKNFPKITLIENKMEVDEMVTVRDITMTSTCEHHFVIIDGKATVAYIPKDKVIGLSKINRIVQFFAQRPQVQERLTQQILIALQTLLGTSNVAVSIDAVHYCVKARGIRDATSTTTTTSLGGLFKTSQNTRQEFLRAVRHLHLS

SEQ ID NO: 16659 - protein, 222 aa, Xenorhabdus thuongxuanensis
  misc_feature (1)..(222): tr|A0A1Q5U9A0|A0A1Q5U9A0_9GAMM GTP cyclohydrolase 1 OS= Xenorhabdus thuongxuanensis OX=1873484 GN=folE PE=3 SV= 1
MSSLSTEAALVHSALVDRGLETPLRGSTLAPEERKARIEEHMTEIMKLLNLDLRDDSLADTPGRIAKMYVDEIFSGLDYNNFPKITLIENKMKVDEMVTVRDITMTSTCEHHFVTIDGKATVAYIPKDKVIGLSKINRIVQFFAQRPQVQERLTQQILIALQTLLGTNNVAVSIDAVHYCVKARGIRDATSTTTTTSLGGLFKTSQNTRQEFLRAVRHLHLS

SEQ ID NO: 16660 - protein, 222 aa, Xenorhabdus vietnamensis
  misc_feature (1)..(222): tr|A0A1Y2SEN2|A0A1Y2SEN2_9GAMM GTP cyclohydrolase 1 OS= Xenorhabdus vietnamensis OX=351656 GN=folE PE=3 SV=1
MSSLSTEAALVHSALVARGLETPLREQTLEPEVRKVRIEEHMTEIMKLLNLDLRDDSLADTPGRIAKMYVDEIFSGLDYNNFPKITLIENKMKVDEMVTVRDITMTSTCEHHFVTIDGKATVAYIPKDKVIGLSKINRIVQFFAQRPQVQERLTQQILIALQTLLGTNNVAVSIDAVHYCVKARGIRDATSTTTTTSLGGLFKTSQNTRQEFLRAVRHLHLS

SEQ ID NO: 16661 - protein, 211 aa, Xiangella phaseoli
  misc_feature (1)..(211): tr|A0A1H7DF36|A0A1H7DF36_9ACTN GTP cyclohydrolase 1 OS= Xiangella phaseoli OX=1144548 GN=folE PE=3 SV=1
MDSLDYIAARLVNGRLTGRPVEDTMDLGRIEKAVREILVAVGEDPDRDGLQQTPARVARAYAELFAGLRVDPATVLTTTFEANHEELVLVRDIDVMSLCEHHLLPFRGSAHIGYIPGPDGRITGLSKLARLVEVFARRPQVQERLTSQIADLLMERLAPRGVIVVLECEHMCMAMRGIQKSGAKTITSAVRGTLQRDAKSRAEAMALILHR

SEQ ID NO: 16662 - protein, 371 aa, Xinfangfangia sp.
  misc_feature (1)..(371): tr|A0A3P5XV29|A0A3P5XV29_9RHOB GTP cyclohydrolase FolE2 OS=Xinfangfangia sp. CIP 111625 OX=2483812 GN=folE2 PE =3 SV=1
MTLHDPELHEQPSRAPGPVPSRDEAAAALAILRRWADAAGEAEIAALDPSVGNLLPDLSYPALHRAYPEEFEADAAYRETLPDLQNGPSSLIVGAKAVIQHVGISNFRLPIRFHSREGAEVVLETSVTGTVSLEAEKKGINMSRIMRSFYAHAERDFSFEVIEGALEDYKRDLGSFDARIQMRFSFPVKVGSLRSGLSGWQYYDIALELVDQGGSRVRIMHLDYVYSSTCPCSLELSEHARRTRGQLATPHSQRSVARLSVVVKDGGILWFEDLIELARRAVVTETQVMVKREDEQAFAELNGANPIFVEDAARSFCEALRGDPRIGDFRVVASHQESLHSHDAVSVLTEGPTFAQTSFDPKLFASLYHVG

SEQ ID NO: 16663 - protein, 206 aa, Xylanibacterium sp.
  misc_feature (1)..(206): tr|A0A4P6ELJ6|A0A4P6ELJ6_9MICO GTP cyclohydrolase 1 OS= Xylanibacterium sp. 2JSPR-7 OX=2509459 GN=folE PE=3 SV= 1
MTQTDRATDGAARPAADVPPVDLARAEAAVRELLFAVGEDPDREGLRETPARVARAYQEIFAGLRQEPEDVLTTTFDLGHEEMVLVRDIEVYSTCEHHLVPFHGVAHVGYIPSADGVITGLSKLARLVDVYARRPQVQERLTTQIADALVRILRPRGVLVVVECEHLCMAMRGVRKPGSRTITSAVRGQMRDPATRAEAMSLVSAR

SEQ ID NO: 16664 - protein, 204 aa, Xylanibacterium ulmi
  misc_feature (1)..(204): tr|A0A4Q7M530|A0A4Q7M530_9MICO GTP cyclohydrolase 1 OS= Xylanibacterium ulmi OX=228973 GN=folE PE=3 SV=1
MTQTDREAAVRRAADVPPVDIARAEAAVRELLLAVGEDPDREGLRETPARVARSYQEIFAGLRQEPEDVLTTTFDLGHEEMVLVKDIEVYSTCEHHLVPFHGVAHVGYIPSADGVITGLSKLARLVEVYARRPQVQERLTSQIADALVRILRPRGVLVVVECEHLCMAMRGVRKPGSRTVTSAVRGQMRDPATRAEAMSLVLGK

SEQ ID NO: 16665 - protein, 202 aa, Xylanimicrobium sp.
  misc_feature (1)..(202): tr|A0A4V0YFX1|A0A4V0YFX1_9MICO GTP cyclohydrolase 1 OS= Xylanimicrobium sp. FW10M-9 OX=2509457 GN=folE PE=3 SV= 1
MTTAESVNRRAADVPPVDIPRAEAAVRELLLAVGEDPDREGLRETPARVARAYAEVFAGLRQEPEDVLTTTFDIGHEEMVLVKDIEVYSTCEHHLVPFHGVAHVGYIPSNDGVITGLSKLARLVDVYARRPQVQERLTTQVADALVKILRPRGVIVVIECEHLCMSMRGVHKPGSRTVTSAVRGQMRDPATRAEAMSLVIGK

SEQ ID NO: 16666 - protein, 202 aa, Xylanimonas cellulosilytica
  misc_feature (1)..(202): tr|D1BZ95|D1BZ95_XYLCX GTP cyclohydrolase 1 OS=Xylanimo nas cellulosilytica (strain DSM 15894 / CECT 5975 / LMG 20990 / XIL07) OX=446471 GN=folE PE=3 SV=1
MTATDGVTRPATEVPPVDLARAEAAVRELLLAVGENPDREGLRETPARVARAYQEVFAGLRQEPEDVLTTTFDIGHEEMVLVKDIEVYSTCEHHLVPFHGVAHVGYIPSTDGVITGLSKIARLVDVYARRPQVQERLTSQVADALVKILRPRGVIVVIECEHLCMSMRGVHKPGSRTVTSAVRGQMRDPATRAEAMSLVIGK

SEQ ID NO: 16667 - protein, 298 aa, Xylella fastidiosa
  misc_feature (1)..(298): sp|B0U741|GCH4_XYLFM GTP cyclohydrolase FolE2 OS=Xylell a fastidiosa (strain M12) OX=405440 GN=folE2 PE=3 SV=2
MSTSIPDVAVHDSPAIAAPLRWVGMDGIVVPVQLTIADGGQHVIGRARAQIDLPAMEVKGIHMSRLYRLLDTHAVEPLTPVGICGLLSAMVNSHADCASTAARVDWYFDWLRRVPALVSNDLSGWRGYPVWLRAEYSAGHVQFWLCVEVGYSSTCPCSAALARQMLADAFLQEHVEVSALSPETVADWLRSNGSYATPHSQRSLARIEVALTEQAVELGLPALVDCAERILSTPVQAAVRRVDEQAFARLNGANLMYVEDATRRLQHGLAIHYSAFRVHVRHLESLHPHDAVASTADE

SEQ ID NO: 16668 - protein, 203 aa, Xylella fastidiosa
  misc_feature (1)..(203): tr|A0A060H9Y9|A0A060H9Y9_XYLFS GTP cyclohydrolase 1 OS= Xylella fastidiosa MUL0034 OX=1401256 GN=folE PE=3 SV=1
MDHSKQQNASITQAQAEEAVRTLLRWAGEDPTREGLLDTPRRVVEAYGDWFSGYREDPHDYLQRTFEEISGYDEMIVLRNITYESHCEHHMAPIIGKVHVGYLPNGKVVGISKLARVVESYARRFQIQEKMTAQIAACIQDTLTPRGVGVVIEGAHACMTTRGIHKRGVSMVTSKMLGTFREDARTRAEFLQFIEVGTNVMDL

SEQ ID NO: 16669 - protein, 200 aa, Xylella taiwanensis
  misc_feature (1)..(200): tr|Z9JH29|Z9JH29_9GAMM GTP cyclohydrolase 1 OS=Xylella taiwanensis OX=1444770 GN=folE PE=3 SV=1
MDHSNQHTASITQAQAEEAVRTLLRWAGEDPTREGLLDTPRRVVEAYGDWFSGYREDPHAYLQRTFEETSGYDELIVLRNITYESHCEHHMAPIIGKVHVGYLPNGKVVGISKLARVVDAYARRFQVQEKMTAQIAACIQDTLTPRGVGVVIEGAHECMTTRGVHKRGVSMVTSKMLGAFRQDARTRAEFLNFIEVGGES

SEQ ID NO: 16670 - protein, 301 aa, Xylella taiwanensis
  misc_feature (1)..(301): tr|Z9JL57|Z9JL57_9GAMM GTP cyclohydrolase FolE2 OS=Xyle lla taiwanensis OX=1444770 GN=folE2 PE=3 SV=1
MSTSIPDVVVHELPAVAAPLRWVGMDGIVVPVQLTTTDGGQRLVGRAKAQIDLPAIEVKGIHMSRLYRLLDTYAAEPLTPVGICGLLTAMVNSHVDCASTAARVDWRFDWLKRVPALVSGDLAGWRGYPVRLRAECCSERVRFWLCVEVAYSSTCPCSAALARQMLADAFLQEHADVSALSPVTIADWLRRHGSYATPHSQRSVACIEVALAEQASELGLAALVDCAERILSTPVQAAVRRVDEQAFARLNGANLMYVEDAARRLQHGLAIHYSAFRVHVRHLESLHPHDVVASTEDALST

SEQ ID NO: 16671 - protein, 366 aa, Yangia pacifica
  misc_feature (1)..(366): tr|A0A1I6WAV2|A0A1I6WAV2_9RHOB GTP cyclohydrolase FolE2 OS=Yangia pacifica OX=311180 GN=folE2 PE=3 SV=1
MNVYSPVVDRNPSRDDAEAALAVLRQWTEAADDSEITDLDPALLKLLGAAQDYPVFSRQYPEGFAVDDAYKTSLPDLQNGPASLIRGENVRIQHVGISNFRLPISYKLKDGQSLSVETSVTGTVSLEADKKGINMSRIMRSFYTHAEKSFSFGVIEAALDDYKSDLESFDARIQMRFRFPMKVESLRSGLSGYQYYDIALELVEQDGVRQRIAHLDYVYSSTCPCSLELSEHARQFRGQLATPHSQRSVARVSVVLNDDSDDCLWFEDLVGLCRTAVPTETQVMVKREDEQAFAELNAANPIFVEDAARLFAEAMAGEERIGDFRVLCSHQESLHSHDAVALLTQGATFAQTSLDPTLFPSLIHQG

SEQ ID NO: 16672 - protein, 365 aa, Yangia sp.
  misc_feature (1)..(365): tr|A0A2E1D5W5|A0A2E1D5W5_9RHOB GTP cyclohydrolase FolE2 OS=Yangia sp. OX=2024862 GN=folE2 PE=3 SV=1
MNVFTPEIDRKPSKEEAAKALEVLRSFAEKALDYEIDALDPGIAALRDGGVPYPDLSRVYPTAFRADEAYRETLPDLQNGPSSLIKGENRLIQHVGISNFRLPIHYRTRDHGELTLETSVTGTVSLEADKKGINMSRIMRSFYAHAEKTFSFEVIEAALDDYKSDLESFDARIMMRLSFPVRRDSLRSGLSGYQYYDIALELVELDGVRRKILHLDYVYSSTCPCSLELSEHARRTRGQLATPHSQRSVARVSAVLANEGDCLWFEDLIGLCRKAVPTETQVMVKREDEQAFAELNAANPIFVEDAARLFAEQLQADPRIGDFRVLASHQESLHSHDAVSVLTEGTTFANDSLDPKLFSTLFHVG

SEQ ID NO: 16673 - protein, 365 aa, Yangia sp.
  misc_feature (1)..(365): tr|A0A1B1PRD8|A0A1B1PRD8_9RHOB GTP cyclohydrolase FolE2 OS=Yangia sp. CCB-MM3 OX=1792508 GN=folE2 PE=3 SV=1
MNVYSPVVDRDPNRDEAEAALAVLRKWTETAADNEITDLDPALLKLLGAAQDYPTFSRQYPEGFTVEPSYKDSLPDLQNGPSSLIRGENRRIQHVGISNFRLPISYRTKEGAPLTVETSVTGTVSLEADKKGINMSRIMRSFYTHAEKTFSFGVIEAALDDYKSDLESFDARIQMRFRFPMRVDSLRSGLSGYQYYDIALELIENDGVRQRVVHLDYVYSSTCPCSLELSEHARQFRGQLATPHSQRSVARVSAVLTDDEDWMWFEDLVGLCRSAVPTETQVMVKREDEQAFAELNAANPIFVEDAARLFAEALQADPRIGDYRVLASHQESLHSHDAVALLTEGPTFAQASLDPTLFPSLIHQG

SEQ ID NO: 16674 - protein, 220 aa, Yersinia aldovae
  misc_feature (1)..(220): tr|A0A0T9TG94|A0A0T9TG94_YERAL GTP cyclohydrolase 1 OS= Yersinia aldovae OX=29483 GN=folE PE=3 SV=1
MSSLSKEAELVHEALLARGLETPLRKQELDAQTRKTRIQEHMTQVMQLLNLDLSDDSLADTPRRIAKMYVDEIFSGLDYENFPKITLIQNKMKVDEMVTVRDITLTSTCEHHFVTIDGKATVAYIPKDSVIGLSKINRIVQFFAQRPQVQERLTQQILLALQTLLGTNNVAVSIDAVHYCVKARGIRDATSATTTTSLGGLFKSSQNTRQEFLRAVRHNS

SEQ ID NO: 16675 - protein, 220 aa, Yersinia bercovieri
  misc_feature (1)..(220): tr|A0A2G4U1S6|A0A2G4U1S6_YERBE GTP cyclohydrolase 1 OS= Yersinia bercovieri OX=634 GN=folE PE=3 SV=1
MSSLSKEAELVHEALLARGLETPLRKQELDAETRKTLIQEHMTQVMQLLNLDLTDDSLADTPRRIAKMYVDEIFSGLDYENFPKITLIENKMKVDEMVTVRDITLTSTCEHHFVTIDGKATVAYIPKDSVIGLSKINRIVQFFAQRPQVQERLTQQILLALQTLLGTNNVAVSIDAVHYCVKARGIRDATSATTTTSLGGLFKSSQNTRQEFLRAVRHNS

SEQ ID NO: 16676 - protein, 220 aa, Yersinia enterocolitica
  misc_feature (1)..(220): sp|A1JU09|GCH1_YERE8 GTP cyclohydrolase 1 OS=Yersinia e nterocolitica serotype O:8 / biotype 1B (strain NCTC 13 174 / 8081) OX=393305 GN=folE PE=3 SV=1
MSSLSKEAELVHEALLARGLETPLRKQELDAETRKTRIQEHMTQVMQLLNLDLSDDSLADTPRRIAKMYVDEIFSGLDYENFPKITLIENKMKVDEMVTVRDITLTSTCEHHFVTIDGKATVAYIPKDSVIGLSKINRIVQFFAQRPQVQERLTQQILLALQTLLGTNNVAVSIDAVHYCVKARGIRDATSATTTTSLGGLFKSSQNTRQEFLRAVRHNG

SEQ ID NO: 16677 - protein, 220 aa, Yersinia enterocolitica; identical to SEQ ID NO: 16676
  misc_feature (1)..(220): tr|A0A3S4IUH4|A0A3S4IUH4_YEREN GTP cyclohydrolase 1 OS= Yersinia enterocolitica subsp. enterocolitica OX=150052 GN=folE PE=3 SV=1

SEQ ID NO: 16678 - protein, 220 aa, Yersinia entomophaga
  misc_feature (1)..(220): tr|A0A3S6EVW8|A0A3S6EVW8_YERET GTP cyclohydrolase 1 OS= Yersinia entomophaga OX=935293 GN=folE PE=3 SV=1
MSSLSKEAILVHAALEARGLETPLRGQVLDSETRKQRIQEHMTEIMQLLNLDLSDDSLADTPRRIAKMYVDEIFSGLDYANFPKITVIENKMKVDEMVTVRDITLTSTCEHHFVTIDGKATVAYIPKDSVIGLSKINRIVQFFAQRPQVQERLTQQILLALQTLLGTNNVAVSIDAVHYCVKARGIRDATSATTTTSLGGLFKSSQNTRQEFLRAVRHSS

SEQ ID NO: 16679 - protein, 309 aa, Yersinia entomophaga
  misc_feature (1)..(309): tr|A0A3S6EY10|A0A3S6EY10_YERET GTP cyclohydrolase FolE2 OS=Yersinia entomophaga OX=935293 GN=folE2 PE=3 SV=1
MKIAANQSLTALPDVQSSYIDFGNTELDWVGMEGIALPLDIVGRPLSAKVNAGIGVKAKGQSKGIHMSRIYLALDELTQGELTPQRIHTTLAAFLASQPDLAASASLHIASDIFISRPAMLSPQRGWKAYPLTIDAQLEQQLQLRLRLSLSVPYSSTCPSSVALSIQSAQQQFQLDFEQQENLTQQQVLDWLGTQGMPATPHSQRSWARVTVSLKSTEMNFPVLELINQIENTLGTPVQTLVKRQDEQAFALANGQNLMFCEDAARRLYAMLRKQCRYSAFSVRVEHQESLHAHNAVAVISSEGINHAA

SEQ ID NO: 16680 - protein, 220 aa, Yersinia frederiksenii
  misc_feature (1)..(220): tr|A0A0B6FTZ4|A0A0B6FTZ4_YERFR GTP cyclohydrolase 1 OS= Yersinia frederiksenii Y225 OX=1454377 GN=folE PE=3 SV= 1
MSSLSKEAELVHEALLARGLETPLRKQELDAETRKTRIQEHMTQVMQLLNLDLSDDSLADTPRRIAKMYVDEIFSGLDYENFPKITLIENKMKVDEMVTVRDITLTSTCEHHFVTIDGKAIVAYIPKDSVIGLSKINRIVQFFAQRPQVQERLTQQILLALQTLLGTNNVAVSIDAVHYCVKARGIRDATSATTTTSLGGLFKSSQNTRQEFLRAVRHNS

SEQ ID NO: 16681 - protein, 238 aa, Yersinia frederiksenii
  misc_feature (1)..(238): tr|A0A0T9PSW6|A0A0T9PSW6_YERFR GTP cyclohydrolase 1 OS= Yersinia frederiksenii OX=29484 GN=folE PE=3 SV=1
MIYIMFMLFGGVRLLEKRMSSLSKEAELVHEALLARGLETPLRKQELDAQTRKTKIQAHMTEVMQLLNLDLSDDSLADTPRRIAKMYVDEIFSGLDYENFPKITLIQNKMKVDEMVTVRDITLTSTCEHHFVTIDGKATVAYIPKDSVIGLSKINRIVQFFAQRPQVQERLTQQILLALQTLLGTNNVAVSIDAVHYCVKARGIRDATSATTTTSLGGLFKSSQNTRQEFLRAVRHNS

SEQ ID NO: 16682 - protein, 220 aa, Yersinia hibernica
  misc_feature (1)..(220): tr|A0A481QEU7|A0A481QEU7_9GAMM GTP cyclohydrolase 1 OS= Yersinia hibernica OX=2339259 GN=folE PE=3 SV=1
MSSLSKEAELVHEALLARGLETPLRKQELDAETRKIRIQEHMTQVMQLLNLDLSDDSLADTPRRIAKMYVDEIFSGLDYENFPKITLIENKMKVDEMVTVRDITLTSTCEHHFVTIDGKATVAYIPKDSVIGLSKINRIVQFFAQRPQVQERLTQQILLALQTLLGTNNVAVSIDAVHYCVKARGIRDATSATTTTSLGGLFKSSQNTRQEFLRAVRHNS

SEQ ID NO: 16683 - protein, 220 aa, Yersinia intermedia; identical to SEQ ID NO: 16682
  misc_feature (1)..(220): tr|A0A0T9T4K0|A0A0T9T4K0_YERIN GTP cyclohydrolase 1 OS= Yersinia intermedia OX=631 GN=folE PE=3 SV=1

SEQ ID NO: 16684 - protein, 220 aa, Yersinia intermedia
  misc_feature (1)..(220): tr|A0A0T9LVN1|A0A0T9LVN1_YERIN GTP cyclohydrolase 1 OS= Yersinia intermedia OX=631 GN=folE PE=3 SV=1
MSSLSKEAELVHEALLARGLETPLRKQELDAQTRKTKIQAHMTEVMQLLNLDLSDDSLADTPRRIAKMYVDEIFSGLDYENFPKITLIQNKMKVDEMVTVRDITLTSTCEHHFVTIDGKATVAYIPKDSVIGLSKINRIVQFFAQRPQVQERLTQQILLALQTLLGTNNVAVSIDAVHYCVKARGIRDATSATTTTSLGGLFKSSQNTRQEFLRAVRHNS

SEQ ID NO: 16685 - protein, 220 aa, Yersinia kristensenii
  misc_feature (1)..(220): tr|A0A2A7TCZ4|A0A2A7TCZ4_YERKR GTP cyclohydrolase 1 OS= Yersinia kristensenii OX=28152 GN=folE PE=3 SV=1
MSSLSKEAELVHEALLARGLETPLRKQELDAETRKARIQEHMAQVMQLLNLDLSDDSLADTPRRIAKMYVDEIFSGLDYENFPKITLIENKMKVDEMVTVRDITLTSTCEHHFVTIDGKAIVAYIPKDSVIGLSKINRIVQFFAQRPQVQERLTQQILLALQTLLGTNNVAVSIDAVHYCVKARGIRDATSATTTTSLGGLFKSSQNTRQEFLRAVRHNS

SEQ ID NO: 16686 - protein, 220 aa, Yersinia kristensenii; identical to SEQ ID NO: 16675
  misc_feature (1)..(220): tr|A0A0T9UZM6|A0A0T9UZM6_YERKR GTP cyclohydrolase 1 OS= Yersinia kristensenii OX=28152 GN=folE PE=3 SV=1

SEQ ID NO: 16687 - protein, 220 aa, Yersinia massiliensis
  misc_feature (1)..(220): tr|A0A0T9PVN6|A0A0T9PVN6_9GAMM GTP cyclohydrolase 1 OS= Yersinia massiliensis OX=419257 GN=folE PE=3 SV=1
MSSLSKEAELVHEALLARGLETPLRKQELDAKTRKTQIEAHMTQVMQLLNLDLTDDSLADTPRRIAKMYVDEIFSGLDYENFPKITLIENKMKVDEMVTVRDITLTSTCEHHFVTIDGKATVAYIPKESVIGLSKINRIVQFFAQRPQVQERLTQQILLALQTLLGTNNVAVSIDAVHYCVKARGIRDATSATTTTSLGGLFKSSQNTRQEFLRAVRHHG

SEQ ID NO: 16688 - protein, 220 aa, Yersinia massiliensis
  misc_feature (1)..(220): tr|A0A2R4NN86|A0A2R4NN86_9GAMM GTP cyclohydrolase 1 OS= Yersinia massiliensis OX=419257 GN=folE PE=3 SV=1
MSSLSKEAELVHEALLARGLETPLRKQELDAKTRKTQIEAHMTQVMQLLNLDLTDDSLADTPRRIAKMYVDEIFSGLDYENFPKITLIENKMKVDEMVTVRDITLTSTCEHHFVTIDGKATVAYIPKDSVIGLSKINRIVQFFAQRPQVQERLTQQILLALQTLLGTNNVAVSIDAVHYCVKARGIRDATSATTTTSLGGLFKSSQNTRQEFLRAVRHHG

SEQ ID NO: 16689 - protein, 220 aa, Yersinia mollaretii
  misc_feature (1)..(220): tr|A0A0U1I7U0|A0A0U1I7U0_YERMO GTP cyclohydrolase 1 OS= Yersinia mollaretii OX=33060 GN=folE_1 PE=3 SV=1
MSSLSKEAELVHEALLARGLETPLRKQELDAETRKTQIQAHMTQVMQLLNLDLTDDSLADTPRRIAKMYVDEIFSGLDYENFPKITLIQNKMKVDEMVTVRDITLTSTCEHHFVTIDGKATVAYIPKDSVIGLSKINRIVQFFAQRPQVQERLTQQILLALQTLLGTNNVAVSIDAVHYCVKARGIRDATSATTTTSLGGLFKSSQNTRQEFLRAVRHNG

SEQ ID NO: 16690 - protein, 239 aa, Yersinia mollaretii
  misc_feature (1)..(239): tr|A0A0U1K913|A0A0U1K913_YERMO GTP cyclohydrolase 1 OS= Yersinia mollaretii OX=33060 GN=folE PE=3 SV=1
MCDLHHVYLIRTRSLLEKRMSSLSKEAELVHEALLARGLETPLRKQELDAETRKTQIQAHMTQVMQLLNLDLTDDSLADTPRRIAKMYVDEIFSGLDYENFPKITLIQNKMKVDEMVTVRDITLTSTCEHHFVTIDGKATVAYIPKDSVIGLSKINRIVQFFAQRPQVQERLTQQILLALQTLLGTNNVAVSIDAVHYCVKARGIRDATSATTTTSLGGLFKSSQNTRQEFLRAVRHNG

SEQ ID NO: 16691 - protein, 220 aa, Yersinia nurmii; identical to SEQ ID NO: 16678
  misc_feature (1)..(220): tr|A0A0T9KEQ9|A0A0T9KEQ9_9GAMM GTP cyclohydrolase 1 OS= Yersinia nurmii OX=685706 GN=folE PE=3 SV=1

SEQ ID NO: 16692 - protein, 307 aa, Yersinia nurmii
  misc_feature (1)..(307): tr|A0A0T9LGC0|A0A0T9LGC0_9GAMM GTP cyclohydrolase FolE2 OS=Yersinia nurmii OX=685706 GN=folE2 PE=3 SV=1
MKIAANQSLTALPDVQSLSIDVSNMGMDWVGMEGIALPLDIAGKPLSAKVNAGIRVKAKSQSKGIHMSRLYLALDELTQGELTPQRIHTTLAAFLASQPDLAASASLHIASEIFISRPAMLSPQRGWKAYPLTIDAQLEQQLQLRLSLSVPYSSTCPSSAALSLQSAWQQFQLDFDQQENLTQQQVLDWLGTQGMPATPHSQRSWAIVTVSLKSTEMNFPVLELINQIENALGTPVQTVVKRQDEQAFALANGQNLMFCEDAARRLYVMLSKQCRYTAFSVRVEHQESLHAHNAVAVISREGTKHTA

SEQ ID NO: 16693 - protein, 220 aa, Yersinia pekkanenii
  misc_feature (1)..(220): tr|A0A0T9QNL6|A0A0T9QNL6_9GAMM GTP cyclohydrolase 1 OS= Yersinia pekkanenii OX=1288385 GN=folE PE=3 SV=1
MSSLSKEAELVHDALLARGLETPLRKQVLDAETRKSRIQEHMTEVMQLLNLDLSDDSLADTPRRIAKMYVDEIFSGLDYENFPKITLIQNKMKVDEMVTVRDITLTSTCEHHFVTIDGKATVAYIPKDSVIGLSKINRIVQFFAQRPQVQERLTQQILLALQTLLGTNNVAVSIDAVHYCVKARGIRDATSATTTTSLGGLFKSSQNTRQEFLRAVRHNS

SEQ ID NO: 16694 - protein, 220 aa, Yersinia pestis
  misc_feature (1)..(220): sp|Q8ZG15|GCH1_YERPE GTP cyclohydrolase 1 OS=Yersinia p estis OX=632 GN=folE PE=1 SV=1
MSSLSKEAELVHQALLARGLETPLRKPELDAETRKTRIQAHMTEVMHLLNLDLTDDSLADTPRRIAKMYVDEIFSGLDYENFPKITLIQNKMKVDEMVTVRDITLTSTCEHHFVTIDGKATVAYIPKDSVIGLSKINRIVQFFAQRPQVQERLTQQILLALQTLLGTNNVAVSIDAVHYCVKARGIRDATSATTTTSLGGLFKSSQNTRQEFLRAVRHHG

SEQ ID NO: 16695 - protein, 220 aa, Yersinia pestis; identical to SEQ ID NO: 16694
  misc_feature (1)..(220): tr|A0A3N4BRX1|A0A3N4BRX1_YERPE GTP cyclohydrolase 1 OS= Yersinia pestis OX=632 GN=folE PE=3 SV=1

SEQ ID NO: 16696 - protein, 220 aa, Yersinia pseudotuberculosis; identical to SEQ ID NO: 16694
  misc_feature (1)..(220): sp|B1JQJ4|GCH1_YERPY GTP cyclohydrolase 1 OS=Yersinia p seudotuberculosis serotype O:3 (strain YPIII) OX=502800 GN=folE PE=3 SV=1

SEQ ID NO: 16697 - protein, 220 aa, Yersinia pseudotuberculosis; identical to SEQ ID NO: 16694
  misc_feature (1)..(220): tr|A0A3G5KJU9|A0A3G5KJU9_YERPU GTP cyclohydrolase 1 OS= Yersinia pseudotuberculosis OX=633 GN=folE PE=3 SV=1

SEQ ID NO: 16698 - protein, 220 aa, Yersinia rohdei
  misc_feature (1)..(220): tr|A0A0U1HTQ8|A0A0U1HTQ8_YERRO GTP cyclohydrolase 1 OS= Yersinia rohdei OX=29485 GN=folE PE=3 SV=1
MSSLSKEAELVHEALLARGLETPLRKQELDAETRKTRIQEHMTQVMQLLNLDLSDDSLADTPRRIAKMYVDEIFSGLDYENFPKITLIENKMKVDEMVTVRDITLTSTCEHHFVTIDGKATVAYIPKDSVIGLSKVNRIVQFFAQRPQVQERLTQQILLALQTLLGTNNVAVSIDAVHYCVKARGIRDATSATTTTSLGGLFKSSQNTRQEFLRAVRHNS

SEQ ID NO: 16699 - protein, 220 aa, Yersinia ruckeri
  misc_feature (1)..(220): tr|A0A0A5FMF7|A0A0A5FMF7_YERRU GTP cyclohydrolase 1 OS= Yersinia ruckeri OX=29486 GN=folE PE=3 SV=1
MSSLSKEAILVHAALEARGLETPLRGQVLDSETRKQRIQAHMTEIMQLLNLDLSDDSLADTPRRIAKMYVDEIFSGLDYANFPKITVIENKMKVDEMVTVRDITLTSTCEHHFVTIDGKATVAYIPKDSVIGLSKINRIVQFFAQRPQVQERLTQQILLALQTLLGTSNVAVSIDAVHYCVKARGIRDATSATTTTSLGGLFKSSQNTRQEFLRAVRHSS

SEQ ID NO: 16700 - protein, 220 aa, Yersinia similis
  misc_feature (1)..(220): tr|A0A0T9NYT0|A0A0T9NYT0_9GAMM GTP cyclohydrolase 1 OS= Yersinia similis OX=367190 GN=folE PE=3 SV=1
MSSLSKEAELVHQALLARGLETPLRKQELDAETRKTRIQAHMTEVMHLLNLDLTDDSLADTPRRIAKMYVDEIFSGLDYENFPKITLIQNKMKVDEMVTVRDITLTSTCEHHFVTIDGKATVAYIPKDSVIGLSKINRIVQFFAQRPQVQERLTQQVLLALQTLLGTNNVAVSIDAVHYCVKARGIRDATSATTTTSLGGLFKSSQNTRQEFLRAVRHHG

SEQ ID NO: 16701 - protein, 220 aa, Yersinia wautersii; identical to SEQ ID NO: 16694
  misc_feature (1)..(220): tr|A0A0E8XD10|A0A0E8XD10_9GAMM GTP cyclohydrolase 1 OS= Yersinia wautersii OX=1341643 GN=folE PE=3 SV=1

SEQ ID NO: 16702 - protein, 220 aa, Yersiniaceae bacterium
  misc_feature (1)..(220): tr|A0A2N5ETR9|A0A2N5ETR9_9GAMM GTP cyclohydrolase 1 OS= Yersiniaceae bacterium 2016Iso3 OX=2060066 GN=folE PE=3 SV=1
MATLSKEAALVHEALMARGLETPLRPEPMLDRETRTRHIQEHMTSIMQLLNLDLTDDSLAETPLRIAKMYVEEIFSGLDYNNFPKITIIENKMKVDEMVTVRDITLTSTCEHHFVTIDGKATVAYIPKDGVIGLSKINRIVQFFAQRPQVQERLTQQILVALQTLLGTNNVAVSIDAVHYCVKARGIRDATSATTTTSLGGLFKSSQNTRQEFLRAVRHV

SEQ ID NO: 16703 - protein, 220 aa, Yersiniaceae bacterium
  misc_feature (1)..(220): tr|A0A2N5ECG7|A0A2N5ECG7_9GAMM GTP cyclohydrolase 1 OS= Yersiniaceae bacterium 2016Iso4 OX=2060068 GN=folE PE=3 SV=1
MATLSKEAALVHEALVARGLETPLRPEPMLDKETRTRHIQDHMTSIMQLLNLDLTDDSLAETPLRIAKMYVDEIFSGLDYNNFPKITIIENKMKVDEMVTVRDITLTSTCEHHFVTIDGKATVAYIPKDGVIGLSKINRIVQFFAQRPQVQERLTQQILVALQTLLGTNNVAVSIDAVHYCVKARGIRDATSATTTTSLGGLFKSSQNTRQEFLRAVRHV

SEQ ID NO: 16704 - protein, 197 aa, Yimella lutea
  misc_feature (1)..(197): tr|A0A542EDI3|A0A542EDI3_9MICO GTP cyclohydrolase 1 OS= Yimella lutea OX=587872 GN=folE PE=3 SV=1
MDALTRRAFDRDRAAAAVRELLIAVGEDPDRDGLVDTPMRVAKSFEEVFSGLDQDPAEVLSRTFEIDHDELIIVKDIELYSTCEHHLVPFHGVAHVGYIPAKDGRVTGLSKIARLVDVFAKRPQVQERLTTQIADAIITHLDAQGVLVVLECEHLCMSMRGVRKPGATTITSAVRGVLRDPATRSEAMSLMKASSHR

SEQ ID NO: 16705 - protein, 197 aa, Yimella sp.; identical to SEQ ID NO: 16704
  misc_feature (1)..(197): tr|A0A4Q3XIX3|A0A4Q3XIX3_9MICO GTP cyclohydrolase 1 OS= Yimella sp. RIT 621 OX=2510323 GN=folE PE=3 SV=1

SEQ ID NO: 16706 - protein, 222 aa, Yokenella regensburgei
  misc_feature (1)..(222): tr|G9ZA45|G9ZA45_9ENTR GTP cyclohydrolase 1 OS=Yokenell a regensburgei ATCC 43003 OX=1002368 GN=folE PE=3 SV=1
MSSLSKEAALVHEALVARGLETPLRPPVHEMDNETRKRLISGHMTEIMQLLNLDLSDDSLMETPHRIAKMYVDEIFSGLDYANFPKITVIENKMKVDEMVTVRDITLTSTCEHHFVTIDGKATVAYIPKDTVIGLSKINRIVQFFAQRPQVQERLTQQILTALQTLLGTNNVAVSIDAVHYCVKARGVRDATSATTTTSLGGLFKSSQNTRQEFLRAVRHHN

SEQ ID NO: 16707 - protein, 222 aa, Yokenella regensburgei; identical to SEQ ID NO: 16706
  misc_feature (1)..(222): tr|A0A2X2Q6Z3|A0A2X2Q6Z3_9ENTR GTP cyclohydrolase 1 OS= Yokenella regensburgei OX=158877 GN=folE PE=3 SV=1

SEQ ID NO: 16708 - protein, 194 aa, Yonghaparkia sp.
  misc_feature (1)..(194): tr|A0A0Q6RCS6|A0A0Q6RCS6_9MICO GTP cyclohydrolase 1 OS= Yonghaparkia sp. Root332 OX=1736516 GN=folE PE=3 SV=1
MAPIDIPRIEAAVAEILAAIGEDVERSGLATTPQRIAKAYGDFFAGVGVDPVPELQDGAEMATEPGERGELVLLRDIALRSMCEHHLLPFTGVAHVAYVPAERIIGLGRIPRLVEIVSARPQLQERLGEDVADALDRAIAPAGVLVVIEARHGCVAARGVRYAESTTVTVASRGSLADPVQRAEVMALIGRSGA

SEQ ID NO: 16709 - protein, 404 aa, Yoonia litorea
  misc_feature (1)..(404): tr|A0A1I6LMC5|A0A1I6LMC5_9RHOB GTP cyclohydrolase FolE2 OS=Yoonia litorea OX=1123755 GN=folE2 PE=3 SV=1
MTDPRSDLKRIYQEIVGKSDDDPHVMGVPDGKKGGAALNIHSPDMNREPTRAEAEAALALLRRWAHDVTPEEVATLDPLVSRLIPGQEISNYPALARAYPEDFEVDEIYKASMPDLQNGPSSLIRGAQQQIQHVGISNFRLPIRFHTRDNGDLTLETSVTGTVSLEAEKKGINMSRIMRTFYKHAEETFSFDVIERALDAYKSDLESFDARIQMRFSFPMKVESLRSGLSGYQYYDIALELVERDGVRKKIIHLDYVYSSTCPCSLELSEHARQFRGQLATPHSQRSVARISVLLEDGADLLWFEDLIDRARAAVPTETQVMVKREDEQAFAELNAANPIFVEDAARLFTEQLQLDERISDFRVIASHQESLHSHDAVSVLTEGETFASESLDPRLFQSLFHVG

SEQ ID NO: 16710 - protein, 403 aa, Yoonia maricola
  misc_feature (1)..(403): tr|A0A2M8WNA0|A0A2M8WNA0_9RHOB GTP cyclohydrolase FolE2 OS=Yoonia maricola OX=420999 GN=folE2 PE=3 SV=1
MNDPRAELQRIYKEIIGNSDARPHVAVSNALMGGPDMNIHSPDMDREPSREEAEAALALLRRWAGDVTAEEVATLDPLVSRLIPGQEVSNYPALARAYPEEFEVDDAYKASMPDLQNGPASLIRGAKQQIQHVGISNFRLPIRFHTRDNGDLTLETSVTGTVSLEAEKKGINMSRIMRTFYKHAEETFSFEVIEQALDAYKTDLESFDARIQMRFSFPMKVDSLRSGLAGYQYYDIALELVESAGVRKKIVHLDYVYSSTCPCSLELSEHARQFRGQLATPHSQRSVARISVLLEEGAEVLWFEDLIDRARAAVPTETQVMVKREDEQAFAELNAANPIFVEDAARLFTEQLQMDTRISDFRVIASHQESLHSHDAVSVLTEGETFAAESIDPRLFQSLFHIG

SEQ ID NO: 16711 - protein, 429 aa, Yoonia maritima
  misc_feature (1)..(429): tr|A0A2T0W213|A0A2T0W213_9RHOB GTP cyclohydrolase FolE2 OS=Yoonia maritima OX=1435347 GN=folE2 PE=3 SV=1
MIIALLSSYHRVMVIYVLATKVEASKMTDPTQDVLRIYQDMVKNAHANPHVVKGKHDAGGQEMNVHVADLDKAPTREDADAALAVLRRWATDVTAEEVATLDPLVSRLIPGQEVSNYPALARAYPDAFEVDDEYKASMPDLQNGPSSLIKGAKQQIQHVGISNFRLPIRFRTRDGDDIRLETSVTGSVSLDAEKKGINMSRIMRTFYKHAEETFSFDVIERALDAYKNDLESFDARIQMRFSFPMKVESLRSGLSGYQYYDIALELVESAGVRKKIMHLDYVYSSTCPCSLELSEHARQFRGQLATPHSQRSVARISVLLDEAGDCLWFEDLIDRARAAVSTETQVMVKREDEQAFAELNAANPIFVEDAVRLFTEQLQQDDRVSDFRVIASHQESLHSHDAVSVLTEGDTFASESLDPKLFSTLFHVG

SEQ ID NO: 16712 - protein, 403 aa, Yoonia rosea
  misc_feature (1)..(403): tr|A0A1R3WWM7|A0A1R3WWM7_9RHOB GTP cyclohydrolase FolE2 OS=Yoonia rosea OX=287098 GN=folE2 PE=3 SV=1
MTDPRADLQRIYKDIIGKSDAQPHVGVSIAPTGSTDMNIHSRDMDREPTRAEAEAALALLRRWAVDVTAEEVATLDPLVSRLIPGQEVSNYPALARAYPEDFEVDEAYKASMPDLQNGPSSLIRGAQQQIQHVGISNFRLPIRFHTRDNGDLTLETSVTGTVSLEAEKKGINMSRIMRTFYKHAGETFSFEVIEKALDAYKTDLESFDARIQMRFSFPMKVESLRSGLSGYQYYDIALELVESAGVRKKIVHLDYVYSSTCPCSLELSEHARQFRGQLATPHSQRSVARISVLLENGADVLWFEDLIDRARAAVPTETQVMVKREDEQAFAELNAANPIFVEDAARLFTEQLQLDTRISDFRVIASHQESLHSHDAVSVLTEGDTFAAESLDPRLFASLFHVG

SEQ ID NO: 16713 - protein, 367 aa, Yoonia sediminilitoris
  misc_feature (1)..(367): tr|A0A2T6KEL8|A0A2T6KEL8_9RHOB GTP cyclohydrolase FolE2 OS=Yoonia sediminilitoris OX=1286148 GN=folE2 PE=3 SV= 1
MNIHSPDMDREPTREEAEAALALLRRWADDVTAEEVATLDPLVSRLIPGQEVSNYPALARAYPDAFEVDDAYKATMPDLQNGPSSLIRGAQQQIQHVGISNFRLPIRFHTRDNGDLTLETSVTGTVSLEAEKKGINMSRIMRTFYKHAEETFSFDVIERALDAYKSDLESFDARIQMRFSFPMKVQSLRSGLEGYQYYDIALELVESAGVRKKIIHLDYVYSSTCPCSLELSEHARQFRGQLATPHSQRSVARISVLLDNEAGVLWFEDLIDRARAAVPTETQVMVKREDEQAFAELNAANPIFVEDAARLFTEQLQLDPRIADFRVIASHQESLHSHDAVSVLTEGETFATESIDPKLFASLFHVG

SEQ ID NO: 16714 - protein, 394 aa, Yoonia tamlensis
  misc_feature (1)..(394): tr|A0A1I6G1J3|A0A1I6G1J3_9RHOB GTP cyclohydrolase FolE2 OS=Yoonia tamlensis OX=390270 GN=folE2 PE=3 SV=1
MLGQTHMTKARKMTDVTKDVVLRYQAAIDAGQAGDADAPTRAQAEAALAVLRAWAGDVSAEEVATLDPLVARLIPGQEVSNYPALARAYPDAFEVDETYRATMPDLQNGPSSLIKGAMRQIQHVGISNFRLPIRFHTRDGDDLTLETSVTGTVSLDAEKKGINMSRIMRTFYKHAQETFSFEVIERAIDAYKADLDSFDARIQMRFSFPMQVESLRSGLSGYQYYDIALELVETGGVRKKIMHLDYVYSSTCPCSLELSEHARQFRGQLATPHSQRSVARISVLLAPHSNCLWFEDLIEAARAAVPTETQVMVKREDEQAFAELNAANPIFVEDAVRLFTENLQAEARITDFRVIASHQESLHSHDAVSVLTEGETFASESLDPKLFGTLFHVG

SEQ ID NO: 16715 - protein, 366 aa, Yoonia vestfoldensis
  misc_feature (1)..(366): tr|A0A1Y0ECL4|A0A1Y0ECL4_9RHOB GTP cyclohydrolase FolE2 OS=Yoonia vestfoldensis OX=245188 GN=folE2 PE=3 SV=1
MNIHARDMDRQPTRSDAEAALALLRRWAGDVTPEEVATLDPLVSRLIPGQEVSHYPALARAYPEDFAVDEAYKASMPDLQNGPSSLIRGAKQQIQHVGISNFRLPIRFRTRDNGDLTLETSVTGTVSLEAEKKGINMSRIMRTFYQHAEETFSFEVIERALDAYKSDLDSFDARIQMRFSFPMKVQSLRSGLAGYQYYDIALELVESAGVRKKIVHLDYVYSSTCPCSLELSEHARQFRGQLATPHSQRSVARISVLVEDGPILWFEDLIDRARAAVPTETQVMVKREDEQAFAELNAANPIFVEDAARLFTEQLQLEPLVSDFRVIASHQESLHSHDAVSVMTEGPTFAAESLDPRLFASLFHVG

SEQ ID NO: 16716 - protein, 414 aa, Yoonia vestfoldensis
  misc_feature (1)..(414): tr|A3V3U6|A3V3U6_9RHOB GTP cyclohydrolase FolE2 OS=Yoon ia vestfoldensis SKA53 OX=314232 GN=folE2 PE=3 SV=1
MGVAFCGKGDVGMSDLRADLLQFCRIMSGHAPQLRHLRKADAPQEGFDMNIHARDMDRQPTRSDAEAALALLRRWAGDVSPEEVATLDPLVSRLIPGQEVSNYPALARAYPEDFAVDEAYKASMPDLQNGPSSLIRGAKQQIQHVGISNFRLPIRFRTRDNGDLTLETSVTGTVSLEAEKKGINMSRIMRTFYKHAEETFSFEVIERALDAYKSDLDSFDARIQMRFSFPMKVQSLRSGLQGYQYYDIALELVESAGVRKKIVHLDYVYSSTCPCSLELSEHARQFRGQLATPHSQRSVARISVLVEDGPILWFEDLIERARAAVPTETQVMVKREDEQAFAELNAANPIFVEDAARLFTEQLQLEPRVSDFRVIASHQESLHSHDAVSVLTEGATFATESLDPRLFASLFHVG

SEQ ID NO: 16717 - protein, 207 aa, Youhaiella tibetensis
  misc_feature (1)..(207): tr|A0A5B9DQ35|A0A5B9DQ35_9RHIZ GTP cyclohydrolase 1 OS= Youhaiella tibetensis OX=1447062 GN=folE PE=3 SV=1
MDATFNASNVSALPGHENRRPTQQEAEDAVRTLIAWAGDDPTREGLLETPGRVARAYGEFFSGYGQNAADVLSKTFKDVGGYDDIVLLKDIPFHSHCEHHMVPFFGKAHIAYLPHDGVVGLSKLARLVDVFAKRLQTQENLTAQIIDAVNENLNPRGAAVMLEAEHMCMTMRGVHSHGVTTVTHRFTGVFAEEREERDRFFAFIGKR

SEQ ID NO: 16718 - protein, 188 aa, Youngiibacter fragilis
  misc_feature (1)..(188): tr|V7I3L4|V7I3L4_9CLOT GTP cyclohydrolase 1 OS=Youngiib acter fragilis 232.1 OX=994573 GN=folE PE=3 SV=1
MDKDRIENAVREILIGVGEDPDREGLQDTPRRIARMYEEIFSGIGENAEDHLQVYFQDEKYEELVLVKDIPFYSMCEHHLVPFFGVAHVAYIPKSGRLTGLSKLARVVETVSKRPQLQERLTAEVADIIMKKLEPYGAIVVIEAEHMCMTMRGVKKPGSKTVTSAIRGIFNKDSKSRAEVLSMINKGN

SEQ ID NO: 16719 - protein, 365 aa, Youngimonas vesicularis
  misc_feature (1)..(365): tr|A0A4S3MAP6|A0A4S3MAP6_9RHOB GTP cyclohydrolase FolE2 OS=Youngimonas vesicularis OX=1294297 GN=folE2 PE=3 SV =1
MNFHSSDMNRELTREEAAEALARLRAWARGASEAEIADLDPAVARLLPGEASDYPVLSRQYPADFTVDAAYKAGLPDLQNGPTSLIRGAKRQIQHVGISNFRLPIRFHTRDNGDLTLETSVTGTVSLEAEKKGINMSRIMRSFYKHAEKTFSFEVIEAALDDYKSDLESFDARIQMRFSYPVKVESLRSGLMGYQYYDIALELVETDGVRKKLMHLDYVYSSTCPCSLELSEHARMTRGQLATPHSQRSVARISLEVAAGDCLWFEDVIEMARAAVPTETQVMVKREDEQAFAELNAANPIFVEDAARLFCEQLHKDPRVGDFRIVASHQESLHSHDAVSVLVEGETFAGQSIDPRLFSTLFHVG

SEQ ID NO: 16720 - protein, 198 aa, Yuhushiella deserti
  misc_feature (1)..(198): tr|A0A1I5R6F7|A0A1I5R6F7_9PSEU GTP cyclohydrolase 1 OS= Yuhushiella deserti OX=587909 GN=folE PE=3 SV=1
MISARATGRIFDQARAEKAVRELLLACGEDPDRDGLRDTPGRVARAYREMFAGLYEEPDSVLDRTFDECHEELVLVTDIPMFSVCEHHLLSFHGVAHIGYIPNDEGKVTGLSKLARLVDLYARRPQVQERLTSQVADALMRKLRPRGVIVVVEAEHLCMAMRGIRKPGARTTTSAVRGLLQTSASSRAEALDLIKGRR

SEQ ID NO: 16721 - protein, 212 aa, Yuhushiella deserti
  misc_feature (1)..(212): tr|A0A1I5SPC9|A0A1I5SPC9_9PSEU GTP cyclohydrolase 1 OS= Yuhushiella deserti OX=587909 GN=folE PE=3 SV=1
MTSLAESGPGSAPGPVEAARLRVVHERDGVDLAAAERAVADLLVALGRDPDSEHLAETPRRVAASYAELLTPPEFDLTTFPNDEGYDELVLAKDIPVRSVCEHHMLPFHGVAHVGYLPGERILGLSKLARVVELFARDLQVQERLTTQVARWLRERLSPKGVGVVVEAEHLCMSLRGVRAGGSRTVTSALHGVLREDGRSRQEFFALAGVGR

SEQ ID NO: 16722 - protein, 227 aa, Zavarzinia compransoris
  misc_feature (1)..(227): tr|A0A317EA92|A0A317EA92_9PROT GTP cyclohydrolase 1 OS= Zavarzinia compransoris OX=1264899 GN=folE PE=3 SV=1
MTITPTLKLGDDKAGAKARGRESNLVLGKARTDRPSREEAESAIRTLLLWAGDDPDREGLVDTPARVARAYEEFFAGYDADPVEMLNRTFEEVEGYDEMIVLKDIRLESHCEHHMVPIIGKAHVAYLPKNRVVGISKLARVVDAYAKRFQVQEKLTAQIANSIDEVLQPRGVAVVIEAQHQCMTTRGVHKPGVSMVTSRMLGAFRHDPLTRREFLTIIGNPASSVGA

SEQ ID NO: 16723 - protein, 227 aa, Zavarzinia sp.
  misc_feature (1)..(227): tr|A0A317E719|A0A317E719_9PROT GTP cyclohydrolase 1 OS= Zavarzinia sp. HR-AS OX=2211142 GN=folE PE=3 SV=1
MKLPGAAKDAKPGNTKAGGGRESNLILGKARTDRPTREEAESAIRTLLLWAGDDPDREGLVDTPARVARAYEEFFAGYDADPVEMLNRTFEEVEGYDEMIVLKDIRLESHCEHHMVPIIGKAHIAYLPKNRVVGISKLARVVDAYAKRFQVQEKMTAQIANSIEDVLQPRGVAVVIEAQHQCMTTRGVHKPGVSMVTSRMLGAFRHDPLTRREFLTIIGNPASSVGA

SEQ ID NO: 16724 - protein, 207 aa, Zeaxanthinibacter enoshimensis
  misc_feature (1)..(207): tr|A0A4R6TPF8|A0A4R6TPF8_9FLAO GTP cyclohydrolase 1 OS= Zeaxanthinibacter enoshimensis OX=392009 GN=folE PE=3 S V=1
MTETEILTMGPYRSLEEYNIELTNEVRSHFQQIITDLGEDVDREGLIKTPERAAKAMMFLTQGYKQDAEEILRSAMFAEDYDDMVIIKDIELYSLCEHHMLPFFGKAHIAYIPNGHIVGLSKVPRIVDVFARRLQVQERLTHDILECINNTLQPKGVAVVIEASHMCMMMRGVQKQNSVTTTSGFRGQFQKIETRNEFLKLISSDLS

SEQ ID NO: 16725 - protein, 226 aa, Zeaxanthinibacter enoshimensis
  misc_feature (1)..(226): tr|A0A4R6TFL9|A0A4R6TFL9_9FLAO GTP cyclohydrolase 1 OS= Zeaxanthinibacter enoshimensis OX=392009 GN=folE PE=3 S V=1
MKIESQLEEQLESMGDDHESSTGETPLRKDAFDLSDEEKISKIQENVRQIMETLGLDLTDDSLRGTPLRVAKMYVQEVFGGLHPKRKPKASTFENKYKYGEMLVEKNITVYSTCEHHLLPIVGKAHIAYISNGTVVGLSKMNRIVDYFAKRPQVQERMNKQVVKALQEVLGTEDVACVIDAKHLCVNSRGIRDVECSTVTAEYGGKFKEDATRREFLDYINLDTNF

SEQ ID NO: 16726 - protein, 198 aa, Zetaproteobacteria bacterium
  misc_feature (1)..(198): tr|A0A2A5EMB9|A0A2A5EMB9_9PROT GTP cyclohydrolase 1 OS= Zetaproteobacteria bacterium OX=2026807 GN=folE PE=3 SV =1
MLRDIDLTDPKNVEAMKHVRGLLTYMGENPEREGLLETPARVLSAMHEHFKGYQEDPKEHLLKTFEEVEGYDEVVLVSDIDLHSHCEHHLVPFVGKAHVAYIPDGRVVGLSKLARVVDGYSKRLQVQEKLTMQIAQAIEEVLQPSGVAVIIQCQHFCMCHRGVHKPNTWTTTSKLTGAFLNNPSSRSELFQLIDMNKR

SEQ ID NO: 16727 - protein, 204 aa, Zetaproteobacteria bacterium
  misc_feature (1)..(204): tr|A0A2A5GZT2|A0A2A5GZT2_9PROT GTP cyclohydrolase 1 OS= Zetaproteobacteria bacterium OX=2026807 GN=folE PE=3 SV =1
MVSKMSVQDMVTQDNRPSREEAMKAVETLLRWAGEDPSREGLLETPKRVVKSYEEFFSGYGKDAPAELQKIFEDIEGFDDMVLVKDIDFVSHCEHHLVPILGKAHVAYWPDRKVVGISKLARIVDIYGRRLVSQENMTRNILRCIDDTLKPKGVAVYIDANHQCMSTRGVNKSASSTVTSMFCGIFKEDRDVQRRFLDMIQYSR

SEQ ID NO: 16728 - protein, 213 aa, Zhengella mangrovi
  misc_feature (1)..(213): tr|A0A2G1QR31|A0A2G1QR31_9RHIZ GTP cyclohydrolase 1 OS= Zhengella mangrovi OX=1982044 GN=folE PE=3 SV=1
MDAIVTNISSLTDTIKTDTMEDRPSREEAEAAVRTLLRWVGDNPDREGLLDTPARVVKAYEEMFSGYGANAAEELGRTFEEVAGYDDMVIVRDIQFHSHCEHHMVPIIGRAHVGYLPDGKVLGLSKIARVVHIFARRLQTQEAMTAQIAATIQDVLNPRGVAVLIEAEHMCMAMRGIRQQGSTTTTSTFTGAFRDNPEEQVRFFTLARDMGRR

SEQ ID NO: 16729 - protein, 197 aa, Zhihengliuella halotolerans
  misc_feature (1)..(197): tr|A0A4Q8AG15|A0A4Q8AG15_9MICC GTP cyclohydrolase 1 OS= Zhihengliuella halotolerans OX=370736 GN=folE PE=3 SV=1
MNQTPPAEGFQVDQSRIRAAVREILEAVGEDPDRDGLQDTPARVAKAYAEFFSGLHGEPGEILGTTFDIDHSELVLVKDIPFYSTCEHHLVPFHGAAHVGYIPGDDGHVTGLSKLARLVDLYARRPQVQERLTTQIAEALCEHLDPRGVIVVVECEHMCMSMRGVQKPGARTVTSAVRGQLRETATRAEAMSLILGK

SEQ ID NO: 16730 - protein, 182 aa, Zhongshania aliphaticivorans
  misc_feature (1)..(182): tr|A0A127M5V1|A0A127M5V1_9GAMM GTP cyclohydrolase 1 OS= Zhongshania aliphaticivorans OX=1470434 GN=folE PE=3 SV =1
MEKAFADIIKKIGEDPTRDGLLDTPARAAKAFEFLTEGYRRSVKDVVNDALFDSDCNEMVVVSDIELYSLCEHHLLPFIGKCHVAYIPSGKVLGLSKVARIVDLYARRLQIQEGLTTQIAKTIMDVTGSEGVGVIIEARHMCMMMRGVEKQNSIMRTSAMLGVFKDNNATRTEFLSLINRPA

SEQ ID NO: 16731 - protein, 180 aa, Zhongshania sp.
  misc_feature (1)..(180): tr|A0A3N0CVW4|A0A3N0CVW4_9GAMM GTP cyclohydrolase 1 OS= Zhongshania sp. DSW25-10 OX=2304603 GN=folE PE=3 SV=1
MEKAFADIIKKIGEDPTRDGLLDTPARAAKAFEFLTEGYRRNVKDVVNDALFESDCNEMVVVSDIELYSLCEHHLLPFIGKCHVAYIPQGKVLGLSKVARIVDLYARRLQIQEGLTTQIANTMMEVTGAEGVGVIIEARHMCMMMRGVEKQNSVMRTSAMLGAFKDNQATRTEFLSLINM

SEQ ID NO: 16732 - protein, 180 aa, Zhongshania sp.; identical to SEQ ID NO: 16731
  misc_feature (1)..(180): tr|A0A2S4HEN7|A0A2S4HEN7_9GAMM GTP cyclohydrolase 1 OS= Zhongshania sp. ZX-21 OX=2067667 GN=folE PE=3 SV=1

SEQ ID NO: 16733 - protein, 226 aa, Zhouia amylolytica
  misc_feature (1)..(226): tr|A0A1I6RKM2|A0A1I6RKM2_9FLAO GTP cyclohydrolase 1 OS= Zhouia amylolytica OX=376730 GN=folE PE=3 SV=1
MKIDKALEEQYEEFGNEHAMSSAETPLRDDAFDLSDSEKIERIEQDVYSIMETLGLDLTDDSLRGTPRRVAKMFVQEIFGGLHPQKKPNASTFENKYKYGEMLVEKNITVYSTCEHHLLPIVGRAHVGYISNGKVVGLSKMNRIVDYFAKRPQVQERMTMQIVQELQKVLNTKDVACVVDAKHLCVNSRGIRDIESSTVTAEFGGKFKDPAVRREFLDYIKLDTEF

SEQ ID NO: 16734 - protein, 198 aa, Zhouia amylolytica
  misc_feature (1)..(198): tr|W2UN80|W2UN80_9FLAO GTP cyclohydrolase 1 OS=Zhouia a mylolytica AD3 OX=1286632 GN=folE PE=3 SV=1
MPYKNIEEYNIKITDEVRERYKHIIEELGEDTAREGLVKTPERAAKAMMFLTQGYHQDAKAILESAMFSENYNEMIIIKDIEVYSLCEHHMLPFFGKAHIAYIPNGKIVGLSKIPKVVDVFARRLQVQERLTKEILESIDDALRPQGVAVVIEAAHLCMMMRGVQKQNSVTTTSGFKGQFEKNETRNEFLKLISSDLR

SEQ ID NO: 16735 - protein, 218 aa, Zobellella denitrificans
  misc_feature (1)..(218): tr|A0A231MVE6|A0A231MVE6_9GAMM GTP cyclohydrolase 1 OS= Zobellella denitrificans OX=347534 GN=folE PE=3 SV=1
MTALSDAAIRVRSALEARGLETPMRGNNLTLEEKQSRITGLMTEMMDVLGLDLEDDSLAETPERIAKMYVREIFSGLDYAHFPKITLIDNKMKVDEMVQVRDITLTSTCEHHFVTIDGTATVAYIPRGKVIGLSKINRIVQFFARRPQVQERLNQQILVALQTLLESDDVAVSITATHYCVKARGVMDATSTTTTTSLGGIFKSRPDTRQEFLSGVVR

SEQ ID NO: 16736 - protein, 218 aa, Zobellella endophytica
  misc_feature (1)..(218): tr|A0A2P7RD52|A0A2P7RD52_9GAMM GTP cyclohydrolase 1 OS= Zobellella endophytica OX=2116700 GN=folE PE=3 SV=1
MTTLSDAAIRVRSALEARGLETPMRSNDLTPDEKQTRIAGLMTEMMDVLGLDLEDDSLAETPERIAKMYVREIFSGLDYAHFPKITLIDNKMKVDEMVQVRDITLTSTCEHHFVTIDGTATVAYIPRGKVIGLSKINRIVQFFARRPQVQERLNQQVLVALQTLLESEDVAVSITATHYCVKARGVMDATSSTTTTSLGGIFKSRPATRQEFLSGAVR

SEQ ID NO: 16737 - protein, 218 aa, Zobellella taiwanensis
  misc_feature (1)..(218): tr|A0A2P7QHT9|A0A2P7QHT9_9GAMM GTP cyclohydrolase 1 OS= Zobellella taiwanensis OX=347535 GN=folE PE=3 SV=1
MTALSDAAIRVRSALEARGLETPMRGNTLTLDQKQARITGLMTEMMDVLGLDLDDDSLAETPQRIAKMYVREIFSGLDYAHFPKITLIDNKMKVDEMVQVRDITLTSTCEHHFVTIDGSATVAYIPRGKVIGLSKINRIVQFFARRPQVQERLTQQVLVALQTLLESDDVAVSITATHYCVKARGVMDATSTTTTTSLGGIFKSRPDTRQEFLGGVVR

SEQ ID NO: 16738 - protein, 221 aa, Zobellia galactanivorans
  misc_feature (1)..(221): tr|G0L3M0|G0L3M0_ZOBGA GTP cyclohydrolase 1 OS=Zobellia galactanivorans (strain DSM 12802 / CCUG 47099 / CIP 1 06680 / NCIMB 13871 / Dsij) OX=63186 GN=folE PE=3 SV=1
MKDKEQIEIVGDNHFSANIETPLRADAFEKSDIEKIKNIQHHFKMIMQEMGLDLTDDSLSGTPFRFAKMYVKELFYGLNPVNKPKLSTFENKYGYKKMLVEHNITIDSTCEHHFLPIVGHAHIGYVPTKKVIGLSKINRLVDYYSHRPQVQERLALQILNDLQNVLETKDVIVVINAKHLCVSSRGIKDKNSFTTTLEYGGCFLSKSTRKEFLNIINQQAL

SEQ ID NO: 16739 - protein, 226 aa, Zobellia galactanivorans
  misc_feature (1)..(226): tr|G0L6G3|G0L6G3_ZOBGA GTP cyclohydrolase 1 OS=Zobellia galactanivorans (strain DSM 12802 / CCUG 47099 / CIP 1 06680 / NCIMB 13871 / Dsij) OX=63186 GN=folE PE=3 SV=1
MKIDSTLEKQFEDMGNDHVSASEDTPLREDAFVLSDDEKIKRIQGSIREVMLTLGLDLDDDSLKGTPNRVAKMFVKEIFGGLHPDRKPKSSTFSNKYKYGEMLVEKNITLYSTCEHHLLPIVGRAHIAYISNGTVVGLSKMNRVVDYFAKRPQVQERLTIQVVRELQNVLGTEDVACVIDAKHLCVNSRGIRDIESSTVTAEYGGKFKNEAVRREFLDYLNLDTTF

SEQ ID NO: 16740 - protein, 199 aa, Zobellia uliginosa
  misc_feature (1)..(199): tr|A0A1N7LMH7|A0A1N7LMH7_9FLAO GTP cyclohydrolase 1 OS= Zobellia uliginosa OX=143224 GN=folE PE=3 SV=1
MAPYRNLEEYDLEITSEVKDRFSKIIDGIGEDVTREGLVKTPERAAKAMLFLTQGYQQDAVEILEGAMFKEDYDDMVIIKDIELYSLCEHHMLPFFGKAHVAYIPNGHIVGLSKIPRVVDVFARRLQVQERLTHDILECINNTLKPKGVAVVIEASHMCMMMRGVQKQNSVTTTSGFRGQFEKIETRNEFLKLISSDLS

SEQ ID NO: 16741 - protein, 217 aa, Zobellia uliginosa
  misc_feature (1)..(217): tr|A0A1N7JCB1|A0A1N7JCB1_9FLAO GTP cyclohydrolase 1 OS= Zobellia uliginosa OX=143224 GN=folE PE=3 SV=1
MDKYKIETLGDNHISTSVQTPLRPDAFEKSDKEKIKNIQSYFSKIMEELGLDLTDDSLSGTPYRFAKMYVEELFYGLDPKNKPKISVFDNKYGYDKMLVEQNITINSSCEHHFLPITGKAHIGYIPKNKVVGLSKINRLVDYYAHRPQVQERLSLQILRDLQNTLETDDVIVVISAEHLCVSSRGIKDSNSFTTTIEYGGRFENERIKSDFLKLIGS

SEQ ID NO: 16742 - protein, 269 aa, Zoogloea ramigera
  misc_feature (1)..(269): tr|A0A4Y4CTB6|A0A4Y4CTB6_ZOORA GTP cyclohydrolase FolE2 OS=Zoogloea ramigera OX=350 GN=folE2 PE=3 SV=1
MTTCAATTVIPDVQNSEDSRQIAINKVGIKSIRHPIKVRDKQAGVQHTIALFNMYVGLPHNFKGTHMSRFVEILNSHDREISVESFEPMLREMVRKLEAETGHIEMSFPYFINKAAPVSGVQSLLDYEVTFIGTISAGGKYEFTMKVVVPVTSLCPCSKKISAYGAHNQRSHVTVTTVTNSYLWIEELVQMIEEQGSCELYGLLKRPDEKYVTERAYDNPKFVEDMVRDVAGVMNREARIDAYVVESENFESIHNHSAYALIEHDKRSA

SEQ ID NO: 16743 - protein, 266 aa, Zoogloea sp.
  misc_feature (1)..(266): tr|A0A5C7KB97|A0A5C7KB97_9RHOO GTP cyclohydrolase FolE2 OS=Zoogloea sp. OX=49181 GN=folE2 PE=3 SV=1
MNAPEKLHLPDVQASEDLRQLAIQRVGVRGLRYPLRFLDRDGQIQHTVATLEMTVFLPPEVKGTHMSRFVEVLEADRAALDLEGLRGMICETLIHLGATAGRMEMCFPFFMRKRAPVSGVESLLDLDATVTVEKAFGRDAELSIKVVVPVTSLCPCSKKISDYGAHNQRSHLTLSVLLREDMSLEELVRIAEEEASCEIFGLLKRPDEKWVTERAYDNPKFVEDLVRDVALRLRAEPRIAAWTVESENFESIHNHSAYALMEGRNN

SEQ ID NO: 16744 - protein, 269 aa, Zoogloea sp.
  misc_feature (1)..(269): tr|A0A5C7KC29|A0A5C7KC29_9RHOO GTP cyclohydrolase FolE2 OS=Zoogloea sp. OX=49181 GN=folE2 PE=3 SV=1
MTTCEAPTPIPDVQNSADSRQLAINKVGIKAIRHPIRVQDKNGGVQHTIAVFNMYVGLPHNFKGTHMSRFVEILNSHEREISVESFEPMLREMVRKLEAETGHVEMTFPYFINKAAPVSGVQSLMDYEVTFIGEISEGGAYEFTMRIVVPVTSLCPCSKKISEYGAHNQRSHVTVTTTTNDHLWIEELVQLVEGQASCELYGLLKRPDEKYVTERAYDNPKFVEDMVRDVAGCLNKEVRIDAYTVESENFESIHNHSAYALIEHDKRAS

SEQ ID NO: 16745 - protein, 266 aa, Zoogloeaceae bacteirum
  misc_feature (1)..(266): tr|A0A2S0QY37|A0A2S0QY37_9RHOO GTP cyclohydrolase FolE2 OS=Zoogloeaceae bacteirum Par-f-2 OX=2080469 GN=folE2 PE=3 SV=1
MNAPESIFLPDIQSIRDHRALAIEQVGICGLRYPLTWRGADGTVVATVATLALSVGLPAEQKGTHMSRFVELVEAKRDALDLSGLRTLFADMLARLGATSGRLEAAFPWFIRKRAPVSGVESLLDIDAALRVEQPPGGRPQTTMRVVVPVTSLCPCSKEISAYGAHNQRSQITLEVVLREDMSFEELVRIAEEEASCELFGLLKRPDEKWVTERAYDNPKFVEDLVRDIALRLRAEPRIAAWQVASENFESIHNHSAWATISGANG

SEQ ID NO: 16746 - protein, 269 aa, Zoogloeaceae bacteirum
  misc_feature (1)..(269): tr|A0A2U3TLD2|A0A2U3TLD2_9RHOO GTP cyclohydrolase FolE2 OS=Zoogloeaceae bacteirum Par-f-2 OX=2080469 GN=folE2 PE=3 SV=1
MKPVEAHAIPDVQNSADTRRIAINKVGIKSIRHPVRVSDKNGGVQHTVALFNMYVGLPHNFKGTHMSRFIEILNGNEREISVESFEPMLREMVKRLEAETGHIEMTFPYFINKSAPVSGVQSLMDYEVTFTGEIREGGQYEFTMRVVVPVTSLCPCSKKISDYGAHNQRSHVTVTATTNAHLWIEELVQLVESQASCELYGLLKRPDEKFVTERAYDNPKFVEDMVRDVAGLLNAEPRIDAYIVESENFESIHNHSAYALIERDKRQHC

SEQ ID NO: 16747 - protein, 191 aa, Zooshikella ganghwensis
  misc_feature (1)..(191): tr|A0A4P9VLL7|A0A4P9VLL7_9GAMM GTP cyclohydrolase 1 OS= Zooshikella ganghwensis OX=202772 GN=folE PE=3 SV=1
MSNENVQTVLAENFRTIISSLGENPDREGLLDTPKRAAKAMQFLTQGYHQDLESIVNGAIFESDNEEMVLVKNIELYSLCEHHLLPFIGKCHVAYLPAGKVIGLSKIARVVDMFARRLQIQENLTSQIAKAVESVTGARGVGVIIEAKHMCMMMRGVEKQNSVMSTSVMLGDMRKSQATRQEFLMLAKQQN

SEQ ID NO: 16748 - protein, 225 aa, Zunongwangia atlantica
  misc_feature (1)..(225): tr|A0A1Y1T5F7|A0A1Y1T5F7_9FLAO GTP cyclohydrolase 1 OS= Zunongwangia atlantica 22II14-10F7 OX=1185767 GN=folE P E=3 SV=1
MKIDKVLNEIDEMGDAHAGSSAETPIRKDAFEVSDTDKIALIRENVEHIMQTLGLDLSDDSLKGTPQRVAKMFVNEIFSGLDPKRKPKASVFDNKYKYGEMLVEKNITVYSTCEHHLLPIVGKAHVAYISKGTVVGLSKMNRIVDYYAKRPQVQERMTMQIVQELQKVLGTDDVACVVDAKHLCVNSRGIRDIESSTVTSEFGGAFKQKEVRREFLDYIKLDTTF

SEQ ID NO: 16749 - protein, 198 aa, Zunongwangia atlantica
  misc_feature (1)..(198): tr|A0A1Y1T1V0|A0A1Y1T1V0_9FLAO GTP cyclohydrolase 1 OS= Zunongwangia atlantica 22II14-10F7 OX=1185767 GN=folE P E=3 SV=1
MAYQSFEEYSIEVTNSLKDNYKSIITELGEDPDREGVLKTPERAAKAMQFLTQGYELDAEKILKKAMFKEDYDEMVVVKNIELYSLCEHHMLPFFGKAHIAYIPNGQIVGLSKLPRIVDVFARRLQVQERLTHDILECLNNVLKPQGVAVVIEAQHMCMMMRGVQKQNSTTTTSGFRGQFEKIETRNEFLKLISSDLS

SEQ ID NO: 16750 - protein, 225 aa, Zunongwangia mangrovi
  misc_feature (1)..(225): tr|A0A1I1K0U6|A0A1I1K0U6_9FLAO GTP cyclohydrolase 1 OS= Zunongwangia mangrovi OX=1334022 GN=folE PE=3 SV=1
MKIDKVLNEIDEMGDAHAGSSAETPIRKDAFEVSDTDKIALIREDVEHIMQTLGLDLSDDSLKGTPQRVAKMFVNEIFSGLDPKRKPKASVFDNKYKYGEMLVEKNITVYSTCEHHLLPIVGKAHVAYISNGTVVGLSKMNRIVDYYAKRPQVQERMTMQIVQELQKVLGTDDVACVVDAKHLCVNSRGIRDIESSTVTSEFGGAFKKKEVRREFLDYIKLDTTF

SEQ ID NO: 16751 - protein, 198 aa, Zunongwangia mangrovi
  misc_feature (1)..(198): tr|A0A1I1LEI5|A0A1I1LEI5_9FLAO GTP cyclohydrolase 1 OS= Zunongwangia mangrovi OX=1334022 GN=folE PE=3 SV=1
MAYQSFEEYSIEVTSSLKDNYKSIITELGEDPDREGVLKTPERAAKAMQFLTQGYELDAEKILKKAMFKEDYDEMVVVKNIELYSLCEHHMLPFFGKAHIAYIPNGHIVGLSKLPRIVDVFARRLQVQERLTHDILECLNNTLKPQGVAVVIEAQHMCMMMRGVQKQNSTTTTSGFRGQFEKIETRNEFLKLISSDLS

SEQ ID NO: 16752 - protein, 225 aa, Zunongwangia profunda
  misc_feature (1)..(225): tr|A0A3D5IYF2|A0A3D5IYF2_9FLAO GTP cyclohydrolase 1 OS= Zunongwangia profunda OX=398743 GN=folE PE=3 SV=1
MKIDKVLNEIDEMGDAHAGSSAETPIRKDAFEVSDTDKIALIREDVERIMQTLGLDLTDDSLKGTPQRVAKMFVNEIFSGLDPKRKPKASVFDNKYKYGEMLVEKNITVYSTCEHHLLPIVGKAHVAYISNGTVVGLSKMNRIVDYYAKRPQVQERMTMQIVQELQQVLGTEDVACVVDAKHLCVNSRGIRDIESSTVTSEFGGAFKQKEVRREFLDYIKLDTTF

SEQ ID NO: 16753 - protein, 198 aa, Zunongwangia profunda
  misc_feature (1)..(198): tr|A0A3D5J2W9|A0A3D5J2W9_9FLAO GTP cyclohydrolase 1 OS= Zunongwangia profunda OX=398743 GN=folE PE=3 SV=1
MAYQSFEEYSIEVTDSLKDNYKKIITELGENPDREGVLKTPERAAKAMQFLTQGYELDAEKILKKAMFKEDYDEMVVVKNIELYSLCEHHMLPFFGKAHIAYIPNGHIVGLSKLPRVVDVFARRLQVQERLTHDILECLNKTLQPQGVAVVIEAQHMCMMMRGVQKQNSTTTTSGFRGQFEKIETRNEFLKLISSDLS

SEQ ID NO: 16754 - protein, 225 aa, Zunongwangia sp.; identical to SEQ ID NO: 16752
  misc_feature (1)..(225): tr|A0A2E0P304|A0A2E0P304_9FLAO GTP cyclohydrolase 1 OS= Zunongwangia sp. OX=1965325 GN=folE PE=3 SV=1

SEQ ID NO: 16755 - protein, 198 aa, Zunongwangia sp.; identical to SEQ ID NO: 16753
  misc_feature (1)..(198): tr|A0A2E0P431|A0A2E0P431_9FLAO GTP cyclohydrolase 1 OS= Zunongwangia sp. OX=1965325 GN=folE PE=3 SV=1

SEQ ID NO: 16756 - protein, 191 aa, Zymobacter palmae
  misc_feature (1)..(191): tr|A0A348HES9|A0A348HES9_9GAMM GTP cyclohydrolase 1 OS= Zymobacter palmae OX=33074 GN=folE PE=3 SV=1
MSDTDNKTTTDALTDYYRDVITLLGEDVEREGLVDTPSRAAKAMQFLTHGYGLSLEEVVNGAVFTSESDEMVLVKDIELYSLCEHHILPFIGRCHIAYLPNGKVLGLSKFARIVDMYARRLQIQEQLTLQIAQAVEEVTGAKGVAVVIEARHMCMMMRGVQKQNSSMTTSVMRGGFRENHRTRQEFLSLIK

SEQ ID NO: 16757 - protein, 201 aa, Zymomonas mobilis
  misc_feature (1)..(201): tr|A0A2R9NT41|A0A2R9NT41_ZYMMB GTP cyclohydrolase 1 OS= Zymomonas mobilis subsp. mobilis NRRL B-12526 OX=119442 4 GN=folE PE=3 SV=1
MEEIQDLAVMRPDQVNVPEEIQEAIRSLIRWAGDDPDREGLIDTPKRVAKAWKYYCRGYREDPENHLKTVFEEVGGYDDIVLLKDIPFYSHCEHHMAPIMGHAHIAYLPDKKVVGLSKLARVLKGYAHRLQIQERLTAQVADCIWNNLRPRGVAVVISAVHSCMAARGVETPNVQTVTKTLRGIYSEDPEQAKMILNLMGV

SEQ ID NO: 16758 - protein, 201 aa, Zymomonas mobilis
  misc_feature (1)..(201): tr|F8ET93|F8ET93_ZYMMT GTP cyclohydrolase 1 OS=Zymomona s mobilis subsp. pomaceae (strain ATCC 29192 / JCM 1019 1 / NBRC 13757 / NCIMB 11200 / NRRL B-4491) OX=579138 G N=folE PE=3 SV=1
MKDKQDLATLHPDQNVPEEIQEAIRSLIRWVGDDPEREGLLDTPKRVAKAWKAYCRGYQENPVDHLGTVFEEVGGYDDLVLLKDIPFYSHCEHHMAPIIGHAHIAYLPDKRVVGISKLARVLKGYAQRLQIQERLTTEVADCIWNGLHPHGVAVVIAATHSCMSARGVETPGVLTVTKTMRGVFKTDIERQKIVLGLMGVS

SEQ ID NO: 16759 - protein, 368 aa, Celeribacter marinus; identical to SEQ ID NO: 6476
  misc_feature (1)..(368): tr|A0A0P0A6T5|A0A0P0A6T5_9RHOB GTP cyclohydrolase FolE2 OS=Celeribacter marinus OX=1397108 GN=folE2 PE=3 SV=1

SEQ ID NO: 16760 - protein, 222 aa, Escherichia coli; identical to SEQ ID NO: 7955
  misc_feature (1)..(222): sp|P0A6T7|GCH1_ECO57 GTP cyclohydrolase 1 OS=Escherichi a coli O157:H7 OX=83334 GN=folE PE=3 SV=2

SEQ ID NO: 16761 - protein, 311 aa, Escherichia coli; identical to SEQ ID NO: 9382
  misc_feature (1)..(311): tr|C0J1H8|C0J1H8_ECOLX GTP cyclohydrolase FolE2 OS=Esch erichia coli OX=562 GN=folE2 PE=3 SV=1

SEQ ID NO: 16762 - protein, 179 aa, Escherichia coli
  misc_feature (1)..(179): tr|A0A376SHM3|A0A376SHM3_ECOLX GTP cyclohydrolase 1 OS= Escherichia coli OX=562 GN=folE_2 PE=3 SV=1
MTEIMQLLNLDLADDSLMETPHRIAKMYVDEIFSGLDYANFPKITLIENKMKVDEMVTVRDITLTSTCEHHFVTIDGKATVAYIPKDSVIGLSKINRIVQFFAQRPQVQERLTQQILIALQTLLGTNNVAVSIDAVHYCVKARGIRDATSATTTTSLGGLFKSSQNTRHEFLRAVRHHN

SEQ ID NO: 16763 - protein, 290 aa, Abditibacterium utsteinense
  misc_feature (1)..(290): tr|A0A2S8SXA5|A0A2S8SXA5_9BACT 6-pyruvoyltetrahydropter in/6-carboxytetrahydropterin synthase OS=Abditibacteriu m utsteinense OX=1960156 GN=B1R32_101138 PE=4 SV=1
MSSAKNQELERAPRVLLSRRSFFSCGRRLRHPDWNPARNREIFGRDVGPHGHEYTLDCAFSGPISTSDGMIVNITDLKPILESAIAPLNGAFLPENSVSELQFFAHNRPTAENIALWLWQTLPHNVAQGTLFRLQLRESRRTLVEITAAFPSQKMKISRSYEFAAAHRLAAPQLSDDENFARFDKCSNLAGHGHNFGLDVFVEGNPDAETGFIINPILLDKIVDEEIFERFDHKHLNVDCPEFRDLIPTTENLSQTIFEILRVRLESEGFKLAKIGLHETQKNYFEVEAQ

SEQ ID NO: 16764 - protein, 278 aa, Abyssibacter profundi
  misc_feature (1)..(278): tr|A0A363UM05|A0A363UM05_9GAMM 6-pyruvoyl tetrahydropte rin reductase OS=Abyssibacter profundi OX=2182787 GN=DE H80_06340 PE=4 SV=1
MATLFVEQLANLDFALLDPERGLVGETYLMDLELSGELDAQGMVLDFGRVKREVRAAAEALVDHKLLIPAAHPALDIQPGQVVLGLVGGGEIEVCSPDIAFCRLPAMAVTVETVADAVSAAVRAVVPDNVDAVRVRLQPEAIDGAYYHYCHGLRKHDGDCQRIAHGHRSRLAITRAGERDAALEAQWAERWNNRFLATVDDELPAQRPGHRRFGYDAPQGRFEIELPEARIDVIPGDTTVECLAAYMARTLAAQQGQTMTVRAYEGLRKGALASAEPA

SEQ ID NO: 16765 - protein, 137 aa, Abyssicoccus albus
  misc_feature (1)..(137): tr|A0A3N5BLG0|A0A3N5BLG0_9STAP 6-carboxy-5,6,7,8-tetrah ydropterin synthase OS=Abyssicoccus albus OX=1817405 GN =EDD62_0067 PE=3 SV=1
MMYIPIDHNYSFELNKQFTVSSAHYIDHKEAGKCARIHGHNYNIQLTIGGDSLDELGFLVNFSLLKKEIHDWLDHQLINELPEFNTVEPSTEQVAYQIYLKGQHYLTRQQNNPKLLQVFVQETDSSYAIYRPKEHQS

SEQ ID NO: 16766 - protein, 291 aa, Acaryochloris marina
  misc_feature (1)..(291): tr|B0C2K5|B0C2K5_ACAM1 6-pyruvoyl-tetrahydropterin synt hase OS=Acaryochloris marina (strain MBIC 11017) OX=329 726 GN=AM1_4824 PE=4 SV=1
MKCLIHRRAEFSASHRYWLPELSKSENQEKFGQCTRSPGHGHNYELFVSMWGELDQYGMVLNLSNVKQVIKREVTAPLNFSYLNEVWPEFKETLPTTEHLARVIWQRLEPHLPIVNIQLFEHPKLWADYKGAGMEAYLTVGSHFSAAHRLALPELSFEENCEIYGKCARPHGHGHNYHLEVTVKGEVDARTGMIVDLVALQSLVDDVVLDPLDHTFLNKDIPYFEKVVPTAENIAFYIAKLLREPILKIGAELHRIKLIESPNNSCEVLCSDLFDTAPMLSGRMGEPALVG

SEQ ID NO: 16767 - protein, 288 aa, Acaryochloris sp.
  misc_feature (1)..(288): tr|A0A2W1JWZ1|A0A2W1JWZ1_9CYAN 6-carboxy-5,6,7,8-tetrah ydropterin synthase OS=Acaryochloris sp. RCC1774 OX=176 4569 GN=queD_1 PE=4 SV=1
MQCIINRRAEFSASHRYWLPELSELGNVQQFGKGSQFPGHGHNYVLYVSMLGDLDQYGMVLNLSDVKKVIAQEVTDHLNYAFLNEVWPEFKQTLPATEHIAKVIWQRLAPHLPLLKIQLFEHPKLWATYEGSGMEATLTVGTHFSAAHRLALPDLSYEENCEIYGKCARPNGHGHNYHLEVTVTGDIDPKTGMIVDLVALEKAVDEAVIEPFDHTFLNKDIPFFATVVPTAENIAVHISHLLQEPIRQLGAQLHRIKLIESPNNSCEILCSSVAEPVVTAANEAVLAS

SEQ ID NO: 16768 - protein, 147 aa, Accumulibacter phosphatis
  misc_feature (1)..(147): tr|C7RQK6|C7RQK6_ACCPU 6-carboxy-5,6,7,8-tetrahydropter in synthase OS=Accumulibacter phosphatis (strain UW-1) OX=522306 GN=CAP2UW1_1018 PE=3 SV=1
MLITRRLEFDAGHRIPDHQSQCRHLHGHRYAIEITLAGDIIRRTGDPANGMVMDFSEVKALAMQHLVEAWDHAFLVWAGDRPIVDFLQSLPDHKTVLLDCVPTAENLAQQAFAILDAVYRDTYGNQLRLERLRLYETPNCWAEALRG

SEQ ID NO: 16769 - protein, 193 aa, Accumulibacter phosphatis
  misc_feature (1)..(193): tr|C7RQ95|C7RQ95_ACCPU 6-pyruvoyl-tetrahydropterin synt hase-like protein OS=Accumulibacter phosphatis (strain UW-1) OX=522306 GN=CAP2UW1_4261 PE=4 SV=1
MLIRKLFKFENAHIVRGCSTRRCSHSMHGHSYKVELLLEALALDHGQMVYDFGLLKDGPRALIDAFDHAVALWSGDDPDYIAACQRFSERWILIPVSPSAEQLSRLFFVMIDRLLDLTEMRNGEADVRLHSVIVHETETGYAQCFREDACSPRLGLIDLEDVEFSEAIRNDWPNHDLFDKLKRGERTFHPNGV

SEQ ID NO: 16770 - protein, 139 aa, Acetitomaculum ruminis
  misc_feature (1)..(139): tr|A0A1I0YW75|A0A1I0YW75_9FIRM 6-carboxy-5,6,7,8-tetrah ydropterin synthase OS=Acetitomaculum ruminis DSM 5522 OX=1120918 GN=SAMN05216249_11157 PE=3 SV=1
MYYLKTEVGFDAAHFLKNYNGKCHNLHGHRWRVIATAKSKELLCDKQKEGMVMDFSDLKKALKEVTDRFDHSLIYEKDSLKNETVKALLSEDFKLVEVDFRTTAENFSKYFFDELKKYGFDMHQIEVYETPNNCAMYSE

SEQ ID NO: 16771 - protein, 177 aa, Acetobacter aceti
  misc_feature (1)..(177): tr|A0A0D6MZK8|A0A0D6MZK8_ACEAC Uncharacterized protein OS=Acetobacter aceti NBRC 14818 OX=887700 GN=Abac_107_0 09 PE=4 SV=1
MTVMVDLIFTRRFSMGHRLIHGASESCALPHGHNEFVTVRLEPTSLRPLDGVANMPVSFQRAKSGWHRFVDEKLDHALQLAEDDPLLGWFRANEPARAERIIVTPGDPTTEMMACLLKAKLDAMLVADGAVLRCTTITLQETPTNTVEFSGDPLPMLPEPRPAEQCWWRRADMSIAD

SEQ ID NO: 16772 - protein, 174 aa, Acetobacter aceti
  misc_feature (1)..(174): tr|A0A1U9KJR7|A0A1U9KJR7_ACEAC 6-pyruvoyl tetrahydropte rin synthase OS=Acetobacter aceti OX=435 GN=A0U92_15930 PE=4 SV=1
MVDLIFTRRFSMGHRLIHGASESCALPHGHNEFVTVRLEPISLKPLDGVANMPVSFQHAKSGWHRFVDEKLDHALQLAEDDPLLTWFRTHEPARAERIIVTPGDPTTEMMACLLKAKLDAMLIADGAVLRCTTITLQETPTNTVEFSGDPLPMLPTPRPAEQCWWRRADMSVAD

SEQ ID NO: 16773 - protein, 182 aa, Acetobacter ascendens
  misc_feature (1)..(182): tr|A0A1Y0UYP2|A0A1Y0UYP2_9PROT 6-pyruvoyltetrahydropter in synthase OS=Acetobacter ascendens OX=481146 GN=queD PE=4 SV=1
MPDLVFTRRFSMGHRLIHGASESCALPHGHNEFVTVRLKPTAFAPLDGKGNMPVSFQKAKSTWHRFVDEKLDHALQLAEDDPLLAWFQTNEPARAARIVITPGDPTTELMVCLLMAKINAFLAAEGGVLWCSELSIQETPTNTVSFSGNPAEFIPAPRPPENCWWNRADMSISDTNTPVTFI

SEQ ID NO: 16774 - protein, 182 aa, Acetobacter ascendens
  misc_feature (1)..(182): tr|A0A1D8QUM6|A0A1D8QUM6_9PROT 6-pyruvoyl tetrahydropte rin synthase OS=Acetobacter ascendens OX=481146 GN=A4S0 2_03735 PE=4 SV=1
MPDLVFTRRFSMGHRLIHGASESCALPHGHNEFVTVRLKPTAFAPLDGKGNMPVSFQKAKSTWHRFVDEKLDHALQLAEDDPLLAWFQTNEPARAARIVITPGDPTTELMVCLLMAKINAFLAAEGGVLWCSELSIQETPTNTVSFSGNPAEFIPAPRPPENCWWNRADMSISDTNSPVTFI

SEQ ID NO: 16775 - protein, 174 aa, Acetobacter cerevisiae
  misc_feature (1)..(174): tr|A0A149VBM8|A0A149VBM8_9PROT 6-pyruvoyl tetrahydropte rin synthase OS=Acetobacter cerevisiae OX=178900 GN=AD9 54_07800 PE=4 SV=1
MPDLVFTRRFSMGHRLIHGASESCALPHGHNEFVTVRLSPTIRARLDGKGNMPVSFQRAKSTWHRFVDEKLDHALQLAEDDPLLAWFQTNEPARAQRIVITPGDPTTELMVCLMMAKLSAFLRADGDVLRCTEVSLQETPTNTVTFSGNPDDMIPAVRPREACWWHRADMSISD

SEQ ID NO: 16776 - protein, 174 aa, Acetobacter cerevisiae
  misc_feature (1)..(174): tr|A0A149UZM2|A0A149UZM2_9PROT 6-pyruvoyl tetrahydropte rin synthase OS=Acetobacter cerevisiae OX=178900 GN=AD9 52_00640 PE=4 SV=1
MPDLVFTRRFSMGHRLIHGASESCALPHGHNEFVTVRLSPTTRTRLDGKGNMPVSFQRAKSTWHRFVDEKLDHALQLAEDDPLLAWFQSNEPARAQRIVITPGDPTTELMVCLMMAKLSAFLRADGDVLRCTEVSLQETPTNTVTFSGNPDDMIPAVRPPEACWWHRADMSISD

SEQ ID NO: 16777 - protein, 177 aa, Acetobacter cibinongensis
  misc_feature (1)..(177): tr|A0A0D6N6E0|A0A0D6N6E0_9PROT Uncharacterized protein OS=Acetobacter cibinongensis 4H-1 OX=1231339 GN=Abci_01 8_110 PE=4 SV=1
MPDLVFTRRFSMGHRLIHGASETCALPHGHNEFVTVKLSATNPVRLDGHGNMPVSFQRAKSTWHRFVDEKLDHALQLAEDDPLLEWFRQHEPERARRIVVTPGDPTTELMVCLLMAKINAFLLADENLLKCVEVSLQETPTNTVTFSGNPQDFLPSPRPSALCWWYRPDMSISDFTQ

SEQ ID NO: 16778 - protein, 177 aa, Acetobacter cibinongensis
  misc_feature (1)..(177): tr|A0A1Z5YS52|A0A1Z5YS52_9PROT 6-pyruvoyl tetrahydropte rin synthase OS=Acetobacter cibinongensis OX=146475 GN= HK14_11200 PE=4 SV=1
MPDLVFTRRFSMGHRLIHGASETCALPHGHNEFVTVKLSATNPVRLDGHGNMPVSFQRAKSTWHRFVDEKLDHALQLAEDDSLLEWFRQHEPERARRIVVTPGDPTTELMVCLLMAKINAFLLADENLLKCVEISLQETPTNTVTFSGNPQDFLPSPRPPELCWWYRPDMSISDFTQ

SEQ ID NO: 16779 - protein, 173 aa, Acetobacter fabarum
  misc_feature (1)..(173): tr|A0A269Y146|A0A269Y146_9PROT 6-pyruvoyl tetrahydropte rin synthase OS=Acetobacter fabarum OX=483199 GN=B8X00_ 00520 PE=4 SV=1
MPDLVFTRRFSMGHRLIHGASESCALPHGHNEFVTVRLEPTSPARLDGRGNMPVSFQKAKQTWHRFVDERLDHALQLAGDDPLLAWFKAHEPARAARIVVTPGDPTTELMVCLLMAKISAFLLAEGGVLRCSELSIEETPTNTVSFAGNPADFIPHTSLQQNWWNRADMSIAD

SEQ ID NO: 16780 - protein, 196 aa, Acetobacter ghanensis
  misc_feature (1)..(196): tr|A0A0U5F4H0|A0A0U5F4H0_9PROT 6-pyruvoyl tetrahydrobio pterin synthase OS=Acetobacter ghanensis OX=431306 GN=A GA_1629 PE=4 SV=1
MVPAQPANSAVPDGKPTKQKTKMPDLVFTRRFSMGHRLIHGASESCALPHGHNEFVTVRLTPTKATRLDGRGNMPVSFQNAKQTWHRFVDERLDHALQLAEDDPLLAWFQTHEPARAARIVVTPGDPTTELMTCLLMAKVNAFLLAEGGVLRCSELSIEETPTNTVSFDGDPADFIPQRSTEQTCWWNRADMSIAD

SEQ ID NO: 16781 - protein, 176 aa, Acetobacter indonesiensis
  misc_feature (1)..(176): tr|A0A252AVB8|A0A252AVB8_9PROT 6-pyruvoyl tetrahydropte rin synthase OS=Acetobacter indonesiensis OX=104101 GN= HK17_04520 PE=4 SV=1
MPDLVFTRRFSMGHRLIHGASESCALPHGHNEFVTVKLSPTQPARLDGHGNMPVSFQKAKSTWHRFVDEKLDHALQLAEDDPLLDWFKTHEPARARRIVVTPGDPTTELMVCLMMAKIGAFLQAEGNLLRCTELSLQETPTNTVTFSGDPNDFIPKRDTISECWWHRSDMSVSNIP

SEQ ID NO: 16782 - protein, 176 aa, Acetobacter indonesiensis; identical to SEQ ID NO: 16781
  misc_feature (1)..(176): tr|A0A0D6NCR7|A0A0D6NCR7_9PROT Uncharacterized protein OS=Acetobacter indonesiensis 5H-1 OX=1231340 GN=Abin_04 7_101 PE=4 SV=1

SEQ ID NO: 16783 - protein, 174 aa, Acetobacter malorum
  misc_feature (1)..(174): tr|A0A149UHI0|A0A149UHI0_9PROT 6-pyruvoyl tetrahydropte rin synthase OS=Acetobacter malorum OX=178901 GN=AD951_ 16480 PE=4 SV=1
MPDLVFTRRFSMGHRLIHGASESCALPHGHNEFITVRLSPTTHTRLDGKGNMPVSFQRAKSTWHRFVDEKLDHALQLAEDDPLLGWFQANEPARAQRIVITPGDPTTELMVCLMMAKLSAFLRADGDVLRCTEVSLQETPTNTVTFSGNPDDMIPAVRPPEACWWHRADMSISD

SEQ ID NO: 16784 - protein, 174 aa, Acetobacter malorum
  misc_feature (1)..(174): tr|A0A177G953|A0A177G953_9PROT Queuosine biosynthesis Q ueD, PTPS-I OS=Acetobacter malorum OX=178901 GN=Amal_02 579 PE=4 SV=1
MPDLVFTRRFSMGHRLIHGASESCALPHGHNEFVTVRLSPNARTRLDGKGNMPVSFQRAKSTWHRFVDEKLDHALQLAEDDPLLAWFQANEPARAQRIVITPGDPTTELMVCLMMAKLSAFLRADGDVLRCTEVSLQETPTNTVTFSGNPEDMIPAVRPPETCWWHRADMSISD

SEQ ID NO: 16785 - protein, 179 aa, Acetobacter nitrogenifigens
  misc_feature (1)..(179): tr|A0A511X7M6|A0A511X7M6_9PROT 6-carboxy-5,6,7,8-tetrah ydropterin synthase OS=Acetobacter nitrogenifigens DSM 23921 = LMG 23498 OX=1120919 GN=ANI02nite_08340 PE=4 SV =1
MFDMLFTRRFSMGHRLIHGASESCALPHGHNEFVTVRLQPTNDGPLDGKGNMPVSFQRAKGAWHKFIDERLDHALQLAEDDPLLEWFRAHEPARAARIVVTPGDPTTELMACLMMAKLNAMLVADGGVLRCTAITLQETPTNTVEFSGDPLAMLPASRPAGQCWWRRADMSISDIATAV

SEQ ID NO: 16786 - protein, 177 aa, Acetobacter oeni
  misc_feature (1)..(177): tr|A0A511XLT1|A0A511XLT1_9PROT Uncharacterized protein OS=Acetobacter oeni OX=304077 GN=AOE01nite_21230 PE=4 S V=1
MADLIFTRRFSMGHRLIHGASESCALPHGHNEFVTIRLEPASASRLDGHGNMPVSFQRAKSGWHRFVDERLDHALQLAEDDPLLAWFRTQEPARAARIIVTPGDPTTELMAGLMKAKLDAMLLADGDVLRCKTITLQETPTNTVEFTGNPLDFLPAPRPPEQCWWRRADMTIADQTL

SEQ ID NO: 16787 - protein, 174 aa, Acetobacter okinawensis
  misc_feature (1)..(174): tr|A0A252BWU7|A0A252BWU7_9PROT 6-pyruvoyl tetrahydropte rin synthase OS=Acetobacter okinawensis OX=1076594 GN=H K26_11030 PE=4 SV=1
MPDLVFTRRFSMGHRLIHGASESCALPHGHNEFITVRLKPTRPSRLDGSANMPVSFQKAKQTWHRFVDERLDHALQLAGDDPLLAWFKAHEPTRAARIVVTPGDPTTELMTCLLMAKINAFLLAEGGVLYCSELSIEETPTNTVSFAGDPADFIPNTDIGQACWWNRADMSIAD

SEQ ID NO: 16788 - protein, 174 aa, Acetobacter orientalis
  misc_feature (1)..(174): tr|A0A2Z5ZE70|A0A2Z5ZE70_9PROT 6-pyruvoyltetrahydropter in synthase OS=Acetobacter orientalis OX=146474 GN=Acet Orient_orf00348 PE=4 SV=1
MPELIFTRRFSMGHRLIHGASETCALPHGHNEFVSVKLTPTRPAPLDGMGNMPVSFQKAKSTWHKFVDEKLDHALQLAQDDPLLIWFQHNEPERAKRIVVTPGDPTTELMVCLMMAKLSAFLRAEGDALRCIEVSLQETPTNTVSFTGNPKDFLPSPRAPEQCWWHRADMSIAD

SEQ ID NO: 16789 - protein, 174 aa, Acetobacter orientalis; identical to SEQ ID NO: 16788
  misc_feature (1)..(174): tr|A0A0D6NKV9|A0A0D6NKV9_9PROT Uncharacterized protein OS=Acetobacter orientalis 21F-2 OX=1231341 GN=Abor_024_ 148 PE=4 SV=1

SEQ ID NO: 16790 - protein, 174 aa, Acetobacter orleanensis
  misc_feature (1)..(174): tr|A0A4Y3TL32|A0A4Y3TL32_9PROT Uncharacterized protein OS=Acetobacter orleanensis OX=104099 GN=AOR01nite_01370 PE=4 SV=1
MPDLVFTRRFSMGHRLIHGASEACALPHGHNEFVTVRLSPTHAARLDGKGNMPVSFQRAKSTWHRFVDEKLDHALQLAEDDPLLAWFQANEPARAQRIVITPGDPTTELMVCLMMAKLSAFLKADGDMLRCTEVSLQETPTNTVTFSGDPADMIPSGRAPESCWWHRADMSISD

SEQ ID NO: 16791 - protein, 182 aa, Acetobacter pasteurianus
  misc_feature (1)..(182): tr|A0A1Y0XU69|A0A1Y0XU69_ACEPA 6-pyruvoyltetrahydropter in synthase OS=Acetobacter pasteurianus subsp. pasteuri anus OX=481145 GN=queD PE=4 SV=1
MPDLVFTRRFSMGHRLIHGASESCALPHGHNEFVTVRLKPTSFAPLDGKGNMPVSFQKAKSTWHRFVDEKLDHALQLAEDDPLLAWFQTNEPARAARIVITPGDPTTELMVCLLMAKINAFLAAEGGLLWCSELSIQETPTNTVSFSGNPAEFIPTPRPPENCWWNRADMSISDTNSPVTFI

SEQ ID NO: 16792 - protein, 182 aa, Acetobacter pasteurianus
  misc_feature (1)..(182): tr|A0A1A0DD45|A0A1A0DD45_ACEPA 6-pyruvoyl tetrahydropte rin synthase OS=Acetobacter pasteurianus OX=438 GN=queD PE=4 SV=1
MPDLVFTRRFSMGHRLIHGASESCALPHGHNEFVTVRLKPTSFAPLDGKGNMPVSFQKAKSTWHRFVDEKLDHALQLAEDDPLLAWFQTNEPARAARIVITPGDPTTELMVCLLMAKINAFLAAEGGVLQCSELSIQETPTNTVSFSGNPAEFIPTPRPPENCWWNRADMSISDTEIPVTFI

SEQ ID NO: 16793 - protein, 176 aa, Acetobacter peroxydans
  misc_feature (1)..(176): tr|A0A4Y3TUA0|A0A4Y3TUA0_9PROT Uncharacterized protein OS=Acetobacter peroxydans OX=104098 GN=APE01nite_03470 PE=4 SV=1
MPELVFTRRFSMGHRLIHGASESCAVPHGHNELVTVRLTATTPARLDGQGNMAISFQQAKGTWHRFVDEKLDHALQLADDDPLLDWFLTHEPARARRIVVTPGDPTTELMACLLMAKINAFLKNEGGILHCTELSLQETPTNTVCFSGDPEDFIPRTASTHTPWWKRADMSISDLP

SEQ ID NO: 16794 - protein, 174 aa, Acetobacter persici
  misc_feature (1)..(174): tr|A0A1U9LC66|A0A1U9LC66_9PROT 6-pyruvoyl tetrahydropte rin synthase OS=Acetobacter persici OX=1076596 GN=A0U91 _02370 PE=4 SV=1
MPDLVFTRRFSMGHRLIHGASESCALPHGHNEFVTVRLTPTHAARLDGRGNMPVSFQRAKSTWHRFVDEKLDHALQLAEDDPLLAWFQAHEPARAQRIVITPGDPTTELMVCLMMAKLNAFLKADGDVLRCTEVSLQETPTNTVSFSGNPEEMIPASRAPEACWWNRADMSISD

SEQ ID NO: 16795 - protein, 174 aa, Acetobacter persici
  misc_feature (1)..(174): tr|A0A252APN9|A0A252APN9_9PROT 6-pyruvoyl tetrahydropte rin synthase OS=Acetobacter persici OX=1076596 GN=HK19_ 03685 PE=4 SV=1
MPDLVFTRRFSMGHRLIHGASESCALPHGHNEFVTIRLTPTHPARLDGRGNMPVSFQRAKSTWHRFVDEKLDHALQLAEDDPLLAWFQANEPARAQRIVITPGDPTTELMVCLMMAKLNAFLKADGDVLRCTEVSLQETPTNTVSFSGNPEEMIPAGRSPESCWWNRADMSISD

SEQ ID NO: 16796 - protein, 182 aa, Acetobacter pomorum
  misc_feature (1)..(182): tr|A0A346DUT4|A0A346DUT4_9PROT 6-pyruvoyl tetrahydropte rin synthase OS=Acetobacter pomorum OX=65959 GN=CJF59_0 8045 PE=4 SV=1
MPDLVFTRRFSMGHRLIHGASESCALPHGHNEFVTVRLKPTSFAPLDGKSNMPVSFQKAKSTWHRFVDEKLDHALQLAEDDPLLAWFQTNEPARAARIVTTPGDPTTELMVCLLMAKINAFLAAEGGVLWCSELSIQETPTNTVSFSGNPAEFIPTPRPPENCWWNRADMSISDTDSPVTFI

SEQ ID NO: 16797 - protein, 182 aa, Acetobacter pomorum
  misc_feature (1)..(182): tr|A0A2G4RAM8|A0A2G4RAM8_9PROT 6-pyruvoyl tetrahydropte rin synthase OS=Acetobacter pomorum OX=65959 GN=CSR02_1 1650 PE=4 SV=1
MPDLVFTRRFSMGHRLIHGASESCALPHGHNEFVTVRLKPTAFAPLDGKGNMPVSFQKAKSTWHRFVDEKLDHALQLAEDDPLLAWFQTNEPARAARIVITPGDPTTELMTCLLMAKINAFLAAEGGALWCSELSIQETPTNTVSFSGNPAEFIPTPRAPENCWWNRADMSISDLNSPVTFI

SEQ ID NO: 16798 - protein, 182 aa, Acetobacter senegalensis
  misc_feature (1)..(182): tr|A0A0U5EYU3|A0A0U5EYU3_9PROT 6-pyruvoyl tetrahydrobio pterin synthase OS=Acetobacter senegalensis OX=446692 G N=ASN_3702 PE=4 SV=1
MKRRRLMPNLVFTRRFSMGHRLIHGASESCALPHGHNEFVTVKLSPTHQTRLDGKGNMPVSFQKAKSTWHRFVDEKLDHALQLAEDDPLLGWFQAHEPERARRIVVTPGDPTTELMVCLMMAKINAFLRAEGDMLRCTELSLQETPTNTVTFSGNPDEIIPMIRPPAECWWQRADMSISDAT

SEQ ID NO: 16799 - protein, 176 aa, Acetobacter senegalensis
  misc_feature (1)..(176): tr|A0A149U142|A0A149U142_9PROT 6-pyruvoyl tetrahydropte rin synthase OS=Acetobacter senegalensis OX=446692 GN=A D948_09850 PE=4 SV=1
MPDLVFTRRFSMGHRLIHGASESCALPHGHNEFVTVKLSPTHQTRLDGKGNMPVSFQKAKSTWHRFVDEKLDHALQLAEDDPLLGWFQAHEPERARRIVVTPGDPTTELMVCLMMAKINAFLRAEGDMLRCTELSLQETPTNTVTFSGNPDEIIPMIRPPAECWWQRADMSISDAT

SEQ ID NO: 16800 - protein, 182 aa, Acetobacter sp.
  misc_feature (1)..(182): tr|A0A368AGP7|A0A368AGP7_9PROT 6-pyruvoyl tetrahydropte rin synthase OS=Acetobacter sp. BCRC 14118 OX=1868878 G N=BBA71_02920 PE=4 SV=1
MPDLVFTRRFSMGHRLIHGASESCALPHGHNEFVTVRLKPTAFAPLDGKGNMPVSFQKAKSTWHRFVDEKLDHALQLAEDDPLLAWFQTNEPARAARIVITPGDPTTELMVCLLMAKINAFLAAEGGVLWCSELSIQETPTNTVSFSGNPAEFIPAPRPPENCWWNRADMSISDTESPVTFI

SEQ ID NO: 16801 - protein, 176 aa, Acetobacter sp.
  misc_feature (1)..(176): tr|A0A5C1YQS1|A0A5C1YQS1_9PROT 6-carboxytetrahydropteri n synthase OS=Acetobacter sp. KACC 21233 OX=2592655 GN= FLP30_12080 PE=4 SV=1
MPDLIFTRRFSMGHRLIHGASESCALPHGHNEFITVRLKPSALTRLDGAGNMPVSFQKAKSTWHRFVDERLDHALQLAADDPLLGWFQTHEPARAARIVVTPGDPTTELMVCLLMSKLNAFLSAEGGVLYCSELSIEETPTNTVSFQGDPTMIIPVQAEPGSRWWTRPDMSISDPA

SEQ ID NO: 16802 - protein, 174 aa, Acetobacter syzygii
  misc_feature (1)..(174): tr|A0A270BTP4|A0A270BTP4_9PROT 6-pyruvoyl tetrahydropte rin synthase OS=Acetobacter syzygii OX=146476 GN=B9K05_ 03615 PE=4 SV=1
MPDLVFTRRFSMGHRLIHGASESCTLPHGHNEFVTVRLKPTHPTRLDGRGNMPVSFQAAKQTWHRFVDERLDHALQLAADDPLLTWFKTHEPARAARIVVTPGDPTTELMTCLLMAKLNAFLLAEGGVLHCTELSIQETPTNTVSFDGNPADFIPHSTTGQTSWWNRADMSIAD

SEQ ID NO: 16803 - protein, 176 aa, Acetobacter tropicalis; identical to SEQ ID NO: 16799
  misc_feature (1)..(176): tr|A0A291PJ39|A0A291PJ39_9PROT 6-pyruvoyl tetrahydropte rin synthase OS=Acetobacter tropicalis OX=104102 GN=CIW 82_12655 PE=4 SV=1

SEQ ID NO: 16804 - protein, 176 aa, Acetobacter tropicalis
  misc_feature (1)..(176): tr|A0A094ZFH1|A0A094ZFH1_9PROT 6-pyruvoyl tetrahydropte rin synthase OS=Acetobacter tropicalis OX=104102 GN=AD9 47_15650 PE=4 SV=1
MPDLVFTRRFSMGHRLIHGASESCALPHGHNEFVTVKLSPTQQVRLDGKGNMPVSFQKAKSTWHRFVDEKLDHALQLAEDDPLLAWFQTHEPERARRIVVTPGDPTTELMVCLMMAKISAFLRAEGDMLRCTELSLQETPTNTVTFSGNPDELIPTGRPVAECWWHRADMSISDVS

SEQ ID NO: 16805 - protein, 133 aa, Acetobacteraceae bacterium
  misc_feature (1)..(133): tr|A0A327M6G2|A0A327M6G2_9PROT 6-carboxytetrahydropteri n synthase OS=Acetobacteraceae bacterium DB1506 OX=2230 885 GN=DOO78_16685 PE=4 SV=1
MFSLTVCDHIMVAHSFRGAEFGPAQRLHGATFAVEAEFRAPQLDHLHLLVDIGLAKTELRRALDTLDYRNLDDEGQFAGQNTTTEYLCRHIHQLLCAALREGRLGPQGGQVTALKVLLRESPNAWAAYEGAVA

SEQ ID NO: 16806 - protein, 175 aa, Acetobacteraceae bacterium
  misc_feature (1)..(175): tr|A0A327M6Z0|A0A327M6Z0_9PROT 6-carboxytetrahydropteri n synthase OS=Acetobacteraceae bacterium DB1506 OX=2230 885 GN=DOO78_11085 PE=4 SV=1
MFELVFRRRFAMAHRLLTDGTAQCAVPHGHTETVTVRLRAVRPERLDGAANMVEPFARAKARWHHWIDGHVDHALQLGEADPLLGWFRAAEPERLPRLLVTPGDPTTELLCGLFAAKLGAFLAADGGRLACVGVEIEETPTNTVRFEGDPYDILPRRHGWWSRADLSINAWDAAR

SEQ ID NO: 16807 - protein, 146 aa, Acetobacteroides hydrogenigenes
  misc_feature (1)..(146): tr|A0A4R2EUY9|A0A4R2EUY9_9BACT 6-pyruvoyltetrahydropter in/6-carboxytetrahydropterin synthase OS=Acetobacteroid es hydrogenigenes OX=979970 GN=CLV25_103134 PE=4 SV=1
MSHTITKTYKNLKAAHRQWRHAGRCAYVHGENWRIDISFTARELDEQHFVFDFGALRPLRQQIEDLFDHTLLIDSDDPQRSFFEEMHAKGMADVRFMPSAGAEGISEMVFSMANDFIREATNQRVWCSKVTVYEDSKNCATYEPSI

SEQ ID NO: 16808 - protein, 129 aa, Acetobacteroides hydrogenigenes
  misc_feature (1)..(129): tr|A0A4R2EMG2|A0A4R2EMG2_9BACT 6-carboxy-5,6,7,8-tetrah ydropterin synthase OS=Acetobacteroides hydrogenigenes OX=979970 GN=CLV25_1062 PE=3 SV=1
MVRAKSIRITKIFTFDSAHQLEDYEGKCRQLHGHTYKLEVTVKGEMGENGMVFDFSILKKVVTERVINLLDHKYLNDVFDFNPTSENMVVWIFEQIDECFVGQSCILECIKLWETATSYAELRRSDIEN

SEQ ID NO: 16809 - protein, 165 aa, Acetohalobium arabaticum
  misc_feature (1)..(165): tr|D9QQX9|D9QQX9_ACEAZ PreQ(0) biosynthesis protein Que D OS=Acetohalobium arabaticum (strain ATCC 49924 / DSM 5501 / Z-7288) OX=574087 GN=Acear_1410 PE=4 SV=1
MIQLNINSEVQVMSQVSVTKSFSWDMAHMLAGHEDQCKNLHGHTYKLEVEVTSKSGKLQAAGASQGMIIDFKDLKQVVTEEIVAPLDHAFLYWAKSPDEVEHQLAATLQDADRKVVSVDFRPTAENMANYFWEILQNNFTKLDIEVVSVKVWETPTSYAEVKGVR

SEQ ID NO: 16810 - protein, 132 aa, Acetomicrobium hydrogeniformans
  misc_feature (1)..(132): tr|A0A0T5XBR1|A0A0T5XBR1_9BACT 6-carboxy-5,6,7,8-tetrah ydropterin synthase OS=Acetomicrobium hydrogeniformans ATCC BAA-1850 OX=592015 GN=HMPREF1705_02961 PE=3 SV=1
MVILKREFSFDAAHYLPDYHGKCERLHGHTYKAAIFVEGSPDEEGMVMDFVELKGLVEERILSKLDHSCLNDVIKRPSAEYIALWIWGEMEPHINAGKRRLKYVQVWESPGSSVIIDENDFENFRGMLEVVS

SEQ ID NO: 16811 - protein, 132 aa, Acetomicrobium mobile
  misc_feature (1)..(132): tr|I4BUS7|I4BUS7_ACEMN 6-carboxy-5,6,7,8-tetrahydropter in synthase OS=Acetomicrobium mobile (strain ATCC BAA-5 4 / DSM 13181 / JCM 12221 / NGA) OX=891968 GN=Anamo_037 7 PE=3 SV=1
MILKREFSFDAAHYLPDYHGKCERLHGHTYRAAIFVEGVPDEEGMVMDFVELKELIRDKLLSKLDHSCLNDIIKRPSAEYIALWIWNEMMSVIDDGRRSLKYVQVWESPDSSILIDRGDFEKFSDRLEVARG

SEQ ID NO: 16812 - protein, 132 aa, Acetomicrobium thermoterrenum
  misc_feature (1)..(132): tr|A0A1H3GWF9|A0A1H3GWF9_9BACT 6-carboxy-5,6,7,8-tetrah ydropterin synthase OS=Acetomicrobium thermoterrenum DS M 13490 OX=1120987 GN=SAMN03080603_01692 PE=3 SV=1
MVILKREFSFDAAHYLPDYHGKCERLHGHTYKAAIFVEGPPDEEGMVMDFVELKGLVEERILSKLDHSCLNDVIKRPSAEYIALWIWGEMGPHINAGKRRLKYVQVWESPGSSVIIDENDFENFRGMLEVVS

SEQ ID NO: 16813 - protein, 133 aa, Acetonema longum
  misc_feature (1)..(133): tr|F7NNG8|F7NNG8_9FIRM 6-carboxy-5,6,7,8-tetrahydropter in synthase OS=Acetonema longum DSM 6540 OX=1009370 GN= ALO_18295 PE=3 SV=1
MKKISIRATKIFTFDAAHCLPGHKGKCANMHGHTYRLEVTVARNDDGVLTDDSGNGMVIDFGDLKQIVQEEIIDKVDHKLLNEVFSFRTTSENMARHFYDLLARRLLAQGVSVEKITLWESPTSCVEVGRWNS

SEQ ID NO: 16814 - protein, 134 aa, Achromatium sp.
  misc_feature (1)..(134): tr|A0A0M1J7K6|A0A0M1J7K6_9GAMM 6-pyruvoyl tetrahydrobio pterin synthase OS=Achromatium sp. WMS3 OX=1604836 GN=T I05_16185 PE=4 SV=1
MKYSISKEIHFCYGHRLLEHKGACKYLHGHSAKVLVRLGTETLDEHGMVCDFADLNQFVKNWLQQTLDHTLLLYQEDPLIPILQAANEQYRALDCHPTAENIARLIFEAVAQAGFPVLEVTLYETASAYATYSV

SEQ ID NO: 16815 - protein, 141 aa, Achromatium sp.
  misc_feature (1)..(141): tr|A0A0M1J2X3|A0A0M1J2X3_9GAMM 6-pyruvoyl tetrahydrobio pterin synthase OS=Achromatium sp. WMS2 OX=1604835 GN=T I04_13020 PE=4 SV=1
MYNIRKEIHFCYGHRLLNHTGPCRYLHGHNAIALICLNSEELDKLGMVCDFSELGHFAKAWVDRELDHQLLLHQDDPLIPWLQQAGERHRVLACNPTAENIAKLIFEALAAAKFSVSEVTVYETPTASASYSHATAYGQTR

SEQ ID NO: 16816 - protein, 147 aa, Achromobacter agilis
  misc_feature (1)..(147): tr|A0A446CGV4|A0A446CGV4_9BURK 6-carboxy-5,6,7,8-tetrah ydropterin synthase OS=Achromobacter agilis OX=1353888 GN=AGI3411_02874 PE=3 SV=1
MISVTRRLEFDAGHRIPDHRSQCRNLHGHRYVLEITLTGDIVQAPGESDNGMLMDFSEIKQIAKAHVVDVWDHAFLVYEGDAAVRAFLDTLPGHKTVVLDRIPTAENLAAIVFGILAPHYHGHYGAELRLTRVRLYETPNCWADCNG

SEQ ID NO: 16817 - protein, 147 aa, Achromobacter aloeverae
  misc_feature (1)..(147): tr|A0A4Q1HMC4|A0A4Q1HMC4_9BURK 6-carboxy-5,6,7,8-tetrah ydropterin synthase OS=Achromobacter aloeverae OX=17505 18 GN=queD PE=3 SV=1
MISVTRKLEFDAGHRIPDHRSQCRNMHGHRYVLEVTLQGDVVDTPGSSDNGMLMDFSEIKAIAKRELVDRWDHAFLVHAGDQAVLAFLHSLPGHKTVVLDRIPTVENLARIAFDTLAPHYHGHYGLDLRLTRVRLYETPNCWADCDG

SEQ ID NO: 16818 - protein, 147 aa, Achromobacter arsenitoxydans
  misc_feature (1)..(147): tr|H0F6C6|H0F6C6_9BURK 6-carboxy-5,6,7,8-tetrahydropter in synthase OS=Achromobacter arsenitoxydans SY8 OX=4771 84 GN=KYC_11598 PE=3 SV=1
MISVTRRLEFDAGHRIPDHRSQCRNLHGHRYVLEITLTGDIVQAAGESDNGMLMDFSEIKHIAKTHIVDVWDHAFLVFEGDAAVRGFLDSLPGHKTVVLDRIPTAENLAAIVFETLAPHYHGHYGADLRLTRVRLYETPNCWADCNG

SEQ ID NO: 16819 - protein, 147 aa, Achromobacter denitrificans
  misc_feature (1)..(147): tr|A0A427WHW9|A0A427WHW9_ACHDE 6-carboxy-5,6,7,8-tetrah ydropterin synthase OS=Achromobacter denitrificans OX=3 2002 GN=queD PE=3 SV=1
MISVTRRLEFDAGHRIPDHRSQCRNLHGHRYVLEITLTGDVVQAPGESDNGMLMDFSEIKQIAKTHIVDVWDHAFLVYEGDAAVRAFLDTLPDHKTVVLDRIPTAENLAAIVFDTLAPHYHGHYGAELRLTRVRLYETPNCWADCNG

SEQ ID NO: 16820 - protein, 147 aa, Achromobacter insolitus
  misc_feature (1)..(147): tr|A0A162NE13|A0A162NE13_9BURK 6-carboxy-5,6,7,8-tetrah ydropterin synthase OS=Achromobacter insolitus OX=21720 4 GN=NCTC13520_02714 PE=3 SV=1
MISVTRRLEFDAGHRIPDHRSQCRNLHGHRYVLEITLTGDVVQAPGESDNGMLMDFSEIKHIAKTHIVDVWDHAFLVYEGDAAVRGFLDSLPDHKTVVLDRIPTAENLAAIVFETLAPHYHGHYGAELRLTRVRLYETPNCWADCNG

SEQ ID NO: 16821 - protein, 147 aa, Achromobacter insuavis
  misc_feature (1)..(147): tr|F7T6R5|F7T6R5_9BURK 6-carboxy-5,6,7,8-tetrahydropter in synthase OS=Achromobacter insuavis AXX-A OX=1003200 GN=AXXA_23245 PE=3 SV=1
MISVTRRLEFDAGHRIPDHRSQCRNMHGHRYVLEITLTGDIVQAPGESDNGMLMDFADIKRIAKAHIVDVWDHAFLVFEGDTAVRGFLDSMPGHKTVVLDRIPTAENLAAIIFEILAPHYHGHYGADLRLTRVRLYETPNCWADCNG

SEQ ID NO: 16822 - protein, 147 aa, Achromobacter marplatensis
  misc_feature (1)..(147): tr|J4PCU1|J4PCU1_9BURK 6-carboxy-5,6,7,8-tetrahydropter in synthase OS=Achromobacter marplatensis OX=470868 GN= DFP87_1011080 PE=3 SV=1
MISVTRRLEFDAGHRIPDHRSQCRNLHGHRYVLEITLTGDVVQAPGESDNGMLMDFSEIKHIAKTHIVDVWDHAFLVYEGDAAVRGFLDSLPGHKTVVLDRIPTAENLAQIVFDTLAPQYHGHYGADLRLTRVRLYETPNCWADCNG

SEQ ID NO: 16823 - protein, 147 aa, Achromobacter piechaudii
  misc_feature (1)..(147): tr|D4XE26|D4XE26_9BURK 6-carboxy-5,6,7,8-tetrahydropter in synthase OS=Achromobacter piechaudii ATCC 43553 OX=7 42159 GN=queD PE=3 SV=1
MISVTRRLEFDAGHRIPDHRSQCRNLHGHRYVLEITLTGDVVQAPGESDNGMLMDFSEIKHIAKSHIVDVWDHAFLVFEGDAAVRDFLATLPDHKTVVLDRIPTAENLAKIVFDTLAPHYHGHYGADLRLTRVRLYETPNCWADCAA

SEQ ID NO: 16824 - protein, 147 aa, Achromobacter piechaudii
  misc_feature (1)..(147): tr|A0A0L6I4T5|A0A0L6I4T5_9BURK 6-carboxy-5,6,7,8-tetrah ydropterin synthase OS=Achromobacter piechaudii OX=7255 6 GN=AKG08_21085 PE=3 SV=1
MISVTRRLEFDAGHRIPDHRSQCRNLHGHRYVLEITLTGDVVQAPGESDNGMLMDFSEIKHIAKTHIVDVWDHAFLVFEGDAAVRDFLATLPDHKTVVLDRIPTAENLAKIVFDTLAPHYHGHYGADLRLTRVRLYETPNCWADCAA

SEQ ID NO: 16825 - protein, 147 aa, Achromobacter pulmonis
  misc_feature (1)..(147): tr|A0A2N8KA41|A0A2N8KA41_9BURK 6-carboxy-5,6,7,8-tetrah ydropterin synthase OS=Achromobacter pulmonis OX=138993 2 GN=queD PE=3 SV=1
MISVTRRLEFDAGHRIPDHRSQCRNLHGHRYVLEITLSGDVVQAPGESDNGMLMDFSEIKQIAKTHIVDVWDHAFLVYEGDAAVRAFLDSLPGHKTVVLDRIPTAENLAAIVFATLAPHYHGHYGAELRLTRVRLYETPNCWADCNG

SEQ ID NO: 16826 - protein, 147 aa, Achromobacter ruhlandii
  misc_feature (1)..(147): tr|A0A1D8IAC7|A0A1D8IAC7_9BURK 6-carboxy-5,6,7,8-tetrah ydropterin synthase OS=Achromobacter ruhlandii OX=72557 GN=queD PE=3 SV=1
MISVTRRLEFDAGHRIPDHRSQCRNLHGHRYVLEITLTGDVVQAPGESDNGMLMDFADIKRIAKTHIVDVWDHAFLVYEGDTAVRGFLDSMPDHKTVVLDRIPTAENLAAIIFEILAPHYHGHYGADLRLTRVRLYETPNCWADCNG

SEQ ID NO: 16827 - protein, 121 aa, Achromobacter sp.
  misc_feature (1)..(121): tr|A0A0M7NCN5|A0A0M7NCN5_9BURK 6-carboxy-5,6,7,8-tetrah ydropterin synthase OS=Achromobacter sp. ATCC35328 OX=1 806490 GN=queD PE=3 SV=1
MMSTTLFKDFTFEAAHRLPHVPEGHKCGRLHGHSFMVRLEITGEVDPHTGWIIDFAELKAAFKPTYERLDHHYLNDIPGLENPTSEVLAKWIWDQVKPVVPLLSAVMVKETCTAGCIYRGE

SEQ ID NO: 16828 - protein, 147 aa, Achromobacter sp.
  misc_feature (1)..(147): tr|A0A226XZS7|A0A226XZS7_9BURK 6-carboxy-5,6,7,8-tetrah ydropterin synthase OS=Achromobacter sp. KAs 3-5 OX=191 5388 GN=queD PE=3 SV=1
MISVTRRLEFDAGHRIPDHRSQCRNLHGHRYVLEITLTGDVVQAPGESDNGMVMDFSEIKHIAKTHIVDVWDHAFLVYEGDAAVRGFLDTLPGHKTVVLDRIPTAENLATIVFETLAPHYHGHYGAELRLTRVRLYETPNCWADCNG

SEQ ID NO: 16829 - protein, 147 aa, Achromobacter spanius
  misc_feature (1)..(147): tr|A0A2S0I754|A0A2S0I754_9BURK 6-carboxy-5,6,7,8-tetrah ydropterin synthase OS=Achromobacter spanius OX=217203 GN=queD PE=3 SV=1
MISVTRRLEFDAGHRIPDHRSQCRNLHGHRYVLEITLTGDIVQAPGESDNGMVMDFSEIKHIAKTHIVDVWDHAFLVYEGDDAVRGFLDSLPGHKTVVLDRIPTAENLATIVFETLAPQYHGHYGAELRLTRVRLYETPNCWADCNG

SEQ ID NO: 16830 - protein, 147 aa, Achromobacter spanius
  misc_feature (1)..(147): tr|A0A0L0R9R6|A0A0L0R9R6_9BURK 6-carboxy-5,6,7,8-tetrah ydropterin synthase OS=Achromobacter spanius OX=217203 GN=queD PE=3 SV=1
MISVTRRLEFDAGHRIPDHRSQCRNLHGHRYVLEITLTGDVVQAPGESDNGMLMDFSEIKHIAKTHIVDVWDHAFLVYEGDAAVRGFLDTLPDHKTVVLDRIPTAENLAKIVFDTLAPHYHGHYGADLRLSRVRLYETPNCWADCNG

SEQ ID NO: 16831 - protein, 147 aa, Achromobacter xylosoxidans
  misc_feature (1)..(147): tr|E3HK35|E3HK35_ACHXA 6-carboxy-5,6,7,8-tetrahydropter in synthase OS=Achromobacter xylosoxidans (strain A8) O X=762376 GN=queD PE=3 SV=1
MISVTRRLEFDAGHRIPDHRSQCRNLHGHRYVLEITLTGDVVQAPGESDNGMLMDFSEIKHIAKTHIVDVWDHAFLVYEGDAAVRGFLDSLPGHKTVVLDRIPTAENLAAIVFQTLAPHYHGHYGAELRLTRVRLYETPNCWADCNG

SEQ ID NO: 16832 - protein, 164 aa, Acidaminobacter hydrogenoformans
  misc_feature (1)..(164): tr|A0A1G5RZM0|A0A1G5RZM0_9FIRM PreQ(0) biosynthesis pro tein QueD OS=Acidaminobacter hydrogenoformans DSM 2784 OX=1120920 GN=SAMN03080599_01767 PE=4 SV=1
MLQSFLFSKLNIIERMKYAVYYLKSEHSFDSAHFLANYEGKCRHIHGHRWRVIVEIMSPTLNTDEALDGMIVDFSKLKKDIKAEVDFFDHALIIEKGSLKPSTLTALIDEAFHVVEVDFRPTAERFSKYFYDRMTLKGYQVKSATVYETPANAASYEEDPHGTV

SEQ ID NO: 16833 - protein, 125 aa, Acidaminococcaceae bacterium
  misc_feature (1)..(125): tr|A0A359EU52|A0A359EU52_9FIRM 6-carboxy-5,6,7,8-tetrah ydropterin synthase OS=Acidaminococcaceae bacterium OX= 2049052 GN=queD PE=3 SV=1
MIVLKKFEFDAAHYLPSYNGKCERLHGHTYKLVVKVDGVPDMEGMVLDFSLLKKIVQTKVLRKLDHRLLNDVIPNPSAENIAIWVWDQLAKPLYAENRRLFEVEVWETRTSGCIYRGEFYEGELC

SEQ ID NO: 16834 - protein, 125 aa, Acidaminococcaceae bacterium
  misc_feature (1)..(125): tr|A0A351E835|A0A351E835_9FIRM 6-carboxy-5,6,7,8-tetrah ydropterin synthase OS=Acidaminococcaceae bacterium OX= 2049052 GN=queD PE=3 SV=1
MKVLKEFEFDAAHYLPSYNGKCEHLHGHTYRLVVLVEGRPDAEGMVMDFTKLKHTVQDLVLSRLDHHLLNDLLPNPSAENIAIWVWNKLAGPLSGPDRRLCEVQVWETRTSGCIYNGEFYEGELC

SEQ ID NO: 16835 - protein, 108 aa, Acidaminococcus fermentans
  misc_feature (1)..(108): tr|A0A1I5GR29|A0A1I5GR29_ACIFE 6-pyruvoyltetrahydropter in/6-carboxytetrahydropterin synthase OS=Acidaminococcu s fermentans OX=905 GN=SAMN02910455_00201 PE=4 SV=1
MYTVTKRIEVSGAHCLRLPYESKCTRLHGHNWIIDVTCRREELDENGMVVDFTHIKDVVMKLDHAFINDIVKTNPTAENIAKWIHDQIPFCTRVSVQESEGNVAIYED

SEQ ID NO: 16836 - protein, 108 aa, Acidaminococcus fermentans
  misc_feature (1)..(108): tr|D2RLP7|D2RLP7_ACIFV Uncharacterized protein OS=Acida minococcus fermentans (strain ATCC 25085 / DSM 20731 / VR4) OX=591001 GN=Acfer_1642 PE=4 SV=1
MYTVTKRIEVSGAHCLRLPYESKCTRLHGHNWIIDVTCRREELDANGMVVDFTHIKDVVMKLDHAFINDIVKTNPTAENIAKWIHDQIPFCTRVSVQESEGNVAIYED

SEQ ID NO: 16837 - protein, 109 aa, Acidaminococcus intestini
  misc_feature (1)..(109): tr|C0WAE6|C0WAE6_9FIRM Putative queuosine biosynthesis protein QueD OS=Acidaminococcus intestini OX=187327 GN= ACDG_00437 PE=4 SV=1
MMYTVTKRMEVSGAHALRLPYESKCTRLHGHNWIIEVTCRREELDENGMVVDFHHIKDVVKKLDHQNLNAILSMNPTAENIAKWIHDQVPYCTKVMVQESEGNVAVYED

SEQ ID NO: 16838 - protein, 120 aa, Acidaminococcus intestini
  misc_feature (1)..(120): tr|G4Q2M3|G4Q2M3_ACIIR 6-carboxy-5,6,7,8-tetrahydropter in synthase OS=Acidaminococcus intestini (strain RyC-MR 95) OX=568816 GN=ptpS PE=3 SV=1
MICLKEFDFDAAHFLPNYNGKCEHLHGHTYKLVVKVEGTPDHEGMVLDFVRFKNLVKELVVSKLDHAFINDILPQPSAENIAVWVWQQLETPLHGPNYHLFEVEVWETKTSGIIYRGETC

SEQ ID NO: 16839 - protein, 108 aa, Acidaminococcus sp.
  misc_feature (1)..(108): tr|R7LY49|R7LY49_9FIRM Uncharacterized protein OS=Acida minococcus sp. CAG:542 OX=1262687 GN=BN701_00714 PE=4 S V=1
MYTVTKRMEVSGAHCLQLPYKSKCTHLHGHNWIIDVTCQRETLDENGMVVDFTHIKEVVMQLDHAFINDIVKTNPTAENIAKWIHDQIPFCTRVSVQESEGNVAIYED

SEQ ID NO: 16840 - protein, 108 aa, Acidaminococcus sp.
  misc_feature (1)..(108): tr|A0A415EHI9|A0A415EHI9_9FIRM 6-carboxytetrahydropteri n synthase QueD OS=Acidaminococcus sp. AM05-11 OX=22919 97 GN=queD PE=4 SV=1
MYTVTKRIEVSGAHRLDLNYTSKCTHLHGHNWIIDVTCQREELDENGMVVDFGKIKEVVMALDHAFINDVVKINPTAENIAKWIHDRVPYCTRVSVQESEGNVAIYED

SEQ ID NO: 16841 - protein, 158 aa, Acidibacillus ferrooxidans
  misc_feature (1)..(158): tr|A0A124IW12|A0A124IW12_9BACL 6-pyruvoyl tetrahydrobio pterin synthase OS=Acidibacillus ferrooxidans OX=176568 3 GN=ATW55_02540 PE=4 SV=1
MSERNLRDSVEPLLYKPSQEIALSSLRYHDRRVTITKEFTFDAAHHLYAYKGKCANLHGHTYRLVVSVSDVLDEIGLSIDFGDVKALVKTHVVDRLDHTYLNEVLPPMNTTAENMIVWMFEEIERALHAFRETARVERLTLYETPTSSVEITRQEMGL

SEQ ID NO: 16842 - protein, 158 aa, Acidibacillus ferrooxidans
  misc_feature (1)..(158): tr|A0A162TX08|A0A162TX08_9BACL 6-carboxytetrahydropteri n synthase QueD OS=Acidibacillus ferrooxidans OX=176568 3 GN=AYJ22_08190 PE=4 SV=1
MSEKVSQDFAAPFVFKQAQESAPSSLRYHLRRVTITKEFTFDAAHHLYAYQGKCANLHGHTYRLIVSVSDVLDEIGLAIDFGDVKTLVKTHVVDRLDHTYLNEVLPPMNTTAENMIVWMFEEIEQALHAFRDTARVERLTLYETPTSSVEITRQEMGL

SEQ ID NO: 16843 - protein, 152 aa, Acidibacillus sulfuroxidans
  misc_feature (1)..(152): tr|A0A2U3D6Q1|A0A2U3D6Q1_9BACL 6-carboxytetrahydropteri n synthase QueD OS=Acidibacillus sulfuroxidans OX=17656 84 GN=BM613_11140 PE=4 SV=1
MEFVVPQKLLQLDIDIAREQLRYHQKRVLVTKEFTFDAAHHLYAYEGKCVGLHGHTYRLLVSASAVPNDIGISIDFADLKRIVKQSVVDRLDHQYLNAVLPPMNTTAENMVVWMYEQIAQALQQEGSSARVERVVLWETPTSCAEVSREEME

SEQ ID NO: 16844 - protein, 107 aa, Acidibacillus sulfuroxidans
  misc_feature (1)..(107): tr|A0A2U3CNT8|A0A2U3CNT8_9BACL Uncharacterized protein OS=Acidibacillus sulfuroxidans OX=1765684 GN=BM613_1447 5 PE=4 SV=1
MIDFSVVKTTLCQWLEDNWDHKFLHWSRDNLIDALKIAASRPSCPLEHEDHEHFLGSLVALPFNPTAENLAAYMVDVIGPQLLDQYGVELVECTIEETSKCHVNYCK

SEQ ID NO: 16845 - protein, 131 aa, Acidiferrobacter sp.
  misc_feature (1)..(131): tr|A0A2Z3R5N7|A0A2Z3R5N7_9GAMM 6-carboxy-5,6,7,8-tetrah ydropterin synthase OS=Acidiferrobacter sp. SPIII_3 OX= 1281578 GN=queD PE=3 SV=1
MEIFKSFRIEAAHRLPGLPEGHKCWRLHGHSFRIDVHVRGLVDARCGWVMDFADVGAAFRPIFDDLDHHYLNDIPGLENPTSECLAQYVWGRLADVLPGLARVVIHETCTSGCAYEGPGSVKEGQKLGGGD

SEQ ID NO: 16846 - protein, 131 aa, Acidiferrobacter thiooxydans
  misc_feature (1)..(131): tr|A0A1C2FY07|A0A1C2FY07_9GAMM 6-carboxy-5,6,7,8-tetrah ydropterin synthase OS=Acidiferrobacter thiooxydans OX= 163359 GN=queD PE=3 SV=1
MEIFKSFRIEAAHRLPGLPEGHKCWRLHGHSFRIDVHVRGVVDAQRGWVMDFADVGAAFRPIFDDLDHRYLNDIVGLENPTSERLAQYVWGRLAGALPGLARVVIHETCTSGCAYEGPGSVKEGQKVGGGD

SEQ ID NO: 16847 - protein, 127 aa, Acidihalobacter ferrooxidans
  misc_feature (1)..(127): tr|A0A1P8UJC5|A0A1P8UJC5_9GAMM 6-carboxy-5,6,7,8-tetrah ydropterin synthase OS=Acidihalobacter ferrooxidans OX= 1765967 GN=BW247_13045 PE=3 SV=1
MPATYLLTVHTDFAAAHTLRDYPGDCSRLHGHNWKLEAQVRATALNDVGMAIDFKAIKSVAREVAGELDHRYLNELPPFTTVNPTAENIAAYIYRQMSARLDTDTARVSAVTLWETDRACVRYSEDT

SEQ ID NO: 16848 - protein, 127 aa, Acidihalobacter prosperus
  misc_feature (1)..(127): tr|A0A1D8IQ47|A0A1D8IQ47_9GAMM 6-carboxy-5,6,7,8-tetrah ydropterin synthase OS=Acidihalobacter prosperus OX=160 660 GN=BI364_12000 PE=3 SV=1
MPAKYTLTVLTDFAAAHTLRDYPGDCSRLHGHNWKLEAEVQATALDKVGMAVDFKVIKRAAREIAGELDHRYLNELEPFVQINPTAEHIAAYLFSRLAERINTDCVRVSAITLWETERACVRYSEEA

SEQ ID NO: 16849 - protein, 127 aa, Acidihalobacter prosperus
  misc_feature (1)..(127): tr|A0A1D8K968|A0A1D8K968_9GAMM 6-carboxy-5,6,7,8-tetrah ydropterin synthase OS=Acidihalobacter prosperus OX=160 660 GN=BJI67_10960 PE=3 SV=1
MPAKYTLTVLTDFAAAHTLRGYPGDCSRMHGHNWKLEAEVQATALDDVGMAVDFKVIKQAAREIAGELDHHYLNDLPAFARVNPTAEQIAAYIYQRLGERLNTGQVRVSAVTLWETERACVRYSEEA

SEQ ID NO: 16850 - protein, 150 aa, Acidimicrobiaceae bacterium
  misc_feature (1)..(150): tr|A0A2D7S0Q5|A0A2D7S0Q5_9ACTN 6-carboxytetrahydropteri n synthase QueD OS=Acidimicrobiaceae bacterium OX=20248 94 GN=CL416_08035 PE=4 SV=1
MTKIRVTKSFGFETGHALYGHDGLCKNIHGHSYKLFVTVIGTPINEANHAKNGMVIDFKDLKTIVKSEIVDVFDHAMVLNNNSPHSELATVLSSQEHKVIRVDYQPTSENMVIDFANRIASKLPSHIKLFKVRLNETATAYAEWYASDQE

SEQ ID NO: 16851 - protein, 125 aa, Acidimicrobiaceae bacterium
  misc_feature (1)..(125): tr|A0A2E0E065|A0A2E0E065_9ACTN Uncharacterized protein OS=Acidimicrobiaceae bacterium OX=2024894 GN=CL425_0657 5 PE=4 SV=1
MKLTITASIHARWGHRVDNLIHTHAWTVEATLEGPLDSKKVFPADDLEKILTNAVEPWSGHYLTKKDVGIWKGYKPLIWMKEPTVEEITRNLWGHLSKKVPTLTGVSLIESSEFDRCRKVSLTKN

SEQ ID NO: 16852 - protein, 115 aa, Acidimicrobiales bacterium
  misc_feature (1)..(115): tr|A0A2W6DEP5|A0A2W6DEP5_9ACTN 6-carboxy-5,6,7,8-tetrah ydropterin synthase OS=Acidimicrobiales bacterium OX=22 01156 GN=queD PE=3 SV=1
MRARVTRSFSFEAAHHLPWHPGRCRRMHGHHYRLEVTVEGAIGDQGVVIDFDRLAEVVEAAVISRYDHHLINDFLDNPTAELIAADAWKSVEAAGLAVAAIRLWETPDSMVELLA

SEQ ID NO: 16853 - protein, 118 aa, Acidiphilium cryptum
  misc_feature (1)..(118): tr|A5G265|A5G265_ACICJ 6-carboxy-5,6,7,8-tetrahydropter in synthase OS=Acidiphilium cryptum (strain JF-5) OX=34 9163 GN=Acry_2756 PE=3 SV=1
MHEITKEFRFEAAHTLQRQIAAEASRRIHGHSYRATVTLRGAPDASGMLMDFGRLGQHLAAIREALDHRFLDEVEGLGPATLENLARFIWTRLATSCPGLARVAVFRDSEGESCAYSE

SEQ ID NO: 16854 - protein, 118 aa, Acidiphilium multivorum
  misc_feature (1)..(118): tr|F0J5N9|F0J5N9_ACIMA 6-carboxy-5,6,7,8-tetrahydropter in synthase OS=Acidiphilium multivorum (strain DSM 1124 5 / JCM 8867 / NBRC 100883 / AIU301) OX=926570 GN=ACMV_ 30860 PE=3 SV=1
MHEITKEFRFEAAHTLQRQIAAEASRRIHGHSYRATVTLRGAPDASGMLMDFGRLGQHLAAIREALDHRFLDEVEGLGPATLENLARFIWTRLAPSCPGLARVAVFRDSEGESCAYSE

SEQ ID NO: 16855 - protein, 118 aa, Acidiphilium rubrum
  misc_feature (1)..(118): tr|A0A1N6VYR7|A0A1N6VYR7_ACIRU 6-carboxy-5,6,7,8-tetrah ydropterin synthase OS=Acidiphilium rubrum OX=526 GN=SA MN05421828_11044 PE=3 SV=1
MFEITKDFRFEAAHTLNRTIETESSRRIHGHSYRATITLRGTPGASGMIMDFGILNTHIATLRDILDHRFLDEVPNLGPATLENLAAFIWRTLHPACPGLARVAVFRDSEGESCTYEG

SEQ ID NO: 16856 - protein, 118 aa, Acidiphilium sp.
  misc_feature (1)..(118): tr|F7S5Z2|F7S5Z2_9PROT 6-carboxy-5,6,7,8-tetrahydropter in synthase OS=Acidiphilium sp. PM OX=1043206 GN=APM_17 43 PE=3 SV=1
MHEITKEFRFEAAHTLQRQIAAEASRRIHGHSYRTTVTLRGAPDASGMLMDFGRLGQHLAAIREALDHRFLDEVEGLGPATLENLARFIWTRLAPSCPGLARVAVFRDSEGESCAYSE

SEQ ID NO: 16857 - protein, 122 aa, Acidiphilium sp.
  misc_feature (1)..(122): tr|A0A257SBV5|A0A257SBV5_9PROT 6-carboxy-5,6,7,8-tetrah ydropterin synthase OS=Acidiphilium sp. 21-60-14 OX=197 0292 GN=B7Z67_07800 PE=3 SV=1
MFELSKQFRFEAAHTLHRVGLAAASEAASRRIHGHSYRADVTLRGERDAQGMVLDLERVAAALAHVRALLDHQFLDDVAGLGPATLENLAAFIWAKLTDELPGLTRVAVYRDSEGDACVYTG

SEQ ID NO: 16858 - protein, 125 aa, Acidipila dinghuensis
  misc_feature (1)..(125): tr|A0A4Q1SHN3|A0A4Q1SHN3_9BACT 6-carboxy-5,6,7,8-tetrah ydropterin synthase OS=Acidipila dinghuensis OX=1560006 GN=queD PE=3 SV=1
MYEVRVEREFSSGHYLRNYRGKCENPHGHNYKVQITLRGETLDVSGLLLDFKDLKHVMRPVIDRLDHQMLNDLEPFTEINPSAENLAKYFYDETKSQLHELTKGRVTVKDCTIYETDTTTATYYE

SEQ ID NO: 16859 - protein, 135 aa, Acidipila dinghuensis
  misc_feature (1)..(135): tr|A0A4Q1SDU2|A0A4Q1SDU2_9BACT 6-carboxytetrahydropteri n synthase OS=Acidipila dinghuensis OX=1560006 GN=ESZ00 _11630 PE=4 SV=1
MILLTRKAEFSAAHYYWNPAWSEEENLRRFGKCANRNGHGHNYTLEVTVAGEIDPATGFVVDLKQLKEVLEREVVSVYDHRHLNLEVPEFATAVPTTENIAIAVWKRLEGKIPGARLYRVRVYELPELFADYYGE

SEQ ID NO: 16860 - protein, 136 aa, Acidipila rosea
  misc_feature (1)..(136): tr|A0A4R1LBY7|A0A4R1LBY7_9BACT 6-pyruvoyltetrahydropter in/6-carboxytetrahydropterin synthase OS=Acidipila rose a OX=768535 GN=C7378_0674 PE=4 SV=1
MRAYFSRRYRLSASHRLHSDALTDEQNRATYGKCNNPFGHGHNYIVEVTAGGQVDAETGMVCNLVDLDGCVHKLVIERFDHTNLNLDPMFQKLVPTTENLTIEIFQILKEAFRPAEIVRVRVEETSNNFFEYSGEA

SEQ ID NO: 16861 - protein, 125 aa, Acidipila rosea
  misc_feature (1)..(125): tr|A0A4V2PUX1|A0A4V2PUX1_9BACT 6-carboxy-5,6,7,8-tetrah ydropterin synthase OS=Acidipila rosea OX=768535 GN=C73 78_2784 PE=3 SV=1
MYEVTVEAGFSSGHYLRNYKGKCENPHGHNYKVKVTLRGNTLDKAGLLLDFKDLKQVMRPVVDRLDHQMINDLEPFTEINPSAENLARYFFDETNKQLSEMTAGRVHVKDCTIYETDTTTATYYE

SEQ ID NO: 16862 - protein, 145 aa, Acidipila sp.
  misc_feature (1)..(145): tr|A0A372IS76|A0A372IS76_9BACT 6-pyruvoyl tetrahydrobio pterin synthase OS=Acidipila sp. 4G-K13 OX=2303751 GN=D 0Y96_06340 PE=4 SV=1
MRAWLGRRYRLSASHRLHTDALSEAENRAIYGKCNNPHGHGHNYVIEVTVGGEVDPKTGMVCDLAALDACVQRKVVEPFDHMNLNTLPCFQDRVPTTENLCMEVHRRLKDALTGVELARVRVEETSNNFFEYRDGAIPSGKGNRA

SEQ ID NO: 16863 - protein, 137 aa, Acidipila sp.
  misc_feature (1)..(137): tr|A0A3P0X3X3|A0A3P0X3X3_9BACT 6-carboxytetrahydropteri n synthase OS=Acidipila sp. EB88 OX=2305226 GN=D1Y84_01 470 PE=4 SV=1
MILLTRRAEWSASHYYWVDSWSEAQNRERFGKCANRNGHGHNYVLDVTVRGNVDPQTGFVVDLKWLKDVLEREVIAVFDHRHLNLEVPEFRTLMPTTENIAIAIWRRLADKVSPAATLHQVRVYETPDLFADYYGEA

SEQ ID NO: 16864 - protein, 125 aa, Acidisarcina polymorpha
  misc_feature (1)..(125): tr|A0A2Z5G8R2|A0A2Z5G8R2_9BACT 6-carboxy-5,6,7,8-tetrah ydropterin synthase OS=Acidisarcina polymorpha OX=22111 40 GN=ACPOL_6106 PE=3 SV=1
MYEVTVEAGFSSGHYLRNYKGKCENPHGHNYKVLVTLQGATLDHAGLLLDFKDLKHVMRPVVDRLDHQMINDLEPFTEINPSAENLARYFFEETNRQLAEMTKGRVRVKDCTVYETDTSFAKYYE

SEQ ID NO: 16865 - protein, 95 aa, Acidisarcina polymorpha
  misc_feature (1)..(95): tr|A0A2Z5G7B0|A0A2Z5G7B0_9BACT 6-pyruvoyl tetrahydrobio pterin synthase OS=Acidisarcina polymorpha OX=2211140 G N=ACPOL_5621 PE=4 SV=1
MEVTTGGQVDAQTGMVCDLVKLDDAVRKNVVERFDLTNLNLDECFRKLVPTTENLCIAIHERLMPVFQSGVLGQVDLVRVRVEETANNFFEFTGK

SEQ ID NO: 16866 - protein, 125 aa, Acidisphaera rubrifaciens
  misc_feature (1)..(125): tr|A0A0D6P3S6|A0A0D6P3S6_9PROT 6-carboxy-5,6,7,8-tetrah ydropterin synthase OS=Acidisphaera rubrifaciens HS-AP3 OX=1231350 GN=Asru_0009_36 PE=3 SV=1
MFELSKEFRFDAAHTLERVIDTEPSRRIHGHSYRAEVVIRGRPDPQTGMIMDLGLFERALESAREGLDHRFLDELHDLGPSTMENLSAWIWRKVEPVCPDLWRVTVRRDSDQGACSYFGREGQGV

SEQ ID NO: 16867 - protein, 119 aa, Acidithiobacillales bacterium
  misc_feature (1)..(119): tr|A0A0S8L2R8|A0A0S8L2R8_9PROT 6-carboxy-5,6,7,8-tetrah ydropterin synthase OS=Acidithiobacillales bacterium SM 1_46 OX=1703384 GN=AMJ72_07790 PE=3 SV=1
MEIFKLFTVEAAHRLPNLPPAHKCSRLHGHSFRIEVHVTGPVVEPEGWVQDFGDIGAAFRPIFEQLDHCYLNEIGGLENPTSEILARWIWQRLKPALPGLSSIVIRETCTSGCIYRGEA

SEQ ID NO: 16868 - protein, 120 aa, Acidithiobacillales bacterium
  misc_feature (1)..(120): tr|A0A0S8BL60|A0A0S8BL60_9PROT 6-carboxy-5,6,7,8-tetrah ydropterin synthase OS=Acidithiobacillales bacterium SG 8_45 OX=1703383 GN=AMJ68_02365 PE=3 SV=1
MDIFKIFTIEAAHRLPNLPESHKCSRLHGHSIGIEVHVSGEVSAEQGWVQDFGDISQAFKPIYEQLDHYYLNEIEGLENPTSENLARWIWVRLKPKLPLLSKLVIRETCTAGCIYTGDDN

SEQ ID NO: 16869 - protein, 118 aa, Acidithrix ferrooxidans
  misc_feature (1)..(118): tr|A0A0D8HCV8|A0A0D8HCV8_9ACTN 6-carboxy-5,6,7,8-tetrah ydropterin synthase OS=Acidithrix ferrooxidans OX=12805 14 GN=queD PE=3 SV=1
MEIYKEFSFDSAHRLPNLPDSHKCSRLHGHTFKVTVYVQGDVDPQLGWVLDFGDIKECVKPIIDELDHRYLNDIDGLENPTSENISRWIFEKLILVMPVSKIMVNETCTSGCIYTGHP

SEQ ID NO: 16870 - protein, 134 aa, Acidobacteria bacterium
  misc_feature (1)..(134): tr|A0A522Q512|A0A522Q512_9BACT 6-carboxy-5,6,7,8-tetrah ydropterin synthase OS=Acidobacteria bacterium OX=19782 31 GN=queD PE=3 SV=1
MFEISVEYSFAAGHALRGYKGKCENVHGHNYKVRVTVGGEKLNSIGLLMDFSDLRAALKGLVERFDHHFLNDVEPFTEANPSAENLACYLGNELQRKIKDQGLSVSNVTVWETDSTSASYRPPSGSRVENGERS

SEQ ID NO: 16871 - protein, 126 aa, Acidobacteria bacterium
  misc_feature (1)..(126): tr|A0A1Q7LD02|A0A1Q7LD02_9BACT 6-carboxy-5,6,7,8-tetrah ydropterin synthase OS=Acidobacteria bacterium 13_1_40C M_4_58_4 OX=1803453 GN=AUH86_05460 PE=3 SV=1
MFEVTVEDSFAAGHYLRNYKGKCEKPHGHNYKVRVTLAGKELDKAGLLLDFKDLREVMKHVIDRLDHQMINELEPFTVMNPSAENLAQYFYEETNGRLRSATNGRAWVKTVTVFETDTTTATYSES

SEQ ID NO: 16872 - protein, 136 aa, Acidobacteriales bacterium
  misc_feature (1)..(136): tr|A0A1Q6X9U9|A0A1Q6X9U9_9BACT 6-pyruvoyl tetrahydrobio pterin synthase OS=Acidobacteriales bacterium 13_2_20CM _55_8 OX=1803470 GN=AUH15_08535 PE=4 SV=1
MIYLTRKAEFAASHYYHNPEFTPEENQRIFGKCNNPNGHGHNYTLEVTVKGEVDPRSGFVVDLKQLKEVLNREVLDAMDHRFLNKEVPEFFTRIPTTENLAISIWQRLAPKLKTAQLHRVRVYETSDLFVDFYGEA

SEQ ID NO: 16873 - protein, 138 aa, Acidobacteriales bacterium
  misc_feature (1)..(138): tr|A0A3N5KCW4|A0A3N5KCW4_9BACT 6-carboxytetrahydropteri n synthase OS=Acidobacteriales bacterium OX=2282142 GN= EHM65_08095 PE=4 SV=1
MLITRRAEFSASHVCRHPARTNEENAAIYGAEANPRGHGHNFVLEVTLEGEPDPVTGMVYDLKKLKEVLQREVVDLFDHRFLNLEVAPFDRVIPTPENMAVDIWGRLDATFRDPGVRLHAVRLFETEDLWVEYNGGAG

SEQ ID NO: 16874 - protein, 123 aa, Acidobacteriia bacterium
  misc_feature (1)..(123): tr|A0A317IXR0|A0A317IXR0_9BACT 6-carboxy-5,6,7,8-tetrah ydropterin synthase OS=Acidobacteriia bacterium OX=2081 523 GN=queD PE=3 SV=1
MFEVTIEQTFAAGHALRNYRGKCENVHGHNYRCEVTLQGPRLDETGLLMDFVALKKSLQTVVDRLDHQWLNDFPPFDVLNPSAENIAKYIYDEVSKQIGAGSEVRLGAVRLWETDTSSATYRP

SEQ ID NO: 16875 - protein, 179 aa, Acidobacteriia bacterium
  misc_feature (1)..(179): tr|A0A317J844|A0A317J844_9BACT Uncharacterized protein OS=Acidobacteriia bacterium OX=2081523 GN=C5B51_02315 P E=4 SV=1
METTGASSGGRSAQVAAGPRLRNARSLCGLLPGGRVFRVTRRYHFASSHRLHSPELSEEENQKIYGKCNNPYGHGHDYVLDVSACGPLDSAAGRVLDTRLMDDLVERLVLHPFDHRNLNTEVQWFMPVVPTSENLGREICRRLKHNWNSTFPDEWPRLEKVRIEETPRNIFEVRADEIE

SEQ ID NO: 16876 - protein, 125 aa, Acidobacterium capsulatum
  misc_feature (1)..(125): tr|C1F2N7|C1F2N7_ACIC5 6-carboxy-5,6,7,8-tetrahydropter in synthase OS=Acidobacterium capsulatum (strain ATCC 5 1196 / DSM 11244 / JCM 7670 / NBRC 15755 / NCIMB 13165 / 161) OX=240015 GN=ACP_2697 PE=3 SV=1
MYEVTVERGFSSGHYLRNYKGKCENPHGHNYKVKITLQGKELDAAGLLLDFKDLKHVMRPVIDRLDHQMINDLEPFTQINPSAENLARYFYDETNKQLAEMTGSRVRVKDCTIYETDTTTATYYE

SEQ ID NO: 16877 - protein, 136 aa, Acidobacterium sp.
  misc_feature (1)..(136): tr|A0A2G4JEZ1|A0A2G4JEZ1_9BACT Uncharacterized protein OS=Acidobacterium sp. OX=1872119 GN=CK533_12330 PE=4 SV =1
MYCVTVRDHIMIAHSFKGDVFGPAQRLHGATYVVDAEFRRAEVDADGIVVDIGRAGDVLKQVLAGLNFRNLDEVPEFKGKNTTTEFIARTVFDRMVAAIRRGELGPGAGAVESLRVTLQESHVASAWYEGRVGGAA

SEQ ID NO: 16878 - protein, 125 aa, Acidobacterium sp.; identical to SEQ ID NO: 16876
  misc_feature (1)..(125): tr|A0A3D4VK39|A0A3D4VK39_9BACT 6-carboxy-5,6,7,8-tetrah ydropterin synthase OS=Acidobacterium sp. OX=1872119 GN =queD PE=3 SV=1

SEQ ID NO: 16879 - protein, 123 aa, Acidocella aminolytica
  misc_feature (1)..(123): tr|A0A0D6PF98|A0A0D6PF98_9PROT 6-carboxy-5,6,7,8-tetrah ydropterin synthase OS=Acidocella aminolytica 101 = DSM 11237 OX=1120923 GN=Aam_047_006 PE=3 SV=1
MYELSKQFIFDAAHTLDRKIETESSRRIHGHTYLAEVTIRGTADPATGMVMDVGLLGRLLESTRDALDHHFLDDVPDLGHATMENLCAWIWRRLIPACPALYRVTISRASNQDRCAYFGPEGD

SEQ ID NO: 16880 - protein, 123 aa, Acidocella sp.
  misc_feature (1)..(123): tr|A0A257NR40|A0A257NR40_9PROT 6-carboxy-5,6,7,8-tetrah ydropterin synthase OS=Acidocella sp. 20-63-7 OX=197030 4 GN=B7X08_01105 PE=3 SV=1
MYELSKQFRFEAAHTLQRTIDEEPSKRIHGHSYRAEVFLRGEPDPKSGMLMDLGHLAQRIALVREALDHRFLDDISDLGPATMENLAAWIWRHLVEACPALVRVCVYRDSEGDACSYFGEANS

SEQ ID NO: 16881 - protein, 123 aa, Acidocella sp.
  misc_feature (1)..(123): tr|K5YIE1|K5YIE1_9PROT 6-carboxy-5,6,7,8-tetrahydropter in synthase OS=Acidocella sp. MX-AZ02 OX=1214225 GN=MXA ZACID_14408 PE=3 SV=1
MYELSKQFIFDAAHTLERKIETDPSRRIHGHTYLAEVTLRGKADPASGMVMDVGLLARLLEEVRDGLDHRFLDEVPDLGPATMENLCAWIWTRLAAACPALYRVTISRASNQDRCAYYGPEAA

SEQ ID NO: 16882 - protein, 176 aa, Acidomonas methanolica
  misc_feature (1)..(176): tr|A0A023D1E4|A0A023D1E4_ACIMT Uncharacterized protein OS=Acidomonas methanolica NBRC 104435 OX=1231351 GN=Amm e_011_057 PE=4 SV=1
MSKAELVFTRRFSMGHRLIDGASESCALPHGHNEFVTVALRPVRERALDGRGNMIVSFREAKQRWHEFVDTALDHALQLSERDPLLEWFRANEPGRAARIVVTPGDPTTELMAALMLAKLNAFLREAGETLVCEEISLQETPTNTVRLTGDAMDYLPPAGRAAQACWWHRPDFSIQ

SEQ ID NO: 16883 - protein, 125 aa, Acidovorax anthurii
  misc_feature (1)..(125): tr|A0A328YTY0|A0A328YTY0_9BURK 6-carboxy-5,6,7,8-tetrah ydropterin synthase OS=Acidovorax anthurii OX=78229 GN= AX018_105123 PE=3 SV=1
MLFTVHQRFFFDAAHTLQREIEAEGSRRIHGHTYHAEICVTGPRHPTTGMVIDLGHLRARCAQLRERLDHHLLDEVPGLGPATLENLCVFIADALADMEPPPSRVRVWREAVGDGCVLDLAPARG

SEQ ID NO: 16884 - protein, 125 aa, Acidovorax avenae
  misc_feature (1)..(125): tr|F0Q0X7|F0Q0X7_ACIAP 6-carboxy-5,6,7,8-tetrahydropter in synthase OS=Acidovorax avenae (strain ATCC 19860 / D SM 7227 / JCM 20985 / NCPPB 1011) OX=643561 GN=Acav_375 3 PE=3 SV=1
MLFTVHQRFFFDAAHTLQREIEAEGSRRIHGHTYHAEISVTGPRHPATGMVIDLGHLRARCAQLRERLDHHLLDEVPGLGPATLENLCVFIADALGDLDPPPSRVRVWRDAVGDGCVLDLALPRG

SEQ ID NO: 16885 - protein, 125 aa, Acidovorax avenae
  misc_feature (1)..(125): tr|A0A2R4DRN2|A0A2R4DRN2_9BURK 6-carboxy-5,6,7,8-tetrah ydropterin synthase OS=Acidovorax avenae subsp. avenae OX=80870 GN=C8239_14545 PE=3 SV=1
MLFTVHQRFFFDAAHTLQREIEAEGSRRIHGHTYHAEIYVTGPRHPATGMVIDLGHLRARCAQLRERLDHHLLDEVPGLGPATLENLCVFIADALGDLDPPPSRVRVWREAVGDGCVLDLARPRG

SEQ ID NO: 16886 - protein, 125 aa, Acidovorax carolinensis
  misc_feature (1)..(125): tr|A0A240TQL3|A0A240TQL3_9BURK 6-carboxy-5,6,7,8-tetrah ydropterin synthase OS=Acidovorax carolinensis OX=55381 4 GN=CBP33_04190 PE=3 SV=1
MQFTVSQRFFFDAAHTLQREIEAEGSRRVHGHTYHAEVWVQGPRNTANGMVIDLGFLRQHLAVVREQLDHHLLDEVPGLGTPTLENLCAFIAQQLSGLQPPPSRVRVWREALGDGCTLDLTPPQA

SEQ ID NO: 16887 - protein, 125 aa, Acidovorax carolinensis
  misc_feature (1)..(125): tr|A0A240U9Q9|A0A240U9Q9_9BURK 6-carboxy-5,6,7,8-tetrah ydropterin synthase OS=Acidovorax carolinensis OX=55381 4 GN=CBP34_04135 PE=3 SV=1
MQFTVSQRFFFDAAHTLQREIEAEGSRRVHGHTYHAEVWVQGPRNPANGMVIDLGFLRQRLAVVREQLDHHLLDEVPGLGTPTLENLCAFIAQQLSGMQPPPSRVRVWREALGDGCTLDLTPPQA

SEQ ID NO: 16888 - protein, 125 aa, Acidovorax cattleyae
  misc_feature (1)..(125): tr|A0A1H0T552|A0A1H0T552_9BURK 6-carboxy-5,6,7,8-tetrah ydropterin synthase OS=Acidovorax cattleyae OX=80868 GN =SAMN04489708_11426 PE=3 SV=1
MLLTVHQRFFFDAAHTLQREIESEGSRRIHGHTYHAEISVTGPRHPATGMVIDLGHLRARCAQLRERLDHHLLDEVPGLGPATLENLCVFIADVLGDLDPPPSRVRVWREAVGDGCVLDLARPRG

SEQ ID NO: 16889 - protein, 120 aa, Acidovorax cavernicola
  misc_feature (1)..(120): tr|A0A3A1W4I0|A0A3A1W4I0_9BURK 6-carboxy-5,6,7,8-tetrah ydropterin synthase OS=Acidovorax cavernicola OX=167579 2 GN=D3H34_21670 PE=3 SV=1
MRFTISQRFFFDAAHTLKREIEVEGSRRIHGHTYHAEVWLTGERDPVTGMVIDLGLLRRRLEDVREQLDHHLLDDVPGLHPPTLENLCVFIAEALPDLRESLARVRVWREALGDSCTVDF

SEQ ID NO: 16890 - protein, 125 aa, Acidovorax citrulli
  misc_feature (1)..(125): tr|A1TTV2|A1TTV2_ACIAC 6-carboxy-5,6,7,8-tetrahydropter in synthase OS=Acidovorax citrulli (strain AAC00-1) OX= 397945 GN=Aave_3845 PE=3 SV=1
MLFTVHQRFFFDAAHTLQREIEAEGSRRIHGHTYHAEISVTGPRHPATGMVIDLGHLRARCAQLRERLDHHLLDEVPGLGPATLENLCVFIADALGDLDPAPSRVRVWREAIGDGCVLDLARPRG

SEQ ID NO: 16891 - protein, 124 aa, Acidovorax delafieldii
  misc_feature (1)..(124): tr|A0A561XIL2|A0A561XIL2_ACIDE 6-carboxy-5,6,7,8-tetrah ydropterin synthase OS=Acidovorax delafieldii OX=47920 GN=ATF69_3516 PE=3 SV=1
MLFTISQRFFFDAAHTLRREIEAEGSRRVHGHTYHAEVFLSGPRDPATGMVLDLGLLRQGLAVVREQLDHHMLDEVPGLGTPTLENLCLFIAQALPADLRASLSRVRVWREALGDSCALDFPQP

SEQ ID NO: 16892 - protein, 124 aa, Acidovorax delafieldii
  misc_feature (1)..(124): tr|C5T9G5|C5T9G5_ACIDE 6-carboxy-5,6,7,8-tetrahydropter in synthase OS=Acidovorax delafieldii 2AN OX=573060 GN= AcdelDRAFT_3545 PE=3 SV=1
MLFTISQRFFFDAAHTLRREIEAEGSRRVHGHTYHAEVFLTGPRDPATGMVLDLGLLRQGLAVVREQLDHHMLDEVPGLGTPTLENLCVFIAQALPADLRPRVSRVRVWREALGDSCVLDFSTH

SEQ ID NO: 16893 - protein, 124 aa, Acidovorax kalamii
  misc_feature (1)..(124): tr|A0A235EGY7|A0A235EGY7_9BURK 6-carboxy-5,6,7,8-tetrah ydropterin synthase OS=Acidovorax kalamii OX=2004485 GN =CBY09_19820 PE=3 SV=1
MLFTISQRFFFDAAHTLRREIEAEGSRRVHGHTYHAEVFLSGPRDPATGMVLDLGLLRRGLEVVREQLDHHMLDDVPGLGTPTLENLCVFIAQALPADLRPSVSRVRVWREALGDSCVLDFPQP

SEQ ID NO: 16894 - protein, 125 aa, Acidovorax konjaci
  misc_feature (1)..(125): tr|A0A1I1SK39|A0A1I1SK39_9BURK 6-carboxy-5,6,7,8-tetrah ydropterin synthase OS=Acidovorax konjaci OX=32040 GN=S AMN04489710_102273 PE=3 SV=1
MLFTVHQRFFFDAAHTLQREIEAEGSRRIHGHTYHAEISVTGPRHPATGMVIDLGHLRARCTQLRERLDHHLLDEVPGLGPATLENLCVFIADALSDLDPPPSRVRVWREAVGDGCVLDLARPRG

SEQ ID NO: 16895 - protein, 124 aa, Acidovorax radicis
  misc_feature (1)..(124): tr|A0A561CPH7|A0A561CPH7_9BURK 6-carboxy-5,6,7,8-tetrah ydropterin synthase OS=Acidovorax radicis OX=758826 GN= FB546_104153 PE=3 SV=1
MQFTISQRFFFDAAHTLRREIEAEGSRRIHGHTYHAEVSLSGPRDPSTGMVLDLGLLRRGLDVVREQLDHHMLDEVPGLGIPTLENLCLFIAQALPAELRPRVSRVRVWREALGDSCALDFTPP

SEQ ID NO: 16896 - protein, 124 aa, Acidovorax soli
  misc_feature (1)..(124): tr|A0A1H3W7Q5|A0A1H3W7Q5_9BURK 6-carboxy-5,6,7,8-tetrah ydropterin synthase OS=Acidovorax soli OX=592050 GN=SAM N05421875_102118 PE=3 SV=1
MLFTISQRFFFDAAHTLRREIEAEGSRRVHGHTYHAEVFLTGARDPATGMVLDLGLLRQGLAVVREQLDHHMLDDVPGLGTPTLENLCVFIAQALPAVLRASVSRVRVWREALGDSCVLDFSTH

SEQ ID NO: 16897 - protein, 124 aa, Acidovorax sp.
  misc_feature (1)..(124): tr|A0A495HZN9|A0A495HZN9_9BURK 6-carboxy-5,6,7,8-tetrah ydropterin synthase OS=Acidovorax sp. 94 OX=2135633 GN= C8C94_2684 PE=3 SV=1
MLFTISQRFFFDAAHTLRREIEAEGSRRVHGHTYHAEVFLSGPRDPATGMVLDLGLLRRGLEVVREQLDHHMLDDVPGLGTPTLENLCVFIAQALPADLRASVSRVRVWREALGDSCMLDFPQP

SEQ ID NO: 16898 - protein, 124 aa, Acidovorax sp.
  misc_feature (1)..(124): tr|A0A1Q3J5H0|A0A1Q3J5H0_9BURK 6-carboxy-5,6,7,8-tetrah ydropterin synthase OS=Acidovorax sp. 65-7 OX=1895692 G N=BGN90_18245 PE=3 SV=1
MLFTISQRFFFDAAHTLRREIEAEGSRRVHGHTYHAEVFLTGPRDPATGMVLDLGLLRQGLAVVREQLDHHMLDEVPGLGTPTLENLCLFIAQALPADLRASVSRVRVWREALGDSCALDFSQP

SEQ ID NO: 16899 - protein, 124 aa, Acidovorax temperans
  misc_feature (1)..(124): tr|A0A543LAB9|A0A543LAB9_9BURK 6-carboxy-5,6,7,8-tetrah ydropterin synthase OS=Acidovorax temperans OX=80878 GN =BDD18_2914 PE=3 SV=1
MQLTIRQRFFFDAAHTLRREIEAEGSRRIHGHTYHAEVALTGPLDPATGMVQDLGHLRARLAEVREQLDHHFLDEVPGLGVPTLEHLCLFIARAVADLHPSQVRVWRDAVGDACTLDLPQAPSA

SEQ ID NO: 16900 - protein, 127 aa, Acidovorax valerianellae
  misc_feature (1)..(127): tr|A0A1G6PHC9|A0A1G6PHC9_9BURK 6-carboxy-5,6,7,8-tetrah ydropterin synthase OS=Acidovorax valerianellae OX=1878 68 GN=SAMN05192589_103226 PE=3 SV=1
MQFTVHQRFFFDAAHTLQREIEAEGSRRIHGHTYHAEVAVTGPRDAATGMVIDLGHLRERLAAVREQLDHHWLDEVPGLGTPTLENLCQFIAQALHGMQPPASRVRVWREALGDGCVLDLPAPGPVR

SEQ ID NO: 16901 - protein, 120 aa, Acidovorax wautersii
  misc_feature (1)..(120): tr|A0A1I2BQB1|A0A1I2BQB1_9BURK 6-carboxy-5,6,7,8-tetrah ydropterin synthase OS=Acidovorax wautersii OX=1177982 GN=SAMN04489711_103138 PE=3 SV=1
MQFTVHQRFFFDAAHTLQREIEAEGSRRIHGHTYHAEISVTGPRHPDSGMVIDLGHLRARCDRLREQLDHHLLDEVPGLGPATLENLCVFIARDLADMQPAPSRVRVWRDALGDGCVLDL

SEQ ID NO: 16902 - protein, 198 aa, Acinetobacter albensis
  misc_feature (1)..(198): tr|A0A1C4GV27|A0A1C4GV27_9GAMM 6-pyruvoyltetrahydropter in/6-carboxytetrahydropterin synthase OS=Acinetobacter albensis OX=1673609 GN=GA0116959_10540 PE=4 SV=1
MLIRKLFKFENAHIVRNCTSDRCKRSIHGHSYKVELLLKASKLDHGQMVYDFGLLKGLIKDIFDSFDHAICFWQQDDADYIEACKKFSARWVSLPVSPSAEQFSRIFFYLAQQILVSTITQNGEGDVEVYSVIVHETDTGYAQSFIEDIENEQMGLLKLEQIIFSEQVQAEWLDPAMYEKLKQGIKFQNPSVDLQVPV

SEQ ID NO: 16903 - protein, 198 aa, Acinetobacter apis
  misc_feature (1)..(198): tr|A0A217EDI9|A0A217EDI9_9GAMM 6-pyruvoyltetrahydropter in/6-carboxytetrahydropterin synthase OS=Acinetobacter apis OX=1229165 GN=SAMN05444584_0513 PE=4 SV=1
MLIRKLFKFENAHIVRNCTSDRCKRSIHGHSYKLELLLKANKLDHGQMVYDFGLLKGVIKDLFDSFDHAICFWNKDDPQYIQACQQFSARWVSLPVSPSAEQFSRIFFFLAQQVLKATQTQNGEGDVEVYSVIVHETDTGYAQSFAEDIDNVQMGRLNLEDILFSEQIQSEWTDPETYQKLKQGHTFNNPTVELQVQL

SEQ ID NO: 16904 - protein, 198 aa, Acinetobacter baumannii
  misc_feature (1)..(198): tr|A0A013S226|A0A013S226_ACIBA 6-pyruvoyl tetrahydropte rin synthase family protein OS=Acinetobacter baumannii 573719 OX=1310759 GN=J658_0912 PE=4 SV=1
MLIRKLFKFENAHVVRNCTSDRCKRSIHGHSYKVELLLKASKLDHGQMVYDFGLLKGVIKDLFDSFDHAICFWEKDDPQYIDACQTFSARWISLPVSPSAEQFSRIFFYLAQQVLQSTVTQNGEGDVEVYSVIVHETDTGYAQSFIEDIQNEQMGILSLDGIVFSEQIQIEWANPHMYEDLKKGIKFNNPQVDLQVEV

SEQ ID NO: 16905 - protein, 198 aa, Acinetobacter baumannii
  misc_feature (1)..(198): tr|A0A062DMC6|A0A062DMC6_ACIBA 6-pyruvoyl tetrahydropte rin synthase family protein OS=Acinetobacter baumannii 496487 OX=1310625 GN=J524_1136 PE=4 SV=1
MLIRKLFKFENAHVVRNCTSDRCKRSIHGHSYKVELLLKASKLDHGQMVYDFGLLKGVIKDLFDSFDHAICFWEKDDPQYIDACKTFSARWISLPVSPSAEQFSRIFFYLAQQVLQSTVTQNGEGDVEVYSVIVHETDTGYAQSFLEDIQNEQMGLLNLEGIIFSEQVQSEWADPNMYENLKQGIKFHNPHVNLQVEV

SEQ ID NO: 16906 - protein, 198 aa, Acinetobacter baylyi
  misc_feature (1)..(198): tr|Q6F9Y1|Q6F9Y1_ACIAD Uncharacterized protein OS=Acine tobacter baylyi (strain ATCC 33305 / BD413 / ADP1) OX=6 2977 GN=ACIAD2353 PE=4 SV=1
MLIRKLFKFENAHIVRNCTSDRCKRSIHGHSYKVELLLKANRLDHGQMVYDFGLLKGVIKELFDSFDHAICFWQDDNPEYIQACKTFSARWISLPVSPSAEQFSRIFFFLAQQVLHSTITQNGEGDVEVYSVIVHETDTGYAQSFLEDIQNVQMGTLDLKDIIFSDQVQLEWTDSQMYEKLRQGDKFSNPQVELQVHI

SEQ ID NO: 16907 - protein, 198 aa, Acinetobacter beijerinckii
  misc_feature (1)..(198): tr|N9EB58|N9EB58_9GAMM Uncharacterized protein OS=Acine tobacter beijerinckii CIP 110307 OX=1217648 GN=F933_008 69 PE=4 SV=1
MLIRKLFKFENAHIVRNCTSDRCKRSIHGHSYKVELLLKASKLDHGQMVYDFGLLKGVIKELFDSFDHAICFWQKDDAAYIDACKTFSARWISLPVSPSAEQFSRIFFYLAQQVLNSTTTQNGEGDVEVYSVIVHETDTGYAQSFQEDIANEQMGLLTLDQIEFSEQVQLEWSDSKMYENLKNGIKFQNPNVELQVDI

SEQ ID NO: 16908 - protein, 198 aa, Acinetobacter beijerinckii
  misc_feature (1)..(198): tr|N9FIZ7|N9FIZ7_9GAMM Uncharacterized protein OS=Acine tobacter beijerinckii ANC 3835 OX=1217649 GN=F934_01623 PE=4 SV=1
MLIRKLFKFENAHIVRNCTSDRCKRSIHGHSYKVELLLKASKLDHGQMVYDFGLLKGVIKELFDSFDHAICFWQKDDAAYIDACKTFSARWISLPVSPSAEQFSRIFFYLAQQVLNSTTTQNGEGDVEVYSVIVHETDTGYAQSFQEDIVNEQMGLLTLDQIEFSEQVQLEWSDSKMYENLKNGIKFQNPNVELQVDI

SEQ ID NO: 16909 - protein, 198 aa, Acinetobacter bereziniae
  misc_feature (1)..(198): tr|N8YQY6|N8YQY6_ACIBZ Uncharacterized protein OS=Acine tobacter bereziniae NIPH 3 OX=1217651 GN=F963_02461 PE= 4 SV=1
MLIRKLFKFENAHIVRNCTSDRCKRSIHGHSYKVELLLKASKLDHGQMVYDFGLLKGIIKEIFDSFDHAICFWQEDSPEYIQACKTFSARWVALPVSPSAEQFSRVFFFLAQQVLKSTITQNGEGDVEVYSVIVHETDTGYAQSFQEDIENTQMGLLSLDKIVFSEQVQVEWTDPEMYEKLKQGVQFQNPEVDLQVKI

SEQ ID NO: 16910 - protein, 198 aa, Acinetobacter bereziniae
  misc_feature (1)..(198): tr|A0A3R9YXF0|A0A3R9YXF0_ACIBZ 6-carboxytetrahydropteri n synthase OS=Acinetobacter bereziniae OX=106648 GN=NDM 229_009660 PE=4 SV=1
MLIRKLFKFENAHIVRNCTSDRCKRSIHGHSYKVELLLKASKLDHGQMVYDFGLLKGIIKEIFDSFDHAICFWQEDSPEYIQACKTFSARWVALPVSPSAEQFSRVFFFLAQQVLKSTITQNGEGDVEVYSVIVHETDTGYAQSFQEDIENTQMGLLSLDKIIFSKQVQVEWTDPEMYEKLKQGVQFQNPEVDLQVKI

SEQ ID NO: 16911 - protein, 198 aa, Acinetobacter bohemicus
  misc_feature (1)..(198): tr|A0A1I6T0U7|A0A1I6T0U7_9GAMM 6-pyruvoyltetrahydropter in/6-carboxytetrahydropterin synthase OS=Acinetobacter bohemicus OX=1435036 GN=SAMN05444586_100943 PE=4 SV=1
MLIRKLFKFENAHIVRNCTSDRCKRSIHGHSYKVELLLKASKLDHGQMVYDFGLLKGVIKDIFDSFDHAICFWQHDDAEYIDACKKFSARWVSLPVSPSAEQFSRIFFYLAQQILASTITQNGEGDVEVYSVIVHETDTGYAQSFVEDIENEQMGMLSLEQIVFSEQVQAEWADSMMYEKLQQGIKFQNPSVDLQVKI

SEQ ID NO: 16912 - protein, 198 aa, Acinetobacter bohemicus
  misc_feature (1)..(198): tr|N8NYZ8|N8NYZ8_9GAMM Uncharacterized protein OS=Acine tobacter bohemicus ANC 3994 OX=1217715 GN=F994_02259 PE =4 SV=1
MLIRKLFKFENAHIVRNCTSDRCKRSIHGHSYKVELLLKASKLDHGQMVYDFGLLKGVIKDIFDSFDHAICFWQHDDAEYIDACKKFSARWVSLPVSPSAEQFSRIFFYLAQQILASTITQNGEGDVEVYSVIVHETDTGYAQSFVEDIENEQMGVLSLEQIVFSEQVQAEWADSTMYEKLQQGIKFQNPSVDLQVKI

SEQ ID NO: 16913 - protein, 198 aa, Acinetobacter boissieri
  misc_feature (1)..(198): tr|A0A1G6J102|A0A1G6J102_9GAMM 6-pyruvoyltetrahydropter in/6-carboxytetrahydropterin synthase OS=Acinetobacter boissieri OX=1219383 GN=SAMN05421733_10999 PE=4 SV=1
MLIRKLFKFENAHIVRNCSSDRCKRSLHGHSYKVELFLKANALDHGQMVYDFGLLKGVIKDLFDSFDHAICFWNKDDAAYIQACQTFSARWVSLPVSPSAEQFSRVFFFLAQQVLANTKMQNGEGDVEVYSVIVHETDTGYAQSFVEDINNPQMGILTLDQIEFSEQIQIEWADPQSYQKLKHGEAFENPVVEPQVKI

SEQ ID NO: 16914 - protein, 198 aa, Acinetobacter bouvetii
  misc_feature (1)..(198): tr|A0A4Q7AX99|A0A4Q7AX99_9GAMM 6-carboxytetrahydropteri n synthase OS=Acinetobacter bouvetii OX=202951 GN=EXE25 _09960 PE=4 SV=1
MLIRKLFKFENAHIVRNCTSDRCKRSIHGHSYKVELLLKASKLDHGQMVYDFGLLKGVIKDLYDSFDHAICFWKQDNADYIEACKNFSARWVSLPVSPSAEQFSRIFFYLAQQVLASTETQNGEGDVEVYSVIVHETDTGYAQSFAEDIENEQMGLLSLDQIEFSEQVKAEWADPEMFDKLIRGIKFQNPSVDLQVKL

SEQ ID NO: 16915 - protein, 198 aa, Acinetobacter bouvetii
  misc_feature (1)..(198): tr|N9DKG9|N9DKG9_9GAMM Uncharacterized protein OS=Acine tobacter bouvetii DSM 14964 = CIP 107468 OX=1120925 GN= F941_01240 PE=4 SV=1
MLIRKLFKFENAHIVRNCTSDRCKRSIHGHSYKVELLLKASKLDHGQMVYDFGLLKGVIKDLYDSFDHAICFWQQDNAGYIEACKNFSARWVSLPVSPSAEQFSRIFFYLAQQVLASTETQNGEGDVEVYSVIVHETDTGYAQSFAEDITNKQMGLLNLDQIEFSEQVKAEWADPEMFDKLIRGIKFQNPSVDLQVKL

SEQ ID NO: 16916 - protein, 199 aa, Acinetobacter brisouii
  misc_feature (1)..(199): tr|V2VW86|V2VW86_9GAMM Uncharacterized protein OS=Acine tobacter brisouii CIP 110357 OX=1341683 GN=P255_01110 P E=4 SV=1
MLIRKLFKFENAHIVRNCTSDRCKRSIHGHSYKVELLLKASKLDHGQMVYDFGLLKGVIKELFDSFDHAICFWNQDSAEYIQACQTFSARWISLPVSPSAEQFSRIFFYLAQQVLKSTQTQNGEGDVEVYSVIVHETDTGYAQSFLEDIENTQMGVLTLEEIEFSEQVQAEWSDPEMYRKLKQGEPFLNPKVELQVQIS

SEQ ID NO: 16917 - protein, 198 aa, Acinetobacter calcoaceticus
  misc_feature (1)..(198): tr|A0A1A0GN71|A0A1A0GN71_ACICA 6-carboxytetrahydropteri n synthase QueD OS=Acinetobacter calcoaceticus OX=471 G N=A9988_00585 PE=4 SV=1
MLIRKLFKFENAHVVRNCTSDRCKRSIHGHSYKVELLLKASKLDHGQMVYDFGLLKGVIKDLFDSFDHAICFWEKDDSQYIDACQTFSARWISLPVSPSAEQFSRIFFYLAQQVLQSTVTQNGEGDVEVYSVIVHETDTGYAQSFIEDIQNEQMGILSLDGIVFSEQIQIEWTNPQMYEDLKKGIKFNNPQVDLQVEV

SEQ ID NO: 16918 - protein, 198 aa, Acinetobacter calcoaceticus
  misc_feature (1)..(198): tr|N9D6B5|N9D6B5_ACICA Uncharacterized protein OS=Acine tobacter calcoaceticus ANC 3680 OX=1217653 GN=F937_0277 0 PE=4 SV=1
MLIRKLFKFENAHVVRNCTSDRCKRSIHGHSYKVELLLKASKLDHGQMVYDFGLLKGVIKDLIDSFDHAICFWEKDDSQYIDACQTFSARWISLPVSPSAEQFSRIFFYLAQQVLQSTITQNGEGDVEVYSVIVHETDTGYAQSFIEDIQNEQMGILSLDGIVFSEQIQIEWANPQMYEDLKKGMKFNNPQVDLQVEV

SEQ ID NO: 16919 - protein, 198 aa, Acinetobacter calcoaceticus
  misc_feature (1)..(198): tr|A0A2S4TCW6|A0A2S4TCW6_9GAMM 6-carboxytetrahydropteri n synthase OS=Acinetobacter calcoaceticus/baumannii com plex sp. ABNIH27 OX=2080673 GN=C3422_00745 PE=4 SV=1
MLIRKLFKFENAHVVRNCTSDRCKRSIHGHSYKVELLLKASKLDHGQMVYDFGLLKGVIKDLFDSFDHAVCFWEKDDPQYIDACKTFSARWISLPVSPSAEQFSRIFFYLAQQVLQSTVTQNGEGDVEVYSVIVHETDTGYAQSFLEDIQNEQMGLLNLEGIIFSEQVQSEWADPNMYENLKQGIKFHNPHVNLQVEV

SEQ ID NO: 16920 - protein, 198 aa, Acinetobacter celticus
  misc_feature (1)..(198): tr|A0A1C3CW06|A0A1C3CW06_9GAMM 6-carboxytetrahydropteri n synthase QueD OS=Acinetobacter celticus OX=1891224 GN =BBP83_10010 PE=4 SV=1
MLIRKLFKFENAHIVRNCTSDRCKRSIHGHSYKVELLLKASKLDHGQMVYDFGLLKGVIKDLFDSFDHAICFWQQDNAEYIQACKTFSARWVSLPVSPSAEQFSRIFFYLAQQVLTSTETQNGEGDVEVYSVIVHETDTGYAQSFAEDIENVQMGLLDLTQIEFSEQVVSEWTDPEMFEKLKQGLKFQNPSVDLQVKL

SEQ ID NO: 16921 - protein, 198 aa, Acinetobacter colistiniresistens
  misc_feature (1)..(198): tr|N9QVH8|N9QVH8_9GAMM 6-carboxytetrahydropterin syntha se OS=Acinetobacter colistiniresistens OX=280145 GN=F88 9_02690 PE=4 SV=1
MLIRKLFKFENAHIVRNCTSDRCKRSIHGHSYKVELLLKASKLDHGQMVYDFGLLKGVIKELFDSFDHAICFWQKDDAAYIDACKTFSARWIALPVSPSAEQFSRIFFYLAQQVLNSTTTQNGEGDVEVYSVIVHETDTGYAQSFQEDIDNAQMGVLSLDQIVFSEQVQAEWSDIQMYENLKNGIKFQNPNVELQVNI

SEQ ID NO: 16922 - protein, 198 aa, Acinetobacter cumulans
  misc_feature (1)..(198): tr|A0A3A8FW28|A0A3A8FW28_9GAMM 6-carboxytetrahydropteri n synthase OS=Acinetobacter cumulans OX=2136182 GN=C9E8 8_013670 PE=4 SV=1
MIIRKLFKFENAHIVRNCTSDRCKRSIHGHSYKVELLLKASKLDHGQMVYDFGLLKGVIKDLYDSFDHAICYWNQDSQEYIQACETFSARWVSLPVSPSAEQFSRIFFYLAQQVLASTETQNGEGDVEVYSVIVHETDTGYAQSFLEDIQNEQMGVLDLEQIVFSEQIQAEWSNPQMFEQLKKGLKFQNPQVELQVKL

SEQ ID NO: 16923 - protein, 198 aa, Acinetobacter defluvii
  misc_feature (1)..(198): tr|A0A2S2FFP5|A0A2S2FFP5_9GAMM 6-carboxytetrahydropteri n synthase OS=Acinetobacter defluvii OX=1871111 GN=DJ53 3_11485 PE=4 SV=1
MLIRKLFKFENAHIVRNCTSDRCKRSIHGHSYKVELLLKASKLDHGQMVYDFGLLKGVIKDIFDSFDHAICFWQEDSLDYTQACKTFSARWVSLPVSPSAEQFSRIFFFLAQQVLQSTITQNGEGDVEVYSVIVHETDTGYAQSFLEDIENEQMGILNLDQIVFSEQVQAEWHDPEMYEKLKKGVKFQNPEVDLQVKL

SEQ ID NO: 16924 - protein, 198 aa, Acinetobacter equi
  misc_feature (1)..(198): tr|A0A0N9V9M3|A0A0N9V9M3_9GAMM 6-carboxy-5,6,7,8-tetrah ydropterin synthase OS=Acinetobacter equi OX=1324350 GN =AOY20_10885 PE=4 SV=1
MIIRKLFKFENAHIVRNCTSDRCKRSIHGHSYKVELLLKASKLDHGQMVYDFGLLKGVIKDLFDAFDHAICFWQNDSQDYIEACQKFSARWVSLPVSPSAEQFSRIFFYLAQQVLASTETQNGEGDVEVYSVIVHETDTGYAQSFLEDIQNEQMGILALDQIVFSEQIQSEWADPQLYEKLKNGIKFQNPTVTLQVNV

SEQ ID NO: 16925 - protein, 198 aa, Acinetobacter gandensis
  misc_feature (1)..(198): tr|A0A1A7R5Q9|A0A1A7R5Q9_9GAMM 6-carboxy-5,6,7,8-tetrah ydropterin synthase OS=Acinetobacter gandensis OX=14439 41 GN=A9J31_10235 PE=4 SV=1
MLIRKLFKFENAHIVRNCTSDRCKRSIHGHSYKVELLLKASRLDHGQMVYDFGLLKGVIKDLFDSFDHAICFWQHDDAEYIKACKQFSARWVALPVSPSAEQFSRIFFYLAQQVLKSTETQNGEGDVEVYSVIVHETDTGYAQSFLEDIENSQMGLLSLEQIVFSEQVQAEWNDTQMYEKLKQGQTFLNPTVDLQVKL

SEQ ID NO: 16926 - protein, 198 aa, Acinetobacter genomosp.
  misc_feature (1)..(198): tr|A0A1V2V3A5|A0A1V2V3A5_9GAMM 6-carboxy-5,6,7,8-tetrah ydropterin synthase OS=Acinetobacter genomosp. 33YU OX= 1675530 GN=AC058_02920 PE=4 SV=1
MLIRKLFKFENAHVVRNCTSDRCKRSIHGHSYKVELLLKASKLDHGQMVYDFGLLKGVIKDLFDSFDHAICFWEKDDPQYIDACKTFSARWISLPVSPSAEQFSRIFFFLAQQVLQSTVTQNGEGDVEVYSVIVHETDTGYAQSFLEDIQNEQMGLLNLEGIVFSEQVQSEWNDPQMYESLKQGIKFHNPHVNLQVEV

SEQ ID NO: 16927 - protein, 198 aa, Acinetobacter genomosp.
  misc_feature (1)..(198): tr|A0A1V2V489|A0A1V2V489_9GAMM 6-carboxy-5,6,7,8-tetrah ydropterin synthase OS=Acinetobacter genomosp. 33YU OX= 1675530 GN=AC057_10610 PE=4 SV=1
MLIRKLFKFENAHVVRNCTSDRCKRSIHGHSYKVELLLKASKLDHGQMVYDFGLLKGVIKDLFDSFDHAICFWEKDDPQYIDACKTFSARWISLPVSPSAEQFSRIFYFLAQQVLQSTVTQNGEGDVEVYSVIVHETDTGYAQSFLEDIQNEQMGLLNLEGIVFSEQVQSEWTDPQMYENLKQGIKFHNPHVNLQVEV

SEQ ID NO: 16928 - protein, 198 aa, Acinetobacter gerneri
  misc_feature (1)..(198): tr|N8ZRR9|N8ZRR9_9GAMM Uncharacterized protein OS=Acine tobacter gerneri DSM 14967 = CIP 107464 OX=1120926 GN=F 960_01493 PE=4 SV=1
MLIRKLFKFENAHIVRNCTSDRCKRSIHGHSYKVELLLKASKLDHGQMVYDFGLLKGVIKDIYDSFDHAICFWQNDDPEYIRACKTFSARWVALPVSPSAEQFSRVFFYLADQVLKSTITQNGEGDVEVYSVIVHETDTGYAQSFREDIENEQMGVLSLQDIIFSDQIQAEWADHEMYAKLLQGMKFQNPEVTLQVKL

SEQ ID NO: 16929 - protein, 198 aa, Acinetobacter guillouiae
  misc_feature (1)..(198): tr|N8Y3W1|N8Y3W1_ACIGI Uncharacterized protein OS=Acine tobacter guillouiae NIPH 991 OX=1217656 GN=F964_02924 P E=4 SV=1
MLIRKLFKFENAHIVRNCTSDRCKRSIHGHSYKVELLLKASKLDHGQMVYDFGLLKGVIKEIFDSFDHAICFWQEDNPEYIQACKTFSARWVALPVSPSAEQFSRIFFFLAQQILKSTITQNGEGDVEVYSVIVHETDTGYAQSFQEDIENAQMGLLSLDKIIFSEQVTSEWSDPEMYEKLKQGIPFQNPEVDLQVKI

SEQ ID NO: 16930 - protein, 198 aa, Acinetobacter guillouiae
  misc_feature (1)..(198): tr|A0A077L428|A0A077L428_ACIGI Putative 6-pyruvoyl tetr ahydrobiopterin synthase OS=Acinetobacter guillouiae OX =106649 GN=AS4_19690 PE=4 SV=1
MLIRKLFKFENAHIVRNCTSDRCKRSIHGHSYKVELLLKASKLDHGQMVYDFGLLKGVIKEVFDSFDHAICFWQEDNPEYIQACKTFSARWVALPVSPSAEQFSRIFFFLAQQILKSTITQNGEGDVEVYSVIVHETDTGYAQSFQEDIENAQMGLLSLDKIIFSEQVTSEWSDPEMYEKLKQGIPFQNPEVDLQVKI

SEQ ID NO: 16931 - protein, 198 aa, Acinetobacter gyllenbergii
  misc_feature (1)..(198): tr|V2V9T8|V2V9T8_9GAMM Uncharacterized protein OS=Acine tobacter gyllenbergii NIPH 230 OX=1217658 GN=F987_00167 PE=4 SV=1
MLIRKLFKFENAHIVRNCTSDRCKRSIHGHSYKVELLLKASKLDHGQMVYDFGLLKGVIKELYDSFDHAICFWQKDDPAYIEACKTFSARWIALPVSPSAEQFSRIFFYLAQQVLNSTTTQNGEGDVEVYSVIVHETDTGYAQSFQEDIDNAQMGALSLDQIVFSEQVQAEWSDVQMYENLKKGMKFQNPNVELQVNI

SEQ ID NO: 16932 - protein, 198 aa, Acinetobacter gyllenbergii; identical to SEQ ID NO: 16931
  misc_feature (1)..(198): tr|A0A1B8UGC9|A0A1B8UGC9_9GAMM 6-carboxy-5,6,7,8-tetrah ydropterin synthase OS=Acinetobacter gyllenbergii OX=13 4534 GN=NG55_01680 PE=4 SV=1

SEQ ID NO: 16933 - protein, 217 aa, Acinetobacter haemolyticus
  misc_feature (1)..(217): tr|D4XQW4|D4XQW4_ACIHA Uncharacterized protein OS=Acine tobacter haemolyticus ATCC 19194 OX=707232 GN=HMP0015_2 106 PE=4 SV=1
MLVFLFYNKLRLQKRFAWCMLIRKLFKFENAHIVRNCTSDRCKRSIHGHSYKVELLLKASKLDHGQMVYDFGLLKGVIKELFDSFDHAICYWQKDDPAYIDACKTFSARWIALPVSPSAEQFSRIFFYLAQQVLNSTITQNGEGDVEVYSVIVHETDTGYAQSFQEDIDNEQMGALSLEQIIFSEQVQAEWSDPNLYKNLKQGLKFQNPNVELQVNI

SEQ ID NO: 16934 - protein, 217 aa, Acinetobacter haemolyticus; identical to SEQ ID NO: 16933
  misc_feature (1)..(217): tr|N9FEX5|N9FEX5_ACIHA Uncharacterized protein OS=Acine tobacter haemolyticus NIPH 261 OX=1217986 GN=F926_01847 PE=4 SV=1

SEQ ID NO: 16935 - protein, 198 aa, Acinetobacter halotolerans
  misc_feature (1)..(198): tr|A0A4Q6XCI1|A0A4Q6XCI1_9GAMM 6-carboxytetrahydropteri n synthase OS=Acinetobacter halotolerans OX=1752076 GN= EXE30_05940 PE=4 SV=1
MLIRKLFKFENAHIVRNCTSDRCKRSIHGHSYKVELLLKASKLDHGQMVYDFGLLKGVIKELFDSFDHAICYWQKDDAAYIDACKTFSARWVALPVSPSAEQFSRIFFFLAQQVLNSTVTQNGEGDVEVYSVIVHETDTGYAQSFQEDIDNEQMGILSLDQIVFSEQVQSEWSDPQMYERLKNGMRFQNPNVELQVNI

SEQ ID NO: 16936 - protein, 198 aa, Acinetobacter idrijaensis
  misc_feature (1)..(198): tr|A0A098YK41|A0A098YK41_9GAMM 6-carboxy-5,6,7,8-tetrah ydropterin synthase OS=Acinetobacter idrijaensis OX=150 7807 GN=GS19_05845 PE=4 SV=1
MLIRKLFKFENAHIVRNCTSDRCKRSIHGHSYKVELLLKASKLDHGQMVYDFGLLKGVIKDFFDSFDHAICFWKNDDPEYIQACKNFSARWVSLPVSPSAEQFSRIFFFLAQQVLASTVTQNGEGDVEVYSVIVHETDTGYAQSFLEDIQNEQMGILSLEQLEFSEQVQAEWTDPDMFAKLKQGTPFHNPTVDLQVQI

SEQ ID NO: 16937 - protein, 198 aa, Acinetobacter indicus
  misc_feature (1)..(198): tr|V2UML2|V2UML2_9GAMM Uncharacterized protein OS=Acine tobacter indicus CIP 110367 OX=1341679 GN=P253_00683 PE =4 SV=1
MLIRKLFKFENAHIVRNCTSDRCKRSIHGHSYKVELLLKATKLDHGQMVYDFGLLKGVIKEIFDSFDHAICFWQQDNPDYIQACQNFSARWVSLPVSPSAEQFSRIFFFLAQQVLASTITQNGEGDVEVYSVIVHETDTGYAQSFLEDIENEQMGRLALDQIEFSAQVRAEWSDPEMYEKLKQGIKFQNPSVDLQVKL

SEQ ID NO: 16938 - protein, 198 aa, Acinetobacter indicus; identical to SEQ ID NO: 16937
  misc_feature (1)..(198): tr|A0A437IWT3|A0A437IWT3_9GAMM 6-carboxytetrahydropteri n synthase OS=Acinetobacter indicus OX=756892 GN=ENC20_ 10920 PE=4 SV=1

SEQ ID NO: 16939 - protein, 198 aa, Acinetobacter johnsonii
  misc_feature (1)..(198): tr|A0A0U3TRP6|A0A0U3TRP6_ACIJO 6-carboxy-5,6,7,8-tetrah ydropterin synthase OS=Acinetobacter johnsonii XBB1 OX= 1242245 GN=RZ95_07590 PE=4 SV=1
MLIRKLFKFENAHIVRNCTSDRCKRSIHGHSYKVELLLKASKLDHGQMVYDFGLLKGVIKDLYDSFDHAICFWQNDDPEYIQACKTFSARWVSLPVSPSAEQFSRIFFYLAQQVLASTVTQNGEGDVEVYSVIVHETDTGYAQSFIEDIENTQMGLLDLSQIEFSEQIQAEWADTEMYTKLKEGIQFHNPNVELQVKL

SEQ ID NO: 16940 - protein, 198 aa, Acinetobacter johnsonii; identical to SEQ ID NO: 16939
  misc_feature (1)..(198): tr|A0A0W8H0M3|A0A0W8H0M3_ACIJO 6-carboxy-5,6,7,8-tetrah ydropterin synthase OS=Acinetobacter johnsonii OX=40214 GN=queD PE=4 SV=1

SEQ ID NO: 16941 - protein, 198 aa, Acinetobacter junii
  misc_feature (1)..(198): tr|D0SIB2|D0SIB2_ACIJU Uncharacterized protein OS=Acine tobacter junii SH205 OX=575587 GN=HMPREF0026_00860 PE=4 SV=1
MLIRKLFKFENAHIVRNCTSDRCKRSIHGHSYKVELLLKASKLDHGQMVYDFGLLKGVIKELFDSFDHAICFWQKDDAAYIDACKTFSARWISLPVSPSAEQFSRIFFYLAQQVLRSTTTQNGEGDVQVYSVIVHETDTGYAQSFQEDIENEQMGILSLDQIVFSEQVVSEWSDPQIYENLKKGIKFENPEVELQVTL

SEQ ID NO: 16942 - protein, 198 aa, Acinetobacter junii; identical to SEQ ID NO: 16941
  misc_feature (1)..(198): tr|A0A2R4UP81|A0A2R4UP81_ACIJU 6-carboxytetrahydropteri n synthase OS=Acinetobacter junii OX=40215 GN=DC346_071 70 PE=4 SV=1

SEQ ID NO: 16943 - protein, 198 aa, Acinetobacter kookii
  misc_feature (1)..(198): tr|A0A1G6GUD4|A0A1G6GUD4_9GAMM 6-pyruvoyltetrahydropter in/6-carboxytetrahydropterin synthase OS=Acinetobacter kookii OX=1226327 GN=SAMN05421732_101267 PE=4 SV=1
MLIRKLFKFENAHIVRNCTSDRCKRSIHGHSYKVELLLKASRLDHGQMVYDFGLLKGVIKDIFDSFDHAICFWQHDDAEYIEACKKFSARWVSLPVSPSAEQFSRIFFYLAQQVLASTITQNGEGDVEVYSVIVHETDTGYAQSFIEDIENTQMGVLSLDQIVFSEQVQVEWADPKMYEKLQQGMKFQNPTVDLQVHI

SEQ ID NO: 16944 - protein, 198 aa, Acinetobacter kyonggiensis
  misc_feature (1)..(198): tr|A0A1H3IAD7|A0A1H3IAD7_9GAMM 6-pyruvoyltetrahydropter in/6-carboxytetrahydropterin synthase OS=Acinetobacter kyonggiensis OX=595670 GN=SAMN05421643_10642 PE=4 SV=1
MLIRKLFKFENAHIVRNCTSDRCKRSIHGHSYKVELLLKASKLDHGQMVYDFGLLKGVIKDIFDSFDHAICFWQHDDAEYIDACKKFSARWVSLPVSPSAEQFSRIFFYLAQQVLASTITQNGEGDVEVYSVIVHETDTGYAQSFVEDIENEQMGVLSLEQIVFSEQVQAEWADSTMYKKLQQGIKFQNPSVDLQVKI

SEQ ID NO: 16945 - protein, 198 aa, Acinetobacter lactucae
  misc_feature (1)..(198): tr|A0A3R9RIF4|A0A3R9RIF4_9GAMM 6-carboxytetrahydropteri n synthase OS=Acinetobacter lactucae OX=1785128 GN=EA76 3_07255 PE=4 SV=1
MLIRKLFKFENAHVVRNCTSDRCKRSIHGHSYKVELLLKASKLDHGQMVYDFGLLKGVIKDLFDSFDHAICFWEKDDPQYIDACQTFSARWISLPVSPSAEQFSRIFFYLAQQVLQSTVTQNGEGDVEVYSVIVHETDTGYAQSFIEDIQNEQMGILSLDRIVFSEQIQIEWANPRMYEDLKTGIKFNNPQVDLQVEV

SEQ ID NO: 16946 - protein, 198 aa, Acinetobacter lactucae
  misc_feature (1)..(198): tr|A0A151YU94|A0A151YU94_9GAMM 6-carboxy-5,6,7,8-tetrah ydropterin synthase OS=Acinetobacter lactucae OX=178512 8 GN=AWW73_10895 PE=4 SV=1
MLIRKLFKFENAHVVRNCTSDRCKRSIHGHSYKVELLLKASKLDHGQMVYDFGLLKGVIKDLFDSFDHAICFWEKDDSQYIDACQTFSARWISLPVSPSAEQFSRIFFYLAQQVLQSTVTQNGEGDVEVYSVIVHETDTGYAQSFIEDIQNEQMGILSLDGIVFSEQIQIEWANPQMYEDLKKGVKFNNPQVDLQVEV

SEQ ID NO: 16947 - protein, 198 aa, Acinetobacter larvae
  misc_feature (1)..(198): tr|A0A1B2LYG2|A0A1B2LYG2_9GAMM 6-carboxytetrahydropteri n synthase QueD OS=Acinetobacter larvae OX=1789224 GN=B FG52_06125 PE=4 SV=1
MLIRKLFKFENAHIVRNCTSDRCKRSIHGHSYKVELLLKANKLDHGQMVYDFGLLKGVIKDLIDSFDHAICFWQNDDPAYIDACKTFSARWVSLPVSPSAEQFSRIFFFLVQQILQATVTQNGEGDVDVYSVIVHETDTGYAQSFLEDIENQQMGVLALDQIIFSEQIKAEWADSQMYHKLQQGIKFENPTVDLQVDI

SEQ ID NO: 16948 - protein, 198 aa, Acinetobacter lwoffii
  misc_feature (1)..(198): tr|N9G4N5|N9G4N5_ACILW Uncharacterized protein OS=Acine tobacter lwoffii ATCC 9957 = CIP 70.31 OX=1311804 GN=F9 24_00696 PE=4 SV=1
MLIRKLFKFENAHIVRNCTSDRCKRSIHGHSYKVELLLKASKLDHGQMVYDFGLLKGVIKDFFDSFDHAICFWQNDDPEYIQACKNFSARWVSLPVSPSAEQFSRIFFFLAQQVLASTVTQNGEGDVEVYSVIVHETDTGYAQSFLEDIQNEQMGILSLEQLEFSEQVQAEWTDPDMFAKLKQGTPFHNPTVDLQVQI

SEQ ID NO: 16949 - protein, 198 aa, Acinetobacter lwoffii; identical to SEQ ID NO: 16948
  misc_feature (1)..(198): tr|D0ST92|D0ST92_ACILW Uncharacterized protein OS=Acine tobacter lwoffii SH145 OX=575588 GN=HMPREF0017_00516 PE =4 SV=1

SEQ ID NO: 16950 - protein, 198 aa, Acinetobacter marinus
  misc_feature (1)..(198): tr|A0A1G6GII2|A0A1G6GII2_9GAMM 6-pyruvoyltetrahydropter in/6-carboxytetrahydropterin synthase OS=Acinetobacter marinus OX=281375 GN=SAMN05421749_10125 PE=4 SV=1
MLIRKLFKFENAHIVRNCSSDRCKRSIHGHSYKVEVLLQANRLDHGQMVYDFGLMKGIIKDLIDSFDHAITFWDKDDADYVTACKNFSARWIALPVSPSAEQFSRVFFFLVDAVLKHTNMQNGEGDVTLHSVIVHETDTGYAQCFREDIENVQMGELSLAEIVFSEQVKNEWAMPDMYDRLKNGELFDNPLVDLQVKV

SEQ ID NO: 16951 - protein, 199 aa, Acinetobacter nectaris
  misc_feature (1)..(199): tr|V2TR41|V2TR41_9GAMM Uncharacterized protein OS=Acine tobacter nectaris CIP 110549 OX=1392540 GN=P256_00486 P E=4 SV=1
MLIRKLFKFENAHIVRNCTSDRCKRSIHGHSYKVELLLKANKLDHGQMVYDFGLLKGIIKDLFDSFDHAICFWDKDSKDYIQACQQFSARWVSLPVSPSAEQFSRIFFYLAQQVLNATKTQNGEGDVEVYSVIVHETDTGYAQSFIEDIENAQMGILSLNEIQFSEQIKIEWNDSEMYEKLKTGQIFNNPEVELQVQTS

SEQ ID NO: 16952 - protein, 198 aa, Acinetobacter nosocomialis
  misc_feature (1)..(198): tr|A0A1Y5NZV9|A0A1Y5NZV9_ACINO 6-pyruvoyl tetrahydrobio pterin synthase OS=Acinetobacter nosocomialis P020 OX=1 285584 GN=H125_00490 PE=4 SV=1
MLIRKLFKFENAHVVRNCTSDRCKRSIHGHSYKVELLLKASKLDHGQMVYDFGLLKGVIKDLFDSFDHAICFWEKDDPQYIDACKTFSARWISLPVSPSAEQFSRIFFYLAQQVLKSTITQNGEGDVEVYSVIVHETDTGYAQSFLEDIQNEQMGLLNLEGIVFSEQVQSEWTDPQMYENLKQGIKFQNPHVNLQVEV

SEQ ID NO: 16953 - protein, 198 aa, Acinetobacter nosocomialis
  misc_feature (1)..(198): tr|A0A0E2G878|A0A0E2G878_ACINO Uncharacterized protein OS=Acinetobacter nosocomialis NIPH 386 OX=1217985 GN=F9 58_02789 PE=4 SV=1
MLIRKLFKFENAHVVRNCTSDRCKRSIHGHSYKVELLLKASKLDHGQMVYDFGLLKGVIKDLFDSFDHAICFWEKDDPQYIDACKTFSARWISLPVSPSAEQFSRIFFYLAQQVLKSTITQNGEGDVEVYSVIVHETDTGYAQSFLEDIQNEQMGLLNLEGIVFSEQVQSEWTDPQMYENLKQGIKFQNPYVNLQVEV

SEQ ID NO: 16954 - protein, 198 aa, Acinetobacter oleivorans
  misc_feature (1)..(198): tr|A0A2T5QLD3|A0A2T5QLD3_9GAMM 6-carboxytetrahydropteri n synthase QueD OS=Acinetobacter oleivorans OX=1148157 GN=DBL02_01700 PE=4 SV=1
MLIRKLFKFENAHVVRNCTSDRCKRSIHGHSYKVELLLKASKLDHGQMVYDFGLLKGVIKDLIDSFDHAICFWEKDDSQYIDACQTFSARWISLPVSPSAEQFSRIFFYLAQQVLQSTITQNGEGDVEVYSVIVHETDTGYAQSFIEDIQNEQMGVLSLDGIVFSEQIQIEWANPQMYEDLKNGIKFNNPQVDLQVEV

SEQ ID NO: 16955 - protein, 198 aa, Acinetobacter oleivorans
  misc_feature (1)..(198): tr|D8JL11|D8JL11_ACISD Putative 6-pyruvoyl tetrahydrobi opterin synthase OS=Acinetobacter oleivorans (strain JC M 16667 / KCTC 23045 / DR1) OX=436717 GN=AOLE_10810 PE= 4 SV=1
MLIRKLFKFENAHVVRNCTSDRCKRSIHGHSYKVELLLKASKLDHGQMVYDFGLLKGVIKDLIDSFDHAICFWEKDDSQYIDACQTFSARWISLPVSPSAEQFSRIFFYLAQQVLQSTITQNGEGDVEVYSVIVHETDTGYAQSFIEDIQNEQMGILSLDGIIFSEQIQIEWANPQMYEDLKNGIKFNNPQVDLQVEV

SEQ ID NO: 16956 - protein, 198 aa, Acinetobacter parvus
  misc_feature (1)..(198): tr|N8Q2Y2|N8Q2Y2_9GAMM Uncharacterized protein OS=Acine tobacter parvus NIPH 1103 OX=1217671 GN=F989_01868 PE=4 SV=1
MLIRKLFKFENAHIVRNCTSDRCKRSIHGHSYKVELLLKASKLDHGQMVYDFGLLKGVIKELFDSFDHAICYWQKDDPEYIAACQTFSARWIALPVSPSAEQFSRIFFYLAQQVLHSTTTQNGEGDVEVYSVIVHETDTGYAQSFIEDIENEQMGILNLDQIIFSEQVQAEWSDPQMYENLKKGIRFQNPNVELQVNI

SEQ ID NO: 16957 - protein, 198 aa, Acinetobacter parvus
  misc_feature (1)..(198): tr|N8RQ50|N8RQ50_9GAMM Uncharacterized protein OS=Acine tobacter parvus DSM 16617 = CIP 108168 OX=981333 GN=F98 8_01491 PE=4 SV=1
MLIRKLFKFENAHIVRNCTSDRCKRSIHGHSYKVELLLKASKLDHGQMVYDFGLLKGVIKELFDSFDHAICYWQKDDPEYIAACQTFSARWIALPVSPSAEQFSRIFFYLAQQVLHSTTTQNGEGDVEVYSVIVHETDTGYAQSFIEDIENEQMGILNLDQIIFSEQVQAEWSDPQMYENLKNGIKFQNPNVELQVNI

SEQ ID NO: 16958 - protein, 198 aa, Acinetobacter piscicola
  misc_feature (1)..(198): tr|A0A4Q4H2U5|A0A4Q4H2U5_9GAMM 6-carboxytetrahydropteri n synthase OS=Acinetobacter piscicola OX=2006115 GN=EWP 19_02810 PE=4 SV=1
MLIRKLFKFENAHIVRNCTSDRCKRSIHGHSYKVELLLKASKLDHGQMVYDFGLLKGVIKDIFDSFDHAICFWQDDSAEYIQACKTFSARWVALPVSPSAEQFSRIFFFLAQQVLQSTITQNGEGDVEVYSVIVHETDTGYAQSFIEDIENEQMGILSLEDIVFSEQVQAEWHDPEMYENLKKGLKFQNPTVDLQVKL

SEQ ID NO: 16959 - protein, 198 aa, Acinetobacter pittii; identical to SEQ ID NO: 16945
  misc_feature (1)..(198): tr|R8YJ92|R8YJ92_ACIPI Uncharacterized protein OS=Acine tobacter pittii ANC 4050 OX=1217691 GN=F931_01148 PE=4 SV=1

SEQ ID NO: 16960 - protein, 198 aa, Acinetobacter pittii; identical to SEQ ID NO: 16917
  misc_feature (1)..(198): tr|A0A143IZ12|A0A143IZ12_ACIPI 6-carboxytetrahydropteri n synthase OS=Acinetobacter pittii OX=48296 GN=BFR81_18 425 PE=4 SV=1

SEQ ID NO: 16961 - protein, 198 aa, Acinetobacter populi
  misc_feature (1)..(198): tr|A0A1Z9YZ46|A0A1Z9YZ46_9GAMM 6-carboxytetrahydropteri n synthase QueD OS=Acinetobacter populi OX=1582270 GN=C AP51_07005 PE=4 SV=1
MIIRKLFKFENAHIVRNCTSDRCKRSIHGHSYKVEILLEAHRLDHGQMVYDFGLLKGVIKDLIDSFDHAITFWNKDDASYIEACKTFSARWISLPVSPSAEQFSRIFFFLASEVLKHTQTQNGEGDVKINSVIVHETDTGYAQCFLEDIENPQMGILSLDQIEFSEQVQAEWSSVDLYDRLKNGQIFENPMVELQVKL

SEQ ID NO: 16962 - protein, 198 aa, Acinetobacter pragensis
  misc_feature (1)..(198): tr|A0A151Y373|A0A151Y373_9GAMM 6-carboxy-5,6,7,8-tetrah ydropterin synthase OS=Acinetobacter pragensis OX=18068 92 GN=AZH43_09915 PE=4 SV=1
MLIRKLFKFENAHIVRNCTSDRCKRSIHGHSYKVELLLKASKLDHGQMVYDFGLLKGVIKDLYDSFDHAICFWQQDNADYIHACKNFSARWVSLPVSPSAEQFSRIFFYLAQQVLASTETQNGEGDVEVYSVIVHETDTGYAQSFAEDIENAQMGLLNLEQIEFSEQVKEEWADPEMFDKLIRGIKFQNPSVDLQVKL

SEQ ID NO: 16963 - protein, 198 aa, Acinetobacter proteolyticus
  misc_feature (1)..(198): tr|A0A1E7R8C7|A0A1E7R8C7_9GAMM 6-carboxytetrahydropteri n synthase OS=Acinetobacter proteolyticus OX=1776741 GN =BJD20_13925 PE=4 SV=1
MLIRKLFKFENAHIVRNCTSDRCKRSIHGHSYKVELLLKASKLDHGQMVYDFGLLKGVIKELYDSFDHAICFWQKDDPAYIDACKTFSARWIALPVSPSAEQFSRIFFYLAQQVLNSTTTQNGEGDVEVYSVIVHETDTGYAQSFQEDIDNAQMGALSLDQIVFSEQVQAEWSDVQMYENLKKGIKFQNPNVELQVNI

SEQ ID NO: 16964 - protein, 198 aa, Acinetobacter puyangensis
  misc_feature (1)..(198): tr|A0A240E883|A0A240E883_9GAMM 6-pyruvoyltetrahydropter in/6-carboxytetrahydropterin synthase OS=Acinetobacter puyangensis OX=1096779 GN=SAMN05421731_102274 PE=4 SV=1
MIIRKLFKFENAHIVRNCTSDRCKRSIHGHSYKVEILLEAHRLDHGQMVYDFGLLKGVIKDLIDSFDHAITFWNKDDAAYIDACKAFSARWISLPVSPSAEQFSRIFFFLASEVLKHTQTQNGEGDVKINSVIVHETDTGYAQCFLEDIENPQMGILSLDEIEFSEQVQTEWSSVDLYDRLKNGQIFENPMVELQVKL

SEQ ID NO: 16965 - protein, 198 aa, Acinetobacter qingfengensis
  misc_feature (1)..(198): tr|A0A1E7R5S5|A0A1E7R5S5_9GAMM 6-carboxytetrahydropteri n synthase QueD OS=Acinetobacter qingfengensis OX=12625 85 GN=BJI46_13390 PE=4 SV=1
MIIRKLFKFENAHIVRNCTSDRCKRSIHGHSYKVEILLQANRLDHGQMVYDFGLLKGVIKDFIDSFDHAITFWNKDSAEYIAACKKFSARWIALPVSPSAEQFSRVFFFLVAEVLKQTQTQNGEGDVTVHSVIVHETDTGYAQCFLEDIENEQMGILTLQEIEFSEQVKAEWSRADLYDRLKSGQSFINPVVELQVQL

SEQ ID NO: 16966 - protein, 198 aa, Acinetobacter radioresistens
  misc_feature (1)..(198): tr|A0A3F3H476|A0A3F3H476_ACIRA Uncharacterized protein OS=Acinetobacter radioresistens NIPH 2130 OX=1217674 GN =F940_00392 PE=4 SV=1
MLIRKLFKFENAHIVRNCTSDRCKRSIHGHSYKVELLLKANRLDHGQMVYDFGLLKGVIKDLFDSFDHAICFWQNDDQEYIAACKKFSARWIALPVSPSAEQFSRIFFFLAQQVLNSTVTQNGEGDVEVYSVIVHETDTGYAQSFQEDIENKQMGLLQLEQIEFSEQVQQEWADPTMYERLKQGLKFENPGVELQVKL

SEQ ID NO: 16967 - protein, 198 aa, Acinetobacter radioresistens
  misc_feature (1)..(198): tr|A0A2T1IZV0|A0A2T1IZV0_ACIRA 6-carboxytetrahydropteri n synthase OS=Acinetobacter radioresistens OX=40216 GN= C7E16_07995 PE=4 SV=1
MLIRKLFKFENAHIVRNCTSDRCKRSIHGHSYKVELLLKANRLDHGQMVYDFGLLKGVIKDLFDSFDHAICFWQNDDQEYIAACKKFSARWIALPVSPSAEQFSRIFFFLAQQVLNSTVTQNGEGDVEVYSVIVHETDTGYAQSFQEDIENRQMGLLQLEQIEFSEQVQQEWADPTMYERLKQGLKFENPGVELQVKL

SEQ ID NO: 16968 - protein, 198 aa, Acinetobacter rudis
  misc_feature (1)..(198): tr|S3P645|S3P645_9GAMM 6-pyruvoyl tetrahydrobiopterin s ynthase OS=Acinetobacter rudis CIP 110305 OX=421052 GN= F945_01673 PE=4 SV=1
MLIRKLFKFENAHIVRNCTSDRCKYSIHGHSYKVELLLKASKLDHGQMVYDFGLLKGMIKELIDSFDHAICFWQQDDMTYIEACKTFSARWIALPVSPSAEQLSRVLFFLVQQLLQATVTKNGEGDVEVYSVIVHETDTGYAQSFIEDIENIQMGILSLDQIHFSDQVMAEWTDSNMYQKLQNGLQFINPEVELQVKL

SEQ ID NO: 16969 - protein, 158 aa, Acinetobacter rudis
  misc_feature (1)..(158): tr|S3MU29|S3MU29_9GAMM 6-pyruvoyl tetrahydrobiopterin s ynthase OS=Acinetobacter rudis CIP 110305 OX=421052 GN= F945_02820 PE=4 SV=1
MDKHIKHKYLSTKTFGHDLGISCAFRQWRAVHSHCSKIHGYALSFHFVFEAEQLDERNWVMDFGGFKALKDKVLELFDHKLVVAEDDPMLSEFKKLDGLGMADVVVLPAVGCEMFAHYVFEMAQDVLQVELERGRVKLKSVEVREHGANSASYLGNEL

SEQ ID NO: 16970 - protein, 198 aa, Acinetobacter schindleri
  misc_feature (1)..(198): tr|N9AF71|N9AF71_9GAMM Uncharacterized protein OS=Acine tobacter schindleri CIP 107287 OX=1217988 GN=F955_01547 PE=4 SV=1
MLIRKLFKFENAHIVRNCTSDRCKRSIHGHSYKVELLLKASKLDHGQMVYDFGLLKGVIKDFFDSFDHAICFWQDDNPEYIQACKNFSARWVSLPVSPSAEQFSRIFFFLAQQVLASTITQNGEGDVEVYSVIVHETDTGYAQSFLEDIENEQMGLLNLDQIEFSEQVQAEWTDPDMFSKLKQGIPFHNPTVDLQVKV

SEQ ID NO: 16971 - protein, 198 aa, Acinetobacter schindleri
  misc_feature (1)..(198): tr|A0A2S1FA97|A0A2S1FA97_9GAMM 6-carboxytetrahydropteri n synthase OS=Acinetobacter schindleri OX=108981 GN=C01 19_00945 PE=4 SV=1
MLIRKLFKFENAHIVRNCTSDRCKRSIHGHSYKVELLLKASKLDHGQMVYDFGLLKGVIKDFFDSFDHAICFWQDDNPEYIQACKNFSARWVSLPVSPSAEQFSRIFFFLAQQVLASTITQNGEGDVEVYSVIVHETDTGYAQSFLEDIENEQMGLLNLDQIEFSEQVQAEWTDPDMFSKLKQGVPFHNPTVDLQVKV

SEQ ID NO: 16972 - protein, 198 aa, Acinetobacter seifertii
  misc_feature (1)..(198): tr|N8S358|N8S358_9GAMM 6-carboxy-5,6,7,8-tetrahydropter in synthase OS=Acinetobacter seifertii OX=1530123 GN=CV D06_05260 PE=4 SV=1
MLIRKLFKFENAHVVRNCTSDRCKRSIHGHSYKVELLLKASKLDHGQMVYDFGLLKGVIKDLFDSFDHAICFWEKDDPQYIDACKTFSARWISLPVSPSAEQFSRIFFFLAQQVLQSTVTQNGEGDVEVYSVIVHETDTGYAQSFLEDIQNEQMGLLNLEGIVFSEQVQSEWTDPQMYENLKQGIKFHNPHVNLQVEV

SEQ ID NO: 16973 - protein, 198 aa, Acinetobacter seifertii
  misc_feature (1)..(198): tr|A0A5E9PNR7|A0A5E9PNR7_9GAMM 6-carboxytetrahydropteri n synthase OS=Acinetobacter seifertii OX=1530123 GN=E2R 16_01805 PE=4 SV=1
MLIRKLFKFENAHVVRNCTSDRCKRSIHGHSYKVELLLKASKLDHGQMVYDFGLLKGVIKDLFDSFDHAICFWEKDDPQYIDACKTFSARWISLPVSPSAEQFSRIFFFLAQQVLQSTVTQNGEGDVEVYSVIVHETDTGYAQSFLEDIQNEQMGLLNLEGIVFSEQVQSEWNDPQMYENLKQGVKFHNPHVNLQVEV

SEQ ID NO: 16974 - protein, 228 aa, Acinetobacter soli
  misc_feature (1)..(228): tr|N9BVP9|N9BVP9_9GAMM Uncharacterized protein OS=Acine tobacter soli NIPH 2899 OX=1217677 GN=F950_02832 PE=4 S V=1
MLIVSNVKRNVMPDELIYNVRSSCRSLIGRMLIRKLFKFENAHIVRNCTSDRCKRSIHGHSYKVELLLKANKLDHGQMVYDFGLLKGVIKELYDSFDHAICFWQDDSPEYIQACKQFSARWVSLPVSPSAEQFSRIFFYLAQQVLNSTITQNGEGDVEVYSVIVHETDTGYAQSFIEDIENPQMGQLHLQDIIFSEQVQTEWTDALMYEKLKQGNRFKNPQVELQVQV

SEQ ID NO: 16975 - protein, 198 aa, Acinetobacter soli
  misc_feature (1)..(198): tr|A0A1P8EFN3|A0A1P8EFN3_9GAMM 6-carboxytetrahydropteri n synthase OS=Acinetobacter soli OX=487316 GN=BEN76_028 15 PE=4 SV=1
MLIRKLFKFENAHIVRNCTSDRCKRSIHGHSYKVELLLKANKLDHGQMVYDFGLLKGVIKELYDSFDHAICFWQDDSPEYIQACKQFSARWVSLPVSPSAEQFSRIFFYLAQQVLNSTITQNGEGDVEVYSVIVHETDTGYAQSFIEDIENPQMGQLHLQDIIFSEQVQTEWTDALMYEKLKQGNRFKNPQVELQVQV

SEQ ID NO: 16976 - protein, 198 aa, Acinetobacter sp.
  misc_feature (1)..(198): tr|A0A241UWF6|A0A241UWF6_9GAMM 6-carboxytetrahydropteri n synthase QueD OS=Acinetobacter sp. ANC 4204 OX=197788 4 GN=B9T36_14270 PE=4 SV=1
MLIRKLFKFENAHIVRNCTSDRCKRSIHGHSYKVELLLKASKLDHGQMVYDFGLLKGVIKDLYDSFDHAICFWQNDDPEYIQACKTFSARWVSLPVSPSAEQFSRIFFYLAQQVLASTVTQNGEGDVEVYSVIVHETDTGYAQSFIEDIENEQMGLLALNEIEFSEQIQAEWNDTEMYSRLKEGIKFHNPNVELQVKL

SEQ ID NO: 16977 - protein, 198 aa, Acinetobacter sp.; identical to SEQ ID NO: 16935
  misc_feature (1)..(198): tr|A0A3L9M483|A0A3L9M483_9GAMM 6-carboxytetrahydropteri n synthase OS=Acinetobacter sp. 2JN-4 OX=2479844 GN=EAH 57_12105 PE=4 SV=1

SEQ ID NO: 16978 - protein, 198 aa, Acinetobacter tandoii
  misc_feature (1)..(198): tr|A0A515BG73|A0A515BG73_9GAMM 6-carboxytetrahydropteri n synthase OS=Acinetobacter tandoii OX=202954 GN=FM020_ 09265 PE=4 SV=1
MLIRKLFKFENAHIVRNCTSDRCKRSIHGHSYKVELLLKASKLDHGQMVYDFGLLKGLIKDIFDSFDHAICFWQHDDPEYIQACQKFSARWVALPVSPSAEQFSRIFFFLAQQILALTETQNGEGDVEVYSVIVHETDTGYAQSFLEDIENAQMGVLSLDEIVFSEQVQSEWTDPQMYQKLKQGFKFQNPSVDLQVKI

SEQ ID NO: 16979 - protein, 198 aa, Acinetobacter tandoii
  misc_feature (1)..(198): tr|R9AUH9|R9AUH9_9GAMM 6-pyruvoyl tetrahydrobiopterin s ynthase OS=Acinetobacter tandoii DSM 14970 = CIP 107469 OX=1120927 GN=I593_02656 PE=4 SV=1
MLIRKLFKFENAHIVRNCTSDRCKRSIHGHSYKVELLLKASKLDHGQMVYDFGLLKGLIKDIFDSFDHAICFWQHDDLEYIQACQKFSARWVSLPVSPSAEQFSRIFFFLAQQILASTETQNGEGDVEVYSVIVHETDTGYAQSFIEDIENEQMGILRLDEIIFSEQVQSEWTDPFMYDKLKQGFKFQNPSVDLQVKI

SEQ ID NO: 16980 - protein, 198 aa, Acinetobacter tjernbergiae
  misc_feature (1)..(198): tr|V2V534|V2V534_9GAMM Uncharacterized protein OS=Acine tobacter tjernbergiae DSM 14971 = CIP 107465 OX=1120928 GN=F990_01403 PE=4 SV=1
MLIRKLFKFENAHIVRNCTSDRCKRSIHGHSYKVELLLKASRLDHGQMVYDFGLLKGVIKELFDSFDHAICYWQKDDPEYIQACETFSARWVALPVSPSAEQFSRIFFYLAQQVLASTMTQNGEGDVEVYSVIVHETDTGYAQSFLEDIENEQMGLLSLEQIIFSEQVQAEWSDPQMYENLKSGIKFQNPNVELQVNI

SEQ ID NO: 16981 - protein, 198 aa, Acinetobacter towneri
  misc_feature (1)..(198): tr|N9CCU1|N9CCU1_9GAMM Uncharacterized protein OS=Acine tobacter towneri DSM 14962 = CIP 107472 OX=1120929 GN=F 947_02742 PE=4 SV=1
MLIRKLFKFENAHIVRNCTSDRCKRSIHGHSYKVELLLKASKLDHGQMVYDFGLLKGVIKELFDAFDHAICFWEQDDPAYIQACKTFSARWVSLPVSPSAEQFSRIFFYLAQQVLASTITQNGEGDVEVYSVIVHETDTGYAQSFLEDIENAQMGLLNLDQIHFSEQVQTEWSDPQMYEKLKQGMTFQNPNVELQVKL

SEQ ID NO: 16982 - protein, 198 aa, Acinetobacter towneri
  misc_feature (1)..(198): tr|A0A1E8E1J8|A0A1E8E1J8_9GAMM 6-carboxytetrahydropteri n synthase QueD OS=Acinetobacter towneri OX=202956 GN=B JN41_06915 PE=4 SV=1
MLIRKLFKFENAHIVRNCTSDRCKRSIHGHSYKVELLLKASKLDHGQMVYDFGLLKGVIKELFDAFDHAICFWDQDDPAYIQACKTFSARWVSLPVSPSAEQFSRIFFYLAQQVLASTITQNGEGDVEVYSVIVHETDTGYAQSFLEDIENAQMGLLSLDQIHFSEQVQTEWSDPQMYEKLKQGMTFQNPNVELQVKL

SEQ ID NO: 16983 - protein, 198 aa, Acinetobacter ursingii
  misc_feature (1)..(198): tr|N9C164|N9C164_9GAMM Uncharacterized protein OS=Acine tobacter ursingii ANC 3649 OX=1257043 GN=F942_02038 PE= 4 SV=1
MLIRKLFKFENAHIVRNCTSDRCKRSIHGHSYKVELILKASKLDHGQMVYDFGLLKGVIKELFDSFDHAICFWQNDSAEYIQACKTFSARWVALPVSPSAEQFSRIFFYLAQQVLKSTETQNGEGDVEVYSVIVHETDTGYAQSFLEDIQNTQMGELGLESIEFSEQVRLEWSDPEMYEQLKQGAKFQNPKVELQVTI

SEQ ID NO: 16984 - protein, 198 aa, Acinetobacter ursingii
  misc_feature (1)..(198): tr|N9SBW1|N9SBW1_9GAMM Uncharacterized protein OS=Acine tobacter ursingii NIPH 706 OX=1217716 GN=F943_02112 PE= 4 SV=1
MLIRKLFKFENAHIVRNCTSDRCKRSIHGHSYKVELILKASKLDHGQMVYDFGLLKGVIKELFDSFDHAICFWQDDSAEYIQACKTFSARWVALPVSPSAEQFSRIFFYLAQQVLKSTETQNGEGDVEVYSVIVHETDTGYAQSFLEDIQNTQMGELDLESIEFSEQVRLEWSDPEMYEQLKQGAKFQNPKVELQVTI

SEQ ID NO: 16985 - protein, 198 aa, Acinetobacter variabilis
  misc_feature (1)..(198): tr|N9MHE8|N9MHE8_9GAMM Uncharacterized protein OS=Acine tobacter variabilis OX=70346 GN=F897_02416 PE=4 SV=1
MLIRKLFKFENAHIVRNCTSDRCKRSIHGHSYKVELLLKASKLDHGQMVYDFGLLKGVIKDFFDSFDHAICFWQKDDPEYIQACKNFSARWVSLPVSPSAEQFSRIFFFLAQQVLTSTITQNGEGDVEVYSVIVHETDTGYAQSFLEDIQNEQMGPLSLEQIEFSEQVRAEWTDSEMFAKLKQGLPFHNPAVDLQVQP

SEQ ID NO: 16986 - protein, 198 aa, Acinetobacter variabilis
  misc_feature (1)..(198): tr|A0A427M775|A0A427M775_9GAMM 6-carboxytetrahydropteri n synthase OS=Acinetobacter variabilis OX=70346 GN=EGK5 8_07130 PE=4 SV=1
MLIRKLFKFENAHIVRNCTSDRCKRSIHGHSYKVELLLKASKLDHGQMVYDFGLLKGVIKDFFDSFDHAICFWQKDDPEYIQACKNFSARWVSLPVSPSAEQFSRIFFFLAQQVLASTITQNGEGDVEVYSVIVHETDTGYAQSFLEDIQNEQMGPLSLEQIEFSEQVRAEWTDSEMFTKLKQGLPFHNPAVDLQVQP

SEQ ID NO: 16987 - protein, 198 aa, Acinetobacter venetianus
  misc_feature (1)..(198): tr|N8YKQ8|N8YKQ8_ACIVR Uncharacterized protein OS=Acine tobacter venetianus (strain ATCC 31012 / CIP 110063 / R AG-1) OX=1191460 GN=F959_02089 PE=4 SV=1
MLIRKLFKFENAHIVRNCTSDRCKRSIHGHSYKVELLLKASKLDHGQMVYDFGLLKGVIKELFDSFDHAICFWQKDDAAYIDACKTFSARWISLPVSPSAEQFSRIFFFIAQQVLNSTSTQNGEGDVEVYSVIVHETDTGYAQSFQEDIDNEQMGLLDLEQIIFSEQVQSEWSDTQMYEKLKNGMKFQNPNVELQVNI

SEQ ID NO: 16988 - protein, 198 aa, Acinetobacter venetianus
  misc_feature (1)..(198): tr|A0A150HZD4|A0A150HZD4_9GAMM 6-pyruvoyl tetrahydropte rin synthase OS=Acinetobacter venetianus OX=52133 GN=AV ENLUH5627_01032 PE=4 SV=1
MLIRKLFKFENAHIVRNCTSDRCKRSIHGHSYKVELLLKASKLDHGQMVYDFGLLKGVIKELFDSFDHAICFWQKDDAAYIDACKTFSARWISLPVSPSAEQFSRIFFYLAQQVLNSTSTQNGEGDVEVYSVIVHETDTGYAQSFQEDIDNEQMGSLNLEQIIFSEQVQSEWSDTQMYEKLKKGVKFQNPNVELQVNI

SEQ ID NO: 16989 - protein, 198 aa, Acinetobacter wuhouensis
  misc_feature (1)..(198): tr|A0A385C6Y0|A0A385C6Y0_9GAMM 6-carboxytetrahydropteri n synthase OS=Acinetobacter wuhouensis OX=1879050 GN=BE N71_11515 PE=4 SV=1
MLIRKLFKFENAHIVRNCTSDRCKRSIHGHSYKVELLLKASKLDHGQMVYDFGLLKGVIKEIFDSFDHAICFWQDDNPEYIQACKTFSARWVALPVSPSAEQFSRVFFYLAQQVLKSTITQNGEGDVEVYSVIVHETDTGYAQSFIEDIENEQMGLLSLDQIIFSEQVQAEWSDSEMYEKLKQGIQFQNPEVDLQVKI

SEQ ID NO: 16990 - protein, 198 aa, Acinetobacter wuhouensis
  misc_feature (1)..(198): tr|A0A3G2T1K0|A0A3G2T1K0_9GAMM 6-carboxytetrahydropteri n synthase OS=Acinetobacter wuhouensis OX=1879050 GN=CD G68_10905 PE=4 SV=1
MLIRKLFKFENAHIVRNCTSDRCKRSIHGHSYKVELLLKASKLDHGQMVYDFGLLKGVIKEIFDSFDHAICFWQDDNPEYIQACKTFSARWVALPVSPSAEQFSRVFFYLAQQVLKSTITQNGEGDVEVYSVIVHETDTGYAQSFIEDIENEQMGVLSLDQIIFSEQVQAEWSDSEMYEKLKQGIQFQNPEVDLQVKI

SEQ ID NO: 16991 - protein, 132 aa, Actinoallomurus bryophytorum
  misc_feature (1)..(132): tr|A0A543CPK0|A0A543CPK0_9ACTN 6-pyruvoyl-tetrahydropte rin synthase OS=Actinoallomurus bryophytorum OX=1490222 GN=FB559_4667 PE=4 SV=1
MFSVTVRDHVMVAHSFRGEVFGPAQRLHGATFVVDATFRRAELDADNIVVDIGRASEELGALLGELNYRNLDDEPDFKGVNTSTEFLAKVVADRLAERIHAGALGEGARGVAEIAVTLHESHVASAGFERPL

SEQ ID NO: 16992 - protein, 132 aa, Actinoalloteichus hoggarensis
  misc_feature (1)..(132): tr|A0A221W6L0|A0A221W6L0_9PSEU 6-carboxy-5,6,7,8-tetrah ydropterin synthase OS=Actinoalloteichus hoggarensis OX =1470176 GN=queD PE=3 SV=1
MPAGTYRISRRFRFAAAHRLSGLPDGHKCRRVHGHTWTVRVTVVARDLVDPGWVVDFAALTPLGRYLDDNVDHRDLTEVLPVSPTAEHLAAWVADWCHRHLEPGRGWWLESVVVDEGGDSTVEFRPDREPAR

SEQ ID NO: 16993 - protein, 142 aa, Actinobacillus delphinicola
  misc_feature (1)..(142): tr|A0A448TSG1|A0A448TSG1_9PAST 6-carboxy-5,6,7,8-tetrah ydropterin synthase OS=Actinobacillus delphinicola OX=5 1161 GN=queD PE=3 SV=1
MFRISKEFSFDMAHLLDGHDGKCKNLHGHTYKLQVELSGNLVQDGPKSGMVADFSEVKTVVKGLLLDHMDHAFIYDENSEREQKIARLLQELNSKTFALPCRSTAENMAHFMFTQLKQHSQLPISAIRLWETPTSFCEYRED

SEQ ID NO: 16994 - protein, 54 aa, Actinobacillus equuli
  misc_feature (1)..(54): tr|A0A3S5EYR8|A0A3S5EYR8_ACTEU 6-pyruvoyl-tetrahydropte rin synthase OS=Actinobacillus equuli OX=718 GN=NCTC943 5_02475 PE=4 SV=1
MAHMLDGHDGKCQNLHGHTYKLQVEVSGDLVAEGAKRGMVMDYSDLKSVVNVKS

SEQ ID NO: 16995 - protein, 72 aa, Actinobacillus equuli
  misc_feature (1)..(72): tr|A0A448QTM3|A0A448QTM3_ACTEU 6-pyruvoyl-tetrahydropte rin synthase OS=Actinobacillus equuli OX=718 GN=NCTC943 5_02476 PE=4 SV=1
MDHAYIYDLNSDRESQVAKLLINLNSKVYGIPSRTTAEEMAKYMFEKLEKVGLPVSLIRLWETPTSYCEYTR

SEQ ID NO: 16996 - protein, 140 aa, Actinobacillus lignieresii
  misc_feature (1)..(140): tr|A0A380TZD1|A0A380TZD1_ACTLI 6-carboxy-5,6,7,8-tetrah ydropterin synthase OS=Actinobacillus lignieresii OX=72 0 GN=queD PE=3 SV=1
MFKIAKEFSFDMAHMLDGHDGKCQNLHGHTYKLQVEVSGDLVAEGAKRGMVMDYSDLKSVVKREILDPMDHAYIYDLNSDRESQVAKLLIDLNSKVYGIPSRTTAEEMAKYMFEKLEKVGLPVSLIRLWETPTSYCEYSR

SEQ ID NO: 16997 - protein, 140 aa, Actinobacillus minor
  misc_feature (1)..(140): tr|C5S1U2|C5S1U2_9PAST 6-carboxy-5,6,7,8-tetrahydropter in synthase OS=Actinobacillus minor NM305 OX=637911 GN= AM305_01569 PE=3 SV=1
MFKIAKEFSFDMAHMLDGHDGKCQNLHGHTYKLQVEVTGNLHLEGAKRGMVMDYSDLKALVKQHILDPMDHAFIYDLQSDKETKVAQLLMDLDSKVYGIPSRTTAEEMAKYIFEKLANVGLPVSLIRLWETPTSYCEYSR

SEQ ID NO: 16998 - protein, 140 aa, Actinobacillus pleuropneumoniae
  misc_feature (1)..(140): tr|A0A448TZL4|A0A448TZL4_ACTPL 6-carboxy-5,6,7,8-tetrah ydropterin synthase OS=Actinobacillus pleuropneumoniae OX=715 GN=queD PE=3 SV=1
MFKIAKEFSFDMAHMLDGHDGKCQNLHGHTYKLQVEVSGDLVAEGAKRSMVMDYADLKSVVKREILDPMDHAYIYDLNSERESQVAKLLVDLNSKVYGIPSRTTAEEMAKYMFEKLEKAGLPVSLIRLWETPTSYCEYSR

SEQ ID NO: 16999 - protein, 140 aa, Actinobacillus pleuropneumoniae
  misc_feature (1)..(140): tr|E0F4S4|E0F4S4_ACTPL 6-carboxy-5,6,7,8-tetrahydropter in synthase OS=Actinobacillus pleuropneumoniae serovar 10 str. D13039 OX=754259 GN=appser10_11490 PE=3 SV=1
MFKIAKEFSFDMAHMLDGHDGKCQNLHGHTYKLQVEVSGDLVAEGAKRSMVMDYADLKSVVKHEILDPMDHAYIYDLNSERESQVAKLLVDLNSKVYGIPSRTTAEEMAKYMFEKLEKVGLPVSLIRLWETPTSYCEYSR

SEQ ID NO: 17000 - protein, 139 aa, Actinobacillus porcinus
  misc_feature (1)..(139): tr|A0A4V0ILG3|A0A4V0ILG3_9PAST 6-carboxy-5,6,7,8-tetrah ydropterin synthase OS=Actinobacillus porcinus OX=51048 GN=queD PE=3 SV=1
MFKVSKEFSFDMAHILDGHDGKCQNLHGHTYKLQVEVSGDLVADGAKKGMVVDFTDVKRIVKAAILDPMDHAFIYDTTSERECKIAALLNELNSKTFGIPVRTTAEEMARFMFNRLKDQLPISAIRLWETPTSFCEYRE

SEQ ID NO: 17001 - protein, 140 aa, Actinobacillus porcitonsillarum
  misc_feature (1)..(140): tr|A0A2U8FJ29|A0A2U8FJ29_9PAST 6-carboxy-5,6,7,8-tetrah ydropterin synthase OS=Actinobacillus porcitonsillarum OX=189834 GN=queD PE=3 SV=1
MFKIAKEFSFDMAHMLDGHDGKCQNLHGHTYKLQVEVTGNLHLDGAKRGMVMDYSDLKAVVKQHILDPMDHAFIYDLQSEKETKVAQLLMDLDSKVYGIPSRTTAEEMAKYMFEKLANVGLPVSLIRLWETPTSYCEYSR

SEQ ID NO: 17002 - protein, 139 aa, [Actinobacillus] rossii
  misc_feature (1)..(139): tr|A0A380TQ30|A0A380TQ30_9PAST 6-carboxy-5,6,7,8-tetrah ydropterin synthase OS=[Actinobacillus] rossii OX=12382 0 GN=queD PE=3 SV=1
MFKVSKEFSFDMAHILDGHDGKCQNLHGHTYKLQVEVSGNLVTEGAKKGMVVDFTDVKSIVKDAILDPMDHAFIYDTTSERECKIAALLNELNSKTFGIPVRTTAEEMARFMFNCLKDKLPISAIRLWETPTSFCEYRE

SEQ ID NO: 17003 - protein, 139 aa, Actinobacillus seminis
  misc_feature (1)..(139): tr|A0A263HEI1|A0A263HEI1_9PAST 6-carboxy-5,6,7,8-tetrah ydropterin synthase OS=Actinobacillus seminis OX=722 GN =queD PE=3 SV=1
MFKVSKEFSFDMAHILDGHDGKCQNLHGHTYKLQVEVSGDLVPDGAKKGMVVDFTDVKTVVKEAILDPMDHAFIYDTTSERECKIAALLNELNSKTFGIPVRTTAEEMARFMFNRLKGKLSISAIRLWETPTSFCEYRE

SEQ ID NO: 17004 - protein, 139 aa, Actinobacillus succinogenes
  misc_feature (1)..(139): tr|A6VQW7|A6VQW7_ACTSZ 6-carboxy-5,6,7,8-tetrahydropter in synthase OS=Actinobacillus succinogenes (strain ATCC 55618 / DSM 22257 / 130Z) OX=339671 GN=Asuc_2018 PE=3 SV=1
MFRVSKEFSFDMAHILDGHDGKCQNLHGHTYKLQVEVSGELYRQGPKKGMVMDFADLKEIVKSLILEPMDHAFIYDTNSERECKIAALLTELNSKTFGIPSRTTAEEMARFMFNRLKPELPLSAVRLWETPTSFCEYRE

SEQ ID NO: 17005 - protein, 140 aa, Actinobacillus suis; identical to SEQ ID NO: 16996
  misc_feature (1)..(140): tr|K0GC34|K0GC34_ACTSU 6-carboxy-5,6,7,8-tetrahydropter in synthase OS=Actinobacillus suis H91-0380 OX=696748 G N=ASU2_05810 PE=3 SV=1

SEQ ID NO: 17006 - protein, 152 aa, Actinobacillus ureae
  misc_feature (1)..(152): tr|E8KIR3|E8KIR3_9PAST Queuosine biosynthesis protein Q ueD OS=Actinobacillus ureae ATCC 25976 OX=887324 GN=que D PE=4 SV=1
MSTYQKKQAVKKMFKIAKEFSFDMAHMLDGHDGKCQNLHGHTYKLQVEVSGDLVAEGAKRGMVMDYSDLKSVVKREILDPMDHAYIYDLNSNRESQVAKLLIDLNSKVYGIPSRTTAEEMAKYMFEKLEKVGLPVSLIRLWETPTSYCEYSR

SEQ ID NO: 17007 - protein, 161 aa, Actinobacteria bacterium
  misc_feature (1)..(161): tr|A0A1F2UV07|A0A1F2UV07_9ACTN Uncharacterized protein OS=Actinobacteria bacterium GWC2_53_9 OX=1797195 GN=A20 74_06485 PE=4 SV=1
MGKYSIHVEKDYLKFSSAHFLIFGEKCERLHGHNYAVSVDLEGELDDIGYIFDFTVLKEFAENHCNKLDHKTLIPSKNDLVAITEANGTVEVVFRDKRFIFPASDVLILPIKNCTAELLAFYLSEKIREDLLDMQADNITSITVGVEESPGQTAYYKRDML

SEQ ID NO: 17008 - protein, 136 aa, Actinobacteria bacterium
  misc_feature (1)..(136): tr|A0A1Q7CGQ9|A0A1Q7CGQ9_9ACTN Uncharacterized protein OS=Actinobacteria bacterium 13_2_20CM_2_66_6 OX=1803492 GN=AUI15_32135 PE=4 SV=1
MTPSLRITRRATFAAAHILCRDDWSDEKNRDVFGACTTDHGHNYVIEVTVGGALDAETGMVVNLKHVDAVLRREFVDAVDHRHLNRDVDFLRGVIPTAENVALAAFQRLEPHFKPARLLKVRIVETENNAAEVAAD

SEQ ID NO: 17009 - protein, 132 aa, Actinocrispum wychmicini
  misc_feature (1)..(132): tr|A0A4R2IWN4|A0A4R2IWN4_9PSEU 6-pyruvoyl-tetrahydropte rin synthase OS=Actinocrispum wychmicini OX=1213861 GN= EV192_11517 PE=4 SV=1
MFSLTVRDHVMVAHSFRGEVFGPAQRLHGATFVVDATFHRAELDADNIVVDIGLATQELRALLEYVNYRNLDEVPEFKGVNTSTEFLAKYVADQLAERVHGGKLGAGAKGIAEIEVTLRESHVAWAGYRRPL

SEQ ID NO: 17010 - protein, 150 aa, Actinocrispum wychmicini
  misc_feature (1)..(150): tr|A0A4R2IQW4|A0A4R2IQW4_9PSEU 6-pyruvoyltetrahydropter in/6-carboxytetrahydropterin synthase OS=Actinocrispum wychmicini OX=1213861 GN=EV192_11757 PE=4 SV=1
MHSITVRHNFETAHRLPHLPGKCESLHGHSWWAAVTLCASELPEDKVVVDFGTVKRLLRGWIDHHLDHGVLLGDGDPLVPVLADHGKVFVMAGWPTVEAVAELLGEVAGKLLSGILDTDEVHVAEVTVTETHLNQAMWRPPATPVPEAGP

SEQ ID NO: 17011 - protein, 221 aa, Actinokineospora auranticolor
  misc_feature (1)..(221): tr|A0A2S6GDP9|A0A2S6GDP9_9PSEU 6-pyruvoyl-tetrahydropte rin synthase OS=Actinokineospora auranticolor OX=155976 GN=CLV40_12962 PE=4 SV=1
MQTTHDALPATGQVTITRTFGFSASHELRLLPEGHKCQRNHGHNYTVTATARMDGDGPIDWSPLADYLASTFDHRLINDQVTFHPTSELLVNHLVEWVRTNVETGSPITLVAMAVSETPSTSARWDGATNGITISKTFDYGQGEITLILGADEFDEFGFVTDFGDLKPFSTYLRKADTVSSAAALAHWFATNVEPMIQGRLVSVQIASATATERWERGDTL

SEQ ID NO: 17012 - protein, 177 aa, Actinokineospora cianjurensis
  misc_feature (1)..(177): tr|A0A421B212|A0A421B212_9PSEU 6-pyruvoyl tetrahydropte rin synthase-like protein OS=Actinokineospora cianjuren sis OX=585224 GN=CLV68_4481 PE=4 SV=1
MTDADTMIDSGRVTIGKRFEFSAGHELRTLGSGHRCFGNHAHNYVVTMTVVVADALDELGFVTDFATLAPFGRYLAGAFDHRLLNDMVPDVRGAGGVSGSVVHRADRTGDLRAVGVDAGRADPAIGGDMAPGLSAALPCTGAGRRPGSEQVLAERFVSVLELGWNLSPCLYVLTGAR

SEQ ID NO: 17013 - protein, 119 aa, Actinokineospora cianjurensis
  misc_feature (1)..(119): tr|A0A421BAK5|A0A421BAK5_9PSEU 6-carboxy-5,6,7,8-tetrah ydropterin synthase OS=Actinokineospora cianjurensis OX =585224 GN=CLV68_1894 PE=3 SV=1
MEIFREFTFEAAHRLPNVPEGHKCARLHGHSYRVEVAVSGPVDPVAGWVMDFGDLKAAVRPVIAELDHYYLNDVAGLENPTSEVLAEWLWERLRATLPLSAITVRETCTSGCTYRGESH

SEQ ID NO: 17014 - protein, 118 aa, Actinokineospora spheciospongiae
  misc_feature (1)..(118): tr|W7IXJ8|W7IXJ8_9PSEU 6-carboxy-5,6,7,8-tetrahydropter in synthase OS=Actinokineospora spheciospongiae OX=9096 13 GN=UO65_3542 PE=3 SV=1
MEIFREFTFEAAHRLPNVPEGHKCARLHGHSYRVTVHVDAPVDPAPGWVMDFGDLKRAFKPLEDQLDHHYLNEVAGLENPTSENLAVWIWDRLLPALPDLSAVGVRETCTSGCIYRGR

SEQ ID NO: 17015 - protein, 119 aa, Actinokineospora terrae
  misc_feature (1)..(119): tr|A0A1H9NXP0|A0A1H9NXP0_9PSEU 6-carboxy-5,6,7,8-tetrah ydropterin synthase OS=Actinokineospora terrae OX=15597 4 GN=SAMN04487818_103188 PE=3 SV=1
MEIFREFTFEAAHRLPNVPEGHKCARLHGHSYRVEVAVSGPVDPVAGWVMDFGDLKAAVRPVIAELDHYYLNEIAGLENPTSEVLAEWLWGRLRATLPLSAITVRETCTSGCTYRGESH

SEQ ID NO: 17016 - protein, 132 aa, Actinomadura bangladeshensis
  misc_feature (1)..(132): tr|A0A4R4NEM5|A0A4R4NEM5_9ACTN 6-carboxytetrahydropteri n synthase OS=Actinomadura bangladeshensis OX=453573 GN =E1284_34530 PE=4 SV=1
MFGITVRDHVMIAHSFRGEVFGPAQRLHGATYVVDATFRRAGLDPDGLVVDIGLATRELGEVLGGLNYRNLDDEPDFAGVNTSTEFLAKVIADRLADRVRAGALGENARGLSGLTVTLHESHVAWASYERDL

SEQ ID NO: 17017 - protein, 134 aa, Actinomadura chibensis
  misc_feature (1)..(134): tr|A0A5D0NET1|A0A5D0NET1_9ACTN 6-carboxytetrahydropteri n synthase OS=Actinomadura chibensis OX=392828 GN=FXF69 _29720 PE=4 SV=1
MFAITVRDHIMIAHSFQGEVFGPAQRLHGATFVVDATFRRAELDPDGIVVDIGLATRELGEVLGALNYRNLDDEPEFAGVNTSTEFLAKVVADRLADRVNAGALGEHARGLSGIAVTLRESHVAWATYERDLAP

SEQ ID NO: 17018 - protein, 132 aa, Actinomadura darangshiensis
  misc_feature (1)..(132): tr|A0A4R5AVP8|A0A4R5AVP8_9ACTN 6-carboxytetrahydropteri n synthase OS=Actinomadura darangshiensis OX=705336 GN= E1293_27820 PE=4 SV=1
MFAITVRDHVMIAHSFRGEVFGPAQRLHGATYVVDATFRRADLDPDGLVVDIGLATGELGEVLGGLNYRNLDDEPDFAGVNTSTEFLAKVIADRLADHVHAGALGEHARGLSGIQVTLHESHVAWASYERDL

SEQ ID NO: 17019 - protein, 130 aa, Actinomadura echinospora
  misc_feature (1)..(130): tr|A0A1H6E821|A0A1H6E821_9ACTN 6-carboxy-5,6,7,8-tetrah ydropterin synthase OS=Actinomadura echinospora OX=1992 GN=SAMN04489712_1417 PE=3 SV=1
MYEIAKSFGFSASHRLERLPEGHKCRRLHGHNYTVEIRLIAEELDEQDFVADFGELDRVGEWLRVAFDHRHLNDVLTVDPTCERLAEVIYEWCVRHLPSALTPMLHAVRVSESPSSWAEYRRAAETETAR

SEQ ID NO: 17020 - protein, 132 aa, Actinomadura echinospora
  misc_feature (1)..(132): tr|A0A1H6C343|A0A1H6C343_9ACTN 6-pyruvoyl-tetrahydropte rin synthase OS=Actinomadura echinospora OX=1992 GN=SAM N04489712_108255 PE=4 SV=1
MFSVTVRDHLMIAHSFRGEVFGPAQRLHGATFVVDATFRRTELDTDNIVVDIGLAAQELKAVLAPLAYRNLDDEPDFAGTNTTTEFLAKVIADRLAERVHAGALGEQARGLDGITVTLHESHVAWAGFERRL

SEQ ID NO: 17021 - protein, 132 aa, Actinomadura hallensis
  misc_feature (1)..(132): tr|A0A543ICK1|A0A543ICK1_9ACTN 6-pyruvoyl-tetrahydropte rin synthase OS=Actinomadura hallensis OX=337895 GN=FHX 41_1930 PE=4 SV=1
MFGITVRDHVMIAHSFRGEVFGPAQRLHGATYVVDATFRRPELDPDGIVVDIGLATRELGEVLGALNYRNLDEEPDFAGVNTSTEFLAKVIADRLADRVHAGALGENARGLSGIKVTLHESHVAWASYERAL

SEQ ID NO: 17022 - protein, 132 aa, Actinomadura madurae
  misc_feature (1)..(132): tr|A0A1I4ZIT7|A0A1I4ZIT7_9ACTN 6-pyruvoyl-tetrahydropte rin synthase OS=Actinomadura madurae OX=1993 GN=SAMN044 89713_102222 PE=4 SV=1
MFALTVRDHVMIAHSFRGEVFGPAQRLHGATYVVDATFRRAELDPDGLVVDIGLATRELGGVLGGLNYRNLDDEPDFAGVNTSTEFLAKAIADRLADRIHAGELGENARGLSGLQVTLHESHVAWASYERDL

SEQ ID NO: 17023 - protein, 118 aa, Actinomadura mexicana
  misc_feature (1)..(118): tr|A0A238VVV1|A0A238VVV1_9ACTN 6-carboxy-5,6,7,8-tetrah ydropterin synthase OS=Actinomadura mexicana OX=134959 GN=SAMN06265355_102447 PE=3 SV=1
MEIFREFTFEAAHRLPNVATGHKCARLHGHSYRVEVHVSGDVDPATGWLMDFAEIKVAFKPIQDQLDHYYLNEVPGLENPTSEVLARWIWDRLTHQLPLSAIVVRETCTSGCIYRGDT

SEQ ID NO: 17024 - protein, 132 aa, Actinomadura mexicana
  misc_feature (1)..(132): tr|A0A239A5P7|A0A239A5P7_9ACTN 6-pyruvoyl-tetrahydropte rin synthase OS=Actinomadura mexicana OX=134959 GN=SAMN 06265355_108183 PE=4 SV=1
MFAITVRDHVMIAHSFRGEVFGPAQHLHGATFVVDATFRRADLDPDGIVVDIGLATRELGVVLGALNYRNLDEEPDFAGINTSTEFLAKVIADRLADRVRAGALGANAAGLAGITVTLHESHVAWASYEREL

SEQ ID NO: 17025 - protein, 132 aa, Actinomadura meyerae
  misc_feature (1)..(132): tr|A0A239GFK7|A0A239GFK7_9ACTN 6-pyruvoyl-tetrahydropte rin synthase OS=Actinomadura meyerae OX=240840 GN=SAMN0 5443665_1007132 PE=4 SV=1
MFGITVRDHVMIAHSFRGEVFGPAQRLHGATYVVDATFRRADLDTDGLVVDIGLATRALGEVLGGLNYRNLDDEPDFAGLNTSTEFLAKVIADRLADRVHAGALGENARGLSGITVTLHESHVAWASYERDL

SEQ ID NO: 17026 - protein, 164 aa, Actinomadura parvosata
  misc_feature (1)..(164): tr|A0A2P9IXC6|A0A2P9IXC6_9ACTN Queuosine biosynthesis Q ueD, PTPS-I OS=Actinomadura parvosata subsp. kistnae OX =1955414 GN=KIS93_12114 PE=4 SV=1
MTHRIRVRHNFETAHRLPHLGGKCHSLHGHSWWAEVVVEAEELSADQTIVEFGPFKKELRAFIDAHLDHGAMLGADDPLAPLLAAHGSKVYLFGQAPYVRDLPHPTVEAVAVLLARASEAILDGRERAAGARVGRVRVTETHVNAAEYVPGDGRRDPSLRRAAS

SEQ ID NO: 17027 - protein, 132 aa, Actinomadura pelletieri
  misc_feature (1)..(132): tr|A0A495QAY3|A0A495QAY3_9ACTN 6-pyruvoyl-tetrahydropte rin synthase OS=Actinomadura pelletieri DSM 43383 OX=11 20940 GN=BZB76_5976 PE=4 SV=1
MFAITVRDHVMIAHSFRGEVFGPAQRLHGATYVVDATFRRADLDPDGIVVDIGLATRELGEVLGALNYRNLDEEPDFAGINTSTEFLAKVVADRLADRVHAGALGEHARGLDGITVTLHESHVAWASYERAL

SEQ ID NO: 17028 - protein, 131 aa, Actinomadura sp.
  misc_feature (1)..(131): tr|A0A4R4XKE1|A0A4R4XKE1_9ACTN 6-carboxy-5,6,7,8-tetrah ydropterin synthase OS=Actinomadura sp. KC06 OX=2530369 GN=queD PE=3 SV=1
MYRIAKSFSFEASHQLTGLPDGHKCGRLHGHTYRVEVVLENANLTDCGFVVDFADLAPFKAYLDASLDHRHLNDVFDFAPTSENLAHHLYGWCRAELPCQVGELVAAVCLSETGSTWVEFRPEHAAGEGDH

SEQ ID NO: 17029 - protein, 132 aa, Actinomadura sp.
  misc_feature (1)..(132): tr|A0A4R4XDB8|A0A4R4XDB8_9ACTN 6-carboxytetrahydropteri n synthase OS=Actinomadura sp. KC06 OX=2530369 GN=E1287 _32540 PE=4 SV=1
MFAITVRDHVMIAHSFRGEVFGPAQRLHGATYVVDATFRRPGLDPDGIVVDIGLATRELGEVLAALNYRNLDDEPDFAGVNTSTEFLAKVIADRLASRVHAGALGEHARGLAGITVTLHESHVAWASYEREL

SEQ ID NO: 17030 - protein, 134 aa, Actinomadura syzygii
  misc_feature (1)..(134): tr|A0A5D0U3F8|A0A5D0U3F8_9ACTN 6-carboxytetrahydropteri n synthase OS=Actinomadura syzygii OX=1427538 GN=FXF65_ 24850 PE=4 SV=1
MFAITVRDHIMIAHSFRGEVFGPAQRLHGATFVVDATFRRAELDPDGIVVDIGLATRELGDVLAALNYRNLDDEPEFAGVNTSTEFLAKVVADRLADRVRAGALGEHARGLSGIAVTLRESHVAWATYERDLTP

SEQ ID NO: 17031 - protein, 132 aa, Actinomadura viridilutea
  misc_feature (1)..(132): tr|A0A2P6U7E1|A0A2P6U7E1_9ACTN 6-pyruvoyl-tetrahydropte rin synthase OS=Actinomadura viridilutea OX=58112 GN=CL V66_12419 PE=4 SV=1
MFSLTVRDHFMIAHSFRGEVFGPAQRLHGATYVVDATFRRAELDADNLVVDIGLATRELKQVLGALDYRNLDEEPEFAGVNTSTEFLAKVIADRLAERVHAGALGEGARGLSGIAVTLRESHIAWATYERAL

SEQ ID NO: 17032 - protein, 132 aa, Actinomycetospora cinnamomea
  misc_feature (1)..(132): tr|A0A2U1EVH5|A0A2U1EVH5_9PSEU 6-pyruvoyl-tetrahydropte rin synthase OS=Actinomycetospora cinnamomea OX=663609 GN=C8D89_11934 PE=4 SV=1
MFAVTVRDHIMIAHSFAGEVFGPAQALHGATFVVDAAFRRAELDADGIVVDIGRATEELHTALEDLNYRNLDEHPEFAGVNTTTEFLAKVIADRLASRARDGRLGEGGRELAGITVTLHESHAASASYELAL

SEQ ID NO: 17033 - protein, 133 aa, Actinomycetospora succinea
  misc_feature (1)..(133): tr|A0A4R6UPH7|A0A4R6UPH7_9PSEU 6-pyruvoyl-tetrahydropte rin synthase OS=Actinomycetospora succinea OX=663603 GN =EV188_11171 PE=4 SV=1
MFAVTVRDHIMIAHSFRGAVFGPAQALHGATFVVDATFRRAELDADNIVVDIGLATEQLHDALADLTYTNLDDHPEFAGVNTTTEYLAQVVARRLAERAGDGRLGPHADGLAGITVTLHESHVASASYELTLT

SEQ ID NO: 17034 - protein, 132 aa, Actinophytocola oryzae
  misc_feature (1)..(132): tr|A0A4R7V5Q8|A0A4R7V5Q8_9PSEU 6-pyruvoyl-tetrahydropte rin synthase OS=Actinophytocola oryzae OX=502181 GN=CLV 71_1137 PE=4 SV=1
MFSLTVRDHMMVAHSFTGEVFGPAQQLHGATFVVDATFSRTELDADNIVVDIGLATDQLKAVLGELNYRNLDELPEFTGVNTSTEFLAKVIADRLVDRVHNGSLGDSATGLAEISVTLKESHVAWATYRRSM

SEQ ID NO: 17035 - protein, 132 aa, Actinophytocola xanthii
  misc_feature (1)..(132): tr|A0A1Q8CS16|A0A1Q8CS16_9PSEU Uncharacterized protein OS=Actinophytocola xanthii OX=1912961 GN=BU204_12965 PE =4 SV=1
MFSLTVRDHMMVAHSFNGEVFGPAQRLHGATFVVDATFHRAELDPDNLVVDIGLASTQLAEILGELNYRNLDEVPEFAGVNTSTEFLAKVVADRLAERVRAGRLGEGARDLADIEVTLRESHVAWASYRRAL

SEQ ID NO: 17036 - protein, 132 aa, Actinoplanes atraurantiacus
  misc_feature (1)..(132): tr|A0A285J5Q1|A0A285J5Q1_9ACTN 6-pyruvoyl-tetrahydropte rin synthase OS=Actinoplanes atraurantiacus OX=1036182 GN=SAMN05421748_116166 PE=4 SV=1
MFSVTVRDHIMIAHSFSGEVFGPAQKLHGATFVVDATFRRPELDDDNIVVDIGRASEELHAICGGLSYKNLDDDPAFKGVNTSTEFLAKVIADRLADKVAAGDLGPGAAGLTGISVTLHESHIAWASYERDL

SEQ ID NO: 17037 - protein, 133 aa, Actinoplanes awajinensis
  misc_feature (1)..(133): tr|A0A0X3VAA6|A0A0X3VAA6_9ACTN 6-pyruvoyl tetrahydropte rin synthase OS=Actinoplanes awajinensis subsp. mycopla necinus OX=135947 GN=ADL15_03135 PE=4 SV=1
MFSVTVRDHIMIAHSFSGEVFGPAQRLHGATFVVDATFRRPELDQDNIVVDIGLASEKLHAICGSLSYQNLDDDPEFAGVNTSTEFLAKLIADRLAVRIGAGELGPGATGLTGLEVTLHESHIAWASYERTLR

SEQ ID NO: 17038 - protein, 132 aa, Actinoplanes brasiliensis
  misc_feature (1)..(132): tr|A0A4R6J7S6|A0A4R6J7S6_9ACTN 6-pyruvoyl-tetrahydropte rin synthase OS=Actinoplanes brasiliensis OX=52695 GN=C 8E87_6609 PE=4 SV=1
MFSVTVRDHIMIAHSFTGEVYGPAQKLHGATFVVDATFRRPELDDDNIVVDIGAASQQLQAICGGLSYRNLDDEPDFLGINTSTEFLAKVIADRLAGKVAAGELGAGAAGLTGITVTLHESHIAWASYERDL

SEQ ID NO: 17039 - protein, 132 aa, Actinoplanes derwentensis
  misc_feature (1)..(132): tr|A0A1H2A2X4|A0A1H2A2X4_9ACTN 6-pyruvoyl-tetrahydropte rin synthase OS=Actinoplanes derwentensis OX=113562 GN= SAMN04489716_3636 PE=4 SV=1
MFSVTVRDHIMIAHSFSGDVFGPAQRLHGATFVVDATFRRPELDDDNIVVDIGRASEQLHTICSGLSYRNLDDDPEFTGINTSTEFLAKVITDRLAVRAQAGELGPGATGLTGISVTLHESHIAWASYERTL

SEQ ID NO: 17040 - protein, 132 aa, Actinoplanes friuliensis
  misc_feature (1)..(132): tr|U5W2L4|U5W2L4_9ACTN Uncharacterized protein OS=Actin oplanes friuliensis DSM 7358 OX=1246995 GN=AFR_19740 PE =4 SV=1
MFSVTVRDHIMIAHSFSGEVFGPAQKLHGATFVVDATFKRPELDADNIVVDIGRASEELHTICGTLSYRNLDDENEFAGQNTSTEFLAKVIADRLAGKAESGDLGVGARGLTGIAVTLHESHIAWASYERNL

SEQ ID NO: 17041 - protein, 132 aa, Actinoplanes italicus
  misc_feature (1)..(132): tr|A0A2T0K7C3|A0A2T0K7C3_9ACTN 6-pyruvoyl-tetrahydropte rin synthase OS=Actinoplanes italicus OX=113567 GN=CLV6 7_11175 PE=4 SV=1
MFSVTVRDHIMIAHSFSGEVFGPAQRLHGATFVVDATFRRPELDDDNIVVDIGRASEQLHTICSGLSYRNLDDDPEFSGVNTSTEFLAKVIADRLAVRAQAGELGPGATGLTGLSVTLHESHIAWATYERDL

SEQ ID NO: 17042 - protein, 132 aa, Actinoplanes lutulentus
  misc_feature (1)..(132): tr|A0A327Z2D0|A0A327Z2D0_9ACTN 6-pyruvoyl-tetrahydropte rin synthase OS=Actinoplanes lutulentus OX=1287878 GN=B 0I29_11849 PE=4 SV=1
MFSVTVRDHIMIAHSFSGEVFGPAQRLHGATFVVDATFRRPELDDDNIVVDIGRASEQLHTICSGLSYRNLDDDPEFTGINTSTEFLAKVIADRLAVRAHAGELGAGASGLTGITITLHESHIAWASYEREL

SEQ ID NO: 17043 - protein, 132 aa, Actinoplanes missouriensis
  misc_feature (1)..(132): tr|I0HBC2|I0HBC2_ACTM4 Uncharacterized protein OS=Actin oplanes missouriensis (strain ATCC 14538 / DSM 43046 / CBS 188.64 / JCM 3121 / NCIMB 12654 / NBRC 102363 / 431 ) OX=512565 GN=AMIS_50890 PE=4 SV=1
MFSVTVRDHIMIAHSFSGEVFGPAQRLHGATFVVDATFRRPELDDDNIVVDIGRASEQLHTICSTLSYRNLDDDPEFSGVNTSTEFLAKVIADRLAVRIQAGELGPGATGLTGLTVTLHESHIAWASYERDL

SEQ ID NO: 17044 - protein, 132 aa, Actinoplanes philippinensis
  misc_feature (1)..(132): tr|A0A1I2GZ09|A0A1I2GZ09_9ACTN 6-pyruvoyl-tetrahydropte rin synthase OS=Actinoplanes philippinensis OX=35752 GN =SAMN05421541_107249 PE=4 SV=1
MFSVTVRDHIMIAHSFSGEVFGPAQRLHGATFVVDATFRRPELDDDNIVVDIGRASEQLHTICSGLSYRNLDDDPEFTGVNTSTEFLAKVIADRLAVRAQAGELGPGATGLTGLSVTLHESHIAWATYERDL

SEQ ID NO: 17045 - protein, 178 aa, Actinoplanes regularis
  misc_feature (1)..(178): tr|A0A238X6L9|A0A238X6L9_9ACTN 6-pyruvoyltetrahydropter in/6-carboxytetrahydropterin synthase OS=Actinoplanes r egularis OX=52697 GN=SAMN06264365_10375 PE=4 SV=1
MAERTDELARDATWCEEEREGDCREIRQTAATTAVTVRHNFESAHRLPQLGGKCHNLHGHSWWVEATVAGEAGADGIVVEFHDLKSYLREWIDENLDHGAMLGSEDELVPALNAANSKVFVFGKADPSFGLSWPTVENVAELLSRVTAGYLQSRGWPGVRVSRVVVRETHVNAAEVSW

SEQ ID NO: 17046 - protein, 133 aa, Actinoplanes regularis
  misc_feature (1)..(133): tr|A0A239A3B8|A0A239A3B8_9ACTN 6-pyruvoyl-tetrahydropte rin synthase OS=Actinoplanes regularis OX=52697 GN=SAMN 06264365_10742 PE=4 SV=1
MFSVTVRDHIMIAHSFSGEVFGPAQRLHGATFLVDATFRRPELDDDNIVVDIGLASEQLRTICSGLSYRNLDDDPEFTGVNTSTEFLAKVIADRLAVRVTAGELGRGAAGLTGIQVTLHESHIAWASYERTLR

SEQ ID NO: 17047 - protein, 120 aa, Actinoplanes sp.
  misc_feature (1)..(120): tr|R4L378|R4L378_9ACTN 6-carboxy-5,6,7,8-tetrahydropter in synthase OS=Actinoplanes sp. N902-109 OX=649831 GN=p tps PE=3 SV=1
MGFRITKKFEFSASHQLSGLAPDHQCARLHGHNYVIELELGADETELSPVGFVRDYGELSPFKVWLDATLDHRHLNDVLTENPTAENMAAWIYRTWSKEFSELTCVRVSETPKTWAEYRP

SEQ ID NO: 17048 - protein, 133 aa, Actinoplanes sp.
  misc_feature (1)..(133): tr|G8SBI1|G8SBI1_ACTS5 6-pyruvoyl tetrahydrobiopterin s ynthase OS=Actinoplanes sp. (strain ATCC 31044 / CBS 67 4.73 / SE50/110) OX=134676 GN=ACPL_3065 PE=4 SV=1
MFSVTVRDHIMIAHSFSGEVFGPAQRLHGATFVVDATFRRPELDEDNIVVDIGLASEKLHTICSGLSYRNLDEDPEFTGVNTSTEFLAKVIADRLAVRISAGELGPGATGLTGLQVTLHESHIAWASYERTLR

SEQ ID NO: 17049 - protein, 120 aa, Actinoplanes teichomyceticus
  misc_feature (1)..(120): tr|A0A561WQZ4|A0A561WQZ4_ACTTI 6-carboxy-5,6,7,8-tetrah ydropterin synthase OS=Actinoplanes teichomyceticus OX= 1867 GN=FHX34_1011273 PE=3 SV=1
MTLRISKQFSFSASHQLDGLPANHQCGRLHGHNYLVEIELSAGREQLTAPGFVRDYGELSGFKGWVDEWLDHQHLNDVVKENPTAENLAIWIYEQWNPELPELTAVRVSETPKTWAEYRP

SEQ ID NO: 17050 - protein, 133 aa, Actinoplanes teichomyceticus
  misc_feature (1)..(133): tr|A0A561WLG2|A0A561WLG2_ACTTI 6-pyruvoyl-tetrahydropte rin synthase OS=Actinoplanes teichomyceticus OX=1867 GN =FHX34_1021268 PE=4 SV=1
MFSVTVRDHIMIAHSFSGEVFGPAQRLHGATFVVDATFRRPELDEDNIVVDIGRASEQLRTICSGLSYRNLDDDPEFSGVNTSTEFLAKVIADRLAVRVCAGELGPGARGLTGIQVTLHESHIAWASYERTLR

SEQ ID NO: 17051 - protein, 132 aa, Actinoplanes utahensis
  misc_feature (1)..(132): tr|A0A0A6WX41|A0A0A6WX41_ACTUT 6-pyruvoyl tetrahydropte rin synthase OS=Actinoplanes utahensis OX=1869 GN=MB27_ 41095 PE=4 SV=1
MFSVTVRDHIMIAHSFSGEVFGPAQRLHGATFVVDATFRRPELDDDNIVVDIGRASEQLHTICSGLSYRNLDDDPEFSGVNTSTEFLAKVIADRLAVRAQAGELGPGAGGLTGISVTLHESHIAWASYERTL

SEQ ID NO: 17052 - protein, 132 aa, Actinoplanes xinjiangensis; identical to SEQ ID NO: 17041
  misc_feature (1)..(132): tr|A0A316FAG6|A0A316FAG6_9ACTN 6-pyruvoyl-tetrahydropte rin synthase OS=Actinoplanes xinjiangensis OX=512350 GN =BC793_11461 PE=4 SV=1

SEQ ID NO: 17053 - protein, 125 aa, Actinopolyspora erythraea
  misc_feature (1)..(125): tr|A0A099D5E0|A0A099D5E0_9ACTN 6-carboxy-5,6,7,8-tetrah ydropterin synthase OS=Actinopolyspora erythraea OX=414 996 GN=CDG81_12230 PE=3 SV=1
MLTISKEFRFSASHVLSNLPEGHQCGRMHGHNYLVVIELSAAPEDLDSAGFVRDFGELSVVKKWLDDNFDHRHLNDVMGGVNPTAENISKWIYENWKGEIPELSAVCVSETPSTWARYHPSPRPA

SEQ ID NO: 17054 - protein, 125 aa, Actinopolyspora xinjiangensis
  misc_feature (1)..(125): tr|A0A1H0S2H8|A0A1H0S2H8_9ACTN 6-carboxy-5,6,7,8-tetrah ydropterin synthase OS=Actinopolyspora xinjiangensis OX =405564 GN=SAMN04487905_103330 PE=3 SV=1
MLTISKEFRFSASHVLGNLPEGHQCGRMHGHNYLVVIELSAAPEDLDSAGFVRDFGELSVVKKWLDDNFDHRHLNDVMGGMNPTAENISKWIYENWKEEIPELSAVCVSETPSTWARYHPSPSPA

SEQ ID NO: 17055 - protein, 118 aa, Actinosynnema pretiosum
  misc_feature (1)..(118): tr|A0A290Z103|A0A290Z103_9PSEU 6-carboxy-5,6,7,8-tetrah ydropterin synthase OS=Actinosynnema pretiosum OX=42197 GN=queD PE=3 SV=1
MELFREFRFEAAHRLPNVPEGHKCARLHGHSYLVVVQLDGPVDPEAGWVVDFGDVKAAFKPLEERLDHYYLNEVEGLENPTSENLAVWIWDRLIGALPMLSAVTVRETCTSGCTYRGR

SEQ ID NO: 17056 - protein, 166 aa, Actinosynnema pretiosum
  misc_feature (1)..(166): tr|A0A347Q2G1|A0A347Q2G1_9PSEU Queuosine biosynthesis Q ueD, PTPS-I OS=Actinosynnema pretiosum subsp. pretiosum OX=103721 GN=APASM_3824 PE=4 SV=1
MENVTRMGHAVCVKHTFEAAHRLPHLGGKCVNLHGHSWAVKVTVGAPRLSEGGTVVEFGALKQAVRRWIDLHWDHATLLGQADPLVGLLRETGSRVYRFGASGDATGAELVGHDLPWPTVESVAVVLARAATAIVDELPGAQGARVTRVEVRETRSNTAVHEPEWS

SEQ ID NO: 17057 - protein, 144 aa, Actinosynnema sp.
  misc_feature (1)..(144): tr|A0A1V2QES6|A0A1V2QES6_9PSEU Uncharacterized protein OS=Actinosynnema sp. ALI-1.44 OX=1933779 GN=ALI144C_111 10 PE=4 SV=1
MFSITVRDHVMVAHSFQGEVFGPAQRLHGATFLVDATFHRAELDDDNIVVDIGLATEQLKDVLAPLNYRNLDDEPEFKGVNTSTEFLAKVIADRLVERIGDGKLGEGARGLAEITVTLHESHVAWASYRRAVESSPESSPESSL

SEQ ID NO: 17058 - protein, 301 aa, Actinosynnema sp.
  misc_feature (1)..(301): tr|A0A1V2P5F9|A0A1V2P5F9_9PSEU Uncharacterized protein OS=Actinosynnema sp. ALI-1.44 OX=1933779 GN=ALI144C_527 20 PE=4 SV=1
MVHKITVEHSFESGHGLSHLGGKCVSLHGHSWSTAVTMVAPKLSPEVTVVEFSALKVGLRRWIDEHLDHAMMLSARDRLIEPLIAEGSRVFCFGAERPADVAEQFAHGLPWPTVEAITVLRGRVAESVSAGLPRAGGASRADSGPRDAAQHRRLRAVDLGGPAFRRECFLLLPIDGSVPRLDASTGRASRPPDAQGSARSRTVGRAAAWSDSFATRSPPAAPDRPGQPPLLARDNHSESLDVVPDREARRGGGYGDVTGWECSCHSWERARHKVGGTTMSPEWWILMIMTRNSRRWIAMEL

SEQ ID NO: 17059 - protein, 137 aa, Adhaeribacter aerolatus
  misc_feature (1)..(137): tr|A0A512B378|A0A512B378_9BACT 6-carboxy-5,6,7,8-tetrah ydropterin synthase OS=Adhaeribacter aerolatus OX=67028 9 GN=ygcM PE=3 SV=1
MKVTVCRKEHFNAAHRLYNPAWSKSKNNDFFGKCSNENFHGHNYELIVKLTGSINPETGYVYDMKQLSELIKKEILRKFDHRNLNLDTEEFKDLNPTAENIAMVIWNRLRERISPEYALAVTLFETERNFVEYNGQI

SEQ ID NO: 17060 - protein, 138 aa, Adhaeribacter aerolatus
  misc_feature (1)..(138): tr|A0A512AZX0|A0A512AZX0_9BACT 6-carboxy-5,6,7,8-tetrah ydropterin synthase OS=Adhaeribacter aerolatus OX=67028 9 GN=AAE02nite_29260 PE=4 SV=1
MVYLSRLEHFNAAHKLANPNWSDEKNKEVFGPCSNTNWHGHNYELIVTVKGEPDPETGFIIDLKQLSTLIRKHIIEVVDHKNLNLDVPFMQGKMASTENLVLAFWEILEPLIPQMSSARLHCLKLYETPRNFVEYYGE

SEQ ID NO: 17061 - protein, 139 aa, Adhaeribacter sp.
  misc_feature (1)..(139): tr|A0A2T2YDP6|A0A2T2YDP6_9BACT 6-carboxytetrahydropteri n synthase QueD OS=Adhaeribacter sp. HMF7605 OX=2072846 GN=AHMF7605_08930 PE=4 SV=1
MVYISRLEHFNAAHKLFNPNWSLAKNKEVFGPCANANWHGHNYELIVTVKGNPDPDTGFVIDLKKLSVLIREHIIQKVDHKNLNLDVAFMEGKLASTENLVIEFWNILKPLISKISSSAQLHSLKLYETPRNFVEYFGE

SEQ ID NO: 17062 - protein, 135 aa, Adhaeribacter sp.
  misc_feature (1)..(135): tr|A0A369QHH0|A0A369QHH0_9BACT 6-carboxy-5,6,7,8-tetrah ydropterin synthase OS=Adhaeribacter sp. HMF7616 OX=207 2847 GN=AHMF7616_02976 PE=3 SV=1
MKITVCRKEHFNAAHRLNNPAWSPEMNQRVFGKCNNPNYHGHNYSLTVKLTGEVNPETGYVYDMKLLSDLIQDEILARFDHQNLNLDTEEFKNLNPTAENIAIVIWNRLREKISAAYALSVTLFETDRNFVEYHG

SEQ ID NO: 17063 - protein, 141 aa, Adlercreutzia equolifaciens
  misc_feature (1)..(141): tr|A0A3E2EFR9|A0A3E2EFR9_9ACTN 6-carboxy-5,6,7,8-tetrah ydropterin synthase OS=Adlercreutzia equolifaciens OX=4 46660 GN=DX903_07565 PE=3 SV=1
MYGLKTESSFDASHFLTDYHGKCENLHGHRWRVVAYLEVEHLQTEGTCKDMVVDFGEFKTELRALTERLDHHFIVEEGSLAPDTLACLEREGFALFIVPFRTTAENLAKWFFDALAARGLPVAQVEVYETPNNCAYYREQR

SEQ ID NO: 17064 - protein, 150 aa, Advenella incenata
  misc_feature (1)..(150): tr|A0A4Q7VDQ0|A0A4Q7VDQ0_9BURK 6-pyruvoyltetrahydropter in/6-carboxytetrahydropterin synthase OS=Advenella ince nata OX=267800 GN=EV681_3751 PE=4 SV=1
MITVTRALHFDAGHRIPDHKSQCRNMHGHRYTLEITLSGPVSMVDGAPDRGMVIDFSDVKAIAKALIVDVWDHAFLVYSGDTVVRTFLESIADHKTVVLDRIPTAENLVQIAFDTLAAAYLAQYGDRLKLTHARLYETPNCWADCYAPQV

SEQ ID NO: 17065 - protein, 150 aa, Advenella kashmirensis
  misc_feature (1)..(150): tr|A0A356LFF8|A0A356LFF8_9BURK 6-carboxytetrahydropteri n synthase QueD OS=Advenella kashmirensis OX=310575 GN= queD PE=4 SV=1
MITVTRALHFDAGHRIPDHKSQCRNMHGHRYTLEITLSGPVSMVDGAPDRGMVLDFSDVKAIAKELIVDVWDHAFLVYSGDTVVRKFLDSMADHKTVVLDRIPTAENLVQIAFDTLAAAYLAQYGDRLKLTHARLYETPNCWADCYGSEA

SEQ ID NO: 17066 - protein, 150 aa, Advenella kashmirensis
  misc_feature (1)..(150): tr|I3UDX5|I3UDX5_ADVKW Queuosine biosynthesis protein Q ueD OS=Advenella kashmirensis (strain DSM 17095 / LMG 2 2695 / WT001) OX=1036672 GN=TKWG_16300 PE=4 SV=1
MITVTRALHFDAGHRIPDHKSQCRNMHGHRYTLEITLSGPVSTVDGAPDRGMVIDFSDVKAIAKALIVDVWDHAFLVYSGDTAVRSFLDSLADHKTVVLDRIPTAENLVQIAFDTLAAAYQAQYGDQLKLTHARLYETPNCWADCYGSQA

SEQ ID NO: 17067 - protein, 149 aa, Advenella mimigardefordensis
  misc_feature (1)..(149): tr|W0P9P6|W0P9P6_9BURK 6-carboxy-5,6,7,8-tetrahydropter in synthase OS=Advenella mimigardefordensis DPN7 OX=124 7726 GN=queD PE=4 SV=1
MITVTRALHFDAGHRIPDHQSQCRNMHGHRYTLEITLSGPVSTVDGAPDRGMVLDFSDVKAIAKALIVDVWDHAFLVYSGDTVVRNFLDSLGDHKTVVLDRIPTAENLVRIAFDTLAAAYQAQYGDRLKLTHARLYETPNCWADCYAAT

SEQ ID NO: 17068 - protein, 150 aa, Advenella sp.
  misc_feature (1)..(150): tr|A0A2M9TZ24|A0A2M9TZ24_9BURK 6-carboxytetrahydropteri n synthase QueD OS=Advenella sp. S44 OX=1982755 GN=CAP4 8_05895 PE=4 SV=1
MITVTRALHFDAGHRIPDHRSQCRNLHGHRYTLEITLSGPVSTVAGAADHGMVLDFSDVKAIAKERIVDVWDHAFLVYYGDTAVRAFLDSLPDHKTVVLDRVPTAENLVQIAFNTLAAAYLAKYGDQLKLTHVRLYETPNCWADCYGTDA

SEQ ID NO: 17069 - protein, 149 aa, Aequorivita antarctica
  misc_feature (1)..(149): tr|A0A5C6Z379|A0A5C6Z379_9FLAO 6-carboxy-5,6,7,8-tetrah ydropterin synthase OS=Aequorivita antarctica OX=153266 GN=ESU54_00180 PE=3 SV=1
MQTIRITKIFSFETGHALYGYDGKCRNVHGHSYKLSVTVVGSPIEDSSNVKFGMVIDFSDLKKIVKEEIVDVFDHSTVFNKNTPHVELAKELSDRGHSVLLVDYQPTSEMMVIDFSEKIKSRLPKNIQLHSLRLQETDSSYAEWFAGDN

SEQ ID NO: 17070 - protein, 136 aa, Aequorivita antarctica
  misc_feature (1)..(136): tr|A0A5C6YUS8|A0A5C6YUS8_9FLAO 6-carboxy-5,6,7,8-tetrah ydropterin synthase OS=Aequorivita antarctica OX=153266 GN=ESU54_17380 PE=3 SV=1
MSLTVYRKAHFNAAHRLFKKEWDDVKNFEVFGKCSNPNYHGHNYELEVGITGEIDPETGFLMDLKILSRIIEEEIEDAFDHKNLNIEVSEFKNLNPTVENIAIVIWNKLRARIDSKFDISIKLYETPRNFVVYNGH

SEQ ID NO: 17071 - protein, 136 aa, Aequorivita lipolytica
  misc_feature (1)..(136): tr|A0A5C6YKG5|A0A5C6YKG5_9FLAO 6-carboxy-5,6,7,8-tetrah ydropterin synthase OS=Aequorivita lipolytica OX=153267 GN=ESV24_14910 PE=3 SV=1
MSLTVYRKAHFNAAHRLFRKEWDDARNFQVFGKCSNPNYHGHNYELEVGISGEIDPETGFLIDLKILTDIIKQEVEDPLDHKNLNIEVPEFKNLNPTVENIAVVIWNKIRTRIDSKYGISVKLYETPRNFVVYNGN

SEQ ID NO: 17072 - protein, 149 aa, Aequorivita lipolytica
  misc_feature (1)..(149): tr|A0A5C6YS51|A0A5C6YS51_9FLAO 6-carboxy-5,6,7,8-tetrah ydropterin synthase OS=Aequorivita lipolytica OX=153267 GN=ESV24_03015 PE=3 SV=1
MNKIRITKIFSFETGHALYGYDGKCRNVHGHSYKLSVTVIGTPISDTDNVKFGMVIDFSDLKKIVKEEIVDVFDHSTVFNKNTPHVELAKELSDRGHSVLLVDYQPTSEMMVIDFSEKIKIRLPKNIQLHSLKLQETDSSYAEWFADDN

SEQ ID NO: 17073 - protein, 149 aa, Aequorivita soesokkakensis
  misc_feature (1)..(149): tr|A0A1A9LCP7|A0A1A9LCP7_9FLAO 6-carboxy-5,6,7,8-tetrah ydropterin synthase OS=Aequorivita soesokkakensis OX=13 85699 GN=A7A78_05965 PE=3 SV=1
MEQIRITKIFSFETGHALYGYDGKCRNVHGHSYKLSVTVIGTPIEDIDNVKFGMVIDFGDLKKIVKEEIVDVFDHATVFNKNTPHVELAKELSDRGHSVLLVDYQPTSEMMVIDFSEKIKKRLPKNIMLHSLRLQETDSSYAEWFAGDN

SEQ ID NO: 17074 - protein, 136 aa, Aequorivita soesokkakensis
  misc_feature (1)..(136): tr|A0A1A9LHM3|A0A1A9LHM3_9FLAO 6-carboxy-5,6,7,8-tetrah ydropterin synthase OS=Aequorivita soesokkakensis OX=13 85699 GN=A7A78_08405 PE=3 SV=1
MSLTVYRKAHFNAAHRLFRKEWSDAKNFEVFGKCSNPNFHGHNYELEVGITGEIDPETGFLMDLKILSDIIKDEIEDCFDHKNLNVEVAEFKNLNPTVENIAVVIWNKIRTRIDSKYGVSVKLYETPRNFVIYNGQ

SEQ ID NO: 17075 - protein, 149 aa, Aequorivita sp.
  misc_feature (1)..(149): tr|A0A410G4Y7|A0A410G4Y7_9FLAO 6-carboxy-5,6,7,8-tetrah ydropterin synthase OS=Aequorivita sp. H23M31 OX=249437 5 GN=EI546_11685 PE=3 SV=1
MKQIRITKIFSFETGHALYGYDGKCRNVHGHSYKLSVTVIGSPISDSNNVKYGMVIDFSDLKKIVKEEIVDVFDHATVFNKNTPHVQLAKELSDRDHSVLLVDYQPTSEMMVIDFSEKIKKRLPEGIKLHSLKLQETDSSYAEWYSEDN

SEQ ID NO: 17076 - protein, 149 aa, Aequorivita sp.
  misc_feature (1)..(149): tr|A0A2E4RQJ0|A0A2E4RQJ0_9FLAO 6-carboxy-5,6,7,8-tetrah ydropterin synthase OS=Aequorivita sp. OX=1872390 GN=CL 529_01950 PE=3 SV=1
MKQIRITKIFSFETGHALYGYDGKCRNVHGHSYKLSVTVIGTPISDNDNVKFGMVIDFGDLKKIVKEEIVDVFDHATVFNKNTPHVELAKELSDRGHSVLLVDYQPTSEMMVIDFSEKIKKRLPKNIMLHSLRLQETDSSYAEWFAGDN

SEQ ID NO: 17077 - protein, 136 aa, Aequorivita sublithincola
  misc_feature (1)..(136): tr|I3YWW8|I3YWW8_AEQSU 6-carboxy-5,6,7,8-tetrahydropter in synthase OS=Aequorivita sublithincola (strain DSM 14 238 / LMG 21431 / ACAM 643 / 9-3) OX=746697 GN=Aeqsu_20 20 PE=3 SV=1
MSLTVYRKAHFNAAHRLFKKEWSDAKNLEIFGKCSNPNYHGHNYELEVGITGDIDPETGFLMDLKILRQIIEEEVETPFDHKNLNIEVPEFKSLNPTVEIIAVVIWNKIRTRIDSKYKISVKLYETPRNFVVYNGH

SEQ ID NO: 17078 - protein, 186 aa, Aequorivita sublithincola
  misc_feature (1)..(186): tr|I3YU92|I3YU92_AEQSU 6-pyruvoyl-tetrahydropterin synt hase OS=Aequorivita sublithincola (strain DSM 14238 / L MG 21431 / ACAM 643 / 9-3) OX=746697 GN=Aeqsu_1061 PE=4 SV=1
MLIGTVCFNQENGTFFSNTANQIVGEENCIFVAQLYLMNQIRITKIFSFETGHALYGYDGKCRNVHGHSYKLSVTVIGKPIEDNTNVKFGMVIDFSDLKKIVKEEIVDVFDHATVFNKNTPHVELAKELSDRGHSVLLVDYQPTSEMMVIDFSEKIKKHLPKNIQLHSLKLQETDSSYAQWFAGDN

SEQ ID NO: 17079 - protein, 149 aa, Aequorivita viscosa
  misc_feature (1)..(149): tr|A0A1M6DHB1|A0A1M6DHB1_9FLAO 6-carboxy-5,6,7,8-tetrah ydropterin synthase OS=Aequorivita viscosa OX=797419 GN =SAMN04487908_10515 PE=3 SV=1
MKQIRITKIFSFETGHALFGYDGKCRNVHGHSYKLSVTVIGSPISDSNNVKFGMVIDFSDLKKIVKEEIVDVFDHATVFNKNTPHVHLAKELSDRDHSVLLVDYQPTSEMMVIDFSEKIAKRLPESIKLHSLRLQETDSSYAEWYASDN

SEQ ID NO: 17080 - protein, 136 aa, Aequorivita viscosa
  misc_feature (1)..(136): tr|A0A1M6B8M9|A0A1M6B8M9_9FLAO 6-carboxy-5,6,7,8-tetrah ydropterin synthase OS=Aequorivita viscosa OX=797419 GN =SAMN04487908_102137 PE=3 SV=1
MSLTVFRKAHFNAAHRLYKKEWDDAKNLKVFGKCSNPNYHGHNYELEVGISGEIDPETGFLINLKILSQIIEEEIEDQFDHKNLNIEVPEFKYLNPTVENIAIVIWNKLRNRIEDKFEISVKLYETPRNFVVYSGK

SEQ ID NO: 17081 - protein, 145 aa, Aeribacillus composti
  misc_feature (1)..(145): tr|A0A559TXK5|A0A559TXK5_9BACI 6-carboxy-5,6,7,8-tetrah ydropterin synthase OS=Aeribacillus composti OX=1868734 GN=FB379_12322 PE=3 SV=1
MLHQFYPQVFHSYSYELNKDMQISAAHYIPHEKAGKCARVHGHTYFVNLTICGDQLDDSGFLVNFQHLKKWVHDRFDHTLLNDHTDVFNGQNSEDFPTTEVVARKIWEIVQDHLNVLPNKPKCLQVFVRETPTSYVVYRPKREMK

SEQ ID NO: 17082 - protein, 145 aa, Aeribacillus pallidus
  misc_feature (1)..(145): tr|A0A164AH60|A0A164AH60_9BACI 6-carboxy-5,6,7,8-tetrah ydropterin synthase OS=Aeribacillus pallidus OX=33936 G N=AP3564_11725 PE=3 SV=1
MLHQFYPQVFHNYSYELNKDMQISAAHYIPHEKAGKCARVHGHTYFVNLTICGDQLDDSGFLVNFQHLKKWVHDRFDHTLLNDHTDVFNGQNSEDFPTTEVVARKIWEIVQDHLNVLPNKPKCLQVFVRETPTSYVVYRPKREMK

SEQ ID NO: 17083 - protein, 145 aa, Aeribacillus pallidus; identical to SEQ ID NO: 17081
  misc_feature (1)..(145): tr|A0A161ZPZ4|A0A161ZPZ4_9BACI 6-carboxy-5,6,7,8-tetrah ydropterin synthase OS=Aeribacillus pallidus OX=33936 G N=AZI98_16555 PE=3 SV=1

SEQ ID NO: 17084 - protein, 118 aa, Aeromicrobium flavum
  misc_feature (1)..(118): tr|A0A512HR28|A0A512HR28_9ACTN 6-carboxy-5,6,7,8-tetrah ydropterin synthase OS=Aeromicrobium flavum OX=416568 G N=AFL01nite_02410 PE=3 SV=1
MFEITKRFTIEAAHFLPLVPDQHPCANMHGHSYVVEVSVAGELDEYGWVMDFAEIGSVFEPIRTLLDHRLLNDVAGLENPTSEIMSQWIFESMRPNVPRLAWVKVSETATSSSTYRPG

SEQ ID NO: 17085 - protein, 124 aa, Aeromicrobium sp.
  misc_feature (1)..(124): tr|A0A0S9RCE6|A0A0S9RCE6_9ACTN 6-carboxy-5,6,7,8-tetrah ydropterin synthase OS=Aeromicrobium sp. Leaf289 OX=173 6324 GN=ASF37_01750 PE=3 SV=1
MNYESEIYREFTFEAAHQLPHVPEGHKCARLHGHSYLAAVHVSGPVGEQTGWVQDFGDIKAAFKPLEDQLDHHYLNDVAGLDNPTSEVLAKWIWDRLVPKLPNLKEVRVRETCTSGCIYRGGAR

SEQ ID NO: 17086 - protein, 121 aa, Aeromicrobium sp.
  misc_feature (1)..(121): tr|A0A3B7D6I5|A0A3B7D6I5_9ACTN 6-carboxy-5,6,7,8-tetrah ydropterin synthase OS=Aeromicrobium sp. A1-2 OX=210771 3 GN=queD PE=3 SV=1
MAVSEIFREFTFEAAHRLPNVPEGHKCSRLHGHSYRVQVHVTGPVGPETGWVRDFGEIKAAFKPLEDCLDHYYLNELDGLENPTSEVLAKWIWDRLVVELPDLSAIQVRETCTSGCVYRGE

SEQ ID NO: 17087 - protein, 291 aa, Aeromonas allosaccharophila
  misc_feature (1)..(291): tr|A0A0T6U0Q0|A0A0T6U0Q0_9GAMM 6-pyruvoyl tetrahydropte rin synthase OS=Aeromonas allosaccharophila OX=656 GN=A O724_07690 PE=4 SV=1
MKLFVRDLTVIDSSYLCERRGMVGESWLVDIEMSGELNEMSMLLDFGRVKKLIKSIIDEEVDHKLLVPTECPLIHIETLDGDESTVDLLRPGRSIHLRCPTQGFAFIRAPLVDKESVTRYLLAVLAKRLPGNIKDLSLTLRHEAIDGAFYHYSHGLKKHDGNCQRIAHGHRSPIEIHVDGMRDGELELNWAERWGDIYLGTEEDKVALTELALSPRANAQLGEHHTGFKYVAPQGLFQLAIPSAEVEMIDTDTTVELLACYIAREVKKMVGDKFVKIVAYEGVGKGAIAYA

SEQ ID NO: 17088 - protein, 291 aa, Aeromonas allosaccharophila
  misc_feature (1)..(291): tr|A0A1Q5VXB2|A0A1Q5VXB2_9GAMM Uncharacterized protein OS=Aeromonas allosaccharophila OX=656 GN=BJP24_01125 PE =4 SV=1
MKLFVRDLTVIDSSYLCERRGMVGESWLVDIEMSGELNEMSMLLDFGRVKKLIKSIIDEEVDHKLLVPTECPLIHIETLDGDESTVDLLRPGRSIHLRCPTQGFAFIPAPLVDKESVTRYLLAVLAKRLPGNIKDLSMTLRHEAIDGAFYHYSHGLKKHDGNCQRIAHGHRSPIEIHVDGERDGELELNWAERWGDIYLGTEEDKVALTELALSPRANAQLGEHHCGFKYVAPQGLFQLAIPRAEVEMIDTDTTVELLACYIAREVKKMVGDKFVKIVAYEGVGKGAIAYA

SEQ ID NO: 17089 - protein, 291 aa, Aeromonas cavernicola
  misc_feature (1)..(291): tr|A0A2H9U0Q9|A0A2H9U0Q9_9GAMM Uncharacterized protein OS=Aeromonas cavernicola OX=1006623 GN=CUC53_16930 PE=4 SV=1
MKLFVRDLTVIDSSYLCERRGMVGESWLVDIEMSGELNEMSMLLDFSRVKKLIKSIIDEEVDHKLLVPVDNPLIRVQLTDDNDSTVDLLRPHRSIHLRCPTQGFALIATSQIDKESVTRHLLAVLAKRLPGNIKDLSLTLRHEAIHGAFYHYSHGLKKHDGNCQRIAHGHRSPIEIHVDGERDPSLELSWAERWGDIYLGTQEDQVALSELSLSDQAKLAVSELHTGFKYVAPQGLFQLAIPTAEVEMIDSDTTVELLAGYIAQEVKKIVGDKFVKIVAYEGVGKGAIAYA

SEQ ID NO: 17090 - protein, 272 aa, Aeromonas caviae
  misc_feature (1)..(272): tr|A0A3S5WZX3|A0A3S5WZX3_AERCA Uncharacterized protein OS=Aeromonas caviae OX=648 GN=C0708_04260 PE=4 SV=1
MGESWLVDIEMSGELNEMSMLLDFGRVKKLIKSIIDEEVDHKLLVPTECPLVHVHALDNDESTVDLLRPGRAIHLRCPTQGFAFIPAPQVDKESVTRYLLGVLAKRLPGNIKDLSLTLRSERIEGAFYHYSHGLKKHDGNCQRIAHGHRSPVEILVDGERDEELEFNWAERWADIYLGTEEDRVALGELALSERAEASLKEGDAHYIGFKYVAPQGLFQLAMPAVEVEMIDTDTTIELLAHYIAREVKKQVGDKFVKIVAYEGVGKGAIAYA

SEQ ID NO: 17091 - protein, 294 aa, Aeromonas caviae
  misc_feature (1)..(294): tr|A0A2X4RT39|A0A2X4RT39_AERCA Queuosine biosynthesis p rotein QueD OS=Aeromonas caviae OX=648 GN=NCTC12244_026 41 PE=4 SV=1
MKLFVRDLTVIDSSYLCERRGMVGESWLVDIEMSGELNEMSMLLDFGRVKKLIKSIIDEEVDHKLLVPTECPLVHVHALENDESTVDLLRPGRAIHLRCPAQGFAFIPAPQVDKESVTRYLLGVLAKRLPGNIKDLSLTLRQERIEGAFYHYSHGLKKHDGNCQRIAHGHRSPVEILVNGERDEELEFNWAERWADIYLGTEEDRVALGELVLSERAEASLKEGNAHYIGFKYVAPQGLFQLAMPAAEVEMIDTDTTIELLAHYIAREVKKQVGDKFVKIVAYEGVGKGAIAYA

SEQ ID NO: 17092 - protein, 272 aa, Aeromonas dhakensis
  misc_feature (1)..(272): tr|A0A433GH98|A0A433GH98_9GAMM Uncharacterized protein OS=Aeromonas dhakensis OX=196024 GN=CX648_12950 PE=4 SV =1
MGESWLVDIEMSGELNEMSMLLDFGRVKKLIKSIIDDEVDHKLLVPTECPLVQVAQLDGDESTVDLLRPGRSIHLRCPSQGFAFIPAPQVDKESVTRYLLAVLAKRLPGNIKDLSLTLRQEAIDGAFYHYSHGLKKHDGNCQRIAHGHRSPIEIHVDGERDQELELNWAERWADIYLGTDEDRVALGDLALSEQAKAILQEAGEHYVGFKYVAPQGLFQLAMPAAEVEMIDTDTTIELLAHYIAREVKKSVGDKFIKIVAYEGVGKGAIAYA

SEQ ID NO: 17093 - protein, 294 aa, Aeromonas dhakensis
  misc_feature (1)..(294): tr|K1JKM4|K1JKM4_9GAMM Uncharacterized protein OS=Aerom onas dhakensis OX=196024 GN=HMPREF1171_01716 PE=4 SV=1
MKLFVKDLTVIDSSYLCERRGMVGESWLVDIEMSGELNEMSMLLDFGRVKKLIKSIIDDEVDHKLLVPTENPLVQVAQLDGDESTVDLLRPGRSIHLRCPSQGFAFIPAPQVDKESVTRYLLAVLAKRLPGNIKDLSLTLRQEAIDGAFYHYSHGLKKHDGNCQRIAHGHRSPIEIHVDGERDQELELNWAERWADIYLGTDEDRVALGDLALSEQAKAILQEAGEHYVGFKYVAPQGLFQLAMPAAEVEMIDTDTTIELLAHYIAREVKKSVGDKFVKIVAYEGVGKGAIAYA

SEQ ID NO: 17094 - protein, 291 aa, Aeromonas diversa
  misc_feature (1)..(291): tr|N9TXU5|N9TXU5_9GAMM Uncharacterized protein OS=Aerom onas diversa CDC 2478-85 OX=1268237 GN=G114_15998 PE=4 SV=1
MKLFVRDLTVIDSSYLCERRGMVGESWVVDIELGGELNEMSMLLDFGRVKKLIKAIIDREVDHKLLIPADNPLLRRAAPAAGEVWVDWLRPGHTIHLRSPEQAFAFIPGQQVDKESLVAYLMEILARELPGNIKDLALTLRHEKIEGAFYHYSHGLKKHDGNCQRIAHGHRSPIELYVDGERAPEFEAAFAERWSDIYLGTLEDEVALETLALSPQAALIGPDSHIGFAYEAPQGRFELAMPRAGVEMIDTDTTVELLAHYIAREVKKQVGEKFLKVVAYEGVGKGAIAWA

SEQ ID NO: 17095 - protein, 291 aa, Aeromonas encheleia
  misc_feature (1)..(291): tr|A0A3S4T3B5|A0A3S4T3B5_9GAMM Queuosine biosynthesis p rotein QueD OS=Aeromonas encheleia OX=73010 GN=NCTC1291 7_01624 PE=4 SV=1
MKLFVRDLTVIDSSYLCERRGMVGESWLVDVEMSGELNEMSMLLDFGRVKKLIKSIIDEEVDHKLLVPTDCGLVHIQPLDDGECTVDLLRPQRSIHLRCPSQAFAFIPAPQVDKESVTRYLLAVLAKRLPDNIKDLALTLRQERLDGAFYHYSHGLKKHDGNCQRIAHGHRSPIEILVDGERDGELELNWAERWADIYLGTEEDKVPLNELALSELAQAELGEHHLGFKYVAPQGLFQLAMPAAEVEMIDTDTTIELLAHYIAREVKKQVGDKFVKIVAYEGVGKGAIAYA

SEQ ID NO: 17096 - protein, 291 aa, Aeromonas enteropelogenes
  misc_feature (1)..(291): tr|A0A175VKX0|A0A175VKX0_AEREN 6-pyruvoyl tetrahydropte rin synthase OS=Aeromonas enteropelogenes OX=29489 GN=L CR_06790 PE=4 SV=1
MKLFVRDLTVIDSSYLCERRGMVGESWLVDIEMSGELNEMSMLLDFGRVKKLIKSIIDEEVDHKLLVPTECALIHVEHLEGDESTVDLLRQGRSIHLRCPTQGFAFIPAPQVDKESVTRYLLAVLAKRLPGNIKDLSLTLRQEQIEGAFYHYSHGLKKHDGNCQRIAHGHRSPIEIHVDGERDEELEQNWAERWADIYLGTEEDRAALTELALSARANVLLGDHHAGFKYVAPQGLFQLAIPSAEVEMIDTDTTVELLAHYIAREVKKAVGDKFVKIVAYEGVGKGAIAYA

SEQ ID NO: 17097 - protein, 272 aa, Aeromonas hydrophila; identical to SEQ ID NO: 17092
  misc_feature (1)..(272): tr|A0A2R4U221|A0A2R4U221_AERHY Uncharacterized protein OS=Aeromonas hydrophila subsp. hydrophila OX=196023 GN= C1A23_16070 PE=4 SV=1

SEQ ID NO: 17098 - protein, 272 aa, Aeromonas hydrophila
  misc_feature (1)..(272): tr|A0A454GF09|A0A454GF09_AERHY Uncharacterized protein OS=Aeromonas hydrophila OX=644 GN=B7E00_18060 PE=4 SV=1
MGESWLVDIEMSGELNEMSMLLDFGRVKKLIKSIIDDEVDHKLLVPTECPLVQVAQLDGNESSVDLLRPGRSIHLRCPSQGFAFIPAPQVDKESVTRYLLAVLAKRLPGNIKDLSLTLRQEAIDGAFYHYSHGLKKHDGNCQRIAHGHRSPIEIHVDGERDQELELNWAERWADIYLGTDEDRVALGELALSEQAKAILQEAGELYVGFKYVAPQGLFQLAMPAAEVEMIDTDTTIELLAHYIAREVKKSVGDKFIKIVAYEGVGKGAIAYA

SEQ ID NO: 17099 - protein, 269 aa, Aeromonas jandaei
  misc_feature (1)..(269): tr|A0A2S5FDF0|A0A2S5FDF0_AERJA Uncharacterized protein OS=Aeromonas jandaei OX=650 GN=C3737_08755 PE=4 SV=1
MGESWLVDIEMSGELNEMSMLLDFGRVKKLIKSIIDDEVDHKLLVPTECSLVHVETLEDGESCVDLLRPGRSIHLRCPTQGFAFIPAPQVDKESVTRYLLAVLAKRLPGNIKDLSLTLRQEAIDGPFYHYSHGLKKHDGNCQRIAHGHRSPIEIHIDGERDGDLEQQWAERWADIYLGTNEDKVALKELALSARANVQLGEHHTGFKYVAPQGLFQLAIPTTEVEMIDTDTTVELLACYIAREVKKMVGDKFVKIVAYEGVGKGAIAYA

SEQ ID NO: 17100 - protein, 270 aa, Aeromonas jandaei
  misc_feature (1)..(270): tr|A0A3N6V6N9|A0A3N6V6N9_AERJA Uncharacterized protein OS=Aeromonas jandaei OX=650 GN=EHZ47_15890 PE=4 SV=1
MGESWLVDIEMSGELNEMSMLLDFGRVKKLIKSIIDDEVDHKLLVPTECPLVHVETLEEDGESCVDLLRPGRSIHLRCPTQGFAFIPAPQVDKESVTRYLLAVLAKRLPGNIKDLSLTLRQEAIDGPFYHYSHGLKKHDGNCQRIAHGHRSPIEIHIDGERDSELELNWAERWADIYLGTDEDKVALAELALSARANVQLGEHHTGFKYVAPQGLFQLAIPTTEVEMIDTDTTVELLACYIAREVKKMVGDKFVKIIAYEGVGKGAIAYA

SEQ ID NO: 17101 - protein, 270 aa, Aeromonas lusitana
  misc_feature (1)..(270): tr|A0A2M8HA08|A0A2M8HA08_9GAMM Uncharacterized protein OS=Aeromonas lusitana OX=931529 GN=CUC44_10185 PE=4 SV= 1
MVGESWLVDIEMSGELNEMSMLLDFGRVKKLIKSIIDEEVDHKLLVPTGCGLVHIAALDNDECTVDLLRPARSIHLRSPSQAFAFIPAPQVDKESVTRYLLGVLATRLPGNIKDLSLTLRQERLDGAFYHYSHGLKKHDGNCQRIAHGHRSPIEILVDGERDEELELNWAERWNDIYLGTQEDQVSLSELDLSDLAKAHLGEHHLGFKYVAPQGLFQLAMPAAEVEMIDTDTTIELLAHYIAREVKKQVGDKFVKIVAYEGVGKGAIAYA

SEQ ID NO: 17102 - protein, 291 aa, Aeromonas media
  misc_feature (1)..(291): tr|A0A023RII4|A0A023RII4_AERME Uncharacterized protein OS=Aeromonas media WS OX=1208104 GN=B224_1506 PE=4 SV=1
MKLFVRDLTVIDSSYLCERRGMVGESWLVDIEMSGELNEMSMLLDFGRVKKLIKSIIDEEVDHKLLVPAECPLVHVHALDCGESTVDLLRPGRSIHLRCPTQGFAFIPASQVDKESVTRYLLAVLAKRLPGNIKDLSLTLRQEKIEGAFYHYSHGLKKHDGNCQRIAHGHRSPVEIEVDGVRDEELELNWAERWADIYLGTQEDKVALSELALSELAKAHLGEHHLGFKYVAPQGLFQLAMPAAEVEMIDTDTTIELLAHYIAREVKKQVGEKFVKIVAYEGVGKGAIAYA

SEQ ID NO: 17103 - protein, 284 aa, Aeromonas molluscorum
  misc_feature (1)..(284): tr|R1F587|R1F587_9GAMM Uncharacterized protein OS=Aerom onas molluscorum 848 OX=1268236 GN=G113_11439 PE=4 SV=1
MTVIDSSYLCERRGMVGESWLVDVELGGELNEMSMLLDFGRVKKLIKAIIDREVDHKLLVPTESALVRIESLAEGEQCVDLLRPDRSIHLRCPEEAFAFIPAAQVDKESVTRYLLAVLAKELPDNIRDLSLTLRHEAIAGAFYHYSHGLKKHDGNCQRIAHGHRSPIEIEVEGVRDEELEQNWAERWADIYLGTAEDEVPLAELALSAVAAPLLGGRHIGFKYTAPQGLFQLAMVKAEVEMIDTDTTIELLAHYIAREVKRQLGDKLVKVVAYEGVGKGAIAYA

SEQ ID NO: 17104 - protein, 270 aa, Aeromonas rivipollensis
  misc_feature (1)..(270): tr|A0A2P1PLA7|A0A2P1PLA7_9GAMM Uncharacterized protein OS=Aeromonas rivipollensis OX=948519 GN=C7N77_16535 PE= 4 SV=1
MVGESWLVDIEMSGELNEMSMLLDFGRVKKLIKSIIDEEVDHKLLVPTESALVHIHPLDDDECTVDLLRPGRSIHLRCPAQAFAFIPAPQVDKESVTRYLLAVLAKRLPGNIKDLSLTLRQEQIEGAFYHYSHGLKKHDGNCQRIAHGHRSPVEIEVDGARNEELELNWAERWADIYLGTLEDKVALSELELSELAKAELGEHHLGFKYTAPQGLFQLAMPAAEVEMIDTDTTIELLAHHIAREVKKQVGDKFVKIVAYEGVGKGAIAYA

SEQ ID NO: 17105 - protein, 291 aa, Aeromonas salmonicida
  misc_feature (1)..(291): tr|A0A290VLV1|A0A290VLV1_AERSA Uncharacterized protein OS=Aeromonas salmonicida subsp. masoucida OX=197700 GN= BHG40_16780 PE=4 SV=1
MKLFVRDLTVIDSSYLCERRGMVGESWLVDVEMSGELNEMSMLLDFGRVKKLIKSIIDEEVDHKLLVPAECALIHVAHLEGEESTVDLLRPQGSIHLRCPTQGFAFIPAPQVDKESVTRYLLAVLAQRLPGNIRDLSVTLRQEQIDGAFYHYSHGLKKHDGNCQRIAHGHRSPIEIHVDGMRDGELELNWAERWADIYLGTDEDKVDLSELNLSDVARSQLGEQHLGFKYVAPQGLFQLAMPAAEVEMIYTDTTIELLACYIAREVKKAVGDKFVKVVAYEGVGKGAIAYA

SEQ ID NO: 17106 - protein, 291 aa, Aeromonas salmonicida; identical to SEQ ID NO: 17105
  misc_feature (1)..(291): tr|A0A4U7JRF6|A0A4U7JRF6_AERSA 6-pyruvoyl tetrahydropte rin synthase OS=Aeromonas salmonicida subsp. salmonicid a OX=29491 GN=WH04_10735 PE=4 SV=1

SEQ ID NO: 17107 - protein, 291 aa, Aeromonas schubertii
  misc_feature (1)..(291): tr|A0A0W7TZE5|A0A0W7TZE5_9GAMM 6-pyruvoyl tetrahydropte rin synthase OS=Aeromonas schubertii OX=652 GN=ATO46_07 630 PE=4 SV=1
MKLFVRDLTVIDSSYLCERRGMVGESWLVDIELGGELNEMSMLLDFGRVKKLIKAIIDREVDHKLLVPSDNDLLRRAEGAPGELTVDWLRPGRSIHLRCPEQAFAFIPGDQVDRESLTAYLMQILARELPGNIKDLTLTLRHEKIDGAFYHYSHGLKKHDGNCQRIAHGHRSPIELHVDGERAPELEAAFAERWSDIYLGTDEDRVALESLTLSPHAAVVTPESHIGFAYEAPQGRFELAMPHAEVEMIDTDTTVELLAHYIAREVKKEVGEKFLKVVAYEGVGKGAIAWA

SEQ ID NO: 17108 - protein, 291 aa, Aeromonas schubertii
  misc_feature (1)..(291): tr|A0A0S2SMS6|A0A0S2SMS6_9GAMM 6-pyruvoyl tetrahydropte rin synthase OS=Aeromonas schubertii OX=652 GN=WL1483_3 553 PE=4 SV=1
MKLFVRDLTVIDSSYLCERRGMVGESWLVDIELGGELNEMSMLLDFGRVKKLIKAIIDREVDHKLLVPSDNGLLRRAEGAPGELTVDWLRPGRSIHLRCPEQAFAFIPGDQVDRESLTAYLMQILARELPGNIKDLTLTLRHEKIDGAFYHYSHGLKKHDGNCQRIAHGHRSPIELHVDGERAPELEAAFAERWSDIYLGTDEDRVALDSLTLSPHAAVVTPESHIGFAYEAPQGRFELAMPRAEVEMIDTDTTVELLAHYIAREVKKEVGEKFLKVAAYEGVGKGAIAWA

SEQ ID NO: 17109 - protein, 269 aa, Aeromonas sobria
  misc_feature (1)..(269): tr|A0A2N3J242|A0A2N3J242_AERSO Uncharacterized protein OS=Aeromonas sobria OX=646 GN=CJP16_08290 PE=4 SV=1
MGESWLVDIEMSGELNEMSMLLDFGRVKKLIKSIIDEEVDHKLLVPTGCPQIHIETLDGDESTVDLLRPERSIHLRCPTQGFAFIPAPHVDKESVTRYLLAVLAKRLPDNIKDLSLTLRQEAITGAFYHYSHGLKKHDGNCQRIAHGHRSPIEIHVDGERDDELELNWAERWGDIYLGTEEDKVALTELSLSSRANAQLGAHHLGFKYVAPQGLFQLAIPAAEVEMIDTDTTVELLACYIAREVKQMVGDKFVKIVAYEGVGKGAIAYA

SEQ ID NO: 17110 - protein, 291 aa, Aeromonas sobria
  misc_feature (1)..(291): tr|A0A2N3IL24|A0A2N3IL24_AERSO 6-pyruvoyl tetrahydropte rin synthase OS=Aeromonas sobria OX=646 GN=AOX56_09230 PE=4 SV=1
MKLFVRDLTVIDSSYLCERRGMVGESWLVDIEMSGELNEMSMLLDFGRVKKLIKSIIDEEVDHKLLVPTGCPLIHIETLDGDESTVDLLRPERSIHLRCPTQGFAFIPAPHVDKESVTRYLLAVLAKRLPDNIKDLSLTLRQEAITGAFYHYSHGLKKHDGNCQRIAHGHRSPIEIHVDGERDDELELNWAERWGDIYLGTEEDKVALTELSLSSRANAQLGDHHLGFKYVAPQGLFQLAIPAAEVEMIDTDTTVELLACYIAREVKQMVGDKFVKIVAYEGVGKGAITYA

SEQ ID NO: 17111 - protein, 291 aa, Aeromonas sp.
  misc_feature (1)..(291): tr|A0A1Q8D0W3|A0A1Q8D0W3_9GAMM Uncharacterized protein OS=Aeromonas sp. YN13HZO-058 OX=1921564 GN=BSP75_18075 PE=4 SV=1
MKLFVRDLTVIDSSYLCERRGMVGESWLVDIEMSGELNEMSMLLDFGRVKKLIKSIIDEEVDHKLLVPTECPLIHIETLDGDESTVDLLRPGRSIHLRCPTQGFAFIPAPLVDKESVTRYLLAVLAKRLPGNIKDLSLTLRHEAIDGAFYHYSHGLKKHDGNCQRIAHGHRSPIEIHVDGMRDGELELNWAERWGDIYLGTEEDKVALTELALSPRANAQLGEHHTGFKYVAPQGLFQLAIPSAEVEMIDTDTTVELLACYIAREVKKMVGDKFVKIVAYEGVGKGAIAYA

SEQ ID NO: 17112 - protein, 269 aa, Aeromonas sp.
  misc_feature (1)..(269): tr|A0A2R7N4S7|A0A2R7N4S7_9GAMM Uncharacterized protein OS=Aeromonas sp. HMWF017 OX=2056853 GN=DBR30_07630 PE=4 SV=1
MGESWLVDIEMSGELNEMSMLLDFGRVKKLIKSIIDEEVDHKLLVPTECPLIHVETLDGDESTVDLLRPGRSIHLRCPSQGFAFIPAPQVDKESVTRYLLAVLAKRLPGNIKDLSLTLRQEAITGAFYHYSHGLKKHDGNCQRIAHGHRSPIEIHVDGERDQELELNWAERWGDIYLGTEEDKVALTELALSPRANAQLGEHHTGFKYVAPQGLFQLAIPSAEVEMIDTDTTVELLACYIAREVKKMVGDKFVKIVAYEGVGKGAIAYA

SEQ ID NO: 17113 - protein, 272 aa, Aeromonas taiwanensis
  misc_feature (1)..(272): tr|A0A5F0K9X2|A0A5F0K9X2_9GAMM Uncharacterized protein OS=Aeromonas taiwanensis OX=633417 GN=DRM93_12450 PE=4 SV=1
MGESWLVDIEMSGELNEMSMLLDFGRVKKLIKSIIDEEVDHKLLVPAESPLVHIHPLDNDECTVDLLRPGRSIHLRCPSQGFAFIPAPQVDKESVTRYLLAVLAVLAKRLPGNIKDLTLTLRQERIDGAFYHYSHGLKKHDGNCQRIAHGHRSPIEILVDGERDEELELNWAERWADIYLGTEEDRVALSDLALSEQAKAHLGEHHQGFKYVAPQGLFQLAMPAAEVEMIDTDTTIELLAHYIAREVKKLVGDKFVKIVAYEGVGKGAIAYA

SEQ ID NO: 17114 - protein, 291 aa, Aeromonas veronii
  misc_feature (1)..(291): tr|A0A160F063|A0A160F063_9GAMM 6-pyruvoyl tetrahydropte rin synthase OS=Aeromonas veronii OX=654 GN=WM43_20010 PE=4 SV=1
MKLFVRDLTVIDSSYLCERRGMVGESWLVDIEMSGELNEMSMLLDFGRVKKLIKSIIDEEVDHKLLVPTECPLIHVETLDDDESTVDLLRPGRSIHLRCPSQGFAFIPAPQVDKESVTRYLLAVLAKRLPGNIKDLSLTLRQEAITGAFYHYSHGLKKHDGNCQRIAHGHRSPIEIHVDGERDQELELNWAERWGDTYLGTEEDKVALTELALSPRANAQLGEHHCGFKYVAPQGLFQLAIPSTEVEMIDTDTTVELLACYIAREVKKMVGDKFVKIVAYEGVGKGAIAYA

SEQ ID NO: 17115 - protein, 269 aa, Aeromonas veronii
  misc_feature (1)..(269): tr|A0A4R8UA58|A0A4R8UA58_9GAMM Uncharacterized protein OS=Aeromonas veronii OX=654 GN=CGZ76_08360 PE=4 SV=1
MGESWLVDIEMSGELNEMSMLLDFGRVKKLIKSIIDEEVDHKLLVPTECPLIHVETLDGDESTVDLLRPGRSIHLRCPSQGFAFIPAPQVDKESVTRYLLAVLAKRLPGNIKDLSLTLRQEAITGAFYHYSHGLKKHDGNCQRIAHGHRSPIEIHVDGERDQELELNWAERWGDIYLGTEEDKVALTELALSPRANAQLGEHHCGFKYVAPQGLFQLAIPSAEVEMIDTDTTVELLACYIAREVKKMVGDKFVKIVAYEGVGKGAIAYA

SEQ ID NO: 17116 - protein, 291 aa, Aestuariibacter sp.
  misc_feature (1)..(291): tr|A0A506RQI8|A0A506RQI8_9ALTE Uncharacterized protein OS=Aestuariibacter sp. GS-14 OX=2590670 GN=FJ444_05675 PE=4 SV=1
MQLFVNDLTVMDFSYLCPQRGMVGESWIVDVLLDGTLNEESMVQDFGIVKKNLKRLIDSYVDHKLLVPAECSATTIRHDDDTDYVEVNFALADQKAIQMYCPADAYAFIYAPIITMESVSEYLREVIATHLPDNVDNLTILLRTEVINTPFYHYTHGLKKHDGNCQRIAHGHRSKVDIYTDGENDLESQTYWANRWCDIYIASEEDRITAEQLKLQQKLPSYQDHVCFAYEATQGYFEIVLPESQCEVITTDSTVECLAQYIYQQQKLRKPGSHCCVLAYEGVGKGARVSD

SEQ ID NO: 17117 - protein, 291 aa, Aestuariibacter sp.
  misc_feature (1)..(291): tr|A0A2D6XWB8|A0A2D6XWB8_9ALTE Uncharacterized protein OS=Aestuariibacter sp. OX=1872400 GN=CL531_03055 PE=4 S V=1
  misc_feature (15)..(15): Xaa can be any naturally occurring amino acid
MQLFVNDLTVMDFSXLCPERGMVGESWIVDVLLDGTLNEESMVQDFGIVKKNLKRLIDSYVDHKLLVPAECQATSIRHDDDTDYVEVNFTLAEQKAIQMYCPADAYAFIYAPTITMESVSEYLREVIATHLPDNVDNLTILLRTEVINTPFYHYTHGLKKHDGNCQRIAHGHRSKVDIITDGEIDLDSQAYWADRWCDIYIASEEDRISAEQLKLQQKLPSYQAHVCFAYEATQGYFEIVLPESQCEVITTDSTVECLAQFIYQQQKQRKPDTHCCVLAYEGVGKGARVSD

SEQ ID NO: 17118 - protein, 119 aa, Aestuariispira insulae
  misc_feature (1)..(119): tr|A0A3D9HGH6|A0A3D9HGH6_9PROT 6-carboxy-5,6,7,8-tetrah ydropterin synthase OS=Aestuariispira insulae OX=146133 7 GN=DFP90_107106 PE=3 SV=1
MMYRIAKEFHFSASHQLLHLAEDHPCARLHGHNYVVEVELASKELNSDGFVRDYRELGALKDYIDGELDHRHLNDVLGDDFVTAELIAKHFYDWCKARWPETVAVRVSETPKTWSEYRP

SEQ ID NO: 17119 - protein, 121 aa, Afipia broomeae
  misc_feature (1)..(121): tr|K8PK78|K8PK78_9BRAD 6-carboxy-5,6,7,8-tetrahydropter in synthase OS=Afipia broomeae ATCC 49717 OX=883078 GN= HMPREF9695_00276 PE=3 SV=1
MWELTKSFRFEAAHSLPGTTLGEASDEIHGHSFRAEVSIRGIPDPATGMVTDLGVLEQRMAEVQKMLDHKLLNKVEALGAPTLENLTRFIWERVQHAGKVTRVSVHRDSCNESCTYFGPQG

SEQ ID NO: 17120 - protein, 121 aa, Afipia broomeae
  misc_feature (1)..(121): tr|A0A2M8ZXP4|A0A2M8ZXP4_9BRAD 6-carboxy-5,6,7,8-tetrah ydropterin synthase OS=Afipia broomeae OX=56946 GN=BKA7 7_7234 PE=3 SV=1
MWELTKSFRFEAAHALPGTTLGEASEEIHGHSFRAEVSVRGMPDPATGMVLDLGLLERSMTDVRKMLDHKLLNKVDALGPPTLENLSRFIWEKVQHAGHVTRVSVHRDSCNESCTYFGPQS

SEQ ID NO: 17121 - protein, 121 aa, Afipia clevelandensis
  misc_feature (1)..(121): tr|K8NR54|K8NR54_9BRAD 6-carboxy-5,6,7,8-tetrahydropter in synthase OS=Afipia clevelandensis ATCC 49720 OX=8830 79 GN=HMPREF9696_03814 PE=3 SV=1
MWELTKSFRFEAAHSLPGTTLGEASDEVHGHSFRAEVTIRGTPDPATGMVTDLGLLEQRMTEVQTILDHKWLNKIETLGAPTLENLTRFIWDRVQHTGQVVRVSVYRDSCGESCTYFGPQG

SEQ ID NO: 17122 - protein, 122 aa, Afipia felis
  misc_feature (1)..(122): tr|A0A090MTM9|A0A090MTM9_AFIFE 6-carboxy-5,6,7,8-tetrah ydropterin synthase OS=Afipia felis OX=1035 GN=queD_2 P E=3 SV=1
MWELTKSFHFEAAHSLKGTTLGENSEEIHGHSFRAEVTIRGMPDPATGMVMDLGLLERKIADVRKALDHKFLNKIEAIGLPTLENLSRYIWDSVQGAGDVTRVSVHRDSCGESCTYFGPQSK

SEQ ID NO: 17123 - protein, 122 aa, Afipia felis
  misc_feature (1)..(122): tr|A0A380WAG8|A0A380WAG8_AFIFE 6-carboxy-5,6,7,8-tetrah ydropterin synthase OS=Afipia felis OX=1035 GN=queD PE= 3 SV=1
MWELTKSFHFEAAHSLSGTTLGDISQEIHGHSFRAEVTIRGTPDPATGMVMDLGLLERRVADVRKELDHKFLNKIEALGLPTLENLSRYIWDRVQGAGEVTRVSVHRDSCGESCTYFGPQPK

SEQ ID NO: 17124 - protein, 121 aa, Afipia massiliensis
  misc_feature (1)..(121): tr|A0A4V6BDU6|A0A4V6BDU6_9BRAD 6-carboxy-5,6,7,8-tetrah ydropterin synthase OS=Afipia massiliensis OX=211460 GN =YH63_002720 PE=3 SV=1
MWELTKSFRFEAAHSLPGTTLGEASDEIHGHSFRAEISIRGTPDPATGMVMDLGVLEQSMADVQKMLDHKLLNKVEALGAPTLENLTRFIWDRVQHAGKVTRVSVHRDSCNESCTYYGPQG

SEQ ID NO: 17125 - protein, 121 aa, Afipia sp.; identical to SEQ ID NO: 17119
  misc_feature (1)..(121): tr|A0A2D6YZF5|A0A2D6YZF5_9BRAD 6-carboxy-5,6,7,8-tetrah ydropterin synthase OS=Afipia sp. OX=1871052 GN=CL533_0 4900 PE=3 SV=1

SEQ ID NO: 17126 - protein, 133 aa, Afipia sp.
  misc_feature (1)..(133): tr|W3RJL3|W3RJL3_9BRAD 6-pyruvoyl tetrahydropterin synt hase OS=Afipia sp. P52-10 OX=1429916 GN=X566_06450 PE=4 SV=1
MFAVEVRDHVMIAHSFRGDVFGPAQALHGATFVIDAAFMAATLDRNGIVVDIGLAHQVLKDILTPLNYRNLDEMPVFKGINTTTEFLTKHVFDGLAAAAAQGRLGRAANELTAIRVTISESHVARAWYEAPLP

SEQ ID NO: 17127 - protein, 290 aa, Agarivorans albus
  misc_feature (1)..(290): tr|R9PN51|R9PN51_AGAAL NADPH dependent preQ0 reductase OS=Agarivorans albus MKT 106 OX=1331007 GN=AALB_2882 PE =4 SV=1
MKLFVKDLTVIDSTYLCPDRGLVGESWLVDIELGGSLNDMDMLLDFGQVKKLIKRLIDEKVDHKLLVPNRSPLCKVKTGEGYTQLDFMRPHGKSIHLRCPDEAYTFIDSVEVSNEALTAYVKNVVLEQLPANIQDLAITLRHESIDGPYYHYSHGLKKHDGNCQRIAHGHRSTIEIQVDGEYDIDLATSWAMKWRNIYLGSESDEISQQDISFYQQQAWQDHYAFAYQSPQGFFELVLPKQETDILPCETTVENLAAYIASTLAKVMEGHSLKVIAYEGVGKGAISEVYR

SEQ ID NO: 17128 - protein, 290 aa, Agarivorans sp.
  misc_feature (1)..(290): tr|A0A4D4IPB5|A0A4D4IPB5_9ALTE Uncharacterized protein OS=Agarivorans sp. Toyoura001 OX=2283141 GN=AHAT_17610 PE=4 SV=1
MKLFVKDLTVIDSTYLCPDRGLVGESWLVDIELGGSLNDMDMLLDFGQVKKLIKRLIDDKVDHKLLVPRRSPLCKVSNSEGYTQLDFQRPHGKSIHLRCPDEAYTFIDAVEVSNEALTAYVKAVVLEQLPSNIQDISINLRHEAIDGPYYHYSHGLKKHDGNCQRIAHGHRSTIEILVDAEGDVDLATSWAMKWRNIYLGSANDEISANDISFYQRQEWQQHYAFAYQSPQGFFELVVPKQETDILPCETTVENLAAYIAQTLSKAMDGHTLKVIAYEGVGKGAISEVYR

SEQ ID NO: 17129 - protein, 139 aa, Agathobacter ruminis
  misc_feature (1)..(139): tr|A0A2G3E2H5|A0A2G3E2H5_9FIRM 6-carboxy-5,6,7,8-tetrah ydropterin synthase OS=Agathobacter ruminis OX=1712665 GN=queD PE=3 SV=1
MYYLTAEAAFDAAHFLSGYEGKCSNIHGHRWRVILKIKSQNLQEQGQERGMVVDFGEVKAALKKEADYFDHTFIYEKDSLKPATVAALADEAFVVRPVDYRPTAENFAKHFFDRFAEHGFEVDEVTVYETPNNCATYRA

SEQ ID NO: 17130 - protein, 141 aa, Aggregatibacter actinomycetemcomitans
  misc_feature (1)..(141): tr|H0KCN6|H0KCN6_AGGAC 6-carboxy-5,6,7,8-tetrahydropter in synthase OS=Aggregatibacter actinomycetemcomitans Rh AA1 OX=1089447 GN=RHAA1_02109 PE=3 SV=1
MFKVSKEFSFDMAHLLDGHDGKCQNLHGHTYKLQVEVRGNLYQEGAKQGMVIDFSDLKKTVNHAILEPMDHAFIYDQTSERESKIAALLQQLDSKTFGVPFRTTAEQLAQFIFNQLKYQNNHPVSAVRLWETPTSFCEYGE

SEQ ID NO: 17131 - protein, 141 aa, Aggregatibacter actinomycetemcomitans
  misc_feature (1)..(141): tr|A0A142FYE6|A0A142FYE6_AGGAC 6-carboxy-5,6,7,8-tetrah ydropterin synthase OS=Aggregatibacter actinomycetemcom itans OX=714 GN=queD PE=3 SV=1
MFKVSKEFSFDMAHLLDGHDGKCQNLHGHTYKLQVEVRGDLYQEGAKQGMVIDFSDLKKTVNHTILEPMDHAFIYDQTSERESKIAALLQQLDSKTFGVPFRTTAEQLAQFIFNQLKYQKNLPVSAIRLWETPTSFCEYGE

SEQ ID NO: 17132 - protein, 141 aa, Aggregatibacter aphrophilus
  misc_feature (1)..(141): tr|A0A0K1N3N7|A0A0K1N3N7_AGGAP 6-carboxy-5,6,7,8-tetrah ydropterin synthase OS=Aggregatibacter aphrophilus OX=7 32 GN=queD PE=3 SV=1
MFKVSKEFSFDMAHLLDGHDGKCQNLHGHTYKLQVEVCGNLYASGAKQGMVIDFSDLKSIVKRAVLDPMDHAFIYDQTSERESKIATLLQQLDSKTFGVPFRTTAEQLAQFIYRRLKDEENLPVSAIRLWETPTSFCEYEE

SEQ ID NO: 17133 - protein, 141 aa, Aggregatibacter aphrophilus
  misc_feature (1)..(141): tr|A0A336NCJ3|A0A336NCJ3_AGGAP 6-carboxy-5,6,7,8-tetrah ydropterin synthase OS=Aggregatibacter aphrophilus OX=7 32 GN=queD PE=3 SV=1
MFKVSKEFSFDMAHLLDGHDGKCQNLHGHTYKLQVEVCGNLYAIGAKQGMVIDFSDLKTIVKRAVLDPMDHAFIYDQTSERESKIATLLQQLDSKTFGVPFRTTAEQLAQFIYRRLKDEENLPVSAIRLWETPTSFCEYEE

SEQ ID NO: 17134 - protein, 198 aa, Agitococcus lubricus
  misc_feature (1)..(198): tr|A0A2T5IZ52|A0A2T5IZ52_9LACT 6-pyruvoyltetrahydropter in/6-carboxytetrahydropterin synthase OS=Agitococcus lu bricus OX=1077255 GN=C8N29_10710 PE=4 SV=1
MLIRKLFRFENAHIVRNCTSQRCSRSIHGHSYQVEIILEAQAFDQGQMVYDFGLLKGHIKDLIDSFDHAIAFWDKDNAEYIAYCQQFSARWISLPVSPSAEQFSRLIFVLVDAVLKQTVMQNGEADVALYSVIVHETQTGYAQCFRADVDNPRMGLIRLQDIIFSSQIQQEWSDPTLYEQLKNGQLFINPVVEPQVRL

SEQ ID NO: 17135 - protein, 132 aa, Agrobacterium albertimagni
  misc_feature (1)..(132): tr|K2QEN2|K2QEN2_9RHIZ Uncharacterized protein OS=Agrob acterium albertimagni AOL15 OX=1156935 GN=QWE_11751 PE= 4 SV=1
MFAVEVRDHIMIAHSLPRPVFGPAQGMHGATFVVDAAFFTKDVDEDGLAVDIGAATTVLSEVLKPLNYQNLDELAVFKGKVSTTEVIAKHIFDQLAQAVSDKRLGPGSHRICRLKVMLHESHAARGWYEADL

SEQ ID NO: 17136 - protein, 118 aa, Agrobacterium arsenijevicii
  misc_feature (1)..(118): tr|A0A0D8KU27|A0A0D8KU27_9RHIZ 6-carboxy-5,6,7,8-tetrah ydropterin synthase OS=Agrobacterium arsenijevicii OX=1 585697 GN=RP75_11745 PE=3 SV=1
MFRITKEFHFSASHQLKSLPADHQCSRLHGHNYIVEIELSGAELNEHGFVRDYHELAPLKRYIDDHFDHRHLNDVLGHDRVTAECLAKHFYDWCKLSLPETSAVRVSETAKTWAEYRP

SEQ ID NO: 17137 - protein, 122 aa, Agrobacterium bohemicum
  misc_feature (1)..(122): tr|A0A135P8N3|A0A135P8N3_9RHIZ 6-carboxy-5,6,7,8-tetrah ydropterin synthase OS=Agrobacterium bohemicum OX=20528 28 GN=ATO67_17320 PE=3 SV=1
MFRITKEFHFSASHQLTGLPADHQCARLHGHNYIVEVELSGETLNEHGFVRDYQELSPLKHYIDDRFDHRHLNDVLGHDMVTAERLAKHFYDWCKERLPETSAVRVSETAKTWAEYRPLRQP

SEQ ID NO: 17138 - protein, 132 aa, Agrobacterium bohemicum
  misc_feature (1)..(132): tr|A0A135P7V8|A0A135P7V8_9RHIZ 6-pyruvoyl tetrahydropte rin synthase OS=Agrobacterium bohemicum OX=2052828 GN=A TO67_19650 PE=4 SV=1
MFAVEVRDHIMIAHSLPRPVFGPAQGMHGATFVVDAAFFTKDVDEDSLAVDIGAATTVLSEVLKPLNYQNLDELSIFKGKISTTEVIAKHIFDELAAAVAAKRLGPGSHRISRLKITLHESHAARGWYEADL

SEQ ID NO: 17139 - protein, 118 aa, Agrobacterium deltaense
  misc_feature (1)..(118): tr|A0A1S7QZE4|A0A1S7QZE4_9RHIZ 6-carboxy-5,6,7,8-tetrah ydropterin synthase OS=Agrobacterium deltaense RV3 OX=1 183426 GN=AGR7B_Lc40088 PE=3 SV=1
MFRITKEFHFSASHQLKSLPSDHQCNRLHGHNYIVEIELAGEALNEHGFVRDYHELAPLKRYIDDHFDHRHLNDVLGHDRVTAECLAKHFYDWCKDRLPETSAVRVSETAKTWAEYRP

SEQ ID NO: 17140 - protein, 118 aa, Agrobacterium deltaense
  misc_feature (1)..(118): tr|A0A1S7RWH4|A0A1S7RWH4_9RHIZ 6-carboxy-5,6,7,8-tetrah ydropterin synthase OS=Agrobacterium deltaense Zutra 3/ 1 OX=1183427 GN=AGR7C_Lc70002 PE=3 SV=1
MFRITKEFHFSASHQLKSLPSDHQCNRLHGHNYIVEVELSGEALNEHGFVRDYHELSPLKRYIDDHFDHRHLNDVLGHDRVTAECLAKHFYEWCKDRLPETSAVRVSETAKTWAEYRP

SEQ ID NO: 17141 - protein, 118 aa, Agrobacterium fabrum
  misc_feature (1)..(118): tr|A9CF17|A9CF17_AGRFC 6-carboxy-5,6,7,8-tetrahydropter in synthase OS=Agrobacterium fabrum (strain C58 / ATCC 33970) OX=176299 GN=exsC PE=3 SV=1
MFRITKEFHFSASHQLKSLPSDHQCNRLHGHNYIVEVELSGEELNEHGFVRDYHELAPLKRYIDDHFDHRHLNDVLGHDQVTAECLAKHFYDWCKTSLPETSAVRVSETTKTWAEYRP

SEQ ID NO: 17142 - protein, 118 aa, Agrobacterium fabrum
  misc_feature (1)..(118): tr|A0A3G2D9L6|A0A3G2D9L6_9RHIZ 6-carboxy-5,6,7,8-tetrah ydropterin synthase OS=Agrobacterium fabrum OX=1176649 GN=exsC PE=3 SV=1
MFRITKEFHFSASHQLKSLPSDHQCNRLHGHNYIVEVELSGEELNEHGFVRDYHELAPLKRYIDDHFDHRHLNDVLGHDWVTAECLAKHFYDWCKTSLPETSAVRVSETTKTWAEYRP

SEQ ID NO: 17143 - protein, 118 aa, Agrobacterium genomosp.
  misc_feature (1)..(118): tr|A0A1S7QVJ8|A0A1S7QVJ8_9RHIZ 6-carboxy-5,6,7,8-tetrah ydropterin synthase OS=Agrobacterium genomosp. 3 str. C FBP 6623 OX=1183432 GN=AGR3A_Lc100002 PE=3 SV=1
MFRITKEFHFSASHQLKSLPSDHQCNRLHGHNYIVEVELSGEALNEHGFVRDYHELSPLKRYIDDHFDHRHLNDVIGHDRVTAECLAKHFYDWCKDRLPETSAVRVSETAKTWAEYRP

SEQ ID NO: 17144 - protein, 118 aa, Agrobacterium genomosp.
  misc_feature (1)..(118): tr|A0A1S7S7K4|A0A1S7S7K4_9RHIZ 6-carboxy-5,6,7,8-tetrah ydropterin synthase OS=Agrobacterium genomosp. 5 str. C FBP 6626 OX=1183435 GN=ptpS PE=3 SV=1
MFRITKEFHFSASHQLKSLPSDHQCNRLHGHNYIVEVELSGEELNEHGFVRDYHELAPLKRYIDDHFDHRHLNDVLGHDRVTAECLAKHFYDWCKDRLPETSAVRVSETTKTWAEYRP

SEQ ID NO: 17145 - protein, 132 aa, Agrobacterium larrymoorei
  misc_feature (1)..(132): tr|A0A4D7DW11|A0A4D7DW11_9RHIZ 6-carboxytetrahydropteri n synthase OS=Agrobacterium larrymoorei OX=160699 GN=CF BP5473_15675 PE=4 SV=1
MFAVEVRDHIMIAHSLPRPVFGPAQGMHGATFVVDAAFFTKDVDEDGLAVDIGAATTVLSEVLKPLNYQNLDELDVFKGRVSTTEVIAKHIFDELAAAVAAKRLGPGSHRISRLKVTLHESHAARGWYEADL

SEQ ID NO: 17146 - protein, 122 aa, Agrobacterium larrymoorei
  misc_feature (1)..(122): tr|A0A4Z1Q6G1|A0A4Z1Q6G1_9RHIZ 6-carboxy-5,6,7,8-tetrah ydropterin synthase OS=Agrobacterium larrymoorei OX=160 699 GN=queD PE=3 SV=1
MFRITKEFHFSASHQLKGLPSDHQCARLHGHNYIVEVELAGEELNEHGFVRDYHELAPLKRYIDDSFDHRHLNDVLGHDMVTAERLAKHFYDWCKERLPETSAVRVSETAKTWAEYRPAVQP

SEQ ID NO: 17147 - protein, 118 aa, Agrobacterium radiobacter
  misc_feature (1)..(118): tr|W1KZS9|W1KZS9_RHIRD 6-carboxy-5,6,7,8-tetrahydropter in synthase OS=Agrobacterium radiobacter DSM 30147 OX=1 336745 GN=L902_12230 PE=3 SV=1
MFRITKEFHFSASHQLKSLPSDHQCARLHGHNYIVEVELTGEELNEHGFVRDYHELAPLKHYIDSHFDHRHLNDVLGHDRVTAECLAKHFYDWCKISLPETSAVRVSETAKTWAEYRP

SEQ ID NO: 17148 - protein, 118 aa, Agrobacterium radiobacter; identical to SEQ ID NO: 17139
  misc_feature (1)..(118): tr|W1L1S2|W1L1S2_RHIRD 6-carboxy-5,6,7,8-tetrahydropter in synthase OS=Agrobacterium radiobacter DSM 30147 OX=1 336745 GN=L902_11140 PE=3 SV=1

SEQ ID NO: 17149 - protein, 132 aa, Agrobacterium rhizogenes
  misc_feature (1)..(132): tr|A0A2T7VFQ1|A0A2T7VFQ1_AGRRH Uncharacterized protein OS=Agrobacterium rhizogenes OX=359 GN=DC430_10010 PE=4 SV=1
MFAVEVRDHIMIAHSLPRPVFGPAQGMHGATFVVDAAFFTKDVDDDGLAVDIGAATTVLSETLKPLNYQNLDELDIFKGKVSTTEVIAKHIFDQLAEAVAVKRLGPGSHRICRIRVLLHESHAARGWYEADL

SEQ ID NO: 17150 - protein, 118 aa, Agrobacterium rhizogenes
  misc_feature (1)..(118): tr|A0A178GZI2|A0A178GZI2_AGRRH 6-carboxy-5,6,7,8-tetrah ydropterin synthase OS=Agrobacterium rhizogenes OX=359 GN=A8L48_04485 PE=3 SV=1
MFRITKEFHFSASHQLKSLPSDHQCNRLHGHNYIVEVELSGEALNEHGFVRDYHELSPLKRYIDDHFDHRHLNDVLGHDRVTAEYLAKHFYDWCKDRLPETSAVRVSETAKTWAEYRP

SEQ ID NO: 17151 - protein, 122 aa, Agrobacterium rosae
  misc_feature (1)..(122): tr|A0A2S4EAF4|A0A2S4EAF4_9RHIZ 6-carboxy-5,6,7,8-tetrah ydropterin synthase OS=Agrobacterium rosae OX=1972867 G N=queD PE=3 SV=1
MFRITKEFHFSASHQLKGLPADHQCARLHGHNYIVEVELSGEALNEHGFVRDYQELSPLKHYIDDHFDHRHLNDVLGHDMVTAERLAHHFYDWCKARLPETSAVRVSETAKTWAEYRPSRQS

SEQ ID NO: 17152 - protein, 122 aa, Agrobacterium rubi
  misc_feature (1)..(122): tr|A0A081CSA9|A0A081CSA9_9RHIZ 6-carboxy-5,6,7,8-tetrah ydropterin synthase OS=Agrobacterium rubi TR3 = NBRC 13 261 OX=1368415 GN=queD PE=3 SV=1
MYRITKEFHFSASHQLKSLPADHQCARLHGHNYIVEVELSGQELNEHGFVRDYQELAPLKHYIDDRFDHRHLNDVMGHDRVTAECLAKHFYDWCKERLPETSAVRVSETSKTWAEYRPQPKP

SEQ ID NO: 17153 - protein, 122 aa, Agrobacterium rubi
  misc_feature (1)..(122): tr|A0A1B9TX06|A0A1B9TX06_9RHIZ 6-carboxy-5,6,7,8-tetrah ydropterin synthase OS=Agrobacterium rubi OX=28099 GN=A 6U92_24495 PE=3 SV=1
MYRITKEFHFSASHQLKSLPADHQCARLHGHNYIVEVELTGHELNEHGFVRDYQELAPLKHYIDDRFDHRHLNDVMGHDKVTAECLAKHFYDWCKERLPETSAVRVSETAKTWAEYRPQPKP

SEQ ID NO: 17154 - protein, 118 aa, Agrobacterium salinitolerans
  misc_feature (1)..(118): tr|A0A1S9E5G6|A0A1S9E5G6_9RHIZ 6-carboxy-5,6,7,8-tetrah ydropterin synthase OS=Agrobacterium salinitolerans OX= 1183413 GN=queD PE=3 SV=1
MFRITKEFHFSASHQLKSLPSDHQCNRLHGHNYIVEIELAGEALNEHGFVRDYHELAPLKHYIDDKFDHRHLNDVLGHDRVTAECLAKHFYDWCKERLPETSAVRVSETAKTWAEYRP

SEQ ID NO: 17155 - protein, 118 aa, Agrobacterium salinitolerans
  misc_feature (1)..(118): tr|A0A1S7UCH5|A0A1S7UCH5_9RHIZ 6-carboxy-5,6,7,8-tetrah ydropterin synthase OS=Agrobacterium salinitolerans str . Hayward 0363 OX=1183434 GN=AGR9A_Lc60176 PE=3 SV=1
MFRITKEFHFSASHQLKSLPSDHQCNRLHGHNYIVEVELKGEALNEHGFVRDYHELAPLKHYIDDKFDHRHLNDVLGHDRVTAECLAKHFYDWCKERLPETSAVRVSETAKTWAEYRP

SEQ ID NO: 17156 - protein, 118 aa, Agrobacterium sp.
  misc_feature (1)..(118): tr|A0A3R9J2B0|A0A3R9J2B0_9RHIZ 6-carboxy-5,6,7,8-tetrah ydropterin synthase OS=Agrobacterium sp. FDAARGOS_525 O X=2420311 GN=queD PE=3 SV=1
MFRITKEFHFSASHQLKSLPSDHQCNRLHGHNYIVEVELSGEELNEHGFVRDYHELAPLKRYIDDHFDHRHLNDVLGHDRVTAECLAKHFYDWCKDRLPETSAIRVSETAKTWAEYRP

SEQ ID NO: 17157 - protein, 118 aa, Agrobacterium sp.; identical to SEQ ID NO: 17139
  misc_feature (1)..(118): tr|A0A0X6ZZX7|A0A0X6ZZX7_9RHIZ 6-carboxy-5,6,7,8-tetrah ydropterin synthase OS=Agrobacterium sp. D14 OX=1336743 GN=L901_25190 PE=3 SV=1

SEQ ID NO: 17158 - protein, 118 aa, Agrobacterium tumefaciens
  misc_feature (1)..(118): tr|A0A1S7RKY7|A0A1S7RKY7_RHIRD 6-carboxy-5,6,7,8-tetrah ydropterin synthase OS=Agrobacterium tumefaciens str. K err 14 OX=1183424 GN=ptpS PE=3 SV=1
MFRITKEFHFSASHQLKSLPADHQCARLHGHNYIVEVELSGEELNEHGFVRDYHELAPLKRYIDDHFDHRHLNDVLGHDRVTAECLAKHFYDWCKDRLPETSAVRVSETAKTWAEYRP

SEQ ID NO: 17159 - protein, 118 aa, Agrobacterium tumefaciens
  misc_feature (1)..(118): tr|H0H3E9|H0H3E9_RHIRD 6-carboxy-5,6,7,8-tetrahydropter in synthase OS=Agrobacterium tumefaciens 5A OX=1107544 GN=AT5A_00860 PE=3 SV=1
MFRITKEFHFSASHQLKSLPADHQCARLHGHNYIVEVELSGEELNEHGFVRDYHELAPLKRYIDDHFDHRHLNDVLGHDRVTAECLAKHFYDWCKTSLPETSAVRVSETAKTWAEYRP

SEQ ID NO: 17160 - protein, 118 aa, Agrobacterium vitis
  misc_feature (1)..(118): tr|A0A1S2DXX7|A0A1S2DXX7_AGRVI 6-carboxy-5,6,7,8-tetrah ydropterin synthase OS=Agrobacterium vitis OX=373 GN=BB K77_05575 PE=3 SV=1
MYRITKEFHFSASHQLKGLPADHQCARLHGHNYIVEVELSGEELNEHGFLRDYHELKVLKTYIDEAFDHRHLNDVLGHDKTTAECLAKHFYDWCKQHFAETSAVRVSETQKTWAEYRP

SEQ ID NO: 17161 - protein, 118 aa, Agrobacterium vitis
  misc_feature (1)..(118): tr|A0A202F0B6|A0A202F0B6_AGRVI 6-carboxy-5,6,7,8-tetrah ydropterin synthase OS=Agrobacterium vitis OX=373 GN=B7 W85_13685 PE=3 SV=1
MYRITKEFHFSASHQLKGLPADHQCARLHGHNYIVLVELSGEELNEYGFLRDYHELKVLKTYIDETFDHRHLNDVLGHDKTTAECLAKHFYDWCKQHFAETSAVRVSETQKTWAEYRP

SEQ ID NO: 17162 - protein, 133 aa, Agromyces flavus
  misc_feature (1)..(133): tr|A0A1H1SLV2|A0A1H1SLV2_9MICO 6-pyruvoyl-tetrahydropte rin synthase OS=Agromyces flavus OX=589382 GN=SAMN04489 721_1402 PE=4 SV=1
MTYTVTVRDHIMIAHSFAGEAFGPAQRLHGATFIVDATFRAGELDPDGVVVDIGLASEALGEITAELNYRNLDDEPQFAGMNTTTERLCQVIADRLAERAAGGRLGAAGERLSSIEVILHESHVAWASYERTV

SEQ ID NO: 17163 - protein, 127 aa, Agromyces ramosus
  misc_feature (1)..(127): tr|A0A4Q7M9I9|A0A4Q7M9I9_9MICO 6-carboxy-5,6,7,8-tetrah ydropterin synthase OS=Agromyces ramosus OX=33879 GN=EV 187_2921 PE=3 SV=1
MTFYAELSREFSFESAHFLPNVPAGHKCGRMHGHSYTVEVHVRGAVDDESGFVQDFGDLSTAFAPISAQLDHRLLNDIEGLENPTSEHLARWMWDRLSVALPLLHAIVVSETPRSRCTYRGESNGGQ

SEQ ID NO: 17164 - protein, 123 aa, Agromyces sp.
  misc_feature (1)..(123): tr|A0A0Q9JPJ2|A0A0Q9JPJ2_9MICO 6-pyruvoyl tetrahydropte rin synthase OS=Agromyces sp. Soil535 OX=1736390 GN=ASG 80_16340 PE=4 SV=1
MMVAHSFSGEAFGAAQRLHGATFIVDASFRASELDSDGVVIDIGRAAEALSQITGSLTYRNLDDEPEFAGMNTTTERLCRVIADRLAERAADGRLGSAGGRLSSIEVTLHESHVAWASYERKM

SEQ ID NO: 17165 - protein, 133 aa, Agromyces sp.
  misc_feature (1)..(133): tr|A0A4V0YHC4|A0A4V0YHC4_9MICO 6-carboxytetrahydropteri n synthase OS=Agromyces sp. FW100M-8 OX=2509455 GN=ET44 5_13690 PE=4 SV=1
MSFTLTVRDHIMVAHSLTGEAFGPAQRLHGATFVVDAAFRARELDADGVVVDIGDAAAALREITGSLTYRNLDDEPALAGVNTTTEALCRFIADRLAERIADGRLGSGDGRLSSIEVTLHESHVAWASYERDV

SEQ ID NO: 17166 - protein, 119 aa, Ahniella affigens
  misc_feature (1)..(119): tr|A0A2P1PY70|A0A2P1PY70_9GAMM 6-carboxy-5,6,7,8-tetrah ydropterin synthase OS=Ahniella affigens OX=2021234 GN= queD PE=3 SV=1
MNLFKSFRIEAAHRLPNVPAGHKCARLHGHSFEIEIHVDGPVDPHTGWVIDFAEIKAAFKPYYEQLDHHYLNDIDGLENPTSENLARWIFDKLKPVLPLLSEVVVYETCTSGCRYRGDG

SEQ ID NO: 17167 - protein, 281 aa, Aidingimonas halophila
  misc_feature (1)..(281): tr|A0A1H3B6B7|A0A1H3B6B7_9GAMM 6-pyruvoyl tetrahydropte rin synthase OS=Aidingimonas halophila OX=574349 GN=SAM N05443545_105135 PE=4 SV=1
MTLFVNDLTHMDVSLYCPERGLVGASWHVDVVLDGELGHDGMLFDFGEVKPWIKARLDGGMDHTLLVPTEAPGITVIECSEGLCLRASQPYPLEIRGPRQAFTLLPWKEITHGRLAERLSADLMRRPPPRVNDIRLELRPESIDGAGYQYSHGLRHHEGNCQRIAHGHRSRLHLWVQGQRAPDLERQWAEWLDGRYLVDEHDIVPASDDDIRGFLTLRYQASQGRFYLRLPSARCVIMPTPTTIEHIAAWLAQRVAESSGQSIRIAAFEGIDKGAMAEAHP

SEQ ID NO: 17168 - protein, 132 aa, Aidingimonas halophila
  misc_feature (1)..(132): tr|A0A1H3ECT0|A0A1H3ECT0_9GAMM 6-pyruvoyl-tetrahydropte rin synthase OS=Aidingimonas halophila OX=574349 GN=SAM N05443545_10761 PE=4 SV=1
MYSLTVRDHFMIAHSFDGDAFGPAQRTHGATYVTDVTFRRPELDDNDLVVDIALAGQVLGEVLNEFHLSNLDDVEAFKGRNTTTEFMAHVIFERLSTAIRQGRLGEHAKGLTALCVTLHESHVAWASYEGAL

SEQ ID NO: 17169 - protein, 150 aa, Akkermansia glycaniphila
  misc_feature (1)..(150): tr|A0A1C7P9R7|A0A1C7P9R7_9BACT 6-pyruvoyl tetrahydropte rin synthase OS=Akkermansia glycaniphila OX=1679444 GN= PYTT_2310 PE=4 SV=1
MYRICKRIELESGHLLSKHPGNCQFPHGHTRSVEMVFAAEELDANDMVMDFKAIKEMLGDFLTRFDHALCMNTDDPNYETFRTAYGDRVIPFTSKDPTSEVMARTVFIQASSALADAIEGKYAYPVRPSVRLERVRVWETSSSWAEYSAH

SEQ ID NO: 17170 - protein, 150 aa, Akkermansia muciniphila
  misc_feature (1)..(150): tr|A0A2N8HDP4|A0A2N8HDP4_9BACT 6-pyruvoyl tetrahydropte rin synthase OS=Akkermansia muciniphila OX=239935 GN=CX U22_05415 PE=4 SV=1
MAYRICKSIELESGHLLSKHPGNCKFPHGHTRSVEMVFRADTLDANDMVLDFKAVKQMVGDFLQQFDHSLCVNTEDPNYAAFVAAYGERIIPFDREDPTSEVMARTIFNFARHALEKAKEGCGEYPVRDCVTLERVRVWETSSSWAEYGE

SEQ ID NO: 17171 - protein, 150 aa, Akkermansia muciniphila
  misc_feature (1)..(150): tr|A0A2N8HZC3|A0A2N8HZC3_9BACT 6-carboxytetrahydropteri n synthase OS=Akkermansia muciniphila OX=239935 GN=AKKM 5201_12395 PE=4 SV=1
MVYRICKSIELESGHLLSKHPGNCKFPHGHTRSVEMVFRAETLDANDMVLDFKAIKQMMGDFLQQFDHSLCVNTEDPNFAAFVAAYGERIIPFDREDPTSEVMARVIFNVARHALEKARENPGEYPVRACVELERVRVWETSSSWAEYGE

SEQ ID NO: 17172 - protein, 150 aa, Akkermansia sp.
  misc_feature (1)..(150): tr|R7DSK6|R7DSK6_9BACT 6-pyruvoyl-tetrahydropterin synt hase-like protein OS=Akkermansia sp. CAG:344 OX=1262691 GN=BN616_01500 PE=4 SV=1
MAYRICKSIELESGHLLSKHPGNCKFPHGHTRSVEMVFRADTLDANDMVVDFKAIKQMMGDFLQQFDHSLCVNTDDPNYAAFVAAYGERIIPFDREDPTSEVMARTIFNFARHALEKAREGSGEYPVRDCVTLERVRVWETSSSWAEYGE

SEQ ID NO: 17173 - protein, 150 aa, Akkermansia sp.
  misc_feature (1)..(150): tr|A0A5B6G5T4|A0A5B6G5T4_9BACT 6-carboxytetrahydropteri n synthase OS=Akkermansia sp. BIOML-A11 OX=2584567 GN=F 1974_02720 PE=4 SV=1
MAYRICKSIELESGHLLSKHPGNCKFPHGHTRSVEMVFRADSLDASDMVLDFKAVKQMMGEFLQQFDHSLCMNTEDPNYRTFLAAYGDRIIPFDREDPTSEVMARTIFTYARKALEKAKKTFTEYPVRDCVTLERVRVWETSSSWAEYGE

SEQ ID NO: 17174 - protein, 121 aa, Albidiferax sp.
  misc_feature (1)..(121): tr|A0A1H0SS47|A0A1H0SS47_9BURK 6-carboxy-5,6,7,8-tetrah ydropterin synthase OS=Albidiferax sp. OV413 OX=1855285 GN=SAMN05216303_104304 PE=3 SV=1
MQLTISQRFYFDAAHTLQREIETEGSRRIHGHTYHAEVSVTGPRDPVNGMVLDLGFLRQRLETVREQLDHHLLDEVPKLGTPTLENLCSFIAEQLSGVHPPVSRVRVWRDAIGDACTLDIP

SEQ ID NO: 17175 - protein, 130 aa, Albimonas donghaensis
  misc_feature (1)..(130): tr|A0A1H2TDT6|A0A1H2TDT6_9RHOB 6-pyruvoyl-tetrahydropte rin synthase OS=Albimonas donghaensis OX=356660 GN=SAMN 05444336_101965 PE=4 SV=1
MYAVEVRDHVMLAHSLPGEVFGPAQGLHGATYVVDVAFFREELGPERIVADIGRAHDVLKAALAPINYANLDAVFPGELTTTEWLARHIFDRLAEAARGGELGTGSEGIERIRVTLNESHIAKAWFEGAV

SEQ ID NO: 17176 - protein, 130 aa, Albimonas pacifica
  misc_feature (1)..(130): tr|A0A1I3H223|A0A1I3H223_9RHOB 6-pyruvoyl-tetrahydropte rin synthase OS=Albimonas pacifica OX=1114924 GN=SAMN05 216258_105466 PE=4 SV=1
MYAVEVRDHVMLAHSLPGEVFGPAQGLHGATYVVDVAFYRAELGPERIVVDIGRAHEALKAALAPLNYANLDETFPGELTTTEWLAKHVHDQLSAAARAGGLGVGSEGIERIRVTLNESHVARAWYEAAP

SEQ ID NO: 17177 - protein, 364 aa, Alcaligenaceae bacterium
  misc_feature (1)..(364): tr|A0A354K340|A0A354K340_9BURK 6-pyruvoyl tetrahydropte rin synthase OS=Alcaligenaceae bacterium OX=2021368 GN= DDY24_11965 PE=4 SV=1
MSDQLLFVAAAPFEAACRVDCLPEGHRASRLHGHSFLGEVRAALPKDWAPFPGAEVESLSRHLSQCVSVLDYSDLNKTIPTPTDENIARWIRRNLTVPGISVVGVQSTTHSGVDLDARDHAHVWRRYIFQSAHQLPNVPNGHKCGRMHGHGFEVILHADQDVGTRDLSIDYDHLDALWAPIHEELDHACLNDIPGLENPTSENISAWIWNRLKPILPELSWVTVYETGSCGAHFDGHHYRIWKELTLDSAVRLKHAPEGDKRRRIHGHTFTLRLHLHAPLDQVHGWTVDFGDVKAVFDPIFKQLDHQPLHKVMDDRDADVASIARYIKELVAMQLPQIDRIDLNSTRGCGVILHWGELGPALPI

SEQ ID NO: 17178 - protein, 123 aa, Alcaligenaceae bacterium
  misc_feature (1)..(123): tr|A0A2G4J8T3|A0A2G4J8T3_9BURK 6-carboxy-5,6,7,8-tetrah ydropterin synthase OS=Alcaligenaceae bacterium OX=2021 368 GN=CK528_06385 PE=3 SV=1
MNPRHFELSQRFYFEAAHSLARTIDAQGSRRIHGHTYEAEVTLQGQPDPLTGMLIDLAYLRQEIERVRNLLDHHFLDDIADLGPVTLENLCVFIANKLRATLPQLSCVTVERRASADKCVLHL

SEQ ID NO: 17179 - protein, 147 aa, Alcaligenes xylosoxydans; identical to SEQ ID NO: 16831
  misc_feature (1)..(147): tr|A0A2T5CJR3|A0A2T5CJR3_ALCXX 6-carboxy-5,6,7,8-tetrah ydropterin synthase OS=Alcaligenes xylosoxydans xylosox ydans OX=85698 GN=queD PE=3 SV=1

SEQ ID NO: 17180 - protein, 147 aa, Alcaligenes xylosoxydans
  misc_feature (1)..(147): tr|A0A176XSZ9|A0A176XSZ9_ALCXX 6-carboxy-5,6,7,8-tetrah ydropterin synthase OS=Alcaligenes xylosoxydans xylosox ydans OX=85698 GN=A7J67_00515 PE=3 SV=1
MISVTRRLEFDAGHRIPDHRSQCRNLHGHRYVLEITLTGDVVQAPGESDNGMVMDFSEIKHIAKTHIVDVWDHAFLVYEGDTAVRGFLDTLPGHKTVVLDRIPTAENLATIVFDTLAPHYHGHYGAELRLTRVRLYETPNCWADCNG

SEQ ID NO: 17181 - protein, 283 aa, Alcanivoracaceae bacterium
  misc_feature (1)..(283): tr|A0A3L8AZZ3|A0A3L8AZZ3_9GAMM 6-pyruvoyl tetrahydropte rin reductase OS=Alcanivoracaceae bacterium GenoA1_TS13 _700 OX=2072747 GN=D9N13_18865 PE=4 SV=1
MSALFVKHLTVIDFSYVHITRGILGESWIVDVELYGELDNQGMVFDFGHVKKQVRDAVESLFDHKLVVPSGLPQWQTNTTAQGLALSWQDDQGRTFSHLSPEEAVQPVNADVINTDALIPLLEDVAMAAVPDNVSRVVIELRPEEIAGPFYHYSHGLKKHDGNCQRIAHGHRSRIKILRNGKRDPLLEKAWALKWRDIYIGTEADMIKRFEDNGVEYCHFGYDAPQGRFELTLPAAQVYLIPTDSTVEYLADHIAATLKQDHPDHQFEVKAYEGVMKGAIAHR

SEQ ID NO: 17182 - protein, 302 aa, Alcanivoracaceae bacterium
  misc_feature (1)..(302): tr|A0A2E2DMM1|A0A2E2DMM1_9GAMM 6-pyruvoyl tetrahydropte rin reductase OS=Alcanivoracaceae bacterium OX=2024895 GN=CL537_16475 PE=4 SV=1
MATLFVENLTVADFSYLHPKRGMIGESWLVDLELSGDLDHQGMVFDFGHIKKSIKRIIDDNVDHRLLVPMDCEQVSVAERDNNTSLEWQYRGGTIRMVVPSESLLLMSGPEVSKASLTLYLMELVQSVVPENVAEVRVILREEDTGTAPYYHYSHGLKKHDGNCQRIAHGHRSSIHIFENGRRSRYWEKLWADRWEDIYIGTEDDLEGTYYIDEIPHHRFRYDAPQGRFELVIPEDHCYLIDTDSTVEQLAAHIAEQLAVEAPGKHFRVRAFEGVGKGAIAEAGEDLPGRTQSGWLTGSAVI

SEQ ID NO: 17183 - protein, 302 aa, Alcanivorax borkumensis
  misc_feature (1)..(302): tr|Q0VMN5|Q0VMN5_ALCBS Uncharacterized protein OS=Alcan ivorax borkumensis (strain ATCC 700651 / DSM 11573 / NC IMB 13689 / SK2) OX=393595 GN=ABO_2115 PE=4 SV=1
MATLFVENLTVADFSYLHSKRGMVGESWLVDLELSGELDDQGMVFDFGHIKKQIKQLIDDNVDHRLLVPVDSDQVTITERDKDISLEWIYRGGTIRMIAPNQSLLLMAGPEVTKASLTLYLMDLIQTVVPKNVEEVRVVLREEDTGTAPFYHYSHGLKKHDGNCQRIAHGHRSNIHIFENGRRSRYWEKLWADRWEDIYLGTEEDLEGTYYIDEIPHHRFRYDAQQGYFELVIPEDHCYMIDTDTTVEQLATHIANQLATEAPGKHFRVRAFEGVGKGAIADAGENMPGKTHNSWLSSTPVI

SEQ ID NO: 17184 - protein, 292 aa, Alcanivorax dieselolei
  misc_feature (1)..(292): tr|K0CC05|K0CC05_ALCDB Uncharacterized protein OS=Alcan ivorax dieselolei (strain DSM 16502 / CGMCC 1.3690 / B- 5) OX=930169 GN=B5T_00903 PE=4 SV=1
MATLFVDNLTVLDFSYLHPKRGMIGESWIVDLELSGDLDGQGMVFDFGQVKRQLKRLIDDQVDHRLLFPGAHEALSLNRRKDQQLSLTWQYGAGEIRLLAPTESLLEIPGTEVSKASVTLFLMELLEPSLPDNVNEARILLREEDTGTAPFYHYSHGLKKHDGNCQRIAHGHRSTIQIFENGRRSRYWEKLWADRWEDIYIGTREDLEGTYFVEEVPHHRFRYDAPQGHFELVIPEDHCYLIDTDTTVEYLADHIARQLAEEAPGKHFRVRAFEGVGKGAIAEAGENNLKSS

SEQ ID NO: 17185 - protein, 303 aa, Alcanivorax hongdengensis
  misc_feature (1)..(303): tr|L0WG81|L0WG81_9GAMM Uncharacterized protein OS=Alcan ivorax hongdengensis A-11-3 OX=1177179 GN=A11A3_00125 P E=4 SV=1
MATLFVENLTVVDFSYLHAKRGMVGESWMVDLELTGELDHQGMVFDFGLIKKQIKKLIDTHVDHRLLVPADSEQLTRSQRDDDLSIEWAYRAGTIRMVSPRESVLLMPGPEVSKASLTLYLMELVQQAVPDNVAEVQIVLREEDTGTAPFYHYSHGLKKHDGNCQRIAHGHRSGIHIFENGRRSRYWEKMWADRWEDIYIGTQEDLEGTYYIEEIPHHRFRYDADQGHFELVIPEDHCYLVDSDTTVEQLASHIAGQLAVEAPGKHFRVRAFEGIGKGAIAEAGENLPGRVQTGWLTGGVASI

SEQ ID NO: 17186 - protein, 302 aa, Alcanivorax jadensis
  misc_feature (1)..(302): tr|A0A095TIK2|A0A095TIK2_9GAMM Uncharacterized protein OS=Alcanivorax jadensis T9 OX=1177181 GN=T9A_00544 PE=4 SV=1
MATLFVENLTVADFSYLHPKRGMVGESWLVDLELTGDLDHQGMVFDFGHIKKRIKQIIDDNVDHRLLVPVDSEHATVSERDNNTSLEWLYRGGTIRMVAPSESLLLMSGPEVSKANLTLFLMDLVQQVVPDNVAEVRIVLREEDTGTAPFYHYSHGLKKHDGNCQRIAHGHRSGIHIFENGRRSRYWEKLWADRWEDIYLGTEEDLEGTYYIEEIPHHRFRYDAPQGHFELVIPEDHCYLVDTDTTVEQLAGHIAEQLATEAPGKHFRVRAFEGIGKGAIAEAGENMPGKTHSGWLSGATVI

SEQ ID NO: 17187 - protein, 302 aa, Alcanivorax nanhaiticus
  misc_feature (1)..(302): tr|A0A095SIZ6|A0A095SIZ6_9GAMM Uncharacterized protein OS=Alcanivorax nanhaiticus OX=1177154 GN=Y5S_02307 PE=4 SV=1
MATLFVENLTVADFSFLHSKRGMVGESWLVDLELTGDLDHQGMVFDFGHIKKRIKQAIDERVDHRLLVPVDCDQASVVERDNDTSLEWQYRGGTIRMVVPSESLLLMPGTEVSKASLTLHLMELVQSVVPENVHEVRIILREEDTGTAPYYHYSHGLKKHDGNCQRIAHGHRSNIHIFENGRRSRYWEKLWADRWEDIYLGTREDLEGTYYIDEIPHHRFRYDAPQGHFELVIPEDHCYLIDTDSTVEQLAAHIAEQLAEEAPGKHFRVRAFEGVGKGAIAEAGENLPGKAHSGWLSGAAVI

SEQ ID NO: 17188 - protein, 293 aa, Alcanivorax pacificus
  misc_feature (1)..(293): tr|A0A0B4XT51|A0A0B4XT51_9GAMM Uncharacterized protein OS=Alcanivorax pacificus W11-5 OX=391936 GN=S7S_15300 P E=4 SV=1
MATLFVDNLTVLDFSYLHGKRGMVGESWIVDLELTGDLDEQGMVFDFGLIKKAVKKAVDATVDHKLVVPADSDHLVAGQAGGDVNLEWVYQGGTIRMKAPTCSTVYLPGSEVTKSTLTLFLLDIVQPVLPANVRELVLTLREEDVGTAPSYHYSHGLKKHDGNCQRIAHGHRSCIQIFENGRRSRYWEKLWADRWEDIYIGTREDLEGTYYIDEVPHHRFRYEAEQGLFELLIPEDHCYLIDTDSTVEHLAEHIARQLADEAPGKHFRVRAFEGVAKGALAEAGSLGPRGPVG

SEQ ID NO: 17189 - protein, 302 aa, Alcanivorax profundi
  misc_feature (1)..(302): tr|A0A418XU16|A0A418XU16_9GAMM 6-pyruvoyl tetrahydropte rin reductase OS=Alcanivorax profundi OX=2338368 GN=D4A 39_15305 PE=4 SV=1
MATLFVENLTVADFSYLHPKRGMIGESWLVDLELSGDLDHQGMVFDFGHIKKSIKRIIDDNVDHRLLVPMDCEQVSVAERDNNTSLEWQYRGGTIRMVVPSESLLLMSGPEVSKASLTLYLMELVQSIVPENVAEVRVILREEDTGTAPYYHYSHGLKKHDGNCQRIAHGHRSSIHIFENGRRSRYWEKLWADRWEDIYIGTEEDLEGTYYIDEIPHHRFRYDAPQGRFELVIPEDHCYLINTDSTVEQLAAHIAEQLAVEAPGKHFRVRAFEGVGKGAIAEAGEDLPGRTQSGWLAGSAVI

SEQ ID NO: 17190 - protein, 302 aa, Alcanivorax sp.
  misc_feature (1)..(302): tr|A0A1H5VXS8|A0A1H5VXS8_9GAMM 6-pyruvoyl tetrahydropte rin synthase OS=Alcanivorax sp. DSM 26293 OX=1798238 GN =SAMN04515663_10519 PE=4 SV=1
MATLFVENLTVADFSYLHPKRGMVGESWLVDLELTGDLDHQGMVFDFGHIKKRIKQIIDDSVDHRLLVPVDSEHATVSERDNNTSLEWLYRGGTIRMVAPSESLLLMNGPEISKANLTLFLMDLVQQVVPENVAEVHIVLREEDTGTAPFYHYSHGLKKHDGNCQRIAHGHRSGIHIFENGRRSRYWEKLWADRWEDIYLGTEEDLEGTYYIDEIPHHRFRYDAPQGHFELVIPEDHCYLVDTDTTVEQLAAHIAEQLATEAPGKHFRVRAFEGVGKGAIAEAGENLPGKAHSGWLSGAAVI

SEQ ID NO: 17191 - protein, 292 aa, Alcanivorax sp.
  misc_feature (1)..(292): tr|A0A154C3N0|A0A154C3N0_9GAMM 6-pyruvoyl tetrahydropte rin reductase OS=Alcanivorax sp. KX64203 OX=1817793 GN= A3Q32_15610 PE=4 SV=1
MATLFVDNLTVLDFSYLHPKRGMIGESWIVDLELSGDLDGQGMVFDFGQVKRRLKRLIDDQVDHRLLFPGAHEALSLNQREDQQLSLTWQYAAGEIRLVAPSESLLEIAGTEVSKASVTLFLMELLEPSLPDNVNEARILLREEDTGTAPFYHYSHGLKKHDGNCQRIAHGHRSTIQIFENGRRSRYWEKLWADRWEDIYIGTREDLEGTYFVEEVPHHRFRYDAPQGHFELVIPEDHCYLIDTDTTVEYLADHIARQLAEEAPGKHFRVRAFEGVGKGAIAEAGENNLKSS

SEQ ID NO: 17192 - protein, 136 aa, Algibacter alginicilyticus
  misc_feature (1)..(136): tr|A0A0P0CVZ8|A0A0P0CVZ8_9FLAO 6-carboxy-5,6,7,8-tetrah ydropterin synthase OS=Algibacter alginicilyticus OX=17 36674 GN=APS56_05505 PE=3 SV=1
MKVTVSRKAHFNAAHRLYRKDWDFEKNDAIFGKCNNPNFHGHNYELIVSVTGDINKETGYVIDIKVLKEIIKDEVEDAFDHKNLNVEVPEFKDLNPTAENIAVVIYNKIKPKLNSNLELEITLFETPRNFVSYSGN

SEQ ID NO: 17193 - protein, 150 aa, Algibacter alginicilyticus
  misc_feature (1)..(150): tr|A0A0P0CS76|A0A0P0CS76_9FLAO 6-pyruvoyl tetrahydropte rin synthase OS=Algibacter alginicilyticus OX=1736674 G N=APS56_11310 PE=4 SV=1
MNHIRITKQFSFESGHALYGYDGKCKNVHGHSYKLSVTVIGVPISDKTNVKYGMVIDFGDLKKIVKEEIVNVFDHATVFNKNTPHVELAKELQDRGHNVLLVDYQPTSEMMVIDFAKKIKKRLPAHIDLHSLKLQETDSSFAEWYNYDNI

SEQ ID NO: 17194 - protein, 151 aa, Algibacter amylolyticus
  misc_feature (1)..(151): tr|A0A556QYQ5|A0A556QYQ5_9FLAO 6-carboxytetrahydropteri n synthase OS=Algibacter amylolyticus OX=1608400 GN=FPF 71_01465 PE=4 SV=1
MANNIRITKQFSFETGHALYGYDGKCKNVHGHSYKLSVTVIGQPITDTNNVKYGMVIDFGDLKKIVKEEIVNVFDHATVFNKNTPHVELAKELSDRGHNVLLVDYQPTSEMMVLDFAKKIGKRLPSHIKLHSLKLQETDTSFAQWFQYDNI

SEQ ID NO: 17195 - protein, 136 aa, Algibacter amylolyticus
  misc_feature (1)..(136): tr|A0A556QFB9|A0A556QFB9_9FLAO 6-carboxy-5,6,7,8-tetrah ydropterin synthase OS=Algibacter amylolyticus OX=16084 00 GN=FPF71_10335 PE=3 SV=1
MKVTVSRKAHFNAAHRLYRKDWSFEKNDDIFGKCNNPNFHGHNYELIVSVTGQIDKETGYVIDMKVLKDIIKNNVEDAFDHKNLNLEVPEFKDLNPTAENIAVVIYNKIKPELSDNLDLEITLYETPRNFVSYSGN

SEQ ID NO: 17196 - protein, 136 aa, Algibacter aquaticus
  misc_feature (1)..(136): tr|A0A1E5SII9|A0A1E5SII9_9FLAO 6-carboxy-5,6,7,8-tetrah ydropterin synthase OS=Algibacter aquaticus OX=1849968 GN=A8C32_07100 PE=3 SV=1
MKVTVSRKAHFNAAHRLHRPDWSFEKNEEIFGKCNNPNFHGHNYELIVSVTGDIDEETGYVIDIKILRNLIKNEVEDAFDHKNLNVEVLEFKNLNPTAENIAVVIYNKIKPKLKPSLELEITLYETPRNFVSYSGK

SEQ ID NO: 17197 - protein, 151 aa, Algibacter aquaticus
  misc_feature (1)..(151): tr|A0A1E5TE34|A0A1E5TE34_9FLAO 6-carboxytetrahydropteri n synthase QueD OS=Algibacter aquaticus OX=1849968 GN=A 8C32_13150 PE=4 SV=1
MSNNIRITKQFSFETGHALYGYDGKCKNVHGHSYKLSVTVIGQPITDNTNVKFGMVIDFSDLKKIVTEEIVDVFDHATVFNKNTPHVELAKELQDRDHNVLLVDYQPTSEMMVIDFAKKIKTRLPKHINLHSLKLQETESSFAEWFAYENN

SEQ ID NO: 17198 - protein, 75 aa, Algibacter lectus
  misc_feature (1)..(75): tr|A0A090X5N0|A0A090X5N0_9FLAO 6-pyruvoyl tetrahydrobio pterin synthase OS=Algibacter lectus OX=221126 GN=JCM19 274_2489 PE=4 SV=1
MDMKVLKDLIEAEVEDQLDHKNLNLEVPEFKDLNPTAENIAVVIYNKLKPKLDDKLALEITLYETPRNFVTYSGK

SEQ ID NO: 17199 - protein, 136 aa, Algibacter lectus
  misc_feature (1)..(136): tr|A0A090VMA9|A0A090VMA9_9FLAO 6-carboxy-5,6,7,8-tetrah ydropterin synthase OS=Algibacter lectus OX=221126 GN=J CM19300_566 PE=3 SV=1
MEVTVNRKAHFNAAHRLYRKDWSFEKNDAVFGKCNNPNFHGHNYELIVSVTGEIDKETGFVMDMKVLKDLIEAEVEDQLDHKNLNLEVPEFKDLNPTAENIAVVIYNKLKPKLDDKLALEITLYETPRNFVTYSGK

SEQ ID NO: 17200 - protein, 151 aa, Algibacter pectinivorans
  misc_feature (1)..(151): tr|A0A1I1NSW4|A0A1I1NSW4_9FLAO 6-pyruvoyltetrahydropter in/6-carboxytetrahydropterin synthase OS=Algibacter pec tinivorans OX=870482 GN=SAMN04487987_102361 PE=4 SV=1
MANNIRITKQFSFETGHALYGYDGKCKNVHGHSYKLSVTVIGQPITDTNNVKYGMVIDFGDLKKIVKEEIVNVFDHATVFNKNTPHVELAKELQDRGHNVLLVDYQPTSEMMVLDFAKKIGKRLPGHIKLHSLKLQETDTSFAQWYQYDNI

SEQ ID NO: 17201 - protein, 136 aa, Algibacter pectinivorans
  misc_feature (1)..(136): tr|A0A1I1R7I7|A0A1I1R7I7_9FLAO 6-carboxy-5,6,7,8-tetrah ydropterin synthase OS=Algibacter pectinivorans OX=8704 82 GN=SAMN04487987_1095 PE=3 SV=1
MKVTVSRKAHFNAAHRLYRKDWSFEKNDDMFGKCNNPNFHGHNYELIVSVTGHIDKETGYVIDMKVLKDIIKTNVEDAFDHKNLNVEVPEFKDLNPTAENIAVVIYNKIKPELKDDLSLEITLYETPRNFVSYSGN

SEQ ID NO: 17202 - protein, 136 aa, Algibacter sp.
  misc_feature (1)..(136): tr|A0A2U2X540|A0A2U2X540_9FLAO 6-carboxy-5,6,7,8-tetrah ydropterin synthase OS=Algibacter sp. ZY111 OX=2100723 GN=DIS18_11595 PE=3 SV=1
MKVTVSRKAHFNAAHRLYRKDWSFEKNDKIFGKCNNPNFHGHNYELIVSVTGGIDKETGYVIDMKVLKDIIKTEVEDAFDHKNLNLEVPEFTNLNPTAENIAVVIYNKMKPKLNSNLELEITLYETPRNFVTYSGN

SEQ ID NO: 17203 - protein, 151 aa, Algibacter sp.
  misc_feature (1)..(151): tr|A0A2U2X8A7|A0A2U2X8A7_9FLAO 6-carboxytetrahydropteri n synthase QueD OS=Algibacter sp. ZY111 OX=2100723 GN=D IS18_05570 PE=4 SV=1
MGNNIRITKQFSFETGHALYGYDGKCKNVHGHSYKLSVTVIGKPITDNTNVKFGMVIDFGDLKKIVKEEIVNVFDHATVFNKNTPHVELAKELQDRGHNVLLVDYQPTSEMMVLDFSKKIGKRLPKHIKLHSLKLQETDTSFAEWFAYENN

SEQ ID NO: 17204 - protein, 136 aa, Algibacter wandonensis; identical to SEQ ID NO: 17199
  misc_feature (1)..(136): tr|A0A4R8M9U6|A0A4R8M9U6_9FLAO 6-carboxy-5,6,7,8-tetrah ydropterin synthase OS=Algibacter wandonensis OX=134316 1 GN=DFQ06_3173 PE=3 SV=1

SEQ ID NO: 17205 - protein, 151 aa, Algibacter wandonensis
  misc_feature (1)..(151): tr|A0A4R8MDT7|A0A4R8MDT7_9FLAO 6-pyruvoyltetrahydropter in/6-carboxytetrahydropterin synthase OS=Algibacter wan donensis OX=1343161 GN=DFQ06_2333 PE=4 SV=1
MGNNIRITKKFAFETGHALYGYDGKCKNVHGHSYKLSVTVIGQPISDSTNVKYGMVIDFGDLKKIVKEEIVDVFDHATVFNKNTPHVELAKELEARDHNVLLVDYQPTSEMMVLDFAKKIKNRLPKHISLHSLKLQETDSSFAQWFASDNI

SEQ ID NO: 17206 - protein, 136 aa, Algoriella xinjiangensis
  misc_feature (1)..(136): tr|A0A1I4TA71|A0A1I4TA71_9FLAO 6-carboxy-5,6,7,8-tetrah ydropterin synthase OS=Algoriella xinjiangensis OX=6840 65 GN=SAMN05421738_102115 PE=3 SV=1
MKVTVNRKAHFNAAHRLFNQNWSDEKNFEVFGKCSYPHFHGHNYEIIVSVKGEVDPETGFVMNLDELRQIIEVEVEDYLDHKNLNIDIEEFKNTNPTAENIVILIWNKIRAKLNADLELKVTLYETPRNFVEYDGE

SEQ ID NO: 17207 - protein, 150 aa, Algoriella xinjiangensis
  misc_feature (1)..(150): tr|A0A1I4YJP9|A0A1I4YJP9_9FLAO 6-pyruvoyltetrahydropter in/6-carboxytetrahydropterin synthase OS=Algoriella xin jiangensis OX=684065 GN=SAMN05421738_11179 PE=4 SV=1
MKIIRLTKAFTFETAHALHGYDGKCKNIHGHSYKLFVTVKGKPSEDLDDVKLGMVMDFGDLKKIVNKEIVHIFDHAILLNENSPHKILGEKLLAEGHTVVFTDYQPSAENMILWIVEKIKPLLPENIELVALKLHETENSYAEWLAEDNQ

SEQ ID NO: 17208 - protein, 139 aa, Algoriphagus alkaliphilus
  misc_feature (1)..(139): tr|A0A1G5ZHT0|A0A1G5ZHT0_9BACT 6-pyruvoyltetrahydropter in/6-carboxytetrahydropterin synthase OS=Algoriphagus a lkaliphilus OX=279824 GN=SAMN03080617_03843 PE=4 SV=1
MIHVCRKEHFNAAHKLWNPKWSDEKNFEVFGPCANVNWHGHNFELIVTVRGLPDPETGFVVDLKQLSTLIRKLVTEKVDHKNLNVDVDFMLGKMASCEILVMEFWKILEPAVKEITPHGGLYKLTLYETPRNFVEYFGG

SEQ ID NO: 17209 - protein, 139 aa, Algoriphagus alkaliphilus
  misc_feature (1)..(139): tr|A0A1G5VSH9|A0A1G5VSH9_9BACT 6-carboxy-5,6,7,8-tetrah ydropterin synthase OS=Algoriphagus alkaliphilus OX=279 824 GN=SAMN03080617_00639 PE=3 SV=1
MIYLTKKIEFEAAHRISNYPGTCSEIHGHTYYLEVTVSGKVDWNTDMVLDFKILKSIIQTGVIDHFDHALILKRNSENEKIFSSYPGKIAWMESEPTAEQMLLWIVSSISPLLPDEISLAKLKLHETSGSCASWKDNKR

SEQ ID NO: 17210 - protein, 139 aa, Algoriphagus antarcticus
  misc_feature (1)..(139): tr|A0A3E0DFS4|A0A3E0DFS4_9BACT 6-pyruvoyltetrahydropter in/6-carboxytetrahydropterin synthase OS=Algoriphagus a ntarcticus OX=238540 GN=C8N25_12669 PE=4 SV=1
MIYVCRKEHFNAAHKLWNPKWSDEKNVEVFGPCANVNWHGHNFELIVMVKGLPDPDTGFVVDLKKLSTVIRNLVIEKVDHKNLNVDVDFMLGKLASCENLIMEFWKILEPAVKEITPYGGLHKLTLYETPRNFVEYLGD

SEQ ID NO: 17211 - protein, 136 aa, Algoriphagus antarcticus
  misc_feature (1)..(136): tr|A0A3E0E1R5|A0A3E0E1R5_9BACT 6-carboxy-5,6,7,8-tetrah ydropterin synthase OS=Algoriphagus antarcticus OX=2385 40 GN=C8N25_104194 PE=3 SV=1
MKVTVFRKEHFNAAHRLHNSDWSDEQNQAVFGKCNNPNYHGHNYDLIVKLRGEIDSRTGYVYDMKMLSDLIKEHILKKLDHKNLNLDTDEFKELNPTAENIAVVIWNILREKIDRKFELTIRLYETERNFVEYDGN

SEQ ID NO: 17212 - protein, 136 aa, Algoriphagus aquaeductus
  misc_feature (1)..(136): tr|A0A326RRV3|A0A326RRV3_9BACT 6-pyruvoyltetrahydropter in/6-carboxytetrahydropterin synthase OS=Algoriphagus a quaeductus OX=475299 GN=CLV31_10480 PE=4 SV=1
MKVSVFRKEHFNAAHRLFNPTWSAQKNEEVFGKCNNPNFHGHNYELIVQLKGEINPETGYVYDMKVLSDLIKIHVLNKFDHKNLNLDTDEFKNLNPSAENIAVVIWNILRVKIDRKFELTIRLYETERNFVEYDGN

SEQ ID NO: 17213 - protein, 139 aa, Algoriphagus aquaeductus
  misc_feature (1)..(139): tr|A0A326RUU3|A0A326RUU3_9BACT 6-pyruvoyltetrahydropter in/6-carboxytetrahydropterin synthase OS=Algoriphagus a quaeductus OX=475299 GN=CLV31_103371 PE=4 SV=1
MIYVSRKEHFNAAHKLWNPNWSDEKNFEVFGPCANVNWHGHNFELIVTVKGLPDAETGFVVDLKQLSTLIRRLVIDKVDHKNLNVDVDFMAGKLASCETLVMEFWKILQPAIKEITKHGGLYKLTLYETPRNFVEYFGE

SEQ ID NO: 17214 - protein, 139 aa, Algoriphagus aquimarinus
  misc_feature (1)..(139): tr|A0A5C7AXQ8|A0A5C7AXQ8_9BACT 6-carboxytetrahydropteri n synthase OS=Algoriphagus aquimarinus OX=237018 GN=ESV 85_07295 PE=4 SV=1
MIYVCRKEHFNAAHKLWNPKWSDEKNVEIFGPCANVNWHGHNFELIVMVKGLPDPDTGFVVDLKKLSTIIRNLVIERVDHKNLNVDVDFMYGKLASCENLIMEFWKILEPAVNEITSHGGLHKLTLYETPRNFVEYFGE

SEQ ID NO: 17215 - protein, 139 aa, Algoriphagus aquimarinus
  misc_feature (1)..(139): tr|A0A1I1C8Y0|A0A1I1C8Y0_9BACT 6-pyruvoyltetrahydropter in/6-carboxytetrahydropterin synthase OS=Algoriphagus a quimarinus OX=237018 GN=SAMN04489723_12514 PE=4 SV=1
MIYVCRKEHFNAAHKLWNPKWSDEKNVEVFGPCANVNWHGHNFELIVMVKGLPDPDTGFVVDLKKLSTIIRNLVIERVDHKNLNVDVDFMEGKLASCENLIMEFWKILEPAVNEITSHGGLHKLTLYETPRNFVEYFGE

SEQ ID NO: 17216 - protein, 136 aa, Algoriphagus boritolerans
  misc_feature (1)..(136): tr|A0A1H5WMC3|A0A1H5WMC3_9BACT 6-carboxy-5,6,7,8-tetrah ydropterin synthase OS=Algoriphagus boritolerans DSM 17 298 = JCM 18970 OX=1120964 GN=SAMN03080598_02151 PE=3 S V=1
MKVSVYRKEHFNAAHRLNNPLWSQAENEAIFGKCNNSNYHGHNYDLVVQLKGEIDSRTGYVYDMKVLSDMIKEYVLNRFDHKNLNLDTDEFRNLNPSAENIAVVIWNILREKIDRKFELTIRLYETERNFVEYDGN

SEQ ID NO: 17217 - protein, 139 aa, Algoriphagus boritolerans
  misc_feature (1)..(139): tr|A0A1H5Z563|A0A1H5Z563_9BACT 6-pyruvoyltetrahydropter in/6-carboxytetrahydropterin synthase OS=Algoriphagus b oritolerans DSM 17298 = JCM 18970 OX=1120964 GN=SAMN030 80598_03334 PE=4 SV=1
MIHVCRKEHFNAAHKLWNPKWSEEKNFEVFGPCANVNWHGHNFELIVTVKGLPDPETGFVVDLKQLSTVIRRLVIDKVDHKNLNVDVDFMAGKMASCEILVMEFWKILEPAVKEITPHGGLYKLTLYETPRNFVEYYGG

SEQ ID NO: 17218 - protein, 136 aa, Algoriphagus boseongensis
  misc_feature (1)..(136): tr|A0A4R6T6T6|A0A4R6T6T6_9BACT 6-carboxy-5,6,7,8-tetrah ydropterin synthase OS=Algoriphagus boseongensis OX=144 2587 GN=DFQ04_0125 PE=3 SV=1
MKVSVYRKEHFNAAHRLYNASWSDEQNEAVFGKCNNPNFHGHNYELIVQLKGEIDPDTGYVYDMKVLSDLIKAHVLNKFDHKNLNLDTDEFKNLNPSAENIAVVIWNILREKIDRKFELTVRLYETERNFVEYDGN

SEQ ID NO: 17219 - protein, 139 aa, Algoriphagus boseongensis
  misc_feature (1)..(139): tr|A0A4R6T3B6|A0A4R6T3B6_9BACT 6-pyruvoyltetrahydropter in/6-carboxytetrahydropterin synthase OS=Algoriphagus b oseongensis OX=1442587 GN=DFQ04_3165 PE=4 SV=1
MIYISRKEHFNAAHKLWNPKWSDEKNFEVFGPCANVNWHGHNFELIVTVKGLPDPETGFVVDLKQLSTLIRRSVIDKVDHKNLNVDVDFMVGKLASCEILVMEFWKILEPAVKEITKNGGLYKLTLYETPRNFVEYYGE

SEQ ID NO: 17220 - protein, 139 aa, Algoriphagus chordae
  misc_feature (1)..(139): tr|A0A2W7QSB9|A0A2W7QSB9_9BACT 6-pyruvoyltetrahydropter in/6-carboxytetrahydropterin synthase OS=Algoriphagus c hordae OX=237019 GN=LV85_03440 PE=4 SV=1
MIYVCRKEHFNAAHKLWNPKWSDEKNVEVFGPCANVNWHGHNFELIVMVKGLPDPETGFVVDLKKLSTIIRNLVIERVDHKNLNVDVDFMQGKLASCENLIMEFWKILEPAVNEITTHGGLHKLTLYETPRNFVEYFGE

SEQ ID NO: 17221 - protein, 136 aa, Algoriphagus chordae
  misc_feature (1)..(136): tr|A0A2W7SXU4|A0A2W7SXU4_9BACT 6-carboxy-5,6,7,8-tetrah ydropterin synthase OS=Algoriphagus chordae OX=237019 G N=LV85_00857 PE=3 SV=1
MKVSVYRKEHFNAAHRLHNPDWSDEQNQAVFGKCNNPHFHGHNYELVVKLRGEVDPRTGYVYDMKVLSDLIKEHVLRKLDHKNLNLDTDEFKELNPSAENIAVVIWNILREKIDRKFELTIRLYETERNFVEYDGN

SEQ ID NO: 17222 - protein, 138 aa, Algoriphagus faecimaris
  misc_feature (1)..(138): tr|A0A1G6RYC4|A0A1G6RYC4_9BACT 6-carboxy-5,6,7,8-tetrah ydropterin synthase OS=Algoriphagus faecimaris OX=68679 6 GN=SAMN04488104_101492 PE=3 SV=1
MMMKVSVFRKEHFNAAHRLNNPTLSAEENESIFGKCNNANYHGHNYDLIVQLRGEIDPVTGYVYDMKKLSDLIKEHVLNKFDHKNLNLDTDEFKELNPSAENIAVVIWNILREKIDRKFELIIRLYETERNYVEYDGN

SEQ ID NO: 17223 - protein, 139 aa, Algoriphagus faecimaris
  misc_feature (1)..(139): tr|A0A1G6M8U7|A0A1G6M8U7_9BACT 6-pyruvoyltetrahydropter in/6-carboxytetrahydropterin synthase OS=Algoriphagus f aecimaris OX=686796 GN=SAMN04488104_100164 PE=4 SV=1
MIYVCRKEHFNAAHKLWNPNWSEEKNFEVFGPCANVNWHGHNFELIVTVKGMPDPETGFVVDLKQLSTLIRRLVIDKVDHKNLNMDVDFMKDKMASCEILIMEFWKILEPAVKEITPNGGLYKLTLYETPRNFVEYFGE

SEQ ID NO: 17224 - protein, 139 aa, Algoriphagus halophilus
  misc_feature (1)..(139): tr|A0A1N6HG22|A0A1N6HG22_9BACT 6-pyruvoyltetrahydropter in/6-carboxytetrahydropterin synthase OS=Algoriphagus h alophilus OX=226505 GN=SAMN05444394_3819 PE=4 SV=1
MIYVCRKEHFNAAHKLWNPKWTDEKNVEVFGPCANVNWHGHNFELIVMVKGLPDPDTGFVVDLKKLSTIIRKLVIEKVDHKNLNVDVDFMEGKLASCENLVMEFWKILEPAVKEITNEGGLHKLTLYETPRNFVEYYGD

SEQ ID NO: 17225 - protein, 136 aa, Algoriphagus halophilus
  misc_feature (1)..(136): tr|A0A1N6DA17|A0A1N6DA17_9BACT 6-carboxy-5,6,7,8-tetrah ydropterin synthase OS=Algoriphagus halophilus OX=22650 5 GN=SAMN05444394_0578 PE=3 SV=1
MKVTVFRKEHFNAAHRLHNPEWSDEQNKAFFGKCNNPNYHGHNYELVVTLKGEVDPASGYVYDMKVLSDLIKEHVLNRFDHKNLNLDTDEFSQLNPTAENIAVVIWNILRDKIDRKFELKIRLYETERNFVEYDGN

SEQ ID NO: 17226 - protein, 139 aa, Algoriphagus hitonicola
  misc_feature (1)..(139): tr|A0A1I2NQ20|A0A1I2NQ20_9BACT 6-pyruvoyltetrahydropter in/6-carboxytetrahydropterin synthase OS=Algoriphagus h itonicola OX=435880 GN=SAMN04487988_101244 PE=4 SV=1
MIYVCRKEHFNAAHKLWNPNWSEEKNFEVFGPCANVNWHGHNFELIVTVKGLPDPETGFVVDLKQLSTLIRNLVIDKVDHKNLNIDVDFMQGKMASCEILIMEFWKILEPAVKEITPNGGLFKLTLYETPRNFVEYFGE

SEQ ID NO: 17227 - protein, 136 aa, Algoriphagus hitonicola
  misc_feature (1)..(136): tr|A0A1I2PDJ1|A0A1I2PDJ1_9BACT 6-carboxy-5,6,7,8-tetrah ydropterin synthase OS=Algoriphagus hitonicola OX=43588 0 GN=SAMN04487988_101459 PE=3 SV=1
MKVSVFRKEHFNAAHRLHNPSWSAEENQAVFGKCNNANYHGHNYDLIVQLRGEIDPKTGYVYDMKVLSDLIKENILNKFDHKNLNLDTDEFKDLNPSAENIAVVIWNILREKIDRKFELTIRLYETERNYVEYDGN

SEQ ID NO: 17228 - protein, 136 aa, Algoriphagus locisalis
  misc_feature (1)..(136): tr|A0A1I7BKX3|A0A1I7BKX3_9BACT 6-carboxy-5,6,7,8-tetrah ydropterin synthase OS=Algoriphagus locisalis OX=305507 GN=SAMN04489724_2506 PE=3 SV=1
MKVSVFRKEHFNAAHRLHNPEWSDEQNQTVFGKCNNPHFHGHNYELIVKLRGEVDPRTGYVYDMKVLSDLIKEHVLRKLDHKNLNLDTDEFKELNPTAENIAVVVWNILREKIDRKFELTIRLYETERNFVEYDGN

SEQ ID NO: 17229 - protein, 139 aa, Algoriphagus locisalis
  misc_feature (1)..(139): tr|A0A1I6ZP02|A0A1I6ZP02_9BACT 6-pyruvoyltetrahydropter in/6-carboxytetrahydropterin synthase OS=Algoriphagus l ocisalis OX=305507 GN=SAMN04489724_1383 PE=4 SV=1
MIYVCRKEHFNAAHKLWNPNWSDEKNVEVFGPCANVNWHGHNFELIVMVKGLPDPETGFVVDLKKLSAIIRNLVIEKVDHKNLNVDVDFMQGKLASCENLIMEFWKILEPAVNEITSQGGLHKLTLYETPRNFVEYFGE

SEQ ID NO: 17230 - protein, 139 aa, Algoriphagus machipongonensis
  misc_feature (1)..(139): tr|A3HZM1|A3HZM1_9BACT 6-pyruvoyl tetrahydrobiopterin s ynthase OS=Algoriphagus machipongonensis OX=388413 GN=A LPR1_07275 PE=4 SV=1
MIYVCRKEHFNAAHKLWNPKWSEEKNVEVFGPCANVNWHGHNFELIVMVKGTPDPETGFVVDLKKLSTTIRTLVIDRVDHKNLNVDVDFMEGKLASCENLVMEFWKILEPAVRELTHHGGLHKLTLYETPRNFVEYFGD

SEQ ID NO: 17231 - protein, 136 aa, Algoriphagus machipongonensis
  misc_feature (1)..(136): tr|A3I139|A3I139_9BACT 6-carboxy-5,6,7,8-tetrahydropter in synthase OS=Algoriphagus machipongonensis OX=388413 GN=ALPR1_16189 PE=3 SV=1
MKVTVFRKEHFNAAHRLHNPDWSDEQNKAVFGKCNNPHFHGHNYELIVKLRGEIDPRTGYVYDMKLLSDLIKEFVLKRFDHKNLNLDTDEFIQLNPTAENIAVVIWNILREKIDRKFELTIRLYETERNFVEYDGN

SEQ ID NO: 17232 - protein, 139 aa, Algoriphagus marincola
  misc_feature (1)..(139): tr|A0A0P7YHV7|A0A0P7YHV7_9BACT 6-pyruvoyltetrahydropter in/6-carboxytetrahydropterin synthase OS=Algoriphagus m arincola HL-49 OX=1305737 GN=queD-2 PE=4 SV=1
MIYVCRKEHFNAAHKLWNPNWSEEKNFEVFGPCANVNWHGHNFELIVTVKGIPDPETGFVVDLKDLSSLIKKLVIDKVDHKNLNMDVDFMQGKMASCEILVMEFWKILEPAIKEITPKGGLHKLTLYETPRNFVEYRGE

SEQ ID NO: 17233 - protein, 136 aa, Algoriphagus marincola
  misc_feature (1)..(136): tr|A0A0P7YEI2|A0A0P7YEI2_9BACT 6-carboxy-5,6,7,8-tetrah ydropterin synthase OS=Algoriphagus marincola HL-49 OX= 1305737 GN=queD PE=3 SV=1
MKVTVIRKEHFNAAHRLHNPNWSDEKNADIFGKCNNPNFHGHNYDLHVSLRGDIDPDTGYVYDMKVLSDLIKEHVLNKFDHKNLNLDTDEFKNLNPTAENIAVVIWNILREKIDRKFELSIRLYETERNYVDFDGN

SEQ ID NO: 17234 - protein, 138 aa, Algoriphagus ornithinivorans
  misc_feature (1)..(138): tr|A0A1I5APZ6|A0A1I5APZ6_9BACT 6-pyruvoyltetrahydropter in/6-carboxytetrahydropterin synthase OS=Algoriphagus o rnithinivorans OX=226506 GN=SAMN04488519_101240 PE=4 SV =1
MIYVCRKEHFNAAHKLWNPKWSDEKNFEVFGPCANVNWHGHNFELIVTVKGLPDPETGFVVDLKELSTLIKKLVIDKVDHKNLNMDVDFMEGKMASCEILVMEFWKILEPAVKEITPNGGLHKLTLYETPRNFVEYFG

SEQ ID NO: 17235 - protein, 144 aa, Algoriphagus ornithinivorans
  misc_feature (1)..(144): tr|A0A1I5H3P0|A0A1I5H3P0_9BACT 6-carboxy-5,6,7,8-tetrah ydropterin synthase OS=Algoriphagus ornithinivorans OX= 226506 GN=SAMN04488519_106270 PE=3 SV=1
MELLFREVMKVTVFRKEHFNAAHRLNNPAWSPEKNQAVFGKCNNPNYHGHNYDLIVKLRGEVDPDTGYVYDMKVLSDLIKKHVLNKFDHKNLNLDTDEFKNLNPSAENIAVVIWNILREKIDRKFELTIRLYETERNFVEYDGN

SEQ ID NO: 17236 - protein, 136 aa, Algoriphagus ratkowskyi
  misc_feature (1)..(136): tr|A0A2W7RQ85|A0A2W7RQ85_9BACT 6-carboxy-5,6,7,8-tetrah ydropterin synthase OS=Algoriphagus ratkowskyi OX=57028 GN=LV84_00094 PE=3 SV=1
MKVSVFRKEHFNAAHRLHNAEWSDEKNQAAFGKCNNPHFHGHNYELIVKLRGETDTRTGYVYDMKLLSDLIKEHILSKLDHKNLNLDTDEFKELNPTAENIAVVIWNILREKIDRKLELTIRLYETERNFVEYDGN

SEQ ID NO: 17237 - protein, 139 aa, Algoriphagus ratkowskyi
  misc_feature (1)..(139): tr|A0A2W7RYG9|A0A2W7RYG9_9BACT 6-pyruvoyltetrahydropter in/6-carboxytetrahydropterin synthase OS=Algoriphagus r atkowskyi OX=57028 GN=LV84_02318 PE=4 SV=1
MIYVCRKEHFNAAHKLWNPKWSDEKNVEVFGPCANVNWHGHNFELIVMVKGLPDPDTGFVVDLKKLSTIIRNLVIERVDHKNLNIDVDFMQGKLASCENLIMEFWKILEPAVNEITSHGGLHKLTLYETPRNFVEYFGE

SEQ ID NO: 17238 - protein, 136 aa, Algoriphagus sp.
  misc_feature (1)..(136): tr|A0A418PVG1|A0A418PVG1_9BACT 6-carboxy-5,6,7,8-tetrah ydropterin synthase OS=Algoriphagus sp. N3 OX=2056311 G N=D0X99_06340 PE=3 SV=1
MKVSVYRKEHFNAAHRLNNPNWSDERNEAVFGKCNNPNFHGHNYELIVQLKGEVDPETGYVYDMKVLSDLIKEHVLNKFDHKNLNLDTDEFRNLNPSAENIAVVIWNILREKIDRKFELTVRLYETERNYVEYDGN

SEQ ID NO: 17239 - protein, 139 aa, Algoriphagus sp.
  misc_feature (1)..(139): tr|A0A258EN07|A0A258EN07_9BACT 6-carboxytetrahydropteri n synthase QueD OS=Algoriphagus sp. 32-45-6 OX=1970314 GN=B7Z16_05865 PE=4 SV=1
MIHVSRKEHFNAAHKLWNPNWSDEKNFEVFGPCANVNWHGHNFELIVTVKGLPDPETGFVVDLKKLSNLIRRLVIDKVDHKNLNVDVDFMQGKLASCETLVVEFWKILDPAIKEITKHGGLYKLTLYETPRNFVEYFGE

SEQ ID NO: 17240 - protein, 139 aa, Algoriphagus yeomjeoni
  misc_feature (1)..(139): tr|A0A327PDF1|A0A327PDF1_9BACT 6-pyruvoyltetrahydropter in/6-carboxytetrahydropterin synthase OS=Algoriphagus y eomjeoni OX=291403 GN=LV83_02261 PE=4 SV=1
MIYVCRKEHFNAAHKLWNPKWSDEKNVEVFGPCANVNWHGHNFELIVMVKGLPDPETGFVVDLKKLSTIIRNLVIEKVDHKNLNVDVDFMQGKLASCENLIMEFWKILEPAVSEITSQGGLHKLTLYETPRNFVEYLGE

SEQ ID NO: 17241 - protein, 136 aa, Algoriphagus yeomjeoni
  misc_feature (1)..(136): tr|A0A327P829|A0A327P829_9BACT 6-carboxy-5,6,7,8-tetrah ydropterin synthase OS=Algoriphagus yeomjeoni OX=291403 GN=LV83_02668 PE=3 SV=1
MKVSVYRKEHFNAAHRLHNPEWSDEQNQSVFGKCNNPHFHGHNYELIVKLRGEVDPRTGYVYDMKVLSDLIKEHVLRKLDHKNLNLDTDEFKELNPTAENIAVVVWNILREKIDRKFELTIRLYETERNFVEYDGN

SEQ ID NO: 17242 - protein, 139 aa, Algoriphagus zhangzhouensis
  misc_feature (1)..(139): tr|A0A1M7ZDZ1|A0A1M7ZDZ1_9BACT 6-pyruvoyltetrahydropter in/6-carboxytetrahydropterin synthase OS=Algoriphagus z hangzhouensis OX=1073327 GN=SAMN04488108_2543 PE=4 SV=1
MIYVCRKEHFNAAHKLWNPNWSDEKNFEVFGPCANVNWHGHNFELIVTVKGLPDPETGFVVDLKQLSTLIRTLVIDKVDHKNLNMDVDFMQGKMASCEILIMEFWKILQPAVEKITPHGGLYKLTLYETPRNFVEYFGD

SEQ ID NO: 17243 - protein, 136 aa, Algoriphagus zhangzhouensis
  misc_feature (1)..(136): tr|A0A1M7Z6J0|A0A1M7Z6J0_9BACT 6-carboxy-5,6,7,8-tetrah ydropterin synthase OS=Algoriphagus zhangzhouensis OX=1 073327 GN=SAMN04488108_0875 PE=3 SV=1
MKVKVFRKEHFNAAHRLNNPNWSEEKNQAVFGKCNNPHYHGHNYELIVTLKGEINPETGYVYDMKLLSDLIKEHVLRKFDHKNLNLDTDEFTNLNPTAENIAVVIWNILREKIDRKLELIIRLYETERNFVEYDGN

SEQ ID NO: 17244 - protein, 155 aa, Alicyclobacillus acidocaldarius
  misc_feature (1)..(155): tr|B7DN74|B7DN74_9BACL Queuosine biosynthesis protein Q ueD OS=Alicyclobacillus acidocaldarius LAA1 OX=543302 G N=AaLAA1DRAFT_0449 PE=4 SV=1
MSAYEIPSRLQVLGSDIDRSQLKYHDRRVAVTKEFTFDAAHHLHAYDGKCANLHGHTYKLVITVSGRVNDIGIVVDFGDLKRLFEDVIKRRLDHQYLNEVLPPMNTTAENMIVWIWEELERALEAYGRDRDVRLERLELYETPTSRASLERAWMS

SEQ ID NO: 17245 - protein, 180 aa, Alicyclobacillus acidocaldarius
  misc_feature (1)..(180): tr|F8IES2|F8IES2_ALIAT Queuosine biosynthesis protein Q ueD OS=Alicyclobacillus acidocaldarius (strain Tc-4-1) OX=1048834 GN=ptpS PE=4 SV=1
MGQPLSCERNLAAANMAGVLRGVRRVSAYGIPGRLQVLGSDIDRSQLKYHDRRVAVTKEFTFDAAHHLHAYDGKCANLHGHTYKLVITVSGRVNDIGIVVDFGDLKRLFEDVIKRRLDHQYLNEVLPPMNTTAENMIVWMWEELERALEAYGRDRDVRLERLELYETPTSRASLERAWMS

SEQ ID NO: 17246 - protein, 156 aa, Alicyclobacillus acidoterrestris
  misc_feature (1)..(156): tr|A0A512CT44|A0A512CT44_9BACL 6-carboxytetrahydropteri n synthase QueD OS=Alicyclobacillus acidoterrestris OX= 1450 GN=AAC03nite_31580 PE=4 SV=1
MGVYRIPSQLQQLGQDITEHQLAYHRRRVALTKEFTFDAAHHLHLYEGKCKNLHGHTYRLVITVSGFINEIGLVIDFADLKRIYQTTIEEKLDHQYLNEVLPPMNTSAENMIVWMWEQLDSALRKETAPAQEIRLEELVLYETPTSYATLKRAWME

SEQ ID NO: 17247 - protein, 275 aa, Alicyclobacillus acidoterrestris
  misc_feature (1)..(275): tr|T0BVT2|T0BVT2_ALIAG Uncharacterized protein OS=Alicy clobacillus acidoterrestris (strain ATCC 49025 / DSM 39 22 / CIP 106132 / NCIMB 13137 / GD3B) OX=1356854 GN=N00 7_10880 PE=4 SV=1
MMYMSRKVTFSAAHFYRIDNWSEEENQRAFGPCSNPNGHGHDYTLEVMVRGDIDEKTGIVVNIVDVDKVVQDFLHAEIDGKFLNHEHPYFHENLPTTENIVNFIWDSLQDKFSDCELHHLRLHENDFLYSEKEFGPMVQLTRKYHFSAAHRLHSDQLTDEENVKLFGKCNNPHGHGHNYKLEVTVRGPIDPVTGMVIGLAELDETVSRIVLQQFDHKHLNLDTEQFKTLNPTSEVVATVIWDMLCDHVPNLYKVGLWETEKNYFEYYGDGQGVSK

SEQ ID NO: 17248 - protein, 159 aa, Alicyclobacillus ferrooxydans
  misc_feature (1)..(159): tr|A0A0P9CA85|A0A0P9CA85_9BACL 6-pyruvoyl tetrahydrobio pterin synthase OS=Alicyclobacillus ferrooxydans OX=471 514 GN=AN477_18080 PE=4 SV=1
MPTTRICKIFTFDAAHQLIGHSGKCANLHGHTYTLEVVVSGEPIGEENPSDEGFVMDFAKLKAVVKTEVTDILDHAFISRGNEPALEVLRASGSKVAVLGFRTTAENLARYIVYRLKTAGLPVESVKLWETQTAWAQVYAAEVPDDGPFYQEVGGCDSE

SEQ ID NO: 17249 - protein, 155 aa, Alicyclobacillus hesperidum
  misc_feature (1)..(155): tr|J9E857|J9E857_9BACL Uncharacterized protein OS=Alicy clobacillus hesperidum URH17-3-68 OX=1200346 GN=URH1736 8_0281 PE=4 SV=1
MAEYRIPERLQVLGVDIEKSELPYHQKRVAVTKEFTFDAAHHLHAYDGKCTNLHGHTYRLVVTVSGFVNAIGIVIDFGELKQIYRDVIERKLDHQYLNEVLPKMNTTAENMVVWIWEQFEAALAQYDAYRGLRLEQIDLFETPTSKATLKREWMI

SEQ ID NO: 17250 - protein, 155 aa, Alicyclobacillus hesperidum; identical to SEQ ID NO: 17249
  misc_feature (1)..(155): tr|A0A1H2U568|A0A1H2U568_9BACL PreQ(0) biosynthesis pro tein QueD OS=Alicyclobacillus hesperidum OX=89784 GN=SA MN04489725_10756 PE=4 SV=1

SEQ ID NO: 17251 - protein, 147 aa, Alicyclobacillus macrosporangiidus
  misc_feature (1)..(147): tr|A0A1I7JNW7|A0A1I7JNW7_9BACL 6-pyruvoyltetrahydropter in/6-carboxytetrahydropterin synthase OS=Alicyclobacill us macrosporangiidus OX=392015 GN=SAMN05421543_11115 PE =4 SV=1
MLQQFYPQVPHHYRYELNKDMHLAAAHFIPHPDAGVCARTHGHTYFINITVAGDDLDDSGFLVNFKELKEAVHGRWDHTLLNDDRDVFDPNDPDRFPSTEVVARVVWERIQALLDQKPNRPRCLQVVVRETPTSYVVFRPRPGVDLR

SEQ ID NO: 17252 - protein, 157 aa, Alicyclobacillus montanus
  misc_feature (1)..(157): tr|A0A1M6JRM9|A0A1M6JRM9_9BACL PreQ(0) biosynthesis pro tein QueD OS=Alicyclobacillus montanus OX=1830138 GN=SA MN05443507_10132 PE=4 SV=1
MTHYHLPPKIQTLHEDIFPEQLRYHQRRVSIEKHFTFDAAHHLHEYMGKCHNLHGHTYLLQIEMSGIPDPRGIVMDFAELKELFENRIKNRLDHQYLNEVLPPMNTTAENMIVWIWEELEDALNVQFGDRGLRLESLVLYETPTSCAKLRREWMINE

SEQ ID NO: 17253 - protein, 155 aa, Alicyclobacillus sacchari
  misc_feature (1)..(155): tr|A0A4R8LNU8|A0A4R8LNU8_9BACL PreQ(0) biosynthesis pro tein QueD OS=Alicyclobacillus sacchari OX=392010 GN=C74 45_105149 PE=4 SV=1
MAEYAIPGRLQVLGVDIEKSELPYHRKRVAVTKEFTFDAAHHLHAYDGKCTNLHGHTYRLVVTVSGFVNDIGIVIDFGELKQMYRDVIERKLDHQYLNDVLPKMNTTAENMVVWIWEQLEAALAQYDTNHALRLEQVDLYETPTSKATVKREWMV

SEQ ID NO: 17254 - protein, 159 aa, Alicyclobacillus sp.
  misc_feature (1)..(159): tr|A0A1F2Y991|A0A1F2Y991_9BACL 6-carboxytetrahydropteri n synthase QueD OS=Alicyclobacillus sp. RIFOXYA1_FULL_5 3_8 OX=1797236 GN=A2201_03045 PE=4 SV=1
MNQVRVCKIFTFDAAHQLEGHKGKCANVHGHTYKLEVIVSGVPITADNPAEEGFVMDFGDIKEVVKEKIVDVLDHSFLAMGNEPGFEALRHTGSKISQLGFRTTAENLCLFICHTLRSSGLPMYSVRVWETPTSYAEVLAAEIPASGPVYRTVGVCDIG

SEQ ID NO: 17255 - protein, 155 aa, Alicyclobacillus tengchongensis
  misc_feature (1)..(155): tr|A0A0V0PPA7|A0A0V0PPA7_9BACL 6-pyruvoyl tetrahydrobio pterin synthase OS=Alicyclobacillus tengchongensis OX=3 68812 GN=SD51_07615 PE=4 SV=1
MAEYKIPERLQVLGVDIEKSELPYHQKRVAVTKEFTFDAAHHLHAYDGKCTNLHGHTYRLVVTVSGFVNAIGIVIDFGELKQIYRDVIERKLDHQYLNEVLPKMNTTAENMVVWIWEQFEAALAQYDAYRGLRLEQIELFETPTSKATLKREWMI

SEQ ID NO: 17256 - protein, 155 aa, Alicyclobacillus vulcanalis
  misc_feature (1)..(155): tr|A0A1N7KWT8|A0A1N7KWT8_9BACL PreQ(0) biosynthesis pro tein QueD OS=Alicyclobacillus vulcanalis OX=252246 GN=S AMN05421799_102242 PE=4 SV=1
MSAYKIPSRLQELGSDIQRSQLKYHDRRVAVTKEFTFDAAHHLHAYDGKCANLHGHTYRVVMTVSGRVNDIGIVVDFGDLKRLFEDVIKKRLDHQYLNEVLPPMNTTAENMIVWMWEELERALTDMGEERDVRLERLELYETPTSRASLERAWMS

SEQ ID NO: 17257 - protein, 292 aa, Aliidiomarina haloalkalitolerans
  misc_feature (1)..(292): tr|A0A432VY67|A0A432VY67_9GAMM Uncharacterized protein OS=Aliidiomarina haloalkalitolerans OX=859059 GN=CWE06_ 01915 PE=4 SV=1
MQLFVKDLTVIDFSYLCPQRGIVGESWIVDILLDGSLNDQSMVLDFGRVKKQIKAIIDQSVDHKLLVPSEHPYTLVTKHENETHYWVDFVRPQNSIHLFCPADAYAFIDAPEIDMAATVAYLHAVIKKELPTNVKGLELNLRAEEIPSFYYHYTHGLKKHDGNCQRIAHGHRSAIQIFLDGMRSPAWEQRWSRRWQDIYIGTAEDVVAKEHMTLSTAAQDLIDSQHVCYSYLAEQGVFELALPKAENEVMTADSTVECIAEYIAKEIKNQEPSHDIKVIAFEGVGKGAIGYA

SEQ ID NO: 17258 - protein, 315 aa, Aliidiomarina iranensis
  misc_feature (1)..(315): tr|A0A432W0A5|A0A432W0A5_9GAMM Uncharacterized protein OS=Aliidiomarina iranensis OX=1434071 GN=CWE08_04355 PE =4 SV=1
MQLFVNDLTVIDFSYLCPERGIVGESWIVDIILDGSLNDQSMVLDFGRVKKQVKAIIDQSVDHKLLIPTEHAYTQVTRETEGTHYWVDFLRPGKTVHLYCPADAYAFIDSDVITQESTIDYLQAVIKRELPANVEGLQLTLRAEEINGFYYHYTHGLKKHDGNCQRIAHGHRSALKIFIDGMRSTAWEQRWSRRWEDIYVGTAEDISNAESMKLSSSAQAHAGEGHIFYSYMAEQGLFELILPKNENEVMPTDTTVERIADYIAREIAIEVANERKVLTANTSTANTAASELSAQSLKIKVIAFEGVGKGAIGYA

SEQ ID NO: 17259 - protein, 296 aa, Aliidiomarina maris
  misc_feature (1)..(296): tr|A0A327X2V0|A0A327X2V0_9GAMM 6-pyruvoyl tetrahydropte rin synthase-like protein OS=Aliidiomarina maris OX=531 312 GN=B0I24_104166 PE=4 SV=1
MQLFVNDLTVIDFSYLCPQRGVVGESWIVDITLDGTLNDQSMVLDFGRVKKQIKAIIDNSVDHKLAVPAEHPYTHVTRRDDDSGYWVDFMRPDARSIHLFCPADAFAFIDADVVDIDSVKAYLHAVIKRELPTNVAGLELTLRAEDINGFYYHYTHGLKKHDGNCQRIAHGHRSAIQIYHNGMRTPRLEKLWATRWQDIYVGSQEDVVSAEQMQLSSLAREAIAASPDAYICYSYQADQGLFELALSVQENTVIETDSTVECISEYLAQRIKQEEGAGDVKVIAFEGVGKGAIGYA

SEQ ID NO: 17260 - protein, 293 aa, Aliidiomarina minuta
  misc_feature (1)..(293): tr|A0A432W6M6|A0A432W6M6_9GAMM Uncharacterized protein OS=Aliidiomarina minuta OX=880057 GN=CWE09_03100 PE=4 S V=1
MQLFVNDLTVIDFSYLCPQRGVVGESWIVDITLDGSLNDQSMVLDFGRVKKQIKAIIDDSVDHKLAVPSDHPYTQVSRSEDESGYWVDFIRPDTKSVHLFCPADAFAFIDADEVSMETVKTYLHAVIKRELPTNVEGLKLTLRAEDISGFYYHYTHGLKKHDGNCQRIAHGHRSRLQIFVDGIRFPRLEKLWASRWEDIYVGSAEDEVASKVMQLSGKAAELVGEHHVCYSYQADQGLFELAIPAAENTIIATDSTVECISEYLANAIKADFPDSKVKVIAYEGVGKGAIGYA

SEQ ID NO: 17261 - protein, 304 aa, Aliidiomarina sanyensis
  misc_feature (1)..(304): tr|A0A432WRP4|A0A432WRP4_9GAMM Uncharacterized protein OS=Aliidiomarina sanyensis OX=1249555 GN=CWE11_01215 PE =4 SV=1
MQLFVNDLTVIDFSYLCPTRGIVGESWIVDIVLDGSLNDQSMVLDFGRVKKQVKAIIDQSVDHKLLVPAEHPYTRVTKHDNETHYWVDFLRPERSVHLFCPSDAYAFIDAELITMEATIAYLKAVIKREMPANVQGIQLSLRSEDISGFYYHYTHGLKKHDGNCQRIAHGHRSAIQVFVDGMRSPAWEQRWSRRWEDIYVGTREDLCEPSAMTLSPHAQGHIQAHHVCYSYVAEQGVFELALPMDENEIMDKDTTVECIAEYIAETIGKQISTETDSQITKQHPESSVKVVAFEGVGKGAIGYA

SEQ ID NO: 17262 - protein, 299 aa, Aliidiomarina shirensis
  misc_feature (1)..(299): tr|A0A432WX27|A0A432WX27_9GAMM Uncharacterized protein OS=Aliidiomarina shirensis OX=1048642 GN=CWE13_01330 PE =4 SV=1
MQLFVNDLTVIDFSYLCPERGIVGESWIVDIILDGSLNDQSMVLDFGRVKKQVKAIIDQSVDHKLLIPTEHVFTQVTREEAGTHYWVDFLRPNKSIHLYCPADAYAFIDSDTITQESTIAYLQAVIKRELPANVKGLELTLRAEEMNGFYYHYTHGLKKHDGNCQRIAHGHRSAIKIFIDGMRSPAWEQRWSRRWEDIYVGTAEDVGEASSLKLSAAARKHTGEHHICYSYMAEQGLFELILPAQENEVMFTDTTVECIADYVAHEIAKTIAAESMPTHTPEVKVIAFEGVGKGAIGYA

SEQ ID NO: 17263 - protein, 293 aa, Aliidiomarina soli
  misc_feature (1)..(293): tr|A0A432WMC1|A0A432WMC1_9GAMM Uncharacterized protein OS=Aliidiomarina soli OX=1928574 GN=CWE14_02720 PE=4 SV =1
MQLFVNDLTVIDFSYLCPQRGIVGESWIVDITLDGSLNDQSMVLDFGRVKKQIKAIIDDSVDHKLAVPAEHPFTKVSRNQDESGYWVDFMRPDNGSIHLFCPADAYAFVDADEVTMDTVKAYLHGVIKRQLPTNVEGLQLTLRAEQINGFYYHYTHGLKKHDGNCQRIAHGHRSAIQVYLNGMRTPRLEQQWARKWQDIYVGSVEDVVMPNSMQLSEYGRESVGNDHVCYSYQADQGLFELAVPRTENTVIDTDSTVECISNYLAATIKMAEPEADVKVIAYEGVGKGAIGYA

SEQ ID NO: 17264 - protein, 298 aa, Aliidiomarina sp.
  misc_feature (1)..(298): tr|A0A552X3V6|A0A552X3V6_9GAMM Uncharacterized protein OS=Aliidiomarina sp. IM1326 OX=2593535 GN=FM042_02310 P E=4 SV=1
MQLFVNDLTVIDFSYLCPERGIVGESWIVDIMLDGSLNDQSMVLDFGRVKKQVKAIIDQSVDHKLLIPTEHPFTRVSAHPNETHHWVDFMRPGRSIHLYCPSDAYAFIDASQIDMDATISYLQAAIKRELPANVQGITLTLRSEAIPGFYYHYTHGLKKHDGNCQRIAHGHRSAIQVYIDGMRSPALEQRWSRRWEDIYVGTREDLASPDELTLSPEATKALGAHHVCYSYVAEQGVFELILPADENEVMEVDSTVECIAEYIAQEIKTSLNDSDYGPSPQIRVIAYEGVGKGAIGYA

SEQ ID NO: 17265 - protein, 152 aa, Aliifodinibius roseus
  misc_feature (1)..(152): tr|A0A1M5BEI5|A0A1M5BEI5_9BACT 6-pyruvoyltetrahydropter in/6-carboxytetrahydropterin synthase OS=Aliifodinibius roseus OX=1194090 GN=SAMN05443144_10893 PE=4 SV=1
MDLVFVTRKAHFNAAHRLHNPDKSDEWNRQTFGKCNHENWHGHNYIVKVTVAGKTDRATGYVIDLSTLKSIIEERIVEECDHKNLNLDVPFLEGIMPSTENLVKAFFEQVEEPIANEAYGSGFLYSLELEETERNSAEYCPYRLGKPLPEID

SEQ ID NO: 17266 - protein, 131 aa, Aliifodinibius sediminis
  misc_feature (1)..(131): tr|A0A521B085|A0A521B085_9BACT 6-carboxy-5,6,7,8-tetrah ydropterin synthase OS=Aliifodinibius sediminis OX=1214 077 GN=SAMN06265218_10243 PE=3 SV=1
MPSWTLHTEFKFDAAHFLEGYEGKCGRMHGHSYKVHIAATSNQLNPSKYLDSADMVCDFHELKWAAKGSEKGGLDHSVLNEELPVNPTAERIAEFIHKETLQRIPDGIKLNVTVWETENSWVEYTDEDGEN

SEQ ID NO: 17267 - protein, 150 aa, Aliifodinibius sediminis
  misc_feature (1)..(150): tr|A0A521B920|A0A521B920_9BACT 6-pyruvoyltetrahydropter in/6-carboxytetrahydropterin synthase OS=Aliifodinibius sediminis OX=1214077 GN=SAMN06265218_102307 PE=4 SV=1
MVFVTRKAHFNAAHRLHNPEKSDEWNRRTFGKCNHENWHGHNYKLSVTVAGKINSTTGYVIDLATLKSIIEQRIVVKCDHKNLNLDVPFLEGIMPSTENLVKAFFEQIEEPIAEKSGGDGFLYSVELQETERNSAEYCPYRLGKPLPEID

SEQ ID NO: 17268 - protein, 129 aa, Aliifodinibius sp.
  misc_feature (1)..(129): tr|A0A2A2GEU4|A0A2A2GEU4_9BACT 6-carboxy-5,6,7,8-tetrah ydropterin synthase OS=Aliifodinibius sp. WN023 OX=2032 627 GN=CK503_00165 PE=3 SV=1
MPTWTLHTEFKFDAAHLIEGYDGKCGRMHGHSYKVHISAKSYKLNPSKYLDTDDMVCDFRELKWASKGSEKGGLDHSVLNEEMPINPTAERIAEFIYKETQQRIPEGVTLNVTVWETENSWVEYTEDNV

SEQ ID NO: 17269 - protein, 150 aa, Aliifodinibius sp.
  misc_feature (1)..(150): tr|A0A2A2G7Z5|A0A2A2G7Z5_9BACT 6-pyruvoyl tetrahydrobio pterin synthase OS=Aliifodinibius sp. WN023 OX=2032627 GN=CK503_13170 PE=4 SV=1
MVFVTRRAHFNAAHRLHNPEKSDKWNKQIFGKCNHENWHGHNYVLKVTVAGKQNPETGYVIDLSELKTIIESRIVEKCDHKNLNLDVPFLDGIMPSTENLVQAFFKELEDPIRNATNQRGFLYSIELQETERNSAKYCPYLLEKEIPTLD

SEQ ID NO: 17270 - protein, 291 aa, Aliiglaciecola lipolytica
  misc_feature (1)..(291): tr|K6YSE8|K6YSE8_9ALTE Uncharacterized protein OS=Aliig laciecola lipolytica E3 OX=1127673 GN=GLIP_1591 PE=4 SV =1
MQLFVNDLTVMDFSYLCAQRGMVGESWIVDVILDGELNEESMVLDFGKVKKELKFLIDEYVDHKLLVPAEHPFSIINRDPNTDEVKVDFLRPDGKSIHLLCPAEAYAFVYAEEVDIVSVGQYLKEVIATHLPSNVEGIELILRPEVINTPFYHYTHGLKKHDGNCQRIAHGHRSKIIVYENDELSLDWQEYWAQRWSDIYIGSEEDIISHQSGLFTQSLSDSSQHFLFAYESSQGEFSLAIPKAECEIVNTDSTVECLAQYIAVELKQQRPDSDFKVLAYEGVGKGAIAYA

SEQ ID NO: 17271 - protein, 291 aa, Aliiglaciecola sp.
  misc_feature (1)..(291): tr|A0A553L6A8|A0A553L6A8_9ALTE Uncharacterized protein OS=Aliiglaciecola sp. M165 OX=2593649 GN=FM019_06815 PE =4 SV=1
MQLFVNDLTVMDFSYLCPERGMVGESWIVDVILDGSLNEESMVLDFGKVKKELKFLIDEYVDHKLLVPAEHAFSVITRDELTDQVSVDFMRENNRTIHLVCPAEAYAFVYSDKVTISSVGQYLKEVIATHLPSNVQGIELVLRAEVIDTPFYHYTHGLKKHDGNCQRIAHGHRSKVTVFENDTYSLSWQQYWATRWKDIYIGSEDDLVNAKDSAFVSIPVDEQSHYFFSYESSQGSFSLAIPIAESEIIKTDSTVECLAQYMADELKKHETSSSFKVFAFEGVGKGAIAYA

SEQ ID NO: 17272 - protein, 283 aa, Aliikangiella marina
  misc_feature (1)..(283): tr|A0A545TK34|A0A545TK34_9GAMM 6-pyruvoyl tetrahydropte rin reductase OS=Aliikangiella marina OX=1712262 GN=FLL 45_00920 PE=4 SV=1
MQALFVDNLTVIDFSYFHPHRGIVGESLILDVILHGELNEEGMLFDFSFVKKRIKSCVDSLVDHKFLVARKTPLLKVTESPQQLELQLVLRTGEHYTHVSPEQAVYFVDSDEVTPETIAASINHEIKKILPENVTRVDLNLRAELIEGDFYHYSHGLKKHFGDCQRIAHGHRSKIEVWENDYFSAKWSSHIAKMWQDIYLATQDDIIERPTIKGAEYLTFQYHANQGTFKLTMPAEKCFIMNTDTTVELIALFLANYLKQQVPEAEFKVKAYEGVDKGAIAIR

SEQ ID NO: 17273 - protein, 283 aa, Aliikangiella sp.
  misc_feature (1)..(283): tr|A0A545UAQ1|A0A545UAQ1_9GAMM 6-pyruvoyl tetrahydropte rin reductase OS=Aliikangiella sp. M105 OX=2592383 GN=F LL46_16655 PE=4 SV=1
MQALFVDNLTVIDFAYFHPERGIVGESLILDVTLFGELNDEGMLFDFSFVKKRIKSCVDSLVDHKFLVAKQQAEIEISESPQHLNITLKSTTGDYYEHISPHEAVYFVDAESVTPETISTAINSEIMEILPDNVKKLTLGLRAEDIQKDFYHYSHGLKKHFGDCQRIAHGHRSKIEVWENEHYAPDWTSHIAEIWRDIYLATEEDIQDTKIINGQKYYVFRYHANQGMFQLTIPQNDCHIIQTDTTVELIADYLANYLKAKKPDSNFKVKAYEGVDKGAIVSV

SEQ ID NO: 17274 - protein, 120 aa, Aliivibrio finisterrensis
  misc_feature (1)..(120): tr|A0A4Q5KW44|A0A4Q5KW44_9GAMM 6-carboxy-5,6,7,8-tetrah ydropterin synthase OS=Aliivibrio finisterrensis OX=511 998 GN=queD PE=3 SV=1
MTTELYKDFMFEAAHHLPHVPEGHKCGRLHGHSFLVRLYVEGEVDQHTGWVIDFSEIKAAFKPTYDRLDHYYLNDIEGLENPTSEVLAKWIWNEVKPSLPLLSKIEIKETCTAGCTYRGE

SEQ ID NO: 17275 - protein, 120 aa, Aliivibrio fischeri
  misc_feature (1)..(120): tr|A0A1B9PC50|A0A1B9PC50_ALIFS 6-carboxy-5,6,7,8-tetrah ydropterin synthase OS=Aliivibrio fischeri OX=668 GN=ss cR PE=3 SV=1
MTTELYKDFMFEAAHHLPHVPEGHKCGRLHGHSFLVRLYVEGEVDPHTGWVVDFAEIKAAFKPTYDRLDHYYLNDIKGLENPTSEVLAKWIWNEVKPNLPLLSKIEIKETCTAGCTYRGE

SEQ ID NO: 17276 - protein, 120 aa, Aliivibrio fischeri; identical to SEQ ID NO: 17275
  misc_feature (1)..(120): tr|Q5E5P1|Q5E5P1_ALIF1 6-carboxy-5,6,7,8-tetrahydropter in synthase OS=Aliivibrio fischeri (strain ATCC 700601 / ES114) OX=312309 GN=sscR PE=3 SV=1

SEQ ID NO: 17277 - protein, 120 aa, Aliivibrio logei
  misc_feature (1)..(120): tr|A0A1B9P0V1|A0A1B9P0V1_ALILO 6-carboxy-5,6,7,8-tetrah ydropterin synthase OS=Aliivibrio logei OX=688 GN=A6E04 _09055 PE=3 SV=1
MTTELYKDFMFEAAHHLPHVPEGHKCGRLHGHSFLVRLYVEGEVDQHTGWVIDFSEIKAAFKPTYDRLDHYYLNDIKGLENPTSEVLAKWIWNEVKPSLPLLSKIEIKETCTAGCTYRGQ

SEQ ID NO: 17278 - protein, 120 aa, Aliivibrio salmonicida; identical to SEQ ID NO: 17277
  misc_feature (1)..(120): tr|B6EKD1|B6EKD1_ALISL 6-carboxy-5,6,7,8-tetrahydropter in synthase OS=Aliivibrio salmonicida (strain LFI1238) OX=316275 GN=VSAL_I1330 PE=3 SV=1

SEQ ID NO: 17279 - protein, 120 aa, Aliivibrio sifiae
  misc_feature (1)..(120): tr|A0A2S7XIT2|A0A2S7XIT2_9GAMM 6-carboxy-5,6,7,8-tetrah ydropterin synthase OS=Aliivibrio sifiae OX=566293 GN=B TO23_05945 PE=3 SV=1
MTTELYKDFMFEAAHHLPHVPEGHKCGRLHGHSFLVRLYVEGEVDQHTGWVIDFSEIKAAFKPTYDRLDHYYLNDIEGLENPTSEVLAKWIWNEVKPNLPLLSKIEIKETCTAGCTYRGE

SEQ ID NO: 17280 - protein, 120 aa, Aliivibrio sifiae
  misc_feature (1)..(120): tr|A0A2S7XCE8|A0A2S7XCE8_9GAMM 6-carboxy-5,6,7,8-tetrah ydropterin synthase OS=Aliivibrio sifiae OX=566293 GN=B TO22_05235 PE=3 SV=1
MTTELYKDFMFEAAHHLPHVPEGHKCGRLHGHSFLVRLYVEGEVDQHTGWVIDFSEIKAAFKPTYDRLDHYYLNDIEGLENPTSEVLAKWIWNEVKPTLPLLSKIEIKETCTAGCTYRGE

SEQ ID NO: 17281 - protein, 120 aa, Aliivibrio sp.
  misc_feature (1)..(120): tr|A0A1B9PQ91|A0A1B9PQ91_9GAMM 6-carboxy-5,6,7,8-tetrah ydropterin synthase OS=Aliivibrio sp. 1S175 OX=1840087 GN=A6E06_13960 PE=3 SV=1
MTTELYKDFMFEAAHHLPHVPEGHKCGRLHGHSFLVRLYVEGEVDQHTGWVIDFSEIKAAFKPTYDRLDHYYLNDIEGLENPTSEVLAKWIWNEVKPTLPLLSKIEIKETCTAGCTYRGQ

SEQ ID NO: 17282 - protein, 120 aa, Aliivibrio wodanis; identical to SEQ ID NO: 17279
  misc_feature (1)..(120): tr|A0A090KI97|A0A090KI97_9GAMM 6-carboxy-5,6,7,8-tetrah ydropterin synthase OS=Aliivibrio wodanis OX=80852 GN=A WOD_I_1149 PE=3 SV=1

SEQ ID NO: 17283 - protein, 286 aa, Alishewanella aestuarii
  misc_feature (1)..(286): tr|J2IE84|J2IE84_9ALTE Uncharacterized protein OS=Alish ewanella aestuarii B11 OX=1197174 GN=AEST_18110 PE=4 SV =1
MILFVRDLTVIDFSYLHRQRGMLGESYIVDVELQGALDDTAMVFDFGKVKKVIKQAIDSLVDHKLAVAAECPALQLDTAGELTLLRYQSERGLLQLACPEQAFAVIPGTEINEATVTAFLQQQIKPLLPANVEQLTLTLRPENISGFYYHYSHGLKKHDGNCQRIAHGHRSTIQIYENNMLAPKLNKGWAERWQDIYLGTESDLVAAEQLVHLTPGAQDYSFRYQASQGWFELCIPQSHCEIVPCDTTVECLVDFIADTLKAQHSTHSYKVVAYEGVGKGAIAVRP

SEQ ID NO: 17284 - protein, 286 aa, Alishewanella agri
  misc_feature (1)..(286): tr|I9DV57|I9DV57_9ALTE Uncharacterized protein OS=Alish ewanella agri BL06 OX=1195246 GN=AGRI_02745 PE=4 SV=1
MILFVRDLTVIDFSYLHRQRGMLGESYIVDVELHGALDDTAMVFDFGKVKKVIKQAIDRLVDHKLAVAADCPAFSQQVCDDLSIVRYQSERGLIQLACPAQAFAVIPGAEINEATVTAFLQQQIKPLLPANVEQLVLTLRPEAISGFYYHYSHGLKKHDGNCQRIAHGHRSTIQIYENNMLAPKLNKLWAERWQDIYLGTQSDLVVPQQLQHLTPAVTDYSFRYQASQGWFELCMPQAHCEIVPCDTTVECLADFIADTLKAQNIKQTYKVVAYEGVGKGAVAMRP

SEQ ID NO: 17285 - protein, 286 aa, Alishewanella jeotgali
  misc_feature (1)..(286): tr|H3Z9V9|H3Z9V9_9ALTE Uncharacterized protein OS=Alish ewanella jeotgali KCTC 22429 OX=1129374 GN=AJE_00550 PE =4 SV=1
MILFVRDLTVIDFSYLHRQRGMLGESYIVDVELQGALDDTAMVFDFGKVKKVIKQAIDSLVDHKLAVAAECPALQLDTAGELTLLRYQSERGLLQLACPEQAFAVIPGTEINEATVTAFLQQQIKPLLPANVEQLTLTLRPENISGFYYHYSHGLKKHDGNCQRIAHGHRSTIQIYENNMLAPKLNKGWAERWQDIYLGTESDLVAAEQLVHLTPGAQDYSFRYQASQGWFELCIPQSHCEIVPCDTTVECLADFIADTLKAQHSTHSYKVVAYEGVGKGAIAVRP

SEQ ID NO: 17286 - protein, 220 aa, Alishewanella sp.
  misc_feature (1)..(220): tr|A0A1C2C221|A0A1C2C221_9ALTE QueD like protein OS=Ali shewanella sp. HH-ZS OX=1856684 GN=A9165_10745 PE=4 SV= 1
MEFVMLLLVLLVVLVALVASRFIDNSNPFQVQAKPSLFSPVERSFLSLLEKAAAADYKILNRVKLADVLEVRDSANDKTRRSTLLKLNAKYLDFILCEPESMKVIAVVDLVNVQHRDGHKAVPDWFVSGALEAAGIPYLRIAIKSGYTVTELQAALAQKLGKPAPKVEPTLKGLVKKGPTRPIRSLKPTTATLAAPALRAVPALSHSQIKAQSTALIQAS

SEQ ID NO: 17287 - protein, 286 aa, Alishewanella sp.
  misc_feature (1)..(286): tr|A0A258CBH7|A0A258CBH7_9ALTE Uncharacterized protein OS=Alishewanella sp. 32-51-5 OX=1970315 GN=B7Z18_07540 PE=4 SV=1
MILFVRDLTVIDFSYLHRQRGMLGESYIVDVELHGALDDTAMVFDFGKVKKVIKQAIDRLVDHKLAVAADCPAFSQQVCDDLSIVRYQSERGLIQLACPAQAFAVIPGAEINEATVTAFLQQQIKPLLPANVEQLVLTLRPEAISGFYYHYSHGLKKHDGNCQRIAHGHRSTIQIYENNMLAPKLNKLWAERWQDIYLGTQSDLVVPEQLQHLTPAANDYSFRYQASQGWFELCMPQAHCEIVPCDTTVECLADFIADTLKTQNIKHTYKVVAYEGVGKGAIAVRP

SEQ ID NO: 17288 - protein, 145 aa, Alistipes finegoldii
  misc_feature (1)..(145): tr|A0A4Q5JNW2|A0A4Q5JNW2_9BACT 6-carboxy-5,6,7,8-tetrah ydropterin synthase OS=Alistipes finegoldii OX=214856 G N=EAI98_05455 PE=3 SV=1
MTKEFSFEAAHALDGYDGPCREIHGHSYRLFVTVKGCPAAGEGDPKCGMVMDFGVLKRIVNEEIVSHFDHSLVLRQTPCNASLRAMLAERFGNIVTVDYQPTCENMLGDFARRISRRLPEGVELHSLRLHETATSFAEWFAEDNR

SEQ ID NO: 17289 - protein, 150 aa, Alistipes finegoldii
  misc_feature (1)..(150): tr|I3YLH3|I3YLH3_ALIFI 6-pyruvoyl-tetrahydropterin synt hase OS=Alistipes finegoldii (strain DSM 17242 / JCM 16 770 / AHN 2437 / CCUG 46020 / CIP 107999) OX=679935 GN= Alfi_1498 PE=4 SV=1
MTVIRLTKEFSFEAAHALDGYDGPCREIHGHSYRLFVTVKGRPMAGEGDPKCGMVMDFGVLKRIVNEEIVSHFDHSLVLRQTPCNASLRAMLAERFGNIVTVDYQPTCENMLGDFARRISRRLPEGVELHSLRLHETATSFAEWFAEDNR

SEQ ID NO: 17290 - protein, 148 aa, Alistipes indistinctus
  misc_feature (1)..(148): tr|G5H5I8|G5H5I8_9BACT Uncharacterized protein OS=Alist ipes indistinctus YIT 12060 OX=742725 GN=HMPREF9450_001 98 PE=4 SV=1
MIRLTKEFSFEMAHTLAGYDGPCREIHGHSYRLFVTVRGVPVRDPQSPKYGMVMDFGDLKHIVGRLIVERYDHALVLRETPENHAALEAMRGTYTKIIVTPYQPTCENMVEDFARAIAAELPAGVELFSVKLHETATSFAEWYASDNL

SEQ ID NO: 17291 - protein, 145 aa, Alistipes indistinctus
  misc_feature (1)..(145): tr|A0A412SID7|A0A412SID7_9BACT 6-carboxytetrahydropteri n synthase OS=Alistipes indistinctus OX=626932 GN=DWW78 _05960 PE=4 SV=1
MTKEFSFEMAHTLAGYDGPCREIHGHSYRLFVTVRGVPVRDPQSPKYGMVMDFGDLKHIVGRLIVERYDHALVLRETPENHAALEAMRGTYTKIIVTPYQPTCENMVEDFARAIAAELPAGVELFSVKLHETATSFAEWYASDNL

SEQ ID NO: 17292 - protein, 150 aa, Alistipes inops
  misc_feature (1)..(150): tr|A0A0B0BWI1|A0A0B0BWI1_9BACT 6-pyruvoyl tetrahydropte rin synthase OS=Alistipes inops OX=1501391 GN=LG35_0002 5 PE=4 SV=1
MSRIRVTKEFSFEMAHMLEGYDGPCSEIHGHSYRLFVTVAGTPCSDPQNPKYGMVIDFGVLKRIVGGRIVDVYDHSLVVRRTADNGELIRTLAARFGKLQAVEFQPTCENLVTRFAETIAAELPRGVELFSLRLHETATSYAEWFASDNA

SEQ ID NO: 17293 - protein, 150 aa, Alistipes obesi
  misc_feature (1)..(150): tr|A0A3D2BDP0|A0A3D2BDP0_9BACT 6-carboxytetrahydropteri n synthase QueD OS=Alistipes obesi OX=1118061 GN=DIT81_ 03380 PE=4 SV=1
MTKIRLTKEFSFEAAHLLEGYDGACREIHGHSYRLFVTVRGVPVCDGRNPKLGMVMDFGQLKRIVGEEVVQRLDHAFVMRRTPAGEAFAEALGTRFERIVCVDYQPTCENMLADFAARIAPRLPEGVELYALRLHETATSYAEWVADDNN

SEQ ID NO: 17294 - protein, 145 aa, Alistipes onderdonkii
  misc_feature (1)..(145): tr|A0A1Y3R008|A0A1Y3R008_9BACT 6-carboxy-5,6,7,8-tetrah ydropterin synthase OS=Alistipes onderdonkii OX=328813 GN=B5G41_10030 PE=3 SV=1
MTKEFSFEAAHALDGYDGPCREIHGHSYRLFVTVKGCPADDDTNPKCGMVMDFGVLKSIVNEEVVSRFDHALVLRATRRDAPLRAVLAERFGNIVTVDYQPTCENMLGDFAARIARRLPLGVELHSLRLHETATSFAEWFAEDNR

SEQ ID NO: 17295 - protein, 119 aa, Alistipes onderdonkii
  misc_feature (1)..(119): tr|A0A4Q5INN1|A0A4Q5INN1_9BACT 6-carboxytetrahydropteri n synthase OS=Alistipes onderdonkii OX=328813 GN=EAI99_ 01375 PE=4 SV=1
MYYVSKRMEIAGSHRLTLSYKSQCQQLHGHNWVVTVFCKAKKLNADGMVCDFKRIKDKIHGYLDHGNFNKLLPFNPTAENIARWIVEQIPECYKATVQESEGNVAIYVSDTSKDEEGAL

SEQ ID NO: 17296 - protein, 156 aa, Alistipes putredinis
  misc_feature (1)..(156): tr|R7JG87|R7JG87_9BACT 6-pyruvoyl tetrahydropterin synt hase/QueD family protein OS=Alistipes putredinis CAG:67 OX=1263036 GN=BN752_01558 PE=4 SV=1
MENEKKPTIIRLTKEFTFEAAHALEGYDGLCREIHGHSYRLFVTVKGTPCADESNPKFGMVMDFGELKRIVNEQILSRLDHAFVMRRTAESTRVAEQIGCRFGRIVLVDYQPTCENMLADFAARIEANLPSHVKLHALRLHETATSFAEWMAEDNR

SEQ ID NO: 17297 - protein, 112 aa, Alistipes putredinis
  misc_feature (1)..(112): tr|B0MZT9|B0MZT9_9BACT 6-pyruvoyl tetrahydropterin synt hase/QueD family protein OS=Alistipes putredinis DSM 17 216 OX=445970 GN=queD PE=4 SV=1
MEIAGSHRLTLSYKSQCQQLHGHNWVVTVFCKAKKLNADGMVCDFKRIKDKIHGYLDHGNFNKLLPFNPTAENIARWIVEQIPECYKATVQESEGNVAIYVSDTSKDEEGAL

SEQ ID NO: 17298 - protein, 189 aa, Alistipes shahii
  misc_feature (1)..(189): tr|A0A5B3FX14|A0A5B3FX14_9BACT Rubredoxin OS=Alistipes shahii OX=328814 GN=F2Y13_14385 PE=4 SV=1
MRSITTFDLQYAHRFYGFQGEAQYLHGHTGKLTIEVEDSIEAGVNMVYPCNEIQKVAWDVLRNFDHALVLREDDPLLPAVLDVYEKQGIRNGHPQNKMKGPAFKTELATAYPDCRLVVTKETLTVEGMIKIVYDLLKDKLNIAKITFTSGVNAASAEFVTKNDIDRCPLCGVAFNEEGVCPKCGYRKKK

SEQ ID NO: 17299 - protein, 145 aa, Alistipes shahii
  misc_feature (1)..(145): tr|A0A5B3GKE9|A0A5B3GKE9_9BACT 6-carboxy-5,6,7,8-tetrah ydropterin synthase OS=Alistipes shahii OX=328814 GN=F2 Y07_11465 PE=3 SV=1
MTKEFSFEAAHALDGYDGPCREIHGHSYRLFVTVKGTPAEDASNPKCGMVLDFGVLKRIVSEEIVSHFDHALVLRASESGEEFFRVLAERFGNVVTVGYQPTCENMLGDFAARIAARLPEGVALHSLRLHETATSFAEWFAEDNM

SEQ ID NO: 17300 - protein, 145 aa, Alistipes sp.
  misc_feature (1)..(145): tr|A0A1Q6EIB2|A0A1Q6EIB2_9BACT 6-carboxytetrahydropteri n synthase QueD OS=Alistipes sp. 56_sp_Nov_56_25 OX=189 6969 GN=BHV64_06345 PE=4 SV=1
MTKEFSFEAAHALDGYDGPCREIHGHSYRLFVTVKGTPAEDEADPKCGMVMDFGVLKRIVNEEIVSRFDHALVLRGSASGAELRRVLAERFGNILTVDYQPTCENMLADFARRIAARLPEGVALHSLKLHETATSFAEWFAGDNE

SEQ ID NO: 17301 - protein, 150 aa, Alistipes sp.
  misc_feature (1)..(150): tr|A0A4Y1X217|A0A4Y1X217_9BACT 6-carboxytetrahydropteri n synthase QueD OS=Alistipes sp. 5CPEGH6 OX=2585119 GN= A5CPEGH6_11940 PE=4 SV=1
MTTIRLTKEFSFEAAHALDGYDGPCREIHGHSYRLFVTVKGTPGEDPRDPKYGMVMDFGLLKRIVNEEVVSRFDHALVLRASASGDALRRLLADRFGNIVAVDYQPTCENMLADFARRIAARLPQGVRLHSLRLNETATSFAEWFAEDNG

SEQ ID NO: 17302 - protein, 150 aa, Alistipes timonensis
  misc_feature (1)..(150): tr|A0A1H4BA86|A0A1H4BA86_9BACT 6-pyruvoyltetrahydropter in/6-carboxytetrahydropterin synthase OS=Alistipes timo nensis JC136 OX=1033731 GN=SAMN05444145_103294 PE=4 SV= 1
MTVIRLTKEFSFEAAHALDGYDGPCREIHGHSYRLFVTVKGCPAEDADDPKCGMVMDFGVLKRIVNEEIVSRFDHALVLRDSASGAELRRVLAARFGNIVTVDYQPTCENMLADFARRIAARLPEGVALHSLKLHETATSFAEWFAGDNE

SEQ ID NO: 17303 - protein, 288 aa, Aliterella atlantica
  misc_feature (1)..(288): tr|A0A0D8ZS51|A0A0D8ZS51_9CYAN 6-pyruvoyl tetrahydropte rin synthase OS=Aliterella atlantica CENA595 OX=1618023 GN=UH38_11205 PE=4 SV=1
MQCIINRRAQFSASHRYWLPELSEAENYQRFDLCARHPGHGHNYVLYVSILGELDRYGMVMNLSEVKQVIKQEVTSQLDFSYLNDVWVEFQQTLPTTENIARVIWQKLESHLPLVNIQLFEHPQLWADYQGNGMEAFLTVSTHFSAAHRLAHPDLSYEENVEIYGKCARPNGHGHNYHLEVTVKGEIDAKTGMLVDLGALQQVIDEQVLEPFDHTFLNKDIAYFAEVVPTAENIAVRIGELLRSPVQQLGAELHKIKLIESPNNSCEVYCSQLDANQLSTISQHLTSV

SEQ ID NO: 17304 - protein, 158 aa, Alkalibacillus haloalkaliphilus
  misc_feature (1)..(158): tr|A0A511W321|A0A511W321_9BACI 6-carboxytetrahydropteri n synthase QueD OS=Alkalibacillus haloalkaliphilus OX=9 4136 GN=ygcM PE=4 SV=1
MWDFKIVDRLEKLDEDIKREQLKYHNKRVMVSKEFTFDAAHHLHCYEGKCKNLHGHTYKVIFGISGYVDDTGILIDFGDIKKIWKELIEIYLDHRYLNEMLPPMNTTAENMVVWIYEKMDEALQQDESRYDGTRVEFIRLFETPTSYAEARREWMNDE

SEQ ID NO: 17305 - protein, 159 aa, Alkalicoccus halolimnae
  misc_feature (1)..(159): tr|A0A5C7F3A5|A0A5C7F3A5_9BACI 6-carboxytetrahydropteri n synthase QueD OS=Alkalicoccus halolimnae OX=1667239 G N=queD PE=4 SV=1
MFGFRIVEELQKLGEDIQKKELKYHSRRVMISKEFSFDAAHHLHEYEGKCKNLHGHTYRVVFGISGYVDDIGIMIDFGDIKEIWKENIETYLDHRYLNEMLPPMNTTAENMVVWIYEQMEQALQERNKAGNQELRTEFVRLFETPTSYAEITREWMRNE

SEQ ID NO: 17306 - protein, 159 aa, Alkalicoccus saliphilus
  misc_feature (1)..(159): tr|A0A2T4UA01|A0A2T4UA01_9BACI 6-carboxytetrahydropteri n synthase QueD OS=Alkalicoccus saliphilus OX=200989 GN =queD PE=4 SV=1
MFGFRIVEKLQKLGTDIQKKDLKYHNKRVMVSKEFTFDAAHHLHEYEGKCKNLHGHTYRAVFGISGYVDEIGMMLDFGDIKDIWKEKIETYLDHRYINEMLPPMNTTAENMVVWLFDQMEKELQERNVKGSQEFRVEFVRLFETPTSYAEMRREWMTDE

SEQ ID NO: 17307 - protein, 175 aa, Alkalilimnicola ehrlichii
  misc_feature (1)..(175): tr|Q0AAF2|Q0AAF2_ALKEH 6-pyruvoyl-tetrahydropterin synt hase OS=Alkalilimnicola ehrlichii (strain ATCC BAA-1101 / DSM 17681 / MLHE-1) OX=187272 GN=Mlg_0831 PE=4 SV=1
MSSFTVTRRVEIDAAHRIPDHGSRCRHLHGHRYVVEAACGNPSLQEAGEERGMVLDFGFLKEEMLAVIDAPCDHGLLLSVDDHVMLALLAGGSDRPEAWLEGLRERVAGQGYAEGRDPALGGKLYLVPGPPTAEVLARHWYERLAPRVHARSRGNAALLAVTVWETPNCWARYQP

SEQ ID NO: 17308 - protein, 286 aa, Alkalilimnicola ehrlichii
  misc_feature (1)..(286): tr|A0A3E0X3B9|A0A3E0X3B9_9GAMM Uncharacterized protein OS=Alkalilimnicola ehrlichii OX=351052 GN=CAL65_03620 P E=4 SV=1
MARLFVDQLTVIDCSYLDARRGIVGESWIVDLELGGELDEQGMVFDFGLVKKQVKAAIDGLVDHTLLVPMHAPGLQLSVSGDRVALTFAFADGDLCEFNAPSCAACLLETVEIDTHCVERYLESTLLEELPRNVTSIRIRLRTEAIDGAYYHYSHGLKKHQGQCQRIAHGHRSRLLIERDGVRAPELEQEWAERWRDIYIGSREDVVADELHGGQRYLRFRYQAAEGEFELLLARKRCYLIDTDSTVEHIAAHLASELGRAQPQARFLVRAFEGVGKGALAHNVAL

SEQ ID NO: 17309 - protein, 285 aa, Alkalimonas amylolytica
  misc_feature (1)..(285): tr|A0A1H3Z6B6|A0A1H3Z6B6_ALKAM 6-pyruvoyl tetrahydropte rin synthase OS=Alkalimonas amylolytica OX=152573 GN=SA MN04488051_10251 PE=4 SV=1
MILFVRDLTVIDFSYLCAERGLLGESLIVDVELHGSLDKTSMVFDFGLVKKVIKKAIDGSIDHALAVPTDFPGCTLTEQDKQQLVKFTSARGDIQVSGPTQAFALLQAEQVNLQSIEQFILQQLAGKLPDNVKEVRLTLRPEASQGFYYQYSHGLKKHDGNCQRIAHGHRSTIQIYQDGMLSPRLNKFWADRWQDIYLITEQDLCQPADLKWLQANVGDLCSRYQSGQGVFEICLPASHCELVPCDTTVECLADYIAGELKTLDAEHQYKVVAYEGVGKGAIAVS

SEQ ID NO: 17310 - protein, 289 aa, Alkalinema sp.
  misc_feature (1)..(289): tr|A0A251W9H5|A0A251W9H5_9CYAN 6-pyruvoyl tetrahydropte rin synthase OS=Alkalinema sp. CACIAM 70d OX=1934309 GN =B0A82_23375 PE=4 SV=1
MKCVINRRAKFSASHRYWLPELSDSENVEQFGACARFPGHGHNYTLYVSMLGELDEYGMVLNLSDVKHIIKQEVTGQLDFSYLNDVWEDFKQTLPTTENLARVIWQRLAPHLPIVEIRLYENETLWADYQGNAMEAYLTVSTHFSAAHRLAHPDLSFEENSQIYGKCARVNGHGHNYHLDVTVKGKIHPRTGMLVDLGALQAAIDHYIVEPMDHTFLNKDIPYFERVVPTAENIAAYVCRTLEEPVRQLGATLHKVKLYESPNNACEVYASSNTDNIALKIQLPELATV

SEQ ID NO: 17311 - protein, 129 aa, Alkalinema sp.
  misc_feature (1)..(129): tr|A0A251WGY2|A0A251WGY2_9CYAN 6-carboxy-5,6,7,8-tetrah ydropterin synthase OS=Alkalinema sp. CACIAM 70d OX=193 4309 GN=B0A82_09760 PE=3 SV=1
MPRWKLATEFHFSAAHQIRDYNGPCGRLHGHTYTVKLEATSDRLHGSEYCPHPVMVADFRTLRWAKKDVTKGGLDHCVLNEVMPPEYETTAEMIAKYIYDKTKKMLPDGVRLNVSVSESPHSWAEYTDD

SEQ ID NO: 17312 - protein, 130 aa, Alkaliphilus peptidifermentans
  misc_feature (1)..(130): tr|A0A1G5KLH0|A0A1G5KLH0_9CLOT 6-carboxy-5,6,7,8-tetrah ydropterin synthase OS=Alkaliphilus peptidifermentans D SM 18978 OX=1120976 GN=SAMN03080606_03564 PE=3 SV=1
MNNKLIDVTKIFTFDSAHKLDDYDGDCKYLHGHTYRMEITIRGRIDYRGMVMDFNDLKELVKKEILLKLDHRYLNDVFDFNPTCENMLVWIFERLDESLKGEDYFIQKIVLWETPTSYGTLEREQYYAEN

SEQ ID NO: 17313 - protein, 175 aa, Alkalispirillum mobile
  misc_feature (1)..(175): tr|A0A498BYX9|A0A498BYX9_9GAMM 6-pyruvoyltetrahydropter in/6-carboxytetrahydropterin synthase OS=Alkalispirillu m mobile OX=85925 GN=DFR31_1718 PE=4 SV=1
MSSFTVTRRLEIDAAHRIPDHGSRCRHLHGHRYVVEAACGNPDLHESGEERGMVLDFGFLKEEMLAVIDGPCDHGLLLSVDDQTLLEMLAGGSEQPAEWLAGLRQAVAANGFAEACDPSLGGKLYLLPGPPTAEVLARHWFQRLAPRVQQRSQGHADLLEVTVWETPNCWARYRP

SEQ ID NO: 17314 - protein, 148 aa, Alkalitalea saponilacus
  misc_feature (1)..(148): tr|A0A1T5E8X5|A0A1T5E8X5_9BACT 6-carboxy-5,6,7,8-tetrah ydropterin synthase OS=Alkalitalea saponilacus OX=88945 3 GN=SAMN03080601_01245 PE=3 SV=1
MAKIRLTKEFRFEMAHALWNYDGLCRNIHGHSYILQVTVIGEPISDQDNTKLGMVMDFGDLKAIVNREIVKDLDHSIVVSNMVSPEIIKQMGQMGERHFLVDYQPTCENMLIDFAQRLKNALPKEVSLFSLKLHETANSFAEWYAEDN

SEQ ID NO: 17315 - protein, 200 aa, Alkanindiges illinoisensis
  misc_feature (1)..(200): tr|A0A4Y7X896|A0A4Y7X896_9GAMM 6-carboxytetrahydropteri n synthase OS=Alkanindiges illinoisensis OX=197183 GN=E 2B99_14075 PE=4 SV=1
MLIRKLFKFENAHIVRNCTSDRCRRSIHGHSYQVELILSANRLDHGQMVYDFGLLKGVIKDLIDSFDHAICFWSKDDAGYIEACKTYSARWISLPVSPSAEQFSRVFFFLADQVLQQTTTQNGEGDVQVHSVIVHETATGYAQCFREDIENVQMGLLTLQEIEFSEQVQQEWANPQMYEQLKQGISFLNPEVTPQVVLQA

SEQ ID NO: 17316 - protein, 200 aa, Alkanindiges sp.
  misc_feature (1)..(200): tr|A0A1S8CSX8|A0A1S8CSX8_9GAMM 6-carboxytetrahydropteri n synthase QueD OS=Alkanindiges sp. H1 OX=1907941 GN=BK E30_10750 PE=4 SV=1
MLIRKLFKFENAHIVRNCTSDRCRRSIHGHSYQVELILSANRLDHGQMVYDFGLLKGVIKDLIDSFDHAICFWSQDDAGYIDACKTYSARWISLPVSPSAEQFSRVFFFLADQVLQQTTTQNGEGDVQVHSVIVHETATGYAQCFREDIANSQMGLLSLNDIEFSEQVQQEWANPQMYEQLKQGISFLNPEVTPQVIVNA

SEQ ID NO: 17317 - protein, 109 aa, Allisonella histaminiformans
  misc_feature (1)..(109): tr|A0A1G5WD92|A0A1G5WD92_9FIRM 6-pyruvoyltetrahydropter in/6-carboxytetrahydropterin synthase OS=Allisonella hi staminiformans OX=209880 GN=SAMN02910343_01304 PE=4 SV= 1
MYTITKRMEVSGAHFLHLDYESKCSHLHGHNWIITVTCQRETLDSNGMVVDFTKIKETVNQLDHVLINDVIGNLNPTAENMAKWICDRIPYCVKVSVEETEGNVAIYEK

SEQ ID NO: 17318 - protein, 229 aa, Alloactinosynnema album
  misc_feature (1)..(229): tr|A0A1H0L9Y0|A0A1H0L9Y0_9PSEU 6-pyruvoyl-tetrahydropte rin synthase OS=Alloactinosynnema album OX=504798 GN=SA MN05192558_10461 PE=4 SV=1
MKATEEKCVADGQITISQSFGFSASHELRQLPAGHKCHRNHGHNYTVTASALVHDDAPGDLSPLGDYLAATFDHRLLNEQVTFHPTSELLAAHLAEWFRDNMESAMPITLVEMLVSETAATSARCDGVTSEVTISKTFKTSHGDVTLVLMADGLNEVGFITDFGDLKPFGTYLQAPDADAGLRAAGPALVAHLAGWFIDNVEPEIRGRLVSLRVDSGTTTGLWERGDAS

SEQ ID NO: 17319 - protein, 136 aa, Alloactinosynnema album
  misc_feature (1)..(136): tr|A0A1H0NEL6|A0A1H0NEL6_9PSEU 6-pyruvoyl-tetrahydropte rin synthase OS=Alloactinosynnema album OX=504798 GN=SA MN05192558_105312 PE=4 SV=1
MEVTLFSITVRDHVMIAHSFRGEVFGPAQRLHGATFVVDARFTRAELDSDNIVVDIGLATEELGKVLADFNYRNLDDEPAFAGINTSTEFLAKVIADRLAERVHAGALGEGARGLTGIAVTLHESHVAWASYERSL

SEQ ID NO: 17320 - protein, 236 aa, Alloactinosynnema iranicum
  misc_feature (1)..(236): tr|A0A1G6VY60|A0A1G6VY60_9PSEU 6-pyruvoyl-tetrahydropte rin synthase OS=Alloactinosynnema iranicum OX=1271860 G N=SAMN05216174_113157 PE=4 SV=1
MTEGSYMKVNDETSAARGQITVSQSFGFSASHELRLLPTSHKCRRNHRHNYTVTATALVRDGDHSDLSPLGDYLTSTFDHRLLNEQVDFHPTSELLAGHLAGWFHGNIKSAMPASLLAMTVSETSSTSARCDGVTGEITISKTFKSGRGDVTLIVGADGLDEVGFVTDFGDLKPFAAYLRGPAAAEAGLATTGPALADHLAGWFIDNIEPEIRGRLVSIQVISGTTTALCKRGDAS

SEQ ID NO: 17321 - protein, 252 aa, Alloactinosynnema sp.
  misc_feature (1)..(252): tr|A0A0H5CCQ2|A0A0H5CCQ2_9PSEU Queuosine biosynthesis Q ueD, PTPS-I OS=Alloactinosynnema sp. L-07 OX=1653480 PE =4 SV=1
MSDLARGRYRIGDGSFSFAAAHRLTKLPDAENKAARPHGHTFTVEVELTDTELLAPGFVADYAELAPVGEYLKRELDHRDLNALFTFDTTTDALAQHLTAWFLAHMPPERGKQLRAIHVGLGTATAACRHVDDESFTFEAAHHLEGLPGGHKCGWPHGHSYRVALRLDSQTDPRRRARLRALLAEYLDLHLDHHDLNAVLPFQPTSELLAEHLYAWTLSQANAREAAVVQAVRVWESPRRWAEFSQDEWSGR

SEQ ID NO: 17322 - protein, 136 aa, Alloactinosynnema sp.
  misc_feature (1)..(136): tr|A0A0H5CCP5|A0A0H5CCP5_9PSEU PTPS-like type 4 OS=Allo actinosynnema sp. L-07 OX=1653480 PE=4 SV=1
MEDTLFSITVRDHVMIAHSFRGEVFGPAQRLHGATYVVDARFTRPELDADNIVVDIGLATVQLHEVLDELNYRNLDDVPAFAGINTSTEYLAKHIADQLADRVHQGALGEGARGLAGIEVTLQESHVAWAGYTRSL

SEQ ID NO: 17323 - protein, 364 aa, Allochromatium vinosum
  misc_feature (1)..(364): tr|D3RQ60|D3RQ60_ALLVD Uncharacterized protein OS=Alloc hromatium vinosum (strain ATCC 17899 / DSM 180 / NBRC 1 03801 / NCIMB 10441 / D) OX=572477 GN=Alvin_2762 PE=4 S V=1
MNARLFHLAAVPFEAACRVDILPEGHRCRRLHGHSFLAQVRAELPLGWAGFPGAESDDLQAALACCVEPLDYRDLNAILPIPTDENLARWVRDRLDVPGIASVGIQSTRDQGADLDGADHAHLWRRFRFESAHRLPNVPEGHPCGRMHGHGFEVILHADQDLGGQDMGIDFDRLAALWTPLHDELHQVCLNDIPGLENPTSERLSSWIWSRLKPELPALSWVTVYETATAGCHFDGAHYRIWKEQRFEAALRLERSPEGDARRRLHGHSYLLRLHLTAPLDQVLGWTVDYGDVKRLFKPLYDRLDHHRLDALDGLEAADPGSLIRWIRERIQDDLPELDRIDLQPTPGCGASLCWGELGPALPT

SEQ ID NO: 17324 - protein, 174 aa, Allochromatium vinosum
  misc_feature (1)..(174): tr|D3RTI4|D3RTI4_ALLVD Uncharacterized protein OS=Alloc hromatium vinosum (strain ATCC 17899 / DSM 180 / NBRC 1 03801 / NCIMB 10441 / D) OX=572477 GN=Alvin_1560 PE=4 S V=1
MPMETFVAEAILTRIEISKDYLNFSAGHFTLFSATERENLHGHNFRVRCAVTAQVGEGGLTFDYVILKRALKELCDALDERMLLPLESPYLRIERRDGLVLAHFADERIPFLDRDVLLLPIRNVTIEELAPLLLGRLRAHPEIAAMAAAIRAIELGVSSGQGQWAIAQSESVSA

SEQ ID NO: 17325 - protein, 175 aa, Allochromatium warmingii
  misc_feature (1)..(175): tr|A0A1H3DUT7|A0A1H3DUT7_ALLWA 6-pyruvoyltetrahydropter in/6-carboxytetrahydropterin synthase OS=Allochromatium warmingii OX=61595 GN=SAMN05421644_11019 PE=4 SV=1
METLVADAILTRIEISKDYLNFSSGHFTLFSATERENLHGHNFRVRCAVTAQVGDGGLTFDYVILKRALKVLCDALDERVLLPLESPYLRIERQDGLVLAHFADERIPFLERDVLLLPIRNVTIEELAPLLLERLRTQVEIAAMTAAIRAIELGVSSGQGQWAIAQWDNRAQAIA

SEQ ID NO: 17326 - protein, 364 aa, Allochromatium warmingii
  misc_feature (1)..(364): tr|A0A1H3DBN5|A0A1H3DBN5_ALLWA 6-pyruvoyltetrahydropter in/6-carboxytetrahydropterin synthase OS=Allochromatium warmingii OX=61595 GN=SAMN05421644_10848 PE=4 SV=1
MNTHLFYLAAVPFEAARQVASLPDGHRGRRRHGHGFVARVRAALPADWASFAGAETDALREALAACIAPLDYQDLNTLLPIPTDENLARWVRERLAVPGIASIGIQSTRDQGADLDGQEQIHLWRRFRFESAHRLPNVPAGHPCGRMHGHGFEVIVHANQDVAGQDMGLDCDRLAALWAPLHEALHQICLNDIAGLENPTSELLARWIWTRLKPELAALSWVTVYETATAGCHFDGQHYRIWKEQHFEAALRLAHAPEGDTRRRLHGHSYLLRLHLTAPLDQVLGWTVDYGDVKRLFQPLYKRLDHHPLDALDGLTSADPASLTRWIRERIGAELPELDRIDLHPTPGCGAALCWGELGPALPT

SEQ ID NO: 17327 - protein, 169 aa, Allofrancisella guangzhouensis
  misc_feature (1)..(169): tr|A0A0A8E987|A0A0A8E987_9GAMM Uncharacterized protein OS=Allofrancisella guangzhouensis OX=594679 GN=SD28_032 50 PE=4 SV=1
MNLNSLSTVIELFREDMKFSAAHFTIFSETQRECLHGHNFQVYAIITAPVIGNNLSFDYTICRKEILNLCYSLNERCLMPSKSPYLKIEKQHRCYMIKFDKTKFVLPEEDVLLLPIKNITTEGLAQWFVKTIASNKDFYGLEDAEILTIKIATAPGQYASATVLLKEFN

SEQ ID NO: 17328 - protein, 81 aa, Allonocardiopsis opalescens
  misc_feature (1)..(81): tr|A0A2T0Q2X1|A0A2T0Q2X1_9ACTN 6-pyruvoyl tetrahydropte rin synthase/QueD family protein OS=Allonocardiopsis op alescens OX=1144618 GN=CLV72_105371 PE=4 SV=1
MIGDVDPATGWLMDFAEIKAAFKPLLDQLDHYYLNDVPGLENPTSEVLAKWIWDRLIDQLPLSAVVVRETCTSGCIYRGEK

SEQ ID NO: 17329 - protein, 178 aa, Allonocardiopsis opalescens
  misc_feature (1)..(178): tr|A0A2T0Q295|A0A2T0Q295_9ACTN 6-pyruvoyltetrahydropter in/6-carboxytetrahydropterin synthase OS=Allonocardiops is opalescens OX=1144618 GN=CLV72_105180 PE=4 SV=1
MDTLSTGGAGAVRRPAAAVRTAFAVTVRHNFETAHRLPHLAGKCVNLHGHSWWAEVTVTAPGLLDGTVVRFSAFKAELREWIDRHLDHGAMLGAADPLAKLLPDCGSRVFRFGAADPLPHERPAADLPYPTVEAVAELLARVSTGLVARLDRAPGARVTRVHITETHVNAAEWREAGA

SEQ ID NO: 17330 - protein, 114 aa, Alloprevotella rava
  misc_feature (1)..(114): tr|G5GDG4|G5GDG4_9BACT 6-carboxy-5,6,7,8-tetrahydropter in synthase OS=Alloprevotella rava F0323 OX=679199 GN=H MPREF9332_01615 PE=3 SV=1
MYYIKKRIEVAFAHHLTLNYASKCTNLHGHNAIITIYCKTKELNENGMVVDFKHVKDIVSGQLDHRCANDVVDFNPTAENLARWICEQIPHCYKVSFQESEGNIATYEKDDIQD

SEQ ID NO: 17331 - protein, 112 aa, Alloprevotella sp.
  misc_feature (1)..(112): tr|A0A328Q4H3|A0A328Q4H3_9BACT 6-carboxy-5,6,7,8-tetrah ydropterin synthase OS=Alloprevotella sp. E39 OX=213394 4 GN=C7Y71_02935 PE=3 SV=1
MFYLEKSIEISYAHRLSLQYESKCTNMHGHNAIVTVYCKAEKLDENGMVVDFMHVKQVVKRLDHVCFNDIFSFNPTAENVARWICEQIPNCYKVAFKESEGNIAIYSLEENI

SEQ ID NO: 17332 - protein, 117 aa, Alloprevotella sp.
  misc_feature (1)..(117): tr|A0A496KJ45|A0A496KJ45_9BACT 6-carboxy-5,6,7,8-tetrah ydropterin synthase OS=Alloprevotella sp. OX=1872471 GN =D8H91_08700 PE=3 SV=1
MYYISKRIEIAYSHQLKLDYESKCTRPHGHNGIVTVYCCAEELNEYGMVVDFTHVKQRVQDKLDHRNVNEILEFNTTAENMARWICDQIPNAYKVSFQESEGNVAVYVKPGFEDAAL

SEQ ID NO: 17333 - protein, 115 aa, Alloprevotella tannerae
  misc_feature (1)..(115): tr|C9LE54|C9LE54_9BACT 6-carboxy-5,6,7,8-tetrahydropter in synthase OS=Alloprevotella tannerae ATCC 51259 OX=62 6522 GN=queD PE=3 SV=1
MFYVSKRIEIAYAHQLKLDYESKCTHLHGHNAVVTVYCKAKELDHNGMVVDFKKVKDIVQGKLDHRFANDVVNFNTTAENLAKWICDQVPHCYKVSFQESEGNIAVYIKEDDDAL

SEQ ID NO: 17334 - protein, 138 aa, Unknown
  misc_feature (1)..(138): tr|A0A0N1BTK3|A0A0N1BTK3_9PROT 6-pyruvoyl tetrahydropte rin synthase OS=alpha proteobacterium AAP38 OX=1523418 GN=IP70_12510 PE=4 SV=1
MYSVSVRDHIMIAHSFVGAIFGPAQALHGATFVVDAEFRRRQLSPEGLVVDIGAASALLKQVLAPLNYKNLDEMPEYRGRNTTTEYLAGDIHRKIAAGIRAGALGADGPALDGLRVTLSESHTAWGSYEAPLNADAAR

SEQ ID NO: 17335 - protein, 170 aa, Unknown
  misc_feature (1)..(170): tr|A0A1V1PPV4|A0A1V1PPV4_9PROT 6-carboxytetrahydropteri n synthase OS=alpha proteobacterium U9-1i OX=1605283 GN =U91I_02221 PE=4 SV=1
MEFTRRYAMAHRLLATDSPRCAVPHGHNEFVTVKLAPLERFRFSATNSTAPFERVKKRWHQWIDEAVDHSLHLGEGDPLIAFFREREPQRLNQIMTFQGDPTTEALAACFWLKLSAFIADDRLPFRLEELRIEETPTNTVVVSEATFDAATCGLRAGAWPWRADMSINDF

SEQ ID NO: 17336 - protein, 118 aa, Alphaproteobacteria bacterium
  misc_feature (1)..(118): tr|A0A257HQJ8|A0A257HQJ8_9PROT 6-carboxy-5,6,7,8-tetrah ydropterin synthase OS=Alphaproteobacteria bacterium PA 1 OX=2015569 GN=queD PE=3 SV=1
MTKSVTFDAAHHLHQGDESHPYRRLHGHSFRLDVSVEDEADGKDHWVRDFAELAKAISEVRNVLDHSFLNEIEGLETPTLENICAWVAERLKPSLPNLRRVSVARPSLGEMCTLEIGL

SEQ ID NO: 17337 - protein, 118 aa, Alphaproteobacteria bacterium
  misc_feature (1)..(118): tr|A0A2S6RGE1|A0A2S6RGE1_9PROT 6-carboxy-5,6,7,8-tetrah ydropterin synthase OS=Alphaproteobacteria bacterium Ma rineAlpha9_Bin4 OX=2013099 GN=queD PE=3 SV=1
MNKLICKSFTFEAAHNLTTTTNDKNKNIHGHSFHVKIYIKGEVKKNGMIVDFFILDKTVKKLKDKLDHSYLNDIKEIKTPTLENIGSWIWKQIKPTLKNLYKVDVARKTCGESFSIFK

SEQ ID NO: 17338 - protein, 135 aa, Alsobacter sp.
  misc_feature (1)..(135): tr|A0A2T1HLZ3|A0A2T1HLZ3_9RHIZ Uncharacterized protein OS=Alsobacter sp. SH9 OX=2109933 GN=SLNSH_22890 PE=4 SV =1
MYAVEVRDHIMIAHSFKGELFGPAQRLHGATFVVDVAFFREALTPDNVVIDIGRAHEALKATLGPLNYRNLDEVPEFAGQQTTTEFLSRHIFDAMAQACRRGELGPGSEGVARIRVTLHESHVARAWFEGPVGGV

SEQ ID NO: 17339 - protein, 122 aa, Altererythrobacter sp.
  misc_feature (1)..(122): tr|A0A0T2QH58|A0A0T2QH58_9SPHN 6-carboxy-5,6,7,8-tetrah ydropterin synthase OS=Altererythrobacter sp. Root672 O X=1736584 GN=ASD76_08830 PE=3 SV=1
MWELSKTFWFESAHTLHRQVETEGSLRIHGHSYRAVVTVRGRPEPATGMLIDLSVFQAALSEACTGLDHRLLDEVVDLGPPTLENLCAWIWRTVQPALPDLHRVEVYRDSQGDRCSYEGNAE

SEQ ID NO: 17340 - protein, 149 aa, Alteribacillus bidgolensis
  misc_feature (1)..(149): tr|A0A1G8MK28|A0A1G8MK28_9BACI 6-carboxy-5,6,7,8-tetrah ydropterin synthase OS=Alteribacillus bidgolensis OX=93 0129 GN=SAMN05216352_11075 PE=3 SV=1
MLHQFYPQVQHEYRYELNKDMHLAAAHFIPASAAGKCTNIHGHTYVINLTIAGDELNDTGFLIDFKLLKDIVHKRFDHSLLNDYHEFGESQTNSADTFPTTEVVARTIWQLVQRELDQCDNKPCCLQVLVRETPTSYVVYRPKKGDFSS

SEQ ID NO: 17341 - protein, 148 aa, Alteribacillus iranensis
  misc_feature (1)..(148): tr|A0A1I2CVN6|A0A1I2CVN6_9BACI 6-carboxy-5,6,7,8-tetrah ydropterin synthase OS=Alteribacillus iranensis OX=9301 28 GN=SAMN05192532_103207 PE=3 SV=1
MLHQFYPQVPHPYRFELNKDMHIAAAHFIPARSAGKCANIHGHTYVINLTIAGDDLDNTGFLVNFKTLKDVVHKRFDHTLLNEDDQFGSEEEDSADTFPTTEVVARTIWQMVQSELDKKQNKPRCVQVLVRETPTSYVVYRPKEGDFR

SEQ ID NO: 17342 - protein, 150 aa, Alteribacillus persepolensis
  misc_feature (1)..(150): tr|A0A1G8GJ51|A0A1G8GJ51_9BACI PreQ(0) biosynthesis pro tein QueD OS=Alteribacillus persepolensis OX=568899 GN= SAMN05192534_1163 PE=4 SV=1
MLHQFYPQVLHDYRYELNKDMHLAAAHFIPASAAGKCTNIHGHTYVINITIAGDKLDRTGFLIDFKLLKDIVHKRFDHSLLNDHREFGDTDTSDPESFPTTEVVAKTIWEMIQRELDKLHNKPRCLQVLVRETPTSYVVYRPKEEDFSDE

SEQ ID NO: 17343 - protein, 280 aa, Alteromonadaceae bacterium
  misc_feature (1)..(280): tr|A0A495D6S7|A0A495D6S7_9ALTE 6-pyruvoyl tetrahydropte rin synthase-like protein OS=Alteromonadaceae bacterium 2052S.S.stab0a.01 OX=1304900 GN=K256_0778 PE=4 SV=1
MRLFVDNLTNVDFSYLDARRGMLGETWLASVELEGELDAQGMVCDFGIVKRKLRDWLDATIDHCLLVPAGSPALHHQLSENQCNLQWRLADGLCITCSSPAEAITLVDATSITPESVASWCITQLKPLFPDSIDRLTLRFTPESISGPYYHYSHGLKKHAGNCQRIAHGHRSKIEIWRNGELSIADMERWGREWQDIYIGSEDDLSRGNTDESTLHFAYQAQQGHFSLTMPKDHCYLINTDSTVEFIAAHIAGRLKSETPADTIRVKAYEGLAKGAICEL

SEQ ID NO: 17344 - protein, 281 aa, Alteromonadaceae bacterium
  misc_feature (1)..(281): tr|A0A2A5HG14|A0A2A5HG14_9ALTE Uncharacterized protein OS=Alteromonadaceae bacterium OX=1916082 GN=COA42_20865 PE=4 SV=1
MLLFIDNLCNIDFSYFHPTRGLVGETWLASIELEGELNEQGMICDFGIVKQVVRQWLDEEVDHRLLVATQSTCAKKVATSQDIVEIHWQTKSGESYLCNSPQSAIVSLDAESTDARSLSAWCKQRLKDKLPSDIGNLNLRFTPEQIVDPFYHYSHGLKKHSGNCQRIAHGHRSKIEIWKNDVLDTGLIAAWAERWQDIYIGSKEDLTKEQASGANYTFAYRSSQGEFYLSIPKGKCALIDTDSTVEFLAQHIAQQLKLEHPNDHFKVKAYEGIGKGAVAKI

SEQ ID NO: 17345 - protein, 285 aa, Alteromonadales bacterium
  misc_feature (1)..(285): tr|A0Y1S3|A0Y1S3_9GAMM Uncharacterized protein OS=Alter omonadales bacterium TW-7 OX=156578 GN=ATW7_12763 PE=4 SV=1
MILFVNSLTVIDFSYLCNKRGAVGESWIVDLTLHGKLNDESMVLDFGLVKKQIKGIIDECIDHRLAIPNSINGSVTEFDEHKTLDCTFGDNHHLAMSAPHQAYCMIDADEINVESVTAFLVDTILPKLPSNIEKIELSLKPEHSQSFYYHYSHGLKKHDGNCQRIIHGHRSQIGISLDGISMPRLQKEWAMQWEDIYLATSEDQIEPHNLKHISARDNDVCFAYTSAQGYFEMAISETRCDILPIDTTVECIAGYIAGQVKAKHPEQNVKITAYEGVGKGAISYA

SEQ ID NO: 17346 - protein, 296 aa, Alteromonadales bacterium
  misc_feature (1)..(296): tr|A0A2N0WRB9|A0A2N0WRB9_9GAMM Uncharacterized protein OS=Alteromonadales bacterium alter-6D02 OX=2058087 GN=C W748_08520 PE=4 SV=1
MKLFVNNLTVIDYSYLCHERGMVGESLIVDIELDGSLNDECMVLDFGLVKKQIKAVIDDEVDHKLLVPATNQCVSYNVLESTTQILLDRPEELPIYLNCPHQAFALIDNDIVDEQSIIKHLEQVIKNVLPENVTGLVLKLAPEPVFGPYYHYSHGLKKHDGNCQRIAHGHRSIIEIERNGEKAEDLEQYWASRWNDIYLITEQDMVSAEEITLPEPLEVLRQVPNMHHVAYDAPQGRFELIIPMQHCEVVDFDTTVELLTVYVAKTLATENPGDTISVIGYEGVDKGAMASHQVSA

SEQ ID NO: 17347 - protein, 291 aa, Alteromonas aestuariivivens
  misc_feature (1)..(291): tr|A0A3D8M8H1|A0A3D8M8H1_9ALTE Uncharacterized protein OS=Alteromonas aestuariivivens OX=1938339 GN=DXV75_0802 5 PE=4 SV=1
MQLFVNDLTVMDFSYLCAERGMVGESWIVDVLLDGALNDESMIQDFGKVKKDLKRLIDEYVDHKLLVPADYAQTRVIHDENSAQVEVQFRCHDGRQFMLSSPADAYAFVYAPEVTMTSVSDYLKEVLATHLPDNVDDIELILRTEVIDTPFYHYTHGLKKHDGNCQRIAHGHRSKIDIFIDGVSCLESQNYWAQRWKDIYIATREDQVDLADTCIQGEISAPENYHCFAYEASQGRFEIILPKSDCEIIDTDSTVECLAQYIFQHQKQRRPEGKCKVLAYEGVGKGAMISE

SEQ ID NO: 17348 - protein, 195 aa, Alteromonas australica
  misc_feature (1)..(195): tr|A0A075P2D1|A0A075P2D1_9ALTE DUF2726 domain-containin g protein OS=Alteromonas australica OX=589873 GN=DEB45_ 02875 PE=4 SV=1
MELAIILMMLLIVVALGAIKLSDGGVAFPFRRKPQLFTPVEHSFLNLIEQAMGREFRIVCRVKLSDIVSVRQSTNKKTASQALSRASSRQLDFVLVDKHDMSPILAIDLVHNQGKEGYKTQRDWFVSGALDAAGVPHARIKVKSGYSVDDIRECLENKLIPYRRVQQKLSQVPTHNPEPTKRPTRPIRSSRAAAA

SEQ ID NO: 17349 - protein, 291 aa, Alteromonas australica
  misc_feature (1)..(291): tr|A0A075P1U7|A0A075P1U7_9ALTE 6-pyruvoyl tetrahydropte rin synthase OS=Alteromonas australica OX=589873 GN=EP1 3_09755 PE=4 SV=1
MQLFVNDLTVMDFSYLCPKRGMVGESWIVDVVLDGELNEESMVQDFGKVKKNLKRLIDEYVDHKLLVPAEYAGSKVIHDEVTEQVEVQFTCEDGRQIMLHCPAEAYAILYSDVVTMASVSVYLKEVLATHLPENVDNITLKLRTEVIHSPFYHYTHGLKKHDGNCQRIAHGHRSRIDILLDGQVSEAEQSYWAKRWEDIYIATQEDEIAYTERKITGSVAEPSAYLCFAYESSQGYFELIIPKSDCEVIDTDSTVECLAQYLLEEQKKRTPDSHCQVIAYEGVGKGAMVSE

SEQ ID NO: 17350 - protein, 290 aa, Alteromonas confluentis
  misc_feature (1)..(290): tr|A0A1E7ZE23|A0A1E7ZE23_9ALTE Uncharacterized protein OS=Alteromonas confluentis OX=1656094 GN=BFC18_05980 PE =4 SV=1
MQLFVNDLTVMDFSYLCPKRGMVGESWIVDVVLSGDLNDESMIQDFGKVKKNLKRLIDDYVDHKLLVPADYNDVAIIRNDDEQVDARFTCEDGRVLQLYCPAEAYAFIYGESVTMESVGLYLREVLATHLPENVDNLELILRTEVITTPFYHYTHGLKKHDGNCQRIAHGHRSKIDVFVDGQNSLESQEYWASRWEDIYIASEEDRLAFDKRQASGDVPGDQSYSCFAYESSQGYFEILLPDADCEVVTTDSTVECLAQFIYDQEKQRKQGAAVKILAYEGVGKGALVCD

SEQ ID NO: 17351 - protein, 291 aa, Alteromonas lipolytica
  misc_feature (1)..(291): tr|A0A1E8FGS0|A0A1E8FGS0_9ALTE Uncharacterized protein OS=Alteromonas lipolytica OX=1856405 GN=BFC17_16310 PE= 4 SV=1
MQLFVNDLTVMDFSYLCPQRGMVGESWIVDVLLDGTLNEESMIQDFGVVKKNLKRLIDGYIDHKLLVPAECESAFIRHDENTEQVEVRFDLGADKAIQMYCPAEAYAFIYAPTITMESVSEYLREVIATHLPDNVDNLTIKLRTEVITTPFYHYTHGLKKHDGNCQRIAHGHRSRVDIITDGKTDLDSEAYWANRWEDIYIASREDQIEPDALQCQHKLVSYADHVCFAYEAAQGYFEIVLPASICEIIDTDSTVECLAQHIYNEQKRRIPAQSCCVMAYEGVGKGAMVGD

SEQ ID NO: 17352 - protein, 291 aa, Alteromonas macleodii
  misc_feature (1)..(291): tr|K0EGE6|K0EGE6_ALTMB Uncharacterized protein OS=Alter omonas macleodii (strain Balearic Sea AD45) OX=1004787 GN=AMBAS45_09840 PE=4 SV=1
MQLFVNDLTVMDFSYLCPKRGMVGESWIVDVILDGELNEESMVQDFGHVKKNLKRLIDEYVDHKLLVPAEYSGSEVIHDDDSEQVEARFTCIDGRSIMLHCPAEAYAFVYSDEINMESVGVYLKEVLATHLPENVENITLHLREEVINSPYYHYTHGLKKHDGNCQRIAHGHRSRIDIILDGKVCVESQQYWADRWADIYIATREDEIAYSDKKLKGQVSNEADYYCFAYESSQGYFELLIPKSDCEVIETDSTVECLAQYLLEEQKKRTPDGVCQVIAYEGVGKGATVKG

SEQ ID NO: 17353 - protein, 195 aa, Alteromonas macleodii
  misc_feature (1)..(195): tr|A0A126Q2L5|A0A126Q2L5_ALTMA DUF2726 domain-containin g protein OS=Alteromonas macleodii OX=28108 GN=AVL55_15 800 PE=4 SV=1
MELAIILMMLLIVVALGAIKLSDGGVAFPFRRKPQLFTPVEHSFLNLIEQAMGREFRIVCRVRLNDLVAVRQSANKKTASQAISRASSRQLDFVLVDKHDMSPVLAIDLVHSQGKDGYKSQKDWFVTGALDAAGLPHARIKVKSGYTVDDIRECLENKLIPYRRLQQKMAQLPTHNPEPPKRPTRPVRSSRPAAA

SEQ ID NO: 17354 - protein, 195 aa, Alteromonas marina
  misc_feature (1)..(195): tr|A0A0B3Z7Q9|A0A0B3Z7Q9_9ALTE QueD like protein OS=Alt eromonas marina OX=203795 GN=RJ41_07595 PE=4 SV=1
MELAIILMMLLIVVALGAIKLSDGGVAFPFRRKPQLFTPVEHTFLNLIEQAMGREFRIVCRVRLNDLVSVRQSANKKTASQALSRASSRQLDFVLVDKQDMSPVMAIDLVHSQGKEGYKAQKDWFVTGALDAAGLPHARIKVKSGYTVDDIRECLENKLIPYRRLQNKMAQLPTHNPEPPKRPTRPVRSSRPAAA

SEQ ID NO: 17355 - protein, 291 aa, Alteromonas marina
  misc_feature (1)..(291): tr|A0A0B3Y656|A0A0B3Y656_9ALTE 6-pyruvoyl tetrahydropte rin synthase OS=Alteromonas marina OX=203795 GN=RJ41_10 565 PE=4 SV=1
MQLFVNDLTVMDFSYLCPKRGMVGESWIVDVILDGELNEESMVQDFGHVKKNLKRLIDEYVDHKLLVPAEYSGSEVIHDDDSEQVEARFTCIDGRSIMLHCPAEAYAFVYSDEINMESVGVYLKEVLATHLPENVENITLHLREEVINSPYYHYTHGLKKHDGNCQRIAHGHRSRIDIILDGKVCVESQQYWADRWADIYIATREDEIAYSDRKLKGQVPNEADYYCFAYESSQGYFELLIPKSDCEVIETDSTVECLAQYLLEEQKKRTPNGVCQVIAYEGVGKGATVKG

SEQ ID NO: 17356 - protein, 291 aa, Alteromonas mediterranea
  misc_feature (1)..(291): tr|S5AE33|S5AE33_9ALTE Uncharacterized protein OS=Alter omonas mediterranea 615 OX=1300253 GN=I633_10530 PE=4 S V=1
MQLFVNDLTVMDFSYLCPQRGMVGESWIVDVVLDGELNEESMVQDFGHVKKNLKRLIDEYVDHKLLVPAEYSGSEVLHDDETEQVETRFTCTDGRSIMLHCPAEAYAFVYSDEINMDSVGVYLKEVLATHLPENVENITLNLREEVITSPFYHYTHGLKKHDGNCQRIAHGHRSRIDIILDGKVSVESQQYWADRWEDIYIATQEDEIAYSDRKLKGTVDNAEDYYCFAYESSQGYFELLIPKSDCEVIDTDSTVECLAQYLLEEQKKRTPEGICQVIAYEGVGKGATVKG

SEQ ID NO: 17357 - protein, 291 aa, Alteromonas mediterranea; identical to SEQ ID NO: 17356
  misc_feature (1)..(291): tr|F2GC59|F2GC59_ALTMD Isocitrate dehydrogenase (NADP(+ )) OS=Alteromonas mediterranea (strain DSM 17117 / CIP 110805 / LMG 28347 / Deep ecotype) OX=1774373 GN=MADE_1 009685 PE=4 SV=1

SEQ ID NO: 17358 - protein, 291 aa, Alteromonas naphthalenivorans
  misc_feature (1)..(291): tr|F5Z7P2|F5Z7P2_ALTNA Uncharacterized protein OS=Alter omonas naphthalenivorans OX=715451 GN=ambt_07785 PE=4 S V=1
MQLFVNDLTVMDFSYLCPKRGMVGESWIVDVILTGELNEESMVQDFGIVKKDLKRLIDEYVDHKLLVPAEYAGATVIHDDVNEQVEVRFTCEDSREIMLRCPAEAYAFLYSDVVTMESVSVYLKEVLATHLPENVDNITLKLRTEVIESPFYHYTHGLKKHDGNCQRIAHGHRSRIDIYLDGKISEQEQAYWANRWDDIYIATTEDEIAYEDRKITGSVATPSDYFSFAYESSQGYFELLIPKADCEVITTDSTVECLAQYLLVEQKKRTPNNHCQVVAYEGVGKGAMVSD

SEQ ID NO: 17359 - protein, 291 aa, Alteromonas pelagimontana
  misc_feature (1)..(291): tr|A0A2A6AYK1|A0A2A6AYK1_9ALTE Uncharacterized protein OS=Alteromonas pelagimontana OX=1858656 GN=CA267_05815 PE=4 SV=1
MQLFVNDLTVMDFSYLCPKRGMVGESWIVDVILDGDLNDESMIQDFGKVKKNLKRLIDDYVDHKLAVPAEYVNADVIHNEENDQVEVRFTCDDERQIQLYCPADAYAFIYSDSVTMDSVGRYLREVIATHLPENVDNIELKLRTEVIDTPFYHYTHGLKKHDGNCQRIAHGHRSKIDIIIDKQPCLESQKYWAERWQDIYIGTTEDAISFSDRQGAGKVPKEDEYYCFAYEASQGYFEIVIPKSDCEVIDTDSTVECLAKYIFTQQKMRSSKGSLQVVAYEGVGKGAIVTE

SEQ ID NO: 17360 - protein, 291 aa, Alteromonas sp.
  misc_feature (1)..(291): tr|A0A349Z7X8|A0A349Z7X8_ALTSX Uncharacterized protein OS=Alteromonas sp. OX=232 GN=DCW59_14945 PE=4 SV=1
MQLFVNDLTVMDFSYLCPERGMVGESWIVDVLLDGTLNEESMIQDFGVVKKNLKRLIDGYIDHKLLVPAESEQAHIRRDEDSEQVEVRFDLTNDQAIQMYCPAEAYAFIYAPTITMDSVSEYLREVIATHLPDNVDNLTIKLRTEVINTPFYHYTHGLKKHDGNCQRIAHGHRSRVDIITNGNEDLESEAYWAKRWEDIYIASREDQISADALQCQHRLANYDDHVCFAYEAAQGYFEIVLPESICEIIDTDSTVECLAQYIYTQQKQRLPDDSCCVMAYEGVGKGAMVGD

SEQ ID NO: 17361 - protein, 291 aa, Alteromonas sp.
  misc_feature (1)..(291): tr|A0A3S5AW37|A0A3S5AW37_9ALTE 6-pyruvoyl tetrahydropte rin synthase-like protein OS=Alteromonas sp. 76-1 OX=23 58187 GN=ALT761_02111 PE=4 SV=1
MQLFVNDLTVMDFSYLCPKRGMVGESWIVDVILTGELNEESMVQDFGIVKKDLKRLIDEYVDHKLLVPAEYAGATVIHDDVNEQVEVRFTCEDGREIMLRCPAEAYAFLYSDVVTMESVSVYLKEVLATHLPENVDNITLKLRTEVIESPFYHYTHGLKKHDGNCQRIAHGHRSRIDIYLDGKISEQEQAYWANRWDDIYIATTEDEIAYEDRKITGSVATPSDYFSFAYESSQGYFELLIPKADCEVITTDSTVECLAQYLLVEQKKRTPNNHCQVVAYEGVGKGAMVSD

SEQ ID NO: 17362 - protein, 281 aa, Alteromonas stellipolaris
  misc_feature (1)..(281): tr|A0A0S1YJ57|A0A0S1YJ57_9ALTE NADPH-dependent 7-cyano- 7-deazaguanine reductase OS=Alteromonas stellipolaris L MG 21856 OX=1160720 GN=AOR13_1448 PE=4 SV=1
MDFSYLCPKRGMVGESWIVDVILTGELNEESMVQDFGIVKKDLKRLIDEYVDHKLLVPAEYAGATVIHDDVNEQVEVRFTCEDAREIMLRCPAEAYAFLYSDVVTMESVSVYLKEVLATHLPENVDNITLKLRTEVIDSPFYHYTHGLKKHDGNCQRIAHGHRSRIDIYLDGKISEQEQAYWANRWDDIYIATTEDEIAYEDRKITGSVATPSDYFLFAYESSQGYFELLIPKADCEVITTDSTVECLAQYLLVEQKKRTPNNHCQVVAYEGVGKGAMVSD

SEQ ID NO: 17363 - protein, 195 aa, Alteromonas stellipolaris
  misc_feature (1)..(195): tr|A0A0S1YFX3|A0A0S1YFX3_9ALTE Putative queD like OS=Al teromonas stellipolaris LMG 21856 OX=1160720 GN=AOR13_3 10 PE=4 SV=1
MELAIILMMLLIVVALGAIKLSDGGVAFPFRRKPQLFTPVEHSFLNLIEQAMGREFRIICRVRLSDIVSVRQSANKKTASQAISRASSRQLDFILVDKQDMSPILAIDLVHNQGKEGYKTQRDWFVSGALDAAGVPHARIKVKSGYTVDDIRECLENKLIPYRRIQQKMSQLPTHNPEPTKRPTRPVRSSRAAAA

SEQ ID NO: 17364 - protein, 150 aa, Altibacter sp.
  misc_feature (1)..(150): tr|A0A2D9N8M1|A0A2D9N8M1_9FLAO 6-carboxytetrahydropteri n synthase QueD OS=Altibacter sp. OX=2024823 GN=CL605_1 2590 PE=4 SV=1
MNKIRITKQFSFETGHALYGYDGKCRNVHGHSYRLSVTVIGTPISNTENVKYGMVIDFSDLKKIVKEEIVDVFDHATVFNKNTPHVELANELKDRGHNVLLVNYQPTSEMMVMDFAEKIKTRLPETIKLHSLKLQETATSYAEWFASDNA

SEQ ID NO: 17365 - protein, 141 aa, Alysiella crassa
  misc_feature (1)..(141): tr|A0A376BSQ5|A0A376BSQ5_9NEIS 6-carboxy-5,6,7,8-tetrah ydropterin synthase OS=Alysiella crassa OX=153491 GN=qu eD PE=3 SV=1
MFKTAKQFTFDMAHMLDGHDGKCQNLHGHTYILQVEVSGCLHEEGAKKGMVMDFADLKDIVKQHILDKMDHAFIYDTTSARESQVADLLNQLNSKTYGIATRTTAEEMTRHIFNTLKIEANLPVSLVRLWETPSSYCEYAE

SEQ ID NO: 17366 - protein, 141 aa, Alysiella filiformis
  misc_feature (1)..(141): tr|A0A286ED78|A0A286ED78_9NEIS 6-carboxy-5,6,7,8-tetrah ydropterin synthase OS=Alysiella filiformis DSM 16848 O X=1120981 GN=SAMN02746062_01430 PE=3 SV=1
MFKTAKQFTFDMAHMLDGHDGKCQNLHGHTYVLQVEVSGSLHETGAKKGMVMDFADLKDIVKTHILDKMDHAFIYDNTNERETQVADLLNKLDSKTYGIASRTTAEEMARHIFTVLKTQADLPVSLIRLWETPSSYCEYAE

SEQ ID NO: 17367 - protein, 198 aa, Amantichitinum ursilacus
  misc_feature (1)..(198): tr|A0A0N0GQ36|A0A0N0GQ36_9NEIS 6-pyruvoyl tetrahydropte rin synthase OS=Amantichitinum ursilacus OX=857265 GN=W G78_05470 PE=4 SV=1
MLIRKLFKFENAHIVRNCSSDRCRHSIHGHSYKVEVLLEAHTLDHGQMVYDFGLMKGTIKDVIDAFDHAICFWDKDDPEYIRLCKQFSARWIALPVSPSAEQFARLFFIVIDAILQNTVMKNGEGDVRLHSVIAHETDTGYAQAFREDADNARMGIIRPADIVFSEQVLAEWQDPQMMQKLIAGQTFVNPDVPLQVKV

SEQ ID NO: 17368 - protein, 131 aa, Amaricoccus sp.
  misc_feature (1)..(131): tr|A0A501WTY8|A0A501WTY8_9RHOB 6-carboxytetrahydropteri n synthase OS=Amaricoccus sp. HB172011 OX=2589815 GN=FJ M51_04060 PE=4 SV=1
MFAVEVRDHIMVAHSLPSPTFGPAQGVHGATFVVDAAFLAEELDAEGLVVDIGLATEALAAALAPLRYANLDEKPEFAGKFTTTEFLCKHVFDALAGAARAGRLADGGRLARIRVTLHESHLARGWYEGAL

SEQ ID NO: 17369 - protein, 187 aa, Aminipila sp.
  misc_feature (1)..(187): tr|A0A410PW00|A0A410PW00_9FIRM Rubredoxin OS=Aminipila sp. JN-39 OX=2507160 GN=EQM06_07510 PE=4 SV=1
MRSFTTLDLQYAHRFYGFKGEAQYLHGHTGILTLEVEDTVNMGVNMVFPCNEIKKTAWEVLQNFDHALILREDDPLLPAILDVYEAQGIKNGAPTNKQKGPAFKTELATAYPECRLVVTKETMTVEGMIKIVYDLLKDKLNIVKITFTSGVNGATEEYEPQKSVERCPLCGIALDKNGVCPKCGYKK

SEQ ID NO: 17370 - protein, 123 aa, Aminivibrio pyruvatiphilus
  misc_feature (1)..(123): tr|A0A4R8MJI0|A0A4R8MJI0_9BACT 6-carboxy-5,6,7,8-tetrah ydropterin synthase OS=Aminivibrio pyruvatiphilus OX=10 05740 GN=C8D99_101349 PE=3 SV=1
MLLRKEFIFDAAHNLVEYHGKCERLHGHTYRLAVVLKGSPDREGMIADFCEVSSLVKERVISRLDHAYLNDILPQPTAEYIARWVWEQVAEPLRRPNCRLWEVEVWETATSCAVLTAEDMDHA

SEQ ID NO: 17371 - protein, 123 aa, Aminobacter aminovorans
  misc_feature (1)..(123): tr|A0A381ILX7|A0A381ILX7_AMIAI 6-carboxy-5,6,7,8-tetrah ydropterin synthase OS=Aminobacter aminovorans OX=83263 GN=queD PE=3 SV=1
MIETYKEFTFEAAHQLQPYSGLHGHSFQVSVHLVGDPDPVFGWPANLYELEQQIEVVRMTLDHKYLNEIEGLSVPSLENVARWIWEKLEPQFPQLDRVAVRRGAQGQAEGTVYNGRVLRRARA

SEQ ID NO: 17372 - protein, 123 aa, Aminobacter aminovorans
  misc_feature (1)..(123): tr|A0A142MDR8|A0A142MDR8_AMIAI 6-carboxy-5,6,7,8-tetrah ydropterin synthase OS=Aminobacter aminovorans OX=83263 GN=AA2016_5583 PE=3 SV=1
MIETYKEFTFEAAHQLQPFSGLHGHSFQVSVHLVGDPDPVFGWPANLYELEQQIEVVRMTLDHKYLNEIEGLSVPSLENVARWIWDKLEPQFPQLDRVAVRRGAQGQAEGTVYNGRALQKARA

SEQ ID NO: 17373 - protein, 119 aa, Aminobacter sp.
  misc_feature (1)..(119): tr|A0A2S0XMY6|A0A2S0XMY6_9RHIZ 6-carboxy-5,6,7,8-tetrah ydropterin synthase OS=Aminobacter sp. MSH1 OX=374606 G N=queD PE=3 SV=1
MVETFKEFTFEAAHQLPPFSGLHGHSFRVSVHLVGAPDPVFGWPANLYEVEKRIEIVRKTLDHTYLNDIEGLSVPSIENIARWIWEQMEDHFPQLDRVAVARGADGQAEGTVYRGRLVN

SEQ ID NO: 17374 - protein, 119 aa, Aminobacter sp.
  misc_feature (1)..(119): tr|A0A0Q6M646|A0A0Q6M646_9RHIZ 6-carboxy-5,6,7,8-tetrah ydropterin synthase OS=Aminobacter sp. Root100 OX=17364 20 GN=ASC75_18580 PE=3 SV=1
MVETFKEFTFEAAHQLPPFSGLHGHSFRVSIHLVGAPDPVFGWPANLYEVEKRIEIVRKTLDHTYLNDIEGLAVPSIENIARWIWEQMENHFPQLDRVAVARGADGQAEGTVYRGRLAN

SEQ ID NO: 17375 - protein, 122 aa, Aminobacterium colombiense
  misc_feature (1)..(122): tr|D5EG49|D5EG49_AMICL 6-carboxy-5,6,7,8-tetrahydropter in synthase OS=Aminobacterium colombiense (strain DSM 1 2261 / ALA-1) OX=572547 GN=Amico_1414 PE=3 SV=1
MLLKKEFVFDAAHNLIHYKGKCEKLHGHTYRMVVIIEGIPDHEGMVIDFCEVSSLVKERVISRLDHAYINDIIPQPSAENIAVWVWKEIEGFLRRPNCHLEAVEIWETATSGVVVRKEDINA

SEQ ID NO: 17376 - protein, 122 aa, Aminobacterium sp.
  misc_feature (1)..(122): tr|A0A3D0MRL8|A0A3D0MRL8_9BACT 6-carboxy-5,6,7,8-tetrah ydropterin synthase OS=Aminobacterium sp. OX=1872491 GN =queD PE=3 SV=1
MFLKKEFTFDAAHNLVHYKGKCEKLHGHTYRLVVTIEGTPDHEGMVIDFCELSSLVKERVLSRLDHSYINDFIPQPTAENIALWVWNQLEEVLRYPHCCLVEIEVWETATSGVILRKEDVYA

SEQ ID NO: 17377 - protein, 121 aa, Aminomonas paucivorans
  misc_feature (1)..(121): tr|E3CW98|E3CW98_9BACT 6-carboxy-5,6,7,8-tetrahydropter in synthase OS=Aminomonas paucivorans DSM 12260 OX=5847 08 GN=Apau_0923 PE=3 SV=1
MRLRRDFTFDAAHNLVAYHGKCERLHGHTYRLGVTLEGTPDEEGMVLDFVELKRIVREQVLDQVDHAYLNDLVPQPTAENLARWAFQRLDAPLHRPHCRLTSVEVFETADSSVTFYREDLS

SEQ ID NO: 17378 - protein, 124 aa, Ammonifex degensii
  misc_feature (1)..(124): tr|C9RBW1|C9RBW1_AMMDK 6-carboxy-5,6,7,8-tetrahydropter in synthase OS=Ammonifex degensii (strain DSM 10501 / K C4) OX=429009 GN=Adeg_0590 PE=3 SV=1
MYRLTVKGSFSAAHRLPNHPSPCSRLHGHNWEVTVTVIGEELGPDGMLLDFTVLKQILQEVLAKLDHQYLNEIPPFGKELPPTAENLARYIYHEVATRLAPYPAVTLQEVKVGESPSAWVVYTP

SEQ ID NO: 17379 - protein, 124 aa, Ammonifex sp.
  misc_feature (1)..(124): tr|A0A3A6MWN3|A0A3A6MWN3_9THEO 6-carboxy-5,6,7,8-tetrah ydropterin synthase OS=Ammonifex sp. OX=1872493 GN=queD PE=3 SV=1
MYELTVETSFSAAHCLEKHPSPCGRLHGHNWTVAVTVTGDELNTMGMVVDFAVLKQALREAVAVFDHRYLNELPPFCDGAQPTAENIARHIWGAVAEKLAAYASVTVKEIKIAESPSAWVVYRP

SEQ ID NO: 17380 - protein, 124 aa, Ammonifex thiophilus
  misc_feature (1)..(124): tr|A0A3D8P4N1|A0A3D8P4N1_9THEO 6-carboxy-5,6,7,8-tetrah ydropterin synthase OS=Ammonifex thiophilus OX=444093 G N=queD PE=3 SV=1
MYRLTVKGSFSAAHRLPDHPSPCSRLHGHNWEVAVTVIGEELGPDGMLLDFAVLKQILREVLAKLDHQYLNELPPFGKEFPPTAENLARYIYHEVAARLASYSAVTLQEVRVGESPSAWVVYTP

SEQ ID NO: 17381 - protein, 155 aa, Ammoniphilus oxalaticus
  misc_feature (1)..(155): tr|A0A419SM96|A0A419SM96_9BACL 6-carboxytetrahydropteri n synthase QueD OS=Ammoniphilus oxalaticus OX=66863 GN= BEP19_04550 PE=4 SV=1
MKPYQIPTTLQTLGEDIQLDQLRYHRKRVGVIREFTFDAAHHLHAYEGKCKSLHGHTYRLVIHLSGRVDEIGIVVDFAEIKRIFKERIDAHLDHRYLNDVLPPMNTTAENMIVWIWEQLQDEITKLNIPELRLEELTLYETPTSRAYLKREWMEE

SEQ ID NO: 17382 - protein, 155 aa, Ammoniphilus sp.
  misc_feature (1)..(155): tr|A0A4Q1SRC5|A0A4Q1SRC5_9BACL 6-carboxytetrahydropteri n synthase QueD OS=Ammoniphilus sp. CFH 90114 OX=249366 5 GN=queD PE=4 SV=1
MSEYKIPTRVQKLGEDITYNQLKYHHRRVGVVKEFTFDAAHHLHAYDGKCVNLHGHTYKVIIHFSGFVNEIGIVVDFGDIKTIFKEKIESKLDHQYLNEVLPAMNTTAENMIVWIWEELEKAIAEMKNDDLRIEELTLYETPTSYAYLKREWMAD

SEQ ID NO: 17383 - protein, 153 aa, Amphibacillus marinus
  misc_feature (1)..(153): tr|A0A1H8H9M3|A0A1H8H9M3_9BACI 6-pyruvoyltetrahydropter in/6-carboxytetrahydropterin synthase OS=Amphibacillus marinus OX=872970 GN=SAMN04488134_101275 PE=4 SV=1
MERFKIVKDLQKIDIDIERDELKFHQKRVLVSKSFTFDAAHHLHCYEGKCKTLHGHTYEVIFGVSGYPNEIGLVIDFGDIKKIWKDQIEIHLDHQYLNQSLPKMNTTAENMVVWIFEQMDQFLNELNQNELRVEFVKLYETPTSYAEARREWM

SEQ ID NO: 17384 - protein, 118 aa, Amphiplicatus metriothermophilus
  misc_feature (1)..(118): tr|A0A239PP92|A0A239PP92_9PROT 6-carboxy-5,6,7,8-tetrah ydropterin synthase OS=Amphiplicatus metriothermophilus OX=1519374 GN=SAMN06297382_1153 PE=3 SV=1
MRIVKSITFDAAHYLADCPDARPYARMHGHSFTLEVAIDGEPDPETGWVVDLGDVAEALAELRDSLDHRLLNEVEGLGRPTLENICRYAAERLRARFPGLARVRVARPSCGEACEYEL

SEQ ID NO: 17385 - protein, 278 aa, Amphritea atlantica
  misc_feature (1)..(278): tr|A0A1H9LFP8|A0A1H9LFP8_9GAMM 6-pyruvoyl tetrahydropte rin synthase OS=Amphritea atlantica OX=355243 GN=SAMN03 080615_03914 PE=4 SV=1
MKLFVDNLTNVDFSYLHPQRGLLGESWLVQLVLDGNLNEQGMICDFAIVKKAVKQWFDNCIDHGLVVPTAMANLSAIQTGGETTVTWQYPDGGEFFCRSPKQAIVLVDLEQVTETSLAKWCKDQLLALFSDEVQGLEISFVPESISGAFYHYSHGLQQHDGNCQRIAHGHRSRIEIYLDGQRDTGVEQHWAEIFHDIYIGTRSHLLAEPSTEHHYQYDAPQGQFEIRLPAEHCYLIDTETTVEQIACHLAGQVKAEYPDRDVMVRAFEGVGKGAIATA

SEQ ID NO: 17386 - protein, 278 aa, Amphritea balenae
  misc_feature (1)..(278): tr|A0A3P1SKX2|A0A3P1SKX2_9GAMM Uncharacterized protein OS=Amphritea balenae OX=452629 GN=EHS89_19590 PE=4 SV=1
MKLFVDNLTNVDFSYLHPQRGLLGESWLVQLVLDGSLNDQGMICDFGIVKKAVKQWFDNCIDHALVVPAGMDNLQVKQADGETSVNWQYPAGGKFYCRSPEQAIVLVDLEQITETSLAQWCRDQLLAIFPDEVKGLEISFVPEAISGAFYQYSHGLQQHDGNCQRIAHGHRSRIEIFLDGQRDTGVEQQWAETYHDIYIGTRDHLVSEPGAEHHYRYEAPQGEFEIRLPAQYCYLIDTETTVEQIACHLAQQVKAEHSDRDVMVRAFEGVGKGAIATA

SEQ ID NO: 17387 - protein, 278 aa, Amphritea sp.
  misc_feature (1)..(278): tr|A0A430KME7|A0A430KME7_9GAMM Uncharacterized protein OS=Amphritea sp. MCCC 1K03512 OX=2490544 GN=EH243_16270 PE=4 SV=1
MKLFVDNLTNVDFSYLHPQRGLLGESWLVQLVLDGDLNAEGMICDFGIVKKAVKHWFDNSIDHALVVPTEMANLHSEQLNGETTVIWRYPAGGEFYCRSPEQAIVLVDIDQIDEISLAAWCNAQLLALFPEEVKGLEISFVPEAINGASYHYSHGLQQHDGNCQRIAHGHRSRIEVFLDGQRDAAVEQQWATTFNDIYIGTRGHLVSATDEEHHYCYDAPQGEFEIRLPASHCYLIDTETTVEQIACHLAAQVKLSHPDKEVMVKAFEGVGKGAIATA

SEQ ID NO: 17388 - protein, 132 aa, Amycolatopsis acidiphila
  misc_feature (1)..(132): tr|A0A558ACM0|A0A558ACM0_9PSEU 6-carboxytetrahydropteri n synthase OS=Amycolatopsis acidiphila OX=715473 GN=FNH 06_14745 PE=4 SV=1
MFSITVRDHIMVAHSFRGEVFGPAQRLHGATFVVDATFRRAELDADNIVVDIGLATTELGAVLAALNYRNLDDEPAFEGVNTSTEFLAKHIADTLAERVHAGALGEGARGLAGIAVTLHESHVASAGYEREL

SEQ ID NO: 17389 - protein, 187 aa, Amycolatopsis alba
  misc_feature (1)..(187): tr|A0A229RC32|A0A229RC32_9PSEU 6-pyruvoyl tetrahydrobio pterin synthase OS=Amycolatopsis alba DSM 44262 OX=1125 972 GN=CFP75_35660 PE=4 SV=1
MHDTETHEQVSPGQEKPAVAVVAPTAHQISIEHTFETAHRLPQLPGKCTSLHGHSWRVTVSVSAPALSSDGTVVEFGALKAGVRQWIDTHLDHGTMLGIRDPLALHLYTAGSKVFRFGADGRESASDEERLASDLPWPTVEAVAVLLRRVSQAALVALPSAPDASIGRVLVRETHLNTATYGPSDAL

SEQ ID NO: 17390 - protein, 132 aa, Amycolatopsis alba
  misc_feature (1)..(132): tr|A0A229RRF8|A0A229RRF8_9PSEU 6-carboxytetrahydropteri n synthase OS=Amycolatopsis alba DSM 44262 OX=1125972 G N=CFP75_19210 PE=4 SV=1
MFSITVRDHVMVAHSFRGEVFGPAQNLHGATFVVDATFRRSGLDADNIVVDIGKATEELKAVLADLNYRNLDDVPEFAGINTSTEFLAKVIADRLADRVHTGALGEGARGLEGIVVSLHESHVAWASYERAL

SEQ ID NO: 17391 - protein, 161 aa, Amycolatopsis albispora
  misc_feature (1)..(161): tr|A0A344LB61|A0A344LB61_9PSEU 6-pyruvoyl tetrahydrobio pterin synthase OS=Amycolatopsis albispora OX=1804986 G N=A4R43_24600 PE=4 SV=1
MSHKITIEHSFESGHRLPHLGGKCVNLHGHSWSVAVTVSAAELSPEVTVVEFGALKVGVRRWIDEHLDHATMLGVRDRLIAPLVADGNRVFRFGAERPADDAEKFGYGLPWPTVEAVAVLLGRVAESALAELARADGARVERVLVRETRLNTAVYEPPVTR

SEQ ID NO: 17392 - protein, 132 aa, Amycolatopsis albispora
  misc_feature (1)..(132): tr|A0A344L9B1|A0A344L9B1_9PSEU 6-pyruvoyl tetrahydropte rin synthase OS=Amycolatopsis albispora OX=1804986 GN=A 4R43_20765 PE=4 SV=1
MFSVNVRGHIMVAHSFRGEVFGPAQQLHGATFVVDATFRRSELDSDNIVVDIGLATEQLSAVLGELNYRNLDDVPEFAGTNTSTEFLAKVIADRLADKVHAGELGEGARGLAGITVTLHESHVAWASYERSL

SEQ ID NO: 17393 - protein, 229 aa, Amycolatopsis antarctica
  misc_feature (1)..(229): tr|A0A263D024|A0A263D024_9PSEU Uncharacterized protein OS=Amycolatopsis antarctica OX=1854586 GN=CFN78_23830 P E=4 SV=1
MKATKEKCVADGQVTVAQSFGFSASHELRQLPAGHKCRRNHGHNYTVTASALVHDEARGDLSPLGDYLAATFDHRLLNEQVTFHPTSELLVVHLAEWFRDNMESAMPITLVEMVVSETATTSARYDGVTGEITISKTFTTSHGGVTLVLGADGLDEVGFITDFGDLKPFGAYLQAPDADAGLRAAGPALVADLAGWFVDNIEPKIRGRLVSVRVGSGATTGLWERGDAS

SEQ ID NO: 17394 - protein, 132 aa, Amycolatopsis australiensis
  misc_feature (1)..(132): tr|A0A1K1QU36|A0A1K1QU36_9PSEU 6-pyruvoyl-tetrahydropte rin synthase OS=Amycolatopsis australiensis OX=546364 G N=SAMN04489730_2225 PE=4 SV=1
MFSITVRDHVMVAHSFRGEVFGPAQRLHGATFVVDATFRRAELDEDNIVVDIGKATEELKAVLGELNYRNLDDEPAFKGINTSTEFLAKVVADRLVDAVHAGRLGEGARGLDSIAVSLHESHVAWASYERAL

SEQ ID NO: 17395 - protein, 132 aa, Amycolatopsis azurea
  misc_feature (1)..(132): tr|M2QBG0|M2QBG0_9PSEU PTPS-like type 4 OS=Amycolatopsi s azurea DSM 43854 OX=1238180 GN=C791_6437 PE=4 SV=1
MFSITVRDHVMVAHSFRGEVFGPAQNLHGATFVVDATFRRSELDSDNIVVDIGKATEELKAVLADLNYRNLDDVPEFAGINTSTEFLAKVIADRLAGRVHAGALGEGARGLEGITVSLHESHVAWASYERAL

SEQ ID NO: 17396 - protein, 132 aa, Amycolatopsis balhimycina
  misc_feature (1)..(132): tr|A0A428WHD9|A0A428WHD9_AMYBA 6-carboxytetrahydropteri n synthase OS=Amycolatopsis balhimycina DSM 5908 OX=108 1091 GN=DMA12_21430 PE=4 SV=1
MFSITVRDHVMVAHSFRGEVFGPAQRLHGATFVVDATFRRAELDEDNIVVDIGKATEELRAVLSDLNYRNLDDEPEFKGINTSTEFLAKVIADRLADAVHAGRLGDGARGLDGITVSLHESHVAWASYERAL

SEQ ID NO: 17397 - protein, 132 aa, Amycolatopsis bartoniae
  misc_feature (1)..(132): tr|A0A557YU00|A0A557YU00_9PSEU 6-carboxytetrahydropteri n synthase OS=Amycolatopsis bartoniae OX=941986 GN=FNH0 7_25840 PE=4 SV=1
MFAITVRDHVMVAHSFRGEVFGPAQQLHGATFVVDATFRREELDADNIVVDIGLATTELKAVLADLNYRNLDDVPEFAGVNTSTEFLAKVIADRLAGRVHAGALGEGARGLSGIAVTLHESHVAWASYERTL

SEQ ID NO: 17398 - protein, 132 aa, Amycolatopsis cihanbeyliensis
  misc_feature (1)..(132): tr|A0A542CS96|A0A542CS96_9PSEU 6-pyruvoyl-tetrahydropte rin synthase OS=Amycolatopsis cihanbeyliensis OX=112866 4 GN=FB471_5832 PE=4 SV=1
MFQLTVRDHVMVAHSFRGEVFGPAQRLHGATFVVEATFRRAELDADNIVVDIGLATRELGQVLGELNYRNLDEEPAFAGVNTSTEFLAKVVADELAERVHAGALGAGARGLAGIAVTLRESPVAWASYERAL

SEQ ID NO: 17399 - protein, 148 aa, Amycolatopsis cihanbeyliensis
  misc_feature (1)..(148): tr|A0A542DPU0|A0A542DPU0_9PSEU 6-carboxy-5,6,7,8-tetrah ydropterin synthase OS=Amycolatopsis cihanbeyliensis OX =1128664 GN=FB471_4910 PE=3 SV=1
MTHSATVPSPVTAAWQPPPGSYRITRTFDFAAAHHLDGMPDGHRCARNHGHTWTIEVTLSSTRLVGPGWVADFADLNPLGAFIEDTLDHRDLNEVLPAPPTSELLAAFLADWCIRHLETRLGARLESIVVSEGGANRVEFRPDRRRAQ

SEQ ID NO: 17400 - protein, 132 aa, Amycolatopsis coloradensis
  misc_feature (1)..(132): tr|A0A1R0KVG4|A0A1R0KVG4_9PSEU Uncharacterized protein OS=Amycolatopsis coloradensis OX=76021 GN=BS329_14855 P E=4 SV=1
MFSITVRDHVMVAHSFHGEVFGPAQNLHGATFVVDATFRRSGLDSDNIVVDIGKATEELKAVLADLNYRNLDDVPEFAGINTSTEFLAKVIADRLAERVHAGALGEGARGLEGITVALHESPVAWASYERAL

SEQ ID NO: 17401 - protein, 169 aa, Amycolatopsis coloradensis
  misc_feature (1)..(169): tr|A0A1R0L1X8|A0A1R0L1X8_9PSEU 6-pyruvoyl tetrahydrobio pterin synthase OS=Amycolatopsis coloradensis OX=76021 GN=BS329_03965 PE=4 SV=1
MADSAPASHQICIEHTFETAHRLPHLEGKCASLHGHSWRVTVSVFAPALSGDGTVVEFGVLKTGVRQWIDTHLDHGTMLGVRDPLAVHLYTAGSKVFRFGAHSCETVDDAELLAADLPWPTVEAVAVLLRRVSQSVLIALPCAPEARVGRVFVRETHLNTATYGPADAP

SEQ ID NO: 17402 - protein, 120 aa, Amycolatopsis decaplanina
  misc_feature (1)..(120): tr|M2X1V5|M2X1V5_9PSEU Uncharacterized protein OS=Amyco latopsis decaplanina DSM 44594 OX=1284240 GN=H074_25897 PE=4 SV=1
MEVTAACQELASTATVVEFGEFKKQLREWIDLRLDHGTMLGYQDPLRDALTADGSKLFVFGEAEAGPAVADLEWPTVENVAVLLGRIAEKVIEGTESAQGARITRVVVKETHVNAAEWCP

SEQ ID NO: 17403 - protein, 132 aa, Amycolatopsis decaplanina
  misc_feature (1)..(132): tr|M2WWK4|M2WWK4_9PSEU 6-pyruvoyl tetrahydropterin synt hase OS=Amycolatopsis decaplanina DSM 44594 OX=1284240 GN=H074_32422 PE=4 SV=1
MFSITVRDHVMVAHSFRGEVFGPAQRLHGATFLVDATFRRSELDADNIVVDIGKATEELKAVLAGLNYRNLDDVPEFAGINTSTEFLAKVIADRLADRVHTGALGEGARGLEGITVSLHESHVAWASYERAL

SEQ ID NO: 17404 - protein, 136 aa, Amycolatopsis eurytherma
  misc_feature (1)..(136): tr|A0A3N2H8W5|A0A3N2H8W5_9PSEU 6-pyruvoyl-tetrahydropte rin synthase OS=Amycolatopsis eurytherma OX=196083 GN=E DD35_7231 PE=4 SV=1
MFSVTVRDHVMVAHSFRGEVFGPAQRLHGATFVVDATFRRAELDADNIVVDIGLATQQLGAVLADLNYRNLDEVPEFAGTNTSTEFLAKVIADRLADRVHSGALGAGAHGLSGISVTLRESHVAWASYDRDLHPAG

SEQ ID NO: 17405 - protein, 187 aa, Amycolatopsis japonica
  misc_feature (1)..(187): tr|A0A075UKA6|A0A075UKA6_9PSEU 6-pyruvoyl-tetrahydropte rin synthase OS=Amycolatopsis japonica OX=208439 GN=AJA P_01865 PE=4 SV=1
MSDTEANGHIVAGQEKATMAAAAPTTHLISIEHTFETAHRLPHLNGKCTSLHGHSWRVTVSVCAPVLSSDGTVVEFGALKAGVRQWIDTHLDHGTMLGIRDPLGMHLDTAGSKVFRFGANDREAVGSEELLAADLPWPTVEAVAVLLRRASQTVLVGLPCAPEASVGRVFVRETHLNAASYGPADVL

SEQ ID NO: 17406 - protein, 132 aa, Amycolatopsis japonica
  misc_feature (1)..(132): tr|A0A075V2I9|A0A075V2I9_9PSEU 6-pyruvoyl-tetrahydropte rin synthase OS=Amycolatopsis japonica OX=208439 GN=ptp S PE=4 SV=1
MFSITVRDHVMVAHSFRGEVFGPAQRLHGATFLVDATFRRSELDADNIVVDIGKATEELKAVLADLNYRNLDDVPEFAGINTSTEFLAKVIADRLAGRVHAGALGEGARGLEGLTVSLHESHVAWASYERAL

SEQ ID NO: 17407 - protein, 132 aa, Amycolatopsis keratiniphila
  misc_feature (1)..(132): tr|A0A1W2LNC9|A0A1W2LNC9_9PSEU Uncharacterized protein OS=Amycolatopsis keratiniphila subsp. keratiniphila OX= 227715 GN=AVR91_0228830 PE=4 SV=1
MFSITVRDHVMVAHSFRGEVFGPAQRLHGATFLVDATFRRSELDADNIVVDIGKATEELKAVLADLNYRNLDDVPEFAGINTSTEFLAKVIADRLADRVHSGALGEGARGLEGLTVSLHESHVAWASYERAL

SEQ ID NO: 17408 - protein, 187 aa, Amycolatopsis keratiniphila
  misc_feature (1)..(187): tr|A0A1H2JCP7|A0A1H2JCP7_9PSEU 6-pyruvoyltetrahydropter in/6-carboxytetrahydropterin synthase OS=Amycolatopsis keratiniphila OX=129921 GN=SAMN04489733_5715 PE=4 SV=1
MSDTETNGHIVAGQEKVTMAAAVPTTHLISIEHTFETAHRLPHLNGKCTSLHGHSWRVTVSVCAPVLSSDGTVVEFGALKAGVRQWIDTHLDHGTMLGIRDPLSMHLDTAGSKVFRFGANDREAVGSEELLAADLPWPTVEAVAVLLRRASQTVLVGLPCAPEASVGRVFVRETHLNAASYGPADVL

SEQ ID NO: 17409 - protein, 132 aa, Amycolatopsis lurida
  misc_feature (1)..(132): tr|A0A2P2FLK0|A0A2P2FLK0_9PSEU 6-pyruvoyl tetrahydropte rin synthase OS=Amycolatopsis lurida NRRL 2430 OX=14603 71 GN=BB31_29660 PE=4 SV=1
MFSITVRDHVMVAHSFRGEVFGPAQRLHGATFLVDATFRRSELDADNIVVDIGKATEELKAVLADLNYRNLDDVPEFAGINTSTEFLAKVIADRLADRVHTGALGEGARGLESLTVSLHESHIAWASYERAL

SEQ ID NO: 17410 - protein, 119 aa, Amycolatopsis marina
  misc_feature (1)..(119): tr|A0A1I1BW66|A0A1I1BW66_9PSEU 6-carboxy-5,6,7,8-tetrah ydropterin synthase OS=Amycolatopsis marina OX=490629 G N=SAMN05216266_116105 PE=3 SV=1
MEIFREFTFEAAHRLPHVPEGHKCARLHGHSYRVTVHVAGEVGTESGWVMDFADVKAAIVPLMEQLDHHYLNEVPGLDNPTSEVLARWIWQRLIDALPLSQVIVRETCTSGCVYRGEED

SEQ ID NO: 17411 - protein, 161 aa, Amycolatopsis marina
  misc_feature (1)..(161): tr|A0A1I1BHL9|A0A1I1BHL9_9PSEU 6-pyruvoyltetrahydropter in/6-carboxytetrahydropterin synthase OS=Amycolatopsis marina OX=490629 GN=SAMN05216266_1143 PE=4 SV=1
MPHKITVEHSFESGHRLPHLGGKCVSLHGHSWSVAVTVSAPELSPEVTVVEFGALKVGLRRWIDEHLDHATMLGARDRLIEPLIAEGSRVFCFGVERPADVAEQFGHGLAWPTVEAVAVLLGRVAESVLAGLPRADGARVERVLVHETRLNTAAYEPSVPR

SEQ ID NO: 17412 - protein, 132 aa, Amycolatopsis mediterranei
  misc_feature (1)..(132): tr|G0FZ77|G0FZ77_AMYMS 6-pyruvoyl tetrahydropterin synt hase OS=Amycolatopsis mediterranei (strain S699) OX=713 604 GN=RAM_42885 PE=4 SV=1
MFSITVRDHVMVAHSFRGEVFGPAQRLHGATFVVDATFRRAELDEDNIVVDIGKATEELGAVLSDLNYRNLDDEPEFKGINTSTEFLAKVIADRLADAVHAGRLGEGARGLDGIVVSLHESHIAWASYERAL

SEQ ID NO: 17413 - protein, 132 aa, Amycolatopsis mediterranei; identical to SEQ ID NO: 17412
  misc_feature (1)..(132): tr|A0A0H3DIM2|A0A0H3DIM2_AMYMU 6-pyruvoyl tetrahydropte rin synthase OS=Amycolatopsis mediterranei (strain U-32 ) OX=749927 GN=ptpS PE=4 SV=1

SEQ ID NO: 17414 - protein, 136 aa, Amycolatopsis methanolica
  misc_feature (1)..(136): tr|A0A076N0N8|A0A076N0N8_AMYME Queuosine biosynthesis p rotein QueD OS=Amycolatopsis methanolica 239 OX=1068978 GN=ptpS PE=4 SV=1
MFSVTVRDHVMVAHSFRGEVFGPAQRLHGATFVVDATFRRAELDADNIVVDIGLATQQLGAVLADLNYRNLDEVPEFAGVNTSTEFLAKVIADRLADRVHSGALGAGAHGLAGISVTLRESHVAWASYDRDLHPAG

SEQ ID NO: 17415 - protein, 171 aa, Amycolatopsis methanolica
  misc_feature (1)..(171): tr|A0A076N3H1|A0A076N3H1_AMYME Quercetinase QueD OS=Amy colatopsis methanolica 239 OX=1068978 GN=AMETH_4435 PE= 4 SV=1
MTAEFATPYRRASRIPAEPGKPYFIEKGEGDRVHLHPDTYEVFYVTAGAVRLFVEDTEGGQQEKLLTPGDFGFVPKNCPHAYRMERHHSMIAGVAAGPGGTFERFFENLGVPAEEMGLLKVPAVPEPHKFAVVPQRYDAVPAGAPLAHHALRRMYRGPTRHRARVVVRSTR

SEQ ID NO: 17416 - protein, 132 aa, Amycolatopsis niigatensis
  misc_feature (1)..(132): tr|A0A2N3WJ50|A0A2N3WJ50_9PSEU 6-pyruvoyl-tetrahydropte rin synthase OS=Amycolatopsis niigatensis OX=369932 GN= ATK30_4744 PE=4 SV=1
MFSVTVRDHIMVAHSFRGEVFGPAQRLHGATFVVDATFRRSELDSDNIVVDIGLATQQLGAVLADLNYRNLDDEPDFAGINTSTEYLAKVIADRLADRIHAGELGENARGLAQISVTLHESHAASAGYERSL

SEQ ID NO: 17417 - protein, 169 aa, Amycolatopsis orientalis
  misc_feature (1)..(169): tr|A0A193CCZ4|A0A193CCZ4_AMYOR 6-pyruvoyl tetrahydrobio pterin synthase OS=Amycolatopsis orientalis OX=31958 GN =SD37_40010 PE=4 SV=1
MADSAPTSHQICIEHTFETAHRLPHLKGKCTSLHGHSWRVAVSVSAPALSTDGTIVEFGFLKAGVRQWIDTHLDHGTMLGVRDPLAVHLYTASSKVFRFGANTCETVDDAELLATDLPWPTVEAVAVLLRRVSQSVLIALPCAPEARVGRVFVRETHLNTATYGPADTP

SEQ ID NO: 17418 - protein, 132 aa, Amycolatopsis orientalis
  misc_feature (1)..(132): tr|A0A193C6Z8|A0A193C6Z8_AMYOR 6-pyruvoyl tetrahydropte rin synthase OS=Amycolatopsis orientalis OX=31958 GN=SD 37_34610 PE=4 SV=1
MFSITVRDHVMVAHSFRGEVFGPAQKLHGATFVVDATFRRSELDADNIVVDIGKATEELKAVLADLNYRNLDDVPEFAGINTSTEFLAKVIADRLADRVHAGALGEGARGLEGITVSLHESHVAWASYERAL

SEQ ID NO: 17419 - protein, 132 aa, Amycolatopsis pretoriensis
  misc_feature (1)..(132): tr|A0A1H5REN7|A0A1H5REN7_9PSEU 6-pyruvoyl-tetrahydropte rin synthase OS=Amycolatopsis pretoriensis OX=218821 GN =SAMN05421837_111257 PE=4 SV=1
MFSITVRDHVMVAHSFRGEVFGPAQRLHGATFVVDATFRRAELDEDNIVVDIGKATEELGAVLSDLNYRNLDDEPVFKGINTSTEFLAKVIADRLADAVHVGRLGEGARGLEGIAVSLKESHVAWASYERAL

SEQ ID NO: 17420 - protein, 132 aa, Amycolatopsis regifaucium
  misc_feature (1)..(132): tr|A0A154MSW5|A0A154MSW5_9PSEU 6-pyruvoyl tetrahydropte rin synthase OS=Amycolatopsis regifaucium OX=546365 GN= ATP06_0207435 PE=4 SV=1
MFSITVRDHVMVAHSFRGEVFGPAQKLHGATFVVDATFRRSELDADNIVVDIGKATEELKAVLADLNYRNLDDVPEFAGINTSTEFLAKVIADRLADRVHAGALGEGARGLGGITVALHESHVAWASYERAL

SEQ ID NO: 17421 - protein, 132 aa, Amycolatopsis rifamycinica
  misc_feature (1)..(132): tr|A0A066TRS0|A0A066TRS0_9PSEU 6-pyruvoyl tetrahydropte rin synthase OS=Amycolatopsis rifamycinica OX=287986 GN =DV20_42230 PE=4 SV=1
MFSITVRDHVMVAHSFRGEVFGPAQRLHGATFVVDATFRRAELDEDNIVVDIGKATEELGAVLSDLNYRNLDDEPEFKGINTSTEFLAKVIADRLADAVHAGRLGEGARGLEGIAVSLHESHIAWASYERAL

SEQ ID NO: 17422 - protein, 132 aa, Amycolatopsis rubida
  misc_feature (1)..(132): tr|A0A1I5W7L7|A0A1I5W7L7_9PSEU 6-pyruvoyl-tetrahydropte rin synthase OS=Amycolatopsis rubida OX=112413 GN=SAMN0 5421854_109100 PE=4 SV=1
MFSVTVRDHIMVAHSFRGEVFGPAQRLHGATFVVDATFRRSELDSDNIVVDIGLATQRLGAVLADLNYRNLDDEPDFAGINTSTEYLAKVIADRLADRIHAGELGENARGLAQISVTLHESHAASAGYERSL

SEQ ID NO: 17423 - protein, 264 aa, Amycolatopsis rubida
  misc_feature (1)..(264): tr|A0A1I5WK81|A0A1I5WK81_9PSEU 6-pyruvoyltetrahydropter in/6-carboxytetrahydropterin synthase OS=Amycolatopsis rubida OX=112413 GN=SAMN05421854_109274 PE=4 SV=1
MKPHPVSSTRVAVSDLARGRYSIGDGTFSFAAAHHLTDLPDAENKAGRSHGHTFTVEVELTDTELRAPGFVADYAELATLGEYLKRELDHRDLNAIFTFDTTTDALAQHITAWFLAHMPSERGKQLHAIHVNIGTTTRSPQHTAVDSFAFEAAHHLEGLPDGHKCGRPHGHSYRVDLRLDQQTSPRRRARIRALLAEYLDRQLDHRDLNAVLQFQPTSELVAEHLYAWTLSQAKGQEAAAVQALRVWESPRRWAEFTQDERSGR

SEQ ID NO: 17424 - protein, 132 aa, Amycolatopsis saalfeldensis
  misc_feature (1)..(132): tr|A0A1H8WPY6|A0A1H8WPY6_9PSEU 6-pyruvoyl-tetrahydropte rin synthase OS=Amycolatopsis saalfeldensis OX=394193 G N=SAMN04489732_105386 PE=4 SV=1
MFSVTVRDHIMVAHSFRGEVFGPAQRLHGATFVVDATFRRAELDADNIVVDIGLATERLGAVLADLNYRNLDEVPEFKGVNTSTEFLAKVIADRLAGQVHAGDLGEGAHGLASISVTLHESHVASAGYERDL

SEQ ID NO: 17425 - protein, 229 aa, Amycolatopsis saalfeldensis
  misc_feature (1)..(229): tr|A0A1H8YN09|A0A1H8YN09_9PSEU 6-pyruvoyl-tetrahydropte rin synthase OS=Amycolatopsis saalfeldensis OX=394193 G N=SAMN04489732_126105 PE=4 SV=1
MKTTDEKLLADGQITISQSFGFSASHELKLLPTSHKCHRNHGHNYRVTASALVHEGGSGDLSSLGTYLAATFDHRLLNEQVAFHPTSELLASHLAEWFRNNIESAVPITLVAMVVSETSSTSARCDGATSAVTISKTFNTAHGDVTLILGADGLDEVGFVTDFGDLKPFAAYLDAPVADAALRASGPASVAHLASWFVDNIEPEIRGRLVSVGVDSITTTGLWERGDAS

SEQ ID NO: 17426 - protein, 132 aa, Amycolatopsis sacchari
  misc_feature (1)..(132): tr|A0A1I3KBR8|A0A1I3KBR8_9PSEU 6-pyruvoyl-tetrahydropte rin synthase OS=Amycolatopsis sacchari OX=115433 GN=SAM N05421835_101483 PE=4 SV=1
MFAITVRDHVMVAHSFRGEVFGPAQRLHGATFVVDATFRRAELDQDNIVVDIGLATTELKAVLADLNYRNLDDEPDFRGINTSTEFLAKVIADRLAERVHAGALGEGARGLSGIAVTLHESHVAWASYERTL

SEQ ID NO: 17427 - protein, 132 aa, Amycolatopsis sp.; identical to SEQ ID NO: 17422
  misc_feature (1)..(132): tr|A0A178XD25|A0A178XD25_9PSEU 6-pyruvoyl tetrahydropte rin synthase OS=Amycolatopsis sp. M39 OX=1825094 GN=A4R 44_00106 PE=4 SV=1

SEQ ID NO: 17428 - protein, 132 aa, Amycolatopsis sp.
  misc_feature (1)..(132): tr|A0A429F381|A0A429F381_9PSEU Uncharacterized protein OS=Amycolatopsis sp. WAC 04182 OX=2203198 GN=DMH01_2974 5 PE=4 SV=1
MFSITVRDHVMVAHSFRGEVFGPAQRLHGATFLVDATFRRSELDADNIVVDIGKATEELKAVLADLNYRNLDDVPEFAGINTSTEFLAKVIADRLADRVHTGALGEGARGLEGLTVSLHESHVAWASYERAL

SEQ ID NO: 17429 - protein, 187 aa, Amycolatopsis sulphurea
  misc_feature (1)..(187): tr|A0A2A9FI03|A0A2A9FI03_9PSEU 6-pyruvoyltetrahydropter in/6-carboxytetrahydropterin synthase OS=Amycolatopsis sulphurea OX=76022 GN=ATK36_5411 PE=4 SV=1
MRGTATTDHTIARLANLLPGDLARTAHQVTIEHTFETAHRLPHLGGKCTSLHGHSWQVVVPVIAPTLSDDVTVVEFGVLKAGIREWIDTYLDHGTMLGVRDPLAVSLYAERCKVFRFGADDDQAVDGTELLAADLGWPTVEAVAVLLRRVSQAVLAALPCAPDVRVGGVFVRETHLNTATFGPVATP

SEQ ID NO: 17430 - protein, 136 aa, Amycolatopsis thailandensis
  misc_feature (1)..(136): tr|A0A229RUF0|A0A229RUF0_9PSEU 6-carboxy-5,6,7,8-tetrah ydropterin synthase OS=Amycolatopsis thailandensis OX=5 89330 GN=CFP71_28020 PE=3 SV=1
MDTATAQLPDGKFEIGKTFTFEAGHRLTGLPPEHKCSRQHGHSYTVEIILTATTLQAPGFVTDFADLDPVKQFLDRTLDHHNLPDVLPIEPTSELLAQYLAGWFLQHVEPTIHGELIAVRVRETGRSWAQFTVDRP

SEQ ID NO: 17431 - protein, 132 aa, Amycolatopsis thailandensis
  misc_feature (1)..(132): tr|A0A229S086|A0A229S086_9PSEU Uncharacterized protein OS=Amycolatopsis thailandensis OX=589330 GN=CFP71_23755 PE=4 SV=1
MFSITVRDHVMVAHSFRGEVFGPAQNLHGATFVVDATFRRSELDADNIVVDIGKATEELKAVLADLNYRNLDDVPEFAGINTSTEFLAKVIADRLAGRVHAGALGEGARGLEGITVSLHESHVAWASYERAL

SEQ ID NO: 17432 - protein, 132 aa, Amycolatopsis tolypomycina
  misc_feature (1)..(132): tr|A0A1H5CNN1|A0A1H5CNN1_9PSEU 6-pyruvoyl-tetrahydropte rin synthase OS=Amycolatopsis tolypomycina OX=208445 GN =SAMN04489727_8877 PE=4 SV=1
MFSITVRDHVMVAHSFRGEVFGPAQRLHGATFVVDATFRRTELDEDNIVVDIGKATEELKAVLSDLNYRNLDDEPEFKGVNTSTEFLAKVIADRLADAVHAGRLGEGARGLEGITVSLHESHVAWASYERAL

SEQ ID NO: 17433 - protein, 132 aa, Amycolatopsis vancoresmycina
  misc_feature (1)..(132): tr|R1HX27|R1HX27_9PSEU 6-pyruvoyl tetrahydropterin synt hase OS=Amycolatopsis vancoresmycina DSM 44592 OX=12920 37 GN=H480_29576 PE=4 SV=1
MFSITVRDHVMVAHSFRGEVFGPAQRLHGATFVVDATFRRAELDEDNIVVDIGKATEELKAVLSDLNYRNLDDEPEFKGVNTSTEFLAKVVADRLADAVHAGRLGEGARGLEGIAVSLKESHVAWASYERAL

SEQ ID NO: 17434 - protein, 132 aa, Amycolatopsis xylanica
  misc_feature (1)..(132): tr|A0A1H2S6M7|A0A1H2S6M7_9PSEU 6-pyruvoyl-tetrahydropte rin synthase OS=Amycolatopsis xylanica OX=589385 GN=SAM N05421504_101126 PE=4 SV=1
MFSVTVRDHVMIAHSFRGEVFGPAQRLHGATFVVDARFKRPELDADNIVVDIGLATVELGKVLAEFNYRNLDEVPAFAGINTSTEYLAKYIADRLADLVHDGTLGEGARGLSAIEVTLHESHVAWAGYERAL

SEQ ID NO: 17435 - protein, 158 aa, Amycolatopsis xylanica
  misc_feature (1)..(158): tr|A0A1H3PBX8|A0A1H3PBX8_9PSEU 6-pyruvoyltetrahydropter in/6-carboxytetrahydropterin synthase OS=Amycolatopsis xylanica OX=589385 GN=SAMN05421504_108137 PE=4 SV=1
MGTHTVLVRHNFETAHRLPHLAGKCLNLHGHSWWMEATVSAPSLTAGTVVEFGDLKRRVRDWIDTHLDHGAMLGAADPLACLLLEHKSKVFRFGAGDPDPAERFAEDLAYPTVEAVAELLARVVGDALGSLDHAPGAFVSRVSVSETHVNAAEFKESR

SEQ ID NO: 17436 - protein, 129 aa, Anabaena cylindrica
  misc_feature (1)..(129): tr|K9ZJA2|K9ZJA2_ANACC 6-carboxy-5,6,7,8-tetrahydropter in synthase OS=Anabaena cylindrica (strain ATCC 27899 / PCC 7122) OX=272123 GN=Anacy_3000 PE=3 SV=1
MPKWKLLTEFTFDSAHYIKDYKGPCGRMHGHTYKVKIEAKSSQLHSSEYCPHPVMVADFRSLRWAKKDVTQGGLDHCVLNEVLPPEYETTAEMIAKYIYDETKKRLPADVKLKVAVSETPNSWAEYEDD

SEQ ID NO: 17437 - protein, 290 aa, Anabaena cylindrica
  misc_feature (1)..(290): tr|K9ZKK7|K9ZKK7_ANACC Uncharacterized protein OS=Anaba ena cylindrica (strain ATCC 27899 / PCC 7122) OX=272123 GN=Anacy_3465 PE=4 SV=1
MQCIVNRRAQFSASHRYWLPELSENENVEKFGLCAKFPGHGHNYVLFVSLAGELDEYGMVLNLSDVKHVIKREVTGQLDFSYLNDVWTEFQQTLPTTENIARVIWERLAPHLPLVRVQLFEHPELWAEYMGNGMEAYLSISTHFSAAHRLAHPDLSLEENTEIYGKCARVNGHGHNYHLEVTVKGEIDPRTGMTVDLGALNQVIEDYVVEPFDHTFLNKDIAFFAKVVPTAENIALYISNVLRSPIQELGAKLYKVKLIESPNNSCEIYAADSETTSVIAAVSQPVLARV

SEQ ID NO: 17438 - protein, 141 aa, Anabaena sp.
  misc_feature (1)..(141): tr|A0A1B7VPV8|A0A1B7VPV8_9NOST 6-carboxy-5,6,7,8-tetrah ydropterin synthase OS=Anabaena sp. WA113 OX=1710889 GN =AN488_08020 PE=3 SV=1
MTSKSESESFLETWIIGKEFRFEAAHQLPNHDGKCSRLHGHSWRGIVYVAGDKLINSGVKQGMIMDYGDISKYIKPLLENYLDHYHLNESTGLTNPTSEAIAKWIYEQLEPQIPGLVAVRIDETCTSQCIYSKGKVNFLGF

SEQ ID NO: 17439 - protein, 290 aa, Anabaena sp.
  misc_feature (1)..(290): tr|A0A1W5CCX4|A0A1W5CCX4_9NOST 6-pyruvoyl tetrahydropte rin synthase OS=Anabaena sp. 39858 OX=1710890 GN=AN489_ 23790 PE=4 SV=1
MQCIVNRRAQFSASHRYWLPELSEAENIEKFGACSRFPGHGHNYVIFISLAGELDEYGMVLNLSDVKQVIKREVTSQLDFSYLNDVWAEFGQTLPTTENIARVIWQRLAPHLPLVRVQLFEHPELWADYQGNGMEAYLTISTHFSAAHRLAHPNLSQEDNTEIYGKCARPHGHGHNYHLEVTVKGEIDPRTGMIIDLGALNQAIEDYVVEPFDHTFLNKDIPYFAEVVPTAENIALYISNLLRSPVQELGAKLYKVKLIESPNNSCEIYSTDSESNTVNTAKPEPILARI

SEQ ID NO: 17440 - protein, 128 aa, Anabaenopsis circularis
  misc_feature (1)..(128): tr|A0A1Z4GIE9|A0A1Z4GIE9_9CYAN 6-carboxy-5,6,7,8-tetrah ydropterin synthase OS=Anabaenopsis circularis NIES-21 OX=1085406 GN=NIES21_31270 PE=3 SV=1
MPKWKVVTEFSFNSAHYIKDYDGPCGRMHGHNYEVRIEAISTQLHSSQFCPHPVMVADFRTLRWAKQDATKGGLDHCILNEVMPPEYETTAEMIAKYIYDETKKRLPPNVQLKVHVSETPNSWVEYEE

SEQ ID NO: 17441 - protein, 290 aa, Anabaenopsis circularis
  misc_feature (1)..(290): tr|A0A1Z4GP41|A0A1Z4GP41_9CYAN 6-pyruvoyl-tetrahydropte rin synthase homolog OS=Anabaenopsis circularis NIES-21 OX=1085406 GN=NIES21_51410 PE=4 SV=1
MQCIVNRRAQFSASHRYWLPELSEAENFEKFGAGSKFPGHGHNYVLFISLAGELDKYGMVLNLSDVKQVIKREVTSVLDFSYLNDVWAEFQETLPTTENIARVIWRRLAPHLPVVRVQLFEHPELWADYMGNSMEAYLSISTHFSAAHRLAHPDLSLEDNTEIYGKCARTNGHGHNYHLEVTVKGEIDQRTGMIVDLGALHQAIADYVVEPFDHTFLNKDVPYFAEVVPTAENIALYISNLLRSPIQNLGAQLYKIKLIESPNNSCEIYCTDTDSNSMSAVDSQPVLARL

SEQ ID NO: 17442 - protein, 162 aa, Anaerobacillus alkalidiazotrophicus
  misc_feature (1)..(162): tr|A0A1S2MAV3|A0A1S2MAV3_9BACI 6-carboxytetrahydropteri n synthase QueD OS=Anaerobacillus alkalidiazotrophicus OX=472963 GN=BKP45_04190 PE=4 SV=1
MCNSHNLFGFRIVDKLQKFGEDIQKEQLRYHNKRVLVSKEFTFDAAHHLHHYEGKCKNLHGHTYKVVFGISSLTDEIGIAIDFGDIKKIWKEQIEIYLDHRYLNETLPLMNTTAENMVVWIYEKMADYLKDSQFKTLKPRVEFVRLFETPTSYAEARREWME

SEQ ID NO: 17443 - protein, 162 aa, Anaerobacillus alkalilacustris
  misc_feature (1)..(162): tr|A0A1S2LWV8|A0A1S2LWV8_9BACI 6-carboxytetrahydropteri n synthase QueD OS=Anaerobacillus alkalilacustris OX=39 3763 GN=BKP37_00210 PE=4 SV=1
MCNSHNLFGFRIVDKLQKFGEDIQKEQLRYHNKRVLVSKEFTFDAAHHLHHYEGKCKNLHGHTYKVVFGISSLTDEIGIAIDFGDIKKIWKEQIEIYLDHRYLNETLPPMNTTAENLVVWIYEKMADYLKKSQFKELQPRVEFVRLFETPTSYAEARREWME

SEQ ID NO: 17444 - protein, 162 aa, Anaerobacillus isosaccharinicus
  misc_feature (1)..(162): tr|A0A1S2MHQ7|A0A1S2MHQ7_9BACI 6-carboxytetrahydropteri n synthase QueD OS=Anaerobacillus isosaccharinicus OX=1 532552 GN=AWH56_00845 PE=4 SV=1
MCSSDGLFGFRIVDKLQKLGEDIHIEDLRYHNKRVLVSKEFTFDSAHHLHHYEGKCKNLHGHTYKVIFGISSLTDEIGIAIDFGDIKAIWKEHIEIYLDHRYLNETLPPMNTTAENMVVWIYEKMADYLKESQFKTLKPRVEFVRLFETPTSYAEARREWME

SEQ ID NO: 17445 - protein, 158 aa, Anaerobacillus macyae
  misc_feature (1)..(158): tr|A0A0J6FYU1|A0A0J6FYU1_9BACI 6-pyruvoyl tetrahydrobio pterin synthase OS=Anaerobacillus macyae OX=157733 GN=A B986_10300 PE=4 SV=1
MSYMIPKKVEVLGEDIQKSELKYHNKRVAVTKEFTFDAAHHLHCYEGKCKSMHGHTYKVVITISGFVNEIGISVDFGEIKTLFKEVIDSKLDHHYLNEVLPNMNTTAENMIVWMWEQLDQALVERNMKDHGQRLEELVLYETPTSYATLKREWMEDNE

SEQ ID NO: 17446 - protein, 127 aa, Anaerobacterium chartisolvens
  misc_feature (1)..(127): tr|A0A369BG22|A0A369BG22_9FIRM 6-carboxy-5,6,7,8-tetrah ydropterin synthase OS=Anaerobacterium chartisolvens OX =1297424 GN=DFR58_102282 PE=3 SV=1
MKGRTLNITKTFTFDSAHHLNNYSGKCKNIHGHTYKLEVTVKGPVAENGLVIDFHDLNDIVEKNVLSYVDHKYLNDLFEFNPTCENLGLWIWDELLPEIAKEGCCLEKIVLWETPTSYITINREDTL

SEQ ID NO: 17447 - protein, 140 aa, Anaerobium acetethylicum
  misc_feature (1)..(140): tr|A0A1D3TN84|A0A1D3TN84_9FIRM 6-carboxy-5,6,7,8-tetrah ydropterin synthase OS=Anaerobium acetethylicum OX=1619 234 GN=SAMN05421730_100117 PE=3 SV=1
MYLLKTEHSFDAAHFLAGYEGKCSNIHGHRWRVVVGIESETLQEDGQCSGMVVDFSQLKKDIKNAIDYFDHSLIVEKNSMKEKTMDALEEEHFRIIQVDFRPTAENLAKYFYDLFAEKGYCVRCVDVYETPNNCASYASC

SEQ ID NO: 17448 - protein, 188 aa, Anaerobium acetethylicum
  misc_feature (1)..(188): tr|A0A1D3TZI1|A0A1D3TZI1_9FIRM 6-pyruvoyltetrahydropter in/6-carboxytetrahydropterin synthase OS=Anaerobium ace tethylicum OX=1619234 GN=SAMN05421730_10748 PE=4 SV=1
MRSFTTFDLQYAHRFFGFKGEAQYLHGHTGILTIEVEDTVNMGVNMVFPCNEIQKTAWEVLQNFDHALILREDDPLLPAILGVYEAQGIKDGAPTNKQKGPAFKTELATAYPECRLVVTKETMTVEGMIKIVYDLLKDKLNIAKITFTSGVNGATEEYEPQKDSIDRCPLCGIALNENGVCPKCGYKK

SEQ ID NO: 17449 - protein, 154 aa, Anaerobutyricum hallii
  misc_feature (1)..(154): tr|C0ERV5|C0ERV5_9FIRM Queuosine biosynthesis protein Q ueD OS=Anaerobutyricum hallii DSM 3353 OX=411469 GN=que D PE=4 SV=1
MFAASFLLGGFLMYILETEQSFDSAHFLSGYEGKCSNLHGHRWRVVARIAMDELNKEGQTRDMVIDFGDFKNALKKLTDALDHSFIFETGSLKERTVAALKDEGFLLHEVPFRPTAEQFSRYFYEQLKGLNFPVYDISVYETPTNCSTYREASL

SEQ ID NO: 17450 - protein, 142 aa, Anaerobutyricum hallii
  misc_feature (1)..(142): tr|A0A174IXK0|A0A174IXK0_9FIRM 6-carboxytetrahydropteri n synthase OS=Anaerobutyricum hallii OX=39488 GN=DW833_ 09095 PE=4 SV=1
MYILETEQSFDSAHFLSGYEGKCSNLHGHRWRVVARIAMDELNKEGQTRDMVIDFGDFKNALKKLTDALDHSFIFETGSLKERTVAALKDEGFLLHEVPFRPTAEQFSRYFYEQLKGLNFPVYDISVYETPTNCSTYREASL

SEQ ID NO: 17451 - protein, 110 aa, Anaerococcus nagyae
  misc_feature (1)..(110): tr|A0A3E2TI04|A0A3E2TI04_9FIRM 6-carboxy-5,6,7,8-tetrah ydropterin synthase OS=Anaerococcus nagyae OX=1755241 G N=queD PE=3 SV=1
MYYIKKNIEISASHQLHLPYESKCNELHGHNYDINIYCKSEELDENGMVLDFTHIKKKVMDKLDHKNLNEILDVPTTAENIARWICEQLGPKCYKVKVAESKGNLAIYER

SEQ ID NO: 17452 - protein, 144 aa, Anaerocolumna xylanovorans
  misc_feature (1)..(144): tr|A0A1M7YCA9|A0A1M7YCA9_9FIRM 6-pyruvoyltetrahydropter in/6-carboxytetrahydropterin synthase OS=Anaerocolumna xylanovorans DSM 12503 OX=1121345 GN=SAMN02745217_02647 PE=4 SV=1
MGYSQYKFKFYLNAIHAIYIQGVMGEKHPHTWEIEISTLKQQEEFVQFKEVEEPVEKFLDKYQNKFLNACEPFKDINPTLENITNYLLKEIQAILMPIGWYIFCIEVGETPSRSYIISLVENRAKSELQKADMVNDIIANSFLT

SEQ ID NO: 17453 - protein, 216 aa, Anaeroglobus geminatus
  misc_feature (1)..(216): tr|G9YHC8|G9YHC8_9FIRM Queuosine biosynthesis protein Q ueD OS=Anaeroglobus geminatus F0357 OX=861450 GN=HMPREF 0080_01055 PE=4 SV=1
MFLSLYFLIVPVTARFLQTAYIDKDKIVHYTKEAVMRTVRLYHPVLKQNQDCFFVAFLRLKTGSAFMQGLFLRGDTMYYITSEASFDGAHFLRNYSGKCRNLHGHHWLVRVHMRSYALQRDIQTDGMLNDFGDLKKTLKDLCDYFDHSLIYEAGSLRKSTLACLAAEEFLLREVPFRPTAENLAKYFYDTLQAKRSEIYRVEVYETPANCAAYEAQ

SEQ ID NO: 17454 - protein, 125 aa, Anaerolinea thermolimosa
  misc_feature (1)..(125): tr|A0A3D1JI34|A0A3D1JI34_9CHLR 6-carboxytetrahydropteri n synthase OS=Anaerolinea thermolimosa OX=229919 GN=DEQ 80_09565 PE=4 SV=1
MYHVAVMRDFMARHYLIGGDWGPENQEHTHHYRIEVELWGKELNEHQYLVDIIAVEDHLATLLSYYRDRVLNELPEFSGVNPSLETFARVLCQSFDRAFQEKNITAVTVRLWENEYARAGYTVER

SEQ ID NO: 17455 - protein, 158 aa, Anaerolinea thermolimosa
  misc_feature (1)..(158): tr|A0A3D1JIH3|A0A3D1JIH3_9CHLR 6-carboxytetrahydropteri n synthase OS=Anaerolinea thermolimosa OX=229919 GN=DEQ 80_09275 PE=4 SV=1
MTIDRKTIEPTMMQEDPFWQIDPTLVLNPPPAYARYKLIMSAFFNAAHSVSFGPSRGNLHRHSYHLRVTAMASALAPDNSLVPYETLRQIMTKITAAYEGTILNNLPPFRTIQPTTEALAAIVAQQIERLARDLPIKIIEVTVMESPTQGVSIQLNPS

SEQ ID NO: 17456 - protein, 129 aa, Anaerolineaceae bacterium
  misc_feature (1)..(129): tr|A0A2E0ZJ01|A0A2E0ZJ01_9CHLR 6-pyruvoyl tetrahydropte rin synthase OS=Anaerolineaceae bacterium OX=2024896 GN =CL608_25030 PE=4 SV=1
MYTVAVKRDFVAQHFLIGGDWGPENEWHSHHYVVELQLSGPTLDQHGYLVDIVDIEANLEALVAYYKDKTLNDLPEFAGLNPSIEHFARLLATQLAERIQASTLSHLTVKVWENEIAWAAFRLPVNGKP

SEQ ID NO: 17457 - protein, 125 aa, Anaerolineaceae bacterium
  misc_feature (1)..(125): tr|A0A351X8E3|A0A351X8E3_9CHLR 6-pyruvoyl tetrahydropte rin synthase OS=Anaerolineaceae bacterium OX=2024896 GN =DCP32_01795 PE=4 SV=1
MYRVSVQKTFTARHYLIGGDWGAENQLHAHPYRLELELSGYDLDQHQYLADIVAIENALEHQIELVRDKTLNEIPAFAGVNPSLEYFARWLCESLSAKIDASNIQRVAVRLWESDTAWAGYELER

SEQ ID NO: 17458 - protein, 128 aa, Anaerolineae bacterium
  misc_feature (1)..(128): tr|A0A3D0RNM3|A0A3D0RNM3_9CHLR 6-pyruvoyl tetrahydropte rin synthase OS=Anaerolineae bacterium OX=2052143 GN=DE P19_01220 PE=4 SV=1
MYTLGVRRDFIARHFLIGGDWGPENFPNSHHYVLELQLIGNELDKHGYLVDIVDVEKHLDEVVGYYKEQMLNEKPEFAGLNPSIEHFARIVCVSLNERIKAKNILEVKVVLWENDSAWSAFQVDRLKG

SEQ ID NO: 17459 - protein, 90 aa, Anaerolineae bacterium
  misc_feature (1)..(90): tr|A0A1J4S240|A0A1J4S240_9CHLR 6-pyruvoyl tetrahydropte rin synthase (Fragment) OS=Anaerolineae bacterium CG1_0 2_58_13 OX=1805002 GN=AUJ21_05775 PE=4 SV=1
NYLDQHGYLVDIMDVEKHLDEIVGYYKEQMLNDKSEFAGLNPSLENFARILATSLNERIQAKNITALKVVLWEHANAWAAYSVERQKSKV

SEQ ID NO: 17460 - protein, 196 aa, Anaerolineales bacterium
  misc_feature (1)..(196): tr|A0A524ADX2|A0A524ADX2_9CHLR 6-carboxytetrahydropteri n synthase OS=Anaerolineales bacterium OX=2073117 GN=E3 J21_16520 PE=4 SV=1
MPSPSDTAPWGSSAGKSCGANTWSDTPLWKNGWRDRAVYRVVVEKGNLRFSAAHFISFGGKCERLHGHNYAVSVELEGGLTEDRYVFDFVVLKKITRRICDSLDHHFLLPQQSKDLDIKKTDGEWEIRFENRRYVLPAEDVLALPVDNITAERLAEYICGQLVEALHEHDVANLTSVTVGVEETAGQTAFYQRPLS

SEQ ID NO: 17461 - protein, 129 aa, Anaerolineales bacterium
  misc_feature (1)..(129): tr|A0A363UAZ0|A0A363UAZ0_9CHLR 6-pyruvoyl tetrahydropte rin synthase OS=Anaerolineales bacterium OX=2073117 GN= C3F07_03590 PE=4 SV=1
MYSLGVRRDFIARHFLIGGDWGAENYPNSHHYILELQLEGAQLDGHGYLVDIVEVEKHLDEIVNYYKEQMLNDKPEFAGLNPSIEHFARILATSLSERIKAGNIAAVKVVLWENESAWAAFRVERPRSG

SEQ ID NO: 17462 - protein, 187 aa, Anaeromassilibacillus sp.
  misc_feature (1)..(187): tr|A0A1Y4HTM9|A0A1Y4HTM9_9FIRM Rubredoxin OS=Anaeromass ilibacillus sp. An200 OX=1965587 GN=B5F35_10795 PE=4 SV =1
MRSITKLDLQYAHRFYGFKGEAQYLHGHTGVLTIEVEDSVEPGVNMVFPCNEIQKTAWDVLKNFDHALVLREDDPLLPAILEVYEKQGIKDGAPNNKMKGEAFKTELATAYPDCRLVVTKETMTVEGMIKIVYDLLKDKLNIAKLTFTSGVNAATAEFETKNQIDRCPLCGIALKNGVCPKCGYKKG

SEQ ID NO: 17463 - protein, 189 aa, Anaeromassilibacillus sp.
  misc_feature (1)..(189): tr|A0A1Y4N3X2|A0A1Y4N3X2_9FIRM Rubredoxin OS=Anaeromass ilibacillus sp. An172 OX=1965570 GN=B5F08_11180 PE=4 SV =1
MRSITTLDLQYAHRFYGFKGEAQYLHGHTGVLTIEVEDTVEPGVNMVFPCNEIQKTAWDVLKNFDHALILREDDPLLPAVLDVYEKQGIRNGAPQNTMVGAAFKTELATAYPECRLVVTKETLTVEGMIKIVYDLLKDKLNIAKITFTSGVNAASAEFTTKNKIDRCPLCGIALDENGVCPKCGYRKQK

SEQ ID NO: 17464 - protein, 141 aa, Anaeromicrobium sediminis
  misc_feature (1)..(141): tr|A0A267MB63|A0A267MB63_9CLOT 6-carboxy-5,6,7,8-tetrah ydropterin synthase OS=Anaeromicrobium sediminis OX=147 8221 GN=queD PE=3 SV=1
MYILRSEHSFDSAHFLAGYEGKCSNIHGHRWRVVVEVMEEKLKSGGQLDGMVVDFGDLKNDLKEIVDFHDHKLIIEMGTMKKHLVELLKEEGFKIMEVNFRPTAENFSKYFYDYITQKGYKVKRAEVYETPTNCAIYEGER

SEQ ID NO: 17465 - protein, 129 aa, Anaeromyxobacter dehalogenans
  misc_feature (1)..(129): tr|B8J839|B8J839_ANAD2 6-carboxy-5,6,7,8-tetrahydropter in synthase OS=Anaeromyxobacter dehalogenans (strain 2C P-1 / ATCC BAA-258) OX=455488 GN=A2cp1_1997 PE=3 SV=1
MAPIDYTDRRRMRLDVEFYFAAAHRLPRYEGPCFRMHGHNYRFFVALEGEVDPATGMIADFGDVKRIVQEHVLARVDHRTLNDVLDNPTAENIARWVWEVLEPHLPGLCEIRLYEIPDSCVTYRGPGGR

SEQ ID NO: 17466 - protein, 138 aa, Anaeromyxobacter dehalogenans
  misc_feature (1)..(138): tr|Q2IKV5|Q2IKV5_ANADE 6-carboxy-5,6,7,8-tetrahydropter in synthase OS=Anaeromyxobacter dehalogenans (strain 2C P-C) OX=290397 GN=Adeh_2514 PE=3 SV=1
MPGYIAARMGSPVYEISKDFVFSAAHQIRFHGGKCERLHGHNWRVRVHARASTLNRIGMVIDFADLQKLVAEVGSRFDHQNVNEVAPFDQENTTAELIARFFYREMSRRLAELEGGRVTVARVDVWENEGSLAIYREE

SEQ ID NO: 17467 - protein, 130 aa, Anaeromyxobacter sp.
  misc_feature (1)..(130): tr|A7HA15|A7HA15_ANADF 6-carboxy-5,6,7,8-tetrahydropter in synthase OS=Anaeromyxobacter sp. (strain Fw109-5) OX =404589 GN=Anae109_1354 PE=3 SV=1
MGVPVFEISKEFLFSAAHQIRFHGGKCERLHGHNWRIRVHARASELNRIGMVIDFADLQRIVADIGGRFDHQNVNEIPPFDELNTTAELLARHFYEEANRAVLEREGGRVRVSKVEVWENEGSLAVYRED

SEQ ID NO: 17468 - protein, 129 aa, Anaeromyxobacter sp.
  misc_feature (1)..(129): tr|A0A0D6QP72|A0A0D6QP72_9DELT 6-carboxy-5,6,7,8-tetrah ydropterin synthase OS=Anaeromyxobacter sp. PSR-1 OX=13 00915 GN=queD PE=3 SV=1
MAPIDYTDRRRMRLDVEFYFAAAHRLPRYEGPCFRMHGHNYRFFVALEGEVDPATGMIADFGDVKRIVQEHVLARVDHRTLNDVLDNPTAENIARWMWEVLEPHLAGLCEIRLYEIPDSCVTYRGPGGR

SEQ ID NO: 17469 - protein, 133 aa, Anaerosporobacter mobilis
  misc_feature (1)..(133): tr|A0A1M7M6A7|A0A1M7M6A7_9FIRM 6-carboxy-5,6,7,8-tetrah ydropterin synthase OS=Anaerosporobacter mobilis DSM 15 930 OX=1120996 GN=SAMN02746066_03660 PE=3 SV=1
MKQDYDFIGKEVYMTKRFSFSAAHQLSGSTRHNDQLHGHNYTVSVTVKGFLNKDGFLIDFDKFESLLYTHVFFKLDHSVLNDHLEPLNPTVEVLTLYLYNEIETCLRICECTENLKIAEITVYETDSFSATIK

SEQ ID NO: 17470 - protein, 150 aa, Anaerosporobacter mobilis
  misc_feature (1)..(150): tr|A0A1M7KZ83|A0A1M7KZ83_9FIRM 6-pyruvoyl tetrahydropte rin synthase OS=Anaerosporobacter mobilis DSM 15930 OX= 1120996 GN=SAMN02746066_02967 PE=4 SV=1
MILQDKLLHYYKFKYYFSAQHSMTKSDEGMHPHTFTILLYMETYENYNIDLFSKVDRFLEEYFSRFSGEKLNKLACFEEEVPTIEVMGEYFYEEIKEKLQSVNLDLIQIDICENPLRIYSISDRILLSSAHIQNSSRQLERILEAQKKYL

SEQ ID NO: 17471 - protein, 127 aa, Anaerosporomusa subterranea
  misc_feature (1)..(127): tr|A0A154BMI5|A0A154BMI5_ANASB 6-carboxy-5,6,7,8-tetrah ydropterin synthase OS=Anaerosporomusa subterranea OX=1 794912 GN=AXX12_15920 PE=3 SV=1
MKIKAKKGFHFDAAHCLPGHSGKCASMHGHTYRLEVVVARKDGGIIADGSSEGMIIDFGDLNRIVKEEILDKVDHQCLNDLFDFRTTSENLAAHFFTILNERLHANDIVLERILLWESNTSCVEVER

SEQ ID NO: 17472 - protein, 139 aa, Anaerostipes caccae
  misc_feature (1)..(139): tr|B0ME53|B0ME53_ANACD 6-carboxy-5,6,7,8-tetrahydropter in synthase OS=Anaerostipes caccae (strain DSM 14662 / NCIMB 13811 / L1-92) OX=411490 GN=queD PE=3 SV=1
MYQLNTHASFDSAHFLAGYEGKCRNLHGHRWKLSVTIQKEKVEEQGQTRGMVVDFGELKDKVKEIADEFDHALIMEKDTLKAKTIEALREEEFRIIEVKFRPTAENFARYFYDRIKQDGYDVSFVEVYETPNNCAIYGE

SEQ ID NO: 17473 - protein, 139 aa, Anaerostipes hadrus
  misc_feature (1)..(139): tr|D4MWU0|D4MWU0_ANAHA 6-carboxy-5,6,7,8-tetrahydropter in synthase OS=Anaerostipes hadrus OX=649756 GN=CL2_309 30 PE=3 SV=1
MYQLTTHASFDSAHFLSGYEGKCSNIHGHRWKLEVTVQSETLEQTGEIRGMVVDFGQLKDDIKKLADEFDHSLIIEDGTLKEKTVEALKEENFKMIFVDFRPTAESFAKYFYDRVKEIGYDVKLAKVYETPNNMAAYGE

SEQ ID NO: 17474 - protein, 139 aa, Anaerostipes hadrus
  misc_feature (1)..(139): tr|A0A173RVB9|A0A173RVB9_ANAHA 6-carboxy-5,6,7,8-tetrah ydropterin synthase OS=Anaerostipes hadrus OX=649756 GN =queD PE=3 SV=1
MYQLTTHASFDSAHFLSGYEGKCSNIHGHRWKLEVTVQSETLEQTGQIRGMVVDFGQLKDDIKKLADEFDHSLIIEDGTLKEKTVEALKEENFKMIFVDFRPTAESFAKYFYDRVKEIGYDVKLAKVYETPNNMAAYGE

SEQ ID NO: 17475 - protein, 139 aa, Anaerostipes rhamnosivorans
  misc_feature (1)..(139): tr|A0A4P8IGC1|A0A4P8IGC1_9FIRM 6-carboxy-5,6,7,8-tetrah ydropterin synthase OS=Anaerostipes rhamnosivorans OX=1 229621 GN=AR1Y2_1410 PE=3 SV=1
MYQLNTHASFDSAHFLAGYEGKCSNLHGHRWKLSVTIQKEKVEQQGQTRGMVVDFGQLKDKVKEIADEFDHALIIEKNTLKEKTMEALKEEDFRIIEVAFRPTAENFAKYFYDCFKQSGYDVSFVEVYETPNNCAIYGE

SEQ ID NO: 17476 - protein, 139 aa, Anaerostipes sp.
  misc_feature (1)..(139): tr|R6QD91|R6QD91_9FIRM 6-carboxy-5,6,7,8-tetrahydropter in synthase OS=Anaerostipes sp. CAG:276 OX=1262699 GN=B N583_03004 PE=3 SV=1
MYQLNTHASFDSAHFLAGYEGKCRNLHGHRWKLSVTIQKEKVEEQGQTRGMVVDFGELKDKVKEIADEFDHALIMEKDTLKTKTIEALREEEFRIIEVKFRPTAENFARYFYDRIKQDGYDVSFVEVYETPNNCAIYGE

SEQ ID NO: 17477 - protein, 140 aa, Anaerostipes sp.
  misc_feature (1)..(140): tr|A0A1Q9JPV9|A0A1Q9JPV9_9FIRM 6-carboxy-5,6,7,8-tetrah ydropterin synthase OS=Anaerostipes sp. 494a OX=1261636 GN=BHF70_00525 PE=3 SV=1
MYRLTTHASFDSAHFLAGYDGKCSNLHGHRWKLEVTVESEKLEENGQIRGMIVDFGKLKQDVKMLADEFDHCLIVEKNTLKSKTMEALLEEKFKIITVEFRPTAENFAKYFFDRMKAQGYQVSFVNVYETPNNMAGYGEG

SEQ ID NO: 17478 - protein, 188 aa, Anaerotruncus colihominis
  misc_feature (1)..(188): tr|B0PAB7|B0PAB7_9FIRM Uncharacterized protein OS=Anaer otruncus colihominis DSM 17241 OX=445972 GN=ANACOL_0168 6 PE=4 SV=1
MRSITTLDLQYAHRFYGFKGEAQYLHGHTGVLTIEVEDSIEPGVNMVFPCNEIQKTAWEVLKNFDHALVLREDDPLLPAILDVYKAQGIRDGAPNNKMMGPAFKTELATAYPECRLVVTKETMTVEGMIKIVYSLLKDKLNIAKITFTSGVNAASEEFEPANKIDRCPLCGIALNENGVCPKCGYKKK

SEQ ID NO: 17479 - protein, 188 aa, Anaerotruncus colihominis; identical to SEQ ID NO: 17478
  misc_feature (1)..(188): tr|A0A174T100|A0A174T100_9FIRM Queuosine biosynthesis p rotein QueD OS=Anaerotruncus colihominis OX=169435 GN=B 5F11_11195 PE=4 SV=1

SEQ ID NO: 17480 - protein, 125 aa, Anaerovibrio lipolyticus
  misc_feature (1)..(125): tr|A0A1M6E6G9|A0A1M6E6G9_9FIRM 6-carboxy-5,6,7,8-tetrah ydropterin synthase OS=Anaerovibrio lipolyticus DSM 307 4 OX=1120997 GN=SAMN02745671_01767 PE=3 SV=1
MFEIHVSAEFEAAHRVAGYNGKCDRLHGHSWTVEAAVTGKKLDNLGMLVDFKVVKGRLRDLLETLDHQYLNELPAFADGHNPTAEHLAQYIYEEMAKAEFFDDNVKLKHIQVWESPKSSVIYSLE

SEQ ID NO: 17481 - protein, 125 aa, Anaerovibrio lipolyticus; identical to SEQ ID NO: 17480
  misc_feature (1)..(125): tr|A0A0B2JZT4|A0A0B2JZT4_9FIRM 6-carboxy-5,6,7,8-tetrah ydropterin synthase OS=Anaerovibrio lipolyticus OX=8237 4 GN=NZ47_06670 PE=3 SV=1

SEQ ID NO: 17482 - protein, 125 aa, Anaerovibrio sp.
  misc_feature (1)..(125): tr|A0A1X1Q6W6|A0A1X1Q6W6_9FIRM 6-carboxy-5,6,7,8-tetrah ydropterin synthase OS=Anaerovibrio sp. JC8 OX=1240085 GN=D081_1344 PE=3 SV=1
MFEIHVSAEFEAAHRVAGYNGKCDRLHGHSWTVEAAVIGTKLDNLGMLVDFKVVKGRLRDLLETLDHQYLNELPAFADGHNPTAEHLAQYIYEEMAKAEFFNDNVKLKHIQVWESPKSSVIYSLD

SEQ ID NO: 17483 - protein, 125 aa, Anaerovibrio sp.
  misc_feature (1)..(125): tr|A0A3D4AN06|A0A3D4AN06_9FIRM 6-carboxy-5,6,7,8-tetrah ydropterin synthase OS=Anaerovibrio sp. OX=1872532 GN=q ueD PE=3 SV=1
MFEIHVSAEFEAAHRVAGYNGKCDRLHGHSWIVEASVTGKKLDNLGMLVDFKVVKGRLRDLLETLDHQYLNELPAFADGHNPTAEHIAKYVYEEMAKAEFFDDNVKLKYIQVWESPKSSAIYSLE

SEQ ID NO: 17484 - protein, 133 aa, Ancylobacter aquaticus
  misc_feature (1)..(133): tr|A0A431Q6I2|A0A431Q6I2_ANCAQ 6-carboxytetrahydropteri n synthase OS=Ancylobacter aquaticus OX=100 GN=EJV44_15 025 PE=4 SV=1
MYSVEVRDRIMIAHSLPDPFFGPAQGLHGATFVVDVAFFREALTAQNVVVDIGAALDVLKQTLAPLAYQNLDTLPAFAGKLTTTEFLARHIFDAMAAAAKAGALGAEGHGLAKIRVTLHETDLARASFESGLG

SEQ ID NO: 17485 - protein, 133 aa, Ancylobacter aquaticus
  misc_feature (1)..(133): tr|A0A4R1HM87|A0A4R1HM87_ANCAQ 6-pyruvoyl-tetrahydropte rin synthase OS=Ancylobacter aquaticus OX=100 GN=EV667_ 3436 PE=4 SV=1
MYCVEVRDRIMIAHSLPDPFFGPAQGLHGATFVVDVAFFRAALTAQNVVVDIGAALDVLKKTLAPLAYQNLDTLPEFAGKLTTTEFLARHIFDAMATAAGAGALGEEGRGLAKIRVTLHETDLARASYEAGLG

SEQ ID NO: 17486 - protein, 133 aa, Ancylobacter rudongensis
  misc_feature (1)..(133): tr|A0A1G4UIR6|A0A1G4UIR6_9RHIZ 6-pyruvoyl-tetrahydropte rin synthase OS=Ancylobacter rudongensis OX=177413 GN=S AMN05660859_3976 PE=4 SV=1
MYSVEVRDRIMIAHSLPDRFFGPAQGLHGATFVVDVAFFREALTAQNVVVDIGAALDVLKQTLAPLAYQNLDTLPDFAGKLTTTEFLARHIFDAMAAAAKAGALGAEGHGLSKIRVTLHETDLARASFESGLS

SEQ ID NO: 17487 - protein, 148 aa, Ancylomarina sp.
  misc_feature (1)..(148): tr|A0A4V1N063|A0A4V1N063_9BACT 6-carboxy-5,6,7,8-tetrah ydropterin synthase OS=Ancylomarina sp. SHSM-M15 OX=250 1299 GN=EO244_08365 PE=3 SV=1
MAKVRLTKEFRFEMAHALWNYDGLCKNIHGHSYILYVTVIGEPITDQANPKLGMVMDFGDLKRIVNQEIVDKLDHAVVLSDRTPMLEQLNIPQMFERFFVFDYQPTCENMIADFAERIIKRLPAEVKLHSLKLHETATSFAEWFAEDN

SEQ ID NO: 17488 - protein, 148 aa, Ancylomarina sp.
  misc_feature (1)..(148): tr|A0A425Y861|A0A425Y861_9BACT 6-carboxy-5,6,7,8-tetrah ydropterin synthase OS=Ancylomarina sp. M1P OX=2283627 GN=DWB61_00450 PE=3 SV=1
MAKVRLTKEFRFEMAHALWNYDGLCKNIHGHSYILYVTVIGEPIADENNPKLGMVMDFGDLKRIVNVEIVDKLDHAVVLSDKTPMLEQLNIPQMFERFFVFDYQPTCENMIADFAGRIMKRLPVDVSLHSLKLHETATSFAEWFAEDN

SEQ ID NO: 17489 - protein, 148 aa, Ancylomarina subtilis
  misc_feature (1)..(148): tr|A0A4Q7VMH9|A0A4Q7VMH9_9BACT 6-carboxy-5,6,7,8-tetrah ydropterin synthase OS=Ancylomarina subtilis OX=1639035 GN=EV201_2192 PE=3 SV=1
MAKVRLTKEFRFEMAHALWNYDGLCKNIHGHSYILYVTVIGEPITDESNPKLGMVMDFGDLKRIVNQEIVDKLDHAVVLSDRTPMLEQLNIPQMFERFFVFDYQPTCENMIADFAERIIKRLPEEVKLHSLKLHETATSFAEWFAEDN

SEQ ID NO: 17490 - protein, 138 aa, Anditalea andensis
  misc_feature (1)..(138): tr|A0A074L5Q0|A0A074L5Q0_9BACT 6-pyruvoyl tetrahydropte rin synthase OS=Anditalea andensis OX=1048983 GN=EL17_2 2620 PE=4 SV=1
MLSITKSFHFEAAHRISDYDGACQYLHGHSYKLEVTISGKEMVKGDMLMDFKILKSLVNKIAIEPWDHALILKDNEINHSEFDHLNGKTYWMETEPTAERMVLHLSEQLAGLLPQGFSVRRVKLYETDSCFAEYENIH

SEQ ID NO: 17491 - protein, 138 aa, Anditalea andensis
  misc_feature (1)..(138): tr|A0A074LLW8|A0A074LLW8_9BACT 6-pyruvoyl tetrahydrobio pterin synthase OS=Anditalea andensis OX=1048983 GN=EL1 7_04115 PE=4 SV=1
MNVAVFRKEHFNAAHRLHNPSWSAEKNQEVFGKCNNPSFHGHNYELVVKLIGPIDPNTGYVFDMKMLSDLIKENILNKFDHKNLNLDTEEFSELNPTAENIAIVIWNILRGKIDNKLALIVRLYETERNFVEYDGNGS

SEQ ID NO: 17492 - protein, 129 aa, Andreesenia angusta
  misc_feature (1)..(129): tr|A0A1S1V7E2|A0A1S1V7E2_9FIRM 6-carboxy-5,6,7,8-tetrah ydropterin synthase OS=Andreesenia angusta OX=39480 GN= queD PE=3 SV=1
MKDRRIDTTKIFTFDSAHKLNDYDGDCKYLHGHTYKLEVTVRGRRDSCGMVIDFKDLKAIVKEEIISELDHRYLNDIFSFNPTCENMVEWIFEKLDSRLSKGESSLQKIVLWETPTSYATLEREEYDAS

SEQ ID NO: 17493 - protein, 198 aa, Andreprevotia lacus
  misc_feature (1)..(198): tr|A0A1W1X1R5|A0A1W1X1R5_9NEIS 6-pyruvoyltetrahydropter in/6-carboxytetrahydropterin synthase OS=Andreprevotia lacus DSM 23236 OX=1121001 GN=SAMN02745857_00417 PE=4 S V=1
MLIRKLFKFENAHIVRNCSSDRCRRSIHGHSYKVEVLLEAHALDHGQMVYDFGLMKGTIKDVIDAFDHAICFWDKDDAEYIRLCKEFSARWIALPVSPSAEQFARLFFVLIDAILKQTVMKNGEADVLLHSVIAHETDTGYAQAFRDDAYNPRMGSIALADIVFSDQVRAEWGDPQLYDKLQSGTPLVNPDVTLQVKI

SEQ ID NO: 17494 - protein, 159 aa, Aneurinibacillus aneurinilyticus
  misc_feature (1)..(159): tr|U1X136|U1X136_ANEAE Queuosine biosynthesis protein Q ueD OS=Aneurinibacillus aneurinilyticus ATCC 12856 OX=6 49747 GN=HMPREF0083_03714 PE=4 SV=1
MSGFEIPRSVQLLYEDIQPEQLRYHQRRVALTKEFTFDSAHHLHLYEGKCKSLHGHTYKLIITMSGFVDDIGICVDFGDIKKVYEHTIKARLDHKYLNEVLPPMNTTAENMIVWIWEQIDEEIEYRGWKKHGTRIEELVLYETPTSYATLKREWMEDND

SEQ ID NO: 17495 - protein, 159 aa, Aneurinibacillus danicus
  misc_feature (1)..(159): tr|A0A511V9M6|A0A511V9M6_9BACL 6-carboxytetrahydropteri n synthase QueD OS=Aneurinibacillus danicus OX=267746 G N=ygcM PE=4 SV=1
MSGFEIPRKVQRIHEDIQPEQLRYHSRRVALTKEFTFDSAHHLHLYEGKCKSLHGHTYKLVITVSGFVDDIGICVDFGEIKQMYEDTIKAQLDHKYLNEVLPPMNTTAENMIVWIWEQLDQEIVRRGFRERGTRLEELVLYETPTSYATLKREWMESDE

SEQ ID NO: 17496 - protein, 159 aa, Aneurinibacillus migulanus
  misc_feature (1)..(159): tr|A0A0D1YK52|A0A0D1YK52_ANEMI 6-pyruvoyl tetrahydrobio pterin synthase OS=Aneurinibacillus migulanus OX=47500 GN=AF333_00160 PE=4 SV=1
MSGFDIPRSVQLLYKDIQPEQLRYHRRRVALTKEFTFDSAHHLHLYEGKCKSLHGHTYKLMITVSGFVDDIGICVDFGDIKKVYEDTIKAQLDHKYLNEVLPPMNTTAENMIVWIWEQIDGEMERRGWKEHGTRIEELVLYETPTSYATLKREWMESDD

SEQ ID NO: 17497 - protein, 159 aa, Aneurinibacillus soli
  misc_feature (1)..(159): tr|A0A0U5BCQ2|A0A0U5BCQ2_9BACL 6-carboxy-5,6,7,8-tetrah ydropterin synthase OS=Aneurinibacillus soli OX=1500254 GN=queD PE=4 SV=1
MSGYEIPQKVQRLYEDIQPSDLRYHTRRVALTKEFTFDSAHHLHLYEGKCKSMHGHTYKLVMTLSGYVNEIGICVDFSDMKRIYEETIKQRLDHRYLNDVMPLMNTTAENMIVWIWEQLDRRLIEEGLTEKGTRLEELVLYETPTSYATLKREWMQDDR

SEQ ID NO: 17498 - protein, 159 aa, Aneurinibacillus sp.
  misc_feature (1)..(159): tr|A0A120HSN5|A0A120HSN5_9BACL 6-pyruvoyl tetrahydrobio pterin synthase OS=Aneurinibacillus sp. XH2 OX=1450761 GN=ACH33_14235 PE=4 SV=1
MSEFQIPRKVQRLHEDIRPEQLRYHSRRVAVTKEFTFDSAHHLHLYEGKCKSLHGHTYKLVITMSGFVNEIGICVDFGDIKEVYEEIIKSQLDHKYLNEVLPPMNTTAENMVVWIWEELDCAIEQRGWKQRGTRLEELVLYETPTSYATLKREWMESNA

SEQ ID NO: 17499 - protein, 131 aa, Aneurinibacillus sp.
  misc_feature (1)..(131): tr|A0A0X8D4R5|A0A0X8D4R5_9BACL 6-carboxy-5,6,7,8-tetrah ydropterin synthase OS=Aneurinibacillus sp. XH2 OX=1450 761 GN=ACH33_11310 PE=3 SV=1
MKQKYHLVKHFWIACAHRVPNAGKCDRIHGHNYKVTFCIEGSKLDDKGMLIDFRDVKHSIEDKYDHYLLNDFPEFDVDQGGSAPSTEKVAEVFYSIIKDLCLMKINQPKVKWVEVQETNEVFVRYSEELEN

SEQ ID NO: 17500 - protein, 131 aa, Aneurinibacillus thermoaerophilus
  misc_feature (1)..(131): tr|A0A1G8BMG2|A0A1G8BMG2_ANETH PreQ(0) biosynthesis pro tein QueD OS=Aneurinibacillus thermoaerophilus OX=14349 5 GN=SAMN04489735_102026 PE=4 SV=1
MKQKYHLVKHFWIACAHRVPNAGKCDRIHRHNYKVTFCIEGSKLDDKGMLIDFRDVKHSIEDKYDHYLLNDFPEFDVDQGGSAPSTEKVAEVFYSIIKDLCLMKINQPKVKWVEVQETNEVFVRYSEELEN

SEQ ID NO: 17501 - protein, 159 aa, Aneurinibacillus thermoaerophilus; identical to SEQ ID NO: 17498
  misc_feature (1)..(159): tr|A0A1G7WYF7|A0A1G7WYF7_ANETH PreQ(0) biosynthesis pro tein QueD OS=Aneurinibacillus thermoaerophilus OX=14349 5 GN=SAMN04489735_1002223 PE=4 SV=1

SEQ ID NO: 17502 - protein, 145 aa, Anoxybacillus amylolyticus
  misc_feature (1)..(145): tr|A0A160F2L3|A0A160F2L3_9BACI 6-carboxy-5,6,7,8-tetrah ydropterin synthase OS=Anoxybacillus amylolyticus OX=29 4699 GN=queD PE=3 SV=1
MIQQIYPQVFHNFRYELNKDMQIAAAHFIPHEAAGKCANMHGHTYFVNITVAGDELDESGFLINFQQLKKIVHGKLDHTLMNDHTDLFSNARAEDFPTTEVVARKIAEIVQAQLDTMPNRPTCVQVFVRESPTSYVVYRPKAGNR

SEQ ID NO: 17503 - protein, 251 aa, Anoxybacillus amylolyticus
  misc_feature (1)..(251): tr|A0A4R1FRZ4|A0A4R1FRZ4_9BACI 6-pyruvoyltetrahydropter in/6-carboxytetrahydropterin synthase OS=Anoxybacillus amylolyticus OX=294699 GN=BDK47_1224 PE=4 SV=1
MEKNKAVFGLCSNLNGHGHDYQLDVTVKGLVNPLTGIVVNITQVDAIMKEVVSAELDGKFLNQEHPYFQTHIPTTEMMVTYIWDVLQGKFSCCQLCKVKLQENETLYAVKEEQELVQLTRRYYFSSAHRLHSDQLTNEENQRLFGKCNNRYGHGHNYCLEVTVIGKPDPITGMVVNLAELDEIVNREVLVKFDHKHLNLDTDEFKQINPTAENIVIVIWELLAPHLSSLYKIGLWETQKNYFEYFGPHKEK

SEQ ID NO: 17504 - protein, 145 aa, Anoxybacillus ayderensis
  misc_feature (1)..(145): tr|A0A0D0HJ54|A0A0D0HJ54_9BACI 6-carboxy-5,6,7,8-tetrah ydropterin synthase OS=Anoxybacillus ayderensis OX=2655 46 GN=B7H16_09170 PE=3 SV=1
MIQQIYPQVIHPFRYELNKDMQIAAAHFIPHEAAGQCANMHGHTYFINITVAGDELDDSGFLINFQQLKKLVHNRFDHTVMNDHKDVFSDTAAEHFPTTEVVARKIAEIVQEHLDTLPNKPTCVQVFVRESPTSYVVYRPKAGKQ

SEQ ID NO: 17505 - protein, 145 aa, Anoxybacillus flavithermus
  misc_feature (1)..(145): tr|B7GLA3|B7GLA3_ANOFW 6-carboxy-5,6,7,8-tetrahydropter in synthase OS=Anoxybacillus flavithermus (strain DSM 2 1510 / WK1) OX=491915 GN=Aflv_1970 PE=3 SV=1
MIQQIYPQVIHPFRYELNKDMQIAAAHFIPHEAAGRCANVHGHTYFINITVAGDELDDSGFLINFQQLKKLIHHRFDHTLMNDHTDVFSNTQAEHFPTTEVVARKIAEIVQQHLDTLPNKPTCVQVFVRESPTSYVVYRPKAGKQ

SEQ ID NO: 17506 - protein, 145 aa, Anoxybacillus flavithermus
  misc_feature (1)..(145): tr|R4G6R5|R4G6R5_9BACI 6-pyruvoyl tetrahydrobiopterin s ynthase OS=Anoxybacillus flavithermus NBRC 109594 OX=13 15967 GN=KN10_1828 PE=4 SV=1
MIQQIYPQVIHPFRYELNKDMQIAAAHFIPHEAAGQCANMHGHTYFINITVAGDELDDSGFLINFQQLKKLIHNRFDHTLMNDHTDVFSNTQAEHFPTTEVVARKIAEIVQQHLDTLPNKPTCVQVFVRESPTSYVVYRPKAGKQ

SEQ ID NO: 17507 - protein, 145 aa, Anoxybacillus gonensis; identical to SEQ ID NO: 17504
  misc_feature (1)..(145): tr|M5QPK2|M5QPK2_9BACI 6-carboxy-5,6,7,8-tetrahydropter in synthase OS=Anoxybacillus gonensis OX=198467 GN=F510 _2721 PE=3 SV=1

SEQ ID NO: 17508 - protein, 145 aa, Anoxybacillus kamchatkensis; identical to SEQ ID NO: 17504
  misc_feature (1)..(145): tr|A0A4V3UUS0|A0A4V3UUS0_9BACI 6-carboxy-5,6,7,8-tetrah ydropterin synthase OS=Anoxybacillus kamchatkensis OX=1 96180 GN=queD PE=3 SV=1

SEQ ID NO: 17509 - protein, 145 aa, Anoxybacillus kamchatkensis; identical to SEQ ID NO: 17504
  misc_feature (1)..(145): tr|A0A346DDC6|A0A346DDC6_9BACI 6-carboxy-5,6,7,8-tetrah ydropterin synthase OS=Anoxybacillus kamchatkensis G10 OX=1212546 GN=queD PE=3 SV=1

SEQ ID NO: 17510 - protein, 145 aa, Anoxybacillus pushchinoensis
  misc_feature (1)..(145): tr|A0A1I0U0A3|A0A1I0U0A3_9BACI PreQ(0) biosynthesis pro tein QueD OS=Anoxybacillus pushchinoensis OX=150248 GN= SAMN05216169_10631 PE=4 SV=1
MIQQIYPQVIHPFRYELNKDMQIAAAHFIPHEAAGQCANLHGHTYFINITVAGDELDDSGFLINFQQLKKLIHNRFDHTLMNDHTDVFSNTQAEHFPTTEVVARKIAEIVQAHLDTLPNRPTCVQVFVRESPTSYVVYRPKAGKQ

SEQ ID NO: 17511 - protein, 145 aa, Anoxybacillus sp.
  misc_feature (1)..(145): tr|A0A167UKD7|A0A167UKD7_9BACI 6-carboxy-5,6,7,8-tetrah ydropterin synthase OS=Anoxybacillus sp. B7M1 OX=149005 7 GN=queD PE=3 SV=1
MMHQLYPQVFHDYCYELNKDMHIAAAHFIPHQLAGKCAHIHGHTYVVNITVAGDELDETGFLVNFQKLKQLIHGKLDHTLLNDHQDWFDSKNSEHFPTTEVVARKIYEVVQDYLDALPHKPKCLQVFVRETPTSYVVYRSKAGDR

SEQ ID NO: 17512 - protein, 145 aa, Anoxybacillus sp.
  misc_feature (1)..(145): tr|A0A1V3FGD7|A0A1V3FGD7_9BACI 6-carboxy-5,6,7,8-tetrah ydropterin synthase OS=Anoxybacillus sp. 103 OX=1919277 GN=BO219_13015 PE=3 SV=1
MIQQIYPQVIHPFRYELNKDMQIAAAHFIPHEAAGQCANLHGHTYFINITVAGDELDDSGFLINFQQLKKLIHNRFDHTLMNDHTDVFSNTQAEHFPTTEVVARKIAEIVQQHLDTLPNKPTCVQVFVRESPTSYVVYRPKAGKQ

SEQ ID NO: 17513 - protein, 145 aa, Anoxybacillus suryakundensis
  misc_feature (1)..(145): tr|A0A0K6GK31|A0A0K6GK31_9BACI 6-carboxy-5,6,7,8-tetrah ydropterin synthase OS=Anoxybacillus suryakundensis OX= 1325335 GN=Ga0061060_102132 PE=3 SV=1
MIQQIYPQVIHPFRYELNKDMQIAAAHFIPHEAAGQCANMHGHTYFINITVAGDELDDSGFLINFQQLKKLIHNRFDHTVMNDHKDVFSDTAAEHFPTTEVVARKIAEIVQEHLDTLPNKPTCVQVFVRESPTSYVVYRPKAGKQ

SEQ ID NO: 17514 - protein, 145 aa, Anoxybacillus thermarum; identical to SEQ ID NO: 17504
  misc_feature (1)..(145): tr|A0A0D0QZQ3|A0A0D0QZQ3_9BACI 6-carboxy-5,6,7,8-tetrah ydropterin synthase OS=Anoxybacillus thermarum OX=40493 7 GN=LH47_00924 PE=3 SV=1

SEQ ID NO: 17515 - protein, 270 aa, Anoxybacillus vitaminiphilus
  misc_feature (1)..(270): tr|A0A327YSH5|A0A327YSH5_9BACI 6-pyruvoyltetrahydropter in/6-carboxytetrahydropterin synthase OS=Anoxybacillus vitaminiphilus OX=581036 GN=B0I26_101485 PE=4 SV=1
MYLLRKIFFSAAHYYRVSSWSEEQNKKVFGPCSSIHGHGHDYVLDVMVTGAFQQDSGIVVNINDVDKVVKSFIQEEFDGKFLNLEHPHFQKYMPTTEGIVSYMWNRLEERFQGCRLHKLTLHENDFLYAEKGRDNMVTLTRKYHFSSAHRLHSEQLSEEENLRLFGKCNNVHGHGHNYYLEVTVFGEPDPVTGMIVNLSELDQHVEREVLQKFDHKHLNLDTEEFKHLNPTSENLVIVIWKLLQDKIPNLYKIGLWETQKNYFEYYGPNR

SEQ ID NO: 17516 - protein, 145 aa, Anoxybacillus vitaminiphilus
  misc_feature (1)..(145): tr|A0A327YS30|A0A327YS30_9BACI 6-carboxy-5,6,7,8-tetrah ydropterin synthase OS=Anoxybacillus vitaminiphilus OX= 581036 GN=B0I26_10180 PE=3 SV=1
MLQQIYPQVSHHFQYELNKDMQIAAAHFIPHEAAGKCANIHGHTYFVNITVAGDELDDSGFLVNFQHLKKLVHDKFDHTLMNDHKELFNHQNSSDFPTTEVVARKIWEIVQNYLDTLPNQPKCLQVFVRETPTSYVVYRPKAGKQ

SEQ ID NO: 17517 - protein, 133 aa, Anseongella ginsenosidimutans
  misc_feature (1)..(133): tr|A0A4R3KXY9|A0A4R3KXY9_9SPHI 6-carboxy-5,6,7,8-tetrah ydropterin synthase OS=Anseongella ginsenosidimutans OX =496056 GN=EDD80_10232 PE=3 SV=1
MILVTRKEHFNAAHKLENPDWTDEKNREIFGKCANKNWHGHNYQLFVTVKGEPDPETGYVTDLKKLSTIIREHIIEKVDHKNLNLDVDFMQGVLASTENLAIAIWDQLERHIDGLHCVRLYETENNFVEYFGK

SEQ ID NO: 17518 - protein, 136 aa, Antarcticibacterium flavum
  misc_feature (1)..(136): tr|A0A5B7X7I6|A0A5B7X7I6_9FLAO 6-carboxy-5,6,7,8-tetrah ydropterin synthase OS=Antarcticibacterium flavum OX=20 58175 GN=FHG64_15470 PE=3 SV=1
MKVTVHRKAHFNAAHRLYRKDWDDVKNENVFGKCSNPNYHGHNYDLVVAVTGEIDPETGFVVDMKYLKDLIAAEVETALDHKNLNVEVEEFRDLNPTAENIAVVIWNKLRPHLQEELELAVTLYETARNYVTYTGN

SEQ ID NO: 17519 - protein, 136 aa, Antarcticibacterium sp.
  misc_feature (1)..(136): tr|A0A5B8YI74|A0A5B8YI74_9FLAO 6-carboxy-5,6,7,8-tetrah ydropterin synthase OS=Antarcticibacterium sp. PAMC 289 98 OX=2585771 GN=FK178_07880 PE=3 SV=1
MKVTVNRKAHFNAAHRLYRKDWDDSKNENVFGKCSNPNFHGHNYELVVSVTGEIDKETGFVVDMKILKDLIYSEIEIAFDHKNLNVEVAEFKELNPTAENIAVVIWNKLKPKLKPELELAITLYETPRNFVTYKGE

SEQ ID NO: 17520 - protein, 157 aa, Antarcticibacterium sp.
  misc_feature (1)..(157): tr|A0A5B8YL14|A0A5B8YL14_9FLAO 6-carboxytetrahydropteri n synthase OS=Antarcticibacterium sp. PAMC 28998 OX=258 5771 GN=FK178_12015 PE=4 SV=1
MSRIRITKQFSFETGHALYGYDGKCKNVHGHSYKLSVTVIGTPITDKANVKYGMVIDFGDLKKIVKSEVVDVFDHATVFNRNTPHIELAKELENRDHSVILVDYQPTSENMVVDFAEKISSRLPAHISLFSLKLQETDTSFAEWFAGDQVDNPTPKG

SEQ ID NO: 17521 - protein, 141 aa, Aphanizomenon flosaquae
  misc_feature (1)..(141): tr|A0A1B7VRU3|A0A1B7VRU3_APHFL 6-carboxy-5,6,7,8-tetrah ydropterin synthase OS=Aphanizomenon flos-aquae LD13 OX =1710894 GN=AN481_14835 PE=3 SV=1
MTSKSESESFLETWIIGKEFRFEAAHQLPNHDGKCSRLHGHSWRGVVYVAGDKLINSGVKQGMIMDYGDISKYIKPLLENYLDHYHLNESTGLTNPTSEAIAKWIYEQLEPQIPGLVAVRIDETCTSQCIYSKGKVNFLGF

SEQ ID NO: 17522 - protein, 143 aa, Aphanizomenon flosaquae
  misc_feature (1)..(143): tr|A0A0B0QP99|A0A0B0QP99_APHFL 6-carboxy-5,6,7,8-tetrah ydropterin synthase OS=Aphanizomenon flos-aquae 2012/KM 1/D3 OX=1532906 GN=OA07_05570 PE=3 SV=1
MTNQQWLLAKEFRFEAAHKLPYHDGKCSRLHGHSWRGVVYVAGDRLVTEGTKQGMVMDYSEIKKYLQPLLENYLDHYYLNESMGLESPTSEAIAAWIYDKLEQAGLAGLTAVRIDETCTSICLYSKNRISGWLNSGESINLLP

SEQ ID NO: 17523 - protein, 308 aa, Aphanocapsa feldmannii
  misc_feature (1)..(308): tr|A0A524RUL5|A0A524RUL5_9CYAN 6-pyruvoyl tetrahydropte rin synthase OS=Aphanocapsa feldmannii 277cI OX=2507554 GN=ERJ68_02820 PE=4 SV=1
MTALMAAKPVAPAIVSHGKGRSCVITRRACFSASHRYWLPELSAAENEARFGPCSLAPGHGHNYELVVAMAGLLDANGMVLNLSDVKHHIREQVTAQLDFRCLNNCWEDFQRTLPTTEYLACCIWRRLQTHLPVVGIRVYEQPRLWADYLGNDLEAFLTISTHFAAAHRLARAELSQTENEAIYGKCARIHGHGHNYHLDVTVRGRIDPRSGMLCDLARLQQVVEEWVTEPFDHTFLNKDVAFFADTVPTAENIALHIADLLRVPITDCGAVLHKVRLQESPNNAAEVFVESPQLDMGSRTLAVLADA

SEQ ID NO: 17524 - protein, 121 aa, Aphanocapsa feldmannii
  misc_feature (1)..(121): tr|A0A524RJ35|A0A524RJ35_9CYAN 6-carboxytetrahydropteri n synthase (Fragment) OS=Aphanocapsa feldmannii 288cV O X=2507555 GN=ERJ69_02485 PE=4 SV=1
MAGRFTCSKTFPELPCSHRQWRHAGHCRFVHGYSRSFTCWFEASRLDENGFVVDFSSLKPLRARLLAQFDHTFLASADDPLLPDWRQLHALGALDLRVMDNVGMEASAVLVWGWANDLLLE

SEQ ID NO: 17525 - protein, 320 aa, Aphanothece cf.
  misc_feature (1)..(320): tr|A0A2T1EST5|A0A2T1EST5_9CHRO 6-pyruvoyl tetrahydropte rin synthase OS=Aphanothece cf. minutissima CCALA 015 O X=2107695 GN=C7B81_15860 PE=4 SV=1
MTATRLTAPPAAPSPTRAAHGRGRPCVITRRATFSASHLYRLPELDDAENTRRFGRCSLAPGHGHNYELTVAMGGPLDADGMVLNLSDVKHAIRREVTEPLDFRFLNEVWPEFDLSRPEGRLPTTEALLQAIRQRLAPHLPLVALRLHEHPNLWADVLCGPTIDPMEAFLSIRTHFAAAHRLARPELSQSENEAIYGKCARPHGHGHNYLLDVTVRGPIDARTGMVCDLAELQRLVDDLVVEPFDHTFLNKDVEHFAGCVPTAENIALHIADLLSAPIAATGARLHKVRLQESPNNAAEVFAETPQLEMVPAALEALAAV

SEQ ID NO: 17526 - protein, 170 aa, Aphanothece cf.
  misc_feature (1)..(170): tr|A0A2T1EXB8|A0A2T1EXB8_9CHRO 6-pyruvoyl tetrahydropte rin synthase OS=Aphanothece cf. minutissima CCALA 015 O X=2107695 GN=C7B81_10590 PE=4 SV=1
MSTPAAHTCSKSYGGFPCCHRQWRHPGHCHFVHGYSRSFTFWFAAHHLDVHGFVVDFSSLQPLRSRLEQQFDHTFLVNHDDPLLAQWQDLHDQGALDLRVMANVGMEASAELAWGWANELLGPRDGGRSCCWRVEARENEANAARFTAIPEWFEAGTAKAPATPEPWPAP

SEQ ID NO: 17527 - protein, 126 aa, Aphanothece hegewaldii
  misc_feature (1)..(126): tr|A0A2T1LV52|A0A2T1LV52_9CHRO 6-carboxy-5,6,7,8-tetrah ydropterin synthase OS=Aphanothece hegewaldii CCALA 016 OX=2107694 GN=queD PE=3 SV=1
MQEWIIYKEFRFEAAHKLPHHEGKCRRLHGHSWVGRIYVKGNELMTEGSQQGMIIDYGEIKKYIEPLLDQFLDHYYLNETTGLENPTSELLAKWIYEQLESAKLPGLYAVEIHETCTSGCMYRKLD

SEQ ID NO: 17528 - protein, 288 aa, Aphanothece hegewaldii
  misc_feature (1)..(288): tr|A0A2T1LV17|A0A2T1LV17_9CHRO 6-pyruvoyl tetrahydropte rin synthase OS=Aphanothece hegewaldii CCALA 016 OX=210 7694 GN=C7H19_16050 PE=4 SV=1
MDCIINRRAQFSASHRYWLPELDEAENQRLFGAGSRFPGHGHNYVLYVSIAGKLDQYGMVENLSYVKQVIKKEITSQLDYAYLNDVWPEFSETLPSTENIARIIWQRLAPHLPIVNIQLFEHPELFADYQGNNMEASLTVKTHFSAAHRLALPELSLEENTEIYGKCARTNGHGHNYHLEVSVVGEIDSRTGMIVDLGDLQKIINDYVVEPFDHTFLNKDVPYFTQTVPTAENIAFYIAQLLQQPIKEIGAELDKVKLIESPNNSCEIFCRKSTRQLNSLQREAVLVG

SEQ ID NO: 17529 - protein, 132 aa, Aphanothece sacrum
  misc_feature (1)..(132): tr|A0A401IN62|A0A401IN62_APHSA 6-carboxy-5,6,7,8-tetrah ydropterin synthase OS=Aphanothece sacrum FPU1 OX=19206 63 GN=AsFPU1_4115 PE=3 SV=1
MNSFSTDQWLIYKEFRFEAAHQLLHHDGKCRRLHGHSWVGRVYVIGDRLITEGPKQGMIMDFADIQQHLDPLIENFLDHYYLNESTGLENPSCEAIAKWIFEKLEGAGLEGLQAVEIQETCTSGARYMRIKP

SEQ ID NO: 17530 - protein, 326 aa, Aphanothece sacrum
  misc_feature (1)..(326): tr|A0A401IKW5|A0A401IKW5_APHSA 6-pyruvoyltetrahydropter in synthase OS=Aphanothece sacrum FPU1 OX=1920663 GN=As FPU1_3312 PE=4 SV=1
MAGTGDPKNFSANNDILKERESLLNFTKFLILTKPMQCIINRRAQFSASHRYWLPEWDEAQNREKFGVASQFPGHGHNYVLSVSLVGEIDTYGMVENLSIVKKVIKQEVTSQLDYGYLNDVWPEFEDTLPTTENIARVIWQRLAPRLPLVKIQVFEHPQLWADYQGNAMKATLTVQTHFSAAHRLALPELTLEQNSEIYGKCARIHGHGHNYHLEVSVAGEIDPRTGMLVDLDGLHQVINDYVVEPFDHSFLNKDIPYFAQVVPTAENIALHIAQLLQKPIQELGAELDKVKLIESPNNSCEIYCNQSLQPQEILSYREPALTGIK

SEQ ID NO: 17531 - protein, 149 aa, Apibacter adventoris
  misc_feature (1)..(149): tr|A0A2S8A7X6|A0A2S8A7X6_9FLAO 6-carboxy-5,6,7,8-tetrah ydropterin synthase OS=Apibacter adventoris OX=1679466 GN=C4S77_10705 PE=3 SV=1
MIRLTKIFTFETAHALWGYDGKCKNIHGHSYKLYVTIKGIPVDDLDDKKNGMVMDFSDLKLIVNSLIIDPLDHGVVLNAQSKHKDLGERLIAEGHKVIFTDYQPTCENMLIDFAKKIQAKLPQNILLVKLKLYETETSYGEWRLEDQMK

SEQ ID NO: 17532 - protein, 147 aa, Apibacter mensalis
  misc_feature (1)..(147): tr|A0A0X3ANP6|A0A0X3ANP6_9FLAO 6-pyruvoyltetrahydropter in/6-carboxytetrahydropterin synthase OS=Apibacter mens alis OX=1586267 GN=Ga0061079_10387 PE=4 SV=1
MIRLTKIFTFETAHALWGYDGKCKNIHGHSYKLYVTVKGEPCNDIHHVKNGMVMDFGDLKSIVKKLIINPLDHAIILNAQTEHKKLGEQLQNQGHKVIFMNYQPTCENMLMDFADKIQLELPENIILAKLKLYETETSYGEWIREDQ

SEQ ID NO: 17533 - protein, 147 aa, Apibacter sp.
  misc_feature (1)..(147): tr|A0A2S8AD02|A0A2S8AD02_9FLAO 6-carboxy-5,6,7,8-tetrah ydropterin synthase OS=Apibacter sp. wkB309 OX=1679467 GN=C4S75_00210 PE=3 SV=1
MIRLTKIFTFETAHALWGYDGKCKNIHGHSYKLYVTVKGEPCNDIHHVKNGMVMDFGELKSIVKKLIINPLDHAIILNAQTEHKQLGEQLQNQGHKVIFMNYQPTCENMLIDFAEKIQSELPENILLAKLKLYETETSYGEWIREDQ

SEQ ID NO: 17534 - protein, 147 aa, Apibacter sp.
  misc_feature (1)..(147): tr|A0A563DI42|A0A563DI42_9FLAO 6-carboxy-5,6,7,8-tetrah ydropterin synthase OS=Apibacter sp. AL1 OX=2509005 GN= ETU09_01865 PE=3 SV=1
MIRLTKIFTFETAHALWGYDGKCKNIHGHSYKLYVTIKGNPLEDLNHKKNGMVMDFGDLKSIIKKLIIDPLDHAILLNVNSKHKELGEKLLLEGHKVVFTPYQPTCENMLLDFASKISSQLPEPIVLAKLKLFETETSYGEWILEDQ

SEQ ID NO: 17535 - protein, 118 aa, Aquabacter spiritensis
  misc_feature (1)..(118): tr|A0A4R3M7W2|A0A4R3M7W2_9RHIZ 6-carboxy-5,6,7,8-tetrah ydropterin synthase OS=Aquabacter spiritensis OX=933073 GN=EDC64_101236 PE=3 SV=1
MRITQAFTFEAAHRLPHVKQTHKCFRMHGHSYRVELVLDGPVDPVTGFVADFFDVEAAFAPLLDRLDHHCLNDIEGLDNPTAEHIAIWIWTRTKPLLAPLAVVRVFETPLSWAEYDGR

SEQ ID NO: 17536 - protein, 131 aa, Aquabacter spiritensis
  misc_feature (1)..(131): tr|A0A4R3M3C8|A0A4R3M3C8_9RHIZ 6-pyruvoyl-tetrahydropte rin synthase OS=Aquabacter spiritensis OX=933073 GN=EDC 64_10140 PE=4 SV=1
MFAVEVRDHIMIAHSFTGAAFGPAQALHGATFVVDVAFFSAELTADGVVVDIGRAHDALKAILAPLSYRNLDVLPEFTGRNTTTEVVCKHIFDHMADAVRAGTLGDPAPSRLRVTLQESHVARAWYEADIA

SEQ ID NO: 17537 - protein, 129 aa, Aquabacterium commune
  misc_feature (1)..(129): tr|A0A4R6RI63|A0A4R6RI63_9BURK 6-carboxy-5,6,7,8-tetrah ydropterin synthase OS=Aquabacterium commune OX=70586 G N=EV672_102383 PE=3 SV=1
MFELSQTFAFDAAHTLKRQVSPEEAAGSRRIHGHTYTAEVIVRGERQADSGMVVDLAELRAVIAGIRNQLDHHFLDEVAGLGAPTLENLCVFIHERARQQIPQVSAVVVSRAAGDRCEYRPGPDHGAAA

SEQ ID NO: 17538 - protein, 124 aa, Aquabacterium olei
  misc_feature (1)..(124): tr|A0A2U8FNR6|A0A2U8FNR6_9BURK 6-carboxy-5,6,7,8-tetrah ydropterin synthase OS=Aquabacterium olei OX=1296669 GN =DEH84_02900 PE=3 SV=1
MMFELSQTFSFDAAHTLKRHVSPEEAAGSRRIHGHTYTAEVTVRGERQPESGMVVDLAVLREVLAEIRSQLDHHFLDEVAGLGAPTLENLSVFIHDHVQRRIPQVSSVAVSRAAGDRCVYRPQA

SEQ ID NO: 17539 - protein, 366 aa, Aquabacterium olei
  misc_feature (1)..(366): tr|A0A2U8FNV8|A0A2U8FNV8_9BURK 6-pyruvoyl tetrahydropte rin synthase OS=Aquabacterium olei OX=1296669 GN=DEH84_ 00165 PE=4 SV=1
MSIATLFAASSTFESARQVGVLPADHPARRLHGHSFTAKVRASLDAGWAPWPGGDVSELAGLLGACTAQLDYRHLNELLPVPTDENLARWVRDQLQVSVPGLEQVGIQSTSDQGVDLDANDHAHIWRRYRFQSAHKLPNVPFGHKCGRLHGHGFEVILHANQDAGGRDLSIDYDHLDAIWAPFHYQLHHKYLNAIEGLENPTSEVIAGWLWQRLKAVLPELSWVTVYETGSCGANFNGHDYRIWKEMTLDSALFLRNAPADDPLSHIHGHTYTMRLHLSAPLDQVMGWTVDFGDVKERFNPIFKALDHHPLHELPGLEDCDAGSLARWVLAEGRRALPQIDRVDMYETRGCGAIALMDRDGPALPI

SEQ ID NO: 17540 - protein, 123 aa, Aquabacterium sp.
  misc_feature (1)..(123): tr|A0A521ZNG5|A0A521ZNG5_9BURK 6-carboxy-5,6,7,8-tetrah ydropterin synthase OS=Aquabacterium sp. OX=1872578 GN= EPO09_09375 PE=3 SV=1
MFELSQSFSFDAAHTLKRKVSAEEAAGSRRIHGHTYTAEIYVRGERQPESGMVVDLAVVREVIAGIRNQLDHHFLDEVAGLGAPTLENLCVFIYAQAKKQIPQVSSVAVSRAAGDRCVYRPTH

SEQ ID NO: 17541 - protein, 123 aa, Aquabacterium sp.
  misc_feature (1)..(123): tr|A0A0A0DPJ7|A0A0A0DPJ7_9BURK 6-carboxy-5,6,7,8-tetrah ydropterin synthase OS=Aquabacterium sp. NJ1 OX=1538295 GN=JY96_07020 PE=3 SV=1
MFELSQTFSFDAAHTLKRKVSAEEAAGSRRIHGHTYTAEIFVRGERQPESGMVVDLAVLREVIAGIRGQLDHHFLDEVSGLGAPTLENLCVFIYAQARLHIPQVSSVAVSRAAGDRCVYRPTH

SEQ ID NO: 17542 - protein, 118 aa, Aquamicrobium sp.
  misc_feature (1)..(118): tr|A0A4U6C3B8|A0A4U6C3B8_9RHIZ 6-carboxy-5,6,7,8-tetrah ydropterin synthase OS=Aquamicrobium sp. LC103 OX=11206 58 GN=queD PE=3 SV=1
MFRITKEFHFSASHQLKKLPSEHPCARLHGHNYVVEVELSGETLDENGFVRDYHDLAVFKRYIDDTFDHRHLNDVFGHDAVTAEWLARHFYEWCRMRLPEISAVRVSETPKTWAEYRP

SEQ ID NO: 17543 - protein, 330 aa, Aquaspirillum sp.
  misc_feature (1)..(330): tr|A0A1U9JIN9|A0A1U9JIN9_9NEIS Uncharacterized protein OS=Aquaspirillum sp. LM1 OX=1938604 GN=BXU06_01985 PE=4 SV=1
MPGLMYTASAGFEAARRIRTASDMRRCLHGHSFLLNARWAENLGTLSPEHVRQAVAPLDYADLNQALAVPDDATLLTQLADALPGHAGLWLRSAPDRGVLCSPHGGPLLHWLQVSFEAAHRLPNVPAGHQCGRLHGHGFGVTLCARNTHAELEQAWQGLHPQLHQRLLNDIPGLANPTSEVLSHWLWQQLANQLALDHVIVRETATAGSQFNGQDYRIWKTQRFEAATPFDAQGCYTGHSYSLRLHLAGTLDQVMGWVLDFGDVKTRFKPFYQQLDHHPLDQVAGLADFSCAGIARWAAEQLQADTPELTRVDVYQRPGEGALYECDGEG

SEQ ID NO: 17544 - protein, 165 aa, Aquicella lusitana
  misc_feature (1)..(165): tr|A0A370GH15|A0A370GH15_9COXI 6-pyruvoyltetrahydropter in/6-carboxytetrahydropterin synthase OS=Aquicella lusi tana OX=254246 GN=C8D86_11553 PE=4 SV=1
MVRFASLAIQKEELSFSAGHFTIFSATEREQLHGHNYYVSIEFLIKIEHNGLSFDYRHYKRKMLTLCDQLDRHFLLPSQSPYLRLEDSGEYWIAHFNQRKLPFLKEDIVLLPLTNITIEELSHWFLQKILDDSKQLAEHSIHGVTVKVYNGPGQSAGASWDKSAS

SEQ ID NO: 17545 - protein, 162 aa, Aquicella siphonis
  misc_feature (1)..(162): tr|A0A5E4PJV9|A0A5E4PJV9_9COXI Uncharacterized protein OS=Aquicella siphonis OX=254247 GN=AQUSIP_20840 PE=4 SV =1
MRVASLEIHKEEFSFSAGHFTIFSATEREQLHGHNYHVSIAFKKVIQNNGLSFDYRVYKKKIHALCAQLDRHFLLPGQSQYLRLEEEGDYWLAHFNNKKIPFLKEDVVILPLSNITIEELSHWFLQKILEDAQEVKNHGIRGIIVKVYNGPGQSGGAAWGEN

SEQ ID NO: 17546 - protein, 162 aa, Aquifex aeolicus
  misc_feature (1)..(162): sp|O66626|QUED_AQUAE 6-carboxy-5,6,7,8-tetrahydropterin synthase OS=Aquifex aeolicus (strain VF5) OX=224324 GN =queD PE=3 SV=1
MKWEISKTFRFEAGHRVWKQNLTYGRGAQFTKEKPVNKCVNLHGHSYVLEVTVGSDTLSEQDMVMDFYHVKNALKGLIEEIDHSFIIDVNDPMYPELKDVAEKYGAMKIFPVEFCPTAEALAKFFYDFLKKRLEEAGLLGEVKVVKVVLWETATSKAEYKEE

SEQ ID NO: 17547 - protein, 114 aa, Aquifex aeolicus
  misc_feature (1)..(114): tr|O67020|O67020_AQUAE 6-carboxy-5,6,7,8-tetrahydropter in synthase OS=Aquifex aeolicus (strain VF5) OX=224324 GN=aq_853 PE=3 SV=1
MPWIVRVKRKFNAAHFLTDYHGKPEPLHGHTWTVEVFIKAEELDKGGMGVDFVEIDNFLKDILPDYTLLNDVFDFSPSAENVAKGLYKKVKEKYPNLVKVVVWETETCGAEYYE

SEQ ID NO: 17548 - protein, 115 aa, Aquifex sp.
  misc_feature (1)..(115): tr|A0A432PY16|A0A432PY16_9AQUI 6-carboxy-5,6,7,8-tetrah ydropterin synthase OS=Aquifex sp. OX=313370 GN=DSY42_0 5420 PE=3 SV=1
MPWTIRVKRKFYAAHFLTDYHGSPEPLHGHTWTVEVYLKADELDKGGMGIDFVEIDKYLKEILPDYKLLNEVFDFSPSAENVAKWLYYKVKEKYPSVVKVVVWETENCGAEYYET

SEQ ID NO: 17549 - protein, 162 aa, Aquifex sp.
  misc_feature (1)..(162): tr|A0A432Q122|A0A432Q122_9AQUI 6-carboxy-5,6,7,8-tetrah ydropterin synthase OS=Aquifex sp. OX=313370 GN=DSY42_0 2420 PE=4 SV=1
MKWEISKTFRFEAGHRVWKQNLTYGRGAQFTKEKPVNKCVNLHGHSYVLEVTVGSDTLSEQDMVMDFYHVKNALKDLIDEIDHSFIIDVNDPMYPELKEVAEKYGAMKIFPVEFCPTAEALAKFFYDFLKRKLEEAGLLGEIKVIKVTLWETATSKAEYKEE

SEQ ID NO: 17550 - protein, 115 aa, Aquificaceae bacterium
  misc_feature (1)..(115): tr|A0A350D0Q6|A0A350D0Q6_9AQUI 6-carboxy-5,6,7,8-tetrah ydropterin synthase OS=Aquificaceae bacterium OX=205350 3 GN=DCX31_03470 PE=3 SV=1
MPWNVIVKKKFSWAHFLTDYHGAPEPVHGHTWIVEVHIRADKVDAGGMGIDFLEIEEFLKKLLPDYVLLNDIVDFSPSAENMAKWIYERVKEKFPTVSKVLVWEKEDCGAEYWEG

SEQ ID NO: 17551 - protein, 164 aa, Aquificaceae bacterium
  misc_feature (1)..(164): tr|A0A3D3RTF5|A0A3D3RTF5_9AQUI 6-carboxy-5,6,7,8-tetrah ydropterin synthase OS=Aquificaceae bacterium OX=205350 3 GN=DIT36_06465 PE=4 SV=1
MKWQITKTFRFEAGHRVWKQNLTCGRGAELTLGKEVPVNKCVNLHGHSYLLEVVIGSNVLSEQEMVLDFYHVKNALKDLIDTIDHSFIIDVKDPMYEELKTVAEKYGALKIFPVDFCPTAEALAKFFYDFLVEKLSQVGLLGEVKVVKVVLWETATSKAEYYGE

SEQ ID NO: 17552 - protein, 117 aa, Aquificae bacterium
  misc_feature (1)..(117): tr|A0A3M2B133|A0A3M2B133_9BACT 6-carboxy-5,6,7,8-tetrah ydropterin synthase OS=Aquificae bacterium OX=2202151 G N=D6699_00040 PE=3 SV=1
MPWTVVVKKQFNWAHYLTNYHGAPEPLHGHTWTVELHIYADRVDEGGMGYDFVEVKKFLEELLPDYRLLNELVDFSPSAENMAKWIYQKVKQRYPTLKKVVVWETPEGGAEYYEEGL

SEQ ID NO: 17553 - protein, 164 aa, Aquificae bacterium
  misc_feature (1)..(164): tr|A0A3M2AU15|A0A3M2AU15_9BACT 6-carboxytetrahydropteri n synthase OS=Aquificae bacterium OX=2202151 GN=D6699_0 1885 PE=4 SV=1
MKWVISKTFRFEAGHRVWKQNLTHGRGAQFTLGRELPVNKCVNLHGHSYVLEVYLGSDRLSEQDMVIDFYHVKNALKDLIDTIDHSFIIDINDPMYPELKALAEKYGALKLFPVDFCPTAEALAKFFYDFLKEKLSQAGLLEEVKVIKVVLWETATSKAEYSEL

SEQ ID NO: 17554 - protein, 140 aa, Aquiflexum balticum
  misc_feature (1)..(140): tr|A0A1W2H284|A0A1W2H284_9BACT 6-pyruvoyltetrahydropter in/6-carboxytetrahydropterin synthase OS=Aquiflexum bal ticum DSM 16537 OX=758820 GN=SAMN00777080_1594 PE=4 SV= 1
MVHVCRKEHFNAAHKLWNPNWSEEKNKEVFGPCSNINWHGHNFELIVTVKGLPDPETGFVVDLKALSTLIRTLVIDKVDHKNLNMDVDFMQGKMASCENLVMEFWKILEPAVNEIVPHGSLYKLTLYETPRNFVEYFGED

SEQ ID NO: 17555 - protein, 136 aa, Aquiflexum balticum
  misc_feature (1)..(136): tr|A0A1W2H2T3|A0A1W2H2T3_9BACT 6-pyruvoyltetrahydropter in/6-carboxytetrahydropterin synthase OS=Aquiflexum bal ticum DSM 16537 OX=758820 GN=SAMN00777080_1825 PE=4 SV= 1
MKVAVYRKEHFNAAHRLYNPNWSDEKNQMIFGKCNNPHYHGHNYELIVKLVGEIDPDTGYVYDMKILSDLIKENVLNRFDHKNLNLDTDEFRTINPTAENIAVVIWNILRKKIDSKHELIIRLYETERNFVEYNGN

SEQ ID NO: 17556 - protein, 136 aa, Aquimarina aggregata
  misc_feature (1)..(136): tr|A0A162WRP1|A0A162WRP1_9FLAO 6-carboxy-5,6,7,8-tetrah ydropterin synthase OS=Aquimarina aggregata OX=1642818 GN=AWE51_16995 PE=3 SV=1
MRIKACRKAHFNAAHRLYRKDWSDEKNAQVFGKCSNPKYHGHNYELIVSVIGEIDPETGFLIDLKILKDYIKSEVEDYMDHKNLNEEVAEFADLNPTAENIAVVIWNRLRNKIESKFDIEVTLYETPRNFVTYTGE

SEQ ID NO: 17557 - protein, 150 aa, Aquimarina aggregata
  misc_feature (1)..(150): tr|A0A162ZAG2|A0A162ZAG2_9FLAO 6-pyruvoyl tetrahydropte rin synthase OS=Aquimarina aggregata OX=1642818 GN=AWE5 1_08440 PE=4 SV=1
MSKIRITKQFSFETGHALYGYDGKCRNVHGHSYKLSVTVIGTPITDTSHVKLGMVIDFGDLKKIVKEDIEDVFDHATVFNKNTPHKELAKELADRGHNVILVDYQPTSENMVIDFAQKIKDRLPGNIQLHSLKLQETETSYAEWFASDNS

SEQ ID NO: 17558 - protein, 150 aa, Aquimarina algiphila
  misc_feature (1)..(150): tr|A0A554VGD2|A0A554VGD2_9FLAO 6-carboxytetrahydropteri n synthase OS=Aquimarina algiphila OX=2047982 GN=FOF46_ 19925 PE=4 SV=1
MSKIRITKQFSFETGHALYGYDGKCRNVHGHSYKLSVTVIGTPISDTSHVKLGMVIDFGDLKKIVKEDIEDVFDHATVFNKNTPHVELAKELQDRGHNVILVDYQPTSENMVIDFSKKIKARLPENIKLHSLKLQETETSYAEWYASDNQ

SEQ ID NO: 17559 - protein, 136 aa, Aquimarina algiphila
  misc_feature (1)..(136): tr|A0A554VAJ9|A0A554VAJ9_9FLAO 6-carboxy-5,6,7,8-tetrah ydropterin synthase OS=Aquimarina algiphila OX=2047982 GN=FOF46_29960 PE=3 SV=1
MRIKACRKAHFNAAHRLYRKDWSDEKNLEVFGKCSNPRYHGHNYELIVALIGDIDPETGYLMDLKILKDYIKTEVEEYMDHKNLNEEVEEFKDTNPTVENIAVVIWNRLRNKINLVYDLEVTLYETPRNFVIYDGK

SEQ ID NO: 17560 - protein, 136 aa, Aquimarina amphilecti
  misc_feature (1)..(136): tr|A0A1H7PD26|A0A1H7PD26_9FLAO 6-carboxy-5,6,7,8-tetrah ydropterin synthase OS=Aquimarina amphilecti OX=1038014 GN=SAMN04487910_2174 PE=3 SV=1
MRIKACRKAHFNAAHRLYRKDWSDEKNTQIFGKCSNPRYHGHNYELDVAVIGDVDPETGFLIDLKILKDYIKSEVEDYMDHKNLNEEVEEFKKLNPTAENIAIVIWNRLRKKLDLRYDIEVTLFETPRNYVIYDGK

SEQ ID NO: 17561 - protein, 150 aa, Aquimarina amphilecti
  misc_feature (1)..(150): tr|A0A1H7K9U5|A0A1H7K9U5_9FLAO 6-pyruvoyltetrahydropter in/6-carboxytetrahydropterin synthase OS=Aquimarina amp hilecti OX=1038014 GN=SAMN04487910_1255 PE=4 SV=1
MSKIRITKQFSFETGHALYGYDGKCKNVHGHSYKLSVTVIGSPITDTSHVKLGMVIDFGDLKKIVKEDIEDVFDHATVFNKNTPHVELAEELQKRGHNVILVDYQPTSENMVIDFAKKIKARLPENILLHSLRLKETETSYAEWYASDND

SEQ ID NO: 17562 - protein, 150 aa, Aquimarina atlantica
  misc_feature (1)..(150): tr|A0A023BZJ4|A0A023BZJ4_9FLAO 6-pyruvoyl tetrahydropte rin synthase OS=Aquimarina atlantica OX=1317122 GN=ATO1 2_09900 PE=4 SV=1
MSKIRITKQFSFETGHALYGYDGKCRNVHGHSYKLSVTVIGTPITDTSHVKLGMVIDFGDLKKIVKEDIEDVFDHATVFNKNTPHIELAKELEKRGHNVILVDYQPTSENMVIDFAKKITSRLPEGITLFSLKLQETETSFAEWYASDNK

SEQ ID NO: 17563 - protein, 136 aa, Aquimarina atlantica
  misc_feature (1)..(136): tr|A0A023BSX0|A0A023BSX0_9FLAO 6-carboxy-5,6,7,8-tetrah ydropterin synthase OS=Aquimarina atlantica OX=1317122 GN=ATO12_18980 PE=3 SV=1
MRIKACRKAHFNAAHRLYRKDWSDEKNLQIFGKCSNPKYHGHNYELVVAVIGETDPETGFLMDLKILKEYIKTEVEDYMDHKNLNEEVEEFKSLNPTVENIAYVIWNRLRKKIAPQYDIEVTLYETPRNFVIYKGE

SEQ ID NO: 17564 - protein, 149 aa, Aquimarina brevivitae
  misc_feature (1)..(149): tr|A0A4Q7PI80|A0A4Q7PI80_9FLAO 6-carboxy-5,6,7,8-tetrah ydropterin synthase OS=Aquimarina brevivitae OX=323412 GN=EV197_0740 PE=3 SV=1
MSKIRITKQFSFETGHALYGYDGKCRNVHGHSYKLSVTVIGTPITDTNHVKLGMVIDFSDLKKIVKEEVEDVFDHATVFNKNTPHIELAKELETRGHNVILVDYQPTSENMVIDFAEKIKARLPKEIALYSLKLQETETSYAEWFAADN

SEQ ID NO: 17565 - protein, 136 aa, Aquimarina brevivitae
  misc_feature (1)..(136): tr|A0A4Q7P012|A0A4Q7P012_9FLAO 6-carboxy-5,6,7,8-tetrah ydropterin synthase OS=Aquimarina brevivitae OX=323412 GN=EV197_1672 PE=3 SV=1
MRIKACRKAHFNAAHRLYRSDWSDEKNAEIFGKCSNPHYHGHNYELIVALTGEIDPETGYLIDLKILKDHIKTEVEDYMDHKNLNEEVEEFKKLNPTVENIAVVIFNRLRAKLDTKYDIEITLYETPRNFVIYKGE

SEQ ID NO: 17566 - protein, 136 aa, Aquimarina sp.; identical to SEQ ID NO: 17556
  misc_feature (1)..(136): tr|A0A3A9VL48|A0A3A9VL48_9FLAO 6-carboxy-5,6,7,8-tetrah ydropterin synthase OS=Aquimarina sp. AD10 OX=1714849 G N=D1816_10070 PE=3 SV=1

SEQ ID NO: 17567 - protein, 145 aa, Aquimarina sp.
  misc_feature (1)..(145): tr|A0A3A9VI95|A0A3A9VI95_9FLAO 6-carboxytetrahydropteri n synthase OS=Aquimarina sp. BL5 OX=1714860 GN=D1818_09 925 PE=4 SV=1
MNDKVEDSLNRKVAITRREHFNAAHRLHNPDWTEEKNKKVFGKCNNPNYHGHNYELEVKVIGYVQPETGYVIDTKILSDVIKDQITGRFDHKNLNLDVAEFKNLNPTAENIAMVTYDILREHLDQKLELKIKLYETPRNYVEFPL

SEQ ID NO: 17568 - protein, 150 aa, Aquimarina spongiae
  misc_feature (1)..(150): tr|A0A1M6FJ67|A0A1M6FJ67_9FLAO 6-pyruvoyltetrahydropter in/6-carboxytetrahydropterin synthase OS=Aquimarina spo ngiae OX=570521 GN=SAMN04488508_104315 PE=4 SV=1
MNKIRITKQFSFETAHALYGYDGKCRNLHGHSYKLSVTVMGTPIADTSHVKLGMVIDFGDLKKIVKEDIEDVFDHATVFNKNTPHVELARELEQRGHDVILVDYQPTTENMILDFAERIKKKLPNTIELHSLRLQETETSYAEWYASDNE

SEQ ID NO: 17569 - protein, 136 aa, Aquimarina spongiae
  misc_feature (1)..(136): tr|A0A1M6D9U6|A0A1M6D9U6_9FLAO 6-pyruvoyltetrahydropter in/6-carboxytetrahydropterin synthase OS=Aquimarina spo ngiae OX=570521 GN=SAMN04488508_102509 PE=4 SV=1
MRIKACRKAHFNAAHRLYRKDWSAEKNQVVFGKCNNPRYHGHNYELVVGVIGEIDPETGYLIDLKILKDYIKSEVEDYMDHKNLNEEVEEFASLNPTVENIAVVIWNRLRKKIDEKFDLEITLYETPRNFVIYTGQ

SEQ ID NO: 17570 - protein, 118 aa, Aquimonas voraii
  misc_feature (1)..(118): tr|A0A1G6VPW4|A0A1G6VPW4_9GAMM 6-carboxy-5,6,7,8-tetrah ydropterin synthase OS=Aquimonas voraii OX=265719 GN=SA MN04488509_103207 PE=3 SV=1
MEIFKVFTLEAAHRLPKVPPGHKCARLHGHSFRVEIHVEGEPDPETGWLMDFADIKTAFKPIYDRLDHHYLNDVPGLENPTSERLAIWIWEQLKPSLPELSTVVVHETCTSGCRYRGP

SEQ ID NO: 17571 - protein, 280 aa, Aquisalimonas asiatica
  misc_feature (1)..(280): tr|A0A1H8QV90|A0A1H8QV90_9GAMM 6-pyruvoyl tetrahydropte rin synthase OS=Aquisalimonas asiatica OX=406100 GN=SAM N04488052_101815 PE=4 SV=1
MARLFVEQLTVIDSSRLDPVDGLVGESWIVDVEIGGSLDAQGMVFDFGDVKRELKAAIDDTVDHRLLVPEQGTGITHTEDGVAVAFASRRGPIHMSGPAHTVVVVPGARVDAAALERLLQASLLPRLPGNVTDLTVHLRHEAIDGAWYAYSHGLQAHGGACQRIAHGHRSRLIVQRDGEPARDWEQYWARRWRNVYLGTRDHLVTTTERDGVSCYGFRYTSGEGVFTLELPAAACELLETETTVEQIAAHLHGEMKDREPAVRITVRAFEGVGKGALADG

SEQ ID NO: 17572 - protein, 140 aa, Aquisalimonas asiatica
  misc_feature (1)..(140): tr|A0A1H8TKH7|A0A1H8TKH7_9GAMM 6-pyruvoyl-tetrahydropte rin synthase OS=Aquisalimonas asiatica OX=406100 GN=SAM N04488052_104246 PE=4 SV=1
MYSLTVREHIMIAHSFRGETFGPAQQLHGATYLVDVTFRRPQLDDDNLVVDIGLASEQLRAVLAPLNYSNLDDDPALAGQNTTTEFLAGLIFRRMAEAVQAGRLGPQAHGLSHMAVVLHESHVAWASYEGRLIADSGAVG

SEQ ID NO: 17573 - protein, 134 aa, Aquisphaera giovannonii
  misc_feature (1)..(134): tr|A0A5B9VY68|A0A5B9VY68_9BACT 6-carboxy-5,6,7,8-tetrah ydropterin synthase OS=Aquisphaera giovannonii OX=40654 8 GN=queD PE=3 SV=1
MFQVSREIHFCYGHRLLDYEGKCRHLHGHNGRAVITLEGLQLDERGMLLDFGDIKRTVQRWIDENLDHNMLLRRDDPILPLLRERGERVFVMEHNPTAENIARLIYERAAEHGLPVVQVVLWETENCSASYGGP

SEQ ID NO: 17574 - protein, 164 aa, Aquisphaera giovannonii
  misc_feature (1)..(164): tr|A0A5B9WBF3|A0A5B9WBF3_9BACT 6-pyruvoyl tetrahydropte rin synthase OS=Aquisphaera giovannonii OX=406548 GN=OJ F2_59310 PE=4 SV=1
MPSSRYKVRVTKDYLVFSSGHFITFNGDTCEPIHGHNYRTAVEVEGDLDENHYVFDFIALRDMTRAIVDELDHRMLLPTQSPHIRLSEDGPNVRATYRDRYWSFPRDECVLLPVANTTSERLAEYIAGRLREAMAGRGLAVSRVIRVEVEECFGQSAEIEWRAD

SEQ ID NO: 17575 - protein, 343 aa, Aquitalea magnusonii
  misc_feature (1)..(343): tr|A0A318JI65|A0A318JI65_9NEIS 6-pyruvoyltetrahydropter in/6-carboxytetrahydropterin synthase OS=Aquitalea magn usonii OX=332411 GN=DFR38_11516 PE=4 SV=1
MHASCLLAGGRFEAARRVPGDEQRLNGLHGHSFRALARADVTHIAQNELHAALERVLAPLDYADLNQQLAQCDDLSLAQHIKDALPCPAALLLQSTPERGVMLENGTALYWIAARFEAAHHLPNVPAGHKCGRLHGHGFGVRIVANAQYCSQRQLEAAWAPLFLRLHQRYLNDIPGLENPTSEVIAAWLYHALQDAGLTGLAWVEVRETHTAGSQFDGKRFRIWKEQRFESAVPFDCHGNYSGHSYLVRLMLTGSLDRTMGWLLDFGDVKDRFKPLYRQLDHNPLDKLAGVRDGHSQSVAEWIHAHLSPLVPELARIDLMDDEHSGVSLLFHDDMRWPLLQGE

SEQ ID NO: 17576 - protein, 343 aa, Aquitalea magnusonii
  misc_feature (1)..(343): tr|A0A0F3K9C6|A0A0F3K9C6_9NEIS 6-pyruvoyl tetrahydrobio pterin synthase OS=Aquitalea magnusonii OX=332411 GN=VI 06_14405 PE=4 SV=1
MHASCLLAGGRFEAARRVAGDEHRLNGLHGHSFRVLARADVTHIEQAELHTALAQVLAPLDYADLNQQLPQCDDLSLARHIKDALNCPAALLLQSAPERGVMLENGTALHWIAASFEAAHHLPHVPAGHKCGRLHGHGFGVRIVAEARQHSQAQLEAAWAPLFLRLNHHYLNDIAGLENPTSEVIAAWLYHALQDAGLTGLAWVEVRETHTAGSQFDGKRFRIWKEQRFESAVPFDSNGNYTGHSYLVRLMLTGSLDRTMGWLLDFGDVKDRFKPIYRQLDHNPLDKLAGVRDGHSQSVAEWVHAHLSPLVPELARIDLMENAHQGVSLLFHDDMRWPLLQGE

SEQ ID NO: 17577 - protein, 343 aa, Aquitalea sp.
  misc_feature (1)..(343): tr|A0A4P6TKW3|A0A4P6TKW3_9NEIS 6-pyruvoyl tetrahydrobio pterin synthase OS=Aquitalea sp. USM4 OX=1590041 GN=DKK 66_12095 PE=4 SV=1
MHASCLLAGGRFEAARRVAGDEHRLNGLHGHSFRVLARADVTHIEQAELHTALAQVLAPLDYADLNQQLPQCDDLSLARHIKDALNCPAALLLQSAPERGVMLENGTALHWIAASFEAAHHLPHVPAGHKCGRLHGHGFGVRIVADARQHSQAQLEAAWAPLFLRLNHRYLNDIAGLENPTSEVIAAWLYHALQDAGLTGLAWVEVRETHTAGSQFDGKRFRIWKEQRFESAVPFDSNGNYTGHSYLVRLMLTGSLDRTMGWLLDFGDVKDRFKPIYRQLDHNPLDKLAGVRDGHSQSVAEWVHAHLSPLVPELARIDLMENAHQGVSLLFHDDMRWPLLQGE

SEQ ID NO: 17578 - protein, 343 aa, Aquitalea sp.
  misc_feature (1)..(343): tr|A0A3N7DBG6|A0A3N7DBG6_9NEIS 6-pyruvoyl tetrahydrobio pterin synthase OS=Aquitalea sp. FJL05 OX=2153366 GN=DB R44_14815 PE=4 SV=1
MHASCLLAGGRFEAARRVPGDEDRLNGLHGHSFRALARADLTHIEQNELHAALDRVLAPLDYADLNQQLAQCDDLSLAQHIKDALPCPAALLLQSTPQRGVMLENGTALYWIAARFEAAHHLPHVPAGHKCGRLHGHGFGVRIVANAQHCSQRQLEAAWAPLFLRLHQRYLNDIPGLENPTSEVIAAWLYGELQAAGLQGLAWVEVRETHTAGSQFDGKRFRIWKEQRFESAVPFDAAGNYSGHSYLVRLMLTGSLDRTMGWLLDFGDVKDRFKPLYRQLDHNPLDKLAGVRDGHSQSVAEWIHAHLSPLVPELARIDLMDDEHSGVSLLFHDDMRWPLLQGE

SEQ ID NO: 17579 - protein, 136 aa, Arachidicoccus ginsenosidivorans
  misc_feature (1)..(136): tr|A0A5B8VJT5|A0A5B8VJT5_9BACT 6-carboxytetrahydropteri n synthase OS=Arachidicoccus ginsenosidivorans OX=49605 7 GN=FSB73_09145 PE=4 SV=1
MVYLTRLEHFNAAHKLYNPNWTKAHNEAVFGLCANENWHGHNFELFVTVKGNPDPDTGFLMDVKVLSQIVNDRVIEALDHKNLNIEVPFLQGKMCTTENLAMAIWDQIVPHLPDKVHLHCIKLYETPRIYVEYFGE

SEQ ID NO: 17580 - protein, 139 aa, Arachidicoccus ginsenosidivorans
  misc_feature (1)..(139): tr|A0A5B8VMI7|A0A5B8VMI7_9BACT 6-carboxytetrahydropteri n synthase OS=Arachidicoccus ginsenosidivorans OX=49605 7 GN=FSB73_09140 PE=4 SV=1
MGQEKVAVFRKAHFNAAHRLHVESWDEQHNNEVFGKCNNPHFHGHNYELIVKVTGPVDPVTGFVVDLKLLNDVIQAEIIQRFDHKNLNLDTQEFKNLIPTAENIAIVIYQILRQKLDLALELQIRLYETERNFVEFPVA

SEQ ID NO: 17581 - protein, 137 aa, Arachidicoccus rhizosphaerae
  misc_feature (1)..(137): tr|A0A1H3VKR3|A0A1H3VKR3_9BACT 6-pyruvoyltetrahydropter in/6-carboxytetrahydropterin synthase OS=Arachidicoccus rhizosphaerae OX=551991 GN=SAMN05192529_101239 PE=4 SV =1
MVYLTRLEHFNAAHKLYNPDWTKEHNEAVFGLCANENWHGHNFELFVTVKGNPDPDTGFLMDVKALSRIVNEKVIEFLDHKNLNIEVPFLQGKMCTTENLAIAIWEQIVPHLPENVQLHRIKLYETPRIYVEYFGEN

SEQ ID NO: 17582 - protein, 139 aa, Arachidicoccus rhizosphaerae
  misc_feature (1)..(139): tr|A0A1H3VKY7|A0A1H3VKY7_9BACT 6-pyruvoyltetrahydropter in/6-carboxytetrahydropterin synthase OS=Arachidicoccus rhizosphaerae OX=551991 GN=SAMN05192529_101238 PE=4 SV =1
MGLEKVAVYRKAHFNAAHRLHVAAWDEPKNNQVFGKCNNPHFHGHNYELIVRVTGPVDPVTGFVVDLKWLNDVIQQEVILRFDHKNLNLDTQEFKTLIPTAENIAIVIYRLLRPKIDLALDLQVRLYETERNFVEFPAS

SEQ ID NO: 17583 - protein, 140 aa, Arachidicoccus sp.
  misc_feature (1)..(140): tr|A0A386HUI6|A0A386HUI6_9BACT 6-carboxy-5,6,7,8-tetrah ydropterin synthase OS=Arachidicoccus sp. KIS59-12 OX=2 341117 GN=D6B99_16835 PE=3 SV=1
MSRELVSVFRKAHFNAAHRLHVPSWSEAENTRIFDKCNNPHFHGHNYELVVKITGEVDTITGFVIDLKILNEIIQQEIIARFDHRNLNLDTQEFKTLNPTAENIAIVIYRLIRAKIDRSLDLQIRLYETERNFVEYPVSR

SEQ ID NO: 17584 - protein, 136 aa, Arachidicoccus sp.
  misc_feature (1)..(136): tr|A0A191TPX1|A0A191TPX1_9BACT 6-pyruvoyl tetrahydrobio pterin synthase OS=Arachidicoccus sp. BS20 OX=1850526 G N=A9P82_12340 PE=4 SV=1
MVYLTRLEHFNAAHKLYNPNWSREQNDEVFGLCANENWHGHNFELYVTVKGNPNPDTGFVMDVKKLSKIIIDNVIEKLDHKNLNLDVDFMQGKLCSTENLAIGIWQQLEPHLPKDVHLHKIKLYETPRIFVEYFGE

SEQ ID NO: 17585 - protein, 133 aa, Arboricoccus pini
  misc_feature (1)..(133): tr|A0A212Q7E0|A0A212Q7E0_9PROT 6-pyruvoyl-tetrahydropte rin synthase OS=Arboricoccus pini OX=1963835 GN=SAMN072 50955_101465 PE=4 SV=1
MFNVRVRDHIMIAHSFKGDVFGPAQALHGATFVVDVTFRRKELDRHNIVVDIGLATMTLKAILAEINYRNLDDVPAFAGENTTTEFVARWIHGQMAEAIKAGKLGPDANAVDALGVELGESHTAWAGFEGPLS

SEQ ID NO: 17586 - protein, 118 aa, Arboricoccus pini
  misc_feature (1)..(118): tr|A0A212RNJ4|A0A212RNJ4_9PROT 6-carboxy-5,6,7,8-tetrah ydropterin synthase OS=Arboricoccus pini OX=1963835 GN= SAMN07250955_11157 PE=3 SV=1
MRIVQAFTFEAAHRLPNVPASHRCSRMHGHSYRVELALEGKVDPGTGFVVDFFDVEAAFGPVLARLDHHTLNEVEGLSNPTAELIAIWIWDQVKPGLPQLASVKVFETPFCWAEHDGT

SEQ ID NO: 17587 - protein, 126 aa, Archangium gephyra
  misc_feature (1)..(126): tr|A0A2W5TPD9|A0A2W5TPD9_9DELT 6-pyruvoyl tetrahydropte rin synthase OS=Archangium gephyra OX=48 GN=DI536_03700 PE=4 SV=1
MFEVAVRRSFTSFHHLFGGDWGAENQHHSHDYLLEVVCQGAQVDQHQYLFDISVLEKHLEAFIDTVRGKSLNELPGFEGKNPSIELFARVAAERLKPALATQKSLSGFKVVIWEHAQAWASFHQSL

SEQ ID NO: 17588 - protein, 120 aa, Archangium gephyra
  misc_feature (1)..(120): tr|A0A0G2ZUV9|A0A0G2ZUV9_9DELT 6-carboxy-5,6,7,8-tetrah ydropterin synthase OS=Archangium gephyra OX=48 GN=AA31 4_05488 PE=3 SV=1
MEIFKEFTFEAAHRLPNVPAGHKCARLHGHSYRVTLHVQGPVGADSGWVMDFADLTEAFKPVHAQLDHYYLNELEGLSNPTSENLARWIWQRVRPRLPLLSQVMVRETCTSGCIYRGEND

SEQ ID NO: 17589 - protein, 120 aa, Archangium sp.
  misc_feature (1)..(120): tr|A0A1Q3HQE1|A0A1Q3HQE1_9DELT 6-carboxy-5,6,7,8-tetrah ydropterin synthase OS=Archangium sp. Cb G35 OX=1920190 GN=BO221_13935 PE=3 SV=1
MEIFKEFTFEAAHRLPNVPPGHKCARLHGHSYRVTLHVQGPVGADSGWVMDFADLTEAFKPLHAQLDHYYLNEIEGLSNPTSENLARWIWQRMRPLLPQLSQVMVRETCTSGCIYRGEAE

SEQ ID NO: 17590 - protein, 120 aa, Archangium violaceum
  misc_feature (1)..(120): tr|A0A084SZM6|A0A084SZM6_9DELT 6-carboxy-5,6,7,8-tetrah ydropterin synthase OS=Archangium violaceum Cb vi76 OX= 1406225 GN=Q664_06480 PE=3 SV=1
MEIFKEFTFEAAHRLPNVPPGHKCARLHGHSYRVTLHVQGPVGADSGWVMDFADLTEAFKPLHAQLDHYYLNEIEGLSNPTSENLARWIWQRMRPLLPQLSQVMVRETCTSGCIYRGEAD

SEQ ID NO: 17591 - protein, 140 aa, Arcicella aurantiaca
  misc_feature (1)..(140): tr|A0A316DHB1|A0A316DHB1_9BACT 6-pyruvoyltetrahydropter in/6-carboxytetrahydropterin synthase OS=Arcicella aura ntiaca OX=591202 GN=LV89_04664 PE=4 SV=1
MVYVTRKEHFNAAHRLYNPNWTEEKNQEVFGPCANINWHGHNFELIVTVKGNPDPDTGFVIDLKLLGDIIKREIIEKVDHKNINLDVDFMQGKMASCEIFVIEIWKILAPQVESASKTAKLHCLKLVETQKNYVEYFGGQ

SEQ ID NO: 17592 - protein, 139 aa, Arcicella aurantiaca
  misc_feature (1)..(139): tr|A0A316EBK7|A0A316EBK7_9BACT 6-carboxy-5,6,7,8-tetrah ydropterin synthase OS=Arcicella aurantiaca OX=591202 G N=LV89_01878 PE=3 SV=1
MTQKKVAVFRKEHFNAAHRLNNPNWSDEKNERVYGKCNNYNFHGHNYDLIVQVTGEIDPETGYVMDMKILSELIKCEVLDNFDHKNLNLDTEEFKDLNPSAENIAIVIYDKLRDKINKNFDLKIRLYETERNFVEYPIG

SEQ ID NO: 17593 - protein, 177 aa, Arcobacter anaerophilus
  misc_feature (1)..(177): tr|A0A4Q0XXK1|A0A4Q0XXK1_9PROT 6-carboxytetrahydropteri n synthase OS=Arcobacter anaerophilus OX=877500 GN=CRV0 6_12385 PE=4 SV=1
MTWKISKSFDFCYGHRVWSQELNPDYSLDPCLKCRHLHGHQGKVVVFLEATKLKNGMVTDFKHLNWFKQFLDDVLDHKFIIDINDPLFETLLPHYSKEELMEFEEGYKLVDLTKIKDEPLHIKEMYEGYVLVDFVPTSENLSAWFLKITSEKMQDLGIKVASVEFAETPKSKSHVYA

SEQ ID NO: 17594 - protein, 181 aa, Arcobacter aquimarinus
  misc_feature (1)..(181): tr|A0A4V1LBR6|A0A4V1LBR6_9PROT 6-carboxytetrahydropteri n synthase QueD OS=Arcobacter aquimarinus OX=1315211 GN =CP986_10780 PE=4 SV=1
MIIRKKFKFEGAHIVRNCSTKRCKTSIHGHSYKVELFFTSNKLDNGYMILDFGLTKKHIKNIIDSFDHAYSLWAEESEEFKNFFKTNSLRWIEMPVSPSAESYSLMFLKFIDHILKNTKFSNGEGDVKVTSVRVHETKTGYAEAFLSDINLIELDIKKVVFSDEIINEWKNKDELLKILSV

SEQ ID NO: 17595 - protein, 177 aa, Arcobacter aquimarinus
  misc_feature (1)..(177): tr|A0A4Q0UTB9|A0A4Q0UTB9_9PROT 6-pyruvoyl tetrahydrobio pterin synthase OS=Arcobacter aquimarinus OX=1315211 GN =CP986_03965 PE=4 SV=1
MHWKISKEFEFCYGHRVWSQTLNTEFSLDGCLKCRHLHGHQGKILVYLEASELKDGMVTDFKHLNWFKQFIDDVLDHKFILDINDPLFNTLLPNVKKDELIKFDENYYLVDLTKFKDDEIHIKELYEGYVLVDFVPTSENLSAWFLKIVQKKMDKLNIKVSHIEFLETPKSKSTFYA

SEQ ID NO: 17596 - protein, 177 aa, Arcobacter bivalviorum
  misc_feature (1)..(177): tr|A0A345J047|A0A345J047_9PROT 6-carboxy-5,6,7,8-tetrah ydropterin synthase OS=Arcobacter bivalviorum OX=663364 GN=queD PE=4 SV=1
MTWKISKSFDFCYGHRVWSQTLNSEYSLDPCLKCRHLHGHQGQIVIFLEANELKDGMVTDFKHLNWFKQFLDDVLDHKFIIDINDPLYPTLLPHFKKEDLIYFEQGYYIPDMNKIKEEALHIKEMYEGYVIVDFVPTSENLSAWFLKIASEKMKNLGIKVSSVEFAETPKSKSHVFA

SEQ ID NO: 17597 - protein, 174 aa, Arcobacter butzleri
  misc_feature (1)..(174): tr|A0A2W5JTJ2|A0A2W5JTJ2_9PROT 6-carboxytetrahydropteri n synthase OS=Arcobacter butzleri OX=28197 GN=DI567_064 05 PE=4 SV=1
MKWEISKEFDFCYGHRVWSQTLNIDFSLDACLKCRHLHGHQGKVIVYLESNELNNSMVTDFKHLNWFKAFLDDVLDHKFILDINDPLFSTLVPNIKKEGLIKFDEGYFSINLTNFKNEELELYESYVVVDFVPTSENLSAWFLKIVQEKMNGLNIKVSKIEFLETPKSKSTFYA

SEQ ID NO: 17598 - protein, 174 aa, Arcobacter butzleri
  misc_feature (1)..(174): tr|A0A0M1UQA8|A0A0M1UQA8_9PROT Uncharacterized protein OS=Arcobacter butzleri ED-1 OX=944546 GN=ABED_1867 PE=4 SV=1
MKWEISKEFDFCYGHRVWSQTLNIDFSLDACLKCRHLHGHQGKVIVYLESNELNNSMVTDFKHLNWFKAFLDDVLDHKFILDINDPLFSTLVPNIKKEDLIKFDEGYFSINLTNFKNEELELYESYVVVDFVPTSENLSAWFLKIVQEKMNGLNIKVSKIEFLETPKSKSTFYA

SEQ ID NO: 17599 - protein, 177 aa, Arcobacter canalis
  misc_feature (1)..(177): tr|A0A2G1CVV6|A0A2G1CVV6_9PROT 6-pyruvoyl tetrahydrobio pterin synthase OS=Arcobacter canalis OX=1912871 GN=CPG 37_03245 PE=4 SV=1
MHWKISKEFDFCYGHRVWSQTLNTDFSLDGCLKCRHLHGHQGKILVYLEAKELKDGMVTDFKHLNWFKSFIDDVLDHKFILDINDPLFETLLPKVNKENLVKFTEGYYLVDLTKLQDEENYIIELYEGYVLVDFVPTSENLSAWFLKIVQEKMNDLGIKVSHVEFLETPKSKSTFYA

SEQ ID NO: 17600 - protein, 175 aa, Arcobacter cibarius
  misc_feature (1)..(175): tr|A0A5J6RGP2|A0A5J6RGP2_9PROT 6-carboxy-5,6,7,8-tetrah ydropterin synthase OS=Arcobacter cibarius OX=255507 GN =queD PE=4 SV=1
MWEISKEFDFCYGHRVWSQSLNIEFSLDGCLMCRHLHGHQGKVIVYLKSDKVKDGMVTDFKHLNWFKKFLDDILDHKFIIDINDPLFSTLLPMIDKKDLIDFEEGYKTVNLKGFQNELLELYESYIIVNFVPTSENISEWLLKIVQEKMNKIDVKVSKIEFLETPKSKSTFYARS

SEQ ID NO: 17601 - protein, 181 aa, Arcobacter cloacae
  misc_feature (1)..(181): tr|A0A4Q0V6R3|A0A4Q0V6R3_9PROT 6-carboxytetrahydropteri n synthase QueD OS=Arcobacter cloacae OX=1054034 GN=CP9 63_05245 PE=4 SV=1
MIIRKKFKFEGAHIVRNCSTKRCKTSIHGHSYKVELFFTSNKLDNGYMILDFGLTKKHIKNIIDSFDHAYSLWGEESEEFKNFFKTNSLRWVEMPVSPSAESYSLMFLKFIDHILKNTKFSNGEGDVKISSVRVHETKTGYAEAFVSDMDLIELDIKKVIFSDEIINEWKNKDELLKILST

SEQ ID NO: 17602 - protein, 177 aa, Arcobacter cloacae
  misc_feature (1)..(177): tr|A0A4V1LV79|A0A4V1LV79_9PROT 6-pyruvoyl tetrahydrobio pterin synthase OS=Arcobacter cloacae OX=1054034 GN=CP9 63_01115 PE=4 SV=1
MHWKISKEFEFCYGHRVWSQTLNTEFSLDGCLKCRHLHGHQGKILVYLEASELKDGMVTDFKHLNWFKQFIDDVLDHKFILDINDPLFDTLLPNVKKNELIKFDENYYLVDLTKFKDDEIHIKELYEGYVLVDFVPTSENLSAWFLRIVQKKMDKLNIKVSHIEFLETPKSKSTFYA

SEQ ID NO: 17603 - protein, 175 aa, Arcobacter cryaerophilus
  misc_feature (1)..(175): tr|A0A2S9SNC5|A0A2S9SNC5_9PROT 6-pyruvoyl tetrahydrobio pterin synthase OS=Arcobacter cryaerophilus OX=28198 GN =CJ669_04810 PE=4 SV=1
MWEISKEFDFCYGHRVWSQALNVEFSLDSCLMCRHLHGHQGKAIVYLKSDTLKSGMVTDFKHLNWFKKFLDDVIDHKFIIDINDPLFKTLLPNIDKKDLISFKEGYKTVDLTNFKNELLELYESYIIVDFVPTSENISAWLLKIVQNKMDKLNIKVSKVEFLETPKSKSTFYARS

SEQ ID NO: 17604 - protein, 175 aa, Arcobacter cryaerophilus
  misc_feature (1)..(175): tr|A0A494T2I0|A0A494T2I0_9PROT 6-carboxy-5,6,7,8-tetrah ydropterin synthase OS=Arcobacter cryaerophilus D2610 O X=1032071 GN=queD PE=4 SV=1
MWEISKEFDFCYGHRVWSQSLNVEFSLDSCLMCRHLHGHQGKVIVYLKSDTLKSGMVTDFKHLNWFKKFLDDVIDHKFIIDINDPLFSTLLPNIDKKDLISFKEGYKTVDLTNFKNELLELYESYIIVDFVPTSENISAWLLKIVQNKMDKLNIKVSKVEFLETPKSKSTFYARS

SEQ ID NO: 17605 - protein, 177 aa, Arcobacter defluvii
  misc_feature (1)..(177): tr|A0A4Q0UNT7|A0A4Q0UNT7_9PROT 6-carboxytetrahydropteri n synthase OS=Arcobacter defluvii OX=873191 GN=CP964_04 235 PE=4 SV=1
MMWKISKEFDFCYGHRVWSQTLDVEFSLDGCLKCRHLHGHQGKILVYLEATKLNDGMVTDFKHLNWFKAFLDDVLDHKFILDINDPLFSTLLPHIDKNELIKYDENYYLVNLTKFQNLESHIKELYEGYVIVNFVPTSENLSAWFLNIVQNKMEKLGIKVSHVEFLETPKSKSTFYA

SEQ ID NO: 17606 - protein, 181 aa, Arcobacter defluvii
  misc_feature (1)..(181): tr|A0A4Q0UJC3|A0A4Q0UJC3_9PROT 6-carboxytetrahydropteri n synthase QueD OS=Arcobacter defluvii OX=873191 GN=CP9 64_12460 PE=4 SV=1
MIIRKKFKFEGAHIVRNCSTNRCKKSIHGHSYIVEVFFTSNKLDNGYMILDFGLTKKHIENIIDSFDHAYSMWSEEKEEFKNFFKTNSERWIEMPVSPSAESYSLMFLKFIDHILKHTTFSNAEGDVLVTSVRVHETKTGYAEAFREDMELIELDIKKVVFSKEVINEWKEKDELIKILSF

SEQ ID NO: 17607 - protein, 177 aa, Arcobacter ebronensis
  misc_feature (1)..(177): tr|A0A4Q1AVP8|A0A4Q1AVP8_9PROT 6-pyruvoyl tetrahydrobio pterin synthase OS=Arcobacter ebronensis OX=1462615 GN= CRV07_06125 PE=4 SV=1
MTWKISKSFDFCYGHRVWSQELNAEFSMDSCLKCRHLHGHQGKVIIYLESNKLNNGMVTDFKHLNWFKHFLDDVLDHKFIIDINDPLFQTLLPHYNKEELLKFPQGYMLVDLTKIKDEPQHIKEMYEGYVLVDFVPTSENLSAWFLKIAAEKMSKLGIKVSSVEFEETPKSKSHVYA

SEQ ID NO: 17608 - protein, 177 aa, Arcobacter ebronensis
  misc_feature (1)..(177): tr|A0A4Q0YEJ2|A0A4Q0YEJ2_9PROT 6-pyruvoyl tetrahydrobio pterin synthase OS=Arcobacter ebronensis OX=1462615 GN= CRV08_05335 PE=4 SV=1
MTWKISKSFDFCYGHRVWSQELNAEFSMDSCLKCRHLHGHQGKVIIYLESNKLNNGMVTDFKHLTWFKHFLDDVLDHKFIIDINDPLFQTLLPHYNKEELVKFPQGYMLVDLTKIEDEPQHIKEMYEGYVLVDFVPTSENLSAWFLKIAAEKMSKLGIKVASVEFEETPKSKSHVYA

SEQ ID NO: 17609 - protein, 177 aa, Arcobacter ellisii
  misc_feature (1)..(177): tr|A0A347UBB1|A0A347UBB1_9PROT 6-carboxy-5,6,7,8-tetrah ydropterin synthase OS=Arcobacter ellisii OX=913109 GN= queD PE=4 SV=1
MHWKISKEFEFCYGHRVWSQTLNTEFSLDGCLKCRHLHGHQGKILVYLEASELKDGMVTDFKHLNWFKQFIDDVLDHKFILDLNDPLFNTLLPHINKDELIKFEENYYLVDLTKFKDDEVHIKELYEGYVLVDFVPTSENLSAWFLKIVQKKMDKLNIKVSHVEFLETPKSKSTFYA

SEQ ID NO: 17610 - protein, 177 aa, Arcobacter halophilus
  misc_feature (1)..(177): tr|A0A2N1J3W9|A0A2N1J3W9_9PROT 6-pyruvoyl tetrahydrobio pterin synthase OS=Arcobacter halophilus OX=197482 GN=C P960_05215 PE=4 SV=1
MHWKISKEFDFCYGHRVWSQTLNTDFSLDGCLKCRHLHGHQGKILVYLESKELKDGMVTDFKHLNWFKSFIDNVLDHKFILDINDPLFDTLLPKVKKSELIKFEQGYYLVDLTKFSNDEHYIKELYEGYVLVDFVPTSENLSAWFLQIVQNKMHNLGIKVSHIEFLETPKSKSTFYA

SEQ ID NO: 17611 - protein, 177 aa, Arcobacter marinus
  misc_feature (1)..(177): tr|A0A347THS5|A0A347THS5_9PROT 6-carboxy-5,6,7,8-tetrah ydropterin synthase OS=Arcobacter marinus OX=505249 GN= queD PE=4 SV=1
MHWKISKEFDFCYGHRVWSQTLNTDFSLDGCLKCRHLHGHQGKILVYLEAKKLKDGMVTDFKHLNWFKSFIDDVLDHKFILDINDPLFETLLPKVNKKNLIKFNEGYYLVDLSKLQDEENHIIELYEGYVLVDFVPTSENLSAWFLEIVQEKMNNLGIKVSHVEFLETPKSKSTFYA

SEQ ID NO: 17612 - protein, 177 aa, Arcobacter molluscorum
  misc_feature (1)..(177): tr|A0A2G1DK46|A0A2G1DK46_9PROT 6-pyruvoyl tetrahydrobio pterin synthase OS=Arcobacter molluscorum LMG 25693 OX= 870501 GN=CPU12_03285 PE=4 SV=1
MHWKISKEFDFCYGHRVWSQSLNTEFSLDGCLKCRHLHGHQGKIIVYLEANELDNGMVTDFKHLNWFKKFIDDILDHKFIIDINDPLFQTLLPNIKKESLVKYEQGYYLVDLTKLENNQPHIIELYEGYVIVDFVPTSENLSAWFLKIVQNKMNKLNIKVSHIEFLETPKSKSTFYA

SEQ ID NO: 17613 - protein, 177 aa, Arcobacter mytili
  misc_feature (1)..(177): tr|A0A345J2E1|A0A345J2E1_9PROT 6-carboxy-5,6,7,8-tetrah ydropterin synthase OS=Arcobacter mytili LMG 24559 OX=1 032238 GN=queD PE=4 SV=1
MHWKISKEFEFCYGHRVWSQTLNTDFSLDGCLKCRHLHGHQGKILVYLEASKLQDGMVTDFKHLNWFKAFIDDVLDHKFILDINDPLFQTLLPKVKKEELINFEQGYYLVDLTKFSNDEHYIKELYEGYVLVDFVPTSENLSAWFLKIVQEKMNHLGIKVSHVEFLETPKSKSTFYA

SEQ ID NO: 17614 - protein, 178 aa, Arcobacter nitrofigilis
  misc_feature (1)..(178): tr|D5UZC7|D5UZC7_ARCNC Uncharacterized protein OS=Arcob acter nitrofigilis (strain ATCC 33309 / DSM 7299 / LMG 7604 / NCTC 12251 / CI) OX=572480 GN=Arnit_0499 PE=4 SV =1
MKWNISKEFDFCYGHRVWSQELNPDFSLDTCLMCRHLHGHQGKVIVHLESSSLKNGMVTDFKHLNWFKKFLDDTLDHKFVLDLNDPLFETLLPHFKNKEELFFHEEGFYTFDLNSIKDEPIHIRELYEGYVLVDFVPTSENLSAWLLEIIQTKMNELPIEVSHVEFLETPKSKSTVYA

SEQ ID NO: 17615 - protein, 177 aa, Arcobacter pacificus
  misc_feature (1)..(177): tr|A0A5C2H9E3|A0A5C2H9E3_9PROT 6-carboxy-5,6,7,8-tetrah ydropterin synthase OS=Arcobacter pacificus OX=1080223 GN=queD PE=4 SV=1
MHWKISKEFDFCYGHRVWSQTLNSEFSIDSCLKCRHLHGHQGKVIVYLQAEELKDGMVTDFKHLNWFKLFLDDVLDHKFILDINDPLFSKLLPDIKKDELVKFDEGYSLVDLTKFKDEESYITELYEGYVIVDFVPTSENISAWLLKIVAKKMAKLNVEVSHIEFLETPKSKSTFYA

SEQ ID NO: 17616 - protein, 175 aa, Arcobacter skirrowii
  misc_feature (1)..(175): tr|A0A2U2C2W5|A0A2U2C2W5_9PROT 6-carboxytetrahydropteri n synthase OS=Arcobacter skirrowii OX=28200 GN=DF188_01 455 PE=4 SV=1
MWEISKEFDFCYGHRVWSQALNVEFSLDSCLMCRHLHGHQGKAIVYLKSDSLKSGMVTDFKHLNWFKKFLDDVIDHKFIIDINDPLFKTLLPNIDKKDLISFKEGYKTVNLNNFENELLELYESYIIVDFVPTSENISAWLLKIVQNKMDKLNIKVSKIEFLETPKSKSTFYARS

SEQ ID NO: 17617 - protein, 175 aa, Arcobacter skirrowii
  misc_feature (1)..(175): tr|A0A4Q0UG80|A0A4Q0UG80_9PROT 6-carboxytetrahydropteri n synthase OS=Arcobacter skirrowii CCUG 10374 OX=103223 9 GN=CP959_02290 PE=4 SV=1
MWEISKEFDFCYGHRVWSQALNVEFSLDSCLMCRHLHGHQGKAIVYLKSDNLKSGMVTDFKHLNWFKKFLDDVIDHKFIIDINDPLFKTLLPNIDKKDLISFKEGYKTVDLTNFKNELLELYESYIIVDFVPTSENISAWLLKIVQNKMDKLNIKVSKIEFLETPKSKSTFYARS

SEQ ID NO: 17618 - protein, 178 aa, Arcobacter sp.
  misc_feature (1)..(178): tr|A0A2G2HDK0|A0A2G2HDK0_9PROT 6-pyruvoyl tetrahydrobio pterin synthase OS=Arcobacter sp. OX=1872629 GN=COA66_0 8305 PE=4 SV=1
MKWNISKEFDFCYGHRVWSQELDIEFALDDCLVCRHLHGHQGKIIIHLESDKLKGGMVTDFKHLNWFKVFLDKTLDHKFIIDINDPLFPTLLPHYTNKENLISFEENYKRPDMDFIKNEEDHIKEMYEGYIIVDYVPTSENISTWLLKIIEKKMKRLDVKVSHLEFLETPKSKSTVYA

SEQ ID NO: 17619 - protein, 178 aa, Arcobacter sp.
  misc_feature (1)..(178): tr|A0A1Y5E1V0|A0A1Y5E1V0_9PROT 6-pyruvoyl tetrahydrobio pterin synthase OS=Arcobacter sp. 31_11_sub10_T18 OX=18 56277 GN=A9Q76_00095 PE=4 SV=1
MKWEISKEFDFCYGHRVWSQELNVEFALDDCLMCRHMHGHQGKIKVSLESETLKAGMVTDFKHLNWFKKFLDDVLDHRFIIDSNDPLYDTLLPLYKNKENLLSYEQGYKTPDMELLKNEPLHIKELYEGFVIVDFVPTSENLSAWLLEIVQKKMSKINVHVPKLEFWETPKSKSTVYA

SEQ ID NO: 17620 - protein, 177 aa, Arcobacter suis
  misc_feature (1)..(177): tr|A0A443TJY2|A0A443TJY2_9PROT 6-pyruvoyl tetrahydrobio pterin synthase OS=Arcobacter suis OX=1278212 GN=CKA55_ 10750 PE=4 SV=1
MHWKISKEFEFCYGHRVWSQTLDTEFSLDGCLKCRHLHGHQGKILVYLEANELKDGMVTDFKHLNWFKQFIDDVLDHKFILDINDPLFSTLLPNVNKDELIKFDENYHLVDLTKFKDDEVHIKELYEGYVLVDFVPTSENLSAWFLKIVQKKMDKINIKVSHVEFLETPKSKSTFYA

SEQ ID NO: 17621 - protein, 175 aa, Arcobacter trophiarum
  misc_feature (1)..(175): tr|A0A4Q0ZX67|A0A4Q0ZX67_9PROT 6-pyruvoyl tetrahydrobio pterin synthase OS=Arcobacter trophiarum LMG 25534 OX=1 032241 GN=CRU87_03820 PE=4 SV=1
MWEISKEFDFCYGHRVWSQSLNIEFSLDSCLMCRHLHGHQGKVIVYLKSDSLQSGMVTDFKHLNWFKKFLDDIIDHKFILDINDPLFSTLLPNIDKKYLIKFKEGYKTVNLKDYKNELLELYESYIIVDFVPTSENISAWLLKIVQEKMSKLDIKVSKVEFLETPKSKSTFYAGN

SEQ ID NO: 17622 - protein, 177 aa, Arcobacter venerupis
  misc_feature (1)..(177): tr|A0A443TSQ3|A0A443TSQ3_9PROT 6-pyruvoyl tetrahydrobio pterin synthase OS=Arcobacter venerupis OX=1054033 GN=C KA56_13290 PE=4 SV=1
MHWKISKEFEFCYGHRVWSQTLDAEFSLDSCLKCRHLHGHQGKILVYLEAHELKDGMVTDFKHLNWFKQFIDDVLDHKFILDLNDPLFSTLLPKIEKSELIKFDENFYLVDLTKFKDEENHIKELYEGYVIVDFVPTSENLSAWFLKIVQKKMDKLNIKVSHVEFLETPKSKSTFYA

SEQ ID NO: 17623 - protein, 181 aa, Arcobacter venerupis
  misc_feature (1)..(181): tr|A0A443TZL6|A0A443TZL6_9PROT 6-carboxytetrahydropteri n synthase QueD OS=Arcobacter venerupis OX=1054033 GN=C KA56_01420 PE=4 SV=1
MIIRKKFKFEGAHIVRNCSTKRCKTSIHGHSYEVEVFFTSNKLDNGYMVLDFGLTKKHIKNIIDSFDHAYSLWSQETDEFKNFFKTNSLRWIEMPVSPSAEIYSLMFLKFIDHILKNTSFFNGEGDVKVSSVRVHETKTGYAEAFRDDMDSIELDIKKVVFSDEVVNEWKNKNELLKILSM

SEQ ID NO: 17624 - protein, 137 aa, Arcticibacter pallidicorallinus
  misc_feature (1)..(137): tr|A0A2T0U7K6|A0A2T0U7K6_9SPHI 6-carboxy-5,6,7,8-tetrah ydropterin synthase OS=Arcticibacter pallidicorallinus OX=1259464 GN=B0I27_103367 PE=3 SV=1
MIYITRRERFNAAHKLFREEWSAEKNLEIFGKCANPNWHGHNYELFVTVKGDVNPETGYVLDLKILKHIVQKYVVDKLDHKNVNLDVDFMSGKMASTEVLCIEIFNQLDPHIKDAGVVLHRVKLVETENNYVEYYGR

SEQ ID NO: 17625 - protein, 91 aa, Arcticibacter pallidicorallinus
  misc_feature (1)..(91): tr|A0A2T0U3C4|A0A2T0U3C4_9SPHI PreQ(0) biosynthesis pro tein QueD OS=Arcticibacter pallidicorallinus OX=1259464 GN=B0I27_106175 PE=4 SV=1
MHGHTYTLTVFLEGDVDPATGWLVDFTDLKEAVDPLVKSLDHRLLNEIPGLENPTSERLAEWFWIKIKPLMPLLSKIEISETPTSGVVYTG

SEQ ID NO: 17626 - protein, 141 aa, Arcticibacter svalbardensis
  misc_feature (1)..(141): tr|R9GSA6|R9GSA6_9SPHI 6-carboxy-5,6,7,8-tetrahydropter in synthase OS=Arcticibacter svalbardensis MN12-7 OX=11 50600 GN=ADIARSV_2434 PE=3 SV=1
MIYITRREQFNAAHKLFREEWSDEKNLEVFGKCANPNWHGHNYELFVTVKGAVAPETGYVIDLKVLKDIIKSHVTDKLDHKNVNLDVDFMQGKMASTEVICVEIFNQLQPHIEAKGVFLHKVKLVETENNYVEYYGHQPIS

SEQ ID NO: 17627 - protein, 92 aa, Arcticibacter svalbardensis
  misc_feature (1)..(92): tr|R9GWM9|R9GWM9_9SPHI Queuosine biosynthesis QueD, PTP S-I OS=Arcticibacter svalbardensis MN12-7 OX=1150600 GN =ADIARSV_0712 PE=4 SV=1
MHGHTYTLTVSLEGEVDSYTGWLIDFTDLKEAVDPLVKALDHRLLNEIPGLDNPTSERLAEWFWDKIKPVMPLLSKIEINETPSSGVIYIGK

SEQ ID NO: 17628 - protein, 136 aa, Arcticibacterium luteifluviistationis
  misc_feature (1)..(136): tr|A0A2Z4GA28|A0A2Z4GA28_9BACT 6-carboxy-5,6,7,8-tetrah ydropterin synthase OS=Arcticibacterium luteifluviistat ionis OX=1784714 GN=DJ013_07895 PE=3 SV=1
MIRITRRENFNAAHRLFNPKWSEEKNYEVFGPCSRLHGHNWTLYVTVAGEIDEETGFVMDLKKLKDLVREVIIDKVDHTYLNEDVDFLRGKLPSTEIFSREIWRLLSPILKDRYGVELFEIKLHETENHFAQYFGE

SEQ ID NO: 17629 - protein, 138 aa, Arcticibacterium luteifluviistationis
  misc_feature (1)..(138): tr|A0A2Z4G720|A0A2Z4G720_9BACT 6-carboxy-5,6,7,8-tetrah ydropterin synthase OS=Arcticibacterium luteifluviistat ionis OX=1784714 GN=DJ013_01675 PE=3 SV=1
MNKKVAVFRKEHFNAAHRLHRADWSDEKNNAVFGKCNNPNFHGHNYNLDIKVVGEVNPETGYVIDIKILSDLIKEHVLDAFDHKNLNLDVPEFKELNPTAENIAIVIYEKLERALNNHELDLKVRLYETERNYVEYPG

SEQ ID NO: 17630 - protein, 215 aa, Ardenticatena maritima
  misc_feature (1)..(215): tr|A0A0M8K5B9|A0A0M8K5B9_9CHLR 6-pyruvoyltetrahydropter in/6-carboxytetrahydropterin synthase OS=Ardenticatena maritima OX=872965 GN=queD PE=4 SV=1
MQMAFFSRNNEKKIEETSLPEGFWDVDIERILKAPEGFVYEITLDMFFNARHFVVMNGVPGEVHTHSYRLQVRCRSRQLEQDSHVVVGYTAIRERMNQVVSAYNNQLLNDLPPFQRLQPTTENLAAVLFQQLERLLADLPVELVGVTVWESPTESVAFRLEPVEQERFQQEEASRALRRPDTRKRFYALMRAQQAASLKALQHGDDDEHRAQQAS

SEQ ID NO: 17631 - protein, 213 aa, Ardenticatena maritima
  misc_feature (1)..(213): tr|A0A0P6YE74|A0A0P6YE74_9CHLR Uncharacterized protein OS=Ardenticatena maritima OX=872965 GN=SE16_07810 PE=4 SV=1
MAFFSRNNEKKIEETSLPEGFWDVDIERILKAPEGFVYEITLDMFFNARHFVVMNGVPGEVHTHSYRLQVRCRSRQLEQDSHVVVGYTAIRERMNQVVSAYNNQLLNDLPPFQRLQPTTENLAAVLFQQLERLLADLPVELVGVTVWESPTESVAFRLEPVEQERFQQEEASRALRRPDTRKRFYALMRAQQAASLKALQHGDDDEHRAQQAS

SEQ ID NO: 17632 - protein, 418 aa, Ardenticatenia bacterium
  misc_feature (1)..(418): tr|A0A3M1BUF0|A0A3M1BUF0_9CHLR Uncharacterized protein OS=Ardenticatenia bacterium OX=2099665 GN=D6802_05445 P E=4 SV=1
MTVQPRIWTTKRFEFCASRQLWRTDWSAEQNRRIFGRLASPHGYASNFTLFVTVSGAVNPDTGMTMNVVDLKQTVNTVLEAFDHRHLNIETPYFTTRPATLEAIADALADAIAPHLPPDIRLERLRLHEDEHRFAEWLRGDIRIGRRTLFSAAHRTASPHVSADENRARFGVCTRTHGHNYVLTTTFGGARHPEFGWLAHPDHLDTLVETVRREFDHCHLNDDLPYFRNQAATTETIVGVLFDRLREEAATLVPDVAVLRAELAELPDFRAATEGERWRDFIREYTFSAAHRMANPNLSEAENRRLYGKCANPHGHGHSYRVVLTLRAPLDERWGIAADLVETDRAAQAVIEQVAFKRLDADIPFFQTHVATTENLLTYLWNAFARAFGERLHHIAIWETPNNLFEYGRAPHFQGAEN

SEQ ID NO: 17633 - protein, 212 aa, Ardenticatenia bacterium
  misc_feature (1)..(212): tr|A0A3M1BU03|A0A3M1BU03_9CHLR 6-carboxytetrahydropteri n synthase OS=Ardenticatenia bacterium OX=2099665 GN=D6 802_05780 PE=4 SV=1
MAFFSRNDEKKIEEPSVPEGFWDVDIERILKAPEGFVYEITLDMFFNARHFVVMNGVPGEVHTHSYRLQVRCRSRQLEKDSHVVVGYTAIRERMNQVVSAYNNQLLNDLPPFQRLQPTTENLAAVLFQQLERLFADLPVELVGVTVWESPTESVAFRLEPVEQERFQEEASRALQRPDTRKRFYALMRTQQAASLKALQYGDDDEHRAQQAS

SEQ ID NO: 17634 - protein, 135 aa, Arenibacter algicola
  misc_feature (1)..(135): tr|A0A221V5I4|A0A221V5I4_9FLAO 6-carboxy-5,6,7,8-tetrah ydropterin synthase OS=Arenibacter algicola OX=616991 G N=queD PE=3 SV=1
MKVKVSRKAHFNAAHRLYRPDWSFEKNDNVFGLCNNPNFHGHNYELIVSVTGEIDEETGFVIDMKVLKDLIREKIEKQLDHKNLNVEVEWFKTVNPTAENIVVYIWNQLRPFIKASNELEVVLYETPRNYVTFSG

SEQ ID NO: 17635 - protein, 149 aa, Arenibacter algicola
  misc_feature (1)..(149): tr|A0A221UTY8|A0A221UTY8_9FLAO 6-carboxy-5,6,7,8-tetrah ydropterin synthase OS=Arenibacter algicola OX=616991 G N=AREALGSMS7_01080 PE=3 SV=1
MGNIRITKQFNFETGHALFGYDGKCRNVHGHSYKLSVTVIGKPITDTAHVKLGMVIDFGDLKRIVKEEIVDQFDHATVFNKNTPHVELAQELTDRGHNVILANYQPTSENMVLDFADRIKARLPKNISLHSLKLQETDTSFAEWYASDN

SEQ ID NO: 17636 - protein, 149 aa, Arenibacter echinorum; identical to SEQ ID NO: 17635
  misc_feature (1)..(149): tr|A0A327RAX2|A0A327RAX2_9FLAO 6-carboxy-5,6,7,8-tetrah ydropterin synthase OS=Arenibacter echinorum OX=440515 GN=LV92_01064 PE=3 SV=1

SEQ ID NO: 17637 - protein, 135 aa, Arenibacter echinorum
  misc_feature (1)..(135): tr|A0A327QPN1|A0A327QPN1_9FLAO 6-carboxy-5,6,7,8-tetrah ydropterin synthase OS=Arenibacter echinorum OX=440515 GN=LV92_04320 PE=3 SV=1
MKVKVSRKAHFNAAHRLYRPEWSFEKNDNVFGLCNNPNFHGHNYELIVSVTGEIDEETGFVIDMKVLKDLIREKIEKQLDHKNLNVEVEWFKTVNPTAENIVVYIWNQLRPFIKASNELEVVLYETPRNYVTFSG

SEQ ID NO: 17638 - protein, 149 aa, Arenibacter nanhaiticus
  misc_feature (1)..(149): tr|A0A1M6CVV8|A0A1M6CVV8_9FLAO 6-carboxy-5,6,7,8-tetrah ydropterin synthase OS=Arenibacter nanhaiticus OX=55815 5 GN=SAMN04487911_10471 PE=3 SV=1
MGNIRITKQFNFETGHALYGYDGKCRNVHGHSYKLSVTVIGTPITDTTHVKLGMVIDFGDLKKIVKEEIVDVFDHATVFNKHTPHVELAKELTDRGHSVILADYQPTSENMVLSFADKIKARLPENIKLHSLRLQETDTSFAEWYASDN

SEQ ID NO: 17639 - protein, 138 aa, Arenibacter nanhaiticus
  misc_feature (1)..(138): tr|A0A1M6IAQ8|A0A1M6IAQ8_9FLAO 6-carboxy-5,6,7,8-tetrah ydropterin synthase OS=Arenibacter nanhaiticus OX=55815 5 GN=SAMN04487911_1175 PE=3 SV=1
MRVKVSRKAHFNAAHRLFRPDWSFEKNEEVFGLCNNPNFHGHNYELIVSVTGKIDPETGFVIDMKVLKDLIKTEIEDSLDHKNLNIEIEEFKTVNPTAENIAVFIWNKLRPFIDASNDLEVVLYETPRNFVTYTGPEA

SEQ ID NO: 17640 - protein, 135 aa, Arenibacter palladensis
  misc_feature (1)..(135): tr|A0A543W2I4|A0A543W2I4_9FLAO 6-carboxy-5,6,7,8-tetrah ydropterin synthase OS=Arenibacter palladensis OX=23737 3 GN=GQ41_0441 PE=3 SV=1
MKVKVSRKAHFNAAHRLYRPDWSFEKNDNVFGLCNNPNFHGHNYELIVSVTGEIDEETGFVIDMKVLKDLIREKIEKQLDHKNLNVEVEWFKTVNPTAENIVVYIWNQLRPFIAASNELEVVLYETPRNYVTFSG

SEQ ID NO: 17641 - protein, 135 aa, Arenibacter palladensis
  misc_feature (1)..(135): tr|A0A1M5H6A6|A0A1M5H6A6_9FLAO 6-carboxy-5,6,7,8-tetrah ydropterin synthase OS=Arenibacter palladensis OX=23737 3 GN=SAMN03080594_1137 PE=3 SV=1
MKVKVSRKAHFNAAHRLYRPEWSYEKNDSVFGLCNNPNFHGHNYELIVSVTGEIDEETGFVIDMKDLKELIREKIENQLDHKNLNVEVEWFKTVNPTAENIVVYIWNQLRPFIKASNELEVVLYETPRNFVTYSG

SEQ ID NO: 17642 - protein, 135 aa, Arenibacter sp.
  misc_feature (1)..(135): tr|A0A2I9ECL9|A0A2I9ECL9_9FLAO 6-carboxy-5,6,7,8-tetrah ydropterin synthase OS=Arenibacter sp. C-21 OX=1883406 GN=queD PE=3 SV=1
MKVKVSRKAHFNAAHRLYRPDWSFEKNDNVFGLCNNPNFHGHNYELIVSVTGEIDEETGFVIDMKVLKDLIREKIEKQLDHKNLNVEVEWFKAVNPTAENIVVYIWNQLRPFIKASNELEVVLYETPRNYVTFSG

SEQ ID NO: 17643 - protein, 135 aa, Arenibacter sp.
  misc_feature (1)..(135): tr|A0A318I748|A0A318I748_9FLAO 6-carboxy-5,6,7,8-tetrah ydropterin synthase OS=Arenibacter sp. ARW7G5Y1 OX=2135 619 GN=C7972_12076 PE=3 SV=1
MKVKVSRKAHFNAAHRLYRPDWSFEKNDSVFGLCNNPNFHGHNYELVVSVTGEIDPETGFVMDMKILKDLIKDKIEKHLDHKNLNVEVEWFKKVNPTAENIAVYIWNLLRPFVEASHELEVILYETPRNYVTFSG

SEQ ID NO: 17644 - protein, 149 aa, Arenibacter troitsensis
  misc_feature (1)..(149): tr|A0A1X7JWX4|A0A1X7JWX4_9FLAO 6-carboxy-5,6,7,8-tetrah ydropterin synthase OS=Arenibacter troitsensis OX=18887 2 GN=SAMN03080602_02352 PE=3 SV=1
MGNIRITKQFNFETGHALFGYDGKCRNVHGHSYKLSVTVIGKPITDTTHVKLGMVIDFGDLKRIVKEEIVDQFDHATVFNKNTPHVELAQELTDRGHNVILANYQPTSENMVLDFADRIKARLPKNISLHSLKLQETDTSFAEWYASDN

SEQ ID NO: 17645 - protein, 135 aa, Arenibacter troitsensis; identical to SEQ ID NO: 17641
  misc_feature (1)..(135): tr|A0A1X7LET2|A0A1X7LET2_9FLAO 6-carboxy-5,6,7,8-tetrah ydropterin synthase OS=Arenibacter troitsensis OX=18887 2 GN=SAMN03080602_04204 PE=3 SV=1

SEQ ID NO: 17646 - protein, 169 aa, Arenicella xantha
  misc_feature (1)..(169): tr|A0A395JNB6|A0A395JNB6_9GAMM 6-pyruvoyltetrahydropter in/6-carboxytetrahydropterin synthase OS=Arenicella xan tha OX=644221 GN=DFR28_101444 PE=4 SV=1
MPRLSSIEIRKQYLHFSAAHFTIFSATERERLHGHNWRLGVEITGEIDANGLCFDYAIYKKILKDLCHQYDEYTLIADHSPYLQISEDEEFYFVTHNHRTQPLLKTDTLLLPVKNITIEELANYFLKLLTDDRERLEELKIYRFEVRVSSGPDQWGIARWDRLAEANDV

SEQ ID NO: 17647 - protein, 289 aa, Arenicella xantha
  misc_feature (1)..(289): tr|A0A395JS46|A0A395JS46_9GAMM 6-pyruvoyl tetrahydropte rin synthase-like protein OS=Arenicella xantha OX=64422 1 GN=DFR28_101547 PE=4 SV=1
MPRLFVNNLTVIDCSVLDPKRGLIGASWEVDVELHGKLDAQSMVFDFAKVKKAIKQLIDAEVDHKLLVPLNYQQLSIDGQLSDDDTGTLALSFTTNDDLSIKHSSPASAICAIATARVSRKRVEKYLKARLQEILPSNVEKIQIKLRKESRAGSYYTYSHGLKKHDGNCQRIAHGHRSTIRIWKNGKRKRGLEKALASRWQDIYLGSNADIVSYQHDDISFRYQAPQGVFEISLPADRVHIMHCDSTVECIAEHIVELLNEASPNAHFKVQAFEGVGKGAIAESLPAIP

SEQ ID NO: 17648 - protein, 119 aa, Arenimonas caeni
  misc_feature (1)..(119): tr|A0A2P6M6Q1|A0A2P6M6Q1_9GAMM 6-carboxy-5,6,7,8-tetrah ydropterin synthase OS=Arenimonas caeni OX=2058085 GN=q ueD PE=3 SV=1
MDIFKSFTLEAAHRLPNVPEGHKCARVHGHSFRVELHVSGEVGERTGWVMDFGDIKAAFKPLYDQLDHHYLNDIAGLDNPTSENLAIWIWDHLKPALPLLSAVVVHETCTSGCRYTGPR

SEQ ID NO: 17649 - protein, 119 aa, Arenimonas composti
  misc_feature (1)..(119): tr|A0A091BWT7|A0A091BWT7_9GAMM 6-carboxy-5,6,7,8-tetrah ydropterin synthase OS=Arenimonas composti TR7-09 = DSM 18010 OX=1121013 GN=P873_13440 PE=3 SV=1
MDIFKVFRIEAAHRLPNVPPGHKCARLHGHSFAVELHVAGEPDPHSGWIMDFGDIKAVFAPLYEQLDHHYLNEVEGLDNPTSENLARWIWDRLKPDLPALSEVVVHETCTSGCRYRGPR

SEQ ID NO: 17650 - protein, 119 aa, Arenimonas donghaensis
  misc_feature (1)..(119): tr|A0A087MK61|A0A087MK61_9GAMM 6-carboxy-5,6,7,8-tetrah ydropterin synthase OS=Arenimonas donghaensis DSM 18148 = HO3-R19 OX=1121014 GN=N788_10515 PE=3 SV=1
MDIFKCFTLEAAHRLPNVPAGHKCARVHGHSFRIELHVSGEVGADTGWVMDFSDIKAAFQPLYDQLDHHYLNDVDGLDNPTSENLAIWIWDKLKPALPGLSAVVVHETCTSGCRYTGPG

SEQ ID NO: 17651 - protein, 119 aa, Arenimonas malthae
  misc_feature (1)..(119): tr|A0A091BWX3|A0A091BWX3_9GAMM 6-carboxy-5,6,7,8-tetrah ydropterin synthase OS=Arenimonas malthae CC-JY-1 OX=13 84054 GN=N790_05590 PE=3 SV=1
MDIFKSFTLEAAHRLPNVPEGHKCARVHGHSFRVELHVSGEVGERTGWVMDFGDIKAAFKPLYDRLDHYYLNDIPGLENPTSENLAIWIWDHLKPALPLLSAVVVHETCTSGCRYTGPR

SEQ ID NO: 17652 - protein, 118 aa, Arenimonas metalli
  misc_feature (1)..(118): tr|A0A091B4M2|A0A091B4M2_9GAMM 6-carboxy-5,6,7,8-tetrah ydropterin synthase OS=Arenimonas metalli CF5-1 OX=1384 056 GN=N787_10580 PE=3 SV=1
MDIFKVFRIEAAHRLPNVPPGHKCARLHGHSFAVELHVGGTPDPHTGWIMDFGDIKAVFAPIYDRLDHHYLNDIPGLENPTSENLARWIWDELKPALPALSLVVVHETCTSGCRYAGH

SEQ ID NO: 17653 - protein, 118 aa, Arenimonas oryziterrae
  misc_feature (1)..(118): tr|A0A091ATT6|A0A091ATT6_9GAMM 6-carboxy-5,6,7,8-tetrah ydropterin synthase OS=Arenimonas oryziterrae DSM 21050 = YC6267 OX=1121015 GN=N789_13685 PE=3 SV=1
MDIFKIFRIEAAHRLPNVPAGHKCARLHGHSFAIELQVGGVPDARSGWIMDFGDVKKIFQPIYDQLDHHYLNDIPGLENPTSEMLAIWIWDRLKPALPALSEVIVHETCTSGCRYRGA

SEQ ID NO: 17654 - protein, 119 aa, Arenimonas sp.; identical to SEQ ID NO: 17651
  misc_feature (1)..(119): tr|A0A352QRM0|A0A352QRM0_9GAMM 6-carboxy-5,6,7,8-tetrah ydropterin synthase OS=Arenimonas sp. OX=1872635 GN=que D PE=3 SV=1

SEQ ID NO: 17655 - protein, 119 aa, Arenimonas sp.
  misc_feature (1)..(119): tr|A0A5B2Z7Z5|A0A5B2Z7Z5_9GAMM 6-carboxy-5,6,7,8-tetrah ydropterin synthase OS=Arenimonas sp. 3729k OX=2608255 GN=queD PE=3 SV=1
MDIFKTFTLEAAHRLPNVPPGHKCARLHGHSFRVELHVSGEVGADTGWVMDFADIKAAFQPLYERLDHHYLNDIPGLENPTSENLAIWIWRELKPSLPLLSAVVVHETCTSGCRYTGPD

SEQ ID NO: 17656 - protein, 136 aa, Arenitalea lutea
  misc_feature (1)..(136): tr|A0A1M6CJT1|A0A1M6CJT1_9FLAO 6-carboxy-5,6,7,8-tetrah ydropterin synthase OS=Arenitalea lutea OX=1178825 GN=S AMN05216261_1276 PE=3 SV=1
MIVTVSRKAHFNAAHRLYRKDWSFEKNDEIFGKCNNPNFHGHNYELIVSVTGEIDKETGYVIDMKVLKDIIKSEVEDAFDHKNLNEEVPEFRDLNPTAENISVIIYNKIKPKLSPNLKLEITLYETPRNFVVYSGH

SEQ ID NO: 17657 - protein, 151 aa, Arenitalea lutea
  misc_feature (1)..(151): tr|A0A1M6DHR1|A0A1M6DHR1_9FLAO 6-pyruvoyltetrahydropter in/6-carboxytetrahydropterin synthase OS=Arenitalea lut ea OX=1178825 GN=SAMN05216261_1572 PE=4 SV=1
MGNNIRITKQFSFETGHALYGYDGKCKNVHGHSYKLSVTVIGKPITDNTNVKYGMVIDFGDLKKIVKEEIVNVFDHATVFNKNTPHVELAKELQDRGHNVLLVDYQPTSEMMVLDFAKKISKRLPKHISLHSLKLQETESSFAEWFQYDNI

SEQ ID NO: 17658 - protein, 127 aa, Armatimonadetes bacterium
  misc_feature (1)..(127): tr|A0A0T6APC8|A0A0T6APC8_9BACT 6-carboxy-5,6,7,8-tetrah ydropterin synthase OS=Armatimonadetes bacterium CSP1-3 OX=1640515 GN=XU14_C0039G0011 PE=3 SV=1
MNAELYALTVRTSFAAAHRLLEYDGNCERLHGHNWQVEVTVESPTLDERGIALDFRIIKASLNGLLSRFDHRYMNEVPPFDGLNPSSENLARHLYEEMGKSVPPPARVSRVTVWESDDARAEYSRPA

SEQ ID NO: 17659 - protein, 145 aa, Armatimonadetes bacterium
  misc_feature (1)..(145): tr|A0A1Y0GZ34|A0A1Y0GZ34_9BACT Uncharacterized protein OS=Armatimonadetes bacterium Uphvl-Ar1 OX=2004467 GN=CC B80_07685 PE=4 SV=1
MSELQPIRITKEYRWEMGHRLSYHTEGCQNLHGHSYRIIVGLTGQTNDGGMIFDFGDISRIIKPIIDELDHSTMLHQEDQPLVNFLQSQSMKLTLVPFHPTTEELARWLIQKVIGQLPTAPNIHSLDLTVFETATSTVTLTHNFS

SEQ ID NO: 17660 - protein, 149 aa, Aromatoleum aromaticum
  misc_feature (1)..(149): tr|Q5P8A3|Q5P8A3_AROAE 6-carboxy-5,6,7,8-tetrahydropter in synthase OS=Aromatoleum aromaticum (strain EbN1) OX= 76114 GN=queD PE=3 SV=1
MRITRRLEFDAGHRIPDHASQCRHLHGHRYAIEITLSGDIIDAAGEAVNGMVMDFGDIKLIARTHVIDRWDHAFLVYRGDSAVVDFLATMPAHKTVVLDTVPTAENLASEAFRILDSCYRDLYGNHLRLERVRLYETPNCWADALRPGE

SEQ ID NO: 17661 - protein, 138 aa, Arsenicibacter rosenii
  misc_feature (1)..(138): tr|A0A1S2VM81|A0A1S2VM81_9BACT 6-carboxytetrahydropteri n synthase QueD OS=Arsenicibacter rosenii OX=1750698 GN =BLX24_08510 PE=4 SV=1
MVYVNRIEHFNAAHRLFNPNWSEEKNKEVFGPCANAYFHGHNFELIVTVKGEPNPDTGFVIDMKKLGQIIKQEVIEKLDHKNLNMDVDFLQGKLASCEVLVMEIWKILERALHDITEARLHQIRLYETPKNFVDYYGE

SEQ ID NO: 17662 - protein, 154 aa, Arsenicibacter rosenii
  misc_feature (1)..(154): tr|A0A1S2VF95|A0A1S2VF95_9BACT 6-pyruvoyl tetrahydrobio pterin synthase OS=Arsenicibacter rosenii OX=1750698 GN =BLX24_20290 PE=4 SV=1
MKPFADAAEHTPFAADSRPRVAVFRKEHFNAAHRLNNPNWSDEKNERVYGKCNNYNYHGHNYDLILQVTGPVDPETGYVIDMKVLSDISKTFVLDRFDHKNLNLDTEEFKDLNPSAENIAIVIYQILREQLDPSLDLKIRLYETERNFVEYPAA

SEQ ID NO: 17663 - protein, 126 aa, Arsenicicoccus sp.
  misc_feature (1)..(126): tr|A0A2W6V9T1|A0A2W6V9T1_9MICO 6-pyruvoyl tetrahydrobio pterin synthase OS=Arsenicicoccus sp. OX=1872639 GN=DI5 71_07215 PE=4 SV=1
MFGLTVTDHVMIAHSLPDPFFGPAQGLHGATLVVEATWRRRELDEHGVVVDIGEAGGHLAAVLDPLRYQNLDEHPDFAGRLSTTESVAAHVAHALADHADPAVDGIGVVVREHPQAWVTYDLDLRA

SEQ ID NO: 17664 - protein, 127 aa, Arsenicicoccus sp.
  misc_feature (1)..(127): tr|A0A0K1F6J7|A0A0K1F6J7_9MICO Uncharacterized protein OS=Arsenicicoccus sp. oral taxon 190 OX=1658671 GN=ADJ7 3_01570 PE=4 SV=1
MFSVTVGSRFMCAHSLPDPFFGPAQQLHGVTYVVEATFERRELDEHNVVVDIGAATEQLRAILAPLDYRNLDDVEELSGLLTTTERMAQHIAERLTETMDLTGLHALQVLLREHADAWASYRIDLSA

SEQ ID NO: 17665 - protein, 120 aa, Arsenophonus endosymbiont
  misc_feature (1)..(120): tr|A0A4Q1B6Y4|A0A4Q1B6Y4_9GAMM 6-carboxy-5,6,7,8-tetrah ydropterin synthase OS=Arsenophonus endosymbiont of Bem isia tabaci Asia II 3 OX=1868623 GN=BBD39_03380 PE=3 SV =1
MSATIFKDFQFEAAHRLPHVPVGHKCGRLHGHSFMVRLELIGEIDQQTGWIVDFSDISKAFKPLWQQLDHHYLNDIEGLENPTSEVIARWIWHKMKPIFPQLSSIMIKETCNVGCIYRGK

SEQ ID NO: 17666 - protein, 120 aa, Arsenophonus nasoniae
  misc_feature (1)..(120): tr|A0A4P7L4I2|A0A4P7L4I2_9GAMM 6-carboxy-5,6,7,8-tetrah ydropterin synthase OS=Arsenophonus nasoniae OX=638 GN= queD PE=3 SV=1
MSATIFKDFQFEAAHRLPHVPAGHKCGRLHGHSFMVRLELTGEIDPQTGWVVDFSDISKAFKPLWQQLDHHYLNDIEGLENPTSEVIARWIWHKMKPMLPQLSSIMIKETCNAGCIYRGK

SEQ ID NO: 17667 - protein, 131 aa, Arsenophonus nasoniae
  misc_feature (1)..(131): tr|D2U3T3|D2U3T3_9GAMM 6-carboxy-5,6,7,8-tetrahydropter in synthase OS=Arsenophonus nasoniae OX=638 GN=ptpS PE= 3 SV=1
MFALIQLIGAIMSATIFKDFQFEAAHRLPHVPAGHKCGRLHGHSFMVRLELTGEIDPQTGWVVDFSDISKAFKPLWQQLDHHYLNDIEGLENPTSEVIARWIWHKMKPMLPQLSSIMIKETCNAGCIYRGK

SEQ ID NO: 17668 - protein, 120 aa, Arsenophonus sp.
  misc_feature (1)..(120): tr|A0A2A2GZX3|A0A2A2GZX3_9GAMM 6-carboxy-5,6,7,8-tetrah ydropterin synthase OS=Arsenophonus sp. ENCA OX=1987579 GN=CBG25_09990 PE=3 SV=1
MSATIFKDFQFEAAHRLPHVPTGHKCGRLHGHSFMVRLELTGEIDQQTGWIVDFSDISKAFKPLWQQLDHHYLNDIEGLENPTSEVIARWIWHKMKPILPQLSSIMIKETCNAGCIYRGE

SEQ ID NO: 17669 - protein, 216 aa, Arsukibacterium ikkense
  misc_feature (1)..(216): tr|A0A0M2V229|A0A0M2V229_9GAMM QueD like protein OS=Ars ukibacterium ikkense OX=336831 GN=WG68_14200 PE=4 SV=1
MEFIMVLLVALVVLVAMVASRFIDNSNPFQVQRRSSLFSPVERSFQNLLEKAVAGEYKILNRIKLADLIEVKENANEKARRSTLVKLNAKYLDFVLCSADDLRVIAVLDLVNNSNKDGHKAAPDWFVSGALEAAGVPYLRIKIKAGYTAADLQQALAQRLGKPTVKAEPMYKGLVKKGPTRPVRSFKPAPAPGTELTPVLSHSQIKAQQTALIQAS

SEQ ID NO: 17670 - protein, 285 aa, Arsukibacterium ikkense
  misc_feature (1)..(285): tr|A0A0M2V7Z6|A0A0M2V7Z6_9GAMM 6-pyruvoyl tetrahydropte rin synthase OS=Arsukibacterium ikkense OX=336831 GN=WG 68_04360 PE=4 SV=1
MILFVNSLTVIDFSYLDLKRGMVGESYIVDTELHGSLDDTAMVFDFAKVKKVIKQAIDQLVDHKLALPALCPALTTTVQAANTLVRYQSQRGVISLASPAEAFALIPSQQINEQSVADYLEQQIKPLLPANVERLKLTLRPEASTGFYYHYSHGLKKHDGNCQRIAHGHRSTIQIYVDGMLSPRLNKLWSERWQDRYLGSAVDRVDSTALQHISSEADDYCFRYQASQGWFELVMPKSHCDIVPCDTTVECLAEYIAGELKGLDQSKTYKVVAYEGVAKGAIAQL

SEQ ID NO: 17671 - protein, 219 aa, Arsukibacterium sp.
  misc_feature (1)..(219): tr|A0A0M2VIL8|A0A0M2VIL8_9GAMM QueD like protein OS=Ars ukibacterium sp. MJ3 OX=1632859 GN=VT06_09205 PE=4 SV=1
MEFIMLLLVALVVLVAMVASRFIDNNNPFQVQKRSSLFSPVERSFQNLLEKAVVGEYKILNRVKLADLIEVKGNATEKSRRSTLLKLNAKYLDFVLCAADDLRVIAVLDLVNNSNKDGHKAAPDWFVSGALEAAGLPYLRIKIKAGYTATDLQQALATRLGKPTVKAEPMYKGLVKKGPTRPVRSFKPVQTLQSAGTGLTPALSHSQIKAQQTALIQAS

SEQ ID NO: 17672 - protein, 285 aa, Arsukibacterium sp.
  misc_feature (1)..(285): tr|A0A0M2VLS8|A0A0M2VLS8_9GAMM 6-pyruvoyl tetrahydropte rin synthase OS=Arsukibacterium sp. MJ3 OX=1632859 GN=V T06_00600 PE=4 SV=1
MILFVNSLTVIDFSYLDLKRGMVGESYIVDAELHGSLDDTAMVFDFAKVKKVIKQAIDQLVDHKLAIPTACQAVTLCATDTATVVHYNSDRGTISLASPADAFACIATTQINEQSVSEFLQENIKPLLPANVERLVLTLRPEASNGFYYHYSHGLKKHDGNCQRIAHGHRSTIQLYVDGMLSPRLNKQWSERWHDIYLGSATDLCDSSALQQLAGQADAYCFRYQASQGWFELVIPQRHCEIVPCDSTVECLADYIASELKAMDNSKTYKVVAYEGVAKGAIAQQ

SEQ ID NO: 17673 - protein, 132 aa, Arthrobacter alpinus
  misc_feature (1)..(132): tr|A0A0U3P684|A0A0U3P684_9MICC 6-pyruvoyl tetrahydropte rin synthase OS=Arthrobacter alpinus OX=656366 GN=MB46_ 03335 PE=4 SV=1
MFSVSVRDHMMIAHSFNGEAFGPAQRLHGATYIIDATFTREELDANSTVVDIGTAAAELRSIVEALGYRNLDDDTDFAGINTTTEVLAKTVADRLAVRIHAGAFGPGASGLSGITVTLRESHISWASYERAL

SEQ ID NO: 17674 - protein, 132 aa, Arthrobacter alpinus
  misc_feature (1)..(132): tr|A0A1H5K2V6|A0A1H5K2V6_9MICC 6-pyruvoyl-tetrahydropte rin synthase OS=Arthrobacter alpinus OX=656366 GN=SAMN0 4489740_1852 PE=4 SV=1
MFSVSVRDHMMIAHSFNGEAFGPAQRLHGATYIIDATFTREELDANSTVVDIGTAAAELRSIVEALGYRNLDDDGDFAGINTTTEVLAKTVADRLAVRIHAGAFGPGASGLAGVTVTLRESHIAWASYERAL

SEQ ID NO: 17675 - protein, 66 aa, Arthrobacter bacterium
  misc_feature (1)..(66): tr|A0A353ZXL6|A0A353ZXL6_9MICC 6-pyruvoyl tetrahydrobio pterin synthase (Fragment) OS=Arthrobacter bacterium OX =2053508 GN=DDY41_18125 PE=4 SV=1
MFSLTVRRHFMIAHSLPREVFGPAQALHGATFVAEVTFRRRALNQDSIVLDIGAAGGIVEHVLSGL

SEQ ID NO: 17676 - protein, 131 aa, Arthrobacter bacterium
  misc_feature (1)..(131): tr|A0A3D3KTG6|A0A3D3KTG6_9MICC 6-pyruvoyl tetrahydrobio pterin synthase OS=Arthrobacter bacterium OX=2053508 GN =DEP82_01380 PE=4 SV=1
MFSLTVRRHFMIAHSLPREVFGPAQALHGATFVAEVTFRRRALNQDSIVLDIGAAGGIVEHVLSGLTYKNLDEHPDFEGRLSTTEALAEYIAHAVAGKLKDHDDGRELAGIDVTLRENPDAWATCTLDLSA

SEQ ID NO: 17677 - protein, 132 aa, Arthrobacter cupressi
  misc_feature (1)..(132): tr|A0A1G8V3E6|A0A1G8V3E6_9MICC 6-pyruvoyltetrahydropter in/6-carboxytetrahydropterin synthase OS=Arthrobacter c upressi OX=1045773 GN=SAMN05216555_11335 PE=4 SV=1
MFSLTVRRHFMIAHSLPRESFGPAQGLHGATFVAEVSFRRVELNQDAVVIDIGAAGELLQQVLDQLNYKNLDELPEFAGQLTTTEVLARYIAERLAEKLPDAAAIAGLDVVLRENPDAWAGYSLELPGPSQV

SEQ ID NO: 17678 - protein, 131 aa, Arthrobacter enclensis
  misc_feature (1)..(131): tr|A0A0V8IGG8|A0A0V8IGG8_9MICC 6-pyruvoyl tetrahydrobio pterin synthase OS=Arthrobacter enclensis OX=993070 GN= AS031_14330 PE=4 SV=1
MFSLTVRRHFMIAHSLPREAFGPAQGLHGATFVAEVAFRRRALNENAIVLDIGAAGTVIEEVLDGLNYKNLDEHPDFEGKLSTTEALAQYIAQAVAAKISNDDDGRHLDGIDVTLRENPDAWATFSLDLRA

SEQ ID NO: 17679 - protein, 132 aa, Arthrobacter glacialis
  misc_feature (1)..(132): tr|A0A2S3ZRH9|A0A2S3ZRH9_ARTGL Uncharacterized protein OS=Arthrobacter glacialis OX=1664 GN=CVS27_18960 PE=4 S V=1
MFSVNVRDHMMVAHSFSGAAFGPAQRLHGATYIIDATFKRDALDENNTVLDIGVAAAELRTIAAALGYSNLDDDPEFAGINTTTEVLAKAIADRLADRVRAGAFGPAALQLASIAVTLHESHVAWASYERPL

SEQ ID NO: 17680 - protein, 132 aa, Arthrobacter globiformis
  misc_feature (1)..(132): tr|A0A328HPL7|A0A328HPL7_ARTGO 6-carboxytetrahydropteri n synthase OS=Arthrobacter globiformis OX=1665 GN=DBZ45 _00405 PE=4 SV=1
MFSLTVRRHFMIAHSLPREAFGPAQGLHGATFVAEVTFRRRALNDDAIVLDIGAAGNMIEEVLAGLNYRNLDEHPDFAGKLSTTEALAQYIADAVAKRLREDKDGRELAGLDVTLRENPDAWASYALEFDRS

SEQ ID NO: 17681 - protein, 132 aa, Arthrobacter globiformis
  misc_feature (1)..(132): tr|H0QLN4|H0QLN4_ARTGO Uncharacterized protein OS=Arthr obacter globiformis NBRC 12137 OX=1077972 GN=ARGLB_047_ 00850 PE=4 SV=1
MFSLTVRRHFMIAHSLPREAFGPAQGLHGATFVAEVTFRRRALNEDAIVLDIGAAGSMIEEVLAGLNYRNLDDHPDFAGKLSTTEALAQYIAGAVADRLREDTDGRELAGLDVTLRENPDAWASYALEFDRD

SEQ ID NO: 17682 - protein, 132 aa, Arthrobacter humicola
  misc_feature (1)..(132): tr|A0A315TKU0|A0A315TKU0_9MICC 6-pyruvoyl tetrahydrobio pterin synthase OS=Arthrobacter humicola OX=409291 GN=C 9424_18760 PE=4 SV=1
MFSLTVRRNFMIAHSLPREVFGPAQGLHGATFVTEVTFRRRELNDDAIVLDIGAAGVVVDEVLDELNYKNLDEHPDFAGKLSTTEALARYIGDGVAAQIRIGRDGRALTGLDVTLRETPDAWASYSLDFDAS

SEQ ID NO: 17683 - protein, 131 aa, Arthrobacter nitrophenolicus
  misc_feature (1)..(131): tr|L8TV30|L8TV30_9MICC 6-carboxytetrahydropterin syntha se OS=Arthrobacter nitrophenolicus OX=683150 GN=E2R57_0 9920 PE=4 SV=1
MFSLTVRRHFMIAHSLPREAFGPAQALHGATFVAEVSFRRHTLNDDEIVLDIGAAGTVIEEVLAGLNYRNLDEHPDFAGRLSTTEALAQYIAQEVAGKIENHDDGRHLQGIDVTLRENPDAWATYSLDLSA

SEQ ID NO: 17684 - protein, 132 aa, Arthrobacter oryzae
  misc_feature (1)..(132): tr|A0A495EPK9|A0A495EPK9_9MICC 6-pyruvoyltetrahydropter in/6-carboxytetrahydropterin synthase OS=Arthrobacter o ryzae OX=409290 GN=C8D78_2657 PE=4 SV=1
MFSLTVRRNFMIAHSLPREAFGPAQGLHGATFVTEVTFRRRELNDDAIVLDIGAAGDVLDEVLAGLNYKNLDEHPDFAGKLSTTEALARYVADAVAAQIRVGEDGRGLAGLDVTLRETPDAWAGYSLDFEAR

SEQ ID NO: 17685 - protein, 126 aa, Arthrobacter rhombi
  misc_feature (1)..(126): tr|A0A1R4GQR1|A0A1R4GQR1_9MICC PTPS-like type 4 OS=Arth robacter rhombi OX=71253 GN=FM101_12510 PE=4 SV=1
MYSLTVRDHIMIAHSLPDPFFGPAQALHGATLVVEVTWRRAELGPHGVVMDIGAATSMLSDVLQSLRYANLDEHPAFAGRLSTTETIAGHISEELCRNFDTNEFAGLGVLLREHPDAWACHDIDFD

SEQ ID NO: 17686 - protein, 132 aa, Arthrobacter sp.
  misc_feature (1)..(132): tr|J7LMI2|J7LMI2_9MICC Uncharacterized protein OS=Arthr obacter sp. Rue61a OX=1118963 GN=ARUE_c07410 PE=4 SV=1
MFSLTVRRHFMIAHSLPREAFGPAQGLHGATFVAEVTFRRPNVNDDAIVLDIGAAGGILEEVLADLNYKNLDEHPAFKGKLSTTEALAKHIADAMAARIQDTADGPALTGIDVVLRENPDAWAGYSLELPVK

SEQ ID NO: 17687 - protein, 132 aa, Arthrobacter sp.
  misc_feature (1)..(132): tr|A0A1G5QKF7|A0A1G5QKF7_9MICC 6-pyruvoyltetrahydropter in/6-carboxytetrahydropterin synthase OS=Arthrobacter s p. UNCCL28 OX=1502752 GN=SAMN02799638_03328 PE=4 SV=1
MFSLTVRRHFMIAHSLPREAFGPAQGLHGATFVAEVSFRRPDLNDDAIVLDIGAAGGILEEILEDLNYKNLDEHPAFKGKLSTTEALAKHIADAMATRIQDTADGPALSGIDVVLRENPDAWAGYSLELPVK

SEQ ID NO: 17688 - protein, 130 aa, Arthrobacter woluwensis
  misc_feature (1)..(130): tr|A0A1H4LJA4|A0A1H4LJA4_9MICC 6-pyruvoyltetrahydropter in/6-carboxytetrahydropterin synthase OS=Arthrobacter w oluwensis OX=156980 GN=SAMN04489745_1026 PE=4 SV=1
MFSLTVRRSFMIAHSLPRESFGPAQGLHGATFVAEVGFRRAELNDDSVVIDIGAAGDLLQEILDRLNYKNLDELPEFAGRLTTTEFLARHIAERLAEKLPDDAGLAGLDVTLRENPDAWAGYSLDLSRGR

SEQ ID NO: 17689 - protein, 130 aa, Arthrobacter woluwensis
  misc_feature (1)..(130): tr|A0A2T3BZI1|A0A2T3BZI1_9MICC 6-pyruvoyl tetrahydrobio pterin synthase OS=Arthrobacter woluwensis OX=156980 GN =C6401_07675 PE=4 SV=1
MFSLTVRRSFMIAHSLPRESFGPAQGLHGATFVAEVGFRRAELNEDSVVIDIGAAGDLLQEILDRLNYKNLDELPEFAGRLTTTEFLARHIAERLAEKLPDDAGLAGLDVTLRENPDAWAGYSLDLSRGR

SEQ ID NO: 17690 - protein, 130 aa, Arthrospira maxima
  misc_feature (1)..(130): tr|B5W8I5|B5W8I5_LIMMA 6-carboxy-5,6,7,8-tetrahydropter in synthase OS=Arthrospira maxima CS-328 OX=513049 GN=A maxDRAFT_5085 PE=3 SV=1
MSKWKLTTEFTFDSAHYIKDYNGPCGRLHGHTYKVRVEATSNQLHGSEFCPHPVMVADFRSLRWAKKDVSKGGLDHGLLNEILPPNYETTAEMIAKFIYDETKKRVPEGVQLKVMVSETANSWVEYEDET

SEQ ID NO: 17691 - protein, 290 aa, Arthrospira maxima
  misc_feature (1)..(290): tr|B5W6A8|B5W6A8_LIMMA Uncharacterized protein OS=Arthr ospira maxima CS-328 OX=513049 GN=AmaxDRAFT_4307 PE=4 S V=1
MQCLITRRAQFSASHRYWLPELSEAENFAKFGQTARAPGHGHNYVLYVSMVGELDEYGMVLNLSNVKHTIRSEVTEPLDFSFLNEAWLEFQDTLPTTEFLAYLIWHRLAPHLPLTNIQLFEHPQLWADYQGNSMEAYLTISTHFSAAHRLAHPLLSDEDNSKIYGKCARPHGHGHNYHLEVTIRGQIDPRTGMIADLGAVQKAIDDYVVEPFDHTFLNKDIPYFAKVVPTAENIAVYIRDLLQNPIDELGAHLHKIKLIESPNNSCEVYCTTSEHQPHLAANREPVAVGV

SEQ ID NO: 17692 - protein, 290 aa, Arthrospira platensis; identical to SEQ ID NO: 17691
  misc_feature (1)..(290): tr|K1WL63|K1WL63_ARTPT Uncharacterized protein OS=Arthr ospira platensis C1 OX=459495 GN=SPLC1_S207250 PE=4 SV= 1

SEQ ID NO: 17693 - protein, 290 aa, Arthrospira platensis
  misc_feature (1)..(290): tr|D4ZVX7|D4ZVX7_ARTPN 6-pyruvoyl tetrahydropterin synt hase homolog OS=Arthrospira platensis (strain NIES-39 / IAM M-135) OX=696747 GN=NIES39_K02950 PE=4 SV=1
MQCLITRRAQFSASHRYWLPELSEAENFAKFGQTARAPGHGHNYVLYVSMVGELDEYGMVLNLSNVKHTIRSEVTEPLDFSFLNEAWPEFQHTLPTTEFLAYLIWHRLAPHLPLTNIQLFEHPQLWADYQGNAMEAYLTISTHFSAAHRLAHPLLNDEDNSKIYGKCARPHGHGHNYHLEVTIRGQIDPRTGMIADLGAVQKAIDDYVVEPFDHTFLNKDIPYFAKVVPTAENIAVYIRELLQNPIDELGANLHKIKLIESPNNSCEVYCTPSEHQTPLASHREPVAVGA

SEQ ID NO: 17694 - protein, 51 aa, Arthrospira sp.
  misc_feature (1)..(51): tr|A0A328V4D6|A0A328V4D6_9CYAN 6-pyruvoyl tetrahydropte rin synthase (Fragment) OS=Arthrospira sp. O9.13F OX=19 82223 GN=B9S53_12295 PE=4 SV=1
MQCLITRRAQFSASHRYWLPELSEAENFAKFGQTARAPGHGHNYVLYVSMV

SEQ ID NO: 17695 - protein, 130 aa, Arthrospira sp.
  misc_feature (1)..(130): tr|A0A328V5K9|A0A328V5K9_9CYAN 6-carboxy-5,6,7,8-tetrah ydropterin synthase OS=Arthrospira sp. O9.13F OX=198222 3 GN=B9S53_10045 PE=3 SV=1
MSKWKLTTEFTFDSAHYIKDYNGPCGRLHGHTYKVRVEATSNPLHGSEFCPHPVMVADFRSLRWAKKDVSKGGLDHGLLNEILPPNYETTAEMIAKFIYDETKKRVPEGVQLKVMVSETANSWVEYEDET

SEQ ID NO: 17696 - protein, 141 aa, Asaccharobacter celatus
  misc_feature (1)..(141): tr|A0A3N0ATH4|A0A3N0ATH4_9ACTN 6-carboxy-5,6,7,8-tetrah ydropterin synthase OS=Asaccharobacter celatus DSM 1878 5 OX=1121021 GN=DMP10_06105 PE=3 SV=1
MYGLKTESSFDASHFLTDYHGKCENLHGHRWRVVAYLEVEHLQTEGTCKDMVVDFGEFKTELRALTERLDHHFIVEEGSLAPDTLACLEREGFALFIVPFRTTAENLAKWFFDALAERGLPVARVEVYETPSNCAYYREQR

SEQ ID NO: 17697 - protein, 141 aa, Asaccharobacter celatus
  misc_feature (1)..(141): tr|A0A369NWS3|A0A369NWS3_9ACTN 6-carboxy-5,6,7,8-tetrah ydropterin synthase OS=Asaccharobacter celatus OX=39434 0 GN=CQJ32_11530 PE=3 SV=1
MYGLKTESSFDASHFLTDYHGKCENLHGHRWRVVAYLEVEHLQKEGTCKDMVVDFGEFKAELRALTERLDHHFIVEEGSLAPDTLTCLEREGFALFIVPFRTTAENLAKWFFDALAERGLPVAQVEVYETPNNCAYYREQR

SEQ ID NO: 17698 - protein, 142 aa, Asaccharospora irregularis
  misc_feature (1)..(142): tr|A0A1M5QLD1|A0A1M5QLD1_9FIRM 6-carboxy-5,6,7,8-tetrah ydropterin synthase OS=Asaccharospora irregularis DSM 2 635 OX=1121321 GN=SAMN04488530_12224 PE=3 SV=1
MFILKNEIQFDMAHYLSGYEGKCKNIHGHRYRLIVKVASKTLHEGGQLRGMVDDFGNIKKVLKEIKEYFDHKLVLEDNEEGRKLADKLSELPNAFSILMLPYRTTAEEMSRHIYHMIKEKGINVREVELFETPTNSCIYMED

SEQ ID NO: 17699 - protein, 182 aa, Asaia bogorensis
  misc_feature (1)..(182): tr|A0A0P0YDQ0|A0A0P0YDQ0_9PROT 6-pyruvoyl tetrahydropte rin synthase domain protein OS=Asaia bogorensis NBRC 16 594 OX=1231624 GN=Asbog_00303 PE=4 SV=1
MSALELSFTRRFSMGHRLIAGSSERCAIPHGHNEFVTVTLQAREPARLDGAQNMVIPFADAKRRWHDFIDTRLDHAFQISSSDPLLSWFLTNEPARADRLVVTPGDPTTEMMAALLYAKLQAFLRADGDVLCCTSLSLEETPTNTVCLTGGPEFYLPVTEAPPESCWWNRADDTISDLLTQN

SEQ ID NO: 17700 - protein, 169 aa, Asaia platycodi
  misc_feature (1)..(169): tr|A0A060QCD6|A0A060QCD6_9PROT Queuosine biosynthesis Q ueD, PTPS-I OS=Asaia platycodi SF2.1 OX=1382230 GN=ASAP _0739 PE=4 SV=1
MGHRLIADSSERCAIPHGHNEFVTVTLQAREPARLDGAQNMVIPFADAKRRWHDFIDTRLDHAFQISSSDPLLSWFLTNEPARADRLVVTPGDPTTEMMAALLYAKLQAFLRADGDVLCCTSLSVEETPTNTVCLTGGPEFYLPVTDAPPESCWWNRADDTISDLLTQS

SEQ ID NO: 17701 - protein, 182 aa, Asaia sp.
  misc_feature (1)..(182): tr|A0A433WSM1|A0A433WSM1_9PROT 6-pyruvoyl tetrahydropte rin synthase OS=Asaia sp. W19 OX=2067395 GN=C0V97_14680 PE=4 SV=1
MSAPELSFTRRFSMGHRLIDGSSERCAIPHGHNEFVTVTLQARLPHRLDGGRNMVVPFAEAKVRWHAFVDTRLDHAFQISAADPLLDWFRDHEPHRLDRLVVTPGDPTTELLAALLYAKLEAFLIADGDMLRCTSLTLQETPTNTVILRDGPDACLPLMPKAPSEYWWHRADHTISDLGVSR

SEQ ID NO: 17702 - protein, 139 aa, Asaia sp.
  misc_feature (1)..(139): tr|A0A433WQW5|A0A433WQW5_9PROT 6-pyruvoyl tetrahydropte rin synthase (Fragment) OS=Asaia sp. W19 OX=2067395 GN= C0V97_17850 PE=4 SV=1
LPHRLDGGRNMVVPFAEAKVRWHAFVDTRLDHAFQISAADPLLDWFRDHEPHRLDRLVVTPGDPTTELLAALLYAKLEAFLIADGDMLRCTSLTLQETPTNTVILRDGPDACLPLMPKAPSEYWWHRADHTISDLGVSR

SEQ ID NO: 17703 - protein, 132 aa, Asanoa ferruginea
  misc_feature (1)..(132): tr|A0A3D9ZKH2|A0A3D9ZKH2_9ACTN 6-pyruvoyl-tetrahydropte rin synthase OS=Asanoa ferruginea OX=53367 GN=DFJ67_370 5 PE=4 SV=1
MFSVTVRDHMMIAHSFRGEVFGPAQQLHGATFLVDATFRRAELDADGIVVDIARASDELKAIVGQFNLHNLDDDPTLAGVNTTTEVLAKVIADRLAERATAGDLGEGGRELAGITVTLHESHIAWASYERSL

SEQ ID NO: 17704 - protein, 132 aa, Asanoa hainanensis
  misc_feature (1)..(132): tr|A0A239JLR1|A0A239JLR1_9ACTN 6-pyruvoyl-tetrahydropte rin synthase OS=Asanoa hainanensis OX=560556 GN=SAMN054 21812_10318 PE=4 SV=1
MFSVTVRDHMMIAHSFRGEVFGPAQQLHGATFLVDATFRRAELDADGIVVDIALASEELKAIVGQFNLRNLDEDPTLAGMNTTTEVLAKVIADRLAERATSGALGAGGPELAGITVTLHESHIAWASYERSL

SEQ ID NO: 17705 - protein, 132 aa, Asanoa ishikariensis
  misc_feature (1)..(132): tr|A0A1H3RGX6|A0A1H3RGX6_9ACTN 6-pyruvoyl-tetrahydropte rin synthase OS=Asanoa ishikariensis OX=137265 GN=SAMN0 5421684_3787 PE=4 SV=1
MFSVTVRDHMMIAHSFRGEVFGPAQQLHGATFLVDATFRRAELDADGIVVDIALASEELKAIVGQFNLRNLDDDPTLAGMNTTTEVLAKVIADRLAERASSGALGAGGPELAGITVTLHESHIAWASYERSL

SEQ ID NO: 17706 - protein, 118 aa, Asanoa ishikariensis
  misc_feature (1)..(118): tr|A0A1H3UDB3|A0A1H3UDB3_9ACTN 6-carboxy-5,6,7,8-tetrah ydropterin synthase OS=Asanoa ishikariensis OX=137265 G N=SAMN05421684_6913 PE=3 SV=1
MEIFREFTFEAAHRLPNVPEGHKCARLHGHSYRVQVHVSGEVDAQTGWVMDFGDLKKAFQPLHAQLDHYYLNEVAGLENPTSEVLARWIWDRLIGQLPVSAVMVRETCTSGCVYRGEQ

SEQ ID NO: 17707 - protein, 185 aa, Asticcacaulis benevestitus
  misc_feature (1)..(185): tr|V4PQR8|V4PQR8_9CAUL Uncharacterized protein OS=Astic cacaulis benevestitus DSM 16100 = ATCC BAA-896 OX=11210 22 GN=ABENE_16625 PE=4 SV=1
MQLQFKRRFSMAHRLRFDHNSKCMTPHGHNEFVVVNLQSKGGRQIDWGNANYAASFADLKRHWHGFVDDSLDHAFQLGHDDPMLGYFQQHEPELLTRLLVIEGDPTTEAVATALYMKLNAILAAHLPDFECVRFEIEETPTNSVVLGPDDIAACPIRLGDWCHRADMSLNDLLPPSSWPQIGSAS

SEQ ID NO: 17708 - protein, 311 aa, Asticcacaulis biprosthecum
  misc_feature (1)..(311): tr|F4QPH6|F4QPH6_9CAUL Dihydroneopterin aldolase OS=Ast iccacaulis biprosthecum C19 OX=715226 GN=folB PE=4 SV=1
MLIQFKRRFSMAHRLRFDSVSKCMTPHGHNEFVAVSLQPKASAKGMDWGNANYAASFADLKRHWHSFVDDALDHAFQLGVDDPMLGYFRDHESELLPRLLVIQGDPTTEAVATALFMKLNAILAKFRPDFECVRFEIEETPTNSIILTPEDVTGCPIRLGEWCHRADLSLNDLMPVESWGQFAAALKQRSGRATKMMTSRRVFVQGLRIEAAIGIYDHEHGRTQPLIIDAVIDLSLHEIHGLKDTLNYELVGKIARQFVARGHIRLVETLAEDVASELLNLPHVQRVELSIAKPEALSDADRAGVTVVYTH

SEQ ID NO: 17709 - protein, 185 aa, Asticcacaulis excentricus
  misc_feature (1)..(185): tr|A0A3G9G8Y0|A0A3G9G8Y0_9CAUL 6-carboxytetrahydropteri n synthase OS=Asticcacaulis excentricus OX=78587 GN=EM6 _2176 PE=4 SV=1
MQIQFTRRFSMAHRLRADRSSKCATPHGHNEFVRVTLKAKSPDTVKWGQSNYAQSFDALKRDWHRFVDEALDHAFQLGADDPLIGFFQAHEPDLLPRLLIIPGDPTTEAVALALYHKLNAILSAHVPDFACVRFEIEETPTNTVILTPEDLSHGPRLADWCHRADLSINDLLPPEDWQKKSDPCL

SEQ ID NO: 17710 - protein, 185 aa, Asticcacaulis excentricus
  misc_feature (1)..(185): tr|E8RRP2|E8RRP2_ASTEC Uncharacterized protein OS=Astic cacaulis excentricus (strain ATCC 15261 / DSM 4724 / VK M B-1370 / CB 48) OX=573065 GN=Astex_0677 PE=4 SV=1
MQIQFTRRFSMAHRLRADRSSKCATPHGHNEFVRVSLKAKSPDTVKWGQSNYAQSFDALKRDWHRFVDEALDHAFQLGADDPLIGFFQAHEPDLLPRLLIIPGDPTTEAVALALYHKLNAILSAQVPDFECVRFEIEETPTNTVILTPEDLIHGPRLADWCHRADLSINDLLPPEDWQKKSDPCL

SEQ ID NO: 17711 - protein, 186 aa, Asticcacaulis sp.
  misc_feature (1)..(186): tr|V4NXL9|V4NXL9_9CAUL 6-pyruvoyl tetrahydropterin synt hase OS=Asticcacaulis sp. YBE204 OX=1282363 GN=AEYBE204 _07625 PE=4 SV=1
MQIQFTRRFSMAHRLRADRSSKCATPHGHNEFVRVTLKAKSPDTVKWGQSNYAQSFDLLKRDWHRFVDDALDHAFQLGHDDPMIGFFRAHEPDLLPRLLIISGDPTTEAVALALYYKLNAILTAHVPDFECVRFEIEETPTNSVILTPDDLIGAPRLAEWCHRPDMSLNDLLTPEQWARPKGDTCT

SEQ ID NO: 17712 - protein, 185 aa, Asticcacaulis sp.
  misc_feature (1)..(185): tr|A0A2T5XFF4|A0A2T5XFF4_9CAUL 6-pyruvoyltetrahydropter in/6-carboxytetrahydropterin synthase OS=Asticcacaulis sp. CF398 OX=2135738 GN=C8K45_3693 PE=4 SV=1
MQIQFTRRFSMAHRLLADRASKCATPHGHNEFVRVTLKARSADTVKWGQANYAQSFDALKRDWHRFVDDSLDHAFQLGEADPMIGFFRENEPDLLPRLLVIPGDPTTEAVALALYHKLNAILAASVPDFECVRFEIEETPTNTVILTPEDLVHGPRLADWCHRADMSLNDLLPPEAWTRKDSTCN

SEQ ID NO: 17713 - protein, 182 aa, Asticcacaulis taihuensis
  misc_feature (1)..(182): tr|A0A1G4QZ93|A0A1G4QZ93_9CAUL 6-pyruvoyltetrahydropter in/6-carboxytetrahydropterin synthase OS=Asticcacaulis taihuensis OX=260084 GN=SAMN02927928_1598 PE=4 SV=1
MQLQFKRRFSMAHRLRFDANSKCLTPHGHNEFVVVSLQARDAGAMRWGNANYAASFADLKRHWHRFVDDSLDHAFQLGHDDPMIGYFRQHEPDLLPRLLVIEGDPTTEAVSAALYMKLNAILAAHLPDFECVRFEIEETPTNSVVLGPADIAACPIRLGEWCHRADMSLNDLLSPEAWDHLT

SEQ ID NO: 17714 - protein, 131 aa, Atelocyanobacterium thalassa
  misc_feature (1)..(131): tr|D3EQA0|D3EQA0_ATETH 6-carboxy-5,6,7,8-tetrahydropter in synthase OS=Atelocyanobacterium thalassa (isolate AL OHA) OX=1453429 GN=UCYN_09710 PE=3 SV=1
MNLKSSWTIYKEFRFEAAHKLPHHKGKCSRLHGHSWVGRVYITQNNLHDEGSQKGMVMDFGDINNYLNPLIENFLDHYYLNETTGLESPTSEAVAQWIFEQLEKAKLPGLTMVEVKETCTSSASYVKGSNS

SEQ ID NO: 17715 - protein, 271 aa, Atelocyanobacterium thalassa
  misc_feature (1)..(271): tr|D3EQ95|D3EQ95_ATETH 6-pyruvoyl-tetrahydropterin synt hase OS=Atelocyanobacterium thalassa (isolate ALOHA) OX =1453429 GN=UCYN_09660 PE=4 SV=1
MKCTVNRRAEFSASHRYYLPEWSITKNEEEFGANSFSPGHGHNYVLFISLEGEINKYGMVENLSFIKKIIKQRVIDELNYSCLNNIWQEFSDTLPTTENIARIIWEHLYPHLPITGIKLFEHPKLWAEYRGNDMQATLTTQVHFSAAHRLALPNLSLEENTNIYGKCARVHGHGHNYHLDISVSGNIDVRTGMIVNLVDLQNIINDYVIEPFDHTFLNKDIPYFVQTIPTAENITLYIAQLLEEPIRNLGVVLHKVKLTESPNNSCEIYCS

SEQ ID NO: 17716 - protein, 120 aa, Atlantibacter hermannii
  misc_feature (1)..(120): tr|A0A447LSV1|A0A447LSV1_ATLHE 6-carboxy-5,6,7,8-tetrah ydropterin synthase OS=Atlantibacter hermannii OX=565 G N=ygcM PE=3 SV=1
MPTTIYKDFVFEAAHRLPHVPEGHKCGRLHGHSFMVRLEITGEVDPHTGWIVDFADLKAAFKPTYDRLDHYYLNDIPGLENPTSEVLARWIWQQMKPKMPLLSAVTIKETCTAGCVYRGE

SEQ ID NO: 17717 - protein, 120 aa, Atlantibacter hermannii; identical to SEQ ID NO: 17716
  misc_feature (1)..(120): tr|H5V0G3|H5V0G3_ATLHE 6-carboxy-5,6,7,8-tetrahydropter in synthase OS=Atlantibacter hermannii NBRC 105704 OX=1 115512 GN=queD PE=3 SV=1

SEQ ID NO: 17718 - protein, 120 aa, Atlantibacter subterranea
  misc_feature (1)..(120): tr|A0A3R9EYK6|A0A3R9EYK6_9ENTR 6-carboxy-5,6,7,8-tetrah ydropterin synthase OS=Atlantibacter subterranea OX=255 519 GN=queD PE=3 SV=1
MPTTIFKEFIFEAAHRLPHVPEGHKCGRLHGHSFLVRLEITGEVDPHTGWIVDFADLKAAFKPIYDRLDHYYLNDIPGLENPTSEVLARWIWQQMKPKMPLLSAVMIKETCTAGCVYRGE

SEQ ID NO: 17719 - protein, 174 aa, Atopobium deltae
  misc_feature (1)..(174): tr|A0A133XPS6|A0A133XPS6_9ACTN Putative queuosine biosy nthesis protein QueD OS=Atopobium deltae OX=1393034 GN= HMPREF3192_01303 PE=4 SV=1
MYSLKTESAFDSAHFLTDYYGKCENLHGHRWRVVVYLRCDELQQAGTMKDMVMDFGVFKREVRALAKTLDHTLLLEKNSLSPATVACLEAEGFSITTLPFRTTAENLARYFAEKLIEKKLPVAQVDMYETPLNCATYTCDNNSGASGADGVSSAHDAACGADATSAATNEKGTR

SEQ ID NO: 17720 - protein, 140 aa, Atopobium minutum
  misc_feature (1)..(140): tr|A0A1H4KBQ9|A0A1H4KBQ9_9ACTN 6-carboxy-5,6,7,8-tetrah ydropterin synthase OS=Atopobium minutum OX=1381 GN=SAM N04489746_0603 PE=3 SV=1
MYALKTEAAFDSAHFLTDYYGKCENLHGHRWRVVVYIQQESLQQEGTMKDMVVDFGVFKKEVRALADSLDHTFLIEEGSLKQKTLDCLVDEGFSLTLLPFRTTAENLARYFAQQLQQKGLPVSQVDMYETPLNCASYYSA

SEQ ID NO: 17721 - protein, 140 aa, Atopobium minutum; identical to SEQ ID NO: 17720
  misc_feature (1)..(140): tr|N2BSL7|N2BSL7_9ACTN 6-carboxy-5,6,7,8-tetrahydropter in synthase OS=Atopobium minutum 10063974 OX=997872 GN= HMPREF1091_00522 PE=3 SV=1

SEQ ID NO: 17722 - protein, 142 aa, Atopobium parvulum
  misc_feature (1)..(142): tr|C8W7S6|C8W7S6_ATOPD 6-carboxy-5,6,7,8-tetrahydropter in synthase OS=Atopobium parvulum (strain ATCC 33793 / DSM 20469 / JCM 10300 / VPI 0546) OX=521095 GN=Apar_108 9 PE=3 SV=1
MYTLKTEYAFDSAHFLTNYYGKCENLHGHRWHVTACISTAELGESGTEKDMVMDFGVFKRKVGALCDSLDHTFLIEEGSLSEKTLNCLTEEGFSLTVLPFRTTAENLAKYLFEQLEAEGLPVSSVEVDETPNNCAIYSKNMN

SEQ ID NO: 17723 - protein, 146 aa, Atopobium rimae
  misc_feature (1)..(146): tr|B9CNU3|B9CNU3_9ACTN 6-carboxy-5,6,7,8-tetrahydropter in synthase OS=Atopobium rimae ATCC 49626 OX=553184 GN= queD PE=3 SV=1
MVKTVTMYSLKTESSFDASHFLTDYYGKCENLHGHRWRVVAYISQSYLGSEGTTKDMVMDFGVFKKRLRELTDELDHTFLVEEGSLMEKTIECLHEEGFTLSILPFRTTAENLAKYFFDRLAAQGVPVSQIEVYETPLNCAIYTRE

SEQ ID NO: 17724 - protein, 140 aa, Atopobium sp.
  misc_feature (1)..(140): tr|U1Y5S5|U1Y5S5_9ACTN 6-pyruvoyl tetrahydropterin synt hase/QueD family protein OS=Atopobium sp. oral taxon 81 0 str. F0209 OX=1321773 GN=HMPREF9069_00348 PE=4 SV=1
MFGLKTEACFDSAHFLADYHGKCENLHGHRWRVVVYIKQNQLGAEGTERDMVLDFGEFKRVVREEVAAFDHMFLVEEGTLKQTTIDALRNEGFKLKILPYRTTAENLAKNFAELFGKRCLPISQVDVYETPLNCASYFVD

SEQ ID NO: 17725 - protein, 142 aa, Atopobium sp.
  misc_feature (1)..(142): tr|Z4WV87|Z4WV87_9ACTN 6-carboxy-5,6,7,8-tetrahydropter in synthase OS=Atopobium sp. BS2 OX=936550 GN=HMPREF149 2_0419 PE=3 SV=1
MYTLKTEYAFDSAHFLTNYYGKCENLHGHRWHVTACISTAELGESGTEKDMVMDFGVFKRKVRALCDSLDHTFLIEEGSLSEKTLTCLKEEGFSLTILPFRTTAENLAKYLFEQLESEGLPVSSVEVDETPNNCAIYSKNMK

SEQ ID NO: 17726 - protein, 177 aa, Atopobium vaginae
  misc_feature (1)..(177): tr|E1L2S6|E1L2S6_9ACTN Putative queuosine biosynthesis protein QueD OS=Atopobium vaginae PB189-T1-4 OX=866774 GN=HMPREF9248_0485 PE=4 SV=1
MTLAICSRAAFARPQLEGTTMGFGLKTEAHFNAAHFLTDFQGKCENIHGHRWRVVVYLYADTLDTSGENRDMLIDFGVFKKAVREEVAKFDHQFIVERGSLANDTIACLERETFSLLMVDFRTTAENFARYFYTRLTSRGFGVSRVDVYETPNNCAIYYGPCGGPHDGSDASVVHMA

SEQ ID NO: 17727 - protein, 140 aa, Atopobium vaginae
  misc_feature (1)..(140): tr|A0A135PAI2|A0A135PAI2_9ACTN Putative queuosine biosy nthesis protein QueD OS=Atopobium vaginae OX=82135 GN=H MPREF3232_01184 PE=4 SV=1
MGFSLKTQSYFNAAHFLTNYKGKCENLHGHRWQVIVYLYKENLSSQGEDKDMLIDFGEFKQIVRAEVKKFDHTFIVEENSLRPETVRALEQETFTLTFVPFRTTSENFARYFYQRFCALGLPVVRVEVDETPHNCAIYEA

SEQ ID NO: 17728 - protein, 290 aa, Aulosira laxa
  misc_feature (1)..(290): tr|A0A1Z4U5Z9|A0A1Z4U5Z9_9CYAN Putative 6-pyruvoyl tetr ahydropterin synthase OS=Aulosira laxa NIES-50 OX=15419 88 GN=NIES50_31980 PE=4 SV=1
MQCIVNRRAQFSASHRYWLPELSEAENTQQFGACSRFPGHGHNYVLFISLIGELDEYGMVLNLSDVKQVIKREVTSQLDFSYLNDVWPDFQETLPTTENIARVIWQRLAPHLPLVRVQLFEHPELWADYMGNSMEAYLTVSTHFSAAHRLAHPNLSNEENAEIYGKCARTHGHGHNYHLEVTVKGEIDQRTGMIVDLGALNQVIEDYVVEPFDHTFLNKDIPYFGEVVPTAENIALYISNLLRSPVQKLGAKLHKVKLIESPNNSCEIYCTDAESNSVSANANQPMLAGV

SEQ ID NO: 17729 - protein, 128 aa, Aulosira laxa
  misc_feature (1)..(128): tr|A0A1Z4U527|A0A1Z4U527_9CYAN 6-carboxy-5,6,7,8-tetrah ydropterin synthase OS=Aulosira laxa NIES-50 OX=1541988 GN=NIES50_28730 PE=3 SV=1
MPEWKLVTEFTFDSAHYIKDYDGPCGRMHGHTYKVRMEAKSSQLHSSEFCPHPVMVADFRTLRWAKQDVTKGGLDHCVLNEVLPPEYETTAEMIAKYIYDRTKQQLPPNVELKVRVSETANSWVEYHE

SEQ ID NO: 17730 - protein, 132 aa, Aurantimonas coralicida
  misc_feature (1)..(132): tr|A0A0P0YYV8|A0A0P0YYV8_9RHIZ 6-pyruvoyl-tetrahydropte rin synthase OS=Aurantimonas coralicida OX=182270 PE=4 SV=1
MFAVEVRDHMMIAHSLLRPVFGPAQGMHGATFVVDAAFFTDSLDADGLAIDIGLATEILAGVVKPLNYQNLDELEIFAGKVTTTEFLAKHLFDAIAEKIAAGELGDGGARVKRLKIQLHESHVARAWYEADL

SEQ ID NO: 17731 - protein, 132 aa, Aurantimonas manganoxydans
  misc_feature (1)..(132): tr|A0A0P0Z4Z9|A0A0P0Z4Z9_9RHIZ 6-pyruvoyl-tetrahydropte rin synthase OS=Aurantimonas manganoxydans OX=651183 PE =4 SV=1
MFAVEVRDHMMIAHSLPRPVFGPAQGMHGATFVVDAAFFTDSLDEDGLAIDIGLATEILAGVVKPLNYQNLDELEIFAGKVTTTEFLAKHLFDAIAEKIAAGELGDGGARVKRLKIQLHESHVARAWYEADL

SEQ ID NO: 17732 - protein, 132 aa, Aurantimonas sp.
  misc_feature (1)..(132): tr|A0A1X0SYL3|A0A1X0SYL3_9RHIZ Uncharacterized protein OS=Aurantimonas sp. 22II-16-19i OX=1317114 GN=ATO4_1946 4 PE=4 SV=1
MFAVEVRDHMMIAHSLPRPVFGPAQGMHGATFVVDAAFFTEDLDADGLAVDIGLASTLLKAVLEPLNYQNLDAIEAFRGKVTTTEFLAKHLFDRLADEIAAGALGDGGGRIRRLKVSLEESHVARAWYEGAL

SEQ ID NO: 17733 - protein, 132 aa, Aurantimonas sp.
  misc_feature (1)..(132): tr|A0A0Q6F7W4|A0A0Q6F7W4_9RHIZ 6-pyruvoyl tetrahydropte rin synthase OS=Aurantimonas sp. Leaf443 OX=1736378 GN= ASG48_07675 PE=4 SV=1
MYCVEVRDHVMIAHSLPRPVFGPAQGLHGATYVVDAGFFSRDLDADGLCVDIGLATSVLKDVLAPLNYANLDDLAVFEGRVTTTEVVARHVFDEIAAAIASGRLGEGGGRIRRLRVTLHESHVARAFYEADL

SEQ ID NO: 17734 - protein, 158 aa, Aureibacillus halotolerans
  misc_feature (1)..(158): tr|A0A4R6U8F2|A0A4R6U8F2_9BACI 6-pyruvoyltetrahydropter in/6-carboxytetrahydropterin synthase OS=Aureibacillus halotolerans OX=1508390 GN=EV213_10456 PE=4 SV=1
MEAYGFRIVDQLQKIDVDIKKDQLRYHQKRVLVSKEFTFDAAHHLHHYEGKCKNLHGHTYKVIFGVSGFVDERGLMMDFADIKQIWKDEIEVHLDHRYLNETLPPMNTTAENMVVWIYEKMADALSHAVCEEQQARVEFVRLFETPTSFAEARREWME

SEQ ID NO: 17735 - protein, 136 aa, Aureicoccus marinus
  misc_feature (1)..(136): tr|A0A2S7T494|A0A2S7T494_9FLAO 6-pyruvoyl tetrahydrobio pterin synthase OS=Aureicoccus marinus OX=754435 GN=BST 99_00135 PE=4 SV=1
MRATICRKAHFNAAHRLFNPAWSEEKNREVFGKCFSPHYHGHNFDLEVRIRGEVDPDTGFIMDLAVLGDLIKTEVEERFDHKNLNIECPEFEGIMPSTEYFVKIIYDLLKPHLKGDQQLHITLHETKKNSAEYGDW

SEQ ID NO: 17736 - protein, 140 aa, Aureicoccus marinus
  misc_feature (1)..(140): tr|A0A2S7T7T2|A0A2S7T7T2_9FLAO 6-carboxy-5,6,7,8-tetrah ydropterin synthase OS=Aureicoccus marinus OX=754435 GN =BST99_09885 PE=3 SV=1
MTKKNKTAIIRKEHFNAAHRLHNEHWSDEKNKQVFGKCNNPHFHGHNYDLEVRVVGFCDQDTGYVMDAKLLSDLIKEKVLNDFDHKNLNLEVDDFKTLNPTAENIARVIYERIRPHLDEELELKITLYETQRNVVEYPAR

SEQ ID NO: 17737 - protein, 122 aa, Aureimonas altamirensis
  misc_feature (1)..(122): tr|A0A1M6K2F6|A0A1M6K2F6_9RHIZ 6-carboxy-5,6,7,8-tetrah ydropterin synthase OS=Aureimonas altamirensis DSM 2198 8 OX=1121026 GN=SAMN02745911_2786 PE=3 SV=1
MFKITKRFEFSASHRLAGLPEDHPCTRLHGHNYIVEIELQASELNAFGFVRDYRDLSAFKRYVDETFDHRHINDVLGHDSPTAEALALHFYNWCSERFPETSAVRVSETPKTWAEYRPLARA

SEQ ID NO: 17738 - protein, 132 aa, Aureimonas altamirensis
  misc_feature (1)..(132): tr|A0A0B1Q876|A0A0B1Q876_9RHIZ 6-pyruvoyl tetrahydropte rin synthase OS=Aureimonas altamirensis OX=370622 GN=LA 66_02715 PE=4 SV=1
MYAVEVRDHIMIAHSLPRPVFGPAQAMHGATFVVDAAFFTDDLDEDGLAVDIGRATQLLASVLKPLNYANLDASPAFAGKVSTTEAIARHIFDALAGAISAGGLGGAGAPVRKLRITLHESHVARAWYEAAL

SEQ ID NO: 17739 - protein, 132 aa, Aureimonas flava
  misc_feature (1)..(132): tr|A0A3A1WL43|A0A3A1WL43_9RHIZ 6-carboxytetrahydropteri n synthase OS=Aureimonas flava OX=2320271 GN=D3218_0683 0 PE=4 SV=1
MFAVEVRDRIMIAHSLPRPVFGPAQGMHGATLEVDAAFFTQDLDEDGLGVDIGLAAAVLGEVLAPLNYQNLDALEVFRGRVTTTEVLARHVFDALAGRIAAGAFGPGGARIRRLRVTLHESQAARAWYEAEL

SEQ ID NO: 17740 - protein, 118 aa, Aureimonas flava
  misc_feature (1)..(118): tr|A0A3A1WGK7|A0A3A1WGK7_9RHIZ 6-carboxy-5,6,7,8-tetrah ydropterin synthase OS=Aureimonas flava OX=2320271 GN=q ueD PE=3 SV=1
MKITQSFFFEAAHRLPNVPPSHKCFRMHGHSYRIDLELEGPVDPHTGFVVDFFDVEHAFAPLMERLDHHTLNEVEGLENPTAEHIAVWIFDHAKPALPLLARVRVFETPHSFAEYEGR

SEQ ID NO: 17741 - protein, 132 aa, Aureimonas jatrophae
  misc_feature (1)..(132): tr|A0A1H0FG34|A0A1H0FG34_9RHIZ 6-pyruvoyl-tetrahydropte rin synthase OS=Aureimonas jatrophae OX=1166073 GN=SAMN 05192530_102500 PE=4 SV=1
MYAVEVRDHMMIAHSLARPVFGPAQGMHGATFVVDAAFFTADVDEDGLGVDIGLATTVLREVIAPLNYQNLDELPVFRGRVTTTEVLARHVFDALAERIAKGDFGPGGRRIERVRVTLHESHVARAWYEAAL

SEQ ID NO: 17742 - protein, 132 aa, Aureimonas phyllosphaerae
  misc_feature (1)..(132): tr|A0A1I2GAJ9|A0A1I2GAJ9_9RHIZ 6-pyruvoyl-tetrahydropte rin synthase OS=Aureimonas phyllosphaerae OX=1166078 GN =SAMN05216566_103249 PE=4 SV=1
MYAVEVRDHIMIAHSLPRPVFGPAQGMHGATFEVDAAFFTREVDADGLGVDMGLAIGLLKEVLAPLNYQNLDELEIFRGRVTTTEVLSRHVFDALAAKIREGAFGPGNGRIERIRVTLHESHVARAWYEGEL

SEQ ID NO: 17743 - protein, 132 aa, Aureimonas sp.
  misc_feature (1)..(132): tr|A0A0Q5H1N7|A0A0Q5H1N7_9RHIZ 6-pyruvoyl tetrahydropte rin synthase OS=Aureimonas sp. Leaf324 OX=1736336 GN=AS F65_07940 PE=4 SV=1
MYAVEVRDHIMIAHSLPRAVFGPAQGMHGATFEVDAAFFTRDVDADGLGVDMGLAITVLKEVLAPLNYQNLDELEVFRGRVTTTEVLARHVFDALAARIRDGAFGPGSGRIERIRVTLHESHVARAWYEGDL

SEQ ID NO: 17744 - protein, 118 aa, Aureimonas sp.
  misc_feature (1)..(118): tr|A0A0S2EUC2|A0A0S2EUC2_9RHIZ 6-carboxy-5,6,7,8-tetrah ydropterin synthase OS=Aureimonas sp. AU20 OX=1349819 G N=M673_19300 PE=3 SV=1
MYRITKRFDFSASHQLTGLPDDHPCARLHGHNYIVEIELSAEALNAHGFVRDYRDLSELKRYIDERFDHRHLNAVLGHDHVTAETLARHFFEWCRVRFPEVSAARVSETPKTWAEYRP

SEQ ID NO: 17745 - protein, 118 aa, Aureimonas ureilytica
  misc_feature (1)..(118): tr|A0A175RKT2|A0A175RKT2_9RHIZ 6-carboxy-5,6,7,8-tetrah ydropterin synthase OS=Aureimonas ureilytica OX=401562 GN=NS365_15695 PE=3 SV=1
MYRITKMFDFSASHQLAGLSEDHPCSRLHGHNYVVEIELSGETLNPHGFVRDYRELSELKRYIDERFDHRHLNDVLGHDHVTAETLARHFFEWCSERFPETSAARVSETPKTWAEYRP

SEQ ID NO: 17746 - protein, 118 aa, Aureimonas ureilytica
  misc_feature (1)..(118): tr|A0A175RCA8|A0A175RCA8_9RHIZ 6-carboxy-5,6,7,8-tetrah ydropterin synthase OS=Aureimonas ureilytica OX=401562 GN=NS226_02525 PE=3 SV=1
MYRITKTFDFSASHQLAGLSEDHPCSRLHGHNYVVEIELSGETLNPHGFVRDYRELSELKRYIDERFDHRHLNDVLGHDHVTAETLARHFFEWCSERFPETSAARVSETPKTWAEYRP

SEQ ID NO: 17747 - protein, 151 aa, Aureitalea marina
  misc_feature (1)..(151): tr|A0A2S7KS01|A0A2S7KS01_9FLAO 6-carboxytetrahydropteri n synthase QueD OS=Aureitalea marina OX=930804 GN=BST85 _11270 PE=4 SV=1
MSQIRLTKKFSFETGHALYGHDGKCRNLHGHSYKLSVTVIGTPIDDSTNPKYGMVIDFSDLKKIVKEEIVDVFDHATVFNGNSPHDELANELIKRGHHVLLVDYQPTSEMMVIDFANKIQKHLPNHIKLHSLKLYETATSYAEWFASDNPS

SEQ ID NO: 17748 - protein, 136 aa, Aureitalea marina
  misc_feature (1)..(136): tr|A0A2S7KQA3|A0A2S7KQA3_9FLAO 6-carboxy-5,6,7,8-tetrah ydropterin synthase OS=Aureitalea marina OX=930804 GN=B ST85_07755 PE=3 SV=1
MSLTVYRKAHFNAAHRLYRPDWSDEKNYEVFGKCSNPNFHGHNYNLEVGLTGEVDPETGYLIDLKILKDYIKEEVEERFDHKNLSLEVDDFANLNPTVENIAIVIYNRLRNRLDPKYKITVKLYETDRNYVIYTGN

SEQ ID NO: 17749 - protein, 135 aa, Aureitalea sp.
  misc_feature (1)..(135): tr|A0A2S0HTC0|A0A2S0HTC0_9FLAO 6-carboxy-5,6,7,8-tetrah ydropterin synthase OS=Aureitalea sp. RR4-38 OX=2094025 GN=C5O00_01335 PE=3 SV=1
MSLTVYRKAHFNAAHRLYRKDWSDEKNEEIFGKCNNPHYHGHNYELEVGVTGEVDPETGYLIDIKVLKDLIREEIEDAFDHKNLNLEVPEFANLNPTAENIAKVIWEKLRPRLDSKFDLSVKLYETPRNFVLYTG

SEQ ID NO: 17750 - protein, 149 aa, Aureitalea sp.
  misc_feature (1)..(149): tr|A0A2S0HV54|A0A2S0HV54_9FLAO 6-carboxy-5,6,7,8-tetrah ydropterin synthase OS=Aureitalea sp. RR4-38 OX=2094025 GN=C5O00_04950 PE=3 SV=1
MNNIQITKMFTFETGHALYGYDGKCRNVHGHSYKLSVTVIGTPISDKNHVKYGMVIDFGDLKKIVKEEIVDVFDHATVFNKNTPHVELAKELETRGHNVLLVDYQPTSEMMVIDFAGKIKKRLPDSVQLHSLKLQETDTSYAAWYASEN

SEQ ID NO: 17751 - protein, 137 aa, Auricoccus indicus; identical to SEQ ID NO: 16765
  misc_feature (1)..(137): tr|A0A1Q1G2Y6|A0A1Q1G2Y6_9STAP 6-carboxy-5,6,7,8-tetrah ydropterin synthase OS=Auricoccus indicus OX=1849491 GN =BVH56_07255 PE=3 SV=1

SEQ ID NO: 17752 - protein, 145 aa, Avibacterium avium
  misc_feature (1)..(145): tr|A0A379AQD8|A0A379AQD8_AVIAV 6-carboxy-5,6,7,8-tetrah ydropterin synthase OS=Avibacterium avium OX=751 GN=que D PE=3 SV=1
MFKVSKEFSFDMAHLLDGHDGKCQNLHGHTYKLQVEVQGELHASGAKKGMVMDFSDLKQIVKEQILTPMDHAFIYDETSERESQIARLLQDLNSKTFAMPTRTTAEEMARFIFQRLSAHLPISAIRLWETPTSFCEYRENKWRED

SEQ ID NO: 17753 - protein, 140 aa, Avibacterium endocarditidis
  misc_feature (1)..(140): tr|A0A2S5AI02|A0A2S5AI02_9PAST 6-carboxy-5,6,7,8-tetrah ydropterin synthase OS=Avibacterium endocarditidis OX=3 80674 GN=queD PE=3 SV=1
MFKVSKEFSFDMAHLLDGHDGKCQNLHGHTYKLQVEVQGELHASGAKKGMVMDFSDLKQIVKEQILTPMDHAFIYDETSGRESKIARLLQDLNSKTFAMPTRTTAEEMARFIFQRLSEHLQISAIRLWETPTSFCEYREN

SEQ ID NO: 17754 - protein, 140 aa, Avibacterium gallinarum
  misc_feature (1)..(140): tr|A0A379AXG3|A0A379AXG3_AVIGA 6-carboxy-5,6,7,8-tetrah ydropterin synthase OS=Avibacterium gallinarum OX=755 G N=queD PE=3 SV=1
MFKVSKEFSFDMAHLLDGHDGKCQNLHGHTYKLQVEVQGELHASGAKKGMVMDFSDLKQIVKEQILTPMDHAFIYDETSERESKIARLLQDLNSKTFAMPTRTTAEEMARFIFQRLSAHLPISAIRLWETPTSFCEYREN

SEQ ID NO: 17755 - protein, 141 aa, Avibacterium paragallinarum
  misc_feature (1)..(141): tr|A0A2S5AY57|A0A2S5AY57_AVIPA 6-carboxy-5,6,7,8-tetrah ydropterin synthase OS=Avibacterium paragallinarum OX=7 28 GN=queD PE=3 SV=1
MFKVSKEFSFDMAHLLDGHDGKCQNLHGHTYKLQVEVQGELHPSGAKKGMVMDFSDLKKIVKEQILAPMDHAFIYDETSERECKIARLLQELNSKTFAMPTRTTAEEMARFIFQRLEQQGLPLSAIRLWETPTSFCEYRKS

SEQ ID NO: 17756 - protein, 141 aa, Avibacterium paragallinarum
  misc_feature (1)..(141): tr|A0A4Q7GDZ4|A0A4Q7GDZ4_AVIPA 6-carboxy-5,6,7,8-tetrah ydropterin synthase OS=Avibacterium paragallinarum OX=7 28 GN=queD PE=3 SV=1
MFKVSKEFSFDMAHLLDGHDGKCQNLHGHTYKLQVELQGELHPSGAKKGMVMDFSDLKKIVKEQILAPMDHAFIYDETSERECKIARVLQELNSKTFAMPTRTTAEEMARFIFQRLEQQGLPLSAIRLWETPTSFCEYRKS

SEQ ID NO: 17757 - protein, 140 aa, Avibacterium volantium
  misc_feature (1)..(140): tr|A0A447SST7|A0A447SST7_AVIVO 6-carboxy-5,6,7,8-tetrah ydropterin synthase OS=Avibacterium volantium OX=762 GN =queD PE=3 SV=1
MFKVSKEFSFDMAHLLDGHDGKCQNLHGHTYKLQVEVQGELHASGAKKGMVIDFSDLKQIVKEQILTPMDHAFIYDETSERESQIARLLQDLNSKTFAMPTRTTAEEMARFIFQRLSEHLPISAIRLWETPTSFCEYRED

SEQ ID NO: 17758 - protein, 149 aa, Azoarcus communis
  misc_feature (1)..(149): tr|A0A2U8H7P0|A0A2U8H7P0_9RHOO 6-carboxy-5,6,7,8-tetrah ydropterin synthase OS=Azoarcus communis OX=41977 GN=qu eD PE=3 SV=1
MRITRRLEFDAGHRIPDHASQCRHLHGHRYALEVTLSGNIIDAAGQAVNGMVMDFADVKKVANEMIVDRWDHAFLVYRDDTQVAAFLASMPGHKTVTLDVVPTAENLAAEAFRVLDGAYQDVYGNQLQLERVRLYETPNCWADAVRGER

SEQ ID NO: 17759 - protein, 195 aa, Azoarcus communis
  misc_feature (1)..(195): tr|A0A323UQT7|A0A323UQT7_9RHOO 6-carboxytetrahydropteri n synthase QueD OS=Azoarcus communis SWub3 = DSM 12120 OX=1121029 GN=DNK49_22065 PE=4 SV=1
MLIRKLFKFENAHIVRGCSTRRCSHSIHGHSYKVELLLEAHALDDGQMVYDFGLLKGYVSDLIDAFDHAVTLWSGDEPDYVSAMRRHTERWVLIPVSPSAEQFSRLFFRLVDTTLSLTAMCNGEDGVRLHSIIVHETETGYAQCFREDADNLRMGHIDLNAIEFAQAITKKWHDPHLFERLKHGQRLPVPIEGPV

SEQ ID NO: 17760 - protein, 195 aa, Azoarcus indigens
  misc_feature (1)..(195): tr|A0A4R6E0U2|A0A4R6E0U2_9RHOO 6-pyruvoyltetrahydropter in/6-carboxytetrahydropterin synthase OS=Azoarcus indig ens OX=29545 GN=C7389_10760 PE=4 SV=1
MLIRKLFKFENAHIVRGCSTRRCSHSIHGHSYKVELLLEAHAFDNGQMIYDFGLLKGAVRELIDAFDHAVTLWSGDNLDYLAAMCRHSERWVLIPVSPSAEQFSRLFFCLVDAVLALSDMANGEADVQLHSVIVHETDTGYAQCFREDALNPRMGLIDLHAIEFAPAITAPWRDPELFERIKHGQQIPACLEELA

SEQ ID NO: 17761 - protein, 151 aa, Azoarcus indigens
  misc_feature (1)..(151): tr|A0A4R6DSL8|A0A4R6DSL8_9RHOO 6-pyruvoyltetrahydropter in/6-carboxytetrahydropterin synthase OS=Azoarcus indig ens OX=29545 GN=C7389_11630 PE=4 SV=1
MRITRRLEFDAGHRIPDHASQCRHLHGHRYVLEVTLSGDIIKADGQPVNGMVMDFADVKRIANEQVVSRWDHAFLVYRGDSLVVDFLATVPGHKTVVLDVVPTAENLAAVAFRILDAAYQDIYGNHLRLERVRLYETPNCWADALRDESRS

SEQ ID NO: 17762 - protein, 149 aa, Azoarcus sp.
  misc_feature (1)..(149): tr|A0A4S4ATN7|A0A4S4ATN7_9RHOO 6-carboxytetrahydropteri n synthase QueD OS=Azoarcus sp. CC-YHH848 OX=2565932 GN =queD PE=4 SV=1
MRITRRLEFDAGHRIPDHASQCRHIHGHRYAIEVTLSGRIIDAAGQPVNGMVMDFADVKAIAKHHLVDLWDHAFLVYRGDTVVVELLARIPGHKTVVLDVIPTAENLAHLAFRILDPLYRDTYGNDLRLEQVRLYETPNCWADAIRGAE

SEQ ID NO: 17763 - protein, 132 aa, Azoarcus sp.
  misc_feature (1)..(132): tr|A0A558D242|A0A558D242_9RHOO 6-carboxytetrahydropteri n synthase OS=Azoarcus sp. PHD OX=1628740 GN=FHK80_1562 5 PE=4 SV=1
MYSLNVRDHIMIAHSFQGEIFGPAQRMHGATYVIDACFQREELDADGLVVDIGLASTVLHAKLAELNFRNLNEEAAFKGRNTTTEFMARVIFERMAVAIRDGELGEGGRGLTGLKVTLHESHIAWASYEGRL

SEQ ID NO: 17764 - protein, 151 aa, Azoarcus tolulyticus
  misc_feature (1)..(151): tr|A0A1N6RSI3|A0A1N6RSI3_9RHOO 6-pyruvoyltetrahydropter in/6-carboxytetrahydropterin synthase OS=Azoarcus tolul yticus OX=34027 GN=SAMN05421829_103351 PE=4 SV=1
MRITRRLEFDAGHRIPDHASQCRHLHGHRYAIEITLSGGIIEAAGQPVNGMVMDFGEVKSIAKAHVVDIWDHAFLVFRGDAQVMQFLASMPGHKTVVLDCVPTAENLAHEAFRILDPRYHDSYGNHLRLERVRLYETPNCWADAVRGDAGL

SEQ ID NO: 17765 - protein, 119 aa, Azomonas agilis
  misc_feature (1)..(119): tr|A0A562J0W1|A0A562J0W1_9GAMM 6-carboxy-5,6,7,8-tetrah ydropterin synthase OS=Azomonas agilis OX=116849 GN=LX5 9_00837 PE=3 SV=1
MEIFKEFTFESAHRLPFVPLGHKCGRLHGHSFRVAIYIKGEVNPATGWIRDFGELKEIFKPIYEQLDHHYLNEIPGLENPTSENIAKWIWQRLKPILPELSRIRIHETCTSGCEYTGGD

SEQ ID NO: 17766 - protein, 193 aa, Azonexus fungiphilus
  misc_feature (1)..(193): tr|A0A495WCW2|A0A495WCW2_9RHOO 6-pyruvoyltetrahydropter in/6-carboxytetrahydropterin synthase OS=Azonexus fungi philus OX=146940 GN=DFR40_1429 PE=4 SV=1
MLIRKLFKFENAHIVRGCSTRRCSHSLHGHSYKVELILEAHAFDNGQMLYDFGLLKGGPRDLIDAFDHAVAIWDGDDADYVAACQRFSERWISLPVSPSAEQFSRLFFRLVDTLLRLTDTVNGEQDVRLHSVIVHETETGYAQCFREDAENPRMGLIELDRIVFSEAITQAWRDPQLFEKLKRGERLRNPSAV

SEQ ID NO: 17767 - protein, 193 aa, Azonexus hydrophilus
  misc_feature (1)..(193): tr|A0A1R1I4V9|A0A1R1I4V9_9RHOO 6-carboxytetrahydropteri n synthase QueD OS=Azonexus hydrophilus OX=418702 GN=BJ N45_09595 PE=4 SV=1
MLIRKLFKFENAHIVRGCSTRRCSHSIHGHSYKVELILEAHAFDNGQMLYDFGLLKGGPRDLIDAFDHAVAIWDGDDADYVAACKRFSERWISLPVSPSAEQFSRLFFRLVDTLLGLTDTVNGEQDVRLHSVIVHETETGYAQCFREDADNPRMGLIALDRIVFSDAITQAWRDPQLFEKLKRGERLSNPASV

SEQ ID NO: 17768 - protein, 139 aa, Azorhizobium caulinodans
  misc_feature (1)..(139): tr|A8HSC6|A8HSC6_AZOC5 Uncharacterized protein OS=Azorh izobium caulinodans (strain ATCC 43989 / DSM 5975 / JCM 20966 / NBRC 14845 / NCIMB 13405 / ORS 571) OX=438753 GN=AZC_4167 PE=4 SV=1
MSSPASLFAVEVRDHIMIAHSFKGDLFGPAQALHGATFVVDVAFMSERLTEEGVVVDIGRATEALKAVLGPLNYRNLDEVPAFADINSTTEVLAKHIFDAMAEAARTGALGTGGDRLCRLRVTLHESHAARAWFEGPIA

SEQ ID NO: 17769 - protein, 118 aa, Azorhizobium caulinodans
  misc_feature (1)..(118): tr|A8HQX0|A8HQX0_AZOC5 6-carboxy-5,6,7,8-tetrahydropter in synthase OS=Azorhizobium caulinodans (strain ATCC 43 989 / DSM 5975 / JCM 20966 / NBRC 14845 / NCIMB 13405 / ORS 571) OX=438753 GN=AZC_1071 PE=3 SV=1
MKITQAFTFEAAHRLPNVPQTHRCFRMHGHSYRVELVLDGDVDPHTGFVVDFFDVEAAFGPVLKRLDHYCLNEIEGLENPTAEHIAIWIWERTKPLLAQLATVRVFETPLSWAEYEGR

SEQ ID NO: 17770 - protein, 131 aa, Azorhizobium sp.
  misc_feature (1)..(131): tr|A0A258K6I8|A0A258K6I8_9RHIZ Uncharacterized protein OS=Azorhizobium sp. 32-67-21 OX=1970319 GN=B7Y84_06820 PE=4 SV=1
MYAVEVRDHIMIAHSFRGDMFGPAQALHGATFVVDVAFFSADLTEEGVVVDIGKAHEVLKQVLAPLSYRNLDDLPEFAGRNTTTEVLCRHIFDAMADAARAGQLGAGQLVRLKVTLHESHVARAWFEADLS

SEQ ID NO: 17771 - protein, 124 aa, Azorhizobium sp.
  misc_feature (1)..(124): tr|A0A258N5Q3|A0A258N5Q3_9RHIZ Uncharacterized protein OS=Azorhizobium sp. 35-67-15 OX=1970320 GN=B7Y65_02640 PE=4 SV=1
MIAHSFKGDLFGPAQALHGATFVVDVAFFARELTAEGVVVDIGRALDALKAVLGPLTYRNLDDLPDFAGRNTTTEVLCRHIFDRMADAARTGALGAGGDALAKLRVTLHESHVARAWYEGDIAA

SEQ ID NO: 17772 - protein, 148 aa, Azospira oryzae
  misc_feature (1)..(148): tr|G8QJ86|G8QJ86_AZOOP 6-carboxy-5,6,7,8-tetrahydropter in synthase OS=Azospira oryzae (strain ATCC BAA-33 / DS M 13638 / PS) OX=640081 GN=Dsui_2137 PE=3 SV=1
MLITRRLEFDAGHRIPDHRSQCRHLHGHRYVLEITLAGDIISKDGDPANGMVMDFSDVKALAKAHVVDVWDHAFLVYAGDKAVVEFLQTLPDHKTVVLDCIPTAENLSETAFRILDAVYQDSYGNHLRLQQVRLYETPNCWADAVRRD

SEQ ID NO: 17773 - protein, 120 aa, Azospira oryzae
  misc_feature (1)..(120): tr|A0A2W5FHR9|A0A2W5FHR9_9RHOO 6-carboxytetrahydropteri n synthase QueD (Fragment) OS=Azospira oryzae OX=146939 GN=queD PE=4 SV=1
MLITRRLEFDAGHRIPNHSSNCRHLHGHRYALEVTLSGNIITSEGAPEQGMVMDFAEVKAIAQRHVVDAWDHAFLVYAQDTVVVEFLRSLPGHKTVVLAAPPTAENLALEAFRILDAAYR

SEQ ID NO: 17774 - protein, 151 aa, Azospira sp.
  misc_feature (1)..(151): tr|A0A2R5E7U0|A0A2R5E7U0_9RHOO 6-carboxytetrahydropteri n synthase QueD OS=Azospira sp. I13 OX=1765050 GN=AZSI1 3_08770 PE=4 SV=1
MLITRRLEFDAGHRIPDHRSQCRHLHGHRYVLEITLAGDIISKDGDPANGMVMDFSDVKALAKAHVVDVWDHAFLVYAGDRAVVDFLQTLPGHKTVVLDCIPTAENLSQTAFRILDAVYRDTYGNHLRLEQVRLYETPNCWADALRQEVSA

SEQ ID NO: 17775 - protein, 148 aa, Azospira sp.; identical to SEQ ID NO: 17772
  misc_feature (1)..(148): tr|A0A5H2YA37|A0A5H2YA37_9RHOO 6-carboxytetrahydropteri n synthase QueD OS=Azospira sp. I09 OX=1765049 GN=AZSP0 9_11030 PE=4 SV=1

SEQ ID NO: 17776 - protein, 132 aa, Azospirillum brasilense
  misc_feature (1)..(132): tr|A0A2W5ELU0|A0A2W5ELU0_AZOBR 6-carboxy-5,6,7,8-tetrah ydropterin synthase OS=Azospirillum brasilense OX=192 G N=DI601_12945 PE=3 SV=1
MIETLKEFTFEAAHQLPPFSGLHGHSFLVQVFLRGEPDPVYGWSHNLYEVEKVVEKVRLKIDHTYLNDIEGLEHPSLENVARWIWNQLSGDLDGLDRVMVRRGPDGLAEGCTYSGHTGGEKREAGEIYNLGG

SEQ ID NO: 17777 - protein, 181 aa, Azospirillum brasilense
  misc_feature (1)..(181): tr|A0A060D9V0|A0A060D9V0_AZOBR 6-pyruvoyl tetrahydropte rin synthase OS=Azospirillum brasilense OX=192 GN=ABAZ3 9_02260 PE=4 SV=1
MTTNEFTLLFRRRFSMAHRLIAGDSVKCAVPHGHNETVSVKLEAVDPAPLDGAANMVESFARAKATWHRWIDGHVDHALQLSHRDPLIGYFREHEPEKLPMLLITPGDPTTEALAACMMAKANALFATETSPLRCVEVEIEETPTNTVIFRGVPEHHLDAGYLGLPGAPWWLRGDMSINDL

SEQ ID NO: 17778 - protein, 137 aa, Azospirillum sp.
  misc_feature (1)..(137): tr|A0A239FM12|A0A239FM12_9PROT 6-pyruvoyl-tetrahydropte rin synthase OS=Azospirillum sp. RU38E OX=1907313 GN=SA MN05880556_107148 PE=4 SV=1
MYSLTVRDHIMIAHSFKGAIFGPAQQLHGATFVVDAEFRRPALSADGLVVDIGQAADLLKQVLAPLNYRNLDDVPELAGRNTTTEFLAGEIHRRLSDGIRAGALGADGQQVASLKISLHESHTAWAAFEAPVAGEVA

SEQ ID NO: 17779 - protein, 179 aa, Azospirillum sp.
  misc_feature (1)..(179): tr|A0A2U1YLN7|A0A2U1YLN7_9PROT 6-pyruvoyl tetrahydropte rin synthase OS=Azospirillum sp. TSO5 OX=716760 GN=TSO5 _18630 PE=4 SV=1
MSEGFTITRQIGIDAGHRIPDHGSKCRHLHGHRYVVEATCRSVDGTLQAAGEENGMVLDFGFLKEEMMEHVDAPCDHGLILSFHDEEVLAMLAPPGIDAGAWLEELRGTVRAKGYAATEETRLGQKLYVIPFPPTAECLARHWYERLGPAVSARSRGKAKLVKVTVWETPNCRADYGVN

SEQ ID NO: 17780 - protein, 118 aa, Azotobacter beijerinckii
  misc_feature (1)..(118): tr|A0A1I4E1L0|A0A1I4E1L0_9GAMM 6-carboxy-5,6,7,8-tetrah ydropterin synthase OS=Azotobacter beijerinckii OX=1706 23 GN=SAMN04244574_02642 PE=3 SV=1
MELFKEFVFEAAHRLPHVPAGHKCGRLHGHSFRAAIYIEGEVDPYTGWIRDFSEIKEIFKPIYERLDHNYLNEIEGLENPTSEILAQWIWRQLKPLLPELSRVRIHETCTSGCEYRGD

SEQ ID NO: 17781 - protein, 118 aa, Azotobacter beijerinckii
  misc_feature (1)..(118): tr|A0A1H6RVA1|A0A1H6RVA1_9GAMM 6-carboxy-5,6,7,8-tetrah ydropterin synthase OS=Azotobacter beijerinckii OX=1706 23 GN=SAMN04244572_02667 PE=3 SV=1
MELFKEFVFEAAHRLPHVPAGHKCGRLHGHSFRAAIYIEGEVDPYTGWIRDFSEIKEIFKPIYERLDHNYLNEIEGLENPTSEILAKWIWRQLKPLLPELSRVRIHETCTSGCEYRGD

SEQ ID NO: 17782 - protein, 118 aa, Azotobacter chroococcum
  misc_feature (1)..(118): tr|A0A0C4WHW4|A0A0C4WHW4_9GAMM 6-carboxy-5,6,7,8-tetrah ydropterin synthase OS=Azotobacter chroococcum NCIMB 80 03 OX=1328314 GN=Achr_19180 PE=3 SV=1
MELFKEFVFEAAHRLPHVPAGHKCGRLHGHSFRVAIYIEGEVDPYTGWIRDFSEIKEIFKPIYERLDHNYLNEIEGLENPTSEILAKWIWQQLKPRLPELSRVRIHETCTSGCEYRGD

SEQ ID NO: 17783 - protein, 118 aa, Azotobacter chroococcum; identical to SEQ ID NO: 17782
  misc_feature (1)..(118): tr|A0A4R1PJI3|A0A4R1PJI3_9GAMM 6-carboxy-5,6,7,8-tetrah ydropterin synthase OS=Azotobacter chroococcum OX=353 G N=queD PE=3 SV=1

SEQ ID NO: 17784 - protein, 194 aa, Azotobacter vinelandii
  misc_feature (1)..(194): tr|C1DM00|C1DM00_AZOVD 6-pyruvoyl-tetrahydropterin synt hase OS=Azotobacter vinelandii (strain DJ / ATCC BAA-13 03) OX=322710 GN=Avin_29180 PE=4 SV=1
MLIRKLFKFESAHIVRHCTTRRCSRSLHGHSYRVEVLIEADALDRGQMVYDFALLKGAVADFIDAFDHAVVFWSGDDPAYIEQCKRFSERWVMLPVSPSAEQLSRVFFRLIDAVLANTEMVNGESGVRLYSVIVHETDTGYAQCFREDAGNPRMGIIRLEEIGFSARVEEDWANPRMFAELLAREPFVNRSPGS

SEQ ID NO: 17785 - protein, 118 aa, Azotobacter vinelandii
  misc_feature (1)..(118): tr|M9YJA2|M9YJA2_AZOVI 6-carboxy-5,6,7,8-tetrahydropter in synthase OS=Azotobacter vinelandii CA6 OX=1283331 GN =AvCA6_28600 PE=3 SV=1
MELFKEFVFEAAHRLPRVPAGHKCGRLHGHSFRVAIYIEGEVDPHTGWIRDFSEIKEIFKPIYERLDHHYLNEIEGLENPTSEILAKWIWRQLKPLLPELSRVRIHETCTSGCEYRGD

SEQ ID NO: 17786 - protein, 145 aa, Bacillaceae bacterium; identical to SEQ ID NO: 17081
  misc_feature (1)..(145): tr|A0A3E0JR94|A0A3E0JR94_9BACI 6-carboxy-5,6,7,8-tetrah ydropterin synthase OS=Bacillaceae bacterium OX=1889774 GN=queD PE=3 SV=1

SEQ ID NO: 17787 - protein, 145 aa, Bacillaceae bacterium
  misc_feature (1)..(145): tr|A0A271M2X7|A0A271M2X7_9BACI 6-carboxy-5,6,7,8-tetrah ydropterin synthase OS=Bacillaceae bacterium SAOS 7 OX= 2015052 GN=queD PE=3 SV=1
MIQQIYPAPVHSYRYELNKDFQFAAAHYIPHEDAGACRRLHGHTYFVNVTVVGNELNESGFLVNFQEIKHLIHKRFDHRLLNEDTLFNEENPNYFPTTEVVARTIWEVMQQSLNKMANKPRCIQVFLRETPTSYVVYRPQEEDFQ

SEQ ID NO: 17788 - protein, 144 aa, Bacilli bacterium
  misc_feature (1)..(144): tr|A0A0K0GE91|A0A0K0GE91_9FIRM 6-carboxy-5,6,7,8-tetrah ydropterin synthase OS=Bacilli bacterium VT-13-104 OX=1 637974 GN=WH51_02355 PE=3 SV=1
MMQQIYPVTEHPYAYELNKDFQFAAAHYVPHEDAGKCQNMHGHTYFTNITIAGNELDHTGFLVNFKKIKDLIHKRFDHHVMNEDTKFSDQDAEYFPTTEVVARTIYEIIQEYLNTLQNKPTCVQVYLRETPTSYCIYRPKEKTL

SEQ ID NO: 17789 - protein, 146 aa, Bacillus aerius
  misc_feature (1)..(146): tr|A0A3A9DQI7|A0A3A9DQI7_9BACI 6-carboxy-5,6,7,8-tetrah ydropterin synthase OS=Bacillus aerius OX=293388 GN=que D PE=3 SV=1
MLTQIYPQPSHPYSFELNKDMQMSAAHFIPREDAGACSRVHGHTYTINITIAGDELNESGFLVNFSTIKKLIHGEYDHTLLNDHQEFSGESADQIPSTEVVAKTIYDKTEAYLKDLKNRPHCVQVFVRETPTSYVVYRPKPGVHNG

SEQ ID NO: 17790 - protein, 146 aa, Bacillus aerophilus
  misc_feature (1)..(146): tr|A0A410KUG6|A0A410KUG6_9BACI 6-carboxy-5,6,7,8-tetrah ydropterin synthase OS=Bacillus aerophilus OX=293389 GN =queD PE=3 SV=1
MLSQIYPQTNHPFLFELNKDMHVSAAHFIPREDAGACSRVHGHTYTINITIAGDHLDDSGFLVNFSTLKKLIHGQYDHTLLNDHEEFSSNDPYAMPTTEVVAKTVYDKVAAYLTTLANKPVCVQVFVRETPTSYCIYRPKRVELND

SEQ ID NO: 17791 - protein, 141 aa, Bacillus akibai
  misc_feature (1)..(141): tr|W4QWP1|W4QWP1_BACA3 6-carboxy-5,6,7,8-tetrahydropter in synthase OS=Bacillus akibai (strain ATCC 43226 / DSM 21942 / JCM 9157 / 1139) OX=1236973 GN=JCM9157_3693 PE =3 SV=1
MMQQFYPQVQHSYRFELNKDMHLAAAHLIPDAAAGQCQYMHGHTYFINITIAGDALDDLGFLINFKRIKEIVHKRYDHSVLNDHPEYKDVYPTTERVAEQIWKAITQELEMLAHQPKCLQVVVRETPTSYVVYRPKPEELA

SEQ ID NO: 17792 - protein, 163 aa, Bacillus albus
  misc_feature (1)..(163): tr|A0A1J9U3N4|A0A1J9U3N4_9BACI 6-carboxytetrahydropteri n synthase QueD OS=Bacillus albus OX=2026189 GN=queD PE =4 SV=1
MDNFFGFRIVENLQKMDKDIQRKQLKYHNKRVMVSKEFTFDAAHHLHCYEGKCKNLHGHTYKVVFGISGYVNEIGLAIDFGDIKEIWKNEIEIYLDHRYLNETLPAMNTTAENMVVWIYEKMAEALIKDNRVNEYKGARVEFVRLFETPTSYAEVRREWMLDE

SEQ ID NO: 17793 - protein, 141 aa, Bacillus alcalophilus
  misc_feature (1)..(141): tr|A0A094WLZ5|A0A094WLZ5_BACAO 6-carboxy-5,6,7,8-tetrah ydropterin synthase OS=Bacillus alcalophilus ATCC 27647 = CGMCC 1.3604 OX=1218173 GN=AJ85_17785 PE=3 SV=1
MIYNYYPQVPHSYRYELNKDMHLSAAHYIDNDLAGKCQKVHGHTYTINVTIVGDALDKLGFLIDFKLIKDQIHKKYDHSILNDHPDFKGKHPTTEVVAETITTEINRFLKQQTNQPKCIQTIVRETPTSYVVYRPKASELE

SEQ ID NO: 17794 - protein, 146 aa, Bacillus altitudinis
  misc_feature (1)..(146): tr|A0A5D4PW93|A0A5D4PW93_9BACI 6-carboxy-5,6,7,8-tetrah ydropterin synthase OS=Bacillus altitudinis OX=293387 G N=queD PE=3 SV=1
MLSQIYPQTDHPFSFELNKDMHLSAAHFIPREDAGACSRIHGHTYTINITIAGDHLDESGFLVNFSTLKKLIHGQYDHTLLNDHEEFSSNDPYAMPTTEVVAKTVYDKVAAYLTTLANKPVCVQVFVRETPTSYCIYRPKRVELND

SEQ ID NO: 17795 - protein, 146 aa, Bacillus altitudinis
  misc_feature (1)..(146): tr|A0A5C2CC60|A0A5C2CC60_9BACI 6-carboxytetrahydropteri n synthase QueD OS=Bacillus altitudinis OX=293387 GN=qu eD PE=4 SV=1
MLSQIYPQTNHPFSFELNKDMHVSAAHFIPREDAGACSRVHGHTYTINITIAGDHLDDSGFLVNFSTLKKLIHGQYDHTLLNDHEEFSSNDPYAMPTTEVVAKTVYDKVAAYLTTLANKPVCVQVFVRETPTSYCIYRPKRVELND

SEQ ID NO: 17796 - protein, 146 aa, Bacillus amyloliquefaciens
  misc_feature (1)..(146): tr|A0A4V7TMF2|A0A4V7TMF2_BACAM 6-carboxy-5,6,7,8-tetrah ydropterin synthase OS=Bacillus amyloliquefaciens OX=13 90 GN=queD PE=3 SV=1
MLSQIYPQVQHPYSFELNKDMHISAAHFIPRESAGACSRVHGHTYTVNITVAGDELDDSGFLVNFSVLKKLVHGAYDHTLLNDHDEFSDDDRYSLPTTEVVAKTIYDKVQSYLETLENQPVCVQIFVRETPTSYCVYRPKKGDMNG

SEQ ID NO: 17797 - protein, 146 aa, Bacillus amyloliquefaciens
  misc_feature (1)..(146): tr|A0A5C2Q299|A0A5C2Q299_BACAM 6-carboxy-5,6,7,8-tetrah ydropterin synthase OS=Bacillus amyloliquefaciens OX=13 90 GN=queD PE=3 SV=1
MLSQIYPQVQHPYSFELNKDMHISAAHFIPRESAGACSRVHGHTYTVNITVAGDELDDSGFLVNFSVLKKLVHGAYDHTLLNDHEEFSDDDRYSLPTTEVVAKTIYDKVQSYLETLENQPVCVQVFVRETPTSYCVYRPKKGDRNG

SEQ ID NO: 17798 - protein, 163 aa, Bacillus anthracis
  misc_feature (1)..(163): tr|A0A5K1VL02|A0A5K1VL02_BACAN 6-carboxytetrahydropteri n synthase QueD OS=Bacillus anthracis OX=1392 GN=queD P E=4 SV=1
MDNFFGFRIVENLQKMDKDIQRKQLKYHNKRVMVSKEFTFDAAHHLHCYEGKCKNLHGHTYKVVFGISGYVNEIGLAIDFGDIKEIWKNEIEIYLDHRYLNETLPAMNTTAENMVVWIYEKMAEALTKDNRVNEYKGARVEFVRLFETPTSYAEVRREWMLDE

SEQ ID NO: 17799 - protein, 163 aa, Bacillus anthracis
  misc_feature (1)..(163): tr|A0A3P1UCM9|A0A3P1UCM9_BACAN 6-carboxytetrahydropteri n synthase QueD OS=Bacillus anthracis OX=1392 GN=queD P E=4 SV=1
MDNFFGFRIVENLQKMDKDIQRKQLKYHNKRVMVSKEFTFDAAHHLHCYEGKCKNLHGHTYKVVFGISGYVNEIGLAIDFGDIKEIWKNEIEIYLDHRYLNETLPAMNTTAENMVVWIYEKMAEALTKDNRANEYKGARVEFVRLFETPTSYAEVRREWMLDE

SEQ ID NO: 17800 - protein, 144 aa, Bacillus aquimaris
  misc_feature (1)..(144): tr|A0A366EX98|A0A366EX98_9BACI 6-carboxy-5,6,7,8-tetrah ydropterin synthase OS=Bacillus aquimaris OX=189382 GN= DET59_102408 PE=3 SV=1
MIQQIYPTPDHTYEFELNKDMHFAAAHYIPHVDAGSCQEIHGHTYFANITIGGDQLDDSGFLINFQHIKKLIHKRFDHKVMNEDELFSAENSNVFPTTEVVAKVMWEIIQAHLDTLPHQPECLQVFLRETPTSYVIYRPKVRQS

SEQ ID NO: 17801 - protein, 144 aa, Bacillus aquimaris
  misc_feature (1)..(144): tr|A0A5D4TZ96|A0A5D4TZ96_9BACI 6-carboxy-5,6,7,8-tetrah ydropterin synthase OS=Bacillus aquimaris OX=189382 GN= FZC85_12110 PE=3 SV=1
MIQQIYPTPDHTYEFELNKDMHFAAAHYIPHADAGSCQDIHGHTYFANITIGGDQLDDSGFLINFQHIKKLIHKRFDHKVMNEDELFSAEKSNMFPTTEVVAKVMWEIIQAHLDTLPHQPKCLQVFLRETPTSYVIYRPKGRKS

SEQ ID NO: 17802 - protein, 147 aa, Bacillus aryabhattai
  misc_feature (1)..(147): tr|A0A264YWH8|A0A264YWH8_9BACI 6-carboxy-5,6,7,8-tetrah ydropterin synthase OS=Bacillus aryabhattai OX=412384 G N=queD PE=3 SV=1
MLQQIYPQVVHPYSYELNKDMNFAAAHFVPHESAGKCQQVHGHTYFVNLTIAGDELDSSGFLVNFATLKKIVSGQFDHTLLNNHKHLFNEEDANDFPTSEVIARKIYELVQAHLDALENKPVCVQVFVRETPTSYVIYRPKKVKRDE

SEQ ID NO: 17803 - protein, 146 aa, Bacillus aryabhattai
  misc_feature (1)..(146): tr|A0A1G6Q7K2|A0A1G6Q7K2_9BACI 6-carboxy-5,6,7,8-tetrah ydropterin synthase OS=Bacillus aryabhattai B8W22 OX=13 58420 GN=SAMN04487777_102397 PE=3 SV=1
MLQQMYPQVFHDYEYELNKDMQFAAAHFVPHTEAGKCRQVHGHTYFVNLTVAGDTLDEAGFLVNFALLKKIVSGQFDHTLLNDHSIFNEENPNDFPTTEVVARKIYELVQEYLDTLPNKPSCVQVFVRETPTSYVVYRPKKVKKRG

SEQ ID NO: 17804 - protein, 157 aa, Bacillus asahii
  misc_feature (1)..(157): tr|A0A3T0KPR2|A0A3T0KPR2_9BACI 6-pyruvoyl tetrahydrobio pterin synthase OS=Bacillus asahii OX=228899 GN=queD PE =4 SV=1
MYGFRIVDKLQKLDQDIQRNQLNYHKKRVLVSKEFTFDAAHHLHCYEGKCKNLHGHTYRVVFGLSGFTDARGLMMDFGDIKQIWKDKIEIYLDHRYLNETLPLMNTTAENMVVWIYEKMADALREEPQYKGARVEFVRLFETPTSYAEARREWMEDE

SEQ ID NO: 17805 - protein, 157 aa, Bacillus asahii
  misc_feature (1)..(157): tr|A0A398BHU5|A0A398BHU5_9BACI 6-carboxytetrahydropteri n synthase QueD OS=Bacillus asahii OX=228899 GN=queD PE =4 SV=1
MYGFRIVDKLQKLDQDIQRNQLNYHKKRVLVSKEFTFDAAHHLHCYEGKCKNLHGHTYRVVFGLSGFTDDRGLMIDFGDIKQIWKDKIEIYLDHRYLNETLPLMNTTAENMVVWIYEKMADALREGPQYKGARVEFVRLFETPTSYAEARREWMEDE

SEQ ID NO: 17806 - protein, 146 aa, Bacillus atrophaeus
  misc_feature (1)..(146): tr|A0A0H3E287|A0A0H3E287_BACA1 6-carboxy-5,6,7,8-tetrah ydropterin synthase OS=Bacillus atrophaeus (strain 1942 ) OX=720555 GN=BATR1942_04625 PE=3 SV=1
MISQIYPQAQHPYSFELNKDMHISAAHFIPRESAGACSRVHGHTYTVNITVAGDELDDSGFLVNFSVLKKLVHGSYDHTLLNDHDEFSNDDPYSLPTTEVVAKTIYNKVQSYLETLANKPACVQVFVRETPTSYCVYRPKKGGLNG

SEQ ID NO: 17807 - protein, 146 aa, Bacillus atrophaeus
  misc_feature (1)..(146): tr|A0A384IA57|A0A384IA57_BACAT 6-carboxy-5,6,7,8-tetrah ydropterin synthase OS=Bacillus atrophaeus OX=1452 GN=q ueD PE=3 SV=1
MISQIYPQAQHPYSFELNKDMHISAAHFIPRESAGACSRVHGHTYTVNITVAGDELDDSGFLVNFSVLKKLVHGSYDHTLLNDHDEFSNDDPYSLPTTEVVAKTIYDKVQSYLETLENKPACVQVFVRETPTSYCVYRPKKGGLNG

SEQ ID NO: 17808 - protein, 146 aa, Bacillus australimaris
  misc_feature (1)..(146): tr|A0A0P7F4K4|A0A0P7F4K4_9BACI 6-carboxy-5,6,7,8-tetrah ydropterin synthase OS=Bacillus australimaris OX=132696 8 GN=AKG37_11270 PE=3 SV=1
MLSQIYPQTNHPFSFELNKDMHVSAAHFIPREDAGACSRVHGHTYTINITIAGDELDESGFLVNFSTLKKLIHGQYDHTLLNDHEEFSSNDPYAMPTTEVVAKTVHDKVAAYLSTLANKPTCVQVFVRETPTSYCIYRPKRVEING

SEQ ID NO: 17809 - protein, 162 aa, Bacillus azotoformans
  misc_feature (1)..(162): tr|A0A072NID9|A0A072NID9_BACAZ Queuosine biosynthesis p rotein QueD OS=Bacillus azotoformans MEV2011 OX=1348973 GN=M670_03518 PE=4 SV=1
MENKIFGFRIVEDLQKIDKDINRNQLKYHNKRVLVSKEFTFDAAHHLHCYDGKCKNLHGHTYKVVFGISGFVNEIGLAIDFGDIKDIWKAEIEIYLDHRYLNETLPNMNTTAENMVVWIYEKMKESLEKRQNQYDGARVEFVRLYETPTSYAEAKREWMELE

SEQ ID NO: 17810 - protein, 162 aa, Bacillus azotoformans
  misc_feature (1)..(162): tr|K6E4X0|K6E4X0_BACAZ 6-pyruvoyl tetrahydrobiopterin s ynthase OS=Bacillus azotoformans LMG 9581 OX=1131731 GN =BAZO_04670 PE=4 SV=1
MENKIFGFRIVEDLQKIDKDINRNQLKYHNKRVLVSKEFTFDAAHHLHCYDGKCKNLHGHTYKVVFGISGFVNEIGLAIDFGDIKDIWKAEIEIYLDHRYLNETLPKMNTTAENMVVWIYEKMKESLEKRQNQYDGARVEFVRLYETPTSYAEAKREWMELE

SEQ ID NO: 17811 - protein, 162 aa, Bacillus bacterium
  misc_feature (1)..(162): tr|A0A3D0E5U3|A0A3D0E5U3_9BACI 6-carboxytetrahydropteri n synthase QueD OS=Bacillus bacterium OX=2053512 GN=que D PE=4 SV=1
MEKDFFGFRIVEDLQKLDRDIKKDELKYHHKRVLVSKEFTFDAAHHLHCYEGKCKNLHGHTYKVIFGISGFVDEIGLVIDFGDIKEIWKEEIEIYLDHRYINETLPNMNTTAENMVVWIYEKMKESLSNRPEKNNGVQVEFVRLYETPTSYAETRREWMEIE

SEQ ID NO: 17812 - protein, 163 aa, Bacillus bacterium
  misc_feature (1)..(163): tr|A0A506QKC4|A0A506QKC4_9BACI 6-carboxytetrahydropteri n synthase QueD OS=Bacillus bacterium OX=2053512 GN=que D PE=4 SV=1
MDNFFGFRIVENLQKMDKDIQRKQLKYHNKRVMVSKEFTFDAAHHLHCYEGKCKNLHGHTYKVVFGISGYVNEIGLAIDFGDIKEIWKNEIEIYLDHRYLNETLPAMNTTAENMVVWIYEKMAEALIKDDRANEYKGARVEFVRLFETPTSYAEVRREWMFDE

SEQ ID NO: 17813 - protein, 145 aa, Bacillus badius
  misc_feature (1)..(145): tr|A0A0C2XZ10|A0A0C2XZ10_BACBA 6-carboxy-5,6,7,8-tetrah ydropterin synthase OS=Bacillus badius OX=1455 GN=A3781 _10960 PE=3 SV=1
MMQQIYPAPAHSYRYELNKDFQFAAAHYVPHEEAGACRRLHGHTYFANITVVGDELNESGFLVNFQDIKNLIHKRFDHTVLNEDSLFDDMDPNHFPTTEAVARKFWEVIQESLNKLPNQPRCLQVFLRETPTSYVVFRPRKEDFQ

SEQ ID NO: 17814 - protein, 160 aa, Bacillus bataviensis
  misc_feature (1)..(160): tr|A0A561DEI3|A0A561DEI3_9BACI 6-pyruvoyltetrahydropter in/6-carboxytetrahydropterin synthase OS=Bacillus batav iensis OX=220685 GN=FB550_105155 PE=4 SV=1
MYGFRIVDKLQKINEDIQPNQLKYHHKRVMVSKEFTFDAAHHLHCYEGKCKNLHGHTYKVIFGLSGFVDERGLMMDFGDIKEIWKNEIEIHLDHRYLNETLPPMNTTAENMVVWIYEKMAEVLKQAERQEKYAGARVEFVRLFETPTSYAEARREWMENE

SEQ ID NO: 17815 - protein, 163 aa, Bacillus bombysepticus
  misc_feature (1)..(163): tr|A0A023P3J8|A0A023P3J8_9BACI 6-pyruvoyl tetrahydrobio pterin synthase OS=Bacillus bombysepticus str. Wang OX= 1330043 GN=CY96_05885 PE=4 SV=1
MDNFFGFRIVENLQKMDKDIQRKQLKYHNKRVMVSKEFTFDAAHHLHCYEGKCKNLHGHTYKVVFGISGYVNEIGLAIDFGDIKEIWKNEIEIYLDHRYLNETLPAMNTTAENMVVWIYEKMAEALTKENRVNEYKGARVEFVRLFETPTSYAEVRREWMLDE

SEQ ID NO: 17816 - protein, 158 aa, Bacillus boroniphilus
  misc_feature (1)..(158): tr|W4RTQ4|W4RTQ4_9BACI Queuosine biosynthesis QueD OS=B acillus boroniphilus JCM 21738 OX=1294265 GN=JCM21738_4 454 PE=4 SV=1
MYEFRIVDQLQKIDKDIKREQLKYHSKRVLVSKEFTFDAAHHLHEYEGKCKNLHGHTYKVIFGLSGFVDARGLMIDFGDIKDIWKSDIEIYLDHRYLNETLPPMNTTAENMVAWIYEKMAEALANRQHLYDGARVEFVKLYETPTSYAEARREWMEIE

SEQ ID NO: 17817 - protein, 156 aa, Bacillus butanolivorans
  misc_feature (1)..(156): tr|A0A0M0EZ49|A0A0M0EZ49_9BACI 6-carboxytetrahydropteri n synthase QueD OS=Bacillus butanolivorans OX=421767 GN =queD PE=4 SV=1
MYGFTIVDKLQKIDKDIQRNQLNYSSKRVMVSKEFTFDAAHHLHDYEGKCKNLHGHTYRVIFGLSGYTDSRGLMIDFGDIKEIWKNEIEIHLDHRYLNETLPLMNTTAENMVVWIYEKMAEALLTKNYEGARVEFVRLYETPTSYAEARREWMESE

SEQ ID NO: 17818 - protein, 273 aa, Bacillus caldolyticus
  misc_feature (1)..(273): tr|A0A2H5KEQ5|A0A2H5KEQ5_BACCL 6-pyruvoyl tetrahydropte rin synthase OS=Bacillus caldolyticus OX=1394 GN=CWI35_ 02825 PE=4 SV=1
MLYLTRTIAFSAAHRYWIEDWSVEKNKAVFGLCSNLNGHGHDYQLDVTVKGLVNPLTGIVVNITQVDAIMKEVVSAELDGKFLNQEHPYFQTHIPTTEMMVTYIWDVLQGKFSCCQLCKVKLQENETLYAVKEEQELVQLTRRYYFSSAHRLHSDQLTNEENQRLFGKCNNRYGHGHNYCLEVTVIGKPDPITGMVVNLAELDEIVNREVLVKFDHKHLNLDTDEFKQINPTAENIVIVIWELLAPYLSSLYKIGLWETQKNYFEYFGPHKEK

SEQ ID NO: 17819 - protein, 145 aa, Bacillus caldolyticus
  misc_feature (1)..(145): tr|A0A2H5KFX2|A0A2H5KFX2_BACCL 6-carboxy-5,6,7,8-tetrah ydropterin synthase OS=Bacillus caldolyticus OX=1394 GN =queD PE=3 SV=1
MMHQLYPQVAHHYRYELNKDMHIAAAHFIPHEAAGSCANVHGHTYIVNVTVAGDELDESGFLVNFQTLKQLVHRKLDHTLLNDHSDWFDGHDPNRFPTSEVVARTIYETIQRYLDTLPHKPKCLQVFVRETPTSYVVYRPKAGER

SEQ ID NO: 17820 - protein, 145 aa, Bacillus camelliae
  misc_feature (1)..(145): tr|A0A2N3LM31|A0A2N3LM31_9BACI 6-carboxy-5,6,7,8-tetrah ydropterin synthase OS=Bacillus camelliae OX=1707093 GN =queD PE=3 SV=1
MIQQFYPQPAPHPYRFELNKDMNFSTAHFIPNEKAGKCSFTHGHTYFVNLTIAGDDLDEMGMLVNFSDLKKLVHGRYDHKLLNDFPEFEKLPPSTEAVAQTIYELVANYLDTLPNLPKCIQVLVRETPTSYVIYRPRNEGNDRHE

SEQ ID NO: 17821 - protein, 160 aa, Bacillus campisalis
  misc_feature (1)..(160): tr|A0A0M2SWC0|A0A0M2SWC0_9BACI 6-pyruvoyl tetrahydrobio pterin synthase OS=Bacillus campisalis OX=1408103 GN=WQ 57_07565 PE=4 SV=1
MYGFRIVDKLQKMDEDIKRNQLKYHHKRVLVSKEFTFDSAHHLHAYEGKCKNLHGHTYRVIFGLSGFVDDRGLLIDFGDIKEIWKTEIEIHLDHKYLNETLPPMNTTAENMVVWIYEKMAEALEKEERKRVYDGARVEFVRLYETPTSYAEARREWMEVE

SEQ ID NO: 17822 - protein, 160 aa, Bacillus canaveralius
  misc_feature (1)..(160): tr|A0A2N5GG91|A0A2N5GG91_9BACI 6-carboxytetrahydropteri n synthase QueD OS=Bacillus canaveralius OX=1403243 GN= queD PE=4 SV=1
MYGFRIVDKLQKIDEDINRDQLKYHAKRVLVSKEFTFDAAHHLHCYEGKCKNLHGHTYKVIFGLSGFVDHRGLLIDFADIKEIWKNEIEIHLDHKYLNETLPPMNTTAENIVVWIYEQMAEALKRQDRQQKYDGARVEFVRLYETPTSYAEARREWMEVE

SEQ ID NO: 17823 - protein, 272 aa, Bacillus canaveralius
  misc_feature (1)..(272): tr|A0A2N5GN87|A0A2N5GN87_9BACI 6-pyruvoyl tetrahydropte rin synthase OS=Bacillus canaveralius OX=1403243 GN=CU6 35_08985 PE=4 SV=1
MLYLSRKLYFSAAHSYRIDDWTEEQNRKMFGPCSNSNGHGHDYTMEVMVKGELNDKSGIVVNITDIDTAVKSFIQIELDGKFLNKENNYFQKHIPTTENIVSYIWDSLIDKIDNCDLHKIRLYENDFLYSEKEDNEMVRLTRKYHFCTAHRLHSDQLSEEKNLSLFGKCNNPYGHGHNYYLEVTVSGVPDPITGMIANIADIDKTVEEEIINRFDHKHLNLDTEEFKELNPTSENVAVVTWNLLAPKMNNLYKIGLYETEKNYFEYFGTEKG

SEQ ID NO: 17824 - protein, 160 aa, Bacillus caseinilyticus
  misc_feature (1)..(160): tr|A0A1H3IK90|A0A1H3IK90_9BACI 6-pyruvoyltetrahydropter in/6-carboxytetrahydropterin synthase OS=Bacillus casei nilyticus OX=1503961 GN=SAMN05421736_101833 PE=4 SV=1
MFGFKIVDKLQKLGVDIKKSELKYHAKRVLVSKEFTFDAAHHLHCYEGKCKNLHGHTYKVVFGISGYVDEIGLVIDFGDIKNIWKKEIEVFLDHRYLNEMLPPMNTTAENMVVWIYEKMSQALLAGESSDNGQGIRVEFVRLYETPTSYAEARREWMEVE

SEQ ID NO: 17825 - protein, 158 aa, Bacillus cavernae
  misc_feature (1)..(158): tr|A0A433HS88|A0A433HS88_9BACI 6-carboxytetrahydropteri n synthase QueD OS=Bacillus cavernae OX=1674310 GN=queD PE=4 SV=1
MYGFRIVDKLQKIDEDIKQDQLKYHSKRVLVSKEFTFDAAHHLHFYDGKCKNLHGHTYRVIFGISGFVDDLGLMIDFGDLKEIWKNEIEIFLDHKYLNETLPAMNTTAENMVVWIYEKMLEALATRAQHYDGARVEFVRLYETPTSYAEARREWMEVE

SEQ ID NO: 17826 - protein, 155 aa, Bacillus cellulosilyticus
  misc_feature (1)..(155): tr|E6TRB9|E6TRB9_BACCJ Uncharacterized protein OS=Bacil lus cellulosilyticus (strain ATCC 21833 / DSM 2522 / FE RM P-1141 / JCM 9156 / N-4) OX=649639 GN=Bcell_2373 PE= 4 SV=1
MFGFKIVENLQKMDKDIVRKDLKYHNKRVLVSKEFTFDAAHHLHSYEGKCKNLHGHTYKVIFGISGHVDEIGLVIDFSDIKQIWKEQIEIYLDHRYLNETLPKMNTTAENMVVWIFERMEHALQAFPNKCRVEFVKLFETPTSYAEVKREWMIDV

SEQ ID NO: 17827 - protein, 163 aa, Bacillus cereus
  misc_feature (1)..(163): tr|R8CV70|R8CV70_BACCE Queuosine biosynthesis protein Q ueD OS=Bacillus cereus HuA2-9 OX=1053204 GN=IG9_03690 P E=4 SV=1
MDNFFGFRIVENLQKMDKDIQREQLKYHNKRVMVSKEFTFDAAHHLHCYEGKCKNLHGHTYKVVFGISGYVNEIGLAIDFGDIKEIWKNEIEIYLDHRYLNETLPEMNTTAENMVVWIYEKMAEALTKDNRANEYKGARVEFVRLFETPTSYAEVRREWMLDE

SEQ ID NO: 17828 - protein, 163 aa, Bacillus cereus; identical to SEQ ID NO: 17827
  misc_feature (1)..(163): tr|C2SH78|C2SH78_BACCE 6-pyruvoyl tetrahydrobiopterin s ynthase OS=Bacillus cereus BDRD-ST196 OX=526976 GN=bcer e0014_11760 PE=4 SV=1

SEQ ID NO: 17829 - protein, 160 aa, Bacillus circulans
  misc_feature (1)..(160): tr|A0A0J1LDL0|A0A0J1LDL0_BACCI 6-pyruvoyl tetrahydrobio pterin synthase OS=Bacillus circulans OX=1397 GN=ABW02_ 08535 PE=4 SV=1
MHDFRIVDRLQKFGEDISSKQLKYHCKRVMVSKEFTFDAAHHLHAYEGKCMNLHGHTYKVVFGISGYLDNRGLMIDFGDIKKIWKTEIEIYLDHRYLNETLPPMNTTAENIVYWIFEKMEEALNKDEVKQADNGARVEFVRLYETPTSYAEMRREWMESE

SEQ ID NO: 17830 - protein, 160 aa, Bacillus circulans
  misc_feature (1)..(160): tr|A0A561HA63|A0A561HA63_BACCI 6-pyruvoyltetrahydropter in/6-carboxytetrahydropterin synthase OS=Bacillus circu lans OX=1397 GN=FHW50_111138 PE=4 SV=1
MHDFRIVDRLQKFGEDISSKQLKYHCKRVMVSKEFTFDAAHHLHAYEGKCMNLHGHTYKVVFGISGYLDNRGLMIDFGDIKKIWKTEIEIYLDHRYLNETLPPMNTTAENIVYWIFEKMEEALNKDEITQADNGARVEFVRLYETPTSYAEMRREWMESE

SEQ ID NO: 17831 - protein, 141 aa, Bacillus clausii
  misc_feature (1)..(141): tr|Q5WG42|Q5WG42_BACSK 6-carboxy-5,6,7,8-tetrahydropter in synthase OS=Bacillus clausii (strain KSM-K16) OX=666 92 GN=ABC2128 PE=3 SV=1
MIQQIYPAPIHSYRYELNKDMHVAAAHYIDDERAGRCQRVHGHTYFINLTIVGDALDETGFLVNFSKLKQAVHGRFDHRLLNEDTLFETAPPSTEKMAETIYKVVQEQLDTCPNRPLCIQVYVRETPTSYVVYRPKEHARG

SEQ ID NO: 17832 - protein, 141 aa, Bacillus clausii
  misc_feature (1)..(141): tr|A0A268RVK5|A0A268RVK5_BACCS 6-carboxy-5,6,7,8-tetrah ydropterin synthase OS=Bacillus clausii OX=79880 GN=que D PE=3 SV=1
MIQQIYPTPIHSYRYELNKDMHVAAAHYIDDERAGQCQRVHGHTYFINLTIVGDDLDETGFLVNFSKLKQAVHGRFDHRLLNEDALFETAPPSTEKMAETIYKVVQEQLDTCPNRPLCIQVYVRETPTSYVVYRPKEHARG

SEQ ID NO: 17833 - protein, 163 aa, Bacillus coagulans
  misc_feature (1)..(163): tr|A0A150JVA9|A0A150JVA9_BACCO Uncharacterized protein OS=Bacillus coagulans OX=1398 GN=B4100_0030 PE=4 SV=1
MSEYHIPEKVQIFGKDIRKEQLKYHHKRTAVTKAFTFDAAHHLHLYEGKCKSLHGHTYKVKITCSAYLNEIGISIDFGDLKKIFQEAVEEKLDHQYLNNVLPPMNTTAENMVVWMWEEIENRLNQQKDYKDRGARLEELVLYETPKSYATMKREWMEEETDGK

SEQ ID NO: 17834 - protein, 163 aa, Bacillus coagulans
  misc_feature (1)..(163): tr|A0A150JSA8|A0A150JSA8_BACCO Uncharacterized protein OS=Bacillus coagulans OX=1398 GN=B4098_0184 PE=4 SV=1
MSEYHTPEKVQIFGKDIRKEELKYHRKRTAVTKEFTFDAAHHLHLYEGKCKRLHGHTYKVKITCSAYLNEIGISIDFGDLKKIFQEAVEEKLDHQYLNNVLPPMNTTAENMVVWMWEEIENRLNRQKDYKDRGARLEELVLYETPKSYATMKREWMEEETDGK

SEQ ID NO: 17835 - protein, 148 aa, Bacillus cohnii
  misc_feature (1)..(148): tr|A0A223KPM3|A0A223KPM3_9BACI 6-carboxy-5,6,7,8-tetrah ydropterin synthase OS=Bacillus cohnii OX=33932 GN=BC63 07_09240 PE=3 SV=1
MLQQIYPQVPHSYQYELNKDMQIAAAHYIPTVSAGKCRQVHGHTYFINVTVAGNELDDSGFLVNFQILKKLLHDKYDHTVLNDHKEVFSDEDSNHFPTTEVVARKMWETIEQHLQTLPNSPTCLQIFVRETPTSYCIYRPKRDCSKNE

SEQ ID NO: 17836 - protein, 160 aa, Bacillus cucumis
  misc_feature (1)..(160): tr|A0A2N5HSM6|A0A2N5HSM6_9BACI 6-carboxytetrahydropteri n synthase QueD OS=Bacillus cucumis OX=1740721 GN=queD PE=4 SV=1
MYGFRIVDKLQKIEEDIKPSQLKYHHKRVLVSKEFTFDAAHHLHCYEGKCKNLHGHTYKVIFGLSGFVDERGLMMDFGDIKEIWKNEIEIFLDHRYLNETLPPMNTTAENMVVWIYEKMDEALKQPERQEQYVGARVEFVRLFETPTSYAEARREWMENE

SEQ ID NO: 17837 - protein, 164 aa, Bacillus cytotoxicus
  misc_feature (1)..(164): tr|A7GMN3|A7GMN3_BACCN Uncharacterized protein OS=Bacil lus cytotoxicus (strain DSM 22905 / CIP 110041 / 391-98 / NVH 391-98) OX=315749 GN=Bcer98_1065 PE=4 SV=1
MEQSFFGFRVVENLQKIDKDIQRQQLKYHNKRVMVSKEFTFDAAHHLHCYDGKCKNLHGHTYKVVFGISGYVNEIGIAIDFGDIKEIWKNEIEIYLDHRYLNETLPAMNTTAENMVVWIYEKMAEALTKGGRAEEYKGARVEFVRLFETPTSYTEVRREWMLDE

SEQ ID NO: 17838 - protein, 164 aa, Bacillus cytotoxicus; identical to SEQ ID NO: 17837
  misc_feature (1)..(164): tr|A0A2S1A8P5|A0A2S1A8P5_9BACI 6-carboxytetrahydropteri n synthase QueD OS=Bacillus cytotoxicus OX=580165 GN=qu eD PE=4 SV=1

SEQ ID NO: 17839 - protein, 159 aa, Bacillus daliensis
  misc_feature (1)..(159): tr|A0A1G9ZJ63|A0A1G9ZJ63_9BACI 6-pyruvoyltetrahydropter in/6-carboxytetrahydropterin synthase OS=Bacillus dalie nsis OX=745820 GN=SAMN04488053_101117 PE=4 SV=1
MFGFRIVEKLQKIGQDIQKEDLKYHQKRVMVSKEFTFDAAHHLHEYEGKCKNLHGHTYTVVFGISGFVDEIGIMIDFGDIKEIWKEYIEPSLDHRYLNEMLPLMNTTAENMVVWIYEQMNEALQHRNQSGSQQFRVEFVRLFETPTSYAEVKREWMEDE

SEQ ID NO: 17840 - protein, 158 aa, Bacillus deserti
  misc_feature (1)..(158): tr|A0A2N5M843|A0A2N5M843_9BACI 6-carboxytetrahydropteri n synthase QueD OS=Bacillus deserti OX=673318 GN=queD P E=4 SV=1
MYGFRIVDKLQKLHEDIKLEQLKYHSKRVMVSKEFTFDAAHHLHHYEGKCKNLHGHTYKVIFGISGYLDERGLLIDFGDIKEIWKNEIEIFLDHRYINETLPSMNTTAENMVAWIYEKMKDALGNRKEQYDGARVEFVRLYETQTSFAEARREWMELG

SEQ ID NO: 17841 - protein, 146 aa, Bacillus enclensis
  misc_feature (1)..(146): tr|A0A1C4B7J4|A0A1C4B7J4_9BACI 6-carboxy-5,6,7,8-tetrah ydropterin synthase OS=Bacillus enclensis OX=1402860 GN =GA0061094_1951 PE=3 SV=1
MMLQQIYPSPTHEYEFELNKDMHFAASHYIPHEDAGDCQKVHGHTYYANITIGGNQLDDSGFLINFKHIKKLIHKRFDHTLLNEDSLFSDEDPLKFPTTEVVAKTVCEIIQGHLDTLEHRPVCLQVFLRETPTSYVIYRPKRGKVS

SEQ ID NO: 17842 - protein, 147 aa, Bacillus endophyticus
  misc_feature (1)..(147): tr|A0A329ENA8|A0A329ENA8_9BACI 6-carboxy-5,6,7,8-tetrah ydropterin synthase OS=Bacillus endophyticus OX=135735 GN=A4R27_10980 PE=3 SV=1
MLQQIYPSVAHDFSYELNKDMHFASAHFVPHESAGACQNMHGHTYFANVTIAGDELDETGFLVNFQSLKKLVAKEFDHTLLNDHEAFDDRDPNFFPTTEVVARTIYERIQKHLDTLKNKPVCLQVFLRETPTSYVVYRPKRGKKSES

SEQ ID NO: 17843 - protein, 147 aa, Bacillus endophyticus
  misc_feature (1)..(147): tr|A0A3N6BNG1|A0A3N6BNG1_9BACI 6-carboxy-5,6,7,8-tetrah ydropterin synthase OS=Bacillus endophyticus OX=135735 GN=FH5_02952 PE=3 SV=1
MLQQIYPSVAHDFSYELNKDMHFAAAHFVPHESAGACQNMHGHTYFANVTIAGDELDETGFLVNFQSLKKLVAKEFDHTLLNDHEAFDDRDPNFFPTTEVVARTIYERIQKHLDTLENKPVCLQVFLRETPTSYVVYRPKRGKKSES

SEQ ID NO: 17844 - protein, 160 aa, Bacillus endozanthoxylicus
  misc_feature (1)..(160): tr|A0A5J5HTG2|A0A5J5HTG2_9BACI 6-carboxytetrahydropteri n synthase QueD OS=Bacillus endozanthoxylicus OX=203601 6 GN=queD PE=4 SV=1
MYGFRIVDKLQKMDIDIKSQQLKYHTKRVLVSKEFTFDAAHHLHQYEGKCKNLHGHTYKVIFGISGFVDERGILIDFGDIKEIWKSEIEIHLDHRYLNETLPLMNTTAENIVVWIYEKMTEALQKENRQQLYSGARVEFVRLYETPTSYAEARREWMENE

SEQ ID NO: 17845 - protein, 147 aa, Bacillus filamentosus
  misc_feature (1)..(147): tr|A0A1X7F0C9|A0A1X7F0C9_9BACI 6-carboxy-5,6,7,8-tetrah ydropterin synthase OS=Bacillus filamentosus OX=1402861 GN=queD PE=3 SV=1
MLQQIYPSVAHDFSYELNKDMHFASAHFVPHESAGACQNMHGHTYFANVTIAGDELDETGFLVNFQSLKKLVAKEFDHTLLNDHEAFDDRDPNFFPTTEVVARTIYERIQKHLDTLENKPVCLQVFLRETPTSYVVYRPKRGKKSES

SEQ ID NO: 17846 - protein, 158 aa, Bacillus firmus
  misc_feature (1)..(158): tr|W7KVG8|W7KVG8_BACFI 6-pyruvoyl tetrahydrobiopterin s ynthase OS=Bacillus firmus DS1 OX=1307436 GN=PBF_15859 PE=4 SV=1
MYGFRIVDKLQKINEDIKPDQLKYHHKRVMVSKEFTFDSAHHLHCYEGKCKNLHGHTYKVIFGISGFVDDRGLMIDFGDIKEIWKNEIEIYLDHKYLNETLPPMNTTAENMVVWIYEKMAESLQNRVEQYDGARVEFVRLFETPTSYAEARREWMEVE

SEQ ID NO: 17847 - protein, 158 aa, Bacillus firmus
  misc_feature (1)..(158): tr|A0A380XQ03|A0A380XQ03_BACFI Putative 6-pyruvoyl tetr ahydropterin synthase OS=Bacillus firmus OX=1399 GN=que D PE=4 SV=1
MYGFRIVDKLQKINEDIQPDQLKYHHKRVMVSKEFTFDSAHHLHCYEGKCKNLHGHTYKVIFGISGFVDDRGLMIDFGDIKEIWKNEIEIYLDHKYLNETLPPMNTTAENMVVWIYEKMAESLQNRKEQYDGARVEFVRLFETPTSYAEARREWMEVE

SEQ ID NO: 17848 - protein, 147 aa, Bacillus flexus
  misc_feature (1)..(147): tr|A0A4P8XA73|A0A4P8XA73_9BACI 6-carboxy-5,6,7,8-tetrah ydropterin synthase OS=Bacillus flexus OX=86664 GN=queD PE=3 SV=1
MLQQIYPQVAHPYSYELNKDMNFAAAHFVPHESAGKCQQVHGHTYFVNLTIAGDELDSSGFLVNFATLKKIVSGQFDHTLLNDHKELFNEEDANDFPTSEVIARKIYELVQAHLDELENKPACVQVFVRETPTSYVVYRPKKVKRDE

SEQ ID NO: 17849 - protein, 160 aa, Bacillus foraminis
  misc_feature (1)..(160): tr|A0A4R2BJS6|A0A4R2BJS6_9BACI 6-pyruvoyltetrahydropter in/6-carboxytetrahydropterin synthase OS=Bacillus foram inis OX=279826 GN=EV146_102399 PE=4 SV=1
MYGFRIVEKLQKIDEDIQRDQLKYHHKRVLVSKEFTFDSAHHLHAYEGKCKNLHGHTYRVIFGLSGFVDDRGLMIDFGEIKEIWKSEIEIYLDHRYLNETLPPMNTTAENMVVWIYEKMAEALRSGDRRQKYDGARVEFVRLYETPTSYAEARREWMEVE

SEQ ID NO: 17850 - protein, 162 aa, Bacillus freudenreichii
  misc_feature (1)..(162): tr|A0A448FGA2|A0A448FGA2_9BACI Putative 6-pyruvoyl tetr ahydropterin synthase OS=Bacillus freudenreichii OX=178 3501 GN=queD PE=4 SV=1
MGKDFFGFRIVEDLQKMDRDIKKDELKYHKKRVLVSKEFTFDAAHHLHCYEGKCKNLHGHTYKVIFGISGFVDEIGLVIDFGDIKEIWKQEIEIYLDHRYLNETLPKMNTTAENMVVWIYEKMRESLNNRQDQYDGVQVEFVRLYETPTSYAEARREWMEIE

SEQ ID NO: 17851 - protein, 164 aa, Bacillus gaemokensis
  misc_feature (1)..(164): tr|A0A073KAX7|A0A073KAX7_9BACI 6-pyruvoyl tetrahydrobio pterin synthase OS=Bacillus gaemokensis OX=574375 GN=BA GA_07750 PE=4 SV=1
MEQNFFGFRIVENLQKVDKDIQREQLKYHNKRVMVSKEFTFDAAHHLHCYEGKCKNLHGHTYKVVFGISGYVNEIGLAIDFGDIKEIWKNEIEIYLDHRYLNETLPAMNTTAENMVVWIYEKMAEALTKENRSDAYKGARVEFVRLFETPTSYAEVRREWMLGE

SEQ ID NO: 17852 - protein, 145 aa, Bacillus galactosidilyticus
  misc_feature (1)..(145): tr|A0A177ZI02|A0A177ZI02_9BACI 6-carboxy-5,6,7,8-tetrah ydropterin synthase OS=Bacillus galactosidilyticus OX=2 17031 GN=ABB05_20110 PE=3 SV=1
MMQQIYPVGSHSYAYELNKDFHFAAAHYIPHEDAGKCQQVHGHTYFANITIVGDELDHTGFLVNFKIIKDLIHKRFDHAALNNDQAFSDYVADQFPSTEVVARTIYEIVQQYLDSQSNCPVCLQVFLRETPTSYCIYRPKRKDRI

SEQ ID NO: 17853 - protein, 272 aa, Bacillus ginsengihumi
  misc_feature (1)..(272): tr|A0A0A6XZV7|A0A0A6XZV7_9BACI 6-pyruvoyl tetrahydropte rin synthase OS=Bacillus ginsengihumi OX=363870 GN=NG54 _08275 PE=4 SV=1
MLYLSRKLFFSAAHFYRVDQWSEEKNADTFGLCSNAHGHGHDYVLEVMVKGKVNPKSGIVVNITDVDKVVKTFVCNELDGKFLNKEVPYFQTNLPTTENIVKFLWESLHGELPNCELHKIRLKENDFLYAEKEGAASMVRLTRRYHFSTAHRLHSNDLSVEENKALFGKCNNRYGHGHNYYLEVTVKGIPDPITGMIIDLTELDEIVDQEIMSRFDHKHLNLDTEEFKTLNPTSENVAVVIWDLLSLKVPNLFKIGLFETEKNYFEYFGPEE

SEQ ID NO: 17854 - protein, 147 aa, Bacillus ginsengihumi
  misc_feature (1)..(147): tr|A0A0A6VH56|A0A0A6VH56_9BACI 6-carboxy-5,6,7,8-tetrah ydropterin synthase OS=Bacillus ginsengihumi OX=363870 GN=NG54_00620 PE=3 SV=1
MLQQFYPQPPTHQYCYELNKDMNFSAAHFIPNEKAGKCANVHGHTYFVNVTIAGNQLDEMGMLVNFSDLKKLVHGKYDHQLLNNFQEFKHTAPSTEVVAKTVYDIIQEYLDTLANQPKCIQVLVRETPTAYVIYRPSNTGKEQSFNE

SEQ ID NO: 17855 - protein, 146 aa, Bacillus glycinifermentans
  misc_feature (1)..(146): tr|A0A1C3SC64|A0A1C3SC64_9BACI 6-carboxy-5,6,7,8-tetrah ydropterin synthase OS=Bacillus glycinifermentans OX=16 64069 GN=queD PE=3 SV=1
MLTQIYPQTSHPYAFELNKDMQVSAAHFIPREDAGACSRVHGHTYTINITIAGDHLNESGFLANFSTIKKLIHGEYDHTLLNDHKEFSGESREQIPSTEAVAKAIFDKVEAYLEGLENRPHCVQVFVRETPTSYVVYRPKQGDHHG

SEQ ID NO: 17856 - protein, 146 aa, Bacillus glycinifermentans
  misc_feature (1)..(146): tr|A0A0J6EKM3|A0A0J6EKM3_9BACI 6-carboxy-5,6,7,8-tetrah ydropterin synthase OS=Bacillus glycinifermentans OX=16 64069 GN=queD PE=3 SV=1
MLTQIYPQTSHPYAFELNKDMQVSAAHFIPREDAGACSRVHGHTYTINITIAGDHLNESGFLANFSTIKKLIHGEYDHTLLNDHKEFSGESREQIPSTEAVAKAIYDKVEAYLEGLENRPHCVQVFVRETPTSYVVYRPKQGDHHG

SEQ ID NO: 17857 - protein, 146 aa, Bacillus gobiensis
  misc_feature (1)..(146): tr|A0A0M4G777|A0A0M4G777_9BACI 6-carboxy-5,6,7,8-tetrah ydropterin synthase OS=Bacillus gobiensis OX=1441095 GN =AM592_04105 PE=3 SV=1
MLSQTYPQAFHPYSFELNKDMQISAAHFIPREEAGACSRVHGHTYTVNLTIAGDTLDSCGFLVNFSTLKKIVHGKYDHTLLNDHLEFSGEDAYSFPTTEVVAKSIYDAVETYLNTLSNRPVCVQVFVRETPTSYCVYRPKKEQAHE

SEQ ID NO: 17858 - protein, 140 aa, Bacillus halodurans
  misc_feature (1)..(140): tr|A0A4Y7X1M5|A0A4Y7X1M5_BACHO 6-carboxy-5,6,7,8-tetrah ydropterin synthase OS=Bacillus halodurans OX=86665 GN= queD PE=3 SV=1
MMQQFYPQTHHPYSFELNKDMHLAAAHFIPAKDAGKCQDVHGHTYFINVTIAGDELDKTGFLVDFKQLKTIVHKRYDHTLLNDHDEFKGTFPTTEMVAKTIYERIQAYLDNRPNKPVCVQVVVRETPTSYVVYRPKKVAE

SEQ ID NO: 17859 - protein, 140 aa, Bacillus halodurans; identical to SEQ ID NO: 17858
  misc_feature (1)..(140): tr|Q9KAP4|Q9KAP4_BACHD 6-carboxy-5,6,7,8-tetrahydropter in synthase OS=Bacillus halodurans (strain ATCC BAA-125 / DSM 18197 / FERM 7344 / JCM 9153 / C-125) OX=272558 GN=BH2243 PE=3 SV=1

SEQ ID NO: 17860 - protein, 146 aa, Bacillus halotolerans
  misc_feature (1)..(146): tr|A0A2S9WEN9|A0A2S9WEN9_9BACI 6-carboxy-5,6,7,8-tetrah ydropterin synthase OS=Bacillus halotolerans OX=260554 GN=queD PE=3 SV=1
MLSQIYPQVQHPYSFELNKDMQISAAHFIPRESAGACSRVHGHTYTVNITVAGDELDNSGFLVNFSVLKKLVHGSYDHTLLNDHEEFSKEDRYSLPTTEVVAKTIYDKVQAYLNTLENKPSCVQVFVRETPTSYCVYRPKKGGLNG

SEQ ID NO: 17861 - protein, 146 aa, Bacillus halotolerans
  misc_feature (1)..(146): tr|A0A3T0L5Y6|A0A3T0L5Y6_9BACI 6-carboxy-5,6,7,8-tetrah ydropterin synthase OS=Bacillus halotolerans OX=260554 GN=queD PE=3 SV=1
MLSQIYPQVQHPYSFELNKDMQISAAHFIPRESAGACSRVHGHTYTVNITVAGDELDNSGFLVNFSVLKKLVHGSYDHTLLNDHEEFSKDDRYSLPTTEVVAKTIYDKVQAYLNTLENKPSCVQVFVRETPTSYCVYRPKKGGLNG

SEQ ID NO: 17862 - protein, 146 aa, Bacillus haynesii
  misc_feature (1)..(146): tr|W7RJS1|W7RJS1_9BACI 6-carboxy-5,6,7,8-tetrahydropter in synthase OS=Bacillus haynesii OX=1925021 GN=BTA31_08 765 PE=3 SV=1
MLTQIYPQPSHPYSFELNKDMQMSAAHFIPREDAGACSRVHGHTYTINITIAGDELNESGFLVNFSTIKKLIHGEYDHTLLNDHQEFSGESADRIPSTEVVAKTIYDKVDAYLKDLKNRPHCVQVFVRETPTSYVVYRPKPGVQHG

SEQ ID NO: 17863 - protein, 141 aa, Bacillus hemicellulosilyticus
  misc_feature (1)..(141): tr|W4QGB4|W4QGB4_9BACI 6-carboxy-5,6,7,8-tetrahydropter in synthase OS=Bacillus hemicellulosilyticus JCM 9152 O X=1236971 GN=JCM9152_2375 PE=3 SV=1
MLQQFYPQVPHSYRYELNKDMNLSAAHFIPDEKAGVCKNMHGHTYFINVTIAGDQLDELGFLIDFKQIKDLVHKRYDHTLLNDHNEYKEIFPTTERVAEQIWKTIHEKLQSLPHQPKCLQVLVRETPTSYVVYRPKPEELL

SEQ ID NO: 17864 - protein, 145 aa, Bacillus horikoshii
  misc_feature (1)..(145): tr|A0A1Y0CLL2|A0A1Y0CLL2_9BACI 6-carboxy-5,6,7,8-tetrah ydropterin synthase OS=Bacillus horikoshii OX=79883 GN= B4U37_07945 PE=3 SV=1
MMQQIYPQVQHDFCYELNKDMQIAAAHFVPTDAAGKCRQLHGHTYFVNVTVAGDDLDEAGFLVNFQVLKKLLHDKFDHTVLNDHKDVFNDQDPNFFPTTEVVARTMWETIEMHLETLPSKPTCLQVYVRETPTSYCIYRPKKGKK

SEQ ID NO: 17865 - protein, 145 aa, Bacillus horikoshii
  misc_feature (1)..(145): tr|A0A5D4TE73|A0A5D4TE73_9BACI 6-carboxy-5,6,7,8-tetrah ydropterin synthase OS=Bacillus horikoshii OX=79883 GN= queD PE=3 SV=1
MMQQIYPQVQHDFCYELNKDMQIAAAHFVPTDAAGKCRQLHGHTYFVNVTVAGDNLDEAGFLVNFQVLKKLLHDKFDHTVLNDHKDVFNDQDPNFFPTTEVVARTMWETIEKHLETLPSKPTCLQVYVRETPTSYCIYRPKKGKK

SEQ ID NO: 17866 - protein, 160 aa, Bacillus horneckiae
  misc_feature (1)..(160): tr|A0A2N0ZEY9|A0A2N0ZEY9_9BACI 6-carboxytetrahydropteri n synthase QueD OS=Bacillus horneckiae OX=549687 GN=que D PE=4 SV=1
MKDLFGFRIVDQLQKIDIDIKRENLKYHHKRVLVSKEFTFDAAHHLHDYEGKCKNLHGHTYKVIFGISGYTDNRGLMIDFGDIKKIWKREIEIYLDHKYLNETLPAMNTTAENMVIWIFEKMDEALSSLDKSLAARVEFVKLYETPTSYAEARREWMIDE

SEQ ID NO: 17867 - protein, 158 aa, Bacillus hwajinpoensis
  misc_feature (1)..(158): tr|A0A4U1MPD0|A0A4U1MPD0_9BACI 6-carboxytetrahydropteri n synthase QueD OS=Bacillus hwajinpoensis OX=208199 GN= queD PE=4 SV=1
MSYMIPKKVEVLGEDIQKSELKYHNKRVAVTKEFTFDAAHHLHCYEGKCKSMHGHTYKVVITISGFVNEIGISVDFGEIKTLFKEVIDSKLDHHYLNEVLPNMNTTAENMIVWMWEQLDQALIERNMKDNGQRLEELVLYETPTSYATLKREWMEDNE

SEQ ID NO: 17868 - protein, 145 aa, Bacillus indicus
  misc_feature (1)..(145): tr|A0A084H2U1|A0A084H2U1_BACID 6-carboxy-5,6,7,8-tetrah ydropterin synthase OS=Bacillus indicus OX=246786 GN=GS 18_0202885 PE=3 SV=1
MIQQMYPQTLHPYTFELNKDMQLSAAHYVPKEEAGKCRRLHGHTYFINVTVAGDELDESGFLINFAHIKQLVHDRFDHTILNEHDVFNDEDPNKFPTTEVVARTICEMIQQHLDSLSHKPKCVGVFVRETPTSYVMYRPKLVKKG

SEQ ID NO: 17869 - protein, 165 aa, Bacillus infantis
  misc_feature (1)..(165): tr|U5LCN8|U5LCN8_9BACI 6-pyruvoyl tetrahydrobiopterin s ynthase OS=Bacillus infantis NRRL B-14911 OX=1367477 GN =N288_12915 PE=4 SV=1
MLKGRESDMYGFRIVDKLQKINEDIKQNQLKYHRKRVLVSKEFTFDAAHHLHCYEGKCKNLHGHTYKVIFGISGYVDEIGLLIDFGDIKEIWKKQIEVHLDHKYLNETLPPMNTTAENMVVWIYEQMSACLKDYSPQQDAKVEFVRLFETPTSYAEARREWMENE

SEQ ID NO: 17870 - protein, 157 aa, Bacillus infantis
  misc_feature (1)..(157): tr|A0A4Q4CAX2|A0A4Q4CAX2_9BACI 6-carboxytetrahydropteri n synthase QueD OS=Bacillus infantis OX=324767 GN=queD PE=4 SV=1
MYGFRIVDKLQKINEDIKQNQLRYHRKRVLVSKEFTFDAAHHLHCYEGKCKNLHGHTYKVIFGISGYVDEIGLLIDFGDIKEIWKKQIEVHLDHKYLNETLPPMNTTAENMVVWIYEQMSACLKDYSPQQDAKVEFVRLFETPTSYAEARREWMENE

SEQ ID NO: 17871 - protein, 146 aa, Bacillus intestinalis
  misc_feature (1)..(146): tr|A0A0F0A8X1|A0A0F0A8X1_9BACI 6-carboxy-5,6,7,8-tetrah ydropterin synthase OS=Bacillus intestinalis OX=1963032 GN=AX282_02550 PE=3 SV=1
MLSQIYPQAQHPYSFELNKDMHISAAHFIPRESAGACSRVHGHTYTVNITVAGDELDDSGFLVNFSVLKKLVHGNYDHTLLNDHEDFSQDDRYSLPTTEVVAKTIYDNVQAYLDTLENKPSCVQVFVRETPTSYCVYRPKKGGLNG

SEQ ID NO: 17872 - protein, 147 aa, Bacillus koreensis
  misc_feature (1)..(147): tr|A0A0M0LHH0|A0A0M0LHH0_9BACI 6-carboxy-5,6,7,8-tetrah ydropterin synthase OS=Bacillus koreensis OX=284581 GN= AMD01_01815 PE=3 SV=1
MIQQIYPQVQHSYSYELNKDMHFAAAHFVPHEAAGKCQNIHGHTYFVNVTIGGDELDESGFLVNFQVLKKLVSGQFDHTLLNDHDQLFNEQNANDFPTTEVIARKIYELIQAHLDVLPNKPSCLQVFVRETPTSYVVYRPKQVRNHG

SEQ ID NO: 17873 - protein, 140 aa, Bacillus krulwichiae
  misc_feature (1)..(140): tr|A0A1X9MDV2|A0A1X9MDV2_9BACI 6-carboxy-5,6,7,8-tetrah ydropterin synthase OS=Bacillus krulwichiae OX=199441 G N=queD PE=4 SV=1
MMQQFYPQIHHHYRYELNKDMHLAAAHFISDDAAGQCQHTHGHTYFINITVVGDALDELGFLINFKRIKDIVHKRYDHSVLNDHPEYKEVYPTTERVAEQIWTAIQTELKQLPHQPKCLQVVVRETPTSYVVYRPKPEEL

SEQ ID NO: 17874 - protein, 157 aa, Bacillus kyonggiensis
  misc_feature (1)..(157): tr|A0A4U1D997|A0A4U1D997_9BACI 6-carboxytetrahydropteri n synthase QueD OS=Bacillus kyonggiensis OX=1037680 GN= queD PE=4 SV=1
MMEFFGFRVVENLQKIDQDIQKSELQYHKKRVLVSKEFMFDAAHHLHCYEGKCKNLHGHTYKVIVGVSGFVNEIGLVVDFGDLKKMWKDEIEIYLDHRYLNETLPKMNTTAENMVVWIYEKFKESLAKYPDARVEFIRLYETPTSYAEARREWMEGE

SEQ ID NO: 17875 - protein, 276 aa, Bacillus kyonggiensis
  misc_feature (1)..(276): tr|A0A4U1D2E2|A0A4U1D2E2_9BACI 6-pyruvoyl tetrahydropte rin synthase OS=Bacillus kyonggiensis OX=1037680 GN=FA7 27_18130 PE=4 SV=1
MLYLSRKLSFSAMHSYRIEHWTEEQNEAIFGPCANKNGHGHDYTLEVMVKGNLDSHSGIVVNITDIDKVAKAFVEENLNGKFLNKENDFFKENIPTTENLVSYIWNALDGKLENCQLHKIRLRESDFLYSEKENSPMVRLTRKYHFSTAHRLHSNQLTDEENLDIFGKCNNPYGHGHNYYLEVTLSGEQDPVTGMIADLAKMDQIVDREILQKFDHKHLNLDTEEFKELNPTSENVAVVIWQLLAPKLPKLFKIGLYETEKNYFEYYGPGVEEDGE

SEQ ID NO: 17876 - protein, 141 aa, Bacillus lehensis
  misc_feature (1)..(141): tr|A0A4Y7WPG4|A0A4Y7WPG4_9BACI 6-carboxy-5,6,7,8-tetrah ydropterin synthase OS=Bacillus lehensis OX=300825 GN=q ueD PE=3 SV=1
MIQQIYPTTPHSYAFELNKDMQLATAHYIDHEEAGKCQRVHGHTYTINITIAGDHLNDTGFLVDFKQLKQLVHDRFDHQLLNEDPLFHNVLPSTENVAKIVYMIIEDLLKTMANAPTCIQVFVRETPTSYVVYRPKRAHHE

SEQ ID NO: 17877 - protein, 141 aa, Bacillus lehensis
  misc_feature (1)..(141): tr|A0A060LY40|A0A060LY40_9BACI 6-carboxy-5,6,7,8-tetrah ydropterin synthase OS=Bacillus lehensis G1 OX=1246626 GN=BleG1_2117 PE=3 SV=1
MIQQIYPTTPHSYAFELNKDMQLATAHYIDHEGAGKCQRVHGHTYTINITIAGDHLNDTGFLVDFKQLKQLVHDRFDHQLLNEDPLFHNVLPSTENVAKIVYMIIEDLLKTMANAPTCIQVFVRETPTSYVVYRPKRVHHE

SEQ ID NO: 17878 - protein, 160 aa, Bacillus lentus
  misc_feature (1)..(160): tr|A0A2X4VNL4|A0A2X4VNL4_BACLE Putative 6-pyruvoyl tetr ahydropterin synthase OS=Bacillus lentus OX=1467 GN=que D PE=4 SV=1
MYGFKIVDKLQKIDKDIKRDQLKYHSKRVLVSKEFTFDSAHHLHCYEGKCKNLHGHTYKVIFGISGYVDHHGLVIDFGDIKNIWKSEIEVHLDHKYLNESLPPMNTTAENIVVWIYEKMVAALQEEKRQKQYSGLEVEFVRLYETPTSYAEARREWMEIE

SEQ ID NO: 17879 - protein, 146 aa, Bacillus licheniformis
  misc_feature (1)..(146): tr|Q65KI5|Q65KI5_BACLD 6-carboxy-5,6,7,8-tetrahydropter in synthase OS=Bacillus licheniformis (strain ATCC 1458 0 / DSM 13 / JCM 2505 / NBRC 12200 / NCIMB 9375 / NRRL NRS-1264 / Gibson 46) OX=279010 GN=queD PE=3 SV=
MLTQIYPQPSHPYSFELNKDMQMSAAHFIPREDAGACSRVHGHTYTINITIAGDELNASGFLVNFSTIKKLIHGEYDHTLLNDHQEFSGESADRIPSTEVVAKTIYDKVEAYLKDLNNRPHCVQVFVRETPTSYVVYRPKPGVQHG

SEQ ID NO: 17880 - protein, 146 aa, Bacillus licheniformis; identical to SEQ ID NO: 17879
  misc_feature (1)..(146): tr|A0A1Y0YMN5|A0A1Y0YMN5_BACLI 6-carboxy-5,6,7,8-tetrah ydropterin synthase OS=Bacillus licheniformis OX=1402 G N=queD PE=3 SV=1

SEQ ID NO: 17881 - protein, 147 aa, Bacillus litoralis
  misc_feature (1)..(147): tr|A0A5C6W2C4|A0A5C6W2C4_9BACI 6-carboxy-5,6,7,8-tetrah ydropterin synthase OS=Bacillus litoralis OX=152268 GN= queD PE=3 SV=1
MIQQIYPQVQHDYQFELNKDMHISAAHYIPHEDAGKCQKVHGHTYFVNVTIAGDELDDSGFLVNFASLKKLIHNRFDHSILNDHSDLFSEVDPNYFPTTEGVARAIWELVQSDLDTKDNKPKCVQVFVRETPTSYVVFRPKKKEGQE

SEQ ID NO: 17882 - protein, 147 aa, Bacillus litoralis
  misc_feature (1)..(147): tr|A0A179SY57|A0A179SY57_9BACI 6-carboxy-5,6,7,8-tetrah ydropterin synthase OS=Bacillus litoralis OX=152268 GN= A6K24_04030 PE=3 SV=1
MIQQIYPQVQHNYQFELNKDMHIAAAHYIPHEDAGKCQKVHGHTYFVNVTIAGDDLDDSGFLVNFSGIKKLIHDRFDHTILNDHTELFSDKDPNFFPTTEGMARAVWEVIQRELDTKVNKPKCVQVFVRETPTSYVVFRPKQKEEQQ

SEQ ID NO: 17883 - protein, 158 aa, Bacillus loiseleuriae
  misc_feature (1)..(158): tr|A0A0K9GR41|A0A0K9GR41_9BACI 6-pyruvoyl tetrahydrobio pterin synthase OS=Bacillus loiseleuriae OX=1679170 GN= AC625_03810 PE=4 SV=1
MYGFRVVDKLQKINEDIKSDQLKYHAKRVLVSKEFTFDAAHHLHCYEGKCKNLHGHTYRVIFGLSGFIDDRGLLIDFGDIKEIWKNEIEIFLDHKYLNETLPLMNTTAENMVVWIYEKMADALNKRQEQYDGARVEFVRLYETPTSYAEAKREWMEHE

SEQ ID NO: 17884 - protein, 140 aa, Bacillus lonarensis
  misc_feature (1)..(140): tr|A0A1G6H6S0|A0A1G6H6S0_9BACI 6-carboxy-5,6,7,8-tetrah ydropterin synthase OS=Bacillus lonarensis OX=1464122 G N=SAMN05421737_1038 PE=3 SV=1
MMQQFYPTVTHPYQFELHKDMHLATAHYIDNERAGNCARVHGHTYVINITIAGNELDETGFLINFKHLKEAVHGRFDHTLLNDDPLFAQTPPSTEKVAETIYTIVNDLLTPLAHKPVCIQVIVRETPTSYVVYQPKQVQS

SEQ ID NO: 17885 - protein, 158 aa, Bacillus luciferensis
  misc_feature (1)..(158): tr|A0A1E2W0E9|A0A1E2W0E9_9BACI 6-carboxytetrahydropteri n synthase QueD OS=Bacillus luciferensis OX=178774 GN=B ED47_05050 PE=4 SV=1
MFDFRIVERLHKIDEHIKKEDLKYHNRRVLVNKEFTFDAAHHLHCYEGKCKNLHGHTYKVIFGISGFVDEIGLVIDFGDIKQIWKEKIEIYLDHRYLNEMLPPMNTTAENMVVWIYEQMENALKDHTNPAQDIRVEFVRLFETPTCYAEARREWMINE

SEQ ID NO: 17886 - protein, 163 aa, Bacillus luti; identical to SEQ ID NO: 17799
  misc_feature (1)..(163): tr|A0A1K0BRC4|A0A1K0BRC4_9BACI 6-carboxytetrahydropteri n synthase QueD OS=Bacillus luti OX=2026191 GN=BAQ48_06 430 PE=4 SV=1

SEQ ID NO: 17887 - protein, 164 aa, Bacillus manliponensis
  misc_feature (1)..(164): tr|A0A073KDK5|A0A073KDK5_9BACI 6-pyruvoyl tetrahydrobio pterin synthase OS=Bacillus manliponensis OX=574376 GN= BAMA_13240 PE=4 SV=1
MENNFFGFRVVENLQKIDTDIGREQLKYHNKRVMVSKEFTFDAAHHLHCYEGKCKNLHGHTYKVVFGISGYVNEIGLTIDFGDIKDIWKNEIEIYLDHRYLNETLPAMNTTAENMVVWIFEKMEEALLTEERQNEYKGARVEFVRLFETPTSYAEVRREWMLGE

SEQ ID NO: 17888 - protein, 142 aa, Bacillus marisflavi
  misc_feature (1)..(142): tr|A0A161TFJ9|A0A161TFJ9_9BACI 6-carboxy-5,6,7,8-tetrah ydropterin synthase OS=Bacillus marisflavi OX=189381 GN =AV649_00965 PE=3 SV=1
MIQQIYPVPSHPYEYELNKDMHFAAAHYIPAESAGSCSEMHGHTYFANITIAGDALDETGFLVNFQQIKKLIHKRFDHTVINDDEKFQGDLKFPTTEVMAKVIYDIIQEHLDTLTHAPRCLQVFLRETPTSYCIYRPKGELS

SEQ ID NO: 17889 - protein, 142 aa, Bacillus marisflavi
  misc_feature (1)..(142): tr|A0A5D4RRS2|A0A5D4RRS2_9BACI 6-carboxy-5,6,7,8-tetrah ydropterin synthase OS=Bacillus marisflavi OX=189381 GN =queD PE=3 SV=1
MIQQIYPVPNHPYEYELNKDMHFAAAHYIPAESAGSCSEMHGHTYFANITIAGDALDETGFLVNFQQIKKLIHKRFDHTVINDDERFQGDLKFPTTEVMAKVMYDIIQEHLDTLPHSPKCLQVFLRETPTSYCIYRPKGGRS

SEQ ID NO: 17890 - protein, 141 aa, Bacillus marmarensis
  misc_feature (1)..(141): tr|U6SS57|U6SS57_9BACI 6-carboxy-5,6,7,8-tetrahydropter in synthase OS=Bacillus marmarensis DSM 21297 OX=118826 1 GN=A33I_11425 PE=3 SV=1
MIQQFYPQVPHSYRFELNKDMHLAAAHFINNESAGACQNMHGHTYFINVTIAGDELDSTGFLINFKDIKTLVHKRYDHSLLNDHKEYEDLDPTTEVVAMQIWQTIQSHLDTLSNQPKCIQVLVRETPTSYVVYRPKPEELA

SEQ ID NO: 17891 - protein, 146 aa, Bacillus megaterium; identical to SEQ ID NO: 17803
  misc_feature (1)..(146): tr|D5DZE4|D5DZE4_BACMQ 6-carboxy-5,6,7,8-tetrahydropter in synthase OS=Bacillus megaterium (strain ATCC 12872 / QMB1551) OX=545693 GN=queD PE=3 SV=1

SEQ ID NO: 17892 - protein, 146 aa, Bacillus megaterium; identical to SEQ ID NO: 17803
  misc_feature (1)..(146): tr|A0A109G0N4|A0A109G0N4_BACME 6-carboxy-5,6,7,8-tetrah ydropterin synthase OS=Bacillus megaterium OX=1404 GN=q ueD PE=3 SV=1

SEQ ID NO: 17893 - protein, 158 aa, Bacillus mesonae
  misc_feature (1)..(158): tr|A0A3Q9R2M2|A0A3Q9R2M2_9BACI 6-carboxytetrahydropteri n synthase QueD OS=Bacillus mesonae OX=1193713 GN=queD PE=4 SV=1
MYGFRIVDKLQKIDEDISRQQLKYHTKRVLVSKEFTFDAAHHLHCYDGKCKNLHGHTYKVIFGISGFVDNRGIMMDFGDIKEIWKNQIEIFLDHKYLNETLPPMNTTAENMVVWIYQKMTEALEAAGPKYDGARVEFVRLYETPTSYAEARREWMGNE

SEQ ID NO: 17894 - protein, 160 aa, Bacillus methanolicus
  misc_feature (1)..(160): tr|I3E8Y1|I3E8Y1_BACMM 6-pyruvoyl tetrahydrobiopterin s ynthase OS=Bacillus methanolicus (strain MGA3 / ATCC 53 907) OX=796606 GN=BMMGA3_09075 PE=4 SV=1
MYGFRIVDKLQKLDEDIRRDQLKYHSKRVLVSKEFTFDSAHHLHCYEGKCKNLHGHTYKVIFGLSGYVDDRGLLIDFSDIKDIWKKEIEIYLDYKYLNETLPPMNTTAENMVVWIYEKMKEALEKEDRQQKYQGARVEFVRLYETPSSYAEARREWMEVE

SEQ ID NO: 17895 - protein, 160 aa, Bacillus methanolicus
  misc_feature (1)..(160): tr|I3DVL4|I3DVL4_BACMT 6-pyruvoyl tetrahydrobiopterin s ynthase OS=Bacillus methanolicus PB1 OX=997296 GN=PB1_1 2014 PE=4 SV=1
MYGFRIVDKLQKIDEDIRRDQLKYHSKRVLVSKEFTFDSAHHLHCYEGKCKNLHGHTYKVIFGLSGYVDDRGLLIDFSDIKDIWKKEIEIFLDHKYLNETLPPMNTTAENMVVWIYEKMKEALEKEDRQQKYLGARVEFVRLYETPTSYAEARREWMEVE

SEQ ID NO: 17896 - protein, 163 aa, Bacillus mobilis
  misc_feature (1)..(163): tr|A0A1K0AXP9|A0A1K0AXP9_9BACI 6-carboxytetrahydropteri n synthase QueD OS=Bacillus mobilis OX=2026190 GN=queD PE=4 SV=1
MDNFFGFRIVENLQKMDKDIQRKQLKYHNKRVMVSKEFTFDAAHHLHCYEGKCKNLHGHTYKVVFGISGYVNEIGLAIDFGDIKEIWKNEIEIYLDHRYLNETLPAMNTTAENMVVWIYEKMAEALIKDNRANEYKGARVEFVRLFETPTSYAEVRREWMLDE

SEQ ID NO: 17897 - protein, 157 aa, Bacillus muralis
  misc_feature (1)..(157): tr|A0A1B3XSN0|A0A1B3XSN0_9BACI 6-carboxytetrahydropteri n synthase QueD OS=Bacillus muralis OX=264697 GN=ABE28_ 017805 PE=4 SV=1
MMYGFTIVDKLQKIDEDIQRSQLNYTKKRVLVSKEFTFDAAHHLHDYEGKCKNLHGHTYKVIFGVSGYTDSRGLMMDFGDMKEIWKNEIEIHLDHRYLNETLPPMNTTAENMVVWIYEKMAEALSLKDYQGARVEFVRLYETPTSYAEARREWMESE

SEQ ID NO: 17898 - protein, 163 aa, Bacillus mycoides; identical to SEQ ID NO: 17827
  misc_feature (1)..(163): tr|A9VKR9|A9VKR9_BACMK Uncharacterized protein OS=Bacil lus mycoides (strain KBAB4) OX=315730 GN=BcerKBAB4_1257 PE=4 SV=1

SEQ ID NO: 17899 - protein, 163 aa, Bacillus mycoides; identical to SEQ ID NO: 17799
  misc_feature (1)..(163): tr|A0A1X6QIA2|A0A1X6QIA2_BACMY Uncharacterized protein OS=Bacillus mycoides OX=1405 GN=BTJ45_00482 PE=4 SV=1

SEQ ID NO: 17900 - protein, 146 aa, Bacillus nakamurai
  misc_feature (1)..(146): tr|A0A150F2K8|A0A150F2K8_9BACI 6-carboxy-5,6,7,8-tetrah ydropterin synthase OS=Bacillus nakamurai OX=1793963 GN =AXI58_06505 PE=3 SV=1
MLSQIYPQAQHSYSFELNKDMHISAAHFIPRESAGACSRVHGHTYTVNITVAGDELDDSGFLVNFSVLKKLVHGAYDHTLLNDHDEFSDDDRYSLPTTEVVAKTIYDKVQAYLETLENKPVCVQIFVRETPTSYCVYRPKKGDVNG

SEQ ID NO: 17901 - protein, 141 aa, Bacillus nanhaiisediminis
  misc_feature (1)..(141): tr|A0A562QRA4|A0A562QRA4_9BACI 6-carboxy-5,6,7,8-tetrah ydropterin synthase OS=Bacillus nanhaiisediminis OX=688 079 GN=IQ10_00951 PE=3 SV=1
MMQQFYPQVQHSYRYELNKDMHLAAAHFIPSEDAGQCQHMHGHTYFINITIGGDTLDGLGFLVDFKKIKDIVHKRYDHSVLNDHPEYKAVFPTTERVAEQIWSAIQKELNTQANKPKCLQVVVRETPTSYVVYRPKPEELK

SEQ ID NO: 17902 - protein, 161 aa, Bacillus nealsonii
  misc_feature (1)..(161): tr|A0A2N0Z2Y8|A0A2N0Z2Y8_9BACI 6-carboxytetrahydropteri n synthase QueD OS=Bacillus nealsonii OX=115979 GN=queD PE=4 SV=1
MQKDLFGFRIVEGLQKLDVDIKKNELNYHKKRVLVSKEFTFDASHHLHAYEGKCKNLHGHTYKVVFGISGFTDEIGLVIDFGDIKKIWKEEIEIYLDHRYLNETLPNMNTTAENMVVWIYEKMQLALTKHSIKEGTRMEFVRLFETPTSYAEAKREWMEVE

SEQ ID NO: 17903 - protein, 160 aa, Bacillus nealsonii
  misc_feature (1)..(160): tr|R9CD29|R9CD29_9BACI 6-pyruvoyl tetrahydrobiopterin s ynthase OS=Bacillus nealsonii AAU1 OX=1202533 GN=A499_0 0165 PE=4 SV=1
MHDFRVVDKLQKFGEDIFSKQLKYHHKRVMVSKEFTFDAAHHLHAYEGKCMNLHGHTYKVVFGISGYLDDRGLMIDFGDIKKIWKSDIEIYLDHRYLNETLPPMNTTAENIVYWIFEKMEEALKKAEMKQADNGARVEFVRLYETPTSFAEMKREWMEYE

SEQ ID NO: 17904 - protein, 158 aa, Bacillus notoginsengisoli
  misc_feature (1)..(158): tr|A0A417YWQ5|A0A417YWQ5_9BACI 6-carboxytetrahydropteri n synthase QueD OS=Bacillus notoginsengisoli OX=1578198 GN=queD PE=4 SV=1
MYGFRIVEKLQKIDEDIERDQLKYHSKRVLVSKEFTFDAAHHLHDYEGKCKNLHGHTYKVIFGISGFVDERGLVIDFGDIKEIWKSEIEVFLDHRYLNETLPPMNTTAENMVVWIYEKMAESLENRAEQFNGARVEFVRLYETPTSFAEARREWMDVE

SEQ ID NO: 17905 - protein, 158 aa, Bacillus oceanisediminis
  misc_feature (1)..(158): tr|A0A1S1YE02|A0A1S1YE02_9BACI 6-carboxytetrahydropteri n synthase QueD OS=Bacillus oceanisediminis OX=665099 G N=BBV17_26285 PE=4 SV=1
MYGFRIVDKLQKINEDIKPDQLKYHHKRVMVSKEFTFDSAHHLHCYEGKCKNLHGHTYKVIFGISGFVNDRGLMIDFGDIKEIWKKEIEIFLDHKYLNETLPPMNTTAENMVVWIYEKMAECLQDRKEQYVGARVEFVRLFETPTSYAEARREWMEVE

SEQ ID NO: 17906 - protein, 158 aa, Bacillus oceanisediminis
  misc_feature (1)..(158): tr|A0A160MCD6|A0A160MCD6_9BACI 6-pyruvoyl tetrahydrobio pterin synthase OS=Bacillus oceanisediminis 2691 OX=119 6031 GN=A361_13245 PE=4 SV=1
MYGFRIVDKLQKINEDIKPDQLKYHHKRVMVSKEFTFDSAHHLHCYEGKCKNLHGHTYKVIFGISGFVDDRGLMIDFGDIKKIWKNEIEIFLDHKYLNETLPPMNTTAENMVVWIYEKMAQSLQNRKEQYVGARVEFVRLFETPTSYAEARREWMEVE

SEQ ID NO: 17907 - protein, 141 aa, Bacillus okhensis
  misc_feature (1)..(141): tr|A0A0B0IK93|A0A0B0IK93_9BACI 6-carboxy-5,6,7,8-tetrah ydropterin synthase OS=Bacillus okhensis OX=333138 GN=L Q50_09320 PE=3 SV=1
MMQQFYPQVPHSYRYELNKDMHVAAAHFIPNDAAGQCKNMHGHTYFINITIGGDTLDDLGFLINFKQIKDIVHKRFDHSVLNDHPEFKEVFPTTERVAEQIWKAIQAKLQTQDNKPNCLQVVVRETPTSYVVYRPKPEELA

SEQ ID NO: 17908 - protein, 140 aa, Bacillus okuhidensis; identical to SEQ ID NO: 17858
  misc_feature (1)..(140): tr|A0A0M0KJ85|A0A0M0KJ85_9BACI 6-carboxy-5,6,7,8-tetrah ydropterin synthase OS=Bacillus okuhidensis OX=136160 G N=AMD02_08645 PE=3 SV=1

SEQ ID NO: 17909 - protein, 145 aa, Bacillus oleivorans
  misc_feature (1)..(145): tr|A0A285CMN6|A0A285CMN6_9BACI 6-carboxy-5,6,7,8-tetrah ydropterin synthase OS=Bacillus oleivorans OX=1448271 G N=SAMN05877753_102739 PE=3 SV=1
MIQQIYPSVTHNFSYELNKDLQIAAAHFIPHNQAGVCQRIHGHTYFVNITVAGNQLDESGFLVNFKQLKKIIHDRFDHSLLNDDTQLFSSKVAEDFPTSEVMARKIYELVQAHLHTLPNKPTCLQVFLRETPTSYVIYRPKAGEC

SEQ ID NO: 17910 - protein, 163 aa, Bacillus pacificus
  misc_feature (1)..(163): tr|A0A1J9Y767|A0A1J9Y767_9BACI 6-carboxytetrahydropteri n synthase QueD OS=Bacillus pacificus OX=2026187 GN=BAQ 45_12470 PE=4 SV=1
MDNFFGFRIVESLQKMDKDIQRKQLKYHNKRVMVSKEFTFDAAHHLHCYEGKCKNLHGHTYKVVFGISGYVNEIGLAIDFGDIKEIWKNEIEIYLDHRYLNETLPAMNTTAENMVVWIYEKMAEALTKDNRANEYKGARVEFVRLFETPTSYAEVRREWMLDE

SEQ ID NO: 17911 - protein, 163 aa, Bacillus pacificus; identical to SEQ ID NO: 17798
  misc_feature (1)..(163): tr|A0A5C4ZGX5|A0A5C4ZGX5_9BACI 6-carboxytetrahydropteri n synthase QueD OS=Bacillus pacificus OX=2026187 GN=que D PE=4 SV=1

SEQ ID NO: 17912 - protein, 146 aa, Bacillus paralicheniformis
  misc_feature (1)..(146): tr|A0A1Q8GGI9|A0A1Q8GGI9_9BACI 6-carboxy-5,6,7,8-tetrah ydropterin synthase OS=Bacillus paralicheniformis OX=16 48923 GN=B4121_3883 PE=3 SV=1
MLTQIYPQPSHPYSFELNKDMQMSAAHFIPREDAGACSRVHGHTYTINITIAGDELNESGFLVNFSTIKKLIHGEYDHTLLNDHQEFSGESADRIPSTEVVAKTIYDRTEAYLKDLKNRPHCVQVFVRETPTSYVVYRPKPGVHNG

SEQ ID NO: 17913 - protein, 146 aa, Bacillus paralicheniformis
  misc_feature (1)..(146): tr|A0A5A9T8Y9|A0A5A9T8Y9_9BACI 6-carboxy-5,6,7,8-tetrah ydropterin synthase OS=Bacillus paralicheniformis OX=16 48923 GN=queD PE=3 SV=1
MLTQIYPQPSHPYSFELNKDMQMSAAHFIPREDAGACSRVHGHTYTINITIAGDELNESGFLVNFSTIKKLIHGEYDHTLLNDHQEFSGESADRIPSTEVVAKTIYDKTEAYLKDLKNRPHCVQVFVRETPTSYVVYRPKPGVHNG

SEQ ID NO: 17914 - protein, 163 aa, Bacillus paramycoides
  misc_feature (1)..(163): tr|A0A1J9U8C6|A0A1J9U8C6_9BACI 6-carboxytetrahydropteri n synthase QueD OS=Bacillus paramycoides OX=2026194 GN= BAU28_17880 PE=4 SV=1
MDNFFGFRIVENLQKMDKDIQREQLKYHNKRVMVSKEFTFDAAHHLHCYEGKCKNLHGHTYKVVFGISGYVNEIGLAIDFGDIKEIWKNEIEIYLDHRYLNETLPAMNTTAENMVVWIYEKMAEALTKDNRVNEYKRARVEFVRLFETPTSYAEVRREWMLDE

SEQ ID NO: 17915 - protein, 163 aa, Bacillus paranthracis; identical to SEQ ID NO: 17799
  misc_feature (1)..(163): tr|A0A4P9F658|A0A4P9F658_9BACI 6-carboxytetrahydropteri n synthase QueD OS=Bacillus paranthracis OX=2026186 GN= queD PE=4 SV=1

SEQ ID NO: 17916 - protein, 163 aa, Bacillus paranthracis; identical to SEQ ID NO: 17798
  misc_feature (1)..(163): tr|A0A1J9ZUU1|A0A1J9ZUU1_9BACI 6-carboxytetrahydropteri n synthase QueD OS=Bacillus paranthracis OX=2026186 GN= BAQ46_04770 PE=4 SV=1

SEQ ID NO: 17917 - protein, 160 aa, Bacillus persicus
  misc_feature (1)..(160): tr|A0A1H8AG34|A0A1H8AG34_9BACI 6-pyruvoyltetrahydropter in/6-carboxytetrahydropterin synthase OS=Bacillus persi cus OX=930146 GN=SAMN05192533_1052 PE=4 SV=1
MYGFRIVEKLQKIDEDIKRDQLKYHNKRVMVSKEFTFDSAHHLHAYEGKCKNLHGHTYRVIFGLSGFVDDRGLMIDFGDIKEIWKTEIEIYLDHKYLNETLPPMNTTAENMVVWIYEKMAAALQAEERKQQYKGARVEFVRLFETPTSYAEARREWMEVE

SEQ ID NO: 17918 - protein, 141 aa, Bacillus pseudofirmus
  misc_feature (1)..(141): tr|D3FSX6|D3FSX6_BACPE 6-carboxy-5,6,7,8-tetrahydropter in synthase OS=Bacillus pseudofirmus (strain OF4) OX=39 8511 GN=queD PE=3 SV=1
MIQQFYPQVPHSYRFELNKDMHLAAAHFINDESAGACQNIHGHTYFINVTIAGDELDSTGFLINFKNIKTLVHKRYDHSLLNEHKEYEDLDPTTEVVAMQIWETIQSHLDTLSNQPKCIQVLVRETPTSYVVYRPKPEELA

SEQ ID NO: 17919 - protein, 141 aa, Bacillus pseudofirmus
  misc_feature (1)..(141): tr|A0A1Q9PTE8|A0A1Q9PTE8_BACPF 6-carboxy-5,6,7,8-tetrah ydropterin synthase OS=Bacillus pseudofirmus OX=79885 G N=BTR22_09280 PE=3 SV=1
MIQQFYPQVPHSYRFELNKDMHLAAAHFINDESAGACQNIHGHTYFINVTIAGDELDSTGFLINFKDIKTLVHKRYDHSLLNEHKEYEDLDPTTEVVAMQIWETIQSHLDTLSNQPKCIQVLVRETPTSYVVYRPKPEELA

SEQ ID NO: 17920 - protein, 163 aa, Bacillus pseudomycoides
  misc_feature (1)..(163): tr|C3BW10|C3BW10_9BACI 6-pyruvoyl tetrahydrobiopterin s ynthase OS=Bacillus pseudomycoides DSM 12442 OX=527000 GN=bpmyx0001_59570 PE=4 SV=1
MENFFGFRIVENLQKMDKDIQREQLKYHNKRVMVSKEFTFDAAHHLHCYEGKCKNLHGHTYKVVFGISGYVNDIGLAIDFGDIKEIWKNEIEIYLDHRYLNETLPVMNTTAENMVVWIYEKMAEALTKGNRAEEYKGARVEFIRLFETPTSYAEVRREWILDE

SEQ ID NO: 17921 - protein, 164 aa, Bacillus pseudomycoides
  misc_feature (1)..(164): tr|A0A1Y3MGL8|A0A1Y3MGL8_9BACI 6-carboxytetrahydropteri n synthase QueD OS=Bacillus pseudomycoides OX=64104 GN= queD PE=4 SV=1
MEQNFFGFRIVENLQKVDKDIQREQLKYHNKRVMVSKEFTFDAAHHLHCYEGKCKNLHGHTYKVVFGISGYVNEIGLAIDFGDIKEIWKNEIEIYLDHRYLNETLPAMNTTAENMVVWIYEKMVEALTKEDRANEYKGARVEFVRLFETPTSYAEVRREWMIGE

SEQ ID NO: 17922 - protein, 146 aa, Bacillus pumilus
  misc_feature (1)..(146): tr|A8FCI0|A8FCI0_BACP2 6-carboxy-5,6,7,8-tetrahydropter in synthase OS=Bacillus pumilus (strain SAFR-032) OX=31 5750 GN=BPUM_1264 PE=3 SV=1
MLSQIYPQTNHPYSFELNKDMHISAAHFIPREDAGACSRVHGHTYTINITIAGDELDDSGFLVNFSTLKKLIHGQYDHTLLNDHEEFSSTNPYAMPTTEVVAKTVHDKVADYLSTLANKPVCVQVFVRETPTSYCIYRPKRVEHNG

SEQ ID NO: 17923 - protein, 146 aa, Bacillus pumilus
  misc_feature (1)..(146): tr|A0A5D4PUG8|A0A5D4PUG8_BACPU 6-carboxy-5,6,7,8-tetrah ydropterin synthase OS=Bacillus pumilus OX=1408 GN=queD PE=3 SV=1
MLSQIYPQANHPFSFELNKDMHISAAHFIPREDAGACSRVHGHTYTINLTIAGDDLDESGFLVNFSTLKKLIHGEYDHTLLNDHEEFSGADRYEMPTTEVVAKTVHDKVAAYLSTLANQPVCVQVFVRETPTSYCIYRPKRVEDNG

SEQ ID NO: 17924 - protein, 146 aa, Bacillus safensis
  misc_feature (1)..(146): tr|A0A5C0WE51|A0A5C0WE51_9BACI 6-carboxy-5,6,7,8-tetrah ydropterin synthase OS=Bacillus safensis OX=561879 GN=q ueD PE=3 SV=1
MLSQIYPQTDHPFSFELNKDMHVSAAHFIPREDAGACSRVHGHTYTINITIAGDELDESGFLVNFSTLKKLIHGQYDHTLLNDHEEFSSNDRYAMPTTEVVAKTVHDKVAAYLSTLANKPTCVQVFVRETPTSYCVYRPKRVEING

SEQ ID NO: 17925 - protein, 146 aa, Bacillus safensis
  misc_feature (1)..(146): tr|A0A561S153|A0A561S153_9BACI 6-carboxy-5,6,7,8-tetrah ydropterin synthase OS=Bacillus safensis OX=561879 GN=F HW57_2115 PE=3 SV=1
MLSQIYPQTNHPFSFELNKDMHVSAAHFIPREDAGACSRVHGHTYTINITIAGDDLDDSGFLVNFSTLKKLIHGQYDHTLLNDHEEFSSNDPYAMPTTEVVAKTVHDKVAAYLSTLANKPTCVQVFVRETPTSYCIYRPKRVEING

SEQ ID NO: 17926 - protein, 144 aa, Bacillus salacetis
  misc_feature (1)..(144): tr|A0A3A1R1Y4|A0A3A1R1Y4_9BACI 6-carboxy-5,6,7,8-tetrah ydropterin synthase OS=Bacillus salacetis OX=2315464 GN =queD PE=3 SV=1
MIGQIYPVPEHPFSYELNKDFQFAAAHFIPSESAGKCRKIHGHTYFANVTIGGDELDDSGFLFNFAEIKKLIHDRFDHTILNEDPLFSEHPERYPTTEVMAEIIYGIIQDCLNEQGNHAQCLQVFLRETPTSYCIFRPGKDKFQ

SEQ ID NO: 17927 - protein, 149 aa, Bacillus salarius
  misc_feature (1)..(149): tr|A0A428MYE6|A0A428MYE6_9BACI 6-carboxy-5,6,7,8-tetrah ydropterin synthase OS=Bacillus salarius OX=284579 GN=q ueD PE=3 SV=1
MIHQFYPQVPHEYRYELNKDMQLAAAHFIPAPTAGKCANVHGHTYVINVTIAGDHLNETGFLVDFKTIKNIVHDRFDHSLLNEDEAFGDTPQNDSDTFPTTEVVARTIWQLIQRELDECVNKPRCLQVLVRETPTSYVVYRAKEGDFDR

SEQ ID NO: 17928 - protein, 149 aa, Bacillus salarius
  misc_feature (1)..(149): tr|A0A3R9NZ74|A0A3R9NZ74_9BACI 6-carboxy-5,6,7,8-tetrah ydropterin synthase OS=Bacillus salarius OX=284579 GN=q ueD PE=3 SV=1
MIHQFYPQVPHDYRYELNKDMQLAAAHFIPAESAGKCANVHGHTYVINVTIAGDKLNETGFLVDFKTIKNIVHDRFDHSLLNEDEVFGDAKQSDPDSFPTTEVVARTIWQLIQRELDECVNQPRCLQVLVRETPTSYVVYRAKEGDFEE

SEQ ID NO: 17929 - protein, 160 aa, Bacillus salsus
  misc_feature (1)..(160): tr|A0A1H0Q4V3|A0A1H0Q4V3_9BACI 6-pyruvoyltetrahydropter in/6-carboxytetrahydropterin synthase OS=Bacillus salsu s OX=930152 GN=SAMN05216565_101602 PE=4 SV=1
MYGFRIVDKLQKMDEDIRHNQLKYHNKRVMVSKEFTFDAAHHLHEYDGKCMNLHGHTYKVIFGISGYVDERGLMIDFGDIKDIWKNEIEIFLDHKYLNETLPPMNTTAENMVVWIYEKMKEALNKDDRQKQYLGARVEFVRLYETPTSFGEARREWMEGE

SEQ ID NO: 17930 - protein, 158 aa, Bacillus selenatarsenatis
  misc_feature (1)..(158): tr|A0A0A8X0L0|A0A0A8X0L0_9BACI Queuosine biosynthesis Q ueD, PTPS-I OS=Bacillus selenatarsenatis SF-1 OX=132160 6 GN=SAMD00020551_1665 PE=4 SV=1
MYDFRIVDQLQKIDKDIKREQLKYHSNRVLVSKEFTFDAAHHLHEYEGKCKNLHGHTYKVIFGLSGFVDAQGLVIDFGDIKSIWKSDIEIYLDHRYLNETLPPMNTTAENMVVWIYEKMAEALANRQHLYDGAKVEFVKLYETPTSYAEVRREWMEIE

SEQ ID NO: 17931 - protein, 160 aa, Bacillus selenitireducens
  misc_feature (1)..(160): tr|D6XXU3|D6XXU3_BACIE Uncharacterized protein OS=Bacil lus selenitireducens (strain ATCC 700615 / DSM 15326 / MLS10) OX=439292 GN=Bsel_2636 PE=4 SV=1
MYGFEIVQNLEKIGEDIQKDELKYHSKRVMVSKEFSFDAAHHLHCYDGKCKNLHGHTYRVVFGISGYVDEIGLMMDFGDIKEIWKEDIEVHLDHRYVNQTLPKMNTTAENMVVWIFEQMAGAIEERPKLSKDQGARVEFVRLFETQTSYAEARREWMDLD

SEQ ID NO: 17932 - protein, 146 aa, Bacillus shackletonii
  misc_feature (1)..(146): tr|A0A0Q3TKN1|A0A0Q3TKN1_9BACI 6-carboxy-5,6,7,8-tetrah ydropterin synthase OS=Bacillus shackletonii OX=157838 GN=AN964_11985 PE=3 SV=1
MLQQFYPQPAPHPYRFELNKDMNFSTAHFISNEKAGKCSFTHGHTYFVNLTIAGDELDEMGMLVNFSDLKKLVHGRYDHQLLNDFPEFEKLTPSTEVVAQTIYELVANYLDTLSNKPICLQVLVRETPTSYVIYRPQFNEGNEKHE

SEQ ID NO: 17933 - protein, 146 aa, Bacillus siamensis
  misc_feature (1)..(146): tr|A0A268DYA9|A0A268DYA9_9BACI 6-carboxy-5,6,7,8-tetrah ydropterin synthase OS=Bacillus siamensis OX=659243 GN= queD PE=3 SV=1
MLSQIYPQVQHPYSFELNKDMHISAAHFIPRESAGACSRVHGHTYTVNITVAGDELDDSGFLVNFSVLKKLVHGAYDHTLLNDHDEFSDDDRYSLPTTEVVAKTIYDKVQSYLETLENQPVCVQVFVRETPTSYCVYRPKKGDLNG

SEQ ID NO: 17934 - protein, 146 aa, Bacillus siamensis
  misc_feature (1)..(146): tr|A0A2K9KCZ9|A0A2K9KCZ9_9BACI 6-carboxy-5,6,7,8-tetrah ydropterin synthase OS=Bacillus siamensis OX=659243 GN= queD PE=3 SV=1
MLSQIYPQVQHPYSFELNKDMHISAAHFIPRESAGACSRVHGHTYTVNITVAGDELDDSGFLVNFSVLKKLVHGAYDHTLLNDHDEFSEDDRYSLPTTEVVAKTIYDKVQSYLETLENQPVCVQVFVRETPTSYCVYRPKKGDLNG

SEQ ID NO: 17935 - protein, 157 aa, Bacillus simplex
  misc_feature (1)..(157): tr|A0A109MWN9|A0A109MWN9_9BACI 6-pyruvoyl tetrahydrobio pterin synthase OS=Bacillus simplex OX=1478 GN=AS888_22 820 PE=4 SV=1
MMYGFKIVDKLQKIDVDIKRSQLNYTKKRVLVSKEFTFDAAHHLHDYEGKCKNLHGHTYKVVFGLSGYTDSRGLMIDFGDMKEIWKNEIEIHLDHRYLNETLPPMNTTAENMVVWIYEKMAEALSMKDYQGARVEFVRLYETPTSYAEARREWMESE

SEQ ID NO: 17936 - protein, 156 aa, Bacillus simplex
  misc_feature (1)..(156): tr|A0A270AH25|A0A270AH25_9BACI 6-carboxytetrahydropteri n synthase QueD OS=Bacillus simplex OX=1478 GN=queD PE= 4 SV=1
MYGFKIVDKLQKIDEDIQRSQLKYTNKRVLVSKEFTFDAAHHLHDYEGKCKNLHGHTYKVIFGLSGYTDSRGLMIDFGDIKDIWKNEIEIHLDHRYLNETLPLMNTTAENMVVWIYEKMAEALSLKEYEGARVEFVRLYETPTSYAEARREWMESE

SEQ ID NO: 17937 - protein, 143 aa, Bacillus smithii
  misc_feature (1)..(143): tr|G9QLM0|G9QLM0_9BACI 6-carboxy-5,6,7,8-tetrahydropter in synthase OS=Bacillus smithii 7_3_47FAA OX=665952 GN= HMPREF1015_02675 PE=3 SV=1
MLQQIYPQVQHDYTYELNKDLQFAAAHFIPHPDAGQCRNVHGHTYFVNITVAGDELDDSGFLVNFQALKKIVSDPFDHTLLNDHQMFSEKQPENFPSTEVVARKIYEMIQAYLDTLPNKPKCLQVFLRETPTSYVVYRPKRGK

SEQ ID NO: 17938 - protein, 143 aa, Bacillus smithii
  misc_feature (1)..(143): tr|A0A0H4NXI0|A0A0H4NXI0_9BACI 6-carboxy-5,6,7,8-tetrah ydropterin synthase OS=Bacillus smithii OX=1479 GN=BSM4 216_1305 PE=3 SV=1
MLQQIYPQVQHDYTYELNKDLQFAAAHFIPHPDAGQCRNVHGHTYFVNITVAGDELDDSGFLVNFQALKKIVSYPFDHTLLNDHQMFSEKQPENFPSTEVVARKIYEMIQAYLDTLPNKPKCLQVFLRETPTSYVVYRPKRGK

SEQ ID NO: 17939 - protein, 145 aa, Bacillus solimangrovi
  misc_feature (1)..(145): tr|A0A1E5LF94|A0A1E5LF94_9BACI 6-carboxy-5,6,7,8-tetrah ydropterin synthase OS=Bacillus solimangrovi OX=1305675 GN=BFG57_01780 PE=3 SV=1
MIQQFYPQVQHDYHYELNKDMQFAAAHFIPHSDAGKCQQVHGHTYFVNVTIVGDELDKTGFLVNFQTLKKIVHGRFDHSLLNDHDDFNEDDPNHFPTTEVVARKLWERIQQHLDKMENQPKCLQILVRETPTSYCIYRPKKGDFK

SEQ ID NO: 17940 - protein, 162 aa, Bacillus solimangrovi
  misc_feature (1)..(162): tr|A0A1E5LIE4|A0A1E5LIE4_9BACI 6-carboxytetrahydropteri n synthase QueD OS=Bacillus solimangrovi OX=1305675 GN= BFG57_11035 PE=4 SV=1
MTDKLFGFRIVDNLQKIDKDIKRNELKYHQKRVLVSKEFTFDAAHHLHQYEGKCKNLHGHTYKVVFGISGFVDEIGLVVDFTDIKQIWKEDIEVYLDHRYLNETLPKMNTTAENMVVWIYEQMKTSLEKRQEQYNEARVEFVRLYETPTSYAEVKREWMEDE

SEQ ID NO: 17941 - protein, 146 aa, Bacillus sonorensis
  misc_feature (1)..(146): tr|M5P3F3|M5P3F3_9BACI 6-carboxy-5,6,7,8-tetrahydropter in synthase OS=Bacillus sonorensis L12 OX=1274524 GN=BS ONL12_12291 PE=3 SV=1
MLTQVYPQTNHLYAFELNKDMQVSAAHFIPREDAGACSRIHGHTYTINITIAGDQLNESGFLVNFSTIKKLVHGEYDHTLLNDHSEFSGESREQIPSTEVVAKTIYEKVDAYLKGLENRPHCVQVFVRETPTSYVVYRPKQGEPNG

SEQ ID NO: 17942 - protein, 133 aa, Bacillus sonorensis
  misc_feature (1)..(133): tr|M5P8K2|M5P8K2_9BACI 6-carboxy-5,6,7,8-tetrahydropter in synthase OS=Bacillus sonorensis L12 OX=1274524 GN=BS ONL12_01012 PE=3 SV=1
MSDQYVYTLTKHFWISCAHKVAGAGKCERLHGHNYKVTFCITGSALDEKDMLIDFREVKHHLEKKYDHYVLNDFDEFNKEKGGYEPSTERVAQVFFEIIESLCKTKRNKPNVKWVDVLETNEASARYEKFERR

SEQ ID NO: 17943 - protein, 146 aa, Bacillus sp.
  misc_feature (1)..(146): tr|A0A0Q9IE47|A0A0Q9IE47_9BACI 6-carboxy-5,6,7,8-tetrah ydropterin synthase OS=Bacillus sp. Root239 OX=1736499 GN=ASE46_03340 PE=3 SV=1
MLQQMYPQVFHDYEYELNKDMQFAAAHFVPHIEAGKCRQVHGHTYFVNLTVAGDKLDEAGFLVNFALLKKIVSGQFDHTLLNDHSIFNEENPNDFPTTEVVARKIYELVQEYLDTLPNKPSCVQVFVRETPTSYVVYRPKKVKKRG

SEQ ID NO: 17944 - protein, 163 aa, Bacillus sp.; identical to SEQ ID NO: 17799
  misc_feature (1)..(163): tr|A0A2B4NNY0|A0A2B4NNY0_9BACI 6-carboxytetrahydropteri n synthase QueD OS=Bacillus sp. AFS075960 OX=2034282 GN =queD PE=4 SV=1

SEQ ID NO: 17945 - protein, 72 aa, Bacillus sporothermodurans
  misc_feature (1)..(72): tr|A0A150KKC7|A0A150KKC7_9BACI Uncharacterized protein OS=Bacillus sporothermodurans OX=46224 GN=B4102_3933 PE =4 SV=1
MLQQFYPQPTPHPFRFELNKDMDFSTAHFIPNEKAGKCSFTHGHTYFVNVTIAGDELDEMGMLVNFGDLKKL

SEQ ID NO: 17946 - protein, 146 aa, Bacillus stratosphericus
  misc_feature (1)..(146): tr|M5R272|M5R272_9BACI 6-carboxy-5,6,7,8-tetrahydropter in synthase OS=Bacillus stratosphericus LAMA 585 OX=123 6481 GN=C883_1536 PE=3 SV=1
MLSQIYPQTDHPFSFELNKDMHVSAAHFIPREDAGACSRVHGHTYTINITIAGDDLDESGFLVNFSTLKKLIHGKYDHTLLNDHEEFSSTDPYAMPTTEVVAKTVYDKVAAYLTTLANKPTCVQVFVRETPTSYCIYRPKRVELND

SEQ ID NO: 17947 - protein, 146 aa, Bacillus stratosphericus
  misc_feature (1)..(146): tr|A0A4Y9K2E7|A0A4Y9K2E7_9BACI 6-carboxy-5,6,7,8-tetrah ydropterin synthase OS=Bacillus stratosphericus OX=2933 86 GN=queD PE=3 SV=1
MLSQIYPQTDHPFSFELNKDMHVSAAHFIPREDAGACSRVHGHTYTINITIAGDELDESGFLVNFSTLKKLIHGQYDHTLLNDHEEFSSNDRYAMPTTEVVAKTVHDKVAAYLSTLANKPTCVQVFVRETPTSYCIYRPKRVEING

SEQ ID NO: 17948 - protein, 158 aa, Bacillus subterraneus
  misc_feature (1)..(158): tr|A0A427TM27|A0A427TM27_9BACI 6-carboxytetrahydropteri n synthase QueD OS=Bacillus subterraneus OX=285983 GN=q ueD PE=4 SV=1
MYDFRIVEQLQKIDKDIKREQLKYHAKRVLVSKEFTFDAAHHLHEYEGKCKNLHGHTYKVIFGISGYVDSRGLMIDFGDIKDIWKSEIEVHLDHRYLNETLPPMNTTAENMVVWIFEKMSEALSRRENLYIGVQVEFVRLYETPTSYAEARREWMEID

SEQ ID NO: 17949 - protein, 146 aa, Bacillus subtilis
  misc_feature (1)..(146): sp|O31676|QUED_BACSU 6-carboxy-5,6,7,8-tetrahydropterin synthase OS=Bacillus subtilis (strain 168) OX=224308 G N=queD PE=1 SV=2
MLSQIYPQAQHPYSFELNKDMHISAAHFIPRESAGACSRVHGHTYTVNITVAGDELDDSGFLVNFSVLKKLVHGNYDHTLLNDHEDFSQDDRYSLPTTEVVAKTIYDNVQAYLDTLENKPTCVQVFVRETPTSYCVYRPKKGGLNG

SEQ ID NO: 17950 - protein, 149 aa, Bacillus subtilis
  misc_feature (1)..(149): tr|A0A5F2KP98|A0A5F2KP98_BACIU 6-carboxy-5,6,7,8-tetrah ydropterin synthase OS=Bacillus subtilis OX=1423 GN=que D PE=3 SV=1
MHKLLSQIYPQAQHPYSFELNKDMHISAAHFIPRESAGACSRVHGHTYTVNITVAGDELDDSGFLVNFSVLKKLVHGNYDHTLLNDHEDFSQDDRYSLPTTEVVAKTIYDNVQAYLDTLENKPNCVQVFVRETPTSYCVYRPKKGGLNG

SEQ ID NO: 17951 - protein, 146 aa, Bacillus swezeyi
  misc_feature (1)..(146): tr|A0A5D4QJC4|A0A5D4QJC4_9BACI 6-carboxy-5,6,7,8-tetrah ydropterin synthase OS=Bacillus swezeyi OX=1925020 GN=q ueD PE=3 SV=1
MLTQVYPQTSHPYAFELNKDMQMSAAHFIPREDAGACSRVHGHTYTINITIAGDVLNESGFLVNFSTLKKLIHGEYDHTLLNDHKEFSGESAEQIPSTEVVAKTIYDKVEAYLKGLENRPRCVQVFVRETPTSYVVYRPKPGDQHG

SEQ ID NO: 17952 - protein, 146 aa, Bacillus swezeyi
  misc_feature (1)..(146): tr|A0A1R1RGQ3|A0A1R1RGQ3_9BACI 6-carboxy-5,6,7,8-tetrah ydropterin synthase OS=Bacillus swezeyi OX=1925020 GN=B TA30_21125 PE=3 SV=1
MLTQVYPQTSHPYAFELNKDMQMSAAHFIPREDAGACSMVHGHTYTINITIAGDVLNESGFLVNFSTLKKLIHGEYDHTLLNDHKEFSGESAEQIPSTEVVAKTIYDKVEAYLKGLENRPCCVQVFVRETPTSYVVYRPKPGDQHG

SEQ ID NO: 17953 - protein, 158 aa, Bacillus taeanensis
  misc_feature (1)..(158): tr|A0A366Y347|A0A366Y347_9BACI 6-carboxytetrahydropteri n synthase QueD OS=Bacillus taeanensis OX=273032 GN=que D PE=4 SV=1
MNFEIPKKVQKIDEDIKRNQLKYHHKRVAVTKEFTFDSAHHLHCYEGKCKSLHGHTYKLIITISGYVNEIGIAVDFSDIKRIYKETIEARLDHRYLNDVLPPMNTTAENMIVWIWEELNTHFEAEGLKAQGHRLEELVLYETPTSYATMKREWMEENE

SEQ ID NO: 17954 - protein, 146 aa, Bacillus tequilensis
  misc_feature (1)..(146): tr|A0A2X0X447|A0A2X0X447_9BACI 6-carboxy-5,6,7,8-tetrah ydropterin synthase OS=Bacillus tequilensis OX=227866 G N=queD PE=3 SV=1
MLSQIYPQAQHPYSFELNKDMHISAAHFIPRESAGACSRVHGHTYTVNITVAGDELDDSGFLVNFSVLKKLVHGNYDHTLLNDHEDFSQDDRYSLPTTEVVAKTIYDNVQAYLDTLENKPACVQVFVRETPTSYCVYRPKKGGLNG

SEQ ID NO: 17955 - protein, 160 aa, Bacillus terrae
  misc_feature (1)..(160): tr|A0A429X5I5|A0A429X5I5_9BACI 6-carboxytetrahydropteri n synthase QueD OS=Bacillus terrae OX=1914933 GN=queD P E=4 SV=1
MGKDFFGFRIVEELQMMDRDIQKNELKYHNKRVLVSKEFTFDAAHHLHCYEGKCKNLHGHTYKVIFGISGFVDEIGLVIDFGDIKEIWKQEIEVHLDHRYLNETLPKMNTTAENMVVWIYEKMRESLNNRSEKYNDMRVEFVRLYETPTSYSEARREWMN

SEQ ID NO: 17956 - protein, 145 aa, Bacillus thermocopriae
  misc_feature (1)..(145): tr|A0A410XI41|A0A410XI41_9BACI 6-carboxytetrahydropteri n synthase QueD OS=Bacillus thermocopriae OX=1215031 GN =queD PE=4 SV=1
MIQQIYPQVIHPFRYELNKDMQIAAAHFIPHEAAGQCANMHGHTYFVNITVAGDELDDSGFLINFQQLKKLIHNRFDHTLMNDHTDVFSNTSAEHFPTTEVVARKIAEIVQAHLDTLPNRPTCVQVFVRESPTSYVVYRPKAGKQ

SEQ ID NO: 17957 - protein, 163 aa, Bacillus thuringiensis; identical to SEQ ID NO: 17799
  misc_feature (1)..(163): tr|C3G069|C3G069_BACTU 6-pyruvoyl tetrahydrobiopterin s ynthase OS=Bacillus thuringiensis serovar andalousiensi s BGSC 4AW1 OX=527032 GN=bthur0009_11990 PE=4 SV=1

SEQ ID NO: 17958 - protein, 163 aa, Bacillus thuringiensis; identical to SEQ ID NO: 17815
  misc_feature (1)..(163): tr|W8XZV5|W8XZV5_BACTU Uncharacterized protein OS=Bacil lus thuringiensis DB27 OX=1431339 GN=BTDB27_001046 PE=4 SV=1

SEQ ID NO: 17959 - protein, 272 aa, Bacillus timonensis
  misc_feature (1)..(272): tr|A0A4S3PN16|A0A4S3PN16_9BACI 6-pyruvoyl tetrahydropte rin synthase OS=Bacillus timonensis OX=1033734 GN=E1I69 _18230 PE=4 SV=1
MLYLSRKMYFSAAHYYRIEEWSEEENQKVFGLCSNPHGHGHDYTLEVMVKGQLDRESGIVVNITDIDKVVKSFIYREVDGKFLNKENPYFTSHLPTTENMVSYIWSSLDGKIDNCQLHKIRLRENDFLFAEKEDQEMVRLTRKYHFSTAHRLHSYQLSHEENLAIFGKCNNPYGHGHNYYLEVTVSGKPDPVTGMIANLSEMDEIVEREIMKKFDHKHLNLDTEEFKELNPTSENVAVVVWDLLAPKLKNLFKIGLYETEKNYFEYYGPEME

SEQ ID NO: 17960 - protein, 167 aa, Bacillus timonensis
  misc_feature (1)..(167): tr|A0A4S3PJ58|A0A4S3PJ58_9BACI 6-carboxytetrahydropteri n synthase QueD OS=Bacillus timonensis OX=1033734 GN=qu eD PE=4 SV=1
MADKKVQHDFFGFRIVENLQKINQDIKRSELKYHRKRVLVSKEFTFDAAHHLHCYEGKCKNLHGHTYKVVFGISGFVNEIGLVIDFGDIKEFWKQEIETYLDHRYLNETLPKMNTTAENMVVWIYEKMKESLNKRSEKYNDLRVEFVRLYETPTSYAEVRREWMEVE

SEQ ID NO: 17961 - protein, 163 aa, Bacillus toyonensis
  misc_feature (1)..(163): tr|A0A2A8HGP5|A0A2A8HGP5_9BACI 6-carboxytetrahydropteri n synthase QueD OS=Bacillus toyonensis OX=155322 GN=que D PE=4 SV=1
MDNFFGFRIVENLQKMDKDIQRKQLKYHNKRVMVSKEFTFDAAHHLHCYEGKCKNLHGHTYKVVFGISGYVNEIGLAIDFGDIKEIWKNEIEIYLDHRYLNETLPAMNTTAENMVVWIYEKMAEALTKDNRVKEYKGARVEFVRLFETPTSYAEVRREWMLDE

SEQ ID NO: 17962 - protein, 163 aa, Bacillus toyonensis
  misc_feature (1)..(163): tr|A0A2B6GU02|A0A2B6GU02_9BACI 6-carboxytetrahydropteri n synthase QueD OS=Bacillus toyonensis OX=155322 GN=que D PE=4 SV=1
MENFFGFRIVENLQKMDKDIQLEQLKYHNKRVMVSKEFTFDAAHHLHCYEGKCKNLHGHTYKVVFGISGYVNDIGLAIDFGDIKEIWKNEIEIYLDHRYLNETLPVMNTTAENMVVWIYEKMAEALIKGNRTEEYKGARVEFVRLFETPTSYAEVRREWILDE

SEQ ID NO: 17963 - protein, 163 aa, Bacillus tropicus; identical to SEQ ID NO: 17799
  misc_feature (1)..(163): tr|A0A4Y6F859|A0A4Y6F859_9BACI 6-carboxytetrahydropteri n synthase QueD OS=Bacillus tropicus OX=2026188 GN=queD PE=4 SV=1

SEQ ID NO: 17964 - protein, 156 aa, Bacillus urumqiensis
  misc_feature (1)..(156): tr|A0A2P6MES5|A0A2P6MES5_9BACI 6-carboxytetrahydropteri n synthase QueD OS=Bacillus urumqiensis OX=1548213 GN=q ueD PE=4 SV=1
MFGFRIVDKLQKLGEDIQKKDLRYHQKRVMVSKEFTFDAAHHLHAYEGKCKNLHGHTYTVVFGISGFVDETGIMMDFGDIKEIWKEKIEIYLDHRYLNEMLPPMNTTAENMVVWIFEQMNEALEKNGEQSMRTEFVRLYETPTSYAEFRREWMINE

SEQ ID NO: 17965 - protein, 146 aa, Bacillus vallismortis
  misc_feature (1)..(146): tr|A0A1W6HHT3|A0A1W6HHT3_BACVA 6-carboxy-5,6,7,8-tetrah ydropterin synthase OS=Bacillus vallismortis OX=72361 G N=B9C48_06910 PE=3 SV=1
MLSQIYPQVQHPYSFELNKDMHISAAHFIPRESAGACSRVHGHTYTVNITVAGDELDDSGFLVNFSVLKKLVHGAYDHTLLNDHDEFSEDDRYSLPTTEVVAKTIYDKVQSYLETLENQPVCVQIFVRETPTSYCVYRPKKGDRNG

SEQ ID NO: 17966 - protein, 149 aa, Bacillus vallismortis
  misc_feature (1)..(149): tr|A0A410WIA6|A0A410WIA6_BACVA 6-carboxy-5,6,7,8-tetrah ydropterin synthase OS=Bacillus vallismortis OX=72361 G N=queD PE=3 SV=1
MHKLLSQIYPQAQHPYSFELNKDMHISAAHFIPRESAGACSRVHGHTYTVNITVAGDELDDSGFLVNFSVLKKLVHGNYDHTLLNDHDDFSQDDRYSLPTTEVVAKTIYDNVQAYLDTLENKPSCVQVFVRETPTSYCVYRPKKGGLNG

SEQ ID NO: 17967 - protein, 147 aa, Bacillus velezensis
  misc_feature (1)..(147): tr|A7Z3Y7|A7Z3Y7_BACVZ 6-carboxy-5,6,7,8-tetrahydropter in synthase OS=Bacillus velezensis (strain DSM 23117 / BGSC 10A6 / FZB42) OX=326423 GN=queD PE=3 SV=1
MLSQIYPQVQHPYSFELNKDMHISAAHFIPRESAGACSRVHGHTYTVNITVAGDELDDSGFLVNFSVLKKLVHGAYDHTLLNDHDEFSADDDRYSLPTTEVVAKTIYDKVQSYLETLENQPVCVQIFVRETPTSYCVYRPKKGDRNG

SEQ ID NO: 17968 - protein, 147 aa, Bacillus velezensis; identical to SEQ ID NO: 17967
  misc_feature (1)..(147): tr|S6FX97|S6FX97_9BACI 6-carboxy-5,6,7,8-tetrahydropter in synthase OS=Bacillus velezensis UCMB5033 OX=1338518 GN=queD PE=3 SV=1

SEQ ID NO: 17969 - protein, 144 aa, Bacillus vietnamensis
  misc_feature (1)..(144): tr|A0A0P6W1E6|A0A0P6W1E6_9BACI 6-carboxy-5,6,7,8-tetrah ydropterin synthase OS=Bacillus vietnamensis OX=218284 GN=AM506_01380 PE=3 SV=1
MIQQIYPTPDHPYEFELNKDMHFAAAHYIPHADAGSCQEVHGHTYFANITIGGDQLDDSGFLINFQHIKKLIHKRFDHTIINQDERFSSEKGMEFPTTEVVAKVMWEIIQDHLDTLPHRPQCLQVFLRETPTSYCIYRPKGKRS

SEQ ID NO: 17970 - protein, 144 aa, Bacillus vietnamensis
  misc_feature (1)..(144): tr|A0A5D4NZD4|A0A5D4NZD4_9BACI 6-carboxy-5,6,7,8-tetrah ydropterin synthase OS=Bacillus vietnamensis OX=218284 GN=queD PE=3 SV=1
MIGQIYPVPQHSYSYELNKDFQFAAAHRIPSEAAGKCQRIHGHTYFANITVGGDILDESGFLINFATIKKLIHDRFDHTLLNDDPLFKGNSERFPTTEVMAEVMHSIIQEHLDQQGNKAQCLQVFLRETPTSYCIFRPRRGKEL

SEQ ID NO: 17971 - protein, 141 aa, Bacillus wakoensis
  misc_feature (1)..(141): tr|W4PZD7|W4PZD7_9BACI 6-carboxy-5,6,7,8-tetrahydropter in synthase OS=Bacillus wakoensis JCM 9140 OX=1236970 G N=JCM9140_389 PE=3 SV=1
MIQQFYPQVQHSYRYELNKDMHLAAAHFIPDDAAGQCKNMHGHTYFINITIGGDTLDELGFLINFKRIKEIVHKRYDHSVLNDHLEYKDVFPTTERVAEQIWQAVQAELQTQVNKPNCLQVVVRETPTSYVVYRPKPEELA

SEQ ID NO: 17972 - protein, 148 aa, Bacillus weihaiensis
  misc_feature (1)..(148): tr|A0A1L3MT71|A0A1L3MT71_9BACI 6-carboxy-5,6,7,8-tetrah ydropterin synthase OS=Bacillus weihaiensis OX=1547283 GN=A9C19_12705 PE=3 SV=1
MIQQIYPQVQHDYQFELNKDMHIAAAHYIPHEDAGKCQNVHGHTYFVNITIAGDELDETGFLVNFASLKRLIHKRFDHTILNDHKDLFSEKDPTYFPTTEGVARAIYEVVQNDLDQKDNQPKCVQVFVRETPTSYVVYRPKKKKEGHR

SEQ ID NO: 17973 - protein, 163 aa, Bacillus wiedmannii
  misc_feature (1)..(163): tr|A0A2A7XAC8|A0A2A7XAC8_9BACI 6-carboxytetrahydropteri n synthase QueD OS=Bacillus wiedmannii OX=1890302 GN=qu eD PE=4 SV=1
MDNLFGFRIVENLQKMDKDIQRKQLKYHNKRVMVSKEFTFDAAHHLHCYEGKCKNLHGHTYKVVFGISGYVNEIGLAIDFGDIKEIWKNEIEIYLDHRYLNETLPAMNTTAENMVVWIYEKMAEALLKDNRANEYKGARVEFVRLFETPTSYAEVRREWMLDE

SEQ ID NO: 17974 - protein, 163 aa, Bacillus wiedmannii
  misc_feature (1)..(163): tr|A0A2A8DPP8|A0A2A8DPP8_9BACI 6-carboxytetrahydropteri n synthase QueD OS=Bacillus wiedmannii OX=1890302 GN=qu eD PE=4 SV=1
MENFFGFRIVENLQKMDKDIQLEQLKYHNKRVMVSKEFTFDAAHHLHCYEGKCKNLHGHTYKVVFGISGYVNDIGIAIDFGDIKEIWKNEIEIYLDHRYLNETLPVMNTTAENMVVWIYEKMAEALTKGYRAEEYKGARVEFVRLFETPTSYAEVRREWILDE

SEQ ID NO: 17975 - protein, 145 aa, Bacillus wudalianchiensis
  misc_feature (1)..(145): tr|A0A1B9AC59|A0A1B9AC59_9BACI 6-carboxy-5,6,7,8-tetrah ydropterin synthase OS=Bacillus wudalianchiensis OX=174 3143 GN=A8F95_16765 PE=3 SV=1
MIQQIYPVPMHSYRYELNKDFQFAAAHYVPHEAAGACRRLHGHTYFANVTVVGNDLNESGFLVNFQDIKNLIHKRFDHTILNEDSLFNEMDPNDFPTTEVVARKFWEVIQESLNKLPNKPLCIQVFLRETPTSYVVFRPQKEDFQ

SEQ ID NO: 17976 - protein, 272 aa, Bacillus wudalianchiensis
  misc_feature (1)..(272): tr|A0A1B9B7S8|A0A1B9B7S8_9BACI 6-pyruvoyl tetrahydropte rin synthase OS=Bacillus wudalianchiensis OX=1743143 GN =A8F95_18530 PE=4 SV=1
MILLTRKVEFSAAHSYRIDTWDEETNRKAFGLCSNPNGHGHDYTLEVTVKGDLNSSSGIVVNITDVDRIVKSVVLEELDGKFLNREHSFFKEHIPTTENIVNYIWNELKDRFNGCKLDRIILHENPFLFSQKGENSMIQLTRKYHFSAAHRLHSDQLSDEENKEIFGKCNNPNGHGHNYVLEVTVEGEIDPVTGMIINLAQLDEIVDETIIQKFDHKHLNLDTEEFNGLNPTAEVMTIVFWELLQSRLPSLSKVGLWETAKNYFEYGGPVEE

SEQ ID NO: 17977 - protein, 145 aa, Bacillus xiamenensis
  misc_feature (1)..(145): tr|K2N7G5|K2N7G5_9BACI 6-carboxy-5,6,7,8-tetrahydropter in synthase OS=Bacillus xiamenensis OX=1178537 GN=BA1_1 7680 PE=3 SV=1
MLSQIYPQTDHPFSFELNKDMHLSAAHFVPREEAGACSRVHGHTYTINITIAGDDLDESGFLVNFSTLKKLIHGQYDHTLLNDHEEFSSNDPYAMPTTEVVAKTVYDKVAAYLTTLANKPVCVQVFVRETPTSYCIYRPKRVELK

SEQ ID NO: 17978 - protein, 277 aa, Bacillus xiamenensis
  misc_feature (1)..(277): tr|K2N9Y3|K2N9Y3_9BACI Putative 6-pyruvoyl tetrahydropt erin synthase OS=Bacillus xiamenensis OX=1178537 GN=BA1 _14572 PE=4 SV=1
MLYLSRKMYFSSLHSYRVKEWSDEYNQQVFGPCSNPNGHGHDYTLEVMVKGKLNRQSGIVVNITDIDKVVKSFVAENLDGKFLNMENDYFKHHIPTTENIATYLWESLDGKIDHCQIHKIRLHENNFLYSEKEDGQLVRLTRKYHFCTAHRLHSEQLSEEENQELFGKCNNPYGHGHNYYLEVTVNGEPDPVTGMIANLSDIDSVVEKEIMERFDHKHLNLDTEEFKDLNPTSENVAVVIWDLLSPQLTNLFKIGLYETEKNYFEYCGPQEDMKYGA

SEQ ID NO: 17979 - protein, 160 aa, Bacillus zeae
  misc_feature (1)..(160): tr|A0A398AVD5|A0A398AVD5_9BACI 6-carboxytetrahydropteri n synthase QueD OS=Bacillus zeae OX=1917180 GN=queD PE= 4 SV=1
MYGFRIVDKLQKIDEDIKIDQLKYHHKRVLVSKEFTFDSAHHLHHYEGKCKNLHGHTYRVIFGLSGYVDERGIMIDFGDIKEIWKSEIEIFLDHKYLNETLPPMNTTAENMVVWIYEKMSEGLQREDRMSKYAEARVEFVRLFETPTSYAEARREWMEHE

SEQ ID NO: 17980 - protein, 146 aa, Bacillus zhangzhouensis
  misc_feature (1)..(146): tr|A0A081L6Z7|A0A081L6Z7_9BACI 6-carboxy-5,6,7,8-tetrah ydropterin synthase OS=Bacillus zhangzhouensis OX=11785 40 GN=BA70_12590 PE=3 SV=1
MLSQIYPQTDHPFSFELNKDMHVSAAHFIPREDAGACSRVHGHTYTINITIAGDDLDESGFLVNFSTLKKLIHGQYDHTLLNDHEEFSSNDPYAMPTTEVVAKTVHDKVAAYLSTLANKPTCVQVFVRETPTSYCIYRPKRVEING

SEQ ID NO: 17981 - protein, 121 aa, Unknown
  misc_feature (1)..(121): tr|A0A0J8YRG2|A0A0J8YRG2_9GAMM 6-carboxy-5,6,7,8-tetrah ydropterin synthase OS=bacteria symbiont BFo2 of Frankl iniella occidentalis OX=1628856 GN=AI29_00610 PE=3 SV=1
MAVTTLFKEFQFEAAHFLPHVPEGHKCGRLHGHSFLVRLEITGEVDAHTGWVMDFAELKAAFKPLYERLDHHYLNDIAGLENPTSEVLAVWIWKQMKPKLPLLSAVMIKETCTAGCTYRGE

SEQ ID NO: 17982 - protein, 119 aa, Unknown
  misc_feature (1)..(119): tr|A0A0J8YGN2|A0A0J8YGN2_9GAMM 6-carboxy-5,6,7,8-tetrah ydropterin synthase OS=bacteria symbiont BFo1 of Frankl iniella occidentalis OX=1628855 GN=AI28_22630 PE=3 SV=1
MATTLFKDFQFEAAHHLPNVPAGHKCGRLHGHSFMVRLEITGEVDAHTGWVMDFSEIKAAFKPVYDRLDHYNLNDIPGLENPTSEVLAAWIWQQMKPVLPLLSAVMVKETCTAGCVYRG

SEQ ID NO: 17983 - protein, 134 aa, Bacteriodetes bacterium
  misc_feature (1)..(134): tr|A0A521WKT0|A0A521WKT0_9BACT 6-carboxy-5,6,7,8-tetrah ydropterin synthase OS=Bacteriodetes bacterium OX=25075 65 GN=EPO24_10450 PE=3 SV=1
MVLLTRKEHFCASHRLYNPKFSDGQNLRIYGKCAYPNGHGHNYELDVTVAGEVDPETGMILDLKELSDIIKKEITDKVDHKHLNMDIDFLRDVIPTAENLAIVFWNILAPKIPKGKLYSLRVYETPTNYAEYRG

SEQ ID NO: 17984 - protein, 138 aa, Bacteriodetes bacterium
  misc_feature (1)..(138): tr|A0A522FWK5|A0A522FWK5_9BACT 6-carboxy-5,6,7,8-tetrah ydropterin synthase OS=Bacteriodetes bacterium OX=25075 65 GN=EPN82_00460 PE=3 SV=1
MLYITKSVTFSASHRLYNPEFSDEENERIFDKCNNFYGHGHNYTLEVTVAGEPNPKTGYIIDLKILKKIIQDEILSKVDHKHLNHDVEFLKGIIPTVENLAIAFWNRLENNFQDGKLHCIRLYETENSYVEYFGKKRD

SEQ ID NO: 17985 - protein, 277 aa, Bacterioplanes sanyensis
  misc_feature (1)..(277): tr|A0A222FMV2|A0A222FMV2_9GAMM Uncharacterized protein OS=Bacterioplanes sanyensis OX=1249553 GN=CHH28_15550 P E=4 SV=1
MQLFVDQLTNVDFSYLDAERGIVGETWWASARLDGGLDDQGMICDFGLVKKTLRNWLDDEVDHRLLVPVKSPQLTLQSTADSVELSWNCQHGTINMSAPRQAVALIDSDHISADSVARWCRQQLKAFFPVNVEQLTLGFTPEQIDGAFYHYSHGLKKHGGNCQRIAHGHRSRIVIQLDGQRNPALEAQWAQRWQDIYLGSDEDVVGQDDQRIHYAYQAMQGDFRLSMPKVTCYQMDTDTTVEFIAQHLANAIKHEHPDSAVTVQAFEGVNKGAIASA

SEQ ID NO: 17986 - protein, 145 aa, Bacteriovorax sp.
  misc_feature (1)..(145): tr|T0DK36|T0DK36_9PROT 6-pyruvoyl tetrahydropterin synt hase OS=Bacteriovorax sp. BAL6_X OX=1201290 GN=M902_211 7 PE=4 SV=1
MATFKSTKHFYGFPCTHRQWKADSHCRFVHGYSRSFHFEFECSELTKEMWVMDFGDLKDVKAWLDDMFDHTFLASQDDPFMEEFKKLDEAGVVQLRVLPNAGMEGTAEFVYEKMSELIKKKTDGRVWISRLEVKENEKNSAIYIP

SEQ ID NO: 17987 - protein, 147 aa, Bacteriovorax sp.
  misc_feature (1)..(147): tr|T0RFZ3|T0RFZ3_9PROT 6-pyruvoyl tetrahydropterin synt hase OS=Bacteriovorax sp. Seq25_V OX=1201288 GN=M900_20 58 PE=4 SV=1
MKTFKSTKNFYGYPCTHRQWKADSHCKYVHGYSRSFHFVFECTELSKEMWVMDFGDLKDVKAWLDYMFDHTFLVSEDDPFKAEFVELDKKGVIQMRELPNAGMEGTAIFVYDHVNKMVEEKTNKRVRVYSLEVKENEKNSAIYCPTA

SEQ ID NO: 17988 - protein, 164 aa, Bacteriovorax stolpii
  misc_feature (1)..(164): tr|A0A2K9NSL7|A0A2K9NSL7_9PROT Uncharacterized protein OS=Bacteriovorax stolpii OX=960 GN=C0V70_10425 PE=4 SV= 1
MKTAFSIRVYKQYFNFASSHFMLFKDGTREPLHGHNYRVQVRGNAPELDDDMVFDFLNIKPIVRKICDSLDHKLLIPKNHPKIIIEDKEKNYNIITPDESVFSIPKTDVLLMPIENTSAERIAAYLAQEIKSAVFAEYKFEFNELEIEVEETPGQSAVYTLLKE

SEQ ID NO: 17989 - protein, 151 aa, Bacteriovorax stolpii
  misc_feature (1)..(151): tr|A0A2K9NU32|A0A2K9NU32_9PROT 6-pyruvoyl tetrahydropte rin synthase OS=Bacteriovorax stolpii OX=960 GN=C0V70_1 3140 PE=4 SV=1
MYISTKRFTGYPCTHRQWRDEGHCRFVHGYSREFSFWFKAKTLDEKGWVMDFGGFKEFKTFLDDTFDHTFLANADDPELPLFEEMHKKGIVKLRVLESVGMEGTSKFLHQKMNEYLDKKTGGRVYCFRVETRENEKNSGLYEEDKSGFSAV

SEQ ID NO: 17990 - protein, 134 aa, Unknown
  misc_feature (1)..(134): tr|A0A2E0CBB8|A0A2E0CBB8_9BACT 6-pyruvoyl tetrahydrobio pterin synthase OS=bacterium OX=1869227 GN=CL640_04825 PE=4 SV=1
MISVTRKSHFNAAHRLNNPKWSVEKNREFFGLCNNENYHGHNYDLDVTVSGELDEESGYLIDMKELSTLIEIEIESRFDHKNLNLDTKEFKNLNPTAENIAIIIWNILRKKIDEKFSLKICLYETSRNFVEYSG

SEQ ID NO: 17991 - protein, 141 aa, Unknown
  misc_feature (1)..(141): tr|A0A2E4FY48|A0A2E4FY48_9BACT 6-pyruvoyl tetrahydrobio pterin synthase OS=bacterium OX=1869227 GN=CL648_01700 PE=4 SV=1
MLKHPVFLTLRRTFCAAHRLYSDALSPEDNQKIFNKCAHPHGHGHNYVVHVSLRGEPDPTTGMIMNVSILKELLETHVFSDFDHRHLNIDVHEFQAGLLPTVENIAIVIWNRLYPHLPEYLYAIKVEETESISALYYGPES

SEQ ID NO: 17992 - protein, 124 aa, Unknown
  misc_feature (1)..(124): tr|A0A532UMC7|A0A532UMC7_9BACT 6-carboxy-5,6,7,8-tetrah ydropterin synthase OS=bacterium (candidate division B3 8) B3_B38 OX=2012999 GN=queD PE=3 SV=1
MYEIMIETGFSASHQVKGYPGDCAQPHGHNWKVRVYVRADRTNSLGMVIDFRRLKEITCEFTEQLDHKSLNNLPPFDKENPTSENIAKWLYDNLKRKIDTEDYYLWAVEVFETETSRAFYSESE

SEQ ID NO: 17993 - protein, 168 aa, Unknown
  misc_feature (1)..(168): tr|A0A2M7G0T0|A0A2M7G0T0_9BACT Folate biosynthesis prot ein OS=bacterium (Candidatus Blackallbacteria) CG17_big _fil_post_rev_8_21_14_2_50_48_46 OX=2014261 GN=COW36_18 030 PE=4 SV=1
MRTVTLELFKENMKFSAGHFTIFSAQERENLHGHNFTVHVTIEACILENGMCFDYALYKRRIEGLCREWNEVVLLPSQSPYLRIEETDDLIFAHFDTERIPFLRRDVLLLPIENATVEEFSRLFLEKLIANPQELSDWGLEAISVKIFSGPGQCAASSWKKPEAHAEP

SEQ ID NO: 17994 - protein, 131 aa, Unknown
  misc_feature (1)..(131): tr|A0A2G9Y9L5|A0A2G9Y9L5_9BACT 6-carboxy-5,6,7,8-tetrah ydropterin synthase OS=bacterium (Candidatus Ratteibact eria) CG23_combo_of_CG06-09_8_20_14_all_48_7 OX=2014292 GN=queD PE=3 SV=1
MGYQVEVTDSFAAAHQLRGYQGKCENLHGHNWKVSVTLFVKQVNKIGMAIDFAEVKRILSAILQEMDHTFLNQHPHFQKNNPTSENIARYIFDQFSSHLRDKKVKVAGVSVWESENCRAIYYSSQDVVRPF

SEQ ID NO: 17995 - protein, 187 aa, Unknown
  misc_feature (1)..(187): tr|A0A3A9EQZ4|A0A3A9EQZ4_9BACT Rubredoxin OS=bacterium 1XD42-8 OX=2320102 GN=D7X25_26540 PE=4 SV=1
MRSITTLDLQYAHRFYGFKGEAQYLHGHTGVLTIEVEDSIESGVNMVFPCNEIQKTAWEVLKNFDHALVLREDDPLLPAILNVYEEQGIRNGEPNNKMKGPAFKTELATAYPDCRLVVTKETMTVEGMIKIVYDLLKDKLNIAKLTFTSGVNAASEEFQTKNKIDRCPKCGIALNENGVCPKCGYKK

SEQ ID NO: 17996 - protein, 139 aa, Unknown
  misc_feature (1)..(139): tr|A0A3A8YF66|A0A3A8YF66_9BACT 6-carboxy-5,6,7,8-tetrah ydropterin synthase OS=bacterium 1xD8-6 OX=2320116 GN=D 7V82_17000 PE=3 SV=1
MYQLTIEQSFDSAHFLAGYSGKCGNIHGHRWRVLLQVQSEQLKEDAQQRGMCVDFSTLKDELKKAVDGLDHTLLIERGTLKEKTLEALSEEGFSVIELAFRPTAENFAKHFYGLFVNKGYDVAAVHVYETPNNCASYQE

SEQ ID NO: 17997 - protein, 162 aa, Unknown
  misc_feature (1)..(162): tr|A0A0S4LZB2|A0A0S4LZB2_9BACT 6-carboxy-5,6,7,8-tetrah ydropterin synthase OS=bacterium 2013Arg42i OX=1561003 GN=queD PE=4 SV=1
MKEKDCLSPVFEITRRIEFDAGHRIPHHHGLCSNIHGHRYGLEITIAGSLVSGESFSDNGMVVDFQAIQKLACESLIDEWDHAFIVYKDDFILEMLKKIPNHRTFVLDQPPTVENMAAFAFRRLRNVYQSRYGNTLHLNRIRLYETPNCWADVTSGYDSSAT

SEQ ID NO: 17998 - protein, 135 aa, Unknown
  misc_feature (1)..(135): tr|A0A0M9DSK3|A0A0M9DSK3_9BACT 6-carboxy-5,6,7,8-tetrah ydropterin synthase OS=bacterium 336/3 OX=1664068 GN=AD 998_15260 PE=3 SV=1
MKVKVSRKEHFNAAHRLHNPAWDEQKNMEVFGKCNNQYYHGHNYELIIEVVGEISPETGYVIDMKVLSDIIKEHVTDRFDHKNLNLELNEFKNLNPTAENIAVVIWNILRQHIQPPYELKVKLYETERNFVEYPA

SEQ ID NO: 17999 - protein, 140 aa, Unknown
  misc_feature (1)..(140): tr|A0A0M9DQK9|A0A0M9DQK9_9BACT 6-pyruvoyl tetrahydrobio pterin synthase OS=bacterium 336/3 OX=1664068 GN=AD998_ 02665 PE=4 SV=1
MVYVCRKEHFNAAHRLYNPAWSKEKNEEVFGICSNEYFHGHNFELIVTVKGIPQSDTGCVIDLKKLSKLIREEVVDKLDHKNINIEVDFMQGKIPSCEILIMEIWNILAPKISGVAYDKQAQLHCIKLFETKNNFVEYYG

SEQ ID NO: 18000 - protein, 137 aa, Unknown
  misc_feature (1)..(137): tr|A0A1H8JJ71|A0A1H8JJ71_9BACT 6-carboxy-5,6,7,8-tetrah ydropterin synthase OS=bacterium A37T11 OX=1855384 GN=S AMN05216436_12253 PE=3 SV=1
MIYITRRERFNAAHRLYRTDWSLEENERVFGKCSNPNWHGHNYELYVTIKGEVNPETGFVMDLKVLKDTILHEVIDKLDHRNVNMDVDFMKGKMASTEVLAMEIFKQLQPHIQRHHAQLHSIRLHETENNYVEYLGE

SEQ ID NO: 18001 - protein, 118 aa, Unknown
  misc_feature (1)..(118): tr|A0A1H9P8T5|A0A1H9P8T5_9BACT 6-carboxy-5,6,7,8-tetrah ydropterin synthase OS=bacterium A52C2 OX=1855383 GN=SA MN05216548_1193 PE=3 SV=1
MFRITKEFHFSASHQLTHLPADHQCARLHGHNYIVVVELAAKSLNEFGFVRDYHELAPFKRYLDESFDHRHLNDVLGHDDATSERLAQHFYEWCRERLPETTAVKVSETPKTWAEYRP

SEQ ID NO: 18002 - protein, 122 aa, Unknown
  misc_feature (1)..(122): tr|A0A1V5V4N6|A0A1V5V4N6_9BACT 6-carboxy-5,6,7,8-tetrah ydropterin synthase OS=bacterium ADurb.Bin236 OX=186692 5 GN=queD PE=3 SV=1
MYEVSKETTFSSAHSLREYEGRCEALHGHNWKVKAHVAATELDRLGMVVDFKILKAALEETADRLDHTLINDVPPFDSINPSAENLAKHFYAELSARLNDGRARVSRVDVWESEGSRASYFE

SEQ ID NO: 18003 - protein, 125 aa, Unknown
  misc_feature (1)..(125): tr|A0A1V5UN32|A0A1V5UN32_9BACT 6-carboxy-5,6,7,8-tetrah ydropterin synthase OS=bacterium ADurb.Bin243 OX=186693 6 GN=queD PE=3 SV=1
MYEISAKFSISSAHYLNNYEGKCKRLHGHNWKVTVYLKGEELDSLGMLVDFTVLKGFFKNIEDQLDHNCLNEIEFFKQKNPTAENISEFIYTRMQELLDQNGIDNARVDRVSVYETENCEAVFYR

SEQ ID NO: 18004 - protein, 134 aa, Unknown
  misc_feature (1)..(134): tr|A0A1V5T626|A0A1V5T626_9BACT 6-carboxy-5,6,7,8-tetrah ydropterin synthase OS=bacterium ADurb.Bin270 OX=186692 6 GN=queD PE=3 SV=1
MTYSVSKTFRFCYGHRLLNDPGKCKNIHGHTAKVTIHLESDSVDENGMVVHFENLKKTIGEWISENLDHTLIVSARDPIKKYLDENGERYLALESNPTAEMIAHFIFDRTKSMGLPVAKVDLWESESSKATYRV

SEQ ID NO: 18005 - protein, 123 aa, Unknown
  misc_feature (1)..(123): tr|A0A1V5T2I8|A0A1V5T2I8_9BACT 6-pyruvoyl tetrahydropte rin synthase OS=bacterium ADurb.Bin270 OX=1866926 GN=BW Y40_00816 PE=4 SV=1
MFEIRVKHKFIARHALTNYRGATEKSHNHEWLCEAFIRSENLDEAGCAVDFIKVDEALSKITSEIEGSDVNAHPFFNGKSPSAENMAFFIFKKLESKIENHGAKLVRVTISEDPDHAASFIRE

SEQ ID NO: 18006 - protein, 118 aa, Unknown
  misc_feature (1)..(118): tr|A0A1V5PTA6|A0A1V5PTA6_9BACT 6-carboxy-5,6,7,8-tetrah ydropterin synthase OS=bacterium ADurb.Bin363 OX=186692 7 GN=queD PE=3 SV=1
MYTLIIKESFDSAHFLKNYPGKCAKIHGHTWHIELEIEGEKLDEAGMLIDFGEVKEIIKKNLPDHEFLNKVLPFNPTAENLSKYFFITFQEIFSNKPFKIKSVTLWESNTCGCSYSIS

SEQ ID NO: 18007 - protein, 122 aa, Unknown
  misc_feature (1)..(122): tr|A0A1V5NJ27|A0A1V5NJ27_9BACT 6-carboxy-5,6,7,8-tetrah ydropterin synthase OS=bacterium ADurb.Bin374 OX=186693 7 GN=queD PE=3 SV=1
MYKIMAEASFSAAHQLVRHPGKCRALHGHNWRVQAIVGAETLDDQGMVVDFSVLKKALGELCDRFDHLMVNEVAPFDRIPPTAENFAKLFFDELVIRVGTNRVQVIAVRVWETDRNVAEYSI

SEQ ID NO: 18008 - protein, 166 aa, Unknown
  misc_feature (1)..(166): tr|A0A1V5MBK4|A0A1V5MBK4_9BACT 6-carboxy-5,6,7,8-tetrah ydropterin synthase OS=bacterium ADurb.Bin425 OX=186692 9 GN=queD PE=4 SV=1
MELISRMQFNESEERLALSTVTASRRLQFCAGHRVYGHESKCANLHGHNYVVFLYARSENELNGDGLDSLGRVVDFGQLKSLFAPWIEDNWDHGFIVSRNDLEAQQALNMIPGQKLFVMDSNPTAENMARYILLELAPRLLKGSGVRLTKVVLWETENCFAEVELV

SEQ ID NO: 18009 - protein, 128 aa, Unknown
  misc_feature (1)..(128): tr|A0A1V5LXG4|A0A1V5LXG4_9BACT 6-carboxy-5,6,7,8-tetrah ydropterin synthase OS=bacterium ADurb.Bin429 OX=186693 0 GN=queD PE=3 SV=1
MFRMTVEGRFSAAHSLRGYPGPCCQLHGHNYLVQVRLEGEELDELGMLVDYTDVKAALIDALAPFDHQYLNDLPDFVAVNPTSEALARLLYSRVSERLFTREELRRRVRLTEVIVFENERQGVGYGEA

SEQ ID NO: 18010 - protein, 121 aa, Unknown
  misc_feature (1)..(121): tr|A0A1V5LKW2|A0A1V5LKW2_9BACT 6-carboxy-5,6,7,8-tetrah ydropterin synthase OS=bacterium ADurb.Bin431 OX=186693 1 GN=queD PE=3 SV=1
MYQLVVRSGFSAAHRLAYYPGACERLHGHNWKVTATVAGEELDQLGMVMDLMVLQTILDECLHQFDHRMINEVAPFDQTNPTSENLARYIFGWMKNNLPAKARVVSIEIAENDDFSVIYSE

SEQ ID NO: 18011 - protein, 137 aa, Unknown
  misc_feature (1)..(137): tr|A0A1V5KKF4|A0A1V5KKF4_9BACT 6-carboxy-5,6,7,8-tetrah ydropterin synthase OS=bacterium ADurb.Bin478 OX=186693 2 GN=BWY83_02031 PE=3 SV=1
MPLVYVTRRMHFSAGHRLHAESLDEETNRGIYGACNNPLGHGHNYDLEVTVRGEPDPVTGMVMDIKTLKDLIQKEVIDPMDHKFLNVEVPFLARQVPTAENIVVAIWRVLQDKLAGVELYRLKLYETERNIVEYYGA

SEQ ID NO: 18012 - protein, 122 aa, Unknown
  misc_feature (1)..(122): tr|A0A1V5KDL6|A0A1V5KDL6_9BACT 6-carboxy-5,6,7,8-tetrah ydropterin synthase OS=bacterium ADurb.Bin478 OX=186693 2 GN=queD PE=3 SV=1
MYQLNVESEFSAAHFLPDYSGACKRVHGHNWKIRLTVGAKKVDESGMAMDLADVRELLETCLEPLDHQILNEVAPFDQMTPTSENMARYIYEWIKKELPAHARMIQVEVFESDKFSVVYTEE

SEQ ID NO: 18013 - protein, 129 aa, Unknown
  misc_feature (1)..(129): tr|A0A1V5JHC4|A0A1V5JHC4_9BACT 6-carboxy-5,6,7,8-tetrah ydropterin synthase OS=bacterium ADurb.BinA028 OX=18669 33 GN=queD PE=3 SV=1
MSDIEVTKEFTFDSAHYLPGHPGKCAAIHGHTYRMQVTLACDPACMTGGMVLDFGDLSGYVHDEIIRRVDHKLLNEVLGYMPTAENMAIDFFGRLKSVIDSLPLGGGKRVRLASVRLWETPTSYAEYRG

SEQ ID NO: 18014 - protein, 120 aa, Unknown
  misc_feature (1)..(120): tr|A0A244C101|A0A244C101_9BACT 6-carboxy-5,6,7,8-tetrah ydropterin synthase OS=bacterium AM6 OX=1954209 GN=B0X7 8_19025 PE=3 SV=1
MEIFKVFMLEAAHRLPNVPPGHKCARLHGHSFRVELKVEGEPGAQTGWIMDFGDVKAAFQPIYDRLDHHYLNDIPGLENPTSENLAVWIWNELKPTLPALSEITVHETCTSGCRYRGPAA

SEQ ID NO: 18015 - protein, 147 aa, Unknown
  misc_feature (1)..(147): tr|A0A4Z0JEK5|A0A4Z0JEK5_9BACT 6-pyruvoyl tetrahydropte rin synthase OS=bacterium BCRC 81129 OX=2487722 GN=EGT5 1_01535 PE=4 SV=1
MQKQRTYKIKSYVNASHAVRWKSGTGKKHNHTWEIVCELHVFEGMVSFFDIEKSLNKAIDALSGKYLNDLPEFKVINPTVENVTEYLFNQIDGILRQNNAVLLRIEVSDSPTRSYCIDVTERQFPTQEEVLAQQAQGDAKPQADDHA

SEQ ID NO: 18016 - protein, 120 aa, Unknown
  misc_feature (1)..(120): tr|A0A2N5ZD13|A0A2N5ZD13_9BACT 6-carboxytetrahydropteri n synthase QueD (Fragment) OS=bacterium BM706 OX=205346 5 GN=C0601_09985 PE=4 SV=1
MYYLGVRDDFSAAHILKGYDGKCSRLHGHNWKIEAVFRGEELNSIDISEDFKNLKNALKFVLEEFDHNYLNEIEYFETSNPSAENISRILNELLQEKIEEEGYKVEVYEVKVWESDRAWV

SEQ ID NO: 18017 - protein, 140 aa, Unknown
  misc_feature (1)..(140): tr|A0A2H6EF72|A0A2H6EF72_9BACT 6-carboxy-5,6,7,8-tetrah ydropterin synthase OS=bacterium BMS3Abin03 OX=2005711 GN=queD_2 PE=3 SV=1
MMGRIIYLTRRETFAAAHRLFKPELSDEENFELFGKCSNPNWHGHNYTLEVVVAGKIDPDTGFVLDIKHLKELIKEHVISKVDHKNLNIDTEFMKGLNTTSENITVAIWNQLVDKIPNGRLYSVKLYETENNYFEYKGEE

SEQ ID NO: 18018 - protein, 138 aa, Unknown
  misc_feature (1)..(138): tr|A0A2H6EC19|A0A2H6EC19_9BACT 6-carboxy-5,6,7,8-tetrah ydropterin synthase OS=bacterium BMS3Abin03 OX=2005711 GN=queD_1 PE=4 SV=1
MKVAKEFHWEMGHRLPEHFGLCKNIHGHSYKMIVEFEGELNEQGMVIDFYDVEKIINPEIEKLDHAFMVKDDDELTLEFLEKLNSKKVVVNFFATVENICKYISKKIIKSSLPSNIKNVSVRVYETAEDYAEVFVAAN

SEQ ID NO: 18019 - protein, 134 aa, Unknown
  misc_feature (1)..(134): tr|A0A2H6EJP0|A0A2H6EJP0_9BACT 6-carboxy-5,6,7,8-tetrah ydropterin synthase OS=bacterium BMS3Abin04 OX=2005712 GN=queD_1 PE=3 SV=1
MIYVTRREVFSASHRLYNERWSDEKNEEVFGKCNNLYGHGHNYVLEITVAGNIDPETGYVIDTKLLKWIIRKNIIEKVDHKHLNLDVDFMKGIIPTAENIAVAFWNQIINKIPSGKLYSIKLYETENNYFEYKG

SEQ ID NO: 18020 - protein, 137 aa, Unknown
  misc_feature (1)..(137): tr|A0A2H6EQR6|A0A2H6EQR6_9BACT 6-carboxy-5,6,7,8-tetrah ydropterin synthase OS=bacterium BMS3Abin04 OX=2005712 GN=queD_2 PE=4 SV=1
MKIAKEFKWEMGHRLPFHKGKCKNLHGHSYKLIVEFEGTLDENGMVLDYYDVKEIVGPIVDNLDHSVMVFNEDKELIEVLEKLNSRYVEVPFQTTAENMCGYFLDQIQSGNLPGNISAIRVWVYETENTYATDLFVL

SEQ ID NO: 18021 - protein, 135 aa, Unknown
  misc_feature (1)..(135): tr|A0A2H6EWA2|A0A2H6EWA2_9BACT 6-carboxy-5,6,7,8-tetrah ydropterin synthase OS=bacterium BMS3Abin05 OX=2005713 GN=queD PE=3 SV=1
MTYVTKRVSFSAAHRLYNPNFSDEKNEDIFGLCNNKMGHGHNYDLEVTVRGNVQKETGMVIDLNKLKKILIREIVEKVDHKHLNYDVPFLKGVIPTAENLAVKFWDILKDKIDEGELYEIKLYESRNNFVIYRAE

SEQ ID NO: 18022 - protein, 122 aa, Unknown
  misc_feature (1)..(122): tr|A0A2H6F7C4|A0A2H6F7C4_9BACT 6-carboxy-5,6,7,8-tetrah ydropterin synthase OS=bacterium BMS3Abin06 OX=2005714 GN=queD PE=3 SV=1
MFDLTVELQFSAAHQLRGYKGKCEELHGHNWRIQITVSSDKLNDTGMVIDFHELKTIANEVISSLDHSFLNKVFPFTEINPSSENIAKWIYESIRKKISKKNCNISSVTVWENETSSATYYE

SEQ ID NO: 18023 - protein, 123 aa, Unknown
  misc_feature (1)..(123): tr|A0A2H6FD01|A0A2H6FD01_9BACT 6-carboxy-5,6,7,8-tetrah ydropterin synthase OS=bacterium BMS3Abin07 OX=2005715 GN=queD PE=3 SV=1
MYDLMIETRFSSAHQLRGYKGKCEALHGHNWKVQVYVTAEKLNEIDLAMDFHEIKTYAEEVVNQLDHGFLNEIFPFTEINPSSENIAKWIYDSLKKKIESENVQLSAVTIWESGTASATYYED

SEQ ID NO: 18024 - protein, 123 aa, Unknown
  misc_feature (1)..(123): tr|A0A2H6FKI4|A0A2H6FKI4_9BACT 6-carboxy-5,6,7,8-tetrah ydropterin synthase OS=bacterium BMS3Abin08 OX=2005716 GN=queD PE=3 SV=1
MYELTIESNFSSAHQLRGYKGKCEGLHGHNWKVQVHVVADRLNEIDLVVDFNELKKHTGEVLEQLDHGFLNEIFPFTEINPSSENIARWIFESLKKKVNSDYVKLSAVTVWESDAASATYYED

SEQ ID NO: 18025 - protein, 122 aa, Unknown
  misc_feature (1)..(122): tr|A0A2H6FX15|A0A2H6FX15_9BACT 6-carboxy-5,6,7,8-tetrah ydropterin synthase OS=bacterium BMS3Abin10 OX=2005718 GN=queD PE=3 SV=1
MYELMIETQFSAAHQLREYKGKCENMHGHNWKVQIVVAAEKLNEIGLGMDFHDLKRISNEVVSTLDHAVLNEIFPFTEINPSSENIAKWLYDSIGKKTEGGNITMSSVTVWESETASATYYE

SEQ ID NO: 18026 - protein, 123 aa, Unknown
  misc_feature (1)..(123): tr|A0A2H6FZA6|A0A2H6FZA6_9BACT 6-carboxy-5,6,7,8-tetrah ydropterin synthase OS=bacterium BMS3Abin11 OX=2005719 GN=queD PE=3 SV=1
MEIYKKFSIEAAHRLIDLPPEHKCSRLHGHSFEVELRVNGDVDEEYGWVQDFAEIKQVFKPIYEQLDHHYLNEVDGLGNPTSENLAKWIWQKLKPDLPLLSTVIVRETCTAGCIYKGPDSHET

SEQ ID NO: 18027 - protein, 123 aa, Unknown
  misc_feature (1)..(123): tr|A0A2H6GM11|A0A2H6GM11_9BACT 6-carboxy-5,6,7,8-tetrah ydropterin synthase OS=bacterium BMS3Abin14 OX=2005722 GN=queD PE=3 SV=1
MKYLLAVRDTFSAAHRLAGSGGRCENLHGHNFAVEIKVEGARLDGAGMVVDFTVLKNILRTILIDLDHTDLNSVPAFSGQSPSSERIAGYVFERAEELLSDLDVGVASVTVSESRNASATYLP

SEQ ID NO: 18028 - protein, 130 aa, Unknown
  misc_feature (1)..(130): tr|A0A2H6HU38|A0A2H6HU38_9BACT 6-carboxy-5,6,7,8-tetrah ydropterin synthase OS=bacterium BMS3Bbin04 OX=2005727 GN=queD PE=4 SV=1
MYSISIRERFTSFLRLENSADDEGYDLYHNYLMEVVVSGEELDERGYLHNMDDLREELGELVVKWDGALLNDFDEFEDENPTLEIVARTACQLLAETLFNERLSEMQVTVWENELDPQLGPGASYRMSLT

SEQ ID NO: 18029 - protein, 121 aa, Unknown
  misc_feature (1)..(121): tr|A0A2H6IPS6|A0A2H6IPS6_9BACT 6-carboxy-5,6,7,8-tetrah ydropterin synthase OS=bacterium BMS3Bbin09 OX=2005732 GN=queD PE=3 SV=1
MYDLSIETQFAAAHQLRGYKGKCENMHGHNWRVQVSISSEKLNDIGIVMDFHDLKKITKDLLSLLDHSNLNVVFPFTEINPSSENIAKWIFDSLKKRLEDSVKVNSITVWESENSSATYYE

SEQ ID NO: 18030 - protein, 122 aa, Unknown
  misc_feature (1)..(122): tr|A0A2H6IXI1|A0A2H6IXI1_9BACT 6-carboxy-5,6,7,8-tetrah ydropterin synthase OS=bacterium BMS3Bbin10 OX=2005733 GN=queD PE=3 SV=1
MRIYKEFTFEAAHFLPSAPEGHPNARIHGHSFRVRVSIEGEPDSETGLIMHLDDLKGATEELRTTLDHNFLNKIEGLEVPTLELISKWLWSRLHNRVPGLVEIAISRDTCNEGCVYTGPGPD

SEQ ID NO: 18031 - protein, 127 aa, Unknown
  misc_feature (1)..(127): tr|A0A2H6JBJ6|A0A2H6JBJ6_9BACT 6-carboxy-5,6,7,8-tetrah ydropterin synthase OS=bacterium BMS3Bbin12 OX=2005735 GN=queD PE=3 SV=1
MAAHYTLRILTDFASAHTLPGYAGVCARMHGHNWKVEVEVEARALDEVGMGVDFKVIKGAARELAGRLDHRYLNEIEPFDRINPTAENLAAWFYRGLAERLDNERVRVRAVTLWETDRACVRYTEES

SEQ ID NO: 18032 - protein, 123 aa, Unknown
  misc_feature (1)..(123): tr|A0A2H6JP40|A0A2H6JP40_9BACT 6-carboxy-5,6,7,8-tetrah ydropterin synthase OS=bacterium BMS3Bbin14 OX=2005737 GN=queD PE=3 SV=1
MIDIFIKTHFSAGHHLRHYPGNCEKPHGHNWKVKVQVRATRLDEMGLGLDFRLLKEQVKLVIDNLDHLDLNEHPAFLDRNPSSEHIAMYIFAELQEKLKTDRYQLFSVTVRETDSSGVIYYGE

SEQ ID NO: 18033 - protein, 135 aa, Unknown
  misc_feature (1)..(135): tr|A0A101VQU2|A0A101VQU2_9BACT 6-carboxy-5,6,7,8-tetrah ydropterin synthase OS=bacterium BRH_c32 OX=1734400 GN= APF79_11000 PE=3 SV=1
MIYVTRREVFSSSHRLFNPKYNEEENNLIFGKCNNFNGHGHNYILEVVVAGDINPDTGYVIDLKMLKTIIIENVIKKVDHKNLNMDVDFLSGIIPTAENIAVGIWDQLKDKIPSGNLYAIKLYETENNYVEYKGE

SEQ ID NO: 18034 - protein, 140 aa, Unknown
  misc_feature (1)..(140): tr|A0A117SCD8|A0A117SCD8_9BACT 6-carboxy-5,6,7,8-tetrah ydropterin synthase OS=bacterium BRH_c32 OX=1734400 GN= APF79_00515 PE=3 SV=1
MRIAKEFTWEMGHRLPFHEGKCRNLHGHSYKMMVELDGKPDCNGMVLDYYDVKSIINPLVEELDHACLVFSGDIELQELLKKIDSRMVVVDFHSTAENLVGYFLKKINEVGLPNNIEKVTVKVLETENTYAEDTIELISH

SEQ ID NO: 18035 - protein, 117 aa, Unknown
  misc_feature (1)..(117): tr|A0A2M7YT63|A0A2M7YT63_9BACT 6-carboxy-5,6,7,8-tetrah ydropterin synthase OS=bacterium CG_4_9_14_3_um_filter_ 65_15 OX=1975567 GN=queD PE=3 SV=1
MRITKRFRFDAAHWLPMVPETHKCRRLHGHTYEVELALEGNLDRKMGWVEDYGAVSAAFKPLLNELDHNCLNELSGLKNPTAENLAVWVFERLAPALPTLTEVTVRETASTSAVYRP

SEQ ID NO: 18036 - protein, 134 aa, Unknown
  misc_feature (1)..(134): tr|A0A1J5CUR6|A0A1J5CUR6_9BACT 6-carboxy-5,6,7,8-tetrah ydropterin synthase OS=bacterium CG2_30_54_10 OX=180540 3 GN=AUK22_05930 PE=3 SV=1
MYKVSVDKSISAAHQLPRYPGKCSNLHGHNWRIRVTVVASSLDDQGMVVDFSLLKKALGEVCELLDHKMLNEVPILNGNHPTAENLSKLFYDEVSRRLPNARVRLDRVEVWETPDNRAEYSPDGDGQSAGEEKA

SEQ ID NO: 18037 - protein, 145 aa, Unknown
  misc_feature (1)..(145): tr|A0A3A9AWM5|A0A3A9AWM5_9BACT 6-carboxy-5,6,7,8-tetrah ydropterin synthase OS=bacterium D16-34 OX=2320120 GN=D 7W09_07195 PE=3 SV=1
MYGLRTESDFDAAHFLTDYHGKCENLHGHRWRVVAYLAQDELQQEGTMKDMVVDFAEFKHALRQLTEQLDHSFVIEEGSLQQKTLDCLYEEGFTLSIMPFRTTAENLAKYFFDQLADQGFPVSQVDVYETPNNCAIYYGEGSRRS

SEQ ID NO: 18038 - protein, 141 aa, Unknown
  misc_feature (1)..(141): tr|A0A3A8WD11|A0A3A8WD11_9BACT 6-carboxy-5,6,7,8-tetrah ydropterin synthase OS=bacterium D16-59 OX=2320098 GN=q ueD PE=3 SV=1
MYQLTIEQSFDSAHFLAGYTGKCGNLHGHRWRVLLQVESEELRTDMQQRGMCVDFSTLKEELKEMVERYDHMLLVEKGSLREKTMEALAEEGFSVVELPFRPTAENFAKHFYDLLKGKGYDVAMVQVYETPNNCASYREGP

SEQ ID NO: 18039 - protein, 141 aa, Unknown
  misc_feature (1)..(141): tr|A0A3A9BD82|A0A3A9BD82_9BACT 6-carboxy-5,6,7,8-tetrah ydropterin synthase OS=bacterium D16-63 OX=2320119 GN=D 7X10_02150 PE=3 SV=1
MYGLKTESSFDASHFLTDYHGKCENLHGHRWRVVAYLEVEQLQAEGTCKDMVVDFGDFKAALRRLTDQLDHRFLVEEGSLAPDTLACLEREGFKLLAMPFRTTAENLAKWLFDSLADQGLPVAQVDVYETPNNCAFYRKGA

SEQ ID NO: 18040 - protein, 137 aa, Unknown
  misc_feature (1)..(137): tr|A0A497U5S5|A0A497U5S5_9BACT 6-pyruvoyl tetrahydrobio pterin synthase OS=bacterium endosymbiont of Escarpia l aminata OX=1221601 GN=DJ030_07915 PE=4 SV=1
MYTVTKEIHFCYGHRLLNHKGKCRYLHGHNATAVIRLESSELDAMGMVCDFSDIGGFAKQWIDSELDHNMLMHQDDPILPTLQAAGERVYVMKNNPTAENIARLIFDQVTKGGFPVVEVAIYETDSALASYRRPSGQ

SEQ ID NO: 18041 - protein, 137 aa, Unknown
  misc_feature (1)..(137): tr|A0A497TYP5|A0A497TYP5_9BACT 6-pyruvoyl tetrahydrobio pterin synthase OS=bacterium endosymbiont of Escarpia l aminata OX=1221601 GN=DJ031_07905 PE=4 SV=1
MYTVTKEIHFCYGHRLLNHKGKCRYLHGHNATAVIRLESSELDAMGMVCDFSDIGGFAKQWIDSELDHNMLMHLDDPILPTLQAAGERVYVMKNNPTAENIARLIFDQVTKGGFPVVEVAIYETDSALASYRRPSGQ

SEQ ID NO: 18042 - protein, 112 aa, Unknown
  misc_feature (1)..(112): tr|A0A132HTJ0|A0A132HTJ0_9BACT 6-carboxy-5,6,7,8-tetrah ydropterin synthase OS=bacterium F083 OX=1768114 GN=F08 3_1757 PE=3 SV=1
MYFIKKTFTISAAHQLTLPYESKCRSLHGHNWTVTVYCKAKELNNDGMVVDFSHIKHAVQDRLDHRFLNDVLPSNPTAENLARWICDQIEQCYRVDVAENDESLAIYEKDDC

SEQ ID NO: 18043 - protein, 139 aa, Unknown
  misc_feature (1)..(139): tr|A0A2H5VPH8|A0A2H5VPH8_9BACT 6-carboxy-5,6,7,8-tetrah ydropterin synthase OS=bacterium HR08 OX=2035403 GN=que D PE=3 SV=1
MFRATKEIFFCYGHRLLNYAGKCRNLHGHNARAEVELAAERLDDRHMVVDFDEIKAVVKSWIDEHIDHKMVLCKDDPLLPILREHGVACFVLDTNPTAEALAKLIFDVAAERGFPVARVTVWETESSFATYEPSREERS

SEQ ID NO: 18044 - protein, 153 aa, Unknown
  misc_feature (1)..(153): tr|A0A2H5VUK4|A0A2H5VUK4_9BACT Uncharacterized protein OS=bacterium HR09 OX=2035404 GN=HRbin09_01613 PE=4 SV=1
MGSFRVAKQFTFDAGHRLVSHPELCHHLHGHTYRVEVVLEAPSLDPNAMVCDYKALSLLVRSVLAPLDHAMILWREDPLRGVLEQAGERVVVLDAEPSAEVLAQHLFSEIKKVLAQAAAEPQRVAPYRWRPEIRLVSVRLWETPTTWAEYSEA

SEQ ID NO: 18045 - protein, 139 aa, Unknown
  misc_feature (1)..(139): tr|A0A2H5W3K8|A0A2H5W3K8_9BACT 6-carboxy-5,6,7,8-tetrah ydropterin synthase OS=bacterium HR10 OX=2035405 GN=que D PE=3 SV=1
MFRATKEIFFCYGHRLLNYAGKCRNLHGHNARAEVELAAERLDDRHMVVDFDEIKAVVKSWIDEHIDHKMVLCKDDPLLPILREHGVACFVLDTNPTAEALAKLIFDVAAERGFPVARVTVWETESSFATYEPSRGERS

SEQ ID NO: 18046 - protein, 164 aa, Unknown
  misc_feature (1)..(164): tr|A0A2H5W9B0|A0A2H5W9B0_9BACT 6-carboxy-5,6,7,8-tetrah ydropterin synthase OS=bacterium HR11 OX=2035406 GN=que D_2 PE=4 SV=1
MERFRITIAKEYLGFCAAHFITYEGHLCEALHGHNYHVRITLEGPIDENYYVMDFIRVKKMMKGICDRLDHRMLLPMHNPHLVLETTEDRVSVRYKHRLFVFPREDVVLLPIPNTTAEMLARYLCEQALAELARMRAPSLQMIEVEVEEAPGQSAIYRRDLAAG

SEQ ID NO: 18047 - protein, 115 aa, Unknown
  misc_feature (1)..(115): tr|A0A2H5W740|A0A2H5W740_9BACT 6-carboxy-5,6,7,8-tetrah ydropterin synthase OS=bacterium HR11 OX=2035406 GN=que D_1 PE=3 SV=1
MRLGIIEYIDSAHFLPGHPKCGRLHGHTYRVELVIQGRPDGGMIIDFGDLKKKLREVLRLYDHRSWNEVLEYPSVENICLRLAQDLTQVLDFPFTLRVWEGHGQWAELNAPDDLS

SEQ ID NO: 18048 - protein, 164 aa, Unknown
  misc_feature (1)..(164): tr|A0A2H5WHL6|A0A2H5WHL6_9BACT 6-carboxy-5,6,7,8-tetrah ydropterin synthase OS=bacterium HR13 OX=2035408 GN=que D_1 PE=4 SV=1
MKWKITKVFSFEAGHRVWKQNLTHGRGAELTGRDVPLQNKCVNLHGHSYTLEVTLGSDTLSEQDMVMDFYHVKNALKDLIDTMDHSFIIDVNDPMYEELKSVAEKYGAFKIFSVDFCPTAEALARYFYDFLTQKLEQAGLLKDVKVVSVVLWETKTSKAEYRPE

SEQ ID NO: 18049 - protein, 114 aa, Unknown
  misc_feature (1)..(114): tr|A0A2H5WIY8|A0A2H5WIY8_9BACT 6-carboxy-5,6,7,8-tetrah ydropterin synthase OS=bacterium HR13 OX=2035408 GN=que D_2 PE=3 SV=1
MPWTVIVKREFQAAHFLTDYHGAPEPLHGHTWKVEVYIRADSLDAGGMGFDFVEIDRFLKEILPDYTLLNDIFDFSPSAENVARWLYHKVKEKYPTVQKVVIWETQHCGAEYWE

SEQ ID NO: 18050 - protein, 268 aa, Unknown
  misc_feature (1)..(268): tr|A0A2H5WLX6|A0A2H5WLX6_9BACT 6-carboxy-5,6,7,8-tetrah ydropterin synthase OS=bacterium HR14 OX=2035409 GN=que D PE=4 SV=1
MFAFEASHFYRLPHLSESENAQIFGKAARHHGHNYRVWVEYAASAGAPVQREQIAQQVQNLINSELDHRCLNLEHPYFQQHLPTTENLAIYLWHTLSQQLSVPIEKVEVFESDMLASAYRGESHQLPSGRDAYTVELTRAYTFSAAHRLYQSSLSEEENRALFGKCANPYGHGHDYRLEITVRGQVDPITGMVISLADLDALVQKEVLEVLDHRYLNEEVPPFDQIPPTSENIVMFIVERLRPHFQERVQLSRVRLHETPRSYFEWSA

SEQ ID NO: 18051 - protein, 279 aa, Unknown
  misc_feature (1)..(279): tr|A0A2H5WTF3|A0A2H5WTF3_9BACT 6-carboxy-5,6,7,8-tetrah ydropterin synthase OS=bacterium HR15 OX=2035410 GN=que D_1 PE=4 SV=1
MRWRIAQWFAFEASHFYRLPHLSEAENEQLFGKAARHHGHNYRVCACLRLQPNPQSHFCPKELEQRLRERIDPQFDHRCLNLEHPYFRQHLPTTENIAVYLWDDLQAALPCELDEVEVYESDWLWASYRGERQLHSHGEEVPMVYLTRAYHFSASHRLYHPELSEDENRALFGKCSHPYGHGHDYRLEVTVRGEPDPITGMIISLGELDALVQREVLEPLDHRFLNEEVAEFQQIIPTTEHLVQFIYQRLSPHLSGRAHLYRVRLYETPRSYFEVISGE

SEQ ID NO: 18052 - protein, 140 aa, Unknown
  misc_feature (1)..(140): tr|A0A2H5WZ09|A0A2H5WZ09_9BACT 6-carboxy-5,6,7,8-tetrah ydropterin synthase OS=bacterium HR15 OX=2035410 GN=que D_2 PE=3 SV=1
MVVEEGYMSYRIGKRFTFCASHQLEELPEGHPCRRLHGHTYQVEVVLAADKLDEAGMVVDFHQVKQWIEPLIQSRFDHRHLNDWLPQPTAERIAQVIYESLQAQLPAHIHCVEVRVWESDTSWASYVADAGIIPPKEVNR

SEQ ID NO: 18053 - protein, 116 aa, Unknown
  misc_feature (1)..(116): tr|A0A2H5XA46|A0A2H5XA46_9BACT 6-carboxy-5,6,7,8-tetrah ydropterin synthase OS=bacterium HR17 OX=2035412 GN=que D PE=3 SV=1
MSRVKLSRTEFIDAGHFIPGHPKCGRPHGHTYRVDVTIERELESDMLLEFGEFKRRVWDVLARYDHVMLNEVMDAVPTVENIAIALHRELKRVLPGFKVTVRVFEGVRKWAEYSDD

SEQ ID NO: 18054 - protein, 156 aa, Unknown
  misc_feature (1)..(156): tr|A0A2H5XGK8|A0A2H5XGK8_9BACT 6-carboxy-5,6,7,8-tetrah ydropterin synthase OS=bacterium HR18 OX=2035413 GN=que D PE=4 SV=1
MKVAKRFRFEAAHRLPWHPGACRHLHGHSYRLVVGLEGDPDARGILVDFQDLKRLVQPLIDTWDHATLVASDDTALQEALDALGSRYVVLPFDSTAENLCTYVADYLIREAGDWLRARGVWRLWVRLAETETSFAETERALLRDVRPEPAAHAEAR

SEQ ID NO: 18055 - protein, 149 aa, Unknown
  misc_feature (1)..(149): tr|A0A2H5XW29|A0A2H5XW29_9BACT 6-carboxy-5,6,7,8-tetrah ydropterin synthase OS=bacterium HR20 OX=2035415 GN=que D_1 PE=3 SV=1
MNTVRIAKEFRWEMGHRLPLHSGQCSNIHGHSYRLRITLDGIPDASGMVMDFYELATLAQPIVDMLDHAFLCSSDDETMQRFFRDHPEFKVVTVPFPTTVENICRWIAEHLAHQLRRYPNITQLRVRLHETATAFAECEVPLSTTPTAP

SEQ ID NO: 18056 - protein, 151 aa, Unknown
  misc_feature (1)..(151): tr|A0A2H5XXU6|A0A2H5XXU6_9BACT 6-carboxy-5,6,7,8-tetrah ydropterin synthase OS=bacterium HR20 OX=2035415 GN=que D_2 PE=4 SV=1
MVYITRRATFSASHRLHNPLLSDADNERIYDKCNNPRGHGHNYVLEVTVRGVPDPTTGYVLDLKLLRDIIEEHIIAKVDHRHLNEDVDFLRGIIPTAENLAWAFWRILEPHIPAGTLHSIKVYESENNFVEYRGEPMEVPRYCVEHIEHVQ

SEQ ID NO: 18057 - protein, 156 aa, Unknown
  misc_feature (1)..(156): tr|A0A2H5Y1G1|A0A2H5Y1G1_9BACT 6-carboxy-5,6,7,8-tetrah ydropterin synthase OS=bacterium HR21 OX=2035416 GN=que D_2 PE=4 SV=1
MSSLRIAKEFRWEMAHRLPFHTGGCQNIHGHSYRAVITLEGEPDERGMILDYLELARIVEPLLAELDHAFLCSADDTVMLDFFGQHPEFKVVIVPFPTTAENLARYLAERLAESLRCFPQLRRFWVRVQETERTSAEVACELSPVDIRPSRYVSAP

SEQ ID NO: 18058 - protein, 155 aa, Unknown
  misc_feature (1)..(155): tr|A0A2H5XZ16|A0A2H5XZ16_9BACT 6-carboxy-5,6,7,8-tetrah ydropterin synthase OS=bacterium HR21 OX=2035416 GN=que D_1 PE=4 SV=1
MVYVTRRVSFSAAHRLYNPQWSEERNQAVFDKCANPHGHGHNYVVEVTVAGIPDPETGYVVDLKLLARVLEEEILSKVDHKHLNYDVDFLRGVNPTVENLAIAFWQILEGKLPAGKLYAVRVYESENNYAEYRGEPVELTGNGVMRHGQLREERP

SEQ ID NO: 18059 - protein, 162 aa, Unknown
  misc_feature (1)..(162): tr|A0A2H5Y999|A0A2H5Y999_9BACT Uncharacterized protein OS=bacterium HR22 OX=2035417 GN=HRbin22_02263 PE=4 SV=1
MDRVRVSQDHLVFCAAHFMIFPRGSEPLHGHNYRVAVSLEGPLQDDVVMDFVALKRLVKALVDELDHRVLLPAEHPRLRLAIREDAVEATIDSRRYLFPLDDVRILPVPNTSAEWLARYLAAQLRARLPSNLRLHALEVEVEESFGQSAVYREVVDAAAATP

SEQ ID NO: 18060 - protein, 172 aa, Unknown
  misc_feature (1)..(172): tr|A0A2H5YIR7|A0A2H5YIR7_9BACT Uncharacterized protein OS=bacterium HR24 OX=2035419 GN=HRbin24_01393 PE=4 SV=1
MLHNGHSANQARYRVRVDAPPLRFAAAHFATFGGDAEPLHGHNYQVTIEAEGDLTADAWVIDFGELRALGTALCRELDHRFLLPEANRHIAVAWDEGSVEVRFGDRRYVFPAVDVARLPVENSTAECLARYLAARLAKELRGRGHRHLRSLTVGVEEAPGQSGWCTIALTTE

SEQ ID NO: 18061 - protein, 165 aa, Unknown
  misc_feature (1)..(165): tr|A0A2H5YLN0|A0A2H5YLN0_9BACT 6-carboxy-5,6,7,8-tetrah ydropterin synthase OS=bacterium HR25 OX=2035420 GN=que D PE=4 SV=1
MRYRVTVERNTLRFAAAHFTTFGDQCEPLHGHNYDVFVELEGELTEDAWVIDFTELKALVAALCRELDHRFLLPLQSRSLLIREDEEGYEVSFQGRRYLVPREDVAPLPIDNTTAERLAEWLAGRILEGLRQRGARNLHLLTVGVEEAPGQTGWCIIPLTELASP

SEQ ID NO: 18062 - protein, 162 aa, Unknown
  misc_feature (1)..(162): tr|A0A2H5ZAM9|A0A2H5ZAM9_9BACT Uncharacterized protein OS=bacterium HR29 OX=2035424 GN=HRbin29_00403 PE=4 SV=1
MDGTFRVSVERNRLRFAAAHMATFADDLEPLHGHNYDVFVDVEGELTAESWVWDFGELKRIAKEIADELDHKFLLQLRSPHLDIVEDGSGWEIRYRDRRYRFPRADVAPLPIDNTTAERLAEWFAARLLRALEERGASNVRRLTVGIEEMPGQAGWYTVSVR

SEQ ID NO: 18063 - protein, 162 aa, Unknown
  misc_feature (1)..(162): tr|A0A2H5ZN47|A0A2H5ZN47_9BACT Uncharacterized protein OS=bacterium HR30 OX=2035425 GN=HRbin30_02479 PE=4 SV=1
MPEAKKFRVYVSKDYLKFNAAHFIAYKGFREALHGHNYRVSVEIEGELGEQGYVLDFSIVKDVTRRVCDRLDERTLLPAQSDCLSIETRGAQVLVRFEDDEFCFPAKDVLLLPIVHTSAEELARYLAGEIRRELARDGIMIQGTIEVGVAETPGQVAYYRDP

SEQ ID NO: 18064 - protein, 127 aa, Unknown
  misc_feature (1)..(127): tr|A0A2H6A1Z7|A0A2H6A1Z7_9BACT 6-carboxy-5,6,7,8-tetrah ydropterin synthase OS=bacterium HR33 OX=2035428 GN=que D PE=3 SV=1
MGTYLVSAEASFSAAHTLAGVDRCDRMHGHDWRIRLTVEVPEDKVGATGMAVDFRTVEALAAEAVADFDHRLLNELEAFKGVSPTAERVALEVSRRVRDRLEAALPEARLYEVEVWETPTYRVVYRP

SEQ ID NO: 18065 - protein, 137 aa, Unknown
  misc_feature (1)..(137): tr|A0A2H6AG87|A0A2H6AG87_9BACT Uncharacterized protein OS=bacterium HR36 OX=2035431 GN=HRbin36_02100 PE=4 SV=1
MYRVSREIYFCYGHRLLNYEGKCRFLHGHNGKAIITLESPDLDARGMVMDFTQIKRVIQGWIDANLDHKMILHRDDPIIPHLRQLGEPFYVLDVNPTAENIARLIYDYARKEGFPIVSVSLWETESCYATYASEQHQ

SEQ ID NO: 18066 - protein, 163 aa, Unknown
  misc_feature (1)..(163): tr|A0A2H6AL14|A0A2H6AL14_9BACT 6-carboxy-5,6,7,8-tetrah ydropterin synthase OS=bacterium HR37 OX=2035432 GN=que D_2 PE=4 SV=1
MKLVQGITYDKIIKFSLELVSDMKFKTLLTKRVEFCASHRYWNPNWSEQKNREVFGKCVSPYGHGHNYILEVTIEGEVDPDTGMIINLYDLKPIINEVLRDFDHKFLNEDNPNFKELIPTTENIARVLWDAIDGKLKETGRECRLYRIRLYETPDLYVDYWRE

SEQ ID NO: 18067 - protein, 139 aa, Unknown
  misc_feature (1)..(139): tr|A0A2H6AL27|A0A2H6AL27_9BACT 6-carboxy-5,6,7,8-tetrah ydropterin synthase OS=bacterium HR37 OX=2035432 GN=que D_1 PE=4 SV=1
MEKEVCTLTRVYRFSAAHRLHSPRYSDEENRRIFGKCNNPKGHGHDYYIEVTVTGNIDSETGMIVSVDYLDRVVKEIIDELDHKRLDIEVPYFMEFQPSGENIVKYLWLQLEQRIKGVKLFHLKLWETRDNYFEFFKEE

SEQ ID NO: 18068 - protein, 146 aa, Unknown
  misc_feature (1)..(146): tr|A0A2H6B411|A0A2H6B411_9BACT Uncharacterized protein OS=bacterium HR40 OX=2035435 GN=HRbin40_02420 PE=4 SV=1
MSAVRRPAAAEGTYWVRVRDRVMVAHSLTGELFGPAQGRHGATFVVEVELRGNRLLPEGVLVDIGRARELLATILAGLHLRDLDEHPEFRGRNSTSEVVARWIFDRLAAAIAAGHLGPGGEAITEVAVEIRESDVARAGFCASLRD

SEQ ID NO: 18069 - protein, 121 aa, Unknown
  misc_feature (1)..(121): tr|A0A3L7ZZA0|A0A3L7ZZA0_9BACT 6-carboxy-5,6,7,8-tetrah ydropterin synthase OS=bacterium J10(2018) OX=2320122 G N=D7V95_06380 PE=3 SV=1
MYYVIKRLEISASHSLSLSYESKCSGLHGHNWIITVYCKARELNSDGMVCDFSHIKESIHGYLDHGNLNELLPFNPTAENIARWIVEHTPQCFMARVKESEGNEAVYVLDKYDSMAVECIK

SEQ ID NO: 18070 - protein, 135 aa, Unknown
  misc_feature (1)..(135): tr|A0A202DZB2|A0A202DZB2_9BACT 6-carboxy-5,6,7,8-tetrah ydropterin synthase OS=bacterium K02(2017) OX=1932696 G N=BVY03_04120 PE=3 SV=1
MPKTTLICSFDICAAHQLYNKNWDAQKNIKIFGKCANIHGHQYKLEAFLSGSIDQDTGMLINGYEVERIIGTFLKEKFDHKFLNEDVEFFKTHQPTAEWIAAWVYNQIKDMFPENINLDKVRLYETPELAVEYVD

SEQ ID NO: 18071 - protein, 120 aa, Unknown
  misc_feature (1)..(120): tr|A0A4S1HV12|A0A4S1HV12_9BACT 6-carboxy-5,6,7,8-tetrah ydropterin synthase OS=bacterium M00.F.Ca.ET.141.01.1.1 OX=2563898 GN=queD PE=3 SV=1
MEIFKVFMLEAAHRLPNVPPGHKCARLHGHSFRVELKVEGEPGAQTGWIMDFGDVKAAFQPIYDRLDHHYLNDIPGLENPTSENLAVWIWNELKPSLPALSEITVHETCTSGCRYRGPTP

SEQ ID NO: 18072 - protein, 118 aa, Unknown
  misc_feature (1)..(118): tr|A0A4S1HSI1|A0A4S1HSI1_9BACT 6-carboxy-5,6,7,8-tetrah ydropterin synthase OS=bacterium M00.F.Ca.ET.141.01.1.1 OX=2563898 GN=queD PE=3 SV=1
MFHITKEFHFSASHQLTSLPPNHQCARLHGHNYVVVVELSAKELDAHGFVRDYHDLAPLKRYIDESFDHRHLNDVLGHEKVTAECLARHFYEWCKARLPQTAAVRVSETPKTWAEYRP

SEQ ID NO: 18073 - protein, 118 aa, Unknown
  misc_feature (1)..(118): tr|A0A4V3NTK8|A0A4V3NTK8_9BACT 6-carboxy-5,6,7,8-tetrah ydropterin synthase OS=bacterium M00.F.Ca.ET.146.01.1.1 OX=2563899 GN=queD PE=3 SV=1
MFHISKEFHFSASHQLTSLPSNHQCARLHGHNYVVVVELSAKELDAHGFVRDYHDLAPLKRYIDESFDHRHLNDVLGHEKVTAECLARHFYEWCKARLPQTAAVRVSETPKTWAEYRP

SEQ ID NO: 18074 - protein, 118 aa, Unknown
  misc_feature (1)..(118): tr|A0A4S1AQV6|A0A4S1AQV6_9BACT 6-carboxy-5,6,7,8-tetrah ydropterin synthase OS=bacterium M00.F.Ca.ET.146.01.1.1 OX=2563899 GN=queD PE=3 SV=1
MFRITKEFHFSASHQLTSLPSDHQCARLHGHNYIVVVELSGGELDEHGFVRDYQDLAALKHYIDGTFDHRHLNDVLGHDRVTAECLARHFYDWCKVRLPQTSAVRVSETPKTWAEYRP

SEQ ID NO: 18075 - protein, 118 aa, Unknown; identical to SEQ ID NO: 18072
  misc_feature (1)..(118): tr|A0A4S1AZ64|A0A4S1AZ64_9BACT 6-carboxy-5,6,7,8-tetrah ydropterin synthase OS=bacterium M00.F.Ca.ET.152.01.1.1 OX=2563900 GN=queD PE=3 SV=1

SEQ ID NO: 18076 - protein, 147 aa, Unknown
  misc_feature (1)..(147): tr|A0A4S0YJM1|A0A4S0YJM1_9BACT 6-carboxy-5,6,7,8-tetrah ydropterin synthase OS=bacterium M00.F.Ca.ET.155.01.1.1 OX=2563901 GN=queD PE=3 SV=1
MTITRKLEFDAGHRIPDHRSQCRNLHGHRYVLEITLQGDLVDTEGAPDRGMVMDFADVKSLAVQHLVDKWDHAFLVYEGDSQVRGFLETMAGHKTVVLDRIPTVENLAAVAFEVLANVYDAHYGVNLRLQKVRLYETPNCWADVVRD

SEQ ID NO: 18077 - protein, 118 aa, Unknown
  misc_feature (1)..(118): tr|A0A4S0Z934|A0A4S0Z934_9BACT 6-carboxy-5,6,7,8-tetrah ydropterin synthase OS=bacterium M00.F.Ca.ET.156.01.1.1 OX=2563902 GN=queD PE=3 SV=1
MFHISKEFHFSASHQLTSLPPNHQCARLHGHNYVVVVQLSAKELDAHGFVRDYHDLAPLKRYIDESFDHRHLNDVLGHEKVTAECLARHFYEWCKARLPQTAAVRVSETPKTWAEYRP

SEQ ID NO: 18078 - protein, 118 aa, Unknown; identical to SEQ ID NO: 18074
  misc_feature (1)..(118): tr|A0A4S0ZB33|A0A4S0ZB33_9BACT 6-carboxy-5,6,7,8-tetrah ydropterin synthase OS=bacterium M00.F.Ca.ET.156.01.1.1 OX=2563902 GN=queD PE=3 SV=1

SEQ ID NO: 18079 - protein, 118 aa, Unknown; identical to SEQ ID NO: 18072
  misc_feature (1)..(118): tr|A0A4S0WKK0|A0A4S0WKK0_9BACT 6-carboxy-5,6,7,8-tetrah ydropterin synthase OS=bacterium M00.F.Ca.ET.157.01.1.1 OX=2563903 GN=queD PE=3 SV=1

SEQ ID NO: 18080 - protein, 118 aa, Unknown; identical to SEQ ID NO: 18074
  misc_feature (1)..(118): tr|A0A4S0WJ30|A0A4S0WJ30_9BACT 6-carboxy-5,6,7,8-tetrah ydropterin synthase OS=bacterium M00.F.Ca.ET.157.01.1.1 OX=2563903 GN=queD PE=3 SV=1

SEQ ID NO: 18081 - protein, 118 aa, Unknown; identical to SEQ ID NO: 18072
  misc_feature (1)..(118): tr|A0A4S0VK15|A0A4S0VK15_9BACT 6-carboxy-5,6,7,8-tetrah ydropterin synthase OS=bacterium M00.F.Ca.ET.159.01.1.1 OX=2563904 GN=queD PE=3 SV=1

SEQ ID NO: 18082 - protein, 118 aa, Unknown; identical to SEQ ID NO: 18074
  misc_feature (1)..(118): tr|A0A4S0VGE0|A0A4S0VGE0_9BACT 6-carboxy-5,6,7,8-tetrah ydropterin synthase OS=bacterium M00.F.Ca.ET.159.01.1.1 OX=2563904 GN=queD PE=3 SV=1

SEQ ID NO: 18083 - protein, 118 aa, Unknown; identical to SEQ ID NO: 18072
  misc_feature (1)..(118): tr|A0A4S2JTH2|A0A4S2JTH2_9BACT 6-carboxy-5,6,7,8-tetrah ydropterin synthase OS=bacterium M00.F.Ca.ET.162.01.1.1 OX=2563905 GN=queD PE=3 SV=1

SEQ ID NO: 18084 - protein, 118 aa, Unknown; identical to SEQ ID NO: 18074
  misc_feature (1)..(118): tr|A0A4S0Y7Y2|A0A4S0Y7Y2_9BACT 6-carboxy-5,6,7,8-tetrah ydropterin synthase OS=bacterium M00.F.Ca.ET.163.01.1.1 OX=2563906 GN=queD PE=3 SV=1

SEQ ID NO: 18085 - protein, 120 aa, Unknown; identical to SEQ ID NO: 18071
  misc_feature (1)..(120): tr|A0A4S0Z1P8|A0A4S0Z1P8_9BACT 6-carboxy-5,6,7,8-tetrah ydropterin synthase OS=bacterium M00.F.Ca.ET.163.01.1.1 OX=2563906 GN=queD PE=3 SV=1

SEQ ID NO: 18086 - protein, 118 aa, Unknown; identical to SEQ ID NO: 17156
  misc_feature (1)..(118): tr|A0A4V3PG83|A0A4V3PG83_9BACT 6-carboxy-5,6,7,8-tetrah ydropterin synthase OS=bacterium M00.F.Ca.ET.168.01.1.1 OX=2563907 GN=queD PE=3 SV=1

SEQ ID NO: 18087 - protein, 118 aa, Unknown
  misc_feature (1)..(118): tr|A0A4S1HCX1|A0A4S1HCX1_9BACT 6-carboxy-5,6,7,8-tetrah ydropterin synthase OS=bacterium M00.F.Ca.ET.168.01.1.1 OX=2563907 GN=queD PE=3 SV=1
MKITQAFTFEAAHRLPNVPATHKCHRMHGHSYRVELQLDGKVNPDTGFVIDFFDLEKAFGPLLEQLDHHTLNEIEGLENPTAENIATWIWTRVRPLLLELSSVKVFETPMCWAEFDGN

SEQ ID NO: 18088 - protein, 118 aa, Unknown; identical to SEQ ID NO: 18072
  misc_feature (1)..(118): tr|A0A4S0Q4L7|A0A4S0Q4L7_9BACT 6-carboxy-5,6,7,8-tetrah ydropterin synthase OS=bacterium M00.F.Ca.ET.177.01.1.1 OX=2563908 GN=queD PE=3 SV=1

SEQ ID NO: 18089 - protein, 118 aa, Unknown
  misc_feature (1)..(118): tr|A0A4S0QII6|A0A4S0QII6_9BACT 6-carboxy-5,6,7,8-tetrah ydropterin synthase OS=bacterium M00.F.Ca.ET.177.01.1.1 OX=2563908 GN=queD PE=3 SV=1
MYIIAKRFAFSASHVIGGLPEEHPCARLHGHNYEVEVVLQAAELDPVGFVRDYRELSPLKEFIDENLDHRHLNEVLGHDRTTSEVIAKWIYDWCNARWPEVAAVRVSETPKTWAEYRP

SEQ ID NO: 18090 - protein, 118 aa, Unknown; identical to SEQ ID NO: 18087
  misc_feature (1)..(118): tr|A0A4S0N4X8|A0A4S0N4X8_9BACT 6-carboxy-5,6,7,8-tetrah ydropterin synthase OS=bacterium M00.F.Ca.ET.179.01.1.1 OX=2563909 GN=queD PE=3 SV=1

SEQ ID NO: 18091 - protein, 118 aa, Unknown; identical to SEQ ID NO: 17156
  misc_feature (1)..(118): tr|A0A4S0MU82|A0A4S0MU82_9BACT 6-carboxy-5,6,7,8-tetrah ydropterin synthase OS=bacterium M00.F.Ca.ET.179.01.1.1 OX=2563909 GN=queD PE=3 SV=1

SEQ ID NO: 18092 - protein, 141 aa, Unknown
  misc_feature (1)..(141): tr|A0A4S0LPG3|A0A4S0LPG3_9BACT 6-carboxy-5,6,7,8-tetrah ydropterin synthase OS=bacterium M00.F.Ca.ET.180.01.1.1 OX=2563910 GN=queD PE=3 SV=1
MFQQNYPSVNHNYQFELNKDFNFSAAHYIPSEDAGKCMRTHGHTYFVNLTIGGDTVDHNGFLVNFSELKQLVHGQFDHQLLNELPQFKGKSPSTEIVAQTIYEMVQSSLDQRPNKPQCLQVYVRETPTSYVIYRPKELNHE

SEQ ID NO: 18093 - protein, 143 aa, Unknown
  misc_feature (1)..(143): tr|A0A4S0LS78|A0A4S0LS78_9BACT 6-pyruvoyl tetrahydrobio pterin synthase OS=bacterium M00.F.Ca.ET.180.01.1.1 OX= 2563910 GN=EN823_06045 PE=4 SV=1
MTNFNQVQPPEQFKYRSNAVLIKNYYEFTCDNRIYFSQKAHKDLANQHYKFNIEILSKINDAGLALDFNEVDKIYNKQIATYLDGQLVNETLPSMNTTAENIAFWIWEQFEQHLPEKNTLQKLEFFENATQGLVLTRELMEAK

SEQ ID NO: 18094 - protein, 47 aa, Unknown
  misc_feature (1)..(47): tr|A0A4S0IUQ1|A0A4S0IUQ1_9BACT 6-carboxytetrahydropteri n synthase QueD (Fragment) OS=bacterium M00.F.Ca.ET.191 .01.1.1 OX=2563911 GN=EN834_33400 PE=4 SV=1
LNDVLGHEKVTAECLARHFYEWCKARLPQTAAVRVSETPKTWAEYRP

SEQ ID NO: 18095 - protein, 147 aa, Unknown; identical to SEQ ID NO: 18076
  misc_feature (1)..(147): tr|A0A4S0J184|A0A4S0J184_9BACT 6-carboxy-5,6,7,8-tetrah ydropterin synthase OS=bacterium M00.F.Ca.ET.191.01.1.1 OX=2563911 GN=queD PE=3 SV=1

SEQ ID NO: 18096 - protein, 118 aa, Unknown; identical to SEQ ID NO: 17156
  misc_feature (1)..(118): tr|A0A4S0GLW2|A0A4S0GLW2_9BACT 6-carboxy-5,6,7,8-tetrah ydropterin synthase OS=bacterium M00.F.Ca.ET.194.01.1.1 OX=2563912 GN=queD PE=3 SV=1

SEQ ID NO: 18097 - protein, 118 aa, Unknown; identical to SEQ ID NO: 18087
  misc_feature (1)..(118): tr|A0A4S0GTS8|A0A4S0GTS8_9BACT 6-carboxy-5,6,7,8-tetrah ydropterin synthase OS=bacterium M00.F.Ca.ET.194.01.1.1 OX=2563912 GN=queD PE=3 SV=1

SEQ ID NO: 18098 - protein, 118 aa, Unknown; identical to SEQ ID NO: 18077
  misc_feature (1)..(118): tr|A0A4S0E8N7|A0A4S0E8N7_9BACT 6-carboxy-5,6,7,8-tetrah ydropterin synthase OS=bacterium M00.F.Ca.ET.199.01.1.1 OX=2563913 GN=queD PE=3 SV=1

SEQ ID NO: 18099 - protein, 120 aa, Unknown; identical to SEQ ID NO: 18071
  misc_feature (1)..(120): tr|A0A4S0F791|A0A4S0F791_9BACT 6-carboxy-5,6,7,8-tetrah ydropterin synthase OS=bacterium M00.F.Ca.ET.199.01.1.1 OX=2563913 GN=queD PE=3 SV=1

SEQ ID NO: 18100 - protein, 118 aa, Unknown; identical to SEQ ID NO: 18072
  misc_feature (1)..(118): tr|A0A4R9YTJ6|A0A4R9YTJ6_9BACT 6-carboxy-5,6,7,8-tetrah ydropterin synthase OS=bacterium M00.F.Ca.ET.205.01.1.1 OX=2563914 GN=queD PE=3 SV=1

SEQ ID NO: 18101 - protein, 118 aa, Unknown; identical to SEQ ID NO: 18072
  misc_feature (1)..(118): tr|A0A4R9TXX6|A0A4R9TXX6_9BACT 6-carboxy-5,6,7,8-tetrah ydropterin synthase OS=bacterium M00.F.Ca.ET.221.01.1.1 OX=2563915 GN=queD PE=3 SV=1

SEQ ID NO: 18102 - protein, 118 aa, Unknown; identical to SEQ ID NO: 18074
  misc_feature (1)..(118): tr|A0A4R9TYM8|A0A4R9TYM8_9BACT 6-carboxy-5,6,7,8-tetrah ydropterin synthase OS=bacterium M00.F.Ca.ET.221.01.1.1 OX=2563915 GN=queD PE=3 SV=1

SEQ ID NO: 18103 - protein, 118 aa, Unknown; identical to SEQ ID NO: 18074
  misc_feature (1)..(118): tr|A0A4R9U2T3|A0A4R9U2T3_9BACT 6-carboxy-5,6,7,8-tetrah ydropterin synthase OS=bacterium M00.F.Ca.ET.222.01.1.1 OX=2563916 GN=queD PE=3 SV=1

SEQ ID NO: 18104 - protein, 118 aa, Unknown; identical to SEQ ID NO: 18072
  misc_feature (1)..(118): tr|A0A4R9U959|A0A4R9U959_9BACT 6-carboxy-5,6,7,8-tetrah ydropterin synthase OS=bacterium M00.F.Ca.ET.222.01.1.1 OX=2563916 GN=queD PE=3 SV=1

SEQ ID NO: 18105 - protein, 118 aa, Unknown; identical to SEQ ID NO: 18074
  misc_feature (1)..(118): tr|A0A4R9T2M3|A0A4R9T2M3_9BACT 6-carboxy-5,6,7,8-tetrah ydropterin synthase OS=bacterium M00.F.Ca.ET.227.01.1.1 OX=2563917 GN=queD PE=3 SV=1

SEQ ID NO: 18106 - protein, 118 aa, Unknown; identical to SEQ ID NO: 18073
  misc_feature (1)..(118): tr|A0A4R9T402|A0A4R9T402_9BACT 6-carboxy-5,6,7,8-tetrah ydropterin synthase OS=bacterium M00.F.Ca.ET.227.01.1.1 OX=2563917 GN=queD PE=3 SV=1

SEQ ID NO: 18107 - protein, 147 aa, Unknown; identical to SEQ ID NO: 18076
  misc_feature (1)..(147): tr|A0A4R9RKW3|A0A4R9RKW3_9BACT 6-carboxy-5,6,7,8-tetrah ydropterin synthase OS=bacterium M00.F.Ca.ET.228.01.1.1 OX=2563918 GN=queD PE=3 SV=1

SEQ ID NO: 18108 - protein, 143 aa, Unknown; identical to SEQ ID NO: 18093
  misc_feature (1)..(143): tr|A0A4R9SET8|A0A4R9SET8_9BACT 6-pyruvoyl tetrahydrobio pterin synthase OS=bacterium M00.F.Ca.ET.229.01.1.1 OX= 2563919 GN=EN872_06050 PE=4 SV=1

SEQ ID NO: 18109 - protein, 141 aa, Unknown; identical to SEQ ID NO: 18092
  misc_feature (1)..(141): tr|A0A4R9SF29|A0A4R9SF29_9BACT 6-carboxy-5,6,7,8-tetrah ydropterin synthase OS=bacterium M00.F.Ca.ET.229.01.1.1 OX=2563919 GN=queD PE=3 SV=1

SEQ ID NO: 18110 - protein, 197 aa, Unknown
  misc_feature (1)..(197): tr|A0A4R9RNQ1|A0A4R9RNQ1_9BACT 6-carboxytetrahydropteri n synthase OS=bacterium M00.F.Ca.ET.230.01.1.1 OX=25639 20 GN=EN873_36510 PE=4 SV=1
MRIRKLFKFENAHIVRNCSSDRCKYSIHGHSYQIELILEAHRLDHGQMVYDFGLLKSSIKDIIDSFDHAICFWDKDDPDYIDACKKFSARWISLPVSPSAEQFSRVVFFWAREILKQTQMQNGETDVKVYSVIAHETATGYAQCFEDDVDNAQMGALTLGDFEFSEQVKAEWHDPNMYDKLKKGEKFVNPTVVLQVD

SEQ ID NO: 18111 - protein, 118 aa, Unknown; identical to SEQ ID NO: 18074
  misc_feature (1)..(118): tr|A0A4R9REW6|A0A4R9REW6_9BACT 6-carboxy-5,6,7,8-tetrah ydropterin synthase OS=bacterium M00.F.Ca.ET.230.01.1.1 OX=2563920 GN=queD PE=3 SV=1

SEQ ID NO: 18112 - protein, 121 aa, Unknown
  misc_feature (1)..(121): tr|A0A5J4E1W5|A0A5J4E1W5_9BACT 6-carboxy-5,6,7,8-tetrah ydropterin synthase OS=bacterium MnTg02 OX=2080452 GN=q ueD PE=4 SV=1
MQIYKEFHLEAAHKLPGAPPGHPNSRVHGHSFRVRVTVEGEPDPETGLIVHFDDMSEVLQGLRDELDHNYLNEIDGLENPTLENISTWIWNRLSQNFPGLAEVEIARDSCKEGCVYRGPKR

SEQ ID NO: 18113 - protein, 117 aa, Unknown
  misc_feature (1)..(117): tr|A0A132GVQ5|A0A132GVQ5_9BACT 6-carboxy-5,6,7,8-tetrah ydropterin synthase OS=bacterium P201 OX=1768112 GN=AUK 64_1897 PE=3 SV=1
MYYVRKTLEISACHQLYLDYESKCENLHGHNWKINVYCRAEKLDSNGMVCDFTEIKRLIHGKIDHTNINEVLDFNPTAENLAKWIVDTVPNCYRADVWESRDNKASYIKDDAPQNFD

SEQ ID NO: 18114 - protein, 155 aa, Unknown
  misc_feature (1)..(155): tr|A0A4Q2RGJ6|A0A4Q2RGJ6_9BACT 6-pyruvoyl tetrahydrobio pterin synthase OS=bacterium RmlP001 OX=2316527 GN=D327 2_00235 PE=4 SV=1
MVAQAPGLYRSTKFYDHSEGLSCCFRQWRAGHSHCRLLHGYALAFRFTFATRELDERNWCFDFGGLKPVRRWLHEMFDHTLVVAEDDPERDRLEALGAAGLADIRVLPAVGCEATARFVYLHVSGMVYGETDGRVWLESVEVAEHGGNSALYSPA

SEQ ID NO: 18115 - protein, 148 aa, Unknown
  misc_feature (1)..(148): tr|A0A4V1RIK2|A0A4V1RIK2_9BACT 6-pyruvoyl tetrahydrobio pterin synthase OS=bacterium RmlP001 OX=2316527 GN=D327 2_14225 PE=4 SV=1
MYRSTKTYDHNEGLSCTFRQWRAGHSHCRLLHGYALAFKFVFAARELDDRHWCFDFGGLKPVRQWLHEMFDHTLLVSEDDPERARLEALGAAGLADVRIVPAVGCEATARIVHAKVGEMVRSATQGRVWLESVEVREHGGNSALFSPA

SEQ ID NO: 18116 - protein, 165 aa, Unknown
  misc_feature (1)..(165): tr|A0A4Q2UAT4|A0A4Q2UAT4_9BACT 6-pyruvoyl tetrahydrobio pterin synthase OS=bacterium RmlP026 OX=2316528 GN=D327 3_01335 PE=4 SV=1
MDHILDPVRLKSESGGGTYRSTKTYDHNEGLSCTFRQWRAGQSHCRLLHGYALAFKFVFVARELDERHWCFDFGGLKPVRQWLHEMFDHTLLVAADDPERDRLEELGRLGLADVRVLPAVGCEATARLVYARVNDMVQTSTDGRVWLESVEVREHGGNSALYTCD

SEQ ID NO: 18117 - protein, 162 aa, Unknown
  misc_feature (1)..(162): tr|A0A177Q825|A0A177Q825_9BACT Uncharacterized protein OS=bacterium SCGC AG-212-C10 OX=1799370 GN=AYO38_02545 PE=4 SV=1
MPNPTRRVSVERNRLRFAAAHMATFAGTCEPLHGHNYDIIVELEGELTDDSWVWDFGDLKRTVKAIADELDHKFLLQRDSRMLEIEERPFAWAVRFEEREYVFPKSDVAVLPIDNTTSERIAEWMAGELLATLTARGAVNVRSLTVGIEEMPGQTGWYTVTM

SEQ ID NO: 18118 - protein, 122 aa, Unknown
  misc_feature (1)..(122): tr|A0A3R7WDC6|A0A3R7WDC6_9BACT 6-carboxy-5,6,7,8-tetrah ydropterin synthase OS=bacterium TMED144 OX=1986778 GN= queD PE=3 SV=1
MIMEIYKDITFEAAHLLPNLPDGHKCSRLHGHSFKLRISVVGDIDKKVGWVKDFSDIKEVFDPIYDQLDHRYLNDIKGLENPTSENIVIWIWNKLKPSLPILSSLELKETCTTGCIYIGENA

SEQ ID NO: 18119 - protein, 289 aa, Unknown
  misc_feature (1)..(289): tr|A0A1Z8MYT7|A0A1Z8MYT7_9BACT Uncharacterized protein OS=bacterium TMED15 OX=1986651 GN=CBB75_02460 PE=4 SV=1
MVIQHSLDMIHLTRYIDFEASHYYYLPELSEEENYQIFGNKVNQHGHNYSVHLTVGGKIQSSDGMVINIKDVDELIRSYINQYYDHKQINQQHPVFSADPCIQPTPENIAIELWRATSQDLVALGVNMRAIRLTEEERTYVQYYGVESMIHLTRTYEFSAAHRLHSSELSDDENTEIFGKCNNPNGHGHNYVLEVTLSGEVDQRTGLLVRIVDLDQVINKKVFGRFDHKHLNLDTVEFQNLNPTSENFVRVLWELIESDILSLSPSRSVRLHRLRLKETPKSFFDYYGD

SEQ ID NO: 18120 - protein, 134 aa, Unknown
  misc_feature (1)..(134): tr|A0A1Z9ISS5|A0A1Z9ISS5_9BACT Uncharacterized protein OS=bacterium TMED161 OX=1986652 GN=CBD21_01280 PE=4 SV= 1
  misc_feature (74)..(74): Xaa can be any naturally occurring amino acid
  misc_feature (77)..(77): Xaa can be any naturally occurring amino acid
  misc_feature (90)..(91): Xaa can be any naturally occurring amino acid
  misc_feature (103)..(103): Xaa can be any naturally occurring amino acid
  misc_feature (106)..(106): Xaa can be any naturally occurring amino acid
  misc_feature (111)..(111): Xaa can be any naturally occurring amino acid
  misc_feature (119)..(119): Xaa can be any naturally occurring amino acid
MPQITKQYKFCAAHRYWNDDWDEAKNIEVFHDDVRLHGHNYDLYITIKGPIDNSSGFVVNLKELNEVVNKKVIXVLXHNLIQDVEWFNDXXPSTENLVVFIWXQIXSEIAXPAKLFCVXLRETGTIFTEYYGDE

SEQ ID NO: 18121 - protein, 119 aa, Unknown
  misc_feature (1)..(119): tr|A0A1Z9IQA5|A0A1Z9IQA5_9BACT 6-carboxy-5,6,7,8-tetrah ydropterin synthase OS=bacterium TMED161 OX=1986652 GN= CBD21_03310 PE=3 SV=1
MIINRTYRAHCARYIPNLDDSHICKQMHGHTFNITIFLDGPINNKSGFVMDFYELDKIINEEIISLIDHKVLNDIDGLQNPSSELLSIFIWDKLKEKLKYLHKVSVSEDYGTGVEYSGK

SEQ ID NO: 18122 - protein, 122 aa, Unknown
  misc_feature (1)..(122): tr|A0A1Z9KSD7|A0A1Z9KSD7_9BACT 6-carboxy-5,6,7,8-tetrah ydropterin synthase OS=bacterium TMED181 OX=1986654 GN= CBD41_03430 PE=3 SV=1
MELLRKFSFDSAHSLPNVPADHKCHRLHGHTFHVEVRVTGPIGETSGWVMDFADLKQVVNPIIEDLDHRYLNEIDGLENPTSEHIAVWIWERIEGNLPGLSSVTVHETCNTGCTYRGTQKKD

SEQ ID NO: 18123 - protein, 120 aa, Unknown
  misc_feature (1)..(120): tr|A0A1Z9RVE7|A0A1Z9RVE7_9BACT 6-carboxy-5,6,7,8-tetrah ydropterin synthase OS=bacterium TMED250 OX=1986657 GN= CBE10_03090 PE=3 SV=1
MEIYKDITFEAAHLLPNLPAGHKCSRLHGHSFLVRITLDGPIDKETGWVEDFADIKKAFQPIYDELDHNYLNNISGLENPTSENLAKWIWDKLENDLDNLTAIEVKETCSSGCIYRGKNG

SEQ ID NO: 18124 - protein, 136 aa, Unknown
  misc_feature (1)..(136): tr|A0A1Z9RVQ4|A0A1Z9RVQ4_9BACT 6-carboxy-5,6,7,8-tetrah ydropterin synthase OS=bacterium TMED250 OX=1986657 GN= CBE10_02600 PE=3 SV=1
MSNPYLTKVFYFNAAHQYGHKDWSDEKNWEVFGPDSKIHGHNYTLEVMVTGEIKEETGFLVDLGHLKKIVNTHVIDVLDHSQFDVEVDWFKNRQPSSENLVIFIWNEIQSRLLDVKLHRIRLHETPTIFTDYYGEE

SEQ ID NO: 18125 - protein, 120 aa, Unknown
  misc_feature (1)..(120): tr|A0A3R7VEU4|A0A3R7VEU4_9BACT 6-carboxy-5,6,7,8-tetrah ydropterin synthase OS=bacterium TMED46 OX=1986782 GN=q ueD PE=3 SV=1
MSMEVYKTFAIESARSLTKLPDEHPCSKVHGHSFKITLTVEGEIDQTTGFVMDFSDIDSAFRPIHEIIDHAYLNDIKGLENPSSENLCRWIWKQLSPSLKGLKQIEIKETESTGCIYKGK

SEQ ID NO: 18126 - protein, 142 aa, Unknown
  misc_feature (1)..(142): tr|A0A424SRE7|A0A424SRE7_9BACT 6-carboxytetrahydropteri n synthase OS=bacterium TMED46 OX=1986782 GN=CBC06_0022 70 PE=4 SV=1
MDKKLKNPIITKKYHFSASHKYGNDYWSEEKNLEVFGKDYNTHGHNYILEVSVAGPIDPDSGWLVDLSTLNQIVKTKIVNVLDHSQIEVDVDWFKGKQPSSENILIWIWDQIVADLEQGSLYRLRLVETHSIHTDYYGPGKP

SEQ ID NO: 18127 - protein, 134 aa, Unknown
  misc_feature (1)..(134): tr|A0A1Z8KVG8|A0A1Z8KVG8_9BACT Uncharacterized protein OS=bacterium TMED6 OX=1986783 GN=CBB66_00695 PE=4 SV=1
  misc_feature (39)..(39): Xaa can be any naturally occurring amino acid
  misc_feature (45)..(45): Xaa can be any naturally occurring amino acid
  misc_feature (59)..(59): Xaa can be any naturally occurring amino acid
  misc_feature (89)..(89): Xaa can be any naturally occurring amino acid
  misc_feature (110)..(110): Xaa can be any naturally occurring amino acid
MVNLTKQYKFCAAHRYWNDNWTEEKNLEVFGDDVRIHGXNYILSXTLKGNINEESGFIXDLQKLNDIVKEKIINVFDHSQIEKDIPWFXNKQPSTENMVVYIWNQLVNIXPSNAQLHCIKLRETPTIFSEYYGS

SEQ ID NO: 18128 - protein, 119 aa, Unknown
  misc_feature (1)..(119): tr|A0A1Z8KQ79|A0A1Z8KQ79_9BACT 6-carboxy-5,6,7,8-tetrah ydropterin synthase OS=bacterium TMED6 OX=1986783 GN=CB B66_04240 PE=3 SV=1
MILVRKYTFQAARKLTKIDPSHICANLHGHTFHVTIKIEGDMNNENDFVMDFYDIDKIFNDTIYKSLDHKYLNEIKGLESPTTENLSKWIWSHLIKKLDILSEVRVFENDVYGCIYKGD

SEQ ID NO: 18129 - protein, 118 aa, Unknown
  misc_feature (1)..(118): tr|A0A1Z8YZT9|A0A1Z8YZT9_9BACT 6-carboxy-5,6,7,8-tetrah ydropterin synthase OS=bacterium TMED80 OX=1986784 GN=C BC40_08090 PE=3 SV=1
MIVYKKFHIESARSLPNLPNEHPCSQVHGHSFEIILKVSGELNEKTGFIIDFQEIEDSFDPIRKLLDHAYLNNIKGLENPTSENMCKYIWEKVKPEILGLVEIEIKETHSTGCIYKGD

SEQ ID NO: 18130 - protein, 138 aa, Unknown
  misc_feature (1)..(138): tr|A0A1Z8ZAD9|A0A1Z8ZAD9_9BACT Uncharacterized protein OS=bacterium TMED80 OX=1986784 GN=CBC40_02910 PE=4 SV=1
MNYPIITKRYHFCASHKYGNDVWSEEKNLEVFGKDYNTHGHNYVLEVSVTGPIDPGSGWLVDLPTLNKIVKSKVVDVLDHSQIEKDVEWFKDKQPSSENLLLWIWDQIFDKITDCKLHRIRLVETHSIFNDYYGPGEE

SEQ ID NO: 18131 - protein, 123 aa, Unknown
  misc_feature (1)..(123): tr|A0A1Z9B185|A0A1Z9B185_9BACT Uncharacterized protein (Fragment) OS=bacterium TMED88 OX=1986661 GN=CBC48_1540 5 PE=4 SV=1
MKVLRVTRSIHFSSSLRYWLEDLSEAENLKRFGAQARQHGHNYELEITVAGVPDPETGMVINLTDLKAVAEKEIMARFDHRDLNADTDFFIRQPPTPENFASVVFRLLDEALPPGLLSRIRLY

SEQ ID NO: 18132 - protein, 171 aa, Unknown
  misc_feature (1)..(171): tr|A0A0A1PF54|A0A0A1PF54_9BACT 6-pyruvoyl tetrahydropte rin synthase OS=bacterium YEK0313 OX=1522316 GN=BN1110_ 02068 PE=4 SV=1
MADPTVSIVPEAQAGGPGPQAVYRSTKSYDHNEGLSCCFRQWRAGHSHCRLVHGYALAVAFVFACHELDERNWCYDFGGMKPVKAWLHDMFDHTMIVAADDPELGTFQALADKGLVDLRVMPAVGCEATARFIFDHVAPRIHAETRGRVWLESVEVREHAGNSAIYEPIRG

SEQ ID NO: 18133 - protein, 133 aa, Unknown
  misc_feature (1)..(133): tr|A0A0A1Q2L4|A0A0A1Q2L4_9BACT 6-pyruvoyl tetrahydropte rin synthase OS=bacterium YEK0313 OX=1522316 GN=BN1110_ 05462 PE=4 SV=1
MYSVEVRDRIMIAHSLPDPFFGPAQGKHGASFVVDVAFFRETLNAQNVVVDIGAALDVLAGTLKELAYRDLDALPQFQGKLTTTEFLCRHIFDACCAAAKAGALGADGADLAKIRVTLHEHDLARASFEGPVA

SEQ ID NO: 18134 - protein, 151 aa, Bacteroidales bacterium
  misc_feature (1)..(151): tr|U5Q676|U5Q676_9BACT 6-carboxy-5,6,7,8-tetrahydropter in synthase OS=Bacteroidales bacterium CF OX=1400053 GN =queD PE=4 SV=1
MSTLRITKEFRFEGAHALTGYDGKCRHIHGHSYGLYITVKGTPISETSNPKNGMVLDFSDLKKVVNDYIINVFDHALILRRGSALSSEISEAYDNVVIVDFQPTCENLVLYIHDILIERLPAKVTLQSIKLYETPTSYVEWMADDNSQSLI

SEQ ID NO: 18135 - protein, 110 aa, Bacteroidales bacterium
  misc_feature (1)..(110): tr|A0A4S4H524|A0A4S4H524_9BACT 6-carboxy-5,6,7,8-tetrah ydropterin synthase OS=Bacteroidales bacterium OX=20309 27 GN=queD PE=3 SV=1
MYYVRKRLEISAAHQLELSYPSKCTNLHGHNWIITVECRARELNADGMVVDFTKIKELVMDRLDHAVINDVIDCNPTAENIARWIVDTVPNCWRCEVQESEGNVAIYEKD

SEQ ID NO: 18136 - protein, 116 aa, Bacteroides acidifaciens
  misc_feature (1)..(116): tr|A0A4Y9GWB1|A0A4Y9GWB1_9BACE 6-carboxy-5,6,7,8-tetrah ydropterin synthase OS=Bacteroides acidifaciens OX=8583 1 GN=E4T97_08300 PE=3 SV=1
MFTVIKRMEISASHKLVLPYRSKCASLHGHNWIITVYCRSARLNSEGMVVDFTRIKEVVMEKLDHQNLNEVLPFNPTAENIARWVCKQIPQCYKVEVQESEGNIVIYEKDPVGAEG

SEQ ID NO: 18137 - protein, 116 aa, Bacteroides acidifaciens
  misc_feature (1)..(116): tr|A0A3L8AH75|A0A3L8AH75_9BACE 6-carboxy-5,6,7,8-tetrah ydropterin synthase OS=Bacteroides acidifaciens OX=8583 1 GN=D7Y07_02110 PE=3 SV=1
MFTVIKRMEISASHKLVLPYRSKCASLHGHNWIITVYCRSERLNSEGMVVDFTRIKEVVTEKLDHQNLNEVLPFNPTAENIARWVCKQIPQCYKVEVQESEGNIVIYEKDPVGAEG

SEQ ID NO: 18138 - protein, 129 aa, Bacteroides caccae
  misc_feature (1)..(129): tr|R5U9G9|R5U9G9_9BACE 6-carboxy-5,6,7,8-tetrahydropter in synthase OS=Bacteroides caccae CAG:21 OX=1263037 GN= BN535_01991 PE=3 SV=1
MFTVIKRLEISASHKLVLPYRSKCASLHGHNWIITVYCRSARLNADGMVVDFTRIKEVVMEKLDHQNLNEVLPFNPTAENIARWVCKQIPQCYKVEVQESEGNIVIYEKDTVKDNASNDVKDHSEDKEE

SEQ ID NO: 18139 - protein, 129 aa, Bacteroides caccae; identical to SEQ ID NO: 18138
  misc_feature (1)..(129): tr|A0A174WLI9|A0A174WLI9_9BACE 6-carboxy-5,6,7,8-tetrah ydropterin synthase OS=Bacteroides caccae OX=47678 GN=q ueD PE=3 SV=1

SEQ ID NO: 18140 - protein, 116 aa, Bacteroides caecimuri; identical to SEQ ID NO: 18137
  misc_feature (1)..(116): tr|A0A4V6RDL4|A0A4V6RDL4_9BACE 6-carboxy-5,6,7,8-tetrah ydropterin synthase OS=Bacteroides caecimuri OX=2516958 GN=E5353_09420 PE=3 SV=1

SEQ ID NO: 18141 - protein, 145 aa, Bacteroides caecimuris; identical to SEQ ID NO: 18037
  misc_feature (1)..(145): tr|A0A3A9B788|A0A3A9B788_9BACE 6-carboxy-5,6,7,8-tetrah ydropterin synthase OS=Bacteroides caecimuris OX=179661 3 GN=D7W50_15530 PE=3 SV=1

SEQ ID NO: 18142 - protein, 116 aa, Bacteroides caecimuris; identical to SEQ ID NO: 18137
  misc_feature (1)..(116): tr|A0A1C7H771|A0A1C7H771_9BACE 6-carboxy-5,6,7,8-tetrah ydropterin synthase OS=Bacteroides caecimuris OX=179661 3 GN=A4V03_03400 PE=3 SV=1

SEQ ID NO: 18143 - protein, 110 aa, Bacteroides cellulosilyticus
  misc_feature (1)..(110): tr|A0A0P0FVD8|A0A0P0FVD8_9BACE 6-carboxy-5,6,7,8-tetrah ydropterin synthase OS=Bacteroides cellulosilyticus OX= 246787 GN=queD PE=3 SV=1
MYTVIKRMEISAAHSLKLSYRSKCEDLHGHNWIITVYCRSRELNADGMVVDFSHIKETVKGKLDHRNLNEVLPFNPTAENIARWICEQIPTCFKVEVQESESNVATYEKE

SEQ ID NO: 18144 - protein, 110 aa, Bacteroides cellulosilyticus; identical to SEQ ID NO: 18143
  misc_feature (1)..(110): tr|R6KI50|R6KI50_9BACE 6-carboxy-5,6,7,8-tetrahydropter in synthase OS=Bacteroides cellulosilyticus CAG:158 OX= 1263038 GN=BN506_02219 PE=3 SV=1

SEQ ID NO: 18145 - protein, 110 aa, Bacteroides clarus
  misc_feature (1)..(110): tr|F3PHI1|F3PHI1_9BACE 6-carboxy-5,6,7,8-tetrahydropter in synthase OS=Bacteroides clarus YIT 12056 OX=762984 G N=HMPREF9445_01118 PE=3 SV=1
MYTVIKRMEVSAAHSLKLSYQSKCENLHGHNWIITVYCRSKELNADGMVVDFSHIKQVVKEQLDHRNINEVLPFNPTAENIARWICDQIPTCFKVEVQESESNIAVYEED

SEQ ID NO: 18146 - protein, 110 aa, Bacteroides clarus; identical to SEQ ID NO: 18145
  misc_feature (1)..(110): tr|A0A1Y3YQG5|A0A1Y3YQG5_9BACE 6-carboxy-5,6,7,8-tetrah ydropterin synthase OS=Bacteroides clarus OX=626929 GN= queD PE=3 SV=1

SEQ ID NO: 18147 - protein, 110 aa, Bacteroides coprocola
  misc_feature (1)..(110): tr|A0A412GA96|A0A412GA96_9BACE 6-carboxy-5,6,7,8-tetrah ydropterin synthase OS=Bacteroides coprocola OX=310298 GN=queD PE=3 SV=1
MYTVIKRMEISASHSLKLSYPSKCEKLHGHNWIITVYCRSKELDENGMVVDFTHIKQAVEKQLDHNNLNDILPFNPTAENIACWICNQVPHCFKVEVKESEGNTAIYEKD

SEQ ID NO: 18148 - protein, 110 aa, Bacteroides coprocola; identical to SEQ ID NO: 18147
  misc_feature (1)..(110): tr|B3JGJ8|B3JGJ8_9BACE 6-carboxy-5,6,7,8-tetrahydropter in synthase OS=Bacteroides coprocola DSM 17136 OX=47014 5 GN=BACCOP_01000 PE=3 SV=1

SEQ ID NO: 18149 - protein, 103 aa, Bacteroides coprophilus
  misc_feature (1)..(103): tr|R6S9A1|R6S9A1_9BACE 6-carboxy-5 6 7 8-tetrahydropter in synthase OS=Bacteroides coprophilus CAG:333 OX=12630 41 GN=BN612_01573 PE=4 SV=1
MEVSASHSLKLSYQSKCENLHGHNWIITVFCRSKDLNEDGMVVDFTHIKEVVMGQLDHRNLNDVLSVNPTAENIAHWICERIPHCFKVEVCESEGNTVVYEKD

SEQ ID NO: 18150 - protein, 110 aa, Bacteroides coprophilus
  misc_feature (1)..(110): tr|S0F9Y6|S0F9Y6_9BACE 6-carboxy-5,6,7,8-tetrahydropter in synthase OS=Bacteroides coprophilus DSM 18228 = JCM 13818 OX=547042 GN=BACCOPRO_02750 PE=3 SV=1
MYTVIKRMEVSASHSLKLSYQSKCENLHGHNWIITVFCRSKDLNEDGMVVDFTHIKEVVMGQLDHRNLNDVLSVNPTAENIAHWICERIPHCFKVEVCESEGNTVVYEKD

SEQ ID NO: 18151 - protein, 110 aa, Bacteroides dorei
  misc_feature (1)..(110): tr|A0A0K2HIQ6|A0A0K2HIQ6_9BACE 6-carboxy-5,6,7,8-tetrah ydropterin synthase OS=Bacteroides dorei OX=357276 GN=q ueD PE=3 SV=1
MYTVIKRMEISASHSLKLSYRSKCENLHGHNWIITVYCRSEVLNEDGMVVDFTHIKETVMGRLDHQNLNEVVSLNPTAENIARWVCEQIPTCFKVEVRESEGNTVIYEKD

SEQ ID NO: 18152 - protein, 110 aa, Bacteroides dorei; identical to SEQ ID NO: 18151
  misc_feature (1)..(110): tr|I9Q960|I9Q960_9BACE 6-carboxy-5,6,7,8-tetrahydropter in synthase OS=Bacteroides dorei CL02T12C06 OX=997876 G N=HMPREF1064_04779 PE=3 SV=1

SEQ ID NO: 18153 - protein, 110 aa, Bacteroides eggerthii
  misc_feature (1)..(110): tr|R5JRD7|R5JRD7_9BACE 6-carboxy-5,6,7,8-tetrahydropter in synthase OS=Bacteroides eggerthii CAG:109 OX=1263043 GN=BN464_00741 PE=3 SV=1
MYTVIKRMEVSAAHSLKLSYQSKCENLHGHNWIITVFCRSKELNSDGMVVDFSHIKQAVKEKLDHRNINEVLPFNPTAENIARWICDQIPTCFKVEVQESESNIAVYEED

SEQ ID NO: 18154 - protein, 110 aa, Bacteroides eggerthii; identical to SEQ ID NO: 18153
  misc_feature (1)..(110): tr|A0A380YI90|A0A380YI90_9BACE 6-carboxy-5,6,7,8-tetrah ydropterin synthase OS=Bacteroides eggerthii OX=28111 G N=queD PE=3 SV=1

SEQ ID NO: 18155 - protein, 117 aa, Bacteroides faecichinchillae
  misc_feature (1)..(117): tr|A0A1M4VJ01|A0A1M4VJ01_9BACE 6-carboxy-5,6,7,8-tetrah ydropterin synthase OS=Bacteroides faecichinchillae OX= 871325 GN=E5981_17135 PE=3 SV=1
MFTVIKRMEISASHKLVLPYRSKCASLHGHNWIITVYCRSARLNSEGMVVDFSRIKEVVMEKLDHQNLNEVLPFNPTAENIARWVCKQIPQCYKVEVQESEGNVAIYEKDNVENEKE

SEQ ID NO: 18156 - protein, 117 aa, Bacteroides faecis
  misc_feature (1)..(117): tr|R6W5A9|R6W5A9_9BACE 6-carboxy-5,6,7,8-tetrahydropter in synthase OS=Bacteroides faecis CAG:32 OX=1263044 GN= BN607_02642 PE=3 SV=1
MFTVIKRMEISASHKLVLPYRSKCASLHGHNWIITVYCRSSRLNSEGMVVDFTRIKEVVTEKLDHQNLNEVLPFNPTAENIARWVCKQIPQCYKVEVQESEGNIVIYEKDRTEDEKE

SEQ ID NO: 18157 - protein, 117 aa, Bacteroides faecis; identical to SEQ ID NO: 18156
  misc_feature (1)..(117): tr|A0A3E5FXY4|A0A3E5FXY4_9BACE 6-carboxy-5,6,7,8-tetrah ydropterin synthase OS=Bacteroides faecis OX=674529 GN= DXB21_24560 PE=3 SV=1

SEQ ID NO: 18158 - protein, 110 aa, Bacteroides fluxus
  misc_feature (1)..(110): tr|F3PS45|F3PS45_9BACE 6-carboxy-5,6,7,8-tetrahydropter in synthase OS=Bacteroides fluxus YIT 12057 OX=763034 G N=HMPREF9446_01578 PE=3 SV=1
MYTVIKRMEVSAAHSLQLSYRSKCENLHGHNWIITVYCRSKELNADGMVIDFSRIKQVVKEQLDHRNLNEVLPFNPTAENIARWICDQIPACFKVEVQESESNIAVYEKD

SEQ ID NO: 18159 - protein, 110 aa, Bacteroides fragilis
  misc_feature (1)..(110): tr|A0A0K6BY12|A0A0K6BY12_BACFG 6-carboxy-5,6,7,8-tetrah ydropterin synthase OS=Bacteroides fragilis OX=817 GN=q ueD PE=3 SV=1
MFTVIKRMEISAAHKLILPYRSKCASLHGHNWIITVYCRSERLNADGMVVDFTQIKQAVKEKLDHRNLNEVLPFNPTAENIARWVCKQIPQCYKVEVQESEANTVIYEKD

SEQ ID NO: 18160 - protein, 110 aa, Bacteroides fragilis
  misc_feature (1)..(110): tr|A0A081UBN4|A0A081UBN4_BACFG 6-carboxy-5,6,7,8-tetrah ydropterin synthase OS=Bacteroides fragilis OX=817 GN=B UN20_14630 PE=3 SV=1
MFTVIKRMEISAAHKLILPYRSKCATLHGHNWIITVYCRSERLNSDGMVVDFTQIKQTVKEKLDHQNLNEVLPFNPTAENIARWVCKQIPQCYKVEVQESEANTVIYEKD

SEQ ID NO: 18161 - protein, 110 aa, Bacteroides helcogenes
  misc_feature (1)..(110): tr|E6SWA7|E6SWA7_BACT6 6-carboxy-5,6,7,8-tetrahydropter in synthase OS=Bacteroides helcogenes (strain ATCC 3541 7 / DSM 20613 / JCM 6297 / P 36-108) OX=693979 GN=Bache _1577 PE=3 SV=1
MYTVIKRMEVSAAHSLQLSYRSKCENLHGHNWIITVYCRSKELNADGMVIDFSHIKKVVKEQMDHRNLNDVFPFNPTAENIARWVCDRIPSCFKVEVQESESNTAIYEKD

SEQ ID NO: 18162 - protein, 110 aa, Bacteroides intestinalis
  misc_feature (1)..(110): tr|A0A4Q5HI91|A0A4Q5HI91_9BACE 6-carboxy-5,6,7,8-tetrah ydropterin synthase OS=Bacteroides intestinalis OX=3298 54 GN=EAJ06_03190 PE=3 SV=1
MYTVIKRMEISAAHSLKLSYRSKCEDLHGHNWIITVYCRSRELNADGMVVDFSHIKETVKGKLDHRNLNEVLPFNPTAENIACWICEQIPTCFKVEVQESESNVATYEKE

SEQ ID NO: 18163 - protein, 110 aa, Bacteroides intestinalis
  misc_feature (1)..(110): tr|A0A412PGN2|A0A412PGN2_9BACE 6-carboxy-5,6,7,8-tetrah ydropterin synthase OS=Bacteroides intestinalis OX=3298 54 GN=queD PE=3 SV=1
MYTVIKRMEISAAHSLKLSYRSKCEDLHGHNWIITVYCCSRELNADGMVVDFSHIKETVKGKLDHRNLNEVLPFNPTAENIARWICEQIPTCFKVEVQESESNVATYEKE

SEQ ID NO: 18164 - protein, 110 aa, Bacteroides massiliensis
  misc_feature (1)..(110): tr|U6RNW4|U6RNW4_9BACE 6-carboxy-5,6,7,8-tetrahydropter in synthase OS=Bacteroides massiliensis B84634 = Timone 84634 = DSM 17679 = JCM 13223 OX=1121098 GN=HMPREF1534 _00263 PE=3 SV=1
MYTVIKRMEVSASHSLNLSYRSKCENLHGHNWIITVYCRSEVLNADGMVVDFTHIKEAVMGRLDHQNLNEVLHFNPTAENIAHWICEQIPFCFKVEVRESEGNTVIYEKD

SEQ ID NO: 18165 - protein, 110 aa, Bacteroides nordii
  misc_feature (1)..(110): tr|A0A413VQK6|A0A413VQK6_9BACE 6-carboxy-5,6,7,8-tetrah ydropterin synthase OS=Bacteroides nordii OX=291645 GN= DW888_08340 PE=3 SV=1
MYTVIKRLEVSAAHSLNLSYSSKCENLHGHNWVITVYCRSAELNADGMVVDFSHIKKAVKEKLDHQNLNEVLPFNTTAENIARWVCEQVPHCFKVEVQESESNTAIYEKD

SEQ ID NO: 18166 - protein, 110 aa, Bacteroides nordii; identical to SEQ ID NO: 18165
  misc_feature (1)..(110): tr|I9S968|I9S968_9BACE 6-carboxy-5,6,7,8-tetrahydropter in synthase OS=Bacteroides nordii CL02T12C05 OX=997884 GN=HMPREF1068_01490 PE=3 SV=1

SEQ ID NO: 18167 - protein, 110 aa, Bacteroides oleiciplenus
  misc_feature (1)..(110): tr|A0A3E5BKH6|A0A3E5BKH6_9BACE 6-carboxy-5,6,7,8-tetrah ydropterin synthase OS=Bacteroides oleiciplenus OX=6269 31 GN=DXB65_04340 PE=3 SV=1
MYTVIKRMEISASHSLKLSYRSKCENLHGHNWIITVYCRSRELNADGMVVDFSHIKEAVKEKLDHRNLNEVLPFNSTAENIACWICEQIPTCFKVEVQESESNVAIYEKD

SEQ ID NO: 18168 - protein, 110 aa, Bacteroides oleiciplenus
  misc_feature (1)..(110): tr|A0A1Q6GBA5|A0A1Q6GBA5_9BACE 6-carboxy-5,6,7,8-tetrah ydropterin synthase OS=Bacteroides oleiciplenus OX=6269 31 GN=BHV75_14345 PE=3 SV=1
MYTVIKRMEISAAHSLKLSYRSKCENLHGHNWIITVYCRSRELNADGMVVDFSHIKETVKEKLDHRNLNEVLPFNPTAENIARWICEQIPTCFKVEVQESESNVAVYEKD

SEQ ID NO: 18169 - protein, 78 aa, Bacteroides ovatus
  misc_feature (1)..(78): tr|A7M566|A7M566_BACO1 Uncharacterized protein OS=Bacte roides ovatus (strain ATCC 8483 / DSM 1896 / JCM 5824 / NCTC 11153) OX=411476 GN=BACOVA_05260 PE=4 SV=1
MRLNSEGMVVDFTRIKEVVMEKLDHQNLNEVLPFNPTAENIARWVCKQLPQCYKVEVQESEGNIVIYEKDSASAEGQE

SEQ ID NO: 18170 - protein, 118 aa, Bacteroides ovatus
  misc_feature (1)..(118): tr|A0A1Y4Q043|A0A1Y4Q043_BACOV 6-carboxy-5,6,7,8-tetrah ydropterin synthase OS=Bacteroides ovatus OX=28116 GN=D W206_13105 PE=3 SV=1
MFTVIKRMEISASHKLVLPYRSKCASLHGHNWIITVYCRSARLNSEGMVVDFTRIKEVVTEKLDHQNLNEVLPFNPTAENIARWVCKQIPQCYKVEVQESEGNIVIYEKDPVGAEGQE

SEQ ID NO: 18171 - protein, 110 aa, Bacteroides plebeius
  misc_feature (1)..(110): tr|R5W7M2|R5W7M2_9BACE 6-carboxy-5,6,7,8-tetrahydropter in synthase OS=Bacteroides plebeius CAG:211 OX=1263052 GN=BN536_00903 PE=3 SV=1
MYTVIKRMEISASHKLKLSYESKCENLHGHNWIITVYCQAEQLNEDGMVVDFTHIKEVVKGQLDHKHLNDVLPCNPTAENIARWICEQVPHCVKVEVCESEGNRVIYEKD

SEQ ID NO: 18172 - protein, 110 aa, Bacteroides plebeius
  misc_feature (1)..(110): tr|A0A415TF00|A0A415TF00_9BACE 6-carboxy-5,6,7,8-tetrah ydropterin synthase OS=Bacteroides plebeius OX=310297 G N=queD PE=3 SV=1
MYTVIKRMEISASHKLKLSYESKCENLHGHNWIITVYCQAEQLNEDGMVVDFTHIKEVVKGQLDHKNLNDVLPCNPTAENIARWICEQVPHCVKVEVCESEGNRVIYEKD

SEQ ID NO: 18173 - protein, 110 aa, Bacteroides reticulotermitis
  misc_feature (1)..(110): tr|W4UWJ1|W4UWJ1_9BACE 6-carboxy-5,6,7,8-tetrahydropter in synthase OS=Bacteroides reticulotermitis JCM 10512 O X=1445607 GN=JCM10512_3736 PE=3 SV=1
MFTVVKRFTISAAHKLVLPYRSNCASLHGHNWTITVYCRSERLNADGMVIDFARIKDVIKEKLDHQNLNEVLPFNPTAENIARWVQKQIPQCFKVEVRETDDNLVIYEKE

SEQ ID NO: 18174 - protein, 110 aa, Bacteroides salanitronis
  misc_feature (1)..(110): tr|F0R8U2|F0R8U2_BACSH 6-carboxy-5,6,7,8-tetrahydropter in synthase OS=Bacteroides salanitronis (strain DSM 181 70 / JCM 13567 / BL78) OX=667015 GN=Bacsa_2503 PE=3 SV= 1
MYTVIKRMEISASHSLTLPYPSKCENLHGHNWIITVYCRSKELNEYGMVVDFSQIKEVVQGALDHRHLNDVLPFNPTAENIARWVCEQVPYCFKVEVRESEGNTVIYEKD

SEQ ID NO: 18175 - protein, 110 aa, Bacteroides salyersiae
  misc_feature (1)..(110): tr|A0A4Q5FHX2|A0A4Q5FHX2_9BACE 6-carboxy-5,6,7,8-tetrah ydropterin synthase OS=Bacteroides salyersiae OX=291644 GN=EAJ08_18040 PE=3 SV=1
MYTVIKRLEVSAAHSLNLSYRSKCENLHGHNWIITVYCRSAELNADGMVVDFSLIKKAVKERLDHRNLNEVLPFNPTAENIARWVCEQVPHCFKVEVQESESNTAVYEKD

SEQ ID NO: 18176 - protein, 110 aa, Bacteroides salyersiae; identical to SEQ ID NO: 18175
  misc_feature (1)..(110): tr|I8Z7N9|I8Z7N9_9BACE 6-carboxy-5,6,7,8-tetrahydropter in synthase OS=Bacteroides salyersiae CL02T12C01 OX=997 887 GN=HMPREF1071_00249 PE=3 SV=1

SEQ ID NO: 18177 - protein, 103 aa, Bacteroides sartorii
  misc_feature (1)..(103): tr|R9HXZ2|R9HXZ2_9BACE Queuosine biosynthesis protein Q ueD OS=Bacteroides sartorii OX=671267 GN=C802_04324 PE= 4 SV=1
MEISASHSLKLSYESKCENLHGHNWIITVYCRSEVLNEDGMVVDFTHIKEAVMGRLDHQNLNEVVPFNPTAENIARWVCEQVPACFKVEVRESEGNTVIYEKD

SEQ ID NO: 18178 - protein, 110 aa, Bacteroides sartorii
  misc_feature (1)..(110): tr|A0A4S2FJL8|A0A4S2FJL8_9BACE 6-carboxy-5,6,7,8-tetrah ydropterin synthase OS=Bacteroides sartorii OX=671267 G N=queD PE=3 SV=1
MYTVIKRMEISASHSLKLSYESKCENLHGHNWIITVYCRSEVLNEDGMVVDFTHIKEAVMGRLDHQNLNEVVPFNPTAENIARWVCEQVPACFKVEVRESEGNTVIYEKD

SEQ ID NO: 18179 - protein, 110 aa, Bacteroides sp.
  misc_feature (1)..(110): tr|R6EU90|R6EU90_9BACE 6-carboxy-5,6,7,8-tetrahydropter in synthase OS=Bacteroides sp. CAG:709 OX=1262748 GN=BN 760_01681 PE=3 SV=1
MYYVSKRFEVSGAHYVTTDRRTKCEELHGHNWIVIVHCKSMTLNEDGMVTDFTVIKQNIMSRIDHKNLNEVLPFSPTAENIAKWICDETENCYKVEIWESENNKAVYEKE

SEQ ID NO: 18180 - protein, 110 aa, Bacteroides sp.
  misc_feature (1)..(110): tr|A0A4P6RJG5|A0A4P6RJG5_9BACE 6-carboxy-5,6,7,8-tetrah ydropterin synthase OS=Bacteroides sp. A1C1 OX=2528203 GN=queD PE=3 SV=1
MYTVIKRMEVSAAHSLKLSYRSKCENLHGHNWIITVYCRSKELNADGMVVDFSHIKQVVKEQLDHHNLNEVLSFNPTAENIARWICDQIPTCFKVEVQESESNIAVYEED

SEQ ID NO: 18181 - protein, 110 aa, Bacteroides stercorirosoris; identical to SEQ ID NO: 18168
  misc_feature (1)..(110): tr|A0A1M6IVY9|A0A1M6IVY9_9BACE 6-carboxy-5,6,7,8-tetrah ydropterin synthase OS=Bacteroides stercorirosoris OX=8 71324 GN=queD PE=3 SV=1

SEQ ID NO: 18182 - protein, 110 aa, Bacteroides stercoris
  misc_feature (1)..(110): tr|A0A4Q5GAF2|A0A4Q5GAF2_BACSE 6-carboxy-5,6,7,8-tetrah ydropterin synthase OS=Bacteroides stercoris OX=46506 G N=queD PE=3 SV=1
MYTVIKRMEVSAAHSLKLSYQSKCENLHGHNWIITVYCRAKELNADGMVVDFSHIKQAVKEKLDHRNINEVLPFNPTAENMARWICNQIPACFKVEVQESESNIAIYEED

SEQ ID NO: 18183 - protein, 187 aa, Bacteroides stercoris
  misc_feature (1)..(187): tr|A0A108TDG7|A0A108TDG7_BACSE 6-pyruvoyl tetrahydropte rin synthase OS=Bacteroides stercoris OX=46506 GN=AA415 _00323 PE=4 SV=1
MRSITTFDLQYAHRFYGFRGEAQYLHGHTGVLTIEVEDTINTGVNMVYPCNEIQKIAWNVLKNFDHALVLREDDPLLPAVLGVYEKQGIKNGNPQNTMKGEAFKIELATAYPDARLVVTKETMTVEGMIKIVYALLKDKLNIAKITFTSGVNAGSAEFVTKNKIQRCPLCGVTLNEESACPKCGYKK

SEQ ID NO: 18184 - protein, 124 aa, Bacteroides thetaiotaomicron
  misc_feature (1)..(124): tr|R9H9A6|R9H9A6_BACT4 6-carboxy-5,6,7,8-tetrahydropter in synthase OS=Bacteroides thetaiotaomicron dnLKV9 OX=1 235785 GN=C799_02239 PE=3 SV=1
MFTVIKRMEISASHKLVLPYRSKCASLHGHNWIITVYCRSSRLNSEGMVVDFTRIKEVVTEKLDHQNLNEVLPFNPTAENIARWVCKQIPQCYKVEVQESEGNIVIYEKDAAANEKTPAAGETE

SEQ ID NO: 18185 - protein, 124 aa, Bacteroides thetaiotaomicron
  misc_feature (1)..(124): tr|A0A0P0EXK7|A0A0P0EXK7_BACT4 6-carboxy-5,6,7,8-tetrah ydropterin synthase OS=Bacteroides thetaiotaomicron OX= 818 GN=queD PE=3 SV=1
MFTVIKRMEISASHKLVLPYRSKCASLHGHNWIITVYCRSSRLNSEGMVVDFTRIKEVVTEKLDHQNLNEVLPFNPTAENIARWVCRQIPQCYKVEVQESEGNIVIYEKDAVANEKTPAAGETE

SEQ ID NO: 18186 - protein, 110 aa, Bacteroides uniformis; identical to SEQ ID NO: 18180
  misc_feature (1)..(110): tr|A0A139K5F7|A0A139K5F7_BACUN 6-carboxy-5,6,7,8-tetrah ydropterin synthase OS=Bacteroides uniformis OX=820 GN= queD PE=3 SV=1

SEQ ID NO: 18187 - protein, 110 aa, Bacteroides uniformis; identical to SEQ ID NO: 18180
  misc_feature (1)..(110): tr|A0A078RZF9|A0A078RZF9_BACUN 6-carboxy-5,6,7,8-tetrah ydropterin synthase OS=Bacteroides uniformis str. 3978 T3 ii OX=1339349 GN=queD PE=3 SV=1

SEQ ID NO: 18188 - protein, 103 aa, Bacteroides vulgatus
  misc_feature (1)..(103): tr|A0A069SV39|A0A069SV39_BACVU 6-pyruvoyl tetrahydropte rin synthase family protein OS=Bacteroides vulgatus str . 3975 RP4 OX=1339352 GN=M099_1141 PE=4 SV=1
MEISASHSLKLSYRSKCENLHGHNWIITVYCRSEVLNEDGMVVDFTHIKETVMGRLDHRNLNEVVSFNPTAENIARWVCEQIPTCFKVEVRESEGNTVIYEKD

SEQ ID NO: 18189 - protein, 103 aa, Bacteroides vulgatus; identical to SEQ ID NO: 18188
  misc_feature (1)..(103): tr|A0A174V505|A0A174V505_BACVU 6-pyruvoyl-tetrahydropte rin synthase OS=Bacteroides vulgatus OX=821 GN=queD PE= 4 SV=1

SEQ ID NO: 18190 - protein, 118 aa, Bacteroides xylanisolvens
  misc_feature (1)..(118): tr|A0A1Y4VDI8|A0A1Y4VDI8_9BACE 6-carboxy-5,6,7,8-tetrah ydropterin synthase OS=Bacteroides xylanisolvens OX=371 601 GN=B5E50_14155 PE=3 SV=1
MFTVIKRMEISASHKLVLPYRSKCASLHGHNWIITVYCRSARLNSEGMVVDFTRIKEVVTEKLDHQNLNEVLPFNPTAENIARWVCKQIPQCYKVEVQESEGNIVIYEKDSGSAEGQE

SEQ ID NO: 18191 - protein, 118 aa, Bacteroides xylanisolvens; identical to SEQ ID NO: 18170
  misc_feature (1)..(118): tr|I9UZ34|I9UZ34_9BACE 6-carboxy-5,6,7,8-tetrahydropter in synthase OS=Bacteroides xylanisolvens CL03T12C04 OX= 997892 GN=HMPREF1074_00515 PE=3 SV=1

SEQ ID NO: 18192 - protein, 145 aa, Bacteroides xylanolyticus
  misc_feature (1)..(145): tr|A0A2S6HNA9|A0A2S6HNA9_9BACE 6-carboxy-5,6,7,8-tetrah ydropterin synthase OS=Bacteroides xylanolyticus OX=384 636 GN=BXY41_112119 PE=3 SV=1
MYYLETEQSFDSAHFLKGYDGKCKNIHGHRWRVVIEIESPTLQKEGQSQGMIVDFTRLKQDLKEETDYFDHSLIMETGSLKPNTLVALKEEGFLLVEVNFRPTAEEFSRYFYERMSQRGYDVKSAKVYETPVNCASYGEDSHGRL

SEQ ID NO: 18193 - protein, 122 aa, Bacteroidetes bacterium
  misc_feature (1)..(122): tr|A0A2T2STY5|A0A2T2STY5_9BACT 6-pyruvoyl tetrahydropte rin synthase OS=Bacteroidetes bacterium QH_1_64_81 OX=1 919089 GN=BRD26_02525 PE=4 SV=1
MYQLMVRRDFVAQHYLTVPNCGPENEWHSHHFEVEVLLEGESLNENGYLVDIVEIEDALGALVDRYRDATLNDLPEFEGLNPSIEHFSRIFCTSLQERLDTDGLDTTVKIWEDEDAWASYSA

SEQ ID NO: 18194 - protein, 150 aa, Bacteroidetes bacterium
  misc_feature (1)..(150): tr|A0A1J5MCT1|A0A1J5MCT1_9BACT 6-carboxytetrahydropteri n synthase QueD OS=Bacteroidetes bacterium MedPE-SWsnd- G1 OX=1860094 GN=BM563_03080 PE=4 SV=1
MSKIRITKQFNFETGHALYGYDGKCKNVHGHSYKLSVTVIGTPISDTNNVKFGMVIDFKDLKDIVESEVVDVFDHATVFNKNTPHIELAKELKDRGHSVILVDYQPTSEMMIIDFAEKIKKRLPENIELHSLKLRETGTSHAEWYASDNQ

SEQ ID NO: 18195 - protein, 148 aa, Bacteroidetes sp.
  misc_feature (1)..(148): tr|A0A3N0ZL81|A0A3N0ZL81_9BACT 6-carboxytetrahydropteri n synthase OS=Bacteroidetes/Chlorobi group bacterium MS -B_bin-24 OX=2382228 GN=D9V87_07460 PE=4 SV=1
MYVRGEKMKVKIGKEFVWQMSHRLPFHKGLCSNIHGHTYKLRVSIVGEPDENGFLIDFYELMSAVQPIIDQLDHSFVVDSNDTEVIEFLRKNNFRYVIIPSTTTSENLAFWIANQIVEKFQKYPNLEKLIVRFYETFDSFAEVELPLR

SEQ ID NO: 18196 - protein, 143 aa, Bacteroidetes sp.
  misc_feature (1)..(143): tr|A0A3N0ZCY8|A0A3N0ZCY8_9BACT 6-carboxytetrahydropteri n synthase OS=Bacteroidetes/Chlorobi group bacterium Na ka2016 OX=2382229 GN=D9V84_09325 PE=4 SV=1
MIYITRRETFSSAHRLYNPTFSDEENERIYDKCNNPNWHGHNYVLEVTVCGYPDPNTGYLIDLKELKKIIRTHIISKVDHKNLNLDVEFLKGIIPTVENLAVAFWKELEDKFTNCKLYRIKLYETENNVVEYYGEKIDLHKFV

SEQ ID NO: 18197 - protein, 121 aa, Bacteroidia bacterium
  misc_feature (1)..(121): tr|A0A1Q3QCC9|A0A1Q3QCC9_9BACT 6-carboxy-5,6,7,8-tetrah ydropterin synthase OS=Bacteroidia bacterium 43-41 OX=1 895720 GN=BGO33_08825 PE=3 SV=1
MYKISKQFAFSAAHSLDGLPGDHPCTRLHGHNYVVTVHLRSKELNDTGFVKDYNELKMVKQYIDEHIDHRNLNDIMHPLNSSAENLARLFFDIFKPILPELYAVEVSETPKTSAIYEPDGQ

SEQ ID NO: 18198 - protein, 150 aa, Bacteroidia bacterium
  misc_feature (1)..(150): tr|A0A2G6PKT0|A0A2G6PKT0_9BACT 6-carboxytetrahydropteri n synthase QueD OS=Bacteroidia bacterium OX=2044936 GN= CSA07_00055 PE=4 SV=1
MIVRLTKEFAFEASHFLPGYRGRCANIHGHSYRLFVTIRGVPRDEPGHPEDGMLIDFGVLKRCVHTAVIDCLDHSLMVRGGSWAELTRLLDGRMRVVELPFQPTCENLLQWMAGRLMPLLPAGVSLFSLRLHETRTSYAEWFASEQGASG

SEQ ID NO: 18199 - protein, 132 aa, Baekduia soli
  misc_feature (1)..(132): tr|A0A5B8U0B7|A0A5B8U0B7_9ACTN 6-carboxytetrahydropteri n synthase OS=Baekduia soli OX=496014 GN=FSW04_01795 PE =4 SV=1
MFSVTIRDHMMIAHSLRGATFGPAQRLHGATYVVDATFRRATLDEDGIVVDIARAAGALHVVVAELGYRNLDDEPALAGLNTTTEELARVVADRLADRAAAGDLGDGGRRLDGLAVTLHESHVAWAGYERSL

SEQ ID NO: 18200 - protein, 130 aa, Baia soyae
  misc_feature (1)..(130): tr|A0A4R2RQT8|A0A4R2RQT8_9BACL 6-carboxy-5,6,7,8-tetrah ydropterin synthase OS=Baia soyae OX=1544746 GN=EDD57_1 2225 PE=3 SV=1
MSQGMYTLVKHFWISCAHSVPGAGKCERIHGHNYKVTFCVQGNSLDSSHMLIDFREVKHAIEKQFDHHYLNDFPEFSPELGGAAPSTEKVAEVFFERIKQLCEKKENCPIMKWVEVEETNEAFARYEEMN

SEQ ID NO: 18201 - protein, 128 aa, Baia soyae
  misc_feature (1)..(128): tr|A0A4R2S188|A0A4R2S188_9BACL PreQ(0) biosynthesis pro tein QueD OS=Baia soyae OX=1544746 GN=EDD57_10417 PE=4 SV=1
MQGKYTLTKHFWISCAHSVPGAGKCERIHGHNYKVTFCVDGTKLDESQMLIDFRLVKHVIEKKYDHHLLNDFPEFNTELGGAAPSTEKVAEIFFYAIDQLCEQKSNQPTLRWVEVQETNEAFVRFERA

SEQ ID NO: 18202 - protein, 215 aa, Balnearium lithotrophicum
  misc_feature (1)..(215): tr|A0A521APQ3|A0A521APQ3_9BACT 6-pyruvoyltetrahydropter in/6-carboxytetrahydropterin synthase OS=Balnearium lit hotrophicum OX=223788 GN=SAMN06269117_10266 PE=4 SV=1
MFEISKTFEFSSAHSVHSQRLNPEWAGNSYPKCRRLPGHGHNYRLKVFLSSDKLDESQMVTDFGHLKWLKEFIDDCFDHKLILGMDDPAFHFLLERLGLTNGNSFIIPHGKAKSTIVDEHFRIETKEISEISLKDLNRFNFITFNSYSPNEISPITDFYQRLIDGIAFFKGSPTSENLARFFFKFVSENVKPLGVKCSRVKIYETPTSCASYFEE

SEQ ID NO: 18203 - protein, 143 aa, Balneola sp.
  misc_feature (1)..(143): tr|A0A1B6YE23|A0A1B6YE23_9BACT 6-carboxy-5,6,7,8-tetrah ydropterin synthase OS=Balneola sp. EhC07 OX=1849360 GN =A8B79_00020 PE=3 SV=1
MVLVTRKTHFNAAHRLHNPSKSDEWNKKTFGKCNHPNWHGHNYVMEVTVAGEPNPETGFIIDLSDLKQIIEENIVEPCDHKNLNLDVPFLEGILPSSENLVKAFYEELKEEVEEASSEGGVLYSVKLYETERNIAEYCPFKKV

SEQ ID NO: 18204 - protein, 143 aa, Balneola sp.
  misc_feature (1)..(143): tr|A0A2D8CHJ0|A0A2D8CHJ0_9BACT 6-pyruvoyl tetrahydrobio pterin synthase OS=Balneola sp. OX=2024824 GN=CL667_093 10 PE=4 SV=1
MTFVTRRAHFNAAHRLHNPDKSEEWNKKTFGKCNLPNWHGHNYVIEVTVSGEPDPETGYTIDLGKLKAIMKEKVLDPCDHRNLNLDVDFLDGIIPTTENLVRAFYEQLRPDVEEACARGGKLYKVKLFETERNIAEYCPYVGL

SEQ ID NO: 18205 - protein, 144 aa, Balneolaceae bacterium
  misc_feature (1)..(144): tr|A0A3D1G8A2|A0A3D1G8A2_9BACT 6-carboxy-5,6,7,8-tetrah ydropterin synthase OS=Balneolaceae bacterium OX=205351 6 GN=DEQ34_03785 PE=3 SV=1
MIFVTRKTHFNAAHRLHNPNRSDDWNSETYGKCNYPNWHGHNYIIEVTVAGSPDPETGYVIDLGDLKSIINEKVLEPCDHRNLNIDVPFLEGVIPTSENLVKAFYDQLKDEVEAAASEGSILYSVKLFETERNIAEYCPYITIG

SEQ ID NO: 18206 - protein, 101 aa, Balneolaceae bacterium
  misc_feature (1)..(101): tr|A0A359E088|A0A359E088_9BACT 6-pyruvoyl tetrahydrobio pterin synthase (Fragment) OS=Balneolaceae bacterium OX =2053516 GN=DEG32_00710 PE=4 SV=1
MTFVTRRAHFNAAHRLHNPDKSEEWNKKTFGKCNLPNWHGHNYVIEVTVSGEPDPETGYTIDLGKLKAIMKEKVLDPCDHRNLNLDVDFLDGIIPTTENLV

SEQ ID NO: 18207 - protein, 119 aa, Barnesiella intestinihominis
  misc_feature (1)..(119): tr|K0X7Y3|K0X7Y3_9BACT 6-carboxy-5,6,7,8-tetrahydropter in synthase OS=Barnesiella intestinihominis YIT 11860 O X=742726 GN=HMPREF9448_01648 PE=3 SV=1
MYYVAKTMEIAGAHSLHLSYESKCEKLHGHNWIITVYCKAKELNQDGMVCDFKHIKDKIHGYLDHGNLNELLPFNPTAENIAKWITDQIPECYKTKVQESGGNTAIYEIDDFENENIDK

SEQ ID NO: 18208 - protein, 119 aa, Barnesiella sp.
  misc_feature (1)..(119): tr|A0A1Y4GXX9|A0A1Y4GXX9_9BACT 6-carboxy-5,6,7,8-tetrah ydropterin synthase OS=Barnesiella sp. An22 OX=1965590 GN=B5F38_01260 PE=3 SV=1
MYYVAKTMEIAGAHALTLSYESKCEQLHGHNWIVTVYCKARELNADGMVCDFKHIKDKIHGYLDHGNLNELLPFNPTAENIARWITEQIPECYKTKVQESGGNIAVYRVDDCADDDFAL

SEQ ID NO: 18209 - protein, 119 aa, Barnesiella sp.
  misc_feature (1)..(119): tr|A0A1Y3WYE1|A0A1Y3WYE1_9BACT 6-carboxy-5,6,7,8-tetrah ydropterin synthase OS=Barnesiella sp. An55 OX=1965646 GN=B5G10_01000 PE=3 SV=1
MYYVAKTMEIAGAHALTLSYESKCEQLHGHNWIVTVYCKAEQLNADGMVCDFKHIKDKIHGYLDHGNLNELLPFNPTAENIARWITEQIPECYKTKVQESGGNIAVYRVDDCKDDDFAL

SEQ ID NO: 18210 - protein, 119 aa, Barnesiella viscericola
  misc_feature (1)..(119): tr|W0ER56|W0ER56_9BACT 6-carboxy-5,6,7,8-tetrahydropter in synthase OS=Barnesiella viscericola DSM 18177 OX=880 074 GN=BARVI_00615 PE=3 SV=1
MYYVAKTMEIAGAHALTLSYESKCEQLHGHNWIITVYCKAEELNADGMVCDFKHIKDQIHGYLDHGNLNELLPFNPTAENIARWITDQIPQCYKTKVQESGGNIAVYRVDDCKDDDFAL

SEQ ID NO: 18211 - protein, 139 aa, Basilea psittacipulmonis
  misc_feature (1)..(139): tr|A0A077DEX7|A0A077DEX7_9BURK 6-carboxy-5,6,7,8-tetrah ydropterin synthase OS=Basilea psittacipulmonis DSM 247 01 OX=1072685 GN=IX83_08355 PE=3 SV=1
MKVSKTFSFDAAHMLDTHDGKCKNLHGHTYTLIVTVSGDLITDGPKKGMVIDFSDLKAKVKSEIIDRLDHAYLYDQTNAQERELAEVLERQGKKTFAFKQRTTAENLTIYVYRCLRDAGLDVSNVRLYETPNSFCEYGE

SEQ ID NO: 18212 - protein, 125 aa, Bathymodiolus azoricus
  misc_feature (1)..(125): tr|A0A1H6K6M8|A0A1H6K6M8_9GAMM 6-carboxy-5,6,7,8-tetrah ydropterin synthase OS=Bathymodiolus azoricus thioautot rophic gill symbiont OX=235205 GN=BAZSYMA_ACONTIG28818_ 0 PE=3 SV=1
MFVLKIVTDFASAHSLRNYPGDCSRLHGHNWQVEVSVESEVVDALGIAIDFREIKKQTKEVVKRLDHQYLNEIPPFDELNPTAENIAKYFYQEVGVLINNQDVRVCEVIIWETPRASVAYSEPRL

SEQ ID NO: 18213 - protein, 122 aa, Bathymodiolus brooksi
  misc_feature (1)..(122): tr|A0A482YSC3|A0A482YSC3_9BACT 6-carboxy-5,6,7,8-tetrah ydropterin synthase OS=Bathymodiolus brooksi thiotrophi c gill symbiont OX=1052209 GN=BBROOKSOX_308 PE=3 SV=1
MFVLKIVTDFGAAHSLRDYPGDCARLHGHNWGVEVSVEAQELDASGIAIDFREIKKQTKAIVKRLDHQYLNEIPPFDILNPTAENIAKYFYQAVGKLINNQNVRVSEVIIWETPRASVSYSE

SEQ ID NO: 18214 - protein, 125 aa, Bathymodiolus heckerae
  misc_feature (1)..(125): tr|A0A483A6H9|A0A483A6H9_9BACT 6-carboxy-5,6,7,8-tetrah ydropterin synthase OS=Bathymodiolus heckerae thiotroph ic gill symbiont OX=1052212 GN=BHECKSOX2_1476 PE=3 SV=1
MFVLKIVTDFASAHSLRNYPGNCARLHGHNWQVEVSVESEVLDDTGIAIDFREIKKQTKAVVKRLDHQYLNEIKPFDKLNPTAENIAKYFYEEAGVLINNQAVRVCEVIIWETLRASVTYSEPKP

SEQ ID NO: 18215 - protein, 123 aa, Bathymodiolus heckerae
  misc_feature (1)..(123): tr|A0A482Z0P4|A0A482Z0P4_9BACT 6-carboxy-5,6,7,8-tetrah ydropterin synthase OS=Bathymodiolus heckerae thiotroph ic gill symbiont OX=1052212 GN=BHECKSOX_2331 PE=3 SV=1
MFVLKIVTDFAAAHSLRDYPGDCSRLHGHNWQVEVLVASKVLDDVGMAIDFRDIKKQTKVVVKRLDHQYLNEVTPFDQLNPTAENIAKYFFEEVGKLINTDDVRVKEITIWETLRASVTYSED

SEQ ID NO: 18216 - protein, 117 aa, Bathymodiolus platifrons
  misc_feature (1)..(117): tr|A0A1Z5HCG9|A0A1Z5HCG9_9GAMM 6-carboxy-5,6,7,8-tetrah ydropterin synthase OS=Bathymodiolus platifrons methano trophic gill symbiont OX=113268 GN=bplSymb_SCF06201P001 PE=3 SV=1
MYTISKQFNFSASHIIEGLPEAHPCSRLHGHNYVVELVLGAEELNETGFVVDYNELVVFKNMIDETLDHRHLNDVLTGPTTAESIAKYLYEHAKSIWQEVLSVSVSETPKTNATYRP

SEQ ID NO: 18217 - protein, 122 aa, Bathymodiolus thermophilus
  misc_feature (1)..(122): tr|A0A1J5TX90|A0A1J5TX90_9GAMM 6-carboxy-5,6,7,8-tetrah ydropterin synthase OS=Bathymodiolus thermophilus thioa utotrophic gill symbiont OX=2360 GN=BGC33_06735 PE=3 SV =1
MFVLKIVTDFGAAHSLRDYPGDCARLHGHNWGVEVSVEAQELDVSGIAIDFREIKKQTKAVVKRLDHQYLNEIPPFDVLNPTAENIAKYFYQAVGKLINNQDVRVSEVIIWETPRASVAYSE

SEQ ID NO: 18218 - protein, 129 aa, Baumannia cicadellinicola
  misc_feature (1)..(129): tr|Q1LTP0|Q1LTP0_BAUCH 6-carboxy-5,6,7,8-tetrahydropter in synthase OS=Baumannia cicadellinicola subsp. Homalod isca coagulata OX=374463 GN=BCI_0219 PE=3 SV=1
MFSLMNKNTALTTTLFKDFTFESAHYLPYVPAGHKCGRIHGHSFRVRIELTAKIDLYTGWIMDFAELKAVCQPIIEQLDHSYLNKIPGLENPTSEVLAQWIWQRLLPNLPLLSAVYIKETCNSGCVYRG

SEQ ID NO: 18219 - protein, 135 aa, Bdellovibrio bacteriovorus
  misc_feature (1)..(135): tr|Q6MLY9|Q6MLY9_BDEBA 6-carboxy-5,6,7,8-tetrahydropter in synthase OS=Bdellovibrio bacteriovorus (strain ATCC 15356 / DSM 50701 / NCIB 9529 / HD100) OX=264462 GN=ygc M PE=3 SV=1
MWSWTYSPRNDYSISMKFELKQHFQIESARFLPHLPASHPCSRMHGHSFKLILTLVGDLDPKIGWVIDYNDIQALMKPLLDQIDHRVLNEVPGLENPTSELLAKWLYDKARPFLPTLVKVTVAETPATECSYPVI

SEQ ID NO: 18220 - protein, 129 aa, Bdellovibrio bacteriovorus
  misc_feature (1)..(129): tr|A0A1Z3N8G9|A0A1Z3N8G9_BDEBC 6-pyruvoyl tetrahydropte rin synthase OS=Bdellovibrio bacteriovorus OX=959 GN=B9 G79_09245 PE=4 SV=1
MIITLKSPFSAAHFYAQPAWDEQKNRETFARCYTQYGHGHNYVLEAGFHCQNSNWQQQQQHYQSVLNKLTSVLDHEHLNFVIPEFKTNIPTTENICLYFLDKLKSQVKSEEISYLRLYEMDNIWTEIRL

SEQ ID NO: 18221 - protein, 163 aa, Bdellovibrio exovorus
  misc_feature (1)..(163): tr|M4VQ88|M4VQ88_9PROT 6-pyruvoyl-tetrahydropterin synt hase, putative OS=Bdellovibrio exovorus JSS OX=1184267 GN=A11Q_1103 PE=4 SV=1
MNKTTLHLAKQNFKFSSAHFLIFDEKSAEMLHGHNYQVEVDIFCSSEDAIGGKGYFVDFNVLKKIIKDQCDIWDEHILLPQAHSDMKYQESANGKNYEITFRDRFYSFPINETIWLPIQNTSVENLSWLFAKSIFEKMKSLGVEKVRVSVEETRGQKASTEVS

SEQ ID NO: 18222 - protein, 119 aa, Bdellovibrio exovorus
  misc_feature (1)..(119): tr|M4V7W4|M4V7W4_9PROT 6-carboxy-5,6,7,8-tetrahydropter in synthase OS=Bdellovibrio exovorus JSS OX=1184267 GN= A11Q_1102 PE=3 SV=1
MKYELKQHFQIESARFLPHLPADHPCSRMHGHSFKIILTLKGDLDPQIGWVVDYHQITQVMQPLLKQLDHRVLNEVEGLENPTSELLAKWIYERALKTLPILQRVTIMETPATECTYPV

SEQ ID NO: 18223 - protein, 129 aa, Bdellovibrio sp.
  misc_feature (1)..(129): tr|A0A514XIE5|A0A514XIE5_9PROT 6-carboxytetrahydropteri n synthase OS=Bdellovibrio sp. ZAP7 OX=2231053 GN=DOM22 _10470 PE=4 SV=1
MILTLKSSFSSAHLYHQPLWSSEENLKNFGRCFTEHGHGHNYTLEVGFHLTEDELKAKLEEYRQLLKSLTSVLDHEHLNFAIPEFKTKIPTTENIALYFMEKLKEHLPQSQIAHIRLYEMNDLWTEIQP

SEQ ID NO: 18224 - protein, 168 aa, Bdellovibrio sp.
  misc_feature (1)..(168): tr|A0A317JHI3|A0A317JHI3_9PROT 6-pyruvoyl tetrahydropte rin synthase OS=Bdellovibrio sp. OX=28201 GN=C5B49_1097 0 PE=4 SV=1
MQSHTTLHLYKQNFRFSAAHFLIFDAHRAERLHGHNYQVEVELRGEQFNHQSGYYIEFKEIKKIIRDRLARWNETVLMPARNEEMKFATHGTTLEIIFRERRYAFPVSEVVLLPTNNTSVEHLSRILAEDLMGLLNAYGVQTIRVQVEETQGQAASCTLTRKSRVVDP

SEQ ID NO: 18225 - protein, 138 aa, Bdellovibrionaceae bacterium
  misc_feature (1)..(138): tr|A0A2E1Q6E9|A0A2E1Q6E9_9PROT 6-pyruvoyl tetrahydrobio pterin synthase OS=Bdellovibrionaceae bacterium OX=2026 715 GN=CL676_11790 PE=4 SV=1
MTPALQLSRALYFDCAHSYQVKSWTQDENLKEFGACFSPVGHGHTYRLEAFVEGPVDPVSGMILNLRDLDDLLKLSVTPLQGKFLDREVPEFLEKVPTTENIALFLFEKLAALLTEKKLKLCRIRLFETEDLWVDCQS

SEQ ID NO: 18226 - protein, 201 aa, Bdellovibrionaceae bacterium
  misc_feature (1)..(201): tr|A0A2E7GB91|A0A2E7GB91_9PROT Uncharacterized protein OS=Bdellovibrionaceae bacterium OX=2026715 GN=CL678_071 50 PE=4 SV=1
MFVFKFNSIKSSGVRKPKEFKFMYQLSFSYSFESAHRFTRCESIPCMTPHGHSWRAVLWIQSLHGSLNENDMVTEFQSLKKQWKKFIQQTVDHSFFHHENDPLLPYLNQEIPKFRGLSFPGDPTTEMIATCFLLKAFAMHPKEIQAKPFKIEVFETQTNFVSYTAESPSEIFKNHPKLKSEKQWWNQAEPYSRERFLNSSK

SEQ ID NO: 18227 - protein, 160 aa, Bdellovibrionales bacterium
  misc_feature (1)..(160): tr|A0A1F3SSP4|A0A1F3SSP4_9PROT Uncharacterized protein OS=Bdellovibrionales bacterium GWA2_49_15 OX=1797384 GN =A2X86_02290 PE=4 SV=1
MESCARRIHFCYGHRVMHHESKCATLHGHNGVIWIHATPVEGLDALGRVIDFSVLKAKVGAWVEENWDHTMILFKDDHKTLELVAQAPSYKKPFIFNVNPTAENLAKYLLWEVCPKVLKGQGVIVHKITFFETENCQAEQSLSPDSPEVLKLYGLPSLGK

SEQ ID NO: 18228 - protein, 104 aa, Bdellovibrionales bacterium
  misc_feature (1)..(104): tr|A0A1F3SPP7|A0A1F3SPP7_9PROT 6-carboxytetrahydropteri n synthase QueD OS=Bdellovibrionales bacterium RBG_16_4 0_8 OX=1797388 GN=A2Z20_00120 PE=4 SV=1
MLPNVPPGHKCGRLHGHSYKMTLIVRGPLLKHEGWIMDFSDIKLLAKPVIDKLDHRYLNEIPGLENPTAEVLARWIYENLQVSITGLYQVIINETCTAQCRYPV

SEQ ID NO: 18229 - protein, 118 aa, Beggiatoa alba
  misc_feature (1)..(118): tr|I3CF74|I3CF74_9GAMM 6-carboxy-5,6,7,8-tetrahydropter in synthase OS=Beggiatoa alba B18LD OX=395493 GN=BegalD RAFT_1373 PE=3 SV=1
MEIYKRFSIEAAHRLPHVPEGHKCARLHGHSFQVSLYVSGAVDVHTGWIMDFGDIKSAFQPLYAQLDHHYLNEIAGLENPTSENLARWIWQRLKPVLPALSKIVIEETCTSGCVYTGE

SEQ ID NO: 18230 - protein, 118 aa, Beggiatoa leptomitoformis
  misc_feature (1)..(118): tr|A0A2N9YG70|A0A2N9YG70_9GAMM 6-carboxy-5,6,7,8-tetrah ydropterin synthase OS=Beggiatoa leptomitoformis OX=288 004 GN=BLE401_12260 PE=3 SV=1
MEIYKKFSIEAAHRLPNVPEGHKCARLHGHSFQITIYVSGTVAPHTGWIMDFGDIKSAFQPIYARLDHYYLNEIEGLDNPTSENIARWIWLHLKPVLPALSKIVIEETCTSGCVYTGD

SEQ ID NO: 18231 - protein, 148 aa, Beggiatoa sp.
  misc_feature (1)..(148): tr|A7BS03|A7BS03_9GAMM 6-carboxy-5,6,7,8-tetrahydropter in synthase OS=Beggiatoa sp. PS OX=422289 GN=BGP_0825 P E=3 SV=1
MNMYKIIVKIKYEYAHRLLHHTGKCRHVHGHSGEAIIELASNTLNDNGFVMDFADVKTPLKKWINQFWDHAYLANESDPLLPAFKSENMNIYTFPEEPTAEVMARHLFEQAAILERPPGVILTRVTIRETCTGQASYQPKELEIAYEI

SEQ ID NO: 18232 - protein, 119 aa, Beggiatoa sp.
  misc_feature (1)..(119): tr|A0A1W9X0R6|A0A1W9X0R6_9GAMM 6-carboxy-5,6,7,8-tetrah ydropterin synthase OS=Beggiatoa sp. 4572_84 OX=1972449 GN=B6247_11245 PE=3 SV=1
MEIYKKFSIEAAHRLPNVPEGHKCSRLHGHSFQVTIHVCGEVGAHSGWVMDFADIKKAFKPVFEQLDHHYLNDIEGLENPTSENLARWIWLRLKPTLPGLCKITIQETCTSGCVYGGEA

SEQ ID NO: 18233 - protein, 117 aa, Beijerinckia indica
  misc_feature (1)..(117): tr|B2IGN7|B2IGN7_BEII9 6-carboxy-5,6,7,8-tetrahydropter in synthase OS=Beijerinckia indica subsp. indica (strai n ATCC 9039 / DSM 1715 / NCIB 8712) OX=395963 GN=Bind_2 178 PE=3 SV=1
MKITQAFHFEAAHRLPKVPEGHRCANLHGHSYRVELYLEGPVDPDTGFVIDFFDIEAVFGPLLHRLDHHYLNEIEGLENPTAELIAVWIWDRVKPSLPQLVKVIVYETPDCWAEYEG

SEQ ID NO: 18234 - protein, 132 aa, Beijerinckia sp.
  misc_feature (1)..(132): tr|A0A1H4TCW4|A0A1H4TCW4_9RHIZ 6-pyruvoyl-tetrahydropte rin synthase OS=Beijerinckia sp. 28-YEA-48 OX=1882748 G N=SAMN05443249_2939 PE=4 SV=1
MYAIEVRDHIMIAHSFKGDLFGPAQKLHGATFVVDVAFFRESLTADGVVVDIGRAHEALKATLAPLNYNNLDTLSQFAGQQTTTEFLSKHIFDAMAAAARTGALGPGGEGIARIRVTLHESHVARAWFEGPV

SEQ ID NO: 18235 - protein, 118 aa, Beijerinckiaceae bacterium
  misc_feature (1)..(118): tr|A0A2N8MDJ8|A0A2N8MDJ8_9RHIZ 6-carboxy-5,6,7,8-tetrah ydropterin synthase OS=Beijerinckiaceae bacterium OX=19 78229 GN=queD PE=3 SV=1
MKISQAFRFEAAHTLPNVAEGHRCRRLHGHSYRVELRLEGAVDPITGFVADFLAIEAAFKPLLERLDHRFLNDIEGLENPTAENIAIWIWHRIKTPLPQLARVVVFETQDCFAEYDGI

SEQ ID NO: 18236 - protein, 118 aa, Beijerinckiaceae bacterium
  misc_feature (1)..(118): tr|A0A522GH17|A0A522GH17_9RHIZ 6-carboxy-5,6,7,8-tetrah ydropterin synthase OS=Beijerinckiaceae bacterium OX=19 78229 GN=queD PE=3 SV=1
MRITQAFSFESAHFLPKVPKTHRCHAMHGHSYRVELKLEGKVDPATGFVVDFFEIEHAFGPLRAKLDHHCLNEVEGLENPTAENIAVWIFTRVKKALPQLAGVVVYETKDCYAEYSGE

SEQ ID NO: 18237 - protein, 139 aa, Belliella baltica
  misc_feature (1)..(139): tr|I3Z0Y7|I3Z0Y7_BELBD 6-pyruvoyl-tetrahydropterin synt hase OS=Belliella baltica (strain DSM 15883 / CIP 10800 6 / LMG 21964 / BA134) OX=866536 GN=Belba_0238 PE=4 SV= 1
MIHVCRKEHFNAAHKLWNPKWSEEKNLEVFGPCANANWHGHNFELIVTVKGIPDSETGFVVDLKQLSNVIRELVIEKVDHKNLNLDVDFMEGKMASCEILIMEFWKILKPAVDEITPHGSLYKLTLYETPRNFVEYFGK

SEQ ID NO: 18238 - protein, 135 aa, Belliella baltica
  misc_feature (1)..(135): tr|I3Z5Q7|I3Z5Q7_BELBD 6-carboxy-5,6,7,8-tetrahydropter in synthase OS=Belliella baltica (strain DSM 15883 / CI P 108006 / LMG 21964 / BA134) OX=866536 GN=Belba_2000 P E=3 SV=1
MLSITKIFTFEAAHRISDHDGACSQLHGHSYSLHVTVSGDDLKKDMLLDFKDLKKIVQEEVIEVFDHALLLKESEKNLIDFEKIGQKIFWMPYEPTAERILLWMKDRIAPQLPSHVKLEGLTLYETATCYARWKD

SEQ ID NO: 18239 - protein, 139 aa, Belliella buryatensis
  misc_feature (1)..(139): tr|A0A239DSE2|A0A239DSE2_9BACT 6-pyruvoyltetrahydropter in/6-carboxytetrahydropterin synthase OS=Belliella bury atensis OX=1500549 GN=SAMN06295967_10811 PE=4 SV=1
MIHVCRKEHFNAAHKLWNPNWSEEKNVEVFGPCANVNWHGHNFELIVTVRGLPDPDTGFVVDLKELSTLIRKLIIDKVDHKNLNLDVEFMIGKMASCENLVLEFWKILKPEVDRIVSHGSLYKLTLYETPRNFVEYFGE

SEQ ID NO: 18240 - protein, 136 aa, Belliella buryatensis
  misc_feature (1)..(136): tr|A0A239G551|A0A239G551_9BACT 6-pyruvoyltetrahydropter in/6-carboxytetrahydropterin synthase OS=Belliella bury atensis OX=1500549 GN=SAMN06295967_114100 PE=4 SV=1
MKVAVYRKEHFNAAHRLHNPNWSDEKNQEIFGKCNNPNFHGHNYELIVKLVGPVDPDTGYVFDMKVLSDLIKVNVLNRFDHKNLNLDTNEFKNLNPTAENIAVVIWNILRTEIDTKYDLTIRLYETERNFVEYDGN

SEQ ID NO: 18241 - protein, 136 aa, Belliella pelovolcani
  misc_feature (1)..(136): tr|A0A1N7PV92|A0A1N7PV92_9BACT 6-pyruvoyltetrahydropter in/6-carboxytetrahydropterin synthase OS=Belliella pelo volcani OX=529505 GN=SAMN05421761_12132 PE=4 SV=1
MKVAVYRKEHFNAAHRLHNPNWSDEKNQEIFGKCNNPNFHGHNYELIVKLVGPVDPETGYVFDMKVLSDLIKVNILNRFDHKNLNLDTHEFRNLNPTAENIAVVIWNILRTEIDTKYDLTIRLYETERNFVEYDGN

SEQ ID NO: 18242 - protein, 139 aa, Belliella pelovolcani
  misc_feature (1)..(139): tr|A0A1N7Q445|A0A1N7Q445_9BACT 6-pyruvoyltetrahydropter in/6-carboxytetrahydropterin synthase OS=Belliella pelo volcani OX=529505 GN=SAMN05421761_1291 PE=4 SV=1
MIHVCRKEHFNAAHKLWNPNWSEEKNVEVFGPCANANWHGHNFELIVTVKGLPDPETGFVVDLKDLSSLIRKLIIDRVDHKNLNLDVDFMLGKMASCENLVMEFWKILKPEVDKIVANGSLYKLTLYETPRNFVEYFGE

SEQ ID NO: 18243 - protein, 125 aa, Bellilinea caldifistulae
  misc_feature (1)..(125): tr|A0A0P6XE97|A0A0P6XE97_9CHLR 6-pyruvoyl tetrahydropte rin synthase OS=Bellilinea caldifistulae OX=360411 GN=A C812_00905 PE=4 SV=1
MYRVGVLRDFIAQHYLIGGDWGAENQLHSHPYRLELELSGKQLDQHQYLVDIVAIEQALDRLIAYYRDHTLNDLPEFAGINPSLEHFARVLCESLAQQFLHGAVERISVKLWENSLAWAGYEVNR

SEQ ID NO: 18244 - protein, 107 aa, Belnapia rosea
  misc_feature (1)..(107): tr|A0A1G7B5H9|A0A1G7B5H9_9PROT 6-pyruvoyl-tetrahydropte rin synthase OS=Belnapia rosea OX=938405 GN=SAMN0448777 9_102320 PE=4 SV=1
MMTIWAECTVSAAHRFADYDMHGHTYIVRVSIREAEDGFLNAETFRDELLRIRRGVDHRCLNDVLETPTMEELARWFARELRKERYDVTEVQISRPEGLGCRLVLAG

SEQ ID NO: 18245 - protein, 138 aa, Belnapia rosea
  misc_feature (1)..(138): tr|A0A1G6JE50|A0A1G6JE50_9PROT 6-pyruvoyl-tetrahydropte rin synthase OS=Belnapia rosea OX=938405 GN=SAMN0448777 9_1001148 PE=4 SV=1
MFSLTVCDHIMVAHSFRGAEFGPAQRLHGATFAVEAEFRAERLDALHLLVDIGLAKVELRRALDGLDYRNLDAEPAFAGLNTTTEFLCHHIHGLLVAALKAGRLGPQAENVTGLKVLLRESPNAWAAYEGPIGEGPTA

SEQ ID NO: 18246 - protein, 142 aa, Bergeriella denitrificans
  misc_feature (1)..(142): tr|A0A378UI02|A0A378UI02_BERDE 6-carboxy-5,6,7,8-tetrah ydropterin synthase OS=Bergeriella denitrificans OX=494 GN=queD PE=3 SV=1
MKITKIFTFDSSHMLDGHDGKCQNLHGHTYTLEITVSDGLIPNGAKSGMVMDFTDLKAIVKQAIIEPFDHAFIYDGSNPREQQIAALLEGWNMKTLRLPFRTTAEHMSIEMYGRLKKAGLNVCRIKLWETPTSCAEYEGDHP

SEQ ID NO: 18247 - protein, 148 aa, Bergeyella zoohelcum
  misc_feature (1)..(148): tr|K1M1H3|K1M1H3_9FLAO 6-carboxy-5,6,7,8-tetrahydropter in synthase OS=Bergeyella zoohelcum ATCC 43767 OX=88309 6 GN=HMPREF9699_00637 PE=3 SV=1
MIRITKIFTFETAHVLYNYDGKCKNMHGHSYKLFVTVKGTPINDINHCKNGMVIDFGDIKSIVKEEIVDAWDHAVLVNAASPHVDLGKDLETRGHKVIFCPYQPTCENMLLDIAQKIQRRLPETVSLAYLKLHETENSYGEWFAEDNE

SEQ ID NO: 18248 - protein, 148 aa, Bergeyella zoohelcum
  misc_feature (1)..(148): tr|A0A380ZSH5|A0A380ZSH5_9FLAO 6-carboxy-5,6,7,8-tetrah ydropterin synthase OS=Bergeyella zoohelcum OX=1015 GN= NCTC11661_01477 PE=3 SV=1
MIRITKIFTFETAHVLYNYDGKCKNMHGHSYKLFVTVKGTPINDINHCKNGMVIDFGDIKSIVKEEIVDAWDHAVLVNAASPHVDLGKDLETKGHKVIFCPYQPTCENMLLDIAQKIQRRLPETVSLAYLKLHETENSYGEWFAEDNE

SEQ ID NO: 18249 - protein, 282 aa, Bermanella marisrubri
  misc_feature (1)..(282): tr|Q1N6S7|Q1N6S7_9GAMM Uncharacterized protein OS=Berma nella marisrubri OX=207949 GN=RED65_08994 PE=4 SV=1
MKLFVDNLTNVDVSYLDANRGLVGESWLTGIMLDGKLDQQSMICDFGIVKRNAKQWLDENIDHRLVIPSQMPGLHIEEHDTQITVRCPHPTGGEFVCTAPQQAFCFIDCDEINNQNVAEWLSKELSSTIPGDIANLTISLQNEMIGGAYYHYSHGLKKHDGNCQRIAHGHRSKIEIFVDGARQPELEKEWAQKWQDIYVGTLEDLHNTTSIHDIEHYHYRYEAPQGKFDLTLPTSVCYNMDSDTTVEQIARHIAKTLLESGHTVTVKAFEGVGKGAIAAYEQ

SEQ ID NO: 18250 - protein, 281 aa, Bermanella sp.
  misc_feature (1)..(281): tr|A0A1Y5DER4|A0A1Y5DER4_9GAMM Uncharacterized protein OS=Bermanella sp. 47_1433_sub80_T6 OX=1856278 GN=A9Q73_ 05075 PE=4 SV=1
MKLFVENLSNVDVSYLDAKRGLVGESWLAGLVLTGNLDNQSMICDFGIVKRNAKAWLDEHIDHRLVVPTQMQGLHISKHASLLTIKFPHPLGGEFVCSAPEQAFCLIDTDTINETTVATWLEQKLSDSIPGDIEKLNVKLDCELMGGAYYHYSHGLKKHDGNCQRIAHGHRSKIEIFIDGARQPELEKNWAKNWQDIYVGTSEDLHNQPTIEGIEHNHYRYEAPQGQFSLTLPKAACYDIKTDTTVEQIANHIATVLLESGHSVTVKAFEGVGKGAMATYE

SEQ ID NO: 18251 - protein, 141 aa, Bernardetia litoralis
  misc_feature (1)..(141): tr|I4AQV5|I4AQV5_BERLS 6-pyruvoyl-tetrahydropterin synt hase OS=Bernardetia litoralis (strain ATCC 23117 / DSM 6794 / NBRC 15988 / NCIMB 1366 / Sio-4) OX=880071 GN=Fl eli_4042 PE=4 SV=1
MVYLCRKEYFCASHRLFNPAWSDEKNEEEFGICSNQYFHGHNFELIVKVKGKINPNTGCVLDLKKLGKLIRTEIIDKVDHKNLNIQVDFLKGKIPSCEIVIMEFWKILAPKILELSEKNAVLHSLTLFETEKNYVEYFGEE

SEQ ID NO: 18252 - protein, 135 aa, Bernardetia litoralis
  misc_feature (1)..(135): tr|I4AMN5|I4AMN5_BERLS 6-carboxy-5,6,7,8-tetrahydropter in synthase OS=Bernardetia litoralis (strain ATCC 23117 / DSM 6794 / NBRC 15988 / NCIMB 1366 / Sio-4) OX=88007 1 GN=Fleli_2867 PE=3 SV=1
MRVSVFRKEHFNAAHRLNNPNWSVEKNQEVFGKCNNEHFHGHNYNLIVQVTGEIDPETGYVVDMKWLSDLIQEHIANRFDHKNLNLEIPEFKELNPSAENIAVVIYNILRPKLNSNLDLKIKLYETERNFVECPA

SEQ ID NO: 18253 - protein, 154 aa, Unknown
  misc_feature (1)..(154): tr|M1T427|M1T427_9PROT Uncharacterized protein OS=beta proteobacterium CB OX=543913 GN=D521_1209 PE=4 SV=1
MSAKQEAISITRRLEFDSGHRIPNHDGQCRHLHGHRYAIEVTLTGVIADHPGKADDGMVLDFGDIKRLTNQYVVEPWDHAFLVAKEDAGLVDYLNSIPNHKTVVMEHVPTVENLASAAFRVLQPVFEKAFDGRLKLASIRLYETPNCWADVSHP

SEQ ID NO: 18254 - protein, 369 aa, Unknown
  misc_feature (1)..(369): tr|A0A2T0XAY7|A0A2T0XAY7_9PROT 6-pyruvoyltetrahydropter in/6-carboxytetrahydropterin synthase OS=beta proteobac terium MWH-P2sevCIIIb OX=323426 GN=BCM14_3033 PE=4 SV=1
MEEQLLYVAAARFEAACQVDCLPAGHRSAKLHGHSYLGEVRVKLPLGWAEFPGAEVYALRVQLQQCVAPLDYSHLNTHLNEPTDENIARWIRKRLGGLPGGVPGIVAVGVQSTTESGVDLDASDHAHVWRRYVFQSAHQLPHVPADHKCGRMHGHGFEVILHANRDLGQQALSIDYDQLDALWAPIHAELDHACLNDIPGLENPTSENISAWIWVKLKPRLPELSWVTVYETAQCGAHFDGHHYRIWKEFTLDSAVQLKRAPDGDARRRIHGHTFTLRLHLHAPLDTVRGWTVDFGDVKEVFDPIFKQLDHQPLHEVLADSDSDTANIARYIKTLASAKIPEMDRIDLFETPGCGVILYWGELGPALPV

SEQ ID NO: 18255 - protein, 150 aa, Betaproteobacteria bacterium
  misc_feature (1)..(150): tr|A0A1F4BZL1|A0A1F4BZL1_9PROT 6-carboxytetrahydropteri n synthase QueD OS=Betaproteobacteria bacterium RIFCSPL OWO2_12_61_14 OX=1797494 GN=A2W81_02840 PE=4 SV=1
MLITRRLEFDAGHRIPNHTSQCRHLHGHRYAIEITLSGDIITAEGQSEQGMVMDFSDVKRIANEKLVDAWDHAFLVYHGDRVVSDFLASLPEHKTVILDAVPTAENLAQIAFNILDPAYRDTYGNRLRLERVRLYETPNNWADCVRVANP

SEQ ID NO: 18256 - protein, 66 aa, Betaproteobacteria bacterium
  misc_feature (1)..(66): tr|A0A3D0LTB3|A0A3D0LTB3_9PROT 6-carboxytetrahydropteri n synthase QueD (Fragment) OS=Betaproteobacteria bacter ium OX=1891241 GN=DEP05_03095 PE=4 SV=1
VAFLRTLPRHKTVTLDTIPTAENLAIHAFTLLDHAFSETYGARLHLERVRLYETPNNWADAVCGQF

SEQ ID NO: 18257 - protein, 140 aa, Bibersteinia trehalosi
  misc_feature (1)..(140): tr|A0A3R8MGG6|A0A3R8MGG6_BIBTR 6-carboxy-5,6,7,8-tetrah ydropterin synthase OS=Bibersteinia trehalosi OX=47735 GN=queD PE=3 SV=1
MHKIAKEFSFDMAHMLDGHDGKCQNLHGHTYKLQVEVCGELIESGAKNGMVIDFSDLKAIVKREILDQMDHAFIYDSTSERECQVAKLLTNLKSKNYGIPMRTTAENMAKYMFDKLSQAGLPVSLIRLWETPTSYCEYSE

SEQ ID NO: 18258 - protein, 140 aa, Bibersteinia trehalosi
  misc_feature (1)..(140): tr|M4R8G2|M4R8G2_BIBTR 6-carboxy-5,6,7,8-tetrahydropter in synthase OS=Bibersteinia trehalosi USDA-ARS-USMARC-1 92 OX=1171377 GN=WQG_7700 PE=3 SV=1
MHKIAKEFSFDMAHMLDGHDGKCQNLHGHTYKLQVEVCGELIESGAKNGMVIDFSDLKAIVKREILDRMDHAFIYDSTSERECQVAKLLTDLKSKNYGIPMRTTAENMAKYMFDKLSQAGLPVSLIRLWETPTSYCEYSE

SEQ ID NO: 18259 - protein, 128 aa, Bilophila sp.
  misc_feature (1)..(128): tr|G1UYF1|G1UYF1_9DELT 6-carboxy-5,6,7,8-tetrahydropter in synthase OS=Bilophila sp. 4_1_30 OX=693988 GN=HMPREF 0178_00298 PE=3 SV=1
MSRPFWKLTVRSEFCAAHALRHYQGKCEHLHGHNYAVEVVVKGYTLSQDTELLMDFGDLKGLLKQALEPLDHAYINDVPPFDAVNPSSENLARYIWNQMAPSLPETVKMYSVTVAEKGIQSATYMEEE

SEQ ID NO: 18260 - protein, 128 aa, Bilophila wadsworthia
  misc_feature (1)..(128): tr|E5Y639|E5Y639_BILWA 6-carboxy-5,6,7,8-tetrahydropter in synthase OS=Bilophila wadsworthia 3_1_6 OX=563192 GN =HMPREF0179_01652 PE=3 SV=1
MSRPFWKLTVRSEFCAAHALRHYQGKCEHLHGHNYAVEVVVKGYTLSQNTELLMDFGDLKALLKQALEPLDHAYINDVPPFDAVNPSSENLARYIWNQMAPSLPETVKMYSVTVAEKGIQSATYMEEE

SEQ ID NO: 18261 - protein, 121 aa, Biostraticola sp.
  misc_feature (1)..(121): tr|A0A4U2UQR4|A0A4U2UQR4_9ENTR 6-carboxy-5,6,7,8-tetrah ydropterin synthase OS=Biostraticola sp. BGMRC 2031 OX= 2575567 GN=queD PE=3 SV=1
MVTTLFKDFTFEAAHRLPHVPAGHKCGRLHGHSFTVRVEIEGPVDPHTGWVMDFADLKAAFNPILRQLDHYYLNDIPGLENPTSEILSRWIWTRLKPQLPQLSAITVKETCTAGCLYRGED

SEQ ID NO: 18262 - protein, 121 aa, Biostraticola tofi
  misc_feature (1)..(121): tr|A0A4R3Z0S1|A0A4R3Z0S1_9ENTR 6-carboxy-5,6,7,8-tetrah ydropterin synthase OS=Biostraticola tofi OX=466109 GN= EDC52_102564 PE=3 SV=1
MTTSLFKDFTFEAAHLLPHVPAGHKCGRLHGHSFLVRIEITGPVDPHTGWILDFADLKAAFKPVLDRLDHYYLNDIPGLENPTSEVLSQWIWQQLKPALPLLSAVQVKETCTAGCIYRGEV

SEQ ID NO: 18263 - protein, 142 aa, Bisgaardia hudsonensis
  misc_feature (1)..(142): tr|A0A4V6NQ85|A0A4V6NQ85_9PAST 6-carboxy-5,6,7,8-tetrah ydropterin synthase OS=Bisgaardia hudsonensis OX=109472 GN=EV697_103113 PE=3 SV=1
MFKIAKEFSFDMAHLLDGHDGKCKNLHGHTYKLQVEVSGQLHSNGAKRGMVMDYADLKSIVKTHILDKMDHAFLYDLHSEKECQIAELLQRFDSKTFGLATRTTAEEIAKYIFDTLTSLGLSVSLIRLWETPTSYCEYNGNE

SEQ ID NO: 18264 - protein, 136 aa, Bizionia algoritergicola
  misc_feature (1)..(136): tr|A0A5D0QU06|A0A5D0QU06_9FLAO 6-carboxy-5,6,7,8-tetrah ydropterin synthase OS=Bizionia algoritergicola OX=2911 87 GN=ES675_09215 PE=3 SV=1
MRVTVSRKAHFNAAHRLYRKDWPDQRNDAVFGKCNNPSFHGHNYDLIVSVTGEIDQETGYVLDVKILKDLIKSKIEDAFDHKNLNVDVPEFQDLNPTAENIVVVIFNKLRPHLAANLDLEITLYETPRNFVTYSGK

SEQ ID NO: 18265 - protein, 152 aa, Bizionia algoritergicola
  misc_feature (1)..(152): tr|A0A5D0R3P7|A0A5D0R3P7_9FLAO 6-carboxytetrahydropteri n synthase OS=Bizionia algoritergicola OX=291187 GN=ES6 75_03440 PE=4 SV=1
MGNIRITKQFSFETGHALYGYDGKCKNVHGHSYKLSVTVIGKPISDSGNVKFGMVIDFGDLKKIVKTEIVDVFDHATVFNKNTPHVELAKELQVRGHNVLLVDYQPTSEMMVIDFADKIKSLLPSHIALHSLKLQETDTSFAEWYASDNKPL

SEQ ID NO: 18266 - protein, 149 aa, Bizionia argentinensis
  misc_feature (1)..(149): tr|G2EEL2|G2EEL2_9FLAO 6-carboxy-5,6,7,8-tetrahydropter in synthase OS=Bizionia argentinensis JUB59 OX=1046627 GN=BZARG_1113 PE=3 SV=1
MGNIRITKQFSFEAGHALYGYDGKCKNVHGHSYKLSVTVIGKPIEDPNNVKFGMVIDFGDLKKIVKSEIVDVFDHATVFNKNTPHVELAKELQDRDHSVLLVDYQPTSEMMVIDFAHKIKKHLPKHIALHSLRLSETDTSCAEWYASDN

SEQ ID NO: 18267 - protein, 136 aa, Bizionia argentinensis
  misc_feature (1)..(136): tr|G2EG36|G2EG36_9FLAO 6-carboxy-5,6,7,8-tetrahydropter in synthase OS=Bizionia argentinensis JUB59 OX=1046627 GN=BZARG_1865 PE=3 SV=1
MIVTVSRKAHFNAAHRLYRKDWSDEKNDTVFGKCNNPSFHGHNYDLTVSVTGEIDQETGYVLDVKVLKDLIKTEIEDAFDHKNFNLDVPEFKDLNPTAENIAVVIFNKLKPKLLSNLDLEITLYETPRNFVTYSGK

SEQ ID NO: 18268 - protein, 136 aa, Bizionia echini
  misc_feature (1)..(136): tr|A0A1I5D9I3|A0A1I5D9I3_9FLAO 6-carboxy-5,6,7,8-tetrah ydropterin synthase OS=Bizionia echini OX=649333 GN=SAM N04487989_10777 PE=3 SV=1
MKVTVSRKAHFNAAHRLYRKDWSDEKNDQIFGKCNNPNFHGHNYDMIVSVTGDIDPETGYVIDVKILKDLIKTEIEDAFDHKNLNLDVPEFQNLNPTAENIVVVIFNKLRKHLAKTLDLEVTLYETPRNFVTYSGK

SEQ ID NO: 18269 - protein, 152 aa, Bizionia echini
  misc_feature (1)..(152): tr|A0A1I4ZDG8|A0A1I4ZDG8_9FLAO 6-pyruvoyltetrahydropter in/6-carboxytetrahydropterin synthase OS=Bizionia echin i OX=649333 GN=SAMN04487989_101746 PE=4 SV=1
MGNIRITKQFSFETGHALYGYDGKCKNVHGHSYKLSVTVIGKPIEDTNNVKFGMVIDFGDLKKIVKTEIVDVFDHATVFNKNTPHVELAKELQDRGHNVLLVNYQPTSEMMVIDFAEKIKSFLPSHIALHSLKLQETDTSFAEWYASDNESL

SEQ ID NO: 18270 - protein, 136 aa, Bizionia myxarmorum
  misc_feature (1)..(136): tr|A0A5D0R7U5|A0A5D0R7U5_9FLAO 6-carboxy-5,6,7,8-tetrah ydropterin synthase OS=Bizionia myxarmorum OX=291186 GN =ES674_09385 PE=3 SV=1
MKVTVSRKAHFNAAHRLYRKDWSDEKNDAVFGKCNNPNFHGHNYDLIVSVTGEIDPETGYVMDVKVLKDLIKLEVEDAFDHKNLNVDVPEFQDLNPTAENIVVVIFNKLRSHLSEKLEMEVTLYETPRNFVTYSGQ

SEQ ID NO: 18271 - protein, 149 aa, Bizionia myxarmorum
  misc_feature (1)..(149): tr|A0A5D0RAX9|A0A5D0RAX9_9FLAO 6-carboxy-5,6,7,8-tetrah ydropterin synthase OS=Bizionia myxarmorum OX=291186 GN =ES674_02430 PE=3 SV=1
MENIRITKQFSFETGHALYGYDGKCKNVHGHSYKLSVTVIGKPIADSNNVKFGMVIDFGDLKKIVKTEIVDVFDHATVFNKNTPHVELAKELQDRGHCVLLVDYQPTSEMMVIDFAKKIKTYLPTHIALHSLKLSETDTSFAEWYACDN

SEQ ID NO: 18272 - protein, 136 aa, Bizionia paragorgiae
  misc_feature (1)..(136): tr|A0A1H4DGG5|A0A1H4DGG5_9FLAO 6-pyruvoyltetrahydropter in/6-carboxytetrahydropterin synthase OS=Bizionia parag orgiae OX=283786 GN=SAMN04487990_1325 PE=4 SV=1
MRVTVSRKAHFNAAHRLHNKAWSDEKNKAVYGLCNNPNYHGHNYEIIASVTGNIDEETGYVIDIKTLKNIIKLEVEDAFDHKNLNLDVPEFKNVIPTAENIVVVIHNKIKNKLKEGLDLEVTLYETPRNFVSYAGE

SEQ ID NO: 18273 - protein, 149 aa, Bizionia paragorgiae
  misc_feature (1)..(149): tr|A0A1H4CEG4|A0A1H4CEG4_9FLAO 6-carboxy-5,6,7,8-tetrah ydropterin synthase OS=Bizionia paragorgiae OX=283786 G N=SAMN04487990_11944 PE=3 SV=1
MSNIRITKQFSFETGHALYGYDGKCKNVHGHSYKLSVTVIGKPISDNTNVKYGMVIDFGDLKKIVKEEIVDVFDHATVFNKNTPHVELAKELQKRDHSVLLVDYQPTSEMMVIDFAEKIKQRLPENIKLHALRLQETDSSYAEWFASDN

SEQ ID NO: 18274 - protein, 136 aa, Bizionia saleffrena
  misc_feature (1)..(136): tr|A0A5D0QMY4|A0A5D0QMY4_9FLAO 6-carboxy-5,6,7,8-tetrah ydropterin synthase OS=Bizionia saleffrena OX=291189 GN =ES676_13150 PE=3 SV=1
MRVTVSRKAHFNAAHRLYRKDWTDEKNDAVFGLCNNPNFHGHNYDLIASVTGDIDTETGYVIDIKTLKDIIKAEVEDAFDHKNLNLDVPEFKELIPTAENIVVVIYNKIKNKLKEGLDLEVTLYETPRNFVSYAGQ

SEQ ID NO: 18275 - protein, 149 aa, Bizionia saleffrena
  misc_feature (1)..(149): tr|A0A5D0QZM5|A0A5D0QZM5_9FLAO 6-carboxy-5,6,7,8-tetrah ydropterin synthase OS=Bizionia saleffrena OX=291189 GN =ES676_07975 PE=3 SV=1
MSNIRITKLFSFETGHALYGYDGKCKNVHGHSYKLSVTVIGKPIKDNSNVKFGMVIDFGDLKKIVKEEIVDVFDHATVFNKNTPHVELARELQKRDHNVLLVDYQPTSEMMVIDFAQKIKQRLPENIQLYALKLQETDSSYAEWYAADN

SEQ ID NO: 18276 - protein, 127 aa, Blastocatellia bacterium
  misc_feature (1)..(127): tr|A0A353CC41|A0A353CC41_9BACT 6-carboxy-5,6,7,8-tetrah ydropterin synthase OS=Blastocatellia bacterium OX=2052 146 GN=queD PE=3 SV=1
MAGFYEVMIERDFSSAHQLRGYKGKCENLHGHNYKVEIYARGDELNNIGLLIDFGDLKKAADEIVAYLDHRNLNELPPFDEELNPSAENIARYFVEYLNSRVGDKRVNVYKVRCFETPTSIATYQID

SEQ ID NO: 18277 - protein, 126 aa, Blastocatellia bacterium
  misc_feature (1)..(126): tr|A0A3D5SM45|A0A3D5SM45_9BACT 6-carboxy-5,6,7,8-tetrah ydropterin synthase OS=Blastocatellia bacterium OX=2052 146 GN=queD PE=3 SV=1
MPGQFEVMIERNFSSAHQLRGYKGKCENLHGHNYRIEIYARGRELDNIGLLVDFVELKAAADEVVQYLDHRNINELDPFVELQPSAENLAKYILERVATKVGDERVQIYKVRCFETPTSVATYEVV

SEQ ID NO: 18278 - protein, 117 aa, Blastochloris viridis
  misc_feature (1)..(117): tr|A0A0H5BFR0|A0A0H5BFR0_BLAVI 6-carboxy-5,6,7,8-tetrah ydropterin synthase OS=Blastochloris viridis OX=1079 GN =queD PE=3 SV=1
MKITQVFTFEAAHRLPKVPETHRCHRMHGHSYRVELRLEGPVDRETGFVVDFFDIEAAFAPLHQQLDHRCLNDVAGLDNPTAENIAIWIWDRVRPALPQTVAVVVYETPTCWAEYQG

SEQ ID NO: 18279 - protein, 122 aa, Blastococcus sp.
  misc_feature (1)..(122): tr|A0A4Y9PAT8|A0A4Y9PAT8_9ACTN Uncharacterized protein OS=Blastococcus sp. CT_GayMR19 OX=2559608 GN=E4P39_0586 0 PE=4 SV=1
MYETGTALQVRAFHVMPGMPPPEGERHSHDYRLDVVVRRDDLDERGMVVDLDLLDQALRDAAARVEGVDLESVVPAEAVTVEVFARWLHDQLAASLGRLPGTTLAVRVWESSVAFGGYSSSL

SEQ ID NO: 18280 - protein, 132 aa, Blastococcus sp.
  misc_feature (1)..(132): tr|A0A366ZW59|A0A366ZW59_9ACTN 6-carboxytetrahydropteri n synthase OS=Blastococcus sp. TF02-9 OX=2250576 GN=DQ2 39_01355 PE=4 SV=1
MFTLTVRDSMMIAHSFTGAVFGPAQRLHGATYVVDATFRRSELDEDGLVVDIGAAGTALHAVLGELTYRNLDDDPDLAGTNTTTEALARVVADRLAARIGDGALCPGGAGLEGLTVTLHESHVAWASYERGL

SEQ ID NO: 18281 - protein, 124 aa, Blastomonas sp.
  misc_feature (1)..(124): tr|A0A0N1LFH7|A0A0N1LFH7_9SPHN 6-carboxy-5,6,7,8-tetrah ydropterin synthase OS=Blastomonas sp. AAP25 OX=1523416 GN=IP68_13780 PE=3 SV=1
MFELSKQFRFDAAHTLDRSINTESSRRIHGHSYRAEVTVRGCPDPVTGMVVDLGLLERIMDDARDALDHRFLDEINDLGPATMENLSRWIWDRLSPEVGNLSKVSVYRDSSGEACSYWGEEVPA

SEQ ID NO: 18282 - protein, 159 aa, Blastopirellula cremea
  misc_feature (1)..(159): tr|A0A368KU24|A0A368KU24_9PLAN 6-carboxytetrahydropteri n synthase OS=Blastopirellula cremea OX=1031537 GN=DTL4 2_12955 PE=4 SV=1
MSLNIMRRIKFCAGHRLHKHGGKCEFFHGHNYVADFHVTGDHVDDVGRVIDFAELKRLFKGWIDEHWDHAFLLNEADENGIHALKQVVPCKMYILPANPTAEGMATYLLESVCPKLLKGTGVTCVKVAIWETEDSFAEASIDTPSRVQEQEEWSEPMVS

SEQ ID NO: 18283 - protein, 161 aa, Blastopirellula cremea
  misc_feature (1)..(161): tr|A0A368KQL2|A0A368KQL2_9PLAN 6-pyruvoyl tetrahydropte rin synthase family protein OS=Blastopirellula cremea O X=1031537 GN=DTL42_17545 PE=4 SV=1
MRKRHWVRLTKDHLVFSAGHFITFGGNICERIHGHNYRVEVELHGPLDENHYVVDFIALRDSLQAIVNGLDHRMLLPTRHPSIKLVMDEKEVTASYEDRRWVFPRTECVLLDIPNTTTELLAEWIGERLLVALAEKLQWKPEAMKVGVDENHGQWGYCEFS

SEQ ID NO: 18284 - protein, 167 aa, Blastopirellula marina
  misc_feature (1)..(167): tr|A3ZTI8|A3ZTI8_9PLAN 6-pyruvoyl tetrahydrobiopterin s ynthase OS=Blastopirellula marina DSM 3645 OX=314230 GN =DSM3645_19683 PE=4 SV=1
MSFEGDGKMSLVIMRRIKFCAGHRLYKHGGKCEFFHGHNYVADFYVTADEVDDVGRVIDFADLKAKFKGWLDEHWDHGFLLSEQDENGINAIKQVVPCKYFVMPYNPTAENMARYLLDYVCPELLDQSNVRPVKVVIWETEEAFAEARLSGEVGETSSASLSSVTVD

SEQ ID NO: 18285 - protein, 158 aa, Blastopirellula marina
  misc_feature (1)..(158): tr|A0A2S8G7S0|A0A2S8G7S0_9PLAN Uncharacterized protein OS=Blastopirellula marina OX=124 GN=C5Y83_00790 PE=4 SV =1
MIIQKQYKFYAAHRNEELQDKCRNLHGHRYGIVCHFDVQRTGSYSTLFSDFDDKIGPFLKDFYDHGMLINVNDPLFATLKQHMEIHGEDLKLREFDGPTSVENLAHQLFTEITQMGFDLVRLDVQETDTSVVCYDRNDWERDNEAQVFSKSKPVKATS

SEQ ID NO: 18286 - protein, 170 aa, Blastopirellula sp.
  misc_feature (1)..(170): tr|A0A2G2JBB6|A0A2G2JBB6_9PLAN 6-pyruvoyl tetrahydropte rin synthase OS=Blastopirellula sp. OX=2024826 GN=COA78 _31425 PE=4 SV=1
MALQEYSIRRRIEIDTAHRVPDHGSKCFNLHGHRYVINAECRGPVIVSGEQNGMVMDFSFLKTCMMDVIYDACDHGTILFKDDPLCATFLKVPADAPVGECIMDHSNLMEGMKLLLLPVVPTAENLAQFWHAKLVERIESFFRNRSENAPRLHCIEVAETPNCVATFPAV

SEQ ID NO: 18287 - protein, 159 aa, Blastopirellula sp.
  misc_feature (1)..(159): tr|A0A2G2JHB2|A0A2G2JHB2_9PLAN 6-pyruvoyl tetrahydrobio pterin synthase OS=Blastopirellula sp. OX=2024826 GN=CO A78_27235 PE=4 SV=1
MSMVIMRRIKFCAGHRLYKHGGKCEFFHGHNYVADFYVTADEVDSVGRVIDFADLKKMFKGWIDEHWDHGFILNEDDENGINAIKQVIPCKYYILPYNPTAESMARYLLENVCVKLLEGSSVRPCKVVIWETEEAFAEARMSCASDEVMVSSFAGSADE

SEQ ID NO: 18288 - protein, 141 aa, Blattabacterium cuenoti
  misc_feature (1)..(141): tr|M4ZU16|M4ZU16_9FLAO 6-pyruvoyltetrahydropterin synth ase OS=Blattabacterium cuenoti BPAA OX=1229512 GN=ygcM PE=4 SV=1
MYKKNTIATINRKGYFSAAHRLYNNHWNYKKNIEIFGKCAHLNYHGHNYEYIVSITGKIDPETGFVFNLQKLKSILSDEIEKLFDHKNINLDIIEFSSINPTIENIVIFMWNRINKKISPDLKLKITLYETKNNFVEYDGK

SEQ ID NO: 18289 - protein, 136 aa, Blattabacterium cuenoti
  misc_feature (1)..(136): tr|A0A224AKI2|A0A224AKI2_9FLAO 6-pyruvoyl-tetrahydropte rin synthase OS=Blattabacterium cuenoti STAT OX=1457030 GN=sscR PE=4 SV=1
MIATVNRKGYFSSSHRLYNNHWDFKKNIEMFGKCANFNYHGHNYEYIVGITGEIDPKTGFVFNLQKLKCILFDEIEKLFDHKNINLDIKEFSFINPTIENIVVFMWNRINSKIPSDLKLKITLYETVNNFVEYDGK

SEQ ID NO: 18290 - protein, 136 aa, Blattabacterium punctulatus
  misc_feature (1)..(136): tr|A0A2U9QBC8|A0A2U9QBC8_9FLAO 6-carboxytetrahydropteri n synthase OS=Blattabacterium punctulatus OX=164514 GN= DM805_00910 PE=4 SV=1
MKVTISRKGHFSAAHRLYNPHWDHNKNIEEFGKCAYINYHGHNYEYIVSITGEISSKTGFVFNIQKLKNLIREEIDIIFDHKNINVDIKEFYDVNPTMENIVIFLWNKIKKKISSNLNLKITLYETKNNFAEYDGS

SEQ ID NO: 18291 - protein, 136 aa, Blattabacterium punctulatus
  misc_feature (1)..(136): tr|A0A2U9Q9J4|A0A2U9Q9J4_9FLAO 6-carboxytetrahydropteri n synthase OS=Blattabacterium punctulatus OX=164514 GN= DM780_00910 PE=4 SV=1
MKVTISRKGHFSAAHRLYNPHWDHNKNIKEFGKCAYINYHGHNYEYIVSITGEINSKTGFVFNIQKLKNLIHKEIDIFFDHKNINVDIEEFYDVNPTMENIVIFLWNKIKKKISSNLNLKITLYETKNNFAEYDGS

SEQ ID NO: 18292 - protein, 136 aa, Blattabacterium sp.
  misc_feature (1)..(136): tr|G7SQB5|G7SQB5_9FLAO 6-pyruvoyl tetrahydrobiopterin s ynthase OS=Blattabacterium sp. (Mastotermes darwiniensi s) str. MADAR OX=1074889 GN=sscR PE=4 SV=1
MKATISRKGYFSAAHKLYNNHWNRHKNIETFGKCAYLNYHGHNYEYIVSITGEVDPETGFVFSIQKLKNLLREEIEVIFDHKNINLDIKEFSVINPTTENIVIFIWNRINQKINPHLDLKITLYETTKNFAEYNGS

SEQ ID NO: 18293 - protein, 136 aa, Blattabacterium sp.
  misc_feature (1)..(136): tr|G8LRL2|G8LRL2_9FLAO 6-carboxy-5,6,7,8-tetrahydropter in synthase OS=Blattabacterium sp. (Cryptocercus punctu latus) str. Cpu OX=1075399 GN=ygcM PE=3 SV=1
MKVTINRKGHFSAAHRLYNPHWDHNKNIEEFGKCAYINYHGHNYEYIVSITGKINSKTGFVFSIQKLKNILREEINILFDHKNINVDIEEFYDVNPTMENIVIFLWQKIKKKISSNLNLKITLYETKNNFAEYDGS

SEQ ID NO: 18294 - protein, 149 aa, Blautia luti
  misc_feature (1)..(149): tr|A0A564VV75|A0A564VV75_9FIRM 6-carboxy-5,6,7,8-tetrah ydropterin synthase OS=Blautia luti OX=89014 GN=RSSSTS7 063_03016 PE=3 SV=1
MYQLKTEADFDSAHFLSGYTGKCSNIHGHRWHVEIEIESRKLEKNGQERGMLVDFGDLKKDLRELADSMDHTLIYEENTLRPKTLEALDEEGFHLVKVPFRPTAENFSEYFFRKMEEKGYPVKRAVVYETPNNCAAYRETEEETEVVWL

SEQ ID NO: 18295 - protein, 149 aa, Blautia obeum
  misc_feature (1)..(149): tr|A0A367FVI6|A0A367FVI6_9FIRM 6-carboxy-5,6,7,8-tetrah ydropterin synthase OS=Blautia obeum OX=40520 GN=queD P E=3 SV=1
MYQLKTEADFDSAHFLSGYTGKCSNIHGHRWHVEIEIESQKLEKNGQERGMLVDFGDLKKDLRELADSMDHTLIYEENTLRPKTLEALDEEGFHLVKVPFRPTAENFSEYFFRKMEEKGYPVKRAVVYETPNNCAAYRETEEETEAVWL

SEQ ID NO: 18296 - protein, 139 aa, Blautia obeum
  misc_feature (1)..(139): tr|A0A411ZLH2|A0A411ZLH2_9FIRM 6-carboxy-5,6,7,8-tetrah ydropterin synthase OS=Blautia obeum OX=40520 GN=queD P E=3 SV=1
MYILKTEASFDSAHFLAGYDGKCSNLHGHRWKIILEVQAEELKDDIQHKGMYVDFGELKKDLRDLADSMDHALIIEKNSLKETTLEALKSENFRIIELDFRPTAENMAKYFYEKIKKLGYNMKAVTVYETPVNSATYME

SEQ ID NO: 18297 - protein, 73 aa, Blautia sp.
  misc_feature (1)..(73): tr|A0A416EJK1|A0A416EJK1_9FIRM Conjugal transfer protei n OS=Blautia sp. AF34-10 OX=2292968 GN=DWZ60_14645 PE=4 SV=1
MYMAFFSSAITTLKTLVVAIGAGLGVWGVVNLLEGYGNDNPGAKSQGIKQLMAGAGIMLLGTTLIPQLATLFS

SEQ ID NO: 18298 - protein, 70 aa, Blautia sp.
  misc_feature (1)..(70): tr|A0A416EF94|A0A416EF94_9FIRM Site-specific integrase (Fragment) OS=Blautia sp. AF34-10 OX=2292968 GN=DWZ60_0 6485 PE=4 SV=1
KTLEGFEGFHFHQLRHTYTSNLLANGAAPKDVQELLGHSDVSTTMNVYAHSTRDAKRKSVRLLDKVVGND

SEQ ID NO: 18299 - protein, 158 aa, Unknown
  misc_feature (1)..(158): tr|A0A1U9VD93|A0A1U9VD93_9RALS 6-carboxytetrahydropteri n synthase QueD OS=blood disease bacterium A2-HR MARDI OX=1944648 GN=B0B51_00270 PE=4 SV=1
MTKTVSITRRLEFDAGHRIPGHAGQCRNLHGHRYQLELTLTGEVLHNDKATDDGMILDFGDVKTLATKHLVELWDHAFLVYRGDTKLVEFLDGMEGGHKTVVLDDVPTVENLAQIAFDILEPVFRNVYGHHLRLSKLVLYETPNCWADVKLARPHEQD

SEQ ID NO: 18300 - protein, 158 aa, Unknown; identical to SEQ ID NO: 18299
  misc_feature (1)..(158): tr|G2ZJ29|G2ZJ29_9RALS Putative 6-pyruvoyl tetrahydrobi opterin synthase (PtpS) (PTP synthase) OS=blood disease bacterium R229 OX=741978 GN=BDB_20065 PE=4 SV=1

SEQ ID NO: 18301 - protein, 125 aa, Bogoriella caseilytica
  misc_feature (1)..(125): tr|A0A3N2BD53|A0A3N2BD53_9MICO 6-pyruvoyltetrahydropter in/6-carboxytetrahydropterin synthase OS=Bogoriella cas eilytica OX=56055 GN=EDD31_1549 PE=4 SV=1
MFSLTVRDHMMIAHSLPHPAFGPAQGLHGATFVVELSIRRAELDEAGIVIDIGEATGMLKDALADLDYSNLDDHPELTGTLTTTEHLARFIAERIATRLQGGPYAGLDVTLREHPDAWASYSREL

SEQ ID NO: 18302 - protein, 185 aa, Bombella intestini
  misc_feature (1)..(185): tr|A0A1S8GNE5|A0A1S8GNE5_9PROT 6-pyruvoyl tetrahydropte rin synthase OS=Bombella intestini OX=1539051 GN=AL01_0 8630 PE=4 SV=1
MSDITRTELIFTRRFCMGHRLISGCSERCAIPHGHNEYVTVTLVPGPNAPQQNQRLDGHSNMLLPFAEAKGRWHRFIDERMDHSFQLSESDPLLNWFAEHEPQRLDRLVVTPGDPTTELLAALLMSKLQAFLTAQGGLLAPASLEIKETPTNTVRLHGDPALYLPLVDRPEDQCWWHRADDTTRD

SEQ ID NO: 18303 - protein, 151 aa, Bordetella ansorpii
  misc_feature (1)..(151): tr|A0A157SXE2|A0A157SXE2_9BORD 6-pyruvoyl tetrahydrobio pterin synthase OS=Bordetella ansorpii OX=288768 GN=SAM EA3906486_05343 PE=4 SV=1
MISITRRLEFDAGHRIPDHRSQCRNLHGHRYVLEITLCGDIVQAPGESDNGMLMDFSEIKSIAQAQLVNVWDHAFLVYSGDEAVRNFLDTLPGHKTVVLDRIPTVENLAAIAFETLAPHYHGHYGHALRLQRVRLYETPNCWADCDGTASP

SEQ ID NO: 18304 - protein, 151 aa, Bordetella ansorpii
  misc_feature (1)..(151): tr|A0A157RAP7|A0A157RAP7_9BORD 6-pyruvoyl tetrahydrobio pterin synthase OS=Bordetella ansorpii OX=288768 GN=SAM EA1982600_04575 PE=4 SV=1
MISITRRLEFDAGHRIPDHRSQCRNLHGHRYVLEITLCGDVVQAPGESDNGMLMDFSEIKSIAQAQLVNVWDHAFLVYSGDEAVRNFLDTLPGHKTVVLDRIPTVENLAAIAFETLAPHYHGHYGHALRLQRVRLYETPNCWADCDGAAKP

SEQ ID NO: 18305 - protein, 148 aa, Bordetella avium
  misc_feature (1)..(148): tr|Q2KZU5|Q2KZU5_BORA1 Uncharacterized protein (Fragmen t) OS=Bordetella avium (strain 197N) OX=360910 GN=BAV20 20 PE=4 SV=1
VIAVTRKLEFDAGHRIPDHRSQCRNLHGHRYVLEITLSGDVVEAPGQSDTGMVMDFSEIKHIAKTHIVDVWDHAFLVYEGDTAVREFLATLPGHKTVVLDRIPTAENLAAIIFARLAPHYQSAYGNALRLSRVRLYETPNCWADCDGH

SEQ ID NO: 18306 - protein, 157 aa, Bordetella bronchialis
  misc_feature (1)..(157): tr|A0A193FXR3|A0A193FXR3_9BORD 6-carboxytetrahydropteri n synthase QueD OS=Bordetella bronchialis OX=463025 GN= BAU08_15425 PE=4 SV=1
MNSPTRAAPGTISVTRRLEFDAGHRIPDHRSQCRNMHGHRYVLEVTLEGQVIDAPGASDNGMVMDFSDIKAIASEHLVDRWDHAFLVYAGDEAVRGFLESLPGHKTVVLDRIPTVENLARIAFDILRPHYHRQFGGDLRLARVRLYETPNCWADCEG

SEQ ID NO: 18307 - protein, 147 aa, Bordetella bronchiseptica
  misc_feature (1)..(147): tr|A0A0H3LQA6|A0A0H3LQA6_BORBR 6-carboxy-5,6,7,8-tetrah ydropterin synthase OS=Bordetella bronchiseptica (strai n ATCC BAA-588 / NCTC 13252 / RB50) OX=257310 GN=BB3076 PE=3 SV=1
MISVTRRLEFDAGHRIPDHNSQCRNLHGHRYVLEVTLSGDVVQAPGASDNGMLMDFSEIKRIARTHIVDVWDHAFLVYEGDHAVRGFLDTLPDHKTVVLDRIPTAENLASIIFATLAPHYHGHYGADLRLTRVRLYETPNCWADCGS

SEQ ID NO: 18308 - protein, 147 aa, Bordetella bronchiseptica; identical to SEQ ID NO: 18307
  misc_feature (1)..(147): tr|A0A3T0NYK1|A0A3T0NYK1_BORBO 6-carboxy-5,6,7,8-tetrah ydropterin synthase OS=Bordetella bronchiseptica OX=518 GN=queD PE=3 SV=1

SEQ ID NO: 18309 - protein, 147 aa, Bordetella flabilis
  misc_feature (1)..(147): tr|A0A193GC63|A0A193GC63_9BORD 6-carboxy-5,6,7,8-tetrah ydropterin synthase OS=Bordetella flabilis OX=463014 GN =BAU07_11270 PE=3 SV=1
MISVTRRLEFDAGHRIPDHRSQCRNMHGHRYVLEVTLAGDVVNVPGASDNGMVMDFSDIKAIAREHVVDKWDHAFLVFAGDTAVRAFLESLPDHKTVVLDRIPTVENLARIAFDTLFPHYHGQYGGDLRLVRVRLYETPNCWADCEG

SEQ ID NO: 18310 - protein, 201 aa, Bordetella genomosp.
  misc_feature (1)..(201): tr|A0A261S0U3|A0A261S0U3_9BORD 6-carboxytetrahydropteri n synthase QueD OS=Bordetella genomosp. 10 OX=1416804 G N=CAL29_23710 PE=4 SV=1
MLIRKLFKFENAHIVRGCSTRRCSHSVHGHSYKVELLLEAHALDRGQMVYDFGLLKRGARDLIDAFDHAVTLWSEDDPAYVAAMQQHSERWIVLPVSPSAEQFSRVIFRLVDAVLAQTDMANGEADVGLHSVIVHETETGYAQCFREDVENPYMGTIDLRDITFSAAISREWGDPDLFERLKLGKLRAPASHESISDAAIT

SEQ ID NO: 18311 - protein, 148 aa, Bordetella genomosp.
  misc_feature (1)..(148): tr|A0A261SEK7|A0A261SEK7_9BORD 6-carboxy-5,6,7,8-tetrah ydropterin synthase OS=Bordetella genomosp. 1 OX=139560 7 GN=queD PE=3 SV=1
MISVTRRLEFDAGHRIPDHRSQCRNLHGHRYVLELTLTGDIVQAPGESDNGMLMDFSEIKSIAKQHVVDVWDHAFLVYEGDSAVRAFLDTLPGHKTVVLDRIPTAENLATIIFGILAPHYHGHYGADLRLTRVRLYETPNCWADCTGA

SEQ ID NO: 18312 - protein, 148 aa, Bordetella hinzii
  misc_feature (1)..(148): tr|A0A0H4WJG3|A0A0H4WJG3_9BORD 6-carboxy-5,6,7,8-tetrah ydropterin synthase OS=Bordetella hinzii OX=103855 GN=q ueD PE=3 SV=1
MISVTRRLEFDAGHRIPDHRSQCRNLHGHRYVLEITLTGDVVQTPGQSDTGMVMDFSDIKHIAKTHVVDVWDHAFLVYEGDTAVRDFLATLPGHKTVVLDRIPTAENLAAIIFDQLAPHYQDAYGHHLRLARVRLFETPNCWADCDGA

SEQ ID NO: 18313 - protein, 148 aa, Bordetella holmesii
  misc_feature (1)..(148): tr|A0A158M6N2|A0A158M6N2_9BORD 6-carboxy-5,6,7,8-tetrah ydropterin synthase OS=Bordetella holmesii CDC-H585-BH OX=1331206 GN=queD PE=3 SV=1
MISVTRRLEFDAGHRIPDHRSQCRNLHGHRYVLELTLTGDVVQAPGQSDNGMVMDFSDIKHIAKTHLVDIWDHAFLVYEGDAAVRDFLASLPDHKTVILDRIPTAENLAAVIFGILAPHYQNTYGHHLRLSRVRLFETPNCWADCDGN

SEQ ID NO: 18314 - protein, 147 aa, Bordetella parapertussis; identical to SEQ ID NO: 18307
  misc_feature (1)..(147): tr|Q7W9V0|Q7W9V0_BORPA 6-carboxy-5,6,7,8-tetrahydropter in synthase OS=Bordetella parapertussis (strain 12822 / ATCC BAA-587 / NCTC 13253) OX=257311 GN=BPP1652 PE=3 S V=1

SEQ ID NO: 18315 - protein, 147 aa, Bordetella parapertussis
  misc_feature (1)..(147): tr|K0MFC1|K0MFC1_BORPB 6-carboxy-5,6,7,8-tetrahydropter in synthase OS=Bordetella parapertussis (strain Bpp5) O X=1208660 GN=BN117_2811 PE=3 SV=1
MISVTRRLEFDAGHRIPDHNSQCRNLHGHRYVLEVTLSGDVVQAPGASDNGMLMDFSEIKRIARTHIVDVWDHAFLVYEGDHAVRDFLDTLPDHKTVVLDRIPTAENLASIIFATLAPHYHGHYGADLRLTRVRLYETPNCWADCGS

SEQ ID NO: 18316 - protein, 147 aa, Bordetella pertussis
  misc_feature (1)..(147): tr|A0A0E7U7K1|A0A0E7U7K1_BORPT 6-carboxy-5,6,7,8-tetrah ydropterin synthase OS=Bordetella pertussis OX=520 GN=q ueD PE=3 SV=1
MISVTRRLEFDAGHRIPDHNSQCRNLHGHRYVLEVTLSGDVVQAPGASDNGMLMDFSEIKRIARAHIVDVWDHAFLVYEGDHAVRGFLDTLPDHKTVVLDRIPTAENLASIIFATLAPHYHGHYGADLRLTRVRLYETPNCWADCGS

SEQ ID NO: 18317 - protein, 147 aa, Bordetella pertussis; identical to SEQ ID NO: 18316
  misc_feature (1)..(147): tr|A0A171JVR1|A0A171JVR1_BORPT 6-carboxy-5,6,7,8-tetrah ydropterin synthase OS=Bordetella pertussis 2356847 OX= 1331248 GN=queD PE=3 SV=1

SEQ ID NO: 18318 - protein, 147 aa, Bordetella petrii
  misc_feature (1)..(147): tr|A9IPG5|A9IPG5_BORPD 6-carboxy-5,6,7,8-tetrahydropter in synthase OS=Bordetella petrii (strain ATCC BAA-461 / DSM 12804 / CCUG 43448) OX=340100 GN=Bpet2601 PE=3 SV= 1
MISVTRRLEFDAGHRIPDHRSQCRNLHGHRYVLEVTLEGDVADAPGASHNGMLMDFSEIKAIAKRHIVDPWDHAFLVYRDDAAVRGFLDTLPGHKTVVLDCIPTAENLARVIFAALAPHYHGHYGAQLRLSRVRLYETPNCWADCSG

SEQ ID NO: 18319 - protein, 148 aa, Bordetella pseudohinzii
  misc_feature (1)..(148): tr|A0A0J6C0Z1|A0A0J6C0Z1_9BORD 6-carboxy-5,6,7,8-tetrah ydropterin synthase OS=Bordetella pseudohinzii OX=13312 58 GN=ERS370011_00317 PE=3 SV=1
MISVTRRLEFDAGHRIPDHRSQCRNLHGHRYVLEITLTGDVVQTPGQSDTGMVMDFSDIKHIAKTHVVDVWDHAFLVYEGDTAVRDFLATLPGHKTVVLDRIPTAENLAAIIFDLLAPHYQDAYGHHLRLTRVRLYETPNCWADCDGA

SEQ ID NO: 18320 - protein, 147 aa, Bordetella sp.
  misc_feature (1)..(147): tr|A0A0S1XXM7|A0A0S1XXM7_9BORD 6-carboxy-5,6,7,8-tetrah ydropterin synthase OS=Bordetella sp. N OX=1746199 GN=A SB57_05650 PE=3 SV=1
MISVTRRLEFDAGHRIPDHRSQCRNMHGHRYVLEVTLQGDVVNTPGSSDNGMLMDFSEIKAIGKKELVDRWDHAFLVYSGDEAVLNFLQSLPGHKTVVLDRIPTVENLVRIAFDTLAPHYHSHYGLDLRLTRVRLYETPNCWADCNG

SEQ ID NO: 18321 - protein, 152 aa, Bordetella sp.
  misc_feature (1)..(152): tr|A0A2V1K224|A0A2V1K224_9BORD 6-carboxytetrahydropteri n synthase QueD OS=Bordetella sp. 3d-2-2 OX=2175229 GN= DD235_03830 PE=4 SV=1
MLTITRKLEFDAGHRIPDHGSQCRNLHGHRYVLEITLRGHINDTPGASDRGMVMDFADVKALATTHLVAIWDHAFLVYEGDTRVREFLASMPDHKTVVLTRIPTVENLAVEAFRILAAVYDVRYGDALRLARVRLYETPNCWADVDASDLQG

SEQ ID NO: 18322 - protein, 148 aa, Bordetella trematum
  misc_feature (1)..(148): tr|A0A157R249|A0A157R249_9BORD 6-carboxy-5,6,7,8-tetrah ydropterin synthase OS=Bordetella trematum OX=123899 GN =SAMEA3906487_03556 PE=3 SV=1
MISVTRKLEFDAGHRIPDHRSQCRNLHGHRYVLEITLSGEVVQTPGQSDTGMVMDFSEIKHIAKTHVVDVWDHAFLVYEGDAAVRDFLATLPGHKTVVLDRIPTAENLAAIIFARLAPEYQGAYGGQLRLSRVRLYETPNCWADCHGD

SEQ ID NO: 18323 - protein, 133 aa, Bosea lathyri
  misc_feature (1)..(133): tr|A0A1H6BCJ1|A0A1H6BCJ1_9BRAD 6-pyruvoyl-tetrahydropte rin synthase OS=Bosea lathyri OX=1036778 GN=SAMN0448811 5_107110 PE=4 SV=1
MFSVEVRDRIMIGHSLPDPFFGPAQNMHGATFVVDVAFFREKLTRQNVVVDIGAALDVLNRTLKPLNYQNLDALPQFAGVLTTTEFLCRYIFDAMAAAATSGALGEDGAGLARIRVTLHETDLARATYEGALA

SEQ ID NO: 18324 - protein, 133 aa, Bosea lupini
  misc_feature (1)..(133): tr|A0A1H7VUB6|A0A1H7VUB6_9BRAD 6-pyruvoyl-tetrahydropte rin synthase OS=Bosea lupini OX=1036779 GN=SAMN04515666 _107251 PE=4 SV=1
MFSVEVRDRIMIGHSLPDPFFGPAQAMHGATFVVDVAFFRESLTRQNVVVDIGAALTVLNETLKPLNYKNLDTLPQFEGVLTTTEFLCKYIFDAMALAARTGKLGADAADLAKIRVTLHETDLARASYEGALA

SEQ ID NO: 18325 - protein, 133 aa, Bosea sp.
  misc_feature (1)..(133): tr|A0A0N0JPL5|A0A0N0JPL5_9BRAD 6-pyruvoyl tetrahydropte rin synthase OS=Bosea sp. AAP35 OX=1523417 GN=IP69_2048 5 PE=4 SV=1
MFSVEVRDRIMIGHSLPDPFFGPAQNMHGATFVVDVAFFRPTLTKQNVVVDIGAALDVLNKTLKPLNYQNLDVLPQFAGVLTTTEFLCKYIFDAMADAARSGALGEDGAGLARIRVTLHETDLARASFEGALA

SEQ ID NO: 18326 - protein, 133 aa, Bosea sp.
  misc_feature (1)..(133): tr|A0A1Q3NUB0|A0A1Q3NUB0_9BRAD Uncharacterized protein OS=Bosea sp. 67-29 OX=1895723 GN=BGO20_13190 PE=4 SV=1
MFSVEVRDRIMIGHSLPDPFFGPAQNMHGATFVVDVAFFRETLNRQNVVVDIGAALDVLARTLKPLKYQNLDALPQFAGVLTTTEFLCKHIFDAMAAAAKSGTLGADGAGLARIRVTLHETDLARASFEGALA

SEQ ID NO: 18327 - protein, 133 aa, Bosea thiooxidans
  misc_feature (1)..(133): tr|A0A0Q3PHN9|A0A0Q3PHN9_9BRAD 6-pyruvoyl-tetrahydropte rin synthase OS=Bosea thiooxidans OX=53254 GN=ARD30_187 35 PE=4 SV=1
MFSVEVRDRIMIGHSLPDPFFGPAQAMHGATFVVDVAFFRETLNRQNVVVDIGAALDVLSRTLKPLNYQNLDALPQFAGVLTTTEFLCKHIFDAMAAAAKSGALGADGTGLAKIRVTLHETDLARASYEGALA

SEQ ID NO: 18328 - protein, 133 aa, Bosea vaviloviae
  misc_feature (1)..(133): tr|A0A1D7U8D0|A0A1D7U8D0_9BRAD Uncharacterized protein OS=Bosea vaviloviae OX=1526658 GN=BHK69_27105 PE=4 SV=1
MFSVEVRDRIMIGHSLPDPFFGPARNMHGATFIVDVAFFRERLTRHNVVVDIGAALEVLNRTLKPLNYQNLDALPQFAGVLTTTEFLCKHIFDAMAQAAASGALGEDGAGLSRIKVTLHETDLARASYEGMLA

SEQ ID NO: 18329 - protein, 133 aa, Bosea vaviloviae
  misc_feature (1)..(133): tr|A0A0N1F4B2|A0A0N1F4B2_9BRAD 6-pyruvoyl tetrahydropte rin synthase OS=Bosea vaviloviae OX=1526658 GN=AE618_14 525 PE=4 SV=1
MYSVEVRDRIMIGHSLPDPFFGPAQNMHGATFVVDVAFFRETLTRQNVVVDIGAALDVLNKTLKPLNYQNLDALPQFAGVLTTTEFLCKHIFNAMASAAKAGALGEDGNGLSRIRVTLHETDLARASFEGALA

SEQ ID NO: 18330 - protein, 133 aa, Bosea vestrisii
  misc_feature (1)..(133): tr|A0A543NPT3|A0A543NPT3_9BRAD 6-pyruvoyl-tetrahydropte rin synthase OS=Bosea vestrisii OX=151416 GN=FHW41_2559 PE=4 SV=1
MFSVEVRDRIMIGHSLPDPFFGPAQNMHGATFVVDVAFFREALNRHNVVVDIGAALDVLAETLKPLKYQNLDALPQFAGVLTTTEFLCKHIFDTMAAAAKSGALGADGAGLARIRVTLHETDLARASYEGALA

SEQ ID NO: 18331 - protein, 290 aa, Bowmanella sp.
  misc_feature (1)..(290): tr|A0A4V2L0E7|A0A4V2L0E7_9ALTE 6-pyruvoyl tetrahydropte rin synthase OS=Bowmanella sp. JS7-9 OX=1605368 GN=TK45 _07995 PE=4 SV=1
MQLFVNDLTVMDFSYLCPQRGMVGESWIVDVILDGSLNEESMVLDFSKVKKRLKALIDEYVDHKLLIPAEHAYTRIERDEQNERVQVDFLRPDERSIHLNCPPEAYAFIYANEVSMASVQEYLKQIIKTHLPENVQGLTLSLREEKIDGPYYHYTHGLKKHDGNCQRIAHGHRSKVVVFADGQQSVRWEDYWAKRWCDIYIGSREDLVTADKLIMQPDISGDEHYLFAYESSQGIFELAIPKCESDLVDTDSTVECLAQFMADEQKRLAPGNSFKVFAFEGVGKGAIAGA

SEQ ID NO: 18332 - protein, 189 aa, Bowmanella sp.
  misc_feature (1)..(189): tr|A0A4Q9XL98|A0A4Q9XL98_9ALTE QueD like protein OS=Bow manella sp. JS7-9 OX=1605368 GN=TK45_09945 PE=4 SV=1
MELAIILMILLIVVAAAAIKLSDVGLTFPFSKKTNLYTPAERKFLQMLDMAVGDQYRIICRVRLSDIVSIRPNTSVKVSRSAMAQAATKQLDFVLCQKDTMSPVVAVDLVSVEAERSYKAQRDWYVSGALDAARIPHIRIKAKASYKPQEIRDCIHAKLAPLRFQQPQEPLVRGTLNNDKAPLRRPVAA

SEQ ID NO: 18333 - protein, 121 aa, Brachyspira sp.
  misc_feature (1)..(121): tr|R5HJ75|R5HJ75_9SPIR 6-carboxy-5,6,7,8-tetrahydropter in synthase OS=Brachyspira sp. CAG:484 OX=1262759 GN=BN 676_01359 PE=3 SV=1
MYEIKTQAFFSAAHHLLNYDGECENQHGHNWMVEAFVKGETLDKSNILIDYKVLKRELNAVLDLLDHKDINEIPEFHGESPSSEMIAAFIYNKLKEKVVLLSKISVWETQTSCASYYEEEV

SEQ ID NO: 18334 - protein, 121 aa, Bradymonadaceae bacterium
  misc_feature (1)..(121): tr|A0A3D8MW50|A0A3D8MW50_9DELT 6-carboxy-5,6,7,8-tetrah ydropterin synthase OS=Bradymonadaceae bacterium TMQ3 O X=2283320 GN=queD PE=3 SV=1
MIVELVKEFRFEAAHRLPHVPEGHKCQRLHGHSYRVTVTVRGEVDPEMGWLLDYGDIKAAVKPLIVEQLDHYYLNEIEGLENPTSEVLAGWMWERIKPVLPQLHSLQIHETCESSCIYRGE

SEQ ID NO: 18335 - protein, 118 aa, Bradymonadales bacterium
  misc_feature (1)..(118): tr|A0A5B8XW71|A0A5B8XW71_9DELT 6-carboxy-5,6,7,8-tetrah ydropterin synthase OS=Bradymonadales bacterium V1718 O X=2600177 GN=queD PE=3 SV=1
MEIFKEFTFEAAHRLPNLPPDHKCSRLHGHSFRCRIYVEGPLDPVFGWVSDFGDIKAVFKPTWERLDHHYLNEIPGLENPTSEVLARWIWQELKAELPQLSRVEVFETCTTGAIYRGD

SEQ ID NO: 18336 - protein, 120 aa, Bradymonadales bacterium
  misc_feature (1)..(120): tr|A0A5B8YCI3|A0A5B8YCI3_9DELT 6-carboxy-5,6,7,8-tetrah ydropterin synthase OS=Bradymonadales bacterium YN101 O X=2292766 GN=queD PE=3 SV=1
MVVELTKQFRFEAAHRLPNTPEGHKCRRLHGHSFKVTVEVKGPVDPDTGWLIDFAEIKEAWKPLHDELDHYFLNEIEGLENPTSEVLARWIWVRLEKTLDCLSAITVHETCTSACTYRGE

SEQ ID NO: 18337 - protein, 120 aa, Bradymonas sediminis
  misc_feature (1)..(120): tr|A0A2Z4FI10|A0A2Z4FI10_9DELT 6-carboxy-5,6,7,8-tetrah ydropterin synthase OS=Bradymonas sediminis OX=1548548 GN=queD PE=3 SV=1
MIVELKKKFTFEAAHCLPNTPPGHKCRRLHGHSYTIEIEVKGEVGEESGWLIDFTDIKEAWQPLHAELDHYYLNEIEGLENPTSEVLAGWIWKRLAPTLEYLSAVTVHETCTSSCTYRGE

SEQ ID NO: 18338 - protein, 120 aa, Bradymonas sp.; identical to SEQ ID NO: 18336
  misc_feature (1)..(120): tr|A0A4Y6PYI5|A0A4Y6PYI5_9DELT 6-carboxy-5,6,7,8-tetrah ydropterin synthase OS=Bradymonas sp. YN101 OX=2589075 GN=queD PE=3 SV=1

SEQ ID NO: 18339 - protein, 121 aa, Bradyrhizobiaceae bacterium
  misc_feature (1)..(121): tr|A0A257KRX5|A0A257KRX5_9BRAD 6-carboxy-5,6,7,8-tetrah ydropterin synthase OS=Bradyrhizobiaceae bacterium PARB 1 OX=2015576 GN=CFE29_12815 PE=3 SV=1
MWELTKSFRFEAAHALSYTTLGEASQEIHGHSFRAEITIRGEPDPVTGMVMDLGLLDRSLDDLRKTLDHKFLNKIEAIGVPTLENLSRYIWDRVADKGPVVRVGVFRDSCNESCVYFGPKK

SEQ ID NO: 18340 - protein, 118 aa, Bradyrhizobiaceae bacterium
  misc_feature (1)..(118): tr|A0A3S0NIG0|A0A3S0NIG0_9BRAD 6-carboxy-5,6,7,8-tetrah ydropterin synthase OS=Bradyrhizobiaceae bacterium OX=2 072420 GN=queD PE=3 SV=1
MRISQAFKFEAAHRLPNVPETHRCRRLHGHSYRVEVQLDGPVDPHTGFVADFFDIENSFADIMGALDHHCLNEVKGLENPTAENIAIWIWDRLKPSLPQLWAVRVYETADCWAEYQGR

SEQ ID NO: 18341 - protein, 121 aa, Bradyrhizobium arachidis
  misc_feature (1)..(121): tr|A0A1I7M169|A0A1I7M169_9BRAD 6-carboxy-5,6,7,8-tetrah ydropterin synthase OS=Bradyrhizobium arachidis OX=8584 23 GN=SAMN05192541_1249 PE=3 SV=1
MWELTKSFRFEAAHSLSGTTFGAASEEIHGHSFRAEVTLRGTPDPKTGMVVDLGLVQRAIEDVRLTLDHKYLNKIEALGTPTLENLSRFVWERLAHIGKLTRVSIHRDSCNESCTYYGPQE

SEQ ID NO: 18342 - protein, 121 aa, Bradyrhizobium betae
  misc_feature (1)..(121): tr|A0A4Q1VPT5|A0A4Q1VPT5_9BRAD 6-carboxy-5,6,7,8-tetrah ydropterin synthase OS=Bradyrhizobium betae OX=244734 G N=B5V03_03470 PE=3 SV=1
MWELTKSFRFEAAHSLTGTTFGAASEEIHGHSFRAEVTVRGTPDPKTGMVVDLGLLQRAIEEVRVTLDHKFLNKIEALGTPTLENLSRFVWERLAHIGKLTRVSIHRDSCNESCTYYGPQG

SEQ ID NO: 18343 - protein, 121 aa, Bradyrhizobium canariense
  misc_feature (1)..(121): tr|A0A1H2B2Y9|A0A1H2B2Y9_9BRAD 6-carboxy-5,6,7,8-tetrah ydropterin synthase OS=Bradyrhizobium canariense OX=255 045 GN=SAMN05444158_6707 PE=3 SV=1
MWELTKSFRFEAAHALPGTTLGEASEEIHGHSFRAEVSIRGMPDPATGMVLDLGLLERSMTDVRKMLDHKLLNKVDALGPPTLENLSRFIWEKVQHAGHVTRVSVHRDSCNESCTYFGPQS

SEQ ID NO: 18344 - protein, 120 aa, Bradyrhizobium canariense
  misc_feature (1)..(120): tr|A0A1X3GZN8|A0A1X3GZN8_9BRAD 6-carboxy-5,6,7,8-tetrah ydropterin synthase OS=Bradyrhizobium canariense OX=255 045 GN=BSZ18_29320 PE=3 SV=1
MKISQAFKFEAAHRLPNVPQTHRCHRVHGHSYRVEVVLNGAVDPHTGFVMDFFNMEEAFGLLIKKLDHHCLNDVPGLENPTAENIAIWIWEHAKPRLAQLSSVRVYETTDSWAEYDGPDR

SEQ ID NO: 18345 - protein, 121 aa, Bradyrhizobium centrolobii
  misc_feature (1)..(121): tr|A0A176YCB3|A0A176YCB3_9BRAD 6-carboxy-5,6,7,8-tetrah ydropterin synthase OS=Bradyrhizobium centrolobii OX=15 05087 GN=AYJ54_04125 PE=3 SV=1
MWELTKSFRFEAAHSLSGTTFGAASEEIHGHSFRAEVSLRGTPDPVTGMVVDLGLVQRAIEDVRLTLDHKFLNKIEAIGVPTLENLSRFVWERLQHIDGLTRVSIHRDSCNESCTYYGPQG

SEQ ID NO: 18346 - protein, 118 aa, Bradyrhizobium centrolobii
  misc_feature (1)..(118): tr|A0A176YKE1|A0A176YKE1_9BRAD 6-carboxy-5,6,7,8-tetrah ydropterin synthase OS=Bradyrhizobium centrolobii OX=15 05087 GN=AYJ54_18795 PE=3 SV=1
MKISQAFKFRAAHRLPNVPSTHGCSRVHGHSYRVEVYLEGPVDPVNGIVADFSAIDESIVGIMTTLDHRYLNEVQGLENPTAERIAEWIWERLNDGLPRMSSVRVYETADCWAEYDGR

SEQ ID NO: 18347 - protein, 121 aa, Bradyrhizobium daqingense
  misc_feature (1)..(121): tr|A0A562L8U3|A0A562L8U3_9BRAD 6-carboxy-5,6,7,8-tetrah ydropterin synthase OS=Bradyrhizobium daqingense OX=993 502 GN=IQ17_03920 PE=3 SV=1
MWELTKSFRFEAAHSLSGTTFGAASEEIHGHSFRAEVTVRGTPDPETGMVVDLGLLQRAIEDVRLVLDHKYLNKIEALGTPTLENLSRFVWERLAHVGKLTRVSIHRDSCNESCTYYGPQG

SEQ ID NO: 18348 - protein, 121 aa, Bradyrhizobium diazoefficiens
  misc_feature (1)..(121): tr|Q89SC1|Q89SC1_BRADU 6-carboxy-5,6,7,8-tetrahydropter in synthase OS=Bradyrhizobium diazoefficiens (strain JC M 10833 / IAM 13628 / NBRC 14792 / USDA 110) OX=224911 GN=bll2482 PE=3 SV=1
MWELTKSFRFEAAHSLSGTTFGAASEEIHGHSFRAEVTVRGTPDPETGMVVDLGLLQRAIEDVRLTLDHKFLNKIEALGKPTLENLSRFVWERLQHIGKLTRVSIHRDSCNESCTYYGPQG

SEQ ID NO: 18349 - protein, 121 aa, Bradyrhizobium diazoefficiens; identical to SEQ ID NO: 18348
  misc_feature (1)..(121): tr|A0A2A6MMS6|A0A2A6MMS6_9BRAD 6-carboxy-5,6,7,8-tetrah ydropterin synthase OS=Bradyrhizobium diazoefficiens OX =1355477 GN=CO678_40090 PE=3 SV=1

SEQ ID NO: 18350 - protein, 120 aa, Bradyrhizobium elkanii
  misc_feature (1)..(120): tr|A0A4Y3ZY96|A0A4Y3ZY96_BRAEL 6-carboxy-5,6,7,8-tetrah ydropterin synthase OS=Bradyrhizobium elkanii OX=29448 GN=BEL01nite_82960 PE=3 SV=1
MRISQAFKFEAAHRLPNVPETHRCHRMHGHSYRIELVLSGRVDPRTGFVIDFFELEQVLGPLLRQLDHHCLNDIHGLENPTVENIAIWIWDKIRPRLQQLSAVKVFETAGCWAEYDGDEP

SEQ ID NO: 18351 - protein, 121 aa, Bradyrhizobium elkanii
  misc_feature (1)..(121): tr|A0A4V1WCY4|A0A4V1WCY4_BRAEL 6-carboxy-5,6,7,8-tetrah ydropterin synthase OS=Bradyrhizobium elkanii OX=29448 GN=BEL01nite_25820 PE=3 SV=1
MWELTKAFRFEAAHALSGTTFGTASEEIHGHSFRAEVTVRGTPDPKTGMVIDLGLLERAMAEVQKTLDHKFLNKIEAIGVPTLENLSRFIWERLQHAGRLTRVSVHRDSCNESCTYFGPQG

SEQ ID NO: 18352 - protein, 121 aa, Bradyrhizobium erythrophlei
  misc_feature (1)..(121): tr|A0A1M5GQ96|A0A1M5GQ96_9BRAD 6-carboxy-5,6,7,8-tetrah ydropterin synthase OS=Bradyrhizobium erythrophlei OX=1 437360 GN=SAMN05444169_0297 PE=3 SV=1
MWELTKSFRFEAAHALPGTTLGAASEEIHGHSFRAEVTVRGTPDPATGMVLDLGLLQRNIAEVQKMLDHKLLNKIEALGAPTLENLSRFVWERVQHAGRITRVSIHRDSCDESCTYYGPQG

SEQ ID NO: 18353 - protein, 121 aa, Bradyrhizobium erythrophlei
  misc_feature (1)..(121): tr|A0A1M5JMH7|A0A1M5JMH7_9BRAD 6-carboxy-5,6,7,8-tetrah ydropterin synthase OS=Bradyrhizobium erythrophlei OX=1 437360 GN=SAMN05443248_1463 PE=3 SV=1
MWELTKSFRFEAAHALPGTALGAASEEIHGHSFRAEVTVRGTPDPLTGMVLDLGLLERSMAEVQKMLDHKLLNKVEALGPPTLENLSRFVWERLQHAGQIARVSIHRDSCGESCTYYGPQG

SEQ ID NO: 18354 - protein, 121 aa, Bradyrhizobium genosp.
  misc_feature (1)..(121): tr|A0A4Q7FG78|A0A4Q7FG78_9BRAD 6-carboxy-5,6,7,8-tetrah ydropterin synthase OS=Bradyrhizobium genosp. SA-3 OX=5 08868 GN=CWO91_16225 PE=3 SV=1
MWELTKSFRFEAAHSLSGTTFGAASEEIHGHSFRAEVTVRGTPDPNTGMVVDLGLLQRAIEDVRLMLDHKYLNKIEALGTPTLENLSRFVWDRLAHIDKLTRVSIHRDSCNESCTYYGPQE

SEQ ID NO: 18355 - protein, 121 aa, Bradyrhizobium guangdongense
  misc_feature (1)..(121): tr|A0A410VBW6|A0A410VBW6_9BRAD 6-carboxy-5,6,7,8-tetrah ydropterin synthase OS=Bradyrhizobium guangdongense OX= 1325090 GN=X265_28650 PE=3 SV=1
MWELTKSFRFEAAHTLKGTTFGAASEEIHGHSFRAEVTVRGTPDPATGMVVDLGLLQRAIEEVRLGLDHKFLNKIEALGTPTLENLSRFVWERLAHIGKLTRVSIHRDSCNESCTYYGPQG

SEQ ID NO: 18356 - protein, 121 aa, Bradyrhizobium guangzhouense
  misc_feature (1)..(121): tr|A0A4Q0RB73|A0A4Q0RB73_9BRAD 6-carboxy-5,6,7,8-tetrah ydropterin synthase OS=Bradyrhizobium guangzhouense OX= 1325095 GN=EAS56_29450 PE=3 SV=1
MWELTKQFRFEAAHTLKGTTFGEASEEIHGHSFRAEVTVRGTPDPATGMVIDLGLLQRAIEEVRLTLDHKFLNKIEALGTPTLENLSRFVWERLAHVGKLSRVSIHRDSCYESCTYYGPQT

SEQ ID NO: 18357 - protein, 121 aa, Bradyrhizobium huanghuaihaiense
  misc_feature (1)..(121): tr|A0A562QYS0|A0A562QYS0_9BRAD 6-carboxy-5,6,7,8-tetrah ydropterin synthase OS=Bradyrhizobium huanghuaihaiense OX=990078 GN=IQ16_06823 PE=3 SV=1
MWELTKSFRFEAAHSLSGTTFGAASEEIHGHSFRAEVTVRGTPDPDTGMVVDLGLLQRAIEDVRLTLDHKYLNKIEALGKPTLENLSRFVWERLQHIGKLTRVSIHRDSCNESCTYYGPQG

SEQ ID NO: 18358 - protein, 118 aa, Bradyrhizobium icense
  misc_feature (1)..(118): tr|A0A533J0V1|A0A533J0V1_9BRAD 6-carboxy-5,6,7,8-tetrah ydropterin synthase OS=Bradyrhizobium icense OX=1274631 GN=queD PE=3 SV=1
MKISQAFKFEAAHFLPGVPATHRCSRLHGHSYRVEVQLDGPVDPQTGFVVDFFDLERSFAGILDALDHRCLNEVEGLPNPTAENIAIWIWDRLKPDFKPMSAVRVYETTDCWAEYDGR

SEQ ID NO: 18359 - protein, 130 aa, Bradyrhizobium icense
  misc_feature (1)..(130): tr|A0A1B1UB54|A0A1B1UB54_9BRAD 6-carboxy-5,6,7,8-tetrah ydropterin synthase OS=Bradyrhizobium icense OX=1274631 GN=LMTR13_07265 PE=3 SV=1
MWELTKSFRFEAAHSLKGTTFGAASEEIHGHSFRAEVSVRGTPDPETGMVMDLGLLERSMEEVRKALDHKLLNNVEALGTPTLENISRYIFERIQHAGQITRVSVHRDSCNESCTYFGPQKLMDNCHHED

SEQ ID NO: 18360 - protein, 121 aa, Bradyrhizobium japonicum
  misc_feature (1)..(121): tr|A0A4Y3Z7M9|A0A4Y3Z7M9_BRAJP 6-carboxy-5,6,7,8-tetrah ydropterin synthase OS=Bradyrhizobium japonicum OX=375 GN=BJA01nite_80640 PE=3 SV=1
MWELTKSFRFEAAHSLSGTTFGAASEEIHGHSFRAEVTLRGTPDPKTGMVVDLGLVQRAIEDVRLTLDHKYLNKIEALGTPTLENLSRFVWERLQHIGKLTRVSIHRDSCNESCSYYGPQG

SEQ ID NO: 18361 - protein, 139 aa, Bradyrhizobium japonicum
  misc_feature (1)..(139): tr|A0A1Y2JM54|A0A1Y2JM54_BRAJP 6-pyruvoyl tetrahydrobio pterin synthase OS=Bradyrhizobium japonicum OX=375 GN=B SZ19_22025 PE=4 SV=1
MPIIRATRYHDISCGHRVVDHEGKCQFLHGHNYRVHFHCEADALDHLGRIIDFGVIKSTLCQWLEDNWDHRMVLWHRDPLLPALLVIEPSIVTVPFNPTAENIAAHLLTVVGPQVLPPTVRLVRVVVDETRKCSCEAAI

SEQ ID NO: 18362 - protein, 121 aa, Bradyrhizobium jicamae
  misc_feature (1)..(121): tr|A0A0R3L1R0|A0A0R3L1R0_9BRAD 6-carboxy-5,6,7,8-tetrah ydropterin synthase OS=Bradyrhizobium jicamae OX=280332 GN=CQ12_27095 PE=3 SV=1
MWELTKSFRFEAAHSLKGTTFGADSEEIHGHSFRAEVSVRGTPDPETGMVLDLGLLERSMEEVRKALDHRLLNKVEALGMPTLENISRYIFERVQHAGKITRVSVHRDSCNESCTYFGPQG

SEQ ID NO: 18363 - protein, 118 aa, Bradyrhizobium jicamae
  misc_feature (1)..(118): tr|A0A0R3LKW6|A0A0R3LKW6_9BRAD 6-carboxy-5,6,7,8-tetrah ydropterin synthase OS=Bradyrhizobium jicamae OX=280332 GN=CQ12_16670 PE=3 SV=1
MKISQAFKFEAAHRLPNLPPTHKCSRVHGHSYRVEVQLDGRLDPVTGFVVDFSDLEEAFLGIIKALDHRCLNEVEGLENPTAENIVVWIWERLKRKLHQMSSVRVYETSDCWAEYDGR

SEQ ID NO: 18364 - protein, 121 aa, Bradyrhizobium lablabi
  misc_feature (1)..(121): tr|A0A1M7DCG9|A0A1M7DCG9_9BRAD 6-carboxy-5,6,7,8-tetrah ydropterin synthase OS=Bradyrhizobium lablabi OX=722472 GN=SAMN05444171_5260 PE=3 SV=1
MWELTKSFRFEAAHSLPGTTFGAASEEIHGHSFRAEVSVRGTPDPSTGMVLDLGLLERSMAEVQKTLDHKLLNRIEALGTPTLENISRFIWERVQHAGKITRVSVHRDSCNESCTYFGPQG

SEQ ID NO: 18365 - protein, 121 aa, Bradyrhizobium lablabi
  misc_feature (1)..(121): tr|A0A0R3MB76|A0A0R3MB76_9BRAD 6-carboxy-5,6,7,8-tetrah ydropterin synthase OS=Bradyrhizobium lablabi OX=722472 GN=CQ14_31600 PE=3 SV=1
MWELTKSFRFEAAHSLKGTTFGAASEEIHGHSFRAEVSVRGTPDPETGMVLDLGLLERSMEEVRKALDHKLLNKVEALGTPTLENISRYIFERVQHAGKITRVSVHRDSCNESCTYFGPQG

SEQ ID NO: 18366 - protein, 118 aa, Bradyrhizobium liaoningense
  misc_feature (1)..(118): tr|A0A151FQT7|A0A151FQT7_9BRAD 6-carboxy-5,6,7,8-tetrah ydropterin synthase OS=Bradyrhizobium liaoningense OX=4 3992 GN=A1D31_04220 PE=3 SV=1
MRISQAFKFEAAHRLPNVPETHRCSRLHGHSYRVEVQLDGPVDPHTGFVADFFDIEKCFADIMGTLDHQCLNEVEGLENPTAENIAVWIWDRLKPGLAQLSAVRVYETADCWAEYQGR

SEQ ID NO: 18367 - protein, 118 aa, Bradyrhizobium lupini; identical to SEQ ID NO: 17156
  misc_feature (1)..(118): tr|K5D1V6|K5D1V6_RHILU 6-carboxy-5,6,7,8-tetrahydropter in synthase OS=Bradyrhizobium lupini HPC(L) OX=1229491 GN=C241_11643 PE=3 SV=1

SEQ ID NO: 18368 - protein, 121 aa, Bradyrhizobium macuxiense
  misc_feature (1)..(121): tr|A0A120FP67|A0A120FP67_9BRAD 6-carboxy-5,6,7,8-tetrah ydropterin synthase OS=Bradyrhizobium macuxiense OX=175 5647 GN=AS156_04415 PE=3 SV=1
MWELTKSFRFEAAHALSGTTLGSGSEEIHGHSFRAEVTVRGTQDPKTGMVVDLGLLERSMAEVQKTLDHKFLNKIEAIGLPTLENLSRFIWERLQHAGTLARVSVHRDSCNESCTYFGPQD

SEQ ID NO: 18369 - protein, 120 aa, Bradyrhizobium macuxiense
  misc_feature (1)..(120): tr|A0A125Q9R8|A0A125Q9R8_9BRAD 6-carboxy-5,6,7,8-tetrah ydropterin synthase OS=Bradyrhizobium macuxiense OX=175 5647 GN=AS156_36180 PE=3 SV=1
MKISQAFKFEAAHRLPSVPQTHRCHRMHGHSYRIEVVLDGPVDPHTGFVVDFFDMEAAFGPLLKALDHHCLNDVPGLENPTAENIAIWIWDRIKPQLAQLFSVRVYETTDCWAEYDGPRR

SEQ ID NO: 18370 - protein, 158 aa, Bradyrhizobium manausense
  misc_feature (1)..(158): tr|A0A0R3D2A6|A0A0R3D2A6_9BRAD 6-pyruvoyl tetrahydrobio pterin synthase OS=Bradyrhizobium manausense OX=989370 GN=AOQ71_29990 PE=4 SV=1
MTYLSTKTYGHEIGLSATFRQWRALSHCRLLHGYSLSFRFEFEADTLDDKNWVVDFGGLKELKAILEDTFDHKTVVAADDPELEWFHEAARRGVADIVVLPAVGCEKFAEHVYGIASKWLLTERLSPRCRLASVEVKEHGANSAIYRGTSRAAGQRDL

SEQ ID NO: 18371 - protein, 121 aa, Bradyrhizobium manausense
  misc_feature (1)..(121): tr|A0A0R3D4P3|A0A0R3D4P3_9BRAD 6-carboxy-5,6,7,8-tetrah ydropterin synthase OS=Bradyrhizobium manausense OX=989 370 GN=AOQ71_35220 PE=3 SV=1
MWELTKQFRFEAAHTLKGTTFGEASEEIHGHSFRAEVTVRGTPDPATGMVVDLGLLQRAIEEVRLMLDHKFLNKIEALGTPTLENLSRFVWERLAHIGKLTRVSIHRDSCNESCTYYGPQT

SEQ ID NO: 18372 - protein, 118 aa, Bradyrhizobium nanningense
  misc_feature (1)..(118): tr|A0A4V1L203|A0A4V1L203_9BRAD 6-carboxy-5,6,7,8-tetrah ydropterin synthase OS=Bradyrhizobium nanningense OX=13 25118 GN=XH99_17460 PE=3 SV=1
MRISQAFKFEAAHRLPNVPETHRCRRLHGHSYRVEVQLDGPVDPHTGFVADFFDIEKCFADILDALDHHCLNEVKGLENPTAENIAIWIWDRLKPSLPQLWAVRVYETADCWAEYQGQ

SEQ ID NO: 18373 - protein, 121 aa, Bradyrhizobium neotropicale
  misc_feature (1)..(121): tr|A0A176ZA01|A0A176ZA01_9BRAD 6-carboxy-5,6,7,8-tetrah ydropterin synthase OS=Bradyrhizobium neotropicale OX=1 497615 GN=AXW67_08790 PE=3 SV=1
MWELTKSFRFEAAHSLSGTTFGAASEEIHGHSFRAEVTLRGTPDPVTGMVVDLGLVQRAIEDVRLTLDHKFLNKIEAIGVPTLENLSRFVWERLQHIEGLTRVSIHRDSCNESCTYYGPQG

SEQ ID NO: 18374 - protein, 122 aa, Bradyrhizobium oligotrophicum
  misc_feature (1)..(122): tr|M4ZCM2|M4ZCM2_9BRAD 6-carboxy-5,6,7,8-tetrahydropter in synthase OS=Bradyrhizobium oligotrophicum S58 OX=124 5469 GN=S58_55750 PE=3 SV=1
MWELTKSFTFEAAHTLPITTLGEASQEIHGHSFRAEVTVRGDTTNPETGMVVDFGVLTQRLGEIQAMLDHKFLNKIEAIGLPTLENLSRFIYERVRHIGHVTKVSVHRDSCRETCTYFGPRD

SEQ ID NO: 18375 - protein, 118 aa, Bradyrhizobium ottawaense
  misc_feature (1)..(118): tr|A0A2U8P3I4|A0A2U8P3I4_9BRAD 6-carboxy-5,6,7,8-tetrah ydropterin synthase OS=Bradyrhizobium ottawaense OX=931 866 GN=queD PE=3 SV=1
MKISQAFKFEAAHRLPNVPETHRCRRLHGHSYRVEVQLDGPVDPHTGFVADFFDIEKCFADILGALDHHCLNEVKGLENPTAENIAIWIWDRLKPSLRQLSAVRVYETADCWAEYNGQ

SEQ ID NO: 18376 - protein, 121 aa, Bradyrhizobium pachyrhizi
  misc_feature (1)..(121): tr|A0A0R3DBM7|A0A0R3DBM7_9BRAD 6-carboxy-5,6,7,8-tetrah ydropterin synthase OS=Bradyrhizobium pachyrhizi OX=280 333 GN=AOQ73_13390 PE=3 SV=1
MWELTKAFRFEAAHALSGTTFGTASEEIHGHSFRAEVTVRGTPDPATGMVVDLGLLERAMAEVQKTLDHKFLNKIEAIGVPTLENLSRFIWERLQHAGKLSRVSVHRDSCNESCTYFGPQG

SEQ ID NO: 18377 - protein, 121 aa, Bradyrhizobium retamae
  misc_feature (1)..(121): tr|A0A0R3NBI4|A0A0R3NBI4_9BRAD 6-carboxy-5,6,7,8-tetrah ydropterin synthase OS=Bradyrhizobium retamae OX=130003 5 GN=CQ13_15295 PE=3 SV=1
MWELTKSFRFEAAHSLKGTTFGAASEEIHGHSFRAEVSVRGTPDPETGMVLDLGLLERSMEEVRKALDHKLLNKVEALGTPTLENISRYIFERVQHAGQITRVSVHRDSCNESCTYFGPQG

SEQ ID NO: 18378 - protein, 124 aa, Bradyrhizobium rifense
  misc_feature (1)..(124): tr|A0A5D3KJY2|A0A5D3KJY2_9BRAD 6-carboxy-5,6,7,8-tetrah ydropterin synthase OS=Bradyrhizobium rifense OX=515499 GN=FXB40_08920 PE=3 SV=1
MWELTKSFRFEAAHSLSGTTFGADSEEIHGHSFRAEVTVRGTPDPATGMVVDLGLLQRAIEDVRVMLDHKFLNKIEALGTPTLENLSRFVWERLAPIGELTRVSIHRDSCNESCTYYGPQELTK

SEQ ID NO: 18379 - protein, 121 aa, Bradyrhizobium sacchari
  misc_feature (1)..(121): tr|A0A560JKU4|A0A560JKU4_9BRAD 6-carboxy-5,6,7,8-tetrah ydropterin synthase OS=Bradyrhizobium sacchari OX=13994 19 GN=FBZ95_10812 PE=3 SV=1
MWELTKSFRFEAAHSLSGTTFGAASEEIHGHSFRAEVTVRGTPDPETGMVVDLGLLQRAIEDVRLVLDHKFLNKIEALGKPTLENLSRFVWERLQHIGKLTRVSIHRDSCSESCTYYGPQG

SEQ ID NO: 18380 - protein, 158 aa, Bradyrhizobium sacchari
  misc_feature (1)..(158): tr|A0A560JAC5|A0A560JAC5_9BRAD 6-pyruvoyltetrahydropter in/6-carboxytetrahydropterin synthase OS=Bradyrhizobium sacchari OX=1399419 GN=FBZ95_11316 PE=4 SV=1
MTYLSTKTYGHEIGLSTTFRQWRALSHCRLLHGYSLSFRFEFEADSLDDKNWVVDFGGLKELKAILEDTFDHKTVVAADDPELEWFHEAARRGVADIVVLPAVGCEKFAEHVYGIASKWLLTERLAPRCRLASVEVKEHGANSAIYRGTSRAAGQRDL

SEQ ID NO: 18381 - protein, 118 aa, Bradyrhizobium shewense
  misc_feature (1)..(118): tr|A0A1C3UZU4|A0A1C3UZU4_9BRAD 6-carboxy-5,6,7,8-tetrah ydropterin synthase OS=Bradyrhizobium shewense OX=17617 72 GN=GA0061098_100342 PE=3 SV=1
MKISQAFKFEAAHRLPNVPETHRCRRLHGHSYRVEVQLDGPIDPHTGFVADFFDIEKCFADILGALDHHCLNEVKGLENPTAENIAIWIWDRLKPSLRQLSAVRVYETADCWAEHNGQ

SEQ ID NO: 18382 - protein, 121 aa, Bradyrhizobium sp.
  misc_feature (1)..(121): tr|A0A1Y6KNF4|A0A1Y6KNF4_9BRAD 6-carboxy-5,6,7,8-tetrah ydropterin synthase OS=Bradyrhizobium sp. ORS 285 OX=11 5808 GN=ptpS PE=3 SV=1
MWELTKSFTFEAAHALSHTTLGEVSQEIHGHSFRAEVTVRGMPDPKTGMVVDFGVLTQRLSEIQATLDHKFLNKIEAIGLPTLENLCRFIYERVRSIGHVTKVSVHRDSCRETCTYFGPQD

SEQ ID NO: 18383 - protein, 121 aa, Bradyrhizobium sp.
  misc_feature (1)..(121): tr|A0A1Q5QY77|A0A1Q5QY77_9BRAD 6-carboxy-5,6,7,8-tetrah ydropterin synthase OS=Bradyrhizobium sp. NAS96.2 OX=16 80160 GN=AC628_36315 PE=3 SV=1
MWELTKAFRFEAAHALSGTTFGAASEEIHGHSFRAEVTVRGTPDPKTGMVIDLGLLERAMAEVQKTLDHKLLNKIEAIGVPTLENLSRFIWERLQHAGKLTRVSVHRDSCNESCTYFGPQG

SEQ ID NO: 18384 - protein, 121 aa, Bradyrhizobium stylosanthis
  misc_feature (1)..(121): tr|A0A560DBB9|A0A560DBB9_9BRAD 6-carboxy-5,6,7,8-tetrah ydropterin synthase OS=Bradyrhizobium stylosanthis OX=1 803665 GN=FBZ96_108168 PE=3 SV=1
MWELTKSFRFEAAHSLSGTTFGPASEEIHGHSFRAEVTVRGTPDPDTGMVVDLGLLQRAIEDVRLTLDHKFLNKIEALGKPTLENLSRFVWERLAHIGKLTRVSIHRDSCNESCTYYGPQG

SEQ ID NO: 18385 - protein, 121 aa, Bradyrhizobium valentinum
  misc_feature (1)..(121): tr|A0A0R3LLB5|A0A0R3LLB5_9BRAD 6-carboxy-5,6,7,8-tetrah ydropterin synthase OS=Bradyrhizobium valentinum OX=151 8501 GN=CP49_24785 PE=3 SV=1
MWELTKSFRFEAAHSLKGTTFGAASEEIHGHSFRAEVSVRGTPDPETGMVLDLGLLERSMDEVRKTLDHKFLNKIEALGTPTLENLSRYIWERVQHAGKITRVTVHRDSCNESCTYFGPQR

SEQ ID NO: 18386 - protein, 118 aa, Bradyrhizobium vignae
  misc_feature (1)..(118): tr|A0A4Q0QRX6|A0A4Q0QRX6_9BRAD 6-carboxy-5,6,7,8-tetrah ydropterin synthase OS=Bradyrhizobium vignae OX=1549949 GN=EAV90_20975 PE=3 SV=1
MRISQAFKFEAAHRLPNVPETHRCSRLHGHSYRVEVQLDGPVDPHTGFVADFFDIEKSFADIMAALDHHCLNEVDGLANPTAENIAVWIWDRLQPSLRQLWAVRVYETADCWAEYQGR

SEQ ID NO: 18387 - protein, 118 aa, Bradyrhizobium yuanmingense
  misc_feature (1)..(118): tr|A0A1C3WKK9|A0A1C3WKK9_9BRAD 6-carboxy-5,6,7,8-tetrah ydropterin synthase OS=Bradyrhizobium yuanmingense OX=1 08015 GN=GA0061099_1006349 PE=3 SV=1
MRISQAFKFEAAHRLPNVPETHRCSRLHGHSYRVEVQLDGPVDPHTGFVADFFDIEKSFAGIMAALDHQCLNEVDGLANPTAENIAVWIWDRLKPSLPQLWAVRVYETTDCWAEYQGR

SEQ ID NO: 18388 - protein, 118 aa, Bradyrhizobium yuanmingense
  misc_feature (1)..(118): tr|A0A0R3CPP9|A0A0R3CPP9_9BRAD 6-carboxy-5,6,7,8-tetrah ydropterin synthase OS=Bradyrhizobium yuanmingense OX=1 08015 GN=AOQ72_18250 PE=3 SV=1
MRISQAFKFEAAHRLPNVPETHRCSRLHGHSYRVEVQLDGPVDPHTGFVADFFDIEKSFAGIMAALDHQCLNEVDGLANPTAENIAVWIWGRLKPSLPQLWAVRVYETTDCWAEYQGR

SEQ ID NO: 18389 - protein, 158 aa, Bradyrhizobium zhanjiangense
  misc_feature (1)..(158): tr|A0A4Q0QDJ9|A0A4Q0QDJ9_9BRAD 6-pyruvoyl tetrahydrobio pterin synthase OS=Bradyrhizobium zhanjiangense OX=1325 107 GN=EAS61_28925 PE=4 SV=1
MTYLSTKTYGHEIGLSATFRQWRALSHCRLLHGYSLSFRFEFEADTLDDKNWVVDFGGLKELKAILEDTFDHKTVVAADDPELEWFHEAARRGVADIVVLPAVGCEKFAEHVYGIASKWLLTERLAPRCRLASVEVKEHGANSAIYRGTSRAAGQRDL

SEQ ID NO: 18390 - protein, 121 aa, Bradyrhizobium zhanjiangense
  misc_feature (1)..(121): tr|A0A4Q0R158|A0A4Q0R158_9BRAD 6-carboxy-5,6,7,8-tetrah ydropterin synthase OS=Bradyrhizobium zhanjiangense OX= 1325107 GN=EAS61_01610 PE=3 SV=1
MWELTKSFRFEAAHSLSGTTFGAASEEIHGHSFRAEVTVRGTPDPNTGMVVDLGLLQRAIEDVRLMLDHKYLNKIEALGTPTLENLSRFVWDRLAHIGKLTRVSIHRDSCNESCTYYGPQE

SEQ ID NO: 18391 - protein, 120 aa, Brenneria alni
  misc_feature (1)..(120): tr|A0A421DP72|A0A421DP72_9GAMM 6-carboxy-5,6,7,8-tetrah ydropterin synthase OS=Brenneria alni OX=71656 GN=BIY29 _09225 PE=3 SV=1
MPITLFKDFQFEAAHRLPHVPSGHKCGRLHGHSFMVRLEITGDVDPHTGWIMDFAELKAAFKPTWERLDHHYLNDIPGLENPTSEVLAHWIWQQIKPSLPELSAVTVKETCTAGCIYKGE

SEQ ID NO: 18392 - protein, 120 aa, Brenneria goodwinii
  misc_feature (1)..(120): tr|A0A0G4JWX4|A0A0G4JWX4_9GAMM 6-carboxy-5,6,7,8-tetrah ydropterin synthase OS=Brenneria goodwinii OX=1109412 G N=AWC36_00700 PE=3 SV=1
MATTLFKDFQFEAAHRLPHVPAGHKCGRLHGHSFMVRLEITGEVDPHTGWVMDFAELKAAFKPTWEKLDHHYLNEIPGLENPTSEVLAHWIWQQVKPSLPELSAVMVKETCTAGCVYKGE

SEQ ID NO: 18393 - protein, 120 aa, Brenneria nigrifluens
  misc_feature (1)..(120): tr|A0A2U1UVA7|A0A2U1UVA7_9GAMM 6-carboxy-5,6,7,8-tetrah ydropterin synthase OS=Brenneria nigrifluens DSM 30175 = ATCC 13028 OX=1121120 GN=queD PE=3 SV=1
MATTLFKDFQFEAAHRLPHVPAGHKCGRLHGHSFMVRLEITGEVDAYTGWVMDFAELKAAFKPTWERLDHHYLNDIPGLENPTSEVLAQWIWQQVKPVLPELSAVMVKETCTAGCVYKGE

SEQ ID NO: 18394 - protein, 120 aa, Brenneria nigrifluens
  misc_feature (1)..(120): tr|A0A2U1UIN3|A0A2U1UIN3_9GAMM 6-carboxy-5,6,7,8-tetrah ydropterin synthase OS=Brenneria nigrifluens DSM 30175 = ATCC 13028 OX=1121120 GN=queD PE=3 SV=1
MKTTLFKDFTFEAAHNLPHVPDGHKCGRLHGHSFVVRLEITGEVDKHTGWIIDFAELKAIFKTTLDRLDHYYLNDIPGLENPTSEVLAEWIWNQVKPQLPILSAITVKETCTAGCTYRGE

SEQ ID NO: 18395 - protein, 120 aa, Brenneria roseae
  misc_feature (1)..(120): tr|A0A2U1U2U0|A0A2U1U2U0_9GAMM 6-carboxy-5,6,7,8-tetrah ydropterin synthase OS=Brenneria roseae subsp. american a OX=1508507 GN=queD PE=3 SV=1
MATTLFKDFQFEAAHRLPHVPAGHKCGRLHGHSFMVRLEITGEVDPHTGWVMDFAELKAAFKPTWERLDHHYLNDIPGLENPTSEVLAHWIWQQLKPSLPELSAVMVKETCTAGCIYQGE

SEQ ID NO: 18396 - protein, 120 aa, Brenneria rubrifaciens
  misc_feature (1)..(120): tr|A0A4P8QR16|A0A4P8QR16_9GAMM 6-carboxy-5,6,7,8-tetrah ydropterin synthase OS=Brenneria rubrifaciens OX=55213 GN=queD PE=3 SV=1
MVTTLFKDFQFEAAHRLPHVPPGHKCGRLHGHSFMVRLEITGEVDPHTGWVMDFAELKAAFKPTWERLDHHYLNDIPGLENPTSEVLAHWVWQQLKPLLPALSAVTVKETCTAGCVYRPA

SEQ ID NO: 18397 - protein, 120 aa, Brenneria salicis
  misc_feature (1)..(120): tr|A0A366I054|A0A366I054_9GAMM 6-carboxy-5,6,7,8-tetrah ydropterin synthase OS=Brenneria salicis ATCC 15712 = D SM 30166 OX=714314 GN=DES54_13215 PE=3 SV=1
MVTTLFKDFQFEAAHRLPHVPDGHKCGRLHGHSFMVRLEITGEIDPHTGWVMDFAELKAAFKPTWEKLDHHYLNDITGLENPTSEVLAHWIWQQLKSALPLLSAVTVKETCTAGCVYRGE

SEQ ID NO: 18398 - protein, 120 aa, Brenneria sp.; identical to SEQ ID NO: 18393
  misc_feature (1)..(120): tr|G7LMK4|G7LMK4_9GAMM 6-carboxy-5,6,7,8-tetrahydropter in synthase OS=Brenneria sp. EniD312 OX=598467 GN=BrE31 2_0864 PE=3 SV=1

SEQ ID NO: 18399 - protein, 120 aa, Brenneria sp.
  misc_feature (1)..(120): tr|A0A5J5FVE2|A0A5J5FVE2_9GAMM 6-carboxytetrahydropteri n synthase QueD OS=Brenneria sp. L3-3HA OX=2590031 GN=q ueD PE=4 SV=1
MTTTIFKDFQFEAAHRLPHVPAGHKCGRLHGHSFMVRLEVTGEVDANTGWVMDFADIKTTFRPIWEQLDHQYLNEIPGLENPTSEVLSRWIWQRLKPILPQLSGVTVKETCSAGCVYRGE

SEQ ID NO: 18400 - protein, 142 aa, Breoghania corrubedonensis
  misc_feature (1)..(142): tr|A0A2T5VFB5|A0A2T5VFB5_9RHIZ 6-pyruvoyl-tetrahydropte rin synthase OS=Breoghania corrubedonensis OX=665038 GN =C8N35_101485 PE=4 SV=1
MFAVEVRDHIMIAHSFTGSLFGPAQALHGATFVVDAAFLAKTLDANGVVIDIGRAHEALKSILAPLNYRNLDDVEEFAGINTTTEFLTGHIHAKLSEVARAGGLGRPGNEIGSIRVTLSESHVARAWYEAPIAPHPSGQDNG

SEQ ID NO: 18401 - protein, 134 aa, Breoghania sp.
  misc_feature (1)..(134): tr|A0A346QYN4|A0A346QYN4_9RHIZ 6-carboxytetrahydropteri n synthase OS=Breoghania sp. L-A4 OX=2304600 GN=D1F64_0 3840 PE=4 SV=1
MFAVEVRDHIMIAHSFSGALFGPAQALHGATFVIDAAFMASALDANGVVIDIGRAHEALKAIIEPLNYKNLDAVPEFAGRNTTTEFLTKHIHDGLAAAARADALGRPGMEIAAIRVTLSESHVARAWYEGPVAQ

SEQ ID NO: 18402 - protein, 118 aa, Breoghania sp.
  misc_feature (1)..(118): tr|A0A346R010|A0A346R010_9RHIZ 6-carboxy-5,6,7,8-tetrah ydropterin synthase OS=Breoghania sp. L-A4 OX=2304600 G N=queD PE=3 SV=1
MKITQAFTFEAAHRLPKVPQTHRCHRMHGHSYRVELVLDGPVDPETGFVVDFFDVEAAFGPLLLRLDHYCLNEVEGLENPTAENIAVWIWQRTKPLLPLLSAVRVFETADCWAEYEGD

SEQ ID NO: 18403 - protein, 162 aa, Brevibacillus agri
  misc_feature (1)..(162): tr|A0A3M8AHA3|A0A3M8AHA3_9BACL 6-carboxytetrahydropteri n synthase QueD OS=Brevibacillus agri OX=51101 GN=queD PE=4 SV=1
MSANFDFRIVDRMQELGTHIQKSQLRYHNKRVLVSKEFTFDAAHHLHAYEGKCKNLHGHTYHVVFGISGYPDEIGLVIDFGDIKQIWKEHIEIYLDHRYLNEMLPPMNTTAENMVVWLFEQMEEQLQSDAYRDRYRGARVEFVRLFETPTSYAEARREWMME

SEQ ID NO: 18404 - protein, 162 aa, Brevibacillus brevis
  misc_feature (1)..(162): tr|A0A291BQ08|A0A291BQ08_BREBE 6-carboxytetrahydropteri n synthase QueD OS=Brevibacillus brevis X23 OX=1200792 GN=queD PE=4 SV=1
MSANFDFRIVDRMQALGTHIQKSQLRYHNKRVLVSKEFTFDAAHHLHAYEGKCKNLHGHTYTVVFGISGFPDEIGLVIDFGDIKQIWKEHIEIYLDHRYLNEMLPPMNTTAENMVVWIFEEMEKQLQSDAYRDHYNDARVEFVRLFETPTSYAEVRREWMME

SEQ ID NO: 18405 - protein, 162 aa, Brevibacillus brevis
  misc_feature (1)..(162): tr|A0A1Y4WXU1|A0A1Y4WXU1_BREBE 6-carboxytetrahydropteri n synthase QueD OS=Brevibacillus brevis OX=1393 GN=B5G5 0_22010 PE=4 SV=1
MSANFDFRIVDRMQALGTHIQKSQLRYHNKRVLVSKEFTFDAAHHLHAYEGKCKNLHGHTYTVVFGISGFPDEIGLVIDFGDIKQIWKEHIEIYLDHRYLNEMLPPMNTTAENMVVWIFEEMEKQLQSDAYRDRYDGARVEFVRLFETPTSYAEARREWMTE

SEQ ID NO: 18406 - protein, 163 aa, Brevibacillus choshinensis
  misc_feature (1)..(163): tr|A0A0Q3SY34|A0A0Q3SY34_BRECH 6-pyruvoyl tetrahydrobio pterin synthase OS=Brevibacillus choshinensis OX=54911 GN=AN963_12555 PE=4 SV=1
MSANSFDFRIVDRMQQLGTHIEKSQLRYHNKRVLVSKEFTFDAAHHLHAYEGKCKNLHGHTYQVVFGISGHPDEIGLVIDFGDIKQIWKEHIEIYLDHRYLNEMLPPMNTTAENMVVWMFEQMENQLQSEAYRDRYNGARVEFVRLFETPTSYAEARREWMYE

SEQ ID NO: 18407 - protein, 155 aa, Brevibacillus fluminis
  misc_feature (1)..(155): tr|A0A3M8DFS4|A0A3M8DFS4_9BACL 6-carboxytetrahydropteri n synthase QueD OS=Brevibacillus fluminis OX=511487 GN= queD PE=4 SV=1
MSGFYDFRIVEGLQKFGTDIQKEQLKYHKKRVLVSKEFTFDAAHHLHCYEGKCKNLHGHTYKVVFGISGYADDIGIVIDFGDIKKIWKEHIEIHLDHRYLNETLPLMNTTAENMVVWIFEQMESQLTNGNRVEFVRLFETPTSYAEARREWMYGE

SEQ ID NO: 18408 - protein, 162 aa, Brevibacillus formosus
  misc_feature (1)..(162): tr|A0A220MLE2|A0A220MLE2_9BACL 6-carboxytetrahydropteri n synthase QueD OS=Brevibacillus formosus OX=54913 GN=B P422_18610 PE=4 SV=1
MSANFDFRIVDRMQALGTHIQKSQLRYHNKRVLVSKEFTFDAAHHLHAYEGKCKNLHGHTYTVVFGISGFPDEIGLVIDFGDIKQIWKEHIEIYLDHRYLNEMLPPMNTTAENMVVWIFEEMEKQLQSDAYRDRYNGARVEFVRLFETPTSYAEARREWMME

SEQ ID NO: 18409 - protein, 162 aa, Brevibacillus formosus
  misc_feature (1)..(162): tr|A0A4Y4I120|A0A4Y4I120_9BACL 6-carboxytetrahydropteri n synthase QueD OS=Brevibacillus formosus OX=54913 GN=y gcM PE=4 SV=1
MSANFDFRIVDRMQALGTHIQKSQLRYHNKRVLVSKEFTFDAAHHLHAYEGKCKNLHGHTYTVVFGISGFPDEIGLVIDFGDIKQIWKEHIEIYLDHRYLNEMLPPMNTTAENMVVWIFEEMEKQLQSDAYRDRYNGARVEFVRLFETPTSYAEARREWMIE

SEQ ID NO: 18410 - protein, 162 aa, Brevibacillus gelatini
  misc_feature (1)..(162): tr|A0A3M8BCE9|A0A3M8BCE9_9BACL 6-carboxytetrahydropteri n synthase QueD OS=Brevibacillus gelatini OX=1655277 GN =queD PE=4 SV=1
MSANFDFRIVERMQALGTHIQKSQLRYHNKRVLVSKEFTFDAAHHLHAYEGKCKNLHGHTYQVVFGISGYPDEIGLVIDFGDIKQIWKEHIEIYLDHRYLNEMLPPMNTTAENMVVWLFEQMEQQLQSDAYRDRYRGARVEFVRLYETPTSYAEARREWMME

SEQ ID NO: 18411 - protein, 273 aa, Brevibacillus gelatini
  misc_feature (1)..(273): tr|A0A3M8AIB9|A0A3M8AIB9_9BACL 6-pyruvoyl tetrahydropte rin synthase OS=Brevibacillus gelatini OX=1655277 GN=ED M57_22655 PE=4 SV=1
MLYLSRRIDFSATHVYRVPAWSEEENRRVFGKCNNPSGHGHDYKLEIMVKGPLNEKSGIVVNTTEIKQIANSFVSEELDGKFLDREHPFFQQRIPTTENLVQYIWQSLENRFKGCELHRIRLHENHYLSAEREGGSMTRLTRKYHFCAAHRLHSNDLSPEENIALFGKCNNPHGHGHNYYLDVTVQGEPDPITGMIIHLSELDEIVETVVLNKFDHKHLNLDTEEFKDLNPTSEVVAMVIYNLLHPHLPQLHKIGLWETEKNYFEYYGTGEQT

SEQ ID NO: 18412 - protein, 162 aa, Brevibacillus invocatus
  misc_feature (1)..(162): tr|A0A3M8C2Q7|A0A3M8C2Q7_9BACL 6-carboxytetrahydropteri n synthase QueD OS=Brevibacillus invocatus OX=173959 GN =queD PE=4 SV=1
MSANFDFRIVDRMQTLGTHIDRSQLRYHNKRVLVSKEFTFDAAHHLHAYEGKCKNLHGHTYTVVFGISGYPDEIGLVIDFGDIKQIWKEHIEIYLDHRYLNEMLPAMNTTAENMVVWLFEQMEQQLQSEAYRDHYNGARVEFVRLFETPTSYAEARREWMME

SEQ ID NO: 18413 - protein, 162 aa, Brevibacillus laterosporus
  misc_feature (1)..(162): tr|H0UFU4|H0UFU4_BRELA Queuosine biosynthesis protein Q ueD OS=Brevibacillus laterosporus GI-9 OX=1118154 GN=qu eD PE=4 SV=1
MGNFYDFRIVERLQRYEQDIQKKELRYHQKRVLVSKEFTFDAAHHLHAYEGKCKNLHGHTYKVVFGISGRPNEIGITVDFGDIKTIWKEQIEVYLDHRYLNETLPPMNTTAENMVAWIFEKMEESLTNSSIYLEQDVRVEFVRLFETPTSYAEMRREWMYHE

SEQ ID NO: 18414 - protein, 162 aa, Brevibacillus laterosporus
  misc_feature (1)..(162): tr|A0A2S5H1H8|A0A2S5H1H8_BRELA 6-carboxytetrahydropteri n synthase QueD OS=Brevibacillus laterosporus OX=1465 G N=queD PE=4 SV=1
MGNFYDFHIVERLQRYEQDIQKEELRYHQKRVLVSKEFTFDAAHHLHAYEGKCKNLHGHTYKVVFGISGRPNEIGITVDFGDIKTIWKEQIEVYLDHRYLNETLPQMNTTAENMVAWIFEKMEESLTNISIYQEQGVRVEFVRLFETPTSYAEMRREWMYNE

SEQ ID NO: 18415 - protein, 162 aa, Brevibacillus nitrificans
  misc_feature (1)..(162): tr|A0A3M8CTV8|A0A3M8CTV8_9BACL 6-carboxytetrahydropteri n synthase QueD OS=Brevibacillus nitrificans OX=651560 GN=queD PE=4 SV=1
MSANFDFRIVDRMQQLGTHIEKSQLRYHNKRVLVSKEFTFDAAHHLHAYEGKCKNLHGHTYQVVFGISGFPDEIGLVIDFGDIKQIWKEHIEIYLDHRYLNEMLPPMNTTAENMVVWIFEQMEQQLTSEAYHDRYNGARVEFVRLFETPTSYAEARREWMYE

SEQ ID NO: 18416 - protein, 162 aa, Brevibacillus panacihumi
  misc_feature (1)..(162): tr|V6M620|V6M620_9BACL 6-pyruvoyl tetrahydrobiopterin s ynthase OS=Brevibacillus panacihumi W25 OX=1408254 GN=T 458_21130 PE=4 SV=1
MSAYFDFKIVERMQTLGTDIDHSQLRYHNKRVMVSKEFTFDAAHHLHAYEGKCKNLHGHTYKVVFGISGFPDEIGLVIDFGDIKEIWKKHIEIYLDHRYLNEMLPPMNTTAENMVVWIFEQMEQQLQSSTYRDRYKGAWLEFVRLYETPTSYAEARREWMVE

SEQ ID NO: 18417 - protein, 162 aa, Brevibacillus panacihumi
  misc_feature (1)..(162): tr|A0A3M8CRK4|A0A3M8CRK4_9BACL 6-carboxytetrahydropteri n synthase QueD OS=Brevibacillus panacihumi OX=497735 G N=queD PE=4 SV=1
MSAYFDFKIVERMQTLGTDIDHSQLRYHNKRVMVSKEFTFDAAHHLHAYEGKCKNLHGHTYKVVFGISGFPDEIGLVIDFGDIKEIWKKHIEIYLDHRYLNEMLPPMNTTAENMVVWIFEQMEQQLQSSTYRDRYKGARVEFVRLYETPTSYAEARREWMVE

SEQ ID NO: 18418 - protein, 162 aa, Brevibacillus parabrevis
  misc_feature (1)..(162): tr|A0A4Y3PWT4|A0A4Y3PWT4_BREPA 6-carboxytetrahydropteri n synthase QueD OS=Brevibacillus parabrevis OX=54914 GN =ygcM PE=4 SV=1
MSANFDFRIVDRMQTLGTHIQQSQLRYHNKRVLVSKEFTFDAAHHLHAYEGKCKNLHGHTYHVVFGISGYPDEIGLVIDFGDIKQIWKEHIEIYLDHRYLNEMLPPMNTTAENMVVWLFEQMEQQLQSDVYRDRYRGARVEFVRLFETPTSYAEARREWMME

SEQ ID NO: 18419 - protein, 160 aa, Brevibacillus reuszeri
  misc_feature (1)..(160): tr|A0A0K9YKE7|A0A0K9YKE7_9BACL 6-pyruvoyl tetrahydrobio pterin synthase OS=Brevibacillus reuszeri OX=54915 GN=A DS79_24810 PE=4 SV=1
MSANFDFRIIDRMQALGTHIQKSELRYHNKRILVSKEFTFDAAHHLHAYEGKCKNLHGHTYKVVFGISGFPDEIGLVIDFGDIKQIWKEHIEVYLDHRYLNEMLPLMNTTAENMVVWIFEQMDNQLQSDTYRNRYNEARVEFVRLFETPTSYAEARREWM

SEQ ID NO: 18420 - protein, 162 aa, Brevibacillus sp.
  misc_feature (1)..(162): tr|A0A553KQC4|A0A553KQC4_9BACL 6-carboxytetrahydropteri n synthase QueD OS=Brevibacillus sp. LEMMJ03 OX=2595056 GN=queD PE=4 SV=1
MSGFFDFRIVDRLQTLGKEIQKEQLRYHRKRVLVSKEFTFDAAHHLHAYEGKCKNLHGHTYKVVFGISGYPNEIGIVIDFGDIKEIWKRHIEVYLDHRYLNEMLPPMNTTAENMVVWLFEQMEAQLCSEAYRDRYDGARVEFVRLYETPTSYAEARREWMYE

SEQ ID NO: 18421 - protein, 162 aa, Brevibacillus sp.
  misc_feature (1)..(162): tr|A0A2P7ULK1|A0A2P7ULK1_9BACL 6-carboxytetrahydropteri n synthase QueD OS=Brevibacillus sp. NRRL NRS-1210 OX=2 126352 GN=queD PE=4 SV=1
MSANFDFRIVDRMQALGTHIQKSQLRYHNKRVLVSKEFTFDAAHHLHAYEGKCKNLHGHTYTVVFGISGFPDEIGLVIDFGDIKQIWKEHIEIYLDHRYLNEMLPPMNTTAENMVVWIFEEMEKQLQSDAYRDRYNGARVEFVRLFETPTSYAETRREWMME

SEQ ID NO: 18422 - protein, 127 aa, Brevibacterium antiquum
  misc_feature (1)..(127): tr|A0A2H1KID4|A0A2H1KID4_9MICO 6-pyruvoyltetrahydropter in/6-carboxytetrahydropterin synthase OS=Brevibacterium antiquum OX=234835 GN=BANT10_03105 PE=4 SV=1
MFSLSVNDHVMIAHSLPDEFFGPAQALHGATLAVEATFTSDQLDEHSVVLDIGQALQMLDDALAPLQYANLDEHPDFAGRFSTSEAIAEHIGTSLSVSLADRPDIGISVHLRENPRAAVSYTVVNRP

SEQ ID NO: 18423 - protein, 127 aa, Brevibacterium antiquum; identical to SEQ ID NO: 18422
  misc_feature (1)..(127): tr|A0A2H1JQF6|A0A2H1JQF6_9MICO 6-pyruvoyltetrahydropter in/6-carboxytetrahydropterin synthase OS=Brevibacterium antiquum CNRZ 918 OX=1255637 GN=BANT918_01781 PE=4 SV= 1

SEQ ID NO: 18424 - protein, 127 aa, Brevibacterium aurantiacum
  misc_feature (1)..(127): tr|A0A1D7W3B9|A0A1D7W3B9_9MICO 6-carboxytetrahydropteri n synthase OS=Brevibacterium aurantiacum OX=273384 GN=B AUR9175_00898 PE=4 SV=1
MFSLSVNDHVMIAHSLPHEFFGPAQSLHGATLAVEVTFTRAELDEHAVVLDIGEALALLDDALTPLQYANLDEHPDFAGRFSTSETIAEYIGTRLSVSLADRPDIGIAVHLRENPRAAVSYTVANRP

SEQ ID NO: 18425 - protein, 127 aa, Brevibacterium aurantiacum
  misc_feature (1)..(127): tr|A0A2A3ZNR1|A0A2A3ZNR1_9MICO 6-carboxytetrahydropteri n synthase OS=Brevibacterium aurantiacum OX=273384 GN=C IK59_13535 PE=4 SV=1
MFSLSVNDHVMIAHSLPHEFFGPAQALHGATLAVEVTFTREELDEHRVVLDIGEALALLDEALTPLRYTNLDEHPDFAGRLSTSEAIAEYIGTDLSTSLADRPEIGITVHLRENPRAAVSYTVANRP

SEQ ID NO: 18426 - protein, 156 aa, [Brevibacterium] frigoritolerans
  misc_feature (1)..(156): tr|A0A4Y8U7L4|A0A4Y8U7L4_9BACI 6-carboxytetrahydropteri n synthase QueD OS=[Brevibacterium] frigoritolerans OX= 450367 GN=queD PE=4 SV=1
MYGFKIVDKLQKIDEDIQRSQLKYTNKRVLVSKEFTFDAAHHLHDYEGKCKNLHGHTYKVIFGLSGYTDSRGLMIDFGDIKDIWKNEIEIHLDHRYLNETLPLMNTTAENMVVWIYEKMAEALSSKEYEGARVEFVRLYETPTSYAEARREWMESE

SEQ ID NO: 18427 - protein, 156 aa, [Brevibacterium] frigoritolerans; identical to SEQ ID NO: 17936
  misc_feature (1)..(156): tr|A0A3Q9SJH9|A0A3Q9SJH9_9BACI 6-carboxytetrahydropteri n synthase QueD OS=[Brevibacterium] frigoritolerans OX= 450367 GN=queD PE=4 SV=1

SEQ ID NO: 18428 - protein, 127 aa, Brevibacterium linens
  misc_feature (1)..(127): tr|A0A0B9A4L2|A0A0B9A4L2_BRELN Uncharacterized protein OS=Brevibacterium linens OX=1703 GN=AE0388_0812 PE=4 SV =1
MFGLTVNDHVMIAHSLPDEFFGPAQGVHGATLEVSATFTRPSLDEHSVVLDIGEAMTLLDAALTPLRYANLDEHPDFTGKLSTTEAVAEYIGQRLAGSLADRPEIGISIELRENPRAAITYTVPERA

SEQ ID NO: 18429 - protein, 127 aa, Brevibacterium linens
  misc_feature (1)..(127): tr|A0A142NL69|A0A142NL69_BRELN 6-pyruvoyl tetrahydrobio pterin synthase OS=Brevibacterium linens OX=1703 GN=A2T 55_06835 PE=4 SV=1
MFGLTVNDHVMIAHSLPDEFFGLAQGVHGATLEVSATFTRPSLDEHSVVLDIGEAMTLLDAALSPLRYANLDEHPDFTGKLSTTEAVAEYIGQRLAESLADRPEIGISIELRENPRAAITYTVPERA

SEQ ID NO: 18430 - protein, 139 aa, Brevibacterium luteolum
  misc_feature (1)..(139): tr|A0A2N6PGV9|A0A2N6PGV9_9MICO 6-pyruvoyl tetrahydrobio pterin synthase OS=Brevibacterium luteolum OX=199591 GN =CJ198_08895 PE=4 SV=1
MFRLSINDHIMIAHSLPDPFFGPAQHMHGATLAVEAHFETAELDSHGVVLDIGRAGEILSAALDPLRYANLDEHPDFAGKISTTEVIAAHIGSRLRAALADRPDISIAVTLDENPNARVTYTVPPAPTLHPADPGPRQV

SEQ ID NO: 18431 - protein, 127 aa, Brevibacterium sandarakinum; identical to SEQ ID NO: 18425
  misc_feature (1)..(127): tr|A0A1H1LQ28|A0A1H1LQ28_9MICO 6-pyruvoyltetrahydropter in/6-carboxytetrahydropterin synthase OS=Brevibacterium sandarakinum OX=629680 GN=SAMN04489751_0374 PE=4 SV=1

SEQ ID NO: 18432 - protein, 151 aa, Brevibacterium siliguriense
  misc_feature (1)..(151): tr|A0A1H1W1X6|A0A1H1W1X6_9MICO 6-pyruvoyltetrahydropter in/6-carboxytetrahydropterin synthase OS=Brevibacterium siliguriense OX=1136497 GN=SAMN04489752_2821 PE=4 SV=1
MLARNYLQPGGEEPDRHPDKKEKTMFGLTVNDHVMIAHSLPDEFFGSAQGMHGATLDVSASFTRPSLDEHSVVLDIGEAMSMLDAALSPLRYANLDEHPDFAGKLSTTEAIAEYIGQRLTESLADRPEIGISIELRENPRAAITYTVPESA

SEQ ID NO: 18433 - protein, 127 aa, Brevibacterium sp.
  misc_feature (1)..(127): tr|A0A4P8H9Q6|A0A4P8H9Q6_9MICO 6-carboxytetrahydropteri n synthase OS=Brevibacterium sp. CS2 OX=2575923 GN=FDF1 3_03200 PE=4 SV=1
MFSLTVNDHVMIAHSLPDEFFGPAQGVHGATLTVDATFTRAELDPHSVVLDIGHASQLLDEALAPLRYANLDTHPDFAGRLSTTEAVARYIGERLAAGLAEQPDIGITVSIVENPRASVSYTVPGRT

SEQ ID NO: 18434 - protein, 127 aa, Brevibacterium sp.
  misc_feature (1)..(127): tr|A0A2H1HYL5|A0A2H1HYL5_9MICO 6-pyruvoyl tetrahydropte rin synthase OS=Brevibacterium sp. 239c OX=1965356 GN=B SP239C_00169 PE=4 SV=1
MFTLSVNDHVMIAHSLPHEFFGPAQALHGATLAVEVTFTREELDEHRVVLDIGEALALLDEALTPLRYTNLDEHPDFAGRLSTSEAIAEYIGTGLSTSLADRPEIGITVHLRENPRAAVSFTVANRP

SEQ ID NO: 18435 - protein, 121 aa, Brevifollis gellanilyticus
  misc_feature (1)..(121): tr|A0A512M6V0|A0A512M6V0_9BACT 6-carboxy-5,6,7,8-tetrah ydropterin synthase OS=Brevifollis gellanilyticus OX=74 8831 GN=BGE01nite_17530 PE=3 SV=1
MRARIIKDFRFEAAQTLPTLPSDHKCTKMHGHSFKVEITVEGEVDPKIGWVYDHAEISRAMKPILDRLDHSYLNEIEGLENPTIEYMAAWLWKKLAPQLPGLAEITIHETPSARCVFRGEF

SEQ ID NO: 18436 - protein, 118 aa, Brevirhabdus pacifica
  misc_feature (1)..(118): tr|A0A1U7DHH7|A0A1U7DHH7_9RHOB 6-carboxy-5,6,7,8-tetrah ydropterin synthase OS=Brevirhabdus pacifica OX=1267768 GN=BV394_06650 PE=3 SV=1
MYRITKEFHFSASHQLCRLPDDHPCARMHGHNYIVEVELSSETLDDDGFVVDYRALAPLKSWIDDTLDHRHLNEVFGHDGVTSEWLARTIFDRARASWPQVSAVRISETPKTWAEYRP

SEQ ID NO: 18437 - protein, 123 aa, Brevundimonas abyssalis
  misc_feature (1)..(123): tr|U3AQH9|U3AQH9_9CAUL 6-carboxy-5,6,7,8-tetrahydropter in synthase OS=Brevundimonas abyssalis TAR-001 OX=13917 29 GN=MBEBAB_2209 PE=3 SV=1
MTKPVFEITKAATFDAAHHFPNEPEGSPYRRIHGHSFQVEVSIRSDRLDANGWVADLNALDAALKAAAGELDHGMLNEHAGLEVPSLEHLCLWFARRLTPAWPGLSRVVVSRPTIHERCALEL

SEQ ID NO: 18438 - protein, 178 aa, Brevundimonas diminuta
  misc_feature (1)..(178): tr|A0A1Z3LW82|A0A1Z3LW82_BREDI 6-pyruvoyl tetrahydropte rin synthase OS=Brevundimonas diminuta OX=293 GN=CD943_ 05990 PE=4 SV=1
MPAVRFTRRFSMAHRLIADAGSKCAVPHGHNEFVTVTLEPTAEIAFGGSNYAASFERLKARWHGFVDRSLDHAFQLNRADPLLAWFQQHEPHRLNQVLTVDGDPTTEALVIALWRKLEAILSAEGLPFRLAELAIEETPTNTVLARGLTEAERVWALGAWCDRADFSINDLLPPETWS

SEQ ID NO: 18439 - protein, 122 aa, Brevundimonas diminuta
  misc_feature (1)..(122): tr|A0A3D4DB98|A0A3D4DB98_BREDI 6-carboxy-5,6,7,8-tetrah ydropterin synthase OS=Brevundimonas diminuta OX=293 GN =DIV82_03645 PE=3 SV=1
MYELTKQFRFDCAHTLERVVETEGSRRIHGHSYRAQVTLRGKPDPVSGMIIDTSLLAMKLAQARDALDHRFLDEINDLGPGTMENLCAYIWRKLEDDIPTLFSVTVLRDSTEDQVTYFGEAA

SEQ ID NO: 18440 - protein, 122 aa, Brevundimonas intermedia
  misc_feature (1)..(122): tr|A0A4Y9RV27|A0A4Y9RV27_9CAUL 6-carboxy-5,6,7,8-tetrah ydropterin synthase OS=Brevundimonas intermedia OX=7431 5 GN=EGY25_12135 PE=3 SV=1
MPVFEITKQATFDAAHHFPNEPEGSIYRRVHGHSFTVEATVRSEVLDAEHGWVADLGALDRALKAAAETLDHGMLNEHPGLELPSLENLCLWFVKTLKPEWPGLCRVQVARPTINERCVLSL

SEQ ID NO: 18441 - protein, 178 aa, Brevundimonas naejangsanensis
  misc_feature (1)..(178): tr|A0A172Y7E3|A0A172Y7E3_9CAUL 6-pyruvoyl tetrahydropte rin synthase OS=Brevundimonas naejangsanensis OX=588932 GN=DA69_10125 PE=4 SV=1
MPAVRFTRRFSMAHRLIADAGSKCAVPHGHNEFVTVTLEPTAEIDFGGANYAASFERLKARWHGFVDRSLDHAFQLNRADPLLAWFQQHEPHRLNQVLTVDGDPTTEALVIALWRKLEAILAAEGLPFRLAELAIEETPTNTVLTRGLTEAERAWALGAWCDRADFSINDLLPPETWS

SEQ ID NO: 18442 - protein, 178 aa, Brevundimonas naejangsanensis
  misc_feature (1)..(178): tr|A0A4P7BSF0|A0A4P7BSF0_9CAUL 6-pyruvoyl tetrahydropte rin synthase OS=Brevundimonas naejangsanensis OX=588932 GN=E3U41_14735 PE=4 SV=1
MPAVRFTRRFSMAHRLIADAGSKCAVPHGHNEFVTVTLEPTAEIDFGGANYAASFERLKARWHGFVDRSLDHAFQLNRADPLLGWFQQHEPHRLNQVLTVDGDPTTEALVIALWRKLEAILQAEGLPFRLAELAIEETPTNTVLTRGLTEAERAWALGAWCDRADFSINDLLPPETWS

SEQ ID NO: 18443 - protein, 122 aa, Brevundimonas nasdae
  misc_feature (1)..(122): tr|A0A0B4CS19|A0A0B4CS19_9CAUL 6-carboxy-5,6,7,8-tetrah ydropterin synthase OS=Brevundimonas nasdae OX=172043 G N=RM53_10065 PE=3 SV=1
MPVFEITKQATFDAAHHFPNEPEGSIYRRVHGHSFTVEATVRSEVLDVEHGWVADLGALDRALKAAAETLDHGMLNEHEGLALPSLENLCLWFAKTLKPEWPGLCRIQVARPTINERCVLSL

SEQ ID NO: 18444 - protein, 178 aa, Brevundimonas sp.
  misc_feature (1)..(178): tr|A0A1R1I6L9|A0A1R1I6L9_9CAUL 6-pyruvoyl tetrahydropte rin synthase OS=Brevundimonas sp. ZS04 OX=1906854 GN=BJ P32_15595 PE=4 SV=1
MPAVRFTRRFSMAHRLIADAGSKCAVPHGHNEFVTVTLEPTAEIAFGGSNHAASFERLKARWHGFVDRSLDHAFQLNRADPLLAWFRQHEPHRLNQVLTVDGDPTTEALVIALWRKLEAILAAEGLPFRLAELAIEETPTNTVLTRGLTEAERAWELGAWCDRADFSINDLLPPETWS

SEQ ID NO: 18445 - protein, 121 aa, Brevundimonas sp.
  misc_feature (1)..(121): tr|A0A0Q7T8K2|A0A0Q7T8K2_9CAUL 6-carboxy-5,6,7,8-tetrah ydropterin synthase OS=Brevundimonas sp. Root1423 OX=17 36462 GN=ASD25_02015 PE=3 SV=1
MSVFEITKAATFDAAHHFPNEPDGSPYRRMHGHSFSVEATVRGEALDGHGWVADLGALDRALKDAAEELDHGLLNDKPGLELPTLEHLCLWFAERLKPEWPGLSRITVARPTIHERCTLSL

SEQ ID NO: 18446 - protein, 175 aa, Brevundimonas subvibrioides
  misc_feature (1)..(175): tr|D9QN44|D9QN44_BRESC Uncharacterized protein OS=Brevu ndimonas subvibrioides (strain ATCC 15264 / DSM 4735 / LMG 14903 / NBRC 16000 / CB 81) OX=633149 GN=Bresu_0932 PE=4 SV=1
MPQVRFTRRFSMAHRLLADAGSRCAVPHGHNEFVTVTLATDAAIDFGGSNYVASFETLKKRWHGFIDGAVDHAFQVGSADPLLDWFRTHEPHRLGQLMVFEGDPTTEAFAIALRRKLDAFLADDGSPYRCVELALEETPTNTIVMGEHLSAAERGWAAGSWMDRPDMSINDLSLA

SEQ ID NO: 18447 - protein, 174 aa, Brevundimonas subvibrioides
  misc_feature (1)..(174): tr|A0A258FQQ1|A0A258FQQ1_9CAUL 6-pyruvoyl tetrahydropte rin synthase OS=Brevundimonas subvibrioides OX=74313 GN =B7Z01_07010 PE=4 SV=1
MPQVRFTRRFSMAHRLLADAGSRCAVPHGHNEFVTVTLATDAQMDFGGSNYVASFESLKTRWHGFIDGAVDHAFQVGAADPLLDWFRTHEPQRLNQIMVFDGDPTTEAFAIALRRKIDAILTAENSAYRCIELALEETPTNTIVVGETLSAAERGWMAGGWMDRPDLTINDLTP

SEQ ID NO: 18448 - protein, 178 aa, Brevundimonas vancanneytii
  misc_feature (1)..(178): tr|A0A4P1JVU7|A0A4P1JVU7_9CAUL Queuosine biosynthesis p rotein QueD OS=Brevundimonas vancanneytii OX=1325724 GN =NCTC9239_00387 PE=4 SV=1
MPAVRFTRRFSMAHRLIADAGSKCAVPHGHNEFVTVTLEPTAEIAFGGSNHAASFERLKARWHGFVDRSLDHAFQLNRADPLLAWFQQHEPHRLNQVLTVDGDPTTEALVIALWRKLEAILAAEGLPFRLAELAIEETPTNTVLTRGLTEAERAWELGAWCDRADFSINDLLPPETWS

SEQ ID NO: 18449 - protein, 170 aa, Brevundimonas vancanneytii
  misc_feature (1)..(170): tr|A0A4P1K2S4|A0A4P1K2S4_9CAUL Queuosine biosynthesis p rotein QueD OS=Brevundimonas vancanneytii OX=1325724 GN =NCTC9239_01366 PE=4 SV=1
MPFHSIKTYGAERGLSCVFRQWDARTDCQLMHGYSLGFRFTFAAETLDRRGWVLDFGEGGFGAVRRWLHATFDHTLLVAADDPAREKFEELARCGLADIRMVPGTSCERLAQHVFAMVQPMVHDATQGRCRLRAVECFEHGANSAVYEQPDAQLQQTVDDVMRAVLERLE

SEQ ID NO: 18450 - protein, 122 aa, Brevundimonas vesicularis
  misc_feature (1)..(122): tr|A0A2X1B773|A0A2X1B773_BREVE 6-carboxy-5,6,7,8-tetrah ydropterin synthase OS=Brevundimonas vesicularis OX=412 76 GN=queD PE=3 SV=1
MPVFEITKQATFDAAHHFPNEPEGSIYRRVHGHSFTVEATVRSEVLDVEHGWVADLGALDRALKAAAETLDHGMLNEHEGLELPSLENLCLWFAKTLKPEWPGLCRIQVARPTINERCVLSL

SEQ ID NO: 18451 - protein, 122 aa, Brevundimonas vesicularis
  misc_feature (1)..(122): tr|A0A1Z3UB08|A0A1Z3UB08_BREVE 6-carboxy-5,6,7,8-tetrah ydropterin synthase OS=Brevundimonas vesicularis OX=412 76 GN=CEP68_13930 PE=3 SV=1
MPVFEITKQATFDAAHHFPNEPEGSIYRRIHGHSFTVEATVRSEVLDVEHGWVADLGALDRALKAAAETLDHGMLNEHEGLELPSLENLCLWFAKTLKPEWPGLCRVQVARPTINERCVLSL

SEQ ID NO: 18452 - protein, 174 aa, Brevundimonas viscosa
  misc_feature (1)..(174): tr|A0A1I6SJT2|A0A1I6SJT2_9CAUL 6-pyruvoyltetrahydropter in/6-carboxytetrahydropterin synthase OS=Brevundimonas viscosa OX=871741 GN=SAMN05192570_2504 PE=4 SV=1
MAWMSTKTYGADRGLSCAWRQWPARSHCALLHGYSLGFRFTFAAEQLDARGWVIDFGKGGFGPIRDWLHETFDHTLLVAADDPEMPEFLRLRDRGLAEVRILPGVSCERIAAWVGEQMEPGVRERTGGRCWIDSVECFEHGANSAIWRNPEAVLRQVSAEILNRALTGEAGIQA

SEQ ID NO: 18453 - protein, 122 aa, Brevundimonas viscosa
  misc_feature (1)..(122): tr|A0A1I6S1P6|A0A1I6S1P6_9CAUL 6-carboxy-5,6,7,8-tetrah ydropterin synthase OS=Brevundimonas viscosa OX=871741 GN=SAMN05192570_2098 PE=3 SV=1
MPVFEITKQATFDAAHHFPNEPEGSIYRRVHGHSFTVEATVRSETLDAEHGWVADLGALDRALRTAAEELDHGMLNEKPGLELPSLENLCLWFANRLGGEWPGLCRIQVARPTINERCVLTL

SEQ ID NO: 18454 - protein, 121 aa, Brucella abortus
  misc_feature (1)..(121): tr|D7H080|D7H080_BRUAO 6-carboxy-5,6,7,8-tetrahydropter in synthase OS=Brucella abortus bv. 5 str. B3196 OX=520 453 GN=BAYG_00104 PE=3 SV=1
MFRITKEFHFSASHQLTGLPADHQCARLHGHNYIVEVELSAPDLDTHGFVRDYHELAALKHYIDDTFDHRHLNDVLGHEQTTAERLAKHFFDWCHARWPEISAVRVSETPKTWAEYRPGKP

SEQ ID NO: 18455 - protein, 121 aa, Brucella abortus; identical to SEQ ID NO: 18454
  misc_feature (1)..(121): tr|Q57AT1|Q57AT1_BRUAB 6-carboxy-5,6,7,8-tetrahydropter in synthase OS=Brucella abortus biovar 1 (strain 9-941) OX=262698 GN=BruAb1_1949 PE=3 SV=1

SEQ ID NO: 18456 - protein, 121 aa, Brucella canis; identical to SEQ ID NO: 18454
  misc_feature (1)..(121): tr|A9M960|A9M960_BRUC2 6-carboxy-5,6,7,8-tetrahydropter in synthase OS=Brucella canis (strain ATCC 23365 / NCTC 10854) OX=483179 GN=BCAN_A2018 PE=3 SV=1

SEQ ID NO: 18457 - protein, 121 aa, Brucella ceti
  misc_feature (1)..(121): tr|C0G803|C0G803_9RHIZ 6-carboxy-5,6,7,8-tetrahydropter in synthase OS=Brucella ceti str. Cudo OX=595497 GN=que D PE=3 SV=1
MFRITKEFHFSASHQLTGLPADHQCARLHGHNYIVEVELSAPNLDTHGFVRDYHELAALKHYIDDTFDHRHLNDVLGHEQTTAERLAKHFFDWCHARWPEISAMRVSETPKTWAEYRPGKP

SEQ ID NO: 18458 - protein, 121 aa, Brucella melitensis; identical to SEQ ID NO: 18454
  misc_feature (1)..(121): tr|C0RFL6|C0RFL6_BRUMB 6-carboxy-5,6,7,8-tetrahydropter in synthase OS=Brucella melitensis biotype 2 (strain AT CC 23457) OX=546272 GN=queD PE=3 SV=1

SEQ ID NO: 18459 - protein, 148 aa, Brucella melitensis
  misc_feature (1)..(148): tr|Q8YJI9|Q8YJI9_BRUME Vacuolar ATP synthase 16 kd prot eolipid subunit OS=Brucella melitensis biotype 1 (strai n 16M / ATCC 23456 / NCTC 10094) OX=224914 GN=BMEI0094 PE=4 SV=1
MFRITKEFHFSASHQLTGLPADHQCARLHGHNYIVEVELSAPDLDTHGFVRDYHELAALKHYIDDTFDHRHLNDVLGHEQTTAERLAKHFFDWCHARWPEISAVRSAKHRRPGRNTGPENHDETRNETCNETRPRNPHQRDFRPDHSR

SEQ ID NO: 18460 - protein, 121 aa, Brucella microti; identical to SEQ ID NO: 18454
  misc_feature (1)..(121): tr|C7LEK2|C7LEK2_BRUMC 6-carboxy-5,6,7,8-tetrahydropter in synthase OS=Brucella microti (strain CCM 4915) OX=56 8815 GN=queD PE=3 SV=1

SEQ ID NO: 18461 - protein, 121 aa, Brucella neotomae; identical to SEQ ID NO: 18454
  misc_feature (1)..(121): tr|A0A381B9S8|A0A381B9S8_BRUNE 6-carboxy-5,6,7,8-tetrah ydropterin synthase OS=Brucella neotomae OX=29460 GN=qu eD PE=3 SV=1

SEQ ID NO: 18462 - protein, 121 aa, Brucella ovis; identical to SEQ ID NO: 18454
  misc_feature (1)..(121): tr|A0A0H3ASS0|A0A0H3ASS0_BRUO2 6-carboxy-5,6,7,8-tetrah ydropterin synthase OS=Brucella ovis (strain ATCC 25840 / 63/290 / NCTC 10512) OX=444178 GN=queD PE=3 SV=1

SEQ ID NO: 18463 - protein, 121 aa, Brucella ovis; identical to SEQ ID NO: 18454
  misc_feature (1)..(121): tr|N8N9N1|N8N9N1_BRUOV 6-carboxy-5,6,7,8-tetrahydropter in synthase OS=Brucella ovis IntaBari-2002-82-58 OX=129 3916 GN=H715_01884 PE=3 SV=1

SEQ ID NO: 18464 - protein, 121 aa, Brucella pinnipedialis; identical to SEQ ID NO: 18454
  misc_feature (1)..(121): tr|A0A0E1WZ05|A0A0E1WZ05_9RHIZ 6-carboxy-5,6,7,8-tetrah ydropterin synthase OS=Brucella pinnipedialis M292/94/1 OX=520462 GN=BALG_00102 PE=3 SV=1

SEQ ID NO: 18465 - protein, 121 aa, Brucella sp.
  misc_feature (1)..(121): tr|A0A1M4LDU6|A0A1M4LDU6_9RHIZ 6-carboxy-5,6,7,8-tetrah ydropterin synthase OS=Brucella sp. 10RB9215 OX=1149953 GN=queD PE=3 SV=1
MFRITKEFHFSASHQLTGLPADHQCARLHGHNYIVEVELSAPDLDTHGFVRDYHELAAFKHYIDDTFDHRHLNDVLGHEQTTAERLAKHFFDWCHARWPEISAVRVSETPKTWAEYRPGKP

SEQ ID NO: 18466 - protein, 121 aa, Brucella sp.; identical to SEQ ID NO: 18465
  misc_feature (1)..(121): tr|A0A1P8S3S1|A0A1P8S3S1_9RHIZ 6-carboxy-5,6,7,8-tetrah ydropterin synthase OS=Brucella sp. 09RB8910 OX=1844051 GN=BKD02_06330 PE=3 SV=1

SEQ ID NO: 18467 - protein, 121 aa, Brucella suis; identical to SEQ ID NO: 18454
  misc_feature (1)..(121): tr|A0A4Z0F785|A0A4Z0F785_BRUSS 6-carboxy-5,6,7,8-tetrah ydropterin synthase OS=Brucella suis OX=29461 GN=queD P E=3 SV=1

SEQ ID NO: 18468 - protein, 121 aa, Brucella suis; identical to SEQ ID NO: 18454
  misc_feature (1)..(121): tr|B0CIX6|B0CIX6_BRUSI 6-carboxy-5,6,7,8-tetrahydropter in synthase OS=Brucella suis (strain ATCC 23445 / NCTC 10510) OX=470137 GN=BSUIS_A1813 PE=3 SV=1

SEQ ID NO: 18469 - protein, 122 aa, Brucellaceae bacterium
  misc_feature (1)..(122): tr|A0A3P1V1F7|A0A3P1V1F7_9RHIZ 6-carboxy-5,6,7,8-tetrah ydropterin synthase OS=Brucellaceae bacterium VT-16-175 2 OX=2487907 GN=queD PE=3 SV=1
MFRITKEFHFSASHQLTGLPADHQCARLHGHNYIVEVELSAPDLDGHGFVRDYHELAPFKRYIDDAFDHRHLNDVLGHGQTTAETLAKHFFDWCHARWPEISAVRVSETPKTWAEYRPSAKP

SEQ ID NO: 18470 - protein, 133 aa, Brumimicrobium aurantiacum
  misc_feature (1)..(133): tr|A0A3E1F1N4|A0A3E1F1N4_9FLAO 6-carboxy-5,6,7,8-tetrah ydropterin synthase OS=Brumimicrobium aurantiacum OX=17 37063 GN=DXU93_01960 PE=3 SV=1
MVKIGRRTTFNSAHRLHNDKWSDEKNQKVFGKCNSPNYHGHNYTLETWVEGEIDPETGFLIDLADLKQIIKEEIEEEFDHRNLNLDVPAFKDLNPTAENIAKVIYQKLKPRLQGFKLTVRLSETQNNMVEYSE

SEQ ID NO: 18471 - protein, 143 aa, Brumimicrobium aurantiacum
  misc_feature (1)..(143): tr|A0A3E1EV56|A0A3E1EV56_9FLAO 6-carboxytetrahydropteri n synthase OS=Brumimicrobium aurantiacum OX=1737063 GN= DXU93_13395 PE=4 SV=1
MKTVYITRKEHFNAAHKLWNDEWSDEKNEAIFGKCSNKNWHGHNFNIFVTVKGVPCEDTGFVMNLKDLSKITKEYVVEALDHKNLNLDVPFMKGILASTENLVMEIWDQIEEPIAKAGGILSKIRLEETENNYVEYYGGKEPF

SEQ ID NO: 18472 - protein, 143 aa, Brumimicrobium glaciale
  misc_feature (1)..(143): tr|A0A4Q4KJS2|A0A4Q4KJS2_9FLAO 6-carboxytetrahydropteri n synthase OS=Brumimicrobium glaciale OX=200475 GN=ERX4 6_12900 PE=4 SV=1
MKTVYITRREHFNAAHKLWNEGWSDEKNEAVFGKCSNKNWHGHNFNIFVTVKGTPSTDTGFVINLKDLSQIMKDYVVEALDHKNLNLDVPFMKGVLASTENLVMKIWEEIEGPIKKAGGVLSKIKLEETENNYVEYYGGNEPF

SEQ ID NO: 18473 - protein, 133 aa, Brumimicrobium glaciale
  misc_feature (1)..(133): tr|A0A4Q4KLQ9|A0A4Q4KLQ9_9FLAO 6-carboxy-5,6,7,8-tetrah ydropterin synthase OS=Brumimicrobium glaciale OX=20047 5 GN=ERX46_08015 PE=3 SV=1
MIKIGRRTTFNAAHRLHNAKWSEDKNNEVFGKCNSPNFHGHNYVMETWVKGDIDPDTGFVINLTDLKKIIKEEIEDEFDHRNLNLDVPAFKNLNPTAENIAKVIYEKLKPRLKQYELTIRLYETQNNIVEYTG

SEQ ID NO: 18474 - protein, 148 aa, Brumimicrobium salinarum
  misc_feature (1)..(148): tr|A0A2I0R626|A0A2I0R626_9FLAO 6-carboxy-5,6,7,8-tetrah ydropterin synthase OS=Brumimicrobium salinarum OX=2058 658 GN=CW751_01455 PE=3 SV=1
MNEEKIRVTKRFTFEMAHALYDYDGNCRYIHGHSYKLYVTIIGAVKKNDSSPKDGMVCDFSDLKKIVNENIVDVYDHALVLNQKDSDKINVLKGEQRTYYFPVQPTCENLLLHFKNTLQSVLPSELKLANIKLYETEGSYAEWDINDQ

SEQ ID NO: 18475 - protein, 143 aa, Brumimicrobium salinarum
  misc_feature (1)..(143): tr|A0A2I0R1X8|A0A2I0R1X8_9FLAO 6-pyruvoyl tetrahydrobio pterin synthase OS=Brumimicrobium salinarum OX=2058658 GN=CW751_09350 PE=4 SV=1
MKTVYITRREHFNAAHKLWNEEWSDEKNESVFGKCSNKNWHGHNFNIFVTVKGVPHEETGFVINLKDLSKIMKDHVVEALDHKNLNLDVPFMNGVLASTENLVIKIWEEIEKPIQEAGGELAKIRLEETENNYVEYFGENTPY

SEQ ID NO: 18476 - protein, 143 aa, Brumimicrobium sp.
  misc_feature (1)..(143): tr|A0A2U2XFE5|A0A2U2XFE5_9FLAO 6-pyruvoyl tetrahydrobio pterin synthase OS=Brumimicrobium sp. C305 OX=2100725 G N=DIT68_04590 PE=4 SV=1
MKTVYITRREHFNAAHKLWNEEWSDEKNEAVFGKCSNKNWHGHNFNIFVTVKGVPNVDTGFVINLKDLSKIMKEYVVEALDHKNLNLDVPFMNGVLASTENLVMKIWEEIEEPIKKAGGVLAKIRLEETENNYVEYYGGNEPF

SEQ ID NO: 18477 - protein, 150 aa, Brumimicrobium sp.
  misc_feature (1)..(150): tr|A0A2U2XAB3|A0A2U2XAB3_9FLAO 6-carboxytetrahydropteri n synthase QueD OS=Brumimicrobium sp. C305 OX=2100725 G N=DIT68_13315 PE=4 SV=1
MNRNILRVTKRFTFEMAHALMNYDGNCQYIHGHSYKLYVTLLGLVKDSPNMAKDGMVCDFSSLKKIVNDKIIDRFDHTLVLNANDESKTKFNQPNQRILLFPVQPTCENLLLHFKNELLSDLPDDLTLANIKLYETEGSFAEWDIHDQNF

SEQ ID NO: 18478 - protein, 174 aa, Bryobacterales bacterium
  misc_feature (1)..(174): tr|A0A350UQF6|A0A350UQF6_9BACT 6-pyruvoyl tetrahydrobio pterin synthase OS=Bryobacterales bacterium OX=2026791 GN=DCY80_19720 PE=4 SV=1
MPENEEPGRPVVRVTRRYRFSASHRLHAPELSAERNREVYGKCNNPYGHGHDYVMDVTLRGPLDARLGRLVSVDQLDQFVRCTIVDAFDRRNLNLDVPEFATLVPTTENLALVAAHRLAAAWPLAFPGSPALPEKVRIWETPRNIFQVFVANSEPFRVMDESARRHAAPTKESR

SEQ ID NO: 18479 - protein, 140 aa, Bryobacterales bacterium
  misc_feature (1)..(140): tr|A0A2E5FMD7|A0A2E5FMD7_9BACT 6-pyruvoyl tetrahydrobio pterin synthase OS=Bryobacterales bacterium OX=2026791 GN=CMN58_07515 PE=4 SV=1
MPQLTKRYPFSASHRLHAAKLSAEENVKLFGKCNNPHGHGHNYTLEVTISGPTDPHSGMIIARTQLDDIVERCILSEIDHTDLNSDIEEFSSTPTTTENLALIISHRLDKFWAQKFTATDPRVTRIRVEETTRNSFEVTF

SEQ ID NO: 18480 - protein, 140 aa, Bryocella elongata
  misc_feature (1)..(140): tr|A0A1H5TY94|A0A1H5TY94_9BACT 6-pyruvoyltetrahydropter in/6-carboxytetrahydropterin synthase OS=Bryocella elon gata OX=863522 GN=SAMN05421819_0786 PE=4 SV=1
MSAGTPIAHFGRRYHFSASHRLHCGELSAERNREVFGKCNNPFGHGHNYVVEVLLAGPIDAATGMVTNLADLDAFAGQELLARFDHQNLNLLPEFASQVSTTENLAVEIWKLFQGYRHATLKKVRVEETGNNSFEYFGER

SEQ ID NO: 18481 - protein, 125 aa, Bryocella elongata
  misc_feature (1)..(125): tr|A0A1H6AFJ7|A0A1H6AFJ7_9BACT 6-carboxy-5,6,7,8-tetrah ydropterin synthase OS=Bryocella elongata OX=863522 GN= SAMN05421819_3112 PE=3 SV=1
MFEVTVQAGFSSGHFLRNYKGKCENPHGHNYRVLVTLVGQDLDASGLLLDFKDLKLVLRPTVEYLDHQMINELEPFDVVNPSAENLAKYFFEKTSDHVKAMTDGRVRVKDCTLYETDTSFARYYE

SEQ ID NO: 18482 - protein, 120 aa, Buchnera aphidicola
  misc_feature (1)..(120): sp|Q8K9D8|QUED_BUCAP 6-carboxy-5,6,7,8-tetrahydropterin synthase OS=Buchnera aphidicola subsp. Schizaphis gram inum (strain Sg) OX=198804 GN=queD PE=3 SV=1
MKTIIFKDFQFEAAHYLPYVPKMHKCRRLHGHSFFVRLELKDKINEKNGWIIDYAEIKLAFQPIYDQLDHHFLNDIPGLENPTSEILAKWIWHRLKPKLSILNTIIIKETCTSGCIYQGF

SEQ ID NO: 18483 - protein, 120 aa, Buchnera aphidicola
  misc_feature (1)..(120): tr|A0A5J6ZEX8|A0A5J6ZEX8_9GAMM 6-carboxytetrahydropteri n synthase QueD OS=Buchnera aphidicola (Aphis fabae) OX =571430 GN=queD PE=4 SV=1
MNTTIFKDFQFEAAHYLPNLPKAHKCNRLHGHSFFVRLELKGVIDKDKGWIMDYSDIKLLFQPIYDQLDHYLLNDIPGLENPTSEILAKWIWDRLKPNLLELNAVIIKETCTSGCIYKDI

SEQ ID NO: 18484 - protein, 120 aa, Budvicia aquatica
  misc_feature (1)..(120): tr|A0A2C6DMZ2|A0A2C6DMZ2_9GAMM 6-carboxy-5,6,7,8-tetrah ydropterin synthase OS=Budvicia aquatica OX=82979 GN=qu eD PE=3 SV=1
MVTTLFKDFNFEAAHRLPNVPEGHKCARLHGHSFMVRIEVTGEVDPYTGWVMDFSDIKAAFKPILDSLDHYYLNDIEGLDNPTSEVLAHWIWQRLKPSLPLLSAIRVKETCTAGCIYRGE

SEQ ID NO: 18485 - protein, 150 aa, Burkholderia ambifaria
  misc_feature (1)..(150): tr|B1YPW7|B1YPW7_BURA4 Queuosine biosynthesis protein Q ueD OS=Burkholderia ambifaria (strain MC40-6) OX=398577 GN=BamMC406_3055 PE=4 SV=1
MLITRKLEFDAGHRIPDHRSQCRNLHGHRYVLEVTLRGDLVDTEGAPDRGMVMDFADVKALAVEHLVNKWDHAFLVYARDEVVRSFLEQMADHKTVVLDRIPTVENLAAIAFDILANVYDAHYGVNLRLERVRLYETPNCWADVERDPAR

SEQ ID NO: 18486 - protein, 150 aa, Burkholderia ambifaria; identical to SEQ ID NO: 18485
  misc_feature (1)..(150): tr|A0A2S9L2J3|A0A2S9L2J3_9BURK 6-carboxytetrahydropteri n synthase QueD OS=Burkholderia ambifaria OX=152480 GN= queD PE=4 SV=1

SEQ ID NO: 18487 - protein, 150 aa, Burkholderia anthina
  misc_feature (1)..(150): tr|A0A106DI15|A0A106DI15_9BURK 6-carboxy-5,6,7,8-tetrah ydropterin synthase OS=Burkholderia anthina OX=179879 G N=WT32_28925 PE=4 SV=1
MLITRKLEFDAGHRIPDHRSQCRNLHGHRYVLEITLRGDLVDTEGAPDRGMVMDFADVKALAMEHLVSKWDHAFLVYARDEVVRSFLEQMADHKTVVIDRIPTVENLAAIAFDILANVYDAHYGVNLRLERVRLYETPNCWADVERQPGR

SEQ ID NO: 18488 - protein, 150 aa, Burkholderia anthina
  misc_feature (1)..(150): tr|A0A3P0C1C0|A0A3P0C1C0_9BURK 6-carboxytetrahydropteri n synthase QueD OS=Burkholderia anthina OX=179879 GN=qu eD PE=4 SV=1
MLITRKLEFDAGHRIPDHRSQCRNLHGHRYVLEITLRGDLVDTEGAPDRGMVMDFADVKALAMEHLVGKWDHAFLVYARDEVVRSFLEQMADHKTVVIDRIPTVENLAAIAFDILANVYDAHYGVNLRLERVRLYETPNCWADVERQPGR

SEQ ID NO: 18489 - protein, 150 aa, Burkholderia catarinensis
  misc_feature (1)..(150): tr|A0A1J9NR41|A0A1J9NR41_9BURK 6-carboxytetrahydropteri n synthase QueD OS=Burkholderia catarinensis OX=1108140 GN=BFF94_07205 PE=4 SV=1
MLITRKLEFDAGHRIPDHRSQCRNLHGHRYVLEVTLRGDLVDTEGAPDRGMVMDFADVKALAVEHLVSKWDHAFLVYARDEVVRSFLEQMADHKTVVIDRIPTVENLAAIAFDLLANVYDAHYGVNLRLERVRLYETPNCWADVERQPGR

SEQ ID NO: 18490 - protein, 192 aa, Burkholderia cenocepacia
  misc_feature (1)..(192): tr|A0A0H2XUN3|A0A0H2XUN3_BURCA 6-pyruvoyl-tetrahydropte rin synthase-like protein OS=Burkholderia cenocepacia ( strain AU 1054) OX=331271 GN=Bcen_3036 PE=4 SV=1
MLIRKLFRFENAHVVRGCSTRRCSHSIHGHSYRVELLLEAHALDHGQMIYDFGLLKGDVRDLIDAFDHAVTLWSDDDPRYVESMRRHSERWVRLPVSPSAEQFSRVFFRLVDAALCGTRMSNGEADVRLHSVIVHETETGYAQCFRDDAFNPRMGRIDLDAIVFAPAIVAQWRDPGLFERLKRGHTLSRQKS

SEQ ID NO: 18491 - protein, 192 aa, Burkholderia cenocepacia
  misc_feature (1)..(192): tr|A0A3N9H255|A0A3N9H255_9BURK 6-carboxytetrahydropteri n synthase OS=Burkholderia cenocepacia OX=95486 GN=DF04 7_06555 PE=4 SV=1
MLIRKLFRFENAHVVRGCSTRRCSHSIHGHSYRVELLLEAHAFDHGQMIYDFGLLKGDVRDLIDAFDHAVTLWSDDDPRYVESMRRHSERWVMLPVSPSAEQFSRVFFRLVDAALCGTRMSNGEADVRLHSVIVHETETGYAQCFRDDAFNPRMGRIDLDAIVFAPAIVAQWRDPGLFERLKRGDILSRKES

SEQ ID NO: 18492 - protein, 193 aa, Burkholderia cepacia
  misc_feature (1)..(193): tr|A0A0U4CCB8|A0A0U4CCB8_BURCE 6-carboxy-5,6,7,8-tetrah ydropterin synthase OS=Burkholderia cepacia JBK9 OX=139 5570 GN=P350_25830 PE=4 SV=1
MLIRKLFRFENAHVVRGCSTRRCSHSIHGHSYRVELLLEAHALDHGQMIYDFGLLKGDVRDLIDAFDHAVTLWSNDDPRYVESMRRHSERWVSLPVSPSAEQFSRVLFRLVDAALSCTRMSNGEADVRLHSVIVHETETGYAQCFRDDAFNPRMGRIDLDAIVFAPAIVAQWRDPGLFERLRRSHLVSQKESS

SEQ ID NO: 18493 - protein, 150 aa, Burkholderia cepacia
  misc_feature (1)..(150): tr|A0A105ZYJ9|A0A105ZYJ9_BURCE 6-carboxy-5,6,7,8-tetrah ydropterin synthase OS=Burkholderia cepacia OX=292 GN=q ueD PE=4 SV=1
MLITRKLEFDAGHRIPDHRSQCRNLHGHRYVLEVTLRGDLVDTEGAPDRGMVMDFADVKALAMEHLVGKWDHAFLVYARDEVVRSFLEQMADHKTVVIDRIPTVENLAAIAFDILANVYDAHYGVNLRLERVRLYETPNCWADVERQPGR

SEQ ID NO: 18494 - protein, 192 aa, Burkholderia contaminans
  misc_feature (1)..(192): tr|A0A2S5E5H2|A0A2S5E5H2_9BURK 6-carboxytetrahydropteri n synthase OS=Burkholderia contaminans OX=488447 GN=C37 43_08795 PE=4 SV=1
MLIRKLFRFENAHVVRGCSTRRCSHSIHGHSYRVELLLEAHALDHGQMIYDFGLLKGDVRDLIDAFDHAVTLWTDDDPCYVESMRRHSERWVLLPVSPSAEQFSRVFFRLVDAALSSTRMTNGEADVRLHSIIVHETETGYAQCFRDDAFNPRMGRIDLDDIVFAPAIAAQWRDPGLFERIKRGRPLSRQES

SEQ ID NO: 18495 - protein, 150 aa, Burkholderia contaminans; identical to SEQ ID NO: 18493
  misc_feature (1)..(150): tr|A0A0G3Z251|A0A0G3Z251_9BURK 6-carboxytetrahydropteri n synthase QueD OS=Burkholderia contaminans OX=488447 G N=queD PE=4 SV=1

SEQ ID NO: 18496 - protein, 150 aa, Burkholderia dabaoshanensis
  misc_feature (1)..(150): tr|A0A2N7VSS0|A0A2N7VSS0_9BURK 6-carboxytetrahydropteri n synthase QueD OS=Burkholderia dabaoshanensis OX=56471 4 GN=queD PE=4 SV=1
MTITRKLEFDAGHRIPDHRSQCRNLHGHRYVLEITLRGDVVETEGAPDRGMVMDFADVKSLAMEHLVSRWDHAFLVFEGDARVREFLESMPEHKTVVLDRIPTVENLAAVAFDVLAQVYDAHYGVNLRLHQVRLYETPNCWADVVREGAL

SEQ ID NO: 18497 - protein, 150 aa, Burkholderia diffusa
  misc_feature (1)..(150): tr|A0A1B4BVZ0|A0A1B4BVZ0_9BURK 6-carboxy-5,6,7,8-tetrah ydropterin synthase OS=Burkholderia diffusa OX=488732 G N=WI26_15100 PE=4 SV=1
MLITRKLEFDAGHRIPDHRSQCRNLHGHRYVLEVTLRGDLVDTEGAPDRGMVMDFADVKALAVEHLVNKWDHAFLVYARDEVVRSFLEQMADHKTVVLDRIPTVENLAAIAFDILANVYDAHYGVNLRLERVRLYETPNCWADVERQPGR

SEQ ID NO: 18498 - protein, 150 aa, Burkholderia dolosa
  misc_feature (1)..(150): tr|A0A0D5J2H7|A0A0D5J2H7_9BURK Queuosine biosynthesis p rotein QueD OS=Burkholderia dolosa AU0158 OX=350701 GN= queD PE=4 SV=1
MLITRKLEFDAGHRIPDHRSQCRNLHGHRYVLEVTLRGDLVDTEGAPDRGMVMDFADVKALAVEHLVSKWDHAFLVYARDEVVRSFLEQMADHKTVVLDRIPTVENLAAIAFDILANVYDAHYGVNLRLERVRLYETPNCWADVEREPGR

SEQ ID NO: 18499 - protein, 150 aa, Burkholderia gladioli
  misc_feature (1)..(150): tr|F2LGW5|F2LGW5_BURGS Putative 6-pyruvoyl tetrahydropt erin synthase OS=Burkholderia gladioli (strain BSR3) OX =999541 GN=bgla_1g38220 PE=4 SV=1
MLITRKLEFDAGHRIPDHRSQCRNLHGHRYVLEITLRGDLVDTEGAPDRGMVMDFADVKSLAMEHLVGKWDHAFLVYARDEVVRSFLEKMADHKTVVLDRIPTVENLAAVAFDILADVYDAHYGVNLRLERVRLYETPNCWADVERDPAR

SEQ ID NO: 18500 - protein, 150 aa, Burkholderia gladioli; identical to SEQ ID NO: 18499
  misc_feature (1)..(150): tr|A0A095HVZ8|A0A095HVZ8_BURGA 6-carboxytetrahydropteri n synthase QueD OS=Burkholderia gladioli OX=28095 GN=qu eD PE=4 SV=1

SEQ ID NO: 18501 - protein, 150 aa, Burkholderia glumae
  misc_feature (1)..(150): tr|A0A2J9H6L0|A0A2J9H6L0_BURGL 6-carboxytetrahydropteri n synthase QueD OS=Burkholderia glumae OX=337 GN=queD P E=4 SV=1
MLITRKLEFDAGHRIPDHRSQCRNLHGHRYVLEITLRGDLVDVEGAPDRGMVMDFADVKSLAMAHLVGKWDHAFLVYARDDVVRSFLEKMADHKTVVLDRIPTVENLAAIAFDILANVYDAHYGVNLRLERVRLYETPNCWAEVEREPGR

SEQ ID NO: 18502 - protein, 150 aa, Burkholderia glumae; identical to SEQ ID NO: 18501
  misc_feature (1)..(150): tr|C5AF27|C5AF27_BURGB Putative 6-pyruvoyl tetrahydropt erin synthase OS=Burkholderia glumae (strain BGR1) OX=6 26418 GN=bglu_1g34000 PE=4 SV=1

SEQ ID NO: 18503 - protein, 148 aa, Burkholderia insecticola
  misc_feature (1)..(148): tr|R4WV76|R4WV76_9BURK 6-carboxy-5,6 7,8-tetrahydropter in synthase OS=Burkholderia insecticola OX=758793 GN=BR PE64_ACDS00380 PE=4 SV=1
MQTITRKLEFDAGHRIPDHRSQCRNLHGHRYVLEITLQGDLVDVEGAPDRGMVMDFADVKALAMEHLVGKWDHAFIVYEGDVKVREFLQTLADHKTVVMDRIPTVENMAAVAFNILAEVYDAHYGVNLKLTRVRLYETPNCWADVERG

SEQ ID NO: 18504 - protein, 192 aa, Burkholderia lata
  misc_feature (1)..(192): tr|A0A3G3HD31|A0A3G3HD31_BURL3 6-carboxytetrahydropteri n synthase QueD OS=Burkholderia lata (strain ATCC 17760 / DSM 23089 / LMG 22485 / NCIMB 9086 / R18194 / 383) O X=482957 GN=CVS37_27435 PE=4 SV=1
MLIRKLFRFENAHVVRGCSTRRCSHSIHGHSYRVELLLEAHALDRGQMIYDFGLLKGDVRDLIDAFDHAVTLWSGDDPCYVESMRRHSERWVLLPVSPSAEQFSRVFFRLVDAALSCTRMANGEADLRLHSIIVHETETGYAQCFRDDAFNPRMGRIDLDDIVFAPAIAGQWRDPGLFERIKRGRPISRQES

SEQ ID NO: 18505 - protein, 192 aa, Burkholderia lata
  misc_feature (1)..(192): tr|Q39AS7|Q39AS7_BURL3 6-pyruvoyl-tetrahydropterin synt hase-like protein OS=Burkholderia lata (strain ATCC 177 60 / DSM 23089 / LMG 22485 / NCIMB 9086 / R18194 / 383) OX=482957 GN=Bcep18194_B0318 PE=4 SV=1
MLIRKLFRFENAHIVRGCSTRRCSHSIHGHSYRVELLLEAHALDHGQMIYDFGLLKGDVRDLIDAFDHAVTLWSDDDPCYVESMRRHSERWVLLPVSPSAEQFSRVFFRLVDAALSCTRMANGEADVRLHSIIVHETETGYAQCFRDDAFNPRMGRIDLDDIVFAPAIAGQWRDPGLFERIKRGRPISRQES

SEQ ID NO: 18506 - protein, 150 aa, Burkholderia latens
  misc_feature (1)..(150): tr|A0A1B4NVK4|A0A1B4NVK4_9BURK 6-carboxy-5,6,7,8-tetrah ydropterin synthase OS=Burkholderia latens OX=488446 GN =WK25_15130 PE=4 SV=1
MLITRKLEFDAGHRIPDHRSQCRNLHGHRYVLEITLRGDLVDTEGAPDRGMVMDFADVKALAVEHLVNKWDHAFLVYARDEVVRSFLEQMADHKTVVLDRIPTVENLAAIAFDILANVYDAHYGVNLRLERVRLYETPNCWADVERQPGR

SEQ ID NO: 18507 - protein, 150 aa, Burkholderia mallei
  misc_feature (1)..(150): tr|A0A0H2WHR6|A0A0H2WHR6_BURMA 6-pyruvoyl tetrahydrobio pterin synthase, putative OS=Burkholderia mallei (strai n ATCC 23344) OX=243160 GN=BMA0154 PE=4 SV=1
MLITRKLEFDAGHRIPDHRSQCRNLHGHRYVLEITLRGDLVETEGAPDRGMVMDFADVKALAMEHLVSKWDHAFLVYARDEIVRSFLEKMADHKTVVLDRIPTVENLAAIAFDILANVYDAHYGVNLRLERVRLYETPNCWADVERDPRV

SEQ ID NO: 18508 - protein, 150 aa, Burkholderia mallei; identical to SEQ ID NO: 18507
  misc_feature (1)..(150): tr|A0A3N4FRE6|A0A3N4FRE6_BURML 6-carboxytetrahydropteri n synthase QueD OS=Burkholderia mallei OX=13373 GN=queD PE=4 SV=1

SEQ ID NO: 18509 - protein, 150 aa, Burkholderia metallica
  misc_feature (1)..(150): tr|A0A1B4HXG8|A0A1B4HXG8_9BURK 6-carboxy-5,6,7,8-tetrah ydropterin synthase OS=Burkholderia metallica OX=488729 GN=WJ16_15805 PE=4 SV=1
MLITRKLEFDAGHRIPDHRSQCRNLHGHRYVLEVTLRGDLVDTEGAPDRGMVMDFADVKALAMEHLVGKWDHAFLVYARDDVVRSFLEQMADHKTVVIDRIPTVENLAAIAFDILANVYDAHYGVNLRLERVRLYETPNCWADVERQPGR

SEQ ID NO: 18510 - protein, 192 aa, Burkholderia metallica
  misc_feature (1)..(192): tr|A0A1B4I676|A0A1B4I676_9BURK 6-carboxy-5,6,7,8-tetrah ydropterin synthase OS=Burkholderia metallica OX=488729 GN=WJ16_31150 PE=4 SV=1
MLIRKLFRFENAHVVRGCSTRRCSHSIHGHSYRVELLLEAHALDHGQMIYDFGLLKGDVRELIDAFDHAVTLWSDDDPDYLDSMRRHSERWVLLPVSPSAEQFSRVFFRLVDAALSCTRMANGEGDVRLHSVIVHETETGYAQCFRDDAFNPRMGRIDLDAIVFAPAIAEQWRDPGMFERIRRGRPISTQES

SEQ ID NO: 18511 - protein, 150 aa, Burkholderia multivorans
  misc_feature (1)..(150): tr|A0A0H3KFR5|A0A0H3KFR5_BURM1 6-pyruvoyl tetrahydrobio pterin synthase OS=Burkholderia multivorans (strain ATC C 17616 / 249) OX=395019 GN=ptpS PE=4 SV=1
MLITRKLEFDAGHRIPDHRSQCRNLHGHRYVLEITLRGDLVDTEGAPDRGMVMDFADVKALAVEHLVSKWDHAFLVYARDEVVRSFLEQMADHKTVVLDRIPTVENLAAIAFDILASVYDAHYGVNLRLERVRLYETPNCWADVERDAGR

SEQ ID NO: 18512 - protein, 150 aa, Burkholderia multivorans; identical to SEQ ID NO: 18511
  misc_feature (1)..(150): tr|A0A1B4U0Z7|A0A1B4U0Z7_9BURK 6-carboxytetrahydropteri n synthase QueD OS=Burkholderia multivorans OX=87883 GN =queD PE=4 SV=1

SEQ ID NO: 18513 - protein, 148 aa, Burkholderia novacaledonica
  misc_feature (1)..(148): tr|A0A2U3IBS5|A0A2U3IBS5_9BURK 6-carboxy-5,6,7,8-tetrah ydropterin synthase OS=Burkholderia novacaledonica OX=1 544861 GN=NOV72_04773 PE=4 SV=1
MQTITRKLEFDAGHRIPDHRSQCRNLHGHRYVLEITLQGDLVDVEGAPDRGMVMDFADVKSLAMEHLVNKWDHAFIVYEGDVKVREFLQTLADHKTVVLDRIPTVENLAAVAFNILAEVYDAHYGVNLKLKRVRLFETPNCWADVERG

SEQ ID NO: 18514 - protein, 150 aa, Burkholderia oklahomensis
  misc_feature (1)..(150): tr|A0A381BVI7|A0A381BVI7_9BURK Queuosine biosynthesis p rotein QueD OS=Burkholderia oklahomensis OX=342113 GN=N CTC13388_02345 PE=4 SV=1
MLITRKLEFDAGHRIPDHRSQCRNLHGHRYVLEITLRGDLVDTEGAPDRGMVMDFADVKALAMEHLVSKWDHAFLVYARDEVVRSFLEKMVDHKTVVLDRIPTVENLAAIAFDILANVYDAHYGVNLRLERVRLYETPNCWADVERGPRA

SEQ ID NO: 18515 - protein, 150 aa, Burkholderia plantarii
  misc_feature (1)..(150): tr|A0A0B6S734|A0A0B6S734_9BURK Queuosine biosynthesis p rotein QueD OS=Burkholderia plantarii OX=41899 GN=queD PE=4 SV=1
MLITRKLEFDAGHRIPDHRSQCRNLHGHRYVLEITLRGDLVDVEGAPDRGMVMDFADVKSLAMEHLVGKWDHAFLVYARDEVVRSFLEKMADHKTVVLDRIPTVENLAAIAFDILANVYDAHYGVNLRLERVRLYETPNCWADVEREPGR

SEQ ID NO: 18516 - protein, 150 aa, Burkholderia pseudomallei; identical to SEQ ID NO: 18507
  misc_feature (1)..(150): tr|A0A0E1WAT9|A0A0E1WAT9_BURPE Putative 6-pyruvoyl tetr ahydropterin synthase OS=Burkholderia pseudomallei 1710 a OX=320371 GN=BURPS1710A_0429 PE=4 SV=1

SEQ ID NO: 18517 - protein, 150 aa, Burkholderia pseudomallei; identical to SEQ ID NO: 18507
  misc_feature (1)..(150): tr|A8E883|A8E883_BURPE Putative 6-pyruvoyl tetrahydropt erin synthase OS=Burkholderia pseudomallei 406e OX=3601 18 GN=BURPS406E_B0481 PE=4 SV=1

SEQ ID NO: 18518 - protein, 193 aa, Burkholderia pseudomultivorans
  misc_feature (1)..(193): tr|A0A132EL25|A0A132EL25_9BURK 6-carboxy-5,6,7,8-tetrah ydropterin synthase OS=Burkholderia pseudomultivorans O X=1207504 GN=WT56_10435 PE=4 SV=1
MLIRKLFRFENAHIVRGCSTRRCSHSIHGHSYKVELLLEAHALDHGQMVYDFGLLKGDVRDLIDAFDHAVTLWSGDDPDYLEALRRHSERWVMLPVSPSAEQFSRVLFRLVDAALSQAEMSNGEADVRLHSVIVHETDTGYAQCFRDDAFNPRMGRIEMDAIEFAPTIVAQWRDPRLFERLARGTLPFPEETR

SEQ ID NO: 18519 - protein, 150 aa, Burkholderia pseudomultivorans
  misc_feature (1)..(150): tr|A0A132ED13|A0A132ED13_9BURK 6-carboxy-5,6,7,8-tetrah ydropterin synthase OS=Burkholderia pseudomultivorans O X=1207504 GN=WT56_21900 PE=4 SV=1
MLITRKLEFDAGHRIPDHRSQCRNLHGHRYVLEVTLRGDLVDTEGAPDRGMVMDFADVKALAMEHLVSKWDHAFLVYARDEVVRSFLEQMADHKTVVIDRIPTVENLAALAFDILANVYDAHYGVNLRLERVRLYETPNCWADVERQPGR

SEQ ID NO: 18520 - protein, 192 aa, Burkholderia puraquae
  misc_feature (1)..(192): tr|A0A1X1P6T1|A0A1X1P6T1_9BURK 6-carboxytetrahydropteri n synthase QueD OS=Burkholderia puraquae OX=1904757 GN= B7G54_34140 PE=4 SV=1
MLIRKLFRFENAHVVRGCSTRRCSHSIHGHSYRVELLLEAHALDHGQMIYDFGLLKGDVRDLIDAFDHAVTLWSDDDPCYVESMRRHSERWVLLPVSPSAEQFSRVLFRLVDAALSCTRMSNGEADVRLHSVIVHETETGYAQCFRDDAFNPRMGRIDLDAIVFAPAIAGQWRDPGLFERIKRGRPISSQAS

SEQ ID NO: 18521 - protein, 150 aa, Burkholderia puraquae; identical to SEQ ID NO: 18493
  misc_feature (1)..(150): tr|A0A1X1PAN4|A0A1X1PAN4_9BURK 6-carboxytetrahydropteri n synthase QueD OS=Burkholderia puraquae OX=1904757 GN= B7G54_27595 PE=4 SV=1

SEQ ID NO: 18522 - protein, 150 aa, Burkholderia pyrrocinia
  misc_feature (1)..(150): tr|A0A124UZK7|A0A124UZK7_BURPY 6-carboxy-5,6,7,8-tetrah ydropterin synthase OS=Burkholderia pyrrocinia OX=60550 GN=WJ63_03350 PE=4 SV=1
MLITRKLEFDAGHRIPDHRSQCRNLHGHRYVLEITLRGDLVDTEGAPDRGMVMDFADVKALAMEHLVSKWDHAFLVYARDEVVRSFLEQMADHKTVVIDRIPTVENLAAIAFDILANVYDAHYGVNLRLERVRLYETPNCWADVEREPGR

SEQ ID NO: 18523 - protein, 150 aa, Burkholderia pyrrocinia
  misc_feature (1)..(150): tr|A0A087P2W6|A0A087P2W6_BURPY 6-carboxy-5,6,7,8-tetrah ydropterin synthase OS=Burkholderia pyrrocinia OX=60550 GN=queD PE=4 SV=1
MLITRKLEFDAGHRIPDHRSQCRNLHGHRYVLEITLRGDLVDTEGAPDRGMVMDFADVKALAMEHLVSKWDHAFLVYARDEVVRSFLEQMADHKTVVIDRIPTVENLAAIAFDLLANVYDAHYGVNLRLERVRLYETPNCWADVERQPGR

SEQ ID NO: 18524 - protein, 192 aa, Burkholderia reimsis
  misc_feature (1)..(192): tr|A0A365QW51|A0A365QW51_9BURK 6-carboxytetrahydropteri n synthase OS=Burkholderia reimsis OX=2234132 GN=DPV79_ 13050 PE=4 SV=1
MLIRKLFRFENAHVVRGCSTRRCSHSIHGHSYRVELLLEAHALDHGQMIYDFGLLKGDVRDLIDAFDHAVTLWSDDDPCYVESMRRHSERWVLLPVSPSAEQFSRVFFRLVDAALSCTRMSNGETGVRLHSIIVHETETGYAQCFRDDAFNPRMGRIDLDDIVFAPAIAGQWRDPGLFERIKRGRSMSRQES

SEQ ID NO: 18525 - protein, 150 aa, Burkholderia reimsis; identical to SEQ ID NO: 18493
  misc_feature (1)..(150): tr|A0A365QRV5|A0A365QRV5_9BURK 6-carboxytetrahydropteri n synthase QueD OS=Burkholderia reimsis OX=2234132 GN=q ueD PE=4 SV=1

SEQ ID NO: 18526 - protein, 150 aa, Burkholderia seminalis; identical to SEQ ID NO: 18523
  misc_feature (1)..(150): tr|A0A103K2U0|A0A103K2U0_9BURK 6-carboxy-5,6,7,8-tetrah ydropterin synthase OS=Burkholderia seminalis OX=488731 GN=WJ13_01265 PE=4 SV=1

SEQ ID NO: 18527 - protein, 193 aa, Burkholderia seminalis
  misc_feature (1)..(193): tr|A0A118FR02|A0A118FR02_9BURK 6-carboxy-5,6,7,8-tetrah ydropterin synthase OS=Burkholderia seminalis OX=488731 GN=WJ13_22125 PE=4 SV=1
MLIRKLFRFENAHVVRGCSTRRCSHSIHGHSYRVELLLEAHALDHGQMVYDFGLLKGDVRDLVDAFDHAVTLWSDDDPCYVESMRRFSERWVVLPVSPSAEQFSRVLFRLVDAALSGTRMSNGEADVRLHSVIVHETETGYAQCFRDDAFNPRMGPIDLDAIVFAPAIAAQWRDPGLFERLRRGPLLSRQESS

SEQ ID NO: 18528 - protein, 150 aa, Burkholderia singularis
  misc_feature (1)..(150): tr|A0A103E1Z9|A0A103E1Z9_9BURK 6-carboxy-5,6,7,8-tetrah ydropterin synthase OS=Burkholderia singularis OX=15030 53 GN=BSIN_2358 PE=4 SV=1
MLITRKLEFDAGHRIPDHRSQCRNLHGHRYVLEITLRGDLVETEGAPDRGMVMDFADVKALAMEHLVNQWDHAFLVYARDEVVRSFLEKMADHKTVVLDRIPTVENLAAVAFDILANVYDSHYGVNLRLERVRLYETPNCWAEVDRESRG

SEQ ID NO: 18529 - protein, 150 aa, Burkholderia sp.
  misc_feature (1)..(150): tr|A0A063BNJ1|A0A063BNJ1_9BURK Queuosine biosynthesis p rotein QueD OS=Burkholderia sp. lig30 OX=1192124 GN=LIG 30_1090 PE=4 SV=1
MLITRKLEFDAGHRIPDHRSQCRNLHGHRYVLEVTLRGDLVDTEGAPDRGMVMDFADVKALAVEHLVSKWDHAFLVYARDEVVRAFLEKMADHKTVVLDRIPTVENLAAVAFDILSNVYDAHYGVNLRLERVRLYETPNCWADVERPPAR

SEQ ID NO: 18530 - protein, 150 aa, Burkholderia sp.; identical to SEQ ID NO: 18497
  misc_feature (1)..(150): tr|A0A3P0S8A4|A0A3P0S8A4_9BURK 6-carboxytetrahydropteri n synthase QueD OS=Burkholderia sp. Bp9004 OX=2184559 G N=queD PE=4 SV=1

SEQ ID NO: 18531 - protein, 150 aa, Burkholderia stabilis
  misc_feature (1)..(150): tr|A0A1D7ZEW3|A0A1D7ZEW3_9BURK 6-carboxytetrahydropteri n synthase QueD OS=Burkholderia stabilis OX=95485 GN=BB J41_13000 PE=4 SV=1
MLITRKLEFDAGHRIPDHRSQCRNLHGHRYVLEITLRGDLVDTEGAPDRGMVMDFADVKALAVEHLVSKWDHAFLVYARDEVVRSFLEQMADHKTVVIDRIPTVENLAAIAFDLLANVYDAHYGVNLRLERVRLYETPNCWADVERQPGR

SEQ ID NO: 18532 - protein, 193 aa, Burkholderia stabilis
  misc_feature (1)..(193): tr|A0A1D7ZR13|A0A1D7ZR13_9BURK 6-carboxytetrahydropteri n synthase QueD OS=Burkholderia stabilis OX=95485 GN=BB J41_26625 PE=4 SV=1
MLIRKLFRFENAHVVRGCSTRRCSHSIHGHSYRVELLLEAHALDNGQMIYDFGLLKGDVRDLIDAFDHAVTLWSGDDAGYLDSMRRHSERWVLLPVSPSAEQFSRVFFLLVDAVLSCTGMSNGEGDVRLHSIIVHETETGYAQCFRDDAFNPRMGCIDLDAIVFSPAVAAQWRDPELFERLKRDRAIFQQESR

SEQ ID NO: 18533 - protein, 150 aa, Burkholderia stagnalis
  misc_feature (1)..(150): tr|A0A106G2Y7|A0A106G2Y7_9BURK 6-carboxy-5,6,7,8-tetrah ydropterin synthase OS=Burkholderia stagnalis OX=150305 4 GN=queD PE=4 SV=1
MLITRKLEFDAGHRIPDHRSQCRNLHGHRYVLEITLRGDLVDTEGAPDRGMVMDFADVKALAMEHLVSKWDHAFLVYARDEVVRSFLEQMADHKTVVIDRIPTVENLAAIAFDILANVYDAHYGINLRLERVRLYETPNCWADVEREPGR

SEQ ID NO: 18534 - protein, 150 aa, Burkholderia territorii; identical to SEQ ID NO: 18497
  misc_feature (1)..(150): tr|A0A125HSB9|A0A125HSB9_9BURK 6-carboxy-5,6,7,8-tetrah ydropterin synthase OS=Burkholderia territorii OX=15030 55 GN=WT83_22990 PE=4 SV=1

SEQ ID NO: 18535 - protein, 150 aa, Burkholderia territorii
  misc_feature (1)..(150): tr|A0A105W2I9|A0A105W2I9_9BURK 6-carboxy-5,6,7,8-tetrah ydropterin synthase OS=Burkholderia territorii OX=15030 55 GN=WT27_22515 PE=4 SV=1
MLITRKLEFDAGHRIPDHRSQCRNLHGHRYVLEVTLRGDLVDTEGAPDRGMVMDFADVKALAVEHLVDKWDHAFLVYARDEVVRSFLEQMADHKTVVLDRIPTVENLAAIAFDILANVYDAHYGVNLRLERVRLYETPNCWADVERQPGR

SEQ ID NO: 18536 - protein, 150 aa, Burkholderia thailandensis
  misc_feature (1)..(150): tr|Q2T2A2|Q2T2A2_BURTA 6-pyruvoyl tetrahydrobiopterin s ynthase, putative OS=Burkholderia thailandensis (strain ATCC 700388 / DSM 13276 / CIP 106301 / E264) OX=271848 GN=BTH_I0139 PE=4 SV=1
MLITRKLEFDAGHRIPDHRSQCRNLHGHRYVLEITLRGDLVETEGAPDRGMVMDFADVKGLAMEHLVSKWDHAFLVYARDEIVRSFLEKMADHKTVVLDRIPTVENLAAIAFDILANVYDAHYGVNLRLERVRLYETPNCWADVERDPRV

SEQ ID NO: 18537 - protein, 150 aa, Burkholderia thailandensis; identical to SEQ ID NO: 18536
  misc_feature (1)..(150): tr|A0A1B4JZT2|A0A1B4JZT2_BURTH 6-carboxytetrahydropteri n synthase QueD OS=Burkholderia thailandensis OX=57975 GN=queD PE=4 SV=1

SEQ ID NO: 18538 - protein, 150 aa, Burkholderia ubonensis
  misc_feature (1)..(150): tr|A0A105ZF61|A0A105ZF61_9BURK 6-carboxy-5,6,7,8-tetrah ydropterin synthase OS=Burkholderia ubonensis OX=101571 GN=WK95_00175 PE=4 SV=1
MLITRKLEFDAGHRIPDHRSQCRNLHGHRYVLEITLRGDLVDTEGAPDRGMVMDFADVKALAMEHLVSKWDHAFLVYARDEVVRSFLERMADHKTVVIDRIPTVENLAAIAFDILANVYDAHYGINLRLERVRLYETPNCWADVEREPGR

SEQ ID NO: 18539 - protein, 150 aa, Burkholderia ubonensis; identical to SEQ ID NO: 18533
  misc_feature (1)..(150): tr|A0A124V862|A0A124V862_9BURK 6-carboxy-5,6,7,8-tetrah ydropterin synthase OS=Burkholderia ubonensis OX=101571 GN=queD PE=4 SV=1

SEQ ID NO: 18540 - protein, 150 aa, Burkholderia vietnamiensis
  misc_feature (1)..(150): tr|A4JIT9|A4JIT9_BURVG Uncharacterized protein OS=Burkh olderia vietnamiensis (strain G4 / LMG 22486) OX=269482 GN=Bcep1808_3201 PE=4 SV=1
MLITRKLEFDAGHRIPDHRSQCRNLHGHRYVLEVTLRGDLVDTEGAPDRGMVMDFADVKALAVEHLVDKWDHAFLVYARDEVVRSFLEQMADHKTVVLDRIPTVENLAAIAFDILAHVYDAHYGVNLRLERVRLYETPNCWADVEREPSR

SEQ ID NO: 18541 - protein, 150 aa, Burkholderia vietnamiensis; identical to SEQ ID NO: 18540
  misc_feature (1)..(150): tr|A0A124QFX2|A0A124QFX2_BURVI 6-carboxy-5,6,7,8-tetrah ydropterin synthase OS=Burkholderia vietnamiensis OX=60 552 GN=BvRS1_36330 PE=4 SV=1

SEQ ID NO: 18542 - protein, 158 aa, Burkholderiaceae bacterium
  misc_feature (1)..(158): tr|A0A0F0DAS8|A0A0F0DAS8_9BURK 6-carboxy-5,6,7,8-tetrah ydropterin synthase OS=Burkholderiaceae bacterium 26 OX =1619951 GN=UB44_24785 PE=4 SV=1
MTKTVSITRRLEFDAGHRIPSHAGQCRNLHGHRYQLELTLTGEVLHNDKAADDGMILDFGDVKQLANKHLVDLWDHAFLVYRGDTKLVEFLNAMEGGHKTVVLNDVPTVENLAQIAFDILEPVFRNTFGHHLRLSKLVLYETPNCWADVKLARPHEQD

SEQ ID NO: 18543 - protein, 153 aa, Burkholderiaceae bacterium
  misc_feature (1)..(153): tr|A0A521ZFH3|A0A521ZFH3_9BURK 6-carboxytetrahydropteri n synthase OS=Burkholderiaceae bacterium OX=2030806 GN= EPO06_03780 PE=4 SV=1
MKTELLTITRKIEFDAGHRIPDHGSQCRNMHGHRYVLEATVTGEVHQRDGDPENGMVTDFSSLKQLMLESVGNPWDHAFLVYRNDREVLNFLHSLPEHKTVVLDAVPTAENLVRIAAAQLTQALRERYGNAVTLVNLRLYETPNCWADVQPQR

SEQ ID NO: 18544 - protein, 131 aa, Burkholderiales bacterium
  misc_feature (1)..(131): tr|A0A257CVN7|A0A257CVN7_9BURK 6-carboxy-5,6,7,8-tetrah ydropterin synthase OS=Burkholderiales bacterium PBB3 O X=2015565 GN=CFE43_04685 PE=3 SV=1
MSTQQRQAAAGGPYFEISQRFFFDAAHTLKREIEAEGSRRIHGHTYNAEITLGGAPDPETGMVVDLGLVRQAIEQLRPQLDHHLLDEVPDLGVPTLENLCAYIWRALQPSLPALTQVRVWRDGMGDSCTLR

SEQ ID NO: 18545 - protein, 121 aa, Burkholderiales bacterium
  misc_feature (1)..(121): tr|A0A2G6U0K8|A0A2G6U0K8_9BURK 6-carboxy-5,6,7,8-tetrah ydropterin synthase OS=Burkholderiales bacterium 23 OX= 2035215 GN=CLU98_4676 PE=3 SV=1
MQFTVHQRFFFDAAHTLERAIETESSRRIHGHTYYAEVSVTGPRNPDNGMVIDLGYLRSRLKTLGDALDHRFLDEIPGLGKPTLENLCLFIADSLADLQPAPSRIRVWRDSIGDGCVLDLN

SEQ ID NO: 18546 - protein, 119 aa, Buttiauxella agrestis
  misc_feature (1)..(119): tr|A0A381C3R6|A0A381C3R6_9ENTR 6-carboxy-5,6,7,8-tetrah ydropterin synthase OS=Buttiauxella agrestis OX=82977 G N=queD PE=3 SV=1
MTTTLFKDFTFEAAHHLPHVPEGHKCGRLHGHSFMVRLEITGEVDPYTGWIMDFSELKAAFKPTYDRLDHYYLNDIPGLENPTSEVLAKWIWDEMKPIVPLLSAVMVKETCTAGCVYKG

SEQ ID NO: 18547 - protein, 119 aa, Buttiauxella agrestis; identical to SEQ ID NO: 18546
  misc_feature (1)..(119): tr|A0A085G430|A0A085G430_9ENTR 6-carboxy-5,6,7,8-tetrah ydropterin synthase OS=Buttiauxella agrestis ATCC 33320 OX=1006004 GN=queD PE=3 SV=1

SEQ ID NO: 18548 - protein, 85 aa, Buttiauxella brennerae
  misc_feature (1)..(85): tr|A0A1B7ILK5|A0A1B7ILK5_9ENTR Queuosine biosynthesis, PTPS-I OS=Buttiauxella brennerae ATCC 51605 OX=1354251 GN=M975_2905 PE=4 SV=1
MVRLEITGEVDPYTGWIMDFSELKAAFKPTYDRLDHYYLNDIPGLENPTSEVLAKWIWDEMKPIVPLLSSVMVKETCTAGCVYKG

SEQ ID NO: 18549 - protein, 119 aa, Buttiauxella gaviniae
  misc_feature (1)..(119): tr|A0A1B7I351|A0A1B7I351_9ENTR 6-carboxy-5,6,7,8-tetrah ydropterin synthase OS=Buttiauxella gaviniae ATCC 51604 OX=1354253 GN=M977_01324 PE=3 SV=1
MTTTLFKDFTFEAAHHLPHVPEGHKCGRLHGHSFMVRLEITGEVDPYTGWIMDFSELKAAFKPTYDRLDHYYLNDIPGLENPTSEVLAKWIWDEMKPIVPLLSSVMVKETCTAGCVYKG

SEQ ID NO: 18550 - protein, 119 aa, Buttiauxella izardii
  misc_feature (1)..(119): tr|A0A3A5JWK6|A0A3A5JWK6_9ENTR 6-carboxy-5,6,7,8-tetrah ydropterin synthase OS=Buttiauxella izardii OX=82991 GN =queD PE=3 SV=1
MSTTLFKDFTFEAAHHLPHVPEGHKCGRLHGHSFMVRLEITGEVDPYTGWIMDFSELKAAFKPTYDRLDHYYLNDIPGLENPTSEVLAKWIWDEMKPLVPLLSAVMVKETCTAGCVYKG

SEQ ID NO: 18551 - protein, 119 aa, Buttiauxella noackiae
  misc_feature (1)..(119): tr|A0A1B7HLU3|A0A1B7HLU3_9ENTR 6-carboxy-5,6,7,8-tetrah ydropterin synthase OS=Buttiauxella noackiae ATCC 51607 OX=1354255 GN=M979_2619 PE=3 SV=1
MTTTLFKDFTFEAAHHLPHVPEGHKCGRLHGHSFMVRLEITGEVDPYTGWIMDFSELKAAFKPTYDRLDHYYLNDIPGLENPTSEVLAKWIWDEMKPLVPLLSSVMVKETCTAGCVYKG

SEQ ID NO: 18552 - protein, 119 aa, Buttiauxella sp.; identical to SEQ ID NO: 18549
  misc_feature (1)..(119): tr|A0A4R8F396|A0A4R8F396_9ENTR 6-carboxy-5,6,7,8-tetrah ydropterin synthase OS=Buttiauxella sp. BIGb0552 OX=248 5120 GN=EDF88_1993 PE=3 SV=1

SEQ ID NO: 18553 - protein, 119 aa, Buttiauxella sp.
  misc_feature (1)..(119): tr|A0A4P5QC92|A0A4P5QC92_9ENTR 6-carboxy-5,6,7,8-tetrah ydropterin synthase OS=Buttiauxella sp. A111 OX=2563088 GN=queD PE=3 SV=1
MSTTLFKDFTFEAAHRLPHVPEGHKCGRLHGHSFMVRLEITGEVDPYTGWIMDFSELKAAFKPTYNRLDHYYLNDIPGLENPTSEVLAKWIWDEMKPIVPLLSAVMVKETCTAGCVYKG

SEQ ID NO: 18554 - protein, 119 aa, Buttiauxella warmboldiae
  misc_feature (1)..(119): tr|A0A3N5DJD2|A0A3N5DJD2_9ENTR 6-carboxy-5,6,7,8-tetrah ydropterin synthase OS=Buttiauxella warmboldiae OX=8299 3 GN=queD PE=3 SV=1
MTTTLFKDFTFEAAHHLPHVPEGHKCGRLHGHSFMVRLEITGEVDPYTGWIMDFSELKAAFKPIYDRLDHYYLNDIPGLENPTSEVLAKWIWDQMKPIVPLLSAVMVKETCTAGCVYKG

SEQ ID NO: 18555 - protein, 142 aa, Butyricicoccus porcorum
  misc_feature (1)..(142): tr|A0A252F719|A0A252F719_9CLOT 6-carboxy-5,6,7,8-tetrah ydropterin synthase OS=Butyricicoccus porcorum OX=19456 34 GN=CBW42_03000 PE=3 SV=1
MFYLKAESSFDAAHFLAHYEGKCHNIHGHHWIVQLRVCGEALQDTVQERGMLVDFSQLKGDLKAIVEPMDHTLIYEAGTLRAGTRDALAEDGFSLTEIPFRPTAEHFAKYFFERASALGYHVAEATVYETPNNCASYTGEED

SEQ ID NO: 18556 - protein, 188 aa, Butyricicoccus pullicaecorum
  misc_feature (1)..(188): tr|R8VTW0|R8VTW0_9CLOT Uncharacterized protein OS=Butyr icicoccus pullicaecorum 1.2 OX=1203606 GN=HMPREF1526_02 227 PE=4 SV=1
MRSITTLDLQYAHRFYGFKGEAQYLHGHTGVLTIEVEDSVEPGVNMVFPCNEIQKTAWEVLKNFDHALILREDDPLLPAVLKVYEEQGIRDGAPQNQMKGPAFKTELATAYPECRLVVTKETLTVEGMIKIVYDLLKDKLNIAKITFTSGVNAASADFSTHNQIDRCPLCGIALNEHGVCPKCGYKKQ

SEQ ID NO: 18557 - protein, 188 aa, Butyricicoccus pullicaecorum
  misc_feature (1)..(188): tr|A0A1Y4LUD2|A0A1Y4LUD2_9CLOT Rubredoxin OS=Butyricico ccus pullicaecorum OX=501571 GN=B5F15_02910 PE=4 SV=1
MRSITTLDLQYAHRFYGFKGEAQYLHGHTGVLTIEVEDSVEPGVNMVFPCNEIQKTAWEVLKNFDHALILREDDPLLPAVLKVYEEQGVRDGAPQNQMKGPAFKTELATAYPECRLVVTKETLTVEGMIKIVYDLLKDKLNIAKITFTSGVNAASADFTTHNQIDRCPLCGIALNEHGICPKCGYKKQ

SEQ ID NO: 18558 - protein, 182 aa, Butyricimonas faecalis
  misc_feature (1)..(182): tr|A0A3Q9IMG5|A0A3Q9IMG5_9BACT 6-carboxytetrahydropteri n synthase OS=Butyricimonas faecalis OX=2093856 GN=D8S8 5_03610 PE=4 SV=1
MLIRKLFKFEGAHIVRNCSSHRCRENIHGHSYIVEVFITSDKLDRGYMVMDFVLLDKVKELVDSFDHTYSLWQEESDDLKTFIYKYNRRVAEIPVSPSAEGYALLLLYLIDKILQNTEHKNGEGNVRLSSVRVHETATGYAEAFREDLKLVNFNIHDIRFSEAIREEWKDELWWEEMKKDKN

SEQ ID NO: 18559 - protein, 178 aa, Butyricimonas sp.
  misc_feature (1)..(178): tr|A0A3D2E0F7|A0A3D2E0F7_9BACT 6-carboxytetrahydropteri n synthase OS=Butyricimonas sp. OX=1969738 GN=DFK15_161 50 PE=4 SV=1
MLIRKLFKFEGAHIVRNCSSHRCRENIHGHSYIVEVFITSDKLDRGYMVIDFVLLDKVKELVDSFDHTYSLWQEESDELKTFIYKYNRRVAEIPVSPSAEGYALLFLYLIDKILQNTEHKNGEGNVRLSSVRVHETATGYAEAFREDLQLVNFNIHDIRFSEAIREEWKDDQWWEGIR

SEQ ID NO: 18560 - protein, 178 aa, Butyricimonas sp.
  misc_feature (1)..(178): tr|A0A1Y3W841|A0A1Y3W841_9BACT 6-carboxytetrahydropteri n synthase QueD OS=Butyricimonas sp. An62 OX=1965649 GN =B5G13_05960 PE=4 SV=1
MVIRKLFKFEGAHIVRNCSSHRCRENIHGHSYIVEVFITSDKLDRGYMVMDFVLLDKVKELVDSFDHTYSLWQEESDELKTFVYKYNRRVAEIPVSPSAEGYALLFFYLIDKILQNTEHKNGEGNVQLSSVRVHETATGYAEAFREDLKLVNFNVHDIRFSEAIREEWKNEQWWEGIR

SEQ ID NO: 18561 - protein, 183 aa, Butyricimonas synergistica
  misc_feature (1)..(183): tr|A0A1U7LAV0|A0A1U7LAV0_9BACT 6-carboxytetrahydropteri n synthase QueD OS=Butyricimonas synergistica OX=544644 GN=BHV81_09995 PE=4 SV=1
MVIRKLFKFEGAHIVRNCSSHRCRENIHGHSYIVEVFITSDKLDRGYMVMDFVLLDKVKELVDSFDHTYSLWQEESDELKTFVYKYNRRVAEIPVSPSAEGYALLFLYLIDKILQNTEHKNGEGNVQLSSVRVHETATGYAEAFREDLKLVNFNVHDIRFSEAIREEWKNDQWWEGIKIKDKN

SEQ ID NO: 18562 - protein, 178 aa, Butyricimonas virosa
  misc_feature (1)..(178): tr|A0A413IMR8|A0A413IMR8_9BACT 6-carboxytetrahydropteri n synthase OS=Butyricimonas virosa OX=544645 GN=DXA50_1 0500 PE=4 SV=1
MLIRKLFKFEGAHIVRNCSSHRCRENIHGHSYIVEVFITSDKLDRGYMVMDFVLLDKVKELVDSFDHTYSLWQEESDELKTFIYKYNRRVAEIPVSPSAEGYALLFLYLIDKILQNTEHKNGEGNVRLSSVRVHETATGYAEAFREDLQLVNFNIHDIRFSEAIREEWKDDQWWEGIR

SEQ ID NO: 18563 - protein, 178 aa, Butyricimonas virosa; identical to SEQ ID NO: 18559
  misc_feature (1)..(178): tr|A0A415QRL2|A0A415QRL2_9BACT 6-carboxytetrahydropteri n synthase OS=Butyricimonas virosa OX=544645 GN=DWZ68_0 0600 PE=4 SV=1

SEQ ID NO: 18564 - protein, 139 aa, Butyrivibrio crossotus
  misc_feature (1)..(139): tr|D4RWH6|D4RWH6_9FIRM 6-carboxy-5,6,7,8-tetrahydropter in synthase OS=Butyrivibrio crossotus DSM 2876 OX=51168 0 GN=queD PE=3 SV=1
MYSLISEHSFDAAHFLKGYEGKCSNIHGHRWRVVVEIQGDALKKDSHTRGMLIDFDELKETIKKEVDYFDHCLIIEKNSLKENTYNALKDEGFRIVELDFRSTAENFSKYFYDRISEKGYQVKCVSVYETPNDCAVYGE

SEQ ID NO: 18565 - protein, 139 aa, Butyrivibrio crossotus
  misc_feature (1)..(139): tr|R5LHJ1|R5LHJ1_9FIRM 6-carboxy-5,6,7,8-tetrahydropter in synthase OS=Butyrivibrio crossotus CAG:259 OX=126306 2 GN=BN569_00097 PE=3 SV=1
MYSLISEHSFDAAHFLKGYEGKCSNIHGHRWRVVVEIQGDALKKDSHTRGMLIDFDELKETIKKEVDYFDHCLIIEKNSLKENTYNALKDEGFRIVELDFRSTAENFSKYFYDRIIEKGYQVKCVSVYETPNNCAVYGE

SEQ ID NO: 18566 - protein, 140 aa, Butyrivibrio fibrisolvens
  misc_feature (1)..(140): tr|D4IW47|D4IW47_BUTFI 6-carboxy-5,6,7,8-tetrahydropter in synthase OS=Butyrivibrio fibrisolvens 16/4 OX=657324 GN=CIY_23340 PE=3 SV=1
MYYLTAEASFDGAHFLAGYEGKCSNLHGHRWRVILKIKTDKLQEEGQQRGMVVDFGDVKNALKKETDLFDHSFIYEEGSLKEATVAALQAENFEMHVVPFRPTAENFAKYFFDKFKEYGFTVAEVTVYETPNNCASYSED

SEQ ID NO: 18567 - protein, 139 aa, Butyrivibrio sp.
  misc_feature (1)..(139): tr|A0A350RPY1|A0A350RPY1_9FIRM 6-carboxy-5,6,7,8-tetrah ydropterin synthase OS=Butyrivibrio sp. OX=28121 GN=que D PE=3 SV=1
MYSLISEHSFDAAHFLKGYEGKCSNIHGHRWRVVVEIQGDALKKDSHTRGMLIDFDELKETIKKEVDYFDHCLIIEKNSLKENTYNALKDEGFRIVELDFRSTAENFSKYFYDRISEKGYQVKRVSVYETPNNCAVYGE

SEQ ID NO: 18568 - protein, 168 aa, Butyrivibrio sp.
  misc_feature (1)..(168): tr|A0A3A9SUX0|A0A3A9SUX0_9FIRM 6-pyruvoyl tetrahydrobio pterin synthase OS=Butyrivibrio sp. CB08 OX=2364879 GN= D6855_03055 PE=4 SV=1
MQSKRRSELRRNKVRNDALREYKFKLYLNANHFVIFNGQKGESHPHTWEFAIELLVDKDKFIMFLDFEKAIDDYLEPFQDKLLNDIKPFDTIIPTLENMLDYFAPIFYEEIKKIGGLLIKIEASETPSRTYVYSFRGRDEYLNDLNEHMNTALSNIVHSIVEESLDEE

SEQ ID NO: 18569 - protein, 159 aa, Bythopirellula goksoyri
  misc_feature (1)..(159): tr|A0A5B9QFC6|A0A5B9QFC6_9PLAN 6-pyruvoyl tetrahydropte rin synthase OS=Bythopirellula goksoyri OX=1400387 GN=P r1d_49400 PE=4 SV=1
MIIQKQYKFYAAHRNEELEDKCRNLHGHRYGITCFFEVERTGSLSTLFGDFDRKIEPFLKSEYDHGMMVNIKDTLYETLMNHVLRTGEKLKLKRFSQPTTVENLAHQLFTEITDMGFRLSCLEVRETDTSVVSYTREDWVTDSRYFANSKTADTESLSE

SEQ ID NO: 18570 - protein, 159 aa, Bythopirellula goksoyri
  misc_feature (1)..(159): tr|A0A5B9Q5Y3|A0A5B9Q5Y3_9PLAN 6-pyruvoyl tetrahydropte rin synthase OS=Bythopirellula goksoyri OX=1400387 GN=P r1d_16730 PE=4 SV=1
MSESFHVRLSKERFVFSAAHFITFNGDICEPLHGHNYHVTAEVNGPLDENQYVVDFILVRDALQKIVDSLDHRMLLPLEHPTIGVTVEGEEVEVTHGVRRWVFPRQDCVLLPMANTTAELLAKYIATLLLETLPDCTPSRLSVGVDECDGQWGYYETNP

SEQ ID NO: 18571 - protein, 148 aa, Caballeronia arationis
  misc_feature (1)..(148): tr|A0A158CER1|A0A158CER1_9BURK 6-carboxy-5,6,7,8-tetrah ydropterin synthase OS=Caballeronia arationis OX=177714 2 GN=AWB81_03996 PE=3 SV=1
MQTITRKLEFDAGHRIPDHRSQCRNLHGHRYVLEITLQGDLVDTEGAPDRGMVMDFADVKSLAMEHLVNKWDHAFLVYEGDVKVREFLDSMAGHKTVVLDRIPTVENMAAVAFGILAEVYDAHYGVNLKLKRVRLYETPNCWADVERA

SEQ ID NO: 18572 - protein, 148 aa, Caballeronia arvi
  misc_feature (1)..(148): tr|A0A158HGE9|A0A158HGE9_9BURK 6-carboxy-5,6,7,8-tetrah ydropterin synthase OS=Caballeronia arvi OX=1777135 GN= AWB74_01782 PE=3 SV=1
MQTITRKLEFDAGHRIPDHRSQCRNLHGHRYVLEITLQGDLVDVEGAPDRGMVMDFADVKALAMEHLVNKWDHAFIVYEGDVKVREFLQTLSDHKTVVLDRIPTVENLAAVAFNILAEVYDAHYGVNLKLKRVRLYETPNCWADVERG

SEQ ID NO: 18573 - protein, 148 aa, Caballeronia calidae
  misc_feature (1)..(148): tr|A0A157Z8I5|A0A157Z8I5_9BURK 6-carboxy-5,6,7,8-tetrah ydropterin synthase OS=Caballeronia calidae OX=1777139 GN=AWB78_00184 PE=3 SV=1
MQTITRKLEFDAGHRIPDHRSQCRNLHGHRYVLEITLQGELVDVEGAPDRGMVMDFADVKALAMEHLVNKWDHAFIVYEGDVKVREFLQTLSDHKTVVLDRIPTVENLAAVAFDLLADVYDAHYGVNLKLKRVRLYETPNCWADVERG

SEQ ID NO: 18574 - protein, 148 aa, Caballeronia catudaia
  misc_feature (1)..(148): tr|A0A157Z586|A0A157Z586_9BURK 6-carboxy-5,6,7,8-tetrah ydropterin synthase OS=Caballeronia catudaia OX=1777136 GN=AWB75_00211 PE=3 SV=1
MQTITRKLEFDAGHRIPDHRSQCRNLHGHRYVLEITLQGDLVDVEGAPDRGMVMDFADVKALAMDHLVNKWDHAFIVYEGDVKVREFLQTLSDHKTVVLDRIPTVENLAAVAFNILADVYDAHYGVNLKLKRVRLYETPNCWADVERG

SEQ ID NO: 18575 - protein, 148 aa, Caballeronia choica
  misc_feature (1)..(148): tr|A0A158FGE7|A0A158FGE7_9BURK 6-carboxy-5,6,7,8-tetrah ydropterin synthase OS=Caballeronia choica OX=326476 GN =AWB68_00614 PE=3 SV=1
MQTITRKLEFDAGHRIPDHRSQCRNLHGHRYVLEITLQGDLVDTEGAPDRGMVMDFADVKSLAMEHLVNKWDHAFIVYEGDGKVREFLDSMAGHKTVVLDRIPTVENMAAVAFDILADVYDAHYGVNLKLKRVRLYETPNCWADVERA

SEQ ID NO: 18576 - protein, 148 aa, Caballeronia cordobensis
  misc_feature (1)..(148): tr|A0A158F325|A0A158F325_9BURK 6-carboxy-5,6,7,8-tetrah ydropterin synthase OS=Caballeronia cordobensis OX=1353 886 GN=AWB70_00458 PE=3 SV=1
MQTITRKLEFDAGHRIPDHRSQCRNLHGHRYVLEITLQGDLVDVEGAPDRGMVMDFADVKALAMEHLVNKWDHAFIVYEGDVKVREFLQTLSDHKTVVLDRIPTVENLAAVAFDILADVYDAHYGVNLKLKRLRLYETPNCWADVERG

SEQ ID NO: 18577 - protein, 148 aa, Caballeronia fortuita
  misc_feature (1)..(148): tr|A0A157Z6R5|A0A157Z6R5_9BURK 6-carboxy-5,6,7,8-tetrah ydropterin synthase OS=Caballeronia fortuita OX=1777138 GN=AWB77_00318 PE=3 SV=1
MQTITRKLEFDAGHRIPDHRSQCRNLHGHRYVLEITLQGDLVDVEGAPDRGMVMDFADVKALAMEHLVNKWDHAFIVYEGDAKVREFLQTLSDHKTVVLDRIPTVENLAAVAFNILAEVYDAHYGVNLKLKRVRLYETPNCWADVERG

SEQ ID NO: 18578 - protein, 148 aa, Caballeronia glathei
  misc_feature (1)..(148): tr|A0A069PHY5|A0A069PHY5_9BURK 6-carboxy-5,6,7,8-tetrah ydropterin synthase OS=Caballeronia glathei OX=60547 GN =BG61_26285 PE=3 SV=1
MQTITRKLEFDAGHRIPDHRSQCRNLHGHRYVLEITLQGDLVDTEGAPDRGMVMDFADVKSLAMEHLVNKWDHAFLVYEGDVKVREFLDSMAGHKTVVLDRIPTVENMAAVAFDILAGVYDAHYGVNLKLKRVRLYETPNCWADVERG

SEQ ID NO: 18579 - protein, 148 aa, Caballeronia glebae
  misc_feature (1)..(148): tr|A0A157ZQI1|A0A157ZQI1_9BURK 6-carboxy-5,6,7,8-tetrah ydropterin synthase OS=Caballeronia glebae OX=1777143 G N=AWB82_01096 PE=3 SV=1
MQTITRKLEFDAGHRIPDHRSQCRNLHGHRYVLEITLQGDLVDVEGAPDRGMVMDFADVKALAMEHLVNKWDHAFIVYEGDVKVREFLQTLPDHKTVVLDRIPTVENLAAVAFNILADVYDAHYGVNLKLKRLRLFETPNCWADVERD

SEQ ID NO: 18580 - protein, 121 aa, Caballeronia glebae
  misc_feature (1)..(121): tr|A0A158CZS2|A0A158CZS2_9BURK 6-carboxy-5,6,7,8-tetrah ydropterin synthase OS=Caballeronia glebae OX=1777143 G N=queD PE=3 SV=1
MNYELSQKFYFEAAHTLHREIDQEGSRRIHGHTYHAEVYLRGLPDSKTGMLVDLGLLRLEIERIRDLLDHRFLDEVSGLGPATLENLSGFILRKLAEYVPSITKVKVERHATGDACVAFAD

SEQ ID NO: 18581 - protein, 148 aa, Caballeronia grimmiae
  misc_feature (1)..(148): tr|A0A069NM63|A0A069NM63_9BURK 6-carboxy-5,6,7,8-tetrah ydropterin synthase OS=Caballeronia grimmiae OX=1071679 GN=BG57_17960 PE=3 SV=1
MQTITRKLEFDAGHRIPDHRSQCRNLHGHRYVLEITLQGDLVDVEGAPDRGMVMDFADVKSLAMQHLVNKWDHAFIVYEGDAKVREFLQSLADHKTVVFDRIPTVENMAAVAFRILADVYDAHYGVNLKLKRLRLYETPNCWADVERE

SEQ ID NO: 18582 - protein, 148 aa, Caballeronia humi
  misc_feature (1)..(148): tr|A0A158GEG9|A0A158GEG9_9BURK 6-carboxy-5,6,7,8-tetrah ydropterin synthase OS=Caballeronia humi OX=326474 GN=A WB65_01899 PE=3 SV=1
MQTITRKLEFDAGHRIPDHRSQCRNLHGHRYVLEITLQGDLVDTEGAPDRGMVMDFADVKSLAMEHLVNKWDHAFLVYEGDTQVREFLDSMAGHKTVVLDRIPTVENMAAVAFGILADVYDAHYGVNLKLKRVRLYETPNCWADVERA

SEQ ID NO: 18583 - protein, 148 aa, Caballeronia hypogeia
  misc_feature (1)..(148): tr|A0A157Z7C8|A0A157Z7C8_9BURK 6-carboxy-5,6,7,8-tetrah ydropterin synthase OS=Caballeronia hypogeia OX=1777140 GN=AWB79_00440 PE=3 SV=1
MQTITRKLEFDAGHRIPDHRSQCRNLHGHRYVLEISLQGDLVDVEGAPDRGMVMDFADVKALAMEHLVNKWDHAFIVYEGDVKVREFLQTLSDHKTVVLDRIPTVENLAAVAFDILANVYDAHYGVNLKLKRVRLYETPNCWADVERT

SEQ ID NO: 18584 - protein, 148 aa, Caballeronia jiangsuensis
  misc_feature (1)..(148): tr|A0A038GMU4|A0A038GMU4_9BURK 6-carboxy-5,6,7,8-tetrah ydropterin synthase OS=Caballeronia jiangsuensis OX=145 8357 GN=BG58_34545 PE=3 SV=1
MQTITRKLEFDAGHRIPDHRSQCRNLHGHRYVLEITLQGDLVDVEGAPDRGMVMDFADVKALAMEHLVNKWDHAFIVYEGDVKVREFLQTLSDHKTVVLDRIPTVENLAAVAFNILAEVYDAHYGVNLKLKRVRLFETPNCWADVERG

SEQ ID NO: 18585 - protein, 148 aa, Caballeronia megalochromosomata
  misc_feature (1)..(148): tr|A0A149RNZ6|A0A149RNZ6_9BURK 6-carboxy-5,6,7,8-tetrah ydropterin synthase OS=Caballeronia megalochromosomata OX=1399969 GN=CR51_02860 PE=3 SV=1
MQTITRKLEFDAGHRIPDHRSQCRNLHGHRYVLEITLQGDLVDVEGAPDRGMVMDFADVKALAMDHLVNKWDHAFIVYEGDVKVREFLQTLSDHKTVVLDRIPTVENLAAVAFNILADVYDAHYGINLKLKRVRLYETPNCWADVERG

SEQ ID NO: 18586 - protein, 148 aa, Caballeronia mineralivorans
  misc_feature (1)..(148): tr|A0A0J1CQT1|A0A0J1CQT1_9BURK 6-carboxy-5,6,7,8-tetrah ydropterin synthase OS=Caballeronia mineralivorans PML1 (12) OX=908627 GN=EOS_27490 PE=4 SV=1
MQTITRKLEFDAGHRIPDHRSQCRNLHGHRYVLEITLQGELVETEGAPDRGMVMDFADVKALAMEHLVNKWDHAFIVYARDEKVRGFLESMAEHKTIVLDRIPTVENLAAEAFRILSGVYDAHYGVNLKLKRIRLYETPNCWADVEGI

SEQ ID NO: 18587 - protein, 148 aa, Caballeronia pedi
  misc_feature (1)..(148): tr|A0A158A2F0|A0A158A2F0_9BURK 6-carboxy-5,6,7,8-tetrah ydropterin synthase OS=Caballeronia pedi OX=1777141 GN= AWB80_01725 PE=3 SV=1
MQTITRKLEFDAGHRIPDHRSQCRNLHGHRYVLEITLQGDLVDVEGAPDRGMVMDFADVKALAMEHLVNKWDHAFIVYEGDVKVREFLQTLSDHKTVVLDRIPTVENLAAVAFNILANVYDAHYGVNLKLNRVRLYETPNCWADVERN

SEQ ID NO: 18588 - protein, 148 aa, Caballeronia peredens
  misc_feature (1)..(148): tr|A0A158FZY1|A0A158FZY1_9BURK 6-carboxy-5,6,7,8-tetrah ydropterin synthase OS=Caballeronia peredens OX=1777132 GN=AWB71_01357 PE=3 SV=1
MQTITRKLEFDAGHRIPDHRSQCRNLHGHRYVLEITLRGDLVDVEGAPDRGMVMDFADVKALAMEHLVNKWDHAFIVYEGDVKVREFLQTLADHKTVVLDRIPTVENMAAVAFNILAEVYDAHYGVNLKLSRVRLYETPNCWADVERG

SEQ ID NO: 18589 - protein, 148 aa, Caballeronia ptereochthonis
  misc_feature (1)..(148): tr|A0A158CTZ0|A0A158CTZ0_9BURK 6-carboxy-5,6,7,8-tetrah ydropterin synthase OS=Caballeronia ptereochthonis OX=1 777144 GN=AWB83_04672 PE=3 SV=1
MQTITRKLEFDAGHRIPDHRSQCRNLHGHRYVVEITLQGDLVDVEGAPDRGMVMDFADVKALAMEHLVNKWDHAFIVYEGDVKVREFLQTLSDHKTVVLDRIPTVENMAAVAFAILADVYDAHYGVNLKLKRLRLYETPNCWADVERG

SEQ ID NO: 18590 - protein, 148 aa, Caballeronia sordidicola
  misc_feature (1)..(148): tr|A0A158FAS6|A0A158FAS6_9BURK 6-carboxy-5,6,7,8-tetrah ydropterin synthase OS=Caballeronia sordidicola OX=1963 67 GN=AWB64_01055 PE=3 SV=1
MQTITRKLEFDAGHRIPDHRSQCRNLHGHRYVLEITLQGELVETEGAPDRGMVMDFADVKALAMEHLVNKWDHAFIVYARDEIVRGFLEQMADHKTVVLDRIPTVENLAAEAFRILSGVYDAHYGVNLKLKRIRLYETPNCWADVEGV

SEQ ID NO: 18591 - protein, 148 aa, Caballeronia sordidicola
  misc_feature (1)..(148): tr|A0A226WJR8|A0A226WJR8_9BURK 6-carboxy-5,6,7,8-tetrah ydropterin synthase OS=Caballeronia sordidicola OX=1963 67 GN=BSU04_46435 PE=3 SV=1
MQTITRKLEFDAGHRIPDHRSQCRNLHGHRYVLEITLQGELVETEGAPDRGMVMDFADVKALAMEHLVNKWDHAFIVYARDEVVRSFLEKMADHKTVVLDRIPTVENLAAEAFRILSGVYNDHYGVDLKLKRVRLYETPNCWADVEGV

SEQ ID NO: 18592 - protein, 148 aa, Caballeronia telluris
  misc_feature (1)..(148): tr|A0A158JAX4|A0A158JAX4_9BURK 6-carboxy-5,6,7,8-tetrah ydropterin synthase OS=Caballeronia telluris OX=326475 GN=AWB66_04004 PE=3 SV=1
MQTITRKLEFDAGHRIPDHRSQCRNLHGHRYVLEITLQGDLVDTEGAPDRGMVMDFADVKSLAMEHLVNKWDHAFLVYEGDAKVREFLDSMAGHKTVVLDRIPTVENMAAVAFGILADVYDAHYGVNLKLKRVRLYETPNCWADVERA

SEQ ID NO: 18593 - protein, 148 aa, Caballeronia temeraria
  misc_feature (1)..(148): tr|A0A157ZI63|A0A157ZI63_9BURK 6-carboxy-5,6,7,8-tetrah ydropterin synthase OS=Caballeronia temeraria OX=177713 7 GN=AWB76_00705 PE=3 SV=1
MQTITRKLEFDAGHRIPDHRSQCRNLHGHRYVLEITLQGDLVDVEGAPDRGMVMDFADVKALAMEHLVNKWDHAFIVYEGDVKVREFLQTLSDHKTVVLDRIPTVENLAAVAFNILADVYDAHYGINLKLKRVRLFETPNCWADVERG

SEQ ID NO: 18594 - protein, 148 aa, Caballeronia terrestris; identical to SEQ ID NO: 18582
  misc_feature (1)..(148): tr|A0A158JEL0|A0A158JEL0_9BURK 6-carboxy-5,6,7,8-tetrah ydropterin synthase OS=Caballeronia terrestris OX=12263 01 GN=AWB67_03758 PE=3 SV=1

SEQ ID NO: 18595 - protein, 148 aa, Caballeronia turbans
  misc_feature (1)..(148): tr|A0A158FJW3|A0A158FJW3_9BURK 6-carboxy-5,6,7,8-tetrah ydropterin synthase OS=Caballeronia turbans OX=1777134 GN=AWB73_01178 PE=3 SV=1
MQTITRKLEFDAGHRIPDHRSQCRNLHGHRYVLEITLQGDLVDVEGAPDRGMVMDFADVKALAMEHLVNKWDHAFIVYEGDVKVREFLHTLPDHKTVVLDRIPTVENLAAVAFNILAEVYDAHYGVNLKLKRVRLFETPNCWADVERG

SEQ ID NO: 18596 - protein, 148 aa, Caballeronia udeis
  misc_feature (1)..(148): tr|A0A158F8X2|A0A158F8X2_9BURK 6-carboxy-5,6,7,8-tetrah ydropterin synthase OS=Caballeronia udeis OX=1232866 GN =AWB69_00824 PE=3 SV=1
MQTITRKLEFDAGHRIPDHRSQCRNLHGHRYVLEITLQGELVETEGAPDRGMVMDFADVKALAMEHLVNKWDHAFIVYARDEVVRSFLEQMADHKTVVLDRIPTVENLAAEAFRILSGVYNDHYGVDLKLKRVRLYETPNCWADVEGV

SEQ ID NO: 18597 - protein, 148 aa, Caballeronia udeis
  misc_feature (1)..(148): tr|A0A3M0V8E4|A0A3M0V8E4_9BURK 6-carboxy-5,6,7,8-tetrah ydropterin synthase OS=Caballeronia udeis OX=1232866 GN =DFJ53_04738 PE=3 SV=1
MQTITRKLEFDAGHRIPDHRSQCRNLHGHRYVLEITLQGELVETEGAPDRGMVMDFADVKALAMEHLVNKWDHAFIVYAGDEKVRGFLESMAEHKTIVLDRIPTVENLAAEAFRILSGVYDAHYGVNLKLKRIRLYETPNCWADVEGI

SEQ ID NO: 18598 - protein, 134 aa, Caenispirillum bisanense
  misc_feature (1)..(134): tr|A0A286G1Z6|A0A286G1Z6_9PROT 6-pyruvoyl-tetrahydropte rin synthase OS=Caenispirillum bisanense OX=414052 GN=S AMN05421508_101164 PE=4 SV=1
MFSVCVRDHFMIAHSFTGETFGPAQRLHGATYVVDVEFRRPDLDPDGVVVDIGAAHALVKDVLSDLNFRNLDDEPAFAGQNTTTEFLAHAVWRRIAGHVREGTLGPNAQGLAVLKVTLHESHVAWAAYEGALTS

SEQ ID NO: 18599 - protein, 142 aa, Caenispirillum salinarum
  misc_feature (1)..(142): tr|K9GTS0|K9GTS0_9PROT PTPS-like type 4 OS=Caenispirill um salinarum AK4 OX=1238182 GN=C882_0778 PE=4 SV=1
MYSVTVRDHFMIAHSFTGETFGPAQALHGATYTVDLEFRRPRLDPDGVVVDIGAAHALLKDVLSELNFRNLDDEPAFAGQNTTTEFLAGAVFERIARHVHDGALGANAEGLTGMKVTLHESHVAWAAFEGPLNGAASGAEAR

SEQ ID NO: 18600 - protein, 126 aa, Caldalkalibacillus thermarum
  misc_feature (1)..(126): tr|F5LAD1|F5LAD1_CALTT 6-carboxy-5,6,7,8-tetrahydropter in synthase OS=Caldalkalibacillus thermarum (strain TA2 .A1) OX=986075 GN=CathTA2_2866 PE=3 SV=1
MGKYTLVKHFWMACAHAVKGAGKCERIHGHNFKITFCVEGEKLDDNGMLIDFREVKHSLEKKYDHHLLNDFPEFNPDQGGASPSTEKVAEIFFQHIKALCKQKKNQPRLKWVEVQETNEAYARYEE

SEQ ID NO: 18601 - protein, 122 aa, Caldanaerobacter subterraneus
  misc_feature (1)..(122): tr|A0A101FDE0|A0A101FDE0_9THEO 6-carboxy-5,6,7,8-tetrah ydropterin synthase OS=Caldanaerobacter subterraneus OX =911092 GN=XD65_0694 PE=3 SV=1
MKVTKIFTFDSAHNLINYNGKCEELHGHTYKLEVTVEGKPDGEGMVIDFVKLKEIVNEKVVKKLDHKYLNEVLGFNTTCENILLWIWKELEPVFKGDNYHLYKLRLWETPTSFAEITEKDFV

SEQ ID NO: 18602 - protein, 122 aa, Caldanaerobacter subterraneus
  misc_feature (1)..(122): tr|Q8R7N5|Q8R7N5_CALS4 6-carboxy-5,6,7,8-tetrahydropter in synthase OS=Caldanaerobacter subterraneus subsp. ten gcongensis (strain DSM 15242 / JCM 11007 / NBRC 100824 / MB4) OX=273068 GN=TTE2368 PE=3 SV=1
MRVTKIFTFDSAHNLVNYHGKCEELHGHTYRLEVTVEGYPDEEGMVLDFVKLKEIVNEKIIKKLDHKYLNEVLGFNTTCENILLWMWKELEGELKGPNYKLYKLTLWETPTSFAEVTAEDLK

SEQ ID NO: 18603 - protein, 126 aa, Caldanaerobius fijiensis
  misc_feature (1)..(126): tr|A0A1M4ZPA4|A0A1M4ZPA4_9THEO 6-carboxy-5,6,7,8-tetrah ydropterin synthase OS=Caldanaerobius fijiensis DSM 179 18 OX=1121256 GN=SAMN02746089_01461 PE=3 SV=1
MKVTKVFEFDSAHNLINYNGKCEKLHGHTYKLEVTVSGVPDINGLVIDFTLLKSIVNECIIEKLDHQYLNELFDFNTTCENILVWMWNQLYGRLKTDRFELYQLTLWETPTSYATVTKEDMGDVES

SEQ ID NO: 18604 - protein, 125 aa, Caldanaerovirga acetigignens
  misc_feature (1)..(125): tr|A0A1M7LTK4|A0A1M7LTK4_9FIRM 6-carboxy-5,6,7,8-tetrah ydropterin synthase OS=Caldanaerovirga acetigignens OX= 447595 GN=SAMN05660826_02033 PE=3 SV=1
MFLIKEFKFDAAHNLVSYKGKCEKLHGHTYRLVVVLEGVPDREEMIMDFLELKEIVNEKVLKKLDHSYINDIVKQPSAENIAVWVWQQLEEGVRRENCRLYEVQVWETETSGVIYRGENLEGRSK

SEQ ID NO: 18605 - protein, 121 aa, Calderihabitans maritimus
  misc_feature (1)..(121): tr|A0A1Z5HXH9|A0A1Z5HXH9_9THEO 6-carboxy-5,6,7,8-tetrah ydropterin synthase OS=Calderihabitans maritimus OX=124 6530 GN=KKC1_33500 PE=3 SV=1
MFRLTVREQFAAAHQLKNYEGKCARIHGHTWQVEVEVAGETLDEAGMLVDFNELKRSLKEILEDYDHTLLNELADFKEANPTAENLARTIYIRMAARIPEKVKVVQVRVWESPTACAIYHP

SEQ ID NO: 18606 - protein, 120 aa, Caldicellulosiruptor bescii
  misc_feature (1)..(120): tr|B9MNP3|B9MNP3_CALBD 6-carboxy-5,6,7,8-tetrahydropter in synthase OS=Caldicellulosiruptor bescii (strain ATCC BAA-1888 / DSM 6725 / Z-1320) OX=521460 GN=Athe_0440 P E=3 SV=1
MLLKKIFKFDAAHNLTKYNGKCENLHGHTYKLAVTVEGKLDNQDMVIDFVLLKKIVQDEVIDILDHAYINDIIENPTAENIAKWIWKKLSKKIEEQGVKLYEIEVWETEDSSVIYRGEDE

SEQ ID NO: 18607 - protein, 121 aa, Caldicellulosiruptor changbaiensis
  misc_feature (1)..(121): tr|A0A3T0D2C8|A0A3T0D2C8_9FIRM 6-carboxy-5,6,7,8-tetrah ydropterin synthase OS=Caldicellulosiruptor changbaiens is OX=1222016 GN=queD PE=3 SV=1
MLLKKIFKFDAAHNLTKYHGKCEKLHGHTYKLVVTVKGKLDEQDMVIDFALLKDIVQKEVIDILDHAYLNDIIENPTAENIAKWIWQRLYDKIKAQNCTLYEIEVWETEDSGAVYRGEDDD

SEQ ID NO: 18608 - protein, 120 aa, Caldicellulosiruptor hydrothermalis
  misc_feature (1)..(120): tr|E4Q883|E4Q883_CALH1 6-carboxy-5,6,7,8-tetrahydropter in synthase OS=Caldicellulosiruptor hydrothermalis (str ain DSM 18901 / VKM B-2411 / 108) OX=632292 GN=Calhy_22 25 PE=3 SV=1
MLLKKIFKFDAAHNLTKYNGKCENLHGHTYKLVVTVEGKPDNQDMVIDFVLLKKIVQDEVIDVLDHAYINDIIENPTAENIAKWIWKKLSRKIEEQGCRLYEIEVWETEDSSVIYRGEDE

SEQ ID NO: 18609 - protein, 120 aa, Caldicellulosiruptor kristjanssonii
  misc_feature (1)..(120): tr|E4S6C5|E4S6C5_CALKI 6-carboxy-5,6,7,8-tetrahydropter in synthase OS=Caldicellulosiruptor kristjanssonii (str ain ATCC 700853 / DSM 12137 / I77R1B) OX=632335 GN=Calk r_2221 PE=3 SV=1
MLLKKIFKFDAAHNLTKYNGKCENLHGHTYKLVVTVEGKPDDQDMVIDFVLLKKIVHDEVINILDHAYINDIIENPTAENIAKWIWGKLSKKIEEQGCRLYEIEVWETEDSSVIYRGEDE

SEQ ID NO: 18610 - protein, 120 aa, Caldicellulosiruptor kronotskyensis
  misc_feature (1)..(120): tr|E4SH09|E4SH09_CALK2 6-carboxy-5,6,7,8-tetrahydropter in synthase OS=Caldicellulosiruptor kronotskyensis (str ain DSM 18902 / VKM B-2412 / 2002) OX=632348 GN=Calkro_ 2196 PE=3 SV=1
MLLKKIFKFDAAHNLTKYNGKCENLHGHTYKLAVTVEGKPDNQDMVIDFMLLKKIVQDEVIDILDHAYINDIIENPTAENIAKWIWEKLSKKIEEQGVKLYEIEVWETEDSSVIYRGEDE

SEQ ID NO: 18611 - protein, 120 aa, Caldicellulosiruptor lactoaceticus
  misc_feature (1)..(120): tr|G2PWG5|G2PWG5_9FIRM 6-carboxy-5,6,7,8-tetrahydropter in synthase OS=Caldicellulosiruptor lactoaceticus 6A OX =632516 GN=Calla_0229 PE=3 SV=1
MLLKKIFKFDAAHNLTKYNGKCENLHGHTYKLVVTVEGKPNDQDMVIDFVLLKKIVHDEVINILDHAYINDIIENPTAENIAKWIWGKLSKKIEEQGCRLYEIEVWETEDSSVIYRGEDE

SEQ ID NO: 18612 - protein, 142 aa, Caldicellulosiruptor obsidiansis
  misc_feature (1)..(142): tr|D9TI95|D9TI95_CALOO 6-carboxy-5,6,7,8-tetrahydropter in synthase OS=Caldicellulosiruptor obsidiansis (strain ATCC BAA-2073 / strain OB47) OX=608506 GN=COB47_0391 P E=3 SV=1
MSKEQPLKFLVNIYYGLGVIFVMLLKKIFKFDAAHNLTKYNGKCENLHGHTYKLVVTVEGKPDNQDMVIDFVLLKKIVQNEVIDILDHAYINDIIENPTAENIAKWIWGKLSKKIEEQGVKLYEIEVWETEDSSVIYRGEDE

SEQ ID NO: 18613 - protein, 120 aa, Caldicellulosiruptor owensensis
  misc_feature (1)..(120): tr|E4Q338|E4Q338_CALOW 6-carboxy-5,6,7,8-tetrahydropter in synthase OS=Caldicellulosiruptor owensensis (strain ATCC 700167 / DSM 13100 / OL) OX=632518 GN=Calow_0273 P E=3 SV=1
MLLKKTFKFDAAHNLTKYNGKCENLHGHTYKLVVTVEGKPDNQDMVIDFVLLKKIVQNEVIDILDHAYINDIIENPTAENIAKWIWGKLSKKIEEQGCRLYEIEVWETEDSSVIYRGEDE

SEQ ID NO: 18614 - protein, 121 aa, Caldicellulosiruptor saccharolyticus
  misc_feature (1)..(121): tr|A4XG23|A4XG23_CALS8 6-carboxy-5,6,7,8-tetrahydropter in synthase OS=Caldicellulosiruptor saccharolyticus (st rain ATCC 43494 / DSM 8903 / Tp8T 6331) OX=351627 GN=Cs ac_0210 PE=3 SV=1
MLLKKIFKFDAAHNLTKYHGKCERLHGHTYKLVVTVKGKLDEQDMVIDFALLKDIVQKEVIDILDHAYLNDIIENPTAENIAKWIWQRLYDKIKAQNSTLYEVEVWETEDSGAVYRGEDDD

SEQ ID NO: 18615 - protein, 125 aa, Caldilinea aerophila
  misc_feature (1)..(125): tr|I0I7G3|I0I7G3_CALAS 6-pyruvoyl tetrahydropterin synt hase family protein OS=Caldilinea aerophila (strain DSM 14535 / JCM 11387 / NBRC 104270 / STL-6-O1) OX=926550 GN=CLDAP_31610 PE=4 SV=1
MYTLAVQRDFVAQHFLIGGDWGAENFWHSHHYRLELILEGDELDQHGYLVDIVHVERELDAIVAHYKDKTLNDLPEFAGLNPSIEHFTRIVCLRLNEAIPAPNIRALTVKIWENQIAWAAYRHER

SEQ ID NO: 18616 - protein, 122 aa, Caldilineae bacterium
  misc_feature (1)..(122): tr|A0A3M1HQL0|A0A3M1HQL0_9CHLR 6-carboxytetrahydropteri n synthase OS=Caldilineae bacterium OX=2420332 GN=D6775 _06120 PE=4 SV=1
MYALAIQQDFIARRSASADGSATALSHRYRVELMVEAEELDQQGYVVDIDELQAQFEGIVDEFRDKTLNELPDFEGVNPSLEHFARVLCEKVDEALYAPQLSAISIKLWEDDTAWVAYDVER

SEQ ID NO: 18617 - protein, 126 aa, Caldilineae bacterium
  misc_feature (1)..(126): tr|A0A3M1F1E1|A0A3M1F1E1_9CHLR 6-carboxytetrahydropteri n synthase OS=Caldilineae bacterium OX=2420332 GN=D6796 _01000 PE=4 SV=1
MYTIATKRTFIARHRLAGTKHPQDSRAHSHQYRLEVILEGNRLNEHGFLVDIEDLERLVEARVRHFQDTVLNDLPEFAALNPTLEHFARILWYSLSEHLSQLPQLTMLTVRIWKGATTWAVYRRRL

SEQ ID NO: 18618 - protein, 124 aa, Caldimicrobium thiodismutans
  misc_feature (1)..(124): tr|A0A0U4W0V2|A0A0U4W0V2_9BACT 6-carboxy-5,6,7,8-tetrah ydropterin synthase OS=Caldimicrobium thiodismutans OX= 1653476 GN=THC_0385 PE=3 SV=1
MYRLKVQDHFSSAHYLRNYQGACENLHGHNWKVELVVEGEKLNEIDILLDFKDIKKILKEVLSELDHRLINELPYFQEKNPSSENIARYIFDRVKDKLKVFEGVRVKEVTVFETEKASATYLEE

SEQ ID NO: 18619 - protein, 124 aa, Caldimicrobium thiodismutans
  misc_feature (1)..(124): tr|A0A2N7PK72|A0A2N7PK72_9BACT 6-carboxy-5,6,7,8-tetrah ydropterin synthase OS=Caldimicrobium thiodismutans OX= 1653476 GN=queD PE=3 SV=1
MYRLKVKDHFSSAHYLRNYQGACENLHGHNWIVELVVEGEKLNEIEILIDFKDLKQILKDVLSQLDHRLINEHPYFKERNPSSENLARFIFEKVKERLKDYPNVRVKEVTVFETEKASATYSEV

SEQ ID NO: 18620 - protein, 127 aa, Caldiserica bacterium
  misc_feature (1)..(127): tr|A0A2H9MDV8|A0A2H9MDV8_9BACT 6-carboxy-5,6,7,8-tetrah ydropterin synthase OS=Caldiserica bacterium CG02_land_ 8_20_14_3_00_36_38 OX=1973932 GN=queD PE=3 SV=1
MNKLSFYLSRNFTFDAAHRIIDYSGKCENLHGHTYKLTVTITGKLKSDGMVLDFAILKQIVEENVLERLDHKYLNDVFENPTTEIIAHWIFEKLQKPFEEVNCSIYEVDLTEGVNNKVSIKNERRSE

SEQ ID NO: 18621 - protein, 127 aa, Caldiserica bacterium; identical to SEQ ID NO: 18620
  misc_feature (1)..(127): tr|A0A2H9N4V1|A0A2H9N4V1_9BACT 6-carboxy-5,6,7,8-tetrah ydropterin synthase OS=Caldiserica bacterium CG_4_8_14_ 3_um_filter_35_18 OX=1973931 GN=queD PE=3 SV=1

SEQ ID NO: 18622 - protein, 117 aa, Caldisericum exile
  misc_feature (1)..(117): tr|I0GJK4|I0GJK4_CALEA 6-carboxy-5,6,7,8-tetrahydropter in synthase OS=Caldisericum exile (strain DSM 21853 / N BRC 104410 / AZM16c01) OX=511051 GN=CSE_08150 PE=3 SV=1
MFFLSREFSFDAAHRVIDYNGKCEKLHGHTYHLIVTITGDLKEDGMVLDFSILKKVVQEKVIVFLDHKYLNDVFENPTTEIVAQWIFKTLDNAFKEYNCKVYEIILFEGDNNRVSIR

SEQ ID NO: 18623 - protein, 127 aa, Caldisericum sp.; identical to SEQ ID NO: 18620
  misc_feature (1)..(127): tr|A0A1J5BLA2|A0A1J5BLA2_9BACT 6-carboxy-5,6,7,8-tetrah ydropterin synthase OS=Caldisericum sp. CG2_30_36_11 OX =1805053 GN=AUJ99_04900 PE=3 SV=1

SEQ ID NO: 18624 - protein, 119 aa, Calditerrivibrio nitroreducens
  misc_feature (1)..(119): tr|E4TF31|E4TF31_CALNY 6-carboxy-5,6,7,8-tetrahydropter in synthase OS=Calditerrivibrio nitroreducens (strain D SM 19672 / NBRC 101217 / Yu37-1) OX=768670 GN=Calni_156 3 PE=3 SV=1
MFKVRVIDHFSSAHNLRGYEGNCERLHGHNWKVEVELMGDKLDHIGMLVDFKVLKKSLKKIIDELDHTYLNEHPYFKDVNPTSENMAKYIFLRLKEDFGTLVHKVAVWESHNAVAEYFE

SEQ ID NO: 18625 - protein, 119 aa, Calditerrivibrio nitroreducens
  misc_feature (1)..(119): tr|A0A2J6WP30|A0A2J6WP30_9BACT 6-carboxy-5,6,7,8-tetrah ydropterin synthase OS=Calditerrivibrio nitroreducens O X=477976 GN=queD PE=3 SV=1
MFKVRVIDHFSSAHNLRGYEGNCERLHGHNWKVEVELMGDRLDNIGMLVDFKVLKKSLKKIIDELDHTYLNEHPYFKDVNPTSENMAKYIFLRLKEDFGTFVYKVAVWESHNAVAEYFE

SEQ ID NO: 18626 - protein, 138 aa, Caldithrix abyssi
  misc_feature (1)..(138): tr|H1XX37|H1XX37_9BACT 6-pyruvoyltetrahydropterin/6-car boxytetrahydropterin synthase OS=Caldithrix abyssi DSM 13497 OX=880073 GN=Cabys_3982 PE=4 SV=1
MSRRQISLSKVYTFSAAHRLHAPQKDDDFNRRIYDKCNNPNGHGHDYYLEVTVRGAVDEQSGMIIPLPTLDSAVHSVIDPLEHRHFDLEIDYFKTRRSTGEEIIQFLWQELEKYLGNKLFKIKLWETNNNYFELERKA

SEQ ID NO: 18627 - protein, 121 aa, Caldithrix abyssi
  misc_feature (1)..(121): tr|H1XNF1|H1XNF1_9BACT 6-carboxy-5,6,7,8-tetrahydropter in synthase OS=Caldithrix abyssi DSM 13497 OX=880073 GN =Cabys_1333 PE=3 SV=1
MYQLSIDLMFSASHHLRGYEGPCQRIHGHNWKVQVVVKSKRVDSIGMVIDFKDLSDLAWQVVGKFDHQMVNDIAPFDQINPTAENLSRYFFKEIARLLPDGVEMQAIRLWETPKYMIEYTE

SEQ ID NO: 18628 - protein, 47 aa, Caldithrix sp.
  misc_feature (1)..(47): tr|A0A523HXL1|A0A523HXL1_9BACT 6-carboxytetrahydropteri n synthase QueD (Fragment) OS=Caldithrix sp. OX=1962856 GN=E2O77_09790 PE=4 SV=1
MKLGTTHYIDCAHFLPGHPKCGQLHGHTYKVEVVIEGENKDGMIIDF

SEQ ID NO: 18629 - protein, 141 aa, Calditrichaeota bacterium
  misc_feature (1)..(141): tr|A0A3M2FVJ1|A0A3M2FVJ1_9BACT 6-carboxytetrahydropteri n synthase OS=Calditrichaeota bacterium OX=2212469 GN=D 6677_00465 PE=4 SV=1
MEARRVTFYRVYGFSAAHRLHAPWYDEMKNFEIYDKCNNISGHGHDYRVEVGVSGTPDARTGFIIDLVDMDKAVQSVLDKLDYKHLNKEVPYFRDRIATSEHLIGFLWQELEKALPAGKLYHIKLWETNNNYFEMERSATR

SEQ ID NO: 18630 - protein, 137 aa, Calditrichaeota bacterium
  misc_feature (1)..(137): tr|A0A3N5JSX8|A0A3N5JSX8_9BACT 6-carboxytetrahydropteri n synthase OS=Calditrichaeota bacterium OX=2212469 GN=E HM72_14805 PE=4 SV=1
MPLVYVTRRLHFSAAHRLHSDQLSAQENEQVYGLCNNPLGHGHNYELEVTVQGIPDPVNGIVVDLKELKKVIESEIIDLVDHKHLNYEVEFMRGIVPTAENIAVAFWNQLKDKLPSGRLYEIKLYETPRNIAVYRGE

SEQ ID NO: 18631 - protein, 137 aa, Calditrichales bacterium
  misc_feature (1)..(137): tr|A0A524LQQ2|A0A524LQQ2_9BACT 6-carboxytetrahydropteri n synthase OS=Calditrichales bacterium OX=2528038 GN=E4 H13_05375 PE=4 SV=1
MSLQITFSRVYQFTCAHRLNSRDLSELENKKVYDKCNNLNGHGHDYKLEVTVQGDIDAKTGMIIPLEVFDQYVQNVLIKIDYKHLDNEVEYFKQHISSGEIIIQYLWQELAAQFPGEMLYHLKLWETNNNYFEFGNA

SEQ ID NO: 18632 - protein, 113 aa, Calditrichales bacterium
  misc_feature (1)..(113): tr|A0A524LFX1|A0A524LFX1_9BACT 6-carboxy-5,6,7,8-tetrah ydropterin synthase OS=Calditrichales bacterium OX=2528 038 GN=queD PE=3 SV=1
MISAAHKLNEYPGPCARIHGHNWKIRLEVHARNLDDQGIALDFGDLDQLLWKVVGPFDHQLMNDLKPFDQLNPTAENLVKYIYTQVKSMIPANIQMHKVTVWETDQYKVAYEE

SEQ ID NO: 18633 - protein, 117 aa, Caloramator australicus
  misc_feature (1)..(117): tr|I7J5C2|I7J5C2_9CLOT 6-carboxy-5,6,7,8-tetrahydropter in synthase OS=Caloramator australicus RC3 OX=857293 GN =CAAU_1557 PE=3 SV=1
MLLIKEFEFDAAHNLIHYHGKCERLHGHTYKLVIKLEGEPDHEGMIFDFVELKRIVKERIIDKFDHAYLNDIISQPTAENIAIFVYKELKDVLKRDNCRLYEVEVWETKTSGVAYRG

SEQ ID NO: 18634 - protein, 148 aa, Caloramator australicus
  misc_feature (1)..(148): tr|I7K941|I7K941_9CLOT 6-carboxy-5,6,7,8-tetrahydropter in synthase OS=Caloramator australicus RC3 OX=857293 GN =CAAU_2026 PE=3 SV=1
MKITVTKEFTFDCAHMLSNHEGICSNLHGHTYKLEVTASAELIKEGSSQGMVVDFGDLKSIVKELIVDKFDHSFIFWEGGSEAEREIARVVEVYGMRIVKFNERPTAENMAIFIIKTLNEHLKDSPVKIVKVRLYETPTSFAEVEDDV

SEQ ID NO: 18635 - protein, 152 aa, Caloramator fervidus
  misc_feature (1)..(152): tr|A0A1H5WUL8|A0A1H5WUL8_9CLOT 6-pyruvoyltetrahydropter in/6-carboxytetrahydropterin synthase OS=Caloramator fe rvidus OX=29344 GN=SAMN05660865_01567 PE=4 SV=1
MKVMATKEFTFDCAHMLSNHEGMCANLHGHTYKLQVTVTRDELKKEGSSQGMVVDFGDLKRIVKELIVDKFDHSFIFWEGGSEAERKIADIVQKNNLKIVKFKDRPTAENMALYIFKVLNEHLKDKNLRVVKVKLYETPTSFAEVYEDVSYF

SEQ ID NO: 18636 - protein, 117 aa, Caloramator fervidus
  misc_feature (1)..(117): tr|A0A1H5W4C6|A0A1H5W4C6_9CLOT 6-carboxy-5,6,7,8-tetrah ydropterin synthase OS=Caloramator fervidus OX=29344 GN =SAMN05660865_01379 PE=3 SV=1
MILIKEFEFDAAHNLIHYHGKCEKLHGHTYRLVVKLEGEPDEEGMIFDFVELKRIVKEKIIDKFDHAYLNEIISQPTAENIAIYVYNELKDVLKRDNCRLYEVEVWETKTSGVVYRG

SEQ ID NO: 18637 - protein, 117 aa, Caloramator mitchellensis
  misc_feature (1)..(117): tr|A0A0R3K029|A0A0R3K029_9CLOT 6-carboxy-5,6,7,8-tetrah ydropterin synthase OS=Caloramator mitchellensis OX=908 809 GN=queD_1 PE=3 SV=1
MILIKEFEFDAAHNLIHYHGKCERLHGHTYKLVIKLEGTPDKEGMIYDFVELKRVVKARIIDKFDHSYLNDIIEQPTAENIAMYVFNELKDVLKRENCKLYEVEVWETKTSGVVYRG

SEQ ID NO: 18638 - protein, 147 aa, Caloramator mitchellensis
  misc_feature (1)..(147): tr|A0A0R3K1T4|A0A0R3K1T4_9CLOT 6-carboxy-5,6,7,8-tetrah ydropterin synthase OS=Caloramator mitchellensis OX=908 809 GN=queD_2 PE=3 SV=1
MKLTVTKEFTFDCAHMLSNHDGLCSNLHGHTYKLEVTASAQLIKEGSSKGMVVDFGDLKSIVKETIVDKFDHSFLFWEEGSEAEKEIARVVENFGMRIVKFKERPTAENMAIYIINTLNENLENGIKIVRVRLYETPTSYAEVEIDV

SEQ ID NO: 18639 - protein, 117 aa, Caloramator proteoclasticus
  misc_feature (1)..(117): tr|A0A1M5AFW3|A0A1M5AFW3_9CLOT 6-carboxy-5,6,7,8-tetrah ydropterin synthase OS=Caloramator proteoclasticus DSM 10124 OX=1121262 GN=SAMN02746091_02187 PE=3 SV=1
MILIKEFEFDAAHNLIHYHGKCERLHGHTYKLVVKLEGEPDSEGMVFDFVQLKKIVKERIIDKFDHAYLNDIIEQPTAENMAIYVWDELYDVLKRDNCRLYEVEVWETKTSGIVYRR

SEQ ID NO: 18640 - protein, 141 aa, Caloramator proteoclasticus
  misc_feature (1)..(141): tr|A0A1M4TRE4|A0A1M4TRE4_9CLOT 6-pyruvoyltetrahydropter in/6-carboxytetrahydropterin synthase OS=Caloramator pr oteoclasticus DSM 10124 OX=1121262 GN=SAMN02746091_0045 1 PE=4 SV=1
MLTVSKEFAFEAAHMLSEHEGDCKNLHGHSYKMIVEATGDMKDGMVIDFKDLKNIVKETIIDKIDHSFIYFNASKDEVEHKIADILKKSGKRVFEVNYRPTAENMATDFYNILNDKLADKGIRVVSITLYETQTSFAKVVG

SEQ ID NO: 18641 - protein, 117 aa, Caloramator quimbayensis
  misc_feature (1)..(117): tr|A0A1T4YFY9|A0A1T4YFY9_9CLOT 6-carboxy-5,6,7,8-tetrah ydropterin synthase OS=Caloramator quimbayensis OX=1147 123 GN=SAMN05443428_1422 PE=3 SV=1
MILIKEFEFDAAHNLINYHGKCEKLHGHTYKLVVKLEGNPDNEGMIFDFVELKKIVKEKVIDKFDHSYINEIIKQPTAENIAVYVFNELKDVLKRDNCRLFEVEVWETKNSGIVYRG

SEQ ID NO: 18642 - protein, 149 aa, Caloramator quimbayensis
  misc_feature (1)..(149): tr|A0A1T4YES9|A0A1T4YES9_9CLOT 6-carboxy-5,6,7,8-tetrah ydropterin synthase OS=Caloramator quimbayensis OX=1147 123 GN=SAMN05443428_14210 PE=3 SV=1
MKLTVTKEFTFDCAHMLSYHEGLCSNLHGHTYRLEVTALKYELINEGSSEGMILDFGDLKRIVKESVLDKFDHSFLFWERGCDAEREIAATIEKHGMRIVRLKDRPTAENIAVFIINTLNEHLKDSPINIVKVRLYETPTSYAEVKNYV

SEQ ID NO: 18643 - protein, 151 aa, Caloramator sp.
  misc_feature (1)..(151): tr|A0A5B7TF41|A0A5B7TF41_9CLOT 6-carboxytetrahydropteri n synthase OS=Caloramator sp. E03 OX=2576307 GN=FDN13_0 3665 PE=4 SV=1
MDLKLTVTKEFTFDCAHILSYHEGLCSNLHGHTYRLEVTASKNELINEGSSEGMILDFGDLKRIVKDLIIDIFDHSFLFWESGCDAEREIADIIEKYGMRIVKLKDRPTAENIAVFIINTLNEHLKDSPINIVKVRLYETPTSYAEVKNYV

SEQ ID NO: 18644 - protein, 117 aa, Caloramator sp.
  misc_feature (1)..(117): tr|A0A5B7TEB6|A0A5B7TEB6_9CLOT 6-carboxy-5,6,7,8-tetrah ydropterin synthase OS=Caloramator sp. E03 OX=2576307 G N=queD PE=3 SV=1
MILIKEFEFDAAHNLVNYHGKCEKLHGHTYKLVVKLEGTVDEEGMVFDFVELKKIVKEKVIDKFDHSYINEIIKQPTAENIAVYVFNELKDVLKRDNCRLFEVEVWETKNSGVAYRG

SEQ ID NO: 18645 - protein, 118 aa, Caloranaerobacter azorensis
  misc_feature (1)..(118): tr|A0A096BKW3|A0A096BKW3_9CLOT 6-carboxy-5,6,7,8-tetrah ydropterin synthase OS=Caloranaerobacter azorensis H532 14 OX=1156417 GN=Y919_00555 PE=3 SV=1
MDITKIFTFDSAHKLEDYDGECRFLHGHTYKLEITIRGEVDNRGIVIDFNELKEIVKEKVINVLDHKYLNEIFDFNPTCENILFWIFNEIDNAIKKDNCWLKKVVLWETPTSYATLER

SEQ ID NO: 18646 - protein, 122 aa, Caloranaerobacter azorensis
  misc_feature (1)..(122): tr|A0A1M5RU39|A0A1M5RU39_9CLOT 6-carboxy-5,6,7,8-tetrah ydropterin synthase OS=Caloranaerobacter azorensis DSM 13643 OX=1121264 GN=SAMN02745135_00339 PE=3 SV=1
MNRTIDITKIFTFDSAHKLEDYDGECRFLHGHTYKLEITIRGEVDNRGIVIDFNELKEIVKEKVINVLDHKYLNEIFDFNPTCENILFWIFNEIDNAIKKDNCWLKKVVLWETPTSYATLER

SEQ ID NO: 18647 - protein, 118 aa, Caloranaerobacter sp.
  misc_feature (1)..(118): tr|A0A0P8XUA4|A0A0P8XUA4_9CLOT 6-carboxy-5,6,7,8-tetrah ydropterin synthase OS=Caloranaerobacter sp. TR13 OX=13 02151 GN=TR13x_01445 PE=3 SV=1
MEITKIFTFDSAHKLEDYDGECKYLHGHTYKLEITIRGEIDNRGIVIDFNDLKDIVKERVINVLDHKYLNEVFDFNPTCENILLWIFNEIDNAIKNDKCCLKKVVLWETPTSYATLER

SEQ ID NO: 18648 - protein, 128 aa, Calothrix brevissima
  misc_feature (1)..(128): tr|A0A1Z4K5Y3|A0A1Z4K5Y3_9CYAN 6-carboxy-5,6,7,8-tetrah ydropterin synthase OS=Calothrix brevissima NIES-22 OX= 1973478 GN=NIES22_44830 PE=3 SV=1
MPKWKLVTEFTFDSAHYIKDYDGPCGRMHGHTYKVRLEATSSKLHSSEYCPHPVMVADFKTLKWAKQDVTKGGLDHCVLNEVLPPEYETTAEMIAKYIYDQTKQKLPAEVQLKVRVSETPNSWVEYQD

SEQ ID NO: 18649 - protein, 290 aa, Calothrix desertica
  misc_feature (1)..(290): tr|A0A433VF97|A0A433VF97_9CYAN 6-pyruvoyltetrahydropter in synthase OS=Calothrix desertica PCC 7102 OX=232991 G N=DSM106972_043500 PE=4 SV=1
MQCIVNRRAQFSASHRYWLPELSEVENFEKFGACAKFPGHGHNYVLFVSLLGELDEYGMVLNLSDVKHVIKREVTGQLDYSFLNDVWSEFQETLPTTENIARVIWDKLTPHLPVVRIQLFEHPELWADYMGNAMEGYLTVSTHFSAAHRLAHPSLSDEKNFEIYGKCARPNGHGHNYHLEVTVKGDIDKRTGMLVDLGALQKVIDDYVVEPFDHTFLNKDIAYFSEVVPTAENIALYISNVLRAPIQNIGASLHKIKLIESPNNSCEIYCNNSQQNIPSTTQSQPLLAQV

SEQ ID NO: 18650 - protein, 289 aa, Calothrix elsteri
  misc_feature (1)..(289): tr|A0A2A2TM65|A0A2A2TM65_9CYAN 6-pyruvoyl tetrahydropte rin synthase OS=Calothrix elsteri CCALA 953 OX=987040 G N=CK510_06180 PE=4 SV=1
MQCIINRRAQFSASHRYWLPELSETENLEKFGACAKFPGHGHNYVLFVSMIGELDEYGMVLNLSDVKHVIKKEVTSHLDYSFLNDAWSEFEETLPTSENIARVIWQKLAPHLPLVKVQLFEHPELWAEYMGNGMEAYLSVSTHFSAAHRLAHPKLSDEENAKIYGKCARTHGHGHNYHLEVTVKGEIDPRTGMLVDLGALNQIIEDYVVEPFDHMFLNKDVPFFAEVVPTAENIALYISNALRSPIQNIGGILHKIKLIESPNNSCEILCSDSDMNSTKAAAQPVLATM

SEQ ID NO: 18651 - protein, 290 aa, Calothrix parasitica
  misc_feature (1)..(290): tr|A0A1Z4M210|A0A1Z4M210_9CYAN 6-pyruvoyl-tetrahydropte rin synthase homolog OS=Calothrix parasitica NIES-267 O X=1973488 GN=NIES267_70450 PE=4 SV=1
MQCIVNRRAQFSASHRYWFPELSEAENIEKFGACANFPGHGHNYVLFISLEGELDEYGMVLNLSDVKQVIKREVTNQLDFSYLNDVWEEFQQILPTTENIARVIYKRLSSYLPIVRVQLFEHPQLWADYMGNSMEAYLTVGTHFSAAHRLASPKLSKEENLEIYGKCARPNGHGHNYHLEITVKGEIAERTGMLVDLGALNKVVDDYVVEQFDHYFLNKDIPYFAEVVPTAENIALYISSTLREPIGELGASLYKVKLIESPNNSCEIYCNNSESNLNEATQEQPVLARL

SEQ ID NO: 18652 - protein, 129 aa, Calothrix parasitica
  misc_feature (1)..(129): tr|A0A1Z4LWN8|A0A1Z4LWN8_9CYAN 6-carboxy-5,6,7,8-tetrah ydropterin synthase OS=Calothrix parasitica NIES-267 OX =1973488 GN=NIES267_51780 PE=3 SV=1
MPKWKLVTEFTFDSAHYIKDYDGPCGRMHGHSYKVKIEAVSNKLHSSEYCPHPVMVADFRSLRWAKKDVSKGGLDHCVLNEVLPPEYETTAEMIAKYIYDETKKKLPEGIKIKVAVSETANSWAEYEDD

SEQ ID NO: 18653 - protein, 291 aa, Calothrix sp.
  misc_feature (1)..(291): tr|A0A1Z4FSX9|A0A1Z4FSX9_9CYAN Putative 6-pyruvoyl tetr ahydropterin synthase OS=Calothrix sp. NIES-2098 OX=195 4171 GN=NIES2098_14830 PE=4 SV=1
MQCIVNRRAQFSASHRYWLPELSEAENTQQFGACSKFPGHGHNYVLFISLIGELDEYGMVLNLSDVKHVIKREVTSQLDFSYLNDVWAEFQQTLPTTENIARVIWQRLAPHLPLVRVQLFEHPELWADYMGNSMEAYLTISTHFSAAHRLAHPNLSNEENAKIYGKCARTHGHGHNYHLEVTVKGEIDQRTGMIVDLGALNQVIEDRVVEPFDHTFLNKDIPYFAEVVPTAENIALYISNLLRSPVQKLGAKLHKVKLIESPNNSCEIYCTDSESNSVSATANQPILARVN

SEQ ID NO: 18654 - protein, 128 aa, Calothrix sp.
  misc_feature (1)..(128): tr|A0A1Z4G1Y1|A0A1Z4G1Y1_9CYAN 6-carboxy-5,6,7,8-tetrah ydropterin synthase OS=Calothrix sp. NIES-2098 OX=19541 71 GN=NIES2098_47150 PE=3 SV=1
MPEWKLVTEFTFDSAHYIKDYDGPCGRMHGHTYKVRLEAKSSQLYSSQYCPHPVMVADFRTLRWAKQDVTKGGLDHSILNEVLPPEYETTAEMIAKYIYDQTKKRLPIDVELKVRVSETPNSWVEYKD

SEQ ID NO: 18655 - protein, 125 aa, Camelimonas lactis
  misc_feature (1)..(125): tr|A0A4R2GTD5|A0A4R2GTD5_9RHIZ 6-carboxy-5,6,7,8-tetrah ydropterin synthase OS=Camelimonas lactis OX=659006 GN= EV666_105124 PE=3 SV=1
MFELSKQFRFEAAHTLHRAAETREVESSRRIHGHSYRAEVTVRGRPDPATGMIIDLTLFERAMETARDGLDHRFLDEVPDLGPATMENLALWIWRKLHPACPGLAAVTVHRDSNGEKCTYFGEAA

SEQ ID NO: 18656 - protein, 194 aa, Caminibacter mediatlanticus
  misc_feature (1)..(194): tr|A0A4P9DQH5|A0A4P9DQH5_9PROT 6-carboxytetrahydropteri n synthase OS=Caminibacter mediatlanticus TB-2 OX=39159 2 GN=FE773_02565 PE=4 SV=1
MIIRKLFKFENAHIVRNCTSRRCSKSIHGHSYRVEIKLQSNFLDNGEMVYDFGLMKTTIKTLIDSFDHAITLWSKDNKEYIEWAKKFSERYIILPVNPSAEQFSRVFFLIVDRVLECMEFKNGEKDIKVYSVVVHETDTGYAECFREDAYNFENMGEIKLEDIVFSDIIKEEWGDKNLWEKLLKKEKITPPKEV

SEQ ID NO: 18657 - protein, 131 aa, Caminicella sporogenes
  misc_feature (1)..(131): tr|A0A1M6R913|A0A1M6R913_9CLOT 6-carboxy-5,6,7,8-tetrah ydropterin synthase OS=Caminicella sporogenes DSM 14501 OX=1121266 GN=SAMN02745883_01735 PE=3 SV=1
MHNKFVNVTKIFTFDSAHKLENYDGNCKYLHGHTYKLEITVRGKTDYRGMVIDFNELKKIVNEKIISKLDHKYLNDVFDFNTTCENMVVWIFNELNGVLNSKNYLLKKVRLWETPTSYAELEREDFYNEGQ

SEQ ID NO: 18658 - protein, 193 aa, Campylobacter avium
  misc_feature (1)..(193): tr|A0A222MZ71|A0A222MZ71_9PROT 6-carboxy-5,6,7,8-tetrah ydropterin synthase OS=Campylobacter avium LMG 24591 OX =522484 GN=queD PE=4 SV=1
MIIRKIFSFENAHIVRFCTSKRCKTSIHGHSYKVEILLQSKYLDNGGMVYDFGLLKQEIRQIIDSFDHSISLYKDDDKEYLKDMKKHSKRWVCLPLNASAENFCRIFFVLIDTLLNKTIMQNGEKGVKLYSVIVHETSTSYAQGFFDDAYSDVLPKVNLDEIEFSDEIKSEWSDENFFENLKGDYKFINKKEL

SEQ ID NO: 18659 - protein, 193 aa, Campylobacter blaseri
  misc_feature (1)..(193): tr|A0A2P8R103|A0A2P8R103_9PROT 6-carboxytetrahydropteri n synthase QueD OS=Campylobacter blaseri OX=2042961 GN= CQ405_03745 PE=4 SV=1
MIIRKIYNFENAHIVRFCSSKRCRTSIHGHSYKCEVLLSSNFLDNASMVYDFGLMKQGIKTLIDSFDHSTTIFSGDSDEYKNDIKKHSLRWVEIPYNPSAEQFCRVFFVLIDRLLSLTKMQNGEKEVRLHSIIVHETTTGYAQCFRDDAYNENMGIINLEDIKFSDEVVGEWYDKELFNKMKNGISFIDEKDC

SEQ ID NO: 18660 - protein, 193 aa, Campylobacter coli
  misc_feature (1)..(193): tr|W8KCT0|W8KCT0_CAMCO 6-carboxy-5,6,7,8-tetrahydropter in synthase OS=Campylobacter coli RM4661 OX=1183379 GN= YSS_08710 PE=4 SV=1
MIIRKLFEFENAHIVRFCSSSRCKSSIHGHSYKVEVLLESKYLDNAGMVYDFGLLKTHMRQIIDSFDHAITLFNQDDESYLNEMKKYSQRWISLPVNVSAENFCRVFFILIDALLKQTKMINGEQGVNLQSIIVHETRTGYAQGFKEDAYSPTMPKITLEDIEFSPAIKAEWNDIEFYDKLKNLHIFTNPKEV

SEQ ID NO: 18661 - protein, 193 aa, Campylobacter coli
  misc_feature (1)..(193): tr|A0A3X8VNU4|A0A3X8VNU4_CAMCO 6-carboxytetrahydropteri n synthase OS=Campylobacter coli OX=195 GN=EIC30_02765 PE=4 SV=1
MIIRKLFEFENAHIVRFCSSSRCKSSIHGHSYKVEVLLESKYLDNAGMVYDFGLLKTHMRQIIDSFDHAITLFNQDDESYLNEMKKYSQRWISLPVNVSAENFCRVFFILIDALLKQTKMINGEQGVNLQSIIVHETRTGYAQGFKEDAYSPTMSKITLEDIEFSPAIKAEWNDIEFYDKLKNLHIFTNPKEV

SEQ ID NO: 18662 - protein, 193 aa, Campylobacter concisus
  misc_feature (1)..(193): tr|U2GDG2|U2GDG2_9PROT Queuosine biosynthesis QueD, PTP S-I OS=Campylobacter concisus ATCC 51562 OX=1242969 GN= ATCC51562_58 PE=4 SV=1
MIIRKLFRFENAHIVRFCSSKRCRTSIHGHSYVAEILLSSNFLDNAGMVYDFGLMKQNIKTIIDSFDHATTIFSGDNDEYKNDLKKHSARWIEIPLNPSAEQFCRIFFVMIERLLELSVMNNGEREVKLHSIIVHETDTGYAQCFKEDAINAQMGEIRLDEIKFSDAIIEEWEDKNLFEKMKNRLKIEIPKDV

SEQ ID NO: 18663 - protein, 193 aa, Campylobacter concisus
  misc_feature (1)..(193): tr|A0A1X4MI16|A0A1X4MI16_9PROT 6-carboxy-5,6,7,8-tetrah ydropterin synthase OS=Campylobacter concisus OX=199 GN =A3835_08060 PE=4 SV=1
MIIRKLFRFENAHIVRFCSSKRCRTSIHGHSYVAEILLSSNFLDNAGMVYDFGLMKQNIKTIIDSFDHATTIFSGDNDEYKNDLKKHSARWIEIPLNPSAEQFCRIFFVMIERLLELSVMNNGEREVKLHSIIVHETDTGYAQCFKEDAVNAQMGEIKLDEIKFSDAIIEEWEDKNLFEKMKNRLKIEIPKDV

SEQ ID NO: 18664 - protein, 193 aa, Campylobacter cuniculorum
  misc_feature (1)..(193): tr|A0A1W6BUZ4|A0A1W6BUZ4_9PROT 6-carboxy-5,6,7,8-tetrah ydropterin synthase OS=Campylobacter cuniculorum DSM 23 162 = LMG 24588 OX=1121267 GN=queD PE=4 SV=1
MIIRKIFEFENAHIVRFCSSKRCKTSIHGHSYKIEILLESQYLDNAGMVYDFGLLKQEIKQIVDSFDHAITLFSADDKAYLKQMQKYSSRWILLPLNVSAENFVRIFFVLIDTLLKKTKMVNGEKGVNLKSIIIHETAKSYAQGFREDAYSELLPKIELKDIEFSPAIKSEWKDKDFFEKLKNSYIFINPKEV

SEQ ID NO: 18665 - protein, 193 aa, Campylobacter curvus
  misc_feature (1)..(193): tr|A7GWA7|A7GWA7_CAMC5 6-carboxy-5,6,7,8-tetrahydropter in synthase OS=Campylobacter curvus (strain 525.92) OX= 360105 GN=queD PE=4 SV=1
MIIRKLFTFENAHIVRFCSSKRCRTSIHGHSYKAEVLLSSNFLDNAGMVYDFGLMKQNIKCIIDSFDHATTIFSGDEAEYKSDLKKHSARWVEIPLNPSAEQFCRIFFVIIDRLLSTTIMQNGEREVKLESIIVHETDTGYAQCFRDDAYNAKMGEINLDRIVFSQAVIDEWDDKELFEKIKFKKPIVNAKDV

SEQ ID NO: 18666 - protein, 193 aa, Campylobacter fetus
  misc_feature (1)..(193): tr|A0A2S0JAK6|A0A2S0JAK6_CAMFE 6-carboxytetrahydropteri n synthase OS=Campylobacter fetus subsp. testudinum OX= 1507806 GN=C6B32_01155 PE=4 SV=1
MIIRKMYDYENAHIVRFCSSKRCRESLHGHSYKCEVMLSSNYLDNAEMVYDFGLMKQGIKTIIDSFDHTTTLYAKDDIQYKNDIKKYSKRWIELPYNPSAEQFSRVFFVLIDKLLGLTVMKNGEREVKLHSIIIHETASGYAQCFYEDAYNPNMGIINLEDIVFSQGIIEEWEDAMFYDKLKNGIKFINPKEC

SEQ ID NO: 18667 - protein, 193 aa, Campylobacter fetus
  misc_feature (1)..(193): tr|A0A433YJL9|A0A433YJL9_CAMFE 6-carboxytetrahydropteri n synthase QueD OS=Campylobacter fetus OX=196 GN=BWK51_ 05575 PE=4 SV=1
MIIRKMYDYENAHIVRFCSSKRCRESLHGHSYKCEVMLSSNYLDNAEMVYDFGLMKQGIKTIIDSFDHTTTLYAKDDIEYKNDIKKYSKRWIELPYNPSAEQFSRVFFVLIDRLLGLTVMRNGEREVKLHSIIVHETASGYAQCFYEDAYNPNMGIINLEDIVFSQGIIEEWEDSMFYDKLKNGIKFINPKEC

SEQ ID NO: 18668 - protein, 193 aa, Campylobacter geochelonis
  misc_feature (1)..(193): tr|A0A128EP70|A0A128EP70_9PROT Putative 6-pyruvoyl tetr ahydrobiopterin synthase OS=Campylobacter geochelonis O X=1780362 GN=ERS672216_00163 PE=4 SV=1
MIIRKIYDFENAHIVRDCSSKRCRTSIHGHSYKCEVLLSSNFLDNAGMVYDFGLMKLGIKSIIDSFDHATTLFLGDSDEYKNDIKKHSSRWVEIPYNPSAEQFCRVFFVIIDKLLSLINMQNGEREVKLHSIIVHETATGYAQCFRDDAYNEQMGIINLNDIKFSDEVMCDWDDKEFFQKIKNGVKFSYPRDC

SEQ ID NO: 18669 - protein, 193 aa, Campylobacter gracilis
  misc_feature (1)..(193): tr|C8PF26|C8PF26_9PROT Uncharacterized protein OS=Campy lobacter gracilis RM3268 OX=553220 GN=CAMGR0001_2667 PE =4 SV=1
MIIRKLYEFENAHIVRLCGSKRCRTSIHGHSYRCEILLSSNFLDEAGMVYDFGYMKLGIRELIDSFDHATTIYARDDASYIADLKKHSARWVQIPLNPSAEQFCRIFFVLIDRLLSLTQMQNGEREVKLHSVIVHETATGYAQCFREDAYNAQMGEIALEEIEFSPAVREEWKQPELWQKLLCGEKIIYPKDC

SEQ ID NO: 18670 - protein, 193 aa, Campylobacter helveticus
  misc_feature (1)..(193): tr|A0A1V0RH26|A0A1V0RH26_9PROT 6-carboxy-5,6,7,8-tetrah ydropterin synthase OS=Campylobacter helveticus OX=2889 8 GN=queD PE=4 SV=1
MIIRKMFEFENAHIVRFCSSKRCKTSIHGHSYRIEILLESRYLDNAGMVYDFGLLKNEIKQIIDSFDHAITLFKNDDEGYLEEMKKHSHRWVVLPVNVSAENFCRVFFVLIDSLLEKTKMQNGEKGVKLQSIIIHETRTGYAQGFREDAYSEILPKIALEDIEFSKAIKAEWSDEGFYEKLCGAYTFINPKEL

SEQ ID NO: 18671 - protein, 193 aa, Campylobacter hepaticus
  misc_feature (1)..(193): tr|A0A424Z0S1|A0A424Z0S1_9PROT 6-carboxytetrahydropteri n synthase OS=Campylobacter hepaticus OX=1813019 GN=DZD 40_03535 PE=4 SV=1
MIIRKLFEFENAHIVRFCSSKRCKSSIHGHSYKVEVLLQSQYLDNAGMVYDFGLLKTYIRQIIDSFDHSITLFKYDDKRYLEEMKKYSNRWVCLPVNVSAENFCRVFFILIDTLLQQTKMINGEQGVNLQSIIVHETRTGYAQGFKEDAYSPNMPKISFEDIEFSDAIKAEWNDINFYEKLKNKEIFINPKEV

SEQ ID NO: 18672 - protein, 193 aa, Campylobacter hominis
  misc_feature (1)..(193): tr|A7I089|A7I089_CAMHC Putative 6-pyruvoyl tetrahydrobi opterin synthase (Ptps)(Ptp synthase) OS=Campylobacter hominis (strain ATCC BAA-381 / LMG 19568 / NCTC 13146 / CH001A) OX=360107 GN=CHAB381_0328 PE=4 SV=1
MIIRKLYEFENAHIVRFCGSKKCRESIHGHSYKAEILLSSNFLDNAGMVYDFGYMKLAIKDIVESFDHATTLFSKDSDEYKNDIRKHSLRVVEIPVNPSAEQFCRVFFVLIDRLLNLTTFKNGEQGVKLHSVIVHETATGYAQCFKDDAYNENMGKIELCDIKFSDEIIRSWNDCNLMQKLINGEKIEFSKDC

SEQ ID NO: 18673 - protein, 193 aa, Campylobacter hyointestinalis
  misc_feature (1)..(193): tr|A0A562X7G1|A0A562X7G1_CAMHY 6-carboxytetrahydropteri n synthase OS=Campylobacter hyointestinalis OX=198 GN=Y Z82_08900 PE=4 SV=1
MIIRKMYDYENAHIVRFCSSKRCKESIHGHSYKCEVLLSSNYLDNAEMVYDFGLMKQGIKTIIDSFDHSTTLYAKDDIEYKNDIKRHSRRWIELPLNPSAEQFSRVFFVLIDRLLELTNMINGEKGVKLHSIIVHETATGYAQCFREDAYNPNMGKINLEDIIFSDGIKEEWDKQDFYENLKNGIKFTNPKEC

SEQ ID NO: 18674 - protein, 193 aa, Campylobacter hyointestinalis
  misc_feature (1)..(193): tr|A0A381CKS9|A0A381CKS9_CAMHY 6-carboxytetrahydropteri n synthase OS=Campylobacter hyointestinalis OX=198 GN=N CTC11608_00250 PE=4 SV=1
MIIRKLYDYENAHIVRFCSSKRCKESIHGHSYKCEVLLSSNYLDNAEMVYDFGLMKQGIKTIIDSFDHSTTLYAKDDIGYKNDIKRHSRRWIELPFNPSAEQFSRVFFVLIDRLLELTDMINGEKGVKLHSIIVHETASGYAQCFREDAYNPNMGKINLEDIIFSDGIKEEWDEQDFYENLKNGVKFTNPKEC

SEQ ID NO: 18675 - protein, 193 aa, Campylobacter iguaniorum
  misc_feature (1)..(193): tr|A0A076F760|A0A076F760_9PROT 6-carboxy-5,6,7,8-tetrah ydropterin synthase OS=Campylobacter iguaniorum OX=1244 531 GN=queD PE=4 SV=1
MIIRKLYDYENAHIVRFCSSKRCRESIHGHSYKCEVLLSSNYLDNAEMVYDFGLMKQGIKQIIDSFDHTTTLYAKDSDEYKNDIKKHSKRWIELPYNPSAEQFSRVFFVLIDRLLSLTNMQNGERDVTLHSIIVHETATGYAQCFKEDAYNRNMGVINLDEVVFSDGIKEEWDDFGFYERLKNADRFTNLKDC

SEQ ID NO: 18676 - protein, 194 aa, Campylobacter insulaenigrae
  misc_feature (1)..(194): tr|A0A0A8H5X1|A0A0A8H5X1_9PROT 6-carboxy-5,6,7,8-tetrah ydropterin synthase OS=Campylobacter insulaenigrae NCTC 12927 OX=1031564 GN=queD PE=4 SV=1
MIIRKLFEFENAHIVRFCSSKRCKTSIHGHSYKVEVLLESKYLDNAGMVYDFGLLKDGIRQIIDSFDHAITLFKNDDSKYLKDMKRHSKRWIILPVNVSAENFVRVFFILIDTLLQKTKMFNGEQGVKLQSIIVHETRTGYAQGFKEDAYSEFLPKINLEDIEFSEAIQDDWKDKNFYINLKDKNFVFINQKEV

SEQ ID NO: 18677 - protein, 193 aa, Campylobacter jejuni
  misc_feature (1)..(193): tr|A0A0M4UH93|A0A0M4UH93_CAMJU 6-carboxytetrahydropteri n synthase OS=Campylobacter jejuni subsp. jejuni OX=320 22 GN=CV422_08670 PE=4 SV=1
MIIRKLFEFENAHIVRFCSSKRCKSSIHGHSYKVEVLLESKYLDNAGMVYDFGLLKTYIRQIIDSFDHAITLFKYDDAKYLEEMKKYSSRWICLPVNVSAENFCRVFFILIDALLKQTKMINGEQGVTLQSIIVHETRTGYAQGFREDAYSELMPKISLQDIEFSNGIKAEWNDIDFYNKLKNEEIFINPKEI

SEQ ID NO: 18678 - protein, 193 aa, Campylobacter jejuni
  misc_feature (1)..(193): tr|A0A0B6U0M0|A0A0B6U0M0_CAMJU 6-carboxy-5,6,7,8-tetrah ydropterin synthase OS=Campylobacter jejuni subsp. jeju ni OX=32022 GN=PJ16_00805 PE=4 SV=1
MIIRKLFEFENAHIVRFCSSKRCKSSIHGHSYKVEVLLESKYLDNAGMVYDFGLLKTYIRQIIDSFDHAITLFKYDDAKYLEEMKKYSSRWICLPVNVSAENFCRVFFILIDALLKQTKMVNGEQGVTLQSIIVHETRTGYAQGFREDAYSELMPKISLQDIEFSNGIKAEWNDIDFYNKLKNEEIFINPKEI

SEQ ID NO: 18679 - protein, 193 aa, Campylobacter lanienae
  misc_feature (1)..(193): tr|A0A1X9SPI4|A0A1X9SPI4_9PROT 6-carboxy-5,6,7,8-tetrah ydropterin synthase OS=Campylobacter lanienae NCTC 1300 4 OX=1031753 GN=queD PE=4 SV=1
MIIRKIYDFENAHIVRFCSSKRCKESIHGHSYRCEVLLKSEYLDAAGMVYDFGLMKQYIRMIIDSFDHTTTLYANDEIGYKNDMKKHSKRWIELPYNPSAEHFSRVFFVLIDKLLNQSIMQNGEKGVELYSIIVHETATGYAQCFKEDAYSPKMGIINLDEIIFSDGIKEEWSDFDFYEKLKNGSKFINPKEC

SEQ ID NO: 18680 - protein, 193 aa, Campylobacter lanienae; identical to SEQ ID NO: 18679
  misc_feature (1)..(193): tr|A0A562WTW5|A0A562WTW5_9PROT 6-carboxytetrahydropteri n synthase OS=Campylobacter lanienae OX=75658 GN=XK09_0 6555 PE=4 SV=1

SEQ ID NO: 18681 - protein, 194 aa, Campylobacter lari
  misc_feature (1)..(194): tr|B9KDV0|B9KDV0_CAMLR 6-carboxy-5,6,7,8-tetrahydropter in synthase OS=Campylobacter lari (strain RM2100 / D67 / ATCC BAA-1060) OX=306263 GN=queD PE=4 SV=2
MIIRKMFEFENAHIVRFCSSKRCKTSIHGHSYKVEILLESKYLDNAGMVYDFGLLKDEIKQIIDSFDHAITLFKDDDKVYLEDMKKHSQRWVSLPVNVSAENFVRIFFVLIDTLLLKTKMVNGEQGVSLKSIIVHETRTGYAQGFREDAYSEFLPKINLADIEFSQAISDEWKDKDFFKKLQDANFVFINQKEV

SEQ ID NO: 18682 - protein, 194 aa, Campylobacter lari
  misc_feature (1)..(194): tr|A0A0A8HX32|A0A0A8HX32_CAMLA 6-carboxy-5,6,7,8-tetrah ydropterin synthase OS=Campylobacter lari NCTC 11845 OX =1388749 GN=queD PE=4 SV=1
MIIRKMFEFENAHIVRFCSSKRCKTSIHGHSYKVEILLESKYLDNAGMVYDFGLLKDEIKQIIDSFDHAITLFKDDDKVYLEDMKKHSQRWVSLPVNVSAENFVRIFFVLIDTLLLKTKMINGEQGVSLKSIIVHETRTGYAQGFREDAYSEFLPKINLTDIEFSQAISNEWKDKDFFKKLQDANFVFVNQKEV

SEQ ID NO: 18683 - protein, 194 aa, Campylobacter ornithocola
  misc_feature (1)..(194): tr|A0A1C2FTX2|A0A1C2FTX2_9PROT 6-carboxy-5,6,7,8-tetrah ydropterin synthase OS=Campylobacter ornithocola OX=184 8766 GN=A7X81_06570 PE=4 SV=1
MIIRKMFEFENAHIVRFCSSKRCKTSIHGHSYKVEILLESKYLDNAGMVYDFGLLKDEIKQIIDSFDHAITLFKDDDKAYLEDIKKHSQRWVSLPVNVSAENFVRVFFILIDTLLSKTKMINGEQGVNLKSIIVHETRTGYAQGFKEDAYSEFLPKITLADIEFSKAICDEWKDKDFFKKLQNSNFIFVNQKEV

SEQ ID NO: 18684 - protein, 194 aa, Campylobacter peloridis
  misc_feature (1)..(194): tr|A0A5C7DS74|A0A5C7DS74_9PROT 6-carboxytetrahydropteri n synthase OS=Campylobacter peloridis OX=488546 GN=FPD4 6_03350 PE=4 SV=1
MIIRKLFEFENAHIVRFCSSKRCKTSLHGHSYKVEILLESKYLDNAGMVYDFGLLKDEIKQIIDSFDHAITLFKDDDKTYLEDMKKHSQRWVSLPVNVSAENFVRVFFVLIDALLLKTKMVNGERGVRLKSVIVHETRTGYAQGFEEDAYSEFLPKINLIDIEFSKAIQDEWKDKDFFKKLQDKDFIFVNQKEV

SEQ ID NO: 18685 - protein, 194 aa, Campylobacter peloridis
  misc_feature (1)..(194): tr|A0A0A8GU69|A0A0A8GU69_9PROT 6-carboxy-5,6,7,8-tetrah ydropterin synthase OS=Campylobacter peloridis LMG 2391 0 OX=1388753 GN=queD PE=4 SV=1
MIIRKLFEFENAHIVRFCSSKRCKTSLHGHSYKVEILLESKYLDNAGMVYDFGLLKDEIKQIIDSFDHAITLFKDDDKTYLEDMKKHSQRWVSLPVNVSAENFVRIFFVLIDALLLKTKMVNGERGVRLKSVIVHETRTGYAQGFEEDAYSEFLPKINLIDIEFSKAIQDEWKDKDFFKKLQDKDFIFVNQKEV

SEQ ID NO: 18686 - protein, 193 aa, Campylobacter pinnipediorum
  misc_feature (1)..(193): tr|A0A1S6TPW4|A0A1S6TPW4_9PROT 6-carboxy-5,6,7,8-tetrah ydropterin synthase OS=Campylobacter pinnipediorum subs p. pinnipediorum OX=1660067 GN=queD PE=4 SV=1
MIIRKLFKFENAHIVRFCSSKRCRTSIHGHSYKAEVLLKSDFLDNAGMVYDFGLMKKNIKTIIDSFDHSTTIYSLDNKEYIDDIKKHSARWVSIPVNPSAEQFCRVFFVIIDTLLQNTIMQNAEQGVTLDSIIVHETDTGYAQCFKQDAYNENMGIISLDDIVFSDAIIDEWEDKNLFNKIKTKTKILNPKEV

SEQ ID NO: 18687 - protein, 193 aa, Campylobacter pinnipediorum
  misc_feature (1)..(193): tr|A0A1S6U8E3|A0A1S6U8E3_9PROT 6-carboxy-5,6,7,8-tetrah ydropterin synthase OS=Campylobacter pinnipediorum subs p. caledonicus OX=1874362 GN=queD PE=4 SV=1
MIIRKLFKFENAHIVRFCSSKRCRTSIHGHSYKAEVLLKSDFLDNAGMVYDFGLMKKNIKTIIDSFDHSTTIYSLDNKEYIDDIKKHSARWVSIPVNPSAEQFCRIFFVIIDTLLQNTIMQNAEQGVTLDSIIVHETDTGYAQCFKQDAYNENMGIISLDNIVFSDAIIDEWEDKNLFDKIKTKTKILNPKEV

SEQ ID NO: 18688 - protein, 193 aa, Campylobacter rectus
  misc_feature (1)..(193): tr|B9CYW3|B9CYW3_CAMRE Uncharacterized protein OS=Campy lobacter rectus RM3267 OX=553218 GN=CAMRE0001_1950 PE=4 SV=1
MIIRKMFKFENAHIVRFCSSKRCKTSIHGHSYRAEILLESNFLDNAGMVYDFGLMKRNIGCIIDSFDHCTTIFRGDNEEYKNDLKKHSARWIEIPLNPSAEQFCRIFFVMIDRLLKTTQMQNGEREVKLHSVIVHETDTGYAQCFKKDAYNVKMGEVNLSEIVFSEGVRAEWEDAELFEKIKLGKKIVNPKEV

SEQ ID NO: 18689 - protein, 193 aa, Campylobacter rectus
  misc_feature (1)..(193): tr|A0A3P1X600|A0A3P1X600_CAMRE 6-carboxytetrahydropteri n synthase OS=Campylobacter rectus OX=203 GN=EII16_0643 5 PE=4 SV=1
MIIRKMFKFENAHIVRFCSSKRCKTSIHGHSYRAEILLESNFLDNAGMVYDFGLMKRNIGCIIDSFDHCTTIFSGDSAEYKNDLKKHSARWIEIPLNPSAEQFCRIFFVMIDRLLKTTQMQNGEREVKLHSVIVHETDTGYAQCFKKDAYNVKMGEVNLSEIVFSEGVRAEWEDAELFEKIKLGKKIVNPKEV

SEQ ID NO: 18690 - protein, 193 aa, Campylobacter showae
  misc_feature (1)..(193): tr|M3HZS7|M3HZS7_9PROT 6-pyruvoyl tetrahydrobiopterin s ynthase OS=Campylobacter showae CC57C OX=1073353 GN=H74 0_09626 PE=4 SV=1
MIIRKMFKFENAHIVRFCSSRRCKTSIHGHSYRAEILLESNFLDNAGMVYDFGLMKQGIGCIIDSFDHCTTIYSGDRVEYKNDLKKHSARWIEIPLNPSAEQFCRIFFVMIDRLLKTTQMQNGEREVKLHSVIVHETDTGYAQCFREDAYNAKMGEVNLNEIVFSEGVRAEWEDEELFEKIKLGKKIVNPKEV

SEQ ID NO: 18691 - protein, 193 aa, Campylobacter showae
  misc_feature (1)..(193): tr|C6RE10|C6RE10_9PROT Uncharacterized protein OS=Campy lobacter showae RM3277 OX=553219 GN=CAMSH0001_1902 PE=4 SV=1
MIIRKMFKFENAHIVRFCSSRRCKTSIHGHSYKAEILLESNFLDNAGMVYDFGLMKRDIGCIIDSFDHCTTIFSGDGAEYKNDLKKHSARWIEIPLNPSAEQFCRIFFVMIDRLLKTTQMQNGEREVKLHSVIVHETDTGYAQCFREDAYNAKMGEVNLNEIVFSEGVRAEWEDEELFEKIKLGKKIVNPKEV

SEQ ID NO: 18692 - protein, 194 aa, Campylobacter sp.
  misc_feature (1)..(194): tr|A0A420VMJ8|A0A420VMJ8_9PROT 6-carboxytetrahydropteri n synthase QueD OS=Campylobacter sp. P255 OX=1979368 GN =CKA54_03870 PE=4 SV=1
MIIRKMFEFENAHIVRFCSSKRCKTSIHGHSYKVEILLESQYLDNAGMVYDFGLLKDEIKQIIDSFDHAITLYQDDDKAYLEDMKKHSQRWVSLPVNVSAENFVRVFFVLIDTLLLKTKMMNGEQGVSLKSIIVHETRTGYAQGFREDAYSEFLPKINLADIEFSQAICNEWKDKDFFKKLQDANFIFVNQKEV

SEQ ID NO: 18693 - protein, 193 aa, Campylobacter sp.
  misc_feature (1)..(193): tr|A0A1X9T3B9|A0A1X9T3B9_9PROT 6-carboxy-5,6,7,8-tetrah ydropterin synthase OS=Campylobacter sp. RM8964 OX=1660 074 GN=queD PE=4 SV=1
MIIRKIYDFENAHIVRFCSSKRCKESIHGHSYRCEVLLKSDYLDAAGMVYDFGLMKQHIRMIIDSFDHTTTLYAKDSNEYKNDMKKHSKRWIELPYNPSAEHFSRIFFVLIDKLLGQCVMQNGEKGVELYSVIVHETATGYAQCFKEDAYSPKMGIINLDEIIFSDEIKAEWSDFDFYEKLKNGFKFINPKEC

SEQ ID NO: 18694 - protein, 193 aa, Campylobacter sputorum
  misc_feature (1)..(193): tr|A0A381DJ14|A0A381DJ14_9PROT Putative 6-pyruvoyl tetr ahydrobiopterin synthase OS=Campylobacter sputorum biov ar sputorum OX=32024 GN=NCTC12475_00822 PE=4 SV=1
MIIRKIFDFENAHIVRFCSSKRCKTSIHGHSYKCEVLLESNFLDNAGMVYDFGLMKDGIKTIVDSFDHATTLYNKDDENYIKDMKKHSKRWIEIPQNPSAEQFCRIFFVLIDKLLSLSLMNNGEKNVKLHSIIVHETATSYAQCFRDDAYNENMGKIELEDIKFSPDIIDEWEDKLLFEKIKAGKIIQTKKEC

SEQ ID NO: 18695 - protein, 194 aa, Campylobacter subantarcticus
  misc_feature (1)..(194): tr|A0A0A8HBT3|A0A0A8HBT3_9PROT 6-carboxy-5,6,7,8-tetrah ydropterin synthase OS=Campylobacter subantarcticus LMG 24374 OX=1388751 GN=queD PE=4 SV=1
MIIRKMFEFENAHIVRFCSSKRCKTSIHGHSYKVEILLESQYLDNAGMVYDFGLLKDEIKQIIDSFDHAITLYQDDDKAYLEDMKKHSQRWVSLPVNVSAENFVRIFFVLIDTLLLKTKMVNGEQGVSLKSIIVHETRTGYAQGFREDAYSEFLSKINLADIEFSQAIIDEWKDKDFFKKLQDSNFVFVNQKEV

SEQ ID NO: 18696 - protein, 193 aa, Campylobacter upsaliensis
  misc_feature (1)..(193): tr|A0A381DTC0|A0A381DTC0_CAMUP Queuosine biosynthesis Q ueD, PTPS-I OS=Campylobacter upsaliensis OX=28080 GN=NC TC11540_00381 PE=4 SV=1
MIIRKMFEFENAHIVRFCSSKRCKTSIHGHSYKIEILLESKYLDNAGMVYDFGLLKNEMKQIVDSFDHAITLFKDDDEAYLKEMQKYSSRWVLLPVNVSAENFCRVFFVLIDALLEKTKMQNGEKGVKLQSIIIHETRTGYAQGFREDAYSEFLPKISLEDIEFSKAIKAEWSDESFYEKLCGTHTFINPKEL

SEQ ID NO: 18697 - protein, 193 aa, Campylobacter upsaliensis
  misc_feature (1)..(193): tr|A0A3X8R3B7|A0A3X8R3B7_CAMUP 6-carboxytetrahydropteri n synthase OS=Campylobacter upsaliensis OX=28080 GN=EHI 55_02360 PE=4 SV=1
MIIRKMFEFENAHIVRFCSSKRCKTSIHGHSYKIEVLLESKYLDNAGMVYDFGLLKNEMRQIVDSFDHAITLFKDDDKAYLEEMQRYSSRWVLLPVNVSAENFCRVFFVLIDALLEKTKMQNGEKGVKLQSIIIHETRTGYAQGFREDAYSEFLPKISLEDIEFSKAIKAEWSDESFYEKLCGTHTFINPKEL

SEQ ID NO: 18698 - protein, 193 aa, Campylobacter ureolyticus
  misc_feature (1)..(193): tr|A0A381EEL3|A0A381EEL3_9PROT Putative 6-pyruvoyl tetr ahydrobiopterin synthase OS=Campylobacter ureolyticus O X=827 GN=NCTC10941_01746 PE=4 SV=1
MIIRKIYDFENAHIVRFCSSKRCRTSIHGHSYRCEVMLSSNFLDNAGMVYDFGLMKQGIKVIIDSFDHATTLFSGDSDEYKNDIKKHSKRWIEIPQNPSAEQFCRVFFILIDRLLSLTNMNNNEKNVTLYSIIVHETATGYAQCFRDDAYNENMGKIELKDIKFSPEILADLDDKEFFTKLKNGIKFNFLKDC

SEQ ID NO: 18699 - protein, 193 aa, Campylobacter ureolyticus
  misc_feature (1)..(193): tr|S3XKC3|S3XKC3_9PROT Uncharacterized protein OS=Campy lobacter ureolyticus ACS-301-V-Sch3b OX=883165 GN=HMPRE F9309_00474 PE=4 SV=1
MIIRKIYDFENAHIVRFCSSKRCRTSIHGHSYRCEVMLSSNFLDSAGMVYDFGLMKQGIKVIIDSFDHATTLFSGDSDEYKNDIKKHSKRWVEIPQNPSAEQFCRVFFILIDRLLSLTNMNNNEKNVTLYSIIVHETATGYAQCFRDDAYNENMGKIELKDINFSPEILADLDDKEFFTKLKNGSKFNFLKGC

SEQ ID NO: 18700 - protein, 194 aa, Campylobacter volucris
  misc_feature (1)..(194): tr|A0A5C8KY15|A0A5C8KY15_9PROT 6-carboxytetrahydropteri n synthase OS=Campylobacter volucris OX=1031542 GN=FVD1 5_04220 PE=4 SV=1
MIIRKLFEFENAHIVRFCSSKRCKTSIHGHSYKVEILLESKYLDNAGMVYDFGLLKDEIKQIIDSFDHAITLYKDDDEQYLNDMKKHSKRWVMLPVNVSAENFVRVFFVLIDALLKKTKMINGEQGVNLQSIIVHETRTGYAQGFKEDAYSEFLPKINLQDIEFSKAIQEEWKNKDFYNQLKDEKFIFINQKEV

SEQ ID NO: 18701 - protein, 194 aa, Campylobacter volucris
  misc_feature (1)..(194): tr|A0A5C7E4B7|A0A5C7E4B7_9PROT 6-carboxytetrahydropteri n synthase OS=Campylobacter volucris OX=1031542 GN=FPD3 8_05230 PE=4 SV=1
MIIRKLFEFENAHIVRFCSSKRCKTSIHGHSYKVEILLESKYLDNAGMVYDFGLLKDEIKQIIDSFDHAITLYKDDDEQYLNDMKKHSRRWVMLPVNVSAENFVRVFFVLIDTLLKKTKMINGEQGVNLQSIIVHETRTGYAQGFKEDAYSEFLPKINLQDIEFSKAIQEEWKNKDFYNQLKDENFIFINQKEV

SEQ ID NO: 18702 - protein, 178 aa, Campylobacteraceae bacterium
  misc_feature (1)..(178): tr|A0A1V4R704|A0A1V4R704_9PROT 6-pyruvoyl tetrahydrobio pterin synthase OS=Campylobacteraceae bacterium 4484_16 6 OX=1956165 GN=B1H07_02935 PE=4 SV=1
MRWEISKEFEFCYGHRVWSQTLNKNFALDDCLVCRHLHGHQGKVIVHLKGDKLKDGMITDFKHLNWFKKFLDDRVDHKFILDINDPLYETMLPLYKEKKDLIYFDENYYLPDLTKIKNEPNHIREYVESFVLVDFVPTSENLSYWFISIVQKKMAKLGVEVSKVELYETSKSKSMALS

SEQ ID NO: 18703 - protein, 193 aa, Campylobacterales bacterium
  misc_feature (1)..(193): tr|A0A258X327|A0A258X327_9PROT 6-carboxytetrahydropteri n synthase QueD OS=Campylobacterales bacterium 16-40-21 OX=1970501 GN=B7Y30_04920 PE=4 SV=1
MIIRKLFKFENAHIVRGCSSERCRASVHGHSYKIEVLFESDYLDNGQMVYDFGLMKQGMKALIDSFDHSIALWSGDDVQYIEDMKRHSQRWVELPVSPSAEQFSRIIFVMIDKLLGCTQSINGEREVKLHSIIVHETDTGYAQGFHEDAYSQKMGVIDLEKIIFSEGVREEWGDPLLWEKMIANEVFINPDTV

SEQ ID NO: 18704 - protein, 149 aa, Scalindua sp.
  misc_feature (1)..(149): tr|A0A286U0Z4|A0A286U0Z4_9BACT 6-carboxy-5,6,7,8-tetrah ydropterin synthase OS=Candiadtus Scalindua japonica OX =1284222 GN=SCALIN_C27_0187 PE=3 SV=1
MTLILSEVELIVKQIVFSADKKCTGFLNMYELVVEKTFAGAHNLRAYDGECERLHGHNWRVEVTLKAEKLNELGMVMDFKDIKKRLEEILSRFDHSYLNELSEFKEENPTTENVSKVIYDNLSEQLPPEIFVAKVKTWESEKCAAAYYI

SEQ ID NO: 18705 - protein, 121 aa, Unknown
  misc_feature (1)..(121): tr|A0A1F4RYR8|A0A1F4RYR8_9BACT 6-carboxy-5,6,7,8-tetrah ydropterin synthase OS=candidate division WOR-1 bacteri um RIFOXYB2_FULL_36_35 OX=1802578 GN=A2290_08185 PE=3 S V=1
MYELMAEDTFDAAHALRGYKGSCENLHGHTWSVQVFLNGEELDKIGLLYDFREIKSKLKLVIDEFDHKNLNDLDIFKEQNPSSENLAKIIFDKLKLEIKLVSKVTVWESQTTKASYYESDD

SEQ ID NO: 18706 - protein, 132 aa, Unknown
  misc_feature (1)..(132): tr|A0A1F4RJS3|A0A1F4RJS3_9BACT 6-pyruvoyl tetrahydrobio pterin synthase (Fragment) OS=candidate division KSB1 b acterium RBG_16_48_16 OX=1798559 GN=A2V82_11890 PE=4 SV =1
YLTRHFHFSAAHRLHSELLSDEENERVYGLCNNPNGHGHNYDLEVTVKGEPDPVTGMVIDLKELKDIVEKELIVNVDHKHLNHDVDFMRGLVPTAENIAMAFWDRLKGKLPKGELYEIKLYETPRNIVIFRG

SEQ ID NO: 18707 - protein, 122 aa, Abyssubacteria bacterium
  misc_feature (1)..(122): tr|A0A3A4P249|A0A3A4P249_9BACT 6-carboxy-5,6,7,8-tetrah ydropterin synthase OS=Candidatus Abyssubacteria bacter ium SURF_5 OX=2093360 GN=queD PE=3 SV=1
MYELTIKTTFSAAHSLRDYEGPCSKVHGHNWVVEVIVSGENLQPNGILIDFGEVKEAASEVLARLDHANLNEVPPFDRLNPSSENLARWIFEEVGKRVNSKELRVSRVNIREAETSCASYFL

SEQ ID NO: 18708 - protein, 141 aa, Abyssubacteria bacterium
  misc_feature (1)..(141): tr|A0A419EQB6|A0A419EQB6_9BACT 6-carboxy-5,6,7,8-tetrah ydropterin synthase OS=Candidatus Abyssubacteria bacter ium SURF_17 OX=2093361 GN=queD PE=3 SV=1
MGKNSCADGEGDSMYELTVTCTFSAAHSLRGYEGPCSRLHGHNWVIEVVVSGETLQQNGILLDFADLKKATADAVSCLDHANLNEVPPFDAANPTSENLARWIYEQVGKRINTAACTVKRVNIREAETSCASYFEETVENT

SEQ ID NO: 18709 - protein, 147 aa, Accumulibacter sp.
  misc_feature (1)..(147): tr|A0A080MAU2|A0A080MAU2_9PROT Queuosine biosynthesis p rotein QueD OS=Candidatus Accumulibacter sp. SK-02 OX=1 453999 GN=AW06_000574 PE=4 SV=1
MLITRRLEFDAGHRIPDHLSQCRHLHGHRYAIEITLAGDIIRQDGDPANGMVMDFSEVKTLACTHLVDAWDHAFLVYAGDLPVVSFLASLPEHKTVLLDCVPTAENLAQKAFSILEAVYRDRYGRRLRLECLRLYETPNCWAEAVRE

SEQ ID NO: 18710 - protein, 147 aa, Accumulibacter aalborgensis
  misc_feature (1)..(147): tr|A0A1A8XIW2|A0A1A8XIW2_9PROT 6-carboxy-5,6,7,8-tetrah ydropterin synthase OS=Candidatus Accumulibacter aalbor gensis OX=1860102 GN=ACCAA_20171 PE=3 SV=1
MLITRRLEFDAGHRIPDHRSQCRHLHGHRYALEITLAGDIIRQAGDPANGMVMDFSEVKALARQHLVDVWDHAFLVWEGDSPIVAFLASLPAHKTVLLDCVPTAENLAQRAFAILDAVYRDTYANHLCLERLRLYETPNCWAEAIRG

SEQ ID NO: 18711 - protein, 162 aa, Acididesulfobacter guangdongensis
  misc_feature (1)..(162): tr|A0A519BHV7|A0A519BHV7_9DELT Uncharacterized protein OS=Candidatus Acididesulfobacter guangdongensis OX=2597 225 GN=EVJ46_00955 PE=4 SV=1
MIVELLGREAGLTFECMHIVPGRGDCSRIHPHFHYIDVSVDGEFDDKRRIVHLYNLKAIIARLCSTFEDKILLADYPESIQKITDKQTHYHIEINNKYYLIPKSDIFRINIPSLNIEDLAVYCIDQLITDIKNDDAFASLNYIEVVLSEGHGQRGKIKKNLR

SEQ ID NO: 18712 - protein, 162 aa, Acididesulfobacter diazotrophicus
  misc_feature (1)..(162): tr|A0A519BK57|A0A519BK57_9DELT Uncharacterized protein OS=Candidatus Acididesulfobacter diazotrophicus OX=2597 226 GN=EVG15_10030 PE=4 SV=1
MIVELLGREAGLTFECMHIVPGKGDCSRIHPHFHYIDVSVDGEFDDKRRIVHLYNLKAIINRLCSTFEDKILLAAYPEIVQKIIDKQTHYHIEINNKYYLIPKSDIFRINIPSLNIEDIAVYCIDQLIIDIKNDDAFSSLNYIEVVLSEGHGQRGKIKKNLK

SEQ ID NO: 18713 - protein, 129 aa, Acidulodesulfobacterium ferriphilum
  misc_feature (1)..(129): tr|A0A519BCV3|A0A519BCV3_9DELT 6-carboxy-5,6,7,8-tetrah ydropterin synthase OS=Candidatus Acidulodesulfobacteri um ferriphilum OX=2597223 GN=queD PE=3 SV=1
MYELKVLSSFSSAHALRGYNGKCENIHGHNWRVETTVTSNVLNEIGLVIDFKLLKKYVDGVMEILDHKFINELDFFKEVNPSAENIARYIYEELEKIIGLNEYNECKDIRITRVDVYETSSSMASYRKN

SEQ ID NO: 18714 - protein, 162 aa, Acidulodesulfobacterium ferriphilum
  misc_feature (1)..(162): tr|A0A519B9I2|A0A519B9I2_9DELT Uncharacterized protein OS=Candidatus Acidulodesulfobacterium ferriphilum OX=25 97223 GN=EVJ47_08725 PE=4 SV=1
MIVELIGKEADLTFECMHIVPGKGDCSRIHPHFHYVDVLVDGEFDDKRRIVHLYKLKAVTKRICAAFEDRILVANYPESVQRIEDKDSHYRIEINNKLYLIPKTDIFKIEIPSLNIEDLTVYFAQELARDLKEDELFKTLNYVEVTLSEGHGQRGKLRLDLK

SEQ ID NO: 18715 - protein, 126 aa, Adiutrix intracellularis
  misc_feature (1)..(126): tr|A0A139DQR3|A0A139DQR3_9DELT 6-carboxy-5,6,7,8-tetrah ydropterin synthase OS=Candidatus Adiutrix intracellula ris OX=1705730 GN=AMR96_06330 PE=3 SV=1
MFELKVTSYFAAAHNLREFYGKCEKLHGHNWFVEVRVRVRDLDKIGIALDFGRLKIILGEILELIDHQYLNELPTFKTLNPSSENITKFIFDQLAPRVGEETGGRAGLYSVSVWESKNASVTYSSD

SEQ ID NO: 18716 - protein, 118 aa, Aegiribacteria bacterium
  misc_feature (1)..(118): tr|A0A1V4MZM5|A0A1V4MZM5_9BACT 6-carboxy-5,6,7,8-tetrah ydropterin synthase OS=Candidatus Aegiribacteria bacter ium MLS_C OX=1775674 GN=AVO35_02225 PE=3 SV=1
MEVYREFSFDAAHLLPGVTPGHSCSRMHGHTFRVVVTLEGDVGAESGWVRDFGELKEACRPVIDQLDHTFLNDIPGLENPTSENLAVWIWNRLKTRLPELSMVEVGETPSTGCRYRGD

SEQ ID NO: 18717 - protein, 123 aa, Aerophobetes bacterium
  misc_feature (1)..(123): tr|A0A497E5A8|A0A497E5A8_9BACT 6-carboxy-5,6,7,8-tetrah ydropterin synthase OS=Candidatus Aerophobetes bacteriu m OX=2030807 GN=queD PE=3 SV=1
MYEIMVEMDFSAAHQVREVGGRCENLHGHTYKVQVFLEGKDLNAVGMLVDFREVKRKVKKWVDKLDHTYLNESLKDINPTAENLARYLFERLQEEINCKGVRLSRVRVAEAEDAWASYSGEED

SEQ ID NO: 18718 - protein, 121 aa, Aerophobetes bacterium
  misc_feature (1)..(121): tr|A0A523TEB3|A0A523TEB3_9BACT 6-carboxy-5,6,7,8-tetrah ydropterin synthase OS=Candidatus Aerophobetes bacteriu m OX=2030807 GN=queD PE=3 SV=1
MYELMVELHFDAAHRIVESGGRCERLHGHTWKVELFVQGKELDERGLVIDFAELKEIASRQVRELDHQYLNEVLPGMNPTTENIARYLFQKVQGEIDLERVKVSRVRVWEARDTCASYQED

SEQ ID NO: 18719 - protein, 150 aa, Amesbacteria bacterium
  misc_feature (1)..(150): tr|A0A0G1UKN1|A0A0G1UKN1_9BACT 6-carboxy-5,6,7,8-tetrah ydropterin synthase OS=Candidatus Amesbacteria bacteriu m GW2011_GWC1_48_10 OX=1618365 GN=UY22_C0008G0014 PE=4 SV=1
MIVTRQIEWDMGHRVTNHRSKCRNLHGHRYKMIVHVSGKLIDKSGDSSEGMVIDFQDIKKIIVENIHDVLDHGFMVWQKDHILMDFFKKQPDFKYISVPFVPTAENIARWSFERLKPLFIDKFGTNLKLVEIQLWETPNSLVICCKKDIV

SEQ ID NO: 18720 - protein, 150 aa, Amesbacteria bacterium; identical to SEQ ID NO: 18719
  misc_feature (1)..(150): tr|A0A1F5A3Z3|A0A1F5A3Z3_9BACT Uncharacterized protein OS=Candidatus Amesbacteria bacterium RIFOXYD1_FULL_47_9 OX=1797267 GN=A2576_00685 PE=4 SV=1

SEQ ID NO: 18721 - protein, 115 aa, Aminicenantes bacterium
  misc_feature (1)..(115): tr|A0A1F5B4Z5|A0A1F5B4Z5_9BACT 6-carboxy-5,6,7,8-tetrah ydropterin synthase OS=Candidatus Aminicenantes bacteri um RBG_19FT_COMBO_65_30 OX=1797277 GN=A2V57_07105 PE=3 SV=1
MSWTLKVRDKFSAAHYLKEYKGKCEKVHGHTFQVEVSIAVRELDRTGIGFDFTEVKKVLAASLPDHTFLNEAFPFNPSAENIARHLYGELKKSYPVKSVTVWESEDASATYAEDD

SEQ ID NO: 18722 - protein, 115 aa, Aminicenantes bacterium
  misc_feature (1)..(115): tr|A0A1F5B0F7|A0A1F5B0F7_9BACT 6-carboxy-5,6,7,8-tetrah ydropterin synthase OS=Candidatus Aminicenantes bacteri um RBG_13_63_10 OX=1797270 GN=A2Y56_16095 PE=3 SV=1
MSWRLRVRDKFQAAHFLKEYKGRCEKVHGHTFHVEVAVAVTELDRTGIGIDFTRLKAKLAEILPDHTLLNDIYPFNPSAENLAREFFGRLKTDFPVVEVTVWESEDACATYSEDH

SEQ ID NO: 18723 - protein, 116 aa, Amulumruptor caecigallinarius
  misc_feature (1)..(116): tr|A0A4Q0U7A3|A0A4Q0U7A3_9BACT 6-carboxy-5,6,7,8-tetrah ydropterin synthase OS=Candidatus Amulumruptor caecigal linarius OX=2109911 GN=C7K11_08565 PE=3 SV=1
MYYVTKQIEISGSHSLELPYESKCVRLHGHNWVITIHCRARELNADGMVVDFSRIKQKIHGYLDHGNFNELLPFNPTAENIAKWICSQVEHCWRVDVQESAHNTATYELDDPDSVA

SEQ ID NO: 18724 - protein, 141 aa, Aquarickettsia rohweri
  misc_feature (1)..(141): tr|A0A429XER4|A0A429XER4_9RICK 6-carboxytetrahydropteri n synthase OS=Candidatus Aquarickettsia rohweri OX=2602 574 GN=EIC27_05990 PE=4 SV=1
MQCTQIIGFDSAHRIIGHKGKCRMLHGHRYTLEATFESEQLNDLGMVIDFSIIKQKLNNWLNSNWDHNTILNIKDQKLGNLISNITGQKIFYLNENPTAENMANFLLLEVCPKIFNDEPVRCSKIKLYETPNCYVTTLNKV

SEQ ID NO: 18725 - protein, 110 aa, Arthromitus sp.
  misc_feature (1)..(110): tr|A0A1B7LLF7|A0A1B7LLF7_9CLOT 6-carboxy-5,6,7,8-tetrah ydropterin synthase OS=Candidatus Arthromitus sp. SFB-t urkey OX=1840217 GN=A6P36_01330 PE=3 SV=1
MFYVRKRIMLSCSHNLNLPYETPCNNLHGHNYVIYIHCKSKNLNENDMVVDFKEIKSKIHNKLDHKNINEVLNFHPTAENLAKWICHEITNCYKVEVYETENNLAIYEID

SEQ ID NO: 18726 - protein, 277 aa, Atelocyanobacterium thalassa
  misc_feature (1)..(277): tr|A0A086CGS4|A0A086CGS4_9CHRO 6-pyruvoyl-tetrahydropte rin synthase OS=Candidatus Atelocyanobacterium thalassa isolate SIO64986 OX=1527444 GN=ucyna2_00813 PE=4 SV=1
MKCVINRRAEFSASHRYYLPEWSMTKNEEQFGANSFFPGHGHNYVLFVSLEGGINEYGMIENLSLIKKIIKQQITDQFNYSYLNNICQEFSDALPTTENIARIIWERLYPHLPIINIKLFEHPRLWAEYRGNNMQATLTTQVHFSAAHRLALPNLSLEENTKIYGKCARVHGHGHNYFLDVSVTGNIDERTGMIVDLEDLQNIVNDYIVEPFDHTFFNKDVPYFVQTIPTAENIALYIAQLLKEPIKNLGVVLHKVKLTESPNNSCEIYCSQLIETL

SEQ ID NO: 18727 - protein, 131 aa, Atelocyanobacterium thalassa
  misc_feature (1)..(131): tr|A0A086CGR9|A0A086CGR9_9CHRO 6-carboxy-5,6,7,8-tetrah ydropterin synthase OS=Candidatus Atelocyanobacterium t halassa isolate SIO64986 OX=1527444 GN=ucyna2_00808 PE= 3 SV=1
MSISHSWTIYKEFRFEAAHILPHHKGKCSRLHGHSWVGRVYITKDSLYRTGSQQGMVMDFNDINNYINPILENFLDHYYLNETTGLENPTSEAVAKWIFEKLEKEGLPGLVMVEVRETCTSGARYTKSINQ

SEQ ID NO: 18728 - protein, 149 aa, Atribacteria bacterium
  misc_feature (1)..(149): tr|A0A524KSY3|A0A524KSY3_9BACT 6-carboxy-5,6,7,8-tetrah ydropterin synthase OS=Candidatus Atribacteria bacteriu m OX=2053509 GN=E4H16_03055 PE=3 SV=1
MKKLRVSKEFHFEMAHALWKYDGLCRHIHGHSYKLLVTIIGEPIEDTSDQKLGMVLDFSDLKAAVKEPVVDFFDHSLVIYKKAGDYLPEEPNEMYDKVHLFDFQPTAENLVLYIAEKVKRRLPRGVDLYSVRLYETATSFAEWYASDNQ

SEQ ID NO: 18729 - protein, 123 aa, Aureabacteria bacterium
  misc_feature (1)..(123): tr|A0A3A4RCE6|A0A3A4RCE6_9BACT 6-carboxy-5,6,7,8-tetrah ydropterin synthase OS=Candidatus Aureabacteria bacteri um SURF_26 OX=2093366 GN=queD PE=3 SV=1
MFEVTLRSQFSAAHRLENYHGKCENFHGHNWKVAVVVQRQDLDSSEMVIDFKILQDILERFLTQLDHTFLNELPFFANTNTTSERVAYVVYKHIAPDIELSGTKLTRVEVWEDEYCSAAYIPE

SEQ ID NO: 18730 - protein, 133 aa, Aureabacteria bacterium
  misc_feature (1)..(133): tr|A0A3A4R9S4|A0A3A4R9S4_9BACT 6-carboxy-5,6,7,8-tetrah ydropterin synthase OS=Candidatus Aureabacteria bacteri um SURF_26 OX=2093366 GN=C4541_06955 PE=3 SV=1
MLLLTKKTRFCCSHTLRKKEWNDQKNFEVFGQCSNLHGHNYILEVTVRGDINDESGMIINLNTVGKIVNEKIVNVIDHTNLNTDIPAFTDRVPTLENMVMVFWDWLEQALPPGTLAKLTLYETENNKIEYTKE

SEQ ID NO: 18731 - protein, 285 aa, Azambacteria bacterium
  misc_feature (1)..(285): tr|A0A350QCR1|A0A350QCR1_9BACT Uncharacterized protein OS=Candidatus Azambacteria bacterium OX=2053511 GN=DCX2 4_00060 PE=4 SV=1
MILFVNSLTVIDFSYLDLKRGMVGESYIVDAELHGSLDDTAMVFDFAKVKKVIKQAIDQLVDHKLALPLSCDALSLTQDNTVNLVHYQSERGLISLASPAEAFAGIPSLKIDEKSVSQYLEQQIKPLLPQNVESLKLTLRPEASTGFYYHYSHGLKKHDGNCQRIAHGHRSTIQIYVDGMLSPRLNKMWAERWQDGYLGSETDLCESDSLQYLTGQPESYCFRYQASQGWFELVIPQNHCEIVPCDTTVECLADYIASELKAMDNKKMYKVVAYEGVAKGAIAQL

SEQ ID NO: 18732 - protein, 146 aa, [Bacteroides] periocalifornicus
  misc_feature (1)..(146): tr|A0A0Q4B8J6|A0A0Q4B8J6_9BACT 6-carboxy-5,6,7,8-tetrah ydropterin synthase OS=Candidatus [Bacteroides] perioca lifornicus OX=1702214 GN=AL399_04595 PE=3 SV=1
MPTIRLTKEFAFEAAHFLQGYDGLCANIHGHSYRLFVTVIGQPSTDVASPKCGMLIDFGLLKQIVAERILSVLDHALMVRVGAVDGGVLAPYTRRLVELPFQPTCENLLPWIAARLAQSLPVGVSLFSLRLHETASSYAEWYAEEN

SEQ ID NO: 18733 - protein, 115 aa, Baumannia cicadellinicola
  misc_feature (1)..(115): tr|A0A088N1A5|A0A088N1A5_9GAMM 6-carboxy-5,6,7,8-tetrah ydropterin synthase OS=Candidatus Baumannia cicadellini cola OX=186490 GN=IM45_507 PE=3 SV=1
MFKNFTFESAHRLPHVPVGHKCGRLHGHSFLVRIEITAEIDLHTGWIMDFSDLKAVCKPIIDKLDHYYLNDIPGLENPTSEVLAQWIWQQLRPNLQLLSSVTIKETCTSGCVYRG

SEQ ID NO: 18734 - protein, 149 aa, Beckwithbacteria bacterium
  misc_feature (1)..(149): tr|A0A1J5B9B1|A0A1J5B9B1_9BACT 6-carboxy-5,6,7,8-tetrah ydropterin synthase OS=Candidatus Beckwithbacteria bact erium CG2_30_44_31 OX=1805035 GN=AUK18_00990 PE=3 SV=1
MRISRQIEWDMGHRVTNHKSKCRNLHGHRYKAEICVEGKLVNINGSSDEGMVMDFGDIKELANKYIHDILDHGFMVWVKDKPVAEFFKKNPDQKHIFVPFIPTAENIAAWIFVQLDKKIKDKYKTGLKLYSVKLWETPTSTAVCTRKDL

SEQ ID NO: 18735 - protein, 121 aa, Berkelbacteria bacterium
  misc_feature (1)..(121): tr|A0A554JAU4|A0A554JAU4_9BACT 6-carboxy-5,6,7,8-tetrah ydropterin synthase OS=Candidatus Berkelbacteria bacter ium Gr01-1014_85 OX=2017150 GN=CEO22_474 PE=3 SV=1
MLKTSVTKLFTFEAAHQLPDHNGKCARLHGHSYKLEVTVSGPLQNIGSSDGMVIDFADLSKIVNEQIIDQWDHRFLNDILPFRTTAENLAVETFKRLTQADLTVNRIKLWETSKAYVEVTK

SEQ ID NO: 18736 - protein, 188 aa, Borkfalkia ceftriaxoniphila
  misc_feature (1)..(188): tr|A0A4Q2KBV4|A0A4Q2KBV4_9FIRM Rubredoxin OS=Candidatus Borkfalkia ceftriaxoniphila OX=2508949 GN=ESZ91_00895 PE=4 SV=1
MKSFTTIQLQYAHRFYGFKGEAQYLHGHTGILTIEVADTIENGVNMVFPCNEIYKTAWEVLQNFDHALILREDDPLLPAVLKVYDEQGIRGGAPTNKQKGPAFKTALATAYPECRLVVTKETMTVEGMIKMVYELLKDKLNIAKITFTSGVNGASEEFTPDKSIDRCPLCGIALNENGVCPKCGYKKR

SEQ ID NO: 18737 - protein, 121 aa, Brocadia sp.
  misc_feature (1)..(121): tr|A0A399X2S3|A0A399X2S3_9BACT 6-carboxy-5,6,7,8-tetrah ydropterin synthase OS=Candidatus Brocadia sp. OX=21725 49 GN=queD PE=3 SV=1
MFELIIETDFSAAHNLREYKGQCERLHGHNWKVQVILKAEKLDTLGMVMDFRDAKRVVGEIINRFDHIYLNELADFAEVNPTTENLSKILYEELRRELPAGVKVEKVTTWESDRCGASYFE

SEQ ID NO: 18738 - protein, 121 aa, Brocadia sinica
  misc_feature (1)..(121): tr|A0A136M729|A0A136M729_9BACT 6-carboxy-5,6,7,8-tetrah ydropterin synthase OS=Candidatus Brocadia sinica OX=79 5830 GN=UZ01_02092 PE=3 SV=1
MFELVVETDFSAAHNLREYKGQCERLHGHNWKVQVVLKAEKLDKLGMVMDFRDAKRIIGEVINRFDHVYLNDLPDFKVLNPTTENLSKILYDGLKNVLPIGVGVAKVTTWESDRCGAAYFE

SEQ ID NO: 18739 - protein, 121 aa, Brocadiaceae bacterium
  misc_feature (1)..(121): tr|A0A5C6F0N5|A0A5C6F0N5_9BACT 6-carboxy-5,6,7,8-tetrah ydropterin synthase OS=Candidatus Brocadiaceae bacteriu m B188 OX=2528032 GN=queD PE=3 SV=1
MFELIIETDFAAAHNLREYKGQCERLHGHNWKVQVILKSEKLDKSGMVMDFRDAKRIIGEIMNRFDHVYLNELADFAEINPTTENLSKILYGELRHGLPNGVKVEKVTTWESDRCGASYFE

SEQ ID NO: 18740 - protein, 121 aa, Brocadiaceae bacterium
  misc_feature (1)..(121): tr|A0A5C6DN77|A0A5C6DN77_9BACT 6-carboxy-5,6,7,8-tetrah ydropterin synthase OS=Candidatus Brocadiaceae bacteriu m S225 OX=2528033 GN=queD PE=3 SV=1
MYELVVEKTFAGAHNLRGYDGDCEKLHGHNWRVEVTLKAEKLNELGMVVDFKIVKKKLGEILSHFDHSYLNELGEFKQENPTTENVSKAIYNSLSAQLPPEIFVAKVKTWESEKCAAAYYV

SEQ ID NO: 18741 - protein, 146 aa, Burkholderia pumila
  misc_feature (1)..(146): tr|A0A0J7JIA5|A0A0J7JIA5_9BURK 6-carboxytetrahydropteri n synthase Queuosine biosynthesis QueD, PTPS-I OS=Candi datus Burkholderia pumila OX=1090375 GN=BPMI_02847 PE=4 SV=1
MQITRKLEFDTGHRIPDHRSQCRTLHGHRYVLEITLQGDVVDTEGAPDHGMVMDFADVKSLAMEHLVNKWDHAFIVYEGDVKVREFLQSMSDHKTVVLDRIPTVENLAAVAFRILADVYDAHYGVNLQLKRVRLFETPNCWADVER

SEQ ID NO: 18742 - protein, 148 aa, Burkholderia verschuerenii
  misc_feature (1)..(148): tr|A0A0L0M6E2|A0A0L0M6E2_9BURK 6-carboxy-5,6,7,8-tetrah ydropterin synthase OS=Candidatus Burkholderia verschue renii OX=242163 GN=BVER_05082 PE=3 SV=1
MQTITRKLEFDAGHRIPDHRSQCRNLHGHRYVLEITLQGDLVDVEGVPDRGMVMDFADVKSLAMEHLVNKWDHAFIVYEGDVKVREFLQTLSDHKTVVLDRIPTVENLAAVAFGILAEVYDAHYGVNLKLKRVRLYETPNCWADVERA

SEQ ID NO: 18743 - protein, 124 aa, Chloroploca asiatica
  misc_feature (1)..(124): tr|A0A2H3KHZ5|A0A2H3KHZ5_9CHLR 6-carboxy-5,6,7,8-tetrah ydropterin synthase OS=Candidatus Chloroploca asiatica OX=1506545 GN=A9Q02_05690 PE=3 SV=1
MFEIGVSARFEAAHRLVGDFGPATRMHGHTYRIEVVIRGPRLQPDGTLIDITRLQTALDAIVNDLHYRDLADVPGLAQINTTAENLAHYCWQRLAQALQGSPIVTLTVRIWENPDAYAAYEDQF

SEQ ID NO: 18744 - protein, 148 aa, Chryseobacterium massiliae
  misc_feature (1)..(148): tr|A0A3D9BDX4|A0A3D9BDX4_9FLAO 6-carboxy-5,6,7,8-tetrah ydropterin synthase OS=Candidatus Chryseobacterium mass iliae OX=204089 GN=DRF68_06055 PE=3 SV=1
MIRITKIFTFETAHVLYNYDGKCKNMHGHSYKLFVTVKGKPVNDLENPKNGMVVDFGDIKSIVKSEIVDVWDHAVLINGLSPHRELGEDLEEKGHKVIYCTFQPTCENMLYAIAAKIKSKLPEGISLAYLKLHETENSYGEWFAEDNQ

SEQ ID NO: 18745 - protein, 122 aa, Cloacimonas sp.
  misc_feature (1)..(122): tr|A0A1V4R6Y5|A0A1V4R6Y5_9BACT 6-carboxy-5,6,7,8-tetrah ydropterin synthase OS=Candidatus Cloacimonas sp. 4484_ 143 OX=1956164 GN=B1H06_04770 PE=3 SV=1
MYKLNVTSHFASAHKLLGYEGLCKNLHGHNWKVRVGIKCQNTDKIGMTIDFGDVKKALNDIMEVLDHSYLNELEPFKEENPTSENIAKYIYEEMKTKISVEGCKIADVEVWESERSSMIYYE

SEQ ID NO: 18746 - protein, 123 aa, Cloacimonas sp.
  misc_feature (1)..(123): tr|A0A3D3EVS8|A0A3D3EVS8_9BACT 6-carboxy-5,6,7,8-tetrah ydropterin synthase OS=Candidatus Cloacimonas sp. OX=20 53534 GN=queD PE=3 SV=1
MYLLNVSDNFSAAHRLCGYQGACSNLHGHNWKVRVGIECSKLDEIGMALDYSIIKSILKSILDQFDHEYLNDLPLLQGQNPTSENLARIIYIEMEKGLADYDAGIKEVEIYESERSSVIYSNA

SEQ ID NO: 18747 - protein, 123 aa, Cloacimonetes bacterium
  misc_feature (1)..(123): tr|A0A2N2L2S9|A0A2N2L2S9_9BACT 6-carboxy-5,6,7,8-tetrah ydropterin synthase OS=Candidatus Cloacimonetes bacteri um HGW-Cloacimonetes-2 OX=2013734 GN=queD PE=3 SV=1
MYKLNVTDSFSAAHRLCGYEGACKNLHGHNWKVRIAITCSQLDEIGMALDYGIIKKALAEVLESLDHQYLNDLEALNGMNPTSENLARHIFMELSKQITKPGCKVAEVEIFESERSSVVYTND

SEQ ID NO: 18748 - protein, 121 aa, Cloacimonetes bacterium
  misc_feature (1)..(121): tr|A0A523SIL1|A0A523SIL1_9BACT 6-carboxy-5,6,7,8-tetrah ydropterin synthase OS=Candidatus Cloacimonetes bacteri um OX=2030808 GN=queD PE=3 SV=1
MFIISIKTDFSAAHHIQGYKGNCSELHGHNYHVEVSVRAHKVNSIGMCVDFRNLKEIAETAISGLDHKNLNTLPFFKGKNPTAEHIAQFIFKRITDNLKGSFSLDSVKVWETDKYAVTYSE

SEQ ID NO: 18749 - protein, 126 aa, Coatesbacteria bacterium
  misc_feature (1)..(126): tr|A0A1W9S084|A0A1W9S084_9BACT 6-carboxy-5,6,7,8-tetrah ydropterin synthase OS=Candidatus Coatesbacteria bacter ium 4484_99 OX=1970774 GN=B6D57_04035 PE=3 SV=1
MGYIIRVNSKISSSHYLRGYSGKCDRAHGHNFFVEMEIEGGELDKIGILIDFRDAKRILNEFLDKLDHTVLNETEYFKDLNPTAENIAMTIYENTADEVSDISGGKAKVSAIKVWETDENCAEYRP

SEQ ID NO: 18750 - protein, 128 aa, Coatesbacteria bacterium
  misc_feature (1)..(128): tr|A0A1F5FEU0|A0A1F5FEU0_9BACT 6-carboxy-5,6,7,8-tetrah ydropterin synthase OS=Candidatus Coatesbacteria bacter ium RBG_13_66_14 OX=1817816 GN=A2Y64_03770 PE=3 SV=1
MYLLTVTGSFSSAHALRDYGGPCERLHGHNWRVEVTVSARELDARGLALDFRVLRDHLGEICDRLDHRLLNELEPFDRLNPTSENLARYLAGEMESRLRDADPPVRVREVRVWESEGSSAAWRDGEPE

SEQ ID NO: 18751 - protein, 210 aa, Competibacter denitrificans
  misc_feature (1)..(210): tr|W6M9B9|W6M9B9_9GAMM Uncharacterized protein OS=Candi datus Competibacter denitrificans Run_A_D11 OX=1400863 GN=BN873_460008 PE=4 SV=1
MAVGRNRLHSNKRFAARYNKTVCNLGGAIRRFNGGDNMTGHDQRSWKLHIRKDNLKFSAAHMTVFPDGSKESLHGHNYEVTLEVELTAPTLAQMLSYAAFKQALRSVCDSWDEKVLLAGANPWFILLPGPEGEYNFRLCGKRYVLPMDEVAILDVDNITVENLTQLFFERFWHVLTQDQAVSWRERILAARLRIDESRGQGATYSVRFNR

SEQ ID NO: 18752 - protein, 134 aa, Competibacter denitrificans
  misc_feature (1)..(134): tr|W6M726|W6M726_9GAMM Uncharacterized protein OS=Candi datus Competibacter denitrificans Run_A_D11 OX=1400863 GN=BN873_300040 PE=4 SV=1
MMYAVCVRDHFMIAHSFRGQTFGPAQRLHGATYVVDLELRRPDLDPDGVVVDISKLSDCLRAVLAELNHRNLDEIPEFAGRNTTTEFLAREIFDRMAARIDEGQLGPNANGLSTMRVVLHESHTAWAAYEGPLA

SEQ ID NO: 18753 - protein, 364 aa, Competibacteraceae bacterium
  misc_feature (1)..(364): tr|A0A433HXT4|A0A433HXT4_9GAMM 6-pyruvoyl tetrahydropte rin synthase OS=Candidatus Competibacteraceae bacterium OX=2053538 GN=EKK68_05275 PE=4 SV=1
MMERLYTIAAAPFEAACRVDILPPGHRSRRLHGHSFLSRIRAELPEGWGPFPGGETDDLAERLREAVAPLDYTLLNEHLPVPTDENLARWLRARLALPGITTVGIQSSRDQGVDLDGRDHAHLWRRFRFEAAHQLPKVPPGHPCGQMHGHGFEVIVHAHQPLLGQDMGMDYGQLDQCWTPLGAALDRACLNDLPGLDNPTSERLAAWLWARLQPQLPALSWITVYETATAGCHYDGRHYRIWKERRFESALRLNRAPLGDPRRRLHGHSYQIRLHLTAPLDEVMGWTVDYGEVKALFDSAYRQLDHHRLDQLAGLDDADPASLLHWIKAALAERLPPLDRIDLEQTPGCGATLCWGEAEPALPG

SEQ ID NO: 18754 - protein, 361 aa, Competibacteraceae bacterium
  misc_feature (1)..(361): tr|A0A3S0WNQ8|A0A3S0WNQ8_9GAMM 6-pyruvoyl tetrahydropte rin synthase OS=Candidatus Competibacteraceae bacterium OX=2053538 GN=EKK69_00665 PE=4 SV=1
MNERIYTSAAASFEAARHIPGLPEGHRAGRLHGHGFQVRVRALLPPDWAPFPGAESDALSERLRAVAAPLDYALLNEHLPVPTDAELAHWLWARLELPGLERISLGSAPGQGVTLDAHHRVGCWRRFRFEAAHQLPNVPAGHPCGRMHGHGFEVILHAGAGAEPELDGERLESAWAPLQAELHHACLNTLPGLENPTSERLAAWIWQRLHGTLPTLSWVTVYETASAGCHYQGTQYRIWKERLFDSALSLRRAPADDSRHRLHGHSYRIRLHLRAPLDAVMGWTVDYGEVKARFEPVYRELDHQRLDALAGPDDADPASLLRWMRPVLAGRLPALERIDLEQTPGCGAVLYWGAADPLPPD

SEQ ID NO: 18755 - protein, 118 aa, Contendobacter odensis
  misc_feature (1)..(118): tr|A0A2G6PFL5|A0A2G6PFL5_9GAMM 6-carboxy-5,6,7,8-tetrah ydropterin synthase OS=Candidatus Contendobacter odensi s OX=1400860 GN=queD PE=3 SV=1
MYKISKEYHFSASHRLLQLPVDHPCARLHGHNYIIEVELRAETLNRFGFVRDYRELDRLKAYIDDNLDHRYLNEVLGDDCVTAEQIARYFYDWCKSKWPEVTAVCVRETPKTSAEYRP

SEQ ID NO: 18756 - protein, 127 aa, Cyclonatronum proteinivorum
  misc_feature (1)..(127): tr|A0A345UKQ9|A0A345UKQ9_9BACT 6-carboxy-5,6,7,8-tetrah ydropterin synthase OS=Candidatus Cyclonatronum protein ivorum OX=1457365 GN=CYPRO_1811 PE=3 SV=1
MPRWKLNTEFTIDSAHFIQGYDGKCGRMHGHTYKVRMTAISTKLNPSAYLKTPDMVCDFKELKWAAADFEKGGLDHAVLNEVIPVVTTAERIAEYLHTETMKRLPDGIELIVTVWETENNWVEYTAD

SEQ ID NO: 18757 - protein, 145 aa, Cyclonatronum proteinivorum
  misc_feature (1)..(145): tr|A0A345UM49|A0A345UM49_9BACT 6-pyruvoyltetrahydropter in/6-carboxytetrahydropterin synthase OS=Candidatus Cyc lonatronum proteinivorum OX=1457365 GN=CYPRO_2305 PE=4 SV=1
MVYVTRKVHFNAAHRLHNPKKSDEWNAETYGDCNHINWHGHNYVMEVTVAGMPDPDTGYVIDLGDLKRILNDKIINKCDHRNLNIDVDFLKDTIPSTENLVIKFFEQIKDDVERASSTGSRLFSVKLFETERNFAEYCPYMSLNY

SEQ ID NO: 18758 - protein, 150 aa, Dactylopiibacterium carminicum
  misc_feature (1)..(150): tr|A0A272ENF5|A0A272ENF5_9RHOO 6-carboxytetrahydropteri n synthase QueD OS=Candidatus Dactylopiibacterium carmi nicum OX=857335 GN=queD PE=4 SV=1
MLITRRLEFDAGHRIPDHRSLCRHLHGHRYAIEVTVSGDITRMDGNPRNGMVVDFSEVKTVVREYIVDCWDHAFLAYEGDRQIIEFLASLPDHRTVILDIVPTAENLAAKAFSILAPRIAELCDKTLRLENVRIYETPNCWADAGPAAKS

SEQ ID NO: 18759 - protein, 161 aa, Dadabacteria bacterium
  misc_feature (1)..(161): tr|A0A3M1KL37|A0A3M1KL37_9BACT 6-carboxytetrahydropteri n synthase OS=Candidatus Dadabacteria bacterium OX=2080 303 GN=D6761_02550 PE=4 SV=1
MTLRPPVEHFRRSPDPLFVEQQHMPQPHIRITRRFHFSASHRYWQPAWTDEANEQVFGKNIHSHGHNYILEVTIEGPIDPDTGMILNLTDVKHRVNDLLEKYYDHRNLNVDHPAFASAQPTTERIALQLAQEVRELIDDGHVRLYRIRLWETEDLYAEVIC

SEQ ID NO: 18760 - protein, 143 aa, Dadabacteria bacterium
  misc_feature (1)..(143): tr|A0A520V8D7|A0A520V8D7_9BACT 6-carboxytetrahydropteri n synthase OS=Candidatus Dadabacteria bacterium OX=2080 303 GN=EVA30_04990 PE=4 SV=1
MAKFTTLTKKIEFSSSHRYWRDEWSEAKNLEVFGKCTSKYGHGHNYVLETTVEGPVDFETGMIINIYRLKPILKETLKQFDHKFLNKDTDYFDDLIPTTENFAKILYECIDEKLSKEECNLLKVRLYETKDLFVDYWKDKDEG

SEQ ID NO: 18761 - protein, 154 aa, Daviesbacteria bacterium
  misc_feature (1)..(154): tr|A0A0G0WGN6|A0A0G0WGN6_9BACT 6-carboxy-5,6,7,8-tetrah ydropterin synthase OS=Candidatus Daviesbacteria bacter ium GW2011_GWB1_41_5 OX=1618429 GN=UU67_C0081G0004 PE=4 SV=1
MKILKQIEWDMGHRVMNHVSKCRNLHGHRYKAEICLEGNLIDINGDSSEGMVMDFEAIKRIAVEYIQDILDHGFMIWEKDKLLMDFFKKNKDLKHIVVPFVPTSERIAAWIFSELDTRFKDIYKTGLKLHSIKLWETPTSVALCNRSDIKNGTI

SEQ ID NO: 18762 - protein, 140 aa, Deianiraea vastatrix
  misc_feature (1)..(140): tr|A0A5B8XDR1|A0A5B8XDR1_9RICK 6-carboxy-5,6,7,8-tetrah ydropterin synthase OS=Candidatus Deianiraea vastatrix OX=2163644 GN=Deia_00609 PE=4 SV=1
MINCTRILEFDAGHRLIRHEGKCRFLHGHRYKMEISFCVADKLDDIGRVIDFGVIKQILGTWIDENLDHTTILHEDDRKLGDFVENHTKQKIYYMKENPTAENIASHIFNDIVPILFHNKGIICTRIKLHETPNCSVCVD

SEQ ID NO: 18763 - protein, 122 aa, Delongbacteria bacterium
  misc_feature (1)..(122): tr|A0A348P000|A0A348P000_9BACT 6-carboxy-5,6,7,8-tetrah ydropterin synthase OS=Candidatus Delongbacteria bacter ium OX=2044594 GN=queD PE=3 SV=1
MYEIIVKHHFSSAHKLINYDGECKNLHGHNWKVKVFARAEELNNIGISLDFKEFKKIARDEIDKFDHVFLNEHPTFNGINPTAENIARILFQDISEKVNDGNLKIHMIEVWESDNNGVRYFQ

SEQ ID NO: 18764 - protein, 122 aa, Delongbacteria bacterium
  misc_feature (1)..(122): tr|A0A2G6P0N1|A0A2G6P0N1_9BACT 6-carboxy-5,6,7,8-tetrah ydropterin synthase OS=Candidatus Delongbacteria bacter ium OX=2044594 GN=queD PE=3 SV=1
MYEIFVKMHFSSAHRLISYNGECSKLHGHNWEVMVYARTSKLNEIGIALDFKEFKKSVKEEIDKFDHVYLNDLEDYKDMNPTAENIARVLYNTLSKKINTDDIKIHMVEIWESEKQGARYFE

SEQ ID NO: 18765 - protein, 175 aa, Dependentiae bacterium
  misc_feature (1)..(175): tr|A0A1V5UBB3|A0A1V5UBB3_9BACT 6-pyruvoyl tetrahydropte rin synthase OS=Candidatus Dependentiae bacterium ADurb .Bin246 OX=1852839 GN=BWY33_00306 PE=4 SV=1
MWEISKEFDFCYGHRVWSQSLNVEFSLDSCLMCRHLHGHQGKVIVYLKSDTLKSGMVTDFKHLNWFKKFLDDVIDHKFIIDINDPLFKTLLPNIDKKDLISFKEGYKTVDLTNFKNELLELYESYIIVDFVPTSENISAWLLKIVQNKMDKLNIKVSKVEFLETPKSKSTFYARS

SEQ ID NO: 18766 - protein, 118 aa, Desantisbacteria bacterium
  misc_feature (1)..(118): tr|A0A1J4SBK8|A0A1J4SBK8_9BACT 6-carboxy-5,6,7,8-tetrah ydropterin synthase OS=Candidatus Desantisbacteria bact erium CG1_02_38_46 OX=1817893 GN=AUJ66_05355 PE=3 SV=1
MFELKVSANFSAAHKLRKYQWKCARLHGHNWKVDVYIRSNLLNKIGMIKDAREVKKILKKFLEKLDHKYLNEMVFFKERNPTSENIARYIYDGLKKRLPQMAEVRVHESDSAAVSYRA

SEQ ID NO: 18767 - protein, 120 aa, Desantisbacteria bacterium
  misc_feature (1)..(120): tr|A0A2M7SEJ8|A0A2M7SEJ8_9BACT 6-carboxy-5,6,7,8-tetrah ydropterin synthase OS=Candidatus Desantisbacteria bact erium CG_4_10_14_0_8_um_filter_48_22 OX=1974543 GN=queD PE=3 SV=1
MFELRVGTDFSAAHSIRGHKGRCAKLHGHNWKVEVFLRSGKLDKLGMVRDAGEVKDIAEGFVNKNLDHAFLNQIDFFRKNNPSSENIAKFIFSGLKKILPNLVEVCVSESDSVRVVYRKK

SEQ ID NO: 18768 - protein, 123 aa, Desulfofervidus auxilii
  misc_feature (1)..(123): tr|A0A127AR58|A0A127AR58_9DELT 6-carboxy-5,6,7,8-tetrah ydropterin synthase OS=Candidatus Desulfofervidus auxil ii OX=1621989 GN=HS1_001870 PE=3 SV=1
MYSLKVVSYFSAAHRLRDYHGKCEVLHGHNWKVEVEIKAKEVGKNGMVMDFKVLKSLLRECLERLDHGYLNEIPPFDKENPTSELIARYIFKTLKDKVSSKASLGKVSVWESETTCASYWEND

SEQ ID NO: 18769 - protein, 129 aa, Desulforudis sp.
  misc_feature (1)..(129): tr|A0A3A6N812|A0A3A6N812_9FIRM 6-carboxy-5,6,7,8-tetrah ydropterin synthase OS=Candidatus Desulforudis sp. OX=2 093368 GN=queD PE=3 SV=1
MYELTVRASFAAAHRLCNHPTKCRHLHGHTWDVELTVAGRDLNADGMLLDFGHLKSLLREIVDGLDHSYLNEHPAFGGEGPDSNPTAENIARHIFTKVKNDLVRNHPAVRLRSVTVWESPKSSVRYTEE

SEQ ID NO: 18770 - protein, 126 aa, Desulforudis audaxviator
  misc_feature (1)..(126): tr|A0A3S8S573|A0A3S8S573_9FIRM 6-carboxy-5,6,7,8-tetrah ydropterin synthase OS=Candidatus Desulforudis audaxvia tor OX=471827 GN=Daudx_1194 PE=3 SV=1
MFELRVRSSFAAAHRLHEYPDQCRRLHGHNWEVEAVVVGPELNAAGMLVDFALLKNELRQVVGALDHCYLNELAAFGPEKNPTAENIARHIFTELKARLAGIGPAGVLTAVTVWESPAAAATYREG

SEQ ID NO: 18771 - protein, 125 aa, Desulfosporosinus infrequens
  misc_feature (1)..(125): tr|A0A2U3LU99|A0A2U3LU99_9FIRM 6-carboxy-5,6,7,8-tetrah ydropterin synthase OS=Candidatus Desulfosporosinus inf requens OX=2043169 GN=SBF1_820014 PE=3 SV=1
MFQVCVQEHFDAAHFIRNYNGKCANLHGHRWTVVVCVEGKQLDHLGMLIDFSEVKQTIQKTLTSLDHSLLNDLSYFGPEGVNPTAEHLAQFMFVEFKKDFLLAEKRLAWVKVYESPDAWAIFKED

SEQ ID NO: 18772 - protein, 147 aa, Desulfovibrio trichonymphae
  misc_feature (1)..(147): tr|A0A1J1E3Q7|A0A1J1E3Q7_9DELT 6-carboxy-5,6,7,8-tetrah ydropterin synthase OS=Candidatus Desulfovibrio trichon ymphae OX=1725232 GN=queD PE=3 SV=1
MARSLWRLTVRDEFSAGHALRGYEGKCENLHGHNFAVEVTVEGRCLTPDTSLLLDFKTLKNVLKDVLEDLDHHTLNQTPPFDAVNPSSENLSRYIWQTVAAHLAGHPDRQAAAVRLVSVSVSEKSAQSATYMEIQENGESDTPSMPS

SEQ ID NO: 18773 - protein, 156 aa, Dojkabacteria bacterium
  misc_feature (1)..(156): tr|A0A3M0Z5Y4|A0A3M0Z5Y4_9BACT 6-carboxytetrahydropteri n synthase OS=Candidatus Dojkabacteria bacterium OX=209 9670 GN=D6810_00645 PE=4 SV=1
MKVIKELQWDMGHRITNHRSQCRNLHGHRYKAEICIEGDLVGIEGISNEGMVIDFGDIKKIAVKHIHNVLDHGFMVWNKDKVLMEYFKKNADQKHIIVSFVPTCENIAAWIFNQLDSHIKDRYKNGLRLHSIKLWETPTSVVICTRNDVKKLTKRL

SEQ ID NO: 18774 - protein, 172 aa, Dormibacter sp.
  misc_feature (1)..(172): tr|A0A2W5Z137|A0A2W5Z137_9BACT Uncharacterized protein OS=Candidatus Dormibacter sp. RRmetagenome_bin12 OX=259 9630 GN=DLM65_11970 PE=4 SV=1
MAVDEQESVASHSRLWYAAMEASLELARADIGFSAAHFSIHQGRSERLHGHNYRVSLRARGTVDEEGTVVDFSALKGALRDLCAELDERMLVPTRSPHVRVEESADGISLIEGSRRFLIPRGDAVLLALVNTTCECLAGHLLGALRGRLGSTGYRLEVRVEEIPGQGASVSE

SEQ ID NO: 18775 - protein, 150 aa, Dormibacteraeota bacterium
  misc_feature (1)..(150): tr|A0A2W6AMY7|A0A2W6AMY7_9BACT 6-pyruvoyl tetrahydrobio pterin synthase OS=Candidatus Dormibacteraeota bacteriu m OX=2052315 GN=DLM67_03955 PE=4 SV=1
MLKISPDQGQASGLGSPTSLVVTRRVTFAAAHVLRRPEWEERRNQEVFGQCAGDHGHNYVLEVSVGGEPDPETGMVINLKDLDRTVKEAVVRHVDHRHLNHDVSFLEGVIPTAENLALAFWQQLDGRLGEGRLRRLRLVESENNSVEVTR

SEQ ID NO: 18776 - protein, 123 aa, Edwardsbacteria bacterium
  misc_feature (1)..(123): tr|A0A1F5RCL3|A0A1F5RCL3_9BACT 6-carboxy-5,6,7,8-tetrah ydropterin synthase OS=Candidatus Edwardsbacteria bacte rium GWF2_54_11 OX=1817851 GN=A2024_03975 PE=3 SV=1
MYYVSAVQHFSAAHSLRGYQGKCENLHGHNYKVEVELKGLELTKNGMVVDFTDLRAALDKVLARMDHKHLNEIKPFDRINPTAENIAKLVYEEMLLKFSAKKIKVSQVVVWESEGCKATYGPK

SEQ ID NO: 18777 - protein, 123 aa, Edwardsbacteria bacterium; identical to SEQ ID NO: 18776
  misc_feature (1)..(123): tr|A0A3D0J6J3|A0A3D0J6J3_9BACT 6-carboxy-5,6,7,8-tetrah ydropterin synthase OS=Candidatus Edwardsbacteria bacte rium OX=2053551 GN=queD PE=3 SV=1

SEQ ID NO: 18778 - protein, 122 aa, Eisenbacteria bacterium
  misc_feature (1)..(122): tr|A0A538TW53|A0A538TW53_9BACT 6-carboxy-5,6,7,8-tetrah ydropterin synthase OS=Candidatus Eisenbacteria bacteri um OX=2212470 GN=queD PE=3 SV=1
MRVELSQTFRFEAAHRLPMVPMDHKCFRLHGHSFVVDVTLAGEVDERMGWLLDFADIAAVVEPILLGELDHRTLNDVKGLENPTSERLCRWLWGRLAPALPGLGAITVHETCAARCTYRGAS

SEQ ID NO: 18779 - protein, 120 aa, Eisenbacteria bacterium
  misc_feature (1)..(120): tr|A0A538TNH8|A0A538TNH8_9BACT 6-carboxy-5,6,7,8-tetrah ydropterin synthase OS=Candidatus Eisenbacteria bacteri um OX=2212470 GN=queD PE=3 SV=1
MRVRLARDFTFEAAHLLPKAPAGHKCRRLHGHSFRVEVQVEGEVDPETGWLLDFGDIKDSIEPLRLQLDHYYLNEIKGLENPTSENLCAWIWERLKPKLPLLARVTVHETCEARCEYEGK

SEQ ID NO: 18780 - protein, 123 aa, Electronema sp.
  misc_feature (1)..(123): tr|A0A521G2A8|A0A521G2A8_9DELT 6-carboxy-5,6,7,8-tetrah ydropterin synthase OS=Candidatus Electronema sp. GS OX =2005002 GN=CDV28_11154 PE=3 SV=1
MFDIFIKTHFSGGHHLREYPGNCERPHGHNWKVKVTVRTQQLDQLGMGVDFKVLKQQVNAVVDALDHHDLNEHPAFQDRNPSSEHIAQFLFQQLHETLTTARYQLYSIEVRETDSSGVIYYGQ

SEQ ID NO: 18781 - protein, 123 aa, Electrothrix aarhusiensis
  misc_feature (1)..(123): tr|A0A444IRP5|A0A444IRP5_9DELT 6-carboxy-5,6,7,8-tetrah ydropterin synthase OS=Candidatus Electrothrix aarhusie nsis OX=1859131 GN=H206_03471 PE=3 SV=1
MFDVFIKTHFSGGHHLRNYPGNCEKPHGHNWKVKVSVRVHELDALGMGIDFKVLKEKVNGVVDELDHCDLNEHPTFQDRNPSSEHIATFLFEQLTPVLSADRYSLYSVEVRETDTSGVIYYGA

SEQ ID NO: 18782 - protein, 123 aa, Electrothrix communis
  misc_feature (1)..(123): tr|A0A444J8Z6|A0A444J8Z6_9DELT 6-carboxy-5,6,7,8-tetrah ydropterin synthase OS=Candidatus Electrothrix communis OX=1859133 GN=VT98_10324 PE=3 SV=1
MYDIFIKTHFSGGHHLRDYPGNCEKPHGHNWKVKVSVRVHELDALGMGIDFKVLKEKVNKVVDELDHCDLNEHPAFQDRNPSSEHIAAFLFEQMAQVLNTDRSALYSVEVRETDSSGVIYYGA

SEQ ID NO: 18783 - protein, 287 aa, Endobugula sertula
  misc_feature (1)..(287): tr|A0A1D2QT42|A0A1D2QT42_9GAMM Uncharacterized protein OS=Candidatus Endobugula sertula OX=62101 GN=AB835_0211 0 PE=4 SV=1
MHLFVDNFTNIDFSYLDIRRGLVGETWLVSITLEGLLDDQGMVCDFGTVKKTVRDWLDTYIDHCLVVPGQATGLHKEQTEHCSYINWLYQDSHNKDKRLHCNSPKQAITFIDSDTVTPESMANWCIQQLSLLLTDTIHKVKLSFAPERIEHAFYHYSHGLKKHVGNCQRIAHGHRSTIAITENGKRNHELETQWCAQWQDIYIGSQEDLTATTRNEGVEYYHFTYQARQGDFELMVAAEDCYLINTDTTVELIAQHIADTLGEQYPDREFVVKAYEGIGKGAVATNR

SEQ ID NO: 18784 - protein, 153 aa, Endolissoclinum sp.
  misc_feature (1)..(153): tr|A0A1Z8S6Q6|A0A1Z8S6Q6_9PROT Uncharacterized protein OS=Candidatus Endolissoclinum sp. TMED37 OX=1986638 GN= CBB97_21300 PE=4 SV=1
MLYFSTKTYGHDRGLSCAFRQPLATHSHCQLIHGYSLAFSFKFAARHLDDKNWVVDFGGLKELKVWLENMFDHTLAVDKDDPHIEHLMYLESKGLADVRVMDGVGCEKFAEHAFDFADTLIERITEGRCVLVSCECSEHGANSAIYEREILEV

SEQ ID NO: 18785 - protein, 150 aa, Endolissoclinum sp.
  misc_feature (1)..(150): tr|A0A1Z8RVP9|A0A1Z8RVP9_9PROT Uncharacterized protein OS=Candidatus Endolissoclinum sp. TMED37 OX=1986638 GN= CBB97_25250 PE=4 SV=1
MAQYLSTKTYGHNIGLACVFRQPNADHSHCHLLHGYSLQFKFTFGCDELDNKNWAVDFGGLKPLKAWLEDMFDHKLALDKADPFLETFKHLESLDLAEIRMFDGVGAEKFAEHAFNFADKLIREKTDNRCYVVEVECAEHGANSAIYRRT

SEQ ID NO: 18786 - protein, 122 aa, Endomicrobium trichonymphae
  misc_feature (1)..(122): tr|A0A1E5IJ00|A0A1E5IJ00_9BACT 6-carboxy-5,6,7,8-tetrah ydropterin synthase OS=Candidatus Endomicrobium trichon ymphae OX=1408204 GN=ATZ36_06765 PE=3 SV=1
MKYKLSVTRSFSSAHCLREYKGRCENLHGHNWKIRAAFYGIELDDTGVLIDFTDIKLHLSKIVNYLDHKFLNEIVPFDRINPTAENIAAFVLGRLKDIETKSAKVCEVEVWENESSSAVVSI

SEQ ID NO: 18787 - protein, 122 aa, Endomicrobium trichonymphae
  misc_feature (1)..(122): tr|A0A1E5IFF5|A0A1E5IFF5_9BACT 6-carboxy-5,6,7,8-tetrah ydropterin synthase OS=Candidatus Endomicrobium trichon ymphae OX=1408204 GN=ATZ36_02295 PE=3 SV=1
MKYKLSGTRSFSSAHCLREYKGRCENLHGHNWKIRAAFYGTELDDTGMLIDFTYIKMHLNEIINYLDHKFLNEIVPFDRVNPTAENIAAFVLGRLKDIETKNAKVCEVEVWESESSSVVVSI

SEQ ID NO: 18788 - protein, 120 aa, Enterovibrio luxaltus
  misc_feature (1)..(120): tr|A0A291BB84|A0A291BB84_9GAMM 6-carboxy-5,6,7,8-tetrah ydropterin synthase OS=Candidatus Enterovibrio luxaltus OX=1927128 GN=BTN50_1858 PE=3 SV=1
MHTELFKEFMFEAAHHLPHVSKGHKCGRLHGHSYHVRIYVTGEVNPYTGWIIDFAEIKIAFKPLYDRLDHYYLNDIKGLENPTSEVLAKWIWEQLLPELPCLSKIMIKETCTAGCIYTGD

SEQ ID NO: 18789 - protein, 120 aa, Enterovibrio escacola
  misc_feature (1)..(120): tr|A0A2A5T0Z8|A0A2A5T0Z8_9GAMM 6-carboxy-5,6,7,8-tetrah ydropterin synthase OS=Candidatus Enterovibrio escacola OX=1927127 GN=BTN49_2529 PE=3 SV=1
MQTELFKEFMFEAAHLLPHVPKGHKCGRLHGHSFFVRIYVAGDVIPYTGWIIDFSEIKEAFKPLLDRLDHYYLNDISGLENPTSEVLAKWIWDELKPKLPCLSKVMIRETCTAGCIYIGE

SEQ ID NO: 18790 - protein, 64 aa, Entotheonella gemina
  misc_feature (1)..(64): tr|W4M913|W4M913_9BACT Uncharacterized protein (Fragmen t) OS=Candidatus Entotheonella gemina OX=1429439 GN=ETS Y2_19010 PE=4 SV=1
DLAVFQGVNTTTEVIAKYIFDRMADHLRASPGVTVGEDGVQAMKVTLIESPNAWAAYEGTLGAA

SEQ ID NO: 18791 - protein, 136 aa, Entotheonella factor
  misc_feature (1)..(136): tr|W4LBY5|W4LBY5_9BACT 6-pyruvoyl tetrahydropterin synt hase OS=Candidatus Entotheonella factor OX=1429438 GN=E TSY1_30720 PE=4 SV=1
MFSVTVRDFIMIAHSLRGEVFGPAQHLHGATYTVDLEFRRAELDANGIVIDIGLALDFLHEVLQPLKYQNLDDLSVFQGINTTTEVIAKYIFDRMADHLRASPGVTVGENGVQAMKVTLIESPNAWAAYEGALGAT

SEQ ID NO: 18792 - protein, 190 aa, Eremiobacter sp.
  misc_feature (1)..(190): tr|A0A2W5XTZ4|A0A2W5XTZ4_9BACT Uncharacterized protein OS=Candidatus Eremiobacter sp. RRmetagenome_bin22 OX=25 99629 GN=DLM53_04870 PE=4 SV=1
MHPAARRGAACNAHHLSTGKHESGKQRILSQFLRAAHASGPCASGAAALRRARPSAASLPAVERCARQVISISCSCHFDAAHQLHVPFESPCNRPHGHRYDVEITASSAQLEHGMVVDFNVLRGVVDEFDHCDLNERPEFAADELQTTAENIACVLAAKLQTAVGSRVSIDEIIVRETPNSLARWRKEQR

SEQ ID NO: 18793 - protein, 122 aa, Eremiobacteraeota bacterium
  misc_feature (1)..(122): tr|A0A2W5Y6J9|A0A2W5Y6J9_9BACT 6-carboxy-5,6,7,8-tetrah ydropterin synthase OS=Candidatus Eremiobacteraeota bac terium OX=2052317 GN=queD PE=3 SV=1
MQIRKQFHFEAAHVLPHHPGKCAQLHGHSYRLEVAVRGPLQTAGPACGMILDFDELKSIVKTEVIDALDHRSLNDLMENPTCEAIVTWIWQRLRSRLGALDELVLWETPTSCAVLRASDAAG

SEQ ID NO: 18794 - protein, 118 aa, Erwinia haradaeae
  misc_feature (1)..(118): tr|A0A451CZZ2|A0A451CZZ2_9GAMM 6-carboxy-5,6,7,8-tetrah ydropterin synthase OS=Candidatus Erwinia haradaeae OX= 1922217 GN=queD PE=3 SV=1
MHSIFKEFQFEAAHYLPNVPEGHKCGRLHGHSFLIRLEVTGELNCYTGWVMDFSKIQSAFQPIYDQLDHSYLNIIPGLSNPTSELLVEWIWIKMKLSLPTLSAVSVRETCTSGCVYRG

SEQ ID NO: 18795 - protein, 119 aa, Erwinia dacicola
  misc_feature (1)..(119): tr|A0A1E7YZR3|A0A1E7YZR3_9GAMM 6-carboxy-5,6,7,8-tetrah ydropterin synthase OS=Candidatus Erwinia dacicola OX=2 52393 GN=queD PE=3 SV=1
MAITLFKDFQFEAAHHLPNVPIGHKCGRLHGHSFMVRLEIIGEVDAQTGWVMDFSDIKAAFKPVYDCLDHYNLNDIPGLENPTSEVLAAWIWQQMKPVLPLLSAVMVKETCTAGCVYRG

SEQ ID NO: 18796 - protein, 116 aa, Falkowbacteria bacterium
  misc_feature (1)..(116): tr|A0A1F5S412|A0A1F5S412_9BACT 6-carboxy-5,6,7,8-tetrah ydropterin synthase OS=Candidatus Falkowbacteria bacter ium RIFOXYA2_FULL_38_12 OX=1797993 GN=A2257_00515 PE=3 SV=1
MYILKLKTGFSAAHQLTNAYDEKCNASIHGHNWKVLVEIKTEKLINNMVIDFKKIKEIIDELDHKNLNEVLDFEPTAELIAKYIYDKLVDFLLKNKKIEIIVTVWEADNASITYFE

SEQ ID NO: 18797 - protein, 149 aa, Falkowbacteria bacterium
  misc_feature (1)..(149): tr|A0A2H0V157|A0A2H0V157_9BACT 6-carboxytetrahydropteri n synthase QueD OS=Candidatus Falkowbacteria bacterium CG10_big_fil_rev_8_21_14_0_10_43_10 OX=1974567 GN=queD PE=4 SV=1
MLITKKFTLDSAHKLINYKGKCKNLHGHTYTLLVTIKGKINKRTGMVFDFGEIKKIVKEKVIDVLDHNYINNFIEQPTAENMIVWIWNQLEAKIKLYKLELSVWKLSKGERIAPTAFCKNFILTAKSLSFKTMHPPTASECPPIYLVIE

SEQ ID NO: 18798 - protein, 121 aa, Fermentibacteria bacterium
  misc_feature (1)..(121): tr|A0A496ULI4|A0A496ULI4_9BACT 6-carboxy-5,6,7,8-tetrah ydropterin synthase OS=Candidatus Fermentibacteria bact erium OX=2044591 GN=queD PE=3 SV=1
MEVYREFKFDAAHLLPNLEPEHRCSKLHGHTFRALIHLEAGVGSETGWVRDFGEIKRLCAPVIEKLDHKYLNDIPGLENPTSENIAKWVWKRLKPLLPELSMVEIKETASTGCRYRGQEDR

SEQ ID NO: 18799 - protein, 117 aa, Fermentibacteria bacterium
  misc_feature (1)..(117): tr|A0A2G6LV40|A0A2G6LV40_9BACT 6-carboxy-5,6,7,8-tetrah ydropterin synthase OS=Candidatus Fermentibacteria bact erium OX=2044591 GN=queD PE=3 SV=1
MEIYRDFTFDAAHRLDRLPAEHKCSSMHGHTYKVRVYVEGTVKPETGWVMDYGELKRVCEPAVRMLDHKCLNDIEDIGHTTSENIAVWLWNRIAPDLPGLSMIEVKETPGTGCRYRG

SEQ ID NO: 18800 - protein, 128 aa, Filomicrobium marinum
  misc_feature (1)..(128): tr|A0A0D6JIA1|A0A0D6JIA1_9RHIZ 6-carboxy-5,6,7,8-tetrah ydropterin synthase OS=Candidatus Filomicrobium marinum OX=1608628 GN=queD PE=3 SV=1
MRIYKDFNFEAAHYLPSAPPGHPNSRMHGHSFRARIWVEGEPDAHSGLVFHFDELSGAIADAREALDHRLLNDVEGLEAPTLERITIWLWNRLANRVPGLARVEVARDSCQEGCVYDGPDRRMPLAAE

SEQ ID NO: 18801 - protein, 134 aa, Filomicrobium marinum
  misc_feature (1)..(134): tr|A0A0D6JFE4|A0A0D6JFE4_9RHIZ Uncharacterized protein OS=Candidatus Filomicrobium marinum OX=1608628 GN=YBN12 29_v1_2172 PE=4 SV=1
MFSVEVRDRIMIAHSLPDPFFGPAQKMHGATFVVDVAFFRAELTRHNVVVDIGAALQVLNDTLKPLAYQNLDELTQFTGKLTTTEFLAKHIFDEIARAARSGGLGEGSSGLAKIRVTLSETDLARASYEGPIGD

SEQ ID NO: 18802 - protein, 123 aa, Firestonebacteria bacterium
  misc_feature (1)..(123): tr|A0A1F5V2U5|A0A1F5V2U5_9BACT 6-carboxy-5,6,7,8-tetrah ydropterin synthase OS=Candidatus Firestonebacteria bac terium RIFOXYC2_FULL_39_67 OX=1817861 GN=A2452_04285 PE =3 SV=1
MYELNVEDEFASAHYLRGYKGKCERVHGHNYRVMITVKAKKLNKIGLAVDFSEIKVELKKNMEILDHRLLDELPCFKKVNPSAENIAKYIFDSMNKPLKVKQVKLSKVTVWETARASASYSNE

SEQ ID NO: 18803 - protein, 123 aa, Firestonebacteria bacterium
  misc_feature (1)..(123): tr|A0A1F5UMF7|A0A1F5UMF7_9BACT 6-carboxy-5,6,7,8-tetrah ydropterin synthase OS=Candidatus Firestonebacteria bac terium GWA2_43_8 OX=1817858 GN=A2044_06910 PE=3 SV=1
MFELNVEDEFASAHYLRGYKGKCERVHGHNYRVMITVKAKVLNKIGLAVDFTELKVELKKVMEILDHNLLDELPYFKKINPSAENIAKYIYDSLSKPLKARKVKLYKVTVWETARASASYTNE

SEQ ID NO: 18804 - protein, 127 aa, Fischerbacteria bacterium
  misc_feature (1)..(127): tr|A0A1F5VGV9|A0A1F5VGV9_9BACT Uncharacterized protein OS=Candidatus Fischerbacteria bacterium RBG_13_37_8 OX= 1817863 GN=A2Y62_11685 PE=4 SV=1
MQEREVYEICVKKHFQARHNLKYSNGQQDAIHLHQWIIEVHILSEKLSEEGLVEDFREVDKILEGILDAINGAHINELEPFTRINPSAENLCRWFYRQLKPCIIAPCRLVKVVLYETEHYSASYREQ

SEQ ID NO: 18805 - protein, 165 aa, Fischerbacteria bacterium
  misc_feature (1)..(165): tr|A0A1F5V7D4|A0A1F5V7D4_9BACT Uncharacterized protein OS=Candidatus Fischerbacteria bacterium RBG_13_37_8 OX= 1817863 GN=A2Y62_10135 PE=4 SV=1
METKNLLFSQELELTIETYFSAAHSYHREELDEEENRKLFGEYYSIYPHGHNYKLIVSVRGTVNPKDGMIINFHHLEEKINAFIMRELHYTYLNLQVEYFRYHTPTTEHICLYLWGRIGEILLPLILYKIRLYEDETLYVECKYDDEEENEKREGSGGFLLLTSV

SEQ ID NO: 18806 - protein, 149 aa, Fokinia solitaria
  misc_feature (1)..(149): tr|A0A2U8BRC7|A0A2U8BRC7_9RICK 6-pyruvoyl tetrahydropte rin synthase OS=Candidatus Fokinia solitaria OX=1802984 GN=Fsol_00079 PE=4 SV=1
MSIESNNMISCTKKIEFDAAHRIIDHHGACKMLHGHRYVIEVTFSKFLKDFTNHDMVIDFIIIKQKLDSWIKQHWDHNTILSEQDKDLGNSIEKCTSQTIFYLKKQPTAENMAIFLMQEIIPVLFDEYGVKCTRLRLRETPSSFVEVLM

SEQ ID NO: 18807 - protein, 130 aa, Frackibacter sp.
  misc_feature (1)..(130): tr|A0A139CKI1|A0A139CKI1_9FIRM 6-carboxy-5,6,7,8-tetrah ydropterin synthase OS=Candidatus Frackibacter sp. T328 -2 OX=1785949 GN=AWU54_1553 PE=3 SV=1
MKKPIVLTKEFEFDAAHYLENYEGDCANLHGHRYKLAVSILGYVNEEKYLAIDFKDLKRISKELIIDKLDHQNLNEVLNFNTSCENIVYWIWETLENEFVKYDCKLYEVKLWETPDSYAVLNHQIMNEGI

SEQ ID NO: 18808 - protein, 130 aa, Frackibacter sp.; identical to SEQ ID NO: 18807
  misc_feature (1)..(130): tr|A0A1H7ZYF8|A0A1H7ZYF8_9FIRM 6-carboxy-5,6,7,8-tetrah ydropterin synthase OS=Candidatus Frackibacter sp. WG12 OX=2017977 GN=SAMN04488698_10946 PE=3 SV=1

SEQ ID NO: 18809 - protein, 127 aa, Frankia californiensis
  misc_feature (1)..(127): tr|A0A1C3PA53|A0A1C3PA53_9ACTN 6-carboxy-5,6,7,8-tetrah ydropterin synthase OS=Candidatus Frankia californiensi s OX=1839754 GN=FDG2_5008 PE=3 SV=1
MEYRIGKRFSFDAAHHLEGLTSGHKCARVHGHTYTVEVVLAADRLSGPGFVTDFGDLAPFSDFLDKHFDHRDLNEVMNVPPTSELVATHLAHWFIDNLEPLIPGRLVSMRVAETPGSWAEYTPPGRD

SEQ ID NO: 18810 - protein, 120 aa, Fukatsuia symbiotica
  misc_feature (1)..(120): tr|A0A2U8I810|A0A2U8I810_9GAMM 6-carboxy-5,6,7,8-tetrah ydropterin synthase OS=Candidatus Fukatsuia symbiotica OX=1878942 GN=queD PE=3 SV=1
MITTLFKDFQFEAAHRLPNVAKGHKCGRLHGHSFTVRLEVTGEVDPHQGWLIDFSKLKEAFQPIWQCLDHHYLNDIPGLENPTSEILASWIWKQLKPELAELSAVIIKETCSAGCIYKGE

SEQ ID NO: 18811 - protein, 151 aa, Gallionella acididurans
  misc_feature (1)..(151): tr|A0A139BXT5|A0A139BXT5_9PROT 6-carboxy-5,6,7,8-tetrah ydropterin synthase OS=Candidatus Gallionella acididura ns OX=1796491 GN=AWT59_0034 PE=4 SV=1
MYITRRLEFDAGHRIPNHNSQCKHLHGHRYAIEITLSGDIITSEGLSEQGMVMDFSDVKRIAKEKLVDAWDHAFLVYRGDKPVCDFLASLPNHKTVILDTVPTAENLAQEAFNILAPAYRDTYGNHLRLEQVRLYETPNNWADCVRNRVPS

SEQ ID NO: 18812 - protein, 120 aa, Gastranaerophilales bacterium
  misc_feature (1)..(120): tr|A0A292RH54|A0A292RH54_9BACT 6-carboxy-5,6,7,8-tetrah ydropterin synthase OS=Candidatus Gastranaerophilales b acterium HUM_9 OX=1916320 GN=queD PE=3 SV=1
MFELKAQMYFSAAHHLLNYDGECENQHGHNWLVEAFVRGTELDKSNILIDYKVLKKHLKSVLDILDHKDINELPDFKGISPSSEVLSKYIYEKMKEVVPQISKISVWETATSCASYFEEE

SEQ ID NO: 18813 - protein, 187 aa, Gastranaerophilales bacterium
  misc_feature (1)..(187): tr|A0A292R8P7|A0A292R8P7_9BACT Rubredoxin OS=Candidatus Gastranaerophilales bacterium HUM_7 OX=1916228 GN=CPT9 3_07705 PE=4 SV=1
MKSVTTFDLQYAHRFLNFKGEAQYLHGHTGTLTIEVEDSINTGVNMVFPCNEIKKMAWDILKNFDHALILREDDPLLPAIFDIYEKQGIKNGAPQNTNIGEAFKTELATAYPNCRIVVTKESMTTEGMIKIVYELLKDKLNISKITFTSGGNIATEEYKIDKTIERCPLCGIALTNGICTKCGYKKA

SEQ ID NO: 18814 - protein, 155 aa, Glomeribacter gigasporarum
  misc_feature (1)..(155): tr|G2JAM4|G2JAM4_9BURK Queuosine biosynthesis protein Q ueD OS=Candidatus Glomeribacter gigasporarum BEG34 OX=1 070319 GN=QueD PE=4 SV=1
MLTITRQLAFDAGHRIPDHQSRCRNLHGHRYVLEITLQGSVIKTQGAPDCGMVMDFAEVKTLAMRHLVEAWDHAFLVYQDDARVRAFLETMPEHKTVIINRIPTAENLAAIAFERLAGVYDAHYGVNLRLAKVRLYETPHCWADVVRDGYTAEDR

SEQ ID NO: 18815 - protein, 121 aa, Goldbacteria bacterium
  misc_feature (1)..(121): tr|A0A2N1W702|A0A2N1W702_9BACT 6-carboxy-5,6,7,8-tetrah ydropterin synthase OS=Candidatus Goldbacteria bacteriu m HGW-Goldbacteria-1 OX=2013807 GN=queD PE=3 SV=1
MYELMVKDTFASAHNLRDYKGKCEHLHGHNYAVEAYFKSEALEKNGLAVDFNILKAALKKVTEYLDHKYLNDDVPFFKVNNTSAENIARFIYEELEKEVKEAQVCKVSVYESEKAMVSYTK

SEQ ID NO: 18816 - protein, 149 aa, Gottesmanbacteria bacterium; identical to SEQ ID NO: 18734
  misc_feature (1)..(149): tr|A0A2H0NH91|A0A2H0NH91_9BACT 6-carboxy-5,6,7,8-tetrah ydropterin synthase OS=Candidatus Gottesmanbacteria bac terium CG11_big_fil_rev_8_21_14_0_20_37_11 OX=1974575 G N=COV53_03965 PE=3 SV=1

SEQ ID NO: 18817 - protein, 154 aa, Gottesmanbacteria bacterium; identical to SEQ ID NO: 18761
  misc_feature (1)..(154): tr|A0A1F6AVJ8|A0A1F6AVJ8_9BACT Uncharacterized protein OS=Candidatus Gottesmanbacteria bacterium RIFCSPLOWO2_0 1_FULL_46_21 OX=1798393 GN=A2971_00200 PE=4 SV=1

SEQ ID NO: 18818 - protein, 120 aa, Gullanella endobia
  misc_feature (1)..(120): tr|A0A143WR28|A0A143WR28_9ENTR 6-carboxy-5,6,7,8-tetrah ydropterin synthase OS=Candidatus Gullanella endobia OX =1070130 GN=queD PE=3 SV=1
MITTLYKDFTFESAHCLPYVPIGHKCGRLHGHSFLVRLEVTGEVQSHTGWIIDLAELKIAFQPILDRLDHYYLNEIPGLKNPTSEVLAKWIWQQLKPSLPVLSAITLRETCTAGCIYRGQ

SEQ ID NO: 18819 - protein, 126 aa, Hamiltonella defensa
  misc_feature (1)..(126): tr|A0A249DXA3|A0A249DXA3_9ENTR 6-carboxy-5,6,7,8-tetrah ydropterin synthase OS=Candidatus Hamiltonella defensa (Bemisia tabaci) OX=672795 GN=BA171_02325 PE=3 SV=1
MNTSLFKEFQFEAAHRLPYVPEGHKCRRLHGHSFVVRLEIIGKIDAKSGWIMDFADLKAAFQPIWNKLDHQYLNDIEGLENPTSELLAVWIWDRLKPKLPQLSSITIKETCSAGCIYRGSETHSGQ

SEQ ID NO: 18820 - protein, 126 aa, Hamiltonella defensa
  misc_feature (1)..(126): tr|A0A2D3TF16|A0A2D3TF16_9ENTR 6-carboxy-5,6,7,8-tetrah ydropterin synthase OS=Candidatus Hamiltonella defensa OX=138072 GN=BJP43_07300 PE=3 SV=1
MNTSLFKEFQFEAAHRLPYVPEGHKCRRLHGHSFVVRLEIIGKIDTKSGWIMDFADLKAAFQPIWNKLDHQYLNDIEGLENPTSELLAVWIWDRLKPKLPQLSSITIKETCSAGCIYRGSETHLGQ

SEQ ID NO: 18821 - protein, 134 aa, Hydrogenedentes bacterium
  misc_feature (1)..(134): tr|A0A1J4VJ04|A0A1J4VJ04_9BACT Uncharacterized protein OS=Candidatus Hydrogenedentes bacterium CG1_02_42_14 OX =1805216 GN=AUJ18_01350 PE=4 SV=1
MWQTIKIIDFSYGHRLLNYEGPCSQPHGHNGRIEIVCESNILNESGMIMDFSKIKSIIKKFVDDNWDHKMLLKREDPLLNYFLEKGEKVFVMDENPTAEILARYLFYFAKKQNLPIVEIRFHETLSSIACYRED

SEQ ID NO: 18822 - protein, 135 aa, Hydrogenedentes bacterium
  misc_feature (1)..(135): tr|A0A3M2EUS0|A0A3M2EUS0_9BACT 6-carboxytetrahydropteri n synthase OS=Candidatus Hydrogenedentes bacterium OX=2 030809 GN=D6679_12430 PE=4 SV=1
MWSVIKKIEFCYGHRLMNYEGKCRHPHGHNGVIEIVCSASDLDERGMVVDFGDVKNFVKSFVDENWDHRMLLRIDDPLVEEYKKRGEPFFLFEENPTAETFARYLFDLVYEKGFPVTEVRFQETPTSVAVYRRDP

SEQ ID NO: 18823 - protein, 144 aa, Hydrothermae bacterium
  misc_feature (1)..(144): tr|A0A496U711|A0A496U711_9BACT 6-pyruvoyl tetrahydrobio pterin synthase OS=Candidatus Hydrothermae bacterium OX =2250085 GN=DRQ03_03090 PE=4 SV=1
MFEIRWERMFDSAHRIYEHEKKCRYLHGHSYRVKVLIRGELEEHGMLVDFGILKSTIHDLLDHKVILYEKDPLVPLLEKAGQKLVVLDRNPTAENLALFIASLIIRNFENVREVEVGVFETPTQSGFVKMTRENFVEVNYKEII

SEQ ID NO: 18824 - protein, 117 aa, Jacksonbacteria bacterium
  misc_feature (1)..(117): tr|A0A1G2A8I3|A0A1G2A8I3_9BACT 6-carboxy-5,6,7,8-tetrah ydropterin synthase OS=Candidatus Jacksonbacteria bacte rium RIFCSPLOWO2_02_FULL_44_20 OX=1798460 GN=A3H61_0410 0 PE=3 SV=1
MQSLNVSCAFRFAAAHFLTKYRGKCENLHGHNYKLTVTVQGAVKPDGMVIDFHIIEETVQREVMTELDHSHLNDRFENPTAEHIAIWIWERLNGKLPLVKITLHETEDTYVEYSGER

SEQ ID NO: 18825 - protein, 117 aa, Jacksonbacteria bacterium; identical to SEQ ID NO: 18824
  misc_feature (1)..(117): tr|A0A3D0PIJ3|A0A3D0PIJ3_9BACT 6-carboxy-5,6,7,8-tetrah ydropterin synthase OS=Candidatus Jacksonbacteria bacte rium OX=2053562 GN=queD PE=3 SV=1

SEQ ID NO: 18826 - protein, 121 aa, Jettenia caeni
  misc_feature (1)..(121): tr|I3IJK9|I3IJK9_9BACT 6-carboxy-5,6,7,8-tetrahydropter in synthase OS=Candidatus Jettenia caeni OX=247490 GN=K SU1_C0308 PE=3 SV=1
MFELIVETDFSAAHNLREYKGQCERLHGHNWKVQVVLKAENLNKLGMVMDFREAKTILGEIINTFDHAYLNELPAFKVLNPTTENLSQLLYHELKSKLPAGVMVGRVTTWESDRCGAVYFE

SEQ ID NO: 18827 - protein, 121 aa, Jettenia ecosi
  misc_feature (1)..(121): tr|A0A533Q9Z5|A0A533Q9Z5_9BACT 6-carboxy-5,6,7,8-tetrah ydropterin synthase OS=Candidatus Jettenia ecosi OX=249 4326 GN=JETT_2250 PE=3 SV=1
MFELMVETDFSAAHNLREYKGQCERLHGHNWKVQVVLKAENLNKLGMVMDFREVKTILGEIINTFDHAYLNELPAFKVLNPTTENLSRLLYNELKSKLPAGVMVGRVTTWESDRCGAVYFE

SEQ ID NO: 18828 - protein, 155 aa, Kapabacteria sp.
  misc_feature (1)..(155): tr|A0A1M3L1Y9|A0A1M3L1Y9_9BACT 6-pyruvoyl tetrahydrobio pterin synthase OS='Candidatus Kapabacteria' thiocyanat um OX=1895771 GN=BGO89_02040 PE=4 SV=1
MVFVTRKAAFSAAHRLYNPTYTDERNEEIFDKCNNYFGHGHNYVLEVTVKGVPDPETGYVIDLKKLRDILDERIIDRVDHKHLNFDVDFLRGIIPTVENLAVMFWRRLEDHLPSGELHAIRLFESEHNYADYYGTPIEIPILPGIEEPRQERILV

SEQ ID NO: 18829 - protein, 140 aa, Kapabacteria sp.
  misc_feature (1)..(140): tr|A0A1M3KYN2|A0A1M3KYN2_9BACT 6-carboxy-5,6,7,8-tetrah ydropterin synthase OS='Candidatus Kapabacteria' thiocy anatum OX=1895771 GN=BGO89_06360 PE=3 SV=1
MRTTISKTFRWEMGHRLPTHPGLCRNIHGHSYEALVVLAGEPAADGMVMDYFDVKTMVQPIIDELDHCFLLDTSDTVLGDFFAAHPMKVVSVGFPTTAENIARMLLERIVERLPHDHRLDAVRVRVYETEKTWAEVEAGL

SEQ ID NO: 18830 - protein, 167 aa, Kentron sp.
  misc_feature (1)..(167): tr|A0A451BTL8|A0A451BTL8_9GAMM 6-pyruvoyltetrahydropter in/6-carboxytetrahydropterin synthase OS=Candidatus Ken tron sp. G OX=2126341 GN=BECKG1743F_GA0114225_100032 PE =4 SV=1
MHTAPPVDFSESIGCDPPRWISNNNYYRCLFRRKFEIPPLKVYTLKVITDFAAAHSLRGYAGDCRRLHGHNWKVEVEITTTVLDQCGMGVDFKVIKKATQSIVRELDHHYLNEIPPFDKVNPTAENIAAYLFQGISRILGDGQIQVSAVTLWETERACVRYQENNTP

SEQ ID NO: 18831 - protein, 185 aa, Kentron sp.
  misc_feature (1)..(185): tr|A0A450X969|A0A450X969_9GAMM 6-pyruvoyltetrahydropter in/6-carboxytetrahydropterin synthase OS=Candidatus Ken tron sp. MB OX=2138164 GN=BECKMB1821G_GA0114241_101626 PE=4 SV=1
MSLEKSYLISREIDINASRRIPYQDGNDMGEKKCGNLRGHRFAITAICSSALHDPGDDQKDVFDFTFLKHAMMETIHEPCDHGLILWCEDEVLPSLIPEQDRKALLGGKDKSQWSGPPLPWSGTGTVGALYVIPYLPVTENLVRLWYDLLAPEIIERSQNRAKLEQIKVWETPNWWMAYPASFGG

SEQ ID NO: 18832 - protein, 114 aa, Kerfeldbacteria bacterium
  misc_feature (1)..(114): tr|A0A359MWZ3|A0A359MWZ3_9BACT 6-carboxy-5,6,7,8-tetrah ydropterin synthase OS=Candidatus Kerfeldbacteria bacte rium OX=2053565 GN=queD PE=3 SV=1
MPFSVTKEFTFAAAHALTKYHGKCENMHGHNYRLAVTVTGPLTSDDLVIDFIELKTIVQEKVINLLDHTNLNDRFPNPTCELVAQWIFQQLKPVLPVSTVMVWETDTTAVTYQE

SEQ ID NO: 18833 - protein, 147 aa, Kinetoplastibacterium galatii
  misc_feature (1)..(147): tr|M1LY17|M1LY17_9PROT 6-carboxy-5,6,7,8-tetrahydropter in synthase OS=Candidatus Kinetoplastibacterium galatii TCC219 OX=1208921 GN=ST1E_0554 PE=3 SV=1
MISISRKLEFDAGHRIPNHNGKCSNIHGHRYSLIVTLEGEVSKESSSSDHGMLMDFADVKLLALEHIINIWDHAFLVSYDDYEILNLLKSLPNHKTVILDKVPTVENLAIISFKKLKPVYSKHYRNNLSLKKVCLYETPNCWSEYIE

SEQ ID NO: 18834 - protein, 148 aa, Kinetoplastibacterium desouzaii
  misc_feature (1)..(148): tr|M1M3J4|M1M3J4_9PROT 6-pyruvoyl tetrahydrobiopterin s ynthase OS=Candidatus Kinetoplastibacterium desouzaii T CC079E OX=1208919 GN=CDSE_0500 PE=4 SV=1
MISITRKLEFDAGHRIPNHKGECKNIHGHRYLLEITLEGDLSEYRDKSDDGMVMDFSDIKKIAIKNLVSIWDHSFFSFYKDKQILDFLNSLPNHKTVVLDKIPTVENLALIAYNTLFPFYNKIYNKNLVLKKICIYETPNCWAEYTCN

SEQ ID NO: 18835 - protein, 123 aa, Kryptonium thompsoni
  misc_feature (1)..(123): tr|A0A0P1P4T8|A0A0P1P4T8_9BACT 6-carboxy-5,6,7,8-tetrah ydropterin synthase OS=Candidatus Kryptonium thompsoni OX=1633631 GN=JGI4_01250 PE=3 SV=1
MYKISAQKRFSASHIIKDYPGECGRLHGHNWNVKVTVKAKELNDFGMAIDFKELSQILNEVIEKLDHYHLNDIPPFNEIQPTAENLAKFFYDELKSKLAQYKNVEIDSVEIWETEKYSAIYQE

SEQ ID NO: 18836 - protein, 155 aa, Lambdaproteobacteria bacterium
  misc_feature (1)..(155): tr|A0A1F6GLT9|A0A1F6GLT9_9PROT Uncharacterized protein OS=Candidatus Lambdaproteobacteria bacterium RIFOXYD2_F ULL_56_26 OX=1817773 GN=A2557_09980 PE=4 SV=1
MIIRKLFKAEAAHRVAHSYTTRCQGLHGHSYLFEIFLAGQTQDQAQMLMDFKLLKDQFNNFIDSFDHTLMVWDQDQELVEMAPKLNARYMFLPYNPTAEQMARHIYAHAQEMGLPIHRVLVHETATGYAEFAGDDPIKIDLKRVVFSAQILAEYK

SEQ ID NO: 18837 - protein, 155 aa, Lambdaproteobacteria bacterium
  misc_feature (1)..(155): tr|A0A1F6GAA3|A0A1F6GAA3_9PROT Uncharacterized protein OS=Candidatus Lambdaproteobacteria bacterium RIFOXYD2_F ULL_50_16 OX=1817772 GN=A2527_12485 PE=4 SV=1
MIIRKLFKAEVAHRVAMAYTARCQGVHGHSYKFEVFLTGETQDQAQMLMDFKLLKDKFNNFMDSFDHSLLVWEQDPALVEMAPKLNNRFMILPYNPTAEQMSRHIFQEAEAMGLPIKKVICHETETGYAEFDGSDPIRIDLTKVVFSKQILAEYK

SEQ ID NO: 18838 - protein, 150 aa, Latescibacteria bacterium
  misc_feature (1)..(150): tr|A0A3D2YYW3|A0A3D2YYW3_9BACT Uncharacterized protein OS=Candidatus Latescibacteria bacterium OX=2053570 GN=D IC52_00335 PE=4 SV=1
MRAPVEKITAKGHFHAAHRQLGYDGKCAYVHGHTWRGTFVVCAESFPRLEDIDMSVDFGALKDIFKSLDHRMLVSSRDEAFLHSGLFEPEGVILLPGNNPSVENVALYCMDQAVDVLQGLFPGRGIDYDLQLTIQETDNNFFTLDRSVTI

SEQ ID NO: 18839 - protein, 70 aa, Latescibacteria bacterium
  misc_feature (1)..(70): tr|A0A3D2RJ56|A0A3D2RJ56_9BACT 6-carboxytetrahydropteri n synthase QueD (Fragment) OS=Candidatus Latescibacteri a bacterium OX=2053570 GN=DHW45_10875 PE=4 SV=1
MEKLYAQAHFHAAHRQLNYDGKCRFVHGHTWNGEITVRTDRFPRDETLDMTLDFGRLKDILKNLDHKMLV

SEQ ID NO: 18840 - protein, 116 aa, Levybacteria bacterium
  misc_feature (1)..(116): tr|A0A2M8FC72|A0A2M8FC72_9BACT 6-carboxy-5,6,7,8-tetrah ydropterin synthase OS=Candidatus Levybacteria bacteriu m CG_4_9_14_0_2_um_filter_35_21 OX=1974627 GN=queD PE=3 SV=1
MLITKEFRFDAAHQLLNYNGPCANLHGHTYKLQVSVAGIVQKSGMVMDFGDLKNIVNEKVISKLDHTFINKIIIQSTAENITLWIWNQLEEFLPLQKITLWETPTSFVEYVKSENK

SEQ ID NO: 18841 - protein, 118 aa, Liberibacter solanacearum
  misc_feature (1)..(118): tr|A0A1V2N955|A0A1V2N955_9RHIZ 6-carboxy-5,6,7,8-tetrah ydropterin synthase OS=Candidatus Liberibacter solanace arum OX=556287 GN=AYO25_00050 PE=3 SV=1
MKITQAFTFEAAHKLPYVPKTHKCYRMHGHSYRVELVMEGDVDPKTGFVDDFFNIEKYFAPLLEKLDHHCLNEVEDLDNPTAENIAIWIWKRLFDSLPILSSVRVYETPMSWVEYQGI

SEQ ID NO: 18842 - protein, 118 aa, Liberibacter europaeus
  misc_feature (1)..(118): tr|A0A2T4VWB4|A0A2T4VWB4_9RHIZ 6-carboxy-5,6,7,8-tetrah ydropterin synthase OS=Candidatus Liberibacter europaeu s OX=744859 GN=queD PE=3 SV=1
MKITQAFTFEAAHSLPNVPKNHKCYRIHGHSYRVELVMEGDVDPKTGFVDDFFNIEKYFSPLLEILDHQYLNEIPDLYNPTAENIAIWIWKRLCNDIPILSAVRVYETPMSWVEYTGV

SEQ ID NO: 18843 - protein, 134 aa, Lindowbacteria bacterium
  misc_feature (1)..(134): tr|A0A1F6LDJ6|A0A1F6LDJ6_9BACT 6-pyruvoyl tetrahydrobio pterin synthase OS=Candidatus Lindowbacteria bacterium RIFCSPLOWO2_12_FULL_62_27 OX=1817870 GN=A3G34_04345 PE= 4 SV=1
MFTVTKEIHFCYGHRLMNYDGQCKHPHGHNGRAAFEMSADRLDARGMVTDFTDIKNSMKAWIDREIDHKMLLRKDDPAVEVLRKMGEPVFVMDQNPTAESIAKLFYEKAKEMGFPVVRVSVWETDTSVASYAGR

SEQ ID NO: 18844 - protein, 135 aa, Macondimonas diazotrophica
  misc_feature (1)..(135): tr|A0A4Z0FB62|A0A4Z0FB62_9GAMM 6-carboxytetrahydropteri n synthase OS=Candidatus Macondimonas diazotrophica OX= 2305248 GN=E4680_05660 PE=4 SV=1
MYGMTLTNHLMIAHRMRGERFGPAQRLHGATFEVELSLFAERLDGDGVVADMGQVAQLLAAVLAPLNYRDLDELPRFAGRNTTSEVLAAAIHADVCAQLRAGALGRDELERIRQVRVVLRENPQAWASFEGPLHP

SEQ ID NO: 18845 - protein, 126 aa, Macondimonas diazotrophica
  misc_feature (1)..(126): tr|A0A4Z0F9Y7|A0A4Z0F9Y7_9GAMM 6-carboxy-5,6,7,8-tetrah ydropterin synthase OS=Candidatus Macondimonas diazotro phica OX=2305248 GN=queD PE=3 SV=1
MPGTYTLTVLTEFSASHILRGHPGPCSRLHGHNWKVEAEVVANTLNDIDLAIDFQDIKAALRAITEQLDHRHLNDLPPFDRLNPTAEQIARHIHQRLATALGGAGVCVSAITIWETDRAKVRYSET

SEQ ID NO: 18846 - protein, 123 aa, Magnetobacterium bavaricum
  misc_feature (1)..(123): tr|A0A0F3GSH2|A0A0F3GSH2_9BACT 6-carboxy-5,6,7,8-tetrah ydropterin synthase OS=Candidatus Magnetobacterium bava ricum OX=29290 GN=MBAV_003044 PE=3 SV=1
MYELMIEATFSAAHQLRGYKGKCEHLHGHNFKVQVHVQADDLNDIDIAMDFHEIKRYAKEVVEQLDHAYLNDVFPFTEINPSSENIAKWVYDSLKKKLPNDDVRLAAVTVWESETASATYYED

SEQ ID NO: 18847 - protein, 162 aa, Magnetoglobus multicellularis
  misc_feature (1)..(162): tr|A0A1V1PDE5|A0A1V1PDE5_9DELT 6-pyruvoyl-tetrahydropte rin synthase OS=Candidatus Magnetoglobus multicellulari s str. Araruama OX=890399 GN=OMM_07247 PE=4 SV=1
MYTVIKKINVSASHVLILPYDSPCNNLHGHNWEITVYCRSSELNKESMVIDFKTIKRIIVESMDHKNLNDEFTFLPTAENIAKWVVESIPFCYKAKVIESKDNIAIYENTPIIVDEIDTILSKLSSAYKHLKFPKNRYLELETTFKQYLKGKAITTLMTNRR

SEQ ID NO: 18848 - protein, 122 aa, Magnetoglobus multicellularis
  misc_feature (1)..(122): tr|A0A1V1PF94|A0A1V1PF94_9DELT 6-carboxy-5,6,7,8-tetrah ydropterin synthase OS=Candidatus Magnetoglobus multice llularis str. Araruama OX=890399 GN=ptpS PE=3 SV=1
MYELKIIRNFAAAHQLPLSKTKCENLHGHNWKIEVIVQGNELDQSGMMVDFSILKKGVDQVLESLDHQFLNDIPFFKENSPSSENIARYIAINVEKQLHVPGIKVSRVVAWESDDACATFIP

SEQ ID NO: 18849 - protein, 164 aa, Magnetomorum sp.
  misc_feature (1)..(164): tr|A0A0N0D303|A0A0N0D303_9DELT Rubredoxin OS=Candidatus Magnetomorum sp. HK-1 OX=1509431 GN=MHK_006780 PE=4 SV =1
MSNDKYTSIVNLDFQYAHRFMKWPREAKHLHGHSGLLTIELEDTVDPLTGFAHACKDGFKKAWEVCDHFHHATLFQEGDPLLDAVIAVYKKEGINNDPENCVPLKKIDHALAWSYPEYRIVVTKKVSTCENLCELFYELLKDKMPIKKITFRSSSMNAASKEFK

SEQ ID NO: 18850 - protein, 123 aa, Magnetomorum sp.
  misc_feature (1)..(123): tr|A0A0M9DXG7|A0A0M9DXG7_9DELT 6-carboxy-5,6,7,8-tetrah ydropterin synthase OS=Candidatus Magnetomorum sp. HK-1 OX=1509431 GN=MHK_010035 PE=3 SV=1
MYELKIIRTFAAAHQLLKSRTKCENLHGHNWKIEVHVKGKNLDQSGMMIDFGILKKHVDEILESLDHQFLNELPFLKDISPSSENIARYIAETLNERIEIPDISVSRVCAWESDNACATYIPE

SEQ ID NO: 18851 - protein, 123 aa, Magnetoovum chiemensis
  misc_feature (1)..(123): tr|A0A0F2J241|A0A0F2J241_9BACT 6-carboxy-5,6,7,8-tetrah ydropterin synthase OS=Candidatus Magnetoovum chiemensi s OX=1609970 GN=MCHI_000736 PE=3 SV=1
MFELMIETTFAAAHQLRGYKGKCEELHGHNFKVRVYIQAEMLNEIDIAVDFHEIKDYTQEIVQQLDHSFLNDVFPFTEINPSSENIAKWIYDSLKKKLNDDNSAIAAVTVYESATAAATYYED

SEQ ID NO: 18852 - protein, 118 aa, Margulisbacteria bacterium
  misc_feature (1)..(118): tr|A0A1F6QEH5|A0A1F6QEH5_9BACT 6-carboxy-5,6,7,8-tetrah ydropterin synthase OS=Candidatus Margulisbacteria bact erium GWE2_39_32 OX=1817872 GN=A2X41_03650 PE=3 SV=1
MFSLMVEDTFSAAHQLYDYKGPCENLHGHTWKIQLFVEGDVLDKAGMLVDFRVLKAILKEERDILDHSYLNKIVEFSPTSENLSKYLFERISLKMPENVHLKKVTIWESASTWASYSQ

SEQ ID NO: 18853 - protein, 118 aa, Margulisbacteria bacterium; identical to SEQ ID NO: 18852
  misc_feature (1)..(118): tr|A0A2W4I8J8|A0A2W4I8J8_9BACT 6-carboxy-5,6,7,8-tetrah ydropterin synthase OS=Candidatus Margulisbacteria bact erium OX=2053573 GN=queD PE=3 SV=1

SEQ ID NO: 18854 - protein, 140 aa, Marinamargulisbacteria bacterium
  misc_feature (1)..(140): tr|A0A328RTL7|A0A328RTL7_9BACT 6-carboxy-5,6,7,8-tetrah ydropterin synthase OS=Candidatus Marinamargulisbacteri a bacterium SCGC AG-439-L15 OX=2184346 GN=DID77_02530 P E=3 SV=1
MSYILSKKFKFEAAHRLAKGYVGKCANIHGHSWYVTVQLSCHNLNQQDMGIDYAEINTFNESIRKEFDHKLLLCKDDTTLLSVCKKENYEVVTFDENPTSETIAKTVYDKAKGYFSSYKNIDMHQVIVEETCTSACYYKP

SEQ ID NO: 18855 - protein, 119 aa, Marinamargulisbacteria bacterium
  misc_feature (1)..(119): tr|A0A328RPE8|A0A328RPE8_9BACT 6-carboxy-5,6,7,8-tetrah ydropterin synthase OS=Candidatus Marinamargulisbacteri a bacterium SCGC AAA071-K20 OX=2184347 GN=queD PE=3 SV= 1
MYEVMVERHFAAAHFLENYVGPCANMHGHNYRIQLFVQGDSLNKDNGILVDFKDLKAHLDKFIDTIDHKVLNEVLDIHTTAECLAKYFFDIMTPHIPTHTKLTKTTLWESDTCSASYIP

SEQ ID NO: 18856 - protein, 137 aa, Marinimicrobia bacterium
  misc_feature (1)..(137): tr|A0A1J4XMJ9|A0A1J4XMJ9_9BACT Uncharacterized protein OS=Candidatus Marinimicrobia bacterium CG1_02_48_14 OX= 1805240 GN=AUJ47_10285 PE=4 SV=1
MIVLNKIFTFCAAHRYHNSAFTEEENKKMFGPDVRTHGHNYTLTVSVTGEVNPDTGFLIDLGHLKKVVREHVISKVDHAMIDQDIDWFADKQPSTENLVVWIWNQIEPLLENGVLYRVRLQETPTIFTDYYGPGGLP

SEQ ID NO: 18857 - protein, 133 aa, Marinimicrobia bacterium
  misc_feature (1)..(133): tr|A0A4Y8I808|A0A4Y8I808_9BACT 6-carboxy-5,6,7,8-tetrah ydropterin synthase OS=Candidatus Marinimicrobia bacter ium MT.SAG.3 OX=2552982 GN=queD PE=3 SV=1
MYKVIKAIEFCYGHRLLNYEGKCRHLHGHNAKAEIELSSEELDERGMVYDFSEIKQSVKKWIDENIDHVMLLNKDDEIIPILEELKERFLAVDGNPTAEFIAKMIFDQVDSLGFPVTSVRVWETPNSNAVYNR

SEQ ID NO: 18858 - protein, 119 aa, Melainabacteria bacterium
  misc_feature (1)..(119): tr|A0A1Q6V136|A0A1Q6V136_9BACT 6-carboxy-5,6,7,8-tetrah ydropterin synthase OS=Candidatus Melainabacteria bacte rium LEY3_CP_29_8 OX=1913460 GN=BHW64_03405 PE=3 SV=1
MWELKIETSFAAAHHLLNYNGECENQHGHNWKVEVFIVGNTLDKSNILMDFKVLKKYVNDVIKTLDHKDINTLDDFKDISPSSEIISKYIYEKLKTNIPIIKKVSVWETSNACASYFEN

SEQ ID NO: 18859 - protein, 134 aa, Melainabacteria bacterium
  misc_feature (1)..(134): tr|A0A3S0CK98|A0A3S0CK98_9BACT 6-carboxy-5,6,7,8-tetrah ydropterin synthase OS=Candidatus Melainabacteria bacte rium OX=2052166 GN=queD PE=3 SV=1
MYQVTREIHFCYGHRLLNYSGKCKNLHGHNGVAVITIESEELDGLGMVIDFSDIKAVVSQWIDDNLDHRMILMEEDPLLPLLRQQNEPVFVMKANPTAENIARLIFDVVAENGFPVTKVTLWETTSCFATYGRQ

SEQ ID NO: 18860 - protein, 162 aa, Methylomirabilis limnetica
  misc_feature (1)..(162): tr|A0A2T4U0Y8|A0A2T4U0Y8_9BACT Uncharacterized protein OS=Candidatus Methylomirabilis limnetica OX=2033718 GN= CLG94_01820 PE=4 SV=1
MAAFRIRVDHENLKFSSAHFVLFGNGKCETLHGHNYRAWVELEGSLQPSDYVLDFLVVKPLMKQVCERLDHKVMLPTENEDLRIDPGDSVVGVIYGNKQYSFPAEDVLLLPIHNTSAELLARYICGVLREEIKSQFGGGGVTAIKVGVQESFGQEASYEEIF

SEQ ID NO: 18861 - protein, 162 aa, Methylomirabilis oxyfera
  misc_feature (1)..(162): tr|D5MKA6|D5MKA6_9BACT Putative 6-pyruvoyl tetrahydropt erin synthase OS=Candidatus Methylomirabilis oxyfera OX =671143 GN=pts PE=4 SV=1
MAAFRIRVNHENLKFSSAHFVLFGNGQCESLHGHNYRAWVELEGSLQPSDYVMDFLAVKPLLKQICERLDHRMLLPTENEDLKIREGSSVVEVIYGAKQYSFPAEDVLLLPIHNATAELLARYICGELKTEIKNRYGGEGVVTIRVGVQESFGQEASYEEAF

SEQ ID NO: 18862 - protein, 145 aa, Methylopumilus rimovensis
  misc_feature (1)..(145): tr|A0A5B8DF53|A0A5B8DF53_9PROT 6-carboxytetrahydropteri n synthase QueD OS=Candidatus Methylopumilus rimovensis OX=2588535 GN=queD PE=4 SV=1
MDITTRLEFDAGHRIPNHKSNCKNLHGHRYAIEVTVTGPIHDDNKSSDFGMVIDFSDVKQIIKDLIVDRWDHAFIVYKDDKEIVNFLNTLPNHKTVIFPVVPTAENMASEAYLILSAEFNNRFNHQLKIKQIRIYETPNSWADAL

SEQ ID NO: 18863 - protein, 145 aa, Methylopumilus universalis
  misc_feature (1)..(145): tr|A0A5B8CXN7|A0A5B8CXN7_9PROT 6-carboxytetrahydropteri n synthase QueD OS=Candidatus Methylopumilus universali s OX=2588536 GN=queD PE=4 SV=1
MDITTRLEFDAGHRIPNHKSNCKNLHGHRYAIEVTVTGPIHDDRKSSDFGMVIDFSDVKQIIKDLVVEPWDHAFIVYQDDKEIVNFLKTLPDHKTVIFPVVPTAENMASEAHRILNSEFNKRFDGQLKIKQIRMYETPNSWADAI

SEQ ID NO: 18864 - protein, 117 aa, Methyloumidiphilus alinensis
  misc_feature (1)..(117): tr|A0A2W4TBT2|A0A2W4TBT2_9GAMM 6-carboxy-5,6,7,8-tetrah ydropterin synthase OS=Candidatus Methyloumidiphilus al inensis OX=2202197 GN=DM484_10320 PE=3 SV=1
MYTISKQFQFSASHVLDGLPDGHPCGRLHGHNYVAEIILASETLNPVGFVVDYNSLGLFKDIIDNELDHRHLNDVLPCLSTAEHIARYLYERARMIWPEVIAVRISETPKTSAEYRP

SEQ ID NO: 18865 - protein, 117 aa, Methyloumidiphilus alinensis
  misc_feature (1)..(117): tr|A0A2W4S7N1|A0A2W4S7N1_9GAMM 6-carboxy-5,6,7,8-tetrah ydropterin synthase OS=Candidatus Methyloumidiphilus al inensis OX=2202197 GN=DM484_29095 PE=3 SV=1
MYTISKQFHFSASHIIEGLPDGHPCGRLHGHNYIAEIVLAAESLNPIGFVVDYNALSPFKDIIEKELDHRHLNNILPCPSTAEHMAKYLYDRAKAIWPEVVAVRISETPKTSAEYRS

SEQ ID NO: 18866 - protein, 160 aa, Microgenomates bacterium
  misc_feature (1)..(160): tr|A0A3A4ZKM5|A0A3A4ZKM5_9BACT 6-carboxytetrahydropteri n synthase OS=Candidatus Microgenomates bacterium OX=20 93373 GN=C4564_01885 PE=4 SV=1
MTEKEVKLVRQMYTETAHRLMDYKGRCAHVHGHSWLWKVEIAGPVRQPTGFVMDFADLKQIMQKVIDPFDHALLLRNDDPLLRLGTGNAWVTPYSQERTPRLHIFEWNPTSENLCNYVAKEIQKVLSEAPHLRLIRVSVSETANNSVVVECGNAESKGGA

SEQ ID NO: 18867 - protein, 123 aa, Micropelagos thuwalensis
  misc_feature (1)..(123): tr|U2XQD2|U2XQD2_9PROT 6-carboxy-5,6,7,8-tetrahydropter in synthase OS=Candidatus Micropelagos thuwalensis OX=1 397666 GN=RS24_00245 PE=3 SV=1
MQLTREFCFDAAHCLENYDPGHPNRRIHGHSFRVRVTLTGMPDNKTGQIVDLAEFGTILEHLRQQLDHHMLNEIDGLETPTLENICLWLWEHLMPDLPDLSAVEVFRDSLGQSCLYQGSRHVN

SEQ ID NO: 18868 - protein, 123 aa, Muproteobacteria bacterium
  misc_feature (1)..(123): tr|A0A1F6TLU8|A0A1F6TLU8_9PROT 6-carboxy-5,6,7,8-tetrah ydropterin synthase OS=Candidatus Muproteobacteria bact erium RIFCSPHIGHO2_01_FULL_65_16 OX=1817764 GN=A2637_03 155 PE=3 SV=1
MEIFKLFTIEAAHRLPQLPEDHKCRRLHGHSFAIEVHVTGPVQPREGWVQDFADIGRAFGPLHDELDHTYLNDIPGLENPTSENLARWIWRRLKPALPMLSQVVVRETCTAGCIYRGEDEKQE

SEQ ID NO: 18869 - protein, 119 aa, Muproteobacteria bacterium
  misc_feature (1)..(119): tr|A0A1F6U2W2|A0A1F6U2W2_9PROT 6-carboxy-5,6,7,8-tetrah ydropterin synthase OS=Candidatus Muproteobacteria bact erium RIFCSPLOWO2_01_FULL_60_18 OX=1817768 GN=A3A87_002 30 PE=3 SV=1
MEIFKIFTLEAAHHLPNVPENHKCRRLHGHSFRIEIHVAGPVQEPSGWIMDFADLSRAFQPIYEQLDHHYLNEIEGLQNPTSEHLARWIWRQLKPALPVLSKVIVRETCTAGCVYRGED

SEQ ID NO: 18870 - protein, 294 aa, Nealsonbacteria bacterium
  misc_feature (1)..(294): tr|A0A2M7BYF5|A0A2M7BYF5_9BACT TPR_REGION domain-contai ning protein OS=Candidatus Nealsonbacteria bacterium CG 03_land_8_20_14_0_80_36_12 OX=1974701 GN=COS47_01080 PE =4 SV=1
MARLGILDNFTATHGTRCLREDMFGVEVIFSGKIRNGFVDGLDYDSPVSALRGVLSSMNGAYLDDIIGRATDENIALYILFSLRKWLPHSVRVYEGNSKYVEVSPSDLDFNEYPSYLALSKAKSLLMRERPSDAIEELNQIISMNHDFADAYNLRGRCHKYMDRYDLALLDYMRALIINPDFGEAYRNLGNAYYYLDDNDQTIPVFTKAIELMPNSALAYNNRGFAYQKLEEFELAAQDHTKAIEIDPNYAEAYGDRGDVFMALGMKDLAERDYQKARELADSGNDTYAGIVMY

SEQ ID NO: 18871 - protein, 138 aa, Nephrothrix sp.
  misc_feature (1)..(138): tr|A0A2B8A366|A0A2B8A366_9BACT 6-carboxytetrahydropteri n synthase QueD OS=Candidatus Nephrothrix sp. EaCA OX=2 044729 GN=CRN43_09320 PE=4 SV=1
MVYISRKEHFNAAHRLYNAAWSPEKNKEVFGICANENWHGHNFLLTVTVKGEPDPDTGFVADFKKLGDIIQREIIEAVDHKNLNLDVPFMKDKLASCETLACEMWKILEPRAATLGPGVKLHCIRLEETAKNFVEYFG

SEQ ID NO: 18872 - protein, 129 aa, Nitrosoglobus terrae
  misc_feature (1)..(129): tr|A0A1Q2SLX5|A0A1Q2SLX5_9GAMM 6-carboxy-5,6,7,8-tetrah ydropterin synthase OS=Candidatus Nitrosoglobus terrae OX=1630141 GN=TAO_0727 PE=3 SV=1
MAAIYTLKILTDFASAHSLRNYPGECQRMHGHNWKLEVEVTAQVLDQQGMAMDFKTVKGHARALCAQLDHRYLNEIPPFDRINPTAENLAAFFYHSLSKKINNGQVRVSAITLWETERACVRYTEENQP

SEQ ID NO: 18873 - protein, 131 aa, Nitrospira inopinata
  misc_feature (1)..(131): tr|A0A0S4KS13|A0A0S4KS13_9BACT 6-carboxy-5,6,7,8-tetrah ydropterin synthase OS=Candidatus Nitrospira inopinata OX=1715989 GN=pts PE=4 SV=1
MTITRRYRFCAAHRLHSDRLTEDENQAAFGKCNNPNGHGHNYVVLVTINGDGENEDQEIASLDRTVAETVLERFDHHDLNCDSAFTDCTTTGENLVKLIWDLLEPKLLRGKLSKVGVIETRDNYFEYAGMA

SEQ ID NO: 18874 - protein, 250 aa, Nitrospira nitrificans
  misc_feature (1)..(250): tr|A0A0S4LMN1|A0A0S4LMN1_9BACT Putative 6-pyruvoyl-tetr ahydropterin synthase (Modular protein) OS=Candidatus N itrospira nitrificans OX=1742973 GN=COMA2_30157 PE=4 SV =1
MPPVLLTKRIEFAAAHRYMRPEWDDAKNRTVFGRCYNPPAHGHNYLLELTVSGEIDPKTGMVVNLFDLKQVLLNVIEEFDHKNLNLDMPYFKDRIPTSENFAHVLWTKLAAQRDIGTLHTLRLCEDEDLYAEVTVADGPDAAAVSKRYSFNAIHESHQGRDWDCYVTVRGTIDPATGMVTDIGALDRLAADRIIKPFDRQDLRQVLGSETVRGEALAKTIWDRLAGHVSGGTLHNVRLVQTRDLSFDYAG

SEQ ID NO: 18875 - protein, 205 aa, Nitrotoga sp.
  misc_feature (1)..(205): tr|A0A3E1D0J2|A0A3E1D0J2_9PROT 6-pyruvoyltetrahydropter in/6-carboxytetrahydropterin synthase OS=Candidatus Nit rotoga sp. MKT OX=2184311 GN=DID91_2727704690 PE=4 SV=1
MQLIYYWEGCSTWMDRWAGFLQMQAEARKAGSATCLTACDCRIQVIIRTPTQHALIMQITRRLEFDAGHRIPSHTSQCRHLHGHRYAIEITLSGEIITTDGISEQGMIMDYSEVKRIAKEQLVDAWDHAFLVYRNDQAVLDFLNSLPNHKTVVLEVPPTAENLAMLAFKLLDSAYRHSYGNNLQLERVRIYETPNNWADCLRNSS

SEQ ID NO: 18876 - protein, 149 aa, Nitrotoga sp.
  misc_feature (1)..(149): tr|A0A3E1D2Y2|A0A3E1D2Y2_9PROT 6-carboxy-5,6,7,8-tetrah ydropterin synthase OS=Candidatus Nitrotoga sp. SPKER O X=2184312 GN=DID92_2727745675 PE=3 SV=1
MQITRRLEFDAGHRIPSHTSQCRHLHGHRYAIEITLSGEIITTDGLSEQGMVMDYTEVKRIAKEQLVDAWDHAFLVYRRDTAVLDFLNSLPNHKTVVLEVPPTAENLAMLAFKLLDSAYRHSYGNNLQLERVRIYETPNNWADCLRNSS

SEQ ID NO: 18877 - protein, 121 aa, Niyogibacteria bacterium
  misc_feature (1)..(121): tr|A0A2H0TCG3|A0A2H0TCG3_9BACT 6-carboxy-5,6,7,8-tetrah ydropterin synthase OS=Candidatus Niyogibacteria bacter ium CG10_big_fil_rev_8_21_14_0_10_46_36 OX=1974726 GN=C OU47_04065 PE=3 SV=1
MAAIYIEKKMHFEASHSLIDVNNPQNNEPRHSHLYSFTVRIKGGTDKGGMITNIRDVKRVLKKEIVDALNGRYLNDVFPEMNPTMENLAEFIYNSAKLIFPGVVRVQIWENEDSSAIYEEE

SEQ ID NO: 18878 - protein, 134 aa, Nomurabacteria bacterium
  misc_feature (1)..(134): tr|A0A1F6V9L0|A0A1F6V9L0_9BACT 6-carboxy-5,6,7,8-tetrah ydropterin synthase OS=Candidatus Nomurabacteria bacter ium RIFCSPHIGHO2_01_FULL_40_24b OX=1801739 GN=A2647_018 90 PE=3 SV=1
MKAVYLTKRFHFESAHRMLNTNFSEAENDEYFGKCQNVHGHNYVLEVTVAGIIDPEKGYFVNLHDLLSDIQNKVIDKIDHQYLNDILPGCKNKPVTIEVVSRWIWNNLNKELPQYNFYKLRLWETPDNSVEIYK

SEQ ID NO: 18879 - protein, 125 aa, Omnitrophica bacterium
  misc_feature (1)..(125): tr|A0A3A4NZT0|A0A3A4NZT0_9BACT 6-carboxy-5,6,7,8-tetrah ydropterin synthase OS=Candidatus Omnitrophica bacteriu m OX=2035772 GN=queD PE=3 SV=1
MYEITVTRDFSSAHYLHDYEGKCANLHGHNWKVAISFRGKELARNGILIDFLDIGKALDGLLEKLDHGVINEIPPFDVMNPTAENLARWFHAEVSQKLPPGAPQPHRVTVWETPDASASFWEDEP

SEQ ID NO: 18880 - protein, 119 aa, Omnitrophica bacterium
  misc_feature (1)..(119): tr|A0A2H0Y5R9|A0A2H0Y5R9_9BACT 6-carboxy-5,6,7,8-tetrah ydropterin synthase OS=Candidatus Omnitrophica bacteriu m CG08_land_8_20_14_0_20_41_16 OX=1974743 GN=queD PE=3 SV=1
MYKIKVEAEFSSAHNLRGYKGKCEELHGHNWKVELAAGSKNLDKVGMVLDFKFLKRKLNSVLDKLDHKYLNRVDYFKKANPTSENIAKYIYDRLGDKVPGLVSITVWESEKSCATYDGE

SEQ ID NO: 18881 - protein, 120 aa, Omnitrophus magneticus
  misc_feature (1)..(120): tr|A0A0F0CWA4|A0A0F0CWA4_9BACT 6-carboxy-5,6,7,8-tetrah ydropterin synthase OS=Candidatus Omnitrophus magneticu s OX=1609969 GN=OMAG_000429 PE=3 SV=1
MFTVKIKSDFSGAHNLRGYKGKCEDLHGHNWYIEVEAVSEELDSLGMVIDFKEMKKVLDSILNELDHKYLNEISYFEKINPTSENIARYLYDKISPFFQKGKISKVTVWETDSSMASYSA

SEQ ID NO: 18882 - protein, 151 aa, Ornithobacterium hominis
  misc_feature (1)..(151): tr|A0A383TVL6|A0A383TVL6_9FLAO 6-pyruvoyl tetrahydropte rin synthase/QueD family protein OS=Candidatus Ornithob acterium hominis OX=2497989 GN=SAMEA104719789_00042 PE= 4 SV=1
MKKVRVTKIFNFETSHALFGYDGKCKNIHGHSYKLFVTVLGEPVQEQTDSKNGMLIDFGELKKIVKELIVDPFDHAIILNQNSPHAALGDKLKQENHDVIMLDYQPTCENMLIHFAGILKKALPDEVELVKLKLFETENSYGEWLASDNIK

SEQ ID NO: 18883 - protein, 130 aa, Ozemobacter sibiricus
  misc_feature (1)..(130): tr|A0A367ZKI6|A0A367ZKI6_9BACT 6-carboxy-5,6,7,8-tetrah ydropterin synthase OS=Candidatus Ozemobacter sibiricus OX=2268124 GN=OZSIB_1345 PE=3 SV=1
MYRISVEKSFSAAHLLPDHPGKCRQLHGHNWRVRVTAAAATLDQQGMVVDFSVLKRALAEVCDQFDHRLLNELPLLAGVVPTAEHLCRIIHGELARRLDDGRVRIALVQIWETPDNCAEFVPAGGGEGQP

SEQ ID NO: 18884 - protein, 147 aa, Pandoraea novymonadis
  misc_feature (1)..(147): tr|A0A2P6UYN0|A0A2P6UYN0_9BURK 6-carboxy-5,6,7,8-tetrah ydropterin synthase OS=Candidatus Pandoraea novymonadis OX=1808959 GN=BZL35_00671 PE=3 SV=1
MITITRKLEFDAGHRIPDHRSQCRNLHGHRYVLEITLMGEMKREEGAFDNGMVMDFADVKALANEHLVSMWDHAFIVYQGDIEVRNFLTSLKDHKTVVLDCIPTVENLANIAFKMLVGIFDAYYGSNLCLTHVRLYETPNCWADVKS

SEQ ID NO: 18885 - protein, 119 aa, Pantoea carbekii
  misc_feature (1)..(119): tr|U3U725|U3U725_9GAMM 6-carboxy-5,6,7,8-tetrahydropter in synthase OS=Candidatus Pantoea carbekii OX=1235990 G N=HHS_01670 PE=3 SV=1
MTTTLFKEFKFEAAHRLPYVAKEHKCSRLHGHSFRVCLEITAELDIHAGWVIDFSELKMAFKPVYNLLDHHYLNDIPGLENPTSEVLAEWIWKRIKPTLPSLSTVIIKETCTTGCIYRG

SEQ ID NO: 18886 - protein, 148 aa, Paraburkholderia kirkii
  misc_feature (1)..(148): tr|G4M7T9|G4M7T9_9BURK 6-carboxy-5,6,7,8-tetrahydropter in synthase OS=Candidatus Paraburkholderia kirkii UZHbo t1 OX=1055526 GN=BKIR_c17_4538 PE=3 SV=1
MQTITRKLEFDAGHRIPDHRSQCRNLHGHRYVLEITLQGDLVDAEGAPDRGMVMDFADVKALAMEHLVNKWDHAFIVYEGDVKVREFLQMLSDQKTVVLDRIPTVENLAAVAFNILANVYDAHYGVNLKLKRVRLYETPNCWADVERA

SEQ ID NO: 18887 - protein, 147 aa, Paraburkholderia sp.
  misc_feature (1)..(147): tr|A0A4R5MCE9|A0A4R5MCE9_9BURK 6-carboxy-5,6,7,8-tetrah ydropterin synthase OS=Candidatus Paraburkholderia sp. 4M-K11 OX=2528715 GN=queD PE=3 SV=1
MTITRKLEFDAGHRIPDHRSQCRNLHGHRYVLEVTLQGDTVETEGAPDRGMVMDFADVKALANQHLVDLWDHAFIVFEGDTQVRGFLETLPGHKTVVIDRIPTVENLAAIAFEILANVYDAHYGVNLQLSKVRLYETPNCWAEVTRS

SEQ ID NO: 18888 - protein, 127 aa, Parcubacteria bacterium
  misc_feature (1)..(127): tr|A0A3M0WSX6|A0A3M0WSX6_9BACT 6-carboxy-5,6,7,8-tetrah ydropterin synthase OS=Candidatus Parcubacteria bacteri um OX=2053309 GN=queD PE=3 SV=1
MGLLISKRYKFEAAHYLPFVPEGHPCKRLHGHSYSFTVTLKGEVNELGFVLDYNELDVYVKGLADSLDHRLLNEIKGLENPTAENICVWLADKLNNTEIKSFLHSVKVKETEKTESILYVNRDNRSI

SEQ ID NO: 18889 - protein, 120 aa, Parcubacteria bacterium
  misc_feature (1)..(120): tr|A0A3R7CH88|A0A3R7CH88_9BACT 6-carboxy-5,6,7,8-tetrah ydropterin synthase OS=Candidatus Parcubacteria bacteri um OX=2053309 GN=queD PE=3 SV=1
MEIYKVFTFDAAHRLPNLPETHKCRRLHGHTFRVEIRVAGKEDDAYDWVIDFSDIAKIAAPIIEILDHNYLNDIEGLENPTSENIAKWIWRKLKPNLPILTQVVVQESPNSGVVCIGEDD

SEQ ID NO: 18890 - protein, 149 aa, Pelagibacter sp.
  misc_feature (1)..(149): tr|A0A1Z9MNM8|A0A1Z9MNM8_9PROT Uncharacterized protein OS=Candidatus Pelagibacter sp. TMED202 OX=1986810 GN=CB D62_00640 PE=4 SV=1
MTYYSTKTYGHNIGLACVFRQPNADHSHCHLLHGYSLAFRFTFGCNELDNKNWAVDFGGLKPLKAWLEDKFDHKLALDNNDPQLERLKDLENYDLAEVRMFDGVGAEMFAKHAFDFADKLIKEKTDGRCFVDSVECMEHGANSAIYRKK

SEQ ID NO: 18891 - protein, 119 aa, Pelagibacter sp.
  misc_feature (1)..(119): tr|A0A1Z9HY59|A0A1Z9HY59_9PROT 6-carboxy-5,6,7,8-tetrah ydropterin synthase OS=Candidatus Pelagibacter sp. TMED 166 OX=1986805 GN=CBD26_02870 PE=3 SV=1
MILVRKYSFQAARKLTKIAPDHICANLHGHTFHITIRIEGPINKKNDFVMDFYDIDKIFNKSVFNLLDHKYLNDIKGLESPTTENLAKWIWNKLVKKLPILKEVNVFENDVYGCVYKGD

SEQ ID NO: 18892 - protein, 113 aa, Peregrinibacteria bacterium
  misc_feature (1)..(113): tr|A0A1F7AB95|A0A1F7AB95_9BACT 6-carboxy-5,6,7,8-tetrah ydropterin synthase OS=Candidatus Peregrinibacteria bac terium RIFCSPLOWO2_01_FULL_39_12 OX=1801897 GN=A3B60_03 720 PE=3 SV=1
MELSSTFHFAASHFLTQYHGKCEHMHGHNYKLIVTIEGEIKSNGMILDFKKIKEIVEEKILEKLDHTHLNNLIENPSAENIVVWIWENLKNSLPLKRLTLYETDDYFCQYEGK

SEQ ID NO: 18893 - protein, 113 aa, Peregrinibacteria bacterium; identical to SEQ ID NO: 18892
  misc_feature (1)..(113): tr|A0A1F7AD70|A0A1F7AD70_9BACT 6-carboxy-5,6,7,8-tetrah ydropterin synthase OS=Candidatus Peregrinibacteria bac terium RIFCSPLOWO2_02_FULL_39_10 OX=1801899 GN=A3I58_02 095 PE=3 SV=1

SEQ ID NO: 18894 - protein, 126 aa, Phaeomarinobacter ectocarpi
  misc_feature (1)..(126): tr|X5MP71|X5MP71_9RHIZ 6-carboxy-5,6,7,8-tetrahydropter in synthase OS=Candidatus Phaeomarinobacter ectocarpi O X=1458461 GN=BN1012_Phect2818 PE=3 SV=1
MRITKQFTFDAAHFLPHAEEGHPNRRLHGHSFRVIVALDGMPAEDTGLIRDFGEVENILGQAQEELDHRFLNEIEGLEAPTLENITLWLWTRLAAPLPELARIEIHRDSCGEACIYEGSRHGKQKS

SEQ ID NO: 18895 - protein, 120 aa, Photodesmus katoptron
  misc_feature (1)..(120): tr|S3EHF6|S3EHF6_9GAMM 6-carboxy-5,6,7,8-tetrahydropter in synthase OS=Candidatus Photodesmus katoptron Akat1 O X=1236703 GN=queD PE=3 SV=1
MKTEIYKDFTFEAAHHLPNVPKGHKCGRLHGHSFLVRLYIQGNIDPNTGWLVDFSDIKKLFNPIYEQLDHFYLNEITGLENPTSEVLAIWIWRKLKPSLPILNKIEIKETCTTGCIYSGK

SEQ ID NO: 18896 - protein, 120 aa, Photodesmus blepharus
  misc_feature (1)..(120): tr|A0A084CMC1|A0A084CMC1_9GAMM 6-carboxy-5,6,7,8-tetrah ydropterin synthase OS=Candidatus Photodesmus blepharus OX=1179155 GN=queD PE=3 SV=1
MKAELYKDFKFEAAHYLPNVPAGHKCSRLHGHSFLVRLYILGEVDPNTGWVLDFDDISTAFKAVYDRLDHRYLNEIKGLENPTSEVLAKWIWQELKSTLPLLNKVEIKETCTANCTYWGE

SEQ ID NO: 18897 - protein, 140 aa, Phycorickettsia trachydisci
  misc_feature (1)..(140): tr|A0A2P1P757|A0A2P1P757_9RICK 6-pyruvoyl-tetrahydropte rin synthase OS=Candidatus Phycorickettsia trachydisci OX=2115978 GN=phytr_1500 PE=4 SV=1
MSIFSCSITVHFDAAHRVIGHKGKCVDLHGHRYVLEVSIRARQLDQLGMVIDFSDLKQIIYGWINQNFDHTVILSTNDQELGEAISKITKQKIYYLPYNPTAENIAYHFKNDILSNILDTKDLRIGKVRLYETPSCWVEV

SEQ ID NO: 18898 - protein, 123 aa, Phycosocius bacilliformis
  misc_feature (1)..(123): tr|A0A2P2E993|A0A2P2E993_9PROT 6-carboxy-5,6,7,8-tetrah ydropterin synthase OS=Candidatus Phycosocius bacillifo rmis OX=1445552 GN=queD PE=3 SV=1
MTRCLLTKSVTFDAAHHLHQGEADHPYRRLHGHSFRLDVSVEDEADGKDHWVRDFAELTRAIATVRDQLDHSFLNEIEGLETPTLENICVWVAKRLGPSLPNLRRVSVARPSLGEMCTLEIGV

SEQ ID NO: 18899 - protein, 493 aa, Poribacteria bacterium
  misc_feature (1)..(493): tr|A0A2E0XGV5|A0A2E0XGV5_9BACT GTP cyclohydrolase 1 OS= Candidatus Poribacteria bacterium OX=2026781 GN=folE PE =3 SV=1
  misc_feature (3)..(3): Xaa can be any naturally occurring amino acid
  misc_feature (40)..(40): Xaa can be any naturally occurring amino acid
  misc_feature (59)..(59): Xaa can be any naturally occurring amino acid
  misc_feature (297)..(297): Xaa can be any naturally occurring amino acid
MLXPPANSERLSPIFMHFLTRYIAFEASHFYRIPELNDQXNYQLFGHKANPNGHGHNYXLYLTVKGSVDPVNGMVLNIKKLDDTIRGYVDQHYDHKQINLQHPVFAVDPHLQPTPENIVMQIWQAFNQRLKKVEIAELRLDEDERLYTMYYGVEQMVHLTRTYEFSAAHRLHSFELSDQENSETFGKCNNPNGHGHNYVLEVTISGEVDSRTGMVVKVDDLDRIIDKQVYGRFDHKHLNLDTVEFQSLNPTSENFVQVLWDLLVADIRSLDPARSVQLYRLRLRETPKSFFDYYGNXDLMVSYNYEEDFVAVDEIIQEHFHNLIKRIGEDPNRQGLVKTPTRAALAMQYLTQGYQQDVHKIVNDAIFDEQYDDMVIVKDIEFFSICEHHILPFFGKCHVGYLPNKKIIGLSKIPRLVDAYARRLQIQERLTYQIAQTLSEVLSPKGVAVVMEAQHMCMMIRGVEKQHSSTITNVMLGDFREDSATRAEFMNCL

SEQ ID NO: 18900 - protein, 64 aa, Poribacteria bacterium
  misc_feature (1)..(64): tr|A0A2E9F6K6|A0A2E9F6K6_9BACT 6-pyruvoyl tetrahydropte rin synthase (Fragment) OS=Candidatus Poribacteria bact erium OX=2026781 GN=CMK17_06235 PE=4 SV=1
MDYYLTRRVEFEAAHYYRIPELSDEENYDLFGPTSNLNSHGHNYVLLVTVKGDAVASDGMLINI

SEQ ID NO: 18901 - protein, 125 aa, Promineofilum breve
  misc_feature (1)..(125): tr|A0A160T4C2|A0A160T4C2_9CHLR 6-pyruvoyl-tetrahydropte rin synthase OS=Candidatus Promineofilum breve OX=18065 08 GN=CFX0092_A3233 PE=4 SV=2
MYTVAVKRDFVGQHFLIGGDWGAENERHSHHYVVEVQLEGSELDRHGYLVDIVDIEHHLEALVAHYRDRTLNELPEFAGLNPSIEHFARIFGESLSARITAANITALTLKIWENEIAWAAYRLAR

SEQ ID NO: 18902 - protein, 147 aa, Propionivibrio aalborgensis
  misc_feature (1)..(147): tr|A0A1A8XXD2|A0A1A8XXD2_9RHOO 6-carboxy-5,6,7,8-tetrah ydropterin synthase OS=Candidatus Propionivibrio aalbor gensis OX=1860101 GN=PROAA_290015 PE=3 SV=1
MLITRRLEFDAGHRIPDHKSQCRHLHGHRYALEITLSGDIIVQAGDPANGMVMDFSEVKSLAKEHLIDHWDHSFLVYAGDKQLVEFLNSIPDHKTVILDCIPTSENLAVQAFSILDSVFQDTYGNHLRLERVRLYETPNCWADAGRQ

SEQ ID NO: 18903 - protein, 126 aa, Pseudomonas adelgestsugas
  misc_feature (1)..(126): tr|A0A481QMX0|A0A481QMX0_9PSED 6-carboxy-5,6,7,8-tetrah ydropterin synthase OS=Candidatus Pseudomonas adelgests ugas OX=1302376 GN=queD PE=3 SV=1
MEIFKEFTFESAHRLPYVPESHKCWRLHGHSFKVAIHLVGNLDYNTGWLRDFSNIKAIFKPLHERLDHNYLNDIPGLENPTSEVLAQWIWTELKPTLPELSAVRIYETCTSGCIYRGNIATCKSKQ

SEQ ID NO: 18904 - protein, 132 aa, Raymondbacteria bacterium
  misc_feature (1)..(132): tr|A0A1F7FCA2|A0A1F7FCA2_9BACT 6-carboxy-5,6,7,8-tetrah ydropterin synthase OS=Candidatus Raymondbacteria bacte rium RIFOXYD12_FULL_49_13 OX=1817890 GN=A2519_18270 PE= 3 SV=1
MKITKRFQFCASHRLYNPRLSSAGNSRLFGKCNRQHGHNFILDVTVEGRVQRTSGMVIDFRQLSAIVKEQVVDYFDHTDFEHDIPEFRTMPQTVENLAVVVWQRLKQKMPARVKLARIRISESDQNWAEYEG

SEQ ID NO: 18905 - protein, 120 aa, Regiella insecticola
  misc_feature (1)..(120): tr|G2GY35|G2GY35_9ENTR 6-carboxy-5,6,7,8-tetrahydropter in synthase OS=Candidatus Regiella insecticola 5.15 OX= 1005043 GN=Rin_00006860 PE=3 SV=1
MTTTLFKDFQFEAAHRLPNVPEGHKCGRLHGHSFSLRLEVTGEVDPTFGWIMDFATLKTQFEPILQRLDHHYLNEIEGLENPTSEVLAAWIWQQLKPKLPELSAVTIKETCSTGCVYRGE

SEQ ID NO: 18906 - protein, 129 aa, Regiella insecticola
  misc_feature (1)..(129): tr|E0WSW3|E0WSW3_9ENTR 6-carboxy-5,6,7,8-tetrahydropter in synthase OS=Candidatus Regiella insecticola LSR1 OX= 663321 GN=sscR PE=3 SV=1
MAYKKKATIVTTTLFKDFQFEAAHRLPNVPEGHKCGRLHGHSFSLRLEVTGEVDPTFGWIMDFAALKTQFEPILQRLDHNYLNEIEGLENPTSEVLAAWIWQQLKPKLPELSAVTIKETCSTGCVYRGE

SEQ ID NO: 18907 - protein, 149 aa, Roizmanbacteria bacterium; identical to SEQ ID NO: 18734
  misc_feature (1)..(149): tr|A0A2M8KMR8|A0A2M8KMR8_9BACT 6-carboxy-5,6,7,8-tetrah ydropterin synthase OS=Candidatus Roizmanbacteria bacte rium CG10_big_fil_rev_8_21_14_0_10_36_26 OX=1974851 GN= COU86_00240 PE=3 SV=1

SEQ ID NO: 18908 - protein, 148 aa, Roizmanbacteria bacterium
  misc_feature (1)..(148): tr|A0A1F7I216|A0A1F7I216_9BACT 6-carboxy-5,6,7,8-tetrah ydropterin synthase OS=Candidatus Roizmanbacteria bacte rium RIFCSPHIGHO2_12_FULL_39_8 OX=1802050 GN=A3F60_0067 5 PE=3 SV=1
MTITKIIEFDMGHRIPNHKSQCRNLHGHRYKLELNIEGEVQKEVGRSEEGMVFDFIDVKTLLMNEVHSKCDHAFMFYEKDPVLAVFAKKNKSLKFVSVPFIPTAENISDWIFNILSKKIEIISKKKFHLQGIKLWETPTSSAFISKKN

SEQ ID NO: 18909 - protein, 144 aa, Rokubacteria bacterium
  misc_feature (1)..(144): tr|A0A0T6ABX4|A0A0T6ABX4_9BACT Uncharacterized protein OS=Candidatus Rokubacteria bacterium CSP1-6 OX=1640509 GN=XU13_C0025G0018 PE=4 SV=1
MGRDALTLTRTFHFSAGHRLANPALGEAENRALYGPCFRPHGHNYLLEVTVGGRIDPRTGMAADLVMLESAVRRAVLDLVDHRDLNADVPALAGVITTGENLARAFWRLLAPALPAGALQRVAVVETANNTFEYYGETDDGDTR

SEQ ID NO: 18910 - protein, 138 aa, Rokubacteria bacterium
  misc_feature (1)..(138): tr|A0A1Q7I334|A0A1Q7I334_9BACT 6-carboxy-5,6,7,8-tetrah ydropterin synthase OS=Candidatus Rokubacteria bacteriu m 13_1_40CM_4_67_11 OX=1805361 GN=AUH76_17890 PE=3 SV=1
MSATAYSTRRFSFAAGHKYWVESWPAAENERVFGRLTVPHGHNYTVDVTVRGPIDERTGMVIDLSELKRIVGETVVDRFDHADLNADALFRNRVPTTENIALVIWDLLAAKLGSERLWQVRVFEDPTLYVDVRAEDAV

SEQ ID NO: 18911 - protein, 114 aa, Saccharicenans subterraneum
  misc_feature (1)..(114): tr|A0A3E2BNL9|A0A3E2BNL9_9BACT 6-carboxy-5,6,7,8-tetrah ydropterin synthase OS=Candidatus Saccharicenans subter raneum OX=2508984 GN=OP8BY_1905 PE=3 SV=1
MSWKLKVRDKFSAAHYLREYKGKCEKLHGHTFQVEVEITVKELDNTGIGIDFTEIKKKLAEILPDHTLLNEAFNFNPSAENLAREIYRRMKEFYPVTAVTVWESEDAAATYTED

SEQ ID NO: 18912 - protein, 118 aa, Saganbacteria bacterium
  misc_feature (1)..(118): tr|A0A2H0Y1U9|A0A2H0Y1U9_9BACT 6-carboxy-5,6,7,8-tetrah ydropterin synthase OS=Candidatus Saganbacteria bacteri um CG08_land_8_20_14_0_20_45_16 OX=2014293 GN=queD PE=3 SV=1
MYQLTVEDTFDAAHALRGYAGPCENLHGHTWKVQVELQGEKLNKIGLLEDFKTIKKHLKEILCEFDHNHLNEIAIFKTQNPSSENLARIIYEKLKQKLKAISKVTVYESPTTCASYFA

SEQ ID NO: 18913 - protein, 121 aa, Scalindua brodae; identical to SEQ ID NO: 18740
  misc_feature (1)..(121): tr|A0A0B0EFJ3|A0A0B0EFJ3_9BACT 6-carboxy-5,6,7,8-tetrah ydropterin synthase OS=Candidatus Scalindua brodae OX=2 37368 GN=SCABRO_02408 PE=3 SV=1

SEQ ID NO: 18914 - protein, 121 aa, Scalindua sp.
  misc_feature (1)..(121): tr|A0A523CJ22|A0A523CJ22_9BACT 6-carboxy-5,6,7,8-tetrah ydropterin synthase OS=Candidatus Scalindua sp. AMX11 O X=2555784 GN=queD PE=3 SV=1
MYELVVNDVFAGAHSLRDYDGECEKLHGHNWRVEVTLQCEELDGLGMVFDFKEVKSILREVLAHFDHSHLNELKEFSIENPTTENVSRILFSKIGEMLPPKISVAKVKTWESDNCAAAYYI

SEQ ID NO: 18915 - protein, 124 aa, Schekmanbacteria bacterium
  misc_feature (1)..(124): tr|A0A1F7RRI7|A0A1F7RRI7_9BACT 6-carboxy-5,6,7,8-tetrah ydropterin synthase OS=Candidatus Schekmanbacteria bact erium RBG_16_38_10 OX=1817879 GN=A2W05_08285 PE=3 SV=1
MFELMITSEFSAAHQLKEYGGKCEALHGHNWRVEVYVKSSVPDKIGMVMDFADIKKAANLILAELDHKNLNEIQPFRDKNPTAENISLWVFNQLLSKINSDNIKLSKVRVWETETSCASYSEES

SEQ ID NO: 18916 - protein, 125 aa, Schekmanbacteria bacterium
  misc_feature (1)..(125): tr|A0A3M1RLC1|A0A3M1RLC1_9BACT 6-carboxy-5,6,7,8-tetrah ydropterin synthase OS=Candidatus Schekmanbacteria bact erium OX=2419984 GN=queD PE=3 SV=1
MYSVSIKLDFSSAHQLRNYKGKCEALHGHNWKVEAVVSGEKLNSLGMLIDFHDLKKELSAVLELLDHKNLNETEIFKEINPTAENIANWIYDEMSKKINNGNISVSEIRVWESEHSCAMYSGKRC

SEQ ID NO: 18917 - protein, 142 aa, Schmidhempelia bombi
  misc_feature (1)..(142): tr|A0A484GDC3|A0A484GDC3_9GAMM 6-carboxy-5,6,7,8-tetrah ydropterin synthase OS=Candidatus Schmidhempelia bombi str. Bimp OX=1387197 GN=queD PE=3 SV=1
MYIIAKEFQFDACHMLDGHQGKCHNLHGHTYKLVIEVSGNLIKQGSSCDMVMDFADLKHIVKQHIVDPLDHAFLFFQENKNECEIAALLQRMQRKVFAFPCRTTAEGMSKFIFEQLSHYLPITMVRLWETPTSYCEYRKENQ

SEQ ID NO: 18918 - protein, 123 aa, Sulfobium mesophilum
  misc_feature (1)..(123): tr|A0A2U3QK93|A0A2U3QK93_9BACT 6-carboxy-5,6,7,8-tetrah ydropterin synthase OS=Candidatus Sulfobium mesophilum OX=2016548 GN=NBG4_710002 PE=3 SV=1
MYELSIEVGFAAAHQLRGYKGKCENMHGHNWRVQISVLAERLNEIDIAMDFHDLKKMAQEVIAPLDHAFLNEVFPFTEKNPSSENIAKWIFDSMKKKINNGNLRMAAVTVWESENASASYYED

SEQ ID NO: 18919 - protein, 123 aa, Sulfopaludibacter sp.
  misc_feature (1)..(123): tr|A0A2N9MVM7|A0A2N9MVM7_9BACT 6-carboxy-5,6,7,8-tetrah ydropterin synthase OS=Candidatus Sulfopaludibacter sp. SbA3 OX=2043164 GN=SBA3_3260008 PE=3 SV=1
MFEVTIEETFAAGHALRNYRGKCENVHGHNYRCQVSIQGERLDEIGLLVDFVELKKVVHGVLDRMDHQWLNEFPPFDVLNPSAENMAKYIYDEVSSGMQGKEAIRVQSVRLWETDTASATYRP

SEQ ID NO: 18920 - protein, 141 aa, Sulfopaludibacter sp.
  misc_feature (1)..(141): tr|A0A2N9MXQ7|A0A2N9MXQ7_9BACT 6-carboxy-5,6,7,8-tetrah ydropterin synthase OS=Candidatus Sulfopaludibacter sp. SbA3 OX=2043164 GN=SBA3_3690011 PE=4 SV=1
MVITRKVEFSASHMCRDPRLSDEENRKLYGPAANPHGHGHNYVVEVSLRGQPDPVTGMVLDLKELKEILNREIVAPYDHRFLNYEVPPFDQVVPTTENIARDIWRRIEPCLSVGNGRLHSVRVYETPDLYVDYYGESPCTM

SEQ ID NO: 18921 - protein, 137 aa, Sulfotelmatobacter sp.
  misc_feature (1)..(137): tr|A0A2N9N8Q8|A0A2N9N8Q8_9BACT 6-pyruvoyl tetrahydropte rin synthase OS=Candidatus Sulfotelmatobacter sp. SbA7 OX=2043160 GN=SBA7_290025 PE=4 SV=1
MKAHLTRRYKFSASHRLHSDAMSEAENAATYGKCNNPHGHGHNYALEVTVSGQVDENGMVCNLVDLDGFVEREILERFDLQNLNTLPEFAETVPTTENLSIAVYDILQRGFRLAHLERVRFEETLMNSFEYAGEENH

SEQ ID NO: 18922 - protein, 140 aa, Sulfotelmatobacter kueseliae
  misc_feature (1)..(140): tr|A0A2U3KP21|A0A2U3KP21_9BACT 6-pyruvoyl tetrahydropte rin synthase OS=Candidatus Sulfotelmatobacter kueseliae OX=2042962 GN=SBA1_360018 PE=4 SV=1
MIAHLTRRYPFSASHRLNSEQMSADENRATYGKCNNPYGHGHNYTLEVTVSGPVDERTGMVCNLTDLDGVVEREVLSRYHLENLNTVQEFAKTVPTTENLCVAIFEILQRGFAQAHLDRVRLEETMMNSFEYTGGAEARK

SEQ ID NO: 18923 - protein, 139 aa, Sulfotelmatomonas gaucii
  misc_feature (1)..(139): tr|A0A2N9L4W4|A0A2N9L4W4_9BACT 6-carboxy-5,6,7,8-tetrah ydropterin synthase OS=Candidatus Sulfotelmatomonas gau cii OX=2043161 GN=SBA5_150072 PE=4 SV=1
MIFLTRRATFSASHYYWNEAWTPEKNQQVFGRCANRNGHGHNYTLEVTVAGEPDPVTGFVVDLKWLKDVMEREVLAAYDHKHLNLDAPEFAHANPTTENIVIAAWKRLEPAVTAAGGARLSRIRVYETPEIFAEYRGEA

SEQ ID NO: 18924 - protein, 125 aa, Sulfotelmatomonas gaucii
  misc_feature (1)..(125): tr|A0A2N9L276|A0A2N9L276_9BACT 6-carboxy-5,6,7,8-tetrah ydropterin synthase OS=Candidatus Sulfotelmatomonas gau cii OX=2043161 GN=SBA5_100029 PE=3 SV=1
MYEVTVEADFSSGHYLRNYRGKCENPHGHNYKVRITLAGTELDEAGLLLDFKLLKQVLRPVVERIDHQMLNDLEPFTTLNPSAENIAKYFYDETNRSLASITAGRVRVKDCTIWETDSTTATYFE

SEQ ID NO: 18925 - protein, 193 aa, Sulfuricurvum sp.
  misc_feature (1)..(193): tr|K7T3I5|K7T3I5_9HELI 6-pyruvoyl tetrahydrobiopterin s ynthase OS=Candidatus Sulfuricurvum sp. RIFRC-1 OX=1249 480 GN=B649_10890 PE=4 SV=1
MIIRKLFKFENAHIVRGCSTQRCRASLHGHSYKVEVLLESDYLDNGQMVYDFGLMKQGMKELIDAFDHAIALWDGDDAEYIADMKKHSNRWVQIPVSPSAEQFSRLIFVMIDKLHWFTQMVNGEKMVRLYSIIVHETDTGYAQCFRNDAYSDKMGLIDLEKIIFSDEVREGWNDPALWERIKRGETFINPRSV

SEQ ID NO: 18926 - protein, 145 aa, Sumerlaea chitinovorans
  misc_feature (1)..(145): tr|A0A2Z4Y2J4|A0A2Z4Y2J4_9BACT 6-pyruvoyl tetrahydrobio pterin synthase OS=Candidatus Sumerlaea chitinovorans O X=2250252 GN=BRCON_0185 PE=4 SV=1
MVYLTRRVGFCASHRLFNPHLSDEENEKIYGRCSNPNGHGHNYTLEVTVCGSPEPRTGMVIDLKELKRIIVEEIVERVDHKHLNTDVDFLQGVIPTSENLVIAFWQLLERRLGGRCQLHEIRLWETANNVVSYRGEGENLVRVTG

SEQ ID NO: 18927 - protein, 145 aa, Sumerlaea chitinovorans
  misc_feature (1)..(145): tr|A0A2Z4Y849|A0A2Z4Y849_9BACT 6-carboxy-5,6,7,8-tetrah ydropterin synthase OS=Candidatus Sumerlaea chitinovora ns OX=2250252 GN=BRCON_2055 PE=3 SV=1
MYLVKIRMQFAAAHRLCREDLSDEENFAIYGKCANPNGHGHNYDLEVAVEGELDPATGMVVNFYDLQRVVEEHIFNKVDHKNLNKDVDFLHGVIPTAENLARCFWEVLEPHVRPARLFSITVAEGEANVVTYFGPRNRTGVSNGE

SEQ ID NO: 18928 - protein, 175 aa, Sumerlaeota bacterium
  misc_feature (1)..(175): tr|A0A353GFJ8|A0A353GFJ8_9BACT 6-pyruvoyl tetrahydrobio pterin synthase OS=Candidatus Sumerlaeota bacterium OX= 2107588 GN=DDW35_03105 PE=4 SV=1
MTIAYCLVPTMNTYAIETSKEALKFSAAHLATFADGTAERLHGHNYQVRARLEGDLDKAGMVLDACVLKQWVRELCDELDEHVLVAMQNPLLEVEEDEDEVVMRYKGKTYVFPQDDCVLLSIPNTTMEYLARYLAERLRARLDMEPAADRMRELSVTVSETPGQSASWTLQFGGA

SEQ ID NO: 18929 - protein, 154 aa, Synechococcus spongiarum
  misc_feature (1)..(154): tr|A0A1T1CRP6|A0A1T1CRP6_9SYNE 6-pyruvoyl tetrahydropte rin synthase OS=Candidatus Synechococcus spongiarum LMB bulk15M OX=1943582 GN=BV61_04605 PE=4 SV=1
MRSPYTCSKAFTDFPCCHRQWRHKGHCRFVHGYSRSFTFWFAATHLDEHGFVVDFSSLDPLRRQLAEQFDHTFLVNHDDPLLAEWQRLHHLGALDLRVLENVGMEATAKLVWGWANALLRRRNQGRCCCWKVEARENDSNRACYEQCPDWYDGV

SEQ ID NO: 18930 - protein, 321 aa, Synechococcus spongiarum
  misc_feature (1)..(321): tr|A0A165B1A1|A0A165B1A1_9SYNE 6-pyruvoyl tetrahydrobio pterin synthase OS=Candidatus Synechococcus spongiarum OX=431041 GN=FLM9_1123 PE=4 SV=1
MTAMVAASVAAAAIARNGTSNGTNPTAPHGEGRFCLITRRATFCASHRYWLPELSAADNEARFGCCSRAPGHGHNYELVVTMAGPLDANGMVLNLSEVKHHIRRQVTDSLDFSFLNSTWPELASKLPCTEWLCHCIWQRLKPHLPVVGIRLYEHPRLWADYFGQTMDAFLTVSTHFAAAHRLARPELSYEENVATYGKCARPHGHGHNYHLEVTVQGQMDERTGMLCDLAVLQQVVQDVVTEPFDHTFLNKDVPHFATTVPTAENIALYICDLLRQPVSRCGAQLHKVRLQESPNNAAEVYAESPVAHHLAAQTLQALASC

SEQ ID NO: 18931 - protein, 132 aa, Syntrophonatronum acetioxidans
  misc_feature (1)..(132): tr|A0A424YFH3|A0A424YFH3_9FIRM 6-carboxy-5,6,7,8-tetrah ydropterin synthase OS=Candidatus Syntrophonatronum ace tioxidans OX=1795816 GN=queD PE=3 SV=1
MSKDGYRLTVKISFSAAHFLREYAGKCSNLHGHTWIAECSVEGSKLNSLGMLIDFHDLEDLVKEVTDEFDHSLINDHPSFSEEGLNPTAENLAWYIYHELEKKVDRSIYDIMVKEITLWESQDAYATYKRKE

SEQ ID NO: 18932 - protein, 123 aa, Syntrophosphaera thermopropionivorans
  misc_feature (1)..(123): tr|A0A4R5JQA3|A0A4R5JQA3_9BACT 6-carboxy-5,6,7,8-tetrah ydropterin synthase OS=Candidatus Syntrophosphaera ther mopropionivorans OX=2593015 GN=queD PE=3 SV=1
MYKLSVYDYFSAAHRLRGYEGPCSNVHGHNWKVKVTFQTDTLDSLGMAIDFKVLKAKLWEILNQLDHIFLNELPIFKDINPTSENIARYIFESISESFKDSSLSLLEVELQESDKVSVIYSNA

SEQ ID NO: 18933 - protein, 117 aa, Tachikawaea gelatinosa
  misc_feature (1)..(117): tr|A0A090ARU7|A0A090ARU7_9ENTR 6-carboxy-5,6,7,8-tetrah ydropterin synthase OS=Candidatus Tachikawaea gelatinos a OX=1410383 GN=ygcM PE=3 SV=1
MIIFKDFQFEAAHQLPYVSKEHKCSRLHGHSFKVRLEIFGETQKKTGWVMDFKKIKNIFKSVHNQLDHRFLNEIPGLENPTSEILAKWIWNKIKPHLPELLSVTIKETCTSGCIYKK

SEQ ID NO: 18934 - protein, 125 aa, Tagabacteria bacterium
  misc_feature (1)..(125): tr|A0A2M8L9E3|A0A2M8L9E3_9BACT 6-carboxy-5,6,7,8-tetrah ydropterin synthase OS=Candidatus Tagabacteria bacteriu m CG10_big_fil_rev_8_21_14_0_10_40_13 OX=1975022 GN=que D PE=3 SV=1
MSNKVLLTKEVYFSAAHKLNNYKGKCASLHGHTYKLQITVSGSIKQSGMVVDFNEIHKIIENTVTCKLDHSYLNDFFKQPTAENMVIWIWNQIANACKGLEITLEEIKLWETPTSFASYRGEKYG

SEQ ID NO: 18935 - protein, 134 aa, Taylorbacteria bacterium; identical to SEQ ID NO: 18878
  misc_feature (1)..(134): tr|A0A1G2NA78|A0A1G2NA78_9BACT 6-carboxy-5,6,7,8-tetrah ydropterin synthase OS=Candidatus Taylorbacteria bacter ium RIFCSPLOWO2_01_FULL_45_15b OX=1802319 GN=A2928_0066 5 PE=3 SV=1

SEQ ID NO: 18936 - protein, 137 aa, Tectomicrobia bacterium
  misc_feature (1)..(137): tr|A0A1F7TR65|A0A1F7TR65_9BACT 6-pyruvoyl tetrahydrobio pterin synthase OS=Candidatus Tectomicrobia bacterium R IFCSPLOWO2_12_FULL_69_37 OX=1802343 GN=A3J27_15510 PE=4 SV=1
MIEITRREEFCAAHRLFNPAWSAERNEALYGLCANPHYHGHNYAVEVTLRGPVDPETGMVFDLAQLKGLMRRQVVEPLDHRNLNEDAAPYLKGRIPTAENIALAIWEHLAEHLPPGLLHRVRLFENERNFVDYLGEG

SEQ ID NO: 18937 - protein, 137 aa, Tectomicrobia bacterium; identical to SEQ ID NO: 18936
  misc_feature (1)..(137): tr|A0A1F7T352|A0A1F7T352_9BACT 6-pyruvoyl tetrahydrobio pterin synthase OS=Candidatus Tectomicrobia bacterium R IFCSPLOWO2_02_FULL_70_19 OX=1802342 GN=A3I72_02245 PE=4 SV=1

SEQ ID NO: 18938 - protein, 126 aa, Tenderia electrophaga
  misc_feature (1)..(126): tr|A0A0S2T9K1|A0A0S2T9K1_9GAMM 6-carboxy-5,6,7,8-tetrah ydropterin synthase OS=Candidatus Tenderia electrophaga OX=1748243 GN=Tel_01230 PE=3 SV=1
MSARYTLKIVTDFAAAHSLRQYPGDCANLHGHNWQVEAEVTATALNEVGMGMDFKQIRQATKAICERLDHTYLNELSPFDEINPTAENIAAYIYHQLAERLNGDSARVSAITIWETERACVRYTEE

SEQ ID NO: 18939 - protein, 118 aa, Terasakiella magnetica
  misc_feature (1)..(118): tr|A0A1C3RME8|A0A1C3RME8_9RHIZ 6-carboxy-5,6,7,8-tetrah ydropterin synthase OS=Candidatus Terasakiella magnetic a OX=1867952 GN=MTBPR1_90126 PE=3 SV=1
MFTISKQFHFSASHQLHGLADDHPCSRLHGHNYICEVVLQSDTLNSVGFVRDYRELSDLKNYIDDELDHRHLNDVLGENNTTAELMAQHLYNWAHARWSEVVAVRISETPKTWAEYRP

SEQ ID NO: 18940 - protein, 115 aa, Termititenax aidoneus
  misc_feature (1)..(115): tr|A0A388TE35|A0A388TE35_9BACT 6-carboxy-5,6,7,8-tetrah ydropterin synthase OS=Candidatus Termititenax aidoneus OX=2218524 GN=queD PE=3 SV=1
MFELTVESSFSGAHQLIKSNSPCENLHGHNWRVALTVCGSEQEPDVGWVIDFKKLKEALNKELAKFDHKYLNEVLPVSPTAENIAKQIYRDLAASLPVCKVTVWETEKSSVSYSE

SEQ ID NO: 18941 - protein, 115 aa, Termititenax persephonae
  misc_feature (1)..(115): tr|A0A388TIM8|A0A388TIM8_9BACT 6-carboxy-5,6,7,8-tetrah ydropterin synthase OS=Candidatus Termititenax persepho nae OX=2218525 GN=queD PE=3 SV=1
MFELTVESYFSGAHQLSQSRSPCENLHGHNWRVALTVRGAEQDPEVGWLIDFKVLKKALQDELAKFDHQYLNEVLAVSPTAENIAKQIYADLKKSLPVYQVTVWETEKASVSYWE

SEQ ID NO: 18942 - protein, 135 aa, Thermochlorobacter aerophilum
  misc_feature (1)..(135): tr|A0A395LY23|A0A395LY23_9BACT Uncharacterized protein OS=Candidatus Thermochlorobacter aerophilum OX=1868324 GN=D0433_10970 PE=4 SV=1
MLPVRTELCLKFEFCASHSLSVREVPHEHLWRVGVHLAGETRAGMILNLPDVRRAFEDVLAPLRNTFLNENTYLSPEAQAAPTCETLSAFLFDAFNKRLATDFLSANPTVQLVSVEVAICEPDGFEWGSVKRTYA

SEQ ID NO: 18943 - protein, 149 aa, Thermochlorobacter aerophilum
  misc_feature (1)..(149): tr|A0A395M2E1|A0A395M2E1_9BACT 6-carboxytetrahydropteri n synthase OS=Candidatus Thermochlorobacter aerophilum OX=1868324 GN=D0433_07655 PE=4 SV=1
MNKVLEKPRKVYVTRKVHFNAAHRLFNPTFSDEKNCQIYDVCNNFYGHGHNYELEVTLSGIVDKETGYLFDLKVLKKILEEEILSKVDHKHLNFDVEMFRDTVPTAEVIAVVFWEVLSQKLKTMNLKGVDLYEIRVFESERNIATYRGE

SEQ ID NO: 18944 - protein, 143 aa, Thermochlorobacteriaceae bacterium
  misc_feature (1)..(143): tr|A0A081SG09|A0A081SG09_9BACT Uncharacterized protein OS=Candidatus Thermochlorobacteriaceae bacterium GBChlB OX=1519464 GN=HY22_08795 PE=4 SV=1
MQRFFETNSLFVKTELFLRFEFLASHSLSVREEPHLHLWRVVVALGGEPQNGMIISLPDLRAAFAEILAPLEHTFLNDNCLLDADAQRAPTCETLGAFFFSTFSDVLQRQFAAQNPTVALRSVEVAICEPTGFEWGSAKLSKE

SEQ ID NO: 18945 - protein, 149 aa, Thermochlorobacteriaceae bacterium
  misc_feature (1)..(149): tr|A0A081SIZ9|A0A081SIZ9_9BACT 6-pyruvoyl tetrahydrobio pterin synthase OS=Candidatus Thermochlorobacteriaceae bacterium GBChlB OX=1519464 GN=HY22_01620 PE=4 SV=1
MNQILEKPRKVYVTRKVHFNAAHRLFNPTFTDEQNCDVYDICNNFYGHGHNYDLEVTLAGIVNKDTGYLFDLKILKKLLEEEILSKVDHKHLNFDVEMFKDTVPTAEVIAVVFWDVIDRKLKTLNLEGVELYEVRVFESERNFVVYRGE

SEQ ID NO: 18946 - protein, 124 aa, Thermokryptus mobilis
  misc_feature (1)..(124): tr|A0A0S4MXW7|A0A0S4MXW7_9BACT 6-carboxy-5,6,7,8-tetrah ydropterin synthase OS=Candidatus Thermokryptus mobilis OX=1643428 GN=JGI1_00573 PE=3 SV=1
MFKITVQKNFSASHIIRGYPGECGRLHGHNWKVKVVVKTEKLDRYGMAIDFKEISEILNDIIEKVDHYHLNDIPPFDKEQPTAENIAKFFYDEVKQRLSGREGVEIDFVEIWETEKYSAIYQEL

SEQ ID NO: 18947 - protein, 134 aa, Thiodiazotropha endoloripes
  misc_feature (1)..(134): tr|A0A1E2UP44|A0A1E2UP44_9GAMM 6-carboxy-5,6,7,8-tetrah ydropterin synthase OS=Candidatus Thiodiazotropha endol oripes OX=1818881 GN=A3196_07035 PE=3 SV=1
MYTVTKEIHFCYGHRLLNHKGKCRHLHGHNATAVIHLESTQLDELGMVCDFSEIGDYVKKWVNQNLDHNMLLHSDDPVLPLLQEAGESVYVMPNNPTAENIARLIFDYVEAGGYPVVQVSLHETDSALASYRKP

SEQ ID NO: 18948 - protein, 134 aa, Thiodictyon syntrophicum
  misc_feature (1)..(134): tr|A0A2K8UI13|A0A2K8UI13_9GAMM Uncharacterized protein OS=Candidatus Thiodictyon syntrophicum OX=1166950 GN=TH SYN_30335 PE=4 SV=1
MYSLCVRDHVMIAHSLRGEVFGPAQRLHGATYVVDLELRRPELDHDNLVVDIGLASQALRAVLATFDYRNLDEHPDLRGQNTTTEFMARQIFEGLVARIRAGELGDAARGLGSLRVVLRESHLAWAAYEAELPV

SEQ ID NO: 18949 - protein, 364 aa, Thiodictyon syntrophicum
  misc_feature (1)..(364): tr|A0A2K8U3R0|A0A2K8U3R0_9GAMM 6-pyruvoyl tetrahydropte rin synthase OS=Candidatus Thiodictyon syntrophicum OX= 1166950 GN=THSYN_01050 PE=4 SV=1
MDDRVFHLAAAPFEAARRVAILPAGHRARRLHGHGFRARVRAALPAHWAPFPGGETVALGDALRACVADLDYRDLNEHLAIPTDENLARWIRARLGVPGVASVGIRSTRDQGADLDALDHAHLWRRFRFEAAHCLPRVPAGHPCGRMHGHGFEVILHADQDLAGQDMGLDFDHLGSVWAPLQAELHLGCLNDLAGLENPTSELLAHWLWQRLKPALPALSWVSVYETVTAGCHYDGAHYRIWKEQRFEAALRLTAAPAADPRRRLHGHSYLLRLHLSAPLDQVLGWTVDYGDVKALFKPVYDRLDHHRLDELPELAAADGAGLVHWIRRHCTAALPALDRIDLYETPGCGVSLCWGDLGPALPS

SEQ ID NO: 18950 - protein, 123 aa, Thioglobus autotrophicus
  misc_feature (1)..(123): tr|A0A0M3TTZ4|A0A0M3TTZ4_9GAMM 6-carboxy-5,6,7,8-tetrah ydropterin synthase OS=Candidatus Thioglobus autotrophi cus OX=1705394 GN=SP60_01530 PE=3 SV=1
MFVLKIVTDFASAHSLRNYPGDCSRLHGHNWQVEVLVASKVLDDVGMAIDFREIKQQTKVVVKRLDHQYLNDVAPFDELNPTAENIAKYFYEEVGQLINNQDVRVKEVTIWETLRASVTYSED

SEQ ID NO: 18951 - protein, 123 aa, Thioglobus sp.
  misc_feature (1)..(123): tr|A0A432TSW2|A0A432TSW2_9GAMM 6-carboxy-5,6,7,8-tetrah ydropterin synthase OS=Candidatus Thioglobus sp. OX=202 6721 GN=queD PE=3 SV=1
MFVLKIVTDFASAHSLRNYPGNCSRLHGHNWQVEVSVESEVLDEIGVAIDFREIKKQTKEVVNRLDHQYLNEIPPFDELNPTAENIAKYFYEEVGQLINNKDVHVSEVIIWETPRASVAYSEK

SEQ ID NO: 18952 - protein, 120 aa, Thiomargarita nelsonii
  misc_feature (1)..(120): tr|A0A0A6P5H1|A0A0A6P5H1_9GAMM 6-carboxy-5,6,7,8-tetrah ydropterin synthase OS=Candidatus Thiomargarita nelsoni i OX=1003181 GN=PN36_04740 PE=3 SV=1
MEIYKKFSIEAAHHLPNVPADHKCNRLHGHSFQVTIHVCGEIGAQTGWVIDFADIKKAFAPLYEQLDHHYLNEIEGLENPTSENMARWIWLRLKPNLPSLCQITIQETCTSACVFRGEGF

SEQ ID NO: 18953 - protein, 120 aa, Thiomargarita nelsonii
  misc_feature (1)..(120): tr|A0A0A6NYH3|A0A0A6NYH3_9GAMM 6-carboxy-5,6,7,8-tetrah ydropterin synthase OS=Candidatus Thiomargarita nelsoni i OX=1003181 GN=THIOM_002926 PE=3 SV=1
MEIYKKFSIEAAHRLPNVPADHKCNRLHGHSFQVTIHVCGEIGAQTGWVIDFADIKKAFAPLYEQLDHHYLNEIEGLENPTSENMARWIWLRLKPKLPCLCQITIQETCTSACVFRGEAF

SEQ ID NO: 18954 - protein, 118 aa, Tokpelaia hoelldoblerii
  misc_feature (1)..(118): tr|A0A1U9JSK4|A0A1U9JSK4_9RHIZ 6-carboxy-5,6,7,8-tetrah ydropterin synthase OS=Candidatus Tokpelaia hoelldobler ii OX=1902579 GN=queD PE=3 SV=1
MFRITKEFHFSASHQLAALPASHPCARLHGHNYRVVVELAATALDTHGFVRDYHDLAIFKEHIDTHFDHRHLNDVLHSDCPTAEQLAKYFYDWCKERLPEIAAVRVSETPKTWAEYRP

SEQ ID NO: 18955 - protein, 272 aa, Viridilinea mediisalina
  misc_feature (1)..(272): tr|A0A2A6RGA0|A0A2A6RGA0_9CHLR 6-pyruvoyl tetrahydropte rin synthase OS=Candidatus Viridilinea mediisalina OX=2 024553 GN=CJ255_16425 PE=4 SV=1
MLTATRRFEFSAAHRYWRDDWSQAENQRVFGKCISPYGHGHNYTLDVTITGTLDPRTGMVMNMTELKALVNEVLEEFDHKHLNEDTPYFKDQLPTTENLVRVLWQLIAAHLPTVARLAHLRIYEQPDLWADYDGAEETTFARAYSFAAAHRLHAPALSAEENRAVYGKCNNPNGHGHNYTLEVSVTGPHDPATGMVIDLEAMDRSVRAVLDQLDFCHLDHEVAAFADKPSTAENIVVYLWDELAPRFEGRLSHLKLWETRKNVFTYTGPHSV

SEQ ID NO: 18956 - protein, 272 aa, Viridilinea halotolerans
  misc_feature (1)..(272): tr|A0A426U4V7|A0A426U4V7_9CHLR 6-pyruvoyl tetrahydropte rin synthase OS=Candidatus Viridilinea halotolerans OX= 2491704 GN=EI684_05865 PE=4 SV=1
MLTATRRFEFSAAHRYWRDDWSHAENERVFGKCISPYGHGHNYRLEVTITGTLDAATGMVMNMTDLKALVNTVLEEFDHKHLNEDTPYFKEQMPTTENLVRVLWQLIAARLPTVARLAHLRLYEQSDLWADYDGADETIFARAYTFASAHRLHAPSLSDAENRAIYGKCNNPNGHGHNYTLEVSIAGTVDAATGMVIDLEALDRTVRSVLDQLDFHHLDRELAAFADKPSTAENIVVYLWGELAPRFEGRLCHLKLWETRNNTFTYSGPHAA

SEQ ID NO: 18957 - protein, 125 aa, Wallbacteria bacterium
  misc_feature (1)..(125): tr|A0A352M730|A0A352M730_9BACT 6-carboxy-5,6,7,8-tetrah ydropterin synthase OS=Candidatus Wallbacteria bacteriu m OX=2053640 GN=queD PE=3 SV=1
MYEISAKFSISSAHFLSDYEGKCRSLHGHNWKITVYLEGAELDNLGMLVDFNVLKKYFKIIEGELDHRSLNEHEYFSRKNPTAENISEYIFNRMAALLEADNIDSAEVSKVSVYETENCEAVYYK

SEQ ID NO: 18958 - protein, 125 aa, Wallbacteria bacterium; identical to SEQ ID NO: 18957
  misc_feature (1)..(125): tr|A0A1F7WJ54|A0A1F7WJ54_9BACT 6-carboxy-5,6,7,8-tetrah ydropterin synthase OS=Candidatus Wallbacteria bacteriu m GWC2_49_35 OX=1817813 GN=A2008_13845 PE=3 SV=1

SEQ ID NO: 18959 - protein, 121 aa, Woesebacteria bacterium
  misc_feature (1)..(121): tr|A0A2H0BJE8|A0A2H0BJE8_9BACT 6-carboxy-5,6,7,8-tetrah ydropterin synthase OS=Candidatus Woesebacteria bacteri um CG22_combo_CG10-13_8_21_14_all_39_10 OX=1975059 GN=q ueD PE=3 SV=1
MLIAKEFTFDAAHKLLNYDGPCANLHGHTYKLQIVLSGSVQKNGMVIDFVDFKKIVTERVISKLDHKFINKIIKQSTAENIAIWIWNQLEKNLPIYEIRLWETPTSFVMYRGPDQEKETGR

SEQ ID NO: 18960 - protein, 151 aa, Woesebacteria bacterium
  misc_feature (1)..(151): tr|A0A1F8C1S4|A0A1F8C1S4_9BACT Uncharacterized protein OS=Candidatus Woesebacteria bacterium RIFCSPLOWO2_01_FU LL_44_14 OX=1802525 GN=A2975_04425 PE=4 SV=1
MKVTKQIEWDMGHRVTNHHSKCQNIHGHRYRAEICMEGKLVDIEGISEEGMVIDFGDIKKIAMEHVHDVLDHGFMVWRKDKEVMKFFEDNPKQKHIIVDFVPTSENIAAWIFKELDGRFIDKFKTDLRLCWVKLWETPTSVAICTREDLEK

SEQ ID NO: 18961 - protein, 125 aa, Wolfebacteria bacterium
  misc_feature (1)..(125): tr|A0A2A4SK90|A0A2A4SK90_9BACT 6-carboxy-5,6,7,8-tetrah ydropterin synthase OS=Candidatus Wolfebacteria bacteri um OX=2030812 GN=queD PE=3 SV=1
MPKKVSVTKFYTFEAAHQLVNHEGKCKNEHGHSYKLEVTVTGTPKQADGSPDEGMIIDFDEMSKIVKKVIDPFDHHNINKAVDYPTTVENIANDIFDRLYKTDLPVSKVRLWETATGSATVEYVE

SEQ ID NO: 18962 - protein, 121 aa, Yonathbacteria bacterium
  misc_feature (1)..(121): tr|A0A1G2S3I5|A0A1G2S3I5_9BACT 6-carboxy-5,6,7,8-tetrah ydropterin synthase OS=Candidatus Yonathbacteria bacter ium RIFCSPHIGHO2_01_FULL_51_10 OX=1802723 GN=A2675_0313 0 PE=3 SV=1
MRTTITKSFTFEAAHLLPDHPGKCAKLHGHSYRLEVSVEGPVQTTGPEAGMVMDFTRLSDAVEREIVSVWDHVYLNDVVPFVPTAELIAQEAFRRLANAGIPVSRVELWETPKARAVVEED

SEQ ID NO: 18963 - protein, 120 aa, Yonathbacteria bacterium
  misc_feature (1)..(120): tr|A0A1G2SJM0|A0A1G2SJM0_9BACT 6-carboxy-5,6,7,8-tetrah ydropterin synthase OS=Candidatus Yonathbacteria bacter ium RIFOXYD1_FULL_52_36 OX=1802730 GN=A2591_00645 PE=3 SV=1
MKTSVVKSFTFEAAHALPNHDGKCKNLHGHSYRLEVFVEGPIQTSGPGEGMVMDFARLSEVVEREIVIQWDHQYLNDVVTFVTTAELLAEEVFRRLASAGISVSRIELWETPKARAVVER

SEQ ID NO: 18964 - protein, 147 aa, Candidimonas bauzanensis
  misc_feature (1)..(147): tr|A0A1M5ZIS2|A0A1M5ZIS2_9BURK 6-carboxy-5,6,7,8-tetrah ydropterin synthase OS=Candidimonas bauzanensis OX=6581 67 GN=SAMN04488135_11556 PE=3 SV=1
MTSITRKLEFDAGHRIPDHRSQCRNLHGHRYVLEITLEGEVIAAPGQSDNGMVMDFSEIKSIARKHIIDQWDHAFLVFKGDTAVVDFLESLENHKTVIIDSIPTAENLAHLAFDTLAPHYARQFGGSLRLSRIRLYETPNCWVDVLA

SEQ ID NO: 18965 - protein, 147 aa, Candidimonas sp.
  misc_feature (1)..(147): tr|A0A432DKA8|A0A432DKA8_9BURK 6-carboxy-5,6,7,8-tetrah ydropterin synthase OS=Candidimonas sp. SYP-B2681 OX=24 97686 GN=queD PE=3 SV=1
MTSITRKLEFDAGHRIPDHRSQCRNLHGHRYVLEITLEGEVIAAPGESDNGMVMDFSEIKAIAKEHIVDRWDHAFLVFRGDTAVVDFLESLGNHKTVIVDSIPTAENLAHLAFDTLAPEYAHKFGGNLHLSRVRLYETPNCWVDVVA

SEQ ID NO: 18966 - protein, 150 aa, Candidimonas sp.
  misc_feature (1)..(150): tr|A0A522PDX4|A0A522PDX4_9BURK 6-carboxytetrahydropteri n synthase QueD OS=Candidimonas sp. OX=1912597 GN=queD PE=4 SV=1
MITVTRRLEFDAGHRIPDHHSQCRNLHGHRYVIEITLEGEVLDAPGQSDNGMVMDFSAIKSIAKEHVVDPWDHAFLVYKHDTPVVNFLRELEGHKTVLVDKVPTAENLAQLAFNLLEPHFIHRYGVFLKLTRIRLYETPNCWVDANKSTA

SEQ ID NO: 18967 - protein, 150 aa, Capnocytophaga canimorsus
  misc_feature (1)..(150): tr|F9YRN7|F9YRN7_CAPCC Queuosine biosynthesis protein q ueD OS=Capnocytophaga canimorsus (strain 5) OX=860228 G N=Ccan_03940 PE=4 SV=1
MSTIRITKKFEFEAGHALYGYDGKCKNLHGHSYKLHVTVVGKPINDPNNVKYGMVIDFGDLKRIVKQEIIDEFDHAMIFNANSPHLELANELKAKGHHIILVDYQPTSENLVADFANRIKKYLPENVTLFSLRLQETESSYAEWFASDNL

SEQ ID NO: 18968 - protein, 150 aa, Capnocytophaga canimorsus
  misc_feature (1)..(150): tr|A0A0B7H6A9|A0A0B7H6A9_9FLAO 6-carboxytetrahydropteri n synthase OS=Capnocytophaga canimorsus OX=28188 GN=que D PE=4 SV=1
MSTIRITKKFEFEAGHALYGYDGKCKNLHGHSYKLHVTVVGKPINDPNNVKYGMVIDFGDLKRIVKQEIIDEFDHAMIFNANSPHLELANELKAKGHYIILVDYQPTSENLVADFANRIKRYLPENVTLFSLRLQETESSYAEWFASDNL

SEQ ID NO: 18969 - protein, 150 aa, Capnocytophaga canis
  misc_feature (1)..(150): tr|A0A0B7ID79|A0A0B7ID79_9FLAO 6-carboxytetrahydropteri n synthase OS=Capnocytophaga canis OX=1848903 GN=CCAND3 8_500021 PE=4 SV=1
MAKIRITKKFDFEAGHALYGYDGKCKNLHGHSYKLHVTVIGEPITNPSDVKFGMVIDFGDLKKIVKREIIDVFDHAMVFNGNSPHLTLAQELIDKEHHIITVDYQPTSENLVVDFAERIKKHLPSNVTLFSLRLQETESSYAEWFANDNL

SEQ ID NO: 18970 - protein, 150 aa, Capnocytophaga cynodegmi
  misc_feature (1)..(150): tr|A0A0B7HHT3|A0A0B7HHT3_9FLAO Queuosine biosynthesis p rotein queD OS=Capnocytophaga cynodegmi OX=28189 GN=CCY N2B_50156 PE=4 SV=1
MANIRITKKFEFEAGHALYGYDGKCKNLHGHSYKLHVTVVGKPINDPNNVKYGMVIDFGDLKRIVKQEIIDEFDHAMIFNANSPHLELANELKAKGHHIILVDYQPTSENLVADFANRIKKYLPENVALFSLRLQETESSYAEWFASDNL

SEQ ID NO: 18971 - protein, 150 aa, Capnocytophaga cynodegmi
  misc_feature (1)..(150): tr|A0A0B7HF25|A0A0B7HF25_9FLAO 6-carboxytetrahydropteri n synthase QueD OS=Capnocytophaga cynodegmi OX=28189 GN =queD PE=4 SV=1
MANIRITKKFEFEAGHALYGYDGKCKNLHGHSYKLHVTVVGKPINDPNNVKYGMVIDFGDLKRIVKQEIIDEFDHAMIFNANSPHLELANELKAKGHHIILVDYQPTSENLVADFANRIKKYLPENVTLFSLRLQETESSYAEWFASDNL

SEQ ID NO: 18972 - protein, 150 aa, Capnocytophaga gingivalis
  misc_feature (1)..(150): tr|C2M5I3|C2M5I3_CAPGI Putative queuosine biosynthesis protein QueD OS=Capnocytophaga gingivalis OX=553178 GN= CAPGI0001_2057 PE=4 SV=1
MTKIRITKKFEFEAGHALYGYDGKCKNIHGHSYKLWVTVVGSPIEDSSHVKNGMVIDFGDIKEIVNEHIIKEADHTIFFNGNSPHRALAEKLQGEGHRIVLLPYQPTSEMLIADFAQRLQQHLPENISLYSLRLQETESSFAEWFASDNQ

SEQ ID NO: 18973 - protein, 150 aa, Capnocytophaga gingivalis
  misc_feature (1)..(150): tr|A0A250FLL1|A0A250FLL1_9FLAO 6-carboxytetrahydropteri n synthase QueD OS=Capnocytophaga gingivalis OX=1017 GN =CGC50_01410 PE=4 SV=1
MTKIRITKKFEFEAGHALYGYDGKCKNIHGHSYKLWVTVIGSPIEDSSHVKNGMVIDFGDIKEIVNEHIIKEADHTIFFNGNSPHRALAEKLQGEGHRIVLLPYQPTSEMLIADFAQRLQQHLPENISLYSLRLQETESSFAEWFSSDNQ

SEQ ID NO: 18974 - protein, 150 aa, Capnocytophaga granulosa
  misc_feature (1)..(150): tr|A0A381E5M4|A0A381E5M4_9FLAO 6-pyruvoyl tetrahydropte rin synthase/QueD family protein OS=Capnocytophaga gran ulosa OX=45242 GN=NCTC12948_01901 PE=4 SV=1
MTKIRITKKFEFEAGHALYGYDGKCKNIHGHSYKLWVTVIGSPIEDASHVKNGMVIDFGDIKEIVNEYIVKEADHTIFFNGNSPHKALAEKLQAEGHKVVLLPYQPTSEMLIVDFAHRLQKHLPAHISLYSLRLQETESSYAEWYASDNL

SEQ ID NO: 18975 - protein, 150 aa, Capnocytophaga haemolytica
  misc_feature (1)..(150): tr|A0A125S2H4|A0A125S2H4_9FLAO 6-pyruvoyl tetrahydropte rin synthase OS=Capnocytophaga haemolytica OX=45243 GN= AXF12_02030 PE=4 SV=1
MAKIRITKKFDFEAGHALYGYDGKCKNLHGHSYKLWVTVIGEPIADAENIKCGMVIDFGDLKRIVNDKIIEQFDHAMVFNAQSPHRVLADELQAKGHRIIKVDYQPTSENLVVDFAQRIAEELPSHITLFSVRLQETDSSYAEWYARDNE

SEQ ID NO: 18976 - protein, 361 aa, Capnocytophaga leadbetteri
  misc_feature (1)..(361): tr|A0A250FD23|A0A250FD23_9FLAO Beta-phosphoglucomutase OS=Capnocytophaga leadbetteri OX=327575 GN=pgmB PE=4 SV =1
MIRITKKFDFEAGHALYGYDGKCKNLHGHSYKLLVTVIGTPINDPHNVKNGMVIDFGDLKRIVQEQIITPFDHAMVFNSNSPHQELAESLRTKGHNIISVPYQPTSENLVIDFAQRIQQQLPPNVQLYSIRLCETESSYAEWFASDNPQPVCALPDADGYIFDLDGVLVDTAKYHYLAWKEIAKEFGFELTPEHNEQLKGIGREVSLHKILSWAGKSLSEEIFAQTALRKNESYLQKISYIDHKELLPGVLPLLQQLKSKGKKIALGSASRNARLVLERTGILPYFDAIVDGTMVSKAKPDPEVFLKAAEALHLSADRCCVLEDAPAGIQAAKAAGMTAIGVGSPEILKGADKVISSLANG

SEQ ID NO: 18977 - protein, 361 aa, Capnocytophaga leadbetteri
  misc_feature (1)..(361): tr|A0A2T5XVF2|A0A2T5XVF2_9FLAO Beta-phosphoglucomutase/ queuosine biosynthesis protein QueD,TIGR03367 OS=Capnoc ytophaga leadbetteri OX=327575 GN=C8P65_10440 PE=4 SV=1
MIRITKKFDFEAGHALYGYDGKCKNLHGHSYKLLVTVIGTPINDPHNVKNGMVIDFGDLKHIVQEQIITPFDHAMVFNSNSPHQELAESLRAKGHNIISVPYQPTSENLVIDFAQRIQQQLPPNVQLHSIRLCETESSYAEWFASDNPQPVCTLPDVDGYIFDLDGVLVDTAKYHYLAWKEIAKEFGFELTPEHNEQLKGIGREVSLHKILSWAGKSLSEEVFAQTALRKNESYLQKISHIDHKELLPGVLPLLQQLKSKGKKIALGSASRNARLVLERTGILPYFDAIVDGTMVSKAKPDPEVFLKAAEALHLNADRCCVLEDAPAGIQAAKAAGMTAIGVGSPEILKGADKVINSLANG

SEQ ID NO: 18978 - protein, 150 aa, Capnocytophaga ochracea
  misc_feature (1)..(150): tr|E4MT03|E4MT03_CAPOC Putative queuosine biosynthesis protein QueD OS=Capnocytophaga ochracea F0287 OX=873517 GN=queD PE=4 SV=1
MIRITKKFDFEAGHALYGYDGKCKNLHGHSYKLYVTVIGEPITDPHNVKNGMVIDFGDLKRIVQEQIIEAFDHAMVFNEHSPHKALAEELRAKGHRIITVPYQPTSENLVTDFARRIAYQLPAGVELFSVRLCETESSYAEWFASDNSAY

SEQ ID NO: 18979 - protein, 147 aa, Capnocytophaga ochracea
  misc_feature (1)..(147): tr|C7M7L8|C7M7L8_CAPOD 6-carboxy-5,6,7,8-tetrahydropter in synthase OS=Capnocytophaga ochracea (strain ATCC 278 72 / DSM 7271 / JCM 12966 / NCTC 12371 / VPI 2845) OX=5 21097 GN=Coch_0617 PE=3 SV=1
MIRITKKFDFEAGHALYGYDGKCKNLHGHSYKLYVTVIGEPITDPHNVKNGMVIDFGDLKRIVQEQIIEAFDHAMVFNEHSPHKALAEELRTKGHRIITVPYQPTSENLVTDFARRIAYQLPAGVELFSVRLCETESSYAEWFASDN

SEQ ID NO: 18980 - protein, 148 aa, Capnocytophaga sp.
  misc_feature (1)..(148): tr|L1P8G9|L1P8G9_9FLAO 6-carboxy-5,6,7,8-tetrahydropter in synthase OS=Capnocytophaga sp. oral taxon 326 str. F 0382 OX=1035193 GN=HMPREF9073_02884 PE=3 SV=1
MIRITKKFDFEAGHALFGYDGKCKNLHGHSYKLYVTVIGEPINNPNNVKNGMVIDFGDLKRIVQEQIIDAFDHAMVFNELSPHKALADELRAKGHRIITVPYQPTSENLVTDFAQRIAYQLPAGVALFSVRLCETESSYAEWFASDNK

SEQ ID NO: 18981 - protein, 150 aa, Capnocytophaga sp.
  misc_feature (1)..(150): tr|U2AUF1|U2AUF1_9FLAO Putative queuosine biosynthesis protein QueD OS=Capnocytophaga sp. oral taxon 863 str. F0517 OX=1227266 GN=HMPREF1551_01427 PE=4 SV=1
MTKIRITKKFEFEAGHALYGYDGKCKNIHGHSYKLWVTVIGSPIEDASHVKNGMVIDFGDIKELVNEYIIKEADHTIFFNGNSPHKALAEKLQAEGHRVVPLPYQPTSEMLIVDFAQRLQKHLPMHIALHSLRLQETESSYAEWYASDNL

SEQ ID NO: 18982 - protein, 150 aa, Capnocytophaga sputigena
  misc_feature (1)..(150): tr|A0A2A3N7T9|A0A2A3N7T9_CAPSP 6-carboxytetrahydropteri n synthase QueD OS=Capnocytophaga sputigena OX=1019 GN= CDC50_04445 PE=4 SV=1
MIRITKKFDFEAGHALFGYDGKCKNLHGHSYKLYVTVIGEPINNPHNVKNGMVIDFGDLKRIVQEQIIDAFDHAMVFNELSPHKALADELRAKGHRIITVPYQPTSENLVTDFAQRIAYQLPAGVTLFSIRLCETESSYAEWFASDNSAY

SEQ ID NO: 18983 - protein, 150 aa, Capnocytophaga stomatis
  misc_feature (1)..(150): tr|A0A250G324|A0A250G324_9FLAO 6-carboxytetrahydropteri n synthase QueD OS=Capnocytophaga stomatis OX=1848904 G N=queD PE=4 SV=1
MTKIRITKKFEFEAGHALYGYDGKCKNLHGHSYKLHVTVIGTPIDNPNDVKHGMVIDFGDLKRIVKREIIDEFDHAMIFNANSPHLELANELKAKGHHIILVDYQPTSENLVVDFAERIKKYLPENVALFSLRLQETESSYAEWFASDNP

SEQ ID NO: 18984 - protein, 122 aa, Caproiciproducens galactitolivorans
  misc_feature (1)..(122): tr|A0A4Z0YII0|A0A4Z0YII0_9FIRM 6-pyruvoyl tetrahydropte rin synthase OS=Caproiciproducens galactitolivorans OX= 642589 GN=CAGA_07960 PE=4 SV=1
MWNKAYKYTFKLHISHNPVSVSKQSAHFHTIKIILYLQNFNNKFSKYDVIEKIIQNYFKIYEGAYLNETASFYELDPTIENIGRVFYSHLKSIVRENGFELLTLEISETPTRIFSISEKEIF

SEQ ID NO: 18985 - protein, 159 aa, Caproiciproducens galactitolivorans
  misc_feature (1)..(159): tr|A0A4Z0YKV9|A0A4Z0YKV9_9FIRM 6-pyruvoyl tetrahydropte rin synthase OS=Caproiciproducens galactitolivorans OX= 642589 GN=CAGA_07920 PE=4 SV=1
MGFEQYKFKFYLNANHAIQINGRTGEVHPHTWEISIIAVKRNDRFVRFNDMEAVIDAMFDKYQDKLINEVEPFNEINPTLENICEVFRDKIDRILKNEGWELKRIEVSETPARSYVMTYADDTSSLEKPALSGLDKDAQEQYITNIINEYLHPENGALS

SEQ ID NO: 18986 - protein, 270 aa, Capsulimonas corticalis
  misc_feature (1)..(270): tr|A0A402CP07|A0A402CP07_9BACT 6-pyruvoyl tetrahydropte rin synthase OS=Capsulimonas corticalis OX=2219043 GN=C CAX7_02190 PE=4 SV=1
MTIALCRRARFSAGDTGSLTGRAGGHDYSCELAVAGEIDPDSGMVVNIRDIDAVMKAEIVSWLDGKILDHDVPALRDTPATPENLTRFIWERCTGKIPPQGRLVRVTLWESDERWAMLSSVSRRKDEPLLTATRMYDFSASHRLHSQKLSEEENAEIFGKCNWENGHGHNYEIEVTLSGEPDSRTGEIAPMALLDQIVEEEVLRPFDHKHLNYDVPEFSGLNPTSENVTKVIWEKLANRLANAPLGPARLYRVLVRETPRNVFKYYGEEP

SEQ ID NO: 18987 - protein, 121 aa, Capsulimonas corticalis
  misc_feature (1)..(121): tr|A0A402CXI6|A0A402CXI6_9BACT 6-carboxy-5,6,7,8-tetrah ydropterin synthase OS=Capsulimonas corticalis OX=22190 43 GN=CCAX7_31600 PE=3 SV=1
MFEIRVEKTIACAHRLFDYNGPCEELHGHNYRIEVAYAGTELDRFGMLIDFTDVKRVFNGVLETLDHKYLNDLPAFKDLSPSAENIAKHVYDELKRETFERGTLVSVSVWETPTQVAVYRE

SEQ ID NO: 18988 - protein, 136 aa, Carboxydocella sporoproducens
  misc_feature (1)..(136): tr|A0A1T4LNP2|A0A1T4LNP2_9FIRM 6-carboxy-5,6,7,8-tetrah ydropterin synthase OS=Carboxydocella sporoproducens DS M 16521 OX=1121270 GN=SAMN02745885_00230 PE=3 SV=1
MFEVAIKESFAAAHLIRNYPGDCARLHGHTWFVEVGIYGEELDDLGMLIDFSKLKQIVRSYLKKLDHQLINDLPEFREGELNPTAENLAFYLYHQINQVIKKEWPDKKIALGWVKVWESPTAWAIYRRGKNENISG

SEQ ID NO: 18989 - protein, 136 aa, Carboxydocella thermautotrophica; identical to SEQ ID NO: 18988
  misc_feature (1)..(136): tr|A0A2R4N0F9|A0A2R4N0F9_9FIRM 6-carboxy-5,6,7,8-tetrah ydropterin synthase OS=Carboxydocella thermautotrophica OX=178899 GN=CFE_1351 PE=3 SV=1

SEQ ID NO: 18990 - protein, 120 aa, Carboxydothermus hydrogenoformans
  misc_feature (1)..(120): tr|Q3ADI6|Q3ADI6_CARHZ 6-carboxy-5,6,7,8-tetrahydropter in synthase OS=Carboxydothermus hydrogenoformans (strai n ATCC BAA-161 / DSM 6008 / Z-2901) OX=246194 GN=CHY_09 51 PE=3 SV=1
MFKISVSTTFDAAHFLKDYDGKCANLHGHTWRVEAEVEGQTTNDLGLLIDFGMIKDYLKDITSRLDHKLLNDVLQVNPTAENIARYIFKELKAKLIVYPEIKLCSVKVWESPNNAATYME

SEQ ID NO: 18991 - protein, 120 aa, Carboxydothermus islandicus
  misc_feature (1)..(120): tr|A0A1L8D4X2|A0A1L8D4X2_9THEO 6-carboxy-5,6,7,8-tetrah ydropterin synthase OS=Carboxydothermus islandicus OX=6 61089 GN=ciss_20540 PE=3 SV=1
MFKISVSTTFDAAHFLKDYDGKCANLHGHTWRVEAEVEGQTTNDLGLLIDFGMIKDYLKDITSRLDHKLLNDVLQDNPTAENIARYIFKELKAKLVVYPEIKLCAVKVWESPNNAATYLE

SEQ ID NO: 18992 - protein, 120 aa, Carboxydothermus pertinax
  misc_feature (1)..(120): tr|A0A1L8CUD2|A0A1L8CUD2_9THEO 6-carboxy-5,6,7,8-tetrah ydropterin synthase OS=Carboxydothermus pertinax OX=870 242 GN=cpu_10280 PE=3 SV=1
MFKISVSTTFDAAHFLKDYDGKCANLHGHTWRVEAEVEGQTTNDLGLLIDFGMIKDYLKEITSRLDHKLLNDVLPVNPTAENIARYIYQELKPKLMVYPEIKLCAIKVWESPNNSATFME

SEQ ID NO: 18993 - protein, 149 aa, Carboxylicivirga sp.
  misc_feature (1)..(149): tr|A0A553GQ94|A0A553GQ94_9BACT 6-carboxytetrahydropteri n synthase OS=Carboxylicivirga sp. M1479 OX=2594476 GN= FNN09_05390 PE=4 SV=1
MAKIRLTKEFRFEMAHALWNYDGLCKNLHGHSYILNVTVLGKPIEDESNPKLGMVMDFGDLKCIVNEEIVDKLDHAIVLSKNAPSEQLLALPQMGQRHEIVDYQPTCENMLVDFAERIKKRLPMNIELFSLKLNETATSYAEWYASDNE

SEQ ID NO: 18994 - protein, 133 aa, Castellaniella sp.
  misc_feature (1)..(133): tr|A0A522TPL9|A0A522TPL9_9BURK 6-carboxytetrahydropteri n synthase OS=Castellaniella sp. OX=1955812 GN=EPN31_10 945 PE=4 SV=1
MYSLTVRDQMMIAHSFTGAAFGPAQNLHGATYVVDVTFGRPALDADGLVVDIGAARSVLGEILVEFNLRNLDDLPDLAGHNTTTEFMARVVFDRVRQAIRSGRLGTGAQGLVRLSVVLHESPFAWAAYEADLQ

SEQ ID NO: 18995 - protein, 136 aa, Catalinimonas alkaloidigena
  misc_feature (1)..(136): tr|A0A1G9NB76|A0A1G9NB76_9BACT 6-pyruvoyltetrahydropter in/6-carboxytetrahydropterin synthase OS=Catalinimonas alkaloidigena OX=1075417 GN=SAMN05421823_108237 PE=4 SV =1
MKVAVYRKEHFNAAHRLHNPAWSEEENQRTFGKCNLPNFHGHNYDLYVRVTGEIDPVTGYVIDLKYLSDLIRQHVTSRFDHRNLNLDVPEFRELNPTAENIAVVIYNLLRPHIDPKHDLNITLYETERNFVEYPVD

SEQ ID NO: 18996 - protein, 138 aa, Catalinimonas alkaloidigena
  misc_feature (1)..(138): tr|A0A1G9GWR0|A0A1G9GWR0_9BACT 6-pyruvoyltetrahydropter in/6-carboxytetrahydropterin synthase OS=Catalinimonas alkaloidigena OX=1075417 GN=SAMN05421823_104239 PE=4 SV =1
MMYVSRKEHFNAAHKLYNPAWSEEKNREVFGPCANTNWHGHNFELIVTVKGEPDPETGFVINLKDLSSVVRREVIDKVDHRNLNMDVDFMQGKMASCEILVIEMWKILAPAIRSIAPQAQLHSLRLYETPRNFVEYFG

SEQ ID NO: 18997 - protein, 125 aa, Catellatospora citrea
  misc_feature (1)..(125): tr|A0A419XJJ4|A0A419XJJ4_9ACTN 6-carboxy-5,6,7,8-tetrah ydropterin synthase OS=Catellatospora citrea OX=53366 G N=C8E86_2739 PE=3 SV=1
MFTISKTFRFEASHRLAGLPEGHKCARLHGHSYAVTVELDADYLDPPGFVMDFAQLSPLGDYLKIAFDHQHLNDVLTVQPTSENLARLFTEWCVGHLPLAESVSAVTVRVSETTSSWAQYRWRRP

SEQ ID NO: 18998 - protein, 132 aa, Catellatospora citrea
  misc_feature (1)..(132): tr|A0A419XHS8|A0A419XHS8_9ACTN 6-pyruvoyl-tetrahydropte rin synthase OS=Catellatospora citrea OX=53366 GN=C8E86 _2119 PE=4 SV=1
MFSVTVRDHMMIAHSFRGEVFGPAQRLHGATFVVDATFKRAELDPDDIVVDIAAASQELNAVVGALNLRNLDDDPAFAGVNTTTEKLAQVIADRLAARVHAGAFGENARGLAGIAVTLHESHIAWASYERPL

SEQ ID NO: 18999 - protein, 295 aa, Catenovulum agarivorans
  misc_feature (1)..(295): tr|W7QQQ6|W7QQQ6_9ALTE Uncharacterized protein OS=Caten ovulum agarivorans DS-2 OX=1328313 GN=DS2_04110 PE=4 SV =1
MHLFVNDLTVIDFSYLDAKRGIVGESWIVDVSLIGNLNDQNMVLDFGVVKSQIKRIIDSEFDHKLHIAEDSSALISKNITDDDNLDVVYKTQGLEFIYMSAPPSAYCFVQDQQICIDSVKPLIRATIMRHMPENVKDIQITLRPENIAQEYYHYSHGLKKHDGNCQRIVHGHRSKVTVMVDDEPNRDWQLYWARRWQDIYIGSEEDLDPALLELFTQQHHLSADNYYAFSYAASQGEFRLVCPKSCADVIDRDSTVECLAEFMLEVMQAQKPEQNIAVLAYEGVSKGAIAQSVVG

SEQ ID NO: 19000 - protein, 200 aa, Catenovulum maritimum
  misc_feature (1)..(200): tr|A0A0J8GMS2|A0A0J8GMS2_9ALTE QueD like protein OS=Cat enovulum maritimum OX=1513271 GN=XM47_16045 PE=4 SV=1
MELVVVIMMIILLMVAAVSLKMTQSGAPFPYQKKNALFTEPERAFMLKLEHAVGDQYRIVNRVRLSDLVTVRTGTDKRSEQNAKVKAASKMLDFVLIDRNTLEPIAAIDLVNMESKTGYKTKQDWFVKGALDTVNLPHIRIKLKAGYKSSEIRECLASKIKNQQLSPLNVRKVKPKGLTRPIGNMLTKHINEQADRAAVA

SEQ ID NO: 19001 - protein, 291 aa, Catenovulum maritimum
  misc_feature (1)..(291): tr|A0A0J8JP64|A0A0J8JP64_9ALTE Uncharacterized protein OS=Catenovulum maritimum OX=1513271 GN=XM47_03905 PE=4 SV=1
MHLFVNDLTVIDFSYLDTARGIVGESWIVDVALIGQLNEQNMVLDFGVVKSQIKRIIDDEFDHKLHIPEDSSALIQKDSKDGQLSVTFKMDSLDLIHMSAPDSAYCFVQSENISIEEVLPLIRSTVMRHMPENVKDIEITLRAENITQEYYHYSHGLKKHDGNCQRIVHGHRSKVTVFKNGQADKDWQSYWQKRWQDIYLGSEEDLNQELSTDFCLQNNVLADNYYGFSYTANQGLFELVCPKAISDLIDRDSTVECLAEFMLEVMQQQEPEAEFKVLAYEGVSKGAIAYS

SEQ ID NO: 19002 - protein, 291 aa, Catenovulum sp.
  misc_feature (1)..(291): tr|A0A2S0VTX9|A0A2S0VTX9_9ALTE Uncharacterized protein OS=Catenovulum sp. CCB-QB4 OX=2172099 GN=C2869_15060 PE =4 SV=1
MHLFVNDLSVIDFSYLDSQRGIVGESWIVDVILVGNLNEQNMVLDFGLVKSQIKTIIDDEFDHKLHIPEESTGLIANHHDLDSQAISFRLDNGEHIYVSAPASSYCFAPTDKITIESLLPVIKSRLMLDMPSNVKDLIITLRPEKIDSPFYHYSHGLKKHEGNCQRIVHGHRSKIIVKSAGNENTDYQTYWAKRWQDIYIGSESDLDLELAHRYCAQHGLSSDDYYGFSYTASQGDFELVVSKRITDIMDRDTTVECIAEFMLETMQNKYPTETFEVHAYEGVSKGAIAFS

SEQ ID NO: 19003 - protein, 122 aa, Caulobacter flavus
  misc_feature (1)..(122): tr|A0A2N5CNJ3|A0A2N5CNJ3_9CAUL 6-carboxy-5,6,7,8-tetrah ydropterin synthase OS=Caulobacter flavus OX=1679497 GN =C1707_25570 PE=3 SV=1
MSEPVFEITKAAHFDAAHYIEQGPGDHRYRRLHGHSFRVEASVKGAMQAAGWVADLESLDVALKAVATELDHGLLNDRPGLESPTLERICLYFAERLKPQFPGLSRVVLSRPTIGESCALSL

SEQ ID NO: 19004 - protein, 121 aa, Caulobacter henricii
  misc_feature (1)..(121): tr|A0A0P0P1T0|A0A0P0P1T0_9CAUL 6-carboxy-5,6,7,8-tetrah ydropterin synthase OS=Caulobacter henricii OX=69395 GN =AQ619_14585 PE=3 SV=1
MMPVFEITKAATFDAAHYIEQGPADHRYRKLHGHSFKVEASVKGQMQDAGWVADLEGLDTALKSVAAELDHGLLNDRPGLESPTLERLCLYFAERLTPAFPGLSRVEISRPTIGERCALSL

SEQ ID NO: 19005 - protein, 122 aa, Caulobacter mirabilis
  misc_feature (1)..(122): tr|A0A2D2AVC8|A0A2D2AVC8_9CAUL 6-carboxy-5,6,7,8-tetrah ydropterin synthase OS=Caulobacter mirabilis OX=69666 G N=CSW64_05570 PE=3 SV=1
MTEPIFEITKTATFDAAHYIEQGPGDHRYRRLHGHSFSVEASVRGPAQPAGWVADLDELDKALKAVAEELDHGLLNDREGLEVPTLERICLYFADRLRPTFPGLSRIVVSRPTIGERCALAL

SEQ ID NO: 19006 - protein, 122 aa, Caulobacter radicis
  misc_feature (1)..(122): tr|A0A2T9JD54|A0A2T9JD54_9CAUL 6-carboxy-5,6,7,8-tetrah ydropterin synthase OS=Caulobacter radicis OX=2172650 G N=DDF65_12985 PE=3 SV=1
MSEPVFEITKAAHFDAAHYIEQGPGDHRYRRLHGHSFRVEASVKGSMQAAGWVADLESLDVALKAVAAELDHGLLNDRPGLESPTLERICLYFAERLKPQFPGLSRVVLSRPTIGESCALTL

SEQ ID NO: 19007 - protein, 122 aa, Caulobacter radicis
  misc_feature (1)..(122): tr|A0A2T9JRK3|A0A2T9JRK3_9CAUL 6-carboxy-5,6,7,8-tetrah ydropterin synthase OS=Caulobacter radicis OX=2172650 G N=DDF62_19565 PE=3 SV=1
MSEPVFEITKAAHFDAAHYIEQGPGDHRYRRLHGHSFRVEASVKGPMLAAGWVADLESLDVALKAVATELDHGLLNDRPGLESPTLERICLYFAERLKPQFPGLSRVVLSRPTIGESCALTL

SEQ ID NO: 19008 - protein, 121 aa, Caulobacter rhizosphaerae
  misc_feature (1)..(121): tr|A0A561NXG8|A0A561NXG8_9CAUL 6-carboxy-5,6,7,8-tetrah ydropterin synthase OS=Caulobacter rhizosphaerae OX=201 0972 GN=FHW61_101504 PE=3 SV=1
MKPVFEITKAAHFDAAHYIEQGPADHRYRKLHGHSFKVEASVRGTMQDAGWVADLDSLDGALKAVAAELDHGLLNDRPGLESPTLERICLYFAERLTPQFPGLSRVVISRPTIGESCALAL

SEQ ID NO: 19009 - protein, 172 aa, Caulobacter segnis
  misc_feature (1)..(172): tr|A0A2W5V4X0|A0A2W5V4X0_9CAUL 6-pyruvoyl tetrahydrobio pterin synthase OS=Caulobacter segnis OX=88688 GN=DI526 _10685 PE=4 SV=1
MAYRSVKTYGAERGLSCAYRQWAADSHCQLLHGYSLGFSFDFAAEQLDARGWVVDFGKSGFGAIRDWLHYMFDHTLLVAADDPSRLEFERLQRLGLAQVRVVPGVSAEALAAHVFEHAQGLVVSATKGRCWIASVECREHGANAAVFENPDRVLRQVSAEALTLALRDGVAG

SEQ ID NO: 19010 - protein, 169 aa, Caulobacter segnis
  misc_feature (1)..(169): tr|D5VJE4|D5VJE4_CAUST 6-pyruvoyl tetrahydrobiopterin s ynthase OS=Caulobacter segnis (strain ATCC 21756 / DSM 7131 / JCM 7823 / NBRC 15250 / LMG 17158 / TK0059) OX=5 09190 GN=Cseg_1880 PE=4 SV=1
MAYRSVKTYGAERGLSCAYRQWAADSHCQLLHGYSLGFVFDFAAEQLDARGWVVDFGKAGFGAIREWLHHMFDHTLLVAADDPSRSEFERLQRLGLAQVRIVPGVSAEALAAHVFEHAQGLVDAATKGRCWVASVECREHGANAAVFENPQGVLRQVSAEALSLALKGL

SEQ ID NO: 19011 - protein, 121 aa, Caulobacter sp.
  misc_feature (1)..(121): tr|A0A3S9VC75|A0A3S9VC75_9CAUL 6-carboxy-5,6,7,8-tetrah ydropterin synthase OS=Caulobacter sp. FWC26 OX=69665 G N=CSW63_05750 PE=3 SV=1
MKPVFEITKAAYFDAAHYIEQGPSDHRYRRLHGHSFKVEASVRGPMQEAGWVADLDRLDVALKAVAAELDHGLLNDKPGLEVPTLERLCLYFAERLTASFPGLSRVVLSRPTIGETCSLAL

SEQ ID NO: 19012 - protein, 121 aa, Caulobacter sp.
  misc_feature (1)..(121): tr|A0A0Q6V5M6|A0A0Q6V5M6_9CAUL 6-carboxy-5,6,7,8-tetrah ydropterin synthase OS=Caulobacter sp. Root343 OX=17365 20 GN=ASC70_06625 PE=3 SV=1
MKPVFEITKAAHFDAAHYIEQGPADHRYRKLHGHSFKVEASVKGQMQDAGWVADLDGLDAALKAVAIELDHGLLNDRPGLETPTLERLCLYFAERLKVQFPGLSRVVLSRPTIGESCALTL

SEQ ID NO: 19013 - protein, 121 aa, Caulobacter vibrioides
  misc_feature (1)..(121): tr|R0EH33|R0EH33_CAUVI 6-carboxy-5,6,7,8-tetrahydropter in synthase OS=Caulobacter vibrioides OR37 OX=1292034 G N=OR37_02750 PE=3 SV=1
MKPVFEITKAAYFDAAHFIEQGPPDHRYRRLHGHSFKVEASVKGEMAEAGWVADLESLDVALKAIAAELDHGLLNEKPGLDVPSLERLCLYFAERLKGTFPSLSRVVLSRPTIGETCSLAL

SEQ ID NO: 19014 - protein, 121 aa, Caulobacter vibrioides
  misc_feature (1)..(121): tr|Q9A3P4|Q9A3P4_CAUVC 6-carboxy-5,6,7,8-tetrahydropter in synthase OS=Caulobacter vibrioides (strain ATCC 1908 9 / CB15) OX=190650 GN=CC_3158 PE=3 SV=1
MKPVFEITKAAYFDAAHYIEQGPSDHRYRRLHGHSFKVEVSVRGEMLDAGWVADLDTLDVALKAVAVELDHGLLNDKPGLEVPTLERLCLYFAERLRSQFPGLSRVALSRPTIGETCVLSL

SEQ ID NO: 19015 - protein, 122 aa, Caulobacter zeae
  misc_feature (1)..(122): tr|A0A2N5D896|A0A2N5D896_9CAUL 6-carboxy-5,6,7,8-tetrah ydropterin synthase OS=Caulobacter zeae OX=2055137 GN=S GCZBJ_18235 PE=3 SV=1
MSEPVFEITKAAHFDAAHYIEQGPGDHRYRRLHGHSFRVEASVKGVMQPAGWVADLESLDVALKAVATELDHGLLNDRPGLESPTLERICLYFAERLKPQFPGLSRVVLSRPTIGESCALSL

SEQ ID NO: 19016 - protein, 123 aa, Caulobacteraceae bacterium
  misc_feature (1)..(123): tr|A0A4Q3SCA5|A0A4Q3SCA5_9CAUL 6-carboxy-5,6,7,8-tetrah ydropterin synthase OS=Caulobacteraceae bacterium OX=19 78230 GN=EON95_00885 PE=3 SV=1
MTTPQFEITKAATFDAAHHFPNGPEGSPYTRLHGHSFRVEATVRGEISGPMGWVTDLGELDAALKAVAAQLDHGLLNEKPGLETPTLEHLCLYFAAALKDRYPGLCRVVISRPTISESCSLAV

SEQ ID NO: 19017 - protein, 124 aa, Caulobacteraceae bacterium
  misc_feature (1)..(124): tr|A0A4Q3SYG1|A0A4Q3SYG1_9CAUL 6-carboxy-5,6,7,8-tetrah ydropterin synthase OS=Caulobacteraceae bacterium OX=19 78230 GN=EON94_02210 PE=3 SV=1
MTQPVFEITKAATFDAAHYFADGPEHRPYANLHGHSFKVEATVRGVQQEPVGWVADLADLDAELKAVAAQLDHGLLNEKPGLERPTLEHLCLYFAERLKVRFPGLSRIVVSRPTISESCALNVA

SEQ ID NO: 19018 - protein, 170 aa, Caulobacterales bacterium
  misc_feature (1)..(170): tr|A0A258C858|A0A258C858_9PROT 6-pyruvoyl tetrahydrobio pterin synthase OS=Caulobacterales bacterium 32-67-6 OX =1970502 GN=B7Z13_11770 PE=4 SV=1
MTWIATKTYGAERGLSCALRQWSAESHCALIHGYSLGFRFTFAAEQLDARGWVVDFGTGGFGQIRTWLHQVFDHALLVAKDDPALPDLMRLSELGLARVQVVPGASCERLAEFVWAAADPMISQATKGRCWVAEVECIEHGANSATYRNPDSVLRGLRTEVLSQLLTEAG

SEQ ID NO: 19019 - protein, 122 aa, Caulobacterales bacterium
  misc_feature (1)..(122): tr|A0A1F8I9U7|A0A1F8I9U7_9PROT 6-carboxy-5,6,7,8-tetrah ydropterin synthase OS=Caulobacterales bacterium RIFCSP HIGHO2_12_FULL_68_13 OX=1797586 GN=A3E24_08545 PE=3 SV= 1
MPVFEITKQATFDAAHHFPNEPEGSIYRRVHGHSFTVEATIRSETLDAEHNWVADLGALDRALRAAAEQLDHGMLNEHEGLELPSLENLCLWFAKTLKPAWPGLCRVQVARPTINERCVLSL

SEQ ID NO: 19020 - protein, 140 aa, Caviibacterium pharyngocola
  misc_feature (1)..(140): tr|A0A2M8RVY5|A0A2M8RVY5_9PAST 6-carboxy-5,6,7,8-tetrah ydropterin synthase OS=Caviibacterium pharyngocola OX=2 8159 GN=queD PE=3 SV=1
MFKVSKEFSFDMAHLLDGHDGKCQNLHGHTYKLQVEVQGELHSSGAKKGMVIDFADVKQIVKQQILDPMDHAFIYDTTSERECKIAALLTELQSKTFGIPTRTTAEEMARFIFNRLKPILPISAVRLWETPTSFCEYREE

SEQ ID NO: 19021 - protein, 136 aa, Cecembia calidifontis
  misc_feature (1)..(136): tr|A0A4Q7P7V5|A0A4Q7P7V5_9BACT 6-pyruvoyltetrahydropter in/6-carboxytetrahydropterin synthase OS=Cecembia calid ifontis OX=1187080 GN=BC751_1698 PE=4 SV=1
MKVSVFRKEHFNAAHKLHNPKWSDEKNQEVFGKCNNPNYHGHNYELIVKLDGPVDPETGYVYDMKVLSDLIKEHVLNKFDHKNLNLDTDEFKEVNPSAENIAVVIWNILRQKIDLKFDLTIRLYETERNFVEYSGD

SEQ ID NO: 19022 - protein, 136 aa, Cecembia calidifontis
  misc_feature (1)..(136): tr|A0A4V2F6Y0|A0A4V2F6Y0_9BACT 6-carboxy-5,6,7,8-tetrah ydropterin synthase OS=Cecembia calidifontis OX=1187080 GN=BC751_3517 PE=3 SV=1
MLSITKIFTFETAHRISSYQGACQHIHGHSYKLHVTITGEEVGEDDMLLDFKILKQIVKDVIVDPIDHAIMLKRNEVNERDFGKMEEKIFWMASEPTAERMLEWMANQLQQKLPNQIHLKRLRLFETENSFAEWEK

SEQ ID NO: 19023 - protein, 136 aa, Cecembia lonarensis
  misc_feature (1)..(136): tr|K1KXK3|K1KXK3_9BACT 6-pyruvoyl tetrahydropterin synt hase/QueD family protein OS=Cecembia lonarensis LW9 OX= 1225176 GN=B879_02585 PE=4 SV=1
MKVSVFRKEHFNAAHRLHNPNWSDEKNLAVFGKCNNYNYHGHNYDLIVKLDGPVDPDTGYVFDMKVLSDLIKENVLNKFDHKNLNLDTDEFKNLNPTAENIAVVIWNILRVKIDLKFDLTIRLYETERNFVEYSGS

SEQ ID NO: 19024 - protein, 139 aa, Cecembia lonarensis
  misc_feature (1)..(139): tr|K1LZ83|K1LZ83_9BACT 6-pyruvoyl tetrahydropterin synt hase/QueD family protein OS=Cecembia lonarensis LW9 OX= 1225176 GN=B879_01915 PE=4 SV=1
MIYVCRKEHFNAAHKLWNPNWTEEKNIEVFGPCANVNWHGHNFELIVTVKGLPDPETGFVVDLKALSVLIKELVIDKVDHKNLNLDVPFMLGKMASCENLVMEFWKILEPAVNAIVPQGRLYKLTLYETPRNFVEYLGE

SEQ ID NO: 19025 - protein, 136 aa, Cecembia rubra
  misc_feature (1)..(136): tr|A0A2P8E6Q4|A0A2P8E6Q4_9BACT 6-carboxy-5,6,7,8-tetrah ydropterin synthase OS=Cecembia rubra OX=1485585 GN=CLV 48_104292 PE=3 SV=1
MRVSVFRKEHFNAAHRLHNPKWSYEKNQEVFGKCNNPNYHGHNYELIVKLAGPVDPETGYVYDMKILSDLIKEHVLNKFDHKNLNLDTDEFKELNPTAENIAVVIWNILRKKIDLKFDLTIRLYETERNFVEYSGD

SEQ ID NO: 19026 - protein, 135 aa, Cecembia rubra
  misc_feature (1)..(135): tr|A0A2P8EE81|A0A2P8EE81_9BACT 6-carboxy-5,6,7,8-tetrah ydropterin synthase OS=Cecembia rubra OX=1485585 GN=CLV 48_101723 PE=3 SV=1
MLSITKIFTFESAHRITDYDGPCCQVHGHSYVLHVTVSGKELENDMLLDFKLLKSILQEGVISQFDHALILKENEKNRLDFGGFDQKILWMDDEPTAERMLLWIKDRIIPKLPPKVNLESLNLYETATCYATWTP

SEQ ID NO: 19027 - protein, 120 aa, Cedecea davisae
  misc_feature (1)..(120): tr|S3IMB2|S3IMB2_9ENTR 6-carboxy-5,6,7,8-tetrahydropter in synthase OS=Cedecea davisae DSM 4568 OX=566551 GN=HM PREF0201_03750 PE=3 SV=1
MMSTTLFKDFTFEAAHHLPNVPEGHKCGRLHGHSFMVRLEITGEVDPHTGWIIDFSELKAAFKPTYDRLDHYYLNDIPGLENPTSEVLAKWIWDQMKPVMPLLSAVMIKETCTAGCVYRG

SEQ ID NO: 19028 - protein, 120 aa, Cedecea davisae
  misc_feature (1)..(120): tr|S3JKS8|S3JKS8_9ENTR 6-carboxy-5,6,7,8-tetrahydropter in synthase OS=Cedecea davisae DSM 4568 OX=566551 GN=HM PREF0201_04082 PE=3 SV=1
MKTTLYKDFTFEAAHRLPNVPEGHKCGRLHGHSFVVRLEITGEVDKHTGWIIDFAELKAIFKPTLDRLDHNYLNDILGLENPTSEVLAAWIWDQIKPQLPILSAVVVKETCTAGCVYRGE

SEQ ID NO: 19029 - protein, 121 aa, Cedecea lapagei
  misc_feature (1)..(121): tr|A0A447UY33|A0A447UY33_9ENTR 6-carboxy-5,6,7,8-tetrah ydropterin synthase OS=Cedecea lapagei OX=158823 GN=que D PE=3 SV=1
MMSTTLFKDFTFEAAHRLPHVPEGHKCGRLHGHSFMVRLEITGEVDPYTGWIMDFSELKAAFKPTYDRLDHYYLNDIPGLENPTSEVLAKWIWDQMKPVVPLLSAVMIKETCTAGCVYRGE

SEQ ID NO: 19030 - protein, 120 aa, Cedecea lapagei
  misc_feature (1)..(120): tr|A0A2N0CSH3|A0A2N0CSH3_9ENTR 6-carboxy-5,6,7,8-tetrah ydropterin synthase OS=Cedecea lapagei OX=158823 GN=que D PE=3 SV=1
MSTTLFKDFIFEAAHRLPHVPEGHKCGRLHGHSFMVRLEITGEVDPHTGWIMDFSELKAAFKPTYDRLDHYYLNDIPGLENPTSEVLAKWIWDQMKPLVPLLSSVMIKETCTAGCVYRGE

SEQ ID NO: 19031 - protein, 120 aa, Cedecea neteri
  misc_feature (1)..(120): tr|A0A089URK2|A0A089URK2_9ENTR 6-carboxy-5,6,7,8-tetrah ydropterin synthase OS=Cedecea neteri OX=158822 GN=queD PE=3 SV=1
MSTTLFKDFTFEAAHRLPHVPEGHKCGRLHGHSFMVRLEITGEVDPYTGWIMDFSELKAAFKPTYDRLDHYYLNDIPGLENPTSEVLAKWIWDQMKPVVPLLSAVMIKETCTAGCVYRGE

SEQ ID NO: 19032 - protein, 121 aa, Cedecea neteri; identical to SEQ ID NO: 19029
  misc_feature (1)..(121): tr|A0A2X2T3X7|A0A2X2T3X7_9ENTR 6-carboxy-5,6,7,8-tetrah ydropterin synthase OS=Cedecea neteri OX=158822 GN=queD PE=3 SV=1

SEQ ID NO: 19033 - protein, 121 aa, Cedecea sp.
  misc_feature (1)..(121): tr|A0A1X7KG06|A0A1X7KG06_9ENTR 6-carboxy-5,6,7,8-tetrah ydropterin synthase OS=Cedecea sp. NFIX57 OX=1566286 GN =SAMN03159353_100979 PE=3 SV=1
MMSTTLFKDFTFEAAHRLPHVPEGHKCGRLHGHSFMVRLEITGEVDPYTGWIMDFSELKAAFKPTYDRLDHYYLNDIPGLENPTSEVLAKWIWDQMKPVVPLLSAVMIKETCTAGCIYRGE

SEQ ID NO: 19034 - protein, 290 aa, Celerinatantimonas diazotrophica
  misc_feature (1)..(290): tr|A0A4R1J860|A0A4R1J860_9GAMM 6-pyruvoyl tetrahydropte rin synthase-like protein OS=Celerinatantimonas diazotr ophica OX=412034 GN=EV690_3510 PE=4 SV=1
MKLFVKDLTVIDSTFLCPDRGLVGESWIVDIELSGELNQMNMLLDFGVVKKTIKKIIDTYVDHKLLAPKRSPQCQIHEQDDGRVQLSFSRSGQSDIFLCCPEQAFCFVDCIEITEAALVHHLIETLRPHLPDNINDLTISLRNEHIEGPYYHYSHGLKKHQGNCQRIAHGHRSMIEILVDDELDDELCASWAMKWRNIYLGSSEDCVAVSHLSFAAQAKLDNHYGFAYQAPQGFFELAVPMHECDLLPCDTTVENLAHHIATQVKLAHPNQCIRVHAYEGVGKGAIEELP

SEQ ID NO: 19035 - protein, 131 aa, Cellulomonas composti
  misc_feature (1)..(131): tr|A0A511J9H7|A0A511J9H7_9CELL 6-carboxy-5,6,7,8-tetrah ydropterin synthase OS=Cellulomonas composti OX=266130 GN=CCO02nite_13040 PE=3 SV=1
MSPARRDEEKANVHEISKRFTVEAAHHLPRVPDGHPCRRLHGHSYVIELGLRGELDESGWVRDFAEIGAAFEPVRLRLDHRLLNDVDGLANPTSEVLAQWVFEAVVPALPELAWVRIEETRSSGCVYRRDG

SEQ ID NO: 19036 - protein, 120 aa, Cellulomonas sp.
  misc_feature (1)..(120): tr|A0A1I3T357|A0A1I3T357_9CELL 6-carboxy-5,6,7,8-tetrah ydropterin synthase OS=Cellulomonas sp. KH9 OX=1855324 GN=SAMN05216467_0292 PE=3 SV=1
MNMELSKEFTFEAAHRLPNLPADHKCSRLHGHSYKVKIEVSGPLDEQLGWVIDFGEIKTAWKELEDSLDHRYLNEIPGLENPTSEVLAVWIWDRLKGDLSGLLSAVGVHETCTSACTYRG

SEQ ID NO: 19037 - protein, 132 aa, Cellulomonas sp.
  misc_feature (1)..(132): tr|A0A542HER1|A0A542HER1_9MICO 6-pyruvoyl-tetrahydropte rin synthase OS=Cellulomonas sp. SLBN-39 OX=664911 GN=F BY26_2240 PE=4 SV=1
MFSVTVRDHMMVAHSLRGEVFGPAQRLHGATFIVDATFRSASLDADGVVVDIGRATEQLRAVLGELTYRNLDDDPGFAGVNTTTEALAKVVADALATRASEGELGPAAEHLAGIAVTLRESHVAWASYERDL

SEQ ID NO: 19038 - protein, 151 aa, Cellulophaga algicola
  misc_feature (1)..(151): tr|E6X824|E6X824_CELAD 6-pyruvoyl tetrahydropterin synt hase OS=Cellulophaga algicola (strain DSM 14237 / IC166 / ACAM 630) OX=688270 GN=Celal_1308 PE=4 SV=1
MSNIRITKQFNFETGHALYGYDGKCRNVHGHSYKLSVTVIGRPITDTTHVKLGMVIDFSDLKKIVKEEIVDQFDHATVFNKNTPHVELAKELTDRGHMVILADYQPTSENMVIDFSARIKSRLPENIQLHSLRLQETDTSFAEWYASDNPL

SEQ ID NO: 19039 - protein, 138 aa, Cellulophaga algicola
  misc_feature (1)..(138): tr|E6X857|E6X857_CELAD 6-carboxy-5,6,7,8-tetrahydropter in synthase OS=Cellulophaga algicola (strain DSM 14237 / IC166 / ACAM 630) OX=688270 GN=Celal_2392 PE=3 SV=1
MKVKVSRKAHFNAAHRLYNPDWSFEKNDTIFGLCNNPNFHGHNYELIVSVTGKIDPETGFVIDVKILKDLIKSEIEDAFDHKNLNVEVPEFKNLNPTAENIAVVIYDKLRPHITSDKDLEVVLYETPRNFVTYRGDNE

SEQ ID NO: 19040 - protein, 138 aa, Cellulophaga baltica
  misc_feature (1)..(138): tr|A0A1G7JBN6|A0A1G7JBN6_9FLAO 6-pyruvoyltetrahydropter in/6-carboxytetrahydropterin synthase OS=Cellulophaga b altica OX=76594 GN=SAMN04487992_1095 PE=4 SV=1
MKVKVSRKAHFNAAHRLYNPDWSFEKNDAIFGLCNNPNFHGHNYELIVSITGKIDPETGFVIDVKILKDLIKSEIENAFDHKNLNVEVPEFKNLNPTAENIAVVIYDKLRPHFESDKDLEVILYETPRNFVTYTGNNE

SEQ ID NO: 19041 - protein, 149 aa, Cellulophaga baltica
  misc_feature (1)..(149): tr|A0A1G7FC16|A0A1G7FC16_9FLAO 6-carboxy-5,6,7,8-tetrah ydropterin synthase OS=Cellulophaga baltica OX=76594 GN =SAMN04487992_103146 PE=3 SV=1
MSNIRITKQFNFETGHALYGYDGKCRNVHGHSYKLSVTVIGRPITDTSHVKLGMVIDFGDLKKIVKEEIVDQFDHATVFNKNTPHVELAKELTDRGHMVILANYQPTSENMVIDFSARIISRLPENIQLHSLRLQETDTSFAEWYASDN

SEQ ID NO: 19042 - protein, 149 aa, Cellulophaga fucicola
  misc_feature (1)..(149): tr|A0A1K1Q304|A0A1K1Q304_9FLAO 6-carboxy-5,6,7,8-tetrah ydropterin synthase OS=Cellulophaga fucicola OX=76595 G N=SAMN05660313_02289 PE=3 SV=1
MSNIRITKQFSFETGHALYGYDGKCRNVHGHSYKLSVTVIGSPITDTTNVKLGMVIDFSDLKKIVKEEIVDVYDHATVFNKNTPHVELAHELTQRGHSVILADYQPTSENMVIDFAAKIKARLPENINLHSLRLQETDSSFAEWYALDN

SEQ ID NO: 19043 - protein, 136 aa, Cellulophaga fucicola
  misc_feature (1)..(136): tr|A0A1K1R5H3|A0A1K1R5H3_9FLAO 6-carboxy-5,6,7,8-tetrah ydropterin synthase OS=Cellulophaga fucicola OX=76595 G N=SAMN05660313_03321 PE=3 SV=1
MKVKVSRKAHFNAAHRLHNKSWDAEKNKAVFGLCSNPNYHGHNYELIVSVAGEIDPETGFVMDMKVLKDLIKEKVENALDHKNLNIEVPEFKELNPTAENIAVVIWNKLRSEIDASKELEIVLYETPRNYVTYSGQ

SEQ ID NO: 19044 - protein, 135 aa, Cellulophaga lytica
  misc_feature (1)..(135): tr|F0RA18|F0RA18_CELLC 6-carboxy-5,6,7,8-tetrahydropter in synthase OS=Cellulophaga lytica (strain ATCC 23178 / DSM 7489 / JCM 8516 / NBRC 14961 / NCIMB 1423 / VKM B- 1433 / Cy l20) OX=867900 GN=Celly_0512 PE=3 SV=1
MKVKVSRKAHFNSAHRLHNKDWDAEKNKAVFGLCSNPNYHGHNYELIVSVAGEIDPTTGFVMDMKVLKDLIKEKIEKALDHKNLNIEVPEFKELNPTAENIAVVIWNKLRPEIDATKDLEVVLYETPRNYVTYSG

SEQ ID NO: 19045 - protein, 149 aa, Cellulophaga lytica
  misc_feature (1)..(149): tr|F0RG65|F0RG65_CELLC 6-carboxy-5,6,7,8-tetrahydropter in synthase OS=Cellulophaga lytica (strain ATCC 23178 / DSM 7489 / JCM 8516 / NBRC 14961 / NCIMB 1423 / VKM B- 1433 / Cy l20) OX=867900 GN=Celly_1203 PE=3 SV=1
MSNIRITKQFSFETGHALYGYDGKCRNVHGHSYKLSVTVIGAPIADNTNVKWGMVIDFGDLKKIVKEEIVDVYDHATVFNKNTPHIELANELMQRGHSVILADYQPTSENMVIDFAAKIKARLPENISLHSLKLQETDSSFAEWYAADN

SEQ ID NO: 19046 - protein, 135 aa, Cellulophaga sp.; identical to SEQ ID NO: 19044
  misc_feature (1)..(135): tr|A0A559N6W3|A0A559N6W3_9FLAO 6-carboxy-5,6,7,8-tetrah ydropterin synthase OS=Cellulophaga sp. RHA_52 OX=12500 36 GN=JM80_1604 PE=3 SV=1

SEQ ID NO: 19047 - protein, 149 aa, Cellulophaga sp.
  misc_feature (1)..(149): tr|A0A559N4W5|A0A559N4W5_9FLAO 6-carboxy-5,6,7,8-tetrah ydropterin synthase OS=Cellulophaga sp. RHA_52 OX=12500 36 GN=JM80_0892 PE=3 SV=1
MSNIRITKQFSFETGHALYGYDGKCRNVHGHSYKLSVTVIGAPIADNTNVKWGMVIDFGDLKKIVKEEIVDVYDHATVFNKNTPHMELANELMQRGHSVILADYQPTSENMVIDFAAKIKARLPENISLHSLKLQETDSSFAEWYAADN

SEQ ID NO: 19048 - protein, 138 aa, Cellulophaga tyrosinoxydans
  misc_feature (1)..(138): tr|A0A1W2BZC7|A0A1W2BZC7_9FLAO 6-carboxy-5,6,7,8-tetrah ydropterin synthase OS=Cellulophaga tyrosinoxydans OX=5 04486 GN=SAMN05660703_2709 PE=3 SV=1
MKVKVSRKAHFNAAHRLYRPDWSFEKNDAIFGLCNNPNFHGHNYELIVSVTGEIDPETGFVIDVKVLKDLIKSEIEDAFDHKNLNIEVPEFKNLNPTAENIAVVIWDKLRPHIDNSKDLEVVLYETPRNFVTYVGNTL

SEQ ID NO: 19049 - protein, 149 aa, Cellulophaga tyrosinoxydans
  misc_feature (1)..(149): tr|A0A1W1YYK0|A0A1W1YYK0_9FLAO 6-carboxy-5,6,7,8-tetrah ydropterin synthase OS=Cellulophaga tyrosinoxydans OX=5 04486 GN=SAMN05660703_0985 PE=3 SV=1
MNTIRITKQFNFETGHALFGYDGKCRNVHGHSYKLSVTVIGSPIKDTSHVKLGMVIDFGDLKKIVKEEIVDQFDHATVFNKNTPHIELAKELTDRGHVVILADYQPTSENMVIDFADRIKARLPKNIQLHSLKLQETDTSFAEWYASDN

SEQ ID NO: 19050 - protein, 283 aa, Cellvibrio japonicus
  misc_feature (1)..(283): tr|B3PKJ5|B3PKJ5_CELJU Uncharacterized protein OS=Cellv ibrio japonicus (strain Ueda107) OX=498211 GN=CJA_2463 PE=4 SV=1
MLLFVDNLTNVDFSFLDPQRGLLGETWLANVRLQGELDGQGMVCDFGTVKKVIRHWLDAELDHRLAVPAKSSQIVIKEEGDFLDITFQFGSQGEQLHTRSPRDAIALVDAEVLTAETIAAWCIRQLQSHFPESIDRLELDFTHELIEGAWYHYSHGLKKHQGNCQRIAHGHRSRIDIWCDGEKSATLERHWADCWRDIYIGTREDIVSTAEYKGTAYYHFAYTSAQGPFELTLPQRCCYLIDTDSTVEFIAQHIAQESRVLQPQASIRVKAYEGIHKGAIAEA

SEQ ID NO: 19051 - protein, 283 aa, Cellvibrio mixtus
  misc_feature (1)..(283): tr|A0A266Q789|A0A266Q789_9GAMM Uncharacterized protein OS=Cellvibrio mixtus OX=39650 GN=CBP51_01155 PE=4 SV=1
MLLFVDNLTNVDFSFLDPQRGLLGETWLANVRLHGELDEQGMVCDFGTVKKVMRHWLDTELDHRLAVPIRSPQIRIEEEGDFLSIHWSFGNKNEFLHTRSPRDAIALVDAEILTAETVAEWCISQLKQQFPLSVARLELDFTLEAMNGAYYHYSHGLKKHKGNCQRIAHGHRSRIDIWANGKKSPKLEQRWADEWTDIYLATRDDLIAKPKHAGVDYYQFAYEAEQGPFDITLPQRCCYLIDTDTTVEFIAHHIAQKTRQENPETSIRVKAYEGINKGAIAEA

SEQ ID NO: 19052 - protein, 283 aa, Cellvibrio sp.
  misc_feature (1)..(283): tr|A0A1U9N8G6|A0A1U9N8G6_9GAMM Uncharacterized protein OS=Cellvibrio sp. PSBB023 OX=1945512 GN=B0D95_05985 PE= 4 SV=1
MLLFVDNLTNVDFSFLDPQRGLLGETWLANVRLHGELDEQGMVCDFGTVKKVMRHWLDTELDHRLAVPIRSPQIRIEEEGDFLSIHWQFGTSGEFLHTRSPRDAIALVDAEILTAETVAEWCISQLKQQFPLSVARLELDFTLEAMNGAYYHYSHGLKKHKGNCQRIAHGHRSRIDIWANGKKSPKLEQRWADEWTDIYLATRDDLIAKPKHAGVDYYQFAYEAEQGSFDITLPQRCCYLIDTDTTVEFIAHHIAQKTRQENPETSIRVKAYEGINKGAIAEA

SEQ ID NO: 19053 - protein, 125 aa, Cellvibrio sp.
  misc_feature (1)..(125): tr|A0A4R7BJE7|A0A4R7BJE7_9GAMM 6-pyruvoyltetrahydropter in/6-carboxytetrahydropterin synthase OS=Cellvibrio sp. YR554 OX=2135765 GN=C8K91_10230 PE=4 SV=1
MYTVAVTRDFIANHFLIGGDWGNENFPHAHHYVVEVSIESDQLDKHGYLVDIVEIEAALDKVVGYFRDCVLNDKEEFSGLNPSIEHFSRILNEKIITLIHPPGTGSLNIKLWENATCWAAYRKQF

SEQ ID NO: 19054 - protein, 165 aa, Cellvibrionaceae bacterium
  misc_feature (1)..(165): tr|A0A2E2XN48|A0A2E2XN48_9GAMM 6-pyruvoyl tetrahydropte rin synthase OS=Cellvibrionaceae bacterium OX=2026723 G N=CL693_19915 PE=4 SV=1
MKNITTIDIEKEYLHFSSAHFTIFSADERERLHGHNFFVSASVTAEVQDDGMCFNYNHLKQTLRRQCEALDEYVLLPKHSPHLNIVEGPVYFKADFAEDTMFFMKNETLLLPVVNVTIEELARYFLAELRTNPIYSDNDAIHEMVIRVSSGPGQWGSARWERASG

SEQ ID NO: 19055 - protein, 282 aa, Cellvibrionaceae bacterium
  misc_feature (1)..(282): tr|A0A545SMD4|A0A545SMD4_9GAMM Uncharacterized protein OS=Cellvibrionaceae bacterium R142 OX=2591008 GN=FKG94_ 27565 PE=4 SV=1
MHLFVDNLTNVDFSYLCPERGLLGETWLAHVQMDGKLDEQGMVCDFGEVKKVTRLWLDAEVDHRLLVPADADNLTLTETGDQLQLVWRFGDGLSLQCRSPRQAICLVEAPVITPANLARWSVAQLAPQFPRSVARLQVGFSEENIDGPFYHYSHGLKKHAGNCQRIAHGHRSRIDIWQNGRPAPALEHQWAERWQDIYIGTREDLIAAPELDGVPCYQFSYAAQQGDFELILPQACCYLIDTDSTVEYIASHIAATLKLQHPNTVIKVKAYEGLGKGAIAEH

SEQ ID NO: 19056 - protein, 161 aa, Cellvibrionales bacterium
  misc_feature (1)..(161): tr|A0A1Z8MSP0|A0A1Z8MSP0_9GAMM 6-pyruvoyl tetrahydropte rin synthase OS=Cellvibrionales bacterium TMED21 OX=198 6745 GN=CBB81_10125 PE=4 SV=1
  misc_feature (159)..(159): Xaa can be any naturally occurring amino acid
MTRLTTLHITKEAHKFSAAHYTIFSVTERERLHGHNYFVSVRLVAQMGDNGFSADYNVYKRRIKMLCDRYDEYILVAGQSLYQTVDQVGEEYHVTFDNRVLKFPVDETWILPITNVTVEELAHFMLQELLTLEHDPDLVEVELTVSSGSGQASSATWTXDR

SEQ ID NO: 19057 - protein, 164 aa, Cellvibrionales bacterium
  misc_feature (1)..(164): tr|A0A350J1X3|A0A350J1X3_9GAMM 6-pyruvoyl tetrahydropte rin synthase OS=Cellvibrionales bacterium OX=2026722 GN =DCE61_02950 PE=4 SV=1
MSHRLTTINICKEALKFSGAHFTIFSATDRERLHGHNFRVRAEVTAPVDDNGMCFNYQEIKTRLRTICNALDEYMLLPGKSPHLKIEHIDKQYHVHFNDEVMVFIADDTRILDIRNTTVEEFSYYILDQMVSADTFFIENDVANITIGVSSGDGQWGSSTWVAS

SEQ ID NO: 19058 - protein, 126 aa, Centipeda periodontii
  misc_feature (1)..(126): tr|F5RP99|F5RP99_9FIRM 6-carboxy-5,6,7,8-tetrahydropter in synthase OS=Centipeda periodontii DSM 2778 OX=888060 GN=HMPREF9081_2085 PE=3 SV=1
MYTLRVEGAFEAAHRVVNYPGKCDRLHGHNWVVEATFQGTQLDELGMLIDFKIAKKALAAVLDDFDHYYLNDFPPFNEGVNPTAENLARIIFERLAAREEVAASPAELTALTVWESPKSSVTYTKD

SEQ ID NO: 19059 - protein, 179 aa, Cesiribacter andamanensis
  misc_feature (1)..(179): tr|M7N854|M7N854_9BACT Queuosine biosynthesis protein Q ueD OS=Cesiribacter andamanensis AMV16 OX=1279009 GN=AD ICEAN_01495 PE=4 SV=1
MNTIRISRTCAFYASYALQASDGHCKPIQAHYYKLRVTLLGTPKAAGPAGHGGLCMHFDDLKRFIEAFVVKPWEGALLLHQDAPAGLIESWKKIDKKLVLLPYQPTCENLLLDIRTTLLEHLPPGAILHSLRLSETDATYMEWNSADNTYLGYADEENEPEVNHALIMDSLSKANTSHW

SEQ ID NO: 19060 - protein, 164 aa, Cesiribacter andamanensis
  misc_feature (1)..(164): tr|M7N2G8|M7N2G8_9BACT Queuosine biosynthesis protein Q ueD OS=Cesiribacter andamanensis AMV16 OX=1279009 GN=AD ICEAN_03382 PE=4 SV=1
MKVSKKFRWEGAHRIAWHTEGCQHLHGHSYVLWVEVEGPTGDKGMLMDFKVLKKVLKPLIAAWDHATLIARDDVRLKEAIDHLDSKFYLLPYDSTAENMCRYITDYLLQQGAAELAAHRIHTLTVRIQETESCFAELRTPVDVETLASHLAPGSWSATPMVQAQ

SEQ ID NO: 19061 - protein, 194 aa, Cetia pacifica
  misc_feature (1)..(194): tr|A0A3N1YLA2|A0A3N1YLA2_9PROT 6-pyruvoyltetrahydropter in/6-carboxytetrahydropterin synthase OS=Cetia pacifica OX=1424653 GN=EDC58_1366 PE=4 SV=1
MIIRKLYKFENAHIVRNCTSRRCSRSIHGHSYKVEVKLSSNFLDKGQMVYDFGLMKLSIKELIDSFDHAITIWSEDNEEYKNFAKKFSERWIELPVNPSAEQFSRVFFLIVDRVLECMEFRNEEKEVKVHSVVVHETDTGYAECFREDAYNFKNMGEIRLEDIVFSDRIKEEWSDKNLWDKLLKKEKLTPPSEV

SEQ ID NO: 19062 - protein, 187 aa, Cetobacterium somerae
  misc_feature (1)..(187): tr|U7VE72|U7VE72_9FUSO Uncharacterized protein OS=Cetob acterium somerae ATCC BAA-474 OX=1319815 GN=HMPREF0202_ 00663 PE=4 SV=1
MRSITTFDLQYAHRFYQFKGEAQYLHGHTGLLTIEVEDSINEGVNMVYPCNEIQKTAWDVLKNFDHALILREDDPLLPAILKVYEETGIKDGTPQNTMKGITFKNELATAYPDSRLVVTKETLTVEGMIKIVYELLKDKLNIAKITFTSGVNAASAEYNTKNNIERCPLCGISLDENHSCPKCGYKK

SEQ ID NO: 19063 - protein, 290 aa, Chamaesiphon minutus
  misc_feature (1)..(290): tr|K9UQ32|K9UQ32_CHAP6 6-pyruvoyl-tetrahydropterin synt hase OS=Chamaesiphon minutus (strain ATCC 27169 / PCC 6 605) OX=1173020 GN=Cha6605_5428 PE=4 SV=1
MKCIINRRAQFSASHRYWLPELSEAENQAEFGLCAQPYGHGHNYVLYISLYGDIDEYGMVLNLSDVKHVIKKEVTAPLDYSFLNDVWPEFQATLPTTENIARVIWHKLAPHFPLVRIQLYEHPELYAEYTGKDMEASLTIGTHFSAAHRLALDSLTLEQNSEIYGKCARVNGHGHNYHLEVTVTGQIDERTGMIVDLVKLHELVDKHAVEPLDHTFLNKDIPHFAKVVPTAENIAVYIGYQIEQPIQALGAQLHKVKLIESPNNSCELLWSQDFSNLAARQLAAVALAGV

SEQ ID NO: 19064 - protein, 290 aa, Chamaesiphon polymorphus
  misc_feature (1)..(290): tr|A0A2T1F7E6|A0A2T1F7E6_9CYAN 6-pyruvoyl tetrahydropte rin synthase OS=Chamaesiphon polymorphus CCALA 037 OX=2 107692 GN=C7B77_27850 PE=4 SV=1
MKCIINRRAQFSASHRYWLPELSEAENQAEFGLCAQPYGHGHNYVLYISLYGDIDEYGMVLNLSDVKHVIKKEVTAPLDYSFLNDVWPEFQATLPTTENIARVIWHKLAPHFPLVRIQLYEHPELYAEYTGKDMEASLTIGTHFSAAHRLALDSLTLEQNSEIYGKCARVNGHGHNYHLEVTVTGQIDARTGMIVDLVKLHELVDKYAVEPLDHTFLNKDIPHFAKVVPTAENIAVYIGYQIEQPIQALGAQLHKVKLIESPNNSCELLWSQDFSNLATRQLASVALAGV

SEQ ID NO: 19065 - protein, 120 aa, Chania multitudinisentens
  misc_feature (1)..(120): tr|W0LBM1|W0LBM1_9GAMM 6-carboxy-5,6,7,8-tetrahydropter in synthase OS=Chania multitudinisentens RB-25 OX=14419 30 GN=Z042_17765 PE=3 SV=1
MATTLFKDFMFEAAHRLPHVPAGHKCGRLHGHSFMVRLEVTGEVDAYTGWVMDFAELKAVFNPIWERLDHHYLNEIPGLENPTSEVLAAWIWQQLKPQLPALTAVIVKETCTAGCVYKGE

SEQ ID NO: 19066 - protein, 118 aa, Chelativorans sp.
  misc_feature (1)..(118): tr|Q11B06|Q11B06_CHESB 6-carboxy-5,6,7,8-tetrahydropter in synthase OS=Chelativorans sp. (strain BNC1) OX=26677 9 GN=Meso_4052 PE=3 SV=1
MFRITKQFHFSASHQLLRLADDHPCKRLHGHNYIVEIELAADALDENGFVRDYHDLAAFQRYVDETLDHRHLNDVFGHDAVTAEWLAKHFFDWCRERLPETSCVRVSETPKTWAEYRP

SEQ ID NO: 19067 - protein, 135 aa, Chelatococcus sambhunathii
  misc_feature (1)..(135): tr|A0A0K6H096|A0A0K6H096_9RHIZ 6-pyruvoyl-tetrahydropte rin synthase OS=Chelatococcus sambhunathii OX=363953 GN =Ga0061061_101386 PE=4 SV=1
MYAVEVRDHVMIAHSFRGDLFGPAQALHGATFIVDVAFFRKELTAEGVVVDIGRAHEALKTVLSPLNYRNLDDLPQFAGCNTTTEFLSRHIFDAMAKAARGGALGPGGEGIDHIRVTLHESHVARAWFEGPVARA

SEQ ID NO: 19068 - protein, 135 aa, Chelatococcus sp.
  misc_feature (1)..(135): tr|A0A0K2D9N3|A0A0K2D9N3_9RHIZ 6-pyruvoyl tetrahydropte rin synthase OS=Chelatococcus sp. CO-6 OX=1702325 GN=AL 346_02765 PE=4 SV=1
MYAVEVRDHVMIAHSFRGDLFGPAQALHGATFIVDVAFFRKELTSEGVVVDIDRAHEALKAVLSPLNYRNLDDLPQFAGRNTTTEFLSRHIFDAMAEAARSGALGPGGEGIDHIRVTLHESHVARAWFEGPVARA

SEQ ID NO: 19069 - protein, 133 aa, Chelatococcus sp.
  misc_feature (1)..(133): tr|A0A2W6YV33|A0A2W6YV33_9RHIZ Uncharacterized protein OS=Chelatococcus sp. OX=1953771 GN=DI527_00080 PE=4 SV= 1
MYSVEVRDRIMIGHSLPDPFFGPAQAMHGATFVVDVAFFSERLTRHNVVVDIGAALDVLAETLKPLKYQNLDALPQFSGILTTTEFLCRHIFDGIVAAAKAGALGEDAAGLARIRVTLHETDLARASFEGPLA

SEQ ID NO: 19070 - protein, 142 aa, Chelonobacter oris
  misc_feature (1)..(142): tr|A0A0A3ATV4|A0A0A3ATV4_9PAST 6-carboxy-5,6,7,8-tetrah ydropterin synthase OS=Chelonobacter oris OX=505317 GN= OA57_06615 PE=3 SV=1
MFKISKEFSFDMAHMLDGHDGKCKNLHGHTYKLQVELCAPLLTDPAKCGMVMDYSDLKRIVDDLILKPMDHAFIFDQNSEKERKVADLLQTLDSKVFALPYRTTAEQMSQFIFQRLQQAGLPVSAVRLWETPTSYCEYTDPA

SEQ ID NO: 19071 - protein, 150 aa, Chishuiella changwenlii
  misc_feature (1)..(150): tr|A0A1M6YT00|A0A1M6YT00_9FLAO 6-pyruvoyltetrahydropter in/6-carboxytetrahydropterin synthase OS=Chishuiella ch angwenlii OX=1434701 GN=SAMN05443634_10729 PE=4 SV=1
MKIIRLTKAFTFETAHALHGYDGKCKNIHGHSYKLFVTVKGIPSEDVNDVKLGMVMDFGDLKKIINKEVVNLFDHAILLNQNSPHKALGDKLIAEGHHVVFTDYQPSCENMILWMVDKIKAQLPTNIELVALKLHETENSYGEWLAEDNQ

SEQ ID NO: 19072 - protein, 136 aa, Chishuiella changwenlii
  misc_feature (1)..(136): tr|A0A1M6VY49|A0A1M6VY49_9FLAO 6-carboxy-5,6,7,8-tetrah ydropterin synthase OS=Chishuiella changwenlii OX=14347 01 GN=SAMN05443634_10481 PE=3 SV=1
MKVTVNRKAHFNAAHRLFNKDWSDEKNFEVFGKCSYPNYHGHNYEIIVAVKGDVDPTTGFVMNLDLLRSIIEEEVEEYLDHKNLNIDIKEFQSVNPSAENIVILIWNKIRAKLAAELELKVTLYETPRNFVEYTGE

SEQ ID NO: 19073 - protein, 163 aa, Chitinimonas sp.
  misc_feature (1)..(163): tr|A0A2G3K8W4|A0A2G3K8W4_9BURK 6-pyruvoyl tetrahydropte rin synthase OS=Chitinimonas sp. BJB300 OX=1559339 GN=C SQ89_01585 PE=4 SV=1
MRQDRLAIRIDRDDIGFAAAHFTIFSATEREGLHGHNFTVGMEVVARGEENGMIFDYRLLKSRLRALCAELDERMLLPARSAHLQISRIGNDIECRFADDKFTFPYRDVVMLELPNITLEALAEWFLGRLLVTTDLPREYLAEMSVSVASSRGQQARRQAILS

SEQ ID NO: 19074 - protein, 197 aa, Chitinimonas sp.
  misc_feature (1)..(197): tr|A0A516SE42|A0A516SE42_9MICO 6-carboxytetrahydropteri n synthase OS=Chitinimonas sp. R3-44 OX=2594795 GN=FNU7 6_08670 PE=4 SV=1
MLIRKLFKFENAHIVRNCSSDRCRHSIHGHSYKVEVLLQANALDHGQMVYDFGLMKGTIRDVIDAFDHAICFWDRDEADYIAWAKRYSQRWIAMPVSPSAEQFSRLFFVLIDAILANTRMANGEQDVTLHSVIAHETETGYAQCFREDAYNPRMGDIKLEEVVFSDQCRAEWHDPAMLEKLQRGEKFTNPTIALQVR

SEQ ID NO: 19075 - protein, 203 aa, Chitinimonas taiwanensis
  misc_feature (1)..(203): tr|A0A1K2HGX2|A0A1K2HGX2_9BURK 6-pyruvoyltetrahydropter in/6-carboxytetrahydropterin synthase OS=Chitinimonas t aiwanensis DSM 18899 OX=1121279 GN=SAMN02745887_01862 P E=4 SV=1
MLIRKLFKFENAHIVRNCSSERCRYSIHGHSYKVEVLLEAHAFDHGQMVYDFGLMKGTIRDVIDAFDHAICFWDKDEADYIAWAKRYSARWISMPVSPSAEQFSRMFFIIIDAILQNTRMANGEQDVALHSVIAHETETGYAQCFRADAYNPRMGNIALADVVFSEQCQAEWKDPAMYEKLLHKQPFINQALPLQVPVDDAAG

SEQ ID NO: 19076 - protein, 205 aa, Chitiniphilus sp.
  misc_feature (1)..(205): tr|A0A4U0QCA9|A0A4U0QCA9_9NEIS 6-carboxytetrahydropteri n synthase OS=Chitiniphilus sp. HX-2-15 OX=2571148 GN=F AZ21_01775 PE=4 SV=1
MLIRKLFKFENAHIVRNCSSDRCRRSIHGHSYKVEVLLEAHALDHGQMVYDFGLMKGSIRDVIDAFDHAVCFWDKDDPEYIRLCQQFSARWIALPVSPSAEQFARLFFVTIDALLKQTQMRNGESDDVRLHSVIAHETDTGYAQAFREDAYNPRMGEIRLAEIVFSEQVKAEWHDPRMMEKLLAGECFVNPEVLLQVPVPGGESR

SEQ ID NO: 19077 - protein, 125 aa, Chitinivibrio alkaliphilus
  misc_feature (1)..(125): tr|U7D5F0|U7D5F0_9BACT 6-carboxy-5,6,7,8-tetrahydropter in synthase OS=Chitinivibrio alkaliphilus ACht1 OX=1313 304 GN=CALK_2357 PE=3 SV=1
MYEVSTEQSFSAAHYLRNYNGACENLHGHNWKVRVTVRTEVLDSIGLAIDFKILKKNLKDLLDTLDHTCINETVFTESYGNPSSENLSKYLFIEMRKRLSPDFPDLEIGRVDVWETPGNCASYYE

SEQ ID NO: 19078 - protein, 163 aa, Chitinivibrio alkaliphilus
  misc_feature (1)..(163): tr|U7D527|U7D527_9BACT 6-pyruvoyl-tetrahydropterin synt hase OS=Chitinivibrio alkaliphilus ACht1 OX=1313304 GN= CALK_2530 PE=4 SV=1
MSHDTYRSIIKLDFQYAHRFMNYPGEASYLHGHSGYLTLEIEGKLNEHNYAYPVKEAQKLAWEVADNFHHGTIFQEGDPLFDLVLQGYDQTGMKGTTNRFGEPAKVLDHELIKSYPESRVSVSKGPSTCEWFCTVFYELLKDKLNIKRVQFRSSSLNCASLEL

SEQ ID NO: 19079 - protein, 137 aa, Chitinophaga arvensicola
  misc_feature (1)..(137): tr|A0A1I0QQX9|A0A1I0QQX9_9BACT 6-pyruvoyltetrahydropter in/6-carboxytetrahydropterin synthase OS=Chitinophaga a rvensicola OX=29529 GN=SAMN04488122_1669 PE=4 SV=1
MIYLTRVENFNAAHKLSNPGWSKEKNEEVFGKCANENWHGHNYELHVTIKGNPDPETGFVFNAKTLGVIIRDAVIEKIDHRNLNMDVDFMKDKFTSAENLSIAIWDQLAKHLPAEVQLHCIKLYETPRIYVEYYGGK

SEQ ID NO: 19080 - protein, 148 aa, Chitinophaga arvensicola
  misc_feature (1)..(148): tr|A0A1I0RVE9|A0A1I0RVE9_9BACT 6-pyruvoyltetrahydropter in/6-carboxytetrahydropterin synthase OS=Chitinophaga a rvensicola OX=29529 GN=SAMN04488122_3467 PE=4 SV=1
MEIKRDDHQTMLTFITRRERFNAAHRMYRQDLTEEENFQLFGKCANPHYHGHNYELFVTVKGDVDPERPYIIDLKELKVIINDYIIEKLDHKNLNLDVDFMAGKMASTELLCVEIFKQLKVPIEGYEGVLLHSVRLAETENNSAECFG

SEQ ID NO: 19081 - protein, 137 aa, Chitinophaga barathri
  misc_feature (1)..(137): tr|A0A3N4MB97|A0A3N4MB97_9BACT 6-carboxytetrahydropteri n synthase OS=Chitinophaga barathri OX=1647451 GN=EG028 _22220 PE=4 SV=1
MIYLTRVEHFNAAHKLFNPQWSKEQNLEVFGKCANDNWHGHNYELHVTIKGEPDPETGFVFNAKTLGILIKDVIVEKLDHKNLNMDVDFMKDKFTSAENVAIAIWEQLEQHLPGTVQLHCIKLHETPKIYVEYFGGK

SEQ ID NO: 19082 - protein, 137 aa, Chitinophaga barathri
  misc_feature (1)..(137): tr|A0A3N4MVX2|A0A3N4MVX2_9BACT 6-carboxytetrahydropteri n synthase OS=Chitinophaga barathri OX=1647451 GN=EG028 _20325 PE=4 SV=1
MTFLTRREQFNAAHRMYRQDLTEEENFRLFGKCANPNYHGHNYDLFVTVKGEVDHERPCIMDLKELKVIINDHVIEKLDHRNLNLDVDFMAGKMASTELLCIEIFKQLKGPIEAYAGVCLHSVRLAETENNSTECFG

SEQ ID NO: 19083 - protein, 137 aa, Chitinophaga caeni
  misc_feature (1)..(137): tr|A0A291QTN7|A0A291QTN7_9BACT 6-pyruvoyl tetrahydrobio pterin synthase OS=Chitinophaga caeni OX=2029983 GN=COR 50_08995 PE=4 SV=1
MIYLTRVEHFNAAHKLSNPSWSKEENQNVFGKCANENWHGHNYELHVTVKGEPHPETGFVFNAKTLGTLINDVIIEKVDHRNLNVDVDFMAGKFTSAENFAIAIWEQLEKHLPAGATLHCIKLFETPKIYVEYFGGK

SEQ ID NO: 19084 - protein, 140 aa, Chitinophaga costaii
  misc_feature (1)..(140): tr|A0A1C4BVT2|A0A1C4BVT2_9BACT 6-pyruvoyltetrahydropter in/6-carboxytetrahydropterin synthase OS=Chitinophaga c ostaii OX=1335309 GN=GA0116948_103276 PE=4 SV=1
MIYLTRVENFNAAHKLSNPAWSDEKNEAVFGKCANVNWHGHNYELHVTIKGNPDPDTGFVFNAKILGEIIKNEVIEKIDHRNLNMDVAFMAGKFTSAENLAIGIWDQLAPHLPASVQLHSIKLYETPRIYVEYFGTHSGL

SEQ ID NO: 19085 - protein, 141 aa, Chitinophaga cymbidii
  misc_feature (1)..(141): tr|A0A512RSR5|A0A512RSR5_9BACT 6-carboxy-5,6,7,8-tetrah ydropterin synthase OS=Chitinophaga cymbidii OX=1096750 GN=CCY01nite_50000 PE=3 SV=1
MLQVTKIFRFEMAHALQGHAGACRHVHGHSYQLHVTVRQEREQEGYLPGAGMLIDFKELKKLVKEAVIRRLDHQLLLSGDYLAANPGILRQENLLVLEAEPSAENLLLFVRNAIREKLPAGIALAKLKLYETADSYAEWVL

SEQ ID NO: 19086 - protein, 137 aa, Chitinophaga cymbidii
  misc_feature (1)..(137): tr|A0A512RJV5|A0A512RJV5_9BACT 6-carboxy-5,6,7,8-tetrah ydropterin synthase OS=Chitinophaga cymbidii OX=1096750 GN=CCY01nite_22390 PE=4 SV=1
MIYLTRVEHFNAAHKLFNPQWSKEQNLEVFGKCANDNWHGHNYELHVTVKGEPDPETGFVFNAKTLGVLIKDVIVEKLDHKNLNMDVDFMKDKFTSAENVAIAIWEQLQQHLPDTVQLHCIRLHETPKIYVEYYGGK

SEQ ID NO: 19087 - protein, 137 aa, Chitinophaga dinghuensis
  misc_feature (1)..(137): tr|A0A327VKW5|A0A327VKW5_9BACT 6-pyruvoyltetrahydropter in/6-carboxytetrahydropterin synthase OS=Chitinophaga d inghuensis OX=1539050 GN=CLV59_11146 PE=4 SV=1
MIYLTRVENFNAAHKLSNPNWSAEKNEEVFGKCANVNWHGHNYELHVTIKGNPDPETGFVFNAKTLGVIIRDVIIEKIDHRNLNLDVDFMAGKFTSAENLAIAIWDQLALHLPSEIELHCIKLYETPRIYVEYFGGK

SEQ ID NO: 19088 - protein, 137 aa, Chitinophaga eiseniae
  misc_feature (1)..(137): tr|A0A1T4QAS2|A0A1T4QAS2_9BACT 6-pyruvoyltetrahydropter in/6-carboxytetrahydropterin synthase OS=Chitinophaga e iseniae OX=634771 GN=SAMN04488128_102262 PE=4 SV=1
MIYLTRVENFNAAHKLSNPAWSKEKNEEVFGKCANDNWHGHNYELHVTIKGNPDPETGFVFNAKTLGVIIRDAVIEKIDHRNLNLDVDFMAGKFTSAENLAIAIWDQLTPHLPAEVQLHCIKLYETPRIYVEYYGGK

SEQ ID NO: 19089 - protein, 143 aa, Chitinophaga eiseniae
  misc_feature (1)..(143): tr|A0A1T4MAR1|A0A1T4MAR1_9BACT 6-pyruvoyltetrahydropter in/6-carboxytetrahydropterin synthase OS=Chitinophaga e iseniae OX=634771 GN=SAMN04488128_1011020 PE=4 SV=1
MLQLTKIFSFETAHALHTYDGKCKNVHGHSYKLHVTIKGRNNSGAYLPAPGILVDFKVIKSLVHETIVQHFDHRLILSAAYMQAHPGCSTQENLWVWDMEPSAENMVLYMERVLQAALPEEVALAGLRLYETSDSYAEWVPAG

SEQ ID NO: 19090 - protein, 137 aa, Chitinophaga filiformis
  misc_feature (1)..(137): tr|A0A1G7GMA4|A0A1G7GMA4_CHIFI 6-pyruvoyltetrahydropter in/6-carboxytetrahydropterin synthase OS=Chitinophaga f iliformis OX=104663 GN=SAMN04488121_10182 PE=4 SV=1
MIYLTRVENFNAAHKLSNPAWSKEKNEEVFGKCANENWHGHNYELHVTVKGTPDPETGFVFNAKTLGVLIKDYIVEKVDHRNLNVDVDFMAGKFTSAENLAIGIWDQLTPHLPAGVELHCIKLYETPRIYVEYFGGK

SEQ ID NO: 19091 - protein, 137 aa, Chitinophaga flava
  misc_feature (1)..(137): tr|A0A365Y1Z9|A0A365Y1Z9_9BACT 6-pyruvoyl tetrahydrobio pterin synthase OS=Chitinophaga flava OX=2259036 GN=DF1 82_08680 PE=4 SV=1
MIYLTRVENFNAAHKLSNPGWSKEKNEEVFGKCANDNWHGHNYELHVTVKGNPDPETGFVFNAKTLGVIIRDSVIEKVDHRNLNLDVDFMTGKFTSAENLAIAIWEQLAPHLPAEVQLHCIKLYETPRIYVEYYGGK

SEQ ID NO: 19092 - protein, 143 aa, Chitinophaga flava
  misc_feature (1)..(143): tr|A0A365XSG0|A0A365XSG0_9BACT 6-carboxytetrahydropteri n synthase QueD OS=Chitinophaga flava OX=2259036 GN=DF1 82_21265 PE=4 SV=1
MLQLTKIFSFETAHALHRYNGKCRNIHGHSYKLHVTVRDKAHQGEYLPAPGILVDFKDIKAVVQSHIVEHFDHRLILSADYVVAHPFCETQENLWVWEMEPSAENMVLYMQKVLQDVLPAEVSLASLRLYETSDSYAEWVAPV

SEQ ID NO: 19093 - protein, 137 aa, Chitinophaga ginsengisegetis; identical to SEQ ID NO: 19079
  misc_feature (1)..(137): tr|A0A1T5NM47|A0A1T5NM47_9BACT 6-pyruvoyltetrahydropter in/6-carboxytetrahydropterin synthase OS=Chitinophaga g insengisegetis OX=393003 GN=SAMN05660461_2173 PE=4 SV=1

SEQ ID NO: 19094 - protein, 137 aa, Chitinophaga ginsengisoli
  misc_feature (1)..(137): tr|A0A2P8GGM8|A0A2P8GGM8_9BACT 6-pyruvoyltetrahydropter in/6-carboxytetrahydropterin synthase OS=Chitinophaga g insengisoli OX=363837 GN=CLV42_103103 PE=4 SV=1
MIYLTRVENFNAAHKLSNPAWSKEKNEEVFGKCANENWHGHNYELHVTVKGTPDPETGFVFNAKTLGVLIKDYIVEKVDHRNLNIDVDFMAGIFTSAENLAIGIWDQLTPHLPAGVELHCIKLYETPRIYVEYFGGK

SEQ ID NO: 19095 - protein, 137 aa, Chitinophaga japonensis
  misc_feature (1)..(137): tr|A0A562TCE3|A0A562TCE3_CHIJA 6-pyruvoyltetrahydropter in/6-carboxytetrahydropterin synthase OS=Chitinophaga j aponensis OX=104662 GN=LX66_0116 PE=4 SV=1
MIYLTRVENFNAAHKLSNPAWSKEKNLEVFGKCANDNWHGHNYELHVTIKGNPDKETGFVFNAKTLGDIIKDTIVEKVDHRNLNLDVDFMAGKFTSAENLAIAIWDELASHLPAEVQLHCIKLYETPRIYVEYYGGK

SEQ ID NO: 19096 - protein, 137 aa, Chitinophaga jiangningensis
  misc_feature (1)..(137): tr|A0A1M6W4B8|A0A1M6W4B8_9BACT 6-pyruvoyltetrahydropter in/6-carboxytetrahydropterin synthase OS=Chitinophaga j iangningensis OX=1419482 GN=SAMN05444266_101479 PE=4 SV =1
MIYLTRVENFNAAHKLSNPNWSAEKNEEVFGKCANVNWHGHNYELHVTIKGNPDPETGFVFNAKTLGVIIKDVVIEKIDHRNLNMDVDFMAGKFTSAENLAIAIWDQLSQHLPAEVMLHCIKLYETPRIYVEYYGGK

SEQ ID NO: 19097 - protein, 137 aa, Chitinophaga niabensis
  misc_feature (1)..(137): tr|A0A1N6HEC8|A0A1N6HEC8_9BACT 6-pyruvoyltetrahydropter in/6-carboxytetrahydropterin synthase OS=Chitinophaga n iabensis OX=536979 GN=SAMN04488055_3331 PE=4 SV=1
MIYLTRVEHFNAAHKLFNPHWSKEQNLEVFGKCANDNWHGHNYDLHVTVKGNPDPETGFVFNAKTLGVLIKDLIIEKMDHKNLNLDVDFMAGKFTSAENVAIAIWEQLEKALPETVQLHCIKLHETAKIYVEYFGGK

SEQ ID NO: 19098 - protein, 137 aa, Chitinophaga niastensis
  misc_feature (1)..(137): tr|A0A2P8HVE2|A0A2P8HVE2_9BACT 6-pyruvoyltetrahydropter in/6-carboxytetrahydropterin synthase OS=Chitinophaga n iastensis OX=536980 GN=CLV51_1011478 PE=4 SV=1
MIYLTRVENFNAAHKLSNPGWSKEKNEEVFGKCANENWHGHNYELHVTIKGNPDPQTGFVFNAKTLGDIIKDVVIEKIDHRNLNMDVDFMVGKFTSAENLSIAIWDQLAKHLPTDVQLHCIKLYETPRIYVEYYGGK

SEQ ID NO: 19099 - protein, 136 aa, Chitinophaga parva
  misc_feature (1)..(136): tr|A0A2T7BNK8|A0A2T7BNK8_9BACT 6-pyruvoyl tetrahydrobio pterin synthase OS=Chitinophaga parva OX=2169414 GN=DCC 81_07130 PE=4 SV=1
MIYLTRVENFNAAHKLSNPAWSDEQNVAVFGKCANVNWHGHNYELHVTVKGTPDKDTGFVFNAKTLGDLIKIHVIEKVDHRNLNMDVDFMKGKFTSAENLAIGIWDQLTPHLPEGVQLHCIKLYETPRIYVEYFGA

SEQ ID NO: 19100 - protein, 137 aa, Chitinophaga pinensis
  misc_feature (1)..(137): tr|A0A5C6LZH8|A0A5C6LZH8_9BACT 6-carboxytetrahydropteri n synthase OS=Chitinophaga pinensis OX=79329 GN=FEF09_0 2735 PE=4 SV=1
MIYLTRVENFNAAHKLSNPAWSKEKNEEVFGKCANENWHGHNYELHVTVKGTPDPETGFVFNAKTLGVLIKDFIVEKIDHRNLNMDVDFMVGKFTSAENLAIGIWDQLTPHLPEGVQLHCIKLYETPRIYVEYFGVK

SEQ ID NO: 19101 - protein, 151 aa, Chitinophaga pinensis
  misc_feature (1)..(151): tr|C7PFN0|C7PFN0_CHIPD Uncharacterized protein OS=Chiti nophaga pinensis (strain ATCC 43595 / DSM 2588 / NCIB 1 1800 / UQM 2034) OX=485918 GN=Cpin_6030 PE=4 SV=1
MKQIVRLTKIFRFEMAHALSGYKGLCRHIHGHSYQLEVTIKGQPDNTPGRSSEGMVLDFGDLKAIVQEEIIAPLDHALMLKEGSVLSLGGVDNELFARIVWTPWQPTCENMVLDFAGRIIAQLPDGVTLCRLKLYETHTSYAEWYASDNID

SEQ ID NO: 19102 - protein, 137 aa, Chitinophaga polysaccharea
  misc_feature (1)..(137): tr|A0A561Q5C0|A0A561Q5C0_9BACT 6-pyruvoyltetrahydropter in/6-carboxytetrahydropterin synthase OS=Chitinophaga p olysaccharea OX=1293035 GN=FHW36_1011477 PE=4 SV=1
MIYLTRVENFNAAHKLSNPGWSKEKNEEVFGKCANENWHGHNYELHVTIKGNPDPDTGFVFNAKTLGVIIRDAVIEKIDHRNLNMDVDFMAGKFTSAENLSIAIWDQLAKHLPAEVQLHCIKLYETPRIYVEYYGGK

SEQ ID NO: 19103 - protein, 137 aa, Chitinophaga rupis
  misc_feature (1)..(137): tr|A0A1H8BT99|A0A1H8BT99_9BACT 6-pyruvoyltetrahydropter in/6-carboxytetrahydropterin synthase OS=Chitinophaga r upis OX=573321 GN=SAMN04488505_106311 PE=4 SV=1
MIYLTRVENFNAAHKLSNPAWSKEKNQEVFGKCANDNWHGHNYELHVTIKGTPDPETGFVFNAKTLGDVIKDVIVEKVDHRNLNMDVDFMAGKFTSAENLAIAIWDELAKNLPPAAQLHCIKLYETPRIYVEYYGGQ

SEQ ID NO: 19104 - protein, 136 aa, Chitinophaga sancti
  misc_feature (1)..(136): tr|A0A1K1PC17|A0A1K1PC17_9BACT 6-pyruvoyltetrahydropter in/6-carboxytetrahydropterin synthase OS=Chitinophaga s ancti OX=1004 GN=SAMN05661012_01801 PE=4 SV=1
MIYLTRVENFNAAHKLSNPAWSKEKNKEVFGKCANENWHGHNYELHVTVKGEPDPETGFVFNAKTLGDLIEEYVVEEVDHRNLNIDVAFMAGKFTSAENLAIGIWEQLARHLPEGVQLHCVKLYETPRIYVEYYGG

SEQ ID NO: 19105 - protein, 141 aa, Chitinophaga sancti
  misc_feature (1)..(141): tr|A0A1K1S6K8|A0A1K1S6K8_9BACT 6-carboxy-5,6,7,8-tetrah ydropterin synthase OS=Chitinophaga sancti OX=1004 GN=S AMN05661012_04873 PE=3 SV=1
MLQITKIFNFETAHALHGYAGKCRNLHGHSYKLHVTVSSKTPEEGYLGGTGILMDFKDLKKLVNEKVVDKFDHRLILSKAYLAANPNLGELENLEIWDMEPSAENIILYIKEELKGGFPEDVELVKLVLYETSDSYAEWIK

SEQ ID NO: 19106 - protein, 137 aa, Chitinophaga skermanii
  misc_feature (1)..(137): tr|A0A327Q274|A0A327Q274_9BACT 6-pyruvoyltetrahydropter in/6-carboxytetrahydropterin synthase OS=Chitinophaga s kermanii OX=331697 GN=LX64_04811 PE=4 SV=1
MIYLTRVEHFNAAHKLSNPGWSKEENKEVFGKCANENWHGHNYELHVTVKGEPHPETGFVFNAKTLGTLIHDVIIEQVDHRNLNVDVPFMAGKFTSAENFAIAIWEQLEQHLPEGAALHCIKLYETPKIYVEYYGGK

SEQ ID NO: 19107 - protein, 141 aa, Chitinophaga sp.
  misc_feature (1)..(141): tr|A0A5B9WQU7|A0A5B9WQU7_9BACT 6-carboxytetrahydropteri n synthase OS=Chitinophaga sp. XS-30 OX=2604421 GN=FW41 5_15950 PE=4 SV=1
MLQVTKIFRFETAHALYGYAGSCRFIHGHSYVLHVTVRSTQQEDVYLPAPGILLDFKELKKLVQETVITHLDHQLVLSSAYVDANPGMAQEDNLLVMEAEPSAENLLLFIRNAIRGKLPAGTELAGLKLFETQDSFAEWVL

SEQ ID NO: 19108 - protein, 137 aa, Chitinophaga sp.
  misc_feature (1)..(137): tr|A0A5B9WTD0|A0A5B9WTD0_9BACT 6-carboxytetrahydropteri n synthase OS=Chitinophaga sp. XS-30 OX=2604421 GN=FW41 5_23875 PE=4 SV=1
MIYLTRVEHFNAAHKLFNPQWSKEQNLEVFGKCANDNWHGHNYELHVTIKGEPDPETGFVFNAKTLGVLIKDVIVEKLDHKNLNMDVDFMKDKFTSAENVAIAIWEQLEQHLPETVQLHCIRLHETPKIYVEYYGGK

SEQ ID NO: 19109 - protein, 137 aa, Chitinophaga terrae
  misc_feature (1)..(137): tr|A0A1H4DBS3|A0A1H4DBS3_9BACT 6-pyruvoyltetrahydropter in/6-carboxytetrahydropterin synthase OS=Chitinophaga t errae Kim and Jung 2007 OX=408074 GN=SAMN05660909_03023 PE=4 SV=1
MIYLTRVENFNAAHKLSNPGWSKEKNEEVFGKCANENWHGHNYELHVTIKGNPDPETGFVFNAKTLGVIIKDTIIEKIDHRNLNLDVDFMKGKFTSAENLAIAIWDQLSKHLPAEVQLHCIKLYETPRIYVEYYGGK

SEQ ID NO: 19110 - protein, 137 aa, Chitinophagaceae bacterium
  misc_feature (1)..(137): tr|A0A3C0IUS5|A0A3C0IUS5_9BACT 6-carboxy-5,6,7,8-tetrah ydropterin synthase OS=Chitinophagaceae bacterium OX=18 69212 GN=DCL43_13150 PE=3 SV=1
MKKVAVFRKEHFNAAHRLHNPALTDAENARVFGKCNNVHYHGHNYELIVKVVGDIDPITGYVIDMKVLSDIIKIEVLDRFDHKNLNLDVPEFASINPTAENIAVVIYDLLRKQIPSEHSLKITLYETERNFVEYPAE

SEQ ID NO: 19111 - protein, 136 aa, Chitinophagaceae bacterium
  misc_feature (1)..(136): tr|A0A1Z5SIL2|A0A1Z5SIL2_9BACT 6-pyruvoyl tetrahydrobio pterin synthase OS=Chitinophagaceae bacterium IBVUCB1 O X=1985173 GN=CAP35_02670 PE=4 SV=1
MVYLTRVEHFNAAHRLYNNDWSDEQNREVFGKCANANWHGHNYELHVTVKGTPHPDTGFIFNAKTLGELIRDVIVERVDHRNLNLDVDFMKGKFTSAENFAIAIWDELQPHIQSNGASLHCIKLLETPRIYVEYFG

SEQ ID NO: 19112 - protein, 143 aa, Chlamydia sp.
  misc_feature (1)..(143): tr|A0A1M3BER8|A0A1M3BER8_9CHLA 6-carboxy-5,6,7,8-tetrah ydropterin synthase OS=Chlamydia sp. 32-24 OX=1895742 G N=BGO10_10245 PE=4 SV=1
MTKIACVRKIHFCSGHRVLNHEGKCANAHGHNYYAHIFAEANNLDELGRVIDFSVLKEMIGGWIDKHWDHNFLVCDKDEEMLRALQLITSPKKPFICPFNPTAENMAIYLLEVICPQELKNTNVTVTKVIISETDNCYAEATL

SEQ ID NO: 19113 - protein, 116 aa, Chlamydiales bacterium
  misc_feature (1)..(116): tr|A0A212KPE4|A0A212KPE4_9CHLA 6-carboxy-5,6,7,8-tetrah ydropterin synthase (Fragment) OS=Chlamydiales bacteriu m SCGC AB-751-O23 OX=1871322 GN=queD PE=4 SV=1
DTWETLVVQLKHHKGKCAIPHGHSYKLEVALKGDTLREKGEEKNMLMDFSFIAKAVKPLIEKYLDHKWLNDTLETDSPTAEFIAQWIYQQLSSKLPSLHKVTVWETKSCKVSYLEN

SEQ ID NO: 19114 - protein, 122 aa, Chloracidobacterium sp.
  misc_feature (1)..(122): tr|A0A257B5K8|A0A257B5K8_9BACT 6-carboxy-5,6,7,8-tetrah ydropterin synthase OS=Chloracidobacterium sp. CP2_5A O X=2012633 GN=queD PE=3 SV=1
MLVELAKTFTFEAAHRLPHVPPDHKCRRLHGHSYRAEIVVRGEVDPELGWLLDFDQIKQAFEPLRQQLDHYYLNEIPGLENPTSEILARWIWERLSPALPCLYRVSIAETCTSACHYYGEAT

SEQ ID NO: 19115 - protein, 128 aa, Chloracidobacterium sp.
  misc_feature (1)..(128): tr|A0A257B839|A0A257B839_9BACT 6-carboxy-5,6,7,8-tetrah ydropterin synthase OS=Chloracidobacterium sp. CP2_5A O X=2012633 GN=queD PE=3 SV=1
MHNRFYEVMVETQFSAAHALRRYQGQGESLHGHNWRIQVFVRGAQLDENHILIDFQAVRRATEEVMEYLDHKHLNEVPPFDQELNPSTENIAAFVFRQVAARINTDRCQVSLVRAWETPATMAAYGVG

SEQ ID NO: 19116 - protein, 128 aa, Chloracidobacterium thermophilum
  misc_feature (1)..(128): tr|G2LJC8|G2LJC8_CHLTF 6-carboxy-5,6,7,8-tetrahydropter in synthase OS=Chloracidobacterium thermophilum (strain B) OX=981222 GN=Cabther_A2073 PE=3 SV=1
MNRHFYEVMVETQFSAAHALRHYRGQGESVHGHNWRIQVFVRGEKLDGNHILVDFRAVREATEEVMHYLDHKHLNELPPFDRELNPSTENIAAFVFHQVAKRINTPHYQVTLVRAWETPTTMAAYGLA

SEQ ID NO: 19117 - protein, 125 aa, Chloracidobacterium thermophilum
  misc_feature (1)..(125): tr|G2LI92|G2LI92_CHLTF 6-carboxy-5,6,7,8-tetrahydropter in synthase OS=Chloracidobacterium thermophilum (strain B) OX=981222 GN=Cabther_A0793 PE=3 SV=1
MRVELAKTFTFEAAHHLPHVPPHHKCRRLHGHSYRVEIVVRGEVDPELGWLMDFDAIRQAFEPIRQQLDHYYLNDIPGLENPTSEILARWIWERLAPALPCLYRVSIAETCTSACHYYGEAPDNA

SEQ ID NO: 19118 - protein, 142 aa, Chlorobaculum limnaeum
  misc_feature (1)..(142): tr|A0A1D8CWL8|A0A1D8CWL8_CHLLM 6-pyruvoyl tetrahydropte rin synthase OS=Chlorobaculum limnaeum OX=274537 GN=BIU 88_03520 PE=4 SV=1
MLISRKIEIDYGHTLPNSFSFCNQLHGHRGVIVATVEGPVIERDGDAEEGMVMDFKFLRQIMDEHIHDLLDHGFAVWKEDKEDLEFILRRNSRVLVTDEPPTAEYLAKWAFNQIMGKLPEGVTLKNLRWYETPNNWADYDGQ

SEQ ID NO: 19119 - protein, 149 aa, Chlorobaculum limnaeum
  misc_feature (1)..(149): tr|A0A1D8D675|A0A1D8D675_CHLLM 6-carboxy-5,6,7,8-tetrah ydropterin synthase OS=Chlorobaculum limnaeum OX=274537 GN=BIU88_07215 PE=3 SV=1
MNDILEKPRKIYVTRKIEFNAAHRLFNPELSDEENRRLYGKCSGTYGHGHNYLLEITLSGIIDRKTGYLFDLKELKKILEEEIVARFDHRHLNHEVSELAGHVPTTEILAVTVWEILESRLETITKKEVSLHEVKIHETGKNSVTYLGE

SEQ ID NO: 19120 - protein, 150 aa, Chlorobaculum parvum
  misc_feature (1)..(150): tr|B3QPA6|B3QPA6_CHLP8 Uncharacterized protein OS=Chlor obaculum parvum (strain NCIB 8327) OX=517417 GN=Cpar_13 57 PE=4 SV=1
MNTTPRDTMLISRKIEIDYGHTLPNSFTFCNQLHGHRGVIVASVEGPVINRDGDAEQGMVMDFKFLREIMDKQIHDVLDHGFAVWKEDKEDLEFILKRNTRVLVTDEPPTAEYLAKWAFNQISDKLPEGVTLKNLRWYETPNNWADFTGE

SEQ ID NO: 19121 - protein, 149 aa, Chlorobaculum parvum
  misc_feature (1)..(149): tr|B3QP42|B3QP42_CHLP8 Uncharacterized protein OS=Chlor obaculum parvum (strain NCIB 8327) OX=517417 GN=Cpar_12 92 PE=4 SV=1
MNDILEKPRKIYVTRTIEFNAAHRLFNPELSEEENRSLYGKCSGKYGHGHNYLLEITLSGPINRKTGYLFDLKKLKTILEEEIVTRFDHRHMNFEVKELQNHVPTTEILAVVVWDILETRLETITKQEVSLHEVKIHETGKNSVTYRGE

SEQ ID NO: 19122 - protein, 149 aa, Chlorobaculum sp.
  misc_feature (1)..(149): tr|A0A4Q1DFA8|A0A4Q1DFA8_9CHLB 6-carboxy-5,6,7,8-tetrah ydropterin synthase OS=Chlorobaculum sp. 24CR OX=250887 8 GN=EST62_02965 PE=3 SV=1
MNDILEKPRKIYVTRQIEFNAAHRLFNPELSDEENLRLYGKCSGAYGHGHNYLLEITLSGLIDRKTGYLFDLKELKKILEEEIVARFDHRHLNHEVSELAGHVPTTEILAVVVWDILELRLQTITKQEVSLHEVKIHETGKNSVTYLGE

SEQ ID NO: 19123 - protein, 120 aa, Chlorobaculum sp.
  misc_feature (1)..(120): tr|A0A4Q1D2P6|A0A4Q1D2P6_9CHLB 6-carboxytetrahydropteri n synthase (Fragment) OS=Chlorobaculum sp. 24CR OX=2508 878 GN=EST62_10660 PE=4 SV=1
MLISRKIEIDYGHTLPNSFSFCNQLHGHRGVIVATVEGPVIERHGDAEEGMVMDFKFLRQIMDEHIHDLLDHGFAVWKEDKEDLEFILRRNSRVLVTDEPPTAEYLAKWAFRQIEGKLPE

SEQ ID NO: 19124 - protein, 149 aa, Chlorobaculum tepidum
  misc_feature (1)..(149): tr|Q8KEA7|Q8KEA7_CHLTE 6-carboxy-5,6,7,8-tetrahydropter in synthase OS=Chlorobaculum tepidum (strain ATCC 49652 / DSM 12025 / NBRC 103806 / TLS) OX=194439 GN=CT0782 P E=3 SV=1
MNDIVEKPRKIYVTRQIEFNAAHRLFNPELSDEENQQLYGKCSGKYGHGHNYLLEITLSGIIDRKTGYLFDLKELKKILEEEIVARFDHRHLNHEVNELAGHVPTTEILAVIVWEILDSRLKTITKQEVSLHEVIIHETGKNSVTYRGE

SEQ ID NO: 19125 - protein, 178 aa, Chlorobaculum tepidum
  misc_feature (1)..(178): tr|Q8KCI4|Q8KCI4_CHLTE 6-pyruvoyl tetrahydrobiopterin s ynthase, putative OS=Chlorobaculum tepidum (strain ATCC 49652 / DSM 12025 / NBRC 103806 / TLS) OX=194439 GN=CT 1437 PE=4 SV=1
MPSMIDLSGYPDSSVFYGKIYVHFVNISVNTTLRDTMLISRKIEIDYGHTLPNSFTFCNQLHGHRGVIVATVEGPVIDRAGDAEEGMVIDFKFLRQIMDEHIHDQLDHGFAVWKEDKEDLEFILKRNTRVLVTDAPPTAECLARWAFNQISGKLPEGVILKNLRWYETPNNWADYTGG

SEQ ID NO: 19126 - protein, 149 aa, Chlorobaculum thiosulfatiphilum
  misc_feature (1)..(149): tr|A0A5C4S4R5|A0A5C4S4R5_CHLTI 6-carboxy-5,6,7,8-tetrah ydropterin synthase OS=Chlorobaculum thiosulfatiphilum OX=115852 GN=FGF66_08890 PE=3 SV=1
MNDILEKPRKIYVTRQIEFNAAHRLFNPELSDEENRRLYGKCSGAFGHGHNYLLEITLSGIIDRKTGYLFDLKELKKILEEQIVARFDHRHLNHEVSELAGHVPTTEILAVTVWEILESQLETITKKEVRLHEVKIHETGKNSVTYRGE

SEQ ID NO: 19127 - protein, 142 aa, Chlorobaculum thiosulfatiphilum
  misc_feature (1)..(142): tr|A0A5C4S5D0|A0A5C4S5D0_CHLTI 6-carboxytetrahydropteri n synthase OS=Chlorobaculum thiosulfatiphilum OX=115852 GN=FGF66_09030 PE=4 SV=1
MLISRKIEIDYGHTLPNSFSFCNQLHGHRGVIVATVEGPVIERHGDAEEGMVMDFKFLRQIMDEHIHDLLDHGFAVWKEDKEDLEFILRRNSRVLVTDEPPTAEYLAKWAFRQISGKLPEGVRLKNLRWYETPNNWADYDDE

SEQ ID NO: 19128 - protein, 149 aa, Chlorobi bacterium
  misc_feature (1)..(149): tr|A0A3M1LSL4|A0A3M1LSL4_9BACT 6-carboxy-5,6,7,8-tetrah ydropterin synthase OS=Chlorobi bacterium OX=2268192 GN =D6747_06160 PE=3 SV=1
MNTVRIAKEFRWEMGHRLPLHSGQCSNIHGHSYRLRIALDGIPDANGMVMDFYDLAALAQPIVDMLDHAFLCSSDDETLLRFFRDHPEFKVVTVPFPTTVENICRWIAEHLGQQLRRYQNVTRLHVRLHETATAFAECEVPLSTTPSAP

SEQ ID NO: 19129 - protein, 148 aa, Chlorobi bacterium
  misc_feature (1)..(148): tr|A0A4P5USZ2|A0A4P5USZ2_9BACT 6-carboxy-5,6,7,8-tetrah ydropterin synthase OS=Chlorobi bacterium OX=2268192 GN =LBMAG36_03540 PE=3 SV=1
MVYVTRKMHFSASHRLYNPTFEPEKNNLIFDKCNNLNGHGHNYTLEVTVKGVPDPETGYVIDLKYLRDLLDLHIVDKVDHKHLNYDVDFLQGIIPTAENIAVSFWRILDPKIVQGKLHSIKLFESDQNFVEYFGDPITIPIYTTVESN

SEQ ID NO: 19130 - protein, 142 aa, Chlorobium chlorochromatii
  misc_feature (1)..(142): tr|Q3ATI1|Q3ATI1_CHLCH 6-pyruvoyl tetrahydrobiopterin s ynthase, putative OS=Chlorobium chlorochromatii (strain CaD3) OX=340177 GN=Cag_0421 PE=4 SV=1
MRISRKIEIDYGHTLPNSFSFCNQLHGHRGVVVATVEGNIISQEQHSQQGMVMDFKFLKDIMVEQIHDKLDHGFAVWKHDTEDLEFITRRNTRVLITDEPPTAECLARWAFHQMQPHLPAGVTLQRIRWYETPNNWADYEGE

SEQ ID NO: 19131 - protein, 148 aa, Chlorobium chlorochromatii
  misc_feature (1)..(148): tr|Q3ATM9|Q3ATM9_CHLCH 6-carboxy-5,6,7,8-tetrahydropter in synthase OS=Chlorobium chlorochromatii (strain CaD3) OX=340177 GN=Cag_0373 PE=3 SV=1
MNDLLEKPRKIYVSRSIEFNAAHRLCNPTLTEEENCAIYGKCNNPHGHGHNYLLTITLSGTINRQTGFLFDLKALKAILEEEIVERFDHKHLNYDVPELSNCIPTTEILAVLIWDILAQRFTTINPAITLHEVHLYETGKNAVRYYGE

SEQ ID NO: 19132 - protein, 149 aa, Chlorobium ferrooxidans
  misc_feature (1)..(149): tr|Q0YQ67|Q0YQ67_9CHLB 6-carboxy-5,6,7,8-tetrahydropter in synthase OS=Chlorobium ferrooxidans DSM 13031 OX=377 431 GN=CferDRAFT_0344 PE=3 SV=1
MNELLEKPRRVYVSRKIEFNAAHRLFNPDFTDEENGEIYGKCSNKNGHGHNYLLEITLYGVVDPATGFLFDLKELKAILEEEIIERFDHRNLNLDVPELRECVPTTEVLAVLIWDILEQRLRNINNREIALHEVKIYETGKNSVRYLGE

SEQ ID NO: 19133 - protein, 171 aa, Chlorobium ferrooxidans
  misc_feature (1)..(171): tr|Q0YPI9|Q0YPI9_9CHLB Uncharacterized protein OS=Chlor obium ferrooxidans DSM 13031 OX=377431 GN=CferDRAFT_017 7 PE=4 SV=1
MGRFAKNHFFCVHFACYREKEKENLFTNPMRISRKIEIDYGHTLPNSFSFCNQLHGHRGVVVATVEGRLIDREGDGEEGMVMDFKFLKEVMVEHIHDKLDHGFAVWKHDHEDLDFILKRNSRVLVTEEPPTAECLAKWAFNQIRCNLPEGVALKQIRWYETPNNWAEYEGE

SEQ ID NO: 19134 - protein, 143 aa, Chlorobium limicola
  misc_feature (1)..(143): tr|B3EE06|B3EE06_CHLL2 Uncharacterized protein OS=Chlor obium limicola (strain DSM 245 / NBRC 103803 / 6330) OX =290315 GN=Clim_1666 PE=4 SV=1
MQISRKIEIDYGHTLPNSFSFCNQLHGHRGAIVATVEGPMINRKGEKEEGMVMDFKFLKDIMVRHIHDILDHGFAVWKDDREDLEFIMKRNSRVLVTDEPPTAECLAKWAFNQIKNHLPEGVILKQVRWYETPNNWADYEGIQ

SEQ ID NO: 19135 - protein, 142 aa, Chlorobium limicola
  misc_feature (1)..(142): tr|A0A101JPD5|A0A101JPD5_CHLLI 6-pyruvoyl tetrahydropte rin synthase OS=Chlorobium limicola OX=1092 GN=ASB62_03 770 PE=4 SV=1
MRISRKIEIDYGHTLPNSFSFCNQLHGHRGVVIATVEGPVIDRSGDGEEGMVMDFKFLKDIMIRYIHDVLDHGFAVWKHDREDLEFIMKRNTRILVTEEPPTAECLAKWAFNQILEKLPAGVEMKEVTWYETPNNWATFTGE

SEQ ID NO: 19136 - protein, 152 aa, Chlorobium phaeobacteroides
  misc_feature (1)..(152): tr|A1BF48|A1BF48_CHLPD Uncharacterized protein OS=Chlor obium phaeobacteroides (strain DSM 266) OX=290317 GN=Cp ha266_0977 PE=4 SV=1
MLHMNAPLQRKRKIYVTRTIGFNAAHRLFNPDFSDQENHKIYGKCSNEHGHGHNYELEITLYGTIDPQTGFLFDLKQLKSILEEEITERFDHKHLNFDVREMQDCVPTTELLAVVIWDILDLRLQQFNNREITLYEVKIYETGKNAVRYLGQ

SEQ ID NO: 19137 - protein, 143 aa, Chlorobium phaeobacteroides
  misc_feature (1)..(143): tr|A1BHI6|A1BHI6_CHLPD Uncharacterized protein OS=Chlor obium phaeobacteroides (strain DSM 266) OX=290317 GN=Cp ha266_1847 PE=4 SV=1
MRISRKIEIDYGHTLPNSFSFCNQLHGHRGVIVATVEGKMIERTGGDEEGMVMDFKFLKEIMVEHIHDKLDHGFAVWKEDHEDLEFILKRNSRVLITDEPPTAECLAKWAFNQLRHRLPEGVLLREVRWYETPNNWADYDGIQ

SEQ ID NO: 19138 - protein, 141 aa, Chlorobium phaeovibrioides
  misc_feature (1)..(141): tr|A4SFK9|A4SFK9_CHLPM Uncharacterized protein OS=Chlor obium phaeovibrioides (strain DSM 265 / 1930) OX=290318 GN=Cvib_1256 PE=4 SV=1
MQISRKIEIDYGHTLPNHYSFCNQLHGHRGVIVATVEGPVVAETGDSREGMVMDFKFLKDIMVERIHNKLDHGFAVWKDDHEDLEFILKRNTRVLVTDEPPTAEFLAKWAFGQIKNHLPEAVTLTNLRWYETPNNWADYNG

SEQ ID NO: 19139 - protein, 157 aa, Chlorobium phaeovibrioides
  misc_feature (1)..(157): tr|A0A3S0NIG4|A0A3S0NIG4_CHLPH 6-carboxytetrahydropteri n synthase OS=Chlorobium phaeovibrioides OX=1094 GN=EKD 02_08165 PE=4 SV=1
MKKKKSPPPPAPANRPRKLYVTRTIEFNAAHRLFNPEFSDEKNREIYGKCANAHGHGHNYLLEITLGGIMDPDTGFLFDLKELKGILEEEVMARFDHRHLNHDVPELNDLVPTTEVLAVLIWDILEQRFQNIDNREISLQAVKIHETGKNSVSYLGE

SEQ ID NO: 19140 - protein, 146 aa, Chlorobium sp.
  misc_feature (1)..(146): tr|A0A4R0QM39|A0A4R0QM39_9CHLB 6-carboxytetrahydropteri n synthase OS=Chlorobium sp. N1 OX=2491138 GN=E0L29_016 40 PE=4 SV=1
MRISRKIEIDYGHTLPNHFSFCNQLHGHRGVVVATVEGPVVEQRGDSQEGMVMDFKFLKEIMVKHVHDRLDHGFAVWKEDHEDLEFILKRNTRVLVTDEPPTAEYLAKWAFGEIRNHLPEGIALKNLRWYETPNNWADYDGQGEKE

SEQ ID NO: 19141 - protein, 149 aa, Chlorobium sp.
  misc_feature (1)..(149): tr|A0A533TR82|A0A533TR82_CHLSQ 6-carboxy-5,6,7,8-tetrah ydropterin synthase OS=Chlorobium sp. OX=1095 GN=FDX18_ 03795 PE=3 SV=1
MNDLLQKPRKIYVSRSIEFNAAHRLFNPQFSEAENLAIYGKCSNLYGHGHNYLLEITISGIVDRNTGFLFDLKELKTILEEEIIARFDHKHLNHDVPELQECVPTTEVLAVLIWDILEQRVRNINNGEFTLHEVKIYETGKNAVRYLGE

SEQ ID NO: 19142 - protein, 90 aa, Chloroflexi bacterium
  misc_feature (1)..(90): tr|A0A2M7K0C2|A0A2M7K0C2_9CHLR 6-carboxytetrahydropteri n synthase QueD (Fragment) OS=Chloroflexi bacterium CG_ 4_8_14_3_um_filter_45_15 OX=1973939 GN=queD PE=4 SV=1
MYQLFIEEHFDAAHRLRNYQGKCENLHGHRYKVIARVEGEKINNSGMVYDFAQLKYYLREILARFDHAYLNEVPPFDQIEPSCENLAASI

SEQ ID NO: 19143 - protein, 126 aa, Chloroflexi bacterium
  misc_feature (1)..(126): tr|A0A1F8PEK0|A0A1F8PEK0_9CHLR 6-pyruvoyl tetrahydropte rin synthase OS=Chloroflexi bacterium RBG_16_51_16 OX=1 797644 GN=A2Y54_07735 PE=4 SV=1
MYTLALRREFIARHFLIGGDWGPENFPNSHHYVLELRLKGPELDEHGYLCDLVEVEKWLNEKVAYFSEKMLNEMPEFHEINPSLEHFARILCTSLAEQIKSTAITGVTVILWENTSAWASFEINRY

SEQ ID NO: 19144 - protein, 130 aa, Chloroflexus aggregans
  misc_feature (1)..(130): tr|B8G7W6|B8G7W6_CHLAD Putative 6-pyruvoyl tetrahydropt erin synthase OS=Chloroflexus aggregans (strain MD-66 / DSM 9485) OX=326427 GN=Cagg_1237 PE=4 SV=1
MYEIGVSAQFEAAHRLEGNFGPATRMHGHTYRLEAIVTGERLQPDGTLVDMSQLQAAVQRVVADLHYRDLGTVEGLRDINTTAEHVAYYCWRRIAAALSGAGLTTLTVRIWENPQVYAAYSETLVSSDGT

SEQ ID NO: 19145 - protein, 130 aa, Chloroflexus aggregans
  misc_feature (1)..(130): tr|A0A2J6XB74|A0A2J6XB74_9CHLR 6-carboxytetrahydropteri n synthase OS=Chloroflexus aggregans OX=152260 GN=C0184 _03070 PE=4 SV=1
MYEVCVSAQFEAAHRLEGNFGPATRMHGHTYRLEAIVTGERLQPDGTLFDISQLQAAVQAIVADLHYRDLGTVEGLRDVNTTAEQVAYYCWRRIAAALSGTDLTTLAVRIWENPQVYAAYSETLASSAGT

SEQ ID NO: 19146 - protein, 126 aa, Chloroflexus aurantiacus
  misc_feature (1)..(126): tr|A9WC20|A9WC20_CHLAA 6-carboxy-5,6,7,8-tetrahydropter in synthase OS=Chloroflexus aurantiacus (strain ATCC 29 366 / DSM 635 / J-10-fl) OX=324602 GN=Caur_0159 PE=3 SV =1
MYEVGVIAQFEAAHRLEGNFGPATRMHGHTYRLEAIVSGERLQADGTLFDITRLQEAVNAIVADLHYRDLGTVAGLENVNTTAENVARYCWDRIAAAIRGVGLMTLTVRIWENPQAFASYQSRLEG

SEQ ID NO: 19147 - protein, 274 aa, Chloroflexus aurantiacus
  misc_feature (1)..(274): tr|A9WIW9|A9WIW9_CHLAA Uncharacterized protein OS=Chlor oflexus aurantiacus (strain ATCC 29366 / DSM 635 / J-10 -fl) OX=324602 GN=Caur_2640 PE=4 SV=1
MVVATRRFEFSAAHRYWRDDWSAEENERVFGPYTSPYGHGHNYTLDVSITGELDERTGMVMNMTELKAIVNEVLEEFDHKHLNYDTPYFRDQVPTTENLVRVLWRLIAARLPAHARLKHLRLYEQPDLWAEYDGVGETQFARLYTFAAAHRLHAPALSDEENLAIYGKCNNPNGHGHNYTLEVTVQGPIDPATGMLVDLEWLDRTVHSVIDRLHLRHLDREIPAFADRPSTAENIIVYLWNELAPLLEGRLALLRLWETRKNIFSYAGPSVIPA

SEQ ID NO: 19148 - protein, 125 aa, Chloroflexus islandicus
  misc_feature (1)..(125): tr|A0A178MBJ9|A0A178MBJ9_9CHLR 6-pyruvoyl tetrahydropte rin synthase OS=Chloroflexus islandicus OX=1707952 GN=A 6A03_13705 PE=4 SV=1
MYEIGVNAQFEAAHRLEGNFGPATRMHGHTYRLEAIVTGPHLQPDGTLFDITRLHEAVNAIVADLHYRDLGTVEGLHNVNTTAEHVARYCWERIAAALRGSGLTTLTVRIWENPQAYAAYGSALE

SEQ ID NO: 19149 - protein, 274 aa, Chloroflexus islandicus
  misc_feature (1)..(274): tr|A0A178MI46|A0A178MI46_9CHLR 6-pyruvoyl tetrahydropte rin synthase OS=Chloroflexus islandicus OX=1707952 GN=A 6A03_08565 PE=4 SV=1
MVIATRRFEFSAAHRYWRDDWSAAENERVFGPYTSPYGHGHNYILDVSITGQLDERTGMVMNMTELKAIVNEVLEEFDHKHLNFDTPYFRDQVPTTENFVRVLWRLIAARLPAHARLAHLRLYEQPDLWADYDGVGETQFSRLYMFASAHRLHAPALNDAENREIYGKCNNPNGHGHNYTLEVTVQGEIDPATGMLVDMAWLDQTVHSVIDPLHLHHLDNEIAAFADRPSTAENIIVYLWNELAPRLAGRLALLRLWETRKNIFSYAGPVSVPA

SEQ ID NO: 19150 - protein, 288 aa, Chlorogloea sp.
  misc_feature (1)..(288): tr|A0A2T1ES11|A0A2T1ES11_9CHRO 6-pyruvoyl tetrahydropte rin synthase OS=Chlorogloea sp. CCALA 695 OX=2107693 GN =C7B70_01200 PE=4 SV=1
MQCIVNRRAQFSASHRYWLPELSEAENNQLFGLCTRNPGHGHNYVLYVAISGELDSYGMVMNLSEVKQVIKREITDYLDYSYLNDAWSEFQQTLPTTENIARIIWQKLESHLPLVNIQLFEHPQLWADYQGNGMEAYLTISTHFSAAHRLAHPDLSYDENVKIYGKCARPNGHGHNYHLEVTVKGEVNPRTGMLVDLGALQSAIDEQVIEPFDHTFLNKDIAYFNDVVPTAENIAVRIQDLLRLPIQELGAQLHKIKLIESPNNSCEVYCVQPQTKVSSSSDAVLTSV

SEQ ID NO: 19151 - protein, 140 aa, Chlorogloeopsis fritschii
  misc_feature (1)..(140): tr|A0A433N6D4|A0A433N6D4_CHLFR 6-carboxy-5,6,7,8-tetrah ydropterin synthase OS=Chlorogloeopsis fritschii PCC 69 12 OX=211165 GN=PCC6912_39980 PE=3 SV=1
MTWLLGKEFRFEAAHYLPNHDGKCARLHGHSWKGVVYVIGTTLIESGTKEGMLIDYSDVKGAIAPLLENYLDHHYLNETTGLEVPTSERLAKWIYEKLEYTLPGLWGVRIDETCTSTCLYTKSSNPALILSDGFTMGGIA

SEQ ID NO: 19152 - protein, 290 aa, Chlorogloeopsis fritschii
  misc_feature (1)..(290): tr|A0A3S1A035|A0A3S1A035_CHLFR 6-pyruvoyltetrahydropter in synthase OS=Chlorogloeopsis fritschii PCC 6912 OX=21 1165 GN=PCC6912_42410 PE=4 SV=1
MQCVVNRRAQFSASHRYWLPELSEAENVEKFGACSRFPGHGHNYVLFVSLVGELDKYGMVLNLSDVKQVIKQEVTSQLDFSYLNDVWAEFQQTLPTTENIARAIWQRLAPHLPLVRIQLFENSELWADYMGNGMEAYLTVSTHFSAAHRLAHPNLSNEENFEIYGKCARPNGHGHNYHLEVTVKGEIDPRTGMIVDLGALNQVIEDYVVEPFDHTFLNKDIPYFAEVVPTAENIALHISNLLRSPVQDLGAKLFKVKLIESPNNSCEIYCTEPESNIVSAAQNQPALIGL

SEQ ID NO: 19153 - protein, 142 aa, Chloroherpeton thalassium
  misc_feature (1)..(142): tr|B3QY96|B3QY96_CHLT3 Uncharacterized protein OS=Chlor oherpeton thalassium (strain ATCC 35110 / GB-78) OX=517 418 GN=Ctha_2613 PE=4 SV=1
MFRISRKIEIDYGHTLPKHYGFCNQLHGHRGVIVATVEGELNQAQNASDQGMVIDFKFLSHILKTKIHDVLDHGFAVWRDSKEDYEMVTKRNTKVLATELPPTAEVLAKWAFKQIESDLPEGVRLVNLRWYETPNNWADYSG

SEQ ID NO: 19154 - protein, 153 aa, Chloroherpeton thalassium
  misc_feature (1)..(153): tr|B3QUQ1|B3QUQ1_CHLT3 Uncharacterized protein OS=Chlor oherpeton thalassium (strain ATCC 35110 / GB-78) OX=517 418 GN=Ctha_0486 PE=4 SV=1
MNTEFNRILKEKHTVFVTRKVHFSAAHRLFNPEFSDAENELIYDRCNNIYGHGHNYELEVTLKGPVDKATGYVFDLKKLDKILSEEILSKVDHKHLNFDVEMLKDMIPSAEVLSIVFWNAIQNRLSELGYTQVALYEVKLFESERNFVRYRGD

SEQ ID NO: 19155 - protein, 290 aa, Chondrocystis sp.
  misc_feature (1)..(290): tr|A0A1Z4RTF4|A0A1Z4RTF4_9CHRO Uncharacterized protein OS=Chondrocystis sp. NIES-4102 OX=2005460 GN=NIES4102_2 7750 PE=4 SV=1
MKCTINRRAQFSASHRYWLPDIDEAENQRLFGACSRFPGHGHNYVLYVSLAGELDQYGMVENLSWVKQVIKKEVTSQLNYSHLNDTWSEFQQTLPTTENIARVIWQKLAPYLPLVNIQLFETPELWADYQGNNMEATLTIKTHFSAAHRLAIPSLSFEENQEIYGKCARPNGHGHNYHLEVTVAGNIDERTGMLVDLGALQQVIDEYVVEPFDHTFLNKDIPYFAEVVPTAENIAVRIADLLRSPIKELGAELDKIKLIESPNNSCEINCRVYQATSNTSATQEPAMISQ

SEQ ID NO: 19156 - protein, 120 aa, Chondromyces apiculatus
  misc_feature (1)..(120): tr|A0A017SZA8|A0A017SZA8_9DELT 6-carboxy-5,6,7,8-tetrah ydropterin synthase OS=Chondromyces apiculatus DSM 436 OX=1192034 GN=CAP_7263 PE=3 SV=1
MNTRLVHEFRFEAAHRLPKVPRGHRCERLHGHSFRVEIAIEGRVREETGWVIDFYDLEKAWAPLHEKLDHHYLNEVPGLENPTSEIIAHWIWEQLTPSLPGLCRVTVFETCEARCEYEGG

SEQ ID NO: 19157 - protein, 120 aa, Chondromyces crocatus
  misc_feature (1)..(120): tr|A0A0K1E600|A0A0K1E600_CHOCO 6-carboxy-5,6,7,8-tetrah ydropterin synthase OS=Chondromyces crocatus OX=52 GN=C MC5_001100 PE=3 SV=1
MNIRLVHEFRFEAAHRLPRVPPGHKCERLHGHSFRAEIAIRGPVREETGWVVDFADLEAAWAPLHAQLDHNYLNEIPGLENPTSEILSRWIWDRLSPALPGLCRVTVYETCEARCEYEGD

SEQ ID NO: 19158 - protein, 368 aa, Chromatiaceae bacterium
  misc_feature (1)..(368): tr|A0A3D4RW30|A0A3D4RW30_9GAMM 6-pyruvoyl tetrahydropte rin synthase OS=Chromatiaceae bacterium OX=2049432 GN=D IW77_07305 PE=4 SV=1
MSERLFHVAAAPFEAARRVLTVPDQHPAHRLHGHSFVARLRAELPPGWAAFAGGETDALKAALDHCIATLDYSDLNQHLAIPTDENLARWVRRCLHVPGIKSVGIQSTRDQGANLDADEHASIWRRFRFEAAHQLPNVRRGHPCGRMHGHGFEVVLHAKQAQSDADRGIDLDALDVLWEPIQEELQYACLNDIPGLENPTSEMIAGWLWRRLKPQLPALCWITVYETITAGCHYDGTHYRIWKERRFESALRLMQAPQGDRRRRLHGHSYLLRLHLSAPLDQVLGWTVDYGDVKQCFEPVYKQLDHHLLNELPGLDRSDPASLARWMRETIGARLPRLDRIDLHQTPGCGAVLCWGASGPADAALVEG

SEQ ID NO: 19159 - protein, 137 aa, Chromatiaceae bacterium
  misc_feature (1)..(137): tr|A0A3D4RZJ5|A0A3D4RZJ5_9GAMM 6-carboxytetrahydropteri n synthase OS=Chromatiaceae bacterium OX=2049432 GN=DIW 77_18745 PE=4 SV=1
MYSLCVRDHIMIAHSFQGQIFGPAQRLHGATFIVDCEFRREQLDADGLVVDIGKASEVLHRLLDQLNYRNLDEDPEFAGQNTTTEFMARAIFERMAALIAAGELGPGAVGLSSLRVVLSESHLAWAAYEAPLNRAAG

SEQ ID NO: 19160 - protein, 127 aa, Chromatiales bacterium
  misc_feature (1)..(127): tr|A0A257SYC9|A0A257SYC9_9GAMM 6-carboxy-5,6,7,8-tetrah ydropterin synthase OS=Chromatiales bacterium 21-64-14 OX=1970504 GN=B7Z66_00770 PE=3 SV=1
MAAPYTLRILTDFASAHTLQGYPGACARMHGHNWKLEVEVEATGLDDMGMGVDFKIIKGAARELSDQLDHRYLNEIEPFDRINPTAENLAAWFYQGLSGKLNDGRVRVSAVTLWETDRACVRYAEER

SEQ ID NO: 19161 - protein, 83 aa, Chromatiales bacterium
  misc_feature (1)..(83): tr|A0A524K454|A0A524K454_9GAMM 6-pyruvoyl tetrahydropte rin synthase family protein (Fragment) OS=Chromatiales bacterium OX=2026725 GN=E4H19_14905 PE=4 SV=1
MEIFKEFIFEAAHRLPNVPPGHKCARLHGHSWRGAIYIRGPVDPHTGWIMDFGEIKQRFAPIYDMLDHHYLNDVPGLENPTSE

SEQ ID NO: 19162 - protein, 167 aa, Chromatium okenii
  misc_feature (1)..(167): tr|A0A2S7XU40|A0A2S7XU40_9GAMM 6-pyruvoyl tetrahydropte rin synthase OS=Chromatium okenii OX=61644 GN=CXB77_029 20 PE=4 SV=1
MPNQKPLIRIEISKEYLNFSAGHFTLFSATERENLHGHNFQVQAAVTTTVGADGLAFDYVLLKRVLKTLCDQWDERVLLPQQSPYLRLEQRDGMLLAHFADEQIPFLHRDVLTLPLRNVTIEELAALLLARLREHPDLASRDLRAIELGVSSGLGQWAFSSWEQQTA

SEQ ID NO: 19163 - protein, 167 aa, Chromatium okenii
  misc_feature (1)..(167): tr|A0A2S7XQA9|A0A2S7XQA9_9GAMM 6-pyruvoyl tetrahydropte rin synthase OS=Chromatium okenii OX=61644 GN=CXB77_083 95 PE=4 SV=1
MPNQKPLIRIEISKEYLNFSAGHFTLFSATERENLHGHNFQVQAAVTTTVGADGLAFDYVLLKRVLKTLCDQLDERVLLPQQSPYLRLEQRDGMLLAHFADEQIPFLHRDVLALPLRNVTIEELSALLLARLREHPDLAAHEICAIELGVSSGLGQWAFSSWEQQTA

SEQ ID NO: 19164 - protein, 118 aa, Chromatocurvus halotolerans
  misc_feature (1)..(118): tr|A0A4R2L3D7|A0A4R2L3D7_9GAMM 6-carboxy-5,6,7,8-tetrah ydropterin synthase OS=Chromatocurvus halotolerans OX=1 132028 GN=EV688_101131 PE=3 SV=1
MDIYKDFHFEAAHRLPNVPEGHKCARLHGHSFHVRITVSGEAPEPAGWVMDFADLKAGFRPLLEQLDHYYLNDIPGLENPTSENLCRWIWQRLQPALPALSCVEIRETCTSGCRYRGE

SEQ ID NO: 19165 - protein, 164 aa, Chromatocurvus halotolerans
  misc_feature (1)..(164): tr|A0A4R2KQQ8|A0A4R2KQQ8_9GAMM 6-pyruvoyltetrahydropter in/6-carboxytetrahydropterin synthase OS=Chromatocurvus halotolerans OX=1132028 GN=EV688_106145 PE=4 SV=1
MNNQEPQLATLYIDKESHKFSAAHYTIFSATERERLHGHNYSVSAKIVAPMGNNGFAADYNVYKNRIKRLCDELDEYMILPEHSPHQTLEDGGTHYRVAFANDTLHFLKSDTLVLPIVNATVEEFSRYLLARVIADSRGEDLREVQICVASGPGQKGCTTWTAG

SEQ ID NO: 19166 - protein, 160 aa, Chromatocurvus sp.
  misc_feature (1)..(160): tr|A0A2N5Y0N6|A0A2N5Y0N6_9GAMM 6-pyruvoyl tetrahydropte rin synthase OS=Chromatocurvus sp. F02 OX=1905677 GN=CW I75_12525 PE=4 SV=1
MERLTTLYIDKESHKFSAAHYTIFSAYERERLHGHNYSVSARIVAPMGDNGFAADYNVYKRRLKALCDALDEYMVLAEDSPYQRIEDLGHAYRVYFAEDEMFFLKSDTRVLPIRNATVEEFSGYLLQQLLLVSEGDDLREIELCVASGPGQKGCASWRKP

SEQ ID NO: 19167 - protein, 119 aa, Chromatocurvus sp.
  misc_feature (1)..(119): tr|A0A2N5Y336|A0A2N5Y336_9GAMM 6-carboxy-5,6,7,8-tetrah ydropterin synthase OS=Chromatocurvus sp. F02 OX=190567 7 GN=queD PE=3 SV=1
MDIYKEFHFEAAHRLPNVPPGHKCARLHGHSFQVRLTVSGEAREPSGWVMDFGDLKRAFQPVLDRLDHYYLNDIPGLENPTSENIARWIWQQLASALPQLAQVEIRETCTSGCIYRGQD

SEQ ID NO: 19168 - protein, 339 aa, Chromobacterium amazonense
  misc_feature (1)..(339): tr|A0A2S9X2Y6|A0A2S9X2Y6_9NEIS 6-pyruvoyl tetrahydrobio pterin synthase OS=Chromobacterium amazonense OX=138280 3 GN=BUE93_15595 PE=4 SV=1
MHASYLLAGAGFEAARQLPAAAGKASRPHGHSFRVLVRSESQCGDAAALESAVHGALSPLDYTDLNAQLADSGDLALARHIAQALPHPAAIKLQGAPDRGVTVDGPHAFCWLNASFEAAHHLPHVPVGHKCGRLHGHGFGVRLVADAARCGIQELEQAWAPLFHRLNHRYLNDIAGLDNPTSEVLALWLHQQLKPTMPGLAWVEVRETHTAGSQFDGQRFRIWKEQRFESAMPFDEAGNYTGHSYLVRLMLAGDIDRAMGWLLDFGDVKDRFKPIYRQLDHNPLDKLAGLRRHDNAAVAEWIHAQLSPLVPELDRIDLMESERAGVSLHFHQDMRWPLL

SEQ ID NO: 19169 - protein, 339 aa, Chromobacterium haemolyticum
  misc_feature (1)..(339): tr|A0A2T5NUB9|A0A2T5NUB9_9NEIS 6-pyruvoyl tetrahydrobio pterin synthase OS=Chromobacterium haemolyticum OX=3949 35 GN=DBB33_06355 PE=4 SV=1
MHTSNLIAGARFEAARQVNGASDLTARPHGHSFRVIARADAQYPGHEQLQAALDAAVAPLDYADLNRQLAQCDDLALAAHLRAALPCPATLSLQSSPQRGVALDGDTALNWIQVQFEAAHQLPHVPAGHKCGRLHGHGFGVRLAADARLSGHPRLEAAWKPLFLELNHRYLNDIAGLDNPTSEVLAQWLHQRLADTLPGLAWVEVRETHSAGSQFDGQRFRIWKEQRFESARPFDDKGAYTGHSYLVRLMLSGELDQAMGWLLDFGDVKDRFKPLYRQLDHNPLDQLSGVRGGDSVSVAEWVHAHLSPLVPELARIDLMQQELRGVSLMFRDAMRWPLL

SEQ ID NO: 19170 - protein, 339 aa, Chromobacterium haemolyticum
  misc_feature (1)..(339): tr|A0A1W0CG17|A0A1W0CG17_9NEIS 6-pyruvoyl tetrahydrobio pterin synthase OS=Chromobacterium haemolyticum OX=3949 35 GN=B0T45_19915 PE=4 SV=1
MHTSNLIAGARFEAARQVNGASDLTARPHGHSFRVIARADAQYPGHEQLQAALDAAVAPLDYADLNRQLTQCDDLALAAHLRTALPCPATLSLQSSPQRGVALDGDTALNWIQVQFEAAHQLPHVPAGHKCGRLHGHGFGVRLAADARLSGHPRLEAAWKPLFLELNHRYLNDIAGLDNPTSEVLAQWLHQRLADTLPGLAWVEVRETHSAGSQFDGQRFRIWKEQRFESARPFDDKGAYTGHSYLVRLILSGELDQAMGWLLDFGDVKDRFKPLYRQLDHNPLDQLSGVRGGDSVSVAEWVHAHLSPLVPELARIDLMEQELRGVSLMFRDAMRWPLL

SEQ ID NO: 19171 - protein, 339 aa, Chromobacterium sp.
  misc_feature (1)..(339): tr|A0A2T5NKQ5|A0A2T5NKQ5_9NEIS 6-pyruvoyl tetrahydrobio pterin synthase OS=Chromobacterium sp. Panama OX=216182 6 GN=DB032_14345 PE=4 SV=1
MHTSSLIAGACFEAARQVSGASDLTARPHGHSFRVIARADAQYPAHERLQAALDAAVAPLDYADLNRQLSQCDDLALAAHLAAALPCPAALSLQSSPQRGVTLDGDLALNWIQVQFEAAHQLPHVPAGHKCGRLHGHGFGVRLAADARLSGHPRLEAAWRPLFQELNHRYLNDIAGLDNPTSEVLAQWLHQRLADTLPGLAWVEVRETHSAGSQFDGRRFRIWKEQRFESARPFNDQGAYTGHSYLVRLMLSGELDQAMGWLLDFGDVKDRFKPIYRQLDHNPLDRLSGVRGGDSASVAEWVHAHLSPLVPELARIDLMEQELRGVSLMFRDDMRWPLL

SEQ ID NO: 19172 - protein, 339 aa, Chromobacterium sp.
  misc_feature (1)..(339): tr|A0A0J6KNK0|A0A0J6KNK0_9NEIS 6-pyruvoyl tetrahydrobio pterin synthase OS=Chromobacterium sp. LK1 OX=1628193 G N=VI26_00520 PE=4 SV=1
MHTSSLISGARFEAARQVAGAPDRTARPHGHSFRVIARADAQYPGHERLQAALDAAVAPLDYADLNRQLAQCDDLALAAHLRAALPCPAALSLQSSPQRGVTLDGDIAFNWIQVQFEAAHQLPHVPAGHKCGRLHGHGFGVRLAADAGLSDHARLEAAWLPLFGELNHRYLNDIAGLDNPTSEVLAQWLHQRLADTLPGLAWVEVRETHSAGSQFDGQRFRIWKEQRFESARPFNDQGAYTGHSYLVRLMLTGKLDQTMGWLLDFGDVKDRFKPIYRQLDHNPLDRLSGVRGGDSASVAEWVHAHLAPLVPELARIDLMEQEQRGVSLMFHDDMRWPLL

SEQ ID NO: 19173 - protein, 339 aa, Chromobacterium sphagni
  misc_feature (1)..(339): tr|A0A1S1X160|A0A1S1X160_9NEIS 6-pyruvoyl tetrahydrobio pterin synthase OS=Chromobacterium sphagni OX=1903179 G N=BI347_06160 PE=4 SV=1
MHACYMMADAGFEAARRLHAAPGREARLHGHSFRLSARCEAQYTDQAALQAALQAAVAPLDYADLNAVLAACDDLALARHVAHALPHPAAIKLQGAPDRGVMLDGARTLVWLNVSFEAAHYLPHVPAGHKCGRLHGHGFGVRLAADAASCNQHDLARAWAPLHRRLDQHYLNDIAGLDNPTSEVLAHWLHQQLQGELPGLAWVEVRETHSAGSQFDGQRFRIWKEQRFESAMPFDAAGNYTGHSYLVRLMLAGDIDRTMGWLLDFGDVKDRFKPIYRQLDHNPLDKLSGLRSRDNAAVAEWIHAQLSPLVPELARIDLMENEHAGVSLHFNQDMRWPLL

SEQ ID NO: 19174 - protein, 339 aa, Chromobacterium vaccinii
  misc_feature (1)..(339): tr|A0A2L2BFU4|A0A2L2BFU4_9NEIS 6-pyruvoyl tetrahydrobio pterin synthase OS=Chromobacterium vaccinii OX=1108595 GN=CFN79_22060 PE=4 SV=1
MHASYLIAGAGFEAARRLPADHGQAARPHGHSFRLSVRSDAQNTSQEALQAAVQAAVAPLDYTDLNAALAASDDLSLARHIADALPHPAAIQLRGAPDRGVMLDGARALSWINSSFEAAHYLPHVPPGHKCGRLHGHGFGVRIVADAALSGQHDLARAWATLHGRLNHRYLNDIPGLDNPTSEVLAQWLHQQLRDAVPGLAWVEVRETHSAGSQFDGKTFRIWKEQRFESAMPFDAEGNYTGHSYLVRLMLSGGIDRTMGWLLDFGDVKDRFKPIYRQLDHNPLDKLAGLRRADNAAVAEWIHAQLAPLVPELSRIDLMESDDAGVSLHFRQDMRWPLL

SEQ ID NO: 19175 - protein, 339 aa, Chromobacterium vaccinii
  misc_feature (1)..(339): tr|A0A1D9LFH4|A0A1D9LFH4_9NEIS 6-pyruvoyl tetrahydrobio pterin synthase OS=Chromobacterium vaccinii OX=1108595 GN=BKX93_08300 PE=4 SV=1
MHASYLIAVAGFEAARRLPADHGQAARPHGHSFRLSVRSDAQNTSQDALQAAVQAAVAPLDYTDLNAALAASDDLSLARHIADTLPHPAAIQLRGAPDRGVMLDDARALSWINSSFEAAHYLPHVPPGHKCGRLHGHGFGVRIVADAALSGQHDLARAWATLHGRLNHRYLNDIPGLDNPTSEVLAQWLHQQLRDAVPGLAWVEVRETHSAGSQFDGKTFRIWKEQRFESAMPFDADGHYTGHSYLVRLMLSGGIDRAMGWLLDFGDVKDRFKPIYRQLDHNPLDKLAGLRRADNAAVAEWIHAQLAPLVPELSRIDLMESDDAGVSLHFRQDMRWPLL

SEQ ID NO: 19176 - protein, 239 aa, Chromobacterium violaceum
  misc_feature (1)..(239): tr|Q7NSB8|Q7NSB8_CHRVO Probable 6-pyruvoyltetrahydrobio pterin synthase OS=Chromobacterium violaceum (strain AT CC 12472 / DSM 30191 / JCM 1249 / NBRC 12614 / NCIMB 91 31 / NCTC 9757) OX=243365 GN=CV_3508 PE=4 SV=1
MMLDGPRALSWIASSFEAAHHLPHVPPGHKCGRLHGHGFGVRIVADAAQCGQRELARAWAPLHRRLNHHYLNDIAGLDNPTSEVLAQWLHQQLSDAVPGLAWVEVRETHSAGSQFDGKTFRIWKEQRFESAIPFDADGNYTGHSYLVRLMLSGGIDRTMGWLLDFGDVKDRFKPIYRQLDHNPLDKLAGVRGADSAAVAEWIHAQLSPLVPELSRIDLMESDDAGVSLHFRQDMRWPLL

SEQ ID NO: 19177 - protein, 339 aa, Chromobacterium violaceum
  misc_feature (1)..(339): tr|A0A381FVT6|A0A381FVT6_CHRVL 6-carboxy-5,6,7,8-tetrah ydropterin synthase OS=Chromobacterium violaceum OX=536 GN=queD PE=4 SV=1
MHASYLIAGAGFEAARRLPADHGQAARPHGHSFRLSVRSDAQNTSQDALQAAVQAAVAPLDYTDLNAALAASDDLSLARHIADTLPHPAAIQLRGAPDRGVMLDDARALSWINSSFEAAHYLPHVPPGHKCGRLHGHGFGVRIVADAALSGQHDLARAWATLHGRLNHRYLNDIPGLDNPTSEVLAQWLHQQLRDAVPGLAWVEVRETHSAGSQFDGKTFRIWKEQRFESAMPFDADGHYTGHSYLVRLMLSGGIDRAMGWLLDFGDVKDRFKPIYRQLDHNPLDKLAGLRRADNAAVAEWIHAQLAPLVPELSRIDLMESDDAGVSLHFRQDMRWPLL

SEQ ID NO: 19178 - protein, 279 aa, Chromohalobacter canadensis
  misc_feature (1)..(279): tr|A0A285VZI0|A0A285VZI0_9GAMM 6-pyruvoyl tetrahydropte rin synthase OS=Chromohalobacter canadensis OX=141389 G N=SAMN05421509_11256 PE=4 SV=1
MTLFVNHLTHIDASLWSPTHGLMGASWHVDAELDGELGSDGMLFDFGEVKPWIKSRLDEGLDHTLLVPTEAPGIQVFDCAEGLCLRTQFPYPMELRGPRQSFTLLPWSEITPEQLATHLSTELSRRPPAKVEAIRLRLRDEDIETAAYTYSHGLKHHVGNCQRIAHGHRSRLHIWRNGQRDPELERQWAQTLDACYLIHDEDLAPQVDESLDTLSVAYRADQGRFHLTLPRERCHLLSTPTTIEHIAAWLAEKIALETHSRIRVQAFEGIDKGAIAEAS

SEQ ID NO: 19179 - protein, 132 aa, Chromohalobacter canadensis
  misc_feature (1)..(132): tr|A0A285VJH3|A0A285VJH3_9GAMM 6-pyruvoyl-tetrahydropte rin synthase OS=Chromohalobacter canadensis OX=141389 G N=SAMN05421509_103260 PE=4 SV=1
MFSLTVRDHFMIAHSFNGEIFGPAQRLHGATYVVDVAFKRPELDRDDLIVDIGLASQTLSRVLGKLNFNNLDEVPEFQGRNTTTEFMAKVIFERLAHAIRNGELGETGHGLTGLGVTLHESHIAWASYEGAL

SEQ ID NO: 19180 - protein, 279 aa, Chromohalobacter japonicus
  misc_feature (1)..(279): tr|A0A1Q8TB13|A0A1Q8TB13_9GAMM 6-pyruvoyl tetrahydropte rin synthase-related protein OS=Chromohalobacter japoni cus OX=223900 GN=BTW10_12315 PE=4 SV=1
MTLFVNHLTHIDASLWSPEHGLTGVSWHVDAELEGELGPDGMLFDFGEVKPWIKSRLDEGLDHTLLVPTQAPGIQVFDCAEGLCLRTQCPYPMELRGPRQSFTLLPWPEITTEQVATHLSTELSRRPPAKVETIRLRLRDEDIETAAYTYSHGLKHHSGNCQRIAHGHRSRLHIWRNGRRDPELESQWAQALDACYLIHDEDLAPQADESLDTLSVAYRADQGRFHLTLPRERCHLLSTPTTIEHIAAWLAEKIAQETHSRIRVQAFEGIDKGAIAESA

SEQ ID NO: 19181 - protein, 132 aa, Chromohalobacter japonicus
  misc_feature (1)..(132): tr|A0A1Q8TBC0|A0A1Q8TBC0_9GAMM Uncharacterized protein OS=Chromohalobacter japonicus OX=223900 GN=BTW10_11900 PE=4 SV=1
MFTLTVRDHFMIAHSFNGEIFGPAQRLHGATYVVDVAFKRPELDRDDLVVDIGLASQTLSRVLSELNFNNLDDVPEFQGHNTTTEFMAKVVFERLAHAIRQGELGETGHGLTALGVTLHESHIAWANYEGAI

SEQ ID NO: 19182 - protein, 279 aa, Chromohalobacter marismortui
  misc_feature (1)..(279): tr|A0A4R7NQ30|A0A4R7NQ30_9GAMM 6-pyruvoyl tetrahydropte rin synthase-like protein OS=Chromohalobacter marismort ui OX=42055 GN=C8E00_103220 PE=4 SV=1
MTLFVNHLTHIDASVWSPTHGLMGASWHVDAELDGELGPDGMLFDFGEVKPWIKARLDSGLDHTLLVPTQAPGLQVFDCAEGLCLRTQLPYHMELRGPRQSFTLLPWSDITVADVAAHLSTELSRRPPAQVETIRLRLREEEIETAAYSYSHGLKHHAGNCQRIAHGHRSRLHIWRDGRRAPELERQWAQALDASYLIHEEDLAPQADECRETLSVAYSADQGRFHLTLPRERCHLLATPTTIEHIAAWLADKIARETHGRIRVQAFEGIDKGAIAESS

SEQ ID NO: 19183 - protein, 132 aa, Chromohalobacter marismortui
  misc_feature (1)..(132): tr|A0A4R7NVE7|A0A4R7NVE7_9GAMM 6-pyruvoyl-tetrahydropte rin synthase OS=Chromohalobacter marismortui OX=42055 G N=C8E00_10176 PE=4 SV=1
MFSLTVRDHFMIAHSFNGEIFGPAQRLHGATYVVDVAFKRPELDHDDLIVDIGLASQTLSRVLSELNFNNLDDVPEFQGRNTTTEFMAKVVFERLAHAIRQGELGETGHGLTALDVTLHESHIAWAKYEGAL

SEQ ID NO: 19184 - protein, 289 aa, Chromohalobacter salexigens
  misc_feature (1)..(289): tr|A0A317QXM9|A0A317QXM9_CHRSL 6-pyruvoyl-tetrahydropte rin synthase OS=Chromohalobacter salexigens OX=158080 G N=DFO74_11262 PE=4 SV=1
MTLFVNHLTHIDASLWSPEHGLTGVSWHVDAELDGELGPDGMLFDFGEVKPWIKSRLDAGLDHTLLVPTEAAGIQVVDCAEGLCLRTQFPYRMEVRGPRQSFTLLPWPEITADRLAVHLSSELSRRPPAKVDTIRLRLRDEEIETAAYTYSHGLKHHTGNCQRIAHGHRSRLHIWRDGRRDAALEAQWAQALDASYLIHDEDLDTPFDEQPLDELSVAYQAAQGRFSLKLPKQRCHLLSTPTTIEHIAAWLADTIARDTGSRIRVQAFEGIDKGAMADAMPPATTHDDA

SEQ ID NO: 19185 - protein, 132 aa, Chromohalobacter salexigens
  misc_feature (1)..(132): tr|A0A317QVE4|A0A317QVE4_CHRSL 6-pyruvoyl-tetrahydropte rin synthase OS=Chromohalobacter salexigens OX=158080 G N=B4O83_06805 PE=4 SV=1
MFSLTVRDHFMIAHSFNGDIFGPAQRLHGATYVVDVAFKRPELDRDDLIVDIGLASQTLSRVLGELNFNNLDEIPEFQGRNTTTEFMAKVIFERLAHAIRDGELGETGHGLTGLGVTLHESHIAWASYEGAL

SEQ ID NO: 19186 - protein, 288 aa, Chroococcales cyanobacterium
  misc_feature (1)..(288): tr|A0A3N5J589|A0A3N5J589_9CHRO 6-carboxytetrahydropteri n synthase OS=Chroococcales cyanobacterium metabat2.561 OX=2485785 GN=EHM73_03275 PE=4 SV=1
MDCIINRRARFSASHRYYLPEWDEAENQRLFGLSSRFPGHGHNYELYVSLYKELNLYGMVENLSTVKQVIKREITSQLDYSYLNQVWPEFQQTLPTTENIARVIWQRLAPYLPLVKIQLFEHPELWAEYQGKDMEATLTIKTHFSAAHRLALPQLTLEQNSEIYGKCARVNGHGHNYHLEVSVAGEIDPRTGMIVDLGDLQKAIDELVVEPFDHTFLNKDIPYFAEVVPTAENIALHIAQLLGERIRQLGAELDKVKLIESPNNSAEIHCRGSVQAPRQLLEKTLTAV

SEQ ID NO: 19187 - protein, 289 aa, Chroococcales cyanobacterium
  misc_feature (1)..(289): tr|A0A2G7GGB4|A0A2G7GGB4_9CHRO 6-pyruvoyl tetrahydropte rin synthase OS=Chroococcales cyanobacterium IPPAS B-12 03 OX=2049454 GN=CSQ79_18820 PE=4 SV=1
MQCIVNRRAQFSASHRYWLPELSEAENTQRFGLCSQTPGHGHNYVLYVSLAGELDEYGMVQNLSEVKQVIKREVTSQLDFSSLNDVWTEFQKTLPTTENIARVIWQRLAPYLPLVRIQLFEHPELWAEYQGNDMEAYLTLSTHFSAAHRLARPDLSYEENSEIYGKCARPNGHGHNYHLEITVKGDIDVRTGMLVDLGALQKIVDDLVIEPLDHTFLNKDVAYFTEVVPTAENIAAYISNVLRSPIQELGATLHKVKLIESPNNSCEIYCDQADKAVTNESLEFKELVH

SEQ ID NO: 19188 - protein, 288 aa, Chroococcidiopsis cubana
  misc_feature (1)..(288): tr|A0A433VLI8|A0A433VLI8_9CYAN 6-pyruvoyltetrahydropter in synthase OS=Chroococcidiopsis cubana SAG 39.79 OX=38 8085 GN=DSM107010_51550 PE=4 SV=1
MQCIVNRRAQFSASHRYWLPELSETENQQQFGLCSRFPGHGHNYVLFVSLLGELDEYGMVLNLSDVKHVIKREVTSQLDFSYLNDVWQEFQQTLPTTENIARVIWQKLASHLPIVKIQLFEHPQLWAEYQGNGMEAYLTISTHFSAAHRLAHPDLNQQENTEIYGKCARPNGHGHNYHLEVTVKGEIHPRTGMIVDLSALNQAIEDLVIEPLDHTFLNKDIAYFAKVVPTAENIAVYISNVLQQPVRELGAELHKVKLIESPNNSCEVYCTPADSIKSATREPALAQV

SEQ ID NO: 19189 - protein, 289 aa, Chroococcidiopsis sp.
  misc_feature (1)..(289): tr|A0A2S6V9Y5|A0A2S6V9Y5_9CYAN 6-pyruvoyl tetrahydropte rin synthase OS=Chroococcidiopsis sp. TS-821 OX=1378066 GN=B1A85_13620 PE=4 SV=1
MQCIVNRRAQFSASHRYWLPELSEAENKQRFGLCARAPGHGHNYVLYVSLSGELDEYGMVQNLSEVKKVIKREVTSQLDFSHLNDVWTEFQQTLPTTENIARVIWHRLAPYLPLVRIQLFEHPELWAEYQGNGMEAYLTLSTHFSAAHRLARPDLSYEENLEIYGKCARPNGHGHNYHLEVTVKGDIDRRTGMLVDLGALQQIVEDLVVEPLDHTFLNKDIAYFAEVVPTAENIAVYISNILRSPIQELGATLHKVKLIESPNNSCEIYCDRTVQEVTGHRSEVRELVH

SEQ ID NO: 19190 - protein, 288 aa, Chroococcidiopsis sp.
  misc_feature (1)..(288): tr|A0A2P8QTB3|A0A2P8QTB3_9CYAN 6-pyruvoyl tetrahydropte rin synthase OS=Chroococcidiopsis sp. CCALA 051 OX=8699 49 GN=C7Y66_08990 PE=4 SV=1
MQCIVNRRAQFSASHRYWLPELSETENQQQFGLCSRFPGHGHNYVLFVSLLGELDEYGMVLNLSDVKHVIKREVTSQLDFSYLNDVWQEFQQTLPTTENIARVIWQKLASHLPIVKIQLFEHPQLWAEYQGNGMEAYLTISTHFSAAHRLAHPDLNQQENTEIYGKCARPNGHGHNYHLEVTVKGKIHPRTGMIVDLSALNQAIEDLVIEPLDHTFLNKDIAYFAKVVPTAENIAVYISNVLQQPVRELGAELHKVKLIESPNNSCEVYCTPADSIKSATREPALAQV

SEQ ID NO: 19191 - protein, 288 aa, Chroococcidiopsis thermalis; identical to SEQ ID NO: 19188
  misc_feature (1)..(288): tr|K9TSU0|K9TSU0_CHRTP Uncharacterized protein OS=Chroo coccidiopsis thermalis (strain PCC 7203) OX=251229 GN=C hro_0325 PE=4 SV=1

SEQ ID NO: 19192 - protein, 289 aa, Chroogloeocystis siderophila
  misc_feature (1)..(289): tr|A0A1U7HM32|A0A1U7HM32_9CHRO 6-pyruvoyl tetrahydropte rin synthase OS=Chroogloeocystis siderophila 5.2 s.c.1 OX=247279 GN=NIES1031_14990 PE=4 SV=1
MQCIVNRRAQFSASHRYWLPELSEAENTQRFGLCARTPGHGHNYILYVSLAGELDEYGMVQNLSEVKQVIKREVTSQLDFSHLNDVWTEFQQTLPTTENIARVIWQRLAPYLSLVRIQLFEHPELWAEYQGNGMEAYLTLSTHFSAAHRLARPDLSYEENSEIYGKCARPNGHGHNYHLEVTVKGEIDPRTGMLVDLGALQQIIDDLVVEPLDHTFLNKDIAYFAEVVPTAENIAVYISNVLRSPIQELGATLHKVKLIESPNNSCEIYCDQTIQGVRDQQSEVRELVH

SEQ ID NO: 19193 - protein, 148 aa, Chryseobacterium angstadtii
  misc_feature (1)..(148): tr|A0A0J7IH29|A0A0J7IH29_9FLAO 6-pyruvoyl tetrahydropte rin synthase OS=Chryseobacterium angstadtii OX=558151 G N=ACM46_07485 PE=4 SV=1
MIRITKIFTFETAHVLYNYDGKCKNMHGHSYKLFVTVKGKVINDLENSKNGMVVDFGDIKSIVKSEIVDVWDHAVLVNALSPHKELGEDLESKGHKVIYCSFQPTCENMLYAIAAKIKSKLPAEVSLAYLKLHETENSYGEWFAEDNK

SEQ ID NO: 19194 - protein, 148 aa, Chryseobacterium antarcticum
  misc_feature (1)..(148): tr|A0A3S4USU0|A0A3S4USU0_9FLAO 6-carboxy-5,6,7,8-tetrah ydropterin synthase OS=Chryseobacterium antarcticum OX= 266748 GN=NCTC13489_01192 PE=3 SV=1
MIRITKIFTFETAHVLYNYDGKCKNMHGHSYKLFVTVKGTPINDLDHPKNGMVLDFGDIKKIVKSEILNVWDHAVMLNGISPHKQFGENLEQQGHKVIYCDYQPTCENMLYDIAAKIKSQLSAKVSLAYLKLHETENSYGEWFAEDQV

SEQ ID NO: 19195 - protein, 148 aa, Chryseobacterium aquaticum
  misc_feature (1)..(148): tr|A0A0Q3HUL7|A0A0Q3HUL7_9FLAO 6-pyruvoyl tetrahydropte rin synthase OS=Chryseobacterium aquaticum OX=452084 GN =AR438_04570 PE=4 SV=1
MIRITKIFTFETAHVLYNYDGKCKNMHGHSYKLFVTVKGKPINDLENPKNGMVVDFGDIKAIVKAEIVDVWDHAVLINGVSPHREMGEELENKGQKVIYCNFQPTCENMLYAIAAKIKSKLPEDVSLAYLKLHETENSYGEWFAEDNQ

SEQ ID NO: 19196 - protein, 148 aa, Chryseobacterium aquifrigidense
  misc_feature (1)..(148): tr|A0A543EN25|A0A543EN25_9FLAO 6-carboxy-5,6,7,8-tetrah ydropterin synthase OS=Chryseobacterium aquifrigidense OX=558021 GN=FB551_2700 PE=3 SV=1
MIRITKIFTFETAHVLYNYDGKCKNMHGHSYKLFVTVKGKPINDIENPKNGMVVDFGDIKSIVKSEIVDVWDHAVLVNALSPHKELGDDLEQKGHKVIYCSFQPTCENMLYAIAAKIKSRLPEGISLAYLKLHETENSYGEWFAEDNQ

SEQ ID NO: 19197 - protein, 147 aa, Chryseobacterium arachidiradicis
  misc_feature (1)..(147): tr|A0A420DBS4|A0A420DBS4_9FLAO 6-carboxy-5,6,7,8-tetrah ydropterin synthase OS=Chryseobacterium arachidiradicis OX=1617282 GN=BXY58_1175 PE=3 SV=1
MIRITKIFTFETAHVLYNYDGKCKNMHGHSYKLYVTVKGHPINNLDDPKNGMVVDFGDIKKIVKEEIVDVWDHAVLVNGASPHLSLGEGLQHQGHKVIFCDYQPTCENMLYDIAEKIKSNLPDHVQLAYLKLHETENSYGEWLAEEN

SEQ ID NO: 19198 - protein, 148 aa, Chryseobacterium arachidis
  misc_feature (1)..(148): tr|A0A1M4ZAQ2|A0A1M4ZAQ2_9FLAO 6-carboxy-5,6,7,8-tetrah ydropterin synthase OS=Chryseobacterium arachidis OX=14 16778 GN=SAMN05443633_103101 PE=3 SV=1
MIRITKIFTFETAHVLYNYDGKCKNMHGHSYKLFVTVKGKPINDLENPKNGMVVDFGDIKSIVKSEIVDVWDHAVLINGLSPHRELGEGLENQGHKVIYCTFQPTCENMLYAIAAKIKSKLPEGISLAYLKLHETENSYGEWFAEDNQ

SEQ ID NO: 19199 - protein, 148 aa, Chryseobacterium arthrosphaerae
  misc_feature (1)..(148): tr|A0A1B8ZU58|A0A1B8ZU58_9FLAO 6-carboxy-5,6,7,8-tetrah ydropterin synthase OS=Chryseobacterium arthrosphaerae OX=651561 GN=BBI00_12635 PE=3 SV=1
MIRITKIFTFETAHVLYNYDGKCKNMHGHSYKLFVTVKGRPINDIENPKNGMVVDFGDIKSIVKSEIVDVWDHAVLVNALSPHKELGDDLEQKGHKVIYCSFQPTCENMLYAIASKIKSKLPEGISLAYLKLHETENSYGEWFAEDNQ

SEQ ID NO: 19200 - protein, 148 aa, Chryseobacterium arthrosphaerae
  misc_feature (1)..(148): tr|A0A3S0QW15|A0A3S0QW15_9FLAO 6-carboxy-5,6,7,8-tetrah ydropterin synthase OS=Chryseobacterium arthrosphaerae OX=651561 GN=EJ377_05915 PE=3 SV=1
MIRITKIFTFETAHVLYNYDGKCKNMHGHSYKLFVTVKGKPINDIENPKNGMVVDFGDIKSIVKSEIVDVWDHAVLVNALSPHKELGDDLEQKGHKVIYCSFQPTCENMLYAIASKIKSKLPEGISLAYLKLHETENSYGEWFAEDNQ

SEQ ID NO: 19201 - protein, 148 aa, Chryseobacterium artocarpi
  misc_feature (1)..(148): tr|A0A1B8ZG43|A0A1B8ZG43_9FLAO 6-carboxy-5,6,7,8-tetrah ydropterin synthase OS=Chryseobacterium artocarpi OX=14 14727 GN=BBI01_11595 PE=3 SV=1
MIRITKIFTFETAHVLYNYDGKCKNMHGHSYKLFVTVKGKPINDIENPKNGMVVDFGDIKSIVKSEIVDVWDHAVLVNALSPHKELGDDLEQKGHKVIYCSFQPTCENMLYAIAAKVKAKLPEGISLAYLKLHETENSYGEWFAEDNQ

SEQ ID NO: 19202 - protein, 147 aa, Chryseobacterium balustinum
  misc_feature (1)..(147): tr|A0A3G6TFF5|A0A3G6TFF5_9FLAO 6-carboxy-5,6,7,8-tetrah ydropterin synthase OS=Chryseobacterium balustinum OX=2 46 GN=EB354_01235 PE=3 SV=1
MIRITKIFTFETAHVLYNYDGKCKNMHGHSYKLFVTVKGKPVNDLENPKNGMVVDFGDIKDIVKSEIVDVWDHAVLINGVSPHRELGEGLENQGHKVIYCTFQPTCENMLYAIAAKVKSKLPEGISLAYLKLHETENSYGEWFAEDN

SEQ ID NO: 19203 - protein, 148 aa, Chryseobacterium bernardetii
  misc_feature (1)..(148): tr|A0A3G6TXK7|A0A3G6TXK7_9FLAO 6-carboxy-5,6,7,8-tetrah ydropterin synthase OS=Chryseobacterium bernardetii OX= 1241978 GN=EG339_00570 PE=3 SV=1
MIRITKIFTFETAHVLYNYDGKCKNMHGHSYKLFVTVKGKPINDIDNPKNGMVVDFGDIKSIVKSEIVDVWDHAVLLNALTPHKELGDDLEQKGHKVIYCSFQPTCENMLYAIAAKIKSRLPEGISLAYLKLHETENSYGEWFAEDNK

SEQ ID NO: 19204 - protein, 148 aa, Chryseobacterium bovis
  misc_feature (1)..(148): tr|A0A1U7PSS7|A0A1U7PSS7_9FLAO 6-carboxy-5,6,7,8-tetrah ydropterin synthase OS=Chryseobacterium bovis DSM 19482 OX=1121284 GN=SAMN05660493_01315 PE=3 SV=1
MIRITKIFTFETAHVLYNYDGKCKNMHGHSYKLFVTVKGNPINNLDDHKNGMVVDFGEIKDIVKKEVVDVWDHAVLVNGNSPHKILGENLQSAGHKVIFCDYQPTCENMLYDIAAKIKSNLSGNIELAYLKLHETENSYGEWLAEENP

SEQ ID NO: 19205 - protein, 148 aa, Chryseobacterium carnipullorum
  misc_feature (1)..(148): tr|A0A1M7KQM7|A0A1M7KQM7_9FLAO 6-carboxytetrahydropteri n synthase QueD OS=Chryseobacterium carnipullorum OX=11 24835 GN=queD PE=4 SV=1
MIRITKIFTFETAHVLYNYDGKCKNMHGHSYKLFVTVKGRVINDLENSKNGMVVDFGDIKSIVKSEIVDLWDHAVLVNALSPHKELGEDLENKGHKVIYCSFQPTCENMLYAIAAKIKSKLPAEVSLAYLKLHETENSYGEWFAEDNK

SEQ ID NO: 19206 - protein, 148 aa, Chryseobacterium carnis
  misc_feature (1)..(148): tr|A0A3G8XR07|A0A3G8XR07_9FLAO 6-carboxytetrahydropteri n synthase OS=Chryseobacterium carnis OX=1241979 GN=EIB 73_05505 PE=4 SV=1
MIRITKIFTFETAHVLYNYDGKCKNMHGHSYKLFVTVKGTPINDLDHPKNGMVVDFGDIKKIVKSEILNVWDHAVMLNENSPHKQLGEDLDQQGHKVIYCDYQPTCENMLYDIAAKIKKQLPETVSLAYLKLHETENSYGEWFAEDNS

SEQ ID NO: 19207 - protein, 148 aa, Chryseobacterium chaponense
  misc_feature (1)..(148): tr|A0A1N7N596|A0A1N7N596_9FLAO 6-pyruvoyltetrahydropter in/6-carboxytetrahydropterin synthase OS=Chryseobacteri um chaponense OX=713588 GN=SAMN05421789_1129 PE=4 SV=1
MIRITKIFTFETAHVLYNYDGKCKNMHGHSYKLFVTVKGIPINDLDHQKNGMVVDFGDIKKIVKSEIIDVWDHAVMLNGISPHKQLGEDLEEKGHKVIYCDYQPTCENMLYDIAQKIKSQLPQTVTLAYLKLHETENSYGEWFAEDQD

SEQ ID NO: 19208 - protein, 148 aa, Chryseobacterium contaminans
  misc_feature (1)..(148): tr|A0A1M7E4N7|A0A1M7E4N7_9FLAO 6-carboxy-5,6,7,8-tetrah ydropterin synthase OS=Chryseobacterium contaminans OX= 1423959 GN=SAMN05444407_10719 PE=3 SV=1
MIRITKIFTFETAHVLYNYDGKCKNMHGHSYKLFVTVKGKPINDIDNPKNGMVVDFGDIKSIVKSEIVDVWDHAVLLNALTPHKELGDDLEQKGHKVIYCSFQPTCENMLYAIAAKIKSRLPEGISLAYLKLHETENSYGEWFAEDNQ

SEQ ID NO: 19209 - protein, 148 aa, Chryseobacterium culicis; identical to SEQ ID NO: 19196
  misc_feature (1)..(148): tr|A0A2S9D1U3|A0A2S9D1U3_9FLAO 6-carboxy-5,6,7,8-tetrah ydropterin synthase OS=Chryseobacterium culicis OX=6801 27 GN=CQ022_10530 PE=3 SV=1

SEQ ID NO: 19210 - protein, 147 aa, Chryseobacterium culicis
  misc_feature (1)..(147): tr|A0A1H6H2G7|A0A1H6H2G7_9FLAO 6-carboxy-5,6,7,8-tetrah ydropterin synthase OS=Chryseobacterium culicis OX=6801 27 GN=SAMN05421593_0637 PE=3 SV=1
MIRITKIFTFETAHVLYNYDGKCKNMHGHSYKLFVTVKGKPINDIENPKNGMVVDFGDIKSIVKSEIVDVWDHAVLVNALSPHKELGDDLEQKGHKVIYCSFQPTCENMLYAIAAKIKSRLPEGISLAYLKLHETENSYGEWFAEDN

SEQ ID NO: 19211 - protein, 148 aa, Chryseobacterium daecheongense
  misc_feature (1)..(148): tr|A0A3N0W6G5|A0A3N0W6G5_9FLAO 6-carboxytetrahydropteri n synthase QueD OS=Chryseobacterium daecheongense OX=19 2389 GN=queD PE=4 SV=1
MIRITKIFTFETAHVLYNYDGKCKNMHGHSYKLFVTVKGKPVNDLNNPKNGMVVDFGDIKTIVKSEIVDVWDHAVLINALSPHKELGEDLEQKGHKVIYCTFQPTCENMLYAIAAKIKSRLPEGVSLAYLKLHETENSYGEWYAEDNR

SEQ ID NO: 19212 - protein, 148 aa, Chryseobacterium defluvii
  misc_feature (1)..(148): tr|A0A495SM21|A0A495SM21_9FLAO 6-pyruvoyltetrahydropter in/6-carboxytetrahydropterin synthase OS=Chryseobacteri um defluvii OX=160396 GN=BCF58_0460 PE=4 SV=1
MIRITKIFTFETAHVLYNYDGKCKNMHGHSYKLFVTVKGKPVNDLNNPKNGMVVDFGDIKTIVKSEIVDVWDHAVLINALSPHKELGEDLEQKGHKVIYCTFQPTCENMLYAIAAKIKSRLPEGVSLAYLKLHETENSYGEWFAEDNR

SEQ ID NO: 19213 - protein, 148 aa, Chryseobacterium elymi
  misc_feature (1)..(148): tr|A0A3D9DP89|A0A3D9DP89_9FLAO 6-carboxytetrahydropteri n synthase QueD OS=Chryseobacterium elymi OX=395936 GN= DRF60_05305 PE=4 SV=1
MIRITKIFTFETAHVLYNYDGKCKNMHGHSYKLFVTVKGRPVNDLENPKNGMVVDFGDIKSIVKSEIVDLWDHAVLVNALSPHKELGEDLENKGHKVIYCSFQPTCENMLYAIAAKIKSRLPAEVSLAYLKLHETENSYGEWFAEDNK

SEQ ID NO: 19214 - protein, 148 aa, Chryseobacterium flavum
  misc_feature (1)..(148): tr|A0A3D9CNX2|A0A3D9CNX2_9FLAO 6-carboxytetrahydropteri n synthase QueD OS=Chryseobacterium flavum OX=415851 GN =DRF59_07325 PE=4 SV=1
MIRITKIFTFETAHVLYNYDGKCKNMHGHSYKLFVTVKGKPINDIENPKNGMVVDFGDIKSIVKSEIVDVWDHAVLVNALSPHKELGDDLEQKGHKVIYCSFQPTCENMLYAIAAKIKSKLPAGISLAYLKLHETENSYGEWFAEDNQ

SEQ ID NO: 19215 - protein, 148 aa, Chryseobacterium formosense
  misc_feature (1)..(148): tr|A0A085Z544|A0A085Z544_9FLAO 6-pyruvoyl tetrahydropte rin synthase OS=Chryseobacterium formosense OX=236814 G N=IX39_02520 PE=4 SV=1
MIRITKIFTFETAHVLYNYDGKCKNMHGHSYKLFVTVKGKPVNDLENPKNGMVVDFGDIKSIVKSEIVDVWDHAVLINGLSPHKNLGESLEDQGHKVIYCTFQPTCENMLYAIAAKIKSKLPEGISLAYLKLHETENSYGEWFAEDNQ

SEQ ID NO: 19216 - protein, 148 aa, Chryseobacterium frigidisoli
  misc_feature (1)..(148): tr|A0A1I3FRF2|A0A1I3FRF2_9FLAO 6-pyruvoyltetrahydropter in/6-carboxytetrahydropterin synthase OS=Chryseobacteri um frigidisoli OX=1125876 GN=SAMN05443292_1573 PE=4 SV= 1
MIRITKIFTFETAHVLYNYDGKCKNMHGHSYKLFVTVKGNPINNLDDTKNGMVMDFGDLKAIVNSQIVNEWDHAVMLNGNSPHKILGETLEKDGHKVIYCDFQPTCENMLYEIASKIKNNLPSEIQLAYLKLNETENSYGEWFAEDQI

SEQ ID NO: 19217 - protein, 148 aa, Chryseobacterium gallinarum
  misc_feature (1)..(148): tr|A0A0G3LZF6|A0A0G3LZF6_9FLAO 6-carboxy-5,6,7,8-tetrah ydropterin synthase OS=Chryseobacterium gallinarum OX=1 324352 GN=OK18_03165 PE=3 SV=1
MIRITKIFTFETAHVLYNYDGKCKNMHGHSYKLFVTVKGRPINDIENPKNGMVVDFGDIKSIVKSEIVDVWDHAVLVNALSPHKELGDDLETRGHKVIYCSFQPTCENMLYAIAAKIKSKLPDGISLAYLKLHETENSYGEWFAEDNQ

SEQ ID NO: 19218 - protein, 160 aa, Chryseobacterium gambrini
  misc_feature (1)..(160): tr|A0A1N7LV32|A0A1N7LV32_9FLAO 6-pyruvoyltetrahydropter in/6-carboxytetrahydropterin synthase OS=Chryseobacteri um gambrini OX=373672 GN=SAMN05421785_102521 PE=4 SV=1
MNGTNQIPYLCRMIRITKIFTFETAHVLYNYDGKCKNMHGHSYKLFVTVKGKPVNDLENPKNGMVVDFGDIKSIVKSEIVDVWDHAVLINGLSPHRELGEDLEEKGHKVIYCTFQPTCENMLYAIAAKIKSKLLEGISLAYLKLHETENSYGEWFAEDNQ

SEQ ID NO: 19219 - protein, 148 aa, Chryseobacterium geocarposphaerae
  misc_feature (1)..(148): tr|A0A2M9CAT8|A0A2M9CAT8_9FLAO 6-pyruvoyltetrahydropter in/6-carboxytetrahydropterin synthase OS=Chryseobacteri um geocarposphaerae OX=1416776 GN=CLV73_1950 PE=4 SV=1
MIRITKIFTFETAHVLYNYDGKCKNMHGHSYKLFVTVKGKPINDLENPKNGMVVDFGDIKTIVKSEIVDVWDHAVMINALSPHKELGEGLENQGHKVIYCSFQPTCENMLYAIAAKIKSRLPEGISLAYLKLHETENSYGEWFAEDNQ

SEQ ID NO: 19220 - protein, 148 aa, Chryseobacterium glaciei
  misc_feature (1)..(148): tr|A0A172XWR9|A0A172XWR9_9FLAO 6-pyruvoyl tetrahydropte rin synthase OS=Chryseobacterium glaciei OX=1685010 GN= A0O34_13330 PE=4 SV=1
MIRITKIFTFETAHVLYNYDGKCKNMHGHSYKLFVTVKGKPVNDLENPKNGMVVDFGDIKSIVKPEIVDVWDHAVLINGLSPHRQLGESLESQGHKVIYCNFQPTCENMLYAIAAKIKSKLPEGISLAYLKLHETENSYGEWLAEDNQ

SEQ ID NO: 19221 - protein, 122 aa, Chryseobacterium gleum
  misc_feature (1)..(122): tr|A0A4U8WE55|A0A4U8WE55_9FLAO Queuosine biosynthesis p rotein QueD OS=Chryseobacterium gleum OX=250 GN=NCTC120 78_01179 PE=4 SV=1
MHGHSYKLFVTVKGKPINDLDHPKNGMVVDFGDIKTIVKSEIVDVWDHAVLINGLSPHKQLGEDLEEKGHKVIYCTFQPTCENMLYAIAAKIKSKLPEGISLAYLKLHETENSYGEWFAEDN

SEQ ID NO: 19222 - protein, 154 aa, Chryseobacterium gleum
  misc_feature (1)..(154): tr|A0A3S5E2W3|A0A3S5E2W3_9FLAO Queuosine biosynthesis p rotein QueD OS=Chryseobacterium gleum OX=250 GN=NCTC114 32_02447 PE=4 SV=1
MSYLCSMIRITKIFTFETAHVLYNYDGKCKNMHGHSYKLFVTVKGKPINDIDNPKNGMVVDFGDIKSIVKSEIVDVWDHAVLVNALSPHKELGDDLEQKGHKVIYCSFQPTCENMLYAIAAKIKSKLPEGISLAYLKLHETENSYGEWFAEDNQ

SEQ ID NO: 19223 - protein, 148 aa, Chryseobacterium greenlandense
  misc_feature (1)..(148): tr|A0A117KC79|A0A117KC79_9FLAO 6-pyruvoyl tetrahydropte rin synthase OS=Chryseobacterium greenlandense OX=34566 3 GN=AR686_04855 PE=4 SV=1
MIRITKIFTFETAHVLYNYDGKCKNMHGHSYKLFVTVKGKPINDLENPKNGMVVDFGDIKAIVKAEIVDVWDHAVLINGVSPHREMGEELENKGQKVIYCNFQPTCENMLYAIAAKIKSKLPADVSLAYLKLHETENSYGEWFAEDNQ

SEQ ID NO: 19224 - protein, 148 aa, Chryseobacterium hagamense
  misc_feature (1)..(148): tr|A0A511YPL1|A0A511YPL1_9FLAO 6-carboxy-5,6,7,8-tetrah ydropterin synthase OS=Chryseobacterium hagamense OX=39 5935 GN=CHA01nite_28720 PE=3 SV=1
MIRITKIFTFETAHVLYNYDGKCKNMHGHSYKLFVTVKGRPVNDLENPKNGMVVDFGDIKSIVKSEIVDVWDHAVLINGLSPHRELGEDMEEKGHKVIYCTFQPTCENMLYAIAAKIKSKLPEGISLAYLKLHETENSYGEWFAEDNQ

SEQ ID NO: 19225 - protein, 152 aa, Chryseobacterium haifense
  misc_feature (1)..(152): tr|A0A246BB66|A0A246BB66_9FLAO 6-carboxytetrahydropteri n synthase QueD OS=Chryseobacterium haifense DSM 19056 OX=1450526 GN=AP75_03475 PE=4 SV=1
MIRITKIFTFETAHVLYNYDGKCKNMHGHSYKLFVTVKGKPINNLDDPKNGMVVDFGDIKKIVNSEIIDVWDHAVLVNGYSPHQELGQDLEGKGHKVIFCNYQPTCENMLYDIAEKIQNKLPKEVQLAYLKLHETENSYGEWFAEENKENFS

SEQ ID NO: 19226 - protein, 148 aa, Chryseobacterium haifense
  misc_feature (1)..(148): tr|A0A3N0WTT0|A0A3N0WTT0_9FLAO 6-carboxy-5,6,7,8-tetrah ydropterin synthase OS=Chryseobacterium haifense OX=421 525 GN=EGH90_05590 PE=3 SV=1
MIRITKIFTFETAHVLYNYDGKCKNMHGHSYKLFVTVKGKPINNLDDPKNGMVVDFGDIKKIVNSEIIDVWDHAVLVNGVSPHKDLGQDLEGKGHKVIFCNYQPTCENMLYDIAEKIQNKLPKEVQLAYLKLHETENSYGEWFAEENN

SEQ ID NO: 19227 - protein, 147 aa, Chryseobacterium halperniae
  misc_feature (1)..(147): tr|A0A085BFN7|A0A085BFN7_9FLAO 6-pyruvoyl tetrahydropte rin synthase OS=Chryseobacterium halperniae OX=421072 G N=IO89_13880 PE=4 SV=1
MIRITKIFTFETAHVLYNYDGKCKNMHGHSYKLFVTVKGEPIDDLENQKNGMVVDFGDIKKIVKDEIVDLWDHSVLVNGASPHKTLGESLQDQGHKVIFCDYQPTCENMLYEIASKIKSKLPSHVQLAYLKLHETENSYGEWLAEEN

SEQ ID NO: 19228 - protein, 147 aa, Chryseobacterium hispanicum
  misc_feature (1)..(147): tr|A0A3D9CXJ7|A0A3D9CXJ7_9FLAO 6-carboxy-5,6,7,8-tetrah ydropterin synthase OS=Chryseobacterium hispanicum OX=3 58687 GN=queD PE=3 SV=1
MIRITKIFTFETAHVLYNYDGKCKNMHGHSYKLFVTVKGNPINDLEHNKNGMVVDFGDIKKIVKEEVVDVWDHAVLVNGASPHRILGENLQNEGHKVIFCDYQPTCENMLYDIASKIQSKLPSEIQLAYLKLHETENSYGEWLAEEN

SEQ ID NO: 19229 - protein, 147 aa, Chryseobacterium hominis
  misc_feature (1)..(147): tr|A0A1H6K2S1|A0A1H6K2S1_9FLAO 6-pyruvoyltetrahydropter in/6-carboxytetrahydropterin synthase OS=Chryseobacteri um hominis OX=420404 GN=SAMN05421793_1189 PE=4 SV=1
MIRITKIFNFETAHVLYNYDGKCKNMHGHSYKLFVTVKGNPIKDLDHHKNGMVVDFGDIKKIVKEEIVDIWDHAVLVNGDSPHKLLGESLENQGHKVIFCEYQPTCENMLYDIAAKIQSKLPNHVQLAYLKLHETENSYGEWIAEEN

SEQ ID NO: 19230 - protein, 147 aa, Chryseobacterium hominis
  misc_feature (1)..(147): tr|A0A3N0X8P9|A0A3N0X8P9_9FLAO 6-carboxytetrahydropteri n synthase OS=Chryseobacterium hominis OX=420404 GN=EGH 73_06770 PE=4 SV=1
MIRITKIFNFETAHVLYNYDGKCKNMHGHSYKLFVTVKGNPIKDLDHHKNGMVVDFGDIKKIVKEEIVDIWDHAVLVNGDSPHKLLGESLENQGHKVIFCKYQPTCENMLYDIAAKIKSKLPTHVQLAYLKLHETENSYGEWIAEEN

SEQ ID NO: 19231 - protein, 148 aa, Chryseobacterium humi
  misc_feature (1)..(148): tr|A0A1H5Z6Y0|A0A1H5Z6Y0_9FLAO 6-carboxy-5,6,7,8-tetrah ydropterin synthase OS=Chryseobacterium humi OX=493375 GN=SAMN05421847_2025 PE=3 SV=1
MIRITKIFTFETAHILYGYDGKCKNMHGHSYKLFVTVKGNPINDLDHSKNGMVMDFGDLKKIVNSQIVNEWDHAVMLNANSPHKGLGQNLEKEGHKVIYCDFQPTCENMLYEIAKKIKNKLPLEIQLAYLKLHETENSFGEWFAEDQV

SEQ ID NO: 19232 - protein, 148 aa, Chryseobacterium hungaricum
  misc_feature (1)..(148): tr|A0A1G7I7V7|A0A1G7I7V7_9FLAO 6-carboxy-5,6,7,8-tetrah ydropterin synthase OS=Chryseobacterium hungaricum OX=4 54006 GN=SAMN05421825_1010 PE=3 SV=1
MIRITKIFTFETAHVLYNYDGKCKNMHGHSYKLFVTVKGIPINDLDDHKNGMVVDFGDIKKIVKEEIVDVWDHAVLVNGASPHRLLGESLQNQGHKVIFCDYQPTCENMLYDMASKIKSKLPGHVQLSYLKLHETENSYGEWLAEENK

SEQ ID NO: 19233 - protein, 148 aa, Chryseobacterium indologenes
  misc_feature (1)..(148): tr|A0A1Z3W4V7|A0A1Z3W4V7_9FLAO 6-carboxy-5,6,7,8-tetrah ydropterin synthase OS=Chryseobacterium indologenes OX= 253 GN=EGX91_10035 PE=3 SV=1
MIRITKIFTFETAHVLYNYDGKCKNMHGHSYKLFVTVKGKPINDIENPKNGMVVDFGDIKSIVKSEIVDVWDHAVLVNALSPHKELGDDLEQRGHKVIYCSFQPTCENMLYAIASKIKSKLPEGISLAYLKLHETENSYGEWFAEDNQ

SEQ ID NO: 19234 - protein, 148 aa, Chryseobacterium indologenes; identical to SEQ ID NO: 19196
  misc_feature (1)..(148): tr|A0A411DK12|A0A411DK12_9FLAO 6-carboxy-5,6,7,8-tetrah ydropterin synthase OS=Chryseobacterium indologenes OX= 253 GN=EU348_05660 PE=3 SV=1

SEQ ID NO: 19235 - protein, 147 aa, Chryseobacterium indoltheticum; identical to SEQ ID NO: 19202
  misc_feature (1)..(147): tr|A0A381FNE4|A0A381FNE4_9FLAO 6-carboxy-5,6,7,8-tetrah ydropterin synthase OS=Chryseobacterium indoltheticum O X=254 GN=EG340_16430 PE=3 SV=1

SEQ ID NO: 19236 - protein, 148 aa, Chryseobacterium jejuense
  misc_feature (1)..(148): tr|A0A2X2WYX4|A0A2X2WYX4_9FLAO 6-carboxy-5,6,7,8-tetrah ydropterin synthase OS=Chryseobacterium jejuense OX=445 960 GN=NCTC13492_02969 PE=3 SV=1
MIRITKIFTFETAHVLYNYDGKCKNMHGHSYKLFVTVKGKPINDIDNPKNGMVVDFGDIKSIVKSEIVDVWDHAVLLNALTPHKELGDDLEQKGHKVIYCSFQPTCENMLYAIAAKVKSRLPEGISLAYLKLHETENSYGEWFAEDNQ

SEQ ID NO: 19237 - protein, 148 aa, Chryseobacterium jeonii
  misc_feature (1)..(148): tr|A0A0C1CUS2|A0A0C1CUS2_9FLAO 6-carboxy-5,6,7,8-tetrah ydropterin synthase OS=Chryseobacterium jeonii OX=26674 9 GN=OA86_12580 PE=3 SV=1
MIRITKIFTFETAHVLYNYDGKCKNMHGHSYKLFVAVKGNPINDLDHPKNGMVVDFGDIKKIVKSEILNVWDHAVMLNGTSPHKKLGEDLENQGHKVIYCDYQPTCENMLYDIANKIKKQLPETVSLAYLKLHETENSYGEWFAEDQD

SEQ ID NO: 19238 - protein, 148 aa, Chryseobacterium joostei
  misc_feature (1)..(148): tr|A0A1N7I4Q4|A0A1N7I4Q4_9FLAO 6-carboxy-5,6,7,8-tetrah ydropterin synthase OS=Chryseobacterium joostei OX=1122 34 GN=EG359_10070 PE=3 SV=1
MIRITKIFTFETAHVLYNYDGKCKNMHGHSYKLFVTVKGKPINDIENPKNGMVVDFGDIKSIVKSEIVDVWDHAVLLNALTPHKELGDDLEQKGHKVIYCSFQPTCENMLYAIAAKVKSRLPEGISLAYLKLHETENSYGEWFAEDNQ

SEQ ID NO: 19239 - protein, 148 aa, Chryseobacterium koreense
  misc_feature (1)..(148): tr|A0A0J7J2E6|A0A0J7J2E6_9FLAO 6-carboxy-5,6,7,8-tetrah ydropterin synthase OS=Chryseobacterium koreense CCUG 4 9689 OX=1304281 GN=ACM44_01550 PE=3 SV=1
MIRITKIFTFETAHVLYNYDGKCKNMHGHSYKLFVTVKGNPINDLENPKNGMVVDFGDIKKIVKEEIIDVWDHAVLINALSPHKELGEDLEQKGHKVIYCNFQPTCENMLYEISVKVKNRLPNHVQLAYLKLHETENSYGEWVAEENI

SEQ ID NO: 19240 - protein, 148 aa, Chryseobacterium kwangjuense
  misc_feature (1)..(148): tr|A0A135WL36|A0A135WL36_9FLAO 6-carboxy-5,6,7,8-tetrah ydropterin synthase OS=Chryseobacterium kwangjuense OX= 267125 GN=AU378_07735 PE=3 SV=1
MIRITKIFTFETAHVLYNYDGKCKNMHGHSYKLFVTVKGRPVNDLENPKNGMVVDFGDIKSIVKSEIVDVWDHAVLVNALSPHKELGEDLENKGHKVIYCSFQPTCENMLYAIAAKIKSKLPAEVSLAYLKLHETENSYGEWFAEDNK

SEQ ID NO: 19241 - protein, 148 aa, Chryseobacterium lactis
  misc_feature (1)..(148): tr|A0A3G6RKQ3|A0A3G6RKQ3_9FLAO 6-carboxy-5,6,7,8-tetrah ydropterin synthase OS=Chryseobacterium lactis OX=12419 81 GN=EG341_16910 PE=3 SV=1
MIRITKIFTFETAHVLYNYDGKCKNMHGHSYKLFVTVKGKPINDMENPKNGMVVDFGDIKSIVKSEIVDVWDHAVLLNALSPHKELGDELEQRGHKVIYCSFQPTCENMLYAIASKIKSKLPEGISLAYLKLHETENSYGEWFAEDNQ

SEQ ID NO: 19242 - protein, 148 aa, Chryseobacterium lathyri; identical to SEQ ID NO: 19213
  misc_feature (1)..(148): tr|A0A511YBD6|A0A511YBD6_9FLAO 6-carboxytetrahydropteri n synthase QueD OS=Chryseobacterium lathyri OX=395933 G N=CLA01_25560 PE=4 SV=1

SEQ ID NO: 19243 - protein, 123 aa, Chryseobacterium limigenitum
  misc_feature (1)..(123): tr|A0A1K2II20|A0A1K2II20_9FLAO 6-pyruvoyltetrahydropter in/6-carboxytetrahydropterin synthase OS=Chryseobacteri um limigenitum OX=1612149 GN=SAMN05216324_10315 PE=4 SV =1
MHGHSYKLFVTVKGKPVNDLENPKNGMVVDFGDIKSIVKPEIVDVWDHAVLINGLSPHRELGESLESQGHKVIYCNFQPTCENMLYAIAAKIKSKLPEGISLAYLKLHETENSYGEWFAEDNQ

SEQ ID NO: 19244 - protein, 148 aa, Chryseobacterium luteum
  misc_feature (1)..(148): tr|A0A085Z1G0|A0A085Z1G0_9FLAO 6-pyruvoyl tetrahydropte rin synthase OS=Chryseobacterium luteum OX=421531 GN=IX 38_19325 PE=4 SV=1
MIRITKIFTFETAHVLYNYDGKCKNMHGHSYKLFVTVKGKVINDLGNPKNGMVVDFGDIKSIVKSEIVDLWDHAVLVNALSPHKELGEDLENKGHKVIYCSFQPTCENMLYAIAAKIKSKLPAEVSLAYLKLHETENSYGEWFAEDNK

SEQ ID NO: 19245 - protein, 169 aa, Chryseobacterium molle
  misc_feature (1)..(169): tr|A0A1M6T921|A0A1M6T921_9FLAO 6-pyruvoyltetrahydropter in/6-carboxytetrahydropterin synthase OS=Chryseobacteri um molle OX=216903 GN=SAMN05444371_2710 PE=4 SV=1
MFSSVTNLLPENIPPFFNYLCSMIRITKIFTFETAHVLYNYDGKCKNMHGHSYKLYVTVKGNPINDLDSHKNGMVVDFGDIKKIVKQEIVDVWDHAVMVNGSSPHKSLGESLENQGHKVIFCNYQPTCENMLYDIASKIRAKLPQHIQLAYLKLHETENSYGEWLAEDN

SEQ ID NO: 19246 - protein, 148 aa, Chryseobacterium mucoviscidosis; identical to SEQ ID NO: 18744
  misc_feature (1)..(148): tr|A0A202CGI6|A0A202CGI6_9FLAO 6-carboxy-5,6,7,8-tetrah ydropterin synthase OS=Chryseobacterium mucoviscidosis OX=1945581 GN=B0E34_01105 PE=3 SV=1

SEQ ID NO: 19247 - protein, 148 aa, Chryseobacterium nakagawai; identical to SEQ ID NO: 19208
  misc_feature (1)..(148): tr|A0A448LM93|A0A448LM93_9FLAO 6-carboxy-5,6,7,8-tetrah ydropterin synthase OS=Chryseobacterium nakagawai OX=12 41982 GN=NCTC13529_04413 PE=3 SV=1

SEQ ID NO: 19248 - protein, 148 aa, Chryseobacterium nakagawai
  misc_feature (1)..(148): tr|A0A3N2F4X4|A0A3N2F4X4_9FLAO 6-pyruvoyltetrahydropter in/6-carboxytetrahydropterin synthase OS=Chryseobacteri um nakagawai OX=1241982 GN=EDF65_0040 PE=4 SV=1
MIRITKIFTFETAHVLYNYDGKCKNMHGHSYKLFVTVKGKPINDIENPKNGMVVDFGDIKSIVKSEIVDVWDHSVLLNALTPHKELGDDLEQKGHKVIYCSFQPTCENMLYAIAAKIKSRLPEGISLAYLKLHETENSYGEWFAEDNQ

SEQ ID NO: 19249 - protein, 148 aa, Chryseobacterium nematophagum
  misc_feature (1)..(148): tr|A0A3M7L8U2|A0A3M7L8U2_9FLAO 6-carboxy-5,6,7,8-tetrah ydropterin synthase OS=Chryseobacterium nematophagum OX =2305228 GN=queD PE=3 SV=1
MIRITKIFTFETAHVLYNYDGKCKNMHGHSYKLFVTVKGKPINDLNNPKNGMVVDFGDIKSIVKSEIVDVWDHAVLINGLSPHKELGEDLENKGHKVIYCTFQPTCENMLSAIAAKIKSKLPAEVSLAYLKLHETENSYGEWFAEDNS

SEQ ID NO: 19250 - protein, 148 aa, Chryseobacterium nematophagum
  misc_feature (1)..(148): tr|A0A3M7THA0|A0A3M7THA0_9FLAO 6-carboxy-5,6,7,8-tetrah ydropterin synthase OS=Chryseobacterium nematophagum OX =2305228 GN=queD PE=3 SV=1
MIRITKIFTFETAHVLYNYDGKCKNMHGHSYKLFVTVKGKPVNDLNNPKNGMVVDFGDIKSIVKSEIVDVWDHAVLINGLSPHKELGEDLENKGHKVIYCTFQPTCENMLSAIAAKIKSKLPPEVSLAYLKLHETENSYGEWFAEDNS

SEQ ID NO: 19251 - protein, 148 aa, Chryseobacterium oleae
  misc_feature (1)..(148): tr|A0A1I4WLQ0|A0A1I4WLQ0_9FLAO 6-pyruvoyltetrahydropter in/6-carboxytetrahydropterin synthase OS=Chryseobacteri um oleae OX=491207 GN=SAMN05421594_1317 PE=4 SV=1
MIRITKIFTFETAHVLYNYDGKCKNMHGHSYKLFVTVKGKVINDLENSKNGMVVDFGDIKSIVKSEIVDLWDHAVLVNALSPHKELGEDLENKGHKVIYCSFQPTCENMLYAIAAKIKSKLPAEVSLAYLKLHETENSYGEWFAEDNK

SEQ ID NO: 19252 - protein, 148 aa, Chryseobacterium oncorhynchi; identical to SEQ ID NO: 19238
  misc_feature (1)..(148): tr|A0A316WNC1|A0A316WNC1_9FLAO 6-carboxy-5,6,7,8-tetrah ydropterin synthase OS=Chryseobacterium oncorhynchi OX= 741074 GN=C1638_019875 PE=3 SV=1

SEQ ID NO: 19253 - protein, 148 aa, Chryseobacterium oranimense; identical to SEQ ID NO: 19240
  misc_feature (1)..(148): tr|A0A1M5MBE5|A0A1M5MBE5_9FLAO 6-carboxy-5,6,7,8-tetrah ydropterin synthase OS=Chryseobacterium oranimense OX=4 21058 GN=SAMN05421866_1393 PE=3 SV=1

SEQ ID NO: 19254 - protein, 148 aa, Chryseobacterium piperi
  misc_feature (1)..(148): tr|A0A086BIX9|A0A086BIX9_9FLAO 6-carboxy-5,6,7,8-tetrah ydropterin synthase OS=Chryseobacterium piperi OX=55815 2 GN=IQ37_08680 PE=3 SV=1
MIRITKIFTFETAHVLYNYDGKCKNMHGHSYKLFVTVKGKPINDLENPKNGMVVDFGDIKSIVKSEIVDVWDHAVLINGLSPHKELGEDLEGRGHKVIYCTFQPTCENMLYAIAAKIKSKLPAEVSLAYLKLHETENSYGEWFAEDNV

SEQ ID NO: 19255 - protein, 148 aa, Chryseobacterium piscicola
  misc_feature (1)..(148): tr|A0A2S7KJM7|A0A2S7KJM7_9FLAO 6-carboxy-5,6,7,8-tetrah ydropterin synthase OS=Chryseobacterium piscicola OX=55 1459 GN=B0A70_00580 PE=3 SV=1
MIRITKIFTFETAHVLYNYDGKCKNMHGHSYKLFVTVKGKPINDLENPKNGMVVDFGDIKSIVKAEIVDVWDHSVLINGVSPHREMGEELENKGQKVIYCNFQPTCENMLYAIAAKIKSKLPVDVSLAYLKLHETENSYGEWFAEDNQ

SEQ ID NO: 19256 - protein, 123 aa, Chryseobacterium piscicola
  misc_feature (1)..(123): tr|A0A1N7MC96|A0A1N7MC96_9FLAO 6-pyruvoyltetrahydropter in/6-carboxytetrahydropterin synthase OS=Chryseobacteri um piscicola OX=551459 GN=SAMN05421796_104153 PE=4 SV=1
MHGHSYKLFVTVKGKPINDLENPKNGMVVDFGDIKSIVKAEIVDVWDHSVLINGVSPHREMGEELENKGQKVIYCNFQPTCENMLYAIAAKIKSKLPVDVSLAYLKLHETENSYGEWFAEDNQ

SEQ ID NO: 19257 - protein, 147 aa, Chryseobacterium piscium; identical to SEQ ID NO: 19202
  misc_feature (1)..(147): tr|A0A3D9BMR2|A0A3D9BMR2_9FLAO 6-carboxy-5,6,7,8-tetrah ydropterin synthase OS=Chryseobacterium piscium OX=3337 02 GN=DRF62_08455 PE=3 SV=1

SEQ ID NO: 19258 - protein, 148 aa, Chryseobacterium polytrichastri
  misc_feature (1)..(148): tr|A0A1M6W7Z3|A0A1M6W7Z3_9FLAO 6-pyruvoyltetrahydropter in/6-carboxytetrahydropterin synthase OS=Chryseobacteri um polytrichastri OX=1302687 GN=SAMN05444267_100921 PE= 4 SV=1
MIRITKIFTFETAHVLYNYDGKCKNMHGHSYKLLVTVKGKPVNDLENPKNGMVVDFGDIKSIVKPEIVDVWDHAVLINGLSPHRELGESLESQGHKVIYCNFQPTCENMLYAIAAKIKSKLPEGISLAYLKLHETENSYGEWFAEDNQ

SEQ ID NO: 19259 - protein, 123 aa, Chryseobacterium rhizoplanae
  misc_feature (1)..(123): tr|A0A521CP99|A0A521CP99_9FLAO 6-pyruvoyltetrahydropter in/6-carboxytetrahydropterin synthase OS=Chryseobacteri um rhizoplanae OX=1609531 GN=SAMN06265171_103232 PE=4 S V=1
MHGHSYKLFVTVKGKPINDIENPKNGMVVDFGDIKSIVNSEIVDVWDHAVLVNALSPHKELGDDLEQKGHKVIYCSFQPTCENMLYAIAAKIKSKLPDGISLAYLKLHETENSYGEWFAEDNQ

SEQ ID NO: 19260 - protein, 147 aa, Chryseobacterium rhizosphaerae
  misc_feature (1)..(147): tr|A0A3D9DFA4|A0A3D9DFA4_9FLAO 6-carboxy-5,6,7,8-tetrah ydropterin synthase OS=Chryseobacterium rhizosphaerae O X=395937 GN=DRF57_07560 PE=3 SV=1
MIRITKIFTFETAHVLYNYDGKCKNMHGHSYKLFVTVKGRPINDIENPKNGMVVDFGDIKSIVKSEIVDVWDHSVLVNALSPHKELGDDLEQKGHKVIYCSFQPTCENMLYAIAAKVKSKLPEGISLAYLKLHETENSYGEWFAEDN

SEQ ID NO: 19261 - protein, 160 aa, Chryseobacterium scophthalmum
  misc_feature (1)..(160): tr|A0A1N6G8H3|A0A1N6G8H3_9FLAO 6-pyruvoyltetrahydropter in/6-carboxytetrahydropterin synthase OS=Chryseobacteri um scophthalmum OX=59733 GN=SAMN05421769_1952 PE=4 SV=1
MILLHIEFSYLCTMIRITKIFTFETAHVLYNYDGKCKNMHGHSYKLFVTVKGKPINDLENPKNGMVVDFGDIKDIVKSEIVDVWDHAVLINGVSPHRELGEGLENQGHKVIYCTFQPTCENMLYAIAAKVKSKLPEGISLAYLKLHETENSYGEWFAEDN

SEQ ID NO: 19262 - protein, 148 aa, Chryseobacterium sediminis
  misc_feature (1)..(148): tr|A0A5B2UDQ0|A0A5B2UDQ0_9FLAO 6-carboxytetrahydropteri n synthase OS=Chryseobacterium sediminis OX=1679494 GN= FW780_09870 PE=4 SV=1
MIRITKIFTFETAHVLYNYDGKCKNMHGHSYKLFVTVKGKPINDIENPKNGMVVDFGDIKSIVNSEIVDVWDHAVLVNALSPHKELGDDLEQKGHKVIYCSFQPTCENMLYAIAAKVKSKLPDGISLAYLKLHETENSYGEWFAEDNQ

SEQ ID NO: 19263 - protein, 148 aa, Chryseobacterium shandongense
  misc_feature (1)..(148): tr|A0A3G6N0K1|A0A3G6N0K1_9FLAO 6-carboxy-5,6,7,8-tetrah ydropterin synthase OS=Chryseobacterium shandongense OX =1493872 GN=EG350_15705 PE=3 SV=1
MIRITKIFTFETAHVLYNYDGKCKNMHGHSYKLFVTVKGKPINDLEHPKNGMVVDFGDIKSIVKSEIVDVWDHAVLINGLSPHKELGEDLEGKGHKVIYCTFQPTCENMLYAIAAKIKSKLPEGISLAYLKLHETENSYGEWFAEDNQ

SEQ ID NO: 19264 - protein, 148 aa, Chryseobacterium shigense; identical to SEQ ID NO: 19205
  misc_feature (1)..(148): tr|A0A1N7INF0|A0A1N7INF0_9FLAO 6-pyruvoyltetrahydropter in/6-carboxytetrahydropterin synthase OS=Chryseobacteri um shigense OX=297244 GN=NCTC13533_00631 PE=4 SV=1

SEQ ID NO: 19265 - protein, 148 aa, Chryseobacterium soldanellicola
  misc_feature (1)..(148): tr|A0A1H1DHM4|A0A1H1DHM4_9FLAO 6-pyruvoyltetrahydropter in/6-carboxytetrahydropterin synthase OS=Chryseobacteri um soldanellicola OX=311333 GN=SAMN05421664_2485 PE=4 S V=1
MIRITKIFTFETAHVLYNYDGKCKNMHGHSYKLFVTVKGKPVNDLENPKNGMVVDFGDIKSIVKSEIVDVWDHAVLINGISPHKELGESLENQGHKVIYCTFQPTCENMLYAIAAKIKSKLPAGVSLAYLKLHETENSYGEWFAEDNQ

SEQ ID NO: 19266 - protein, 147 aa, Chryseobacterium soli
  misc_feature (1)..(147): tr|A0A086A990|A0A086A990_9FLAO 6-carboxy-5,6,7,8-tetrah ydropterin synthase OS=Chryseobacterium soli OX=445961 GN=IW15_05505 PE=3 SV=1
MIRITKIFTFETAHVLYNYDGKCKNMHGHSYKLFVTVKGKPINDMENPKNGMVVDFGDIKTIVKSEIVDVWDHAVLLNALSPHKELGEDLEEKGHKVIYCSFQPTCENMLYAIAAKIKSKLPADISLAYLKLHETENSYGEWFAEDN

SEQ ID NO: 19267 - protein, 148 aa, Chryseobacterium solincola
  misc_feature (1)..(148): tr|A0A0C1CJ17|A0A0C1CJ17_9FLAO 6-carboxy-5,6,7,8-tetrah ydropterin synthase OS=Chryseobacterium solincola OX=51 0955 GN=OA84_10185 PE=3 SV=1
MIRITKIFTFETAHVLYNYDGKCKNMHGHSYKLFVTVKGNPIDDLENPKNGMVVDFGDIKKIVKSEILSVWDHAVLLNGLSPHKNLGEDLEKQGHKVIYCDYQPTCENMLYDIAKKVQFHLPKNVSLAYLKLHETENSYGEWFAEDQV

SEQ ID NO: 19268 - protein, 147 aa, Chryseobacterium sp.
  misc_feature (1)..(147): tr|A0A368N550|A0A368N550_9FLAO 6-carboxy-5,6,7,8-tetrah ydropterin synthase OS=Chryseobacterium sp. YLOS41 OX=2 058346 GN=DQ356_00100 PE=3 SV=1
MIRITKIFTFETAHVLYNYDGKCKNMHGHSYKLFVTVKGTPINDLNHPKNGMVIDFGDIKKIVKEEITEIWDHAVLVHGGSPHIELGQDLEQKGHKVIYCDFQPTCENMLYAIASRIKSRLPDGISLAYLKLHETENSYGEWIAEEN

SEQ ID NO: 19269 - protein, 148 aa, Chryseobacterium sp.
  misc_feature (1)..(148): tr|A0A316X912|A0A316X912_9FLAO 6-carboxytetrahydropteri n synthase OS=Chryseobacterium sp. ISE14 OX=475075 GN=C 1631_009715 PE=4 SV=1
MIRITKIFTFETAHVLYNYDGKCKNMHGHSYKLFVTVKGKPINDIDSPKNGMVVDFGDIKSIVKSEIVDVWDHAVLVNALSPHKELGDDLEQKGHKVIYCSFQPTCENMLYAIASKVKSKLPEGISLAYLKLHETENSYGEWFAEDNQ

SEQ ID NO: 19270 - protein, 148 aa, Chryseobacterium taeanense
  misc_feature (1)..(148): tr|A0A1G8E5Y2|A0A1G8E5Y2_9FLAO 6-pyruvoyltetrahydropter in/6-carboxytetrahydropterin synthase OS=Chryseobacteri um taeanense OX=311334 GN=SAMN05421846_101428 PE=4 SV=1
MIRITKIFTFETAHVLYNYDGKCKNMHGHSYKLFVTVKGKPVNDLENPKNGMVVDFGDIKSIVKSEIVDVWDHAVLINGLSPHKELGEDLEEKGHKVIYCTFQPTCENMLYAIAAKIKSKLPEEISLTYLKLHETENSYGEWFAEDNQ

SEQ ID NO: 19271 - protein, 123 aa, Chryseobacterium taichungense
  misc_feature (1)..(123): tr|A0A1H7VWZ3|A0A1H7VWZ3_9FLAO 6-pyruvoyltetrahydropter in/6-carboxytetrahydropterin synthase OS=Chryseobacteri um taichungense OX=295069 GN=SAMN05421856_101316 PE=4 S V=1
MHGHSYKLFVTVKGKPVNDLENPKNGMVVDFGDIKSIVKSEIVDVWDHAVLINGLSPHKELGEDLEEKGHKVIYCTFQPTCENMLYAIAAKIKSKLPEGISLAYLKLHETENSYGEWLAEDNQ

SEQ ID NO: 19272 - protein, 122 aa, Chryseobacterium taihuense; identical to SEQ ID NO: 19221
  misc_feature (1)..(122): tr|A0A1G9N0K2|A0A1G9N0K2_9FLAO 6-pyruvoyltetrahydropter in/6-carboxytetrahydropterin synthase OS=Chryseobacteri um taihuense OX=1141221 GN=SAMN05216273_106157 PE=4 SV= 1

SEQ ID NO: 19273 - protein, 148 aa, Chryseobacterium taiwanense
  misc_feature (1)..(148): tr|A0A0B4D0I3|A0A0B4D0I3_9FLAO 6-carboxy-5,6,7,8-tetrah ydropterin synthase OS=Chryseobacterium taiwanense OX=3 63331 GN=RM51_13690 PE=3 SV=1
MIRITKIFTFETAHVLYNYDGKCKNMHGHSYKLFVTVKGKPINDLENPKNGMVVDFGEIKTIVKSEIVDVWDHAVMINGLSPHKELGESLENQGHKVIYCTFQPTCENMLYAIASKIKSRLPEGISLAYLKLHETENSYGEWFAEDNQ

SEQ ID NO: 19274 - protein, 148 aa, Chryseobacterium takakiae; identical to SEQ ID NO: 19263
  misc_feature (1)..(148): tr|A0A1M4Z0B5|A0A1M4Z0B5_9FLAO 6-carboxy-5,6,7,8-tetrah ydropterin synthase OS=Chryseobacterium takakiae OX=130 2685 GN=SAMN05444408_10918 PE=3 SV=1

SEQ ID NO: 19275 - protein, 122 aa, Chryseobacterium taklimakanense
  misc_feature (1)..(122): tr|A0A239XRX4|A0A239XRX4_9FLAO Queuosine biosynthesis p rotein QueD OS=Chryseobacterium taklimakanense OX=53644 1 GN=SAMEA4412677_02018 PE=4 SV=1
MHGHSYKLFVTVKGKPIDDLNNPKNGMVVDFGDIKKIVKEEVVDVWDHAVLINALSPHKELGEDLERKGHKVIYCNYQPTCENMLYDIAEKIKKHLTQHVQLAYLKMHETENSYGEWFAEEN

SEQ ID NO: 19276 - protein, 147 aa, Chryseobacterium taklimakanense
  misc_feature (1)..(147): tr|A0A3G8WNI7|A0A3G8WNI7_9FLAO 6-carboxytetrahydropteri n synthase QueD OS=Chryseobacterium taklimakanense OX=5 36441 GN=queD PE=4 SV=1
MIRITKIFTFETAHVLYNYDGKCKNMHGHSYKLFVTVKGKPIDDLNNPKNGMVVDFGDIKKIVKEEVVDVWDHAVLINALSPHKELGEDLERKGHKVIYCNYQPTCENMLYDIAEKIKKHLPQHVQLAYLKMHETENSYGEWFAEEN

SEQ ID NO: 19277 - protein, 148 aa, Chryseobacterium treverense
  misc_feature (1)..(148): tr|A0A1I3JAD7|A0A1I3JAD7_9FLAO 6-pyruvoyltetrahydropter in/6-carboxytetrahydropterin synthase OS=Chryseobacteri um treverense OX=631455 GN=SAMN05421638_0052 PE=4 SV=1
MIRITKIFTFETAHVLYNYDGKCKNMHGHSYKLFVTVKGNPIDNLENPKNGMVVDFGDIKKIVKSEILSVWDHAVLLNGLSAHKNLGEDLEKQGHKVIYCDYQPTCENMLYDIAKKVQFHLPKNVSLAYLKLHETENSYGEWFAEDQL

SEQ ID NO: 19278 - protein, 148 aa, Chryseobacterium ureilyticum; identical to SEQ ID NO: 19196
  misc_feature (1)..(148): tr|A0A1N7M1W7|A0A1N7M1W7_9FLAO 6-carboxy-5,6,7,8-tetrah ydropterin synthase OS=Chryseobacterium ureilyticum OX= 373668 GN=SAMN05421786_102189 PE=3 SV=1

SEQ ID NO: 19279 - protein, 148 aa, Chryseobacterium viscerum
  misc_feature (1)..(148): tr|A0A316WJY6|A0A316WJY6_9FLAO 6-carboxytetrahydropteri n synthase OS=Chryseobacterium viscerum OX=1037377 GN=C 1634_010645 PE=4 SV=1
MIRITKIFTFETAHVLYNYDGKCKNMHGHSYKLFVTVKGKPINDIENPKNGMVVDFGDIKSIVKSEIVDVWDHSVLVNALSPHKELGDDLEQKGHKVIYCSFQPTCENMLYAIAAKVKSKLPDGISLAYLKLHETENSYGEWFAEDNQ

SEQ ID NO: 19280 - protein, 148 aa, Chryseobacterium wanjuense
  misc_feature (1)..(148): tr|A0A1I0MUW8|A0A1I0MUW8_9FLAO 6-carboxy-5,6,7,8-tetrah ydropterin synthase OS=Chryseobacterium wanjuense OX=35 6305 GN=SAMN05421841_0205 PE=3 SV=1
MIRITKIFTFETAHVLYNYDGKCKNMHGHSYKLFVTVKGKPINDLENPKNGMVVDFGDIKTIVKSEIVDVWDHAVLINALSPHKELGEDLEQKGHKVIYCTFQPTCENMLYAIAAKIKSRLPEGISLAYLKLHETENSYGEWFAEDNQ

SEQ ID NO: 19281 - protein, 147 aa, Chryseobacterium xixisoli
  misc_feature (1)..(147): tr|A0A4R8I9Y8|A0A4R8I9Y8_9FLAO 6-pyruvoyltetrahydropter in/6-carboxytetrahydropterin synthase OS=Chryseobacteri um xixisoli OX=1476462 GN=B0I22_0457 PE=4 SV=1
MIRITKIFTFETAHVLYNYDGKCKNMHGHSYKLFVTVKGNPINDLENQKNGMVVDFGDIKKIVKEEVVDVWDHAVMVNGASPHKLLGESLENQGHRVIFCDYQPTCENMLYDIASKIQSKLPASVQLAYLKLHETENSYGEWLAEEN

SEQ ID NO: 19282 - protein, 147 aa, Chryseobacterium zeae
  misc_feature (1)..(147): tr|A0A1N6HD50|A0A1N6HD50_9FLAO 6-pyruvoyltetrahydropter in/6-carboxytetrahydropterin synthase OS=Chryseobacteri um zeae OX=1416779 GN=SAMN05444409_2396 PE=4 SV=1
MIRITKIFTFETAHVLYNYDGKCKNMHGHSYKLFVTVKGNPINNLDDPKNGMVVDFGDIKKIVKEEIVDIWDHAVLVNGASPHKSLGENLQNEGHKVIFCDYQPTCENMLYDIASKIKSKLPSEIQLAYLKLHETENSYGEWLAEEN

SEQ ID NO: 19283 - protein, 135 aa, Chryseolinea flava
  misc_feature (1)..(135): tr|A0A364Y565|A0A364Y565_9BACT 6-carboxytetrahydropteri n synthase OS=Chryseolinea flava OX=2059302 GN=DQQ10_11 220 PE=4 SV=1
MKVKVSRKEHFNAAHRLFNPAWTAEENMKVFGKCSNPNYHGHNYELVVSVTGLPDPNTGYVYDMKVLSDIIKDNVLRKFDHRNLNLDIAEFNGVNPTAENIAAVIWKILREKIDTNLELKITLYETERNFVEYPA

SEQ ID NO: 19284 - protein, 139 aa, Chryseolinea flava
  misc_feature (1)..(139): tr|A0A364XZK8|A0A364XZK8_9BACT 6-carboxytetrahydropteri n synthase OS=Chryseolinea flava OX=2059302 GN=DQQ10_17 905 PE=4 SV=1
MIYVSRKEHFNAAHKLYNPKWTKEKNVEVFGPCANENWHGHNFDLIVTVKGIPDPESGFVVDLKKLSTLIRNEVIEKLDHKNLNTDVDFMKDKLASCENLIVEIWKILNSHLPSITSRGKLHCIRLYETPRNYVEYYGE

SEQ ID NO: 19285 - protein, 139 aa, Chryseolinea serpens
  misc_feature (1)..(139): tr|A0A1M5X1D0|A0A1M5X1D0_9BACT 6-pyruvoyltetrahydropter in/6-carboxytetrahydropterin synthase OS=Chryseolinea s erpens OX=947013 GN=SAMN04488109_6235 PE=4 SV=1
MVYVSRKEHFNAAHKLYNPKWSPERNVEVFGPCANDNWHGHNFELIVTVKGKPDPDTGFVVDLKQLSTLIRKEVIDKLDHKNLNLDVDFMTGKLASCENLIIEIWRILHAHLPSITPNGKLHSLRLFETPRNYVDYFGE

SEQ ID NO: 19286 - protein, 136 aa, Chryseolinea serpens
  misc_feature (1)..(136): tr|A0A1M5L2X8|A0A1M5L2X8_9BACT 6-pyruvoyltetrahydropter in/6-carboxytetrahydropterin synthase OS=Chryseolinea s erpens OX=947013 GN=SAMN04488109_0955 PE=4 SV=1
MKVKVSRREHFNAAHRLHNPAWTAEKNQQVFGKCNNPNYHGHNYELVVSLIGEPNPDTGYVYDLKVLSDLIKENVLKKFDHKNLNLDTEYFKDINPTAENIAVMIWRILRQKIDSNLELKITLYETERNFVEYPAA

SEQ ID NO: 19287 - protein, 136 aa, Chryseolinea sp.
  misc_feature (1)..(136): tr|A0A385SMR5|A0A385SMR5_9BACT 6-carboxytetrahydropteri n synthase OS=Chryseolinea sp. KIS68-18 OX=2321403 GN=D 4L85_21885 PE=4 SV=1
MKVKVSRREHFNAAHRLHNPAWTAEKNQQVFGKCNNPNYHGHNYELVVSLIGEPHPETGYVYDLKVLSDLIKESVLKKFDHKNLNLDTEYFKDINPTAENIAVMIWRILRQKIDSNLELKITLYETERNFVEYPAA

SEQ ID NO: 19288 - protein, 139 aa, Chryseolinea sp.
  misc_feature (1)..(139): tr|A0A385SEX2|A0A385SEX2_9BACT 6-carboxytetrahydropteri n synthase OS=Chryseolinea sp. KIS68-18 OX=2321403 GN=D 4L85_03785 PE=4 SV=1
MVYVSRKEHFNAAHKLYNPKWSQERNVEVFGPCANDNWHGHNFELIVTVKGQPDPDTGFVVDLKQLSNLIRKEVIDKLDHKNLNLDVDFMTGKLASCENLIIEIWRILHTHLPSITPHGKLHSLRLYETPRNYVDYFGE

SEQ ID NO: 19289 - protein, 115 aa, Chrysiogenales bacterium
  misc_feature (1)..(115): tr|A0A524JV60|A0A524JV60_9BACT 6-carboxy-5,6,7,8-tetrah ydropterin synthase OS=Chrysiogenales bacterium OX=2528 039 GN=E4H23_08140 PE=3 SV=1
MSWDLVVRQKFSAAHYLEHYRGKCEKMHGHTFEIEVHFQTNELDKSGISIDFSAIKEYLRGLVPDHKVLNELYEFSPSAENLARHFFEQIKLKYPVIKVMVWESDDAGAAYAEDQ

SEQ ID NO: 19290 - protein, 66 aa, Chrysiogenales bacterium
  misc_feature (1)..(66): tr|A0A524Q4G1|A0A524Q4G1_9BACT 6-pyruvoyl tetrahydropte rin synthase family protein (Fragment) OS=Chrysiogenale s bacterium OX=2528039 GN=E4G96_02955 PE=4 SV=1
MYRLTIHDYFSSAHQLKGYRGECEGVHGHNWKVEVEVEGEGLNDIGLLVDFHDLKAILKEVIDPLD

SEQ ID NO: 19291 - protein, 151 aa, Chthoniobacter flavus
  misc_feature (1)..(151): tr|B4D1V3|B4D1V3_9BACT 6-pyruvoyl-tetrahydropterin synt hase-like protein OS=Chthoniobacter flavus Ellin428 OX= 497964 GN=CfE428DRAFT_2891 PE=4 SV=1
MPYRICKTIDIENGHMLSKHPDKCQFPHGHTRKVEFVLEAAELDRNEMVCDFKIIKDAVGQWLDTFDHALCMNTSDPAYAEFKQRYGDRVIGFENQDPTTEVLARTIFDHASKALSAYSQKQDSRYPLRLDARLVTVRVWETATSWAEYAE

SEQ ID NO: 19292 - protein, 333 aa, Chthoniobacterales bacterium
  misc_feature (1)..(333): tr|A0A2W5ZM82|A0A2W5ZM82_9BACT Uncharacterized protein (Fragment) OS=Chthoniobacterales bacterium OX=2201154 G N=DLM52_08905 PE=4 SV=1
MLLTVSKRVDFSASRRLFSPNVSAEENRRLFGGETGARYGTGRNYTAYFVFAGEPDATTGMLINISEIKARAGAIIDDRYDHRFLNEDNESFRETVPTVENVARQLLHDIAPSFENNPAQLVAVHLRETPTRSATAYKNGAIEGNFWFDFSAARRTLSPRLSDAENQHLFGVSTHEHGHNYRARLTLRSDDAAPVFPVTQVEELMTNLRAELDHKNLSRDVAALRDRPTTTESLARFILQSGSSLDSLARVRLHERDDFFAEAQRDGRVFLGMRRSFSASHRLHVSSFTDEKNAELFGKCNNLRGHGHWYVTESTIGGEYDQRTGALFSFAGL

SEQ ID NO: 19293 - protein, 405 aa, Chthoniobacterales bacterium
  misc_feature (1)..(405): tr|A0A2W5YW15|A0A2W5YW15_9BACT Uncharacterized protein OS=Chthoniobacterales bacterium OX=2201154 GN=DLM73_030 80 PE=4 SV=1
MLLTVSKRLEFSASRRLFVKEWSDAENLAAFGPETAARHGTGRNYAAYFIFSGTVDPATGMLMNISEIKERAGQVLRDGFDHKFLNADNSTFSNVPPTAENIARELFVDATPLFQDSKAQLMACHLSESDERSATFFAKGTTESNHWFEFSAARQTMSPLLSAEENEKLFGAAASPFGHGHNYRARVTFRSEAGSSSDGSSASQEIKSALASVQRELDHKNLNREVPGLTNQRITTEKLARYIHGRVAEKLPVHRVRLHERRDFFAEYWKGGSYFLGLQVPFSAAHRLHSHVLSTEENLALYGKCNNPLGHGHLYVTEATIGGIFDERSGTLSDFIAFQSGIADAIQPWQDKHLDFEMEEFRNKPSTGENIVQALWPRFDSRLDGRLVRLRLWETANNRFTLRKL

SEQ ID NO: 19294 - protein, 267 aa, Chthonomonas calidirosea
  misc_feature (1)..(267): tr|S0ESN2|S0ESN2_CHTCT 6-pyruvoyl-tetrahydropterin synt hase OS=Chthonomonas calidirosea (strain DSM 23976 / IC MP 18418 / T49) OX=1303518 GN=CCALI_00091 PE=4 SV=1
MLIMTRRLYFAAAHRDIQGSELTGHTYTLDVAVSGHINERTGLLVNIKELDRIVKEHVLNQIDGKCLNDRLSFFQAHLATPENIATYIAGTVHPFLPSDIHLHSVRLQPTPVLYTEWLSSLKEVSHMLLTKIYEFSASHRLHSDSLSAEENRTLFGKCNNPNGHGHNYELEVTICGPINPITGRVLPPERLDAVVEREVLSRYDHRYLNLDVPEFAHVVPSAEMIVKTIWERLRPCIPAPARLYRLRLYETPRNLFEYSEEDDKEQR

SEQ ID NO: 19295 - protein, 126 aa, Chthonomonas calidirosea
  misc_feature (1)..(126): tr|S0EU80|S0EU80_CHTCT 6-carboxy-5,6,7,8-tetrahydropter in synthase OS=Chthonomonas calidirosea (strain DSM 239 76 / ICMP 18418 / T49) OX=1303518 GN=CCALI_01012 PE=3 S V=1
MELFKEFYIEAAHRLPHVPEGHKCARLHGHSFRITIYVSGSPDPQLGWVMDFADIGEAFRPLYDMLDHRYLNEIEGLENPTSENLARWIWQRLKPRLPGLCRIVIQETCTSGCTYTGEQDHDTSVV

SEQ ID NO: 19296 - protein, 118 aa, Ciceribacter sp.
  misc_feature (1)..(118): tr|A0A4Q2TEU0|A0A4Q2TEU0_9RHIZ 6-carboxy-5,6,7,8-tetrah ydropterin synthase OS=Ciceribacter sp. F8825 OX=250971 7 GN=queD PE=3 SV=1
MYRITKEFHFSASHQLKGLPADHQCARLHGHNYVVEVELSAAELDEHGFVRDYHELAPLKRYIDEAFDHRHLNDVLGHDKVTAECLARHFYDWCKVRLPETSAVRVSETPKTWAEYRP

SEQ ID NO: 19297 - protein, 117 aa, Citreicella sp.
  misc_feature (1)..(117): tr|D0DDU1|D0DDU1_9RHOB 6-carboxy-5,6,7,8-tetrahydropter in synthase OS=Citreicella sp. SE45 OX=501479 GN=queD P E=3 SV=1
MFRIRKEFHFSASHRLEHLPPDHQCARLHGHNYVVVVELAAETLNADGFVRDYHDLADLKTYIDGQFDHRHLNDVLEVPSTAEHMARHFFDWCRARWPETSAVLVSETPKTWAEYRP

SEQ ID NO: 19298 - protein, 120 aa, Citrobacter amalonaticus
  misc_feature (1)..(120): tr|A0A515AK03|A0A515AK03_CITAM 6-carboxy-5,6,7,8-tetrah ydropterin synthase OS=Citrobacter amalonaticus OX=3570 3 GN=queD PE=3 SV=1
MSTTLFKDFTFEAAHRLPHVPEGHKCGRLHGHSFMVRLEITGEVCPHTGWIMDFAELKAAFKPTYERLDHYYLNDIPGLENPTSEVLAKWIWDQVKPAVPLLSAVMVKETCTAGCVYRGE

SEQ ID NO: 19299 - protein, 120 aa, Citrobacter amalonaticus
  misc_feature (1)..(120): tr|A0A0X8S2H4|A0A0X8S2H4_CITAM 6-carboxy-5,6,7,8-tetrah ydropterin synthase OS=Citrobacter amalonaticus OX=3570 3 GN=queD PE=3 SV=1
MSTTLFKDFTFEAAHRLPHVPEGHKCGRLHGHSFMVRLEITGEVCPHTGWIMDFAELKAAFKPTYDRLDHYYLNDIPGLENPTSEVLAKWIWDQVKPAVPLLSAVMVKETCTAGCVYRGE

SEQ ID NO: 19300 - protein, 120 aa, Citrobacter braakii
  misc_feature (1)..(120): tr|A0A4R0LRS9|A0A4R0LRS9_CITBR 6-carboxy-5,6,7,8-tetrah ydropterin synthase OS=Citrobacter braakii OX=57706 GN= queD PE=3 SV=1
MTTTLFKDFTFEAAHRLPHVPEGHKCGRLHGHSFMVRLEITGEVDPHTGWIMDFSELKAAFKPTYNRLDHYYLNDIPGLENPTSEVLAKWIWDQVKPVVPLLSAVMVKETCTAGCVYRGE

SEQ ID NO: 19301 - protein, 120 aa, Citrobacter braakii
  misc_feature (1)..(120): tr|A0A1R0FZ92|A0A1R0FZ92_CITBR 6-carboxy-5,6,7,8-tetrah ydropterin synthase OS=Citrobacter braakii OX=57706 GN= queD PE=3 SV=1
MSTTLFKDFTFEAAHRLPHVPEGHKCGRLHGHSFMVRLEITGEVDPHTGWIMDFSELKAAFKPTYNRLDHYYLNDIPGLENPTSEVLAKWIWDQVKPVVPLLSAVMVKETCTAGCVYRGE

SEQ ID NO: 19302 - protein, 121 aa, Citrobacter farmeri
  misc_feature (1)..(121): tr|A0A223JVH1|A0A223JVH1_9ENTR 6-carboxy-5,6,7,8-tetrah ydropterin synthase OS=Citrobacter farmeri OX=67824 GN= queD PE=3 SV=1
MMTTTLFKDFTFEAAHRLPHVPEGHKCGRLHGHSFMVRLEVTGEVCPHTGWIIDFAELKAAFKPTYDRLDHYYLNDIPGLENPTSEVLAKWIWDQVKPAIPLLSAVMIKETCTAGCVYRGE

SEQ ID NO: 19303 - protein, 121 aa, Citrobacter farmeri
  misc_feature (1)..(121): tr|A0A223JYS9|A0A223JYS9_9ENTR 6-carboxy-5,6,7,8-tetrah ydropterin synthase OS=Citrobacter farmeri OX=67824 GN= queD PE=3 SV=1
MKTTLYKDFTFEAAHRLPNVSEGHKCGRLHGHSFVVRLEITGEVDPNTGWIIDFAELKAIFKPTLDRLDHYYLNDIPGLENPTSEVLAEWVWQQIKPQLPLLSAVIVKETCTAGCIYRGEL

SEQ ID NO: 19304 - protein, 120 aa, Citrobacter freundii
  misc_feature (1)..(120): tr|A0A0P8KDJ9|A0A0P8KDJ9_CITFR 6-carboxy-5,6,7,8-tetrah ydropterin synthase OS=Citrobacter freundii OX=546 GN=A N672_08440 PE=3 SV=1
MSTTLFKDFTFEAAHRLPHVPEGHKCGRLHGHSFMVRLEITGEVDPHTGWIMDFAELKAAFKPTYNRLDHYYLNDIPGLENPTSEVLAKWIWDQIKPVVPLLSAVMVKETCTAGCVYRGE

SEQ ID NO: 19305 - protein, 120 aa, Citrobacter freundii
  misc_feature (1)..(120): tr|A0A064DKJ8|A0A064DKJ8_CITFR 6-carboxy-5,6,7,8-tetrah ydropterin synthase OS=Citrobacter freundii MGH 56 OX=1 439318 GN=AF42_03208 PE=3 SV=1
MSTTLFKDFTFEAAHRLPHVPEGHKCGRLHGHSFMVRLEITGEVDPHTGWIMDFSELKAAFKPTYDRLDHYYLNDIPGLENPTSEVLAKWIWDQVKPVVPLLSAVMVKETCTAGCVYRGE

SEQ ID NO: 19306 - protein, 120 aa, Citrobacter gillenii
  misc_feature (1)..(120): tr|A0A3E2KPT5|A0A3E2KPT5_9ENTR 6-carboxy-5,6,7,8-tetrah ydropterin synthase OS=Citrobacter gillenii OX=67828 GN =queD PE=3 SV=1
MSTTLFKDFTFEAAHHLPHVPEGHKCGRLHGHSFMVRLEITGEVDPHTGWIMDFSELKAAFKPTYNRLDHYYLNDIPGLENPTSEVLAKWIWDEMKPLVPLLSAVMVKETCTAGCVYRGE

SEQ ID NO: 19307 - protein, 120 aa, Citrobacter koseri
  misc_feature (1)..(120): tr|A8ANX3|A8ANX3_CITK8 6-carboxy-5,6,7,8-tetrahydropter in synthase OS=Citrobacter koseri (strain ATCC BAA-895 / CDC 4225-83 / SGSC4696) OX=290338 GN=CKO_04120 PE=3 S V=1
MSTTLFKDFTFEAAHRLPHVPEGHKCGRLHGHSFMVRLEITGDVDPHTGWIMDFAELKAAFKPTYDRLDHYYLNDIPGLENPTSEVLAKWIWDQVKPAVPLLSAVMVKETCTAGCVYRGE

SEQ ID NO: 19308 - protein, 120 aa, Citrobacter koseri; identical to SEQ ID NO: 19307
  misc_feature (1)..(120): tr|A0A336PYX9|A0A336PYX9_CITKO 6-carboxy-5,6,7,8-tetrah ydropterin synthase OS=Citrobacter koseri OX=545 GN=que D PE=3 SV=1

SEQ ID NO: 19309 - protein, 120 aa, Citrobacter murliniae
  misc_feature (1)..(120): tr|A0A4S3S338|A0A4S3S338_9ENTR 6-carboxy-5,6,7,8-tetrah ydropterin synthase OS=Citrobacter murliniae OX=67829 G N=queD PE=3 SV=1
MTTTLFKDFTFEAAHRLPHVPEGHKCGRLHGHSFMVRLEITGEVDPHTGWIMDFSELKAAFKPTYDRLDHYYLNDIPGLSNPTSEVLAKWIWDEVKPVVPLLSAVMVKETCTAGCVYRGE

SEQ ID NO: 19310 - protein, 120 aa, Citrobacter pasteurii
  misc_feature (1)..(120): tr|A0A0A1RUH5|A0A0A1RUH5_9ENTR 6-carboxy-5,6,7,8-tetrah ydropterin synthase OS=Citrobacter pasteurii OX=1563222 PE=3 SV=1
MSTTLFKDFTFEAAHHLPHVPEGHKCGRLHGHSFMVRLEITGEVDPHTGWIMDFAELKAAFKPTYDRLDHYYLNDIPGLENPTSEVLSRWIWEQVKPVVPLLSAVMVKETCTAGCVYRGE

SEQ ID NO: 19311 - protein, 120 aa, Citrobacter portucalensis
  misc_feature (1)..(120): tr|A0A4P7UVN9|A0A4P7UVN9_9ENTR 6-carboxy-5,6,7,8-tetrah ydropterin synthase OS=Citrobacter portucalensis OX=163 9133 GN=queD PE=3 SV=1
MSTTLFKDFTFEAAHHLPHVPEGHKCGRLHGHSFMVRLEITGEVDPHTGWIMDFAELKAAFKPTYDRLDHYYLNDIPGLENPTSEVLAKWIWDQVKPVVPLLSAVMVKETCTAGCVYRGE

SEQ ID NO: 19312 - protein, 121 aa, Citrobacter rodentium
  misc_feature (1)..(121): tr|A0A482PNG3|A0A482PNG3_CITRO 6-carboxy-5,6,7,8-tetrah ydropterin synthase OS=Citrobacter rodentium OX=67825 G N=queD PE=3 SV=1
MMTTTLFKDFTFEAAHRLPHVPEGHKCGRLHGHSFMVRLEITGEVDPHTGWIIDFAELKAAFKPTYDRLDHHYLNEIPGLSNPTSEVLAKWIWDEVKPTMPLLSAVMVKETCTAGCVYRGE

SEQ ID NO: 19313 - protein, 120 aa, Citrobacter sp.
  misc_feature (1)..(120): tr|A0A4U6GP12|A0A4U6GP12_9ENTR 6-carboxy-5,6,7,8-tetrah ydropterin synthase OS=Citrobacter sp. wls716 OX=257642 0 GN=queD PE=3 SV=1
MSTTLFKDFTFEAAHRLPHVPEGHKCGRLHGHSFMVRLEITGEVDPHTGWIMDFSELKAAFKPTYDRLDHYYLNDIPGLENPTSEVLAKWIWEQVKPVVPLLSAVMVKETCTAGCVYRGE

SEQ ID NO: 19314 - protein, 120 aa, Citrobacter sp.; identical to SEQ ID NO: 19305
  misc_feature (1)..(120): tr|A0A4P6WP30|A0A4P6WP30_9ENTR 6-carboxy-5,6,7,8-tetrah ydropterin synthase OS=Citrobacter sp. LY-1 OX=2546350 GN=queD PE=3 SV=1

SEQ ID NO: 19315 - protein, 120 aa, Citrobacter werkmanii
  misc_feature (1)..(120): tr|A0A422V964|A0A422V964_9ENTR 6-carboxy-5,6,7,8-tetrah ydropterin synthase OS=Citrobacter werkmanii OX=67827 G N=queD PE=3 SV=1
MSTTLFKDFTFEAAHRLPHVPEGHKCGRLHGHSFMVRLEITGEVDPHTGWIMDFAELKAAFKPTYDRLDHYYLNDIPGLENPTSEVLAKWIWDQVKPVVPLLSAVMVKETCTAGCVYRGE

SEQ ID NO: 19316 - protein, 120 aa, Citrobacter werkmanii; identical to SEQ ID NO: 19315
  misc_feature (1)..(120): tr|A0A090U157|A0A090U157_9ENTR 6-carboxy-5,6,7,8-tetrah ydropterin synthase OS=Citrobacter werkmanii NBRC 10572 1 OX=1114921 GN=queD PE=3 SV=1

SEQ ID NO: 19317 - protein, 120 aa, Citrobacter youngae; identical to SEQ ID NO: 19315
  misc_feature (1)..(120): tr|D4BH08|D4BH08_9ENTR 6-carboxy-5,6,7,8-tetrahydropter in synthase OS=Citrobacter youngae ATCC 29220 OX=500640 GN=queD PE=3 SV=1

SEQ ID NO: 19318 - protein, 120 aa, Citrobacter youngae; identical to SEQ ID NO: 19313
  misc_feature (1)..(120): tr|A0A549VC26|A0A549VC26_9ENTR 6-carboxy-5,6,7,8-tetrah ydropterin synthase OS=Citrobacter youngae OX=133448 GN =queD PE=3 SV=1

SEQ ID NO: 19319 - protein, 123 aa, Cloacibacillus porcorum
  misc_feature (1)..(123): tr|A0A1B2I7B1|A0A1B2I7B1_9BACT 6-carboxy-5,6,7,8-tetrah ydropterin synthase OS=Cloacibacillus porcorum OX=11977 17 GN=BED41_12575 PE=3 SV=1
MLLCRDFKFDAAHNLIHYHGKCERLHGHTYHLRVTLEGEPDAEGMIFDFVDLKKAVNELVLSKLDHAYINDILPQPTAEYIAVWIFRALDGPLSRANCRLHEIRLWETESSSVICRREDVKDA

SEQ ID NO: 19320 - protein, 188 aa, Cloacibacillus porcorum
  misc_feature (1)..(188): tr|A0A1B2I6B8|A0A1B2I6B8_9BACT Rubredoxin OS=Cloacibaci llus porcorum OX=1197717 GN=BED41_10820 PE=4 SV=1
MKSIAKLDLQYAHRFYGFKGEAQYLHGHTGILTIEVEGSVNPGVNMVFPCNEIQKTAWDVLKNFDHALILREDDPLLPAVLDVYEKQGIRNGAPSNTMKGPAFKTELATAYPECRLVVTKETMTVEGMIKIVYDLLKDKLNIVKLTFSSGVNEASEEYEPHLNVDRCPLCGIALDENGVCPKCGYRKA

SEQ ID NO: 19321 - protein, 123 aa, Cloacibacillus sp.
  misc_feature (1)..(123): tr|A0A1Y4GD18|A0A1Y4GD18_9BACT 6-carboxy-5,6,7,8-tetrah ydropterin synthase OS=Cloacibacillus sp. An23 OX=19655 91 GN=B5F39_06290 PE=3 SV=1
MLLCRDFKFDAAHNLIHYHGKCERLHGHTYHLRVTLEGEPDAEGMIYDFVDLKKAVTELVLDRLDHAYINDVIPQPTAEYISRWIFRELDAPLRRDNCRLFEVQLWETEGSSVICRREDVKDA

SEQ ID NO: 19322 - protein, 123 aa, Cloacibacterium normanense
  misc_feature (1)..(123): tr|A0A1E5UE45|A0A1E5UE45_9FLAO 6-pyruvoyl tetrahydropte rin synthase family protein OS=Cloacibacterium normanen se OX=237258 GN=BHF72_2307 PE=4 SV=1
MHGHSYKLFVTVKGTPINDINNVKNGMVVDFGDIKKIVKEEIVEVWDHAVLLNALTPHKELGEDLANKGHKVIECNYQPTCENMLYEIAEKIKNKLPSHVQLAYLKLHETENSYGEWFAEENS

SEQ ID NO: 19323 - protein, 148 aa, Cloacibacterium normanense
  misc_feature (1)..(148): tr|A0A2S7I2I4|A0A2S7I2I4_9FLAO 6-carboxy-5,6,7,8-tetrah ydropterin synthase OS=Cloacibacterium normanense OX=23 7258 GN=queD PE=3 SV=1
MIRITKIFTFETAHVLYNYDGKCKNMHGHSYKLFVTVKGTPINDINNVKNGMVVDFGDIKKIVKEEIVDVWDHAVLLNALTPHKELGEDLAQKGHKVIECNYQPTCENMLYEIAEKIKNKLPSHVQLAYLKLHETENSYGEWFAEENS

SEQ ID NO: 19324 - protein, 126 aa, Cloacimonas acidaminovorans
  misc_feature (1)..(126): tr|B0VJG6|B0VJG6_CLOAI 6-carboxy-5,6,7,8-tetrahydropter in synthase OS=Cloacimonas acidaminovorans (strain Evry ) OX=459349 GN=CLOAM1792 PE=3 SV=1
MFYLNVIETFSAAHLLRGYEGACSKLHGHNWKVRVCVKTKEQDEIGMAMDFGVLKTILSNILNNLDHSYLNEIVPFTERNPTSENLAKYIYECMEKELQDKPVAISEVEVYESEKSSVIYKNDQIC

SEQ ID NO: 19325 - protein, 127 aa, Clostridia bacterium
  misc_feature (1)..(127): tr|A0A523C2D6|A0A523C2D6_9FIRM 6-carboxy-5,6,7,8-tetrah ydropterin synthase OS=Clostridia bacterium OX=2044939 GN=queD PE=3 SV=1
MYRLRVKDHFQAAHQLPDHPGKCSRLHGHTYQVEICVAGNDLGAGGMLMDLGELKQVVSQALTPLDHSYLNEVPELQGKLPTAENLCRYLYDCLQAEMPAQVLVEEVQVWESDHAGAGYRGEDGCGQ

SEQ ID NO: 19326 - protein, 140 aa, Clostridiaceae bacterium
  misc_feature (1)..(140): tr|A0A316N5S5|A0A316N5S5_9CLOT 6-carboxy-5,6,7,8-tetrah ydropterin synthase OS=Clostridiaceae bacterium OX=1898 204 GN=queD PE=3 SV=1
MYQLTIEQSFDSAHFLAGYQGKCGNIHGHRWRVLLVIQEEKLREEQQQRGMCVDFSTLKDELKEVADQYDHSFLIEKDTLKERTLEALKEEGFSWVELEFRPTAENFAKHFYDLFSQKGYDVARVQVYETPNNCATYTES

SEQ ID NO: 19327 - protein, 139 aa, Clostridiales bacterium; identical to SEQ ID NO: 17474
  misc_feature (1)..(139): tr|A0A1Q6ND25|A0A1Q6ND25_9FIRM 6-carboxy-5,6,7,8-tetrah ydropterin synthase OS=Clostridiales bacterium 42_27 OX =1897045 GN=BHV90_10440 PE=3 SV=1

SEQ ID NO: 19328 - protein, 427 aa, Clostridiales bacterium
  misc_feature (1)..(427): tr|A0A1M2Z9I2|A0A1M2Z9I2_9FIRM Uncharacterized protein OS=Clostridiales bacterium 43-6 OX=1895747 GN=BGN88_004 80 PE=4 SV=1
MSKQEYRFIFYLDAMHSIITNGVRGSEHQHTWKIGLTVFKLNDNFIEFHEFEQVIKEFLSIYQNKNFDRLPYFEDCVPTIENITEYFKVQLESLLFLRGWQLLRIEISDSPNRTYIYKTDHEAPEKHRNLSTDPVGKFFAPKPLIDKTEAPASPAGPTAVQPPVSEPPYTKPSEYTEHFAAEIPEPQANVSTSLNVIPDAPLIPETLLRDEEAVLNNNLEQYVDDRFNQFFEKISKRHDFTTPIPEPLPTTASPKVPPLQAEPKPLEQPKPAAERISIPKPSYSYTIPNIDAKPIDGFASTNLTLQEPADPPSTFEEIPLSVSKDETQKLFKNIEHAFSDFHTSLQPEPTPSDNRIFDSQKIRIETNNYKKKREIEYEQPVLYRELETLIQNERSRIKKRKRLLLLLISLLALSVSAVVILKILHII

SEQ ID NO: 19329 - protein, 132 aa, Clostridioides difficile
  misc_feature (1)..(132): tr|A0A449NLH8|A0A449NLH8_CLODI 6-carboxy-5,6,7,8-tetrah ydropterin synthase OS=Clostridioides difficile OX=1496 GN=queD PE=3 SV=1
MIKYATVICNFESGHFLAMGKKTREENSDIYGKCVNMHGHNYKLHVTVRGDISENGMIINFSKIKEIINKKIVQVFDHKVINDVINEIPTAENMCCIIWNILNKEFNLLGIVLSEIILFETDKSYVTFKEQI

SEQ ID NO: 19330 - protein, 130 aa, Clostridium aceticum
  misc_feature (1)..(130): tr|A0A0G3WDD3|A0A0G3WDD3_9CLOT 6-carboxy-5,6,7,8-tetrah ydropterin synthase OS=Clostridium aceticum OX=84022 GN =queD PE=3 SV=1
MYNKLIDVTKTFTFDSAHHLENYDGDCKYLHGHTYKLEITVRGKTDDCGMVIDFSELKAIVKKEVIKPLDHRYLNEVLDFNPTCENMIVWIFNKLEGLLKKERYWLQKIVLWETPTSFATLEKEQYDVES

SEQ ID NO: 19331 - protein, 141 aa, Clostridium acetireducens
  misc_feature (1)..(141): tr|A0A1E8EYF7|A0A1E8EYF7_9CLOT 6-carboxy-5,6,7,8-tetrah ydropterin synthase OS=Clostridium acetireducens DSM 10 703 OX=1121290 GN=CLOACE_13880 PE=3 SV=1
MYILKTEHSFDSAHFLAGYKGKCSNIHGHRWKVEVEIKSPTLVEGGQLDGMVIDFGDFKKDVKEMIDCYDHALIIQKDTMRNETLNYIKEDGFKVIEVDFRPTAENFAKFFFEIMKSKGYKVHRTTVFETPTNSAMYEEVI

SEQ ID NO: 19332 - protein, 118 aa, Clostridium acetobutylicum
  misc_feature (1)..(118): tr|Q97G44|Q97G44_CLOAB 6-pyruvoyl-tetrahydropterin synt hase related protein OS=Clostridium acetobutylicum (str ain ATCC 824 / DSM 792 / JCM 1419 / LMG 5710 / VKM B-17 87) OX=272562 GN=CA_C2526 PE=4 SV=1
MRTGYKFKFYLNARHVAIIDGRASNIHPHTWELLINVGAKEDYTISFGEVEKEVQAYLANYEGSFLNEKEEFKDINPTMESIGKVLIPYIKDIISKKEMKFISMEISENPTRTYVIEE

SEQ ID NO: 19333 - protein, 153 aa, Clostridium acetobutylicum
  misc_feature (1)..(153): tr|Q97FY9|Q97FY9_CLOAB 6-pyruvoyl-tetrahydropterin synt hase related domain conserved membrane protein OS=Clost ridium acetobutylicum (strain ATCC 824 / DSM 792 / JCM 1419 / LMG 5710 / VKM B-1787) OX=272562 GN=CA_C2
MKYNQYRFKFYLNAAHSIFLNGVLGDKHPHTWEITINTIKINDSFVIFNDVEKKIDKYLQGFQDIYLNDTEPFNKINPTLENICVYFKETLGKLLSKNGWVLLSIEISETPTRSYIIDVGDEVKYESAYEDNTSQMKYLKDAVKNKIERMKKI

SEQ ID NO: 19334 - protein, 143 aa, Clostridium acidisoli
  misc_feature (1)..(143): tr|A0A1W1XK78|A0A1W1XK78_9CLOT 6-carboxy-5,6,7,8-tetrah ydropterin synthase OS=Clostridium acidisoli DSM 12555 OX=1121291 GN=SAMN02745134_02138 PE=3 SV=1
MFILKSEIEFDSAHFLSGYEGKCANIHGHRYRLIVKIKGDKLKTSGNDRAMVEDFSFIKSTLKEIHDLFDHKIIIEDDEIGKDLINKLKTVPQEFKYELVQYRPTVEEMSRNIFFIIKGKGINIYEVELFETPTNSCIYREDD

SEQ ID NO: 19335 - protein, 187 aa, [Clostridium] aldenense
  misc_feature (1)..(187): tr|A0A3E2WPU7|A0A3E2WPU7_9FIRM Rubredoxin OS=[Clostridi um] aldenense OX=358742 GN=DWX59_07585 PE=4 SV=1
MRSITTLDLQYAHRFFGFKGEAQYLHGHTGILTIEVEDSIEPGVNMVFPCNEIQKTAWEVLKNFDHALILREDDPLLPAILKVYEEQGIRDGALTNKMKGPAFKTELATAYPECRLVVTKETMTVEGMIKIVYDLLKDKLNIAKITFSSGVNAATQEYQPSRTIDRCPLCGIALNENGVCPKCGYKK

SEQ ID NO: 19336 - protein, 187 aa, [Clostridium] aldenense
  misc_feature (1)..(187): tr|A0A413W0L5|A0A413W0L5_9FIRM Rubredoxin OS=[Clostridi um] aldenense OX=358742 GN=DW886_24365 PE=4 SV=1
MRSITTLDLQYAHRFFGFKGEAQYLHGHTGILTIEVEDSIEPGVNMVFPCNEIQKTAWEVLKNFDHALILREDDPLLPAILKVYEEQGIRDGAPTNKMKGPAFKTELATAYPECRLVVTKETMTVEGMIKIVYDLLKDKLNIAKITFSSGVNAATQEYQPSRTIDRCPLCGIALNENGVCPKCGYKK

SEQ ID NO: 19337 - protein, 139 aa, [Clostridium] algidixylanolyticum
  misc_feature (1)..(139): tr|A0A419T7J8|A0A419T7J8_9FIRM 6-carboxy-5,6,7,8-tetrah ydropterin synthase OS=[Clostridium] algidixylanolyticu m OX=94868 GN=BET01_13400 PE=3 SV=1
MYSLRTEHSFDSAHFLAGYEGKCSNIHGHRWQVVIEVKSLTLQTNQQLNGMLVDFAQLKKDIKEEVDFLDHAFIIEKNTLKPKTVAALEEEGFQIIVLDFRPTAENMAKYFYDRMEHRGYQVKSATVYETPNNCASYEE

SEQ ID NO: 19338 - protein, 143 aa, Clostridium argentinense
  misc_feature (1)..(143): tr|A0A0C1QZA1|A0A0C1QZA1_9CLOT 6-carboxy-5,6,7,8-tetrah ydropterin synthase OS=Clostridium argentinense CDC 274 1 OX=1418104 GN=queD PE=3 SV=1
MYILKAEQSFDSAHFLAGYEGKCSNIHGHRWKVEIEIKSQSLIKDGQLDGMVIDFGDLKKAVKDMVDYYDHGLIIQKETMREETLNCLLLDGFKIIEVDFRPTAENFAAFFFKTMKAQGFNVLRATVFETPTNSATYEEREES

SEQ ID NO: 19339 - protein, 163 aa, Clostridium autoethanogenum
  misc_feature (1)..(163): tr|A0A3M0T2F0|A0A3M0T2F0_9CLOT 6-pyruvoyl tetrahydrobio pterin synthase OS=Clostridium autoethanogenum OX=84023 GN=D9O40_00170 PE=4 SV=1
MKYNQYRFKFYLNASHSIYLKGILGEEHPHTWEITLDTVKLEDNFIIFNDIEKNIEKYLQKFQDKYINNITPFNTLNPTLENICAYFKECFESLLMENKWLLLSIEISETPTRSYIIDVSDEINYNNISYIKGKEKYNSNNGISIVNQEIDRITKLVIDKNKS

SEQ ID NO: 19340 - protein, 163 aa, Clostridium autoethanogenum
  misc_feature (1)..(163): tr|U5RYN3|U5RYN3_9CLOT 6-pyruvoyl tetrahydropterin synt hase-related domain protein OS=Clostridium autoethanoge num DSM 10061 OX=1341692 GN=CAETHG_2465 PE=4 SV=1
MKYNQYRFKFYLNASHSIYLKGILGEEHPHTWEITLDTVKLEDNFIIFNDIEKNIEEYLQKFQDKYINNITPFNTLNPTLENICAYFKECFESLLMENKWLLLSIEISETPTRSYIIDVSDEINYNNISHIKDKEKYNWNKGISIVNQEIDRITKLVIDKNKS

SEQ ID NO: 19341 - protein, 142 aa, Clostridium bartlettii
  misc_feature (1)..(142): tr|R5X9L7|R5X9L7_9CLOT 6-carboxy-5,6,7,8-tetrahydropter in synthase OS=Clostridium bartlettii CAG:1329 OX=12630 63 GN=BN488_00123 PE=3 SV=1
MFKVKSQIEFDMAHYLSGYNGKCSNIHGHRYKLIVSVKSETLHQEGQLRGMVDDFGNIKARLKEIEDLYDHKLVIEDNEDGRLVAQKLSELPNAFKVMLVPYRPTAEEMSRDIFYKLKDMGLNVSEVELFETPTNSCTYSED

SEQ ID NO: 19342 - protein, 142 aa, Clostridium beijerinckii
  misc_feature (1)..(142): tr|A0A0K2MDW4|A0A0K2MDW4_CLOBE 6-carboxy-5,6,7,8-tetrah ydropterin synthase OS=Clostridium beijerinckii NRRL B- 598 OX=1428454 GN=X276_13970 PE=3 SV=1
MFKIKSEVQFDMAHYLSGYEGKCSNIHGHRYKLIAKLKSEKLHQDGQLRGMVDDFGNFKNILKEIAETFDHKLIIENNEDGKALVKNLEELQNNFNIYLVDYRPTAEEMSRDIFNRLKAKGLSVCEVELFETPNNSCIYTED

SEQ ID NO: 19343 - protein, 142 aa, Clostridium beijerinckii; identical to SEQ ID NO: 19342
  misc_feature (1)..(142): tr|A0A1B9BKD4|A0A1B9BKD4_CLOBE 6-carboxy-5,6,7,8-tetrah ydropterin synthase OS=Clostridium beijerinckii OX=1520 GN=BGS1_24285 PE=3 SV=1

SEQ ID NO: 19344 - protein, 187 aa, [Clostridium] bolteae
  misc_feature (1)..(187): tr|R0AG37|R0AG37_9FIRM Rubredoxin OS=[Clostridium] bolt eae 90B8 OX=997897 GN=HMPREF1097_05523 PE=4 SV=1
MRSITTLDLQYAHRFYGFKGEAQYLHGHTGILTLEVEDTVNAGVNMVFPCNEIQKTAWEVLKNFDHATILREDDPLLPALLGVYEAQGIKDGAPNNIMKGPAFKTDLATAYPECRLVVTKETMTVEGMIKIVYDLLKDKLNIVKITFTSGVNAASEEFKPQRTMERCPLCGIALDENGVCPKCGYRK

SEQ ID NO: 19345 - protein, 187 aa, [Clostridium] bolteae
  misc_feature (1)..(187): tr|R0BS03|R0BS03_9FIRM Rubredoxin OS=[Clostridium] bolt eae 90A9 OX=997894 GN=HMPREF1085_04204 PE=4 SV=1
MRSITTLDLQYAHRFYGFKGEAQYLHGHTGILTLEVEDTVNAGVNMVFPCNEIQKTAWEVLKNFDHATILREDDPLLPALLGVYEAQGIKDGAPNNTMKGPAFKTELATAYPECRLVVTKETMTVEGMIKIVYDLLKDKLNIVKITFTSGVNAASEEFKPQRTMERCPLCGIALDENGVCPKCGYRK

SEQ ID NO: 19346 - protein, 187 aa, Clostridium bolteae; identical to SEQ ID NO: 19344
  misc_feature (1)..(187): tr|A8RMA2|A8RMA2_CLOBW Uncharacterized protein OS=Clost ridium bolteae (strain ATCC BAA-613 / WAL 16351) OX=411 902 GN=CLOBOL_01855 PE=4 SV=1

SEQ ID NO: 19347 - protein, 187 aa, Clostridium bolteae
  misc_feature (1)..(187): tr|R5F896|R5F896_9CLOT Uncharacterized protein OS=Clost ridium bolteae CAG:59 OX=1263064 GN=BN723_01238 PE=4 SV =1
MRSITTLDLQYAHRFYGFKGEAQYLHGHTGILTLEVEDTVNAGVNMVFPCNEIQKTAWEVLKNFDHATILREDDPLLPALLGVYEAQGIKDGAPNNTMKGPAFKTELATAYPECRLVVTKETMTVEGMIKIVYDLLKDKLNIVKITFTSGINAASEEFKPQRTMERCPLCGIALDENGVCPKCGYRK

SEQ ID NO: 19348 - protein, 142 aa, Clostridium bornimense
  misc_feature (1)..(142): tr|W6RZH4|W6RZH4_9CLOT 6-pyruvoyl tetrahydrobiopterin s ynthase OS=Clostridium bornimense OX=1216932 GN=CM240_0 232 PE=4 SV=1
MFKLRSEAQFDMAHYLSGYKGKCANIHGHRYRLIATLKAEELQKEGQCRGMVDDFTNFKNALRDIAESFDHKLIIEDNEDGRALAKQLEVLPNNFNIVFVPYRSTAEEMSRDIFNKLKAQGFPIYEVELFETPTNSCIYSEE

SEQ ID NO: 19349 - protein, 143 aa, Clostridium botulinum
  misc_feature (1)..(143): tr|C1FN24|C1FN24_CLOBJ 6-carboxy-5,6,7,8-tetrahydropter in synthase OS=Clostridium botulinum (strain Kyoto / Ty pe A2) OX=536232 GN=queD PE=3 SV=1
MYTLKVEHNFDSAHFLAGYEGKCGNIHGHRWKVEIQVQAESLVQGGQLDGMIIDFGDLKKDVKSMVDYYDHALIIEKGTMRGQSLSSLKEDGFRIIEVNFRPTAENFAAFFYKIMKDRGYNVKSTTVYETPNNSATYEESGVI

SEQ ID NO: 19350 - protein, 117 aa, Clostridium botulinum
  misc_feature (1)..(117): tr|A0A1J1CXW1|A0A1J1CXW1_CLOBO 6-carboxy-5,6,7,8-tetrah ydropterin synthase OS=Clostridium botulinum OX=1491 GN =queD PE=3 SV=1
MILIKKFKFDAAHNLIHYHGKCERLHGHTYGLVIKISGEPDKEDMVIDFTELKAIVKENVLDILDHAYINEIIKQPTAENIAVWIWDKLYTKLKRDNCSLYEIEVWETETSGVVYSG

SEQ ID NO: 19351 - protein, 141 aa, Clostridium butyricum
  misc_feature (1)..(141): tr|A0A2S7F9M6|A0A2S7F9M6_CLOBU 6-carboxy-5,6,7,8-tetrah ydropterin synthase OS=Clostridium butyricum OX=1492 GN =AWN73_14270 PE=3 SV=1
MFKLKSEVQFDMAHYLSGYNGKCSNIHGHRYRLIAKIGSETLHECGQCRGMVDDFSNFKNALKNIEETFDHKLVIEDNDEGRALSEKLKELPNNFDIYFVNYRPTAEEMSRDIFNRLKDMGLSVCEVELFETPNNSCIYSE

SEQ ID NO: 19352 - protein, 141 aa, Clostridium butyricum
  misc_feature (1)..(141): tr|A0A0Q0YQF4|A0A0Q0YQF4_CLOBU 6-carboxy-5,6,7,8-tetrah ydropterin synthase OS=Clostridium butyricum OX=1492 GN =AK964_07255 PE=3 SV=1
MFKLKSEVQFDMAHYLSGYNGKCSNIHGHRYRLIAKIGSETLHEYGQCRGMVDDFSNFKNALKNIEETFDHKLVIENNDEGRLLSEKLKELPNNFDIYFVNYRPTAEEMSRDIFNRLKDMGLSVCEVELFETPNNSCIYSE

SEQ ID NO: 19353 - protein, 138 aa, Clostridium carboxidivorans
  misc_feature (1)..(138): tr|C6PUT4|C6PUT4_9CLOT 6-carboxy-5,6,7,8-tetrahydropter in synthase OS=Clostridium carboxidivorans P7 OX=536227 GN=CcarbDRAFT_2551 PE=3 SV=1
MYSLKVELSFDSAHFLAGYKGKCSNIHGHRWRVEIEVQSENLIDSGQMDGMVVDFGDLKSDLKEMVDFYDHALIIQKGTMREETLKCLIQDEFKIIELEFRPTAENLAKFFFDTMKEKGYNMKRAVVYETPSNCAVYE

SEQ ID NO: 19354 - protein, 119 aa, Clostridium cavendishii
  misc_feature (1)..(119): tr|A0A1M6JAT6|A0A1M6JAT6_9CLOT 6-pyruvoyltetrahydropter in/6-carboxytetrahydropterin synthase OS=Clostridium ca vendishii DSM 21758 OX=1121302 GN=SAMN02745163_01968 PE =4 SV=1
MNTYYKFKFYINGRHSVTFGTNKSNIHPHTWEVVLIMKTKLDEEVNFTIFEKKLEEYFSNYEGKYLNELDEFIDINPTMENMGKILCEDIKALVDDEVLILKKIEISENPMRTYIIETI

SEQ ID NO: 19355 - protein, 187 aa, [Clostridium] celerecrescens
  misc_feature (1)..(187): tr|A0A084JPE4|A0A084JPE4_9FIRM Rubredoxin OS=[Clostridi um] celerecrescens OX=29354 GN=IO98_05395 PE=4 SV=1
MRSITTLDLQYAHRFFGFKGEAQYLHGHTGVLTIEVEDSVNSGVNMVFPCNEIQKTAWEVLKNFDHALILREDDPLLPAILDVYEKQGIKDGAPTNQMKGPAFKTELATAYPECRLVVTKETMTVEGMIKIVYDLLKDKLNIAKITFTSGVNAASEEFETKNNIDRCPLCGIALNENGVCPKCGYKK

SEQ ID NO: 19356 - protein, 145 aa, Clostridium cellulovorans
  misc_feature (1)..(145): tr|D9SMJ5|D9SMJ5_CLOC7 6-carboxy-5,6,7,8-tetrahydropter in synthase OS=Clostridium cellulovorans (strain ATCC 3 5296 / DSM 3052 / OCM 3 / 743B) OX=573061 GN=Clocel_419 0 PE=3 SV=1
MKEVYKLVSEHSMDSAHFLKDYDGKCSNIHGHRWRVVAEIFSDQLINEGAEKGMIVDFGIFKNDIRELVDFYDHCLIVEKGSLKTELFQMLTTEGFRVEEVSFRPTAENLAKFFFEQLKKKGHNMKSVVVYETPNNAATYEVTYV

SEQ ID NO: 19357 - protein, 142 aa, Clostridium chromiireducens
  misc_feature (1)..(142): tr|A0A1V4IC92|A0A1V4IC92_9CLOT 6-carboxy-5,6,7,8-tetrah ydropterin synthase OS=Clostridium chromiireducens OX=2 25345 GN=CLCHR_44110 PE=3 SV=1
MFKIKSEAQFDMAHYLSGYKGKCSNIHGHRYRLIVKLKSETLHADGQLRGMVDDFSNFKNSLKEIEEIFDHKLILEDNEEGKALAKKLADLPNDFDIYFVNYRPTAEEMSRDIFNRLKEKGLSVCEVELFETPNNSCIYTED

SEQ ID NO: 19358 - protein, 188 aa, [Clostridium] citroniae
  misc_feature (1)..(188): tr|A0A3E2V1P1|A0A3E2V1P1_9FIRM Rubredoxin OS=[Clostridi um] citroniae OX=358743 GN=DWZ14_28835 PE=4 SV=1
MRSITTLDLQYAHRFYGFKGEAQYLHGHTGILTIEVEDSVEPGVNMVFPCNEIQKTAWALLKNFDHALILREDDPLLPAILGVYEAQGIRDGAPNNQMKGPAFKTELATAYPECRLVVTKETMTVEGMIKIVYDLLKDKLNIAKITFSSGVNAASEEFKPTLKVDRCPLCGIALNENGVCPKCGYKKS

SEQ ID NO: 19359 - protein, 188 aa, [Clostridium] citroniae
  misc_feature (1)..(188): tr|A0A0J9C174|A0A0J9C174_9FIRM Uncharacterized protein OS=[Clostridium] citroniae WAL-19142 OX=742734 GN=HMPRE F9470_03056 PE=4 SV=1
MRSITTLDLQYAHRFYGFKGEAQYLHGHTGILTIEVEDSVEPGVNMVFPCNEIQKTAWALLKNFDHALILREDDPLLPAILGVYEAQGIRDGAPNNQMKGPAFKTELATAYPECRLVVTKETMTVEGMIKIIYDLLKDKLNIAKITFSSGVNAASEEFKPTLKVDRCPLCGIALNENGVCPKCGYKKS

SEQ ID NO: 19360 - protein, 187 aa, [Clostridium] clostridioforme; identical to SEQ ID NO: 19345
  misc_feature (1)..(187): tr|N9YLH8|N9YLH8_9FIRM Rubredoxin OS=[Clostridium] clos tridioforme 90A7 OX=999407 GN=HMPREF1082_05629 PE=4 SV= 1

SEQ ID NO: 19361 - protein, 175 aa, [Clostridium] clostridioforme
  misc_feature (1)..(175): tr|R0CSR8|R0CSR8_9FIRM Rubredoxin OS=[Clostridium] clos tridioforme 90A6 OX=999406 GN=HMPREF1083_04000 PE=4 SV= 1
MRSITQLDLQYAHRFYGFKGEAQYLHGHTGVLTIEVEGSVNAGVNMVFPCNEIQKTAWEVLKNFDHALVLREDDPLLPAILDVYEKQGIKDGSPNNTMKGPAFQTELATAYPDCRLVVTKETMTVEGMIKIVYDLLKDKLNIVKLTFTSGVNQASEEYTPHLEVERCPLCGIATE

SEQ ID NO: 19362 - protein, 187 aa, Clostridium clostridioforme
  misc_feature (1)..(187): tr|R7PJV4|R7PJV4_9CLOT Uncharacterized protein OS=Clost ridium clostridioforme CAG:511 OX=1263066 GN=BN688_0303 6 PE=4 SV=1
MRSITQLDLQYAHRFYGFKGEAQYLHGHTGVLTIEVEGSVNAGVNMVFPCNEIQKTAWEILKNFDHALVLREDDPLLPAILDVYEKQGIKDGSPNNTMKGPAFKTELATAYPDCRLVVTKETMTVEGMIKIVYDLLKDKLNIVKLTFTSGVNQASEEYTPHLEVERCPLCGIALNENGVCPKCGYKK

SEQ ID NO: 19363 - protein, 138 aa, [Clostridium] cocleatum
  misc_feature (1)..(138): tr|A0A1I0EWL9|A0A1I0EWL9_9FIRM 6-carboxy-5,6,7,8-tetrah ydropterin synthase OS=[Clostridium] cocleatum OX=69824 GN=SAMN04489758_11511 PE=3 SV=1
MYYLKTEQSFDSAHFLHGYHGKCANIHGHRWKIVATIKNEKLLDDPQNKSMVIDFGDLKADLKVITDNFDHALIIEDGSLSKRLYQALIDENFKIINLPFRPTAENLAKYIYDRLAKKYNVDYIEVYETPNNCASYRG

SEQ ID NO: 19364 - protein, 139 aa, Clostridium colicanis
  misc_feature (1)..(139): tr|A0A151AQW0|A0A151AQW0_9CLOT 6-carboxy-5,6,7,8-tetrah ydropterin synthase OS=Clostridium colicanis DSM 13634 OX=1121305 GN=CLCOL_06690 PE=3 SV=1
MYILKTEQSFDAAHFLAGYEGKCSNIHGHRWRVVIEVKSLTLQDSKQLNGMVVDFNQLKKDLKEEVDYFEHMLIIEKNTLKTETVKALKGEGFKIVVLDFRPTAENLAKYFFNRMKIKGYKVKSAVVYETPNNCAAYEE

SEQ ID NO: 19365 - protein, 117 aa, Clostridium combesii
  misc_feature (1)..(117): tr|A0A2G7HDE3|A0A2G7HDE3_9CLOT 6-carboxy-5,6,7,8-tetrah ydropterin synthase OS=Clostridium combesii OX=39481 GN =queD PE=3 SV=1
MILIKKFKFDAAHNLIHYHGKCERLHGHTYGLVIKISGERDKEDMVIDFTELKAIVKENVLDILDHAYINDIIEQPTAENIAVWIWNKLYTKLERDNCSLYEIEVWETETSGVVYNG

SEQ ID NO: 19366 - protein, 143 aa, Clostridium combesii
  misc_feature (1)..(143): tr|A0A2G7HEJ0|A0A2G7HEJ0_9CLOT 6-carboxy-5,6,7,8-tetrah ydropterin synthase OS=Clostridium combesii OX=39481 GN =queD PE=3 SV=1
MYTLKVEHNFDSAHFLAGYEGKCGNIHGHRWKVEIQVQAESLVQGGQLDGMIIDFGDLKKDVKSMVDYYDHALIIEKGTMRGQSLSSLKEDGFRIIEVNFRPTAENFAAFFYKIMKDRGYNVKSTTVHETPNNSATYEESGVI

SEQ ID NO: 19367 - protein, 163 aa, Clostridium coskatii; identical to SEQ ID NO: 19339
  misc_feature (1)..(163): tr|A0A170NPN8|A0A170NPN8_9CLOT 6-pyruvoyl tetrahydropte rin synthase OS=Clostridium coskatii OX=1705578 GN=WX73 _03383 PE=4 SV=1

SEQ ID NO: 19368 - protein, 1018 aa, Clostridium coskatii
  misc_feature (1)..(1018): tr|A0A170NPM5|A0A170NPM5_9CLOT 6-pyruvoyl-tetrahydropte rin synthase related domain membrane protein OS=Clostri dium coskatii OX=1705578 GN=WX73_03378 PE=4 SV=1
MKFQGYKYKFKINISHSVLINNRRGNLHSHTFEISLFIKIINDDFALYDDVEKIVQEFLNIYDEKELNLIEPFDKIEPTIENVGDFLYVRLKEILKNNNMILVRLEISETPARVYVVNYDENDIKEPGYEEEFKNYKKRMTRIIINNILNTTAKQLTDDLKNSSNTIVEGTWIQEDDKKEKVIEKKNTIKIEESKKTPNAIRHNDKMRKSNHVFLETAGAISVLLIGTIVLLLCIAKTGGYPWGADTYGHIFKGDLLYKSIKEGNIYPLFTQFWYNGVQPFRYWGPLSYYVLAACEFISGGNPINGYVIFIGYSFFIGGLGWLLWGIHQRRILLSLVFGILWFFLPENIRVLFVAGNIPRVIIAALIPYLFYFVWKFVKDDDRSSIIPIALFMCAIIMCHLMIGAMIGIASFIFLSLYSIMNKKIERSFHVILTMLLSFAICGIWIYPALKGGLVSMDSGATSSQMMELLATPFTISLNPFLRLFGIVDREYFYYGLSILIISILGIFVSNKKSVPGFITSIVIFLGTTTAFVPMLEKMPFSQLLWMVRFTPIAYALFIISLLNWTKCKKYFMIIMVVLIAADSSLSFNLSLYPQIKSAEVDNILSSAKNITKQRIALLDNSTFGAYPSFYICSEDKKTSYSYGWAWQGAATAQNIVLLNTALEKGYYNYMFDRSLEMGCDTAVVAKAPMKKNKRDFSIINSAAKLSQYTLYKETSEGYVFHRKTSENFGVVTKYSGLCIGRSASDIPLQYPSFEIGSSWNIEDYTLDELSKYKVIYLSDFRYNSRSKAENMVSKLSSMGIKVIIDMNRIPSDTITNRMVFLGVTAQPITFSTKIPDMFFNNKKYESVNFKDEYKIWNTVYLDNVPQVTGFSWVNGKKVPFLGSGKGKNKNITFLGFNLMFHGMENDDSKVLTIMDTIMRTKSSILPKRILIPIDLKYGQNSITINSPKNNVNTTVAFLDAYKSNSGEIYSKQNLLNVNKGETKIRVTYPYLFQGIAVSVIGLMGFAFFIIYIYKRVV

SEQ ID NO: 19369 - protein, 117 aa, Clostridium cylindrosporum
  misc_feature (1)..(117): tr|A0A0J8D3Z1|A0A0J8D3Z1_CLOCY 6-carboxy-5,6,7,8-tetrah ydropterin synthase OS=Clostridium cylindrosporum DSM 6 05 OX=1121307 GN=queD PE=3 SV=1
MILIKEFEFDAAHNLVKYHGKCERLHGHTYKLIVKIEGEPGEEDMVFDFVELKRIVKAKVIDKLDHYYLNDIIEQPTAENIAKYVWNELVDEIKRDNCKLFEIEIWETKTSGLIYRG

SEQ ID NO: 19370 - protein, 142 aa, Clostridium cylindrosporum
  misc_feature (1)..(142): tr|A0A0J8G2V1|A0A0J8G2V1_CLOCY 6-carboxy-5,6,7,8-tetrah ydropterin synthase OS=Clostridium cylindrosporum DSM 6 05 OX=1121307 GN=queD PE=3 SV=1
MFKIKSEVGFDMAHYLCGYEGKCANIHGHRYRLVATLKSETLQESGQCRGMVDDFTNFKKALKEIAEDFDHKLLIEDNEEGRELAAKLEVLPNNFDIVFVPYRTTAEEMSRDVFNRLKSKGFKIYEVELFETPTNSCIYTEE

SEQ ID NO: 19371 - protein, 142 aa, Clostridium diolis
  misc_feature (1)..(142): tr|A0A2P8RLZ8|A0A2P8RLZ8_9CLOT 6-carboxy-5,6,7,8-tetrah ydropterin synthase OS=Clostridium diolis OX=223919 GN= C4L39_01905 PE=3 SV=1
MFKIKSEVQFDMAHYLSGYEGKCSNIHGHRYKLIAKLKSEKLHQDGQLRGMVDDFGNFKNILKEIAETFDHKLIIENNEDGKALVKKLEELQNNFNIYLVDYRPTAEEMSRDIFNRLKAKGLSVCEVELFETPNNSCIYTED

SEQ ID NO: 19372 - protein, 142 aa, Clostridium diolis; identical to SEQ ID NO: 19342
  misc_feature (1)..(142): tr|A0A5A5UM36|A0A5A5UM36_9CLOT 6-carboxy-5,6,7,8-tetrah ydropterin synthase OS=Clostridium diolis OX=223919 GN= CDIOL_42950 PE=3 SV=1

SEQ ID NO: 19373 - protein, 139 aa, Clostridium disporicum
  misc_feature (1)..(139): tr|A0A174EMT9|A0A174EMT9_9CLOT 6-carboxy-5,6,7,8-tetrah ydropterin synthase OS=Clostridium disporicum OX=84024 GN=queD PE=3 SV=1
MYYITTEASFDSAHFLYGYEGKCRNIHGHRWRVIITLKSEELIEDGEYKGMLIEFGDVKEKLKKETEKLDHSLIIEENSLSERTLNALKEENFNIITVNFRPTAENFAKYFYKKMKKYNYTIATAEVYETPNNKAIYGE

SEQ ID NO: 19374 - protein, 143 aa, Clostridium estertheticum
  misc_feature (1)..(143): tr|A0A1J0GDZ2|A0A1J0GDZ2_9CLOT 6-carboxy-5,6,7,8-tetrah ydropterin synthase OS=Clostridium estertheticum subsp. estertheticum OX=1552 GN=A7L45_05565 PE=3 SV=1
MYILKSEHSFDSAHFLSGYEGKCANIHGHRWKVEVEVQSETLTKGGQLEGMVIDFGDLKRDVKSMADSYDHALIVQIGSMRDETLNCINQDGFKVILVDFRTTAENFAKFFFKKMKDKGYNVKRTTVYETPNNSASYEESEAH

SEQ ID NO: 19375 - protein, 136 aa, Clostridium felsineum
  misc_feature (1)..(136): tr|A0A1S8L4G2|A0A1S8L4G2_9CLOT 6-carboxy-5,6,7,8-tetrah ydropterin synthase OS=Clostridium felsineum DSM 794 OX =1121310 GN=CLFE_43850 PE=3 SV=1
MYIVKIENSFDSAHFLSNYDGKCANIHGHRWKIEVEIQAKTLINDMVEDFTILKKKIKEVIDFYDHALIIEKNTLRELTYNCLIEDGFRIIELPFRPTAENFSKFFFDEIERLNYDVRKITVYETPNNSASYVKEV

SEQ ID NO: 19376 - protein, 156 aa, Clostridium felsineum
  misc_feature (1)..(156): tr|A0A1S8LBU2|A0A1S8LBU2_9CLOT 6-pyruvoyl tetrahydropte rin synthase OS=Clostridium felsineum DSM 794 OX=112131 0 GN=CLFE_32110 PE=4 SV=1
MHYDEYKFKFYLNASHSIYINGVLGEEHPHTWEIIIYTIKLEEDFIIFNDVEKYVEDYIKKYQDLYINEVEPFTTLNPTLENICKFFKEKLRVLLLDAGWILLSIEISETPTRSYIIDLSREFENNYEISINKSKIMENSLIQKLDKLKKYGIKSE

SEQ ID NO: 19377 - protein, 486 aa, [Clostridium] fimetarium
  misc_feature (1)..(486): tr|A0A1I0R6P2|A0A1I0R6P2_9FIRM 6-pyruvoyl tetrahydropte rin synthase-related domain-containing protein OS=[Clos tridium] fimetarium OX=99656 GN=SAMN05421659_11273 PE=4 SV=1
MGRNKDKKNRFIIVASVIVLGVILLVLLILDINNTVNKTLSAYNDNQNLLANTLLKTAVVQAENDSSELKDIIQFNVDENFPTSSSSYCIFAKNDNIIFLKDENTSSTLIDERISNYFDGNNVSSKDNQKYIISTAQTQNDGDNYTFVICTRQNYLLKQVKFNELRLHALGYFIIYGVILLMIIIYLLYKSRADEKRNRTLGEAAKNNRMIIEKLGNDKTKNYVNLDRDEVDSFYSRTIVDEVIACMSEEEKKKCIEIDILVQNLKIEHFILITIILGRIKAGGSLACYWEENQFKVLLFNSNKEEVEEFIDRFMNKYRTDSEEKVEELKIIATRFGRKIMEYSQYKYNFYLNASHSIYINGNKGERHPHTWQISLYVVNSKDTFIMFNEVEKLIEDYLGQYQEKYMNECPPFDTMNPTLENIAHYFMEELQKNLNPLNWVIFTMEISETPSRSYIISNVENNIISDVEKKNIAEKILEKNRIKNQ

SEQ ID NO: 19378 - protein, 145 aa, [Clostridium] fimetarium
  misc_feature (1)..(145): tr|A0A1I0RJ99|A0A1I0RJ99_9FIRM 6-carboxy-5,6,7,8-tetrah ydropterin synthase OS=[Clostridium] fimetarium OX=9965 6 GN=SAMN05421659_11680 PE=3 SV=1
MYSLKTEDSFDSAHFLSGYEGKCSNIHGHRWRVIIEVKSNTLQTDQQSNGMLVDFGDLKKDIKEEVDFMDHAFIIEKNTLKPGTVAALEEEGFRIIMMEFRPTAENLAKYFYDQMVQKGYQVKSATVYETPNNCASYEEDFNVTI

SEQ ID NO: 19379 - protein, 125 aa, Clostridium formicaceticum
  misc_feature (1)..(125): tr|A0A1D9FS44|A0A1D9FS44_9CLOT 6-carboxy-5,6,7,8-tetrah ydropterin synthase OS=Clostridium formicaceticum OX=14 97 GN=BJL90_00165 PE=3 SV=1
MDVTKIFTFDSAHHLENYDGDCKYLHGHTYKLEITVRGKTDACGMVIDFSELKTIVKKEIIKPLDHRYLNEVLDFNPTCENMLVWIFNKLEDLLKKERYWLQKVVLWETPTSFATLEKEQYDVEG

SEQ ID NO: 19380 - protein, 143 aa, Clostridium gasigenes
  misc_feature (1)..(143): tr|A0A1H0NUJ4|A0A1H0NUJ4_9CLOT 6-carboxy-5,6,7,8-tetrah ydropterin synthase OS=Clostridium gasigenes OX=94869 G N=SAMN04488529_101965 PE=3 SV=1
MYILKAEHSFDSAHFLSNYEGKCGNIHGHRWKVEIEVQSETLVKGGQLDGMVIDFGDLKKDVKSMADYYDHALIIEKDTMREETLSCITKDGFKTIKVNFRPTAENFAAFFFNTMKDKGYNIKRATVYETPTNSAVYEESEAN

SEQ ID NO: 19381 - protein, 143 aa, Clostridium homopropionicum
  misc_feature (1)..(143): tr|A0A0L6Z770|A0A0L6Z770_9CLOT 6-carboxy-5,6,7,8-tetrah ydropterin synthase OS=Clostridium homopropionicum DSM 5847 OX=1121318 GN=CLHOM_29520 PE=3 SV=1
MYILKTEHYFDSAHFLADYEGKCSNIHGHRWKVEIEIQSETLEKGGQLDGMIVDFGDFKEDVKAMVDYYDHVLIIQNGTLRKETLNCLMEDGFNLISVDFRPTAENFAAFFFNTMKNKGYNVKRATVFETPANSAVYEESEAN

SEQ ID NO: 19382 - protein, 141 aa, [Clostridium] indolis
  misc_feature (1)..(141): tr|A0A3P6J9S3|A0A3P6J9S3_9FIRM 6-carboxy-5,6,7,8-tetrah ydropterin synthase OS=[Clostridium] indolis OX=69825 G N=queD_2 PE=3 SV=1
MFQQHYPSINHNYQFELNKDFNFSAAHYIPSDDAGKCMRTHGHTYFVNLTIGGDVLDHNGFLVNFSELKKLVHDQFDHHLLNELPQFKDKSPSTEIVAQTIYEMVQTSLNERANQPQCLQVYVRETPTSYVIFRPKELNHE

SEQ ID NO: 19383 - protein, 143 aa, [Clostridium] indolis
  misc_feature (1)..(143): tr|A0A3P6J8R4|A0A3P6J8R4_9FIRM Queuosine biosynthesis p rotein QueD OS=[Clostridium] indolis OX=69825 GN=queD_1 PE=4 SV=1
MTNFENVQPPKQFKYRSNAVLIKNYYEFTCDNRIYFTQTVHKDLANQRYQFNIEILSQIDDYGLALDFNEVDKIYKSKIATYLDGQLINEALPPMNTTAENIAFWIWEQFEQFLPENNTLQKLEFFENETQGLVLTRERMEAN

SEQ ID NO: 19384 - protein, 160 aa, [Clostridium] lavalense
  misc_feature (1)..(160): tr|A0A1I0KDK6|A0A1I0KDK6_9FIRM 6-pyruvoyltetrahydropter in/6-carboxytetrahydropterin synthase OS=[Clostridium] lavalense OX=460384 GN=SAMN05216313_1702 PE=4 SV=1
MRSITQLDLQYAHRFYGFKGEAQYLHGHTGVLTIEVEGSVNAGVNMVFPCNEIQKTAWEILKNFDHALVLREDDPLLPAILDVYEKQGIKDGSPNNTMKGPAFKTELATAYPDCRLVVTKETMTVEGMIKIVYDLLKYSLQGTTQGRYLTGGVPPVRFSM

SEQ ID NO: 19385 - protein, 1018 aa, Clostridium ljungdahlii
  misc_feature (1)..(1018): tr|A0A162LAG3|A0A162LAG3_9CLOT 6-pyruvoyl-tetrahydropte rin synthase related domain membrane protein OS=Clostri dium ljungdahlii OX=1538 GN=WY13_02202 PE=4 SV=1
MKFQGYKYKFKINISHSVLINNRRGNLHSHTFEISLFIKIINDDFALYDDVEKIVQEFLNIYDEKELNLIKPFDKIEPTIENVGDLLYVRLKGILKNNNMILIRLEISETPARIYVVNYDENHIKEPGYEKEFKSYKKRMTRIIINNILNTTAKQLTDDLKNSSNTIVEGTWIQEDDKKEKVIEKKNTIKIKESKKAPDDIRHSGKVRKNNYVFLEILGPISVLLIGTIVLLLCIIKTGGYPWGADTYGHIFKGDLLYKSIKEGNIYPLFTQFWYNGVQPFRYWGPLSYYVLAGCEFISGGNPINGYVIFIGYSFFIGGLGWLLWGIHQRRILLSLVFGILWFFLPENIRVLFVAGNIPRVIIAALIPYLFYFVWKFVKDDDRSSIIPIALFMCAIIMCHLMIGAMVGIASFIFLSLYSIMNKKIEKSVHVILTMLLSFAICGIWIYPALKGGLVSMDSGATSSQMMELLATPFTISLNPFLRLFGIVDREYFYYGLSILIISILGIFVSNKKSAPGFVTSIVIFLGTTTAFVPMLEKMPFSQLLWMVRFTPIAYALFIISLLNWTKCKKYFMIIMVVLIAADSSLSFNLSLYPQIKSAEVDNILSSAKNITKQRIALLDDSTFGAYPSFYICSEDKKISYSYGWAWQGAATAQNIVLLNTALEKGYYNYMFDRSLEMGCDTVVVAKAPMKKDKRDFNIINNAAKFSQYTLYKETSEGYVFHRKASENFGVVTKYSGLCIGRSASDIPLEYPSFEIGSSWNIEDYTLDELSKYKVIYLSDFRYNSRSKAENMVSKLSSMGIKIIIDMNRIPADTITNRMVFLGVTAQPITFNTKMPDMFFNDKKYESVNFKDEYKIWNTVYLDNVPQVTGFSWVNGKKVPFLGSGKGKNKNITFLGFNLMFHGMENDDSRVLAIMNTVMGTKSSILPERTLVPINLKYGQNSITIDSPKNNVNTTVAFLDAYKSNSGQIYAKQNLLNVNKGETKIRVTYPYLFQGIAVSVIGLLGFAFFIIYIYKRVV

SEQ ID NO: 19386 - protein, 163 aa, Clostridium ljungdahlii; identical to SEQ ID NO: 19339
  misc_feature (1)..(163): tr|D8GLT8|D8GLT8_CLOLD 6-pyruvoyl-tetrahydropterin synt hase related protein OS=Clostridium ljungdahlii (strain ATCC 55383 / DSM 13528 / PETC) OX=748727 GN=CLJU_c0402 0 PE=4 SV=1

SEQ ID NO: 19387 - protein, 143 aa, Clostridium magnum
  misc_feature (1)..(143): tr|A0A162T3F9|A0A162T3F9_9CLOT 6-carboxy-5,6,7,8-tetrah ydropterin synthase OS=Clostridium magnum DSM 2767 OX=1 121326 GN=queD PE=3 SV=1
MYILKTEHNFDSAHFLAGYEGKCGNIHGHRWKVEIEVQSETLVEEGQLEGMVVDFGDLKKDLKEVVDSYDHALIVQEKTMREETLNCLMQDGFKIIQVNFRPTAEQFSAFFFKEMKNRGYKVRRASVYETPTNCAVYEESEVN

SEQ ID NO: 19388 - protein, 139 aa, Clostridium novyi
  misc_feature (1)..(139): tr|A0A0A0IJW3|A0A0A0IJW3_CLONO 6-carboxy-5,6,7,8-tetrah ydropterin synthase OS=Clostridium novyi A str. 4570 OX =1444290 GN=Z969_07830 PE=3 SV=1
MYILKTEQSFDSAHFLSGYDGKCSNIHGHRWTVEIEIQSETLNSTGKLRGMIVDFGDLKKDLKSIVDFYDHSLIIEQNSMKLETLNNLKNDGFRIIEVEFRPTAENLAYHFFNLMEQKGYDVRKSTVYETPNNCATFQK

SEQ ID NO: 19389 - protein, 139 aa, Clostridium novyi
  misc_feature (1)..(139): tr|A0A0A0IDZ4|A0A0A0IDZ4_CLONO 6-carboxy-5,6,7,8-tetrah ydropterin synthase OS=Clostridium novyi A str. 4552 OX =1444289 GN=Z968_02185 PE=3 SV=1
MYILKTVESFDSAHFLAGYDGKCSNIHGHRWKVEIEIQSETLKSNGALKGMIVDFGDLKKDLKSIVDFYDHCLIIENNSMRLGTLNTLKNDGFKIIEVNFRPTAENLAYHFFNLMEQKGYDVRKSTVYETPNNCATFEK

SEQ ID NO: 19390 - protein, 118 aa, Clostridium paraputrificum
  misc_feature (1)..(118): tr|A0A174W4K3|A0A174W4K3_9CLOT Uncharacterized protein OS=Clostridium paraputrificum OX=29363 GN=CP373A1_00580 PE=4 SV=1
MECSYKFKFYINARHSVNLGGNQSDIHPHTWETVIYIAVKSQNYINFTKMEKMLEAYFHQYEGKYLNDLKCFKESIPTMENIGRKIFVDISNVLESNNLILNSIEISENPTRTYIIKK

SEQ ID NO: 19391 - protein, 123 aa, Clostridium pasteurianum
  misc_feature (1)..(123): tr|A0A0H3J005|A0A0H3J005_CLOPA 6-carboxy-5,6,7,8-tetrah ydropterin synthase OS=Clostridium pasteurianum DSM 525 = ATCC 6013 OX=1262449 GN=queD PE=3 SV=1
MFTYEVIKKVKFDAAHFIPEYKGKCRNIHGHTWFVEAGVKGNKLENGMLFDFTILKKELKSICDEFDHKFLNELEEFKELAPTAENIGRVIYEKIEDKLDKGLELSFIKVFENPDSWVTVTKD

SEQ ID NO: 19392 - protein, 123 aa, Clostridium pasteurianum; identical to SEQ ID NO: 19391
  misc_feature (1)..(123): tr|A0A1D9N087|A0A1D9N087_CLOPA 6-carboxy-5,6,7,8-tetrah ydropterin synthase OS=Clostridium pasteurianum OX=1501 GN=AQ984_02580 PE=3 SV=1

SEQ ID NO: 19393 - protein, 140 aa, [Clostridium] polysaccharolyticum
  misc_feature (1)..(140): tr|A0A1I0BGB3|A0A1I0BGB3_9FIRM 6-carboxy-5,6,7,8-tetrah ydropterin synthase OS=[Clostridium] polysaccharolyticu m OX=29364 GN=SAMN04487772_107107 PE=3 SV=1
MYRLQTEDSFDAAHFLAGYDGKCHNIHGHRWRVIVEIQTAALQESGQMRGMCVDFKMLKRDLKKITDKLDHALIIEKGSLKQKTLEALQAEEFTIIELPFRPTAEHLAQYFYENMNSLGYDISLVTIYETPANCASYSAD

SEQ ID NO: 19394 - protein, 147 aa, [Clostridium] populeti
  misc_feature (1)..(147): tr|A0A1I6I684|A0A1I6I684_9FIRM 6-carboxy-5,6,7,8-tetrah ydropterin synthase OS=[Clostridium] populeti OX=37658 GN=SAMN05661086_00455 PE=3 SV=1
MNDINIPKPKKLKYHEKRVAVTKEFDFSAAHFLYEYQGKCKNLHGHTYIVVLTVSGYTDEQGFLIDFNKLKSIYIESIHNKLDHSYLNSILTNMNSTVENMIVWIWEQLEETFSLVQYKKQDIRIEEIKLYETPTSYATLKWEWMHG

SEQ ID NO: 19395 - protein, 142 aa, Clostridium puniceum
  misc_feature (1)..(142): tr|A0A1S8TIG0|A0A1S8TIG0_9CLOT 6-carboxy-5,6,7,8-tetrah ydropterin synthase OS=Clostridium puniceum OX=29367 GN =CLPUN_22880 PE=3 SV=1
MFTIKSEIQFDMAHYLSGYNGKCSNIHGHRYKLIAKLKAETLHLEGQLRGMVDDFSNFKDALKEIGDIFDHKLIIEDNSEGKALAKKIEELPNNFDIYFVNYRPTAEEMSRDIFNRLKVQGLAVCEVELFETPKNSCIYTED

SEQ ID NO: 19396 - protein, 1004 aa, Clostridium roseum
  misc_feature (1)..(1004): tr|A0A1S8L370|A0A1S8L370_9CLOT 6-pyruvoyl-tetrahydropte rin synthase OS=Clostridium roseum OX=84029 GN=CROST_28 480 PE=4 SV=1
MEFEGYIYKFKLNASHSVLINNKRGTVHAHTFIISLRVKVYYDTFLLYNKMERVVEDYLKRYEEKELNKVEPFNKIEPTLENIGNVLFEEFTKVFDKKKVQLIKLEISETPSRVYVVNSYSRKDKERHENKVKKVILDGILTLCTEELIKGFKEHEREEKVVEEEVREKEIEIEEVRAHRKVNNDITKKYSVKKRVVISVICIIFSAVALLYYLWNVGGYPWGIDTYGHIFKGEFLYRNLRQGNLYPLFTKYWYNGVQPFRYWAPLSYYVFSVCEFLMSGNTLNAYLIFIILLFLIGALGWLIWGIREKCVFTALVLGILWFFLPENLKVLFYEGNIPRAVITVLLPYLFYFLWDFVEYDKKWSILPMTLFMTLITFTHLMISAMVGVASFMFLFIYSIIFKKILKPIQCIIAMFMGIAICGVWLYPALKGGLTSMNSDATSEVMKFFSAKFAVALNPFIRLTPDGKNGMFYYGLSVFLVALFGIVLSKKKSLPGFITSVIILLASTTAFLPIVSKLPLNQLFWMIRFAPIAYALFIISFLNWKSLKKYIKITVIIIIIADSMLSFRFSLYPEGRNLDSEKVLSKAKDIAQQRISLLDDSTFASYASYYICNGENKSTYSYGWAWQGAATANNIVLLNTAMGNGYYKYMFDRSMEMGCDTVVLRKSVLKKSKDNFKDIVYAAGLLGYKLYFQNDDSYIFHLNTPKTFGVITEYEGLCIGKSSESLPLLYPDFRKGSSDNIEDYSLKELMKYKVIYLSGFSYNLRAEAEKMITKLSENGVKIIIDMNRIPADNITNRMIFLGVTSEPITFNNRMPNLFFDKEKYEEKVAFKEEYKKWNTVYLEKLPEIQGFSWVKDKKLAFLGTGTKKNKNVYFLGFNLLFNGMTNEDHKSIDIMSRIIGKSFLNTPKREIVPIDISYGKNSIRINSPKNNVNTTLAYLDAYKGDKKIYKDQNLLNVDKKGVTNILIDYPYLRKGIAVSLMGIIGLIILISFVFKGKGEGIEKNT

SEQ ID NO: 19397 - protein, 136 aa, Clostridium roseum
  misc_feature (1)..(136): tr|A0A1S8L681|A0A1S8L681_9CLOT 6-carboxy-5,6,7,8-tetrah ydropterin synthase OS=Clostridium roseum OX=84029 GN=C ROST_22390 PE=3 SV=1
MYIVKIENSFDSAHFLSNYDGKCANIHGHRWKIEVEIQAKTLINDMVEDFTILKKKIKEVIDFYDHALIIEKNTLRELTYTCLIEDGFRIIELPFRPTAENFSKFFFDEIERLNYDVRKITVYETPNNSASYVKEV

SEQ ID NO: 19398 - protein, 142 aa, Clostridium saccharobutylicum
  misc_feature (1)..(142): tr|U5MPX2|U5MPX2_CLOSA 6-carboxy-5,6,7,8-tetrahydropter in synthase OS=Clostridium saccharobutylicum DSM 13864 OX=1345695 GN=queD PE=3 SV=1
MFKIKSEIQFDTAHYLSGYKGKCSNIHGHRYRLIAKLKSETLHEDGQLRGMVDDFSNFKGALKEIEEIFDHKLVIENNDEGKALARKLEDLPNNFDIYFVNYRPTAEEMSRDIFNMLKAKGLSVCEVELFETPNNSCIYTED

SEQ ID NO: 19399 - protein, 142 aa, Clostridium saccharobutylicum
  misc_feature (1)..(142): tr|A0A1S8NBJ9|A0A1S8NBJ9_CLOSA 6-carboxy-5,6,7,8-tetrah ydropterin synthase OS=Clostridium saccharobutylicum OX =169679 GN=CLOSAC_19250 PE=3 SV=1
MFKIKSEIQFDTAHYLSGYEGKCSNIHGHRYRLIAKLKSETLHEDGQLRGMVDDFSNFKGALKQIEEIFDHKLVIENNDEGKAFARKLEDLPNNFDIYFVKYRPTAEEMSRDIFNMLKAKGLSVCEVELFETPNNSCIYTED

SEQ ID NO: 19400 - protein, 142 aa, Clostridium saccharoperbutylacetonicum
  misc_feature (1)..(142): tr|M1LVB2|M1LVB2_9CLOT 6-carboxy-5,6,7,8-tetrahydropter in synthase OS=Clostridium saccharoperbutylacetonicum N 1-4(HMT) OX=931276 GN=queD PE=3 SV=1
MFKIKSEVQFDMAHYLSGYDGKCSNIHGHRYRLIAKLKSETLHKEGQLRGMVDDFSNFKEALKQIEEEFDHKLIIENNEEGKVLSKKLSELQNNFEISFVNYRPTAEEMSRDIFNRLKSKGLSVCEVELFETPNNSCIYTED

SEQ ID NO: 19401 - protein, 139 aa, Clostridium sp.
  misc_feature (1)..(139): tr|A7VCM5|A7VCM5_9CLOT 6-carboxy-5,6,7,8-tetrahydropter in synthase OS=Clostridium sp. L2-50 OX=411489 GN=queD PE=3 SV=1
MYSLKTNSSFDSAHFLAGYEGKCRNLHGHRWTVEVEVGGEKLMQDGQTRGMVVDFGDLKKDLREKTEEMDHCLIMEKGTLKEKTMEALAEEQFRIIELPMRPTAENLAKYFYEYMADKGYQVIRTTVYETPTNAATYMA

SEQ ID NO: 19402 - protein, 364 aa, Clostridium sp.
  misc_feature (1)..(364): tr|R5JYM4|R5JYM4_9CLOT 6-pyruvoyl tetrahydropterin synt hase-related domain OS=Clostridium sp. CAG:632 OX=12628 30 GN=BN743_01154 PE=4 SV=1
MKKNKADLKWFRQPGKRLTVILILCAVCVSIFFGLYILIINSISRDYITTGSNTQQQYSNQLADALNSMCELGASEKDLQDYMAGSVPASGSSWAFLIKNHTVIFAKNPSTTETLQELKERDAFLKHLKEQNAIVTVDNFYVGNDSYTAGIITDEAQYLEQIHTHEVYLSILFATLTLIFIGAITALTGAWTGSDRKQATIRAELLKRNKEFEALEHASSADSSANGSGSTPIVIHHRGKSNLYKQYKFKFYLNARHAIYIDGVLGAMHPHTWEITLHVIKMQHDFVQFGDLEKKIEAFMQQYQDQELNSIPPFDVINPTLENCCDYFKEQISRILEEAGWLFLMIEMSETPSRSYVISMIDEE

SEQ ID NO: 19403 - protein, 141 aa, [Clostridium] spiroforme
  misc_feature (1)..(141): tr|A0A1Y4QN73|A0A1Y4QN73_9FIRM 6-carboxy-5,6,7,8-tetrah ydropterin synthase OS=[Clostridium] spiroforme OX=2934 8 GN=B5E91_00880 PE=3 SV=1
MYYLKTEQSFDSAHFLHGYSGKCANIHGHRWRIVVTIKSDKLLDDPQNNGMIIDFSDLKNNLKSITDNLDHALIIEEGSLRSSLYQALIAENFKIINLPFRPTAENLAKYIYEILAKTYDVECVDVYETPNNCASYNENNK

SEQ ID NO: 19404 - protein, 143 aa, Clostridium sporogenes; identical to SEQ ID NO: 19349
  misc_feature (1)..(143): tr|A0A1V9IVH7|A0A1V9IVH7_CLOSG 6-carboxy-5,6,7,8-tetrah ydropterin synthase OS=Clostridium sporogenes OX=1509 G N=VT92_0206100 PE=3 SV=1

SEQ ID NO: 19405 - protein, 143 aa, Clostridium sporogenes
  misc_feature (1)..(143): tr|A0A1V9IWH2|A0A1V9IWH2_CLOSG 6-carboxy-5,6,7,8-tetrah ydropterin synthase OS=Clostridium sporogenes OX=1509 G N=queD_2 PE=3 SV=1
MYTLKVEHSFDSAHFLANYEGKCGNIHGHRWKVEIQIKSESLVQGGQLDGMVIDFGDLKKDVKSMVDYYDHALIIEKETMREQSLSSLKEDGFRIIEVNFRPTAENFAAFFYKFMKDKGYNVKSVTVYETPNNSATYEESGVI

SEQ ID NO: 19406 - protein, 188 aa, [Clostridium] symbiosum
  misc_feature (1)..(188): tr|U2BIN4|U2BIN4_CLOSY Uncharacterized protein OS=[Clos tridium] symbiosum ATCC 14940 OX=411472 GN=CLOSYM_01711 PE=4 SV=1
MRSITTLDLQYAHRFFGFKGEAQYLHGHTGILTIEVEDSVEPGVNMVFPCNEIQKTAWDVLKNFDHALILREDDPLLPAILKVYEEQGIKDGAPHNQMKGPAFHTDLATAYPECRLVVTKETMTVEGMIKIVYDLLKDKLNIAKITFSSGVNKASEEFQTKNRIDRCPLCGIALNENGICPKCGYKKQ

SEQ ID NO: 19407 - protein, 188 aa, [Clostridium] symbiosum; identical to SEQ ID NO: 19406
  misc_feature (1)..(188): tr|E7GUF1|E7GUF1_CLOSY Uncharacterized protein OS=[Clos tridium] symbiosum WAL-14163 OX=742740 GN=HMPREF9474_04 546 PE=4 SV=1

SEQ ID NO: 19408 - protein, 188 aa, Clostridium symbiosum
  misc_feature (1)..(188): tr|A0A174GT12|A0A174GT12_CLOSY Queuosine biosynthesis p rotein QueD OS=Clostridium symbiosum OX=1512 GN=DXA34_1 2390 PE=4 SV=1
MRSITTLDLQYAHRFFGFKGEAQYLHGHTGILTIEVEDSVEPGVNMVFPCNEIQKTAWDVLKNFDHALILREDDPLLPAILKVYEEQGIKDGAPHNQMKGPAFHTDLATAYPECRLVVTKETMTVEGMIKIVYDLLKDKLNIAKITFSSGVNKASEEFQTKNQIDRCPLCGIALNENGICPKCGYKKQ

SEQ ID NO: 19409 - protein, 143 aa, Clostridium taeniosporum
  misc_feature (1)..(143): tr|A0A1D7XKK5|A0A1D7XKK5_9CLOT 6-carboxy-5,6,7,8-tetrah ydropterin synthase OS=Clostridium taeniosporum OX=3949 58 GN=queD PE=3 SV=1
MYILKAEHSFDSAHFLAGYEGKCGNIHGHRWRVEIEIQGDTLVKGGQLDGMVIDFGDLKKDVKEMVDHYDHALIIEEKTMREETLGCIKQDGFKVIEVNFRPTAENFAAFFFKTMKNKGYNVKRAIVYETPTNSAVYEESERC

SEQ ID NO: 19410 - protein, 143 aa, Clostridium tagluense
  misc_feature (1)..(143): tr|A0A401UUW9|A0A401UUW9_9CLOT 6-carboxy-5,6,7,8-tetrah ydropterin synthase OS=Clostridium tagluense OX=360422 GN=Ctaglu_48610 PE=3 SV=1
MYILKAEHSFDSAHFLSGYVGKCSNIHGHRWKVEVYVQSETLLKGGQLDGMVIDFGDLKKDVKAMVDCYDHALIVQEGTMRFETLNCIKQDGFNVIVVDFRPTAENFAGFFFKLMKDIGYNVKRTTVYETPTNSATYEESEAR

SEQ ID NO: 19411 - protein, 143 aa, Clostridium tepidiprofundi
  misc_feature (1)..(143): tr|A0A151B3D3|A0A151B3D3_9CLOT 6-carboxy-5,6,7,8-tetrah ydropterin synthase OS=Clostridium tepidiprofundi DSM 1 9306 OX=1121338 GN=CLTEP_16390 PE=3 SV=1
MYILRTEHSFDSAHFLAGYDGKCGNIHGHRWKVEVEVQSNKLTENGQLEGMVVDFGDLKKDLKEIVDYYDHAFIIQQGSMRNKTLECILEDGFRVIEVEFRPTAENFALFFFNRMKNKGYNVKRVFVYETPKNCAVYEEGEVN

SEQ ID NO: 19412 - protein, 118 aa, Clostridium tepidum
  misc_feature (1)..(118): tr|A0A1S9I250|A0A1S9I250_9CLOT 6-carboxy-5,6,7,8-tetrah ydropterin synthase OS=Clostridium tepidum OX=1962263 G N=BS638_10985 PE=3 SV=1
MILIKKFKFDAAHNLVHYHGKCEKLHGHTYGLVIKVLGEPDKEDMVIDFTELKSIVKENVLDLLDHAYINEIIEQPTAENIAIWIWNKLYEKLKRDNCRLYEIEVWETETSGVVYRGQ

SEQ ID NO: 19413 - protein, 143 aa, Clostridium tepidum
  misc_feature (1)..(143): tr|A0A1S9I1B3|A0A1S9I1B3_9CLOT 6-carboxy-5,6,7,8-tetrah ydropterin synthase OS=Clostridium tepidum OX=1962263 G N=BS638_11975 PE=3 SV=1
MYTLKVEHSFDSAHFLANYEGKCGNIHGHRWKVEIQIKSESLVQGGQLDGMVIDFGNLKKDVKSMVDYYDHALIIEKGTMREQSLNSLKEDGFRIIEVNFRPTAENFAAFFYKTIKDKGYNIKSVTVYETPNNSATYEESGVI

SEQ ID NO: 19414 - protein, 143 aa, Clostridium tetanomorphum
  misc_feature (1)..(143): tr|A0A037ZAX7|A0A037ZAX7_CLOTT 6-carboxy-5,6,7,8-tetrah ydropterin synthase OS=Clostridium tetanomorphum DSM 66 5 OX=1230342 GN=CTM_10421 PE=3 SV=1
MYILKSEHSFDSAHFLAGYKGKCGNIHGHRWKVEIEIQSENLINGGQLDGMVIDFGDLKKDVKEMVDYYDHALIIQEGTMRTETLSCISEDGFKVITVNFRPTAENFAAFFFKTMKNKGYSVKRATVYETPTNSAVYEESEVI

SEQ ID NO: 19415 - protein, 140 aa, [Clostridium] thermoalcaliphilum
  misc_feature (1)..(140): tr|A0A1V4IAY0|A0A1V4IAY0_9FIRM 6-carboxy-5,6,7,8-tetrah ydropterin synthase OS=[Clostridium] thermoalcaliphilum OX=29349 GN=CLOTH_03560 PE=3 SV=1
MYILKGEHSFDSAHFLANYQGKCSNIHGHRWKVEVEVYSESLIEGGQLDGMVVDFGDLKKDIKDVVDYFDHALIIQSGTMRKETLDSIVSDGFKVINVDFRPTAENFSKHFFDCMKERSYNVKKVTVYETPTNSASYEVK

SEQ ID NO: 19416 - protein, 156 aa, Clostridium thermobutyricum
  misc_feature (1)..(156): tr|A0A1V4SXR6|A0A1V4SXR6_9CLOT 6-pyruvoyl tetrahydropte rin synthase OS=Clostridium thermobutyricum DSM 4928 OX =1121339 GN=CLTHE_06130 PE=4 SV=1
MSYLLECEESFDSSHFLKGHKGKCRNLHGHRWRIKYGLKANELIQSGSSEGMIIDFSDIKSLIKEYFKVYDHALILTDYKEETLTKEEKNFIQACEDMKFRIVHVPFRSTAENMSKFFFNELERVLSEKIPSKNFNVHYVTVYETPNNAATYGGIN

SEQ ID NO: 19417 - protein, 156 aa, Clostridium thermobutyricum; identical to SEQ ID NO: 19416
  misc_feature (1)..(156): tr|N9XWI3|N9XWI3_9CLOT Queuosine biosynthesis protein Q ueD OS=Clostridium thermobutyricum OX=29372 GN=HMPREF10 92_03123 PE=4 SV=1

SEQ ID NO: 19418 - protein, 139 aa, Clostridium thermopalmarium
  misc_feature (1)..(139): tr|A0A2T0AQJ2|A0A2T0AQJ2_9CLOT 6-carboxy-5,6,7,8-tetrah ydropterin synthase OS=Clostridium thermopalmarium DSM 5974 OX=1121340 GN=CPAL_17270 PE=3 SV=1
MYILKTEQSFDAAHFLAGYEGKCSNIHGHRWRVVIEVKSLTLQDSKQLNGMVVDFNQLKKDLKEEVDYFDHMLIIEKNTLKTETVKALKGEGFKIVVLDFRPTAENLAKYFFNRMKIKGYKVKSAVVYETPNNCAAYEE

SEQ ID NO: 19419 - protein, 143 aa, Clostridium uliginosum
  misc_feature (1)..(143): tr|A0A1I1GPH6|A0A1I1GPH6_9CLOT 6-carboxy-5,6,7,8-tetrah ydropterin synthase OS=Clostridium uliginosum OX=119641 GN=SAMN05421842_10120 PE=3 SV=1
MYILKAEHSFDSAHFLAKYEGKCGNIHGHRWKVEIEVQSETLVKGGQLDGMVIDFGDLKRDVKDMVDYYDHALIIEQGTMREETLNCIKQDGFKTIEVNFRPTAENFAAFFFKTMKDKGYNINRSTVYETPTNSATYEESEAR

SEQ ID NO: 19420 - protein, 154 aa, Clostridium ventriculi
  misc_feature (1)..(154): tr|A0A173WU36|A0A173WU36_CLOVE 6-carboxy-5,6,7,8-tetrah ydropterin synthase OS=Clostridium ventriculi OX=1267 G N=queD PE=4 SV=1
MSYFLEGEESFDSSHFLIGHSGKCKNLHGHRWKIQYGLKADELIESGSSKGMIIDFTDIKNIIKNYFDKYDHALLLTVDSHEVSSEEKSFIDACNAMNFKIINLPCRTTAENMSKLFFYEISALLDEKVKSNNFSLCYITVYETPNNKATYKED

SEQ ID NO: 19421 - protein, 118 aa, Clostridium ventriculi
  misc_feature (1)..(118): tr|A0A174C5P6|A0A174C5P6_CLOVE 6-pyruvoyl tetrahydropte rin synthase-related domain OS=Clostridium ventriculi O X=1267 GN=ERS852473_01819 PE=4 SV=1
MNYQYRFKFYVSARHYSNIAGTPTILHPHTWELTLLLTSSNNELIKFSYLESKISQYLKNFEQKSLNTLEVFINKSCTTEDIAYTFFEDLSNVVLKDDIVLDCLELSENPTRTFIVKR

SEQ ID NO: 19422 - protein, 143 aa, Clostridium vincentii
  misc_feature (1)..(143): tr|A0A2T0BDY1|A0A2T0BDY1_9CLOT 6-carboxy-5,6,7,8-tetrah ydropterin synthase OS=Clostridium vincentii OX=52704 G N=queD PE=4 SV=1
MFILKSEIGFDMSHYLSGYDGKCGNIHGHRYRLIVKVKGTELKSTGSNRAMVEDFGFIKLILKDIHDLFDHKLVVEDDQIGRDLIKRLEGTLQNFEHVVVSYRPTAEEMSRDIFNRIKAKGINIYEVELFETPTNSCIYREEE

SEQ ID NO: 19423 - protein, 136 aa, Cnuella takakiae
  misc_feature (1)..(136): tr|A0A1M5C472|A0A1M5C472_9BACT 6-carboxy-5,6,7,8-tetrah ydropterin synthase OS=Cnuella takakiae OX=1302690 GN=S AMN05444008_108217 PE=3 SV=1
MVYLTRVEHFNAAHKLYNPAWSREENELVFGKCANEHCHGHNYELYVTVKGKPDSGTGFVMDVKKLSTLIKEHVTDQLDHRNLNVDVPFMEGKLTSTENLAMAIWQQLAPQLPQSVQLHCIKLYETPRIYVEYFGE

SEQ ID NO: 19424 - protein, 118 aa, Cnuella takakiae
  misc_feature (1)..(118): tr|A0A1M4Y205|A0A1M4Y205_9BACT 6-carboxy-5,6,7,8-tetrah ydropterin synthase OS=Cnuella takakiae OX=1302690 GN=S AMN05444008_104123 PE=3 SV=1
MEIYKEFSFDSAHFLPNVPEGHKCKNMHGHTYKLKVFVAGEVHPHYGWIMDFKELKDAIAPLIDQLDHKLINDIPGLENPTAENITIWIWNRLNPLVPQLSRIELYETPTTGVIYNGK

SEQ ID NO: 19425 - protein, 305 aa, Cobetia crustatorum
  misc_feature (1)..(305): tr|A0A558HN93|A0A558HN93_9GAMM 6-pyruvoyl tetrahydropte rin synthase-related protein OS=Cobetia crustatorum OX= 553385 GN=FQP86_08190 PE=4 SV=1
MITKTLFVRALTALDASTWSNTRGLYGISQHLDIELDGEVGHDGMLFDFGNVKPWAKGLIDQDADHTLIVPTLAEGVSVTDCPEGLSLRFTQPYAMEVRGPRQAFCLLPVAEITDEVMTQHFEKLLMRRLPPRVDAIRVKLRNEVIDGATYTYSHGLRHHTGNCQRIAHGHRSPLIIERNGERDTTLEAEWAEKLHDSYLAEEADLFDRPGRDMVFSYEAPQGKFRIRLPRQRVWLLPTPTTIEWIADWLARQIALESGDTIRVEAYEGINKGAIALHTPESARQPLVMPTLDTSREEVAGNEAS

SEQ ID NO: 19426 - protein, 299 aa, Cobetia marina
  misc_feature (1)..(299): tr|A0A4U1LY21|A0A4U1LY21_COBMA 6-pyruvoyl tetrahydropte rin synthase-related protein OS=Cobetia marina OX=28258 GN=FBG13_08075 PE=4 SV=1
MTSKTLFVRALTAVDASVWSNTRGLHGISQHLDLELDGAVGHDGMLFDFGDVKPWAKRMIDQDADHTLIVPSQADGVNVTDCPEGLCLRFTQPYAMEVRGPRQAFCLLPVAEVTTLVLANHFEKLLTRRLPPRVEALRVRLRDECIEGAAYTYSHGLRHHSGNCQRIAHGHRSPLVIERNGLRDTALEAEWAEKLNDRYLAEEGDLIDRPGRELVFSYEAPQGRFRIRLPRKQVWLLPTPTTIEWIADWLARQIALDSGDSIRVEAYEGINKGAIARHTPETARQPLVLPEHEEMPVPS

SEQ ID NO: 19427 - protein, 299 aa, Cobetia marina
  misc_feature (1)..(299): tr|A0A4Y4GPH1|A0A4Y4GPH1_COBMA Uncharacterized protein OS=Cobetia marina OX=28258 GN=HHA02_22550 PE=4 SV=1
MTSKTLFVRALTAVDASVWSNTRGLHGISQHLDLELDGAVGHDGMLFDFGDVKPWAKRMIDQDADHTLIVPSQAEGVSVTDCPEGLCLRFTQPYAMEVRGPRQAFCLLPVAEVTTVVLANHFEKLLTRRLPPRVEALRVRLRDECIEGAAYTYSHGLRHHSGNCQRIAHGHRSPLVIERNGLRDTALEAEWAEKLNDRYLAEEGDLIDRPGRELVFSYEAPQGRFRIRLPRKQVWLLPTPTTIEWIADWLARQIALDSGDSIRVEAYEGINKGAIARHTPETARQPLVLPEHEEMPATS

SEQ ID NO: 19428 - protein, 299 aa, Cobetia sp.
  misc_feature (1)..(299): tr|A0A3T0K563|A0A3T0K563_9GAMM 6-pyruvoyl tetrahydropte rin synthase-related protein OS=Cobetia sp. ICG0124 OX= 2053669 GN=CU110_04805 PE=4 SV=1
MTSKTLFVRALTAVDASVWSNTRGLHGISQHLDLELDGAVGHDGMLFDFGDVKPWAKRMIDQDADHTLIVPSQADGVSVTDCPEGLCLRFTQPYAMEVRGPRQAFCLLPVAEVTTVVLANHFEKLLTRRLPPRVEALRVRLRDECIEGAAYTYSHGLRHHSGNCQRIAHGHRSPLVIERNGLRDTALEAEWAEKLNDRYLAEEGDLIDRPGRELVFSYEAPQGRFRIRLPRKQVWLLPTPTTIEWIADWLARQIALDSGDSIRVEAYEGINKGAIARHTPETARQPLVLPEHEEIPATS

SEQ ID NO: 19429 - protein, 299 aa, Cobetia sp.
  misc_feature (1)..(299): tr|A0A2E4Q1A9|A0A2E4Q1A9_9GAMM 6-pyruvoyl tetrahydropte rin synthase-related protein OS=Cobetia sp. OX=1873876 GN=CL809_09510 PE=4 SV=1
MTPKTLFVRALTAVDASVWSNTRGLFGISQHLDLELDGAVGHDGMLFDFGDVKPWAKRMIDQDADHTLIVPSQAEGVSVTDCPEGLCLRFTQPYAMEVRGPRQAFCLLPVAEVTTEVLANHFEKLLTRRLPPRVEALRVRLRDEIIDGAAYTYSHGLRHHSGNCQRIAHGHRSPLIIERNGVRDTALEAEWAEKLNDRYLAEEGDLIDRPGRELVFSYEAPQGRFRIRLPRKQVWLLPTPTTIEWIADWLARQIALDSGDSIRVEAYEGINKGAIARHTPQTAREPLVLPEHEDTSATS

SEQ ID NO: 19430 - protein, 118 aa, Cocleimonas flava
  misc_feature (1)..(118): tr|A0A4R1EYR0|A0A4R1EYR0_9GAMM 6-carboxy-5,6,7,8-tetrah ydropterin synthase OS=Cocleimonas flava OX=634765 GN=E V695_3179 PE=3 SV=1
MYTISKQFTFSASHQLLNLPGDHPCHRLHGHNYIVEIELRSATLNSTGFVRDYNDLDALKQYIDDTLDHRHLNEVFGHDDTTAENLAYFLYDWSKKQWPEVSAVRVSETPKTWAEYRP

SEQ ID NO: 19431 - protein, 118 aa, Cognatishimia maritima
  misc_feature (1)..(118): tr|A0A1M5L5T1|A0A1M5L5T1_9RHOB 6-carboxy-5,6,7,8-tetrah ydropterin synthase OS=Cognatishimia maritima OX=870908 GN=SAMN04488044_1170 PE=3 SV=1
MYRITKEFHFSASHQLKGLPDDHPCARLHGHNYIVEVELSAPELDAVGFVLDYRELAPLKVWIDETLDHRHLNDVFGHDMVTSERLAKEVYDWAKARWDAVSAVRVSETPKTWAEYRP

SEQ ID NO: 19432 - protein, 126 aa, Cohaesibacter gelatinilyticus
  misc_feature (1)..(126): tr|A0A285N6U7|A0A285N6U7_9RHIZ 6-carboxy-5,6,7,8-tetrah ydropterin synthase OS=Cohaesibacter gelatinilyticus OX =372072 GN=SAMN06265368_0045 PE=3 SV=1
MFRITKEFHFSASHQLCGLPDDHPCARLHGHNYIAEIELSSPDHNEHGFVLDYRELSPLKAYIDDHLDHRHLNDVLGHDMVTSELLAKHLFDWAKARWPQVSAMRVSETPKTWAEYRPVISNGDDA

SEQ ID NO: 19433 - protein, 132 aa, Cohaesibacter marisflavi
  misc_feature (1)..(132): tr|A0A1I5KJN2|A0A1I5KJN2_9RHIZ 6-pyruvoyl-tetrahydropte rin synthase OS=Cohaesibacter marisflavi OX=655353 GN=S AMN04488056_11442 PE=4 SV=1
MFAVEVRDHIMIAHSLPRPVFGPAQGIHGATFVVDATFFTRDVDSDGLAVDIGEATTALNDVLNPLNYQNLDEIEVFRHKISTTEVIAKYIFDQLATAVHEERFGPGSRRICKIRVTLHESHVAKGWYEADL

SEQ ID NO: 19434 - protein, 148 aa, Cohnella luojiensis
  misc_feature (1)..(148): tr|A0A4Y8LSR1|A0A4Y8LSR1_9BACL 6-carboxytetrahydropteri n synthase OS=Cohnella luojiensis OX=652876 GN=E2980_16 030 PE=4 SV=1
MIQQIYPSTPHPFRYELNKDMHFAAAHYVPSEQAGDCAKLHGHTYFANVTIVGNELDESGFLVNFSLIKKLVHDRFDHSLLNGHAEFADEHNPERYPTTENVARTLCEMIQDHLNGMANKPRCVQVFLRETPTSYVVYRPAAGGVYGG

SEQ ID NO: 19435 - protein, 146 aa, Cohnella lupini
  misc_feature (1)..(146): tr|A0A3D9I8V8|A0A3D9I8V8_9BACL PreQ(0) biosynthesis pro tein QueD OS=Cohnella lupini OX=1294267 GN=DFP95_109111 PE=4 SV=1
MIQQIYPSVPHPYRYELNKDMHFAAAHYIPDERAGNCSELHGHTYFANLTIVGNELDECGFLVNFSLVKKLIHDRFDHSLLNGHADFTGDKQPERYPTTENVARTLCELVQSHLDGMANKPICSQVFLRETPSSYVVYRPAAGAVI

SEQ ID NO: 19436 - protein, 154 aa, Cohnella sp.
  misc_feature (1)..(154): tr|A0A1I0ZN58|A0A1I0ZN58_9BACL 6-pyruvoyltetrahydropter in/6-carboxytetrahydropterin synthase OS=Cohnella sp. O V330 OX=1855288 GN=SAMN05216312_105126 PE=4 SV=1
MLQQIYPVAPHPYRYELNKDLQFAAAHFVPAESAGKCSQVHGHTYFVNVTVAGDLLDEAGFLVNFSDIKTLIHTRFDHTLLNDDTESFNADDPNRFPTTEVVAKTICELVQHYLDGRPNHPVCLQVFVRETPTSYCVYRPWPKVSKRPAGDARA

SEQ ID NO: 19437 - protein, 149 aa, Cohnella sp.
  misc_feature (1)..(149): tr|A0A3E0RBA4|A0A3E0RBA4_9BACL 6-carboxy-5,6,7,8-tetrah ydropterin synthase OS=Cohnella sp. OX=1883426 GN=queD PE=3 SV=1
MMQQIYPSVAHPYEYELNKDIQFAAAHYIPSDEAGKCRKLHGHTYFANITVAGDELDASGFLVNFAKIKELIHDRFDHTVLNDDAESFDSELPDRFPTTEVVARTIYEIVQRYLDGTANRPRCVQVYVRETPTSYCIYRPKLKEGDRRG

SEQ ID NO: 19438 - protein, 290 aa, Coleofasciculus chthonoplastes
  misc_feature (1)..(290): tr|B4VM09|B4VM09_9CYAN 6-pyruvoyl tetrahydropterin synt hase family OS=Coleofasciculus chthonoplastes PCC 7420 OX=118168 GN=MC7420_1717 PE=4 SV=1
MKCIINRRAQFSASHRYWLPELSEAQNQQQFGRGAQFPGHGHNYVLFVSLEGDLDEYGMVQNLSQVKKVIKQEVTSQLDYAYLNHTWLDFQETLPTTENIARVIWQKLAPYLPLVKIQLFEHPELWADYLGNGMEAYLTISTHFSAAHRLAHPQLSYDQNCEIYGKCARPNGHGHNYHLEVTVKGEIDPRTGMIVDLGALQKVIDDYVVEPFDHTFLNKDIPYFDQVVPTAENIAIYIRQLLQSPIQKLGAKLHKVKLIESPNNSCEVYCTGDTSSVEPDAIASPVLTFV

SEQ ID NO: 19439 - protein, 128 aa, Coleofasciculus chthonoplastes
  misc_feature (1)..(128): tr|B4VMX3|B4VMX3_9CYAN 6-carboxy-5,6,7,8-tetrahydropter in synthase OS=Coleofasciculus chthonoplastes PCC 7420 OX=118168 GN=MC7420_1793 PE=3 SV=1
MSKWKLVTEFTFDSAHYIRDYDGPCGRMHGHTYTVRLEATSSTLHASEHCPHPVMVADFKSLRWAKKDVTKGGLDHGILNDILPDNYETTAEMIAQYIYDETKKRIPEGVQLKVAVSETPNSWVEYEE

SEQ ID NO: 19440 - protein, 149 aa, Collimonas arenae
  misc_feature (1)..(149): tr|A0A561FTT7|A0A561FTT7_9BURK 6-pyruvoyltetrahydropter in/6-carboxytetrahydropterin synthase OS=Collimonas are nae OX=279058 GN=FHW24_1236 PE=4 SV=1
MLTITRKLEFDAGHRIPDHKSQCRNLHGHRYTLEITLVGAVIEVEGSSDNGMIMDFSDIKTLAKQHLVDIWDHAFLVYEKDTAVREFLATLPDHKTVIIDRIPTVENLARTAYDILKAAYKDHYGTGLHLQKLVLHETPNCWAEISEDR

SEQ ID NO: 19441 - protein, 149 aa, Collimonas arenae
  misc_feature (1)..(149): tr|A0A0A1FFI9|A0A0A1FFI9_9BURK 6-carboxy-5,6,7,8-tetrah ydropterin synthase OS=Collimonas arenae OX=279058 GN=L T85_3392 PE=3 SV=1
MLTITRKLEFDAGHRIPDHKSQCRNLHGHRYTLEITLVGAVIEVEGSSDNGMIMDFSDIKTLAKQHLVDVWDHAFLVYEKDTAVRDFLATLPDHKTVIIDRIPTVENLARTAFDILKAAYKDHFGTGLHLQKLVLHETPNCWAEISEDR

SEQ ID NO: 19442 - protein, 149 aa, Collimonas fungivorans
  misc_feature (1)..(149): tr|G0AB81|G0AB81_COLFT 6-carboxy-5,6,7,8-tetrahydropter in synthase OS=Collimonas fungivorans (strain Ter331) O X=1005048 GN=queD PE=3 SV=1
MLTITRKLEFDAGHRIPDHKSQCRNLHGHRYTLEITLVGAVIEVEGSSDNGMIMDFSDIKTLAKQHLVDVWDHAFLVYEKDTAVRDFLATLPDHKTVIIDRIPTVENLARTAYDILKAAYKDHYGTGLHLQKLVLHETPNCWAEISEDR

SEQ ID NO: 19443 - protein, 149 aa, Collimonas fungivorans; identical to SEQ ID NO: 19442
  misc_feature (1)..(149): tr|A0A127P9L2|A0A127P9L2_9BURK 6-carboxy-5,6,7,8-tetrah ydropterin synthase OS=Collimonas fungivorans OX=158899 GN=queD PE=3 SV=1

SEQ ID NO: 19444 - protein, 149 aa, Collimonas pratensis
  misc_feature (1)..(149): tr|A0A127Q7V1|A0A127Q7V1_9BURK 6-carboxy-5,6,7,8-tetrah ydropterin synthase OS=Collimonas pratensis OX=279113 G N=queD PE=3 SV=1
MLTITRKLEFDAGHRIPDHKSQCRNLHGHRYTLEITLVGAVIEVEGSSDNGMIMDFSDIKTLAKQHLVDVWDHAFLVYEKDAAVRDFLATLPNHKTVVIDRIPTVENLARTAFDILKAAYKDHFGTGLHLQKLVLHETPNCWAEISEDR

SEQ ID NO: 19445 - protein, 149 aa, Collimonas pratensis
  misc_feature (1)..(149): tr|A0A127R0U6|A0A127R0U6_9BURK 6-carboxy-5,6,7,8-tetrah ydropterin synthase OS=Collimonas pratensis OX=279113 G N=queD PE=3 SV=1
MLTITRKLEFDAGHRIPDHKSQCRNLHGHRYTLEITLVGAVIEVEGSSDNGMIMDFSDIKTLAKQHLVDVWDHAFLVYEKDAAVRDFLATLPNHKTVVIDRIPTVENLARTAFDILKVAYKDHFGTGLHLQKLVLHETPNCWAEISEDR

SEQ ID NO: 19446 - protein, 149 aa, Collimonas sp.
  misc_feature (1)..(149): tr|A0A1H3B5L0|A0A1H3B5L0_9BURK 6-pyruvoyltetrahydropter in/6-carboxytetrahydropterin synthase OS=Collimonas sp. OK242 OX=1798195 GN=SAMN04515617_103132 PE=4 SV=1
MLTITRKLEFDAGHRIPDHKSQCRNLHGHRYTLEITLVGAVIEVEGSSDNGMIMDFSDIKTLAKQHLVDVWDHAFLVYEKDMAVRDFLATLPDHKTVIIDRIPTVENLARTAYDILKAAYKDHYGTGLHLQKLVLHETPNCWAEISEDR

SEQ ID NO: 19447 - protein, 149 aa, Collimonas sp.
  misc_feature (1)..(149): tr|A0A1I1MIU0|A0A1I1MIU0_9BURK 6-pyruvoyltetrahydropter in/6-carboxytetrahydropterin synthase OS=Collimonas sp. OK412 OX=1801619 GN=SAMN04515619_114113 PE=4 SV=1
MLTITRKLEFDAGHRIPDHKSQCRNLHGHRYTLEITLVGAVIEVEGSSDNGMIMDFSDIKTLAKQHLVDVWDHAFLVYEKDTAVREFLATLPDHKTVIIDRIPTVENLARTAYDILKAAYKDHYGTGLHLQKLVLHETPNCWAEISEDR

SEQ ID NO: 19448 - protein, 293 aa, Colwellia beringensis
  misc_feature (1)..(293): tr|A0A222GC81|A0A222GC81_9GAMM Uncharacterized protein OS=Colwellia beringensis OX=1967665 GN=B5D82_17985 PE=4 SV=1
MQLFVNDLTVIDFSYCCASRGIVGESWIVDVLLDGSLNEMSMVLDFAVVKKQIKAIIDDAVDHKLLLPMQENTISVEVSENRPGHEFVNFTSKQGGYYLQSPSCAFAKIDTKQIDIASVTDYLTTIILTHLPKNVQGLTLNLRPEVIDGAYYHYTHGLKLHDGNCQRIAHGHRSKIHIYKNGQRSAALEDVWSLRWQDIYLASEADRISLSDIELSATAMANLTPDHQLFSYFAPQGRFDIAVPSTILDVVDCDSTVELLADFIVRQLKKQSPLDEFKVVAFEGVAKGAIANG

SEQ ID NO: 19449 - protein, 293 aa, Colwellia chukchiensis
  misc_feature (1)..(293): tr|A0A1H7MQ00|A0A1H7MQ00_9GAMM 6-pyruvoyl tetrahydropte rin synthase OS=Colwellia chukchiensis OX=641665 GN=SAM N05216262_10691 PE=4 SV=1
MQLFVNDLTVIDFSYCCAERGIVGESWIVDVLLDGSLNEMSMVLDFAVVKKQIKAIIDDAVDHKLLLPMLNRAINVENLAKRMGHEYVDFSSKQGSYYLQSPASAFAKIASDEITIDAVTTHLKTIILAQLPKNVQGLTLKLRPENIDGAYYHYTHGLKLHDGNCQRIAHGHRSKIHIYKNGQRSSALEDVWCLRWQDIYLASEADRVSQSEIELSETAMANLTPDHQFFAYHAPQGRFDIAVPSNILDVVDCDSTVELLADFIVRQLKQQSPNDEFKVVAFEGVAKGAIAHG

SEQ ID NO: 19450 - protein, 296 aa, Colwellia demingiae
  misc_feature (1)..(296): tr|A0A5C6Q9I6|A0A5C6Q9I6_9GAMM Uncharacterized protein OS=Colwellia demingiae OX=89401 GN=ESZ36_18585 PE=4 SV= 1
MQLFVDDLTVIDFSYLCKQRGIVGESWIVDVLLDGSLNEMSMVLDFAVVKKQIKAIIDDAVDHKLLLPIQEQALTLAESPHNDGHQTIDFIIDVASYYLQSPACAFASIDCLTITIPEVTKHLTAIILAHLPDNVKGLTLVLRPENIPSDYYHYTHGLKLHDGNCQRIAHGHRSKIQILVDGERSAKLEAAWCQRWEDIYIASEADRISASDIQLSAQAINNLTPDHQYFSYHAPQGRFDIAVDSKVLDVVDCDSTVELLADFILRQIKAQYSELANNEVKVIAYEGVAKGAIVHG

SEQ ID NO: 19451 - protein, 292 aa, Colwellia hornerae
  misc_feature (1)..(292): tr|A0A5C6Q5S2|A0A5C6Q5S2_9GAMM Uncharacterized protein OS=Colwellia hornerae OX=89402 GN=ESZ27_14750 PE=4 SV=1
MQLFVNDLTVIDFSYCCPERGIVGESWIVDVLLDGALNEMSMVLDFAVVKKQIKAIIDDAVDHKLLLPMKNECITVTDSLHQENHEYVDFISERASYYLQSPKCAFAKIISDTIDVTSVTGHLTAIILEQLPQNVQGLKLTLRPENISGDYYHYTHGLKLHDGNCQRIAHGHRSTIHILQKGQRVAALEKAWCLRWQDIYIASDVDRVEKADIELSNFAQHNLTSDHHYFSYTAPQGRFDIAVENKVLDVVDCDSTVELLADFIARQLVADNQGEVTVVAFEGVGKGAIANA

SEQ ID NO: 19452 - protein, 296 aa, Colwellia marinimaniae
  misc_feature (1)..(296): tr|A0A1Z5I4H8|A0A1Z5I4H8_9GAMM Uncharacterized protein OS=Colwellia marinimaniae OX=1513592 GN=queD PE=4 SV=1
MQLFVDNLTVIDFSYLCKQRGIVGESWIVDVLLDGSLNEQSMVLDFAIVKKQIKAIIDDAVDHKLLLPAQEQAITLADSPHNQGHQTIDFNSDVANYYLQSPACAFATIDCLSITVAAVTTHLTAIILAHLPDNVQGLSLVLRPEVISSDYYHYTHGLKLHDGNCQRIAHGHRSKIKVYVDDKRDAKLEAAWCQRWQDIYIASEADRISRDDIELSAHAMNNLTPDHQYFSYHAPQGRFDIAVDSKVLDVVDCDSTVELLADFILRQIKAEHAELANKTVQVVAYEGVAKGAIVHG

SEQ ID NO: 19453 - protein, 120 aa, Colwellia psychrerythraea
  misc_feature (1)..(120): tr|Q47ZY6|Q47ZY6_COLP3 6-carboxy-5,6,7,8-tetrahydropter in synthase OS=Colwellia psychrerythraea (strain 34H / ATCC BAA-681) OX=167879 GN=CPS_2933 PE=3 SV=1
MNTAIYKDFMFEAAHKLPNVPAGHKCARLHGHSYKVRIHLEGTVDKDSGWFIDFSDVKTIFKPIYNQLDHYYLNDIEGLENPTAEVISKWIWDKLKPDLPELSAIELMETCTCGVIYKGK

SEQ ID NO: 19454 - protein, 296 aa, Colwellia psychrerythraea
  misc_feature (1)..(296): tr|A0A099KUL7|A0A099KUL7_COLPS Uncharacterized protein OS=Colwellia psychrerythraea OX=28229 GN=GAB14E_2445 PE =4 SV=1
MQLFVDDLTVIDFSYLCKQRGIVGESWIVDVLLDGSLNDQSMVLDFAVVKKQIKAIIDDAVDHKLVLPIQEPALTLAESPHNEGHQTIDFISDVASYYLQSPACAFASIDCLTITVPAVTKHLTAIILAQLPDNVKGLTLVLRPEVIPSDYYHYTHGLKLHDGNCQRIAHGHRSKIKIYVDDKRDAKLEAQWCKRWQDIYIASEADRVSRDDIELSAYAMNNLTLDHQYFSYHAPQGRFDIAVDKKILEVVDCDSTVELLADFILRQIKAEHTELANNTVTVVAYEGVAKGAIVNG

SEQ ID NO: 19455 - protein, 293 aa, Colwellia sp.
  misc_feature (1)..(293): tr|A0A136HHM4|A0A136HHM4_9GAMM 6-pyruvoyl tetrahydropte rin synthase OS=Colwellia sp. Phe_37 OX=1795872 GN=AXW1 7_04550 PE=4 SV=1
MQLFVNDLTVIDFSYCCTERGIVGESWIVDVLLDGSLNEMSMVLDFAVVKKQIKAIIDDAVDHKLLLPMLDNAITVSDSTYREGHEFVDFKSKQGSYNLQSPRCAFAKISSDKIDIASVTNYLTEIILEQLPKNVQGLTLNLRAENIDGAFYHYTHGLKLHDGNCQRIAHGHRSKIHIYQNGQRSVDLEAAWSLRWKDIYLASEADRIALTDIELSANATENLSADQQLFSYFAPQGRFDIAVPSNILDVVDCDSTVELLADFILRQLKQQSPDNEFKVVAFEGVAKGAIANG

SEQ ID NO: 19456 - protein, 175 aa, Colwellia sp.
  misc_feature (1)..(175): tr|A0A2G2EZ62|A0A2G2EZ62_COLSX QueD like 2 OS=Colwellia sp. OX=56799 GN=COA35_17210 PE=4 SV=1
MQIDDLLITEQQLSTRLNQSVHADRRGEFSLLLAMLSQDALDFSQFHLPKTEIEENTTQEAQLREQLGAGPKQPLAPSEFNMLIGQFNAQRLSLVGENKGMADIKLNQCLNPEPFSIRDDVNHIPLPIIDNCELAVRRRLQKDEIEIDNPKMDVAGFYDVLTDVNQREPLHLTMA

SEQ ID NO: 19457 - protein, 293 aa, Colwelliaceae bacterium
  misc_feature (1)..(293): tr|A0A2D6REB3|A0A2D6REB3_9GAMM Uncharacterized protein OS=Colwelliaceae bacterium OX=2026726 GN=CL811_03250 PE =4 SV=1
  misc_feature (276)..(276): Xaa can be any naturally occurring amino acid
  misc_feature (280)..(280): Xaa can be any naturally occurring amino acid
MQLFVNDLTVIDFSYLCEERGIVGESWIVDVLLEGCLNEMSMVLDFGVVKKQIKAIIDDAVDHKLLLPGSSEKLRVTKEGARQDHEFVDFISERASYFLQSPEQAFATIDCQKISIEAVTSHLITVIKKQLPDNVEGLTIKLRPEDIKSDFYHYTHGLKKHDGNCQRIAHGHRSMITLFENDERSEALEAYWCERWKDIYLATDSDEISKEQAELSSFAMDNLKPDHRYFAYMAPQGRFDIAVQENVLEVVDCDSTVELLADYIGRQLKARTENSXITVXAYEGVGKGAIADV

SEQ ID NO: 19458 - protein, 149 aa, Colwelliaceae bacterium
  misc_feature (1)..(149): tr|A0A2D6RD73|A0A2D6RD73_9GAMM 6-carboxytetrahydropteri n synthase QueD OS=Colwelliaceae bacterium OX=2026726 G N=CL811_01115 PE=4 SV=1
MTVIAKTIEINMGHRLPNHNSKCRNLHGHRYKIEVGVQGELISSKGSSDEGMIIDFGDLKKIMVEIIDDVYDHGLVLSNEDHNLIQFLENPANGVKTKLVVVDFIPTVENLTRHWHDLLKPKLEEKKILLKYVKTWETPTCFAVYEDED

SEQ ID NO: 19459 - protein, 147 aa, Comamonadaceae bacterium
  misc_feature (1)..(147): tr|A0A2M8E3R8|A0A2M8E3R8_9BURK 6-carboxytetrahydropteri n synthase QueD OS=Comamonadaceae bacterium CG_4_9_14_0 _8_um_filter_60_18 OX=1973950 GN=queD PE=4 SV=1
MLTITRKLEFDAGHRIPDHKSQCRNLHGHRYTLLITLTGEVVQQDGAADNGMIMDFGDIKALANQHLVNLWDHAFIVYAHDTPVRQFLESLPDHKTVVIDRVPTVENLAKIAFDILQPVYHGRFGHQLSLTRVTLFETPNCWAEIDA

SEQ ID NO: 19460 - protein, 147 aa, Comamonadaceae bacterium; identical to SEQ ID NO: 19459
  misc_feature (1)..(147): tr|A0A2M7FVC3|A0A2M7FVC3_9BURK 6-carboxytetrahydropteri n synthase QueD OS=Comamonadaceae bacterium CG17_big_fi l_post_rev_8_21_14_2_50_60_13 OX=1973953 GN=queD PE=4 S V=1

SEQ ID NO: 19461 - protein, 158 aa, Comamonas serinivorans
  misc_feature (1)..(158): tr|A0A1Y0EPT5|A0A1Y0EPT5_9BURK 6-pyruvoyl tetrahydrobio pterin synthase OS=Comamonas serinivorans OX=1082851 GN =CCO03_14035 PE=4 SV=1
MSYRSTKTYGHEVGLSVAFRQWRAASHCRLLHGYSLAFRFEFEAHALDERHWVVDFGGLKPLKAMLEATFDHKTVVAADDPEIAWFEEAARRGLLELVVLPGVGCEKFAEHVHGLATAWMRAQGLSPRCRLVSVEVKEHGANSAIYLGADHAANQRGV

SEQ ID NO: 19462 - protein, 121 aa, Comamonas sp.
  misc_feature (1)..(121): tr|A0A0M2DPS3|A0A0M2DPS3_9BURK 6-carboxy-5,6,7,8-tetrah ydropterin synthase OS=Comamonas sp. E6 OX=364029 GN=CS E6_013_25260 PE=3 SV=1
MQFTVHQRFFFDAAHTLERAIETEGSRRIHGHTYWAEVSVRGPRNPDNGMVIDLGHLRARLELLRDQLDHHFLDEVPGLGKPTLENLCLFIANALADLEPAPSRIRVWRDSIGDGCVLDLS

SEQ ID NO: 19463 - protein, 121 aa, Comamonas sp.
  misc_feature (1)..(121): tr|A0A5D3GXW3|A0A5D3GXW3_9BURK 6-carboxy-5,6,7,8-tetrah ydropterin synthase OS=Comamonas sp. Z3 OX=2601247 GN=F SY59_18155 PE=3 SV=1
MQFTVHQRFFFDAAHTLERAIETESSRRIHGHTYWAEVSVTGPRNPDNGMVIDLGHLRARLELLRDQLDHHFLDEVPGLGKPTLENLCLFIASALADLEPAPSRIRVWRDSIGDGCVLDLS

SEQ ID NO: 19464 - protein, 121 aa, Comamonas testosteroni; identical to SEQ ID NO: 19463
  misc_feature (1)..(121): tr|A0A076PY41|A0A076PY41_COMTE 6-carboxy-5,6,7,8-tetrah ydropterin synthase OS=Comamonas testosteroni TK102 OX= 1392005 GN=O987_23310 PE=3 SV=1

SEQ ID NO: 19465 - protein, 121 aa, Comamonas testosteroni
  misc_feature (1)..(121): tr|A0A0L7MCN3|A0A0L7MCN3_COMTE 6-carboxy-5,6,7,8-tetrah ydropterin synthase OS=Comamonas testosteroni OX=285 GN =GL58_16730 PE=3 SV=1
MQFTVHQRFFFDAAHTLERAIETESSRRIHGHTYWAEVSVSGPRNPDNGMVIDLGHLRARLELLRDQLDHHFLDEVPGLGKPTLENLCLFIANALTDLQPAPSRIRVWRDSIGDGCVLDLS

SEQ ID NO: 19466 - protein, 121 aa, Comamonas thiooxydans; identical to SEQ ID NO: 19462
  misc_feature (1)..(121): tr|A0A0E3BRN9|A0A0E3BRN9_9BURK 6-carboxy-5,6,7,8-tetrah ydropterin synthase OS=Comamonas thiooxydans OX=363952 GN=ATN89_20090 PE=3 SV=1

SEQ ID NO: 19467 - protein, 121 aa, Comamonas thiooxydans
  misc_feature (1)..(121): tr|A0A096DHH5|A0A096DHH5_9BURK 6-carboxy-5,6,7,8-tetrah ydropterin synthase OS=Comamonas thiooxydans OX=363952 GN=Ga0061062_11043 PE=3 SV=1
MQFTVHQRFFFDAAHTLERAIETESSRRIHGHTYWAEVSVRGPRNPDNGMVIDLGHLRARLELLRDQLDHHFLDEVPGLGKPTLENLCLFIANALADLEPAPSRIRVWRDSIGDGCVLDLS

SEQ ID NO: 19468 - protein, 177 aa, Commensalibacter intestini
  misc_feature (1)..(177): tr|G6F1Y1|G6F1Y1_9PROT 6-pyruvoyl-tetrahydropterin synt hase OS=Commensalibacter intestini A911 OX=1088868 GN=C IN_16270 PE=4 SV=1
MLELIFTRRFAMAHRLIHGSSEICATPHGHNEEVRVYLKPLEVKPLDGKQNVIVPFEKAKSTWHRFIDGSVDHAFQLAENDPLVSWFIEHEPQRIPKLLITPGDPTTELLACLFMSKLNCFLSAEQSGLYCDQIEILETPTNTVRFTGNPLDFIPNIRPPEQCWWRRADISISDLES

SEQ ID NO: 19469 - protein, 177 aa, Commensalibacter intestini; identical to SEQ ID NO: 19468
  misc_feature (1)..(177): tr|A0A251ZVS3|A0A251ZVS3_9PROT 6-pyruvoyl tetrahydropte rin synthase OS=Commensalibacter intestini OX=479936 GN =HK18_07625 PE=4 SV=1

SEQ ID NO: 19470 - protein, 176 aa, Commensalibacter sp.
  misc_feature (1)..(176): tr|W7DZ12|W7DZ12_9PROT Uncharacterized protein OS=Comme nsalibacter sp. MX01 OX=1208583 GN=COMX_08075 PE=4 SV=1
MLELVFTRRFAMAHRLIHGSSEICATPHGHNEEVKVYLKSQNFKALDGKMNVVVPFQQAKTTWHRFIDQSVDHAFQLAENDPLVEWFKQHEPKRLPRLLITPGDPTTELLACLFMSKLNCFLSAEQSGLYCHQIEIMETPTNTVRFMGNPSEFIPNCRPSDQCWWNRADMSISEFS

SEQ ID NO: 19471 - protein, 177 aa, Commensalibacter sp.
  misc_feature (1)..(177): tr|A0A318MY95|A0A318MY95_9PROT 6-pyruvoyl tetrahydropte rin synthase OS=Commensalibacter sp. ESL0284 OX=2070537 GN=DK869_06650 PE=4 SV=1
MFDLVFTRRYSMGHRLIHGAGDICATPHGHNEEVSVYLKAHEAERLDGSANMVLPFYYAKKKWHQFVDGSIDHSFQLSEDDPLLPWFIKNEPKRVRHLVVTPGDPTTELMACLLMIKVNTILDAEKTGLYCFKIDIKETPTNTVSFSGNPFDFVPQSKNGQGHWWERPDMSISDLEI

SEQ ID NO: 19472 - protein, 150 aa, Confluentibacter sp.
  misc_feature (1)..(150): tr|A0A2N3HLR8|A0A2N3HLR8_9FLAO 6-carboxytetrahydropteri n synthase QueD OS=Confluentibacter sp. 3B OX=1909700 G N=CSW08_05600 PE=4 SV=1
MSNIRITKQFSFETGHALYGYDGKCKNVHGHSYKLSVTVIGTPITDTTHVKFGMVIDFSDLKKIVKEEIVDVFDHATVFNKNTPHVELAKELKNRGHNVLLVNYQPTSEMMVIDFSNKISKRLPSHIKLHSLKLQETETSFAEWYASDNA

SEQ ID NO: 19473 - protein, 136 aa, Confluentibacter sp.
  misc_feature (1)..(136): tr|A0A2N3HL94|A0A2N3HL94_9FLAO 6-carboxy-5,6,7,8-tetrah ydropterin synthase OS=Confluentibacter sp. 3B OX=19097 00 GN=CSW08_07135 PE=3 SV=1
MNVTVSRKAHFNAAHRLYRKEWTDEKNSLVFGKCSNPNYHGHNYELIVSVTGEIDKETGYVIDIQELKDLIKVEVEDAFDHKNLNIEVPEFKDLNPTAEHIAVVIYNKIKPKLKPNLDLEITLYETPRNFVRYSGT

SEQ ID NO: 19474 - protein, 118 aa, Confluentimicrobium lipolyticum
  misc_feature (1)..(118): tr|A0A238KQX6|A0A238KQX6_9RHOB 6-carboxy-5,6,7,8-tetrah ydropterin synthase OS=Confluentimicrobium lipolyticum OX=1524263 GN=queD PE=3 SV=1
MFRITKEFHFSASHQLCGLPDDHPCARLHGHNYIVEVELAAEALDENGFVIDYRELLPLKRYIDDELDHRHLNDVFGHDMVTSERLAKTLYDWCKSRWPETTAVRVSETPKTWAEYRP

SEQ ID NO: 19475 - protein, 122 aa, Congregibacter litoralis
  misc_feature (1)..(122): tr|A4A7S0|A4A7S0_9GAMM 6-carboxy-5,6,7,8-tetrahydropter in synthase OS=Congregibacter litoralis KT71 OX=314285 GN=KT71_14134 PE=3 SV=1
MEIFKDFHFEAAHRLPQVPPGHKCERLHGHSFQLRVYVEGEPGATSGWIMDFGDIKAACKPVIEQLDHYYLNDIEGLENPTSENLCRWIWDRVLPALPELSAIEIRETCTSGCIYRGNRSAV

SEQ ID NO: 19476 - protein, 165 aa, Congregibacter litoralis
  misc_feature (1)..(165): tr|A4ACK7|A4ACK7_9GAMM 6-pyruvoyl-tetrahydropterin synt hase OS=Congregibacter litoralis KT71 OX=314285 GN=KT71 _19188 PE=4 SV=1
MERLATLYIDKESHKFSAAHYTIFSATERERLHGHNFSVSAMIAAPMGDNGFAADYNVYKRRIKGLCDELDEYMVLPGHSPYQSVVEDGDNYRVSFNGEDMWFLRSDTLVLPIVNSTVEEFAHYLLRRMLEESAGEALAELEICVASGPGQKGSARWSAMDEGIA

SEQ ID NO: 19477 - protein, 140 aa, Coprobacillus sp.
  misc_feature (1)..(140): tr|G9QXV8|G9QXV8_9FIRM 6-carboxy-5,6,7,8-tetrahydropter in synthase OS=Coprobacillus sp. 3_3_56FAA OX=665941 GN =HMPREF1021_00502 PE=3 SV=1
MYFLKTEQSFDSAHFLAGYHGKCANIHGHRWKVIATIKSEKLLEDPQNKGMVTDFGDLKKDLKIIADSFDHALIIETGSLSEKLYQALIDENFKIINLPFRPTAENLAKYIYEALSKNYLVDCLDVYETPNNCASYRGKL

SEQ ID NO: 19478 - protein, 138 aa, Coprobacillus sp.
  misc_feature (1)..(138): tr|H1AM46|H1AM46_9FIRM 6-carboxy-5,6,7,8-tetrahydropter in synthase OS=Coprobacillus sp. 8_2_54BFAA OX=469597 G N=HMPREF0978_01994 PE=3 SV=1
MYFLKTEQSFDSAHFLAGYHGKCANIHGHRWKVIATIKSEKLLEDPQNKGMVTDFGDLKKDLKIIADSFDHALIIETGSLSEKLYQALIYENFKIINLPFRPTAENLAKYIYEALSKDYLVDCLEVYETPNNCASYRG

SEQ ID NO: 19479 - protein, 110 aa, Coprobacter fastidiosus
  misc_feature (1)..(110): tr|A0A495WJ39|A0A495WJ39_9BACT 6-carboxy-5,6,7,8-tetrah ydropterin synthase OS=Coprobacter fastidiosus NSB1 OX= 1349822 GN=BC742_0435 PE=3 SV=1
MYIVKKTLEISASHHLNLSYESKCSSLHGHNWIISIFCRAETLNQDGMVTDFSLIKKLIHEKLDHKNLNEILPFNPTAENIARWVCDQIPFCFRVEVQESEGNIAIYEKD

SEQ ID NO: 19480 - protein, 110 aa, Coprobacter secundus
  misc_feature (1)..(110): tr|A0A0B2J8S2|A0A0B2J8S2_9BACT 6-carboxy-5,6,7,8-tetrah ydropterin synthase OS=Coprobacter secundus OX=1501392 GN=PU94_14125 PE=3 SV=1
MFTVKKTLEISASHSLKLSYESKCSQLHGHNWIITIYCRSKELNEDGMVIDFTLIKKKIQDKLDHKNLNEVLSFNSTAENLAYWICNQIPQCFKVEVQESEGNIAIYEKD

SEQ ID NO: 19481 - protein, 112 aa, Coprobacter sp.
  misc_feature (1)..(112): tr|A0A316SRQ4|A0A316SRQ4_9BACT 6-carboxy-5,6,7,8-tetrah ydropterin synthase OS=Coprobacter sp. OX=1941478 GN=qu eD PE=3 SV=1
MYYIIKKFEISASHSLKLSYQSKCEQLHGHNWIIEVHARSEKLNRDGMVIDFGHVKEKIQSQLDHRNLNDIFPDMNTTAENLAKWICDQIPECYKVMIQESESNVAWYEKDQ

SEQ ID NO: 19482 - protein, 139 aa, Coprococcus catus; identical to SEQ ID NO: 18296
  misc_feature (1)..(139): tr|A0A3E2TAU8|A0A3E2TAU8_9FIRM 6-carboxy-5,6,7,8-tetrah ydropterin synthase OS=Coprococcus catus OX=116085 GN=q ueD PE=3 SV=1

SEQ ID NO: 19483 - protein, 139 aa, Coprococcus catus
  misc_feature (1)..(139): tr|A0A3E2TRY5|A0A3E2TRY5_9FIRM 6-carboxytetrahydropteri n synthase OS=Coprococcus catus OX=116085 GN=DW070_0254 5 PE=4 SV=1
MYYLKTEHSFDSAHFLAGYEGKCRNIHGHEWRVVIEICRPDLDEEGQTRDMMFDFGQLKKDVKREVDAMDHALIIEKGSLMPATMAALQAENFRIIEIPYRPTAERLAYYFYERLTACGYHVHRSTVYETPNNCASYEE

SEQ ID NO: 19484 - protein, 139 aa, Coprococcus comes; identical to SEQ ID NO: 18296
  misc_feature (1)..(139): tr|A0A3R6BDP0|A0A3R6BDP0_9FIRM 6-carboxy-5,6,7,8-tetrah ydropterin synthase OS=Coprococcus comes OX=410072 GN=q ueD PE=3 SV=1

SEQ ID NO: 19485 - protein, 140 aa, Coprococcus comes
  misc_feature (1)..(140): tr|A0A3R6A9Q9|A0A3R6A9Q9_9FIRM 6-carboxy-5,6,7,8-tetrah ydropterin synthase OS=Coprococcus comes OX=410072 GN=D WX03_12975 PE=3 SV=1
MYYLRTESSFDAAHFLWKYEGKCRNLHGHRWRVVAEIKSPDLKQEEQTRGMVVDFGDLKNDLRLLCDLFDHSLIYETGSLREETLLAFRKEMFHLEEVSFRPTAENFAAYFYTKLSDLGYEVHRVEVYETPNNCATYEGK

SEQ ID NO: 19486 - protein, 111 aa, Coprococcus eutactus
  misc_feature (1)..(111): tr|A0A3R5WI00|A0A3R5WI00_9FIRM 6-carboxy-5,6,7,8-tetrah ydropterin synthase OS=Coprococcus eutactus OX=33043 GN =DWX94_14135 PE=3 SV=1
MAELAVERVIDSAHGRKIHGHSFKVNVTFAGTVENDMVSGIDFHDAIDKVNAVLDTIDKKYLNDIEGMGRATVENIAVYIIRHLKGIEGLYAVTVWEGLDRYAKIFANEVD

SEQ ID NO: 19487 - protein, 163 aa, Coprococcus eutactus
  misc_feature (1)..(163): tr|A0A412IRW2|A0A412IRW2_9FIRM Uncharacterized protein OS=Coprococcus eutactus OX=33043 GN=DWX94_07575 PE=4 SV =1
MWHIKQGGGWLFNYYIYRSYFNARHSFNGDRENMHGHSFTLVTYIGMKDKSEDIPFFKLEAIVSAFVDQYRGKYLNELPEFQKCENTLETLGDHFYEELKRRLEKIGMELYQLDISENPLCVYQVSDRLLLPTMNMDTSNRNYQKIFDDILRLESMTGVNNSQ

SEQ ID NO: 19488 - protein, 160 aa, Coprococcus sp.
  misc_feature (1)..(160): tr|A0A374K2K6|A0A374K2K6_9FIRM 6-pyruvoyl tetrahydrobio pterin synthase OS=Coprococcus sp. OM06-34AC OX=2293095 GN=DXB91_00705 PE=4 SV=1
MRFRQYKFKFYLNARHGIYKNGVLGEVHPHTWEIVINVVKGRDETVKFHHLEHRVEEFLSRYQDKTLNEIAPFDMINPTLENMCEYFKDELTEILNRNGWIFLMMEMSESPSMSYVVSLIDDSYTEEMQTINSLADRILKEIKQSRDETIDRIYSDMYNK

SEQ ID NO: 19489 - protein, 145 aa, Coprococcus sp.
  misc_feature (1)..(145): tr|A0A374K6C0|A0A374K6C0_9FIRM 6-carboxy-5,6,7,8-tetrah ydropterin synthase OS=Coprococcus sp. OM06-34AC OX=229 3095 GN=queD PE=3 SV=1
MLIGGVMYKLKTKASFDSAHFLKDYDGKCSNIHGHRWTVEIEVGAETLESDTQNRGMVVDFSNLKKDLKEIADHFDHSLIMETGSLKQATEDALLAENLRIVKVDFRPTAENFAKYIYDEMAGRGYKVIEASVYETPNNVASYCE

SEQ ID NO: 19490 - protein, 127 aa, Coprothermobacter proteolyticus
  misc_feature (1)..(127): tr|B5Y6S0|B5Y6S0_COPPD 6-carboxy-5,6,7,8-tetrahydropter in synthase OS=Coprothermobacter proteolyticus (strain ATCC 35245 / DSM 5265 / BT) OX=309798 GN=COPRO5265_0096 PE=3 SV=1
MNVCVTKAFTFDAAHNLTNYKGKCEALHGHTYRLEVTVCGTPNELENGLLMDFGDLKDLVNKEVLSKLDHSYLNDHFEQPSTELVAMWVFETLKPHVEKLGLVLTSVKLFETATSWVEIKADASRGD

SEQ ID NO: 19491 - protein, 143 aa, Coraliomargarita akajimensis
  misc_feature (1)..(143): tr|D5EK68|D5EK68_CORAD 6-pyruvoyl tetrahydropterin synt hase OS=Coraliomargarita akajimensis (strain DSM 45221 / IAM 15411 / JCM 23193 / KCTC 12865 / 04OKA010-24) OX= 583355 GN=Caka_1798 PE=4 SV=1
MLTCTKTYRDIPFAHRQHKHDGHCALIHGHNWAITLTFACSDADENGFVVDFGKLKYLKAWIDEHLDHACLLNEDDPEKDALLADYGHLFQVYILPNCSSEGLAVHLHGIFDPMVREQTNGRVWITAIEIEEDSKNSATYRPE

SEQ ID NO: 19492 - protein, 144 aa, Coraliomargarita sp.
  misc_feature (1)..(144): tr|A0A317ZNA3|A0A317ZNA3_9BACT 6-carboxytetrahydropteri n synthase OS=Coraliomargarita sp. WN38 OX=2174842 GN=D DZ13_02245 PE=4 SV=1
MITCKKSYRDIPFAHRQHLHDGHCAFIHGHNWTITLTFACEALDTNGFVVDFGKLGYIKKWIAKHLDHACLFNENDPEREKLLKNYGNLFQAYVLPNCSCEGIAQHLYEVFNPMVQEATNGRAWITSVEVEEDSKNSAKYSAGE

SEQ ID NO: 19493 - protein, 147 aa, Coraliomargarita sp.
  misc_feature (1)..(147): tr|A0A424QV87|A0A424QV87_9BACT 6-carboxytetrahydropteri n synthase OS=Coraliomargarita sp. TMED73 OX=1986604 GN =CBC33_009715 PE=4 SV=1
  misc_feature (63)..(63): Xaa can be any naturally occurring amino acid
  misc_feature (110)..(110): Xaa can be any naturally occurring amino acid
MLTCSKTYRDIPFAHRQHRHAGHCAFLHGHNWTLRFTFACTEPDENGFVIDFGKLKYIKEWIXENLDHACLFNQDDPEREALLSQHPDLFKPYILPDCSSEGLAHHLYEXINPMVQEATGGRVRVTIVEVEEDSKNAAMYSTGSLAE

SEQ ID NO: 19494 - protein, 293 aa, Corallincola sp.
  misc_feature (1)..(293): tr|A0A368NQ18|A0A368NQ18_9GAMM Uncharacterized protein OS=Corallincola sp. C4 OX=2282215 GN=DU002_00570 PE=4 S V=1
MRLFVDGLTVIDSTFLCAQRGMLGESWIVDVELAGELNDEGMLFDFSHVKKTIKHALDATVDHKLIVPEQAAETIIVSSDNDILLSFKAAKSELVIQSPLSAFAILPLAQITDSAFARYLEVMLLKLLPDNVTGITVHLRHEAEGPAFYHYTHGLKKHDGNCQRIAHGHRSRIGIWLDGEKRADLESNWASRWQDIYLGSADDEVSVETLPFSAQFGLTDASFYGFQYSASQGNYYLAVSKSATEIVDCDTTVECLADYIARQLSCDYPEQLIKVRAYEGVEKGAICEISASS

SEQ ID NO: 19495 - protein, 127 aa, Corallococcus coralloides
  misc_feature (1)..(127): tr|H8MTT4|H8MTT4_CORCM 6-carboxy-5,6,7,8-tetrahydropter in synthase OS=Corallococcus coralloides (strain ATCC 2 5202 / DSM 2259 / NBRC 100086 / M2) OX=1144275 GN=queD PE=3 SV=1
MKKTPLVTEISKEFTFEAAHRLPNVPEGHKCSRVHGHSYRIEITLRGPVHPQFGWIVDFAELNAAWQPLHAQLDHRLLNDVPGLENPTSELLAAWLFERVNVPGTTVARIRVAETCTSSCTVYAQEG

SEQ ID NO: 19496 - protein, 166 aa, Corallococcus coralloides
  misc_feature (1)..(166): tr|H8MTT2|H8MTT2_CORCM Folate biosynthesis protein OS=C orallococcus coralloides (strain ATCC 25202 / DSM 2259 / NBRC 100086 / M2) OX=1144275 GN=COCOR_01408 PE=4 SV=1
MAPRTTTLELHKEEMKFSAGHFTIFSATHRENLHGHNFSVYVALTGEVSDDGLLSDYGPLKQAIIQRCKAWNETFFLPAHSKHLRLERDEKGNHVAHFNGEELRFLARDVTVLPVANVSLEELARVFGEELVGDGSAMARDHITGLVVKCASGPGQWASWEWKRDV

SEQ ID NO: 19497 - protein, 132 aa, Corallococcus exiguus
  misc_feature (1)..(132): tr|A0A5C5DZ62|A0A5C5DZ62_9DELT 6-carboxy-5,6,7,8-tetrah ydropterin synthase OS=Corallococcus exiguus OX=83462 G N=queD PE=3 SV=1
MEAVSVKKPTLVTEISKEFTFEAAHRLPNVPEGHKCSRVHGHSYRIEITLHGPVHPQFGWIVDFAELNAAWQPLHAQLDHRLLNDVPGLENPTSELLAAWLFERVNVPGTTVARIRVAETCTSSCTVYAAEG

SEQ ID NO: 19498 - protein, 166 aa, Corallococcus exiguus
  misc_feature (1)..(166): tr|A0A5C5DYX7|A0A5C5DYX7_9DELT Folate biosynthesis prot ein OS=Corallococcus exiguus OX=83462 GN=FH620_08430 PE =4 SV=1
MAPRTTTLELHKEEMKFSAGHFTIFSATHRENLHGHNFSVYVALTGEVADDGLLSDYGPLKQAIINRCKSWNETFFLPSRSKHLRLERDEKGNHVAHFNGEELRFLARDVTVLPVANVSLEELARVFGEELVGDGSGMARDHITGLVVKCASGPGQWASWEWKRDV

SEQ ID NO: 19499 - protein, 127 aa, Corallococcus sp.
  misc_feature (1)..(127): tr|A0A3A8LE70|A0A3A8LE70_9DELT 6-carboxy-5,6,7,8-tetrah ydropterin synthase OS=Corallococcus sp. CA053C OX=2316 732 GN=queD PE=3 SV=1
MKKIPLITEISKEYTFEAAHHLPHVEKGHKCSRVHGHSYRIEITLQGPIHPQLGWLVDFAELNAAWEPLNEQLDHRLLNDVPGLENPTSELLAAWIYERLDIPGARVSRLKVAETCMSSCTVFPAPG

SEQ ID NO: 19500 - protein, 165 aa, Corallococcus sp.
  misc_feature (1)..(165): tr|A0A3A8NPU0|A0A3A8NPU0_9DELT Folate biosynthesis prot ein OS=Corallococcus sp. CA040B OX=2316726 GN=D7X12_076 55 PE=4 SV=1
MARTTTIELHKEEMKFSAGHFTIFSATHRENLHGHNFTVYVALTGEVGDDGLMADYGPLKQAVIARCKAWNETFFLPERSRHLRLERDANGNHRAYFNGEELHFLARDVTLLPAANVTLEELARVFGEELVGDGAGMARDHVTRLVVKCASGPGQWATWEWNGNG

SEQ ID NO: 19501 - protein, 139 aa, Coriobacteriaceae bacterium
  misc_feature (1)..(139): tr|A0A0A8B3U7|A0A0A8B3U7_9ACTN 6-carboxy-5,6,7,8-tetrah ydropterin synthase OS=Coriobacteriaceae bacterium 68-1 -3 OX=1531429 GN=JI75_05255 PE=3 SV=1
MYELKTETAFDGAHFLTDYYGKCENLHGHRWRVVAYIGKEALETAGTHKDMVLDFSVFKRTVRAVAEELDHTFLVEEGSLRPETIACLESEGFDLTVLPFRTTAENLATYLFERIAASGLPATCVEVYETPNNCAIYRP

SEQ ID NO: 19502 - protein, 140 aa, Coriobacteriaceae bacterium
  misc_feature (1)..(140): tr|A0A143X4Z6|A0A143X4Z6_9ACTN 6-carboxy-5,6,7,8-tetrah ydropterin synthase OS=Coriobacteriaceae bacterium CHKC I002 OX=1780377 GN=BN3658_01203 PE=3 SV=1
MYGLKTEASFDSAHFLTDYYGKCENLHGHRWRMVVRIESTDLQAEGTMKDMVMDFGVFKRAVRALAEELDHTFLVEEGSLADATLAALEAEGFSLTILPFRTTAENLARYACERLTEQGLPVSQVDMYETPNNCAVYRAR

SEQ ID NO: 19503 - protein, 141 aa, Coriobacteriales bacterium
  misc_feature (1)..(141): tr|A0A437UUL8|A0A437UUL8_9ACTN 6-carboxytetrahydropteri n synthase OS=Coriobacteriales bacterium OH1046 OX=2491 116 GN=EII22_06755 PE=4 SV=1
MFGLKTEGAFDSAHFLTDYYGACENLHGHRWRVVAYLAQEDLQSEGAMRGMVLDFGVFKSKVRLLCSEFDHTFLVEEGSLKPATVEALEGEGFSLKMLPFRTTAENLARHFAERLIGDGLPVCQIDLYETPNNCASYYVGG

SEQ ID NO: 19504 - protein, 142 aa, Coriobacteriales bacterium
  misc_feature (1)..(142): tr|A0A133ZCF4|A0A133ZCF4_9ACTN 6-carboxy-5,6,7,8-tetrah ydropterin synthase OS=Coriobacteriales bacterium DNF00 809 OX=1588753 GN=HMPREF3190_00711 PE=3 SV=1
MFELKTESAFDSAHFLTDYYGKCENLHGHRWRVVGYIAQEHLQSEGTHKDMVLDFCLFKKIFREEVARLDHTFLVEEGSLHNDTLECLKREGFKLTILPFRTTAENLAQYFYRALQEKKLPVSCIEVYETPNNCAIYRPKQG

SEQ ID NO: 19505 - protein, 139 aa, Coriobacteriia bacterium
  misc_feature (1)..(139): tr|A0A2V2ECH2|A0A2V2ECH2_9ACTN 6-carboxy-5,6,7,8-tetrah ydropterin synthase OS=Coriobacteriia bacterium OX=2052 159 GN=DBX43_01170 PE=3 SV=1
MYGLKTESSFDAAHFLTDYHGKCENLHGHRWRVVAYLEQEELQTQGTHKDMVIDFADFKGALRDLTEAFDHSFVVEEGSLAPDTLACLEREGFSLSVVPFRTTAENLARYFYGKLAEAGFPVSQVDVYETPNNCAIYRG

SEQ ID NO: 19506 - protein, 160 aa, Coriobacteriia bacterium
  misc_feature (1)..(160): tr|A0A316RUA5|A0A316RUA5_9ACTN 6-carboxytetrahydropteri n synthase QueD OS=Coriobacteriia bacterium OX=2052159 GN=DBX94_06865 PE=4 SV=1
MSFGLKTEASFDAAHFLADYYGKCENLHGHRWRVVAYLEQDGLQQEGTMREMVLDFGVFKRALRELVAEYDHTFLVEKGTLKDSTVAALESEGFSLTIVPFRTTAENLARHFADELMARGLPCSQVDVYETPLNCATYRPDFRGSAGEGPLLSRPAAILR

SEQ ID NO: 19507 - protein, 143 aa, Corynebacterium striatum
  misc_feature (1)..(143): tr|A0A2H1AFW3|A0A2H1AFW3_CORST 6-pyruvoyl tetrahydrobio pterin synthase OS=Corynebacterium striatum OX=43770 GN =AZH47_01955 PE=4 SV=1
MTNFDQVQPPEQFKYRSNAVLIKNYYEFTCDNRIYFSQTAHKDLANQHYKFDIEILSEIDDTGLALDFNEVDKIYNQKIATYLDGQLVNETLPSMNTTAENIAFWIWEQFEQHLPEQNTLQKLEFFENATQGLVLTREFMDEK

SEQ ID NO: 19508 - protein, 141 aa, Corynebacterium striatum
  misc_feature (1)..(141): tr|A0A2H1ADM1|A0A2H1ADM1_CORST 6-carboxy-5,6,7,8-tetrah ydropterin synthase OS=Corynebacterium striatum OX=4377 0 GN=AZH47_11510 PE=3 SV=1
MFQQNYPSVNHNYQFELNKDFNFSAAHYIPSEDAGKCMRTHGHTYFVNLTIGGDTVDHNGFLVNFSELKQLVHGQFDHQLLNELPQFEGKSPSTEIVAQTIYEMVQSSLNQRPNTPQCLQVYVRETPTSYVIYRPKEPNHE

SEQ ID NO: 19509 - protein, 120 aa, Cosenzaea myxofaciens
  misc_feature (1)..(120): tr|A0A198GC03|A0A198GC03_9GAMM 6-carboxy-5,6,7,8-tetrah ydropterin synthase OS=Cosenzaea myxofaciens ATCC 19692 OX=1354337 GN=M983_1071 PE=3 SV=1
MTTTIFKEFQFEAAHQLPHVPKGHKCGRLHGHSFLVRLELTGDVDTHSGWLIDFADVKAAFKPTLDRLDHYYLNDIEGLENPTSEVLAKWIWSQVKPSLPLLSAVIVKETCTAGSIYRGE

SEQ ID NO: 19510 - protein, 132 aa, Couchioplanes caeruleus
  misc_feature (1)..(132): tr|A0A3N1GBW1|A0A3N1GBW1_9ACTN 6-pyruvoyl-tetrahydropte rin synthase OS=Couchioplanes caeruleus OX=56438 GN=EDD 30_0433 PE=4 SV=1
MFSVTVRDHIMIAHSFSGEVFGPAQKLHGATFVVDATFKRPELDADNIVVDIGLASQELHAICAGLSYRNLDDEPDFTGVNTSTEFLAKVIADRLAGKAAAGELGAGASGLTGIAVTLHESHIAWASYERDL

SEQ ID NO: 19511 - protein, 132 aa, Couchioplanes caeruleus; identical to SEQ ID NO: 19510
  misc_feature (1)..(132): tr|A0A1K0G2I9|A0A1K0G2I9_9ACTN Uncharacterized protein OS=Couchioplanes caeruleus subsp. caeruleus OX=56427 GN =BG844_25865 PE=4 SV=1

SEQ ID NO: 19512 - protein, 184 aa, Coxiella burnetii
  misc_feature (1)..(184): tr|A9KBA1|A9KBA1_COXBN Queuosine biosynthesis protein O S=Coxiella burnetii (strain Dugway 5J108-111) OX=434922 GN=queD PE=4 SV=1
MKQYISRRVEIDLGHRVMDERFKCYSIHGHRASVHMTFEFSNQSEIGYCIDFKEIKRVGAQWIDDKFDHGFAANPKDKFVIEACQKTNSKYYLMSLNGKDNYCNPTAENISREIFLALEILFEDYPGLKIHRLRFYETPNCWIDTEVSSILPAERENFLSVRGEEVRQYAKEKGRLEYDIRKVK

SEQ ID NO: 19513 - protein, 184 aa, Coxiella burnetii; identical to SEQ ID NO: 19512
  misc_feature (1)..(184): tr|Q83AK2|Q83AK2_COXBU Queuosine biosynthesis protein O S=Coxiella burnetii (strain RSA 493 / Nine Mile phase I ) OX=227377 GN=queD PE=4 SV=1

SEQ ID NO: 19514 - protein, 132 aa, Coxiella sp.
  misc_feature (1)..(132): tr|A0A0S7XW01|A0A0S7XW01_9COXI Uncharacterized protein OS=Coxiella sp. DG_40 OX=1703354 GN=AMJ43_07655 PE=4 SV =1
MVYFSEKFGFAAMHKLWNDELSESRNFEVFGKCANPAGHGHNYVVEVTIKKPTGIETFRIGEFERIVDDELIKTLDHKNLNAEVAAFGKINPTVENIAFFAWNKLVGKFGEAVLHCVTVWETDKTYCSYYGR

SEQ ID NO: 19515 - protein, 144 aa, Coxiella sp.
  misc_feature (1)..(144): tr|A0A0S7Y0Q6|A0A0S7Y0Q6_9COXI Uncharacterized protein OS=Coxiella sp. DG_40 OX=1703354 GN=AMJ43_01910 PE=4 SV =1
MYKIRVKLKSFSAAHRLRKYHTDRCSNLHGHNYDISVVLGTKRLNEFGFVMDFRRVKELCNNWVEKHWDHVVILDENDSTLLEFLKREQQKFFLLPNEYPTSAENLAKYAFIQLAEIIDREDKQIKLLQVEISETKNCTAIYAE

SEQ ID NO: 19516 - protein, 133 aa, Coxiellaceae bacterium
  misc_feature (1)..(133): tr|A0A2E9ZBC2|A0A2E9ZBC2_9COXI 6-carboxy-5,6,7,8-tetrah ydropterin synthase OS=Coxiellaceae bacterium OX=202672 7 GN=CL816_08100 PE=3 SV=1
MFQVLKQITFCYGHRLIRYTGKCQHLHGHDAMAEVVIERDGLDDRGMVVDFSDIKADVTSWIDQHLDHKMLLCKDDPIVEQLKAFGEPLFLLDGNPTAENIAKVIFDQTARMGHNVVEVRLWESPTSCAVYRR

SEQ ID NO: 19517 - protein, 227 aa, Coxiellaceae bacterium
  misc_feature (1)..(227): tr|A0A2E9Z7Q2|A0A2E9Z7Q2_9COXI Uncharacterized protein OS=Coxiellaceae bacterium OX=2026727 GN=CL816_01585 PE= 4 SV=1
MSYQSTKIIELGSCAFRQPQADSHCKFIHGYRLKAKFWFEASHLDQNNWVVDFGGLKELKKLMQDQFDHTTCIARTDPKVMLFKQMRDAGVCDLRIMDGVGIEKFAEWCHTTADNFVGVLTEMRCRCVKVEVFEHENNSAIFETRDSSTSGAQYMNDKADEIERSMQNNEPVVDHHFIKDEPTEKLVKPVVDNVTQPPFAKKAKQGLWPEKQKNTWLDKSGKSTWGF

SEQ ID NO: 19518 - protein, 143 aa, Crassaminicella sp.
  misc_feature (1)..(143): tr|A0A5C0SJ28|A0A5C0SJ28_9CLOT 6-carboxy-5,6,7,8-tetrah ydropterin synthase OS=Crassaminicella sp. SY095 OX=259 9308 GN=queD PE=3 SV=1
MYLLKAEHSFDSAHFLANYNGKCRNIHGHRWKVEIEVKSESLIRGGQLDGMVVDFTDLKRDVKEMVDFYDHALIIQENTMREETLKHLMEDGFKIIQVKFRPTAENFAAFFFHYMEEKGYDVKRASVYETPTNCAAYEKSEGK

SEQ ID NO: 19519 - protein, 324 aa, Crenobacter cavernae
  misc_feature (1)..(324): tr|A0A4Q2JDY6|A0A4Q2JDY6_9NEIS 6-pyruvoyl tetrahydrobio pterin synthase OS=Crenobacter cavernae OX=2290923 GN=E BB06_06590 PE=4 SV=1
MRTTHLATCGFEAARTLPTAGKHGHSFFVTAESRVADLAELRERLTYACAPLDYRDLDTMIASPSDATLAAYLADALGQPCALNLRSAPDRGVDLDEDGALRHWLSTGFEAAHQLPNVEPGHQCGRLHGHGFRVRLVASEDHATIAAAWQPQFERLQHRYLNDIAGLENPTSEVLADWLWQGLAEPLPGLSKVEVFETHTAGSRRDASGLTIWKEQRFEAAVPFDAAGHYTGHSYLVRLYLAGEMDKVSGWLRDFGEVKSLFKPLYKRLDHNPLDQLRGIERTDCAGIAAWIAAKLTPLLPELSAIDLFENAHEGARLSLRDAR

SEQ ID NO: 19520 - protein, 324 aa, Crenobacter cavernae
  misc_feature (1)..(324): tr|A0A345Y7C9|A0A345Y7C9_9NEIS 6-pyruvoyl tetrahydrobio pterin synthase OS=Crenobacter cavernae OX=2290923 GN=D WG20_10480 PE=4 SV=1
MRTTHLATCGFEAARSLSATGRHGHSFFVTAESRVADLAELRERLTYACAPLDYRDLDTMIASPSDATLAAYLADALGQPCALNLRSAPDRGVELDEDGALRHWLSTGFEAAHQLPNVEPGHQCGRLHGHGFRVRLVASEDHATIAAAWQPQFERLQHRYLNDIAGLENPTSEVLADWLWQGLAEPLPGLAKVEVFETHTAGSRRDASGLTIWKEQRFEAAVSIDQDGNYTGHSYLVRLYLAGEMDQVSGWLRDFGEVKSLFKPLYKRLDHNPLDQLRGIERTDCAGIAAWIAAKLTPLLPELSAIDLFENAHEGARLSLRDPR

SEQ ID NO: 19521 - protein, 327 aa, Crenobacter luteus
  misc_feature (1)..(327): tr|A0A163D4Q4|A0A163D4Q4_9NEIS 6-pyruvoyl tetrahydrobio pterin synthase OS=Crenobacter luteus OX=1452487 GN=AVW 16_07230 PE=4 SV=1
MRTLHLATRGFEAARTLPGVGRHGHSFFVTAESRVADHAELRAHLTEACAPLHYRDLSAMLADAGDAALARHLAATLSELGQPCALTLRSAPERGVELAEDGSLCHWFATGFEAAHQLPHVPPGHQCGRLHGHGFKVRLVAAEDVGDIVDAWQPQFDVLQHKYLNEIAGLENPTSEVLADWLWQRLAEPLPGLCKVEVFETHTAGSRRDARGLTIWKEQRFEAAVPFDAAGNYTGHSYLVRLYLSGAIDEFSGWLRDFGEVKSLFKPLYKQLDHNPLDALPGVARTDCAGIAAWIAARLSPLLPELSGVDLFENPHEGARLILRDAR

SEQ ID NO: 19522 - protein, 324 aa, Crenobacter sp.
  misc_feature (1)..(324): tr|A0A4T0V5W7|A0A4T0V5W7_9NEIS 6-pyruvoyl tetrahydrobio pterin synthase OS=Crenobacter sp. GY 70310 OX=2563443 GN=E5K04_01245 PE=4 SV=1
MTVLSCSGAGFDAARTLARVRHGHGFFAQAISPQPLEMLAGELAAACASLTLCDLDPLFASPDDLTLARHLASCLSAPAELALRSAPELGVRRLAGGDEHVWFDTRFEAAHQLPNVPAGHPCGRLHGHGFGVRIEADAARATHASLAAAWQPLAARLEHRLLNEIAGLANPTSEVLAAWLFAELDVDGLVAVEVYETASAGSRFDGGRWTIWKTLRFEAARAFDAAGRYTGHSYRLRLRLAGDALDAELGWLRDFGDVKRAFAPLYDALDHHLLDTLPGLAATDCASLASYIGERFAMPALAGVDVLQNGHDGALWRKEAACTR

SEQ ID NO: 19523 - protein, 134 aa, Crenotalea thermophila
  misc_feature (1)..(134): tr|A0A1I7N4J1|A0A1I7N4J1_9BACT 6-carboxy-5,6,7,8-tetrah ydropterin synthase OS=Crenotalea thermophila OX=139312 2 GN=SAMN05660895_0581 PE=3 SV=1
MYITRRVHFNAAHKLYNPAWSKEKNEEVFGKCANENWHGHNYVLYVTVKGEIDPETGYVTDAKALHELIQRKILDQVDHRNLNLDVPFMKGKICSTENFAKAIWEQLAPEIRQGKLHCVKLYETENIYVEYFGD

SEQ ID NO: 19524 - protein, 151 aa, Crenotalea thermophila
  misc_feature (1)..(151): tr|A0A1I7N158|A0A1I7N158_9BACT 6-pyruvoyltetrahydropter in/6-carboxytetrahydropterin synthase OS=Crenotalea the rmophila OX=1393122 GN=SAMN05660895_0320 PE=4 SV=1
MNRVRVTRVFHFEAAHALYGYDGKCRHIHGHGYELHVTLMGEPLQDPSHPKQGMVMDFGDIKQCIQQHIIEQFDHALLLCKHTPFIELADALQQHTDRIVWLDYTPTCENLVIDFARRIQSVLPAHVQLHHLTLYETPSSYASWYAEDQPA

SEQ ID NO: 19525 - protein, 134 aa, Crenothrix polyspora
  misc_feature (1)..(134): tr|A0A1R4H6B5|A0A1R4H6B5_9GAMM 6-carboxy-5,6,7,8-tetrah ydropterin synthase OS=Crenothrix polyspora OX=360316 G N=CRENPOLYSF2_240003 PE=3 SV=1
MFTITKEVYFCYGHRLMNHSGKCRHLHGHSVKAAISVAQDQLNDQGMVCDFADIKQCVEGYINEYLDHNFLLHKNDPIVPVLIENKERFLALDEHPTAEVISKMIYQYLKKSGFNVVEVVLWETASAYASYKES

SEQ ID NO: 19526 - protein, 134 aa, Crenothrix polyspora
  misc_feature (1)..(134): tr|A0A1R4HJZ3|A0A1R4HJZ3_9GAMM 6-carboxy-5,6,7,8-tetrah ydropterin synthase OS=Crenothrix polyspora OX=360316 G N=CRENPOLYSF1_890021 PE=3 SV=1
MFIITKEVYFCYGHRLMNHAGKCRNLHGHSVKAAISIASEQLNDHAMVCDFSEIKQCVESYIDEYLDHNFLLHKDDPIMPVLHANNERFLALDEHPTAEVISKMIYQHIKKSGFNVTQVTLWETASAYACYQEN

SEQ ID NO: 19527 - protein, 134 aa, Crenothrix sp.
  misc_feature (1)..(134): tr|A0A1Y2ZZT3|A0A1Y2ZZT3_9GAMM 6-carboxy-5,6,7,8-tetrah ydropterin synthase OS=Crenothrix sp. D3 OX=1880899 GN= BCS42_03660 PE=3 SV=1
MFTITKEVYFCYGHRLMNHAGKCRHLHGHSVKAAISIQQETLNDQGMVCDFSDIRDCVTAYVDEQLDHNFLLHKDDPIIPMLIANNERFMALNEHPTAEVLSKMIYQHLKQAGFNVAEVALWETASAYACYRED

SEQ ID NO: 19528 - protein, 122 aa, Criblamydia sequanensis
  misc_feature (1)..(122): tr|A0A090D135|A0A090D135_9BACT 6-carboxy-5,6,7,8-tetrah ydropterin synthase OS=Criblamydia sequanensis CRIB-18 OX=1437425 GN=queD PE=3 SV=1
MFELEKSFRFEAGHSLPQSNSKCRVPHGHSFLLVVKIRAEKLQEEGQERNMVVDFNVISSVVRPLINEYFDHCWLNDTLQTDAPTVEFIARWIYNRLKPELPDLYSITLHETDTQKVTFYES

SEQ ID NO: 19529 - protein, 141 aa, Cricetibacter osteomyelitidis
  misc_feature (1)..(141): tr|A0A4R2TFP4|A0A4R2TFP4_9PAST 6-carboxy-5,6,7,8-tetrah ydropterin synthase OS=Cricetibacter osteomyelitidis OX =1521931 GN=EDC44_11733 PE=3 SV=1
MFKVSKEFSFDMAHILDGHDGKCQNLHGHTYKLQVEISGELYPNGPKKGMVIDFSDLKAIVQQFILDPMDHAFIYDQTSERESKIATLLQELKSKTFALDKRTTAEEMARFIFNRLKNEQNLPVSAIRLWETPTSFCEYSE

SEQ ID NO: 19530 - protein, 290 aa, Crinalium epipsammum
  misc_feature (1)..(290): tr|K9VX27|K9VX27_9CYAN Uncharacterized protein OS=Crina lium epipsammum PCC 9333 OX=1173022 GN=Cri9333_1778 PE= 4 SV=1
MRCTINRRAQFSASHRYWLPELSEADNIQRFGLCTQTHGHGHNYVLYISLEGEIDEYGMVQNLSDVKQVIKREVTSQLDYSFLNEVWSEFQETLPTTENIAKVIWQRLAPHLPLVKIQLFEHPELWADYLGNDMEAYLSIGTHFSAAHRLALPTLSYEENCQIYGKCARPNGHGHNYHLEVTVKGEVDSRTGMIVDLVALQKVVEDHVVEPFDHTFLNKDIPYFAEVVPTAENIAIHIGQLLEQPVRELGAELYKVKLIESPNNSCEVLCGKSTLNSVTAQSSEQVLLSV

SEQ ID NO: 19531 - protein, 129 aa, Crinalium epipsammum
  misc_feature (1)..(129): tr|K9VZ82|K9VZ82_9CYAN 6-carboxy-5,6,7,8-tetrahydropter in synthase OS=Crinalium epipsammum PCC 9333 OX=1173022 GN=Cri9333_1974 PE=3 SV=1
MPRWKLVTEFSFDSAHYIKDYDGPCGRMHGHTYKVKVEATSGQLHSSQYVPHKVMVADFRTLRWAKQDGTKGGLDHCVLNEVLPEGYETTAEMIAKYIYDETKKRVPEGVQLKVAVSETPNSWVEYEDD

SEQ ID NO: 19532 - protein, 150 aa, Croceibacter atlanticus
  misc_feature (1)..(150): tr|A3U5Z0|A3U5Z0_CROAH 6-pyruvoyl tetrahydrobiopterin s ynthase OS=Croceibacter atlanticus (strain ATCC BAA-628 / HTCC2559 / KCTC 12090) OX=216432 GN=CA2559_02840 PE= 4 SV=1
MSHIRITKQFSFETGHALYGYDGKCKNVHGHSYKLSVTVIGTPISDTSHVKFGMVIDFGDLKKIVKEEIVDVYDHATVFNKNTPHVDLAKELSNRGHNVLLVDYQPTSEMMVTDFAEKIKTRLPEHISLHSLKLQETETSFAEWYASDNM

SEQ ID NO: 19533 - protein, 136 aa, Croceibacter atlanticus
  misc_feature (1)..(136): tr|A3UB99|A3UB99_CROAH 6-pyruvoyltetrahydropterin synth ase OS=Croceibacter atlanticus (strain ATCC BAA-628 / H TCC2559 / KCTC 12090) OX=216432 GN=CA2559_13633 PE=4 SV =1
MKLTVHRKAHFNAAHRLFRKDWSDKKNNEVFGKCSNPNYHGHNYELIVSVTGNVDPETGFVIDLGQLKDLIYKEIEVPFDHKNLNVEVEEFRDLIPTTEHISYVIYQKLRKHIDSSKELEITLYETPRNFVTYSGS

SEQ ID NO: 19534 - protein, 136 aa, Croceitalea dokdonensis
  misc_feature (1)..(136): tr|A0A0P7A744|A0A0P7A744_9FLAO 6-carboxy-5,6,7,8-tetrah ydropterin synthase OS=Croceitalea dokdonensis DOKDO 02 3 OX=1300341 GN=I595_1004 PE=3 SV=1
MIATICRKAHFNAAHRLHNPNWSDEKNLHVFGKCNSPHYHGHNFDLEVRIKGEVDPDTGFVMDLAVLGKLIKEEVELRFDHKNLNEDCPEFKDILPSTEYFVKIIYDILKPKLDKAQQLHITLHETQKNSAEYGDW

SEQ ID NO: 19535 - protein, 135 aa, Croceitalea dokdonensis
  misc_feature (1)..(135): tr|A0A0P7A5D4|A0A0P7A5D4_9FLAO 6-carboxy-5,6,7,8-tetrah ydropterin synthase OS=Croceitalea dokdonensis DOKDO 02 3 OX=1300341 GN=I595_2276 PE=3 SV=1
MRVKVSRKAHFNAAHRLYRPDWSFEKNNEVFGKCNNPRFHGHNYDLIVSVTGEIDEVTGYVMDMKVLKDLIKEEVEEAFDHKNLNMDVPDFKNLNPTAENIAVVIYDKLRKHIDADKDIEVVLYETPRNFVTYSG

SEQ ID NO: 19536 - protein, 135 aa, Croceivirga radicis
  misc_feature (1)..(135): tr|A0A1V6LNW4|A0A1V6LNW4_9FLAO 6-carboxy-5,6,7,8-tetrah ydropterin synthase OS=Croceivirga radicis OX=1929488 G N=BUL40_14540 PE=3 SV=1
MRVKVSRKEQFNAAHRLFRPDWSSQKNQETFGKCNNPSFHGHNYDLIVSVTGEIDPETGYVMDMKVLKDLIKKEVTEYMDHKNLNLDVPDFKDLNPTAENIAVVIFNRIRPHLAPDKELEIQLFETPRNFVTYSG

SEQ ID NO: 19537 - protein, 136 aa, Croceivirga radicis
  misc_feature (1)..(136): tr|A0A1V6LMZ7|A0A1V6LMZ7_9FLAO 6-carboxy-5,6,7,8-tetrah ydropterin synthase OS=Croceivirga radicis OX=1929488 G N=BUL40_15110 PE=3 SV=1
MIATICRKAHFNAAHRLHNPKWSDEKNIEVFGKCNSPHYHGHNFDLEVRIRGEVNPDTGFVMDLAVLGSLIKNEIEERFDHKNLNVDCPEFAEILPSTENFVKVIYDILKPKLAGDPLLHITLHETTKNSAEYGDW

SEQ ID NO: 19538 - protein, 134 aa, Crocinitomicaceae bacterium
  misc_feature (1)..(134): tr|A0A2D9D5H2|A0A2D9D5H2_9FLAO 6-carboxy-5,6,7,8-tetrah ydropterin synthase OS=Crocinitomicaceae bacterium OX=2 026728 GN=CL824_01625 PE=3 SV=1
MKVCRIAYFNSAHRLYNPEWSDEKNNEVFGKCNNPNYHGHNYKIEVWIEGSVNQETGYLIDLKILKQIIKDEITDAFDHKNLNLDCPEFKNLIPTLENICIVCWNKLSKALDSSLNLSVKIWETENNLAEYSGE

SEQ ID NO: 19539 - protein, 134 aa, Crocinitomicaceae bacterium
  misc_feature (1)..(134): tr|A0A358Y314|A0A358Y314_9FLAO 6-carboxy-5,6,7,8-tetrah ydropterin synthase OS=Crocinitomicaceae bacterium OX=2 026728 GN=DEF82_00145 PE=3 SV=1
MKVCRRATFNSAHRLYRKDWTDDKNKAVFGKCSNENFHGHNYTLEVWISGNVNQETGYLIDLKIVKDLIKEEISDRFDHKNLNLDCVEFKDLNPTAENIAIVCWNLLRSKLASEYGLVVKLWETENNSVEYDGI

SEQ ID NO: 19540 - protein, 137 aa, Crocinitomix sp.
  misc_feature (1)..(137): tr|A0A1J5LNJ0|A0A1J5LNJ0_9FLAO 6-carboxy-5,6,7,8-tetrah ydropterin synthase OS=Crocinitomix sp. MedPE-SWsnd OX= 1860084 GN=BM555_03965 PE=3 SV=1
MRVSVCRKAHFNAAHRLHNKAWTAEKNEQVFGKCNNPNYHGHNYKLEVWVSGEIDEETGYLIDLKILRDIIEKEVEDRFDHKNLNLDTEEFANLNPTAENIAVVIWGLIREKLNDNLELNIKLFETDRNFVQYPAIQ

SEQ ID NO: 19541 - protein, 149 aa, Crocinitomix sp.
  misc_feature (1)..(149): tr|A0A2W1NP84|A0A2W1NP84_9FLAO 6-carboxytetrahydropteri n synthase QueD OS=Crocinitomix sp. SM1701 OX=2219161 G N=DNU06_12825 PE=4 SV=1
MNLRVTKIFDFETAHVLWGYDGKCKNIHGHSYKLTVTISGPLVNDLKEVKNGMIIDFSDLKKIVKSNVVEPFDHCLLVNGQTPHKKYTEVENGFSKIMLCDYQPTAENMLIDMVQRISTNLPDHVQLKYAKLQETENSFVEWLAEENGH

SEQ ID NO: 19542 - protein, 291 aa, Crocosphaera chwakensis
  misc_feature (1)..(291): tr|A3IUZ2|A3IUZ2_9CHRO Uncharacterized protein OS=Croco sphaera chwakensis CCY0110 OX=391612 GN=CY0110_23336 PE =4 SV=1
MQCIINRRAQFSASHRYWLPEWDEAKNKQVFGACSRFPGHGHNYVLFVSLWGEIDQYGMVENLSTVKQVIKQEVTSQLDYSYLNDIWEDFQTTLPTTENLARVIWQRLAPHLPIVKIQLFEHPQLWAEYQGNAMKATLTIQTHFSAAHRLARPDLSLEENTKIYGKCARTHGHGHNYHLEVSVSGEIDPHTGMIVDLGELQTIVDDYVVEPFDHNFLNKDVPYFAEVVPTAENIALYIAQLLEQPIQKLGAQLEKVKLIESPNNSCEIYCGTSAESLNLPSQQAPQLVTLH

SEQ ID NO: 19543 - protein, 130 aa, Crocosphaera chwakensis
  misc_feature (1)..(130): tr|A3ISU0|A3ISU0_9CHRO 6-carboxy-5,6,7,8-tetrahydropter in synthase OS=Crocosphaera chwakensis CCY0110 OX=39161 2 GN=CY0110_26822 PE=3 SV=1
MMNPTDQWTIYKEFRFEAAHRLPYHQGKCSRLHGHSWVGRVYVSCDRLQETGSQQGMVMDFGEISDYVDPLVENFLDHYYLNETTGLESPTSEAIAQWIFEKLESAQLPGLCMVEIRETCTSGAQYRRSV

SEQ ID NO: 19544 - protein, 291 aa, Crocosphaera subtropica
  misc_feature (1)..(291): tr|B1WP62|B1WP62_CROS5 6-pyruvoyl tetrahydropterin synt hase OS=Crocosphaera subtropica (strain ATCC 51142 / BH 68) OX=43989 GN=ptpS PE=4 SV=1
MQCVINRRAQFSASHRYWIPEWDEAKNKQVFGACSHFPGHGHNYVLFVSLWGEIDQYGMVENLSTVKQVIKGEVTSQLDYAYLNDVWEEFQTTLPTTENLARVIWQRLADHLPIVKIQLFEHPQLWAEYQGNAMKATLTIQTHFSAAHRLALPHLSLEENTEIYGKCARTHGHGHNYHLEVSVSGEIDPRTGMIVDLGKLQTIVEDYVVEPFDHNFLNKDIPYFAEVVPTAENIALYIAQLLEKPIKDLGVQLEKVKLIESPNNSCEIYCGASAESFKTPSQQAPQLVTLH

SEQ ID NO: 19545 - protein, 130 aa, Crocosphaera subtropica
  misc_feature (1)..(130): tr|B1WNN6|B1WNN6_CROS5 6-carboxy-5,6,7,8-tetrahydropter in synthase OS=Crocosphaera subtropica (strain ATCC 511 42 / BH68) OX=43989 GN=cce_2115 PE=3 SV=1
MNPPHQWTIYKEFRFEAAHRLPHHQGKCSRLHGHSWVGRVYVSRDRLHETGPQQGMVMDFGEISAYLDPLVENFLDHYYLNETTGLESPTSEAIAQWIFEKLEAAKLPGLCMVEIRETCTSGAQYRRSNE

SEQ ID NO: 19546 - protein, 291 aa, Crocosphaera watsonii
  misc_feature (1)..(291): tr|T2ILC4|T2ILC4_CROWT 6-pyruvoyl tetrahydrobiopterin s ynthase OS=Crocosphaera watsonii WH 8502 OX=423474 GN=C WATWH8502_4946 PE=4 SV=1
MQCVINRRAQFSANHRYWLPEWDESKNQQAFGLCSRFPGHGHNYVLFVSLLGEIDQYGMVENLSTVKQVIKREVTSQLDYAYLNDVWEEFQTTLPTTENIARVIWQRLKDHLPIVKIQLFEHPQLWAEYQGDAMKATLNIQTHFSAAHRLARPDLSLEENTKIYGKCARTHGHGHNYHLEVSVSGDIDPRTGMLVDLVALQNIVNDYVVEPFDHNFLNKDVPYFAEVVPTAENIALYIAQLLQQPIRELGAQLEKVKLIESPNNSCEIYCGSSTESLNILSQQAPQLMALH

SEQ ID NO: 19547 - protein, 291 aa, Crocosphaera watsonii
  misc_feature (1)..(291): tr|T2IYK6|T2IYK6_CROWT 6-pyruvoyl tetrahydrobiopterin s ynthase OS=Crocosphaera watsonii WH 0005 OX=423472 GN=C WATWH0005_1873 PE=4 SV=1
MQCVINRRAQFSASHRYWLPEWDESKNQQAFGLCSRFPGHGHNYVLFVSLLGEIDQYGMVENLSTVKQVIKREVTSQLDYAYLNDVWEEFQTTLPTTENIARVIWQRLKDHLPIVKIQLFEHPQLWAEYQGDAMKATLNIQTHFSAAHRLARPDLSLEENTKIYGKCARTHGHGHNYHLEVSVSGDIDPRTGMLVDLVALQNIVNDYVVEPFDHNFLNKDVPYFAEVVPTAENIALYIAQLLQQPIRELGAQLEKVKLIESPNNSCEIYCGSSAESLNILSQQAPQLMALH

SEQ ID NO: 19548 - protein, 86 aa, Cronobacter condimenti
  misc_feature (1)..(86): tr|K8A908|K8A908_9ENTR Queuosine biosynthesis QueD, PTP S-I OS=Cronobacter condimenti 1330 OX=1073999 GN=BN137_ 85 PE=4 SV=1
MVRLEITGEVDPHTGWIIDFAELKAAFKPIYDSLDHYYLNDIPGLENPTSEVLARWIWDQMKPRLPLLSAVMIKETCTAGCVYRGE

SEQ ID NO: 19549 - protein, 120 aa, Cronobacter dublinensis
  misc_feature (1)..(120): tr|A0A0K2P5B1|A0A0K2P5B1_9ENTR 6-carboxy-5,6,7,8-tetrah ydropterin synthase OS=Cronobacter dublinensis subsp. d ublinensis LMG 23823 OX=1159554 GN=AFK67_16475 PE=3 SV= 1
MPTTLFKDFIFEAAHRLPHVPEGHKCGRLHGHSFMVRLEITGEVDPHTGWIIDFAELKAAFKPIYDSLDHYYLNDIPGLENPTSEVLARWIWDQMKPRMPLLSAVMIKETCTAGCVYRGE

SEQ ID NO: 19550 - protein, 73 aa, Cronobacter dublinensis
  misc_feature (1)..(73): tr|K8ASL8|K8ASL8_9ENTR Queuosine biosynthesis QueD, PTP S-I OS=Cronobacter dublinensis 1210 OX=1208656 GN=BN134 _4343 PE=4 SV=1
MVRLEITGEVDPHTGWIIDFAELKAAFKPIYDSLDHYYLNDIPGLENPTSESAGALDLGSDEAPYAAVERGDD

SEQ ID NO: 19551 - protein, 86 aa, Cronobacter malonaticus
  misc_feature (1)..(86): tr|V5TXC1|V5TXC1_9ENTR Uncharacterized protein OS=Crono bacter malonaticus OX=413503 GN=P262_01171 PE=4 SV=1
MVRLEVTGEVDPHTGWIIDFAELKAAFKPIYDSLDHYYLNDIPGLENPTSEVLARWIWDQMKPRLPLLSAVMIKETCTAGCVYRGE

SEQ ID NO: 19552 - protein, 120 aa, Cronobacter malonaticus
  misc_feature (1)..(120): tr|A0A423XYU8|A0A423XYU8_9ENTR 6-carboxy-5,6,7,8-tetrah ydropterin synthase OS=Cronobacter malonaticus OX=41350 3 GN=queD PE=3 SV=1
MPTTLFKDFIFEAAHRLPHVPEGHKCGRLHGHSFMVRLEVTGEVDPHTGWIIDFAELKAAFKPIYDSLDHYYLNDIPGLENPTSEVLARWIWDQMKPRLPLLSAVMIKETCTAGCVYRGE

SEQ ID NO: 19553 - protein, 120 aa, Cronobacter muytjensii; identical to SEQ ID NO: 19549
  misc_feature (1)..(120): tr|A0A2T7AS09|A0A2T7AS09_9ENTR 6-carboxy-5,6,7,8-tetrah ydropterin synthase OS=Cronobacter muytjensii OX=413501 GN=queD PE=3 SV=1

SEQ ID NO: 19554 - protein, 120 aa, Cronobacter sakazakii
  misc_feature (1)..(120): tr|A0A3Q9CEU4|A0A3Q9CEU4_CROSK 6-carboxy-5,6,7,8-tetrah ydropterin synthase OS=Cronobacter sakazakii OX=28141 G N=queD PE=3 SV=1
MPTTLFKDFIFEAAHRLPHVPEGHKCGRLHGHSFMVRLEITGEVDPHTGWIIDFAELKAAFKPIYDSLDHYYLNDIPSLENPTSEVLARWIWDQMKPRLPLLSAVMIKETCTAGCVYRGE

SEQ ID NO: 19555 - protein, 86 aa, Cronobacter sakazakii; identical to SEQ ID NO: 19548
  misc_feature (1)..(86): tr|K8CSY2|K8CSY2_CROSK Queuosine biosynthesis QueD, PTP S-I OS=Cronobacter sakazakii 696 OX=1208664 GN=BN128_22 77 PE=4 SV=1

SEQ ID NO: 19556 - protein, 120 aa, Cronobacter sp.; identical to SEQ ID NO: 19549
  misc_feature (1)..(120): tr|A0A5J6X4R2|A0A5J6X4R2_9ENTR 6-carboxytetrahydropteri n synthase QueD OS=Cronobacter sp. JZ38 OX=1906275 GN=B JP61_05340 PE=4 SV=1

SEQ ID NO: 19557 - protein, 120 aa, Cronobacter turicensis; identical to SEQ ID NO: 19552
  misc_feature (1)..(120): tr|A0A2T7B6R5|A0A2T7B6R5_9ENTR 6-carboxy-5,6,7,8-tetrah ydropterin synthase OS=Cronobacter turicensis OX=413502 GN=queD PE=3 SV=1

SEQ ID NO: 19558 - protein, 120 aa, Cronobacter turicensis
  misc_feature (1)..(120): tr|C9XZ31|C9XZ31_CROTZ 6-carboxy-5,6,7,8-tetrahydropter in synthase OS=Cronobacter turicensis (strain DSM 18703 / LMG 23827 / z3032) OX=693216 GN=ygcM PE=3 SV=1
MPTTLFKDFIFEAAHRLPHVPEGHKCGRLHGHSFMVRLEVTGEVDPHTGWIIDFAELKAAFKPIYDSLDHYYLNDIPGLENPTSEVLARWIWAQMKPRLPLLSAVMIKETCTAGCVYRGE

SEQ ID NO: 19559 - protein, 120 aa, Cronobacter universalis; identical to SEQ ID NO: 19552
  misc_feature (1)..(120): tr|A0A376EU27|A0A376EU27_9ENTR 6-carboxy-5,6,7,8-tetrah ydropterin synthase OS=Cronobacter universalis NCTC 952 9 OX=1074000 GN=queD PE=3 SV=1

SEQ ID NO: 19560 - protein, 148 aa, Cruoricaptor ignavus
  misc_feature (1)..(148): tr|A0A1M6G683|A0A1M6G683_9FLAO 6-pyruvoyltetrahydropter in/6-carboxytetrahydropterin synthase OS=Cruoricaptor i gnavus OX=1118202 GN=SAMN05443429_10874 PE=4 SV=1
MDMSKGLITAERYHDISCGHRVVGHESKCRFLHGHNYRFHFKIASENGLDNLGRVIDFSVIKTHLCQWLEDYYDHKTLIWKNDPHLPDLLSVFRESIVVTEFNPTAENIAEDFCVNKAPELLKGTKCKLIEIKIEETRKCSATYQIRN

SEQ ID NO: 19561 - protein, 147 aa, Cruoricaptor ignavus
  misc_feature (1)..(147): tr|A0A1M6H3U3|A0A1M6H3U3_9FLAO 6-pyruvoyltetrahydropter in/6-carboxytetrahydropterin synthase OS=Cruoricaptor i gnavus OX=1118202 GN=SAMN05443429_11117 PE=4 SV=1
MIRVTKIFSFETAHILFNYDGKCKNMHGHSYKLFVTVKGEPIQDLDHPKNGMVVDFADIKSIVDEHIVKVWDHAVLLNAQSPHKDLGKNLEEQGHRVIYCNFQPTCENMLYAIAAILRRNLPETVQLAYLKLHETENSYGEWFAEEN

SEQ ID NO: 19562 - protein, 132 aa, Cryobacterium sp.
  misc_feature (1)..(132): tr|A0A4Y8JS34|A0A4Y8JS34_9MICO 6-carboxytetrahydropteri n synthase OS=Cryobacterium sp. TMT1-51 OX=1259239 GN=E 3T49_12205 PE=4 SV=1
MTFTVTVRDHMMIAHSLAGESFGPAQQLHGATFVVDASFAATDLDADGVVVDIGRVTAALAEITGSLTYRNLDEDPRFAGRNTTTEVLCKVIADRLAEQVTSGALAPGQQFQSITVTLHESHIAWASYTRAP

SEQ ID NO: 19563 - protein, 132 aa, Cryobacterium sp.
  misc_feature (1)..(132): tr|A0A4R8WN18|A0A4R8WN18_9MICO 6-carboxytetrahydropteri n synthase OS=Cryobacterium sp. MDB2-A-2 OX=1259182 GN= E3O35_10415 PE=4 SV=1
MTYTVTVRDHLMIAHSLTGDAFGAAQRLHGATFIVDATVASGGLDANGVVVDIGRLASALAEITGALTYRNLDEDPRFRGRNTTTEVLCTAIADLLAEGVKAGSLGPVQQLDSITVTLHESHIAWASYTRTA

SEQ ID NO: 19564 - protein, 137 aa, Cryomorphaceae bacterium
  misc_feature (1)..(137): tr|A0A3B9P6V2|A0A3B9P6V2_9FLAO 6-carboxy-5,6,7,8-tetrah ydropterin synthase OS=Cryomorphaceae bacterium OX=1898 111 GN=DCG83_07865 PE=3 SV=1
MIYIKRKEHFCAAHKLWNDKWDAATNKKVFGKCSNENYHGHNFELEVTVRGEIDPDTGFVMNLFDLKQIIREHIIDVVDHKNLNLDIDFMAGKQPTAEIIAYEFWNILSPKIAEYGAELHKIKLAETHNNIIEYYGE

SEQ ID NO: 19565 - protein, 137 aa, Cryomorphaceae bacterium
  misc_feature (1)..(137): tr|A0A354S7B1|A0A354S7B1_9FLAO 6-carboxy-5,6,7,8-tetrah ydropterin synthase OS=Cryomorphaceae bacterium OX=1898 111 GN=DCG68_03940 PE=3 SV=1
MVYIQRRETFSASHRLFNSAWTDEQNEAVFGKCSNRHGHGHNFQLIVTVKGTVSSETGFVMNLVDLKDIMMREVIDQVDHRNLNEDVPFLQGVLPSTENLALAFWARLSPAIEARGAALHCVRIVETENNFVEYYGE

SEQ ID NO: 19566 - protein, 146 aa, Cryptobacterium curtum
  misc_feature (1)..(146): tr|C7MN71|C7MN71_CRYCD 6-pyruvoyl-tetrahydropterin synt hase OS=Cryptobacterium curtum (strain ATCC 700683 / DS M 15641 / 12-3) OX=469378 GN=Ccur_06460 PE=4 SV=1
MYGLKTESYFDGAHFLAEYHGKCENLHGHRWRVVAILGSACLMPSGDERDMVMDFSSFKQTLRDLTAAFDHTFIVEEGTLAPDTLDCLAREGFHLTMVPFRTTAENFARHFFSKLDQAGFPVEQVEVYETPMNCAIYTHDASGDCA

SEQ ID NO: 19567 - protein, 140 aa, Cryptobacterium sp.
  misc_feature (1)..(140): tr|R7CFS3|R7CFS3_9ACTN 6-carboxy-5,6,7,8-tetrahydropter in synthase OS=Cryptobacterium sp. CAG:338 OX=1262868 G N=BN613_01299 PE=3 SV=1
MYKLKTESSFDAAHFLTDYHGKCENLHGHRWRVVAYLAQQELCKEGTHKDMVLDFGEFKSALRKLTEELDHSFIVEEGSLMQETLACLEKEGFVLTIMPFRTTAENLARYFYNRLAELGLPVSEIEVYETPNNCAIYCGD

SEQ ID NO: 19568 - protein, 126 aa, Cryptosporangium arvum
  misc_feature (1)..(126): tr|A0A010ZX57|A0A010ZX57_9ACTN 6-pyruvoyl-tetrahydropte rin synthase OS=Cryptosporangium arvum DSM 44712 OX=927 661 GN=CryarDRAFT_2917 PE=4 SV=1
MYEAGTERGVRAFHTMPDMPPPEGEKHSHDYRLALVVSREQLDEKGMVVDLDVLVGALEDLTKQLQDNDLDEIVAPEIGKEAVTVEDFAHWVHGRIGAAIGTPGATLSVRVYENATEFGGYSGVLA

SEQ ID NO: 19569 - protein, 126 aa, Cryptosporangium aurantiacum
  misc_feature (1)..(126): tr|A0A1M7RLI7|A0A1M7RLI7_9ACTN 6-pyruvoyl-tetrahydropte rin synthase OS=Cryptosporangium aurantiacum OX=134849 GN=SAMN05443668_119137 PE=4 SV=1
MYEAGTAREVRAFHVMPDMPPPEGERHSHDYRLALVVSREELDEKGMVVDLDVLVGALEDLTERLRDADLDEIVGKEIGADAVTVEAFANWVHGKIGAAIDSPGSALSVRIYENATEFGGYTGVLA

SEQ ID NO: 19570 - protein, 130 aa, Cryptosporangium sp.
  misc_feature (1)..(130): tr|A0A545AN75|A0A545AN75_9ACTN 6-carboxy-5,6,7,8-tetrah ydropterin synthase OS=Cryptosporangium sp. A-T 5661 OX =2593070 GN=FL583_22265 PE=3 SV=1
MSRYAIGKSFAFSASHQLPGLPEGHQCGRLHGHNYTVEVELEAETLEFPGFVTDFGDLAPFKAYLDATFDHRHLNDVLDEPPTSERLAAHLATWLERELLPQVGGRLVSVRVSETPTSWAKFSPSPGGGS

SEQ ID NO: 19571 - protein, 147 aa, Cryptosporangium sp.
  misc_feature (1)..(147): tr|A0A545AXE5|A0A545AXE5_9ACTN Uncharacterized protein OS=Cryptosporangium sp. A-T 5661 OX=2593070 GN=FL583_05 750 PE=4 SV=1
MPPSIAATPECCTPPSGMNERMYQTGTEREVRAFHTMPDMPPPEGERHSHDYRLTLVVSREELDDKGMVVDLDVLVGALEELTGRLQDADLDEIVAPELGTEAVTVESFAFWVHGKIGAAIKTPGADLAVRVYENASEFGGYSGVLA

SEQ ID NO: 19572 - protein, 178 aa, Culturomica sp.
  misc_feature (1)..(178): tr|A0A356DIE8|A0A356DIE8_9BACT 6-carboxytetrahydropteri n synthase OS=Culturomica sp. OX=1926652 GN=DD657_10085 PE=4 SV=1
MIIRKLFKFEGAHIVRNCSSRHCRENMHGHSYIVEVFITSDRLDNGYMVMDFGLLDKVKAFIESFDHTYTLWTQEEPDFKHFIYRYNKRVAEIPVSPSAEGFALLFLYIINRILENTTFRNGEGHVQLSSVRVHETATGYAEAFREDLKLAEFTPADVLFSPAIQEEWKSDEWWKKIR

SEQ ID NO: 19573 - protein, 158 aa, Cupriavidus alkaliphilus
  misc_feature (1)..(158): tr|A0A2W7PEX8|A0A2W7PEX8_9BURK 6-pyruvoyltetrahydropter in/6-carboxytetrahydropterin synthase OS=Cupriavidus al kaliphilus OX=942866 GN=C7416_102608 PE=4 SV=1
MSKQVSITRRLEFDSGHRIPNHCGQCRNIHGHRYRLDLTLSGEVLHREGASDDGMILDFGDIKALANEHLVSQWDHAFLIYRGDTALLNFLQSMEGHKTVVLDAIPTVENLAQVAFDILAPVFKDCFGHQLQLTRLVLFETPNCWAEVSAPAVLPAQD

SEQ ID NO: 19574 - protein, 158 aa, Cupriavidus alkaliphilus
  misc_feature (1)..(158): tr|A0A1C3UGK6|A0A1C3UGK6_9BURK 6-pyruvoyltetrahydropter in/6-carboxytetrahydropterin synthase OS=Cupriavidus al kaliphilus OX=942866 GN=C7415_102536 PE=4 SV=1
MSKQVSITRRLEFDSGHRIPNHCGQCRNIHGHRYRLDLTLSGEVLHREGASDDGMILDFGDIKALANEHLVSKWDHAFLIYRGDTALLNFLQSMEGHKTVVLDAIPTVENLAQVAFDILAPVFKDCFGHQLQLTRLVLFETPNCWAEVSAPVQLPAQD

SEQ ID NO: 19575 - protein, 158 aa, Cupriavidus basilensis
  misc_feature (1)..(158): tr|A0A0C4Y9U6|A0A0C4Y9U6_9BURK 6-carboxytetrahydropteri n synthase or Queuosine biosynthesis QueD, PTPS-I OS=Cu priavidus basilensis OX=68895 GN=RR42_m2296 PE=4 SV=1
MNKQVSITRRLEFDSGHRIPNHGGQCRNIHGHRYRLDLTLSGEVLHRAGASDEGMILDFSDIKALATEHLVSKWDHAFLIHRGDTALLNFLQTMDGHKTVVLDAIPTVENLAQIAFDMLAPVFKDCFGHQLQLTRLVLFETPNCWAEVSAAFSLPAQD

SEQ ID NO: 19576 - protein, 158 aa, Cupriavidus basilensis; identical to SEQ ID NO: 19575
  misc_feature (1)..(158): tr|H1S881|H1S881_9BURK 6-pyruvoyl tetrahydrobiopterin s ynthase OS=Cupriavidus basilensis OR16 OX=1127483 GN=OR 16_20917 PE=4 SV=1

SEQ ID NO: 19577 - protein, 158 aa, Cupriavidus campinensis
  misc_feature (1)..(158): tr|A0A556UVQ7|A0A556UVQ7_9BURK 6-carboxytetrahydropteri n synthase OS=Cupriavidus campinensis OX=151783 GN=FGG1 2_00400 PE=4 SV=1
MTKQVSITRRLEFDSGHRIPSHGGQCRNIHGHRYRLDLTLSGEVLHKEGASDDGMILDFGDIKTLANEHLVSKWDHAFLIYRGDTALLNFLQSMDNHKTVVLESIPTVENLAQVAFDILAPVFKDCFGHHLQLTRLVLFETPNCWAEVSAPVRLPAQD

SEQ ID NO: 19578 - protein, 158 aa, Cupriavidus gilardii
  misc_feature (1)..(158): tr|A0A0M4LFH2|A0A0M4LFH2_9BURK 6-pyruvoyl tetrahydrobio pterin synthase OS=Cupriavidus gilardii CR3 OX=1267562 GN=CR3_1227 PE=4 SV=1
MNKQVSITRRLEFDAGHRIPNHGGQCRNIHGHRYRLDLTLSGEVLHREGAADEGMILDFSDIKALANQHLVDKWDHAFLIHRGDTALLEFLRGMEGHKTVVLDAIPTVENLAQIAFDMLAPVFKDCFGHHLQLTRLVLFETPNCWAEVTAPAVAPAQD

SEQ ID NO: 19579 - protein, 158 aa, Cupriavidus gilardii
  misc_feature (1)..(158): tr|A0A562B3M4|A0A562B3M4_9BURK 6-pyruvoyltetrahydropter in/6-carboxytetrahydropterin synthase OS=Cupriavidus gi lardii J11 OX=936133 GN=L602_000600001560 PE=4 SV=1
MNKQVSITRRLEFDAGHRIPNHGGQCRNIHGHRYRLDLTLSGEVLRREGAADEGMILDFGDIKALANQHLVDKWDHAFLVHRGDTALVEFLRGMEGHKTVVLDAVPTVENLAQIAFDMLAPVFKDCFGHHLQLTRLVLFETPNCWAEVTAPVTLPAQD

SEQ ID NO: 19580 - protein, 187 aa, Cupriavidus metallidurans
  misc_feature (1)..(187): tr|A0A2L0WZK8|A0A2L0WZK8_9BURK 6-carboxytetrahydropteri n synthase OS=Cupriavidus metallidurans OX=119219 GN=C3 Z06_06245 PE=4 SV=1
MLIRKLFRFENAHIVRGCSTRRCSHSIHGHSYKIELLLEAHSLDHGQMVYDFGLLKGGAFTLLDAFDHTVTLWTGDDPAYLAAMRQHSERWVLIPVSPSAEQFSRLFFLLVDAVLATTALRNGEGDVRLHSVIVHETETGYAQCFREDAENPRMGRIDLESIVFAPAITAQWSDPALFERLKRARAD

SEQ ID NO: 19581 - protein, 158 aa, Cupriavidus metallidurans
  misc_feature (1)..(158): tr|A0A132HMA9|A0A132HMA9_9BURK 6-carboxy-5,6,7,8-tetrah ydropterin synthase OS=Cupriavidus metallidurans OX=119 219 GN=queD PE=4 SV=1
MSKQVSITRRLEFDAGHRIPSHGGQCRNIHGHRYRLDLTLSGEVLHQEGAPDDGMILDFGDIKTLANEHLVSKWDHAFLIYRGDTALLNFLQSMDNHKTVVIDSIPTVENLAQVAFDILAPVFKDCFDHHLQLTRLVLFETPNCWAEVSAPLSLPAQD

SEQ ID NO: 19582 - protein, 158 aa, Cupriavidus nantongensis
  misc_feature (1)..(158): tr|A0A142JK48|A0A142JK48_9BURK 6-carboxy-5,6,7,8-tetrah ydropterin synthase OS=Cupriavidus nantongensis OX=1796 606 GN=A2G96_12335 PE=4 SV=1
MSKQVSITRRLEFDSGHRIPNHCGQCRNIHGHRYRLDLTLSGEVLHREGASDDGMILDFGDIKALANEHLVSKWDHAFLIYRGDTALLNFLQSMEGHKTVVLDAIPTVENLAQVAFDILAPVFKDCFGHQLQLTRLVLFETPNCWAEVSAPAQLPAQD

SEQ ID NO: 19583 - protein, 158 aa, Cupriavidus necator
  misc_feature (1)..(158): tr|A0A1U9UNJ8|A0A1U9UNJ8_CUPNE 6-carboxytetrahydropteri n synthase QueD OS=Cupriavidus necator OX=106590 GN=BJN 34_10165 PE=4 SV=1
MSKQVSITRRLEFDSGHRIPNHCGQCRNIHGHRYRLDLTLSGEVLHREGASDDGMILDFGDIKALANEHLVNKWDHAFLIYRGDTALLNFLQSMEGHKTVVLDAIPTVENLAQVAFDILAPVFKGCFGHHLQLTRLVLFETPNCWAEVSAPAVLPAQD

SEQ ID NO: 19584 - protein, 158 aa, Cupriavidus necator
  misc_feature (1)..(158): tr|A0A1K0JFF0|A0A1K0JFF0_CUPNE 6-Pyruvoyl tetrahydrobio pterin synthase protein OS=Cupriavidus necator OX=10659 0 GN=ptpS PE=4 SV=1
MSKQVSITRRLEFDSGHRIPNHCGQCRNIHGHRYRLDLTLSGEVLHREGASDDGMILDFGDIKALANEHLVNKWDHAFLIYRGDTALLNFLQSMEGHKTVVLDAIPTVENLAQVAFDILAPVFKDCFGHHLQLTRLVLFETPNCWAEVSAPAVLPAQD

SEQ ID NO: 19585 - protein, 158 aa, Cupriavidus oxalaticus; identical to SEQ ID NO: 19584
  misc_feature (1)..(158): tr|A0A375FTH5|A0A375FTH5_9BURK 6-Pyruvoyl tetrahydrobio pterin synthase protein OS=Cupriavidus oxalaticus OX=96 344 GN=ptpS PE=4 SV=1

SEQ ID NO: 19586 - protein, 158 aa, Cupriavidus oxalaticus
  misc_feature (1)..(158): tr|A0A4P7LCK2|A0A4P7LCK2_9BURK 6-carboxytetrahydropteri n synthase QueD OS=Cupriavidus oxalaticus OX=96344 GN=q ueD PE=4 SV=1
MSKQVSITRRLEFDSGHRIPNHGGQCRNIHGHRYRLDLTLSGEVLHREGASDDGMILDFGDIKALANEHLVNKWDHAFLIYRGDTALLNFLQSMEGHKTVVLDAIPTVENLAQVAFDILAPVFKDCFGHHLQLTRLVLFETPNCWAEVSAPAVLPAQD

SEQ ID NO: 19587 - protein, 158 aa, Cupriavidus pauculus
  misc_feature (1)..(158): tr|A0A2N5C6I2|A0A2N5C6I2_9BURK 6-carboxytetrahydropteri n synthase QueD OS=Cupriavidus pauculus OX=82633 GN=CYJ 10_25450 PE=4 SV=1
MSKQVSITRRLEFDAGHRIPSHGGQCRNIHGHRYRLDLTLSGEVLRQEGASDDGMILDFGDIKTLANEHLVSKWDHAFLIYRGDTALLNFLQSMDNHKTVVIDSIPTVENLAQEAFDILAPVFKDCFGHHLQLTKLVLFETPNCWAEVSAPFSLPAQD

SEQ ID NO: 19588 - protein, 158 aa, Cupriavidus pauculus
  misc_feature (1)..(158): tr|A0A3G8H1R9|A0A3G8H1R9_9BURK 6-carboxytetrahydropteri n synthase OS=Cupriavidus pauculus OX=82633 GN=EHF44_13 315 PE=4 SV=1
MSKQVSITRRLEFDAGHRIPSHGGQCRNIHGHRYRLDLTLAGEVLRQEGASDDGMILDFGDIKALANEHLVSKWDHAFLIYRGDTALLNFLQSMDNHKTVVIDSIPTVENLAQAAFDILAPVFKDCFGHHLQLTRLVLFETPNCWAEVSAPLSLPAQD

SEQ ID NO: 19589 - protein, 158 aa, Cupriavidus pinatubonensis
  misc_feature (1)..(158): tr|Q470H1|Q470H1_CUPPJ Putative 6-pyruvoyl tetrahydrobi opterin synthase protein OS=Cupriavidus pinatubonensis (strain JMP 134 / LMG 1197) OX=264198 GN=Reut_A1847 PE= 4 SV=1
MSKQVSITRRLEFDSGHRIPNHCGQCRNIHGHRYRLDLTLSGEVLHREGASDDGMILDFGDIKSLAQEHLVSKWDHAFLIYRGDTALLNFLQSMEGHKTVVLDAIPTVENLAQIAFDMLAPVFKDCFGHHLQLTRLVLFETPNCWAEVTATVALPAQD

SEQ ID NO: 19590 - protein, 158 aa, Cupriavidus plantarum
  misc_feature (1)..(158): tr|A0A316F188|A0A316F188_9BURK 6-pyruvoyltetrahydropter in/6-carboxytetrahydropterin synthase OS=Cupriavidus pl antarum OX=942865 GN=C7419_1011135 PE=4 SV=1
MTKQVSITRRLEFDAGHRIPSHGGQCRNIHGHRYRLDLTLSGEVLHLEGAPDDGMILDFGDIKSLANEHLVNKWDHAFLIYRGDTALLNFLQTMDNHKTVVIESIPTVENLAQEAFDILAPVFRNCFGHQLQLTRLVLFETPNCWAEVSAPVQLPAQD

SEQ ID NO: 19591 - protein, 158 aa, Cupriavidus sp.; identical to SEQ ID NO: 19584
  misc_feature (1)..(158): tr|R7XQG3|R7XQG3_9BURK 6-pyruvoyl tetrahydrobiopterin s ynthase OS=Cupriavidus sp. GA3-3 OX=1229514 GN=C265_032 28 PE=4 SV=1

SEQ ID NO: 19592 - protein, 155 aa, Cupriavidus sp.
  misc_feature (1)..(155): tr|A0A439EZD4|A0A439EZD4_9BURK 6-pyruvoyl tetrahydrobio pterin synthase OS=Cupriavidus sp. UYMSc13B OX=1774746 GN=AU476_26235 PE=4 SV=1
MYKSTKRYGHEIGLSCCFRQHRADSHCKLLHGYALAFKFVFASRELDVRNWVVDFGSLKGLKAILEDTFDHTLLVAEDDPKLVTLRGLQDAGLARVIVMPAVGCEATAHLVYEVAKQWLKDAGYGDRVWLESVEVSEHGANSAIYIKEQRNDVQD

SEQ ID NO: 19593 - protein, 158 aa, Cupriavidus taiwanensis
  misc_feature (1)..(158): tr|A0A375EJ66|A0A375EJ66_9BURK Putative 6-PYRUVOYL TETR AHYDROBIOPTERIN SYNTHASE PROTEIN OS=Cupriavidus taiwane nsis OX=164546 GN=CBM2606_A110016 PE=4 SV=1
MSKQVSITRRLEFDSGHRIPNHCGQCRNIHGHRYRLDLTLSGEVLHREGASDDGMILDFGDIKALANEHLVSKWDHAFLIYRGDTALLNFLQSMEGHKTVVLDAIPTVENLAQVAFDMLAPVFKDCFGHQLQLTRLVLFETPNCWAEVSAPVVLPAQD

SEQ ID NO: 19594 - protein, 158 aa, Cupriavidus taiwanensis; identical to SEQ ID NO: 19574
  misc_feature (1)..(158): tr|A0A375E0M6|A0A375E0M6_9BURK 6-carboxy-5,6,7,8-tetrah ydropterin synthase QueD OS=Cupriavidus taiwanensis OX= 164546 GN=queD PE=4 SV=1

SEQ ID NO: 19595 - protein, 119 aa, [Curtobacterium] plantarum
  misc_feature (1)..(119): tr|A0A3M7UEF3|A0A3M7UEF3_9GAMM 6-carboxy-5,6,7,8-tetrah ydropterin synthase OS=[Curtobacterium] plantarum OX=22 1276 GN=queD PE=3 SV=1
MSTTLFKEFQFEAAHHLPNVPAGHKCGRLHGHSFLVRLEITGEVDAHTGWVMDFAELKAAFKPVYNRLDHYYLNDIPGLENPTSEVLAKWIWDQMKPQLPLLSAVMIKETCTAGCVYRG

SEQ ID NO: 19596 - protein, 149 aa, Curtobacterium sp.
  misc_feature (1)..(149): tr|A0A1S2J8Z5|A0A1S2J8Z5_9MICO Uncharacterized protein OS=Curtobacterium sp. MMLR14_014 OX=1898744 GN=BIV02_04 560 PE=4 SV=1
MYSVIKLFDDLPCAHRAWAQGGNCVFLHGYERSFELTFEAEALEIGTGFVVDFSRLKGIRKLLESQFDHTTVIAEDDPMLAEFERMHELGVLDLRVMMQAGMEGAAQWVLENADAFIRRDTGGRVRVVRVLARESRKNAVTYERAPSGD

SEQ ID NO: 19597 - protein, 115 aa, Curtobacterium sp.
  misc_feature (1)..(115): tr|A0A4P8SUH9|A0A4P8SUH9_9MICO 6-carboxy-5,6,7,8-tetrah ydropterin synthase OS=Curtobacterium sp. SGAir0471 OX= 2070337 GN=queD PE=3 SV=1
MKHSLTRSFRFEAAHVLPWHRGKCSRLHGHSYRLEVTITGPLDVNGIVTDFGEIRQIVDAHVVQVLDHTYLNDRFDNPTVELVASWVFETLEPHLRGLTSVRMWETADSSVAVHR

SEQ ID NO: 19598 - protein, 135 aa, Curvibacter putative
  misc_feature (1)..(135): tr|C9YH99|C9YH99_9BURK 6-carboxy-5,6,7,8-tetrahydropter in synthase OS=Curvibacter putative symbiont of Hydra m agnipapillata OX=667019 GN=Csp_B21490 PE=3 SV=1
MTQAPAIPLPRSCEVSQKFFFDAAHTLKRTVDDAEEIAGSRRIHGHTYHAEVTVAGSADADTGMVVDLGHLRNAIQVLRPQLDHHLLDEVEGLGPGTLENLAAFIWRAMAAEFPGLSQVRVWRDGIGDSCTLRAH

SEQ ID NO: 19599 - protein, 120 aa, Curvibacter sp.
  misc_feature (1)..(120): tr|A0A1F8VVL2|A0A1F8VVL2_9BURK 6-carboxy-5,6,7,8-tetrah ydropterin synthase OS=Curvibacter sp. GWA2_64_110 OX=1 797747 GN=A2Z93_09005 PE=3 SV=1
MMYEISQRFFFDAAHTLRREIEAEGSKRVHGHTYYAEVFVRGEPAAENGMVMDLGYIRREVNALREQLDHHFLDEVQGLGPATLENLCTYIWKALKPKIPGLSAVMVERHAIGDKCVYRP

SEQ ID NO: 19600 - protein, 136 aa, Curvibacter sp.
  misc_feature (1)..(136): tr|A0A433CB00|A0A433CB00_9BURK 6-carboxy-5,6,7,8-tetrah ydropterin synthase OS=Curvibacter sp. OX=1888168 GN=EK K45_00490 PE=3 SV=1
MSLSPSNAFPRAGAVFELSQRFFFDAAHTLQRQIEAEGSRRIHGHTYHAEVHVSGAPDPATGMVVDLGFVRAEIARLREQLDHHFLDEVPGLGPATLENLCLFIGRQLAPVLPQLSAITVERQAVGDRCTLRWSGA

SEQ ID NO: 19601 - protein, 290 aa, Cuspidothrix issatschenkoi
  misc_feature (1)..(290): tr|A0A2S6CQ92|A0A2S6CQ92_9CYAN 6-pyruvoyl tetrahydropte rin synthase OS=Cuspidothrix issatschenkoi CHARLIE-1 OX =2052836 GN=CUN59_18135 PE=4 SV=1
MQCIVNRRAQFSASHRYWLPELSETENLEKFGLCSKFPGHGHNYVLFISLVGELDEYGMVLNLSDVKQVIKREVTGQLDFSYLNDVWAEFGQTLPTTENIARVIWQRLSPHLPLVRVQLFEHPQLWADYMGNGMEAYFSVSTHFSAAHRLAHPDLSLAENTDIYGKCARVNGHGHNYHLEVTVKGEIDPRTGMIIDLGALNQVITDYIVEPFDHTFLNKDIPFFSKVVPTAENIALYISNTLRSPIQELGAKLYKVKLIESPNNSCEIYAADSETTTVNATVSEPVLARV

SEQ ID NO: 19602 - protein, 129 aa, Cuspidothrix issatschenkoi
  misc_feature (1)..(129): tr|A0A2S6CUA3|A0A2S6CUA3_9CYAN 6-carboxy-5,6,7,8-tetrah ydropterin synthase OS=Cuspidothrix issatschenkoi CHARL IE-1 OX=2052836 GN=CUN59_10450 PE=3 SV=1
MPKWKLTTEFTFDSAHYIKDYKGPCGRMHGHTYKVRIEAQSATLHSSEYCPHPVMVADFRSLRWAKKDVNQGGLDHCILNEVLPPEYETTAEMIAKYIYDETKKRLPTDIKLKVSVSETANSWAEYEDD

SEQ ID NO: 19603 - protein, 94 aa, Cutibacterium acnes
  misc_feature (1)..(94): tr|A0A085B3P6|A0A085B3P6_CUTAC 6-pyruvoyl tetrahydrobio pterin synthase OS=Cutibacterium acnes HL201PA1 OX=1271 528 GN=PAST3_03734 PE=4 SV=1
MHGHNYIVRVELISDTLNAIGFVVDYRDLSPIKDWLNKELDHRCLNEVIAANPTAENLAMHIAKIIRKVTNIPREVRVAVGVSETAKTWARYAE

SEQ ID NO: 19604 - protein, 85 aa, Cutibacterium acnes
  misc_feature (1)..(85): tr|W4TNR8|W4TNR8_CUTAC Queuosine biosynthesis QueD OS=C utibacterium acnes JCM 18909 OX=1302241 GN=JCM18909_332 6 PE=4 SV=1
MELISDTLNAIGFVVDYRDLSPIKDWLNKELDHRCLNEVIAANPTAENLAMHIAKIIRKVTNIPREVHVAVGVSETAKTWARYAE

SEQ ID NO: 19605 - protein, 157 aa, Cyanobacteria bacterium
  misc_feature (1)..(157): tr|A0A3M1KR02|A0A3M1KR02_9CYAN 6-carboxytetrahydropteri n synthase (Fragment) OS=Cyanobacteria bacterium J083 O X=2420336 GN=D6756_13670 PE=4 SV=1
MEASLTVKTHFSAAHRLALDELSLEENQEIYGKCARPHGHGHNYHLEVSVVGEIDPRTGMLVDLGALQKVIDDYVVEPFDHTFLNKDIAYFAQVVPTAENIALHIAQLLKAPIAALGAQLDKIKLIESPNNSCEIYCRKNNNQQQNSQIQELVATNY

SEQ ID NO: 19606 - protein, 119 aa, Cyanobacteria bacterium
  misc_feature (1)..(119): tr|A0A353QYQ3|A0A353QYQ3_9CYAN 6-carboxy-5,6,7,8-tetrah ydropterin synthase OS=Cyanobacteria bacterium UBA9971 OX=2055776 GN=queD PE=3 SV=1
MFEVKVEAHFSAAHHLLNYDGKCENLHGHNWKVEVYAQGEELDQSGMLIDFTILKKELNCILDILDHHDLNTLEELKGVSPSSENIAKFIYTELKKKIPKLTKVCVWETERARATYWEN

SEQ ID NO: 19607 - protein, 287 aa, Cyanobacterium aponinum
  misc_feature (1)..(287): tr|K9Z633|K9Z633_CYAAP Uncharacterized protein OS=Cyano bacterium aponinum (strain PCC 10605) OX=755178 GN=Cyan 10605_2523 PE=4 SV=1
MECIVNRRAKFSASHRYWLPELSEAENQQRFGANSRFPGHGHNYVLYVSLIGELDKYGMVQNLSEVKKVIKEEVTSQLDYSYLNDTWAEFQQTLPTTENIAKVIWERLSPHLPLVDIQLYEHPQLWVNYQGNNMEATLTVQTHFSAAHRLALPELSLEENTEIYGKCARVNGHGHNYHLEVSVTGEMDARTGMIVDLGELQKAINDYVVEPFDHTFLNKDIPYFADVVPTAENIAVYIAQLLKDPIASLGVELDKVKLIESPNNSCEIYCRKGVLNQSPANHQVALV

SEQ ID NO: 19608 - protein, 287 aa, Cyanobacterium aponinum
  misc_feature (1)..(287): tr|A0A2G3PFE0|A0A2G3PFE0_9CHRO 6-pyruvoyl tetrahydropte rin synthase OS=Cyanobacterium aponinum IPPAS B-1201 OX =2047986 GN=CSQ80_03375 PE=4 SV=1
MECIVNRRAKFSASHRYWLPELSESENQQRFGANSRFPGHGHNYVLYVSLIGELDKYGMVQNLSEVKKVIKEEVTSQLDYSYLNDTWAEFQQTLPTTENIAKVIWERLSPHLPLVDIQLYEHPQLWVNYQGNNMEATLTVQTHFSAAHRLALPELSLEENTEIYGKCARVNGHGHNYHLEVSVTGEMDARTGMIVDLGELQKAINDYVVEPFDHTFLNKDIPYFADVVPTAENIAVYIAQLLKDPIASLGVELDKVKLIESPNNSCEIYCRKGVLNQSPANHQVALV

SEQ ID NO: 19609 - protein, 154 aa, Unknown
  misc_feature (1)..(154): tr|A0A0R2U305|A0A0R2U305_9CYAN 6-pyruvoyl tetrahydropte rin synthase OS=cyanobacterium BACL30 MAG-120619-bin27 OX=1655601 GN=ABR96_07350 PE=4 SV=1
MPTPAYSCSKTFSGYPCCHRQWRHQGHCRFVHGYSRSFSFWFRAHELDDCGFVVDFSSLKQLEARLADQFDHTFLANADDPLLSTWRQLHDQGALDLRVMANVGMEASAELVWGWANELLHGRDSGRSCCWKVEARENEKNAACFEALPGWFKP

SEQ ID NO: 19610 - protein, 320 aa, Unknown
  misc_feature (1)..(320): tr|A0A0R2U4Y7|A0A0R2U4Y7_9CYAN 6-pyruvoyl tetrahydropte rin synthase OS=cyanobacterium BACL30 MAG-120619-bin27 OX=1655601 GN=ABR96_09080 PE=4 SV=1
MTATATASGFSPNPASSSHGRGRPCVITRRATFSASHRYWLPELSAEENQARFGLCSLAPGHGHNYTLVVAMAGPLDADGMVLNLSEVKHAIRAEVTAQLDFRFLNEAWPEFDLDRPEGKLPTTEALCQAIWTRLAPQLPLVGLRLHETDTLWVDLLAPGSTPIPMEAFLSIRTHFAAAHRLARPELSQGENETIYGKCARPHGHGHNYLLDVTVRGPIDARTGMVCDLAALQQLVDDLVVEPFDHTFLNKDVEHFASTVPTAENIALHIADLLSAPIAATGARLHKVRLQESPNNAAEVFAETPQLEMVPAALEALVAG

SEQ ID NO: 19611 - protein, 274 aa, Epithemia turgida
  misc_feature (1)..(274): tr|A0A077JD67|A0A077JD67_9CYAN 6-pyruvoyl-tetrahydropte rin synthase OS=cyanobacterium endosymbiont of Epithemi a turgida isolate EtSB Lake Yunoko OX=1228987 GN=ptpS P E=4 SV=1
MECIISRRAQFSASHRYWLPEFDERENQRLFGACTWFPGHGHNYVLYVSLIGEVDQYGMVENLSTVKRVIKKEVTGQLDYSYLNDVWEEFQHTLPTTENLARVIWQRLAPHLSLANIQLFEYPQLWAQYEGNAMKASLTISTHFSAAHRLALPELSLEENTKIYGKCARPHGHGHNYHLEVSVTGQIDPRTGILVNLVALQEVVNNYVVEPFDHNFLNKDVSYFAQVVPTAENITLHIAQLLRKPIGELGVDLDKVKLIESPNNSCEIHCRQST

SEQ ID NO: 19612 - protein, 291 aa, Rhopalodia gibberula
  misc_feature (1)..(291): tr|A0A2Z5SWQ2|A0A2Z5SWQ2_9CYAN 6-pyruvoyl-tetrahydropte rin synthase OS=cyanobacterium endosymbiont of Rhopalod ia gibberula OX=1763363 GN=ptpS PE=4 SV=1
MECIISRRAQFSASHRYWLPEFDEGENKRLFGACTWFPGHGHNYVLYVSLIGEIDHYGMVENLSTVKRVIKKEVTGQLDYSYLNDVWEEFQDTLPTTENLARVIWQRLAPHLPLANIQLFEYPQLWAQYQGNAMKASLTIRTHFSAAHRLALPELSLEENTKIYGKCARPHGHGHNYHLEVSVTGEIDSRTGMLVDLVALQEVVNNYVVEPFDHNFLNKDVPYFAQIVPTAENIALHIAQLLRKPIEELGVDLDKVKLIESPNNSCEIYCRKSPQIPQGLTHQESVLATTN

SEQ ID NO: 19613 - protein, 70 aa, Unknown
  misc_feature (1)..(70): tr|A0A2T4D237|A0A2T4D237_9CYAN 6-carboxytetrahydropteri n synthase QueD (Fragment) OS=cyanobacterium G8-9 OX=21 37193 GN=C9925_01175 PE=4 SV=1
MIIRKLFKFENAHIVRDCTTQRCSENIHGHSYKIEVLLESNYLDNGQMVYDFGLTKRYIKELIDSFDHAI

SEQ ID NO: 19614 - protein, 120 aa, Unknown
  misc_feature (1)..(120): tr|A0A2T4CZU3|A0A2T4CZU3_9CYAN 6-carboxytetrahydropteri n synthase QueD (Fragment) OS=cyanobacterium G8-9 OX=21 37193 GN=C9925_01960 PE=4 SV=1
SKDDEKYIEAMKTYSNRWVELPVSPSAEQFSRVIYLMVERVLECTDMRNGEREVKLHSIIVHETETGYAQGFKEDAHSILMGKIALEDIIFSSQVQSEWSDPELWDKLLSHTSIKNPTKV

SEQ ID NO: 19615 - protein, 290 aa, Cyanobacterium sp.
  misc_feature (1)..(290): tr|A0A1E5QXQ6|A0A1E5QXQ6_9CHRO 6-pyruvoyl tetrahydropte rin synthase OS=Cyanobacterium sp. IPPAS B-1200 OX=1562 720 GN=A5482_00880 PE=4 SV=1
MKCIVNRRAKFSASHRYWLPELSEQENQERFGLNSRFPGHGHNYVLFVSLIGELDQYGMVQNLSNVKKVIKNEVTGQLDYGYLNDVWAEFQETLPTTENIARVIWQRLAPHLPLTDIQLYEHPQLWVNYQGKDMEATLSIQTHFSAAHRLASNQLSYEENLEIYGKCARPNGHGHNYHLEVSVTGNMDARTGMIVDLGALQNVIDEYVVEPFDHTFLNKDIAHFADTVPTAENIAFYIATLLKEPVSKLGVELEKIKLIESPNNSCEIFCRNQSFDGVKAQESEKVPALA

SEQ ID NO: 19616 - protein, 290 aa, Cyanobacterium sp.
  misc_feature (1)..(290): tr|A0A2K8WPE4|A0A2K8WPE4_9CHRO Bifunctional 6-pyruvoylt etrahydropterin / 6-carboxytetrahydropterin synthase Qu eD OS=Cyanobacterium sp. HL-69 OX=2054282 GN=queD PE=4 SV=1
MKCIVNRRAKFSASHRYWLPELSEQENQERFGLNSRFPGHGHNYVLFVSLIGELDQYGMVQNLSNVKKVIKNEVTSQLDYGYLNDIWEEFQETLPTTENIARVIWQRLNPHLPLTDILLYEHPQLWVNYQGKDMEATLSIQTHFSAAHRLASNKLSYEENLEIYGKCARPNGHGHNYHLEVSVTGNMDARTGMIVDLGALQNVIDEYVVEPFDHTFLNKDIAHFADTVPTAENIAFYIATLLKEPVSKLGVELEKIKLIESPNNSCEIFCRNQSFDGVKAQESEKVPALA

SEQ ID NO: 19617 - protein, 288 aa, Cyanobacterium stanieri
  misc_feature (1)..(288): tr|K9YN20|K9YN20_CYASC Uncharacterized protein OS=Cyano bacterium stanieri (strain ATCC 29140 / PCC 7202) OX=29 2563 GN=Cyast_1547 PE=4 SV=1
MKCIVNRRAKFSASHRYWLPELSEQENQKRFGPNSRFPGHGHNYVLYVSLIGELDQYGMVQNLSNVKKVIKNEVTSQLDYGYLNDIWEEFKQTLPTTENIARVIWQRLAPHLPLTDIQLYEHPQLWVNYQGKDMEATLTIQTHFSAAHRLASNQLSYEENLEIYGKCARPNGHGHNYHLEVSVTGEMDSRTGMIVDLVALQNVIDEYVVEPFDHTFLNKDIAHFADTVPTAENIAFYIATLLKEPVSKLGVELDKIKLIESPNNSCEIFCRHQNFNNVQGENKVPALV

SEQ ID NO: 19618 - protein, 244 aa, Ornithocercus magnificus
  misc_feature (1)..(244): tr|A0A4Y3FW88|A0A4Y3FW88_9CYAN 6-carboxytetrahydropteri n synthase OS=cyanobiont of Ornithocercus magnificus OX =2496102 GN=OMCYN_00940 PE=4 SV=1
MAGGLNADGMVLNLSEVKHAIHSQVTSQLDFHFLNEVWPEFDVYHPQGCLPTTEALARVIWKRLSPYLPITALRLYEQPVLWADYLGHTMDVFLSIRTHFAAAHRLARPELSQEENESIYGKCARPNGHGHNYLVDITVRGAIDVRTGMACDLSALQRLVNDLVVEPFDHTFLNKDIPHFADCVPTAENIALHIADRLTSPIRAIGVELHRVRLQESPNNAAEVYAETPQLEMIPMNSTAIAAS

SEQ ID NO: 19619 - protein, 163 aa, Ornithocercus magnificus
  misc_feature (1)..(163): tr|A0A4Y3G0F5|A0A4Y3G0F5_9CYAN 6-carboxytetrahydropteri n synthase OS=cyanobiont of Ornithocercus magnificus OX =2496102 GN=OMCYN_00154 PE=4 SV=1
MTASHLIQGAPTPYTCSKQFDGYPCCHRQWRHLGHCRYVHGYSRSFTIWFAALELDDCGFIVDFSSLRPFEEQLRQQFDHTFLVNADDPLLPEWHHLHKLGAIDLRVMVNVGMESTARLVWEWINELLLEREGGRSCCWCVSARENAVNTAYFQEVPSWFLAG

SEQ ID NO: 19620 - protein, 320 aa, Cyanobium gracile
  misc_feature (1)..(320): tr|K9PBT3|K9PBT3_CYAGP 6-pyruvoyl-tetrahydropterin synt hase OS=Cyanobium gracile (strain ATCC 27147 / PCC 6307 ) OX=292564 GN=Cyagr_2953 PE=4 SV=1
MTATRLTAPPAAPSPTSAAHGRGRPCVITRRATFSASHLYRLPELDDAENARRFGRCSLAPGHGHNYELTVAMGGPLDADGMVLNLSDVKHAIRREVTEPLDFRFLNEVWPEFDLSRSEGRLPTTEALLLAIRQRLAPQLPLVALRLHEHPNLWADVLCGPTTDPMEAFLSIRTHFAAAHRLARPELSQSENEAIYGKCARPHGHGHNYLLDVTVRGPIDGRTGMVCDLAALQRLVDDLVVEPFDHTFLNKDVAHFADCVPTAENIALHIADLLSAPIAATGARLHKVRLQESPNNAAEVFAETPQLEMVPAALEALAAV

SEQ ID NO: 19621 - protein, 167 aa, Cyanobium gracile
  misc_feature (1)..(167): tr|K9PAL6|K9PAL6_CYAGP 6-pyruvoyl-tetrahydropterin synt hase OS=Cyanobium gracile (strain ATCC 27147 / PCC 6307 ) OX=292564 GN=Cyagr_3319 PE=4 SV=1
MPIPAAHTCSKSYGGFPCCHRQWRHPGHCRFVHGYSRSFTFWFAAQHLDIHGFVVDFSSLQPLRARLEEQFDHTFLVNHDDPLLAQWQALHDQGALDLRVMANVGMEASAELAWGWANDLLHPRDGGRSCCWRVEARENEANAARFTAIPDWFEAATPATPEPWPAP

SEQ ID NO: 19622 - protein, 155 aa, Cyanobium sp.
  misc_feature (1)..(155): tr|A0A182AJS0|A0A182AJS0_9CYAN 6-pyruvoyl tetrahydropte rin synthase OS=Cyanobium sp. NIES-981 OX=1851505 GN=CB M981_0117 PE=4 SV=1
MPSPAAYTCSKTFRGYPCCHRQWRHPGHCRFVHGYSRGFTFWFAANQLDACGFVVDFSSLRPLEAQLAAQFDHTFLANADDPLLEHWRALHEAGALDLRVMENVGMEASAALVWEWANALLLERDGGRTCCWKTEARENSRNAACYEAVPPWFQP

SEQ ID NO: 19623 - protein, 321 aa, Cyanobium sp.
  misc_feature (1)..(321): tr|A0A2W6Z7D7|A0A2W6Z7D7_9CYAN 6-pyruvoyl tetrahydropte rin synthase OS=Cyanobium sp. OX=2164130 GN=DCF23_09770 PE=4 SV=1
MSAQGLITKGKPPAEPRSVERFSGHGEGRGCVITRRATFSSSHLYRLPELSDAENLARFGRCSLAPGHGHNYELIVAMAGGLNQDGMVLNLSDVKHAIRREVTEQLDFRFLNDCWPEFDLRGPAGRLPTTEALCQAIWQRLAPHLPLIGLRLYEQPTLWADLLDDTMEAFLSIRTHFAAAHRLARQELSQAENERIYGKCARPHGHGHNYLLDVTVRGTIDPRTGMVCDLAELQQIVNDLVVEPFDHTFLNKDVVHFASCVPTAENIALHIVDLLAAPVAATGARLHKVRLQESPNNAAEVFAETPLLDMRPAALEALAAV

SEQ ID NO: 19624 - protein, 154 aa, Cyanobium usitatum
  misc_feature (1)..(154): tr|A0A2P7MVL2|A0A2P7MVL2_9CYAN 6-pyruvoyl tetrahydropte rin synthase OS=Cyanobium usitatum str. Tous OX=2116684 GN=C7K55_07740 PE=4 SV=1
MPTPAYSCSKTFSGYPCCHRQWRHQGHCRFVHGYSRSFSFWFRATELDDCGFVVDFSSLKQLEARLADQFDHTFLANADDPLLSTWRQLHDQGALDLRVMTNVGMEASAELVWGWANELLHGRDSGRSCCWKVEARENEKNAACFEALPGWFKT

SEQ ID NO: 19625 - protein, 320 aa, Cyanobium usitatum
  misc_feature (1)..(320): tr|A0A2P7MQT0|A0A2P7MQT0_9CYAN 6-pyruvoyl tetrahydropte rin synthase OS=Cyanobium usitatum str. Tous OX=2116684 GN=C7K55_12645 PE=4 SV=1
MTATATASGFSPNPASSSHGRGRPCVITRRATFSASHRYWLPELSAEENQARFGPCSLAPGHGHNYTLVVAMAGPLDADGMVLNLSEVKHAIRAEVTAQLDFRYLNEAWPEFDLDRPEGKLPTTEALCQAIWTRLAPQLPLVGLRLHETDTLWVDLLAPGSAPTPMEAFLSIRTHFAAAHRLARPELSQGENETIYGKCARPHGHGHNYLLDVTVRGPIDARTGMVCDLAALQQLVDDLVVEPFDHTFLNKDVEHFASTVPTAENIALHIADLLSAPIAATGARLHKVRLQESPNNAAEVFAETPQLEMVPAALEALVAG

SEQ ID NO: 19626 - protein, 288 aa, Cyanosarcina cf.; identical to SEQ ID NO: 19188
  misc_feature (1)..(288): tr|A0A2T1FLG4|A0A2T1FLG4_9CHRO 6-pyruvoyl tetrahydropte rin synthase OS=Cyanosarcina cf. burmensis CCALA 770 OX =2107697 GN=C7B80_15395 PE=4 SV=1

SEQ ID NO: 19627 - protein, 294 aa, Cyanothece sp.
  misc_feature (1)..(294): tr|B8HT27|B8HT27_CYAP4 Uncharacterized protein OS=Cyano thece sp. (strain PCC 7425 / ATCC 29141) OX=395961 GN=C yan7425_0432 PE=4 SV=1
MPCIINRRDEFSASHRYWIPEWSEAKNLHCFGACTRFPGHGHNYVLYVSMIGELDEYGMVLNLSEVKHTIRREVTQQLNFSYLNDVWPEFQQTLPTTENLARVIWQRLAPHLPLVRIQLFEHPRLWADYEGNGMEAFLSVSTHFSAAHRLARPDLSYEENCQIYGKCARPHGHGHNYHLEVTVKGEIDPRTGMIVDLVALEKAIDDHVTEPFDHTFLNKDIPYFAEVVPTAENIAVHIRDLLQQPIRDLGAKLHRVKLIESPNNSCEVFCQDEVESQTLEAAVQRISSVAALQV

SEQ ID NO: 19628 - protein, 133 aa, Cyanothece sp.
  misc_feature (1)..(133): tr|A0A3B8Y9P7|A0A3B8Y9P7_9CYAN 6-carboxy-5,6,7,8-tetrah ydropterin synthase OS=Cyanothece sp. UBA12306 OX=20557 57 GN=queD PE=3 SV=1
MNANFTDNWLIFKEFRFEAAHRLPHHDGKCHRLHGHSWVGRIYVQGNHLVKEGPKQGMVLDFGDIQQYLEPLLENFLDHYYLNETTGLENPSCEAVAQWIFEKLEKSGLQGLQAVEIQETCTSGARYSRSQKS

SEQ ID NO: 19629 - protein, 136 aa, Cyclobacteriaceae bacterium
  misc_feature (1)..(136): tr|A0A3N4H594|A0A3N4H594_9BACT 6-carboxy-5,6,7,8-tetrah ydropterin synthase OS=Cyclobacteriaceae bacterium YHN1 5 OX=2487897 GN=EF405_10280 PE=3 SV=1
MKVAVYRKEHFNAAHRLHNPDWSDEKNTEIFGKCNNYHYHGHNYELIVKLVGEVDPNTGYVYDMKLLSDLIKIYVTDRFDHKNLNLDTNEFKKLNPTAENIAVVIWHILREKIEDKYDLTIRLYETERNFVEYDGN

SEQ ID NO: 19630 - protein, 136 aa, Cyclobacteriaceae bacterium
  misc_feature (1)..(136): tr|A0A5C7ZBE9|A0A5C7ZBE9_9BACT 6-carboxytetrahydropteri n synthase OS=Cyclobacteriaceae bacterium OX=2099675 GN =E6Q41_01075 PE=4 SV=1
MKIAVYRKEHFNAAHRLFNPAWSDEKNNAVFGKCSNPNYHGHNYELEVKLIGTPDPETGYVFDMKVLSDLIQEHVVKKFDHKNLNLDTAYFKNLNPTAENIAVVIWRILRQHIDNQYELKIKLYETERNFVEYPAD

SEQ ID NO: 19631 - protein, 139 aa, Cyclobacterium amurskyense
  misc_feature (1)..(139): tr|A0A0H4PH58|A0A0H4PH58_9BACT Uncharacterized protein OS=Cyclobacterium amurskyense OX=320787 GN=CA2015_2778 PE=4 SV=1
MVHVCRKEHFNAAHKLWNPKWSEEKNKAVFGPCSNENWHGHNFELIVTIKGRPDEDTGFVVDLKQLSTLIRNEVIDKVDHKNLNVDVPFMTGKMASCENLVMEFWKILQPKVDKIVKDGGLYKLTLYETPRNFVEYYGE

SEQ ID NO: 19632 - protein, 136 aa, Cyclobacterium amurskyense
  misc_feature (1)..(136): tr|A0A0H4PBZ5|A0A0H4PBZ5_9BACT 6-carboxy-5,6,7,8-tetrah ydropterin synthase OS=Cyclobacterium amurskyense OX=32 0787 GN=CA2015_0875 PE=3 SV=1
MKIAIYRKEHFNAAHRLHNPKWSEEKNNEVFGKCNNASYHGHNYDLVVKLSGPIDPETGYVYDMKRLKDVIKKHVTSKLDHKNLNLDVDEFKNLNPTAENIAVVIWNILREEIELKYDLTIRLYETERNFVEFSGD

SEQ ID NO: 19633 - protein, 136 aa, Cyclobacterium halophilum
  misc_feature (1)..(136): tr|A0A1H6Y353|A0A1H6Y353_9BACT 6-carboxy-5,6,7,8-tetrah ydropterin synthase OS=Cyclobacterium halophilum OX=141 6801 GN=SAMN05192553_103438 PE=3 SV=1
MKLSIYRKEHFNAAHRLHNPAWSDDKNQEVFGKCNNPNYHGHNYDLIVKVSGPVDPDTGYVYDMKLLKDLIRAHVTDKFDHKNLNLDTDEFKNLNPTAENIAVVIWHILRNKIEKKYDLTVRLYETERNFVEFSGN

SEQ ID NO: 19634 - protein, 139 aa, Cyclobacterium halophilum
  misc_feature (1)..(139): tr|A0A1H7BRF7|A0A1H7BRF7_9BACT 6-pyruvoyltetrahydropter in/6-carboxytetrahydropterin synthase OS=Cyclobacterium halophilum OX=1416801 GN=SAMN05192553_111105 PE=4 SV=1
MVHVCRKEHFNAAHKLWNPKWSEEKNKAVFGPCANENWHGHNFELIVTIKGRPDADTGFVVDLKQLSTLIRREVIDKVDHKNLNVDVPFMAGKMASCENLVMEFWKILQPLVDELVKEGGLYKLTLYETPRNFVEYYGE

SEQ ID NO: 19635 - protein, 139 aa, Cyclobacterium lianum
  misc_feature (1)..(139): tr|A0A1M7QS69|A0A1M7QS69_9BACT 6-pyruvoyltetrahydropter in/6-carboxytetrahydropterin synthase OS=Cyclobacterium lianum OX=388280 GN=SAMN04488057_12312 PE=4 SV=1
MVHVCRKEHFNAAHKLWNPKWSEEKNKAVFGPCANENWHGHNFELIVTIKGKPDEDTGFVVDLKQLSTLVRREVIDKVDHKNLNLDVSFMSGKMASCENLVMEFWKILQPLVDKLVKEGGLYKLTLYETPRNFVEYYGE

SEQ ID NO: 19636 - protein, 136 aa, Cyclobacterium lianum
  misc_feature (1)..(136): tr|A0A1M7QD38|A0A1M7QD38_9BACT 6-carboxy-5,6,7,8-tetrah ydropterin synthase OS=Cyclobacterium lianum OX=388280 GN=SAMN04488057_11695 PE=3 SV=1
MKTAIFRKEHFNAAHRLHNPKWSSKKNQEVFGKCNNENYHGHNYDLIVKLEGPIDPDTGYVYDMKLLKDLIREYVTDRFDHKNLNLDTDEFKTLNPTAENIAVVIWNILREKIEKKYDLTVRLYETERNFVEYSGN

SEQ ID NO: 19637 - protein, 139 aa, Cyclobacterium marinum
  misc_feature (1)..(139): tr|G0J1E4|G0J1E4_CYCMS Uncharacterized protein OS=Cyclo bacterium marinum (strain ATCC 25205 / DSM 745) OX=8800 70 GN=Cycma_2845 PE=4 SV=1
MVHVCRKEHFNAAHKLWNPKWSEEKNKSVFGPCSNANWHGHNFELIVTIKGRPDEDTGFVVDLKQLSNLIRKEVIDKVDHKNLNVDVPFMEGKMASCENLVMEFWKILQPQVDKMVKDGGLYKLTLYETPRNFVEYYGE

SEQ ID NO: 19638 - protein, 136 aa, Cyclobacterium marinum
  misc_feature (1)..(136): tr|A0A5D9BG42|A0A5D9BG42_9BACT 6-carboxy-5,6,7,8-tetrah ydropterin synthase OS=Cyclobacterium marinum OX=104 GN =FY028_00300 PE=3 SV=1
MKIAIYRKEHFNAAHRLHNPQWSAEKNDAVFGKCNNPSYHGHNYDLEVKLTGPIDPETGYVYDMKLLKDVIKENVTKKFDHKNLNLDVDEFKNLNPTAENIAVVIWNILREKIELKYDLTIRLYETERNFVEFSGD

SEQ ID NO: 19639 - protein, 139 aa, Cyclobacterium qasimii
  misc_feature (1)..(139): tr|A0A512CHI9|A0A512CHI9_9BACT 6-carboxy-5,6,7,8-tetrah ydropterin synthase OS=Cyclobacterium qasimii OX=135042 9 GN=CQA01_42030 PE=4 SV=1
MVHVCRKEHFNAAHKLWNPKWSEEKNKEVFGPCSNANWHGHNFELIVTIKGRPDEDTGFVVDLKQLSTLIRKEVIDKVDHKNLNVDVPFMSGKMASCENLVMEFWKILQPGVNEIVKDGGLFKLTLYETPRNFVEYYGE

SEQ ID NO: 19640 - protein, 136 aa, Cyclobacterium qasimii
  misc_feature (1)..(136): tr|S7WJ41|S7WJ41_9BACT 6-carboxy-5,6,7,8-tetrahydropter in synthase OS=Cyclobacterium qasimii M12-11B OX=641524 GN=ADICYQ_4291 PE=3 SV=1
MKIAIYRKEHFNAAHRLHNPKWSEEKNKAVFGKCNNPSYHGHNYDLVVKLSGPIDPDTGYVYDMKKLKDVIKEHITSKFDHKNLNLDVDEFKNLNPTAENIAVVIWNILREEIELKYDLTIRLYETERNFVEFSGD

SEQ ID NO: 19641 - protein, 134 aa, Cycloclasticus sp.
  misc_feature (1)..(134): tr|A0A1M6F8N0|A0A1M6F8N0_9GAMM 6-carboxy-5,6,7,8-tetrah ydropterin synthase OS=Cycloclasticus sp. DSM 27168 OX= 1884353 GN=SAMN05519226_1149 PE=3 SV=1
MYRITKNLSFCYGHRLMNHPGKCRHLHGHSARVEITLESEQLNEQGMVCDFADIKQFAGQWINETLDHNMLLHKNDPVLPLLQEAGERLMVVDEHPTAEFLAKLIYNYVSKGGFPVTKVSVWETDSSSASYSPA

SEQ ID NO: 19642 - protein, 134 aa, Cycloclasticus sp.
  misc_feature (1)..(134): tr|A0A1Y5F296|A0A1Y5F296_9GAMM 6-carboxy-5,6,7,8-tetrah ydropterin synthase OS=Cycloclasticus sp. 44_32_T64 OX= 1856282 GN=A9Q85_04660 PE=3 SV=1
MYRITKKLSFCYGHRLMNHPGKCRHLHGHSARVAITLESAELNEQGMVCDFSDLKQFVGKWISETLDHNMLLHKNDPVLPLLQEAGERLMVVDEHPTAEFLAKLIYDYVAKGGFPVTNVSVWETDSANASYSTN

SEQ ID NO: 19643 - protein, 134 aa, Cycloclasticus zancles; identical to SEQ ID NO: 19641
  misc_feature (1)..(134): tr|S5T9Y0|S5T9Y0_9GAMM 6-carboxy-5,6,7,8-tetrahydropter in synthase OS=Cycloclasticus zancles 78-ME OX=1198232 GN=CYCME_2050 PE=3 SV=1

SEQ ID NO: 19644 - protein, 287 aa, Cylindrospermopsis raciborskii
  misc_feature (1)..(287): tr|A0A1S1ZYT1|A0A1S1ZYT1_9CYAN Uncharacterized protein OS=Cylindrospermopsis raciborskii MVCC14 OX=940191 GN=B CV64_05870 PE=4 SV=1
MSLTARSHFSAAHRLAPNLSAEKYGKFIRTHGHNYHLEVTVEGEMDGRTGMIVDLGCLHETVEREILELFDHSCINEDIPYFSTSHIVPTTENIARYMSDLLQFPISELGVKLSRVKLFESDHLWVEYEGKDSEIFFSVATGFSAAHRLADPTLSLEKNQTIYGKCSRINGHGHNYHLEVTVRGEIDSVTGMSVDLVGLNQIIQHYVIEPMDHSFLNQDLPYFTEVVPTAENIAVYISDVVRSPIEELGAKLHKVKLIESPNNSCEIYAKDIEESRVDRVDRELAVV

SEQ ID NO: 19645 - protein, 422 aa, Cylindrospermopsis raciborskii
  misc_feature (1)..(422): tr|A0A1X4G8H6|A0A1X4G8H6_9CYAN 6-pyruvoyl tetrahydropte rin synthase OS=Cylindrospermopsis raciborskii CENA303 OX=1170769 GN=B7O87_06320 PE=4 SV=1
MECIINRRAQFSASHRYWLPELGEAQNVGKFGLCAKFPGHGHNYVLFISMSGELDEYGMVLNLSDVKQVIKSEVTSELDFSYLNEVWEEFQATLPTTENIARVIWNRLTPHLPLVRVQLFQHPQLWTEYEGKGEKVSLTARSHFSAAHRLAPNLSAEKYGKCTRTHGHNYHLEVTVEGEMDGRTGMIVDLGCLHETVEREILELFDHSCINEDIPYFSTSHIVPTTENIARYMSDLLQFPISELGVKLSRVKLFESDHLWVEYEGKDSEIFFSVATGFSAAHRLADPTLSLEKNQTIYGKCSRINGHGHNYHLEVTVRGEIDSVTGMSVDLVGLNQIIQHYVIEPMDHSFLNQDLPYFTEVVPTAENIAVYISDVVRSPIEELGAKLHKVKLIESPNNSCEIYAKDIEESRVDRVDRELAVV

SEQ ID NO: 19646 - protein, 129 aa, Cylindrospermopsis sp.
  misc_feature (1)..(129): tr|A0A0R0M9M6|A0A0R0M9M6_9CYAN 6-carboxy-5,6,7,8-tetrah ydropterin synthase OS=Cylindrospermopsis sp. CR12 OX=1 747196 GN=ASL19_03280 PE=3 SV=1
MPRWKLSTEFTFDSAHYIKDYKGPCGRMHGHTYRVKMEVTSSQLHSSEYCPHPVMVADFKSLRWAKKDVTQGGLDHCVLNEVLPPEYETTAEMIAKYIYDETKRRLPTGVKLKVAVSETPNSWAEYEDD

SEQ ID NO: 19647 - protein, 420 aa, Cylindrospermopsis sp.
  misc_feature (1)..(420): tr|A0A0R0M285|A0A0R0M285_9CYAN 6-pyruvoyl tetrahydropte rin synthase OS=Cylindrospermopsis sp. CR12 OX=1747196 GN=ASL19_11215 PE=4 SV=1
MECIINRRAQFSASHRYWLPELGEAQSVEKFGPCAKFPGHGHNYVLFISMSGELDEYGMVLNLSDVKQVIKSEVTSELDFSYLNEVWEEFQATLPTTENIARVIWNRLAPHLPLVRVQLFEHPQLWTEYEGEKSSLTVRSHFSAAHRLAPNLSAEKYGKCTRTHGHNYHLEVTVEGEMDGRTGMIVDLGCLHEIVEREILELFDHSCINEDIPYFSTSHIVPTTENIARYMSDLLQFPISQLGVKLSRVKLFESDHLWVEYEGKDSEIFFSVATGFSAAHRLADPTLSLEKNQTIYGKCSRINGHGHNYYLEVTVQGEIDSVTGMSVDLVGLNQIIQHYVIEPMDHSFLNQDLPYFTEVVPTAENIAVYITNVVRSPIEELGAKLHKVKLIESPNNSCEIYARDIEESKVDRIYRELAAV

SEQ ID NO: 19648 - protein, 129 aa, Cylindrospermum sp.
  misc_feature (1)..(129): tr|A0A1Z4QSJ2|A0A1Z4QSJ2_9NOST 6-carboxy-5,6,7,8-tetrah ydropterin synthase OS=Cylindrospermum sp. NIES-4074 OX =2005457 GN=NIES4074_57160 PE=3 SV=1
MPKWKLLTEFTFDSAHYIKDYNGPCGRLHGHTYTVRVEAKSSKLYSSEYCPHPVMVADFRTLRWAKKDVTKGGLDHCVLNDVLPAEYATTAEMIAKYIYDETKKRLTPDIHLKVAVSETPNSWAEYEDD

SEQ ID NO: 19649 - protein, 290 aa, Cylindrospermum sp.
  misc_feature (1)..(290): tr|A0A1Z4QJY1|A0A1Z4QJY1_9NOST 6-pyruvoyl-tetrahydropte rin synthase homolog OS=Cylindrospermum sp. NIES-4074 O X=2005457 GN=NIES4074_29920 PE=4 SV=1
MQCIVNRRAQFSASHRYWLPELSEAENIENFGACSRFPGHGHNYVLFISLAGELDKYGMVLNLSDVKQVIKREVTSQLDFSYLNDVWAEFQQTLPTTENIARVIWQRLAPHLPLVRVQLFEHPELWADYMGNGMEGYLTTSTHFSAAHRLAHPQLSLEENTEIYGKCARVNGHGHNYHLEVTVKGEIDPRTGMILDLGALHQAIADYVVEPFDHTFLNKDIAFFAEVVPTAENIALYICNLLRSPIQELGAKLYKVKLIESPNNSCEIYAPESESNSAVSAVSQPVLARV

SEQ ID NO: 19650 - protein, 290 aa, Cylindrospermum stagnale
  misc_feature (1)..(290): tr|K9WTA5|K9WTA5_9NOST 6-pyruvoyl-tetrahydropterin synt hase OS=Cylindrospermum stagnale PCC 7417 OX=56107 GN=C ylst_0420 PE=4 SV=1
MQCIVNRRAQFSASHRYWLPELTEAENIEKFGACSRFPGHGHNYVLFISLAGELDKYGMVLNLSDVKQVIKREVTSQLDFSYLNDVWADFQETLPTTENIARVVWQRLAPHLPLVRVQLFEHPELWADYMGNGMEAYLSISTHFSAAHRLAHPDLSLEENTEIYGKCARVNGHGHNYHLEVTVKGEIDPRTGMIADLGALHQAIADYVVEPFDHTFLNKDIAFFAEVVPTAENIALYISNVLRSPIQELGAKLYKVKLIESPNNSCEIYTTESELNSASTVKTAPVLARV

SEQ ID NO: 19651 - protein, 165 aa, Cystobacter ferrugineus
  misc_feature (1)..(165): tr|A0A1L9AWH3|A0A1L9AWH3_9DELT Folate biosynthesis prot ein OS=Cystobacter ferrugineus OX=83449 GN=BON30_43955 PE=4 SV=1
MARTTTIELHKEDMKFAAGHFTIFSATHRENMHGHNFAVFVSLTGEVLDNGMLADYDIFKRMALEQCRAWNETFMLPAHSRHLQVERDARGDVIARFNGEELRFLARDVTILPVENVSLEELARLFGENLVGDGSLMRDSRISRVVVKCSSEPGQNCSWEWNSHG

SEQ ID NO: 19652 - protein, 132 aa, Cystobacter ferrugineus
  misc_feature (1)..(132): tr|A0A1L9AW87|A0A1L9AW87_9DELT 6-carboxy-5,6,7,8-tetrah ydropterin synthase OS=Cystobacter ferrugineus OX=83449 GN=BON30_43965 PE=3 SV=1
MESAILSKPPLITEISKEFTFEAAHRLPNVPPGHKCARVHGHSYRIEITLRGPVHPTYGWVVDFAELTAAWQPLHAQLDHRLLNEVPGLENPTSELLAAWVFERVSIPGTRVTKVRVAETCTSSCTVFAAEG

SEQ ID NO: 19653 - protein, 132 aa, Cystobacter fuscus
  misc_feature (1)..(132): tr|S9PP52|S9PP52_9DELT 6-carboxy-5,6,7,8-tetrahydropter in synthase OS=Cystobacter fuscus DSM 2262 OX=1242864 G N=D187_000243 PE=3 SV=1
MESATLSKPPLITEISKEFTFEAAHRLPNVPPGHKCARVHGHSYRIEITLRGPVHPTFGWVVDFAELTAAWQPLQAQLDHRLLNEVPGLENPTSELLAAWVFERVNIPGTRVTKVRVAETCTSSCTVFAAEG

SEQ ID NO: 19654 - protein, 165 aa, Cystobacter fuscus
  misc_feature (1)..(165): tr|S9R713|S9R713_9DELT Folate biosynthesis protein PTPS -III OS=Cystobacter fuscus DSM 2262 OX=1242864 GN=D187_ 000245 PE=4 SV=1
MARTTTIELHKEDMKFAAGHFTIFSATHRENMHGHNFAVFISLTGEVLDNGMLADYDIFKRMALEQCRTWNETFMLPAHSRHLQVERDARGDVLARFNGEELRFLARDVTILPVENVSLEELARLFGENLVGDGALMRDSRISRVVVKCSSEPGQNCSWEWNSHG

SEQ ID NO: 19655 - protein, 135 aa, Cytophaga hutchinsonii
  misc_feature (1)..(135): tr|Q11WI3|Q11WI3_CYTH3 6-pyruvoyl tetrahydrobiopterin s ynthase OS=Cytophaga hutchinsonii (strain ATCC 33406 / NCIMB 9469) OX=269798 GN=ygcM PE=4 SV=1
MKTAIFRKEHFNAAHRLFNASWSDEKNDAVFGKCNNPNFHGHNYELIVKLTGEIDPITGYVFDTKELSNLIKQHILTRYDHKNLNLDCEEFKDVNPTAENIAKQIYTTLRSLIDASLDLKVILYETERNFVEYPA

SEQ ID NO: 19656 - protein, 141 aa, Cytophaga hutchinsonii
  misc_feature (1)..(141): tr|Q11VA5|Q11VA5_CYTH3 Probable 6-pyruvoyltetrahydropte rin synthase (6-pyruvoyl tetrahydrobiopterin) synthase OS=Cytophaga hutchinsonii (strain ATCC 33406 / NCIMB 94 69) OX=269798 GN=ygcM PE=4 SV=1
MIIYVSRQEHFNAAHKLYNPAWSEEKNAEMFGPCANSNWHGHNFDLIVTVKGEPSPDTGFVIDLKKLSTLIREKVTDKVDHKNLNLDVDFMIGKMASTEILAYEFWKILEPHITTLSDGRGKLHSIKLYETPRNYVEYFGE

SEQ ID NO: 19657 - protein, 140 aa, Cytophaga sp.
  misc_feature (1)..(140): tr|A0A4R4KGU7|A0A4R4KGU7_9BACT 6-carboxytetrahydropteri n synthase OS=Cytophaga sp. DMA-K-7a OX=2070510 GN=EZE2 0_07720 PE=4 SV=1
MILPRVSVFRKEHFNAAHRLHNPNWSDDKNERVYGKCNNYNYHGHNYDLIVQLTGEVDPETGYVFDMKVLGDLIREHITDKFDHKNLNLDTEEFKDLNPSAENIAIVIYNLLRKEISTNLDLKIRLYETERNFVEYPTHG

SEQ ID NO: 19658 - protein, 139 aa, Cytophaga sp.
  misc_feature (1)..(139): tr|A0A4R4KJR7|A0A4R4KJR7_9BACT 6-carboxytetrahydropteri n synthase OS=Cytophaga sp. DMA-K-7a OX=2070510 GN=EZE2 0_06445 PE=4 SV=1
MIYVTRKEHFNAAHRLYNPAWSEEKNQEVFGPCANRNFHGHNFELIVTVKGTPDPDTGFVIDLKVLGELIKKHVVDKVDHRNLNLDVDFMEGKMASCEIFVMEIWKILAPIITEKAPAAHLHYIKLVETPKNFVEYYGE

SEQ ID NO: 19659 - protein, 149 aa, Cytophaga xylanolytica
  misc_feature (1)..(149): tr|A0A2W7P1Y0|A0A2W7P1Y0_9BACT 6-carboxy-5,6,7,8-tetrah ydropterin synthase OS=Cytophaga xylanolytica OX=990 GN =LX69_00703 PE=3 SV=1
MTSIRLTKEFRFEMAHALWNYDGLCRNLHGHSYILRVTVKGMPNADANHPKCGMVMDFGELKAIVKDEILDRLDHAILVSDRAPVNDIANLSQMAERLIVVDYQPTCENMLVDFAQRIAARLPERVMLHSLRLNETATSYAEWFAEDNG

SEQ ID NO: 19660 - protein, 137 aa, Cytophagaceae bacterium
  misc_feature (1)..(137): tr|A0A4Q5RI41|A0A4Q5RI41_9BACT 6-carboxytetrahydropteri n synthase OS=Cytophagaceae bacterium OX=2026729 GN=EOO 36_01845 PE=4 SV=1
MLYVSRREHFNAAHKLYNPAWTPARNQEVFGPCANENWHGHNYEMIVTVKGQPDPDTGFVVDLKALSDLIRTHITDQVDHKNLNLDVPFLTGQLASTENLAVAFWRILERELPGITPAQLHCIKIYETPRNAVEYYG

SEQ ID NO: 19661 - protein, 140 aa, Cytophagaceae bacterium
  misc_feature (1)..(140): tr|A0A1E4A5F1|A0A1E4A5F1_9BACT 6-carboxytetrahydropteri n synthase QueD OS=Cytophagaceae bacterium SCN 52-12 OX =1660162 GN=ABS46_07535 PE=4 SV=1
MIYVSRKEHFNAAHRLYNSNWSAEKNREVFGPCANPYYHGHNFELIVTVKGDPDPETGFVIDLKVLGDIIRVEVVEKVDHRNLNIDVDFMEGKMASCEVFVTEIWKLLKPAIEKAAPNARLHYIKLIETPKNFVEYYGEG

SEQ ID NO: 19662 - protein, 138 aa, Cytophagales bacterium
  misc_feature (1)..(138): tr|A0A286IH16|A0A286IH16_9BACT 6-carboxy-5,6,7,8-tetrah ydropterin synthase OS=Cytophagales bacterium TFI 002 O X=1945892 GN=SAMN06298216_0357 PE=3 SV=1
MKKKVAVFRKEHFNAAHRLHNPSWNEEKNNRIFGKCNNPNYHGHNYEMEVKVVGHIDDETGYVMDIKILSDIIKEHVLDKLDHKNLNLDVPEFEFLNPTAENIVIVIHEKIEKAINNPQLALTVRLYETPRNYVEYPG

SEQ ID NO: 19663 - protein, 138 aa, Cytophagales bacterium
  misc_feature (1)..(138): tr|A0A2M6GLK9|A0A2M6GLK9_9BACT 6-carboxytetrahydropteri n synthase QueD OS=Cytophagales bacterium CG18_big_fil_ WC_8_21_14_2_50_42_9 OX=1973956 GN=COW65_03530 PE=4 SV= 1
MVYLSRLEHFNAAHKLYNPKWSEERNKEVFGPCSNANWHGHNYELIVTVKGQPDPETGFIIDLKKLSILIREQIIEKVDHKNVNLDVPFMADKLASTENLVIEFWRILEPLIATTSSARLYCLKLYETPRNFVEYYGE

SEQ ID NO: 19664 - protein, 143 aa, Cytophagia bacterium
  misc_feature (1)..(143): tr|A0A2E5GWL0|A0A2E5GWL0_9BACT 6-carboxytetrahydropteri n synthase QueD OS=Cytophagia bacterium OX=2026730 GN=C L871_05715 PE=4 SV=1
MIYLTRKEHFNAAHKLYNPLWSKEKNYQVYGDCSNENWHGHNYELLVTIKGSINDDDGMVINLKLLSKIINDEIISKVDHKNLNIDVPFLKNKITSTENVVVEFWNILEKKISSLENYKCFLHCVKLYETPKNSVEYYGPEGK

SEQ ID NO: 19665 - protein, 140 aa, Cytophagia bacterium
  misc_feature (1)..(140): tr|A0A2E9WJC5|A0A2E9WJC5_9BACT 6-carboxytetrahydropteri n synthase QueD OS=Cytophagia bacterium OX=2026730 GN=C L870_03060 PE=4 SV=1
MIYIVRKEHFNAAHKLFNPSWSKEKNQKEFGVCSNKNWHGHNYEIEVTLKGKIDPGSGMLINLKILSKILKDEIIDKVDHKNLNIDVPFLEGIITTTENVTIKFWEILDERIKSLNISCSLHKIRLYETPRNFVEYYGEN

SEQ ID NO: 19666 - protein, 290 aa, Dactylococcopsis salina
  misc_feature (1)..(290): tr|K9YUC6|K9YUC6_DACSA 6-pyruvoyl-tetrahydropterin synt hase OS=Dactylococcopsis salina PCC 8305 OX=13035 GN=Da csa_1876 PE=4 SV=1
MKCIINRRAQFSAAHRYWLPELSEAENEAKFGTGSRYPGHGHNYVLYVSLEGEIDQYGMVMNLSEVKPVIRKQITEQLNNAHLNEVWREFTETLPTTENVARVIWQRLESYLPLVNIRLFEHPQLWADYQGRNMEASLTVGTHFSAAHRLARPDLSYEENCEIYGKCARPHGHGHNYHLEVTVTGEIDPRTGMIVNLEKLHDILEEFVVEPFDHYFLNEDIPYFAEVVPTAENIAVYIGQLLQQPTQELGVMLDKIKLIESPNNSCEINCRSLSQEFSNQATREPALASY

SEQ ID NO: 19667 - protein, 133 aa, Dankookia rubra
  misc_feature (1)..(133): tr|A0A4R5QK02|A0A4R5QK02_9PROT 6-carboxytetrahydropteri n synthase OS=Dankookia rubra OX=1442381 GN=E2C06_08280 PE=4 SV=1
MYSLTVCDHIMVAHSFRGAEFGPAQRLHGATFAVEAEFRAPKLDHLHLLVDIGLAKVELRKALDGLDYRNLDGEPAFAGLNTTTEFLCAHIHGLLAAALQEGKLGAQSGSVTSLKVLLRESPNAWAAYEGEVA

SEQ ID NO: 19668 - protein, 194 aa, Dankookia rubra
  misc_feature (1)..(194): tr|A0A4R5Q854|A0A4R5Q854_9PROT 6-pyruvoyl tetrahydrobio pterin synthase OS=Dankookia rubra OX=1442381 GN=E2C06_ 33415 PE=4 SV=1
MVEGARGALDRELSPYSGISLASTPIHRSTKTYDHSEGLSCCFRQWRAQSHCRLIHGYALAFKFVFATRELDECGWCFDFGGLKPVRAWLHEMFDHTMLVAADDPDLPEFKRLEEKGLVALRVLPRVGCEATAEHVFRHVARFVAEQTAGRVWLETVEVREHGGNSALYEGEVHDTAGAGQSLGTFGELGAIAR

SEQ ID NO: 19669 - protein, 152 aa, Dechloromonas aromatica
  misc_feature (1)..(152): tr|Q47HS1|Q47HS1_DECAR Uncharacterized protein OS=Dechl oromonas aromatica (strain RCB) OX=159087 GN=Daro_0854 PE=4 SV=1
MPMLITRRLEFDAGHRIPDHKSQCRHLHGHRYAIEITLSGSVIDKAGDAANGMVMDFSQVKDLANLHLVKEWDHAFLAFAGDKAIVDFLSSLPGHKTVILDRVPTAENLARLAFERLDAVYRDTYGNHLQLEQVRLYETPNCWADALRTKLD

SEQ ID NO: 19670 - protein, 150 aa, Dechloromonas denitrificans
  misc_feature (1)..(150): tr|A0A133XHC1|A0A133XHC1_9RHOO 6-carboxy-5,6,7,8-tetrah ydropterin synthase OS=Dechloromonas denitrificans OX=2 81362 GN=AT959_13035 PE=4 SV=1
MFITRRLEFDAGHRIPDHKSQCRHLHGHRYVIEITLSGQVIDKAGDAANGMVMDFSQVKHLAKQHLVDEWDHAFLAFAGDSAIVDFLNSLPDHKTVILDRVPTAENLARIAFDRLDAVYRDTYGNHLQLEQVRLYETPNCWADALRAKLD

SEQ ID NO: 19671 - protein, 150 aa, Dechloromonas sp.
  misc_feature (1)..(150): tr|A0A5C7ZMQ3|A0A5C7ZMQ3_9RHOO 6-carboxytetrahydropteri n synthase QueD OS=Dechloromonas sp. OX=1917218 GN=queD PE=4 SV=1
MLITRRLEFDAGHRIPDHKSQCRHLHGHRYAIEITLSGSVIDKARDAANGMVMDFSQVKDLAKAHLVDLWDHAFLAYAGDTAIVDFLQSIPGHKTVILDRVPTAENLARLAFEILDGVYRDTYGNHLRLEQVRLYETPNCWSDAIRSRLD

SEQ ID NO: 19672 - protein, 150 aa, Dechloromonas sp.
  misc_feature (1)..(150): tr|A0A3B7ACR8|A0A3B7ACR8_9RHOO 6-carboxytetrahydropteri n synthase QueD OS=Dechloromonas sp. HYN0024 OX=2231055 GN=queD PE=4 SV=1
MLITRRLEFDAGHRIPDHKSQCRHLHGHRYAIEITLSGSVIDKAGDAANGMVMDFSQVKDLANSHLVHEWDHAFLAYAGDQAIVDFLASLPGHKTVILDRVPTAENLARIAFERLDAVYRDTYGNHLRLEQVRLYETPNCWADALRTRLD

SEQ ID NO: 19673 - protein, 119 aa, Deferribacter autotrophicus
  misc_feature (1)..(119): tr|A0A5A8F772|A0A5A8F772_9BACT 6-carboxy-5,6,7,8-tetrah ydropterin synthase OS=Deferribacter autotrophicus OX=5 00465 GN=queD PE=3 SV=1
MYRLRVIDSFASAHFLRNYEGKCENLHGHNWRVEVYLEGDKLNETGLLVDFKEIKKELKKILDELDHIFLNEHEYFKNVNPTSENIAKYIYDKMKEKFENLMKSVVVWESDNAAAEYFE

SEQ ID NO: 19674 - protein, 119 aa, Deferribacter desulfuricans
  misc_feature (1)..(119): tr|D3PD04|D3PD04_DEFDS 6-carboxy-5,6,7,8-tetrahydropter in synthase OS=Deferribacter desulfuricans (strain DSM 14783 / JCM 11476 / NBRC 101012 / SSM1) OX=639282 GN=DE FDS_1007 PE=3 SV=1
MYRLRVIDHFASAHFLRDYEGKCENLHGHNWKVEVYLKGEKLDKTGMLVDFKNIKKELRKITDELDHIFLNEHPYFEKINPTSENIAKYIYDRLKEKFCDLMSSVVVWESETAAAEYYE

SEQ ID NO: 19675 - protein, 117 aa, Defluviimonas sp.
  misc_feature (1)..(117): tr|A0A059IJE3|A0A059IJE3_9RHOB 6-carboxy-5,6,7,8-tetrah ydropterin synthase OS=Defluviimonas sp. 20V17 OX=14172 96 GN=U879_19825 PE=3 SV=1
MYRIAKEFAFSASHQLCHLPPDHQCARLHGHNYVVVVELAAEALNADGFVRDYHDLAPLKTYIDECFDHRHLNDVLDGPSTAETLARHFHDWCRARWPETVAVRVSETPKTWAEYRP

SEQ ID NO: 19676 - protein, 141 aa, Dehalobacter sp.
  misc_feature (1)..(141): tr|K4L699|K4L699_9FIRM 6-carboxy-5,6,7,8-tetrahydropter in synthase OS=Dehalobacter sp. CF OX=1131462 GN=queD P E=3 SV=1
MYMLKVESGFDSAHFLAGHPGKCRNIHGHSWRVVVEIESETLADEGEARGMIVDFSQLKADLRQLADDYDHALLVEDGTLQKSTLEHLIRDGFRVIEVPFRTTAENFARCFYEALAGKGYQMTRVSVFETPANCAVYEGRR

SEQ ID NO: 19677 - protein, 141 aa, Dehalobacter sp.
  misc_feature (1)..(141): tr|A0A4V2WJA4|A0A4V2WJA4_9FIRM 6-carboxy-5,6,7,8-tetrah ydropterin synthase OS=Dehalobacter sp. 12DCB1 OX=20703 64 GN=queD PE=3 SV=1
MYMLKVESGFDSAHFLAGHPGKCRNIHGHSWRVVVEIESETLADEGEARGMIVDFSQLKADLRQLADDYDHALLVEDGTLRKSTLEHLIRDGFRVIEVPFRTTAENFARCFYEALAGKGYQMTRVSVFETPTNCAVYEGRR

SEQ ID NO: 19678 - protein, 162 aa, Dehalococcoidaceae bacterium
  misc_feature (1)..(162): tr|A0A2E8T9Y4|A0A2E8T9Y4_9CHLR 6-carboxytetrahydropteri n synthase QueD OS=Dehalococcoidaceae bacterium OX=2026 731 GN=CL872_00985 PE=4 SV=1
MSESFAVNVNAVKLRFASAHMATLGKELEPLHGHNYIVSCTVEGDITDDEWVIDFSVIKDSVRDACKILDHKFILQKDSSILEIKETSNEWQIMHDGQKYLFPKNDVVALNIKNTTAENLAKWLFYSIKKDILTKNYSNIHKMTIEVEEMPGQSGIYKSKLK

SEQ ID NO: 19679 - protein, 123 aa, Dehalococcoidales bacterium
  misc_feature (1)..(123): tr|A0A2D6LGT2|A0A2D6LGT2_9CHLR 6-carboxy-5,6,7,8-tetrah ydropterin synthase OS=Dehalococcoidales bacterium OX=2 026733 GN=queD PE=3 SV=1
MYQISVEKHFDAAHFLRGYRGKCEALHGHRFRAVARVSATKLDDIGLAYDFNELKRHLNDILDRFDHTCLNDVPPFDKINPSSENIAAAIHGELRSKLAEAPVAISAIEVWESPQTRIIYRPD

SEQ ID NO: 19680 - protein, 123 aa, Dehalococcoidales bacterium
  misc_feature (1)..(123): tr|A0A2D5UQZ4|A0A2D5UQZ4_9CHLR 6-carboxy-5,6,7,8-tetrah ydropterin synthase OS=Dehalococcoidales bacterium OX=2 026733 GN=queD PE=3 SV=1
MYLVSVQQHFDAAHYLRDYQGKCEALHGHRFQVVAKIAASQVNDIGLAYDFTLLKRHLGGIVDRFDHACLNDMAPFDKINPSSENIASTIYHELDPRLTEDPVSLSFVEVWESPDSWVTYSPD

SEQ ID NO: 19681 - protein, 123 aa, Dehalococcoides mccartyi
  misc_feature (1)..(123): tr|A0A0V8LXK9|A0A0V8LXK9_9CHLR 6-carboxy-5,6,7,8-tetrah ydropterin synthase OS=Dehalococcoides mccartyi OX=6143 5 GN=DA01_06055 PE=3 SV=1
MYYLSVKKHFEAAHFLRGYKGKCENMHGHRYEVALKVRANELDECGMGADFKVLKTRLGEVLQSYDHTCLNDLTPFDNQNPSAENISKDIYDKLKPVISRMGVELRGVEVWESPDSSVLYQPD

SEQ ID NO: 19682 - protein, 123 aa, Dehalococcoides mccartyi
  misc_feature (1)..(123): tr|A0A076IA57|A0A076IA57_9CHLR 6-carboxy-5,6,7,8-tetrah ydropterin synthase OS=Dehalococcoides mccartyi CG1 OX= 1432059 GN=X792_08035 PE=3 SV=1
MYYLSVKRHFEAAHFLRGYKGKCENLHGHRYEAALKVRVSKLDECGMGVDFKLLKTSLSEVLQSYDHTCLNDLTPFDSQNPSAENIAKDIYNRLKPVITKNGAELYGVEVWESPDSSVLYQPD

SEQ ID NO: 19683 - protein, 123 aa, Dehalococcoides sp.; identical to SEQ ID NO: 19682
  misc_feature (1)..(123): tr|A0A0C6ERC3|A0A0C6ERC3_9CHLR 6-carboxy-5,6,7,8-tetrah ydropterin synthase OS=Dehalococcoides sp. UCH007 OX=15 22671 GN=queD PE=3 SV=1

SEQ ID NO: 19684 - protein, 123 aa, Dehalococcoidia bacterium
  misc_feature (1)..(123): tr|A0A0S7WMY0|A0A0S7WMY0_9CHLR Uncharacterized protein OS=Dehalococcoidia bacterium DG_22 OX=1703393 GN=AMJ38_ 00270 PE=4 SV=1
MEVEGELTEDAWVIDFGELKRIGEALCQELDHRFLLPRDNPALNISDLDDAWQITSAGRRYVIPKSDVCVLPLDNSTAERLAEWFCHRLAEALTERGNITSISVGVEEAPGQTGWCTLSLGNR

SEQ ID NO: 19685 - protein, 120 aa, Dehalococcoidia bacterium
  misc_feature (1)..(120): tr|A0A0S8EBL7|A0A0S8EBL7_9CHLR Uncharacterized protein OS=Dehalococcoidia bacterium SM23_28_2 OX=1703396 GN=AM J77_06985 PE=4 SV=1
MEVEGALTEDAWVLDFGDVKRIGGQQLDHRFLLPRDNPALDVSDLDDAWQIAVAGRRYLIPKSDACLLPLDNPTAERLAEWFCHRLAEALADRGNITSITVGVEEAPDQAGWCTLSLSDR

SEQ ID NO: 19686 - protein, 121 aa, Dehalogenimonas alkenigignens
  misc_feature (1)..(121): tr|A0A0W0GGF2|A0A0W0GGF2_9CHLR 6-carboxy-5,6,7,8-tetrah ydropterin synthase OS=Dehalogenimonas alkenigignens OX =1217799 GN=DEALK_04810 PE=3 SV=1
MYIVAVESHFDAAHYLRGYQGKCENLHGHRYRVAVKLSSKELDSVGLACDFGDVKSALKPILARYDHSLLNDVPPFNKINPSAENIARTIYEEIKPEIGGASLKAVTVWESPESSAEYTED

SEQ ID NO: 19687 - protein, 123 aa, Dehalogenimonas formicexedens
  misc_feature (1)..(123): tr|A0A1P8FAL1|A0A1P8FAL1_9CHLR 6-carboxy-5,6,7,8-tetrah ydropterin synthase OS=Dehalogenimonas formicexedens OX =1839801 GN=queD PE=3 SV=1
MYYIAVENHFDAAHFLRGYQGKCENLHGHRYKVAVKVSSATLNETGLVIDFREIKDALKPVIDRFDHTLLNDVPPFDQINPSAENLARTIFEAIKPAIHGAVLESVMVWESPESWAEYKPQVG

SEQ ID NO: 19688 - protein, 121 aa, Dehalogenimonas lykanthroporepellens
  misc_feature (1)..(121): tr|D8K2B5|D8K2B5_DEHLB 6-carboxy-5,6,7,8-tetrahydropter in synthase OS=Dehalogenimonas lykanthroporepellens (st rain ATCC BAA-1523 / JCM 15061 / BL-DC-9) OX=552811 GN= Dehly_1457 PE=3 SV=1
MYRISVESHFDSAHFLRGYGGKCEQLHGHRYRVMVKVAAAELDDTGLACDFTELKALLKPVLARYDHTLLNDVPPFDTINPSAENIARVIFEALAPEITGVQLESVTVWESPESSAEYRPD

SEQ ID NO: 19689 - protein, 124 aa, Dehalogenimonas sp.
  misc_feature (1)..(124): tr|A0A0F7GBS8|A0A0F7GBS8_9CHLR 6-carboxy-5,6,7,8-tetrah ydropterin synthase OS=Dehalogenimonas sp. WBC-2 OX=943 347 GN=queD PE=3 SV=1
MYYINVESHFDAAHFLRGYAGKCENLHGHRYKVAVKIASENLDDIGMAYDFTNLKAVLKPLLSRYDHTLLNDVPPFDKINPSAENIARAIYEALAPEIKGVRLESVTVWESPESCAEYRATNPT

SEQ ID NO: 19690 - protein, 121 aa, Dehalogenimonas sp.
  misc_feature (1)..(121): tr|A0A2P5P6K2|A0A2P5P6K2_9CHLR 6-carboxy-5,6,7,8-tetrah ydropterin synthase OS=Dehalogenimonas sp. GP OX=153664 8 GN=queD PE=3 SV=1
MYYITVENHFDAAHFLRGYVGKCENLHGHRYKVAVKLSSATLDEVGLAFDFRDLKNVLKPILNRLDHTLLNDVSPFDKINPSAENIARSIFKEVKAGIEGATLESVTVWESPESSAEYRED

SEQ ID NO: 19691 - protein, 136 aa, Deinococcus actinosclerus
  misc_feature (1)..(136): tr|A0A2Z3YXG7|A0A2Z3YXG7_9DEIO 6-carboxy-5,6,7,8-tetrah ydropterin synthase OS=Deinococcus actinosclerus OX=176 8108 GN=DM785_16080 PE=3 SV=1
MPWKLSSEFTFDSAHVITGYDGPCGRLHGHTYRVRMELTSDRLRPSAHVKRAIMVADFKTLKWAKKDVDVGGLDHAYLNDLPDLGDDTTAEVIAAYIHRKTMERVRADLPEGDDGADLRLHVTLWETPDSSCEYWE

SEQ ID NO: 19692 - protein, 136 aa, Deinococcus actinosclerus
  misc_feature (1)..(136): tr|A0A0U4BUB5|A0A0U4BUB5_9DEIO 6-carboxy-5,6,7,8-tetrah ydropterin synthase OS=Deinococcus actinosclerus OX=176 8108 GN=AUC44_15615 PE=3 SV=1
MPWKLSSEFTFDSAHVITGYDGPCGRLHGHTYRVRMELSSEKLRPSAHVKRAIMVADFKTLKWAKKDVDAGGLDHAYLNDLPDLGDDTTAEVIAAYLHRRTMDRVRADLPEGDDGADLRLHVTLWETPESSCEYWE

SEQ ID NO: 19693 - protein, 134 aa, Deinococcus cellulosilyticus
  misc_feature (1)..(134): tr|A0A511MZJ7|A0A511MZJ7_9DEIO 6-carboxy-5,6,7,8-tetrah ydropterin synthase OS=Deinococcus cellulosilyticus NBR C 106333 = KACC 11606 OX=1223518 GN=queD PE=3 SV=1
MPWKLVTEFTFDSAHVIVGYDGPCGRLHGHTYRVKMELQSEKLRPSAHVKRGIMVADFKTLKWAKKDVEKGGLDHAYLNDLLGDDTTAEVIVQHLYRKTLERIRENLPEGDDGSDLKLKVTLWETPESYCEYWE

SEQ ID NO: 19694 - protein, 149 aa, Deinococcus cellulosilyticus
  misc_feature (1)..(149): tr|A0A511MZX5|A0A511MZX5_9DEIO 6-carboxy-5,6,7,8-tetrah ydropterin synthase OS=Deinococcus cellulosilyticus NBR C 106333 = KACC 11606 OX=1223518 GN=queD PE=4 SV=1
MLTCIKEYKDIPFAHRQYRHEGHCAFIHGHNWNIKITFKAATLDQSGFVMDFGKLKPIRNWIDHHLDHACLLSSNDPLLDTLLAFNQQHHVFKLLVLEDVSCEGLAQHLWQVFSSILQQETGGRVAIHSIEVFENKSNAVVFTPQGVQG

SEQ ID NO: 19695 - protein, 136 aa, Deinococcus deserti
  misc_feature (1)..(136): tr|C1CXM4|C1CXM4_DEIDV 6-carboxy-5,6,7,8-tetrahydropter in synthase OS=Deinococcus deserti (strain VCD115 / DSM 17065 / LMG 22923) OX=546414 GN=Deide_00320 PE=3 SV=1
MPWTLRTEFTFDSAHVIAGYDGPCGRLHGHTYRVRMELTSSRLRPSAHVRRNIMVADFRTLKWAKKDVTGGGLDHTYLNDVPELGDDTTAEVIAAYIHRKTMERVRADLEPGDDGADLKLKVTLWETPDSSCEYWE

SEQ ID NO: 19696 - protein, 136 aa, Deinococcus gobiensis
  misc_feature (1)..(136): tr|H8GTZ1|H8GTZ1_DEIGI 6-carboxy-5,6,7,8-tetrahydropter in synthase OS=Deinococcus gobiensis (strain DSM 21396 / JCM 16679 / CGMCC 1.7299 / I-0) OX=745776 GN=DGo_CA27 04 PE=3 SV=1
MPWRLATEFTFDSAHTIVGYDGPCGRLHGHTYRVRLELTSDRLRPSAHVKRHIMVADFKTLKWAKKDVDAGGLDHAYLNDLPELGDDTTAEVIAAYIHRHTMARVRADLPGGDDGADLKLRVTLWETPDSSCEYWE

SEQ ID NO: 19697 - protein, 136 aa, Deinococcus grandis
  misc_feature (1)..(136): tr|A0A100HGC4|A0A100HGC4_9DEIO 6-carboxy-5,6,7,8-tetrah ydropterin synthase OS=Deinococcus grandis OX=57498 GN= DEIGR_100153 PE=3 SV=1
MPWKLTSEFTFDSAHVITGYDGPCGRLHGHTYRVRMELTSDRLRPSAHVKRAIMVADFKTLKWAKKDVDAGGLDHAYLNDFPELGDDTTAEVVAAYIHRRTMQRVRADLPEGDDGADLRLHVTLWETPDSSCEYWE

SEQ ID NO: 19698 - protein, 136 aa, Deinococcus indicus
  misc_feature (1)..(136): tr|A0A246BFR4|A0A246BFR4_9DEIO 6-carboxy-5,6,7,8-tetrah ydropterin synthase OS=Deinococcus indicus OX=223556 GN =CBQ26_18760 PE=3 SV=1
MPWKLSSEFTFDSAHVITGYDGPCGRLHGHTYRVRMELSSDRLRPSAHVKRAIMVADFKTLKWAKKDVDAGGLDHAYLNDLPDLGDDTTAEVIAAYIHRKTMDRVRADLPDGDDGADLRLHVTLWETPDSSCEYWE

SEQ ID NO: 19699 - protein, 136 aa, Deinococcus maricopensis
  misc_feature (1)..(136): tr|E8U3S3|E8U3S3_DEIML 6-carboxy-5,6,7,8-tetrahydropter in synthase OS=Deinococcus maricopensis (strain DSM 212 11 / LMG 22137 / NRRL B-23946 / LB-34) OX=709986 GN=Dei ma_3137 PE=3 SV=1
MPWQLSTEFTFDSAHTITGYDGPCGRLHGHTYRVRLQLQSDRLRPSAHVRRAIMVADFRTLKWAKKDVSQGGLDHAYLNDLPDLGDDTTAEVIAAYLHRETLRRLRDALEPGDDGADLQLRVTLWETPDSACEYWE

SEQ ID NO: 19700 - protein, 136 aa, Deinococcus peraridilitoris
  misc_feature (1)..(136): tr|L0A460|L0A460_DEIPD 6-carboxy-5,6,7,8-tetrahydropter in synthase OS=Deinococcus peraridilitoris (strain DSM 19664 / LMG 22246 / CIP 109416 / KR-200) OX=937777 GN=D eipe_2337 PE=3 SV=1
MPWKLSTEFTFDSAHTIVGYDGPCGRLHGHTYRVRLELQSGRLRPSAHVKRNIMVADYRTLKWAKKDVEAGGLDHAYLNDIAELGDDTTAEVIAQFIHCHTLQRVREALEAGDDGADLQLKVTVWETPDSACEYWE

SEQ ID NO: 19701 - protein, 136 aa, Deinococcus proteolyticus
  misc_feature (1)..(136): tr|F0RP01|F0RP01_DEIPM 6-carboxy-5,6,7,8-tetrahydropter in synthase OS=Deinococcus proteolyticus (strain ATCC 3 5074 / DSM 20540 / JCM 6276 / NBRC 101906 / NCIMB 13154 / VKM Ac-1939 / CCM 2703 / MRP) OX=693977 GN=De
MPWKLSTEFTFDSAHIIEGYDGPCGRLHGHTYRVRMELQSDRLRPSAHVKRDIMVADFKSLKWAKKDVEQGGLDHMFLNEHPDLGSDTTAEVIAAFLHRETMRRIRENLAEGDDGADLHLRVFLWETPESCCEYWE

SEQ ID NO: 19702 - protein, 136 aa, Deinococcus radiophilus
  misc_feature (1)..(136): tr|A0A431W5S7|A0A431W5S7_9DEIO 6-carboxy-5,6,7,8-tetrah ydropterin synthase OS=Deinococcus radiophilus OX=32062 GN=EJ104_00990 PE=3 SV=1
MPWKLSTEFTFDSAHIIEGYDGPCGRLHGHTYRVRMELESERLRPSAHVRRGIMVADFKSLKWAKKDVDQGGLDHMFLNEHPELGDDTTAEVVAAYLHRETMRRIHADLEESDDGADLKLRVLLWETPESCCEYWE

SEQ ID NO: 19703 - protein, 136 aa, Deinococcus soli
  misc_feature (1)..(136): tr|A0A0F7JN50|A0A0F7JN50_9DEIO 6-carboxy-5,6,7,8-tetrah ydropterin synthase OS=Deinococcus soli Cha et al. 2016 OX=1309411 GN=SY84_08625 PE=3 SV=1
MPWKLSSEFTFDSAHVITGYDGPCGRLHGHTYRVRMELTSDRLRPSAHVKRAIMVADFKTLKWAKKDVDAGGLDHAYLNDLPDLGDDTTAEVIAAYLHRRTMDRVRADLPGGDDGADLRLHVTLWETPDSSCEYWE

SEQ ID NO: 19704 - protein, 136 aa, Deinococcus sp.
  misc_feature (1)..(136): tr|A0A418REK7|A0A418REK7_9DEIO 6-carboxy-5,6,7,8-tetrah ydropterin synthase OS=Deinococcus sp. RM OX=2316359 GN =D3W47_00730 PE=3 SV=1
MPWKLSSEFTFDSAHVITAYDGPCGRLHGHTYRVRMELTSEKLRPSAHVKRAIMVADFKTLKWAKKDVDAGGLDHAYLNALPDLGDDTTAEVIAAYIHRKTMDRVRADLPDGDEGADLRLHVTLWETPDSSCEYWE

SEQ ID NO: 19705 - protein, 136 aa, Deinococcus sp.
  misc_feature (1)..(136): tr|A0A1T1BDC2|A0A1T1BDC2_9DEIO 6-carboxy-5,6,7,8-tetrah ydropterin synthase OS=Deinococcus sp. LM3 OX=1938608 G N=BXU09_06355 PE=3 SV=1
MPWKLSSEFTFDSAHVITGYDGPCGRLHGHTYRVRMELTSDRLRPSAHVKRAIMVADFKTLKWAKKDIDAGGLDHAYLNDIPELGDDTTAEVVAAYIHRHTMKRVRADLPEGDDGADLRLHVTLWETPDSSCEYWE

SEQ ID NO: 19706 - protein, 136 aa, Deinococcus yavapaiensis
  misc_feature (1)..(136): tr|A0A318S5A3|A0A318S5A3_9DEIO 6-carboxy-5,6,7,8-tetrah ydropterin synthase OS=Deinococcus yavapaiensis KR-236 OX=694435 GN=DES52_112106 PE=3 SV=1
MPWKLTTEFTFDSAHTITGYDGPCGRLHGHTYRVRIELQSDRLRPSAHVKRNIMVADFKTLKWPKKDVDAGGLDHAYLNDLPALGDDTTAEVIAAFIHHETMRRVRFDLPEGDDGADLRLKVTVWETPDSACEYWE

SEQ ID NO: 19707 - protein, 121 aa, Delftia acidovorans
  misc_feature (1)..(121): tr|S2WFH1|S2WFH1_DELAC 6-carboxy-5,6,7,8-tetrahydropter in synthase OS=Delftia acidovorans CCUG 274B OX=883101 GN=HMPREF9701_04463 PE=3 SV=1
MQFTVHQRFFFDAAHTLERAIETESSRRIHGHTYYAEVSVTGPRNPDNGMVIDLGYLRSRLKTLGDALDHRFLDEIPGLGKPTLENLCLFIADSLADLQPAPSRIRVWRDSIGDGCVLDLG

SEQ ID NO: 19708 - protein, 121 aa, Delftia acidovorans; identical to SEQ ID NO: 19707
  misc_feature (1)..(121): tr|A0A2W5H015|A0A2W5H015_DELAC 6-carboxy-5,6,7,8-tetrah ydropterin synthase OS=Delftia acidovorans OX=80866 GN= DI604_12080 PE=3 SV=1

SEQ ID NO: 19709 - protein, 121 aa, Delftia lacustris; identical to SEQ ID NO: 19707
  misc_feature (1)..(121): tr|A0A1H3RRK1|A0A1H3RRK1_9BURK 6-carboxy-5,6,7,8-tetrah ydropterin synthase OS=Delftia lacustris OX=558537 GN=S AMN05421547_116114 PE=3 SV=1

SEQ ID NO: 19710 - protein, 121 aa, Delftia sp.; identical to SEQ ID NO: 18545
  misc_feature (1)..(121): tr|A0A031HMY3|A0A031HMY3_9BURK 6-carboxy-5,6,7,8-tetrah ydropterin synthase OS=Delftia sp. RIT313 OX=1468410 GN =BW39_04733 PE=3 SV=1

SEQ ID NO: 19711 - protein, 121 aa, Delftia sp.; identical to SEQ ID NO: 18545
  misc_feature (1)..(121): tr|A0A1C7LG28|A0A1C7LG28_9BURK 6-carboxy-5,6,7,8-tetrah ydropterin synthase OS=Delftia sp. JD2 OX=469553 GN=ACM 14_11090 PE=3 SV=1

SEQ ID NO: 19712 - protein, 121 aa, Delftia tsuruhatensis; identical to SEQ ID NO: 19707
  misc_feature (1)..(121): tr|A0A072T7B0|A0A072T7B0_9BURK 6-carboxy-5,6,7,8-tetrah ydropterin synthase OS=Delftia tsuruhatensis OX=180282 GN=BI380_15475 PE=3 SV=1

SEQ ID NO: 19713 - protein, 154 aa, Unknown
  misc_feature (1)..(154): tr|Q1NNT9|Q1NNT9_9DELT Uncharacterized protein OS=delta proteobacterium MLMS-1 OX=262489 GN=MldDRAFT_3224 PE=4 SV=1
MNSWRGIPKGSSRLFFVMTAKKTGEAMYTLGVNRSFSARHRLIGGDWGEESITHAHCYRLEVALDGPELNEHGFLVDIVELAGNLDLVQEAYEDRILNDLPEFAGLNPSIENLARLIWQRLSQLPASDKLLSMSVTVWEDDQAWASFQSKLPCG

SEQ ID NO: 19714 - protein, 125 aa, Unknown
  misc_feature (1)..(125): tr|A0A1V4MQ64|A0A1V4MQ64_9DELT 6-carboxy-5,6,7,8-tetrah ydropterin synthase OS=delta proteobacterium MLS_D OX=1 775673 GN=AVO39_00375 PE=3 SV=1
MYTVTIRRTFSAAHTIAIGGVKEAMHGHNFAVEISLESMELDGDGVVVDFRTVKNHADIVLKEMDHSYLNDLTFFKTIPPTSENIARHIFERMEKACASQNAVLSQVTVWESESARATYRRGNRG

SEQ ID NO: 19715 - protein, 152 aa, Deltaproteobacteria bacterium
  misc_feature (1)..(152): tr|A0A2D5G440|A0A2D5G440_9DELT 6-pyruvoyl tetrahydropte rin synthase OS=Deltaproteobacteria bacterium OX=202673 5 GN=CL913_05790 PE=4 SV=1
  misc_feature (67)..(68): Xaa can be any naturally occurring amino acid
  misc_feature (90)..(90): Xaa can be any naturally occurring amino acid
  misc_feature (95)..(95): Xaa can be any naturally occurring amino acid
  misc_feature (125)..(125): Xaa can be any naturally occurring amino acid
MGQYIYTCTKQYFNLPCAHRQHAHQGHCSQIHGYSRSFKFHFACKELDTNHFVFDFGELKELKEHLXXMCDHTLLINKQDPYLETFEGMXEKGLXKLRVVENCGAEGMARYFLEFADELVRRKSXSRAWCYKVIQWENDKNSGIAEYIPSQR

SEQ ID NO: 19716 - protein, 69 aa, Deltaproteobacteria bacterium
  misc_feature (1)..(69): tr|A0A2N2I3L3|A0A2N2I3L3_9DELT Uncharacterized protein (Fragment) OS=Deltaproteobacteria bacterium HGW-Deltapr oteobacteria-20 OX=2013748 GN=CVU63_15600 PE=4 SV=1
KRYVIPSDEVLWLPVENVVVESLAEYLWGRLEDELHADMVAAGVDMLEVTVTEAPGQGASHRCAPRGGR

SEQ ID NO: 19717 - protein, 126 aa, Dendrosporobacter quercicolus
  misc_feature (1)..(126): tr|A0A1G9M0U8|A0A1G9M0U8_9FIRM 6-carboxy-5,6,7,8-tetrah ydropterin synthase OS=Dendrosporobacter quercicolus OX =146817 GN=SAMN04488502_101527 PE=3 SV=1
MYELTVSVDFEAAHRIVDYPGKCDRLHGHNWLVEVTVAGQKLNELGMLIDFKELKAEVNQVINQLDHIYLNELEAFQVENPTAENIARYIYTALRKRPVLAQRVSVRKVKVWESPKSAVTYHEDDR

SEQ ID NO: 19718 - protein, 146 aa, Denitratisoma sp.
  misc_feature (1)..(146): tr|A0A518U7X2|A0A518U7X2_9PROT 6-carboxy-5,6,7,8-tetrah ydropterin synthase OS=Denitratisoma sp. DHT3 OX=198188 0 GN=queD PE=3 SV=1
MQITRRLEFDAGHRIPNHRSQCRHLHGHRYVLEVTLSGDVMQQAGSPEEGMVMDFSDVKAIAKAHLVDLWDHAFLAYRHDKAVVEFLASLPDHKTVLLDAIPTAENLAKQAFSILAPLYRDNYGNRLRLERIRIYETPNCWADMTA

SEQ ID NO: 19719 - protein, 142 aa, Denitrobacterium detoxificans
  misc_feature (1)..(142): tr|A0A172RY43|A0A172RY43_9ACTN 6-pyruvoyltetrahydropter in/6-carboxytetrahydropterin synthase OS=Denitrobacteri um detoxificans OX=79604 GN=SAMN02910314_01610 PE=4 SV= 1
MYGLKTESCFDSAHFLSDYYGKCENLHGHRWKVVAYLRQPSLRTQGTMRDMVVDFGEFKKAVRELTEAFDHTFLVEEGTLSDATIEALRGEGFAPTIVPFRTTAENLARHFYDSLAAKGFPVSQIDCYETPLNCASYFGEGE

SEQ ID NO: 19720 - protein, 289 aa, Denitrobacterium detoxificans
  misc_feature (1)..(289): tr|A0A1H8TJX5|A0A1H8TJX5_9ACTN Ribonuclease HI OS=Denit robacterium detoxificans OX=79604 GN=SAMN02910314_01574 PE=4 SV=1
MSTGVLYIDGASHGNPGPSACAFALLSESGGEVSHGAWYLGDATNNIAAYMALIWGMQNALASGFTAVDVRCDSQLVALQMGGALKVKTADLVPLYRKASDLAGRFESFSITRIRRAENHALNELACEALDERSHSGSYAVPLDAGQDTLFQVRDEAESPIESVFSPDASFLYKGGYYELTIKSRFEQITPTGDPVTWSVEARVSSEELDAQGRVISLGTMQQMLADVIDGLDGADLSRQEPFDALPATMEHLARVIFWRLDPALPPRVQLDEVGIWSSAIGAKIVYRP

SEQ ID NO: 19721 - protein, 151 aa, Denitromonas halophilus
  misc_feature (1)..(151): tr|A0A557RL65|A0A557RL65_9RHOO 6-carboxytetrahydropteri n synthase QueD OS=Denitromonas halophilus OX=1629404 G N=queD PE=4 SV=1
MRITRRLEFDAGHRIPDHASQCKHLHGHRYVIEITLTGDIIQADGNPANGMVMDFGDIKRIAKTHLVDQWDHAFLAYRGDAPIVDFLASLPDHKTVLLDAVPTAENLVVIAFRILDAQYKDSFGNHLRLERVRLYETPNCWADATRDMVQA

SEQ ID NO: 19722 - protein, 151 aa, Denitromonas halophilus
  misc_feature (1)..(151): tr|A0A557QJX8|A0A557QJX8_9RHOO 6-carboxytetrahydropteri n synthase QueD OS=Denitromonas halophilus OX=1629404 G N=queD PE=4 SV=1
MRITRRLEFDAGHRIPDHASQCKHLHGHRYVIEITLTGDIIQADGNPANGMVMDFGDIKRIAKTHLVDQWDHAFLAYRGDAPIVDFLASLPNHKTVLLDAVPTAENLVVIAFRILDAHYTDSFGNHLRLERVRLYETPNCWADATRDMVQA

SEQ ID NO: 19723 - protein, 122 aa, Denitrovibrio acetiphilus
  misc_feature (1)..(122): tr|D4H7Z0|D4H7Z0_DENA2 6-carboxy-5,6,7,8-tetrahydropter in synthase OS=Denitrovibrio acetiphilus (strain DSM 12 809 / N2460) OX=522772 GN=Dacet_1367 PE=3 SV=1
MYKVRVVMSFGGAHNLRNYNGKCENLHGHNWKVEAYLKGDELNETEMLVDFTIMKKRLKEILETLDHKYLNEQVEFFKVNNPTSENIARYIYQGLKETFGKLTDRVAVWETDIQAAEYWEQE

SEQ ID NO: 19724 - protein, 122 aa, Denitrovibrio sp.
  misc_feature (1)..(122): tr|A0A2N6D222|A0A2N6D222_9BACT 6-carboxy-5,6,7,8-tetrah ydropterin synthase OS=Denitrovibrio sp. OX=2053308 GN= queD PE=3 SV=1
MYRVRAVMSFGGAHNLRNYNGKCENLHGHNWKVEAYLKGDSLDETGMLVDFSVLKKRLKEILDTLDHKYLNDEVVFFRSNNHTSENIAKYIFTEMKETFGSLTDRVVVWETDIQAAEYWEND

SEQ ID NO: 19725 - protein, 122 aa, Denitrovibrio sp.
  misc_feature (1)..(122): tr|A0A2N6DDF6|A0A2N6DDF6_9BACT 6-carboxy-5,6,7,8-tetrah ydropterin synthase OS=Denitrovibrio sp. OX=2053308 GN= queD PE=3 SV=1
MYRVRVVMSFNGAHNLRNYNGKCENLHGHNWKVEAYLKGNELNETEMLVDFTILKKRLKEILETLDHKYLNEEVPFFVEHNPTSENISKYIYTCLKETFGELTDRVVVWETDIQAAEYWEND

SEQ ID NO: 19726 - protein, 126 aa, Desertifilum sp.
  misc_feature (1)..(126): tr|A0A1E5QLY9|A0A1E5QLY9_9CYAN 6-carboxy-5,6,7,8-tetrah ydropterin synthase OS=Desertifilum sp. IPPAS B-1220 OX =1781255 GN=BH720_09620 PE=3 SV=1
MDEWIIYKEFRFEAAHHLPHHDGKCRRLHGHSWVGRVYVRGNTLVKSGPKQGMLIDYGEIKQYIQPLLEDYLDHHYLNETTGLENPTSEAIAQWIYNRLEAAKLPGLYAVEIQETCTSGCRYQKLT

SEQ ID NO: 19727 - protein, 290 aa, Desertifilum sp.
  misc_feature (1)..(290): tr|A0A1E5QLH0|A0A1E5QLH0_9CYAN 6-pyruvoyl tetrahydropte rin synthase OS=Desertifilum sp. IPPAS B-1220 OX=178125 5 GN=BH720_09030 PE=4 SV=1
MKCIITRRAQFSASHRYWLPELSEAENQQKFGPTSRSPGHGHNYVLFVYMEGELDEYGMVLNLSEVKHVIKSEVTSQLDFSFLNEAWPEFQQTLPTTEHIAQAIWKRLSPHLPLVRIQLYEHPELWADYLGEGMEAYLTISTHFSAAHRLARPDLSFEENCEIYGKCARPHGHGHNYHLEVTVKGQIDPRTGMIADLAAVQKAIDEHVVEPFDHTFLNKDIPYFAEVVPTAENIAVHIRELLQQPIRETGAKLHKVKLIESPNNACEVYCTEPNEAATSSQQREAILASV

SEQ ID NO: 19728 - protein, 158 aa, Desmospora activa
  misc_feature (1)..(158): tr|A0A2T4Z6T9|A0A2T4Z6T9_9BACL PreQ(0) biosynthesis pro tein QueD OS=Desmospora activa DSM 45169 OX=1121389 GN= C8J48_0159 PE=4 SV=1
MDFQIPERVERFGVDIQREELRYHRKRVAVTKSFTFDAAHHLHLYEGKCKNLHGHTYRLVISISGFVDDVGIAVDFGDIKRMYQEEIKARLDHRYLNEVLPNMNTTAENMIVWIWERLDERLVQEGLKKRGHRLEELVLYETPTSYATLRREWMEGDE

SEQ ID NO: 19729 - protein, 161 aa, Desmospora sp.
  misc_feature (1)..(161): tr|F5SDR0|F5SDR0_9BACL 6-pyruvoyltetrahydropterin synth ase OS=Desmospora sp. 8437 OX=997346 GN=ptpS PE=4 SV=1
MEFRIPERVERLGVDIGRHELRYHRKRVAVTREFTFDAAHHLHLYEGKCKNLHGHTYRLVITVSGFVDEVGIAVDFGEIKRMYKEEVEARLDHRYLNEVLPNMNTSAENIIVWIWEVLDDRLERDGWKKRGHRLEELVLYETPTSRATMKREWMEAEESDE

SEQ ID NO: 19730 - protein, 162 aa, Desulfacinum hydrothermale
  misc_feature (1)..(162): tr|A0A1W1XMX6|A0A1W1XMX6_9DELT PreQ(0) biosynthesis pro tein QueD OS=Desulfacinum hydrothermale DSM 13146 OX=11 21390 GN=SAMN02746041_02238 PE=4 SV=1
MAIDKGKAIEFNGRNCSKEKDFDCVHGVRPSPRDEKLMYEVKIVTDFAAAHNLRNFRGRCENLHGHNWKVEVVVRGDRLDQAGVLLDFGELKQATRQVLQQVDHQYLNDLPYFKERNPSSEHIARFLFESLAARINGDHRWVFSVSAWESKDSCATYYGESR

SEQ ID NO: 19731 - protein, 125 aa, Desulfacinum infernum
  misc_feature (1)..(125): tr|A0A1M5C6R9|A0A1M5C6R9_9DELT 6-carboxy-5,6,7,8-tetrah ydropterin synthase OS=Desulfacinum infernum DSM 9756 O X=1121391 GN=SAMN02745206_02124 PE=3 SV=1
MYEVKIVSDFAAAHNLRNFRGRCENLHGHNWKVEVVVRGDRLDDAGVLLDFGELKQATRDVLQLVDHQYLNDLPYFKERNPSSEYIARFLFENLSARVNGDHRWVHSVSAWESKDSCATYYGESR

SEQ ID NO: 19732 - protein, 137 aa, Desulfallas geothermicus
  misc_feature (1)..(137): tr|A0A1I6D4V2|A0A1I6D4V2_9FIRM 6-carboxy-5,6,7,8-tetrah ydropterin synthase OS=Desulfallas geothermicus DSM 366 9 OX=1121426 GN=SAMN05660706_105126 PE=3 SV=1
MTERMKYLLAPQNIASITKVFTFNSAHSLPNYPGHCKNVHGHTYRLEVTIRGPVNTETGMVMDFYDLKSLVKEHIIKKLDHCYLNDVLPYIPTAENIAIWICRSLQNKVPTLYKIKLWETPTSCVEVYVTDVQTSSM

SEQ ID NO: 19733 - protein, 151 aa, Desulfamplus magnetovallimortis
  misc_feature (1)..(151): tr|A0A1W1H816|A0A1W1H816_9DELT Related to 6-pyruvoyl te trahydropterin synthase OS=Desulfamplus magnetovallimor tis OX=1246637 GN=MTBBW1_1380072 PE=4 SV=1
MEARLINSPSLNIKKVDMLTITKEFLFDAAHKLWRSELSDDENHALYGKCSRFHGHTYRLRITVSGTVGPDGMIINFEKLKKLVTDSIIERYDHAYLNELEEYQDLPVTAENMVQYIFNVLASILYEEKVALESVVLYETPTSWATMTRDS

SEQ ID NO: 19734 - protein, 124 aa, Desulfamplus magnetovallimortis
  misc_feature (1)..(124): tr|A0A1W1HIX6|A0A1W1HIX6_9DELT 6-carboxy-5,6,7,8-tetrah ydropterin synthase OS=Desulfamplus magnetovallimortis OX=1246637 GN=ptpS PE=3 SV=1
MFELKIKTHFAAAHQLTMVGQKCENLHGHNWNIEVYVSGEKLNAAGVLVDFGDIKKEVRKIMEQLDHKFLNEIDAFKDAQPSSERIAIYIAEQLQPKLANFPEDVRVSRVSAWESDDACATYIP

SEQ ID NO: 19735 - protein, 122 aa, Desulfarculus baarsii
  misc_feature (1)..(122): tr|E1QE11|E1QE11_DESB2 6-carboxy-5,6,7,8-tetrahydropter in synthase OS=Desulfarculus baarsii (strain ATCC 33931 / DSM 2075 / VKM B-1802 / 2st14) OX=644282 GN=Deba_042 3 PE=3 SV=1
MFELMVTGRFAAAHSLRNFNGRCEALHGHNWKVEVVVYGDKLDKADLLMDFGELKKLMNQALDNLDHRHLNEVPPFDRLNPSSEQIARHIAQQVALGLPEHVRVRRVSAWESDDSRASYLPD

SEQ ID NO: 19736 - protein, 121 aa, Desulfarculus sp.
  misc_feature (1)..(121): tr|A0A3A6NMZ7|A0A3A6NMZ7_9DELT 6-carboxy-5,6,7,8-tetrah ydropterin synthase OS=Desulfarculus sp. OX=2093367 GN= queD PE=3 SV=1
MYRLSVTGRFAAAHNLRHFKGRCESLHGHNWKVEVVVEGRDLDQADLLLDFGELKRLLNLALDQLDHRHLNQVPPFDQRNPSSEMIAKHLYETIAAQLPPQVKMAEVSTWESEDSRATYLG

SEQ ID NO: 19737 - protein, 122 aa, Desulfatibacillum aliphaticivorans
  misc_feature (1)..(122): tr|B8FGI6|B8FGI6_DESAL 6-carboxy-5,6,7,8-tetrahydropter in synthase OS=Desulfatibacillum aliphaticivorans OX=21 8208 GN=Dalk_3205 PE=3 SV=1
MYELKVKTDFAAAHRLTLVGHKCENLHGHNWKVEVCIKGDGLDEGGVLMDFGVIKKSLRGIMEELDHKFLNELEMFSECPPSSENIARIIADKLGAAVNSDKARVYSVTAWESDNASATYIV

SEQ ID NO: 19738 - protein, 126 aa, Desulfatibacillum aliphaticivorans
  misc_feature (1)..(126): tr|B8FMW4|B8FMW4_DESAL 6-carboxy-5,6,7,8-tetrahydropter in synthase OS=Desulfatibacillum aliphaticivorans OX=21 8208 GN=Dalk_4150 PE=3 SV=1
MAGVFEIYVKTHFSAAHALTGYDGDCSRIHGHNWMVEVSIQCRKLDDVGIGIDFKDVKDAVEEITQGLDHCMLNDHPAFQSVNPTSENVAMFLYKQLGSHLNNEYTKVSRVKVFEAPGAGAAYWEE

SEQ ID NO: 19739 - protein, 126 aa, Desulfatibacillum alkenivorans
  misc_feature (1)..(126): tr|A0A1M6MMJ5|A0A1M6MMJ5_9DELT 6-carboxy-5,6,7,8-tetrah ydropterin synthase OS=Desulfatibacillum alkenivorans D SM 16219 OX=1121393 GN=SAMN02745216_02371 PE=3 SV=1
MAGVFEIYVKTHFSAAHALTGYDGDCSRIHGHNWMVEVSIQCRKLDNVGIGIDFKDVKDAVEEITQGLDHCMLNDHPAFQSVNPTSENVAMFLYKELGSHLNNKYTKVSRVKVFEAPGAGAAYWEE

SEQ ID NO: 19740 - protein, 123 aa, Desulfatibacillum alkenivorans
  misc_feature (1)..(123): tr|A0A1M6WRG1|A0A1M6WRG1_9DELT 6-carboxy-5,6,7,8-tetrah ydropterin synthase OS=Desulfatibacillum alkenivorans D SM 16219 OX=1121393 GN=SAMN02745216_04388 PE=3 SV=1
MYELKVKTDFAAAHRLTLVGHKCENLHGHNWKVEVCIKGDGLDEGGVLMDFGVIKKSLRGIMEELDHKFLNELDMFSDCPPSSENIARIIADKLGAAVNTDKARVYSVTAWESDNASATYIVQ

SEQ ID NO: 19741 - protein, 121 aa, Desulfatitalea sp.
  misc_feature (1)..(121): tr|A0A0F2QUP7|A0A0F2QUP7_9DELT 6-carboxy-5,6,7,8-tetrah ydropterin synthase OS=Desulfatitalea sp. BRH_c12 OX=16 29708 GN=VR64_17285 PE=3 SV=1
MFELKILTHFAAAHQLRLVAKKCENLHGHNWKVEVCVAGEKLNSAGVLIDFGELKAHVNEIVGTLDHKYLNDLEMFSGNPSSENIAVYIADALSERLAGTGIKISRVTTWESEDACATYSP

SEQ ID NO: 19742 - protein, 126 aa, Desulfitobacterium metallireducens
  misc_feature (1)..(126): tr|W0EBG6|W0EBG6_9FIRM 6-carboxy-5,6,7,8-tetrahydropter in synthase OS=Desulfitobacterium metallireducens DSM 1 5288 OX=871968 GN=DESME_14940 PE=3 SV=1
MKITKSFTFDAAHFLPNHKGKCSSMHGHTYRLEVTVLRENGKLIERGSDEGMVIDFSDLKAIVKAEIIDKVDHKLLNEVFPFRTTAENMAAHIFSVLTDKFQPLGVKVEKIKLYETPDSYAEVERA

SEQ ID NO: 19743 - protein, 124 aa, Desulfobacca acetoxidans
  misc_feature (1)..(124): tr|F2NGH8|F2NGH8_DESAR 6-carboxy-5,6,7,8-tetrahydropter in synthase OS=Desulfobacca acetoxidans (strain ATCC 70 0848 / DSM 11109 / ASRB2) OX=880072 GN=Desac_0711 PE=3 SV=1
MYELKVITQFAAAHRLDNFYGKCEALHGHNWKVEIFLRADGLDEAGLVMDFGKIKSRAHEILSEIDHTFLNELPAFKTQNPSSENIARYLFERLGAAINNDRVTVSRISVWESDNTSASYFLAG

SEQ ID NO: 19744 - protein, 126 aa, Desulfobacca sp.
  misc_feature (1)..(126): tr|A0A1F9PLQ6|A0A1F9PLQ6_9DELT 6-pyruvoyl tetrahydropte rin synthase OS=Desulfobacca sp. RBG_16_60_12 OX=179790 9 GN=A2139_02495 PE=4 SV=1
MHEYTLAVKRDFVARHYLVGGDWGAENELHSHYYQVEVQLEGRTLDKHGYLVDIVAVEAHLQELVAYYRDQSLNDLPEFAGLNPSIEHFARILCQEILSRVKEPLSAVMVKIWENDIAWASYREER

SEQ ID NO: 19745 - protein, 123 aa, Desulfobacca sp.
  misc_feature (1)..(123): tr|A0A1V4QP79|A0A1V4QP79_9DELT 6-carboxy-5,6,7,8-tetrah ydropterin synthase OS=Desulfobacca sp. 4484_104 OX=194 0691 GN=BZ151_00220 PE=3 SV=1
MYELKIITQFSAAHRLENFYGKCEALHGHNWKVEIFLGAASLDEVGLVRDFGKIKAAAREVLEEVDHTYLNELPAFQNQNPSSENLARYLFERLSPAINDDRVKVTRVAVWESDTSSAAYYLP

SEQ ID NO: 19746 - protein, 126 aa, Desulfobacter hydrogenophilus
  misc_feature (1)..(126): tr|A0A328FK83|A0A328FK83_9DELT 6-carboxy-5,6,7,8-tetrah ydropterin synthase OS=Desulfobacter hydrogenophilus OX =2291 GN=queD PE=3 SV=1
MPGIYDICVQDHFAAAHSLRGYDGNCSNLHGHNWVIEAHIRCTKLNQLGMGIDFRDVKGVVKDVLSKLDHTNLNEVAEFGSINPTAENLAKFLYSELSRRLNTEFIKVQKIMVFESPGCGSSYQEI

SEQ ID NO: 19747 - protein, 132 aa, Desulfobacter hydrogenophilus
  misc_feature (1)..(132): tr|A0A328FDL4|A0A328FDL4_9DELT 6-carboxy-5,6,7,8-tetrah ydropterin synthase OS=Desulfobacter hydrogenophilus OX =2291 GN=queD PE=3 SV=1
MFELKVKTRFAGAHQLAMVGRKCENLHGHNWQVEVYVKGDQLNDAGVLADFGDIKRAVRAVVDEELDHQFLNELPAFEDNQPTSELIAVYIAGKVQAYLDKNLDEKVVVSRVMAWESDDACAIYYPTPVVTQ

SEQ ID NO: 19748 - protein, 126 aa, Desulfobacter postgatei
  misc_feature (1)..(126): tr|I5AYI0|I5AYI0_9DELT 6-carboxy-5,6,7,8-tetrahydropter in synthase OS=Desulfobacter postgatei 2ac9 OX=879212 G N=DespoDRAFT_00255 PE=3 SV=1
MPGVYEICVQDHFAAAHSLRGYDGNCSNLHGHNWVVEAHIRCTKLNQLGMGIDFRDVKSVLKDVLSRLDHTNLNEIAEFGSINPTAENLAKFLYSELSRRLNTEFIKIQKIMVFESPSCGSSYQEI

SEQ ID NO: 19749 - protein, 132 aa, Desulfobacter postgatei
  misc_feature (1)..(132): tr|I5B2Q2|I5B2Q2_9DELT 6-carboxy-5,6,7,8-tetrahydropter in synthase OS=Desulfobacter postgatei 2ac9 OX=879212 G N=DespoDRAFT_01855 PE=3 SV=1
MFELKVKTRFAGAHQLAMVGRKCENLHGHNWQVEVYVKGDQLNDAGVLADFGDIKRAVRSVVDGELDHKFLNELPAFADTQPTSERIAIYIADKVQTYLDKNVDEKIVVSRVMAWESDDACAIYYPAPIVMK

SEQ ID NO: 19750 - protein, 126 aa, Desulfobacter sp.
  misc_feature (1)..(126): tr|A0A357YRA5|A0A357YRA5_9DELT 6-carboxy-5,6,7,8-tetrah ydropterin synthase OS=Desulfobacter sp. OX=2294 GN=que D PE=3 SV=1
MPGVYEICVQDHFAAAHSLRGYDGNCSNLHGHNWVVEAHIRCTKLNQLGMGIDFRDVKSVVKDVLSRLDHTNLNEIAEFGSINPTAENLAKFLYSELSRRLNTEFIKIQKIMVFESPSCGSSYQEI

SEQ ID NO: 19751 - protein, 132 aa, Desulfobacter sp.
  misc_feature (1)..(132): tr|A0A357YSI7|A0A357YSI7_9DELT 6-carboxy-5,6,7,8-tetrah ydropterin synthase OS=Desulfobacter sp. OX=2294 GN=que D PE=3 SV=1
MFELKVKTRFAAAHQLAMVGRKCENLHGHNWQVEVYVKGDQLNDAGVLADFGDIKRAVRSVVDGELDHKFLNELPAFADTQPTSERIAIYIADKVQTYLDKNVDEKIVVSRVMAWESDDACAIYYPAPIVMQ

SEQ ID NO: 19752 - protein, 125 aa, Desulfobacteraceae bacterium
  misc_feature (1)..(125): tr|A0A525D4R0|A0A525D4R0_9DELT 6-carboxy-5,6,7,8-tetrah ydropterin synthase OS=Desulfobacteraceae bacterium OX= 2049433 GN=queD PE=3 SV=1
MFELKVKTHFAAAHQLTMVGQKCENLHGHNWNVEVYVSGENLNEAGVLADFGDIKKAVRQIMTDLDHKFLNEIDAFAHAQPTSERIAVYIAEKLQAEMDQLAEEVKVTRVSAWESADACATYYPS

SEQ ID NO: 19753 - protein, 113 aa, Desulfobacteraceae bacterium
  misc_feature (1)..(113): tr|A0A1W9TUT1|A0A1W9TUT1_9DELT 6-carboxy-5,6,7,8-tetrah ydropterin synthase OS=Desulfobacteraceae bacterium 457 2_187 OX=1971620 GN=B6I30_04190 PE=3 SV=1
MVSKKCENLHGHNWKIEICVAGKTLNNTGVLVDFGELKQHVSEIMTRLDHKFLNELDYFNDDNPPSSENIARYIANSLQTLLNNSKIKVARVTAWESEDACATYFMGNPSLSF

SEQ ID NO: 19754 - protein, 122 aa, Desulfobacterales bacterium
  misc_feature (1)..(122): tr|A0A1E7GL23|A0A1E7GL23_9DELT 6-carboxy-5,6,7,8-tetrah ydropterin synthase OS=Desulfobacterales bacterium S373 0MH5 OX=1869298 GN=BA861_10265 PE=3 SV=1
MYELKVITHFSAAHQLRNFEGACEDLHGHNWKIEVYVTSEALSEAGIVVDFRILKKYVKDILATLDHKFLNELEPFKSQNPSSENIARYMADQLALLLQDPQIKVSRVTAWESETSCATYYP

SEQ ID NO: 19755 - protein, 123 aa, Desulfobacterales bacterium
  misc_feature (1)..(123): tr|A0A2H0A9J9|A0A2H0A9J9_9DELT 6-carboxy-5,6,7,8-tetrah ydropterin synthase OS=Desulfobacterales bacterium CG23 _combo_of_CG06-09_8_20_14_all_51_8 OX=1973983 GN=queD P E=3 SV=1
MYELKVVSRFAAAHQLKMVAEKCENLHGHNWRVEVYVAGPELNSAGVLMDFGEIKAHLREIINTLDHKFLNELAFLKNGNPSSENIARYIAQTLSAKIDTPGVRVSRIGVWESDDCCATYIIP

SEQ ID NO: 19756 - protein, 127 aa, Desulfobacterium autotrophicum
  misc_feature (1)..(127): tr|C0QLV0|C0QLV0_DESAH 6-carboxy-5,6,7,8-tetrahydropter in synthase OS=Desulfobacterium autotrophicum (strain A TCC 43914 / DSM 3382 / HRM2) OX=177437 GN=ptpS PE=3 SV= 1
MFELKVKTHFAAAHKLAMVGEKCENLHGHNWDVEVYVAGEQLNEAGVLVDFGVIKGFVRKIMKELDHKYLNELDAFADVQPSSEQIAIYIANRLKPSLKGFHPPVRVSRVSAWESANACATYILPAE

SEQ ID NO: 19757 - protein, 134 aa, Desulfobacterium vacuolatum
  misc_feature (1)..(134): tr|A0A1W2A6Z1|A0A1W2A6Z1_9DELT 6-carboxy-5,6,7,8-tetrah ydropterin synthase OS=Desulfobacterium vacuolatum DSM 3385 OX=1121400 GN=SAMN02746065_104204 PE=3 SV=1
MLTITRQFKFDAAHRLFLKNLTHRENHDIFGKCSKVHGHTYCLKITISGKVQPTGMILNFTDLKRIVETRIIDRYDHSFLNDLDEYKDLPTTAENMALYIFKALSPCLKSRDLTLTRVVLYETPDSWATVTSDV

SEQ ID NO: 19758 - protein, 129 aa, Desulfobacterium vacuolatum
  misc_feature (1)..(129): tr|A0A1W1ZTI4|A0A1W1ZTI4_9DELT 6-carboxy-5,6,7,8-tetrah ydropterin synthase OS=Desulfobacterium vacuolatum DSM 3385 OX=1121400 GN=SAMN02746065_103166 PE=3 SV=1
MFELKVKTDFAAAHQLTMVGEKCENLHGHNWNVEVYVAGEHLNAAGVLVDFGDIKKHVRAIMKELDHKFLNELDAFKGIQPSSEQIAIYIANRLQGYLKDDKLDETVRVSRVSAWESADACATYIPPQD

SEQ ID NO: 19759 - protein, 126 aa, Desulfobacula phenolica
  misc_feature (1)..(126): tr|A0A1H2IE89|A0A1H2IE89_9DELT 6-carboxy-5,6,7,8-tetrah ydropterin synthase OS=Desulfobacula phenolica OX=90732 GN=SAMN04487931_108104 PE=3 SV=1
MPGVYEIYVKDHFAAAHVLKGYDGNCSNMHGHNWIVEAYIQCTKLDHLGMGIDFMDVKSAVTDVLSKLDHTTLNDLPEFCNMNPTSENVAKILYTQLSRRLNTEHITVTKVMVFESPGCGSSYREV

SEQ ID NO: 19760 - protein, 127 aa, Desulfobacula phenolica
  misc_feature (1)..(127): tr|A0A1H2DV57|A0A1H2DV57_9DELT 6-carboxy-5,6,7,8-tetrah ydropterin synthase OS=Desulfobacula phenolica OX=90732 GN=SAMN04487931_102225 PE=3 SV=1
MFELKVKTRFAGAHQLTMVGQKCENLHGHNWHIEVCVKGEKLNSAGVLADFGDIKKAVRQIVKGELDHKFLNELEIFEGKQPTSERIAVYIAQRVQVLLDQSLDNDVKVSKVMAWESDDACATYFAG

SEQ ID NO: 19761 - protein, 126 aa, Desulfobacula sp.
  misc_feature (1)..(126): tr|A0A1F9NAT3|A0A1F9NAT3_9DELT 6-carboxy-5,6,7,8-tetrah ydropterin synthase OS=Desulfobacula sp. GWF2_41_7 OX=1 797910 GN=A2097_15830 PE=3 SV=1
MFELKVKSHFSGAHQLTMVGQKCENLHGHNWNVEVCVTGEKLNSAGVLADFGDIKKAVRKVVDEELDHKFLNDLEIFKGVQPTSERIAIYIAERVQAMLSQELSEEVRVSKVMAWESEDACATYIP

SEQ ID NO: 19762 - protein, 126 aa, Desulfobacula sp.
  misc_feature (1)..(126): tr|A0A1F9NBI2|A0A1F9NBI2_9DELT 6-carboxy-5,6,7,8-tetrah ydropterin synthase OS=Desulfobacula sp. GWF2_41_7 OX=1 797910 GN=A2097_13295 PE=3 SV=1
MPGVYEIYVKDHFAAAHALKGYDGNCSNLHGHNWIIEAYIQCKKLNKLGIGIDFRDVKTVLKDVLGKLDHTNLNDIAEFGAINPTSENLSKFLYSELSLRLNTDYIKVKKIMVFESPGCGSAYWEE

SEQ ID NO: 19763 - protein, 126 aa, Desulfobacula toluolica
  misc_feature (1)..(126): tr|K0NBU6|K0NBU6_DESTT 6-carboxy-5,6,7,8-tetrahydropter in synthase OS=Desulfobacula toluolica (strain DSM 7467 / Tol2) OX=651182 GN=queD PE=3 SV=1
MPGVYEIYVKDHFAAAHVLKGYDGNCSNMHGHNWIVEAYIQCTKLDHLGMGIDFMDVKSAVTDVLSKLDHTTLNDLPEFCNMNPTSENVAKFLYTQLSRHLNTEHITVTKVMVFESPGCGSSYREV

SEQ ID NO: 19764 - protein, 127 aa, Desulfobacula toluolica
  misc_feature (1)..(127): tr|K0NSA5|K0NSA5_DESTT 6-carboxy-5,6,7,8-tetrahydropter in synthase OS=Desulfobacula toluolica (strain DSM 7467 / Tol2) OX=651182 GN=ptpS PE=3 SV=1
MFELKVKTRFAGAHQLTMVGQKCENLHGHNWHIEVCVKGEKLNSAGVLADFGDIKKAVRQIVKGELDHKFLNELEIFDGKQPTSERIAVYIAQRVQFLLDQSLDNDVKVSKVMAWESDDACATYFAG

SEQ ID NO: 19765 - protein, 138 aa, Desulfobotulus alkaliphilus
  misc_feature (1)..(138): tr|A0A562RW57|A0A562RW57_9DELT 6-carboxy-5,6,7,8-tetrah ydropterin synthase OS=Desulfobotulus alkaliphilus OX=6 22671 GN=LZ24_01474 PE=3 SV=1
MLSITREFRFEAAHRLALAHLTDEENTEIFGPCARIHGHSYRLRVTLSGTTNAFGWILNFSELKKIVYQHVLSEYDHACLNELHDYRNDIPTAENMAKTIFRRLEPHLQGPNYRLLRICVHETENAWASWEADHALCS

SEQ ID NO: 19766 - protein, 124 aa, Desulfobotulus alkaliphilus
  misc_feature (1)..(124): tr|A0A562S3U6|A0A562S3U6_9DELT 6-carboxy-5,6,7,8-tetrah ydropterin synthase OS=Desulfobotulus alkaliphilus OX=6 22671 GN=LZ24_00611 PE=3 SV=1
MYELRVRGDFAAAHQLHNVTEKCENLHGHNFDVEAAVEGKELNEAHVLMDFGLLKKHLREILASLDHCFLNEHPAFAGKNASSENIARFIAENLSERLLPLGGGVRVRRVRVWESARASAAYYP

SEQ ID NO: 19767 - protein, 123 aa, Desulfobulbaceae bacterium
  misc_feature (1)..(123): tr|A0A1W9M6D2|A0A1W9M6D2_9DELT 6-carboxy-5,6,7,8-tetrah ydropterin synthase OS=Desulfobulbaceae bacterium A2 OX =1934250 GN=BWK76_14485 PE=3 SV=1
MFDVFITTHFAGAHHLRDYPGDCERPHGHNWQIEVRVRAEALDSLGMGIDFKELKRRVKAVIDELDHRDLNEHPAFRERNPSSEHIAVFLFQRLRDALQHERYRLHAITVRETDSSGVTYYGP

SEQ ID NO: 19768 - protein, 125 aa, Desulfobulbaceae bacterium
  misc_feature (1)..(125): tr|A0A0F2NQS3|A0A0F2NQS3_9DELT 6-pyruvoyl tetrahydropte rin synthase OS=Desulfobulbaceae bacterium BRH_c16a OX= 1629713 GN=VR65_00510 PE=4 SV=1
MYSLGVRRQFSARHYLIDGDWGEENIEHSHLYRMELVLHGKELDRHGFLADIVEVERHLDDVTAGFREKTFNSLPAFAGSNPSIERLAAVLHDIFRKRFESFRLEAITVTIWEDDIAWTSYHDTL

SEQ ID NO: 19769 - protein, 122 aa, Desulfobulbus propionicus
  misc_feature (1)..(122): tr|A0A2G6MI46|A0A2G6MI46_9DELT 6-carboxy-5,6,7,8-tetrah ydropterin synthase OS=Desulfobulbus propionicus OX=894 GN=queD PE=3 SV=1
MDIFIKTHFSGGHHLRDYPGSCEKPHGHNWKIKVTVRASELDHLGMGIDFRTLKHEVGKVVDELDHCDLNEHPAFASINPSSEHIAIFLFEKLEEVLKTDRYQLYAVEVRETDTSGVIYYGQ

SEQ ID NO: 19770 - protein, 124 aa, Desulfobulbus propionicus
  misc_feature (1)..(124): tr|A0A2G6MCT7|A0A2G6MCT7_9DELT 6-carboxy-5,6,7,8-tetrah ydropterin synthase OS=Desulfobulbus propionicus OX=894 GN=queD PE=3 SV=1
MFDIFIQTHFSGGHHLREYPGTCEQPHGHNWKVKVTVRAHQLDELGMGIDFKVLKKKVNSVIDTLDHCDLNQHPAFLQRNPSSEHIAQYIFDQLRPQLVSHRYRIHSVEVRETDTSGVIYHPNP

SEQ ID NO: 19771 - protein, 123 aa, Desulfobulbus sp.
  misc_feature (1)..(123): tr|A0A0A2HW67|A0A0A2HW67_9DELT 6-carboxy-5,6,7,8-tetrah ydropterin synthase OS=Desulfobulbus sp. Tol-SR OX=1536 652 GN=JT06_04815 PE=3 SV=1
MFDIFVKTHFAGAHHLRDYPGECENPHGHNWKVEVAVRATELDELGMGIDFKLLKNIVKVAIDKLDHRDLNNMAIFKDVNPSSENIARFLFSELKGPLTHDRYSLCSVTVHETDTSGLTYYGP

SEQ ID NO: 19772 - protein, 71 aa, Desulfobulbus sp.
  misc_feature (1)..(71): tr|A0A432QIC3|A0A432QIC3_9DELT Uncharacterized protein OS=Desulfobulbus sp. OX=895 GN=DSY58_01290 PE=4 SV=1
MIDIFIKTHFSGGHHLRDYPGTCERPHGHNWKVKVQVRATSLDQLGMGIDFKTLKKQLSSVPVLTQCSSNK

SEQ ID NO: 19773 - protein, 123 aa, Desulfocapsa sp.
  misc_feature (1)..(123): tr|A0A432QNS7|A0A432QNS7_9DELT 6-carboxy-5,6,7,8-tetrah ydropterin synthase OS=Desulfocapsa sp. OX=2066021 GN=D SY80_10295 PE=3 SV=1
MIDIFIKTHFSGGHHLRDYPGNCEHPHGHNWKIKVLVRAHGLDKLGMGLDFKILKKQVNLVIDDLDHCDLNKHPAFLDRNPSSENIAIFIFNSLQDKLKTDRYQLYSVQVQETDSSGVIYYGA

SEQ ID NO: 19774 - protein, 126 aa, Desulfocapsa sp.
  misc_feature (1)..(126): tr|A0A432R3Z1|A0A432R3Z1_9DELT 6-carboxy-5,6,7,8-tetrah ydropterin synthase OS=Desulfocapsa sp. OX=2066021 GN=q ueD PE=3 SV=1
MYDIFIKTHFAGAHHLRNYPGDCENPHGHNWKIRVTVRASSVDELGMGIDFKVLKKIVNKAVDELDHRDLNKHPAFQDRNPSSEHIAAFLFDTLRPDLEHDRYALYSVEVWETDSSGLIYYGADAK

SEQ ID NO: 19775 - protein, 126 aa, Desulfocapsa sulfexigens
  misc_feature (1)..(126): tr|M1PTT0|M1PTT0_DESSD 6-carboxy-5,6,7,8-tetrahydropter in synthase OS=Desulfocapsa sulfexigens (strain DSM 105 23 / SB164P1) OX=1167006 GN=UWK_03234 PE=3 SV=1
MYDIFIKTHFAGAHHLRNYPGDCENPHGHNWKIKVTVRATQVDELGMGIDFKVLKKIVNTAVDMLDHRDLNEHPAFQDRNPSSEHIAAFLYDTLYPDLKHDRYKLHCVEVWETETSGLIFYGPDAS

SEQ ID NO: 19776 - protein, 121 aa, Desulfocarbo indianensis
  misc_feature (1)..(121): tr|A0A0K9IF88|A0A0K9IF88_9DELT 6-carboxy-5,6,7,8-tetrah ydropterin synthase OS=Desulfocarbo indianensis OX=1348 163 GN=AAU61_03610 PE=3 SV=1
MYELMVTGRFAAAHSLRNFKGRCEALHGHNWRVEVVVRGDTLDQAGLIMDFGELKAAMNQVMDRLDHCYLNEIKPFDELNPSSELIAKYLYEEISQLLPAGVSMARVSAWESEDSRATYFG

SEQ ID NO: 19777 - protein, 124 aa, Desulfococcus multivorans
  misc_feature (1)..(124): tr|S7V5R0|S7V5R0_DESML 6-carboxy-5,6,7,8-tetrahydropter in synthase OS=Desulfococcus multivorans DSM 2059 OX=11 21405 GN=dsmv_1726 PE=3 SV=1
MFELKILTRFAAAHQLRMVGQKCENLHGHNWKVEVCVGGEHLNEAGVLMDFGDVKRHVADIIREIDHKFLNELEFFQRVEQPSSERIAVHIAQELQKRLDTPGVRVTRVSAWESDDACATYILP

SEQ ID NO: 19778 - protein, 128 aa, Desulfococcus multivorans
  misc_feature (1)..(128): tr|S7UP63|S7UP63_DESML 6-carboxy-5,6,7,8-tetrahydropter in synthase OS=Desulfococcus multivorans DSM 2059 OX=11 21405 GN=dsmv_3426 PE=3 SV=1
MKEIHEIYVKTHFSAAHCLEGYPGDCARLHGHNWIIEVHVRCERLNEIGIGIDFRDIKTAVKEVLQGLDHFNLNELPAFKSVNPTSENIARFLYKELSWILNADGIKVSKVKVCETPGAGAYYWEEED

SEQ ID NO: 19779 - protein, 129 aa, Desulfococcus oleovorans
  misc_feature (1)..(129): tr|A8ZZE4|A8ZZE4_DESOH 6-carboxy-5,6,7,8-tetrahydropter in synthase OS=Desulfococcus oleovorans (strain DSM 620 0 / Hxd3) OX=96561 GN=Dole_1493 PE=3 SV=1
MFELTVTTHFAAAHQLKMVAHKCENLHGHNWKVEVCVAGSELDHAGLLIDFGELKRHVATVIDGLDHRFLNELEYFKNGNPSSEHIAVYIADQLTGMLKETRAKISRVKVWESENSCATYIPDAQGQPL

SEQ ID NO: 19780 - protein, 122 aa, Desulfococcus sp.
  misc_feature (1)..(122): tr|A0A1W9PQ37|A0A1W9PQ37_9DELT 6-carboxy-5,6,7,8-tetrah ydropterin synthase OS=Desulfococcus sp. 4484_241 OX=19 68522 GN=B5M56_10865 PE=3 SV=1
MFELMVTTNFAAAHQLRMVGNKCENLHGHNWKVEVYVSGDKLDNTGLLIDFGELKRHLGTIIESLDHRFLNEMDFFKNENPSSERIAVFIANKLAELIEGTPAKVSRVRVWESDNACVTYLP

SEQ ID NO: 19781 - protein, 131 aa, Desulfocurvibacter africanus
  misc_feature (1)..(131): tr|M5PZ95|M5PZ95_DESAF 6-carboxy-5,6,7,8-tetrahydropter in synthase OS=Desulfocurvibacter africanus PCS OX=1262 666 GN=PCS_03493 PE=3 SV=1
MGTGRWRLTVREEFSASHQLRHYQGKCEALHGHNFGVEVSIEGDRTDERTGMLLDFKVLKDITRESVGLLDHKHLNDLEAFAGENPSSEHLARFLFREIEGRLGGYAVSLVEVTVAEKSSQSATYFESGEK

SEQ ID NO: 19782 - protein, 131 aa, Desulfocurvibacter africanus
  misc_feature (1)..(131): tr|F3YYG6|F3YYG6_DESAF 6-carboxy-5,6,7,8-tetrahydropter in synthase OS=Desulfocurvibacter africanus subsp. afri canus str. Walvis Bay OX=690850 GN=Desaf_2396 PE=3 SV=1
MGTGRWRLTVREEFSASHQLRHYQGKCEALHGHNFGVEVSIEGDRTDERTGMLLDFKVLKDITRECVGLLDHKHLNDLEAFAGENPSSEHLARFLFREIEGRLGGYAVSLVEVTVAEKSSQSATYFEPGGK

SEQ ID NO: 19783 - protein, 136 aa, Desulfofaba hansenii
  misc_feature (1)..(136): tr|A0A2M9DJW5|A0A2M9DJW5_9DELT 6-carboxy-5,6,7,8-tetrah ydropterin synthase OS=Desulfofaba hansenii OX=157842 G N=CKJ97_24450 PE=3 SV=1
MAMLTITKEFLFDAAHMLRREELSDAENMEIFGKCSKIHGHTYRLQITVAGAVDENGMIIHFSNLKAMVKHHVVDRYDHSMLNAQEEYAKLPPTAEVMVNYIFKTLARALGDEGLTLTAVTLFETPTSWATMTADA

SEQ ID NO: 19784 - protein, 124 aa, Desulfofaba hansenii
  misc_feature (1)..(124): tr|A0A2M9DL15|A0A2M9DL15_9DELT 6-carboxy-5,6,7,8-tetrah ydropterin synthase OS=Desulfofaba hansenii OX=157842 G N=CKJ97_22345 PE=3 SV=1
MFELKVTGKFAAAHQLKMVGEKCENLHGHNFKVEAYVAGEALNDAGVLLDFGIVKAALKEIVGGVDHKFLNEMAPFKESSASSENIAVHIATELQKAVDSEGVCVSRIRVWESDNACVTYHPKK

SEQ ID NO: 19785 - protein, 125 aa, Desulfofarcimen acetoxidans
  misc_feature (1)..(125): tr|C8VWH9|C8VWH9_DESAS 6-carboxy-5,6,7,8-tetrahydropter in synthase OS=Desulfofarcimen acetoxidans (strain ATCC 49208 / DSM 771 / VKM B-1644 / 5575) OX=485916 GN=Dtox _3631 PE=3 SV=1
MSILFELKVTEHFDSAHYLREYPGKCKNVHGHTWYIEVVLQGENLDSTGILIDFSELKGLIKNIIEPFDHQLLNEQVPFEVDNPTSENLARYFYHEIKKKLSDKPVKLVRVTVSESRATAAAYFE

SEQ ID NO: 19786 - protein, 127 aa, Desulfofundulus australicus
  misc_feature (1)..(127): tr|A0A1M5C708|A0A1M5C708_9FIRM 6-carboxy-5,6,7,8-tetrah ydropterin synthase OS=Desulfofundulus australicus DSM 11792 OX=1121425 GN=SAMN02745218_02438 PE=3 SV=1
MYRLTIIERFAAAHRLFNYQGKCARLHGHTWTVEVSVEGKKLNSCGMLIDFGELKKMTSTVIKELDHSYLNDLHPFNKLDNNPTAENLAKYIYHQLKTLLPSNLTLAEVRVWESPDACASYREDTGP

SEQ ID NO: 19787 - protein, 127 aa, Desulfofundulus kuznetsovii
  misc_feature (1)..(127): tr|A0A101HXW3|A0A101HXW3_9FIRM 6-carboxy-5,6,7,8-tetrah ydropterin synthase OS=Desulfofundulus kuznetsovii OX=5 8135 GN=XE00_0541 PE=3 SV=1
MYEVTVKKQFAAAHRLLDYPDRCSRLHGHSWVVEVSVSGTELDENGMLIDFKEAKKLVGEVIDGLDHQYLNELEFFSQPGRETNPTAENIARYIFNCLRAVFKNSLKLSGVRVWESSDTCAFYSEGR

SEQ ID NO: 19788 - protein, 127 aa, Desulfofundulus salinum
  misc_feature (1)..(127): tr|A0A494WY09|A0A494WY09_9FIRM 6-carboxy-5,6,7,8-tetrah ydropterin synthase OS=Desulfofundulus salinum OX=24198 43 GN=queD PE=3 SV=1
MYRLTVIKRFAAAHRLVNYQGQCARLHGHTWTVEVSVGGEKLDSCGMLIDFRALKELVGKIVGELDHSYLNDLHPFNELNFNPTAENLARHIFYKLKSLLPPDLTMSEVRVWESPDVCASYREDVIP

SEQ ID NO: 19789 - protein, 127 aa, Desulfofundulus thermosubterraneus
  misc_feature (1)..(127): tr|A0A1M6DGK5|A0A1M6DGK5_9FIRM 6-carboxy-5,6,7,8-tetrah ydropterin synthase OS=Desulfofundulus thermosubterrane us DSM 16057 OX=1121432 GN=SAMN02745219_00909 PE=3 SV=1
MYRLTVIKRFAAAHRLVNYQGQCARLHGHTWTIEVSVGGEKLDSCGMLIDFRALKELVGQIVGELDHSYLNDLHPFSEPNFNPTAENLARYIYYKLKSLLPSDLTMGEVRVWESPDVCASYREDIRP

SEQ ID NO: 19790 - protein, 127 aa, Desulfofustis glycolicus
  misc_feature (1)..(127): tr|A0A1M5U978|A0A1M5U978_9DELT 6-carboxy-5,6,7,8-tetrah ydropterin synthase OS=Desulfofustis glycolicus DSM 970 5 OX=1121409 GN=SAMN02745124_01067 PE=3 SV=1
MYDIFIKTHFSSGHHLRDYPGNCEFPHGHNWHVTVTVRAEELDEIGMGIDFKVLKKEVNKIVDHLDHKNLNDLEAFSRINPSSENIARYIFEQLQPILHDERYRLHAVTVYETDNAGLTYYGSGPHA

SEQ ID NO: 19791 - protein, 125 aa, Desulfofustis sp.
  misc_feature (1)..(125): tr|A0A353XGJ0|A0A353XGJ0_9DELT 6-carboxytetrahydropteri n synthase OS=Desulfofustis sp. OX=2053546 GN=DDX99_137 50 PE=4 SV=1
MYELGIRRSFSATHYLIGGDWGAENFEHSHEYRLEVILGKNQLDRHGFLVDIVEVEDHLDQVVAQFRGKTLNDLPGFTGANPSIERLAAVIHECFRFRFADYDLSSLTVVIWEDDIAWTSYRASF

SEQ ID NO: 19792 - protein, 127 aa, Desulfofustis sp.
  misc_feature (1)..(127): tr|A0A353XC03|A0A353XC03_9DELT 6-carboxy-5,6,7,8-tetrah ydropterin synthase OS=Desulfofustis sp. OX=2053546 GN= queD PE=3 SV=1
MYDIFINTHFSSGHHLRDYPGSCEYPHGHNWKVRVTVRAHELDEVGMGIDFKVLKQHVKVVIEQLDHRNLNEMEPFTTVNPSSEHIARYIFEQLQAPLATARYHLFSVSVHETDSAGLIYYGKSDRP

SEQ ID NO: 19793 - protein, 125 aa, Desulfoglaeba alkanexedens
  misc_feature (1)..(125): tr|A0A4P8L1H1|A0A4P8L1H1_9DELT 6-carboxy-5,6,7,8-tetrah ydropterin synthase OS=Desulfoglaeba alkanexedens ALDC OX=980445 GN=queD PE=3 SV=1
MYEVKIISEFSAAHHLRHFRGKCENLHGHNWKVEVVVRGSCLDESGMLIDFGVVKQITREILGGLDHRYLNDLPAFKERNPSSENIAEHLFEGLSERINNDHRWVYCVSAWESKDACATYWNDRR

SEQ ID NO: 19794 - protein, 126 aa, Desulfoglaeba alkanexedens
  misc_feature (1)..(126): tr|A0A4P8L3I7|A0A4P8L3I7_9DELT 6-carboxy-5,6,7,8-tetrah ydropterin synthase OS=Desulfoglaeba alkanexedens ALDC OX=980445 GN=queD PE=3 SV=1
MPACFEVYVETHFSAAHRLKGYPGDCARLHGHNWMVEVTVRCTQLDALGIGIDFRDVRTALKEAVADLDHQDLGEIPAFRAQNPTSENIARYLYRELSSKLDDASRRVSKVKVCETPGAGALYWEE

SEQ ID NO: 19795 - protein, 130 aa, Desulfohalobium retbaense
  misc_feature (1)..(130): tr|C8X2N5|C8X2N5_DESRD 6-carboxy-5,6,7,8-tetrahydropter in synthase OS=Desulfohalobium retbaense (strain ATCC 4 9708 / DSM 5692 / JCM 16813 / HR100) OX=485915 GN=Dret_ 1395 PE=3 SV=1
MHTDQGLYRLRVRGGFSASHQLLHYEGKCERLHGHNFRVEAEVEGREVDPDTGMLLDFKVLKKRLNAVLDYLDHRHLNELTPFEGLSPSSENIARYIFTTLQKSMAEPGVRLREVSVAENEGSVAVYREE

SEQ ID NO: 19796 - protein, 123 aa, Desulfoluna butyratoxydans
  misc_feature (1)..(123): tr|A0A4U8YJK3|A0A4U8YJK3_9DELT 6-carboxy-5,6,7,8-tetrah ydropterin synthase OS=Desulfoluna butyratoxydans OX=23 1438 GN=MSL71_11390 PE=3 SV=1
MFELKVTTRFAAAHRLTMVGEQCENLHGHNWHVEVYVQGEKLDKGGVLMDFGIVKKELKEVIGTLDHTYLNESDIFKDAPPSSEHIAMYIAKELERRIDVDGVKVSRVSAWESENSCATYIAD

SEQ ID NO: 19797 - protein, 132 aa, Desulfoluna butyratoxydans
  misc_feature (1)..(132): tr|A0A4U8YS17|A0A4U8YS17_9DELT 6-carboxy-5,6,7,8-tetrah ydropterin synthase OS=Desulfoluna butyratoxydans OX=23 1438 GN=MSL71_42010 PE=3 SV=1
MLSITKEFRFDAAHKLCRHDFSEEENKALYGKCAAFHGHTYTLRVTVAGPLDASGMILNFTELKGLVKERIVDRYDHANLNELPEYENLPVTAENMVLHIFKTLSEAPEFHGLTLKEVRLYETPDSWATVTA

SEQ ID NO: 19798 - protein, 123 aa, Desulfoluna spongiiphila
  misc_feature (1)..(123): tr|A0A1G5IXY2|A0A1G5IXY2_9DELT 6-carboxy-5,6,7,8-tetrah ydropterin synthase OS=Desulfoluna spongiiphila OX=4194 81 GN=SAMN05216233_122108 PE=3 SV=1
MFELKVTTRFAAAHRLTMVGKQCENLHGHNWHVEVYVQGENLDKGGVLMDFGIVKKELKKVIDTLDHTYLNESEIFKDVPASSEHIAMYIAKELERRIDVDGIKVSRVSAWESENSCATYIAD

SEQ ID NO: 19799 - protein, 123 aa, Desulfoluna spongiiphila
  misc_feature (1)..(123): tr|A0A5E7XG89|A0A5E7XG89_9DELT 6-carboxy-5,6,7,8-tetrah ydropterin synthase OS=Desulfoluna spongiiphila OX=4194 81 PE=3 SV=1
MFELKVTTRFAAAHRLTMVGKQCENLHGHNWHVEVYVQGENLDKGGVLMDFGIVKKELKKVIDTLDHTYLNESEIFKDVPASSEHIAMYIAKELERRIDVDGVKVSRVSAWESENSCATYIAD

SEQ ID NO: 19800 - protein, 125 aa, Desulfomicrobiaceae bacterium
  misc_feature (1)..(125): tr|A0A3D1NBP4|A0A3D1NBP4_9DELT 6-carboxy-5,6,7,8-tetrah ydropterin synthase OS=Desulfomicrobiaceae bacterium OX =2053547 GN=DEU72_01275 PE=3 SV=1
MGVWRLRVRGGFAAAHQILHYGGPCEALHGHNFAVEVEVEGCVLDSKTGMLMDFKELKGHLAAVTGQLDHTHVNALPEFAGVSPSSERLAEYIFRRLAVRLKDSGVRLVRVSVAENTGSEAEYRE

SEQ ID NO: 19801 - protein, 138 aa, Desulfomicrobium apsheronum
  misc_feature (1)..(138): tr|A0A1I3UNK2|A0A1I3UNK2_9DELT 6-carboxy-5,6,7,8-tetrah ydropterin synthase OS=Desulfomicrobium apsheronum OX=5 2560 GN=SAMN04488082_10847 PE=3 SV=1
MLTITKEFSFHAAHRLHLRNLSESDNLRIYGNCARLHGHTYRLQVQLAGRPDETGMILHFGELKGIVQREVLSRYDHADLSDLPEYHDLPATAENMAEHIFRTLDRALVSNRFRLEQVTVFETQTAWATRSRDGGEHA

SEQ ID NO: 19802 - protein, 130 aa, Desulfomicrobium apsheronum
  misc_feature (1)..(130): tr|A0A1I3UEB1|A0A1I3UEB1_9DELT 6-carboxy-5,6,7,8-tetrah ydropterin synthase OS=Desulfomicrobium apsheronum OX=5 2560 GN=SAMN04488082_10793 PE=3 SV=1
MTQGQWRLRVSSDFSSSHQLRHYEGKCENMHGHNFTVEVDVVGESLDQRLGILMDFKALKRLLKEVTDELDHRHLNDLPDFAEQNPSSELLARFVFRRMKDLLAPYPVRLAEVMVSEKASSRAYYSEGSV

SEQ ID NO: 19803 - protein, 130 aa, Desulfomicrobium baculatum
  misc_feature (1)..(130): tr|C7LSL2|C7LSL2_DESBD 6-carboxy-5,6,7,8-tetrahydropter in synthase OS=Desulfomicrobium baculatum (strain DSM 4 028 / VKM B-1378) OX=525897 GN=Dbac_0097 PE=3 SV=1
MTQGQWRLRVSSDFSSSHQLRHYEGKCENMHGHNFTVEVDVVGESLDPKLGILMDFKALKRLLKEVTDELDHRHLNDLPDFAEQNPSSELLARFVFLRMKNLLAPYPVRLTEVMVSEKASSRAYYSEVQG

SEQ ID NO: 19804 - protein, 138 aa, Desulfomicrobium norvegicum
  misc_feature (1)..(138): tr|A0A1I4KYF8|A0A1I4KYF8_DESNO 6-carboxy-5,6,7,8-tetrah ydropterin synthase OS=Desulfomicrobium norvegicum (str ain DSM 1741 / NCIMB 8310) OX=52561 GN=SAMN05421830_107 90 PE=3 SV=1
MLTITKEFSFHAAHRLHLRDLSESDNLRIYGNCARLHGHTYRLQVQLAGRPDETGMILHFGELKGIVQRKVLSRYDHADLSDLPEYHDLPATAENMAEHIFRTLDCALVSDRFRLEQVTVYETQTAWATRSRDGGEHA

SEQ ID NO: 19805 - protein, 130 aa, Desulfomicrobium norvegicum
  misc_feature (1)..(130): tr|A0A1I4GXG9|A0A1I4GXG9_DESNO 6-carboxy-5,6,7,8-tetrah ydropterin synthase OS=Desulfomicrobium norvegicum (str ain DSM 1741 / NCIMB 8310) OX=52561 GN=SAMN05421830_101 673 PE=3 SV=1
MTQGQWRLRVSSDFSSSHQLRHYEGKCENMHGHNFTVEVDVVGESLDQRLGILMDFKALKRLLKEVTDELDHKHLNDLPDFAEQNPSSELLARFVFRRMKDLLASYPVRLAEVMVSEKASSRAYYSEGSV

SEQ ID NO: 19806 - protein, 130 aa, Desulfomicrobium orale
  misc_feature (1)..(130): tr|A0A0X8JPN0|A0A0X8JPN0_9DELT 6-carboxy-5,6,7,8-tetrah ydropterin synthase OS=Desulfomicrobium orale DSM 12838 OX=888061 GN=AXF15_05145 PE=3 SV=1
MNTGLWRLRVNSDFSSSHQLRHYEGKCERLHGHNFIVEAEVEGRELDRKLGILMDFKELKRLLKIVTDELDHKHLNELPAFTRQNPSSELLAHYVFTRLRELLASHPVRLKEVMVAEKDSSRAYYSEGGD

SEQ ID NO: 19807 - protein, 60 aa, Desulfomicrobium sp.
  misc_feature (1)..(60): tr|A0A3D5BQG8|A0A3D5BQG8_9DELT 6-carboxytetrahydropteri n synthase QueD (Fragment) OS=Desulfomicrobium sp. OX=5 2017 GN=DGF30_05255 PE=4 SV=1
DHRHLNELPAFADHNPSSELLAQYVYRRMKDLLAAHPVRLEQVMVSEKASSRAYYSEGTD

SEQ ID NO: 19808 - protein, 35 aa, Desulfomicrobium sp.
  misc_feature (1)..(35): tr|A0A3D5BSF7|A0A3D5BSF7_9DELT 6-carboxytetrahydropteri n synthase QueD (Fragment) OS=Desulfomicrobium sp. OX=5 2017 GN=DGF30_05260 PE=4 SV=1
MNMGKGQWRLRVSGDFSSSHQLRHYEGKCENMHGH

SEQ ID NO: 19809 - protein, 131 aa, Desulfomonile tiedjei
  misc_feature (1)..(131): tr|I4C7W8|I4C7W8_DESTA 6-pyruvoyl-tetrahydropterin synt hase OS=Desulfomonile tiedjei (strain ATCC 49306 / DSM 6799 / DCB-1) OX=706587 GN=Desti_2993 PE=4 SV=1
MHSSSGYSVAVQRDFVAQHFLFGGDWGAENQRHSHHYRIEVQLEGAELDQHGYLVDIVDIETQLEALVSYYRDKTLNELPEFQGLNPSIEHLSRIFCDTFSSRISAKNITVITVKIWENEIAWASFRKERS

SEQ ID NO: 19810 - protein, 123 aa, Desulfomonile tiedjei
  misc_feature (1)..(123): tr|I4C2Z1|I4C2Z1_DESTA 6-carboxy-5,6,7,8-tetrahydropter in synthase OS=Desulfomonile tiedjei (strain ATCC 49306 / DSM 6799 / DCB-1) OX=706587 GN=Desti_1219 PE=3 SV=1
MYEVEITVNFSAAHRLRDYNGKCEQLHGHNYKIQIAARSSSPGKGGMVIDFGDLKKAANQVLDTLDHRYLNDIKPFDEIEPSAENIAAHIFREVSQNLGDQGAMLHSVSVWESDTSKATYLKD

SEQ ID NO: 19811 - protein, 128 aa, Desulfonatronospira thiodismutans
  misc_feature (1)..(128): tr|D6SUG9|D6SUG9_9DELT 6-carboxy-5,6,7,8-tetrahydropter in synthase OS=Desulfonatronospira thiodismutans ASO3-1 OX=555779 GN=Dthio_PD0263 PE=3 SV=1
MAAPRYCLRVSSDFSSSHQLRNYGGKCESLHGHNFQVQVQVCGKEVDPDTGMLMDFKELKNTLLAVLEELDHKHLNDLPHFKETNPSSENLACFVYQGLKKSLGNRGVYLDWVMVAEKDSSRAYYSES

SEQ ID NO: 19812 - protein, 130 aa, Desulfonatronovibrio sp.
  misc_feature (1)..(130): tr|A0A424XZA0|A0A424XZA0_9DELT 6-carboxy-5,6,7,8-tetrah ydropterin synthase OS=Desulfonatronovibrio sp. MSAO_Ba c4 OX=2293858 GN=queD PE=3 SV=1
MAYSEWRLRVSDDFSSSHQLRNYGGKCESLHGHNFLVEVEVKGSEVDPDTGMLMDFKVLKQKLGAVLEMLDHKHLNDLEWFKKVNPSSENLAKFVYENLKPALQGEKVSIEWVMVAEKNSSKAFYREVLP

SEQ ID NO: 19813 - protein, 128 aa, Desulfonatronum sp.
  misc_feature (1)..(128): tr|A0A2T5CC71|A0A2T5CC71_9DELT 6-carboxy-5,6,7,8-tetrah ydropterin synthase OS=Desulfonatronum sp. SC1 OX=21096 26 GN=queD PE=3 SV=1
MSREIWRLTVSDHFSSAHQLRHYQGKCESLHGHNFAVQVQVQGRDLDPKLGILIDFQELKTLLKQVLAELDHRNLNELPEFAAINPSSEHLARYIFQRLAALLPGPGVTMHAVSVAEGPTAIATYSEE

SEQ ID NO: 19814 - protein, 128 aa, Desulfonatronum thiosulfatophilum
  misc_feature (1)..(128): tr|A0A1G6C9H5|A0A1G6C9H5_9DELT 6-carboxy-5,6,7,8-tetrah ydropterin synthase OS=Desulfonatronum thiosulfatophilu m OX=617002 GN=SAMN05660653_01416 PE=3 SV=1
MGEGLWRLTVADHFSSAHQLRHYQGKCECLHGHNFAVQVQVQGRRLHPELGIVMDFKELKALLKTVLAELDHCNLNEMAEFSRINPSSENIARHIYQRLQTMLPGPEVIMHSVSVAEGPNSVAIYMED

SEQ ID NO: 19815 - protein, 126 aa, Desulfonauticus sp.
  misc_feature (1)..(126): tr|A0A101DJV1|A0A101DJV1_9DELT 6-carboxy-5,6,7,8-tetrah ydropterin synthase OS=Desulfonauticus sp. 38_4375 OX=1 635258 GN=XD41_0092 PE=3 SV=1
MDKRYRLRIKDKFSAAHSLRNYEGSCENVHGHNFGVEIEVYGYSLEKDTEILIDFKVLKRKLKNILMDLDHKFLNELDFFRVNNPSSENIAKFIFFKLKETLPQNISLSYVMVSESDNSQAFYEEV

SEQ ID NO: 19816 - protein, 126 aa, Desulfonauticus submarinus
  misc_feature (1)..(126): tr|A0A1G9ZQA9|A0A1G9ZQA9_9DELT 6-carboxy-5,6,7,8-tetrah ydropterin synthase OS=Desulfonauticus submarinus OX=20 6665 GN=SAMN04488516_101119 PE=3 SV=1
MKGIYRLRIKDKFSAAHSLRNYNGKCEELHGHNFGVEIEVYGKKLEKDTEILIDFKILKKFLKEVLNSLDHKFLNDLQYFQKYNPSSENIACYIYKNLQSKLPSGVNLKYVMVSEGENSMAFFEEV

SEQ ID NO: 19817 - protein, 124 aa, Desulfonema ishimotonii
  misc_feature (1)..(124): tr|A0A401G1Y5|A0A401G1Y5_9DELT 6-carboxy-5,6,7,8-tetrah ydropterin synthase OS=Desulfonema ishimotonii OX=45657 GN=DENIS_4186 PE=3 SV=1
MFELKVITRFAAAHQLKMVARQCENLHGHNWKVEVCVGGETLNEAGVLVDFGEIKTHVRALMAQLDHKFLNELEIFDDQCPPSSENIAHFIGTRLQEMISVPDVRVTRVTAWESDDACATYIMN

SEQ ID NO: 19818 - protein, 104 aa, Desulfonispora thiosulfatigenes
  misc_feature (1)..(104): tr|A0A1W1VEP7|A0A1W1VEP7_DESTI 6-pyruvoyltetrahydropter in/6-carboxytetrahydropterin synthase OS=Desulfonispora thiosulfatigenes DSM 11270 OX=656914 GN=SAMN00017405_2 199 PE=4 SV=1
MTQYHGKCENLHGHTYKLQVTVKGTLNEEDLVLDFIVLKNIVKEKVLNKLDHTNLNDRFTQPSTENILIWIWNEIKDELKGPNYELYELKLWETPTSFATYRED

SEQ ID NO: 19819 - protein, 126 aa, Desulfopila aestuarii
  misc_feature (1)..(126): tr|A0A1M7YKM4|A0A1M7YKM4_9DELT 6-carboxy-5,6,7,8-tetrah ydropterin synthase OS=Desulfopila aestuarii DSM 18488 OX=1121416 GN=SAMN02745220_04985 PE=3 SV=1
MYDIFVKTHFAGAHHLRDYPGDCEKPHGHNWKVKVTVRAAKLDHLGMGIDFTILKKHVKEVIDTIDHCDLNEHEAFRVLNPSSEHIAQYLFENLADKLCHERYFLYSIEVSETDNQGLIYFGPENN

SEQ ID NO: 19820 - protein, 131 aa, Desulfopila sp.
  misc_feature (1)..(131): tr|A0A4U1AFF7|A0A4U1AFF7_9DELT 6-carboxy-5,6,7,8-tetrah ydropterin synthase OS=Desulfopila sp. IMCC35006 OX=256 9542 GN=queD PE=3 SV=1
MFDIFIDTHFAGAHHLRDYPGDCEKPHGHNWKVKVTARATELDRCGMAIDFKVLKKIVKEVIDKLDHNDLNTLPYFQDKNPSSEHIARFIFDEVSALLTNKNHSLRTVTVLETDTQGLTYYGNQDHGGELR

SEQ ID NO: 19821 - protein, 125 aa, Desulfopila sp.
  misc_feature (1)..(125): tr|A0A4U1AL17|A0A4U1AL17_9DELT 6-carboxytetrahydropteri n synthase OS=Desulfopila sp. IMCC35006 OX=2569542 GN=F CL47_05870 PE=4 SV=1
MYNLGVAREFNARHYLIGGDWGEENVEHSHHYRIELILEKKDLDRHGFLVDIVEVERHLDEVVADFQGQTLNALDAFAGINPSIERLATILQEIFRERLGSLQLEALTVKIWENDIAWTSYRTTI

SEQ ID NO: 19822 - protein, 142 aa, Desulfoplanes formicivorans
  misc_feature (1)..(142): tr|A0A194AFJ3|A0A194AFJ3_9DELT 6-carboxy-5,6,7,8-tetrah ydropterin synthase OS=Desulfoplanes formicivorans OX=1 592317 GN=DPF_0669 PE=3 SV=1
MTRNGRWRLRVRTDFSAAHQLRHYQGKCEALHGHNFSVEAEVAGDQLDAKVGYLMDFKDLKNRLNQVVDTLDHTCLNDLPGFSTCNPTSEELARYIFEALDALLQDSPVRLCWTMVAEKDSSMAFYERCDHASQDDCRRGIS

SEQ ID NO: 19823 - protein, 132 aa, Desulforhopalus singaporensis
  misc_feature (1)..(132): tr|A0A1H0IZ83|A0A1H0IZ83_9DELT 6-carboxy-5,6,7,8-tetrah ydropterin synthase OS=Desulforhopalus singaporensis OX =91360 GN=SAMN05660330_00088 PE=3 SV=1
MLSITRQFRFDAAHKLERTELSDQENQLLYGKCSALHGHSYTLEVTVSGPVDESGMIINFTELKKLVTDLVITRYDHAYLNELEEYRNEVVTVENMALHIFRTLSKASEFNDLTLLRIRLYETADSWATVTA

SEQ ID NO: 19824 - protein, 128 aa, Desulforhopalus singaporensis
  misc_feature (1)..(128): tr|A0A1H0PJ70|A0A1H0PJ70_9DELT 6-carboxy-5,6,7,8-tetrah ydropterin synthase OS=Desulforhopalus singaporensis OX =91360 GN=SAMN05660330_01696 PE=3 SV=1
MYDIFIDTHFAGAHHLRDYPGDCEKPHGHNWKVRVTVRAAKVDKCGMGMDFTLLKKVVKEVIDLLDHHDLNTLPYFQEKNPSSEYIAEFIYGEVRARLTDDNHRIFSVRVLETDTQGLIYYGPEGPKF

SEQ ID NO: 19825 - protein, 125 aa, Desulforhopalus sp.
  misc_feature (1)..(125): tr|A0A4U0ZWQ2|A0A4U0ZWQ2_9DELT 6-carboxy-5,6,7,8-tetrah ydropterin synthase OS=Desulforhopalus sp. IMCC35007 OX =2569543 GN=queD PE=3 SV=1
MFDIFIDTHFAGAHHLRDYPGDCEKPHGHNWKVRVTVRATSVDQYGMGIDFKVLKKIVKHAIDKLDHKDLNTLPYFEKQNPSSEHIAEFLFADIKEELTSDSYQLYSVRVLETDTQGLTYYGPQN

SEQ ID NO: 19826 - protein, 125 aa, Desulforhopalus sp.
  misc_feature (1)..(125): tr|A0A4U0ZTS2|A0A4U0ZTS2_9DELT 6-carboxytetrahydropteri n synthase OS=Desulforhopalus sp. IMCC35007 OX=2569543 GN=FCL48_22335 PE=4 SV=1
MYRLGMRRKFSARHHLIGGDWGDENVEHSHNYQLELILEKKELDQHGFLVDIVEVEHHLDEVTAVFQGQYLNTLAAFEGINPSIERLANVIHDIFTKRLESFQLEALTVTIWEDDIAWTSYRATL

SEQ ID NO: 19827 - protein, 126 aa, Desulforudis audaxviator; identical to SEQ ID NO: 18770
  misc_feature (1)..(126): tr|B1I3W3|B1I3W3_DESAP 6-carboxy-5,6,7,8-tetrahydropter in synthase OS=Desulforudis audaxviator (strain MP104C) OX=477974 GN=Daud_1237 PE=3 SV=1

SEQ ID NO: 19828 - protein, 124 aa, Desulfosoma caldarium
  misc_feature (1)..(124): tr|A0A3N1V069|A0A3N1V069_9DELT 6-carboxy-5,6,7,8-tetrah ydropterin synthase OS=Desulfosoma caldarium OX=610254 GN=EDC27_1534 PE=3 SV=1
MYEVKVMADFAAAHNLRNFRGRCENLHGHNWKVEVTVRGDRLEESGVLVDFGEVKDALRKALHQLDHQYLNDLTYFQDKNPSSELIARYLFETLSAVIDGPHRRVHSVSAWESKDSCATYYGER

SEQ ID NO: 19829 - protein, 125 aa, Desulfosporosinus acididurans
  misc_feature (1)..(125): tr|A0A0J1FWU6|A0A0J1FWU6_9FIRM 6-carboxy-5,6,7,8-tetrah ydropterin synthase OS=Desulfosporosinus acididurans OX =476652 GN=queD PE=3 SV=1
MYQVCVQAHFDAAHFIRNYKGKCSNLHGHRWNVVVCIEGKQLDNLGMLVDFSEVKQAIRKTLDLLDHSLLNDLPAFGPAGVNPTAELIAQFLFCEFKQNLVLGENRLVWVKVFEAPDAWAIYKED

SEQ ID NO: 19830 - protein, 125 aa, Desulfosporosinus acidiphilus
  misc_feature (1)..(125): tr|I4D854|I4D854_DESAJ 6-carboxy-5,6,7,8-tetrahydropter in synthase OS=Desulfosporosinus acidiphilus (strain DS M 22704 / JCM 16185 / SJ4) OX=646529 GN=Desaci_3071 PE= 3 SV=1
MFQVCVQAHFDAAHFIRNYKGKCSNLHGHRWNVVVCIEGSKLDHLGMLVDFSEVKQVIKKTLDLLDHSLLNDLPIFGPEGINPTAELIAHFLFKEFKRSLVLEEKRLAWVKVFEAPDAWAVYKED

SEQ ID NO: 19831 - protein, 125 aa, Desulfosporosinus fructosivorans
  misc_feature (1)..(125): tr|A0A4Z0R243|A0A4Z0R243_9FIRM 6-carboxy-5,6,7,8-tetrah ydropterin synthase OS=Desulfosporosinus fructosivorans OX=2018669 GN=queD PE=3 SV=1
MFQVFVQAHFDAAHFIRNYDGNCAKLHGHRWNVVVCIEGRQLDHLGMLIDFSEVKQSIREKLKLLDHSLLNDLAAFGIEGVNPTAENLAQQLYTELKKDLVLTNKRLAWVQVNESPDAWAIFKED

SEQ ID NO: 19832 - protein, 126 aa, Desulfosporosinus fructosivorans
  misc_feature (1)..(126): tr|A0A4Z0R2X3|A0A4Z0R2X3_9FIRM 6-carboxy-5,6,7,8-tetrah ydropterin synthase OS=Desulfosporosinus fructosivorans OX=2018669 GN=queD PE=3 SV=1
MKTTKSFTFDAAHFLPDHKGKCANMHGHTYRLEVSVARNNGILGNGGSDEGMVIDFADLKAIVKAEVIDKMDHKVLNDVLPFRTTAENMADHIFKVLTDKLQASGVIVDRIKLWETPDSYVEACYE

SEQ ID NO: 19833 - protein, 125 aa, Desulfosporosinus hippei
  misc_feature (1)..(125): tr|A0A1G7XL28|A0A1G7XL28_9FIRM 6-carboxy-5,6,7,8-tetrah ydropterin synthase OS=Desulfosporosinus hippei DSM 834 4 OX=1121419 GN=SAMN05443529_10720 PE=3 SV=1
MFQVCVRAHFDAAHYIRDYDGDCSNLHGHRWDIEVCISGEKLDHLGMLIDFKEIKQAIRKEVKLLDHCLLNDLTPFGASGVNPTAENLARYLFLEFKEALSLQEKRLAWVKVFESPDTWAIFRED

SEQ ID NO: 19834 - protein, 125 aa, Desulfosporosinus lacus
  misc_feature (1)..(125): tr|A0A1M5WJF7|A0A1M5WJF7_9FIRM 6-carboxy-5,6,7,8-tetrah ydropterin synthase OS=Desulfosporosinus lacus DSM 1544 9 OX=1121420 GN=SAMN02746098_01648 PE=3 SV=1
MFQVCVRAHFDAAHFIRDYDGDCSNLHGHRWDVEVCIAGKQLDHLGMLIDFKEVKQSIRKTLKSLDHGLLNNLTSFGPEGVNPTAENLAQFLFLEFKRDLVLEDKRLAWVKVFESPDTWAIFKED

SEQ ID NO: 19835 - protein, 125 aa, Desulfosporosinus meridiei
  misc_feature (1)..(125): tr|J7IWI9|J7IWI9_DESMD 6-carboxy-5,6,7,8-tetrahydropter in synthase OS=Desulfosporosinus meridiei (strain ATCC BAA-275 / DSM 13257 / NCIMB 13706 / S10) OX=768704 GN=D esmer_2605 PE=3 SV=1
MFQVCVRAHFDAAHYIRDYDGDCSNLHGHRWDIEVCVSGEKLDHLGMLIDFKDIKQAIRSEVKLLDHCLLNDLTPFGASGVNPTAENLARYLYLEFKEALSLQEKRLAWVKVFESPDTWAIYEED

SEQ ID NO: 19836 - protein, 125 aa, Desulfosporosinus orientis
  misc_feature (1)..(125): tr|G7WDT3|G7WDT3_DESOD 6-carboxy-5,6,7,8-tetrahydropter in synthase OS=Desulfosporosinus orientis (strain ATCC 19365 / DSM 765 / NCIMB 8382 / VKM B-1628) OX=768706 GN =Desor_3342 PE=3 SV=1
MFQVCVRAHFDAAHFIRGYDGDCAKLHGHRWDVEVCISGNQLDSLGMLIDFKDVKQTIRKTLKSLDHSLINDLTHFGPQGINPTAENLARFLFLEFKRDLRLNDNNLAWVKVYESPDTWAIFKED

SEQ ID NO: 19837 - protein, 126 aa, Desulfosporosinus sp.
  misc_feature (1)..(126): tr|A0A0F2JEM2|A0A0F2JEM2_9FIRM 6-carboxy-5,6,7,8-tetrah ydropterin synthase OS=Desulfosporosinus sp. I2 OX=1617 025 GN=UF75_2275 PE=3 SV=1
MFQVCVRAHFDAAHFIRNYEGDCANLHGHRWDVEVCIEGQSLDNLGMLIDFSLVKQSIRKYLQILDHSLLNDFPAFGVQGVNPTAENIAQFLYREFKKDIVLIDKRLTWVKVYESPDTWALFKEDG

SEQ ID NO: 19838 - protein, 125 aa, Desulfosporosinus sp.
  misc_feature (1)..(125): tr|A0A117SJX7|A0A117SJX7_9FIRM 6-carboxy-5,6,7,8-tetrah ydropterin synthase OS=Desulfosporosinus sp. BRH_c37 OX =1734396 GN=APF81_27565 PE=3 SV=1
MFQVCVQAHFDAAHFIRNYDGNCAKLHGHRWNVVVCIEGRELDHLGMLIDFGEIKQSIRKKLKLLDHSLLNDLPSFGLEGVNPTAENLALLIFTELKRDLVLTEKRLAWVQVNESPDAWAIFKEG

SEQ ID NO: 19839 - protein, 132 aa, Desulfosporosinus youngiae
  misc_feature (1)..(132): tr|H5XVK8|H5XVK8_9FIRM 6-carboxy-5,6,7,8-tetrahydropter in synthase OS=Desulfosporosinus youngiae DSM 17734 OX= 768710 GN=DesyoDRAFT_3047 PE=3 SV=1
MFQVCVRAHFDAAHFIRDYDGDCAKLHGHRWDVEVCIEGSQLNQLGMLIDFKDVKQSIRKTLKLLDHSLLNDLTPFGINGVNPTAENLARFLFFEFKGDLVLEDKHLAWVKVYESPDTWALFKEDKSVRGAL

SEQ ID NO: 19840 - protein, 80 aa, Desulfotalea psychrophila
  misc_feature (1)..(80): tr|Q6AKY1|Q6AKY1_DESPS Related to 6-pyruvoyl-tetrahydro pterin synthase OS=Desulfotalea psychrophila (strain LS v54 / DSM 12343) OX=177439 GN=DP2265 PE=4 SV=1
MGLDFTVLKKKTKEVIELLDHRDLNNLPYFKEKNPSSEHIAIFIFDILAPVLEHKRYSLYSVRVMETDNQGCTYFAPSQG

SEQ ID NO: 19841 - protein, 136 aa, Desulfotalea psychrophila
  misc_feature (1)..(136): tr|Q6ARY1|Q6ARY1_DESPS 6-carboxy-5,6,7,8-tetrahydropter in synthase OS=Desulfotalea psychrophila (strain LSv54 / DSM 12343) OX=177439 GN=DP0165 PE=3 SV=1
MAMLTITKEFRFDAAHKLFLKDLTDQENREAFGKCSQLHGHTYCLRITITGKVQPNGMVLNFTDLKQIVEEKIIARYDHSHLNELEEYRDLPTTAENMSLYIFKVLAACLKKQKVTLTEVQLYETPTSWATVSHDA

SEQ ID NO: 19842 - protein, 128 aa, Desulfotalea sp.
  misc_feature (1)..(128): tr|A0A2G2DQA0|A0A2G2DQA0_9DELT 6-carboxy-5,6,7,8-tetrah ydropterin synthase OS=Desulfotalea sp. OX=2030813 GN=q ueD PE=3 SV=1
MFDIFIDTHFAGAHHLRDYPGECEKPHGHNWKVKVTVRASSVDQYGMGIDFKILKKVVKKAIDKLDHKDLNELPYFRDQNPSSEHIAEFLFEEVKEDLASDSYYLYSVRVLETDTQGLTYYGPTSEQD

SEQ ID NO: 19843 - protein, 127 aa, Desulfotignum phosphitoxidans
  misc_feature (1)..(127): tr|S0FZ22|S0FZ22_9DELT 6-carboxy-5,6,7,8-tetrahydropter in synthase OS=Desulfotignum phosphitoxidans DSM 13687 OX=1286635 GN=queD PE=3 SV=1
MFELKVKTRFAGAHRLTMVGQKCENLHGHNWQVEVCVKGPKLNDAGVLADFGDIKKAVRQVVDGDLDHKYLNELSVFEGMQPTSERIAVYIARQVQALLDENLPEKLQVSRVMAWESEDACAIYYPD

SEQ ID NO: 19844 - protein, 134 aa, Desulfotignum phosphitoxidans
  misc_feature (1)..(134): tr|S0G179|S0G179_9DELT 6-carboxy-5,6,7,8-tetrahydropter in synthase OS=Desulfotignum phosphitoxidans DSM 13687 OX=1286635 GN=queD PE=3 SV=1
MLTITREFRFDAAHRLFLNGLTDRENRDIFGQCSKLHGHTYRLRVTVSGRVHPNGMILDFTDLKQIVDEKIIARYDHAFLNEWDEYRDQPTTVENMCLHIFKVLFPCFEALGAVLTRVQICETPDAWATVTPDV

SEQ ID NO: 19845 - protein, 131 aa, Desulfotomaculum aeronauticum
  misc_feature (1)..(131): tr|A0A1M6NEX7|A0A1M6NEX7_9FIRM 6-carboxy-5,6,7,8-tetrah ydropterin synthase OS=Desulfotomaculum aeronauticum DS M 10349 OX=1121421 GN=SAMN02745123_00096 PE=3 SV=1
MYELTVKSRFSAAHSLCGYPGDCARLHGHTWTVEVKVCGHDLDQLGMVVDFKDIKRQLSRIIDQLDHSFLNDLPGFGPEGLNPTAENLSYYIYQSLAKPVAELRPGIKLKEISVWESPDAYATYREGSSCE

SEQ ID NO: 19846 - protein, 106 aa, Desulfotomaculum aquiferis
  misc_feature (1)..(106): tr|A0A4Q2WPH8|A0A4Q2WPH8_9FIRM Uncharacterized protein OS=Desulfotomaculum aquiferis OX=1397668 GN=N752_14000 PE=4 SV=1
MYELTVSKSFSAAHILCGYPGDCARLHGHTWTVQVKVKGEELDNLGMLVDFKAIKKELMNLIDQFDHRFINDLDGFGDGGVNPTAENLAFYIYRSLEKPVEALRLG

SEQ ID NO: 19847 - protein, 124 aa, Desulfotomaculum arcticum
  misc_feature (1)..(124): tr|A0A1I2QHM6|A0A1I2QHM6_9FIRM 6-carboxy-5,6,7,8-tetrah ydropterin synthase OS=Desulfotomaculum arcticum DSM 17 038 OX=1121424 GN=SAMN05660649_01253 PE=3 SV=1
MDNNIIAYITKVFTFDSAHSLPNYPGHCRNIHGHTYKLEVTVKGEINNETGMVMDFYDLKHLVKEHVISKLDHCYLNDVLPCVPTAENIAVWICQLIKVKSPSLYQVKLWETPTSCVEVYAADV

SEQ ID NO: 19848 - protein, 125 aa, Desulfotomaculum copahuensis
  misc_feature (1)..(125): tr|A0A1B7LE21|A0A1B7LE21_9FIRM 6-carboxy-5,6,7,8-tetrah ydropterin synthase OS=Desulfotomaculum copahuensis OX= 1838280 GN=A6M21_10725 PE=3 SV=1
MYQLSVTKRFAAAHRLSNYQGQCANLHGHTWQLEVTVKGEKLDANGMLLDFKALKEMVGRVIKELDHQYLNELPSFNRINPTAENLARYISGRLRVLLAPELQLALVRVWESPDAWAGYTEDEQA

SEQ ID NO: 19849 - protein, 127 aa, Desulfotomaculum ferrireducens
  misc_feature (1)..(127): tr|A0A1S6IWH7|A0A1S6IWH7_9FIRM 6-carboxy-5,6,7,8-tetrah ydropterin synthase OS=Desulfotomaculum ferrireducens O X=1833852 GN=B0537_08535 PE=3 SV=1
MYELTVKSRFSAAHSLCGYPGDCARLHGHTWTVEVKVCGHELDKLGMLVDFKDIKRQLSRIIDQLDHSLLNDLPEFSTGGSNPTAENLAYYIYQSLLKPVAELRPGLKLKEISVWESPDAYATYRED

SEQ ID NO: 19850 - protein, 128 aa, Desulfotomaculum hydrothermale
  misc_feature (1)..(128): tr|K8EEA0|K8EEA0_9FIRM 6-carboxy-5,6,7,8-tetrahydropter in synthase OS=Desulfotomaculum hydrothermale Lam5 = DS M 18033 OX=1121428 GN=ygcM PE=3 SV=1
MYELTVRSRFSAAHSLCGYPGDCARLHGHTWTVQIKVEGEKLDSLGMLVDFKELKKQLSLIIDQLDHRLLNELPGFREQGINPTAENLAYYIYQTLKQPVTDLQQGIRLKEISVWESPDAYATYWEER

SEQ ID NO: 19851 - protein, 127 aa, Desulfotomaculum nigrificans
  misc_feature (1)..(127): tr|F6B4U2|F6B4U2_DESCC 6-carboxy-5,6,7,8-tetrahydropter in synthase OS=Desulfotomaculum nigrificans (strain DSM 14880 / VKM B-2319 / CO-1-SRB) OX=868595 GN=Desca_1345 PE=3 SV=1
MYQLTVNSKFSAAHSLCGYPGDCARLHGHTWNVQVKVKGNNLDHLGMLVDFKAIKKLLAEVVDQLDHSFLNEIPGFGQDGMNPTAENLAYYIYKKLKNPIAGIREGVTLQEISVWESPDAYATYREE

SEQ ID NO: 19852 - protein, 129 aa, Desulfotomaculum profundi
  misc_feature (1)..(129): tr|A0A2C6M6P6|A0A2C6M6P6_9FIRM 6-carboxy-5,6,7,8-tetrah ydropterin synthase OS=Desulfotomaculum profundi OX=138 3067 GN=P378_13440 PE=3 SV=1
MFELTVRSRFSAAHSLCGYPGDCARLHGHTWTVEVKVTGDKLDQLGMLVDFKDIKKQLSMIIDQLDHRFLNDIPGFREEGVNPTAENLAYYIYKTLEQAIAAIREGIRLKEISVWESPDAYATYREEFN

SEQ ID NO: 19853 - protein, 1161 aa, Desulfotomaculum profundi
  misc_feature (1)..(1161): tr|A0A2C6ME53|A0A2C6ME53_9FIRM PTPS_related domain-cont aining protein OS=Desulfotomaculum profundi OX=1383067 GN=P378_13200 PE=4 SV=1
MGEIKIACLENNVIEILKQELQALINQKKQSEDKITILKCQLAAREAEVMTVERALAESKKIAREIEDQALQRAESTVEETKKIVREKEALIKSVESEIARLEKELELYHHLVNQLITIGKTNNTGGDRSSRENLHSVSIQEIKPFTNGSLYTIKMVCFLNARHFVSFSGTAGPVHAHSWQVQISARVNSDNPELVTFTKVIESIKTVFVPYENTILNEVYPFNIIQPTTENMALYFYNRLEDTLADLGLSLNTLSVWETPTRGIEVSNRYQEFDRILQNPEQYEVPSEFKKEAAAGVEPVPSVPIQDENKENAVEHNDREISTGNPSKYATGHWVLALAVISLFAIVAYYNILFPPAGQHYPWGADTSLHLRHAEYVYNEFRKGNYFPQFFEYSYTSFDPFIYWGSLSYYLLAFFRAITGDFILAGKYFIFTCYLLGGFSCLIFQRRLGLWPATLVGIIWTVWITNLHVAFVDGNLPRVMVTALLPVLLEMYLRVLENRKSIYAIPITVFLFQLVNLGQVYTGVGYFLCLFLFTFFLWIFQGCSFKDCLRGILVLTAGILVSAWWLLPILNNHMDTGTSTAGSGLIPATIALDPFYRFSDHDSFYWGISLLFVILANFLTWRLKLSWARSLTMCGIVLMVLTFPSLEPIYHLLPLSQLTWPLCFTDFASLGLLVSGVAFTTRNKQHWLLRFKQAPAVLLAGIFLVLMTDCLFSLGLLAKTEKDRPGLPSSELLQNPTGWRHSLIDLRKADSSPSFLLSSHPGHGRGTGWVWQGNWTSKQIIFSNHGLDQQYYPFLFRSGLYLGITDMAVADAVLTNPEEFRKAAMLAGYHRRGTDGYYSILSNDHGPYLVEKSYKCLVIGKYAEIVGLLFPEVEMGVSRYIDDYSPTFLRKYPTILLAGAEWQVKSKAEETVRNYAAAGGQVLVDLAGMSKNVLSGTPQFLGVAGEPVLLDSRLEIFGQGKNLSVPLWSATATPNSPVPAGLDKVTFYVPLGLDNVELKFIYHGNEAPVYGYKLVDGKKIGFLGGNLIHQAFLTGDKVTLDLLREILGLSSQYHAWNIIPLADFKVTKNGYQIHYRSERNLGAIVPVVAQNNMKVTIDGVLTPYSKFENLLQLDLPAGSHVITIERSLIPIQLLGIGLSAGSLLLLIFILYRVKRAGETA

SEQ ID NO: 19854 - protein, 128 aa, Desulfotomaculum putei
  misc_feature (1)..(128): tr|A0A1M4T0S6|A0A1M4T0S6_9FIRM 6-carboxy-5,6,7,8-tetrah ydropterin synthase OS=Desulfotomaculum putei DSM 12395 OX=1121429 GN=SAMN02745133_00306 PE=3 SV=1
MYELTVRSRFSAAHSLCGYPGDCARLHGHTWTLEVKVVGEKLDQMGMLVDFKEIKKQLSLVIDQLDHRLLNEIPGFGKDGLNPTAENLSYYIYQTLKQPIAAMKEGIRLKEISVWESPDAYATYREDV

SEQ ID NO: 19855 - protein, 1158 aa, Desulfotomaculum putei
  misc_feature (1)..(1158): tr|A0A1M5C8T7|A0A1M5C8T7_9FIRM 6-pyruvoyl tetrahydropte rin synthase-related domain-containing protein OS=Desul fotomaculum putei DSM 12395 OX=1121429 GN=SAMN02745133_ 02848 PE=4 SV=1
MGEIKIACLENDVIEILKQELQALINQKKQSEDKITNLKCQLAAREAEVMTVERALAESKKIAREIEDQALQRAESMVEETKKIVREKEALIKSVESEIARLEKELELYHHLVNQLITIGKTNNTGGDRSSRENLHSVSIQEIKPFTNGSLYTIKMVCFLNARHFVSFSGTAGPVHAHSWQVQISAQVNSDNPELVTFTKVIESIKTVFVPYENTILNEVYPFNIIQPTTENMALYFYNRLEDTLADLGLSLNTLSVWETPTRGIEVSNRYQEFDRILQNPEQYEVPSEFKKEAAAGVEPVPSVPIQDENKESAVEHNDREISTGNPSKYAWVLALAVISLFATVAYYNILFPPAGQHYPWGADTSLHLRHAEYVYNEFRKGNYFPQFFEYSYTSFDPFIYWGSLSYYLLAFFRAITGDFILAGKYFIFTCYLLGGFSCLIFQRRLGLWPATLVGIIWTVWITNLHVAFVDGNLPRVMVTALLPVLLEMYLRVLENRKSIYAIPITVFLFQLVNLGQVYNGVGYFLCLFLFTFFLWIFQGCSFKDCLRGILVLTAGILVSAWWLLPILNNHMDTGTSTAGSGLIPAAIALDPFYRFSDHDSFYWGISLLFVILANFLTWRLKLSWARSLTMCGIVLMVLTFPSLEPIYHLLPLSQLTWPLCFTDFASLGLLVSGVAFTTRNKQHWLLRFKQAPAVLLAGIFLVLMTDCLFSLGLLAKTEKDRPGLPSSELLQNPTGWRHSLIDLRKADSSPSFLLSSPPGHGRGTGWVWQGNWTSKQIIFSNHGLDQQYYPFLFRSGLYLGITDMAVADAVLTNPEEFRKAAMLAGYHRRGTDGYYSIWSNDHGPYLVEKSYKCLVIGKYAEIVGLLFPEVEMGVSRYIDDYSPTFLRKYPTILLAGAKWQVKSKAEETVRNYAAAGGQVLVDLAGMSKNVLSGTPQFLGVAGEPVLLDSRLEIFGQGKNLSIPLWSATATPNSPVPAGLDKVTFYVPLGLDNVELKFIYHGNEAPVYGYKLVDGKKIGFLGGNLIHQAFLTGDKVTLDLLREILGLSSQYHAWNIIPLADFKVTKNGYQIHYRSERNLGAIVPVVAQNNMKVTIDGVLTPYSKFENLLQLDLPAGSHVITIERSLIPIQLLGIGLSAGSLLLLIFILYRVKRAGETA

SEQ ID NO: 19856 - protein, 128 aa, Desulfotomaculum reducens
  misc_feature (1)..(128): tr|A4J5C6|A4J5C6_DESRM 6-carboxy-5,6,7,8-tetrahydropter in synthase OS=Desulfotomaculum reducens (strain MI-1) OX=349161 GN=Dred_1754 PE=3 SV=1
MFELTVKNKFSAAHVLCGYPGDCARLHGHTWTVEVKVFGKELNELGMLIDFKDIKKQLATIINEFDHSYINDLPGFGEDGVNPTAENLSYYIFQTLAQRISSIQMGVKLKEVSVWESPDAYATYREDF

SEQ ID NO: 19857 - protein, 127 aa, Desulfotomaculum ruminis
  misc_feature (1)..(127): tr|F6DLC1|F6DLC1_DESRL 6-carboxy-5,6,7,8-tetrahydropter in synthase OS=Desulfotomaculum ruminis (strain ATCC 23 193 / DSM 2154 / NCIMB 8452 / DL) OX=696281 GN=Desru_22 20 PE=3 SV=1
MYELTVNGKFSAAHRLCGYPGDCARLHGHTWTVQVKVIGEELDPLGMLVDFKEIKKHLAAVIDRLDHQFLNEIPGFGQGGVNPTAENLSFYIYRLLEKPILEIKKGIRLKEISVWESPDAYATYREE

SEQ ID NO: 19858 - protein, 129 aa, Desulfotomaculum sp.
  misc_feature (1)..(129): tr|A0A356UII4|A0A356UII4_9FIRM 6-carboxy-5,6,7,8-tetrah ydropterin synthase OS=Desulfotomaculum sp. OX=41211 GN =DD719_05650 PE=3 SV=1
MDLLFTVGVKREFEAAHKLEGDFGPASSLHGHTYQVEVEVSGKELDKKGVLFDLGHLKESLNKVIAPLHCRYLNELEAFKAKNPTAENVSKYILECLLPEIENKSKNIQRLKVTVWESSFAFACCSIEF

SEQ ID NO: 19859 - protein, 126 aa, Desulfotomaculum sp.
  misc_feature (1)..(126): tr|A0A356UI78|A0A356UI78_9FIRM 6-carboxy-5,6,7,8-tetrah ydropterin synthase OS=Desulfotomaculum sp. OX=41211 GN =queD PE=3 SV=1
MYEITVKKTFAAAHRLPGYKGRCAAVHGHTWTVEVSVAGVSLDENGMLIDFIQLKEIVTQITRDFDHQYLNDLKLADSVVTTHPTAENLARYIFKQLGRLLPPNLSLTKVKVWESAETAASYQEGV

SEQ ID NO: 19860 - protein, 130 aa, Desulfovibrio alaskensis
  misc_feature (1)..(130): tr|Q30ZA2|Q30ZA2_DESAG 6-carboxy-5,6,7,8-tetrahydropter in synthase OS=Desulfovibrio alaskensis (strain G20) OX =207559 GN=Dde_2197 PE=3 SV=1
MPKGIWRLTVRSDFAAAHSLRNYCGKCEALHGHNFGVEATVEGGILTPDTELLVDFKVLKNALKQVLDGLDHCVLNETPPFDTCNPSSENLARHIYRHMAPLVQPHGVRMHSVTVSEKQAQSATYMEVDE

SEQ ID NO: 19861 - protein, 129 aa, Desulfovibrio alkalitolerans
  misc_feature (1)..(129): tr|S7TG79|S7TG79_9DELT 6-carboxy-5,6,7,8-tetrahydropter in synthase OS=Desulfovibrio alkalitolerans DSM 16529 O X=1121439 GN=dsat_1745 PE=3 SV=1
MPGRWLIGVTLDFSASHCLRNYGGKCEALHGHNFSVTVEVEGRDPDPATGLVLDFKILKTETKAVLETLDHAHLNDTPPFRDVNPSSEHIARHVFRLLAERLSPYPVRLKRVQVAEKPGQWAVYLEDEP

SEQ ID NO: 19862 - protein, 130 aa, Desulfovibrio bizertensis
  misc_feature (1)..(130): tr|A0A1T4VY84|A0A1T4VY84_9DELT 6-carboxy-5,6,7,8-tetrah ydropterin synthase OS=Desulfovibrio bizertensis DSM 18 034 OX=1121442 GN=SAMN02745702_01247 PE=3 SV=1
MSEKKGKWRLTVRKDFAAAHQLRHYEGKCERMHGHNFMVEAQVEGDTLSQDTELLVDFKVLKNMLKEILGDMDHCHLNEHPAFAVHNPSSENIARHIYKGLEARLAGSGVDVKSVSVSEKPAQTATYFEE

SEQ ID NO: 19863 - protein, 123 aa, Desulfovibrio carbinolicus
  misc_feature (1)..(123): tr|A0A4P6HKR0|A0A4P6HKR0_9DELT 6-carboxy-5,6,7,8-tetrah ydropterin synthase OS=Desulfovibrio carbinolicus OX=29 6842 GN=C3Y92_07625 PE=3 SV=1
MPPIYTIAVAGDFSAAHRLPGHPGPCAAMHGHNFQVTAEICAESLINGMVADFLDVRTAMDAIFADLDHACLNDVPTLDPPTAEVLAGYILAKLKERLDDGRVRVTAVTVVESRGLAATCREA

SEQ ID NO: 19864 - protein, 130 aa, Desulfovibrio carbinolicus
  misc_feature (1)..(130): tr|A0A4P6HSG6|A0A4P6HSG6_9DELT 6-carboxy-5,6,7,8-tetrah ydropterin synthase OS=Desulfovibrio carbinolicus OX=29 6842 GN=C3Y92_14235 PE=3 SV=1
MQQRKGKWRLTVSEGFCASHCLRGYEGPCENLHGHNFGVEAVVEGERLDPKVEYLVDFKVLRGRLREILAGLDHRHLNDLPAFSLENPSSENLARFVYRQLEAALAGQPVRLVCVSVSEKDSSKATYMEE

SEQ ID NO: 19865 - protein, 124 aa, Desulfovibrio carbinoliphilus
  misc_feature (1)..(124): tr|G7QC33|G7QC33_9DELT 6-carboxy-5,6,7,8-tetrahydropter in synthase OS=Desulfovibrio carbinoliphilus subsp. oak ridgensis OX=694327 GN=DFW101_3481 PE=3 SV=1
MPGTYTITVSGAFSAAHRLPDHPGPCAFMHGHNFEVAVALTATALVRGMVADFLDVRAALDAAFARLDHACLNDIPELSPPTAEVLAAWIFGQLRERLDDGRVRVARVTVTESAGLAATYAEDA

SEQ ID NO: 19866 - protein, 131 aa, Desulfovibrio carbinoliphilus
  misc_feature (1)..(131): tr|G7QCS5|G7QCS5_9DELT 6-carboxy-5,6,7,8-tetrahydropter in synthase OS=Desulfovibrio carbinoliphilus subsp. oak ridgensis OX=694327 GN=DFW101_0214 PE=3 SV=1
MLNNKRGVWQLTVTESFSASHCLRGYEGPCENLHGHNFGVEAVVEGERLDAKVEYLMDFKKLRGRLRGILAELDHRHLNDVAPFDGENPSSENLARHIYRRLEAALAGEAVTLVAVSVSEKDTSKATYREL

SEQ ID NO: 19867 - protein, 120 aa, Desulfovibrio desulfuricans
  misc_feature (1)..(120): tr|A0A4Y3TD82|A0A4Y3TD82_DESDE 6-carboxy-5,6,7,8-tetrah ydropterin synthase OS=Desulfovibrio desulfuricans OX=8 76 GN=DDE01_11040 PE=3 SV=1
MELFVTLSFDAAHRLPCVPQGHKCGNLHGHTFSVEVHLAGPLDGDNGWVMDFGDVKRVARPVVDQLDHAYLNDIEGLENPTSENIARWLWERLVTSLPLLSKVVVRESPTSGAVYRGHSA

SEQ ID NO: 19868 - protein, 126 aa, Desulfovibrio desulfuricans
  misc_feature (1)..(126): tr|F0JJ65|F0JJ65_DESDE 6-carboxy-5,6,7,8-tetrahydropter in synthase OS=Desulfovibrio desulfuricans ND132 OX=641 491 GN=DND132_2761 PE=3 SV=1
MPGKWKLTITQEFSASHQLRNYCGKCENMHGHNFGVEVVVEGDTLDPKVQYLVDFKELKRLTRTVLDKLDHKHLNEVECFTEINPSSENLAMFIYRNLKSNMPENVSLVEVSVSEKNTSKATYWEE

SEQ ID NO: 19869 - protein, 143 aa, Desulfovibrio fairfieldensis
  misc_feature (1)..(143): tr|A0A109W3S4|A0A109W3S4_9DELT 6-pyruvoyl tetrahydrobio pterin synthase OS=Desulfovibrio fairfieldensis OX=4474 2 GN=AXF13_03180 PE=4 SV=1
MTVRHCWRLTVRDEFSAGHALRHYQGKCERLHGHNFGVELCVEGRDLTPGTELLLDFKVLKTALKDALRELDHCVLNDTPPFDRINPSSENLSRHIWRNVAARLAESPDPQARAVRLVSVSVSEKGSQSATYLEWAEGDPPVR

SEQ ID NO: 19870 - protein, 128 aa, Desulfovibrio ferrireducens
  misc_feature (1)..(128): tr|A0A1G9D9X4|A0A1G9D9X4_9DELT 6-carboxy-5,6,7,8-tetrah ydropterin synthase OS=Desulfovibrio ferrireducens OX=2 46191 GN=SAMN05660337_0968 PE=3 SV=1
MNKGTWKLKVKKDFAAAHQLRNYGGKCENIHGHNFGVEVEIEGNKLDSKIEILMDFKVLKNELSAVLETLDHKHLNEIEYFKHRNPSSENLARYVYEEMKKRVETDGIKLVYASVSENDSSVATYSEV

SEQ ID NO: 19871 - protein, 128 aa, Desulfovibrio ferrophilus
  misc_feature (1)..(128): tr|A0A2Z6B0E5|A0A2Z6B0E5_9DELT 6-carboxy-5,6,7,8-tetrah ydropterin synthase OS=Desulfovibrio ferrophilus OX=241 368 GN=DFE_2184 PE=3 SV=1
MPKGKWRLEITEDFAASHQLRHYEGKCERMHGHNFGVLAAVEGDTLTPDTELLIDFKVLRKQLKAVLSELDHRHLNEVEPFTTCNPSSENLARFIYQGLSAKLADVGVRVAYITVSEKPAQSATYFED

SEQ ID NO: 19872 - protein, 129 aa, Desulfovibrio fructosivorans
  misc_feature (1)..(129): tr|E1K0M9|E1K0M9_DESFR 6-carboxy-5,6,7,8-tetrahydropter in synthase OS=Desulfovibrio fructosivorans JJ OX=59615 1 GN=DesfrDRAFT_3429 PE=3 SV=1
MSKRGIWRLTVTESFSASHCLRGYEGPCENLHGHNFGVEAVVEGERLDPKVEYLMDFKRLRGALREILAPLDHHHLNEVPPFDVENPSSENLARYIYRKLEGALEGEAARLVSVSVLEKEASKATYMEY

SEQ ID NO: 19873 - protein, 124 aa, Desulfovibrio fructosivorans
  misc_feature (1)..(124): tr|E1JX66|E1JX66_DESFR 6-carboxy-5,6,7,8-tetrahydropter in synthase OS=Desulfovibrio fructosivorans JJ OX=59615 1 GN=DesfrDRAFT_2190 PE=3 SV=1
MPGIYAITVSGSFSAAHRLPGHPGPCAAMHGHNFAVTLHLVATSLKDGMVADFLTVRAALDAAFARLDHACLNDIPELSPPTAEVIAAWIFGEVRPRLEDGRVRLSRVTVEESKGLVASYTEDA

SEQ ID NO: 19874 - protein, 130 aa, Desulfovibrio gigas
  misc_feature (1)..(130): tr|T2G7C5|T2G7C5_DESGG 6-carboxy-5,6,7,8-tetrahydropter in synthase OS=Desulfovibrio gigas (strain ATCC 19364 / DSM 1382 / NCIMB 9332 / VKM B-1759) OX=1121448 GN=DGI_ 0099 PE=3 SV=1
MTDTWRLSVTREFAASHCLRHYQGKCEQLHGHNFSAHVVVEGHTLDPKVEILMDFGDLKKCTDQALAALDHRHLNEVPPFDRLNPSSENLARHIFHTLTPLLAAFPVRLVSVTVCEKPGQCASYSPTGAF

SEQ ID NO: 19875 - protein, 128 aa, Desulfovibrio gilichinskyi
  misc_feature (1)..(128): tr|A0A1X7EQB2|A0A1X7EQB2_9DELT 6-carboxy-5,6,7,8-tetrah ydropterin synthase OS=Desulfovibrio gilichinskyi OX=15 19643 GN=SAMN06295933_3249 PE=3 SV=1
MKQGKWKLKVKKDFAAAHQLRNYNGKCENMHGHNFGVEVEVEGCKLDPEVEIVMDFKVLKTELADVLETLDHKDLNKIEYFKNRNPSSENLARYVYEEMKKRVETDEIKLIYASVSENESSVATYSEI

SEQ ID NO: 19876 - protein, 127 aa, Desulfovibrio gracilis
  misc_feature (1)..(127): tr|A0A1T4Y2G6|A0A1T4Y2G6_9DELT 6-carboxy-5,6,7,8-tetrah ydropterin synthase OS=Desulfovibrio gracilis DSM 16080 OX=1121449 GN=SAMN02745704_02681 PE=3 SV=1
MPEPLWRLTVKLGFSASHQLRNYGGKCERMHGHNFGVEVMVEGSRLDPKIHYLVDFKVLKRLTKEILEELDHHHLNEHPFFLERNPSSENIAMYIYRQLSGKLPENVRLVEVSVAEKDAQKATYMEV

SEQ ID NO: 19877 - protein, 128 aa, Desulfovibrio hydrothermalis
  misc_feature (1)..(128): tr|L0R8Z0|L0R8Z0_9DELT 6-carboxy-5,6,7,8-tetrahydropter in synthase OS=Desulfovibrio hydrothermalis AM13 = DSM 14728 OX=1121451 GN=DESAM_20363 PE=3 SV=1
MSKGKWKLKVKKDFSAAHQLRNYGGKCENMHGHNFGVEVEIEGDRLDSRVEILMDFKELKKELSEVLETLDHKHLNSTEFFEHRNPSSENIARYIYKEMQKRVETEHIKLVYASVSEKDSSVASYSEE

SEQ ID NO: 19878 - protein, 142 aa, Desulfovibrio legallii
  misc_feature (1)..(142): tr|A0A1G7I146|A0A1G7I146_9DELT 6-carboxy-5,6,7,8-tetrah ydropterin synthase OS=Desulfovibrio legallii OX=571438 GN=SAMN05192586_101111 PE=3 SV=1
MNTHLWRLTVRDDFAAAHALRHYEGKCERLHGHNFAVELAVEGQNLTPDTEMLLDFKVLKTGLKAVLEALDHRLLNETPPFDRLNPSSENLARHIWRGMEAWLAGQADPQARAVRLYSVTVAEKGAQSATYMELPPLAAPRG

SEQ ID NO: 19879 - protein, 130 aa, Desulfovibrio litoralis
  misc_feature (1)..(130): tr|A0A1M7TAA6|A0A1M7TAA6_9DELT 6-carboxy-5,6,7,8-tetrah ydropterin synthase OS=Desulfovibrio litoralis DSM 1139 3 OX=1121455 GN=SAMN02745728_01772 PE=3 SV=1
MLKKFWRITIHSEFSAAHALRNYNGKCEHLHGHNFGVSITIQGEKLSEDTELLLDFTVLKQELKSVLELLDHKDLNAVSPFDKINPSSENIARFVFQALAPRLTKYAVTLYEVNISERGPQSASYFEVFE

SEQ ID NO: 19880 - protein, 130 aa, Desulfovibrio magneticus
  misc_feature (1)..(130): tr|C4XMR6|C4XMR6_DESMR 6-carboxy-5,6,7,8-tetrahydropter in synthase OS=Desulfovibrio magneticus (strain ATCC 70 0980 / DSM 13731 / RS-1) OX=573370 GN=DMR_13660 PE=3 SV =1
METKKGKWRLTVSEGFCASHCLRGYEGPCENLHGHNFGVEAVVEGERLDPKVEYLVDFKVLRGRLREILAGLDHRHLNDLPAFSLENPSSENLARFVYRQLEAALAGQPVRLVCVSVSEKDSSKATYMEE

SEQ ID NO: 19881 - protein, 123 aa, Desulfovibrio magneticus
  misc_feature (1)..(123): tr|C4XPJ5|C4XPJ5_DESMR 6-carboxy-5,6,7,8-tetrahydropter in synthase OS=Desulfovibrio magneticus (strain ATCC 70 0980 / DSM 13731 / RS-1) OX=573370 GN=DMR_16850 PE=3 SV =1
MPPIYTIAVAGDFSAAHRLPGHPGPCAAMHGHNFQVTAEICADSLINGMVADFLDVRTAMDAIFADLDHACLNDVPALDPPTAEVLAGYILSRLKARLDDGRVRVTAVTVVESRGLAATCREA

SEQ ID NO: 19882 - protein, 129 aa, Desulfovibrio mexicanus
  misc_feature (1)..(129): tr|A0A238ZZH6|A0A238ZZH6_9DELT 6-carboxy-5,6,7,8-tetrah ydropterin synthase OS=Desulfovibrio mexicanus OX=14704 7 GN=SAMN04488503_1694 PE=3 SV=1
MAGKWRLTIDEGFCASHQLRNYNGKCEHLHGHNFGVSVEVEGSELDPAVEILVDFGELKRLAREAVDALDHAHLNDLPAFAERNPSSENIARHLYQGIREKLAALAPQARLVSVSVSEKGTSRATYLED

SEQ ID NO: 19883 - protein, 133 aa, Desulfovibrio mexicanus
  misc_feature (1)..(133): tr|A0A238Z5Q7|A0A238Z5Q7_9DELT 6-carboxy-5,6,7,8-tetrah ydropterin synthase OS=Desulfovibrio mexicanus OX=14704 7 GN=SAMN04488503_1238 PE=3 SV=1
MKRNYELCVRGEFCAAHRLAGYPGDCRNTHGHNWGVTAYVLCHELDDIGMGLDFREIKRILREALATLDHACLNDLPPFSGQNPTAENIARHLFHDLGERLAQSAPQNGSAARVSRVRIAETPGAEVTYWEEP

SEQ ID NO: 19884 - protein, 134 aa, Desulfovibrio piger
  misc_feature (1)..(134): tr|B6WWR8|B6WWR8_9DELT 6-carboxy-5,6,7,8-tetrahydropter in synthase OS=Desulfovibrio piger ATCC 29098 OX=411464 GN=queD PE=3 SV=1
MSKKIWRLTVRDEISAGHALRHYEGKCERLHGHNFAVELTVEGDKLTENVELLLDFKVLKRALKEELALLDHQIINEVPPFDRINPSSENISRHIFQNVARRLAADASACHVRVHSVSVSEKGAQTATYLELED

SEQ ID NO: 19885 - protein, 138 aa, Desulfovibrio piger
  misc_feature (1)..(138): tr|B6WPV7|B6WPV7_9DELT Putative 6-carboxy-5,6,7,8-tetra hydropterin synthase OS=Desulfovibrio piger ATCC 29098 OX=411464 GN=DESPIG_00072 PE=4 SV=1
MISICRYHDISVGHRICGHESHCARLHGHNYRIHFTCTADELDALGRVLDFQVVKERLCQWLEDHWDHRFLVWDKDPLLEGLRALDPSVSVLPCNPSAENMARYLGEVVGPAQLEGTGARLVAVEVEETAKCKARWSL

SEQ ID NO: 19886 - protein, 128 aa, Desulfovibrio salexigens
  misc_feature (1)..(128): tr|C6BS13|C6BS13_DESAD 6-carboxy-5,6,7,8-tetrahydropter in synthase OS=Desulfovibrio salexigens (strain ATCC 14 822 / DSM 2638 / NCIB 8403 / VKM B-1763) OX=526222 GN=D esal_3346 PE=3 SV=1
MSKGKWRLKVKKDFSSAHQLRNYGGKCENMHGHNFGVEVEIEGDRLDQKVEILMDFKELKKELNEVLDTLDHKHLNSLEYFEHRNPSSENIARYIYEEMKKRVENEHVRMVFASVSEKESSVATYFED

SEQ ID NO: 19887 - protein, 131 aa, Desulfovibrio sp.
  misc_feature (1)..(131): tr|I2PZI8|I2PZI8_9DELT 6-carboxy-5,6,7,8-tetrahydropter in synthase OS=Desulfovibrio sp. U5L OX=596152 GN=DesU5 LDRAFT_1248 PE=3 SV=1
MLNNKRGVWQLTVAESFSASHCLRGYEGPCENLHGHNFGVEAVVEGGRLDAKVEYLMDFKKLRGRLRGILAELDHRHLNDVAPFDGENPSSENLARHIYRRLEAALAGEAVTLVAVSVSEKDTSKATYREL

SEQ ID NO: 19888 - protein, 143 aa, Desulfovibrio sp.
  misc_feature (1)..(143): tr|A0A396CAJ9|A0A396CAJ9_9DELT 6-carboxy-5,6,7,8-tetrah ydropterin synthase OS=Desulfovibrio sp. AM18-2 OX=2292 040 GN=queD PE=3 SV=1
MNTHLWRLTVRDDFAAAHALRHYEGKCERLHGHNFAVELTVEGQNLTPDTEMLLDFKVLKTGLKRVLETLDHRLLNETPPFDRLNPSSENLSRHIWRSMAAWLEAHPDPQARAVRLHSVTVAEKGAQSATYMELPSEVGGRAG

SEQ ID NO: 19889 - protein, 120 aa, Desulfovibrio vulgaris
  misc_feature (1)..(120): tr|A0A0E0T4X8|A0A0E0T4X8_DESVR 6-carboxy-5,6,7,8-tetrah ydropterin synthase OS=Desulfovibrio vulgaris (strain R CH1) OX=573059 GN=Deval_2449 PE=3 SV=1
MELFVTLSFDAAHRLPCVPKGHKCGNLHGHTFSVEVHLAGPLDGDNGWVMDFGDVKRVARPVVDQLDHAYLNDIEGLENPTSENIARWLWERLVTSLPLLSKVVVRESPTSGAVYRGHSA

SEQ ID NO: 19890 - protein, 120 aa, Desulfovibrio vulgaris; identical to SEQ ID NO: 19867
  misc_feature (1)..(120): tr|A0A0H3A5L6|A0A0H3A5L6_DESVV 6-carboxy-5,6,7,8-tetrah ydropterin synthase OS=Desulfovibrio vulgaris subsp. vu lgaris (strain DP4) OX=391774 GN=Dvul_0598 PE=3 SV=1

SEQ ID NO: 19891 - protein, 135 aa, Desulfovibrionaceae bacterium
  misc_feature (1)..(135): tr|A0A1J4SNJ5|A0A1J4SNJ5_9DELT 6-carboxytetrahydropteri n synthase QueD OS=Desulfovibrionaceae bacterium CG1_02 _65_16 OX=1805130 GN=AUJ49_10445 PE=4 SV=1
MKRIYELSVRAEFCAAHRLIGYPGDCRNTHGHNWDVTAYVLCEELDELGMGLDFREIKKLVREALATLDHACLNDLAPFAEQNPTAENIARHLHETLSASLAACPAAKGPGGRARISRVRVAETPGAEVTYWEEP

SEQ ID NO: 19892 - protein, 128 aa, Desulfovibrionaceae bacterium
  misc_feature (1)..(128): tr|A0A316MGS6|A0A316MGS6_9DELT 6-carboxy-5,6,7,8-tetrah ydropterin synthase OS=Desulfovibrionaceae bacterium OX =2049043 GN=queD PE=3 SV=1
MKTPVWYLTVRGEFSAAHALRHYHGKCENMHGHNYGAELTVRGEELTPDTELAMDFSQLKKIFREVLEQLDHHILNEMSPFDVINPSSENLARHIWKQMTPRLAGSPVELYSVTVSEKSAQSATYREE

SEQ ID NO: 19893 - protein, 129 aa, Desulfovibrionales bacterium
  misc_feature (1)..(129): tr|A0A1F9QB07|A0A1F9QB07_9DELT 6-carboxy-5,6,7,8-tetrah ydropterin synthase OS=Desulfovibrionales bacterium GWA 2_65_9 OX=1797915 GN=A2051_10720 PE=3 SV=1
MAGKWRLTVDEAFCASHQLRNYNGKCEHLHGHNFGVTVEVEGSELDPAVEILVDFGELKRLTREAVGALDHSHLNDLPAFTEHNPSSENLARHLYREIRDRLAALAPQARLRSVSVSEKGTSRATYMED

SEQ ID NO: 19894 - protein, 131 aa, Desulfovibrionales bacterium
  misc_feature (1)..(131): tr|A0A1F9PYF4|A0A1F9PYF4_9DELT 6-carboxy-5,6,7,8-tetrah ydropterin synthase OS=Desulfovibrionales bacterium GWA 2_65_9 OX=1797915 GN=A2051_04945 PE=3 SV=1
MTRNYELSVSAEFCAAHRLDGYPGNCKNTHGHNWGVTVFVLCTELDGLGMGLDFRDIKALVKEAISSLDHVFLNDLAPFAEQNPTAENIARHLYQELSHLLAAGLNTGAARISRVHVAETPGAGVTYWEAP

SEQ ID NO: 19895 - protein, 121 aa, Desulfurella acetivorans
  misc_feature (1)..(121): tr|W0JIU0|W0JIU0_DESAE 6-carboxy-5,6,7,8-tetrahydropter in synthase OS=Desulfurella acetivorans A63 OX=694431 G N=DESACE_04950 PE=3 SV=1
MFEICVESHFCAAHRLNNYLGACENLHGHNFKVEVVVRCKKLNQIYIGIDFKELKKYLKEILSTLDHRYLNEIDYFSKTNPTSEMIAKYIFETLKPRIKDCMLYSVSVYETSTSKVTYTED

SEQ ID NO: 19896 - protein, 121 aa, Desulfurella amilsii
  misc_feature (1)..(121): tr|A0A1X4Y002|A0A1X4Y002_9DELT 6-carboxy-5,6,7,8-tetrah ydropterin synthase OS=Desulfurella amilsii OX=1562698 GN=DESAMIL20_229 PE=3 SV=1
MFEICVESDFCAAHRLNNYLGACENLHGHNFKVEVVVRCSKLNQTYIGIDFKELKGHLKDILSALDHRYLNEIDFFSKTNPTSEMIAKYIFETLKSRIKECDLYTVSVYETPTSKATYMED

SEQ ID NO: 19897 - protein, 121 aa, Desulfurella multipotens
  misc_feature (1)..(121): tr|A0A1G6PXN8|A0A1G6PXN8_9DELT 6-carboxy-5,6,7,8-tetrah ydropterin synthase OS=Desulfurella multipotens OX=7926 9 GN=SAMN05660835_01449 PE=3 SV=1
MFEICVESDFCAAHRLNNYRGACENLHGHNFKVEVVVRCKKLNQIYIGIDFKELKKYLKEILSTLDHRYLNEIDYFSKTNPTSEMIAKYIFETLKPHIKDCMLYSVSVYETSTSKVTYTED

SEQ ID NO: 19898 - protein, 33 aa, Desulfurella sp.
  misc_feature (1)..(33): tr|A0A2N7PZR6|A0A2N7PZR6_9DELT 6-carboxytetrahydropteri n synthase QueD (Fragment) OS=Desulfurella sp. OX=19628 57 GN=C0173_04645 PE=4 SV=1
MFEIFVESDFCAAHRLNNYRGACENLHGHNFKV

SEQ ID NO: 19899 - protein, 121 aa, Desulfurella sp.
  misc_feature (1)..(121): tr|A0A2N7PYA0|A0A2N7PYA0_9DELT 6-carboxy-5,6,7,8-tetrah ydropterin synthase OS=Desulfurella sp. OX=1962857 GN=q ueD PE=3 SV=1
MFEICVESHFCAAHRLNNYLGACENLHGHNFKVEVVVRCKKLNQIYIGIDFKELKKYLKEILSTLDHRYLNEIDYFSKTNPTSEMIAKYIFETLKPRIKDCMLYSVSVYETPTSKVTYTED

SEQ ID NO: 19900 - protein, 168 aa, Desulfurellales bacterium
  misc_feature (1)..(168): tr|A0A5C7Q6P3|A0A5C7Q6P3_9DELT 6-carboxytetrahydropteri n synthase OS=Desulfurellales bacterium OX=2482794 GN=E 6Q97_10375 PE=4 SV=1
MYLGHRCYLEADPLTVVRISKEIGIDAGHRVPNHESKCRNPHGHRYRVIVHAEGPIITEPGSPDEGMLVDFAFLKQIMMQRVDAILDHGFIVYEGDHDMLDCFTFPQASEWKIVVFPYIPTAENIARWIWEQINPDIATHFRGNLKLVAVEIWETPTSMAIYEGKEVQ

SEQ ID NO: 19901 - protein, 140 aa, Desulfurellales bacterium
  misc_feature (1)..(140): tr|A0A5C7P352|A0A5C7P352_9DELT 6-carboxytetrahydropteri n synthase OS=Desulfurellales bacterium OX=2482794 GN=E 6Q97_36820 PE=4 SV=1
MITAQRYHDISCGHRVFGHESKCAHLHGHNYRVHFTIAGDLDDVGRVLDFSAIKERLCMWLESEWDHKFLIWEEDPWQQQLAILDPKGVVWVPFNPTAENMAEYLVNVVAPLRLAGTGTKLLSCTIEETRKCSATYAIGG

SEQ ID NO: 19902 - protein, 125 aa, Desulfuribacillus alkaliarsenatis
  misc_feature (1)..(125): tr|A0A1E5G6Z4|A0A1E5G6Z4_9BACL 6-carboxy-5,6,7,8-tetrah ydropterin synthase OS=Desulfuribacillus alkaliarsenati s OX=766136 GN=BHF68_02295 PE=3 SV=1
MYELKIISSFDAAHSLKGYQGDCANLHGHTWTIEVYVVGDKLNELGLLVDFKDVKKYTNEIVQRLDHQYLNNLPDFQAKELNPTAENLSKYIYDELVKKLGHLDVEVSKVAVWESPKACATYLAR

SEQ ID NO: 19903 - protein, 128 aa, Desulfuribacillus stibiiarsenatis
  misc_feature (1)..(128): tr|A0A1E5L6U8|A0A1E5L6U8_9BACL 6-carboxy-5,6,7,8-tetrah ydropterin synthase OS=Desulfuribacillus stibiiarsenati s OX=1390249 GN=BHU72_02835 PE=3 SV=1
MYELKIITHFDSAHSLRGYNGDCANLHGHTWTIEVYVEGDQLNEIGLLVDFKEVKKYTNEIIKRFDHQCINQIPGFRENELNPTAENLSRYIYEELAKLMSHIDIQLKKISVWESPNACATYFPNGKS

SEQ ID NO: 19904 - protein, 125 aa, Desulfurispirillum indicum
  misc_feature (1)..(125): tr|E6W0J9|E6W0J9_DESIS 6-carboxy-5,6,7,8-tetrahydropter in synthase OS=Desulfurispirillum indicum (strain ATCC BAA-1389 / S5) OX=653733 GN=Selin_0500 PE=3 SV=1
MFELKVTEEFASAHNLRDYQGKCENIHGHNYVVNLYVRGEKLQHNEMLVDFKVMKTCLREVMEYLDHKYLNDVPPFDQWNPTGENIARYVYQECKRLLAEQGVANATVWKVEVYETSTSSATYWE

SEQ ID NO: 19905 - protein, 123 aa, Desulfurivibrio alkaliphilus
  misc_feature (1)..(123): tr|D6Z266|D6Z266_DESAT 6-carboxy-5,6,7,8-tetrahydropter in synthase OS=Desulfurivibrio alkaliphilus (strain DSM 19089 / UNIQEM U267 / AHT2) OX=589865 GN=DaAHT2_0938 P E=3 SV=1
MYEVFTTTHFSSGHHLRNYPGNCEKPHGHNWKVKVIMRADELDELGMALDFRDLKAALKVIIDDLDHRDLNEHPAFQQENPSSENIARYIFAELKKSLSSDRYRPHKVTVLETDACGVSYSEE

SEQ ID NO: 19906 - protein, 222 aa, Desulfurobacterium atlanticum
  misc_feature (1)..(222): tr|A0A238Z3U8|A0A238Z3U8_9BACT 6-pyruvoyltetrahydropter in/6-carboxytetrahydropterin synthase OS=Desulfurobacte rium atlanticum OX=240169 GN=SAMN06265340_10648 PE=4 SV =1
MFEISKTFTFSAAHSVFSQQLNPKWTTNTYPKCRRLPGHGHDYKLTVYLCSETLDKSQMVTDFHHLSWFKQFLDRCFDHKLILSLQDSGTLLFLKKLNLIDDDVFSLPEIEKMKPSVKFYGVETDFSFVSGEIDVDAIDLSRFIYLTFDNFSCPAFSEKSVVEIDFYQRLLDGIALFKYSPTSEQMAKFFYKFINKNIEPLGVRCSRVSISETETSCATYSE

SEQ ID NO: 19907 - protein, 222 aa, Desulfurobacterium indicum
  misc_feature (1)..(222): tr|A0A1R1MN46|A0A1R1MN46_9BACT 6-pyruvoyl tetrahydropte rin synthase OS=Desulfurobacterium indicum OX=1914305 G N=BLW93_01235 PE=4 SV=1
MFEISKSFTFSAAHSVFSQQLNPKWTKNTYPKCRRLPGHGHNYKLTVYLASDSLDRSQMVTDFGHLSWFKRFLDRCFDHKLILSSQDTGSVMFLEKLGILEDGKVVLPEIEKMKPSLKFYGVNKNFTFVSGEIDVESVPLDNFHYLTFDSFSCPAFSEKSIVEIDFYQRLLDGIAIFSESPTSENMARFFFKFINESIKPMGVTCSKVTIQETETSSATYME

SEQ ID NO: 19908 - protein, 220 aa, Desulfurobacterium thermolithotrophum
  misc_feature (1)..(220): tr|F0S3K1|F0S3K1_DESTD Uncharacterized protein OS=Desul furobacterium thermolithotrophum (strain DSM 11699 / BS A) OX=868864 GN=Dester_0782 PE=4 SV=1
MFEISKVIEFSAAHSVYSQKLNPEWTKNTYPKCRRLPGHGHNYRLVVYLKSENLDFSQMVTDFGHLSWLKSFVDSCFDHKLILGMDDPALHLFFTKLGLMKSEKLVIPQIDGKKTEVDVVAVDENYRIKKLTIREVDLSEIKSYKYFSFQNFRSDSDSVEADFYQRLLDGISLFSGSPTSENLARFFFYFVSENIKPLGIKCSKVSIHETPTSCATFKER

SEQ ID NO: 19909 - protein, 123 aa, Desulfuromonadaceae bacterium
  misc_feature (1)..(123): tr|A0A1G2WEH2|A0A1G2WEH2_9DELT 6-carboxy-5,6,7,8-tetrah ydropterin synthase OS=Desulfuromonadaceae bacterium GW C2_58_13 OX=1801896 GN=A2X84_08810 PE=3 SV=1
MYHLTIHSHFAAAHNLINYQGDCENLHGHNWKVEVTVRARELDKAGLAIDFKILKRETNAVLDLLDHKYLNKIEPFVTASPSSENIARFLYETLGKRLNNDNVTVSKVNVWESEYACASYMED

SEQ ID NO: 19910 - protein, 123 aa, Desulfuromonadales bacterium
  misc_feature (1)..(123): tr|A0A1E7IH66|A0A1E7IH66_9DELT 6-carboxy-5,6,7,8-tetrah ydropterin synthase OS=Desulfuromonadales bacterium C00 003107 OX=1869309 GN=BA869_10680 PE=3 SV=1
MYYLTIHTQFAAAHNLLHYQGDCENLHGHNWKVEVTVTARELDKAGLGVDFKVLKRETNRQLDLLDHKYLNDLPAFRELSPSSENIARFLYEGLQGVLNDGNVAIDKVTVWESDYACASYVAD

SEQ ID NO: 19911 - protein, 123 aa, Desulfuromonadales bacterium
  misc_feature (1)..(123): tr|A0A1E7GXJ9|A0A1E7GXJ9_9DELT 6-carboxy-5,6,7,8-tetrah ydropterin synthase OS=Desulfuromonadales bacterium C00 003096 OX=1869311 GN=BA871_14695 PE=3 SV=1
MYYLTIHTQFAAAHNLLHYQGDCENLHGHNWKVEVTVTARELDKAGLGVDFKVLKRETNRQLDLLDHKYLNELPAFREHSPSSENIARFLYEELQGVLNDGNVAIDKVTVWESDHACASYVAD

SEQ ID NO: 19912 - protein, 123 aa, Desulfuromonas acetexigens
  misc_feature (1)..(123): tr|A0A550JL42|A0A550JL42_9DELT 6-carboxy-5,6,7,8-tetrah ydropterin synthase OS=Desulfuromonas acetexigens OX=38 815 GN=queD PE=3 SV=1
MYRLKIHTHFAAAHNLINYQGDCENLHGHNWKVEVTVTARELDKAGLGIDFKILKRETKAVLDLLDHKYLNEIEPFVSNSPSSENIARFLFEKLTARLNTDNVTVYKVNVWESEYACASYLAD

SEQ ID NO: 19913 - protein, 123 aa, Desulfuromonas acetoxidans
  misc_feature (1)..(123): tr|Q1K0N4|Q1K0N4_DESA6 6-carboxy-5,6,7,8-tetrahydropter in synthase OS=Desulfuromonas acetoxidans (strain DSM 6 84 / 11070) OX=281689 GN=Dace_2207 PE=3 SV=1
MYHLKICTHFAAAHNLINYDGDCENLHGHNWKVEVTVRAKELDESGLGIDFKILKARTKELLATLDHKYLNDLPPFKETSPSSENIGRYLFEALEETLNTDNVQVECVNVWESDNACASYSRD

SEQ ID NO: 19914 - protein, 123 aa, Desulfuromonas soudanensis
  misc_feature (1)..(123): tr|A0A0M5IL17|A0A0M5IL17_9DELT 6-carboxy-5,6,7,8-tetrah ydropterin synthase OS=Desulfuromonas soudanensis OX=16 03606 GN=queD PE=3 SV=1
MYHLTVYTHFAAAHNLINYQGDCENLHGHNWKVEVTVSARELDKAGLGIDFKILKSETKEVLGLLDHKYLNELPPFTEISPSSENLSRFLFEKLSETFNNDNVRVTKVNVWESDYACASYTAD

SEQ ID NO: 19915 - protein, 123 aa, Desulfuromonas sp.
  misc_feature (1)..(123): tr|A0A2N6E1T9|A0A2N6E1T9_9DELT 6-carboxy-5,6,7,8-tetrah ydropterin synthase OS=Desulfuromonas sp. OX=892 GN=que D PE=3 SV=1
MYRLTIFTHFAAAHNLVNYQGDCENLHGHNWKVEVTVAARELDKSGLGVDFKVLKRETKQALGLLDHSYLNDLEPFKGLSPSSENIARYLFETLGERLDTDNITVEQVNVWESENACASYRKD

SEQ ID NO: 19916 - protein, 123 aa, Desulfuromonas sp.
  misc_feature (1)..(123): tr|A0A357YGZ9|A0A357YGZ9_9DELT 6-carboxy-5,6,7,8-tetrah ydropterin synthase OS=Desulfuromonas sp. OX=892 GN=que D PE=3 SV=1
MFHLTVHTFFAAAHNLINYQGDCENLHGHNWKVEVTVGAQELDKAGLGIDFKILKSTLRTLLETLDHKHLNQVPPFDVISPSSENIARFLFDRLSDQLNNANIAVEKVNVWESDYACASYTRD

SEQ ID NO: 19917 - protein, 123 aa, Desulfuromonas thiophila
  misc_feature (1)..(123): tr|A0A1G7AK65|A0A1G7AK65_9DELT 6-carboxy-5,6,7,8-tetrah ydropterin synthase OS=Desulfuromonas thiophila OX=5766 4 GN=SAMN05661003_10455 PE=3 SV=1
MYRLKIFTHFAAAHNLMHYEGDCEHLHGHNWKVEVTVCAQELDQAGLGIDFKILKARTKEVLAQLDHKYLNELEPFNQLSPSSENIACYLFGQLSACLNSANVAVEVVTVWESDQACASYSLT

SEQ ID NO: 19918 - protein, 123 aa, Desulfuromusa kysingii
  misc_feature (1)..(123): tr|A0A1H4D241|A0A1H4D241_9DELT 6-carboxy-5,6,7,8-tetrah ydropterin synthase OS=Desulfuromusa kysingii OX=37625 GN=SAMN05660420_02788 PE=3 SV=1
MYHLTILTHFAAAHNLLNYQGDCENLHGHNWKIEVTVNTEELNDAGLGIDFKILKKHTKEVMNYLDHKYLNDLEAFKGISPSSEHIAKFIYDRLLESLSPYAVHLEKITVWESDNAYATYTQS

SEQ ID NO: 19919 - protein, 122 aa, Dethiosulfatarculus sandiegensis
  misc_feature (1)..(122): tr|A0A0D2JUJ3|A0A0D2JUJ3_9DELT 6-carboxy-5,6,7,8-tetrah ydropterin synthase OS=Dethiosulfatarculus sandiegensis OX=1429043 GN=X474_14680 PE=3 SV=1
MYELTVLGKFAAAHSLRNFKGKCEDLHGHNWKIEVVVTGTELDKADLLMDFGDLKALMNQALDRLDHKYLNELPPFDQLNPSSEQIAKHLFSTIAQGLPSQVTMKSVSAWESDNAKATYLGE

SEQ ID NO: 19920 - protein, 139 aa, Dethiosulfatibacter aminovorans
  misc_feature (1)..(139): tr|A0A1M6AS51|A0A1M6AS51_9FIRM 6-carboxy-5,6,7,8-tetrah ydropterin synthase OS=Dethiosulfatibacter aminovorans DSM 17477 OX=1121476 GN=SAMN02745751_00224 PE=3 SV=1
MYLLKAEHSFDSAHFLAGYDGKCSNIHGHRWTVEVEIQSENLVADGKLKGMIVDFSELKEDVKELVNDLDHALIIQKDTMRKETLNCLVEDGFKMIEVDFRPTAENFSFHFFSEMEKKGYDVKRTRVYETPNNSAVYEK

SEQ ID NO: 19921 - protein, 121 aa, Dethiosulfovibrio peptidovorans
  misc_feature (1)..(121): tr|D2Z7N8|D2Z7N8_9BACT 6-carboxy-5,6,7,8-tetrahydropter in synthase OS=Dethiosulfovibrio peptidovorans DSM 1100 2 OX=469381 GN=Dpep_1459 PE=3 SV=1
MLLRKEFTFDAAHRLERYRGKCEALHGHTYRLAVTLNGRSDDEDMVFDFTELKRIVSEKILTELDHAYLNDVMDQPTAENIALWVWRKLDESVKRPNCELHSVQIWETATSSVIVFREDVE

SEQ ID NO: 19922 - protein, 122 aa, Dethiosulfovibrio peptidovorans
  misc_feature (1)..(122): tr|A0A2G6M633|A0A2G6M633_9BACT 6-carboxy-5,6,7,8-tetrah ydropterin synthase OS=Dethiosulfovibrio peptidovorans OX=47055 GN=queD PE=3 SV=1
MFLRKEFTFDAAHRLERYRGKCEALHGHTYRLAVTLQGTPDHEDIVFDFTELKRLVTDQVLSHLDHSYLNDILDQPTAENIALWVWRILDTQVRRPNCELYSIRLWETATSSVIIYREDVTK

SEQ ID NO: 19923 - protein, 123 aa, Dethiosulfovibrio salsuginis
  misc_feature (1)..(123): tr|A0A1X7KEJ9|A0A1X7KEJ9_9BACT 6-carboxy-5,6,7,8-tetrah ydropterin synthase OS=Dethiosulfovibrio salsuginis OX= 561720 GN=SAMN06275492_1263 PE=3 SV=1
MLLKKEFTFDAAHRLERYRGKCEALHGHTYRLAVTLKGHRDDDDMVFDFTELKKLVTAKVLDRLDHAYLNDVMDQPTAENIALWVWDELDGEVNRPNCKLHTVQVWETATSSVIVDREDAESR

SEQ ID NO: 19924 - protein, 115 aa, Devosia elaeis
  misc_feature (1)..(115): tr|A0A178I6K0|A0A178I6K0_9RHIZ 6-carboxy-5,6,7,8-tetrah ydropterin synthase OS=Devosia elaeis OX=1770058 GN=A38 40_00945 PE=3 SV=1
MTKEFHFSASHQLTSLPPDHQCARLHGHNYVVEVELTANELNEHGFVRDYQDLSVLKRHIDEVFDHRHLNDVLGHDRVTAECLAQYFYVWCKQRLPEASAVRVSETAKTWAEYRP

SEQ ID NO: 19925 - protein, 115 aa, Devosia elaeis
  misc_feature (1)..(115): tr|A0A178HR26|A0A178HR26_9RHIZ 6-carboxy-5,6,7,8-tetrah ydropterin synthase OS=Devosia elaeis OX=1770058 GN=A38 40_14730 PE=3 SV=1
MTKEFHFSASHQLASLPPDHQCARLHGHNYIVEVELTADELNEHGFVRDYQDLSVLKRHIDEAFDHRHLNDVLGHDKVTAECLAKHFFDWCKQRLPEASAVRVSETAKTWAEYRP

SEQ ID NO: 19926 - protein, 119 aa, Devosia psychrophila
  misc_feature (1)..(119): tr|A0A0F5PZI0|A0A0F5PZI0_9RHIZ 6-carboxy-5,6,7,8-tetrah ydropterin synthase OS=Devosia psychrophila OX=728005 G N=SAMN04488059_13911 PE=3 SV=1
MTFRITKEFHFSASHQLASLPPDHQCARLHGHNYILEVELSADQLNEYGFVRDYQDLSVLKQHIDETFDHRHLNDVLGHDRVTAECLAKHFFDWCNVRLPETSAVRVSETAKTWAEYRP

SEQ ID NO: 19927 - protein, 119 aa, Devosia riboflavina
  misc_feature (1)..(119): tr|A0A087LYJ7|A0A087LYJ7_9RHIZ 6-carboxy-5,6,7,8-tetrah ydropterin synthase OS=Devosia riboflavina OX=46914 GN= JP75_19035 PE=3 SV=1
MTFRITKEFHFSASHQLASLPSDHQCARLHGHNYIVEVELSADQLNEYGFVRDYQDLSLLKQYIDEAFDHRHLNDVLAHDRVTAECLAKHFFDWCKARLPEASAVRVSETAKTWAEYRP

SEQ ID NO: 19928 - protein, 119 aa, Devosia sp.
  misc_feature (1)..(119): tr|A0A2L1S7B0|A0A2L1S7B0_9RHIZ 6-carboxy-5,6,7,8-tetrah ydropterin synthase OS=Devosia sp. I507 OX=2083786 GN=q ueD PE=3 SV=1
MTFRITKEFHFSASHQLTSLPPDHQCARLHGHNYVVEVELTANELNEHGFVRDYQDLSVLKRHIDEAFDHRHLNDVLGHDRVTAECLAQYFYVWCKQRLPEASAVRVSETAKTWAEYRP

SEQ ID NO: 19929 - protein, 109 aa, Dialister invisus
  misc_feature (1)..(109): tr|C9LPW8|C9LPW8_9FIRM Putative queuosine biosynthesis protein QueD OS=Dialister invisus DSM 15470 OX=592028 G N=GCWU000321_01599 PE=4 SV=1
MFTVTKRMEISGAHFLRLNYESKCTSMHGHNWIVTVTVQNDKLDENGMVVDFTKIKDIVNLFDHRCANDIMEGLNPTAENMAKWLCDRIPHCIRVAVQETEGNTAVYEK

SEQ ID NO: 19930 - protein, 109 aa, Dialister invisus; identical to SEQ ID NO: 19929
  misc_feature (1)..(109): tr|R5SNF6|R5SNF6_9FIRM Putative 6-pyruvoyl tetrahydrobi opterin synthase OS=Dialister invisus CAG:218 OX=126307 2 GN=BN540_01211 PE=4 SV=1

SEQ ID NO: 19931 - protein, 109 aa, Dialister micraerophilus
  misc_feature (1)..(109): tr|F2BWC7|F2BWC7_9FIRM 6-pyruvoyl-tetrahydropterin synt hase OS=Dialister micraerophilus DSM 19965 OX=888062 GN =HMPREF9083_0494 PE=4 SV=1
MYTVTKRMEISGAHFLKLDYESKCKKLHGHNWIVTITVQSETLNEHGMVVDFTDIKKVVNRLDHNVVNEVIGSMNPTAENIAKWLCDQIPNCIKVSVQETEGNIATYEK

SEQ ID NO: 19932 - protein, 109 aa, Dialister microaerophilus; identical to SEQ ID NO: 19931
  misc_feature (1)..(109): tr|E4L7B4|E4L7B4_9FIRM Putative queuosine biosynthesis protein QueD OS=Dialister microaerophilus UPII 345-E OX =910314 GN=HMPREF9220_1262 PE=4 SV=1

SEQ ID NO: 19933 - protein, 109 aa, Dialister pneumosintes
  misc_feature (1)..(109): tr|A0A1B3WEU1|A0A1B3WEU1_9FIRM 6-carboxytetrahydropteri n synthase QueD OS=Dialister pneumosintes OX=39950 GN=B CB69_05785 PE=4 SV=1
MYTITKRMEISGAHILSLEYESKCTKLHGHNWIITVTAQSETLNHNGMVVDFTHIKKVVNQLDHVCINDVIKDRNPTAENIAKWIYDQIPHCVRVSVEETEGNVATYEA

SEQ ID NO: 19934 - protein, 109 aa, Dialister sp.
  misc_feature (1)..(109): tr|A0A3D2VIV6|A0A3D2VIV6_9FIRM 6-carboxytetrahydropteri n synthase QueD OS=Dialister sp. OX=1955814 GN=queD PE= 4 SV=1
MFTVTKRMEISGAHFLRLNYESKCTSMHGHNWIVTVTVQNDKLDENGMVVDFTKIKDVVNLFDHRCANDIMEGLNPTAENMAKWLCDRIPHCIRVAVQETEGNTAVYEK

SEQ ID NO: 19935 - protein, 109 aa, Dialister sp.
  misc_feature (1)..(109): tr|R7PR99|R7PR99_9FIRM 6-pyruvoyl-tetrahydropterin synt hase OS=Dialister sp. CAG:588 OX=1262871 GN=BN722_00772 PE=4 SV=1
MYTITKRMEISGAHILSLDYESKCTKLHGHNWIITVTAQSETLNHNGMVVDFTHIKKVVNQLDHVCINDVIKDRNPTAENIAKWIYDQIPHCVRVSVEETEGNVATYEA

SEQ ID NO: 19936 - protein, 109 aa, Dialister succinatiphilus
  misc_feature (1)..(109): tr|H1D0W4|H1D0W4_9FIRM Queuosine biosynthesis protein Q ueD OS=Dialister succinatiphilus YIT 11850 OX=742743 GN =HMPREF9453_01252 PE=4 SV=1
MFTVTKRMEVSGAHFLHLDYESKCTNLHGHNWIITVTVQNDTLDKNGMVVDFSKIKEIVNQFDHHLINDVLGDLNPTAENMAKWICDHIPYCIRVSVQETEGNVATYEK

SEQ ID NO: 19937 - protein, 121 aa, Diaphorobacter sp.
  misc_feature (1)..(121): tr|A0A0J0UP50|A0A0J0UP50_9BURK 6-carboxy-5,6,7,8-tetrah ydropterin synthase OS=Diaphorobacter sp. J5-51 OX=6804 96 GN=OX89_04845 PE=3 SV=1
MQFTVHQRIFFDAAHTLRREIEAEGSRRIHGHTYHAEVSLTGPLDPATGMVQDLGYLRQRLAVLRERLDHHLLDEVPGLGAPTLENLCRFIAEALSDMQPPPSRVRVWRDALGDGCTLELS

SEQ ID NO: 19938 - protein, 134 aa, Dichotomicrobium thermohalophilum
  misc_feature (1)..(134): tr|A0A397Q9U9|A0A397Q9U9_9RHIZ 6-pyruvoyl-tetrahydropte rin synthase OS=Dichotomicrobium thermohalophilum OX=93 3063 GN=BXY53_0071 PE=4 SV=1
MYSVEVSDHIMIAHSLKKEFFGPAQNLHGATFVITVAFFRQTLTENNVVVDIGRALDVLNEVLSPLRYANLDEKPEFAGQLTTTEFLCRHIFDQFALAVRDGRLGDGAEGLERIRVTLQETPNAAATYEGRVGT

SEQ ID NO: 19939 - protein, 123 aa, Dichotomicrobium thermohalophilum
  misc_feature (1)..(123): tr|A0A397Q5Z5|A0A397Q5Z5_9RHIZ 6-carboxy-5,6,7,8-tetrah ydropterin synthase OS=Dichotomicrobium thermohalophilu m OX=933063 GN=BXY53_1618 PE=3 SV=1
MTRIYKEFTFEAAHYLPSAPPGHRNARVHGHSFHVRVSIDGEPDPETGLIYHFDDLSAAIADVREMLDHQMLNDVPGLQAPTLEMISRWIWEQLAPRVPGLAEVALSRPSCQEGCIYTGGSSQ

SEQ ID NO: 19940 - protein, 122 aa, Dickeya aquatica
  misc_feature (1)..(122): tr|A0A375AE28|A0A375AE28_9GAMM 6-carboxy-5,6,7,8-tetrah ydropterin synthase OS=Dickeya aquatica OX=1401087 GN=q ueD PE=3 SV=1
MPTTLFKDFQFEAAHRLPHVPAGHKCGRLHGHSFMVRLEITGEVSPYTGWVMDFAELKAAFKPTWERLDHHYLNDIPGLENPTSEVLARWIWQQLKPTLPLLSAVTVKETCTAGCVYRGEEA

SEQ ID NO: 19941 - protein, 122 aa, Dickeya chrysanthemi
  misc_feature (1)..(122): tr|C6CLR5|C6CLR5_DICC1 6-carboxy-5,6,7,8-tetrahydropter in synthase OS=Dickeya chrysanthemi (strain Ech1591) OX =561229 GN=Dd1591_0823 PE=3 SV=1
MPTTLFKDFQFEAAHRLPHVPDGHKCGRLHGHSFMVRLEITGEVDPYTGWVMDFAELKAAFKPTWEQLDHHYLNDIQGLENPTSEVLAHWIWQQLKPTLPLLSAVTVKETCTAGCVYRGEND

SEQ ID NO: 19942 - protein, 122 aa, Dickeya dadantii
  misc_feature (1)..(122): tr|E0SDK7|E0SDK7_DICD3 6-carboxy-5,6,7,8-tetrahydropter in synthase OS=Dickeya dadantii (strain 3937) OX=198628 GN=ygcM PE=3 SV=1
MPTTLFKDFQFEAAHRLPHVPNGHKCGRLHGHSFMVRLEITGEVDPYTGWVMDFAELKAAFKPTWERLDHHYLNDIPGLENPTSEVLARWIWQQLKPTLPLLSAVTVKETCTAGCVYRGEDD

SEQ ID NO: 19943 - protein, 122 aa, Dickeya dianthicola
  misc_feature (1)..(122): tr|A0A385Y122|A0A385Y122_9GAMM 6-carboxy-5,6,7,8-tetrah ydropterin synthase OS=Dickeya dianthicola OX=204039 GN =queD PE=3 SV=1
MPTTLFKDFQFEAAHRLPHVPNGHKCGRLHGHSFMVRLEVTGEVDPYTGWVMDFAELKAAFKPTWERLDHHYLNDIPGLENPTSEVMARWIWQQLKPTLPLLSAVTVKETCTAGCIYRGEDD

SEQ ID NO: 19944 - protein, 122 aa, Dickeya fangzhongdai
  misc_feature (1)..(122): tr|A0A2K8QQ74|A0A2K8QQ74_9GAMM 6-carboxy-5,6,7,8-tetrah ydropterin synthase OS=Dickeya fangzhongdai OX=1778540 GN=queD PE=3 SV=1
MPTTLFKDFQFEAAHRLPHVPNGHKCGRLHGHSFMVRLEITGEVDPYTGWVMDFAELKAAFKPTWEQLDHHYLNDIPGLENPTSEVLARWIWQQLKPTLPLLSAVTVKETCTAGCVYRGEDD

SEQ ID NO: 19945 - protein, 121 aa, Dickeya paradisiaca
  misc_feature (1)..(121): tr|C6CAW7|C6CAW7_DICP7 6-carboxy-5,6,7,8-tetrahydropter in synthase OS=Dickeya paradisiaca (strain Ech703) OX=5 79405 GN=Dd703_0857 PE=3 SV=1
MATTLFKDFQFEAAHRLPHVPEGHKCGRLHGHSFMVRLEVTGEVDPHTGWVMDFAELKAVFKPIWQRLDHYYLNDIPGLENPTSEVLAQWIWQQLKPSLPELSAVTVKETCTAGCVYRGGA

SEQ ID NO: 19946 - protein, 122 aa, Dickeya solani
  misc_feature (1)..(122): tr|A0A2K8VXF7|A0A2K8VXF7_9GAMM 6-carboxy-5,6,7,8-tetrah ydropterin synthase OS=Dickeya solani RNS 08.23.3.1.A O X=1240086 GN=D083_1576 PE=3 SV=1
MPTTLFKDFQFEAAHRLPHVPNGHKCGRLHGHSFMVRLEITGEVDPYTGWVMDFAELKAAFKPTWERLDHHYLNDIPGLENPTSEVLARWIWQQLKPTLPLLSAVTVKETCTAGCIYRGEDD

SEQ ID NO: 19947 - protein, 122 aa, Dickeya sp.
  misc_feature (1)..(122): tr|A0A5B8I345|A0A5B8I345_9GAMM 6-carboxy-5,6,7,8-tetrah ydropterin synthase OS=Dickeya sp. NCPPB 569 OX=568768 GN=queD PE=3 SV=1
MPTTLFKDFQFEAAHRLPHVPDGHKCGRLHGHSFMVRLEITGEIDPYTGWVMDFAELKAAFKPTWERLDHHYLNDIPGLENPTSEVLARWIWQQLKPTLPLLSTVTVKETCTAGCVYRGEDN

SEQ ID NO: 19948 - protein, 122 aa, Dickeya sp.; identical to SEQ ID NO: 19944
  misc_feature (1)..(122): tr|A0A3N0FWZ1|A0A3N0FWZ1_9GAMM 6-carboxy-5,6,7,8-tetrah ydropterin synthase OS=Dickeya sp. FVG1-MFV-O17 OX=2487 136 GN=queD PE=3 SV=1

SEQ ID NO: 19949 - protein, 122 aa, Dickeya zeae
  misc_feature (1)..(122): tr|D2BV85|D2BV85_DICZ5 6-carboxy-5,6,7,8-tetrahydropter in synthase OS=Dickeya zeae (strain Ech586) OX=590409 G N=Dd586_3320 PE=3 SV=1
MPTTLFKDFQFEAAHRLPHVPDGHKCGRLHGHSFMVRLEITGEVDPYTGWVMDFAELKAAFKPTWERLDHHYLNEIPGLENPTSEVLARWIWQQLKPTLPLLSAVTVKETCTAGCIYRGEED

SEQ ID NO: 19950 - protein, 122 aa, Dickeya zeae; identical to SEQ ID NO: 19949
  misc_feature (1)..(122): tr|A0A0A8FGK2|A0A0A8FGK2_9GAMM 6-carboxy-5,6,7,8-tetrah ydropterin synthase OS=Dickeya zeae EC1 OX=1427366 GN=W 909_15940 PE=3 SV=1

SEQ ID NO: 19951 - protein, 166 aa, Dictyobacter alpinus
  misc_feature (1)..(166): tr|A0A402B0J6|A0A402B0J6_9CHLR 6-pyruvoyl tetrahydrobio pterin synthase OS=Dictyobacter alpinus OX=2014873 GN=K DA_03210 PE=4 SV=1
MAGTRILRKVKVEGGYLHFSSAHFITYSGKCERLHGHNYGVLVEVEGELGPDNVVFDFTVLKRRTKEICQHLDHRFLLPLHNAQLELTRLSDAWEIRFRERRYVFPLTDVVELPIENSTAELLAQYICEELCKVLEEYPAANLHTIMVGVEEAPTQMAYYQKDLRS

SEQ ID NO: 19952 - protein, 151 aa, Dictyobacter alpinus
  misc_feature (1)..(151): tr|A0A402BIC7|A0A402BIC7_9CHLR 6-carboxy-5,6,7,8-tetrah ydropterin synthase OS=Dictyobacter alpinus OX=2014873 GN=KDA_66170 PE=4 SV=1
MTKYAIITKEFTFEAAHHLPNHRGKCRRPHGHSYRLQISLRGPIIEAPGESSDGMVMDFDDLKSIVNTTIIDNLSDAVPRGDAAGPLEKGGMDHNDLNTITGIRTTAENLVHWIWDALVAGGIPDPLLYRIRLWETEKGYVEITQAERGEV

SEQ ID NO: 19953 - protein, 151 aa, Dictyobacter aurantiacus
  misc_feature (1)..(151): tr|A0A401ZQB6|A0A401ZQB6_9CHLR 6-carboxy-5,6,7,8-tetrah ydropterin synthase OS=Dictyobacter aurantiacus OX=1936 993 GN=KDAU_64000 PE=4 SV=1
MTRYAIITKEFTFEAAHHLPNHRGKCRRPHGHSYRLQISLRGPILQAPGESSDGMVMDFDDVKTIVNATILEQLSDAVPRGDAAQVVEKGGMDHNDLNALTGIRTTAENLVHWVWDALVAGGIPDALLYRIRLWETEKGYVEITHAEREEV

SEQ ID NO: 19954 - protein, 166 aa, Dictyobacter aurantiacus
  misc_feature (1)..(166): tr|A0A401Z8J3|A0A401Z8J3_9CHLR 6-pyruvoyl tetrahydrobio pterin synthase OS=Dictyobacter aurantiacus OX=1936993 GN=KDAU_04670 PE=4 SV=1
MAGTQVMRKVKVEGGYLNFSSAHFITYSGKCERLHGHNYGVLVEVEGELGSDGLVFDFTILKKRTKEICQQLDHRFLLPVRNPHLELTRSSDGWEVRFRERRYVFPHSDVVELPIENSTSELLAQYICEKLCQVLEEYPTAGLRSIMVGVEEAPTQMAFYRQELHL

SEQ ID NO: 19955 - protein, 145 aa, Dictyobacter kobayashii
  misc_feature (1)..(145): tr|A0A402AGI3|A0A402AGI3_9CHLR 6-carboxy-5,6,7,8-tetrah ydropterin synthase OS=Dictyobacter kobayashii OX=20148 72 GN=KDK_20280 PE=3 SV=1
MVYLTRRVTFSAAHRLWSNHLTEEENYQIYDKCANPNGHGHNYILEVTVHGQPDPKTGMVMNLTDMKKITNEQVVDWVDHKHLNYDVPWLEGVIPTAEMLAIKFWERLERGFPTGLLYEVTLHETENNSASYRGEHTDALEAGIA

SEQ ID NO: 19956 - protein, 166 aa, Dictyobacter kobayashii
  misc_feature (1)..(166): tr|A0A402ACL7|A0A402ACL7_9CHLR 6-pyruvoyl tetrahydrobio pterin synthase OS=Dictyobacter kobayashii OX=2014872 G N=KDK_06390 PE=4 SV=1
MAGTRIMRKVKVEGGYLNFSSAHFITYSGKCERLHGHNYGVLVEVEGELGPDNLVFDFTVLKKRTKEICQHLDHRFLLPLRNPQLELTRLPDAWDIRFKEKHYVFPLADVVELPIENSTAELLAQYICEELCQLLEEYPTAGLHNIMVGVEEAPTQMAYYQKDLQG

SEQ ID NO: 19957 - protein, 151 aa, Dictyobacter sp.
  misc_feature (1)..(151): tr|A0A5A5T6E4|A0A5A5T6E4_9CHLR 6-carboxy-5,6,7,8-tetrah ydropterin synthase OS=Dictyobacter sp. Uno17 OX=201487 4 GN=KDI_05160 PE=4 SV=1
MTRYAIITKEFTFEAAHHLPNHRGKCRRPHGHSYRLQISLRGPINQTPGESSDGMVMDFDDLKTIVNATILEQLSDSVPRGKEAQLVEHGGLDHNDLNALTGIRTTAENLVHWIWDALVAGGVPDTLLYRIRLWETEKGYVEITHAEREEL

SEQ ID NO: 19958 - protein, 145 aa, Dictyobacter sp.
  misc_feature (1)..(145): tr|A0A5A5T8Z1|A0A5A5T8Z1_9CHLR 6-carboxy-5,6,7,8-tetrah ydropterin synthase OS=Dictyobacter sp. Uno17 OX=201487 4 GN=KDI_10230 PE=3 SV=1
MVYLTRRVTFSAAHRLWSNHLTEEENYRIYDKCANGNGHGHNYVLEVTVCGEPNEHTGMVINLTDLKRITNEQVVNWVDHKHLNYDVPWLEGVIPTAEMLAIKFWERLERGFPEGLLYEVKLHETENNIATYHGDRESVSKAGQV

SEQ ID NO: 19959 - protein, 125 aa, Dictyoglomus sp.
  misc_feature (1)..(125): tr|A0A2J6XV97|A0A2J6XV97_9BACT 6-carboxy-5,6,7,8-tetrah ydropterin synthase OS=Dictyoglomus sp. NZ13-RE01 OX=20 10949 GN=queD PE=3 SV=1
MFLIKEFYFDSAHNLIKYKGKCENLHGHTYKLVVVIEGIPNDEGMIMDFVELKEIVKEHVLKYLDHAYLNDIIEQPTAENIAIWIWNRLYDLLKRDNCQLFEIQVWETRESGVVYRGEKFERRTE

SEQ ID NO: 19960 - protein, 125 aa, Dictyoglomus thermophilum
  misc_feature (1)..(125): tr|B5YCT3|B5YCT3_DICT6 6-carboxy-5,6,7,8-tetrahydropter in synthase OS=Dictyoglomus thermophilum (strain ATCC 3 5947 / DSM 3960 / H-6-12) OX=309799 GN=DICTH_0459 PE=3 SV=1
MFVIRKFKFDAAHNLESYKGKCERLHGHTYRLVVIVEGIPDSEGMIIDFVELKDIVKREVIDILDHSYINEIIKQPTAENIAIWIWQRLEEKLKRGNCHLYEIQVWETEDSGVIYRGEKIERRSE

SEQ ID NO: 19961 - protein, 125 aa, Dictyoglomus thermophilum; identical to SEQ ID NO: 19960
  misc_feature (1)..(125): tr|A0A5D4XH94|A0A5D4XH94_DICTH 6-carboxy-5,6,7,8-tetrah ydropterin synthase OS=Dictyoglomus thermophilum OX=14 GN=queD PE=3 SV=1

SEQ ID NO: 19962 - protein, 125 aa, Dictyoglomus turgidum
  misc_feature (1)..(125): tr|B8DZG9|B8DZG9_DICTD 6-carboxy-5,6,7,8-tetrahydropter in synthase OS=Dictyoglomus turgidum (strain Z-1310 / D SM 6724) OX=515635 GN=Dtur_0614 PE=3 SV=1
MFLIREFKFDAAHNLESYKGKCEKLHGHTYRLVIVVEGVPDSEGMIIDFVELKDIVKEEVINVLDHSYINEIMNQPTAENIAIWVWKRLEKKLQRDNCHLYEVQVWETEDSGVIYRGEKIEGCSK

SEQ ID NO: 19963 - protein, 138 aa, Dinghuibacter silviterrae
  misc_feature (1)..(138): tr|A0A4R8DEM9|A0A4R8DEM9_9BACT 6-pyruvoyltetrahydropter in/6-carboxytetrahydropterin synthase OS=Dinghuibacter silviterrae OX=1539049 GN=EDB95_3509 PE=4 SV=1
MNTNRVAVYRREHFNAAHRLHNPSWDAATNERVFGKCNLPHYHGHNYELIVKLTGVPDPDTGYVMDLKRLSDLVHEEVIQRFDHKNLNLDTVEFRDLNPTAEHIAMVIYRLLRPHIPVDLDLEVTLYETDRNFVSYPA

SEQ ID NO: 19964 - protein, 136 aa, Dinghuibacter silviterrae
  misc_feature (1)..(136): tr|A0A4R8DE99|A0A4R8DE99_9BACT 6-pyruvoyltetrahydropter in/6-carboxytetrahydropterin synthase OS=Dinghuibacter silviterrae OX=1539049 GN=EDB95_3508 PE=4 SV=1
MVYLTRVEHFNAAHKLYNPRWSTAQNEAVFGKCANENWHGHNYELYVTVKGEVNEDTGFLMDVKVLSDLVKTHVLDIVDHRNLNLDVPFLKDKMCSTENLAKGIWAQLAPHLPQGVRLHAIKLYETPRIYVEFFGE

SEQ ID NO: 19965 - protein, 123 aa, Dissulfuribacter thermophilus
  misc_feature (1)..(123): tr|A0A1B9F7P7|A0A1B9F7P7_9DELT 6-carboxy-5,6,7,8-tetrah ydropterin synthase OS=Dissulfuribacter thermophilus OX =1156395 GN=DBT_0716 PE=3 SV=1
MYEIFVEREFAAAHYLRDYPGNCEHLHGHNWIVRAFVRVEKLNEIHVGIDFRDLKKALDSVLQELDHTNINDHPAFQERNPSSENIAYFIFHSLKERLQHIEGVEVAKVTVCETPKTGVTYSE

SEQ ID NO: 19966 - protein, 119 aa, Dokdonella fugitiva
  misc_feature (1)..(119): tr|A0A4R2IA41|A0A4R2IA41_9GAMM 6-carboxy-5,6,7,8-tetrah ydropterin synthase OS=Dokdonella fugitiva OX=328517 GN =EV148_103241 PE=3 SV=1
MEISKTFRIEAAHRLPNVPAGHKCSRLHGHSFAIAIHVSGPLDPELGWVMDYADLKAAFAPLYDQLDHRYLNEVPGLENPTSEQLARWIWERLAPRLPLLSKVVVNETCTTACEYRGKD

SEQ ID NO: 19967 - protein, 120 aa, Dokdonella immobilis
  misc_feature (1)..(120): tr|A0A1I4VHL7|A0A1I4VHL7_9GAMM 6-carboxy-5,6,7,8-tetrah ydropterin synthase OS=Dokdonella immobilis OX=578942 G N=SAMN05216289_10292 PE=3 SV=1
MEIYKKFRIEAAHRLPNVPDGHKCARLHGHSFEIEVVLRGPVAAEPGWVCDFADVGAAFAPLFEQLDHHYLNDVPGLENPTSENLAIWIWNALQPRLPLLARVTVHETCTSGCHYLGPTA

SEQ ID NO: 19968 - protein, 121 aa, Dokdonella koreensis
  misc_feature (1)..(121): tr|A0A160DW48|A0A160DW48_9GAMM 6-carboxy-5,6,7,8-tetrah ydropterin synthase OS=Dokdonella koreensis DS-123 OX=1 300342 GN=I596_2403 PE=3 SV=1
MDIFKIFQVEAAHRLPNVPAGHKCARLHGHSFRIEIHVSGPVDPHAGWVMDFADLKAAFAPIHDRIDHRLLNDIPGLENPTSENLARWLWEALVPHLPQLARVVVHETCTSGCSYAGPDAR

SEQ ID NO: 19969 - protein, 150 aa, Dokdonia donghaensis
  misc_feature (1)..(150): tr|A0A0A2GX50|A0A0A2GX50_9FLAO 6-pyruvoyl tetrahydropte rin synthase OS=Dokdonia donghaensis DSW-1 OX=1300343 G N=NV36_08410 PE=4 SV=1
MSKIRITKQFTFETGHALYGYDGKCKNVHGHSYKLSVTVIGEPITDMGNAKLGMVIDFGDLKKIVNREIVNVFDHATVFNKNTPHVELAKELSDRGHDVLLVDYQPTSEMMVIDFAAKIQSFLPDTIKLHSLRLSETATSYAEWHAADQL

SEQ ID NO: 19970 - protein, 136 aa, Dokdonia donghaensis
  misc_feature (1)..(136): tr|A0A0A2GUR5|A0A0A2GUR5_9FLAO 6-carboxy-5,6,7,8-tetrah ydropterin synthase OS=Dokdonia donghaensis DSW-1 OX=13 00343 GN=NV36_03850 PE=3 SV=1
MRITAHRKAHFNAAHRLYRPDWNDEKNSQIFGKCSNPNFHGHNYDLTVSVTGEIDPETGFLIDLKILKDIIKAQVEDYLDHKNLNLEVQEFKELNPTAENIAVVIYNRIKTVLEPKFDLEVTLYETPRNFVTYKGE

SEQ ID NO: 19971 - protein, 136 aa, Dokdonia pacifica
  misc_feature (1)..(136): tr|A0A239D6L9|A0A239D6L9_9FLAO 6-carboxy-5,6,7,8-tetrah ydropterin synthase OS=Dokdonia pacifica OX=1627892 GN= SAMN06265376_1104 PE=3 SV=1
MRITVNRRAHFNAAHRLYRKEWDEETNKSIFGKCSNPHYHGHNYDLIVGITGEIDPETGYLIDLKIVKDLIKSEVEDAFDHKNLNLEVPEFKNLNPTAENIAVVIYNKMKPMLDPKFDLTITLYETPRNFVIYKGE

SEQ ID NO: 19972 - protein, 149 aa, Dokdonia pacifica
  misc_feature (1)..(149): tr|A0A238WDF2|A0A238WDF2_9FLAO 6-carboxy-5,6,7,8-tetrah ydropterin synthase OS=Dokdonia pacifica OX=1627892 GN= SAMN06265376_101944 PE=3 SV=1
MANIRITKQFTFETGHALYGYDGKCKNVHGHSYKLSVTVIGSPISDSNHVKYGMVIDFGDLKKIVNKEIVDVFDHATVFNKNTPHVELAKELSDRGHNVLLVDYQPTSEMMVIDFAQKIQPLLPDHIKLHSLRLQETRSSYAEWFASDN

SEQ ID NO: 19973 - protein, 136 aa, Dokdonia sp.
  misc_feature (1)..(136): tr|A0A3M0FTF4|A0A3M0FTF4_9FLAO 6-carboxy-5,6,7,8-tetrah ydropterin synthase OS=Dokdonia sp. SH27 OX=2479847 GN= EAX61_15990 PE=3 SV=1
MRITAYRKAHFNAAHRLYRSDWSDDKNSSVFGKCSNPNFHGHNYDLEVGVTGNIDPETGYLIDLKILKDMIKSEVEDVLDHKNLNLEVDYFKTANPTAENIAVFIYNQLRRVLDQKFELEIKLYETPRNFVVYTGA

SEQ ID NO: 19974 - protein, 150 aa, Dokdonia sp.
  misc_feature (1)..(150): tr|A0A2S1QB84|A0A2S1QB84_9FLAO 6-carboxytetrahydropteri n synthase QueD OS=Dokdonia sp. Dokd-P16 OX=2173169 GN= DCS32_06600 PE=4 SV=1
MSKIRITKQFTFETGHALYGYDGKCKNVHGHSYKLSVTVIGEPITDMDNAKLGMVIDFGDLKKIVNREIVNVFDHATVFNKNTPHVELAKELSDRGHDVLLVDYQPTSEMMVIDFAAKIQSFLPDSIKLHSLRLSETATSYAEWHAADQD

SEQ ID NO: 19975 - protein, 157 aa, Dolichospermum compactum
  misc_feature (1)..(157): tr|A0A1Z4UY01|A0A1Z4UY01_9CYAN Queuosine biosynthesis p rotein QueD OS=Dolichospermum compactum NIES-806 OX=197 3481 GN=NIES806_02340 PE=4 SV=1
MTNQQWLLAKEFRFEAAHKLPYHDGKCSRLHGHSWRGVVYVAGDTLVTEGAKQGMVMDYSEIKKYLQPLLENYLDHYYLNESMGLESPTSEAIAAWIYDKLEQAGLAGLTAVRIDETCTSICLYSKNRISGWLNSGQDLNLLQSGENNHGLGMNLIV

SEQ ID NO: 19976 - protein, 422 aa, Dolichospermum compactum
  misc_feature (1)..(422): tr|A0A1Z4UZM0|A0A1Z4UZM0_9CYAN Uncharacterized protein OS=Dolichospermum compactum NIES-806 OX=1973481 GN=NIES 806_08900 PE=4 SV=1
MQCIVNRRDQFSAVGRYWFPELSEIENLEKFGAYSKFPGHGHNYVLFISMIGELDEYGMVLNLSDVKHVIKEEVTSQLDFSYLNDVWTEFQQTLPTTENIARVIWERLSPHLPLVRVQLFEHPQLWADYQGEGKQANLTIRTHFSAAHRLAPNLSVDKYGRCTQTHGHNYHLEVTVEGEIDSRTGMIVDVAALNRVVEDYVVKIFDHSCINEDVPYFADIVPTTENISRYIHGLLESPIDELGVKLSNVKLFESHQLWADYSGQGMEGYLSISTHFSSAHRLAHPDLSLAKNTEIYGKCARVNGHGHNYQLEVTIKGDIDSSKGMVIDLGAVNQIITDYVIEPFDHTFLNKDVAFFNKVVPTAENIALYISNTLRSPIQELGATLYKVKLVESPNNACEIYGADSESTSVNAAVSQPVLAIV

SEQ ID NO: 19977 - protein, 141 aa, Dolichospermum planctonicum
  misc_feature (1)..(141): tr|A0A480ACS4|A0A480ACS4_9CYAN 6-carboxy-5,6,7,8-tetrah ydropterin synthase OS=Dolichospermum planctonicum OX=1 36072 GN=NIES80_05810 PE=3 SV=1
MTSKPESESCLETWIIGKEFRFEAAHQLPNHDGKCARLHGHSWRGVVYVTGDKLINSGVKQGMIMDYGDISKYIKPLLENYLDHYHLNESTGLANPTSEAIAKWIYEQLEPQIPGLVAVRIDETCTSQCIYSKGKVNFLGF

SEQ ID NO: 19978 - protein, 422 aa, Dolichospermum sp.
  misc_feature (1)..(422): tr|A0A5C0DRW1|A0A5C0DRW1_9CYAN 6-carboxy-5,6,7,8-tetrah ydropterin synthase OS=Dolichospermum sp. UHCC 0315A OX =1914871 GN=queD_1 PE=4 SV=1
MQCIVNRRDQFSAVGRYWFPELSQIENLEKFGAYSKFPGHGHNYVLFISMIGELDEYGMVLNLSDVKHVIKGEVTSQLDFSYLNDVWTEFQQTLPTTENIARVIWERLAPHLPLVRVQLFEHPQLWADYQGEGEKANLTIRTHFSAAHRLAPNLSVDKYGRCTQTHGHNYHLEVTVEGEIDSRTGMIVDVAALNRVVEDYVVRIFDHSCVNEDIPYFADIVPTTENISRYIHGLLESPIDELGVKLSNIKLFESHQLWADYSGKDRSGYLSISTHFSSAHRLAHPDLSLAKNTEIYGKCARVNGHGHNYQLEVTIKGEIDSSTGMVIDLGALNQIITDYVIEPFDHTFLNKDVAFFNQVVPTAENIALYISNTLRSPIQELGATLYKVKLVESPNNACEIYAADSESTSVNAAVSQPVLAIV

SEQ ID NO: 19979 - protein, 169 aa, Dolichospermum sp.
  misc_feature (1)..(169): tr|A0A5C0DXI1|A0A5C0DXI1_9CYAN 6-carboxy-5,6,7,8-tetrah ydropterin synthase OS=Dolichospermum sp. UHCC 0315A OX =1914871 GN=queD_2 PE=4 SV=1
MTNHQWLLAKEFRFEAAHKLPYHDGKCSRLHGHSWRGVVYVAGDTLITKGAKQGMVMDYSDIKKYLKPLLENYLDHYYLNESMGLESPTSEAIAAWIYEKLEQAGLAGLTAVRIDETCTSICLYSKTRISGWLNSGESLNLLQSRQNDDVKIPRSEDAGISEESTKELS

SEQ ID NO: 19980 - protein, 145 aa, Domibacillus aminovorans
  misc_feature (1)..(145): tr|A0A177L7V6|A0A177L7V6_9BACI 6-carboxy-5,6,7,8-tetrah ydropterin synthase OS=Domibacillus aminovorans OX=2933 2 GN=AWH48_18115 PE=3 SV=1
MMQQIYPAPAHDFRYELNKDFQFAAAHYVPHDEAGACRKLHGHTYFANVTVAGDELNESGFLTNFQLIKSLIHKRFDHTVLNDDMLFSEDISERFPTTEVVARVIWEVIQKELNETPNKPKCLQVYLRETPTSYVVYRPKQEDFS

SEQ ID NO: 19981 - protein, 145 aa, Domibacillus antri
  misc_feature (1)..(145): tr|A0A1Q8Q8S6|A0A1Q8Q8S6_9BACI 6-carboxy-5,6,7,8-tetrah ydropterin synthase OS=Domibacillus antri OX=1714264 GN =BTO30_03145 PE=3 SV=1
MMQQIYPAPMHDFRYELNKDFQFAAAHYVPHDEAGACRKLHGHTYFANITVAGDDLNDSGFLVNFQLIKSLIHKRFDHTVLNDDPLFSEDISERFPTTEAVARTIWEVVQKELNETPNKPKCLQVYLRETPTSYVVYRPKKGDFS

SEQ ID NO: 19982 - protein, 272 aa, Domibacillus antri
  misc_feature (1)..(272): tr|A0A1Q8Q5Q6|A0A1Q8Q5Q6_9BACI 6-pyruvoyl tetrahydropte rin synthase OS=Domibacillus antri OX=1714264 GN=BTO30_ 08245 PE=4 SV=1
MLYLSRKMYFSAVHSYRIDEWSEEKNRAVFGLCSNISGHGHDYRLEVMVKGKLNKKSGIVVNITDIDKVVKSFVHDNLDGKFLNKENTYFHDNIPTTEVIVDYIWKSLNGKIDHCSLHKIRLYENDFLYSEKEDEEVVRLTRKYHFCTAHRLHSPLLSDDENMSIFGKCNNPYGHGHNYYLEVTVSGKPDPITGMIANIAEIDNLVEKEIMQKFDHKHLNLDTEEFKDLNPTSENVTVVIWDLLSPELKNLYKIGLYETEKNYFEYYGPDKE

SEQ ID NO: 19983 - protein, 275 aa, Domibacillus enclensis
  misc_feature (1)..(275): tr|A0A1N7ABL0|A0A1N7ABL0_9BACI 6-pyruvoyltetrahydropter in/6-carboxytetrahydropterin synthase OS=Domibacillus e nclensis OX=1017273 GN=SAMN05443094_107143 PE=4 SV=1
MTVYLSRKLSFSAMHSYRIEQWSDEKNQAVFGLCSNPNGHGHDYVLKVMAGGQIKQDSGIVVNITDIDKTVKTFIEEQMDGKFLNKENAYFQTNIPTTENIVKYVWNSLRDKLEGCRLHTIRLYESDYLYAEKGEDDMVRLTKRYHFCTAHRLHSEQLSQEENDRLFGKCNNPYGHGHNYYLEVTVSDRPDPITGMIVDLSQLDALVEKEIMERFDHKHLNLDTEEFKELNPTSENVTIVIWDLLKDSLKNLYKIGLYETEKNYFEYYGPDQELV

SEQ ID NO: 19984 - protein, 145 aa, Domibacillus enclensis
  misc_feature (1)..(145): tr|A0A1N6YH84|A0A1N6YH84_9BACI 6-carboxy-5,6,7,8-tetrah ydropterin synthase OS=Domibacillus enclensis OX=101727 3 GN=SAMN05443094_105275 PE=3 SV=1
MMQQIYPAPAHDFRYELNKDFHFAAAHYVPHDEAGACRKMHGHTYFVNITVAGDTLNDSGFLVNFQLVKSLVHKRFDHTVLNEDGLFSEDLSERFPTTEVVARVIWEVVQKELDQTVNKPKCLQVYVRETPTSYVLFRPKREDFS

SEQ ID NO: 19985 - protein, 145 aa, Domibacillus epiphyticus
  misc_feature (1)..(145): tr|A0A1V2AAE9|A0A1V2AAE9_9BACI 6-carboxy-5,6,7,8-tetrah ydropterin synthase OS=Domibacillus epiphyticus OX=1714 355 GN=BTO28_04620 PE=3 SV=1
MMQQIYPAPAHDFRYELNKDFQFAAAHYVPHDEAGACRNLHGHTYFANITVAGDELNDSGFLVNFQLIKSLIHNRFDHTILNNDALFSEDTSERFPTTEVVARIIWEVVQKELDDTPNKPKCLQVYLRETPTSYVVYRPKKGDFL

SEQ ID NO: 19986 - protein, 272 aa, Domibacillus epiphyticus
  misc_feature (1)..(272): tr|A0A1V2A938|A0A1V2A938_9BACI 6-pyruvoyl tetrahydropte rin synthase OS=Domibacillus epiphyticus OX=1714355 GN= BTO28_06025 PE=4 SV=1
MLYLSRKMFFSAVHSYRIDEWSEEKNKTVFGLCSNPSGHGHDYRLEVMVKGKLDKTSGIVVNITDIDKVVKSFVQDELDGKFLNKEHKYFQEKIPTTEVIVDYIWNSLDGKIDHCDLHKIRLYENDFLYSEKEDEEVVRLTRKYHFCTAHRLHSNQLSDEENMELFGKCNNPYGHGHNYYLEVTVSGKPDPITGMTANIADIDSLVEKEIMQKFDHKHLNLDTEEFKELNPTSENVTVVIWDLLSSELKNLYKIGLYETEKNYFEYYGPDKE

SEQ ID NO: 19987 - protein, 145 aa, Domibacillus iocasae
  misc_feature (1)..(145): tr|A0A1E7DTV9|A0A1E7DTV9_9BACI 6-carboxy-5,6,7,8-tetrah ydropterin synthase OS=Domibacillus iocasae OX=1714016 GN=BA724_00065 PE=3 SV=1
MMQQIYPAPVHDFRYELNKDFHFAAAHYVPHDEAGNCRKLHGHTYFVNITVAGDELNDSGFLVNFQLLKSLVHKRFDHTVLNEDGLFSEDTSERFPTTEVVARVIWEVVQKELNQTVNKPKCLQVFVRETPTSYVVFRPKKGDFA

SEQ ID NO: 19988 - protein, 276 aa, Domibacillus iocasae
  misc_feature (1)..(276): tr|A0A1E7DTD3|A0A1E7DTD3_9BACI 6-pyruvoyl tetrahydropte rin synthase OS=Domibacillus iocasae OX=1714016 GN=BA72 4_15010 PE=4 SV=1
MVLLTRKVEFSSAHSYHVPTWSAEKNKEIFGLCNNPNGHGHDYTLEVTVKGKINSKSGIVVNITDIDRIVKDLVLEELDGKFLNREHPFFKEHIPTTENIVAYIWNELNDKFDDCKLHKIKLHENPFLLSEKGEKSMIQLTRKYHFSAAHRLHSDQLSDEENKMIFGKCNNPHGHGHNYILEVTVDGEADPVTGMVINLADLDRAVDETIIQKFDHKHLNLDTEEFSGLNPTAEVMTVVFWELLQSSLPNLSKIGLWETAKNYFEYSGPEMVEAYK

SEQ ID NO: 19989 - protein, 145 aa, Domibacillus mangrovi
  misc_feature (1)..(145): tr|A0A1Q5P032|A0A1Q5P032_9BACI 6-carboxy-5,6,7,8-tetrah ydropterin synthase OS=Domibacillus mangrovi OX=1714354 GN=BLL40_14835 PE=3 SV=1
MMQQIYPAPTHGFRYELNKDFQFAAAHYVPHDEAGACRKLHGHTYFANVTVAGDELNESGFLTNFQLIKTLIHKRFDHTVLNDDMLFSEDISERYPTTEVVARVIWEVIQKELNETPNKPKCLQVYLRETPTSYVIYRPKQEDFS

SEQ ID NO: 19990 - protein, 117 aa, Donghicola sp.
  misc_feature (1)..(117): tr|A0A1M4N469|A0A1M4N469_9RHOB 6-carboxy-5,6,7,8-tetrah ydropterin synthase OS=Donghicola sp. KarMa OX=1779855 GN=KARMA_3018 PE=3 SV=1
MFRISKEFHFSASHQLAHLPDDHQCARLHGHNYIVVVELSAAELNSDGFVRDYHELKPLKTYIDDVFDHRHLNDVMDVASTAENMSKHFYDWCKARWPEVTAVKVSETPKTWAEYRP

SEQ ID NO: 19991 - protein, 117 aa, Donghicola tyrosinivorans
  misc_feature (1)..(117): tr|A0A2T0WGD7|A0A2T0WGD7_9RHOB 6-carboxy-5,6,7,8-tetrah ydropterin synthase OS=Donghicola tyrosinivorans OX=165 2492 GN=CLV74_11537 PE=3 SV=1
MFRISKEFHFSASHQLTHLPADHQCARLHGHNYIVVVELASATLNSDGFVRDYHELKPLKTYIDDSFDHRHLNDVMEGHSTAENMAKHFFDWCKSRWPETSAVKVSETPKTWAEYRP

SEQ ID NO: 19992 - protein, 140 aa, Dorea longicatena
  misc_feature (1)..(140): tr|A0A3E5GEQ2|A0A3E5GEQ2_9FIRM 6-carboxytetrahydropteri n synthase OS=Dorea longicatena OX=88431 GN=DW641_12460 PE=4 SV=1
MYYLQTKASFDAAHFLWKYEGKCRNIHGHRWNVVAKIKSQELEREGQTRGMVVDFGNLKNDLKVFCDYFDHSLIYETGSLKAETVAALQKEEFHLEEVSFRPTAENFAYYFYKKLTDSGYGVHCVEVYETPNNCAVYEEE

SEQ ID NO: 19993 - protein, 140 aa, Dorea longicatena
  misc_feature (1)..(140): tr|A0A414T0Q6|A0A414T0Q6_9FIRM 6-carboxy-5,6,7,8-tetrah ydropterin synthase OS=Dorea longicatena OX=88431 GN=DW 265_02985 PE=3 SV=1
MYYLQTKASFDAAHFLWKYEGKCRNIHGHRWNVVAKIKSQELEREGQTRGMVVDFGNLKKDLKVLCDYFDHSLIYETGSLKAETVAALQKEEFHLEEVSFRPTAENFAYYFYKKLTDSGYGVHCVEVYETPNNCAVYEEE

SEQ ID NO: 19994 - protein, 149 aa, Draconibacterium orientale
  misc_feature (1)..(149): tr|X5DED3|X5DED3_9BACT 6-carboxy-5,6,7,8-tetrahydropter in synthase OS=Draconibacterium orientale OX=1168034 GN =FH5T_06530 PE=3 SV=1
MAKIRVTKKFHFEMGHALHNYDGLCRNIHGHTYNMEVTLLGEIREEKGHPKDGMVIDFGKLKKLVKDKIVNVYDHSLVVSQIYADKNQEHLLKATERLIVHDFQPTSENMCVYFAGVLQQELPEDVSLYSIRLYETATSYAEWFAEDNK

SEQ ID NO: 19995 - protein, 149 aa, Draconibacterium sediminis
  misc_feature (1)..(149): tr|A0A0D8J7L6|A0A0D8J7L6_9BACT 6-pyruvoyl tetrahydropte rin synthase OS=Draconibacterium sediminis OX=1544798 G N=LH29_15780 PE=4 SV=1
MAKIRVTKKFHFEMGHALHNYDGLCRNIHGHTYNMEVTLLGEIREEKGHPKDGMVIDFGKLKKLVKDKIVNVYDHSLVVSRIYADKNQEHLLKATERLIVHDFQPTSENMCVYFAGVIQQELPEDVSLYSIRLYETATSYAEWFAEDNK

SEQ ID NO: 19996 - protein, 148 aa, Duganella phyllosphaerae
  misc_feature (1)..(148): tr|A0A1E7WP20|A0A1E7WP20_9BURK 6-carboxy-5,6,7,8-tetrah ydropterin synthase OS=Duganella phyllosphaerae OX=7628 36 GN=DUPY_22170 PE=3 SV=1
MLTITRKLEFDAGHRIPDHKSQCRNLHGHRYTLEITLTGEIITAEGNSDNGMIMDFSDVKTLAKQHLVDVWDHAFIVYEKDTAVREFLASLPDHKTVVIDRIPTVENLAYVAFGILKAAFTDRFGTGLRLHKLVLHETPNCWAEITDA

SEQ ID NO: 19997 - protein, 149 aa, Duganella sacchari
  misc_feature (1)..(149): tr|A0A1M7L2N8|A0A1M7L2N8_9BURK 6-pyruvoyltetrahydropter in/6-carboxytetrahydropterin synthase OS=Duganella sacc hari OX=551987 GN=SAMN05192549_102315 PE=4 SV=1
MLTITRKLEFDAGHRIPDHKSQCRNLHGHRYTLEITLTGNIIDVEGNSDNGMIMDFSDIKALAKEHLVDVWDHAFIVYEKDDAVREFLASLPNHKTVVIDRIPTVENLAHVAFAILKAAYKDRYGTGLHLHKLVLHETPNCWAEITDGV

SEQ ID NO: 19998 - protein, 148 aa, Duganella sp.
  misc_feature (1)..(148): tr|A0A3E1S387|A0A3E1S387_9BURK 6-carboxy-5,6,7,8-tetrah ydropterin synthase OS=Duganella sp. BJB480 OX=1871181 GN=queD PE=3 SV=1
MLTITRKLEFDAGHRIPDHKSQCRNLHGHRYTLEITLTGNIITAEGNSDNGMIMDFSDIKALAKEHLVDVWDHSFIVYEKDAAVRDFLATLPGHKTVVIDRIPTVENLAHVAFEILKAAYKDRYGTGLHLHKLVLHETPNCWAEITDA

SEQ ID NO: 19999 - protein, 148 aa, Duganella sp.
  misc_feature (1)..(148): tr|A0A0Q5CZ90|A0A0Q5CZ90_9BURK 6-carboxy-5,6,7,8-tetrah ydropterin synthase OS=Duganella sp. Leaf126 OX=1736266 GN=ASF61_15690 PE=4 SV=1
MLTITRKLEFDAGHRIPDHKSQCRNLHGHRYTLEITLTGDIITAEGNSDNGMIMDFSDVKTLAKQHLVDVWDHAFIVYEQDTAVREFLASLPGHKTVVIDRIPTVENLAHVAFGILKAAFIDRFGTGLRLHKLVLHETPNCWAEITDA

SEQ ID NO: 20000 - protein, 111 aa, Duncaniella muris
  misc_feature (1)..(111): tr|A0A2V1IKH6|A0A2V1IKH6_9BACT 6-carboxy-5,6,7,8-tetrah ydropterin synthase OS=Duncaniella muris OX=2094150 GN= C5O23_04865 PE=3 SV=1
MYYITKRFELAGCHRLELSYESKCSRLHGHNWIVTVHCRSRQLNADGMVADFSHIKEHITSYLDHGNFNELLPFNPTAENIARWICEQIPHCYRVDVQESEGNVASYETDE

SEQ ID NO: 20001 - protein, 111 aa, Duncaniella sp.
  misc_feature (1)..(111): tr|A0A4P7VUN4|A0A4P7VUN4_9BACT 6-carboxy-5,6,7,8-tetrah ydropterin synthase OS=Duncaniella sp. C9 OX=2530392 GN =E7745_05220 PE=3 SV=1
MYYITKRFELAGCHRLELSYESKCSRLHGHNWIVTVHCRSRQLNADGMVADFSHIKKHITSYLDHGNFNELLPFNPTAENIARWICEQIPHCYRVDVQESEGNVASYETDE

SEQ ID NO: 20002 - protein, 113 aa, Duncaniella sp.
  misc_feature (1)..(113): tr|A0A4Z0V2K9|A0A4Z0V2K9_9BACT 6-carboxy-5,6,7,8-tetrah ydropterin synthase OS=Duncaniella sp. TLL-A3 OX=253039 1 GN=EZ315_01215 PE=3 SV=1
MYYITKTFELAGCHRLELSYPSKCSRLHGHNWIVTVHCRSRELNADGMVIDFSHIKERITAYLDHGNFNELLPFNPTAENIARWVCDQIDTCYRVDVKESEGNVASYVVEEKA

SEQ ID NO: 20003 - protein, 139 aa, Dyadobacter fermentans
  misc_feature (1)..(139): tr|C6W1R0|C6W1R0_DYAFD Uncharacterized protein OS=Dyado bacter fermentans (strain ATCC 700827 / DSM 18053 / NS1 14) OX=471854 GN=Dfer_2573 PE=4 SV=1
MIYVTRKEHFNAAHRLYNPAWSEEKNQEVFGPCANNNWHGHNFELIVTVKGKPDPETGFVIDLKVLGDIMKRQIVDKVDHKNLNLDVDFMQGKMASCEIFVMEIWNILAPAIEQAAPNAKLHYIKLIETPKNFVEYYGE

SEQ ID NO: 20004 - protein, 138 aa, Dyadobacter fermentans
  misc_feature (1)..(138): tr|C6VZC4|C6VZC4_DYAFD 6-carboxy-5,6,7,8-tetrahydropter in synthase OS=Dyadobacter fermentans (strain ATCC 7008 27 / DSM 18053 / NS114) OX=471854 GN=Dfer_0467 PE=3 SV= 1
MVQNVAVFRKEHFNAAHRLHNPAWSDEQNEAVFGKCNNPSFHGHNYELIVQVTGPLDPETGYVMDMKLLSAILKESVIDRFDHRNLNLDVEEFKTLNPTAENIAIVIYSIIRPKIDAGLDLKIRLYETERNFVEYPVR

SEQ ID NO: 20005 - protein, 138 aa, Dyadobacter jejuensis
  misc_feature (1)..(138): tr|A0A316AMD8|A0A316AMD8_9BACT 6-pyruvoyltetrahydropter in/6-carboxytetrahydropterin synthase OS=Dyadobacter je juensis OX=1082580 GN=CLV98_103270 PE=4 SV=1
MNPRVSVFRKEHFNAAHRLHNKAWTAEQNREVFDKCNNANYHGHNYELIVQVTGRVDPETGFVIDMKYLSRLIRQHVIDRFDHKNLNLDLKEFETLNPTAENITLVIHDILRKLIDPELALKIRLYETERNFVEYPAD

SEQ ID NO: 20006 - protein, 139 aa, Dyadobacter jejuensis
  misc_feature (1)..(139): tr|A0A316AP36|A0A316AP36_9BACT 6-pyruvoyltetrahydropter in/6-carboxytetrahydropterin synthase OS=Dyadobacter je juensis OX=1082580 GN=CLV98_10293 PE=4 SV=1
MIYITRKEHFNAAHRLFNPKWSDEKNQEVFGPCANNNWHGHNFDLYVTVKGLPDPDTGFVIDLKVLGDIVKATIIDKVDHKNLNLDVDFMQGKMASCEIFVMEIWKILDPAIKAAASQAQLHYIKLVETPKNYVEYYGE

SEQ ID NO: 20007 - protein, 139 aa, Dyadobacter jiangsuensis
  misc_feature (1)..(139): tr|A0A2P8FWK6|A0A2P8FWK6_9BACT 6-pyruvoyltetrahydropter in/6-carboxytetrahydropterin synthase OS=Dyadobacter ji angsuensis OX=1591085 GN=CLV60_11081 PE=4 SV=1
MIYVTRKEHFNAAHRLYNPAWSDEKNQEVFGPCANNNWHGHNFELIVTVKGKPNPDTGFVIDLKVLGDIIKGEVVDKVDHKNLNLDVDFMQGKMASCEIFVMEIWNILEPAIAQAAPNAKLHYIKLIETPKNFVEYYGE

SEQ ID NO: 20008 - protein, 138 aa, Dyadobacter jiangsuensis
  misc_feature (1)..(138): tr|A0A2P8G9F3|A0A2P8G9F3_9BACT 6-carboxy-5,6,7,8-tetrah ydropterin synthase OS=Dyadobacter jiangsuensis OX=1591 085 GN=CLV60_104447 PE=3 SV=1
MVQKVAVFRKEHFNAAHRLHNPEWSEEKNGEVFGKCNNPNFHGHNYELIVQVTGPVAPETGYVIDMKVLSAILKESVIDRFDHRNLNLDVEEFKTLNPTAENIAIVIYSIIRPKIEAGLDLKIRLYETERNFVEYPVQ

SEQ ID NO: 20009 - protein, 138 aa, Dyadobacter koreensis
  misc_feature (1)..(138): tr|A0A1H6Y8V0|A0A1H6Y8V0_9BACT 6-pyruvoyltetrahydropter in/6-carboxytetrahydropterin synthase OS=Dyadobacter ko reensis OX=408657 GN=SAMN04487995_4272 PE=4 SV=1
MAHKVAVFRKEHFNAAHRLHNPAWSDEKNGEIFGKCNNPNFHGHNYELIIQVVGELNQETGFVIDMKELSVLIQEHVLDRFDHKNLNLDVAEFHHLNPSAENIAIVIYDILRPKIDAELALKIRLYETERNFVEYPVD

SEQ ID NO: 20010 - protein, 139 aa, Dyadobacter koreensis
  misc_feature (1)..(139): tr|A0A1H6RZX3|A0A1H6RZX3_9BACT 6-pyruvoyltetrahydropter in/6-carboxytetrahydropterin synthase OS=Dyadobacter ko reensis OX=408657 GN=SAMN04487995_1470 PE=4 SV=1
MIYVTRKEHFNAAHRLFNPAWSDEKNQEVFGPCANNNWHGHNFELIVTVKGKPDPDTGFVIDLKVLGDLVKEKVVDKVDHKNLNLDVDFMQGKMASCEIFVMEIWNILAPAIQEVSPGSSLHYIKLVETPKNFVEYYGE

SEQ ID NO: 20011 - protein, 139 aa, Dyadobacter psychrophilus
  misc_feature (1)..(139): tr|A0A1T5FA98|A0A1T5FA98_9BACT 6-pyruvoyltetrahydropter in/6-carboxytetrahydropterin synthase OS=Dyadobacter ps ychrophilus OX=651661 GN=SAMN05660293_02949 PE=4 SV=1
MIYVTRKEHFNAAHRLFNPAWSEEKNQEVFGPCANNNWHGHNFELIVTVKGKPDPDTGFVIDLKVLGDIVKEKVVDKVDHKNLNLDVDFMQGKMASCEIFVYEIWNILAPAIAEASPNAKLHYIKLVETPKNFVEYYGE

SEQ ID NO: 20012 - protein, 138 aa, Dyadobacter psychrophilus
  misc_feature (1)..(138): tr|A0A1T5GFE4|A0A1T5GFE4_9BACT 6-carboxy-5,6,7,8-tetrah ydropterin synthase OS=Dyadobacter psychrophilus OX=651 661 GN=SAMN05660293_04016 PE=3 SV=1
MAQKVAVFRKEHFNAAHRLHNPEWSDEKNENVFGKCNNPNFHGHNYELIVQVTGEVDPETGYVLDMKVLSSILKESVLDRFDHKNLNLDVEEFKSLNPSAENIAIVIYSILRPKIDSGLDLKVRLYETERNFVEYPVD

SEQ ID NO: 20013 - protein, 138 aa, Dyadobacter soli
  misc_feature (1)..(138): tr|A0A1G8A812|A0A1G8A812_9BACT 6-carboxy-5,6,7,8-tetrah ydropterin synthase OS=Dyadobacter soli OX=659014 GN=SA MN04487996_13014 PE=3 SV=1
MVQKVAVFRKEHFNAAHRLHNPDWSEEKNGEVFGKCNNPNFHGHNYELIVQVTGPVDPETGYVMDMKVLSAILKESVIDRFDHRNLNLDVEEFKTLNPTAENIAIVIYSVIRPKIDSGLDLKIRLYETERNFVEYPVQ

SEQ ID NO: 20014 - protein, 139 aa, Dyadobacter soli
  misc_feature (1)..(139): tr|A0A1G6ZI31|A0A1G6ZI31_9BACT 6-pyruvoyltetrahydropter in/6-carboxytetrahydropterin synthase OS=Dyadobacter so li OX=659014 GN=SAMN04487996_103126 PE=4 SV=1
MIYVTRKEHFNAAHRLYNPAWSDEKNQEVFGPCANNNWHGHNFELIVTVKGKPDPDTGFVIDLKVLGDIVKQEIVDKVDHKNLNLDVDFMQGKMASCEIFVMEIWNILEPAIAQAAPNAKLHYIKLVETPKNFVEYYGE

SEQ ID NO: 20015 - protein, 139 aa, Dyadobacter sp.
  misc_feature (1)..(139): tr|A0A4U6CT06|A0A4U6CT06_9BACT 6-carboxytetrahydropteri n synthase OS=Dyadobacter sp. AR-3-8 OX=2576211 GN=FDK1 3_30215 PE=4 SV=1
MIYVTRKEHFNAAHRLFNPAWSEDKNQEVFGPCANNNWHGHNFELIVTVKGKPDPDTGFVIDLKVLGDLIKDKVVDKVDHKNLNLDVDFMKDKMASCEIFVTEIWKILAPAIQEVAPTSQLHYIKLVETPKNFVEYYGE

SEQ ID NO: 20016 - protein, 139 aa, Dyadobacter sp.
  misc_feature (1)..(139): tr|A0A3D8YFD7|A0A3D8YFD7_9BACT 6-carboxy-5,6,7,8-tetrah ydropterin synthase OS=Dyadobacter sp. RS19 OX=2259619 GN=DSL64_06210 PE=3 SV=1
MLIHVTRRETFNAAHRMYREEWSAEKNEEVFGRCANPNWHGHNFTLFVTVKGEIDDKKGYLIDLKELKKMIKEYVIEKVDHRNLNLDVDFMKGKMATTEMLCAQIFHQLKKPVEACEGVFMHSVRLHETENNSAEYFGQ

SEQ ID NO: 20017 - protein, 120 aa, Dyella japonica
  misc_feature (1)..(120): tr|A0A075JYE9|A0A075JYE9_9GAMM 6-carboxy-5,6,7,8-tetrah ydropterin synthase OS=Dyella japonica A8 OX=1217721 GN =HY57_04030 PE=3 SV=1
MHIFKEFHIEAAHRLPNVPPGHKCARLHGHSFRIEIHVEGEPDPTLGWVMDFADVKAAFAPLFEQLDHHYLNDIEGLENPTSEMLCRWIFKRLQPSLPGLDKVVVHETCTSGASCSRDSF

SEQ ID NO: 20018 - protein, 120 aa, Dyella japonica
  misc_feature (1)..(120): tr|A0A0G9H4F2|A0A0G9H4F2_9GAMM 6-carboxy-5,6,7,8-tetrah ydropterin synthase OS=Dyella japonica DSM 16301 OX=144 0762 GN=Y882_07315 PE=3 SV=1
MHIFKEFHIEAAHRLPNVPPGHKCARLHGHSFRIQIHVEGEPDPTLGWVMDFADVKAAFAPLFDQLDHHYLNDIEGLENPTSEVLCRWIFKRLQPSLPGLDKVVVHETCTSGASCSRDSF

SEQ ID NO: 20019 - protein, 120 aa, Dyella jiangningensis
  misc_feature (1)..(120): tr|A0A023NWL8|A0A023NWL8_9GAMM 6-carboxy-5,6,7,8-tetrah ydropterin synthase OS=Dyella jiangningensis OX=1379159 GN=CA260_19840 PE=3 SV=1
MHIFKVFHIEAAHRLPNVPPGHKCARLHGHSFKVEIHVAGEPDPAMGWVMDFADVKAAFAPLYDQLDHHYLNDIEGLENPTSEMLSRWIFRRLEPALPGLDKVVVHETCTSGASCSRDSF

SEQ ID NO: 20020 - protein, 120 aa, Dyella marensis
  misc_feature (1)..(120): tr|A0A1I2EIF0|A0A1I2EIF0_9GAMM 6-carboxy-5,6,7,8-tetrah ydropterin synthase OS=Dyella marensis OX=500610 GN=SAM N02799615_01970 PE=3 SV=1
MHIFKLFHLEAAHRLPNVPPGHKCARLHGHSFRVEIHVAGEPDPHQGWVMDFADVKAAFAPLYDQLDHHYLNDIEGLENPTSENLARWIFRRLEPRLPGLDKVVVHETCTSGASCSRDSF

SEQ ID NO: 20021 - protein, 120 aa, Dyella soli
  misc_feature (1)..(120): tr|A0A4R0YLP6|A0A4R0YLP6_9GAMM 6-carboxy-5,6,7,8-tetrah ydropterin synthase OS=Dyella soli OX=522319 GN=queD PE =3 SV=1
MHIFKLFHIEAAHRLPHVPEGHKCARLHGHSFRVEIHVSGEPDPKLGWVMDFADVKAAFAPLYDQLDHHYLNDIEGLENPTSEMLARWIFTRLSKDLPGLDKVVVHETCTSGASCSRDSF

SEQ ID NO: 20022 - protein, 120 aa, Dyella soli
  misc_feature (1)..(120): tr|A0A4R0YKA0|A0A4R0YKA0_9GAMM 6-carboxy-5,6,7,8-tetrah ydropterin synthase OS=Dyella soli OX=522319 GN=queD PE =3 SV=1
MHIFKVFHLEAAHRLPNVPPGHKCARLHGHSFRVEIHVAGEPDPALGWVMDFADVKAAFAPIYDQLDHHYLNDIEGLENPTSEVLARWIFRHLESSLPGLDKVVVHETCTSGASCSRDSF

SEQ ID NO: 20023 - protein, 120 aa, Dyella sp.
  misc_feature (1)..(120): tr|A0A3M0ETA2|A0A3M0ETA2_9GAMM 6-carboxy-5,6,7,8-tetrah ydropterin synthase OS=Dyella sp. YR388 OX=2135665 GN=C 8J93_3500 PE=3 SV=1
MHIFKEFHIEAAHRLPNVPPGHKCARLHGHSFRVQIHVEGEPDPTLGWVMDFADVKAAFAPLYDQLDHHYLNDIEGLENPTSEMLCRWIFKRLQPALPGLDKVVVHETCTSGASCSRDSF

SEQ ID NO: 20024 - protein, 118 aa, Dyella sp.
  misc_feature (1)..(118): tr|A0A1G7RXM4|A0A1G7RXM4_9GAMM 6-carboxy-5,6,7,8-tetrah ydropterin synthase OS=Dyella sp. 333MFSha OX=1798240 G N=SAMN04515659_2238 PE=3 SV=1
MRIYKTFNIEAAHRLPNVPEGHKCARLHGHSFRVELHVEGPVDPVFGWVMDFGDLKARFQPLYDRLDHNYLNDIDGLENPTSENLARWIFQRLRVDVPGLAKVVVNETCTSGAEYSGD

SEQ ID NO: 20025 - protein, 120 aa, Dyella thiooxydans
  misc_feature (1)..(120): tr|A0A161J2C8|A0A161J2C8_9GAMM 6-carboxy-5,6,7,8-tetrah ydropterin synthase OS=Dyella thiooxydans OX=445710 GN= ATSB10_27250 PE=3 SV=1
MHIFKVFQLEAAHRLPNVPPGHKCSRLHGHSFRIEIHVEGEPDPQLGWVMDFADIKAAFAPLYDQLDHHYLNDIEGLENPTSEMLARWIWQRLGPRLPGLDRVVVHETCTSGASCSSSSF

SEQ ID NO: 20026 - protein, 118 aa, Dysgonamonadaceae bacterium
  misc_feature (1)..(118): tr|A0A2N4S9L1|A0A2N4S9L1_9BACT 6-carboxy-5,6,7,8-tetrah ydropterin synthase OS=Dysgonamonadaceae bacterium OX=2 065189 GN=queD PE=3 SV=1
MYKISKQFSFSAAHSLHGLPDSHPCSRLHGHNYVVTIRLKSETLSETGFVRDYHDLKFVKKYIDENLDHRNLNDILNPLNSSAENLAKLLYDVFKPQLPELYAVEVSETPKTNAIYEP

SEQ ID NO: 20027 - protein, 117 aa, Dysgonomonas alginatilytica
  misc_feature (1)..(117): tr|A0A2V3PUU3|A0A2V3PUU3_9BACT 6-carboxy-5,6,7,8-tetrah ydropterin synthase OS=Dysgonomonas alginatilytica OX=1 605892 GN=CLV62_103137 PE=3 SV=1
MYKISKQFAFSASHILEGLSEDHPCSRLHGHNYIITVHLKSETLNEVGFVKDYRELSIIKEYIDNTLDHRHLNDVFSVNPTAENIARELYTIFVKEIPQIYAVEVCETPKTSAIYEA

SEQ ID NO: 20028 - protein, 120 aa, Dysgonomonas capnocytophagoides
  misc_feature (1)..(120): tr|A0A4Y8L2B3|A0A4Y8L2B3_9BACT 6-carboxy-5,6,7,8-tetrah ydropterin synthase OS=Dysgonomonas capnocytophagoides OX=45254 GN=queD PE=3 SV=1
MYKISKQFAFSASHILEGLPEGHPCGRMHGHNYIVTIHLKSDVLNDVGFVKDYRELSVIKQFIDDKLDHRHLNDIFDMNPTAENLARTLYEIFAESIPQIYAVEVSETPKTTAIYEADGK

SEQ ID NO: 20029 - protein, 120 aa, Dysgonomonas gadei
  misc_feature (1)..(120): tr|F5J0D8|F5J0D8_9BACT 6-carboxy-5,6,7,8-tetrahydropter in synthase OS=Dysgonomonas gadei ATCC BAA-286 OX=74276 6 GN=HMPREF9455_02805 PE=3 SV=1
MYKISKQFSFSASHILEGLPLEHPCSRLHGHNYVITVHLQAKQLNTVGFIKDYRELDSVKQYIDNTLDHRHLNDILPFNPTAENMAKYLYDIFKKDIPELYAIEVSETPKTTAIYEADSE

SEQ ID NO: 20030 - protein, 120 aa, Dysgonomonas macrotermitis
  misc_feature (1)..(120): tr|A0A1M5D9A7|A0A1M5D9A7_9BACT 6-carboxy-5,6,7,8-tetrah ydropterin synthase OS=Dysgonomonas macrotermitis OX=13 46286 GN=SAMN05444362_108108 PE=3 SV=1
MYKISKQFAFSASHILEGLSGDHPCSRMHGHNYIITVHLKSAELNEVGFVKDYRELSFIKKYIDDVLDHRHLNDIFDVNPTAENIARKLYEIFVKQAPQIYAVEVSETPKTTAIYEADGK

SEQ ID NO: 20031 - protein, 120 aa, Dysgonomonas mossii
  misc_feature (1)..(120): tr|F8WVN7|F8WVN7_9BACT 6-carboxy-5,6,7,8-tetrahydropter in synthase OS=Dysgonomonas mossii DSM 22836 OX=742767 GN=HMPREF9456_00376 PE=3 SV=1
MYKISKQFSFSASHILEGLPQEHPCSRLHGHNYVITVHLKSKELNEVGFIKDYRELDSVKKYIDEKLDHRHLNDVMSFNPTAENIARYLYDTFVADIPELYAVEVSETPKTTAIYEADSK

SEQ ID NO: 20032 - protein, 120 aa, Dysgonomonas mossii
  misc_feature (1)..(120): tr|A0A4Y9IL30|A0A4Y9IL30_9BACT 6-carboxy-5,6,7,8-tetrah ydropterin synthase OS=Dysgonomonas mossii OX=163665 GN =queD PE=3 SV=1
MYKISKQFSFSASHILKGLPQEHPCSRLHGHNYVITVHLKSKELNQVGFIKDYRELDSVKKYIDEKLDHRHLNDVLSFNPTAENIARYLYDIFVADIPELYAVEVSETPKTTAIYEADSK

SEQ ID NO: 20033 - protein, 120 aa, Dysgonomonas sp.
  misc_feature (1)..(120): tr|A0A1M3LBT9|A0A1M3LBT9_9BACT 6-carboxy-5,6,7,8-tetrah ydropterin synthase OS=Dysgonomonas sp. 37-18 OX=189590 7 GN=BGO84_13465 PE=3 SV=1
MYKISKQFSFSASHILEGLPQEHPCSRLHGHNYVITVHLKSKELNQVGFIKDYRELDSVKKYIDEKLDHRHLNDVLSFNPTAENIARYLYDTFVADIPELYAVEVSETPKTTAIYEADSK

SEQ ID NO: 20034 - protein, 136 aa, Echinicola sp.
  misc_feature (1)..(136): tr|A0A514CIB5|A0A514CIB5_9BACT 6-carboxytetrahydropteri n synthase OS=Echinicola sp. LN3S3 OX=2591634 GN=FKX85_ 10185 PE=4 SV=1
MKVAVYRKEHFNAAHRLYNADWSEEKNEQVFGKCNNPSYHGHNYDLHVKLVGPINPETGYVYDMKVLSDLIKSKVIKKFDHKNLNLDTDEFKDLNPTAENIAVVIWNILRKEIEEKYDLTVRLYETERNYVEYDGH

SEQ ID NO: 20035 - protein, 139 aa, Echinicola sp.
  misc_feature (1)..(139): tr|A0A514CNP4|A0A514CNP4_9BACT 6-carboxytetrahydropteri n synthase OS=Echinicola sp. LN3S3 OX=2591634 GN=FKX85_ 21150 PE=4 SV=1
MIHVSRKEHFNAAHKLWNPNWTEERNKEVFGPCANANWHGHNFELIVTVKGLPDEDTGFVVDLKALSTLIRTLVIDKVDHKNLNVDVDFMQGKMASCENLVMEFWKILQPAVNKITPHGGLYKLKLYETPRNFVDYYGE

SEQ ID NO: 20036 - protein, 139 aa, Echinicola strongylocentroti
  misc_feature (1)..(139): tr|A0A2Z4IFN5|A0A2Z4IFN5_9BACT 6-carboxytetrahydropteri n synthase OS=Echinicola strongylocentroti OX=1795355 G N=DN752_06320 PE=4 SV=1
MIHVSRKEHFNAAHKLWNPNWTEEKNIEVFGPCANVNWHGHNFELIVTVKGLPDEGTGFVVDLKALSTLIRTLVIDKVDHKNLNVDVDFMQGKMASCENLVMEFWKILQPAVDKITPHGGLYKLKLYETPRNFVEYYGE

SEQ ID NO: 20037 - protein, 139 aa, Echinicola vietnamensis
  misc_feature (1)..(139): tr|L0G7H4|L0G7H4_ECHVK 6-pyruvoyl-tetrahydropterin synt hase OS=Echinicola vietnamensis (strain DSM 17526 / LMG 23754 / KMM 6221) OX=926556 GN=Echvi_4637 PE=4 SV=1
MIHVSRKEHFNAAHKLWNPNWTEEKNVEVFGPCANANWHGHNFELIVTVKGLPDADTGFVVDLKALSTLIRSLVIDKVDHKNLNVDVDFMQGKMASCENLVMEFWKILQPAVDKITPHGGLYKLKLYETPRNFVEYYGD

SEQ ID NO: 20038 - protein, 136 aa, Echinicola vietnamensis
  misc_feature (1)..(136): tr|L0G044|L0G044_ECHVK 6-pyruvoyl-tetrahydropterin synt hase OS=Echinicola vietnamensis (strain DSM 17526 / LMG 23754 / KMM 6221) OX=926556 GN=Echvi_2135 PE=4 SV=1
MRVAVYRKEHFNAAHRLFNPEWSDEKNSQVFGKCNNPSYHGHNYDLHVKLVGPIDPATGYVYDMKVLSDMIREKVINKFDHKNLNLDTDEFKQLNPTAENIAVVIWNILRKEIEEKYDLTVRLYETERNYVEYDGH

SEQ ID NO: 20039 - protein, 128 aa, Ectothiorhodosinus mongolicus
  misc_feature (1)..(128): tr|A0A1R3W346|A0A1R3W346_9GAMM 6-carboxy-5,6,7,8-tetrah ydropterin synthase OS=Ectothiorhodosinus mongolicus OX =233100 GN=SAMN05216526_1448 PE=3 SV=1
MATPLYNLKVLTEFCAAHTLRDYPGNCARMHGHNWKVEVEVESSVLDNLGMVLDFKTIKQYAREVTEIVDHRYLNDLPAFQNQNPTAENIAAWFFKEMSERLSNNKGIQLKAITLWETDRACVRYTEN

SEQ ID NO: 20040 - protein, 132 aa, Ectothiorhodospira haloalkaliphila
  misc_feature (1)..(132): tr|W8KRG7|W8KRG7_9GAMM 6-pyruvoyl tetrahydropterin synt hase OS=Ectothiorhodospira haloalkaliphila OX=421628 GN =M911_01845 PE=4 SV=1
MYMVNVRDHMMIAHSFSGETFGPAQRLHGATYVVDACFKRKALDEENLVVDIGRASEVLHQILGEFNYRNLDEVEAFQGQNTTTEFMARVIFDRLAVAIREGRLGASARGLSALAVTLHESHVAQAGFEGPL

SEQ ID NO: 20041 - protein, 132 aa, Ectothiorhodospira haloalkaliphila
  misc_feature (1)..(132): tr|W8KGP0|W8KGP0_9GAMM 6-carboxy-5,6,7,8-tetrahydropter in synthase OS=Ectothiorhodospira haloalkaliphila OX=42 1628 GN=M911_03195 PE=3 SV=1
MSKYTLKVLTDFASAHTLRDYPGDCARLHGHNWKVEAEVEASRLDRLGMAVDFKTIKGLAREIAGQLDHQYLNDLEPFRDVNPTAENIAQWFFREMAARLDAPNVRVSAITLWETERACVRYSEDQSKDSAP

SEQ ID NO: 20042 - protein, 132 aa, Ectothiorhodospira magna
  misc_feature (1)..(132): tr|A0A1H9FH55|A0A1H9FH55_9GAMM 6-carboxy-5,6,7,8-tetrah ydropterin synthase OS=Ectothiorhodospira magna OX=8673 45 GN=SAMN05421693_12624 PE=3 SV=1
MPKYTLKVLTDFASAHTLRNYPGNCSRLHGHNWKVEAEVEATVLDALGMAVDFKTIKSLARDIAGELDHTYLNDLPPFRDVNPTAENIAAWFFHEMAARLNAPGVRVSAITLWETERACVRYTEESPKDTPS

SEQ ID NO: 20043 - protein, 132 aa, Ectothiorhodospira marina
  misc_feature (1)..(132): tr|A0A1H7NMM7|A0A1H7NMM7_9GAMM 6-carboxy-5,6,7,8-tetrah ydropterin synthase OS=Ectothiorhodospira marina OX=139 6821 GN=SAMN05444515_11225 PE=3 SV=1
MPKYTLKVLTDFASAHTLRDYPGDCARLHGHNWKVEAEVEASQLDALGMAVDFKTIKGLAREIAGQLDHQYLNDLEPFRDLNPTAENIAAWFFHEMTARLDAPHVRVSAITLWETERACVRYSEDQSKDSAL

SEQ ID NO: 20044 - protein, 132 aa, Ectothiorhodospira marina
  misc_feature (1)..(132): tr|A0A1H7QLG9|A0A1H7QLG9_9GAMM 6-pyruvoyl-tetrahydropte rin synthase OS=Ectothiorhodospira marina OX=1396821 GN =SAMN05444515_11818 PE=4 SV=1
MYTVTVRNHMMIAHSFSGETFGPAQRLHGATYVVDACFKREALDEENLVVDIGRATEVLNEILSEFNYRNLDEVEAFQGRNTTTEFMARVIFDRLAKAIREGRLGASARGLSALAVNLHESHVAHAGFEGPL

SEQ ID NO: 20045 - protein, 126 aa, Ectothiorhodospira mobilis
  misc_feature (1)..(126): tr|A0A1I4SL43|A0A1I4SL43_ECTMO 6-carboxy-5,6,7,8-tetrah ydropterin synthase OS=Ectothiorhodospira mobilis OX=19 5064 GN=SAMN05421721_11820 PE=3 SV=1
MPTYTLKVLTDFASAHTLRDYPGDCARLHGHNWKVEVEVRATRLDRLGMAVDFKTVKALAREIAGRLDHRYLNDLEPFRDINPTAEHIAAWFFQEMAGRLDSPGVQVSAVTLWETERACVRYSEDS

SEQ ID NO: 20046 - protein, 132 aa, Ectothiorhodospira sp.
  misc_feature (1)..(132): tr|A0A161HG34|A0A161HG34_9GAMM 6-carboxy-5,6,7,8-tetrah ydropterin synthase OS=Ectothiorhodospira sp. BSL-9 OX= 1442136 GN=ECTOBSL9_1669 PE=3 SV=1
MPKFTLKVLTDFASAHTLRDYPGDCARLHGHNWKVEAEVEASQLDRLGMAVDFKTIKGLAREIAGQLDHQYLNDLEPFRDVNPTAENIAQWFFREMAARLDAPNVRVSAITLWETERACVRYSEDQSKDSAL

SEQ ID NO: 20047 - protein, 132 aa, Ectothiorhodospira sp.
  misc_feature (1)..(132): tr|A0A161HRA4|A0A161HRA4_9GAMM 6-pyruvoyl tetrahydropte rin synthase OS=Ectothiorhodospira sp. BSL-9 OX=1442136 GN=ECTOBSL9_1278 PE=4 SV=1
MYTVNVRDHMMIAHSFSGETFGPAQRLHGATYVVDACFKREALDEENLVVDIGRASEVLHEILGEFNYRNLDEMEAFQGQNTTTEFMARVIFDRLAGAIHEGRLGASARNLSALAVTLHESHVAQAGFEGPL

SEQ ID NO: 20048 - protein, 145 aa, Ectothiorhodospiraceae bacterium
  misc_feature (1)..(145): tr|A0A2E0UHB1|A0A2E0UHB1_9GAMM 6-carboxy-5,6,7,8-tetrah ydropterin synthase OS=Ectothiorhodospiraceae bacterium OX=2026737 GN=CL946_02485 PE=3 SV=1
MKIAKQFHWEMGHRLPFHKELCANIHGHSYRMWVELEGGLDPNGMLLDYGILKEKVKPIIDEIDHAFMCDENDDVMKQFLAGSDFKHVMVSFTTTAEHISEYLIRKIWFALQGYTNLSRITVRIHETETAMAETSLTREEFQKVV

SEQ ID NO: 20049 - protein, 127 aa, Ectothiorhodospiraceae bacterium
  misc_feature (1)..(127): tr|A0A2A4X4U6|A0A2A4X4U6_9GAMM 6-carboxy-5,6,7,8-tetrah ydropterin synthase OS=Ectothiorhodospiraceae bacterium OX=2026737 GN=queD PE=3 SV=1
MPAKYTLKVVSDFASAHTLRDYPGACSRMHGHNWKVEAEVEASRLNNVGMAVDFKAIRQQVRKLTDILDHRYLNDIKPFDMINPTAENIAKFLFNGLAEVLDDENIRVKAITLWETERACVRYEEND

SEQ ID NO: 20050 - protein, 137 aa, Edaphobacter aggregans
  misc_feature (1)..(137): tr|A0A428ME96|A0A428ME96_9BACT 6-carboxy-5,6,7,8-tetrah ydropterin synthase OS=Edaphobacter aggregans OX=570835 GN=EDE15_0657 PE=3 SV=1
MIFLTRKAEFSSAHYYWNDAWSLEENERIFGKCANRNGHGHNYTLEVTVAGEVDPTSGFVVDLKQLKDILEQEVVSVYDHRHLNLEVPEFAKAIPTTENIAIAVWNRLENKIPNAKLHRVRIYEMPDLFADYYGEQS

SEQ ID NO: 20051 - protein, 135 aa, Edaphobacter aggregans
  misc_feature (1)..(135): tr|A0A428ME76|A0A428ME76_9BACT 6-pyruvoyltetrahydropter in/6-carboxytetrahydropterin synthase OS=Edaphobacter a ggregans OX=570835 GN=EDE15_0656 PE=4 SV=1
MKAHLSRRYHFSASHRLHAEAYDDDRNRVVYGKCNNPHGHGHNYMVQVTLSGPVDSVTGMVCNLAELDDFAQTNLIAQFDQMNLNTLDCFRDTVTTTENLSIEIYRIFSKFTAAHLESVHVEETSNNSFDFAGAF

SEQ ID NO: 20052 - protein, 140 aa, Edaphobacter dinghuensis
  misc_feature (1)..(140): tr|A0A495BRS1|A0A495BRS1_9BACT 6-pyruvoyltetrahydropter in/6-carboxytetrahydropterin synthase OS=Edaphobacter d inghuensis OX=1560005 GN=C8E94_0580 PE=4 SV=1
MKAYLSRRYNFPASHRLNTDAYDAEQNRAVFGKCNNPHGHGHNYTVQVTVSGEVDPETGMVCNLADLDTFAQTNLLDRFDHANLNTLDCFRESVSTTENLSIEVYRIFRSFTAAHLERVHVEETSNNSFDYAGNVDPGFI

SEQ ID NO: 20053 - protein, 136 aa, Edaphobacter dinghuensis
  misc_feature (1)..(136): tr|A0A495BRZ8|A0A495BRZ8_9BACT 6-pyruvoyltetrahydropter in/6-carboxytetrahydropterin synthase OS=Edaphobacter d inghuensis OX=1560005 GN=C8E94_0581 PE=4 SV=1
MILLTRKAEFSSAHFYWNEAWSAEENQRVFGKCANRNGHGHNYTIEVTVAGEVDPVSGFVVDLKQLKDILEREVISVYDHRHLNLEVPEFSKTIPTTENIAIAIWHRLEGKIPNAKLYRVRVYEMPDLFADFYGER

SEQ ID NO: 20054 - protein, 142 aa, Edaphobacter modestus
  misc_feature (1)..(142): tr|A0A4Q7YSF1|A0A4Q7YSF1_9BACT 6-pyruvoyltetrahydropter in/6-carboxytetrahydropterin synthase OS=Edaphobacter m odestus OX=388466 GN=BDD14_1190 PE=4 SV=1
MKAYLSRRYHFSASHRLHSEAFDEGQNQQVFGKCNNPHGHGHNYTVEVTFSGRVNPVTGMVCDLGALDAFARENLIDRFDHTNLNLLHCFENRVSTTENLSVEVYRIFAGFSAAHLERVHIEETSNNSFDYAGDAMPAEGTH

SEQ ID NO: 20055 - protein, 125 aa, Edaphobacter modestus
  misc_feature (1)..(125): tr|A0A4Q7YS99|A0A4Q7YS99_9BACT 6-carboxy-5,6,7,8-tetrah ydropterin synthase OS=Edaphobacter modestus OX=388466 GN=BDD14_2152 PE=3 SV=1
MFEVTVEAGFSSGHYLRNYRGKCENPHGHNYKVFVTLIGEELDEAGLLLDFKLLKQVMRPVVDYLDHQMINELEPFTTLNPSAENLARYFYQETAKQLHEMTTGRVRVKDCTLYETDTSFARYYE

SEQ ID NO: 20056 - protein, 120 aa, Edwardsiella anguillarum
  misc_feature (1)..(120): tr|A0A076LLQ7|A0A076LLQ7_9GAMM 6-carboxy-5,6,7,8-tetrah ydropterin synthase OS=Edwardsiella anguillarum ET08081 3 OX=667120 GN=queD PE=3 SV=1
MTTTLFKEFQFEAAHRLPHVPQGHKCGRLHGHSFLVRIEITGEVDPYTGWVMDFADLKARFQPIYDQLDHHYLNEIAGLENPTSEVLARWIWDQLKPSLPLLSAVRVKETCTAGCTYRGQ

SEQ ID NO: 20057 - protein, 120 aa, Edwardsiella hoshinae
  misc_feature (1)..(120): tr|A0A376DIG3|A0A376DIG3_9GAMM 6-carboxy-5,6,7,8-tetrah ydropterin synthase OS=Edwardsiella hoshinae OX=93378 G N=queD PE=3 SV=1
MTTTLFKEFQFEAAHRLPHVPQGHKCGRLHGHSFLVRIEISGEVDPYTGWVMDFADLKARFQPIYDQLDHHYLNEIPGLENPTSEVLAHWIWAQLKPRLPLLSAVMVKETCTAGCTYRGA

SEQ ID NO: 20058 - protein, 120 aa, Edwardsiella ictaluri
  misc_feature (1)..(120): tr|C5BHL2|C5BHL2_EDWI9 6-carboxy-5,6,7,8-tetrahydropter in synthase OS=Edwardsiella ictaluri (strain 93-146) OX =634503 GN=NT01EI_1146 PE=3 SV=1
MTTTLFKEFQFEAAHRLPHVPQGHKCGRLHGHSFLVRIEITGEVDPHTGWVMDFADLKARFQPIYDQLDHHYLNEVAGLENPTSEVLARWIWDQLKPRLPLLSAVRVKETCTAGCTYRGQ

SEQ ID NO: 20059 - protein, 120 aa, Edwardsiella piscicida; identical to SEQ ID NO: 20056
  misc_feature (1)..(120): tr|A0A034SZS0|A0A034SZS0_9GAMM 6-carboxy-5,6,7,8-tetrah ydropterin synthase OS=Edwardsiella piscicida OX=126355 0 GN=MA13_contig00002-0032 PE=3 SV=1

SEQ ID NO: 20060 - protein, 120 aa, Edwardsiella piscicida
  misc_feature (1)..(120): tr|A0A411GZL7|A0A411GZL7_9GAMM 6-carboxy-5,6,7,8-tetrah ydropterin synthase OS=Edwardsiella piscicida OX=126355 0 GN=queD PE=3 SV=1
MTTTLFKEFQFEAAHRLPHVPQGHKCGRLHGHSFLVRIEITGEVDPYTGWVMDFADLKARFQPIYDQLDHHYLNEIAGLENPTSEVLARWIWDQLKPCLPLLSAVRVKETCTAGCTYRGQ

SEQ ID NO: 20061 - protein, 120 aa, Edwardsiella tarda; identical to SEQ ID NO: 20060
  misc_feature (1)..(120): tr|A0A0H3DPA8|A0A0H3DPA8_EDWTF 6-carboxy-5,6,7,8-tetrah ydropterin synthase OS=Edwardsiella tarda (strain FL6-6 0) OX=718251 GN=queD PE=3 SV=1

SEQ ID NO: 20062 - protein, 120 aa, Edwardsiella tarda; identical to SEQ ID NO: 20060
  misc_feature (1)..(120): tr|D0ZET8|D0ZET8_EDWTE 6-carboxy-5,6,7,8-tetrahydropter in synthase OS=Edwardsiella tarda (strain EIB202) OX=49 8217 GN=ygcM PE=3 SV=1

SEQ ID NO: 20063 - protein, 140 aa, Effusibacillus lacus
  misc_feature (1)..(140): tr|A0A292YHR6|A0A292YHR6_9BACL 6-carboxy-5,6,7,8-tetrah ydropterin synthase OS=Effusibacillus lacus OX=1348429 GN=EFBL_0158 PE=3 SV=1
MNKERYHNKKVFVTKIFTFDSAHRLDDYIGKCANLHGHTYKLEVEVKGRTDHRGIVIDFTDLKKIVNEQIIAKYDHQFLNDHMPFNTTAENMVVFFFEIIDTYLNKLDDAQNITLQRCRLWETPTCYAEITREEFDRESE

SEQ ID NO: 20064 - protein, 141 aa, Eggerthella lenta
  misc_feature (1)..(141): tr|A0A369NGT4|A0A369NGT4_EGGLN 6-carboxy-5,6,7,8-tetrah ydropterin synthase OS=Eggerthella lenta OX=84112 GN=C1 853_02570 PE=3 SV=1
MYGLKTEASFDSAHFLTDYYGKCENLHGHRWRAVVYLEVADLQADGTMKDMVVDFGVFKRAVRDLAEELDHTFLVEEGSLAATTLAALEAEGFSLTVLPFRTTAENLARYVCDRLTEQGFPVSQVDLYETPNNCAIYRRTA

SEQ ID NO: 20065 - protein, 141 aa, Eggerthella lenta; identical to SEQ ID NO: 20064
  misc_feature (1)..(141): tr|C8WKK4|C8WKK4_EGGLE 6-carboxy-5,6,7,8-tetrahydropter in synthase OS=Eggerthella lenta (strain ATCC 25559 / D SM 2243 / JCM 9979 / NCTC 11813 / VPI 0255) OX=479437 G N=Elen_0320 PE=3 SV=1

SEQ ID NO: 20066 - protein, 140 aa, Eggerthella sinensis
  misc_feature (1)..(140): tr|A0A3N0IXJ5|A0A3N0IXJ5_9ACTN 6-carboxy-5,6,7,8-tetrah ydropterin synthase OS=Eggerthella sinensis OX=242230 G N=DMP09_08465 PE=3 SV=1
MYGLKTEASFDSAHFLTDYYGKCENLHGHRWRCVVYLEADELQDEGTMKDMVLDFGVFKRAVRAVAEELDHTFLVEEGSLKPATVAALEGEGFSLTVLPFRMTAENLARYFHDRLVEQNLPVACVEMYETPNNCALYRAR

SEQ ID NO: 20067 - protein, 139 aa, Eggerthella sp.
  misc_feature (1)..(139): tr|R7AFG8|R7AFG8_9ACTN 6-carboxy-5,6,7,8-tetrahydropter in synthase OS=Eggerthella sp. CAG:298 OX=1262876 GN=BN 592_00806 PE=3 SV=1
MYGLKTESSFDAAHFLTDYHGKCENLHGHRWRVVAYLEQEDLQSEGTMKDMVLDFGEFKQAVRAMTEALDHTFIVEEGSLSPQTITCLEDEGFTLSVMPFRTTAENLARYFFDHLREQSLPIAQIDVYETPNNCAIYRG

SEQ ID NO: 20068 - protein, 139 aa, Eggerthella sp.
  misc_feature (1)..(139): tr|F7UYB6|F7UYB6_EEGSY 6-carboxy-5,6,7,8-tetrahydropter in synthase OS=Eggerthella sp. (strain YY7918) OX=50255 8 GN=EGYY_03330 PE=3 SV=1
MYGLKTESSFDAAHFLTDYDGKCENLHGHRWRVVAYIEQDRLQSDGQAKDMVVDFGDFKHALRALTEELDHMFIVEEGSLAPETVACLERETFKLFVVPFRTTSENLARYFYERLEKRGFPVSLVEVYETPLNCAYYSK

SEQ ID NO: 20069 - protein, 139 aa, Ekhidna lutea
  misc_feature (1)..(139): tr|A0A239K9S1|A0A239K9S1_9BACT 6-pyruvoyltetrahydropter in/6-carboxytetrahydropterin synthase OS=Ekhidna lutea OX=447679 GN=SAMN05421640_2499 PE=4 SV=1
MIVIKQKHHFSSSHKLFNPSWTEEQNKKVFGPCANENWHGHNFELIVGVKGEPDNESGFVINPEKLNSLVQDKVIVKVDHKNLNLDVPFMKDKIASCENLIIEFWKILYPEVNRIDRNARLNHLRLYETPRNFVDYYGD

SEQ ID NO: 20070 - protein, 136 aa, Ekhidna lutea
  misc_feature (1)..(136): tr|A0A239L770|A0A239L770_9BACT 6-pyruvoyltetrahydropter in/6-carboxytetrahydropterin synthase OS=Ekhidna lutea OX=447679 GN=SAMN05421640_3027 PE=4 SV=1
MPRVTINRKEHFNAAHRLYNESWSDEKNEEIFGKCNNPNWHGHNYEIVVSLTGEPDPDTGYVYDMKKLSDVIKERVLSRFDHKNLNLDVTEFKNLNPTAENIVKVIYDLLRPEIEDQYEMKITLYETERNFVEYPG

SEQ ID NO: 20071 - protein, 133 aa, Elioraea sp.
  misc_feature (1)..(133): tr|A0A541BVX1|A0A541BVX1_9PROT 6-carboxytetrahydropteri n synthase OS=Elioraea sp. Yellowstone OX=2592070 GN=FK 498_17735 PE=4 SV=1
MFSLTVCDHVMIAHSFRGEVFGPAQKLHGATYAVEAEFRAPSLDAHGLVVDIGLARAELRRALDSFDYDNLDALPQFAGQNTTTEFMAAHVHGLLVAALKAGRLGEGGRRVTSLKVLLRESPLAWAAYEAVVE

SEQ ID NO: 20072 - protein, 150 aa, Elizabethkingia anophelis
  misc_feature (1)..(150): tr|A0A290N926|A0A290N926_9FLAO 6-carboxytetrahydropteri n synthase OS=Elizabethkingia anophelis R26 OX=1246994 GN=BAZ09_014420 PE=4 SV=1
MIRITKIFTFETAHVLYNYDGKCKNMHGHSYKLFVTVKGKPVNDLDNPKNGMVVDFGDIKKIVNEEVVDIWDHAVLINANSPHKELGNELEGRGHKVIYCSFQPTCENMLYEIAAKVQAKLPSDISLAYLKLHETENSYGEWFAEDQSEN

SEQ ID NO: 20073 - protein, 150 aa, Elizabethkingia anophelis; identical to SEQ ID NO: 20072
  misc_feature (1)..(150): tr|X5KTY1|X5KTY1_9FLAO 6-carboxy-5,6,7,8-tetrahydropter in synthase OS=Elizabethkingia anophelis OX=1117645 GN= ygcM PE=4 SV=1

SEQ ID NO: 20074 - protein, 150 aa, Elizabethkingia bruuniana
  misc_feature (1)..(150): tr|A0A5E8D1Z1|A0A5E8D1Z1_9FLAO 6-pyruvoyl tetrahydropte rin synthase OS=Elizabethkingia bruuniana OX=1756149 GN =AYC65_13875 PE=4 SV=1
MIRITKIFTFETAHVLYNYDGKCKNMHGHSYKLFVTVKGKPVNDLDNPKNGMVVDFGDIKKIVNEEIINIWDHAVLINANSPHKELGNELEGRGHKVIYCSFQPTCENMLYEVAAKIQAKLPSEISLAYLKLHETENSYGEWFAEDQTEN

SEQ ID NO: 20075 - protein, 150 aa, Elizabethkingia meningoseptica
  misc_feature (1)..(150): tr|A0A1V3U4U7|A0A1V3U4U7_ELIME 6-carboxytetrahydropteri n synthase QueD OS=Elizabethkingia meningoseptica OX=23 8 GN=BMF97_01950 PE=4 SV=1
MIRITKIFTFETAHVLYNYDGKCKNMHGHSYKLFVTVKGKPIDNLDHPKNGMVVDFGDIKKIVNEEIVDVWDHAVLINANSPHKELGEDLEAKGHKVIYCSFQPTCENMLYEIADRIQAKLPQEISLAYLKLHETENSYGEWFAEDQREN

SEQ ID NO: 20076 - protein, 150 aa, Elizabethkingia meningoseptica; identical to SEQ ID NO: 20072
  misc_feature (1)..(150): tr|A0A376EFX0|A0A376EFX0_ELIME Queuosine biosynthesis p rotein QueD OS=Elizabethkingia meningoseptica OX=238 GN =NCTC10588_02698 PE=4 SV=1

SEQ ID NO: 20077 - protein, 150 aa, Elizabethkingia miricola
  misc_feature (1)..(150): tr|A0A0W8EZF8|A0A0W8EZF8_ELIMR 6-pyruvoyl tetrahydropte rin synthase OS=Elizabethkingia miricola OX=172045 GN=A MC91_02740 PE=4 SV=1
MIRITKIFTFETAHVLYNYDGKCKNMHGHSYKLFVTVKGKPVNDLDNPKNGMVVDFGDIKKIVNEEVVDIWDHAVLINANSPHKELGNELEGRGHKVIYCGFQPTCENMLYEIAAKVQAKLPSDISLAYLKLHETENSYGEWFAEDQSEN

SEQ ID NO: 20078 - protein, 150 aa, Elizabethkingia miricola
  misc_feature (1)..(150): tr|A0A0D5BN66|A0A0D5BN66_ELIMR 6-carboxytetrahydropteri n synthase OS=Elizabethkingia miricola OX=172045 GN=DSC 47_14885 PE=4 SV=1
MIRITKIFTFETAHVLYNYDGKCKNMHGHSYKLFVTVKGKPINDLDNPKNGMVVDFGDIKKIVNEEVVDIWDHAVLINANSPHKELGNELEGRGHKVIYCSFQPTCENMLYEVAAKIQAKLPSEISLAYLKLHETENSYGEWFAEDQTEN

SEQ ID NO: 20079 - protein, 150 aa, Elizabethkingia occulta
  misc_feature (1)..(150): tr|A0A1T3MMJ9|A0A1T3MMJ9_9FLAO 6-carboxytetrahydropteri n synthase QueD OS=Elizabethkingia occulta OX=1867263 G N=BAZ10_01110 PE=4 SV=1
MIRITKIFTFETAHVLYNYDGKCKNMHGHSYKLFVTVKGKPVNDLDNPKNGMVVDFGDIKKIVNEEVVDIWDHAVLINANSPHKELGNELEGRGHKVIYCVFQPTCENMLYEIAAKVQAKLPSEISLAYLKLHETENSYGEWFAEDQSEN

SEQ ID NO: 20080 - protein, 150 aa, Elizabethkingia sp.
  misc_feature (1)..(150): tr|A0A2T5RWV4|A0A2T5RWV4_9FLAO 6-pyruvoyltetrahydropter in/6-carboxytetrahydropterin synthase OS=Elizabethkingi a sp. YR191 OX=2135666 GN=C8J94_102372 PE=4 SV=1
MIRITKIFTFETAHVLYNYDGKCKNMHGHSYKLFVTVKGKPVNDLDNPKNGMVVDFGDIKKIVNEEVVDIWDHAVLINANSPHKELGNELEGRGHKVIYCGFQPTCENMLYEIAAKVQAKLPSEISLAYLKLHETENSYGEWFAEDQSEN

SEQ ID NO: 20081 - protein, 148 aa, Elizabethkingia sp.
  misc_feature (1)..(148): tr|A0A5B7UCP6|A0A5B7UCP6_9FLAO 6-carboxy-5,6,7,8-tetrah ydropterin synthase OS=Elizabethkingia sp. JS20170427CO W OX=2583851 GN=FGE20_03025 PE=3 SV=1
MIRITKIFTFETAHVLYGYDGKCKNLHGHSYKLYVSLKGKPIEDLHHVKNGMVIDFGDLKKIVKDEIQDPWDHGVLVNALSPHLELGENLEKEGHKVIFCNYQPTCENMLYDIAEKIQKHLPEGVELAYLKLHETENSYGEWFAEDQL

SEQ ID NO: 20082 - protein, 150 aa, Elizabethkingia ursingii; identical to SEQ ID NO: 20080
  misc_feature (1)..(150): tr|A0A1T3FBC5|A0A1T3FBC5_9FLAO 6-carboxytetrahydropteri n synthase QueD OS=Elizabethkingia ursingii OX=1756150 GN=BAY32_06285 PE=4 SV=1

SEQ ID NO: 20083 - protein, 123 aa, Elstera cyanobacteriorum
  misc_feature (1)..(123): tr|A0A255XKB6|A0A255XKB6_9PROT 6-carboxy-5,6,7,8-tetrah ydropterin synthase OS=Elstera cyanobacteriorum OX=2022 747 GN=CHR90_15795 PE=3 SV=1
MFELSKQFYFEAAHTLERVIETESSRRIHGHTYHAEITVRGRPDPVSGMILDLGLFTRALEAVRARLDHHFLDDVPDLGPATLENLCVYLWRTLAPDLAGLNRVTVWRQASGDKCTYFGPEVN

SEQ ID NO: 20084 - protein, 133 aa, Elstera cyanobacteriorum
  misc_feature (1)..(133): tr|A0A255XXJ8|A0A255XXJ8_9PROT Uncharacterized protein OS=Elstera cyanobacteriorum OX=2022747 GN=CHR90_03220 P E=4 SV=1
MYALEVRDHIMIAHSLPRPVFGPAQGLHGATYIVDVAFFRETLDPDNLVVDIGLASDALKKLLAPLNYQNLDTVPALAGQITTTEFLARFIFDGMAAAVKAGDLGPHAAGLAKLRVTLEESHVARASFEGALA

SEQ ID NO: 20085 - protein, 123 aa, Elstera litoralis
  misc_feature (1)..(123): tr|A0A0F3IV64|A0A0F3IV64_9PROT 6-carboxy-5,6,7,8-tetrah ydropterin synthase OS=Elstera litoralis OX=552518 GN=V Z95_04785 PE=3 SV=1
MFELSKQFYFEAAHTLERSIETESSRRIHGHTYHAEITVRGAPDPATGMILDLGLFTRALDSVRAELDHRFLDDVPGLGPATLENLCVYLWKNLAPSLPGLNRVSVWRQASGDKCTYFGPEEA

SEQ ID NO: 20086 - protein, 133 aa, Elstera litoralis
  misc_feature (1)..(133): tr|A0A0F3INX9|A0A0F3INX9_9PROT 6-pyruvoyl tetrahydropte rin synthase OS=Elstera litoralis OX=552518 GN=VZ95_178 40 PE=4 SV=1
MFALEVRDHMMIAHSLPRPVFGPAQGLHGATFIVDVAFFRPELDADNLVVDIGLASVALKKILSPLTYQNLDSVPELAGKITTTEFLARYIFDQMCAAVQAGDLGPHAGGLTKIRVSLEESHIARAWYEGALA

SEQ ID NO: 20087 - protein, 118 aa, Elusimicrobia bacterium
  misc_feature (1)..(118): tr|A0A2M7S2X3|A0A2M7S2X3_9BACT 6-carboxy-5,6,7,8-tetrah ydropterin synthase OS=Elusimicrobia bacterium CG_4_10_ 14_0_8_um_filter_37_32 OX=2014301 GN=queD PE=3 SV=1
MYEVTVIRHFSGAHNLRNYKGKCEALHGHNWKVEVTLRGGKLNKTGMLMDFTHLKKLLDKVLSKIDHKYLNKTPPFDKLNPTAENIAEYIYRQIAKYFREIYKVTVWESDNSYATYAE

SEQ ID NO: 20088 - protein, 123 aa, Elusimicrobia bacterium
  misc_feature (1)..(123): tr|A0A350W3S1|A0A350W3S1_9BACT 6-carboxy-5,6,7,8-tetrah ydropterin synthase OS=Elusimicrobia bacterium OX=20308 00 GN=queD PE=3 SV=1
MYSITVEDNFSAAHNLRNYKGKCEKLHGHNYRVYLTVGGSSLDKSGMLSDFSYLKNVLENILSELDHAYLNRVPPFNKINPTAENIAEFIFTEAELKIKNKMLKVERVKVWETEKNCAEYYEK

SEQ ID NO: 20089 - protein, 120 aa, Elusimicrobium minutum
  misc_feature (1)..(120): tr|B2KCS0|B2KCS0_ELUMP 6-carboxy-5,6,7,8-tetrahydropter in synthase OS=Elusimicrobium minutum (strain Pei191) O X=445932 GN=Emin_0761 PE=3 SV=1
MEKHKVYLIKKSSFTAAHSHEGMLNEAQHTHTFHYEIKLCGFTNNEGFLTDFRIVEEDMNTLINKELKDKNLNIFLKDPTTEKLAVWIFRRLKDSYGKMLHCVTVYETPQSAVIYEGEDE

SEQ ID NO: 20090 - protein, 115 aa, Elusimicrobium minutum
  misc_feature (1)..(115): tr|B2KC64|B2KC64_ELUMP 6-carboxy-5,6,7,8-tetrahydropter in synthase OS=Elusimicrobium minutum (strain Pei191) O X=445932 GN=Emin_0636 PE=3 SV=1
MLLKLKRKFSSAHRLPDYDGECNNLHGHTWVVEFIIEGETKESGMVEDFKTLKPLLDSVLPDHKYLNDFVQNPTAENMVKYIYDNAAKLLTQRGLKLKQVELWENENASAIFQAY

SEQ ID NO: 20091 - protein, 116 aa, Elusimicrobium sp.
  misc_feature (1)..(116): tr|A0A1Y4DBH3|A0A1Y4DBH3_9BACT Uncharacterized protein OS=Elusimicrobium sp. An273 OX=1965617 GN=B5F75_04680 P E=4 SV=1
MSKVYLTQCGSFTARHGHGGTLAEEVHTHTFHYEVTFFGPTNAEGYLIDFRQLADTFKKELESRLEGSDLGTFLPQPTTEALCVWMYKRLKERLPHLYSVKVAEEPDRWIEYRGEE

SEQ ID NO: 20092 - protein, 114 aa, Elusimicrobium sp.
  misc_feature (1)..(114): tr|A0A1Y4DFM1|A0A1Y4DFM1_9BACT 6-carboxy-5,6,7,8-tetrah ydropterin synthase OS=Elusimicrobium sp. An273 OX=1965 617 GN=B5F75_04660 PE=3 SV=1
MLIKLIRTFSSAHRLPHYDGPCHQLHGHTWKAVFVIEGAVREDGMVCDFKVIKKLLDDNLPDHQFLNDWVENPTAENLAQYLFAKIGAELKKQNLTLKTLEIWESDNAAAVVEG

SEQ ID NO: 20093 - protein, 178 aa, Emcibacter congregatus
  misc_feature (1)..(178): tr|A0A2G4YP45|A0A2G4YP45_9PROT 6-pyruvoyl tetrahydropte rin synthase OS=Emcibacter congregatus OX=2043170 GN=CR D36_12940 PE=4 SV=1
MSFEICFTRRYCMAHRLFNIRNSRCFVPHGHNEFVKVYLVSIGNDTLDGGVNMMAPFAVLKQVWHQWIDDHVDHSLQLSSQDPMLDYFKTRESENLAHLMITPGDPTTEVLAALFMSKINALMADQGLAVRCRKVEIEETPTNTVSFSGDAKDVISAAHYDGPETPWWQRPDMTINDL

SEQ ID NO: 20094 - protein, 178 aa, Emcibacter nanhaiensis
  misc_feature (1)..(178): tr|A0A501PGH7|A0A501PGH7_9PROT 6-carboxytetrahydropteri n synthase OS=Emcibacter nanhaiensis OX=1505037 GN=FIV4 6_13195 PE=4 SV=1
MFEICFTRRYSMSHRLYSLKDSRCFVPHGHNEFVKVYLSRPENDALDGDTNMMAPFDTLKKTWHQWVDNHLDHSLHLSDKDPLIGFFRDNEPENLAHLLVTPGDPTTEALAACLFAKINAFLNDLGLGIVCRRLEIEETPTNTVIFHGDPDKALCTDSYPGPARPWWKRADMSINDLA

SEQ ID NO: 20095 - protein, 136 aa, Empedobacter brevis; identical to SEQ ID NO: 17206
  misc_feature (1)..(136): tr|A0A3P6N317|A0A3P6N317_9FLAO 6-carboxy-5,6,7,8-tetrah ydropterin synthase OS=Empedobacter brevis OX=247 GN=qu eD PE=3 SV=1

SEQ ID NO: 20096 - protein, 136 aa, Empedobacter brevis
  misc_feature (1)..(136): tr|A0A511NHJ6|A0A511NHJ6_9FLAO 6-carboxy-5,6,7,8-tetrah ydropterin synthase OS=Empedobacter brevis NBRC 14943 = ATCC 43319 OX=1218108 GN=ygcM PE=3 SV=1
MKVTVNRKAHFNAAHRLFNQTWSDEQNFKVFGKCSYPNYHGHNYEIIVSVKGEVDPETGFVMNLDQLRKIIEVEVEDYLDHKNLNVDIEEFKTVNPTAENIVILIWNKIRAKLASGLELKVTLYETPRNFVEYTGE

SEQ ID NO: 20097 - protein, 136 aa, Empedobacter falsenii
  misc_feature (1)..(136): tr|A0A376GI85|A0A376GI85_9FLAO 6-carboxy-5,6,7,8-tetrah ydropterin synthase OS=Empedobacter falsenii OX=343874 GN=queD_2 PE=3 SV=1
MKVTVNRKAHFNAAHRLFNKNWSDEQNFEVFGKCSYPNYHGHNYEIIVAVKGEVDPETGFVMNLDELRKIIAVEVEDYLDHKNLNVDIEEFKTINPTAENIVILIWNKIRAKLATDLELKVTLYETPRNFVEYAGE

SEQ ID NO: 20098 - protein, 148 aa, Empedobacter falsenii
  misc_feature (1)..(148): tr|A0A427BS26|A0A427BS26_9FLAO 6-carboxy-5,6,7,8-tetrah ydropterin synthase OS=Empedobacter falsenii OX=343874 GN=queD PE=3 SV=1
MIRLTKAFTFETAHALHGYDGKCKNIHGHSYKLFVTVKGTPSEDTNDVKLGMVMDFGDLKKIVNKEIVNLFDHAILLNENSPHKTLGEKLLAEGHNVVFTDYQPSAENMILWIVDKIKPLLPTNIDLVALKLHETENSYAEWLAEDNQ

SEQ ID NO: 20099 - protein, 148 aa, Empedobacter haloabium
  misc_feature (1)..(148): tr|A0A5C7CBW2|A0A5C7CBW2_9FLAO 6-carboxy-5,6,7,8-tetrah ydropterin synthase OS=Empedobacter haloabium OX=592317 GN=queD PE=3 SV=1
MLTITRKLEFDAGHRIPDHKSQCRNLHGHRYTLEITLTGQVITAEGNSDNGMIMDFSDVKAIAKEHLVDVWDHAFLVYDKDTAVKEFLASLPNHKTVVIDRIPTVENLAAVAFGILKAAFKDRYGTGLHLHKLVLHETPNCWAEIVEG

SEQ ID NO: 20100 - protein, 148 aa, Empedobacter sp.
  misc_feature (1)..(148): tr|A0A4Z1BSX6|A0A4Z1BSX6_9FLAO 6-carboxy-5,6,7,8-tetrah ydropterin synthase OS=Empedobacter sp. MRS2 OX=2491114 GN=queD PE=3 SV=1
MIRLTKAFTFETAHALHGYDGKCKNIHGHSYKLFVTVKGTPSEDTNDVKLGMVMDFGDLKKIVNKEIVNLFDHAILLNENSPHKTLGEKLLAEGHNVVFTDYQPSAENMILWIVDKIKPLLPINIDLVALKLHETENSYAEWLAEDNQ

SEQ ID NO: 20101 - protein, 136 aa, Empedobacter sp.; identical to SEQ ID NO: 20097
  misc_feature (1)..(136): tr|A0A4Z1CCA6|A0A4Z1CCA6_9FLAO 6-carboxy-5,6,7,8-tetrah ydropterin synthase OS=Empedobacter sp. MRS2 OX=2491114 GN=E4J94_00480 PE=3 SV=1

SEQ ID NO: 20102 - protein, 139 aa, Emticicia sp.
  misc_feature (1)..(139): tr|A0A4Q5M0G2|A0A4Q5M0G2_9BACT 6-carboxy-5,6,7,8-tetrah ydropterin synthase OS=Emticicia sp. 17J42-9 OX=2492393 GN=EWM59_11260 PE=3 SV=1
MSSKRVAVFRKEHFNAAHRLNNPNWPDEKNERVYGKCNNYNFHGHNYDLVVQVIGDIDPESGYVMDMKLLSDLIKVEILDKFDHKNLNLDTEEFKDINPSAENIAVVIYEKLRAKLPDHLDLRIRLYETERNFVEYPVI

SEQ ID NO: 20103 - protein, 136 aa, Emticicia sp.
  misc_feature (1)..(136): tr|A0A2N4XBB6|A0A2N4XBB6_9BACT 6-carboxy-5,6,7,8-tetrah ydropterin synthase OS=Emticicia sp. TH156 OX=2067454 G N=C0V77_14615 PE=3 SV=1
MIYITRRERFNAAHRLWNAEWSDEKNREVFGLCSNIHGHNWELVVTVKGEIDPNTGFVMDLKDLSKVMKSEVTDKVDHTFLNEDVPFLKGKYPTTEIFAVEIWKILAPVLQEKYNTTLHCVKLIETPNHYVEYFGD

SEQ ID NO: 20104 - protein, 123 aa, Endomicrobium proavitum
  misc_feature (1)..(123): tr|A0A0G3WIR0|A0A0G3WIR0_9BACT 6-carboxy-5,6,7,8-tetrah ydropterin synthase OS=Endomicrobium proavitum OX=14082 81 GN=ptpS PE=3 SV=1
MKYKLSVTKGFASAHCLREYKGKCENVHGHNWKIRAAFGGTQLDKTGMLIDFTDLKAHLDKIMTYLDHKFLNETAPFDKINPTAENIALYIFEELKKAETLTAKVAEVEVWESDTSSATITAE

SEQ ID NO: 20105 - protein, 123 aa, Bathymodiolus septemdierum
  misc_feature (1)..(123): tr|A0A0P0USB2|A0A0P0USB2_9GAMM 6-carboxy-5,6,7,8-tetrah ydropterin synthase OS=endosymbiont of Bathymodiolus se ptemdierum str. Myojin knoll OX=1303921 GN=queD PE=3 SV =1
MFVLKIVTDFGAAHSLRDYPGDCARLHGHNWGVEMSVEAQELDANGIAIDFRVIKKQTKEVVKRLDHQYLNEISPFDKLNPTAENIAKYMYHEVGKLINNQAVRVSEVIIWETPRASVAYSEQ

SEQ ID NO: 20106 - protein, 125 aa, Galathealinum brachiosum
  misc_feature (1)..(125): tr|A0A370D8M1|A0A370D8M1_9GAMM 6-carboxy-5,6,7,8-tetrah ydropterin synthase OS=endosymbiont of Galathealinum br achiosum OX=2200906 GN=queD PE=3 SV=1
MPAKYTLKIVTDFASAHTLRDYPGACSRMHGHNWKVELELESSQLDNVGMAIDFKAMKKATNDVCDKLDHRYLNEIEPFTEINPTAENMAAWIFQEIAKKLNTDTLRVSSLTLWETERACVTYSE

SEQ ID NO: 20107 - protein, 118 aa, Endozoicomonadaceae bacterium
  misc_feature (1)..(118): tr|A0A3S3QV71|A0A3S3QV71_9GAMM 6-carboxy-5,6,7,8-tetrah ydropterin synthase OS=Endozoicomonadaceae bacterium GT F-13 OX=2506149 GN=queD PE=3 SV=1
MEIYKDFTFEAAHRLPNVPDGHKCGRLHGHSFQVRIVVSGEVDSHTGWILDFADLKAAFKPIYERLDHHYLNEIEGLDNPTSEVLARWIWQQLKPGLELLSRVEVKETCTCGCVYRGD

SEQ ID NO: 20108 - protein, 285 aa, Endozoicomonas elysicola
  misc_feature (1)..(285): tr|A0A081K8E0|A0A081K8E0_9GAMM 6-pyruvoyl tetrahydropte rin reductase OS=Endozoicomonas elysicola OX=305900 GN= GV64_06420 PE=4 SV=1
MQALFVNQLSTLDFSFLCPERGIVGETWLVDVTLWGELDEQGMVFDFSHVKKQIKASLDTLSDHRLLVPLLAEETTITHEKKQLTVRFEAAEGQITCSAPAQAMLLVDAAAITPELLRPFLEEAVIKELPDNVTKVDLRLYPEEIGGAYYHYSHGLKKHDGDCQRIAHGHRSQIRVFVDEQRDQVLEALWAKQWRDIYIATREDLRETFTEKSVEYYRFNYTANQGYFEISLPSTYCYLIDTDSTVELLASHIAQSLSTQKTGKTIRVVAFEGLNKGAIATHSLK

SEQ ID NO: 20109 - protein, 287 aa, Endozoicomonas montiporae
  misc_feature (1)..(287): tr|A0A081N8S1|A0A081N8S1_9GAMM 6-pyruvoyl tetrahydropte rin reductase OS=Endozoicomonas montiporae OX=1027273 G N=GZ77_11265 PE=4 SV=1
MTALFVNQLTTLDFSFLSPDRGVVGETWLVDVVLYGDLDEQGMVFDFGHVKKQVKASLDFMADHRLLVPVAHPSIKVEAEKDRLDVTLDSPVTGTINCKAPAQAMLLVDAEEIATETLTPILEKALMSELPDNVKDVKLKLYNEFIKGAYYHYSHGLKKHLGDCQRIAHGHRSAINVQVNGEDSPQLEKDWAEKWSDIYIATREDRLDCFEENGRQYNRFGYTADQGYFELTLASELCYLIDTDSTVELLAQHMAAEMYQSLPADSDLEVTAYEGFNKGSIARINSY

SEQ ID NO: 20110 - protein, 287 aa, Endozoicomonas montiporae; identical to SEQ ID NO: 20109
  misc_feature (1)..(287): tr|A0A142B921|A0A142B921_9GAMM Uncharacterized protein OS=Endozoicomonas montiporae CL-33 OX=570277 GN=EZMO1_1 040 PE=4 SV=1

SEQ ID NO: 20111 - protein, 284 aa, Endozoicomonas numazuensis
  misc_feature (1)..(284): tr|A0A081NL01|A0A081NL01_9GAMM 6-pyruvoyl tetrahydropte rin reductase OS=Endozoicomonas numazuensis OX=1137799 GN=GZ78_03715 PE=4 SV=1
MTALFVNQLTTLDFSYLSPERGVVGETWLVDVVLKGNLDEQGMVFDFGHVKKQIKASLDLLADHRLLVPTAHQALTIKADNEERLSVQMQTSSGDIIECKAPAQAILLVNAQEITPQALTPFLEKTLLDELPDNVSGVELQIYPEQFSGAFYHYSHGLKKHLGDCQRIAHGHRSPIHIYLNGQRDPMEEAGWAETWKDIYIATREDLLETVTLGKQEHFRFGYTSDQGYFELTIAEDRCYLIDTDSTVELLAEHIASMLKSRHPDQSVRVVAFEGFNKGAVAEK

SEQ ID NO: 20112 - protein, 118 aa, Endozoicomonas sp.; identical to SEQ ID NO: 20107
  misc_feature (1)..(118): tr|A0A3P3VJF0|A0A3P3VJF0_9GAMM 6-carboxytetrahydropteri n synthase QueD OS=Endozoicomonas sp. GTF13 OX=2528527 GN=queD PE=4 SV=1

SEQ ID NO: 20113 - protein, 120 aa, Enhydrobacter aerosaccus
  misc_feature (1)..(120): tr|A0A1T4LAN6|A0A1T4LAN6_9PROT 6-carboxy-5,6,7,8-tetrah ydropterin synthase OS=Enhydrobacter aerosaccus OX=2253 24 GN=SAMN02745126_01448 PE=3 SV=1
MWELTKSFRFDAAHTLKRSIDAESSKRIHGHSYRAEVTLRGEPDPETGMVVDFGLLERTLAQARDGLDHHMLDDVPDLGPATMENLAAWIWRRLAPATKGLVKVTVYRDSNDESVTYRGP

SEQ ID NO: 20114 - protein, 133 aa, Enhydrobacter sp.
  misc_feature (1)..(133): tr|A0A5C8PAL7|A0A5C8PAL7_9PROT 6-carboxytetrahydropteri n synthase OS=Enhydrobacter sp. CC-CFT640 OX=2586908 GN =FHP25_36290 PE=4 SV=1
MFAVEVRDHIMVAHSFRGEIFGPAQRVHGATFVVDAAFMTRDLDAAGLVVDIGRAIAILREVLEPLNYRNLDEMPAFAGRNTTTEFLARHIHERIAACARDGRLGRAASEIDALRVTLSESHVARGWYEAPLA

SEQ ID NO: 20115 - protein, 197 aa, Enhydrobacter sp.; identical to SEQ ID NO: 18110
  misc_feature (1)..(197): tr|A0A1V2GRN8|A0A1V2GRN8_9PROT 6-carboxytetrahydropteri n synthase QueD OS=Enhydrobacter sp. H5 OX=1907940 GN=B KE17_03025 PE=4 SV=1

SEQ ID NO: 20116 - protein, 150 aa, Enhygromyxa salina
  misc_feature (1)..(150): tr|A0A2S9XL02|A0A2S9XL02_9DELT 6-pyruvoyl tetrahydropte rin synthase OS=Enhygromyxa salina OX=215803 GN=ENSA7_7 9610 PE=4 SV=1
MRYRSTKTFTNLPCAHRLHSHPGHCRFVHGYSRSFKFYFEASELDEHNFVVDFAALKDVRQWLEHMYDHTLLIGEHDPELAFFREMEARKLCDLRVVPSVTMEGTAALVFEHVDALIRDKTNGRAWVAKVEVHENDKNSAELERIDDRAQ

SEQ ID NO: 20117 - protein, 120 aa, Enhygromyxa salina
  misc_feature (1)..(120): tr|A0A2S9XUG9|A0A2S9XUG9_9DELT 6-carboxy-5,6,7,8-tetrah ydropterin synthase OS=Enhygromyxa salina OX=215803 GN= queD PE=3 SV=1
MDVFKEFRFEAAHLLPNVPPGHKCGRLHGHSFRVEVHIRGPVDPASGWVLDFADIKQAFKPLYERLDHHYLNEIPGLDNPTSENLARWIWRELGDSLPGLSKIVVRETCTSGCIYEGESD

SEQ ID NO: 20118 - protein, 118 aa, Ensifer adhaerens
  misc_feature (1)..(118): tr|A0A0L8BRN3|A0A0L8BRN3_ENSAD 6-carboxy-5,6,7,8-tetrah ydropterin synthase OS=Ensifer adhaerens OX=106592 GN=A C244_17750 PE=3 SV=1
MYRITKEFHFSASHQLSHLPADHQCARLHGHNYIVEVELAAADLDENGFVRDYHDLAPLKRYIDDSFDHRHLNEVLGHDRVTSECLARHFYDWCKERLPETSAVRVSETPKTWAEYRP

SEQ ID NO: 20119 - protein, 118 aa, Ensifer adhaerens
  misc_feature (1)..(118): tr|W8I6L1|W8I6L1_ENSAD 6-carboxy-5,6,7,8-tetrahydropter in synthase OS=Ensifer adhaerens OV14 OX=1416753 GN=OV1 4_a0985 PE=3 SV=1
MYRITKEFHFSASHQLSHLPADHQCARLHGHNYIVEVELAAADLNDDGFVRDYHDLAPLKHYIDGSFDHRHLNDVLGHDRVTSECLARHFYDWCKERLPETSAVRVSETPKTWAEYRP

SEQ ID NO: 20120 - protein, 118 aa, Ensifer alkalisoli
  misc_feature (1)..(118): tr|A0A1E3V7S9|A0A1E3V7S9_9RHIZ 6-carboxy-5,6,7,8-tetrah ydropterin synthase OS=Ensifer alkalisoli OX=1752398 GN =A8M32_19890 PE=3 SV=1
MFRITKEFHFSASHQLKSLPPEHQCARLHGHNYIVEVELSAETLNEHGFVRDYHELAPLKRYIDEAFDHRHLNDVLGHDRVTAECLAQHFFEWCKGRFPETAAVRVSETAKTWAEYRP

SEQ ID NO: 20121 - protein, 168 aa, Ensifer alkalisoli
  misc_feature (1)..(168): tr|A0A1E3VID7|A0A1E3VID7_9RHIZ Uncharacterized protein OS=Ensifer alkalisoli OX=1752398 GN=A8M32_00235 PE=4 SV =1
MVLDFGFLKTEMMGEIDACCDHGMMIWVDDPWIASFLPFTSREASAEVMQQYRAEVRETGQKLIEGPFGKTLLLSQVPTAENLAKHWFRRLAPRVRLRSGNRADLLSVVVWETPNCMATYHAPDLGRSRPGLSPRHSHSEKFPNEIGGIAGEGGNLGSHERSTFSQRF

SEQ ID NO: 20122 - protein, 118 aa, Ensifer glycinis
  misc_feature (1)..(118): tr|A0A178XX75|A0A178XX75_9RHIZ 6-carboxy-5,6,7,8-tetrah ydropterin synthase OS=Ensifer glycinis OX=1472378 GN=A U381_10320 PE=3 SV=1
MFRITKEFHFSASHQLTSLPPEHQCARLHGHNYIVEVELSAETLNEHGFVRDYHELAPLKRYIDEVFDHRHLNDVLGHDRVTAECLAQHFYVWCKARLPETSAVRVSETAKTWAEYRP

SEQ ID NO: 20123 - protein, 119 aa, Ensifer sojae
  misc_feature (1)..(119): tr|A0A249PJB2|A0A249PJB2_9RHIZ 6-carboxy-5,6,7,8-tetrah ydropterin synthase OS=Ensifer sojae CCBAU 05684 OX=716 928 GN=SJ05684_b48400 PE=3 SV=1
MMFRITKEFHFSASHQLKSLPPEHQCARLHGHNYVVEVELSAGALNEHGFVRDYHDLASLKHYIDEAFDHRHLNDVLGHDRVTAECLAQHFFEWCKARFPETTAVRVSETAKTWAEYRP

SEQ ID NO: 20124 - protein, 118 aa, Ensifer sp.
  misc_feature (1)..(118): tr|A0A395KZG0|A0A395KZG0_9RHIZ 6-carboxy-5,6,7,8-tetrah ydropterin synthase OS=Ensifer sp. M14 OX=2203782 GN=qu eD PE=3 SV=1
MYRITKEFHFSASHQLSHLPADHQCARLHGHNYIVEVELAANELDENGFVRDYHDLAPLKRYIDGSFDHRHLNDVLGHDRVTSECLARHFYDWCKQRLPETSAVRVSETPKTWAEYRP

SEQ ID NO: 20125 - protein, 118 aa, Ensifer sp.
  misc_feature (1)..(118): tr|A0A1C0SH49|A0A1C0SH49_9RHIZ 6-carboxy-5,6,7,8-tetrah ydropterin synthase OS=Ensifer sp. LC14 OX=1873714 GN=B C362_11965 PE=3 SV=1
MFRITKEFHFSASHQLKSLPADHQCARLHGHNYIVEVELTGQELNEHGFVRDYHELSPLKRYIDDSFDHRHLNDVLGHDRVTAECLAKHFYDWCKARLPETSAVRVSETPKTWAEYRP

SEQ ID NO: 20126 - protein, 127 aa, Enteractinococcus coprophilus
  misc_feature (1)..(127): tr|A0A543AN69|A0A543AN69_9MICC 6-pyruvoyl-tetrahydropte rin synthase OS=Enteractinococcus coprophilus OX=102763 3 GN=FB556_0425 PE=4 SV=1
MFSLTVNDYVMIAHSLPNEFFGPAQQLHGATLTVEATFTRPELDEHSVVLDIGHATQLLDDALAPLRYADLDSHPDFEGRLSTSEVIAQYIGDKLAASLAEQPDIGISVTIHENPRARVSYTVADRG

SEQ ID NO: 20127 - protein, 127 aa, Enteractinococcus helveticum
  misc_feature (1)..(127): tr|A0A1B7M0J4|A0A1B7M0J4_9MICC 6-pyruvoyl tetrahydrobio pterin synthase OS=Enteractinococcus helveticum OX=1837 282 GN=A6F49_08960 PE=4 SV=1
MFSLTVNDYVMIAHSLPNEFFGPAQQLHGATLTVEATFTRAALDEHSVVLDIGHATQLLDDALAPLRYADLDSHPDFAGRLSTTEVIAQYIGDALAASLAEQPYIGISVTLHENPRARVSYTVADRG

SEQ ID NO: 20128 - protein, 120 aa, Enterobacillus tribolii
  misc_feature (1)..(120): tr|A0A370QT67|A0A370QT67_9ENTR 6-carboxy-5,6,7,8-tetrah ydropterin synthase OS=Enterobacillus tribolii OX=14879 35 GN=C8D90_104281 PE=3 SV=1
MTTTLFKDFQFEAAHHLPHVPSGHKCGRLHGHSFLVRVEVTGEVDPHTGWVIDFAEIKAAFKPILDRLDHYYLNDIPGLENPTSEVLAQWIWQMLKPALPLLSAIMVKETCTAGCTYRGE

SEQ ID NO: 20129 - protein, 119 aa, Enterobacter agglomerans; identical to SEQ ID NO: 19595
  misc_feature (1)..(119): tr|A0A2V1YJ13|A0A2V1YJ13_ENTAG 6-carboxy-5,6,7,8-tetrah ydropterin synthase OS=Enterobacter agglomerans OX=549 GN=queD PE=3 SV=1

SEQ ID NO: 20130 - protein, 119 aa, Enterobacter agglomerans
  misc_feature (1)..(119): tr|A0A2A7V9B0|A0A2A7V9B0_ENTAG 6-carboxy-5,6,7,8-tetrah ydropterin synthase OS=Enterobacter agglomerans OX=549 GN=queD PE=3 SV=1
MSTTLFKEFQFEAAHHLPNVPAGHKCGRLHGHSFLVRLEITGEVDAHTGWVMDFAELKAAFKPLYNQLDHYYLNDIPGLENPTSEVLAKWIWDQMKPQLPLLSAVMIKETCTAGCVYRG

SEQ ID NO: 20131 - protein, 120 aa, Enterobacter asburiae
  misc_feature (1)..(120): tr|A0A0D9HAQ8|A0A0D9HAQ8_ENTAS 6-carboxy-5,6,7,8-tetrah ydropterin synthase OS=Enterobacter asburiae OX=61645 G N=queD PE=3 SV=1
MSTTLFKDFTFEAAHHLPHVPEGHKCGRLHGHSFMVRLEITGEVDPHTGWIMDFAELKAAFKPTYDRLDHYYLNDIPGLENPTSEVLAKWIWDQMKPLVPLLSAVMIKETCTAGCIYRGE

SEQ ID NO: 20132 - protein, 120 aa, Enterobacter asburiae
  misc_feature (1)..(120): tr|A0A5A8ZVW2|A0A5A8ZVW2_ENTAS 6-carboxy-5,6,7,8-tetrah ydropterin synthase OS=Enterobacter asburiae OX=61645 G N=queD PE=3 SV=1
MSTTLFKDFTFEAAHHLPHVPEGHKCGRLHGHSFMVRLEITGEVDPHTGWIMDFAELKAAFKPTYDRLDHYYLNEIPGLENPTSEVLAKWIWDQMKPLVPLLSAVMIKETCTAGCIYRGE

SEQ ID NO: 20133 - protein, 120 aa, Enterobacter bugandensis
  misc_feature (1)..(120): tr|A0A2J7T7G2|A0A2J7T7G2_9ENTR 6-carboxy-5,6,7,8-tetrah ydropterin synthase OS=Enterobacter bugandensis OX=8812 60 GN=queD PE=3 SV=1
MSTTLFKDFTFEAAHHLPHVPAGHKCGRLHGHSFMVRLEITGEVDPHTGWIMDFAELKAAFKPTYDRLDHYYLNDIPGLENPTSEVLAKWIWDQMKPLVPLLSAVMIKETCTAGCVYRGE

SEQ ID NO: 20134 - protein, 120 aa, Enterobacter bugandensis
  misc_feature (1)..(120): tr|A0A3S0I8K2|A0A3S0I8K2_9ENTR 6-carboxy-5,6,7,8-tetrah ydropterin synthase OS=Enterobacter bugandensis OX=8812 60 GN=queD PE=3 SV=1
MSTTLFKDFTFEAAHHLPHVPEGHKCGRLHGHSFMVRLEITGEVDPHTGWIMDFAELKAAFKPTYDRLDHYYLNDIPGLENPTSEVLAKWIWDQMKPLVPLLSAVMIKETCTAGCVYRGE

SEQ ID NO: 20135 - protein, 121 aa, Enterobacter cancerogenus
  misc_feature (1)..(121): tr|D2ZJN7|D2ZJN7_9ENTR 6-carboxy-5,6,7,8-tetrahydropter in synthase OS=Enterobacter cancerogenus ATCC 35316 OX= 500639 GN=queD PE=3 SV=1
MMSTTLFKDFIFEAAHHLPHVPAGHKCGRLHGHSFMVRLEITGEVDPHTGWIMDFAELKAAFKPTYDRLDHYYLNDIPGLENPTSEVLAKWIWDQVKPLVPQLSAVMIKETCTAGCIYRGE

SEQ ID NO: 20136 - protein, 120 aa, Enterobacter cancerogenus
  misc_feature (1)..(120): tr|A0A2J7NZZ6|A0A2J7NZZ6_9ENTR 6-carboxy-5,6,7,8-tetrah ydropterin synthase OS=Enterobacter cancerogenus OX=692 18 GN=queD PE=3 SV=1
MSTTLFKDFIFEAAHHLPHVPAGHKCGRLHGHSFMVRLEITGEVDPHTGWIMDFAELKAAFKPTYDRLDHYYLNDIPGLENPTSEVLAKWIWDQVKPLVPLLSAVMIKETCTAGCIYRGE

SEQ ID NO: 20137 - protein, 120 aa, Enterobacter chengduensis
  misc_feature (1)..(120): tr|A0A0F4BCN6|A0A0F4BCN6_9ENTR 6-carboxy-5,6,7,8-tetrah ydropterin synthase OS=Enterobacter chengduensis OX=249 4701 GN=SG71_18005 PE=3 SV=1
MSTTLFKDFTFEAAHHLPHVPAGHKCGRLHGHSFMVRLEITGEVDPHTGWIMDFAELKAAFKPTYDRLDHYYLNEIPGLENPTSEVLAKWIWDQMKPLVPLLSAVMIKETCTAGCIYRGE

SEQ ID NO: 20138 - protein, 120 aa, Enterobacter chuandaensis
  misc_feature (1)..(120): tr|A0A3A3Z7T8|A0A3A3Z7T8_9ENTR 6-carboxy-5,6,7,8-tetrah ydropterin synthase OS=Enterobacter chuandaensis OX=249 7875 GN=queD PE=3 SV=1
MSTTLFKDFTFEAAHHLPHVPAGHKCGRLHGHSFMVRLEITGEVDPHTGWIMDFAELKAAFKPTYDRLDHYYLNDIPGLENPTSEVLAKWIWDQMKPLVPLLSAVMIKETCTAGCIYRGE

SEQ ID NO: 20139 - protein, 120 aa, Enterobacter cloacae; identical to SEQ ID NO: 20133
  misc_feature (1)..(120): tr|A0A0A5QUN8|A0A0A5QUN8_ENTCL 6-carboxy-5,6,7,8-tetrah ydropterin synthase OS=Enterobacter cloacae OX=550 GN=q ueD PE=3 SV=1

SEQ ID NO: 20140 - protein, 120 aa, Enterobacter cloacae
  misc_feature (1)..(120): tr|A0A5E0IGI7|A0A5E0IGI7_ENTCL 6-carboxy-5,6,7,8-tetrah ydropterin synthase OS=Enterobacter cloacae OX=550 GN=q ueD PE=3 SV=1
MSTTLFKDFTFEAAHHLPHVPEGHKCGRLHGHSFMVRLEITGDVDPHTGWIMDFAELKAAFKPTYDRLDHYYLNDIPGLENPTSEVLAKWIWDQMKPQVPLLSAVMIKETCTAGCIYRGE

SEQ ID NO: 20141 - protein, 120 aa, Enterobacter genomosp.; identical to SEQ ID NO: 20134
  misc_feature (1)..(120): tr|A0A0X4EM38|A0A0X4EM38_9ENTR 6-carboxy-5,6,7,8-tetrah ydropterin synthase OS=Enterobacter genomosp. O OX=2364 150 GN=AWI28_00730 PE=3 SV=1

SEQ ID NO: 20142 - protein, 121 aa, Enterobacter hormaechei
  misc_feature (1)..(121): tr|F5S184|F5S184_9ENTR 6-carboxy-5,6,7,8-tetrahydropter in synthase OS=Enterobacter hormaechei ATCC 49162 OX=88 8063 GN=queD PE=3 SV=1
MMSTTLFKDFTFEAAHHLPHVPAGHKCGRLHGHSFMVRLEITGEVDPHTGWIMDFAELKAAFKPTYDRLDHYYLNDIPGLENPTSEVLAKWIWDQMKPLVPLLSAVMIKETCTAGCVYRGE

SEQ ID NO: 20143 - protein, 120 aa, Enterobacter hormaechei; identical to SEQ ID NO: 20133
  misc_feature (1)..(120): tr|A0A2J0PXM6|A0A2J0PXM6_9ENTR 6-carboxy-5,6,7,8-tetrah ydropterin synthase OS=Enterobacter hormaechei OX=15883 6 GN=queD PE=3 SV=1

SEQ ID NO: 20144 - protein, 121 aa, Enterobacter huaxiensis
  misc_feature (1)..(121): tr|A0A3R9NIF5|A0A3R9NIF5_9ENTR 6-carboxy-5,6,7,8-tetrah ydropterin synthase OS=Enterobacter huaxiensis OX=24947 02 GN=queD PE=3 SV=1
MMSTTLFKDFIFEAAHHLPHVPAGHKCGRLHGHSFMVRLEITGEVDPHTGWIIDFAELKAAFKPTYDRLDHYYLNDIPGLENPTSEVLAKWIWDQMKPLIPLLSAVTIKETCTAGCVYRGE

SEQ ID NO: 20145 - protein, 120 aa, Enterobacter huaxiensis
  misc_feature (1)..(120): tr|A0A3R9PD69|A0A3R9PD69_9ENTR 6-carboxy-5,6,7,8-tetrah ydropterin synthase OS=Enterobacter huaxiensis OX=24947 02 GN=queD PE=3 SV=1
MKTTLYKDFTFEAAHRLPNVPEGHKCGRLHGHSFVVRLEITGDVDKHTGWIIDFAELKAIFKPTLDRLDHYYLNDIPGLENPTSEVLAEWIWNQIKPQLPTLSAVVVKETCSAGCIYRGE

SEQ ID NO: 20146 - protein, 120 aa, Enterobacter kobei; identical to SEQ ID NO: 20133
  misc_feature (1)..(120): tr|A0A5E0W9H5|A0A5E0W9H5_9ENTR 6-carboxy-5,6,7,8-tetrah ydropterin synthase OS=Enterobacter kobei OX=208224 GN= queD_1 PE=3 SV=1

SEQ ID NO: 20147 - protein, 120 aa, Enterobacter kobei
  misc_feature (1)..(120): tr|A0A0P8LEX4|A0A0P8LEX4_9ENTR 6-carboxy-5,6,7,8-tetrah ydropterin synthase OS=Enterobacter kobei OX=208224 GN= queD PE=3 SV=1
MSTTLFKDFTFEAAHHLPHVPEGHKCGRLHGHSFMVRLEITGEVDPHTGWIMDFAELKAAFKPTYDRLDHYYLNEIPGLENPTSEVLAKWIWDQMKPLVPLLSAVMIKETCTAGCVYRGE

SEQ ID NO: 20148 - protein, 120 aa, Enterobacter lignolyticus
  misc_feature (1)..(120): tr|E3GCD4|E3GCD4_ENTLS 6-carboxy-5,6,7,8-tetrahydropter in synthase OS=Enterobacter lignolyticus (strain SCF1) OX=701347 GN=Entcl_3865 PE=3 SV=1
MKTTLYKDFTFEAAHRLPNVPEGHKCGRLHGHSFVVRLEITGEVDPHTGWIIDFAELKAIFKPTLDRLDHYYLNDIPGLENPTSEVLAEWVWQQIKPQLPLLSAVVVKETCTAGCIYRGE

SEQ ID NO: 20149 - protein, 121 aa, Enterobacter lignolyticus
  misc_feature (1)..(121): tr|E3G5S8|E3G5S8_ENTLS 6-carboxy-5,6,7,8-tetrahydropter in synthase OS=Enterobacter lignolyticus (strain SCF1) OX=701347 GN=Entcl_0941 PE=3 SV=1
MMSTTLFKDFTFEAAHHLPHVPEGHKCGRLHGHSFMVRLEITGEVDPYTGWIMDFAELKAAFKPTYDRLDHYYLNDIPGLENPTSEVLAKWIWDQMKPQVPLLSAVMVKETCTAGCVYRGE

SEQ ID NO: 20150 - protein, 120 aa, Enterobacter ludwigii; identical to SEQ ID NO: 20140
  misc_feature (1)..(120): tr|G8LCJ1|G8LCJ1_9ENTR 6-carboxy-5,6,7,8-tetrahydropter in synthase OS=Enterobacter ludwigii OX=299767 GN=queD PE=3 SV=1

SEQ ID NO: 20151 - protein, 120 aa, Enterobacter mori
  misc_feature (1)..(120): tr|A0A2J0NF55|A0A2J0NF55_9ENTR 6-carboxy-5,6,7,8-tetrah ydropterin synthase OS=Enterobacter mori OX=539813 GN=B 9Q20_12430 PE=3 SV=1
MSTKLFKDFTFEAAHHLPHVPEGHKCGRLHGHSFMVRLEITGEVDPHTGWIMDFAELKAAFKPTYDRLDHYYLNDIPGLENPTSEVLAKWIWDQMKPLVPLLSAVMIKETCTAGCIYRGE

SEQ ID NO: 20152 - protein, 120 aa, Enterobacter mori; identical to SEQ ID NO: 20131
  misc_feature (1)..(120): tr|A0A2U2NLY6|A0A2U2NLY6_9ENTR 6-carboxy-5,6,7,8-tetrah ydropterin synthase OS=Enterobacter mori OX=539813 GN=q ueD PE=3 SV=1

SEQ ID NO: 20153 - protein, 120 aa, Enterobacter roggenkampii
  misc_feature (1)..(120): tr|A0A1C7ZNV7|A0A1C7ZNV7_9ENTR 6-carboxy-5,6,7,8-tetrah ydropterin synthase OS=Enterobacter roggenkampii OX=181 2935 GN=BBX43_13120 PE=3 SV=1
MSTTLFKDFTFEAAHHLPHVPEGHKCGRLHGHSFMVRLEITGEVDPHTGWIMDFAELKAAFKPTYDRLDHYYLNEIPGLENPTSEVLAKWIWDQMKPRVPLLSAVMIKETCTAGCIYRGE

SEQ ID NO: 20154 - protein, 120 aa, Enterobacter roggenkampii
  misc_feature (1)..(120): tr|A0A384GQN0|A0A384GQN0_9ENTR 6-carboxy-5,6,7,8-tetrah ydropterin synthase OS=Enterobacter roggenkampii OX=181 2935 GN=ASU87_02275 PE=3 SV=1
MSTTLFKDFTFEAAHHLPHVPEGHKCGRLHGHSFMVRLEITGEVDPHTGWIMDFAELKAAFKPTYDRLDHYYLNEIPGLENPTSEVLAKWIWDQMKPRVPLLSAVMIKETCTAGCVYRGE

SEQ ID NO: 20155 - protein, 120 aa, Enterobacter sichuanensis
  misc_feature (1)..(120): tr|A0A0F1AGZ2|A0A0F1AGZ2_9ENTR 6-carboxy-5,6,7,8-tetrah ydropterin synthase OS=Enterobacter sichuanensis OX=207 1710 GN=SS37_20335 PE=3 SV=1
MSTTLFKDFTFEAAHHLPHVPAGHKCGRLHGHSFMVRLEITGEVDPHTGWIMDFAELKAAFKPTYDRLDHYYLNDIPGLENPTSEVLAKWIWDQMKPQVPLLSAVMIKETCTAGCVYRGE

SEQ ID NO: 20156 - protein, 120 aa, Enterobacter soli
  misc_feature (1)..(120): tr|A0A198H2R9|A0A198H2R9_9ENTR 6-carboxy-5,6,7,8-tetrah ydropterin synthase OS=Enterobacter soli ATCC BAA-2102 OX=1354262 GN=M987_00177 PE=3 SV=1
MMSTTLFKDFVFEAAHHLPHVPAGHKCGRLHGHSFMVRLEITGEVDPHTGWIMDFAELKAAFKPTYDRLDHYYLNDIPGLENPTSEVLAKWIWDQMKPLVPLLSAVMIKETCTAGCVYRG

SEQ ID NO: 20157 - protein, 119 aa, Enterobacter sp.
  misc_feature (1)..(119): tr|A0A495API6|A0A495API6_9ENTR 6-carboxy-5,6,7,8-tetrah ydropterin synthase OS=Enterobacter sp. R1(2018) OX=244 7891 GN=queD PE=3 SV=1
MATTLFKDFTFEAAHRLPHVPEGHKCGRLHGHSFMVRLEITGEVDPHTGWIMDFSELKAAFKPTYDRLDHYYLNDIPGLENPTSEVLAKWIWEQMKPVVPLLSAVMVKETCTAGCVYKG

SEQ ID NO: 20158 - protein, 120 aa, Enterobacter sp.; identical to SEQ ID NO: 20132
  misc_feature (1)..(120): tr|A0A4S3ERB2|A0A4S3ERB2_9ENTR 6-carboxy-5,6,7,8-tetrah ydropterin synthase OS=Enterobacter sp. AD2-3 OX=254783 4 GN=queD PE=3 SV=1

SEQ ID NO: 20159 - protein, 119 aa, Enterobacterales bacterium
  misc_feature (1)..(119): tr|A0A389M7R4|A0A389M7R4_9GAMM 6-carboxy-5,6,7,8-tetrah ydropterin synthase OS=Enterobacterales bacterium OX=19 93870 GN=queD PE=3 SV=1
MTTTLFKDFQFEAAHHLPNVPAGHKCGRLHGHSFTVRIEITGEVDPYTGWVMDFADLKAAFNPTLDRLDHYNLNDIPGLENPTSEVLAEWIWNEMKPKLPLLSAVRVKETCTAGCVYKG

SEQ ID NO: 20160 - protein, 120 aa, Enterobacterales bacterium
  misc_feature (1)..(120): tr|A0A2I0FQA8|A0A2I0FQA8_9GAMM 6-carboxy-5,6,7,8-tetrah ydropterin synthase OS=Enterobacterales bacterium CwR94 OX=2025587 GN=queD PE=3 SV=1
MAITLFKDFTFEAAHRLPNVPVGHKCNRIHGHSFTVRLEITGDIDPHTGWLMDFSELKAAFQPTYDRLDHHYLNDIPGLENPTSEVLSRWIWEQIKPLVPQLSRVLIKETCTSGSIYRGE

SEQ ID NO: 20161 - protein, 120 aa, Enterobacteriaceae bacterium
  misc_feature (1)..(120): tr|A0A351NL55|A0A351NL55_9ENTR 6-carboxy-5,6,7,8-tetrah ydropterin synthase OS=Enterobacteriaceae bacterium OX= 1849603 GN=queD PE=3 SV=1
MSTTLFKDFIFEAAHRLPHVPEGHKCGRLHGHSFMVRLEITGDVDPHTGWIMDFSELKAAFKPTYDRLDHYYLNDIPGLENPTSEVLAKWIWEEMKPLVPLLSAVTIKETCTAGCVYRGE

SEQ ID NO: 20162 - protein, 119 aa, Enterobacteriaceae bacterium
  misc_feature (1)..(119): tr|A0A286BW05|A0A286BW05_9ENTR 6-carboxy-5,6,7,8-tetrah ydropterin synthase OS=Enterobacteriaceae bacterium JKS 000234 OX=1938870 GN=SAMN06273570_2707 PE=3 SV=1
MSTTLFKEFQFESAHRLPHVPEGHKCGRLHGHSFLVRLEITGEVDAHTGWVMDFAELKAAFKPLYERLDHHYLNDIPGLENPTSEVLAKWIWDQMKPLLPELSAVMIKETCTAGCVYRG

SEQ ID NO: 20163 - protein, 104 aa, Enterococcus faecium
  misc_feature (1)..(104): tr|A0A2S7M949|A0A2S7M949_ENTFC 6-pyruvoyl tetrahydropte rin synthase OS=Enterococcus faecium OX=1352 GN=CUN04_0 7750 PE=4 SV=1
MRWEGGMGAKHNHTWEIICEIKSNNGEMHLFEEIEGVLKDFFQPFSGCFLNEMSPFVEINPSVENVANYFYDQLFHRFAAIQTELIRIEVGESPTRFYCIEKQG

SEQ ID NO: 20164 - protein, 123 aa, Enterococcus gallinarum
  misc_feature (1)..(123): tr|A0A366U922|A0A366U922_ENTGA 6-pyruvoyl tetrahydropte rin synthase OS=Enterococcus gallinarum OX=1353 GN=EB54 _00826 PE=4 SV=1
MVEKRCIYKFKSHVNASHAMRWEGGMGAKHNHTWEIICEIKSQDDEMHLFEEIEGVLKDFFQPFSGSFLNEMPPFLEINPSVENVTNYFYDQLSLRLAAIQTELIRIEVGESPTRFYCIEKQA

SEQ ID NO: 20165 - protein, 123 aa, Enterococcus gallinarum
  misc_feature (1)..(123): tr|A0A1L8TZV8|A0A1L8TZV8_ENTGA 6-pyruvoyl tetrahydropte rin synthase OS=Enterococcus gallinarum OX=1353 GN=E4T7 6_11205 PE=4 SV=1
MAEKRCIYKFKSHVNASHAMRWEGGMGAKHNHTWEIICEIKSQDDEMHLFEEIEGVLKDFFQPFSGSFLNEMPPFLEINPSVENVTNYFYDQLSLRLAAIQTELIRIEVGESPTRFYCIEKQA

SEQ ID NO: 20166 - protein, 123 aa, Enterococcus hirae
  misc_feature (1)..(123): tr|A0A4S3PTE9|A0A4S3PTE9_ENTHR 6-pyruvoyl tetrahydropte rin synthase OS=Enterococcus hirae OX=1354 GN=E1H99_067 15 PE=4 SV=1
MVEKRCIYKFKSHVNASHAMRWEDGMGARHNHTWEIICEIKSNDDEMHLFEEIESVLKDFFQPFSGSFLNETPPFVEINPSVENVANYFYDQLSLRLAEIQTELIRIEVGESPTRFYCIEKQE

SEQ ID NO: 20167 - protein, 123 aa, Enterococcus sp.; identical to SEQ ID NO: 20166
  misc_feature (1)..(123): tr|A0A242JYT3|A0A242JYT3_9ENTE Uncharacterized protein OS=Enterococcus sp. 10A9_DIV0425 OX=1987383 GN=A5844_00 2176 PE=4 SV=1

SEQ ID NO: 20168 - protein, 123 aa, Enterococcus sp.; identical to SEQ ID NO: 20165
  misc_feature (1)..(123): tr|T0U8R5|T0U8R5_9ENTE 6-pyruvoyl-tetrahydropterin synt haserelatedprotein OS=Enterococcus sp. HSIEG1 OX=131641 4 GN=HSIEG1_1875 PE=4 SV=1

SEQ ID NO: 20169 - protein, 141 aa, Enterorhabdus caecimuris
  misc_feature (1)..(141): tr|A0A4S4G562|A0A4S4G562_9ACTN 6-carboxy-5,6,7,8-tetrah ydropterin synthase OS=Enterorhabdus caecimuris OX=6712 66 GN=E5986_00385 PE=3 SV=1
MYGLKTESSFDASHFLTDYHGKCENLHGHRWRVVAYLEVERLQTEGTCKDMVVDFGDFKGAVRALTDKLDHHFIIEEGSLAPDTLACLEREGFALFTVPFRTTAENLAKWFFDELAAQGLPVAQVDVYETPNNCAFYRKDV

SEQ ID NO: 20170 - protein, 141 aa, Enterorhabdus caecimuris
  misc_feature (1)..(141): tr|R9KW85|R9KW85_9ACTN 6-carboxy-5,6,7,8-tetrahydropter in synthase OS=Enterorhabdus caecimuris B7 OX=1235794 G N=C811_01059 PE=3 SV=1
MYGLKTESSFDASHFLTDYHGKCENLHGHRWRVVAYLEVERLQTEGTCKDMVVDFGDFKAAVRALTDKLDHHFIIEEGSLAPDTLACLEREGFALFTVPFRTTAENLAKWFFDELAAQGLPVSQVDVYETPNNCAFYRKDV

SEQ ID NO: 20171 - protein, 98 aa, Enterorhabdus sp.
  misc_feature (1)..(98): tr|A0A4S2G0M9|A0A4S2G0M9_9ACTN 6-carboxytetrahydropteri n synthase (Fragment) OS=Enterorhabdus sp. NM05_H27 OX= 2516956 GN=E5332_00735 PE=4 SV=1
MYGLKTESSFDASHFLTDYHGKCENLHGHRWRVVAYLEAAELQTEGTCKDMVVDFGDFKGALRSLTERLDHHFIIEEGSLAPDTLACLEREGFALFTV

SEQ ID NO: 20172 - protein, 61 aa, Enterorhabdus sp.
  misc_feature (1)..(61): tr|A0A4S2FCH7|A0A4S2FCH7_9ACTN 6-carboxytetrahydropteri n synthase QueD (Fragment) OS=Enterorhabdus sp. NM05_H2 7 OX=2516956 GN=E5332_11220 PE=4 SV=1
APDTLACLEREGFALFTVPFRTTAENLAKWFFDELAAQGLPVAQVDVYETPNNCAFYRKGA

SEQ ID NO: 20173 - protein, 142 aa, Enteroscipio rubneri
  misc_feature (1)..(142): tr|A0A2K2UC84|A0A2K2UC84_9ACTN 6-carboxy-5,6,7,8-tetrah ydropterin synthase OS=Enteroscipio rubneri OX=2070686 GN=C2L71_05310 PE=3 SV=1
MYGLKTEASFDSAHFLTDYYGKCENLHGHRWRVVVHLAVDDLQTEGTMKGMVLDFGVFKRAVRELAEELDHTFLVEEGSLADATLAALESEGFSLTLLPFRTTAENLARYFCDCLAEQGLPVSQVEMYETPNNCALYRPLQR

SEQ ID NO: 20174 - protein, 120 aa, Enterovibrio coralii
  misc_feature (1)..(120): tr|A0A135I8P5|A0A135I8P5_9GAMM 6-carboxy-5,6,7,8-tetrah ydropterin synthase OS=Enterovibrio coralii OX=294935 G N=ATN88_03700 PE=3 SV=1
MHTELFKEFMFEAAHRLPHVPEGHKCGRLHGHSFLVRIYVAGEVDPHTGWVIDFSEIKKAFQPIYDRLDHYYLNDIEGLENPTSEVLAKWIWDELKPALPCLNKIMIKETCTAGCIYTGE

SEQ ID NO: 20175 - protein, 169 aa, Enterovibrio coralii
  misc_feature (1)..(169): tr|A0A135I7T5|A0A135I7T5_9GAMM Queuosine biosynthesis p rotein QueD OS=Enterovibrio coralii OX=294935 GN=ATN88_ 02045 PE=4 SV=1
MQVHALDKANLITDVQLGNHLSHAVTQGRRSDFALMLALLSGDATETTPLNPTYPEKTTDAMLRQALELPEPNRLAAEEIDYELCGEQASAFHSSSITSARFNHCVTPSALHFPAHGTHDLGEDVYHNLSGHTRRQLAEEKPNLTAYDPVNLYNQLVLSKRFQELNTTV

SEQ ID NO: 20176 - protein, 120 aa, Enterovibrio nigricans
  misc_feature (1)..(120): tr|A0A1T4VBV7|A0A1T4VBV7_9GAMM 6-carboxy-5,6,7,8-tetrah ydropterin synthase OS=Enterovibrio nigricans DSM 22720 OX=1121868 GN=SAMN02745132_03619 PE=3 SV=1
MHTELFKEFMFEAAHHLPHVPEGHKCGRLHGHSFLVRIYVAGEVDPHTGWVIDFSEIKKAFQPIYDRLDHYYLNDIEGLENPTSEVLSKWIWDELKPALPCLSKIMIKETCTAGCIYTGE

SEQ ID NO: 20177 - protein, 120 aa, Enterovibrio norvegicus
  misc_feature (1)..(120): tr|A0A2N7LAI7|A0A2N7LAI7_9GAMM 6-carboxy-5,6,7,8-tetrah ydropterin synthase OS=Enterovibrio norvegicus OX=18814 4 GN=queD PE=3 SV=1
MHTELFKEFMFEAAHHLPHVPEGHKCGRLHGHSFLVRLYVTGEVDPHTGWIIDFSEIKAAFKPIYDRLDHYYLNDIEGLENPTSEVLAKWIWDQLKPELPCLSKVMIKETCTAGCIYTGE

SEQ ID NO: 20178 - protein, 120 aa, Enterovibrio norvegicus
  misc_feature (1)..(120): tr|A0A1E5C190|A0A1E5C190_9GAMM 6-carboxy-5,6,7,8-tetrah ydropterin synthase OS=Enterovibrio norvegicus FF-454 O X=1185651 GN=A1OK_14590 PE=3 SV=1
MHTELFKEFMFEAAHHLPHVPEGHKCGRLHGHSFLVRLYVAGEVDPYTGWVIDFSEIKEAFKPIYDRLDHYYLNDIEGLENPTSEVLAKWIWDQLKPSLPCLSKVMIKETCTAGCIYTGE

SEQ ID NO: 20179 - protein, 169 aa, Enterovibrio pacificus
  misc_feature (1)..(169): tr|A0A1C3ERR7|A0A1C3ERR7_9GAMM Queuosine biosynthesis p rotein QueD OS=Enterovibrio pacificus OX=1080227 GN=A8L 45_02550 PE=4 SV=1
MQLHTLDKAALISDIQLGDKLNHAVSQGRRSDFALMLALLSGDSTETEPVEVVCTEEKTDDELRRLFQLSEPERLSADSLDYERAEQQSHAFHYAGLTSAKLSGYVSPPALHFPAEGTHNLGEDVYHNLSGHQRRRLSGEKSKETGLDPANLYRQLNEARRFKEINSYA

SEQ ID NO: 20180 - protein, 120 aa, Enterovibrio pacificus
  misc_feature (1)..(120): tr|A0A1C3EPV2|A0A1C3EPV2_9GAMM 6-carboxy-5,6,7,8-tetrah ydropterin synthase OS=Enterovibrio pacificus OX=108022 7 GN=A8L45_04935 PE=3 SV=1
MHTELFKEFMFEAAHHLPNVPEGHKCGRLHGHSFMVRIYVAGEVDPHTGWLIDFAEIKAAFKPIYDRLDHYYLNDIEGLENPTSEVLAQWIWNELKPALPCLSKVMIKETCTAGCVYTGE

SEQ ID NO: 20181 - protein, 120 aa, Enterovibrio sp.
  misc_feature (1)..(120): tr|A0A4V1LTE9|A0A4V1LTE9_9GAMM 6-carboxy-5,6,7,8-tetrah ydropterin synthase OS=Enterovibrio sp. CAIM 600 OX=127 8244 GN=queD PE=3 SV=1
MQTELFKEFMFEAAHHLPNVPEGHKCGRLHGHSFLVRIYVAGDVDPCTGWVIDFAEIKAAFKPIYDRLDHYYLNDIEGLENPTSEVLSKWIWNELKPSLPCLSKVMIKETCTAGCIYTGE

SEQ ID NO: 20182 - protein, 296 aa, Enterovibrio sp.
  misc_feature (1)..(296): tr|A0A4Q0YRZ1|A0A4Q0YRZ1_9GAMM Uncharacterized protein OS=Enterovibrio sp. CAIM 600 OX=1278244 GN=CS022_06525 PE=4 SV=1
MSSPQWSTLFIKGFTVIDSSFASKTRGLVGESWLVDITLKGTLNDESMIFDFGLVKKHIKSIIDEVADHKLIIPATCSGIEVVRENDTTSVTADFDNENNFVVKAPENAFYFIDEDEVSASCIQVDLERKILAKMPANVTEVSIVLRTEALGDAPYYHYSHGLKKHQGNCQRIVHGHRSKIEIYEDGVRSDSLQRHWEKRWQDIYLVSEEDINGYQSWQHTEVENQTFIHSSYSSSEGDFELLVHKSKCEVIPTDTTVEFLAEYIAHESLKKSQCSRLEVFAYEGIEKGAYVELTQ

SEQ ID NO: 20183 - protein, 118 aa, Enterovirga rhinocerotis
  misc_feature (1)..(118): tr|A0A4R7CAP7|A0A4R7CAP7_9RHIZ 6-carboxy-5,6,7,8-tetrah ydropterin synthase OS=Enterovirga rhinocerotis OX=1339 210 GN=EV668_1146 PE=3 SV=1
MKITQAFTFEAAHRLPNVPETHRCFRMHGHSYRIELTLEGPVDPRSGFVIDFFDVEAVFAPLLERLDHHCLNEVEGLENPTAEHIAIWIWQRVKPLLPLVSSVRVYETPQSWAEYEGV

SEQ ID NO: 20184 - protein, 135 aa, Enterovirga rhinocerotis
  misc_feature (1)..(135): tr|A0A4R7BUF6|A0A4R7BUF6_9RHIZ 6-pyruvoyl-tetrahydropte rin synthase OS=Enterovirga rhinocerotis OX=1339210 GN= EV668_3508 PE=4 SV=1
MYAVEVRDHVMIAHSFRGDLFGPAQALHGATFVVDVAFFREALTEDGVVVDIGRAGEALKAILGPLNYRNLDDLPAFAGRNTTTEFLSGHIHKAMSAAIRAGDLGPGGEGVDRIRVTLHESHIARAWFEGPVADG

SEQ ID NO: 20185 - protein, 117 aa, Epibacterium mobile
  misc_feature (1)..(117): tr|A0A1B1A2X0|A0A1B1A2X0_9RHOB 6-carboxy-5,6,7,8-tetrah ydropterin synthase OS=Epibacterium mobile F1926 OX=126 5309 GN=K529_009165 PE=3 SV=1
MFRIRKEFHFSASHQLSHLPDDHQCARLHGHNYIVVVELAAETLNTEGFVRDYHDLKPLKTYIDDTFDHRHLNDVLEGPSTAENMAKHFHDWCAARWPETRAVLVSETPKTWAEYRP

SEQ ID NO: 20186 - protein, 117 aa, Epibacterium mobile
  misc_feature (1)..(117): tr|A0A1H3DHH5|A0A1H3DHH5_9RHOB 6-carboxy-5,6,7,8-tetrah ydropterin synthase OS=Epibacterium mobile OX=379347 GN =SAMN05444385_110113 PE=3 SV=1
MFRIRKEFHFSASHQLSHLPDDHQCARLHGHNYIVVVELAAETLNPEGFVRDYHDLKPLKTYIDDTFDHRHLNDVLEGSSTAENMAKHFHDWCAARWPETRAVLVSETPKTWAEYRP

SEQ ID NO: 20187 - protein, 121 aa, Epibacterium multivorans
  misc_feature (1)..(121): tr|A0A0P1GWS6|A0A0P1GWS6_9RHOB 6-carboxy-5,6,7,8-tetrah ydropterin synthase OS=Epibacterium multivorans OX=9288 56 GN=queD PE=3 SV=1
MFRICKEFHFCASHSLDTLPEGHKCAGLHGHNYIVYLELESETLDDTGFIIDFHELDTFKAYIDEEFDHKHLNNVMDLPPTTENVAYHFYTWCKARWPQTSAVRVSETPKTWAEYRPRPAS

SEQ ID NO: 20188 - protein, 116 aa, Epibacterium ulvae
  misc_feature (1)..(116): tr|A0A1G5PIT0|A0A1G5PIT0_9RHOB 6-carboxy-5,6,7,8-tetrah ydropterin synthase OS=Epibacterium ulvae OX=1156985 GN =SAMN04488118_10167 PE=3 SV=1
MYRITKEFQFSASHRLTTLQDGHPCTRVHGHNYVVVVELASATLDEHGFVREYRDLDLLKAYIDENFDHRHLNDVLEMPTSEVLAKHFYDWCRERWEEVTSVRISETPKIWAEYRP

SEQ ID NO: 20189 - protein, 131 aa, Epibacterium ulvae
  misc_feature (1)..(131): tr|A0A1G5R9T0|A0A1G5R9T0_9RHOB 6-pyruvoyl-tetrahydropte rin synthase OS=Epibacterium ulvae OX=1156985 GN=SAMN04 488118_11126 PE=4 SV=1
MFAVEVRDHIMIAHSLPSPVFGPAQGMHGATFVVDAAFFTDSLDDNGLVVDMGLALDALAEALAPLKYANLDEVPEFKGKITTTEFLCHHIWQQLRDAVKTTGLGAGDRVRRIKVSLHESHTARGWYEADI

SEQ ID NO: 20190 - protein, 155 aa, Epsilonproteobacteria bacterium
  misc_feature (1)..(155): tr|A0A496XSG2|A0A496XSG2_9PROT 6-carboxytetrahydropteri n synthase OS=Epsilonproteobacteria bacterium OX=202680 9 GN=DRQ89_04265 PE=4 SV=1
METCVRKIHFCYGHRVMRHESKCATLHGHNGIVWAHATPIEGLDELGRVIDFSVLKDEVGGWIDKNWDHTMILFKDDQETVELCQKAPSYKDVFILPTNPTAENLAHYLLYEVCPKVLKGKGVVVHKITFWETENCYATQSLDPKDEKIIALYSN

SEQ ID NO: 20191 - protein, 193 aa, Epsilonproteobacteria bacterium
  misc_feature (1)..(193): tr|A0A426VXC7|A0A426VXC7_9PROT 6-carboxy-5,6,7,8-tetrah ydropterin synthase OS=Epsilonproteobacteria bacterium (ex Lamellibrachia satsuma) OX=2496635 GN=P794_06210 PE =4 SV=1
MLIRKLFKFENAHIVRGCSTQRCSENIHGHSYKVEVLLESNYLDNGQMVYDFGLTKLYIKELIDSFDHGITLWSKDDADYIEAMKKYSHRWVELPVSPSAEQFSRVIYLMVERVLACTAMVNGEREVKLHSIIVHETDTGYAQGFKEDAHSELMGKIGLEDISFSEQVKKEWSDSELWEKLISHTLMKNPEKV

SEQ ID NO: 20192 - protein, 141 aa, Epulopiscium sp.
  misc_feature (1)..(141): tr|A0A1V2YHY9|A0A1V2YHY9_9FIRM 6-carboxy-5,6,7,8-tetrah ydropterin synthase OS=Epulopiscium sp. Nuni2H_MBin001 OX=1884656 GN=BEN18_05040 PE=3 SV=1
MFILKNEIQFDLAHYLSGYNGKCANIHGHRYKLVVKVASETLHEQGQLRGMVDDFSNIKSILKEVENYFDHKLIIEDNEDGRKVGEVLSGFDILYFPHRTTAEEMSRFIYHMIKQKGINVYEVELYETPTNSCIYTEVDNK

SEQ ID NO: 20193 - protein, 119 aa, Erwinia amylovora
  misc_feature (1)..(119): tr|D4HWM0|D4HWM0_ERWAC 6-carboxy-5,6,7,8-tetrahydropter in synthase OS=Erwinia amylovora (strain CFBP1430) OX=6 65029 GN=ygcM PE=3 SV=1
MATTLFKEFQFEAAHHLPHVPAGHKCGRLHGHSFMVRLEITGEVDAHTGWVMDFSEIKSAFKPVYDRLDHYYLNDIPGLENPTSEVLAEWIWQQMKPALPLLSAVMVKETCTAGCVYRG

SEQ ID NO: 20194 - protein, 155 aa, Erwinia amylovora
  misc_feature (1)..(155): tr|E5B290|E5B290_ERWAM K01737 6-pyruvoyl tetrahydrobiop terin synthase OS=Erwinia amylovora ATCC BAA-2158 OX=88 9211 GN=ygcM PE=4 SV=1
MSLLFRPQPLVCKRVRKKRISVILRRFARPSQRPGTMATTLFKEFQFEAAHHLPHVPAGHKCGRLHGHSFMVRLEITGEVDAHTGWVMDFSEIKSAFKPVYDRLDHYYLNDIPGLENPTSEVLAEWIWQQMKPALPLLSAVMVKETCTAGCVYRG

SEQ ID NO: 20195 - protein, 119 aa, Erwinia aphidicola; identical to SEQ ID NO: 17982
  misc_feature (1)..(119): tr|A0A4R6PAQ6|A0A4R6PAQ6_ERWAP 6-carboxy-5,6,7,8-tetrah ydropterin synthase OS=Erwinia aphidicola OX=68334 GN=B 0I34_1321 PE=3 SV=1

SEQ ID NO: 20196 - protein, 119 aa, Erwinia billingiae
  misc_feature (1)..(119): tr|D8MW64|D8MW64_ERWBE 6-carboxy-5,6,7,8-tetrahydropter in synthase OS=Erwinia billingiae (strain Eb661) OX=634 500 GN=EbC_35400 PE=3 SV=1
MATTLFKDFMFEAAHHLPNVPAGHKCGRLHGHSFLVRLEITGEVDAHTGWIMDFAELKAAFKPIYDQLDHYYLNEIAGLENPTSEVLAKWIWDQMKPKLAELSAVTIKETCTAGCIYRG

SEQ ID NO: 20197 - protein, 119 aa, Erwinia billingiae; identical to SEQ ID NO: 20196
  misc_feature (1)..(119): tr|A0A5J6LS78|A0A5J6LS78_9GAMM 6-carboxytetrahydropteri n synthase QueD OS=Erwinia billingiae OX=182337 GN=queD PE=4 SV=1

SEQ ID NO: 20198 - protein, 119 aa, Erwinia citreus
  misc_feature (1)..(119): tr|A0A358L743|A0A358L743_ERWCI 6-carboxy-5,6,7,8-tetrah ydropterin synthase OS=Erwinia citreus OX=558 GN=queD P E=3 SV=1
MATTLFKDFQFEAAHHLPNVPEGHKCGRLHGHSFLVRLEITGEVDAHTGWIMDFAELKAAFRPLYDRLDHYYLNDIPGLENPTSEVLAKWIWDRMKPTLPLLSAVMIKETCTAGCVYKG

SEQ ID NO: 20199 - protein, 120 aa, Erwinia gerundensis
  misc_feature (1)..(120): tr|A0A0U5L942|A0A0U5L942_9GAMM 6-carboxy-5,6,7,8-tetrah ydropterin synthase OS=Erwinia gerundensis OX=1619313 G N=queD PE=3 SV=1
MATTLFKDFHFEAAHHLPHVPEGHKCGRLHGHSFMVRIEITGEVDAHTGWVMDFADLKAAFKPIYDRLDHYYLNDIAGLENPTSEVLAQWIWQNLKPDLPELSAVMIKETCTAGCIYRGE

SEQ ID NO: 20200 - protein, 119 aa, Erwinia iniecta
  misc_feature (1)..(119): tr|A0A0L7T113|A0A0L7T113_9GAMM 6-carboxy-5,6,7,8-tetrah ydropterin synthase OS=Erwinia iniecta OX=1560201 GN=NG 42_13545 PE=3 SV=1
MATTLFKDFQFEAAHHLPNVPEGHKCGRLHGHSFMVRIEITGEVDAHTGWVMDFAELKAAFKPLYDRLDHYYLNDIPGLENPTSEVLAAWIWEQMKPTLPELSAVMVKETCTAGCVYKG

SEQ ID NO: 20201 - protein, 120 aa, Erwinia mallotivora
  misc_feature (1)..(120): tr|A0A014PVP5|A0A014PVP5_9GAMM 6-carboxy-5,6,7,8-tetrah ydropterin synthase OS=Erwinia mallotivora OX=69222 GN= BG55_14695 PE=3 SV=1
MATTLFKDFQFEAAHHLPNVPAGHKCGRLHGHSFLVRLEITGEVDAHTGWVMDFAELKAAFKPVYDRLDHYYLNEIPGLSNPTSEVLAKWIWDQMKPTLPLLSAVMIKETCTAGCVYRGE

SEQ ID NO: 20202 - protein, 119 aa, Erwinia persicina
  misc_feature (1)..(119): tr|A0A354AEE5|A0A354AEE5_9GAMM 6-carboxy-5,6,7,8-tetrah ydropterin synthase OS=Erwinia persicina OX=55211 GN=qu eD PE=3 SV=1
MATTLFKDFQFEAAHHLPNVPEGHKCGRLHGHSFMVRLEITGEVDAHTGWVMDFSEIKAAFKPIYDRLDHYYLNDIPGLENPTSEVLAAWIWQQMKPVLPLLSAVLVKETCTAGCVYRG

SEQ ID NO: 20203 - protein, 119 aa, Erwinia piriflorinigrans
  misc_feature (1)..(119): tr|V5Z5H8|V5Z5H8_9GAMM 6-carboxy-5,6,7,8-tetrahydropter in synthase OS=Erwinia piriflorinigrans CFBP 5888 OX=11 61919 GN=ygcM PE=3 SV=1
MATTLFKEFQFEAAHLLPHVPAGHKCGRLHGHSFMVRLEITGDVDPYTGWVMDFSEIKRAFKPVYDRLDHYYLNDIPGLENPTSEVLAEWIWQQMKPALPLLSAVMVKETCTAGCVYRG

SEQ ID NO: 20204 - protein, 119 aa, Erwinia psidii
  misc_feature (1)..(119): tr|A0A3N6S3G8|A0A3N6S3G8_9GAMM 6-carboxy-5,6,7,8-tetrah ydropterin synthase OS=Erwinia psidii OX=69224 GN=queD PE=3 SV=1
MATTLFKDFQFEAAHHLPNVPAGHKCGRLHGHSFLVRLEITGEVDEHTGWVMDFAELKAAFKPVYDRLDHYYLNEIPGLSNPTSEVLAKWIWEQMKPTLPLLSAVMIKETCTAGCVYKG

SEQ ID NO: 20205 - protein, 119 aa, Erwinia pyrifoliae
  misc_feature (1)..(119): tr|D2T5L6|D2T5L6_ERWP6 6-carboxy-5,6,7,8-tetrahydropter in synthase OS=Erwinia pyrifoliae (strain DSM 12163 / C IP 106111 / Ep16/96) OX=644651 GN=ygcM PE=3 SV=1
MATTLFKEFQFEAAHLLPHVPAGHKCGRLHGHSFMIRLEITGEVNPHTGWVMDFSEIKSAFKPIYDRLDHYYLNDIPGLENPTSEVLAEWIWQQMKPALPLLSAVMVKETCTAGCVYRG

SEQ ID NO: 20206 - protein, 119 aa, Erwinia rhapontici
  misc_feature (1)..(119): tr|A0A4R7GIA9|A0A4R7GIA9_ERWRD 6-carboxy-5,6,7,8-tetrah ydropterin synthase OS=Erwinia rhapontici OX=55212 GN=E DF84_10986 PE=3 SV=1
MATTLFKDFQFEAAHHLPNVPAGHKCGRLHGHSFMVRLEITGEVDAHTGWVMDFSEIKAAFKPVYDRLDHYYLNDIPGLENPTSEVLAEWIWQQMKPVLPLLSAVLVKETCTAGCVYRG

SEQ ID NO: 20207 - protein, 119 aa, Erwinia sp.
  misc_feature (1)..(119): tr|A0A3R8ZU66|A0A3R8ZU66_9GAMM 6-carboxy-5,6,7,8-tetrah ydropterin synthase OS=Erwinia sp. 198 OX=2022746 GN=qu eD PE=3 SV=1
MATTLFKDFQFEAAHHLPNVPEGHKCGRLHGHSFLVRLEITGEVDAHTGWVMDFAELKAAFRPLYDRLDHYYLNEIPGLENPTSEVLAKWIWDRMKPTLPLLSAVMIKETCTAGCVYKG

SEQ ID NO: 20208 - protein, 119 aa, Erwinia sp.; identical to SEQ ID NO: 17982
  misc_feature (1)..(119): tr|A0A0Q4N9J5|A0A0Q4N9J5_9GAMM 6-carboxy-5,6,7,8-tetrah ydropterin synthase OS=Erwinia sp. Leaf53 OX=1736225 GN =ASF13_02380 PE=3 SV=1

SEQ ID NO: 20209 - protein, 119 aa, Erwinia tasmaniensis
  misc_feature (1)..(119): tr|B2VG08|B2VG08_ERWT9 6-carboxy-5,6,7,8-tetrahydropter in synthase OS=Erwinia tasmaniensis (strain DSM 17950 / CIP 109463 / Et1/99) OX=465817 GN=ptpS PE=3 SV=1
MATTLFKEFQFEAAHLLPHVPAGHKCGRLHGHSFMVRLEITGEVDQHTGWVMDFSDIKRAFKPIYDRLDHYYLNDIPGLENPTSEVLAEWIWQQMKPALPLLSAVMVKETCTAGCVYRG

SEQ ID NO: 20210 - protein, 120 aa, Erwinia tracheiphila
  misc_feature (1)..(120): tr|A0A0M2K8V6|A0A0M2K8V6_9GAMM 6-carboxy-5,6,7,8-tetrah ydropterin synthase OS=Erwinia tracheiphila OX=65700 GN =SY86_07975 PE=3 SV=1
MATTLFKDFHFEAAHHLPDVPAGHKCGRLHGHSFMVRIEITGEVDAHTGWVMDFAELKAAFRPIYDRLDHYYLNDIPGLSNPTSEVLAKWIWEQMKPCLPLLSAVMIKETCTAGCVYRGG

SEQ ID NO: 20211 - protein, 120 aa, Erwinia tracheiphila
  misc_feature (1)..(120): tr|A0A345CTG2|A0A345CTG2_9GAMM 6-carboxy-5,6,7,8-tetrah ydropterin synthase OS=Erwinia tracheiphila OX=65700 GN =queD PE=3 SV=1
MATTLFKDFHFEAAHHLPNVPAGHKCGRLHGHSFMVRIEITGEVDAHTGWVMDFAELKAAFRPIYDRLDHYYLNDIPGLSNPTSEVLAKWIWEQMKPCLPLLSAVMIKETCTAGCVYRGG

SEQ ID NO: 20212 - protein, 119 aa, Erwinia typographi
  misc_feature (1)..(119): tr|A0A0A3Z6A9|A0A0A3Z6A9_9GAMM 6-carboxy-5,6,7,8-tetrah ydropterin synthase OS=Erwinia typographi OX=371042 GN= NG99_11560 PE=3 SV=1
MATTLFKDFMFEAAHHLPNVPAGHKCGRLHGHSFLVRLEITGEVDAHTGWIIDFAELKAAFKPIYDQLDHYYLNEIPGLENPTSEVLAKWIWDRMKPRLAQLSAVTIKETCTAGCIYKG

SEQ ID NO: 20213 - protein, 120 aa, Erwiniaceae bacterium
  misc_feature (1)..(120): tr|A0A3D5MAT6|A0A3D5MAT6_9GAMM 6-carboxy-5,6,7,8-tetrah ydropterin synthase OS=Erwiniaceae bacterium OX=2053552 GN=queD PE=3 SV=1
MATTLFKDFQFEAAHRLPHVPEGHKCGRLHGHSFLVRLEITGDVDPYTGWIMDFAELKAAFKPLYDRLDHYYLNDIPGLENPTSEVLAQWIWQQMKPVVPLLSAVMIKETCTAGCVYRGE

SEQ ID NO: 20214 - protein, 162 aa, Erysipelatoclostridium ramosum
  misc_feature (1)..(162): tr|B0N7X8|B0N7X8_9FIRM Queuosine biosynthesis protein Q ueD OS=Erysipelatoclostridium ramosum DSM 1402 OX=44597 4 GN=queD PE=4 SV=1
MLFLSRLFSEPAFLFDGIEGGKMYFLKTEQSFDSAHFLAGYHGKCANIHGHRWKVIATIKSEKLLEDPQNKGMVTDFGDLKKDLKIIADSFDHALIIETGSLSEKLYQALIDENFKIINLPFRPTAENLAKYIYEALSKNYLVDCLDVYETPNNCASYRGKL

SEQ ID NO: 20215 - protein, 140 aa, Erysipelatoclostridium ramosum; identical to SEQ ID NO: 19477
  misc_feature (1)..(140): tr|A0A3E3EH81|A0A3E3EH81_9FIRM 6-carboxy-5,6,7,8-tetrah ydropterin synthase OS=Erysipelatoclostridium ramosum O X=1547 GN=queD PE=3 SV=1

SEQ ID NO: 20216 - protein, 141 aa, Erysipelatoclostridium sp.
  misc_feature (1)..(141): tr|A0A1Y4MWP9|A0A1Y4MWP9_9FIRM 6-carboxy-5,6,7,8-tetrah ydropterin synthase OS=Erysipelatoclostridium sp. An173 OX=1965571 GN=B5F09_11945 PE=3 SV=1
MYYLKTEQSFDSAHFLAGYNGKCANIHGHRWRVVVSIKSTSLLEDKQNNGMIIDFTDLKNDLKQITDSLDHTLIIETNSLSTDLYQALINENFKIVSLPFRPTAENLARYIFELLAKKYNLDCIDVYETPNNCASYRGNDE

SEQ ID NO: 20217 - protein, 141 aa, Erysipelatoclostridium sp.; identical to SEQ ID NO: 20216
  misc_feature (1)..(141): tr|A0A1Y4QSU5|A0A1Y4QSU5_9FIRM 6-carboxy-5,6,7,8-tetrah ydropterin synthase OS=Erysipelatoclostridium sp. An15 OX=1965566 GN=B5E92_07425 PE=3 SV=1

SEQ ID NO: 20218 - protein, 133 aa, Erysipelotrichaceae bacterium
  misc_feature (1)..(133): tr|A0A3G9JRC9|A0A3G9JRC9_9FIRM 6-carboxy-5,6,7,8-tetrah ydropterin synthase OS=Erysipelotrichaceae bacterium SG 0102 OX=2487118 GN=SG0102_05330 PE=3 SV=1
MYVITTEASFDAAHFLKDYPGKCHNIHGHRWKVQVSLQAETLGAEGMVIDFGIIKKDLKALCETFDHTLIIEEGSLKPQTVAALQEEDFALSFVPFRPTAEHLSRYFFEALQKYPVLSVDVYETPGNKAHYEL

SEQ ID NO: 20219 - protein, 133 aa, Erysipelotrichaceae bacterium; identical to SEQ ID NO: 20218
  misc_feature (1)..(133): tr|A0A3C1MZR1|A0A3C1MZR1_9FIRM 6-carboxy-5,6,7,8-tetrah ydropterin synthase OS=Erysipelotrichaceae bacterium OX =2049044 GN=queD PE=3 SV=1

SEQ ID NO: 20220 - protein, 76 aa, Erythrobacter citreus
  misc_feature (1)..(76): tr|A0A0L1KGG2|A0A0L1KGG2_9SPHN Queuosine biosynthesis Q ueD, PTPS-I OS=Erythrobacter citreus LAMA 915 OX=130695 3 GN=J121_893 PE=4 SV=1
MIVDVGILEKELESVRDALDHRFLDDINDLGPATMENLCRWIWNRLKPEFPALSKVSVYRDSNSDAVTYWGEEELA

SEQ ID NO: 20221 - protein, 128 aa, Erythrobacter sp.
  misc_feature (1)..(128): tr|A0A165QDA7|A0A165QDA7_9SPHN 6-carboxy-5,6,7,8-tetrah ydropterin synthase OS=Erythrobacter sp. HI00D59 OX=182 2215 GN=A3711_07410 PE=3 SV=1
MIEVTKRFGFDAAHTLQRHVDAEGSRRIHGHSYQAEVAIEGEIDPTSGMVVDLGILARTLEGVRDGLDHRFLDEVEGLGPATLENLAMWIWAKLQDASIGGLTRVTVLRESAGETCTYRGPMRRESLS

SEQ ID NO: 20222 - protein, 124 aa, Erythrobacter sp.
  misc_feature (1)..(124): tr|A0A2D8MEX6|A0A2D8MEX6_9SPHN 6-carboxy-5,6,7,8-tetrah ydropterin synthase OS=Erythrobacter sp. OX=1042 GN=CL9 49_13555 PE=3 SV=1
MYELSKQFRFDAAHTLDRIVQTESSRRIHGHSYRGEVTLRGRPDPESGMIVDVGILERELESVRDALDHRFLDDINDLGPATMENLCRWIWERLKPSFPALTKVSVYRDSNSDACSYWGEEELA

SEQ ID NO: 20223 - protein, 120 aa, Escherichia albertii
  misc_feature (1)..(120): tr|W0AS21|W0AS21_9ESCH 6-carboxy-5,6,7,8-tetrahydropter in synthase OS=Escherichia albertii KF1 OX=1440052 GN=q ueD PE=3 SV=1
MSTTLFKDFTFEAAHRLPHVPQGHKCGRLHGHSFMVRLEITGEVDPHTGWIIDFAELKAAFKPTYDRLDHHYLNEIPGLENPTSEVLAKWIWDQVKPVVPLLSAVMVKETCTAGCIYRGE

SEQ ID NO: 20224 - protein, 120 aa, Escherichia albertii; identical to SEQ ID NO: 20223
  misc_feature (1)..(120): tr|B1EGN1|B1EGN1_ESCAT 6-carboxy-5,6,7,8-tetrahydropter in synthase OS=Escherichia albertii (strain TW07627) OX =502347 GN=queD PE=3 SV=1

SEQ ID NO: 20225 - protein, 161 aa, Escherichia fergusonii
  misc_feature (1)..(161): tr|F0JRQ1|F0JRQ1_ESCFE Putative 6-pyruvoyl tetrahydrobi opterin synthase OS=Escherichia fergusonii ECD227 OX=98 1367 GN=ygcM PE=4 SV=1
MNIAHHQDKSAILRNKGVLDNAKKQAFRYSTAVLSSCREIMMSTTLFKDFTFEAAHRLPHVPEGHKCGRLHGHSFMVRLEITGEVDPHTGWIIDFAELKAAFKPTYERLDHHYLNDIPGLENPTSEVLAKWIWDQVKPVVPLLSAVMVKETCTAGCIYRGE

SEQ ID NO: 20226 - protein, 121 aa, Escherichia marmotae
  misc_feature (1)..(121): tr|A0A370V712|A0A370V712_9ESCH 6-carboxy-5,6,7,8-tetrah ydropterin synthase OS=Escherichia marmotae OX=1499973 GN=queD PE=3 SV=1
MMSTTLFKDFTFEAAHRLPHVPEGHKCGRLHGHSFMVRLEITGEVDPHTGWIIDFAELKAAFKPTYDRLDHYYLNDIPGLENPTSEVLAKWIWDQVKPVVPLLSAVMVKETCTAGCIYRGE

SEQ ID NO: 20227 - protein, 121 aa, Escherichia sp.
  misc_feature (1)..(121): tr|A0A4U6CR26|A0A4U6CR26_9ESCH 6-carboxy-5,6,7,8-tetrah ydropterin synthase OS=Escherichia sp. MR OX=2575922 GN =queD PE=3 SV=1
MMSTTLFKDFTFEAAHHLPHVPQGHKCGRLHGHSFMVRLEITGEVDPHTGWIIDFAELKAAFKPTYDRLDHYYLNDIPGLENPTSEVLAKWIWDQVKPVVPLLSAVMVKETCTAGCIYRGE

SEQ ID NO: 20228 - protein, 121 aa, Escherichia sp.
  misc_feature (1)..(121): tr|A0A4Q9JJ04|A0A4Q9JJ04_9ESCH 6-carboxy-5,6,7,8-tetrah ydropterin synthase OS=Escherichia sp. E10V4 OX=2478971 GN=queD PE=3 SV=1
MMSTTLFKDFTFEAAHRLPHVPQGHKCGRLHGHSFMVRLEITGEVDPHTGWIIDFAELKAAFKPTYDRLDHYYLNDIPGLENPTSEVLAKWIWDQVKPVVPLLSAVMVKETCTAGCIYRGE

SEQ ID NO: 20229 - protein, 122 aa, Estrella lausannensis
  misc_feature (1)..(122): tr|A0A0H5DRR9|A0A0H5DRR9_9BACT 6-carboxy-5,6,7,8-tetrah ydropterin synthase OS=Estrella lausannensis OX=483423 GN=queD PE=3 SV=1
MFELEKTFRFEAGHVLAHHDGKCKIPHGHSYVLTVRVRSPHLQTEGPKRNMVIDFQDISSTVKPLIKEKLDHCWLNDSLETDSPTVEYIALWIFNQLKEKIRGLHSVTLQETESCKVTYFVN

SEQ ID NO: 20230 - protein, 140 aa, Eubacteriaceae bacterium
  misc_feature (1)..(140): tr|A0A143XYE8|A0A143XYE8_9FIRM 6-pyruvoyl tetrahydropte rin synthase OS=Eubacteriaceae bacterium CHKCI004 OX=17 80380 GN=BN3660_02550 PE=4 SV=1
MYILETEQAFDSAHFLSGYEGKCRNLHGHRWRIVARIAADHLSEERQTRDMVIDFGDFKDALKELTETLDHCLIVETGSLRPKTMEALREEEFRIVELPFRPTAEQLSRYFYMQLKERAFPVYNVSVYETPNNCATYQEA

SEQ ID NO: 20231 - protein, 147 aa, Eubacteriaceae bacterium
  misc_feature (1)..(147): tr|A0A425W6P4|A0A425W6P4_9FIRM 6-carboxy-5,6,7,8-tetrah ydropterin synthase OS=Eubacteriaceae bacterium OX=2049 045 GN=queD PE=3 SV=1
MYTLKTKGHFDAAHFLKGYAGKCANLHGHHWTVTVEIQGETLQTDEQHRGMLVDFGDLKADLKAACDGFDHRLIYEAGSLSETAMQALSEEGFSGRAIPVRPTAENLAKLFCDEMTAKGYDVRRVEVYETPNNMAAYEPEDKDQGGH

SEQ ID NO: 20232 - protein, 140 aa, [Eubacterium] cellulosolvens
  misc_feature (1)..(140): tr|I5AU64|I5AU64_EUBCE 6-carboxy-5,6,7,8-tetrahydropter in synthase OS=[Eubacterium] cellulosolvens 6 OX=633697 GN=EubceDRAFT1_1548 PE=3 SV=1
MYYLKSEHSFDAAHFLKDYCGKCHNLHGHRWRVVVELKGETLSEETQTRGMMIDFSDLKEVVKTLCDHLDHCLIYETGSLKERTKEALMDEDFRLVEVPFRPTAENFARYFYEEITAKKLPVHRVEVYETPNNCAAYEGH

SEQ ID NO: 20233 - protein, 139 aa, [Eubacterium] eligens
  misc_feature (1)..(139): tr|A0A174YSY0|A0A174YSY0_9FIRM 6-carboxy-5,6,7,8-tetrah ydropterin synthase OS=[Eubacterium] eligens OX=39485 G N=queD_2 PE=3 SV=1
MYILKTEASFDSAHFLAGYNGKCSNLHGHRWKIVLEVQTEELKEDVQHKGMYVDFGELKKDLRNIADSMDHALIIERNSLKETTFEALKSENFKIIELDFRPTAENMAKYFYEKIKILGYNMRAVTVYETPANSATYME

SEQ ID NO: 20234 - protein, 154 aa, [Eubacterium] eligens
  misc_feature (1)..(154): tr|A0A414DID3|A0A414DID3_9FIRM 6-pyruvoyl tetrahydrobio pterin synthase OS=[Eubacterium] eligens OX=39485 GN=DW 007_05290 PE=4 SV=1
MAVNMYREYRLKFYLNMRHYIIINEVKGETHPHTWEFALDIKFSRNLFVEFNIFEQGISQFLEKYQNKILNEAEPFDAMMPTLENVTDYFAEEFFKIIYKTGGMLTRVEASETPTRSYIVNMAEQERNSILNKKADEKIISEVMDAVLDDIVKQ

SEQ ID NO: 20235 - protein, 139 aa, Eubacterium eligens
  misc_feature (1)..(139): tr|C4Z7K7|C4Z7K7_EUBE2 6-carboxy-5,6,7,8-tetrahydropter in synthase OS=Eubacterium eligens (strain ATCC 27750 / VPI C15-48) OX=515620 GN=EUBELI_20139 PE=3 SV=1
MYYLKTESSFDSAHFLKGYDGKCRNLHGHRWRVVVEIAADQLKDEGQTRGMLVDFSDLKNALKDICDDFDHSLIYEKGSLKGATIAALQAEEFRMIEVGFRPTAEHFSKYFYELMSAKGFPIHRVEVYETPNNVAAYEE

SEQ ID NO: 20236 - protein, 139 aa, Eubacterium eligens
  misc_feature (1)..(139): tr|R5ZWW4|R5ZWW4_9FIRM 6-carboxy-5,6,7,8-tetrahydropter in synthase OS=Eubacterium eligens CAG:72 OX=1263077 GN =BN765_01345 PE=3 SV=1
MYYLKTESSFDSAHFLKGYDGKCRNLHGHRWRVVVEIAADQLKDEGQTRGMLVDFSDLKNALKDICDDFDHSLIYEKGSLKGATIAALQAEEFRMIEVGFRPTAEHFSKYFYELMSVKGFPIHRVEVYETPNNVAAYEQ

SEQ ID NO: 20237 - protein, 142 aa, Eubacterium hallii
  misc_feature (1)..(142): tr|R6G2K0|R6G2K0_9FIRM Queuosine biosynthesis protein Q ueD OS=Eubacterium hallii CAG:12 OX=1263078 GN=BN476_01 987 PE=4 SV=1
MYILETEQSFDSAHFLSGYEGKCSNLHGHRWRVVARIAMDELNKEGQTRDMVIDFGDFKNALKKLTDALDHSFIFETGSLKERTVAALKDEGFLLHEVPFRPTAEQFSRYFYEQLKGLNFPVYDISVYETPTNCSTYQEASL

SEQ ID NO: 20238 - protein, 118 aa, Eubacterium minutum
  misc_feature (1)..(118): tr|A0A223B153|A0A223B153_9FIRM 6-carboxy-5,6,7,8-tetrah ydropterin synthase OS=Eubacterium minutum ATCC 700079 OX=888721 GN=AXF21_02890 PE=3 SV=1
MILVKEFEFDAAHNLINYHGKCERLHGHTYKLVVKLKGKPDHEDMVYDFVDLKRLVKKEVIEEFDHHYINDFIEQPTAENIAVYIWDKLEPKVRTDNACLHEIEVWETKTSGIVYNGE

SEQ ID NO: 20239 - protein, 119 aa, Eubacterium nodatum
  misc_feature (1)..(119): tr|W2BZU8|W2BZU8_9FIRM 6-carboxy-5,6,7,8-tetrahydropter in synthase OS=Eubacterium nodatum ATCC 33099 OX=116190 2 GN=queD PE=3 SV=1
MILIKEFEFDAAHNLINYHGKCERLHGHTYKLVVKLKGTRDHEDMVYDFVDLKNLVKKEILEDFDHHYINDFIKQPTAENIAVYIWDKLEPKVKTDNSRLYEIEVWETKTSGIVYNGEE

SEQ ID NO: 20240 - protein, 140 aa, Eubacterium oxidoreducens
  misc_feature (1)..(140): tr|A0A1G6A6D2|A0A1G6A6D2_EUBOX 6-carboxy-5,6,7,8-tetrah ydropterin synthase OS=Eubacterium oxidoreducens OX=173 2 GN=SAMN02910417_00279 PE=3 SV=1
MYFLKTEQSFDAAHFLSGYDGKCKNLHGHRWRVVAQISGECLNDDTQTRGMLVDFGELKSELKKLCDDFDHSFIYEKGSLKEKTVVALREEDFRMVEVDFRPTAECFAKYFFDKMKERGYAPHRIEVYETVNNCAAYEES

SEQ ID NO: 20241 - protein, 110 aa, Eubacterium pyruvativorans
  misc_feature (1)..(110): tr|A0A1I7FDQ9|A0A1I7FDQ9_9FIRM 6-carboxy-5,6,7,8-tetrah ydropterin synthase OS=Eubacterium pyruvativorans OX=15 5865 GN=SAMN05216508_10276 PE=3 SV=1
MYRIHKRLEISAAHRLDLNYESKCSRIHGHNWMIDVYMQSEKLDENGMVCDFTLIKQRVKDRLDHRFLNEVLDVNPTAENIAKWIADQLGEKCYLVRVKESEGNTAEYER

SEQ ID NO: 20242 - protein, 139 aa, Eubacterium ramulus
  misc_feature (1)..(139): tr|A0A4Q5CVD9|A0A4Q5CVD9_EUBRA 6-carboxy-5,6,7,8-tetrah ydropterin synthase OS=Eubacterium ramulus OX=39490 GN= EAI88_09665 PE=3 SV=1
MYKIRIEESFDSAHFLAGYDGKCSNLHGHHWRIVMEAKADKLHEEGQLRGMVTDFGDIRRDLKELADFYDHALIYESGTLKSLTIQALKDEQFRLIEVPFRPTAENFAKFFYEKMTLKGYAVQEIAVYETPNNCAVYQM

SEQ ID NO: 20243 - protein, 139 aa, Eubacterium ramulus
  misc_feature (1)..(139): tr|U2R0X2|U2R0X2_EUBRA 6-carboxy-5,6,7,8-tetrahydropter in synthase OS=Eubacterium ramulus ATCC 29099 OX=125690 8 GN=HMPREF0373_01368 PE=3 SV=1
MYKIRIEESFDSAHFLAGYDGKCSNLHGHRWRIVMEAKADKLHEEGQLRGMVTDFGDIRRDLKELADFYDHALIYESGTLKSLTIQALKDEQFRLIEVPFRPTAENFAKFFYEKMTLKGYAVQEIAVYETPNNCAVYQM

SEQ ID NO: 20244 - protein, 142 aa, Eubacterium ruminantium
  misc_feature (1)..(142): tr|A0A1H5Y9V8|A0A1H5Y9V8_9FIRM 6-carboxy-5,6,7,8-tetrah ydropterin synthase OS=Eubacterium ruminantium OX=42322 GN=SAMN04487934_11051 PE=3 SV=1
MYILSTKSDFDSAHFLKDYDGKCANIHGHRWTVSIDVEGSKLEESGSYRGMVVDFSELKKSLRKLTKALDHAFIMEEGSLKASTRAALEEEGFKLITFPFRPTAENFAKYFYDKMSEAGYKVAKVSVYETPNNIASYVPDKN

SEQ ID NO: 20245 - protein, 141 aa, Eubacterium ruminantium
  misc_feature (1)..(141): tr|A0A1T4Q7M2|A0A1T4Q7M2_9FIRM 6-carboxy-5,6,7,8-tetrah ydropterin synthase OS=Eubacterium ruminantium OX=42322 GN=SAMN02745110_02289 PE=3 SV=1
MYILSTKSDFDSAHFLKGYDGKCANIHGHRWTVSVDVKGNKLIESGSYRGMVVDFSDLKGSLKKLTKNLDHSLIIEENSLKEKTMEALEEEGFRIIKFPFRPTAENFAKYFYDAMSKEGYEVVKVSVYETPNNVATYMPGE

SEQ ID NO: 20246 - protein, 140 aa, Eubacterium sp.
  misc_feature (1)..(140): tr|A0A1Y4UZY6|A0A1Y4UZY6_9FIRM 6-carboxy-5,6,7,8-tetrah ydropterin synthase OS=Eubacterium sp. An11 OX=1965542 GN=B5E53_15925 PE=3 SV=1
MYILETEQAFDSAHFLSGYEGKCRNLHGHRWRIVARIAAEELSRERQTRDMVIDFGDFKDALKALTEELDHCLIIETGSLRPKTMEALKEEDFRIVELPFRPTAEQLSRYFYMRLKQYSFPVYSVSVYETPNNCATYQES

SEQ ID NO: 20247 - protein, 152 aa, Eubacterium sp.
  misc_feature (1)..(152): tr|A0A351PUP7|A0A351PUP7_9FIRM 6-pyruvoyl tetrahydrobio pterin synthase OS=Eubacterium sp. OX=142586 GN=DCX21_0 4755 PE=4 SV=1
MANKIFREYRFKFYLNAQHFVLINGKKGSTHPHTWEFTLDILINRNIFVEFGEFEKKIEEYLERYQDKLMNDVAPFDVVIPTLENMSDIFAKDFSEEIREMGARLVRLEGKETPTRGYIVDFTETDEYMNDIKDFSHDAVIDIIDSVIDATL

SEQ ID NO: 20248 - protein, 139 aa, Eubacterium ventriosum; identical to SEQ ID NO: 18296
  misc_feature (1)..(139): tr|A0A414R2B2|A0A414R2B2_9FIRM 6-carboxy-5,6,7,8-tetrah ydropterin synthase OS=Eubacterium ventriosum OX=39496 GN=queD PE=3 SV=1

SEQ ID NO: 20249 - protein, 125 aa, Euhalothece natronophila
  misc_feature (1)..(125): tr|A0A5B8NU95|A0A5B8NU95_9CHRO 6-carboxy-5,6,7,8-tetrah ydropterin synthase OS=Euhalothece natronophila Z-M001 OX=522448 GN=queD PE=3 SV=1
MDQWVIYKEFYFEAAHQLPNHNGKCRRLHGHSWVGRVYLQGKTLHQHGSQQGMLMDYGEIKKYIQPLLDHYLDHYYLNETTGLENPTSEEIAKWIFNQLEKAGCPNLYAVEIQETCTSGCKYIKD

SEQ ID NO: 20250 - protein, 290 aa, Euhalothece natronophila
  misc_feature (1)..(290): tr|A0A5B8NKA4|A0A5B8NKA4_9CHRO 6-pyruvoyl tetrahydropte rin synthase OS=Euhalothece natronophila Z-M001 OX=5224 48 GN=FRE64_05880 PE=4 SV=1
MKCIINRRAQFSAAHRYWLPELSEAENQAQFGEGSRFPGHGHNYVLYVSLEQDIDQYGMVMNLSEVKPVIREKITSQLNNAYLNDVWEEFSETLPTTENVARVIWQRLSPDLPLVNIRLFEHPELWADYQGKDMEASLTVGTHFSAAHRLARPDLSYEENCKIYGKCARPHGHGHNYHLEVTVTGEIHPRTGMVVNLEKLHQVLEDEVVEPFDHYFLNEDIPYFAEVVPTAENIAIYIAQLLRQPIEELGVTLERVKLIESPNNSCEINCRSLFTETTNEATREPALASY

SEQ ID NO: 20251 - protein, 131 aa, Euhalothece sp.
  misc_feature (1)..(131): tr|A0A2K3AN67|A0A2K3AN67_9CHRO 6-pyruvoyl tetrahydropte rin synthase OS=Euhalothece sp. KZN 001 OX=1884791 GN=B EN50_12415 PE=4 SV=1
MQLSDPPYALRIERELIAQHYLTVPDPGPEGQIHSHRYTVGVTLLADELNRYGYVIDIDAFTERVEAIADRYRDTLLNDHADAEATNPSVEWFATVFADELAATVESDRIVGIDLEVHEDDIASVRYRRTV

SEQ ID NO: 20252 - protein, 290 aa, Euhalothece sp.; identical to SEQ ID NO: 19666
  misc_feature (1)..(290): tr|A0A2K2ZV82|A0A2K2ZV82_9CHRO 6-pyruvoyl tetrahydropte rin synthase OS=Euhalothece sp. KZN 001 OX=1884791 GN=B EN50_17595 PE=4 SV=1

SEQ ID NO: 20253 - protein, 438 aa, Euzebya sp.; identical to SEQ ID NO: 7997
  misc_feature (1)..(438): tr|A0A346XS57|A0A346XS57_9ACTN GTP cyclohydrolase FolE2 OS=Euzebya sp. DY32-46 OX=1608957 GN=folE2 PE=3 SV=1

SEQ ID NO: 20254 - protein, 150 aa, Euzebyella marina
  misc_feature (1)..(150): tr|A0A3G2LBB6|A0A3G2LBB6_9FLAO 6-carboxytetrahydropteri n synthase OS=Euzebyella marina OX=1761453 GN=D1013_003 60 PE=4 SV=1
MANIRITKQFNFETGHALFGYDGKCRNVHGHSYKLSVTVIGRPITDTSHVKLGMVIDFGDLKKIVKEEIVDKFDHATVFNKNTPHVELAQELTDRGHNVILADYQPTSENMVIDFAKKIGDRLPENIKLHSLKLQETDTSYAEWYASDNS

SEQ ID NO: 20255 - protein, 135 aa, Euzebyella marina
  misc_feature (1)..(135): tr|A0A3G2L472|A0A3G2L472_9FLAO 6-carboxy-5,6,7,8-tetrah ydropterin synthase OS=Euzebyella marina OX=1761453 GN= D1013_06570 PE=3 SV=1
MKVKVSRKAHFNAAHRLFRKDWDEEKNDSVFGKCNNPNFHGHNYELVVSVTGEIDPATGFVIDMKVLKDLIYEHVEEAFDHKNLNIEVAEFKDLNPTAENIAVVIWQKLRPYIETDHDLEIILYETPRNFVTFSG

SEQ ID NO: 20256 - protein, 139 aa, Ewingella americana
  misc_feature (1)..(139): tr|A0A085GNV2|A0A085GNV2_9GAMM 6-carboxy-5,6,7,8-tetrah ydropterin synthase OS=Ewingella americana ATCC 33852 O X=910964 GN=queD PE=3 SV=1
MAPTRDFRYYAAFFEQRDSAMTTTLFKDFQFEAAHHLPHVPAGHKCGRLHGHSFTVRLEITGEVDPHTGWVMDFADLKAAFAPTLDRLDHYNLNDIPGLENPTSEVLAEWIWNEMKPKLPLLSAVRVKETCTAGCVYKG

SEQ ID NO: 20257 - protein, 346 aa, Ewingella americana
  misc_feature (1)..(346): tr|A0A502GGR2|A0A502GGR2_9GAMM Uncharacterized protein OS=Ewingella americana OX=41202 GN=EAH77_16385 PE=4 SV= 1
MTTSTIFFANQNCIDFGFLRADGCPIGYSVNPSFTLTGRIEEKEQVVIDFSDAKKKLKQFMDDSFDHRLVVFKNADGSLLGVESTETNAENRTVFHLKNALGRIELPEDAFCIVDIVGESPDVDSFVQNNLQIFLKDYCEKALLAHYGFAVEVQVKMATLMMSYGDLNNTVFPTLKFNYVHGLKNSTSYGCKNIGHGHLSYLHFEHDIKLPDQHSPDNKLVIEAFKEYSHLEKVLTNCIFVKRENLDHQQNGDEEFMVISYSTEERGFMEMTLNVNELEHYPDVNIHICDKETTIENLAERISEIIARECPNLSGFVNQLFVSEGLTKGCVYDRSAHQVKFGQKAA

SEQ ID NO: 20258 - protein, 151 aa, Exiguobacterium antarcticum
  misc_feature (1)..(151): tr|K0AH61|K0AH61_EXIAB Queuosine biosynthesis protein Q ueD OS=Exiguobacterium antarcticum (strain B7) OX=10874 48 GN=Eab7_2718 PE=4 SV=1
MKFNYEAPETVERPTGDSLIYTTSRVMIVKKLTFDAAHHLYDYDGKCRALHGHTYHVDLGISGFLDHRGMTLDFGDLKKIFKEHLEPLLDHRYLNESLPYMNTTAENMSAWIFETLGKHLPDERGLRVEFVKLYETPTAFAEVRREWMLES

SEQ ID NO: 20259 - protein, 151 aa, Exiguobacterium aurantiacum
  misc_feature (1)..(151): tr|A0A377FY09|A0A377FY09_9BACL 6-carboxy-5,6,7,8-tetrah ydropterin synthase OS=Exiguobacterium aurantiacum OX=3 3987 GN=queD PE=4 SV=1
MKNAPFLAPTSVEAKQDGSLIYCKHRVQIVKEVTFDAAHHLFDYDGKCRALHGHTYKLQMGISGFLDNRGMTLDFGDLKAIFKEELEPYLDHRYLNESLPYMNTTAENMCYWIFEQLAKHLPDERDVRVEFVKLYETPTSYAEFRREWLVD

SEQ ID NO: 20260 - protein, 151 aa, Exiguobacterium chiriqhucha
  misc_feature (1)..(151): tr|U1LF40|U1LF40_9BACL 6-pyruvoyl tetrahydrobiopterin s ynthase OS=Exiguobacterium chiriqhucha RW-2 OX=1345023 GN=M467_01410 PE=4 SV=1
MKNAPFLAPTSVEAKQDGSLIYCPHRVQIVKEVTFDAAHHLFDYDGKCRALHGHTYKLQMGISGFLDNRGMTLDFGDLKAIFKEELEPYLDHRYLNESLPYMNTTAENMCYWIFEQLAKHLPDERDVRVEFVKLYETPTSYAEFRREWLVD

SEQ ID NO: 20261 - protein, 151 aa, Exiguobacterium enclense
  misc_feature (1)..(151): tr|A0A0V8GDR7|A0A0V8GDR7_9BACL 6-pyruvoyl tetrahydrobio pterin synthase OS=Exiguobacterium enclense OX=1017277 GN=AS033_12300 PE=4 SV=1
MTFNYEAPETVERPTGDSLIYTKSRVMIVKKLTFDAAHHLYDYDGKCRALHGHTYHVDMGISGFLDHRGMTLDFGDLKKIFKTHLEPLLDHRYLNESLPYMNTTAENMAAWIFETLGQHLPDERGLRVEFVKLYETPTAFAEVRREWMNEA

SEQ ID NO: 20262 - protein, 151 aa, Exiguobacterium mexicanum
  misc_feature (1)..(151): tr|A0A099DEP0|A0A099DEP0_9BACL 6-pyruvoyl tetrahydrobio pterin synthase OS=Exiguobacterium mexicanum OX=340146 GN=JY98_12380 PE=4 SV=1
MKNAPFLAPTSVEAKQDGSLIYCPHRVQIVKEVTFDAAHHLFDYDGKCRALHGHTYKLQMGISGFLDNRGMTLDFGDLKAIFKEELEPYLDHRYLNESLPYMNTTAENMCYWIFEQLAKHLPDEHDVRVEFVKLYETPTSYAEFRREWLVD

SEQ ID NO: 20263 - protein, 151 aa, Exiguobacterium sibiricum
  misc_feature (1)..(151): tr|B1YFM7|B1YFM7_EXIS2 Queuosine biosynthesis protein Q ueD OS=Exiguobacterium sibiricum (strain DSM 17290 / JC M 13490 / 255-15) OX=262543 GN=Exig_2906 PE=4 SV=1
MKFNYEAPETVERPTGDSLIYTKSRVMIVKKLTFDAAHHLYDYDGKCRALHGHTYHVDLGISGFLDHRGMTLDFGDLKKIFKEHLEPLLDHRYLNESLPYMNTTAENMSAWIFETLGKHLPDERGLRVEFVKLYETPTAFAEVRREWMLES

SEQ ID NO: 20264 - protein, 151 aa, Exiguobacterium sp.
  misc_feature (1)..(151): tr|S3FEQ8|S3FEQ8_9BACL Queuosine biosynthesis protein Q ueD OS=Exiguobacterium sp. S17 OX=856854 GN=queD PE=4 S V=1
MKHAPFLAPTSVEAKQDGSLIYCPHRVQIVKEVTFDAAHHLFDYDGKCRALHGHTYKLQMGISGFLDNRGMTLDFGDLKAIFKEELEPYLDHRYLNESLPYMNTTAENMCYWIFDQLAKHLPDERDVRVEFVRLYETPTSYAEFRREWLVD

SEQ ID NO: 20265 - protein, 151 aa, Exiguobacterium sp.; identical to SEQ ID NO: 20260
  misc_feature (1)..(151): tr|A0A4R0ZV22|A0A4R0ZV22_9BACL 6-carboxytetrahydropteri n synthase QueD OS=Exiguobacterium sp. IPBC4 OX=2510946 GN=queD PE=4 SV=1

SEQ ID NO: 20266 - protein, 139 aa, Fabibacter misakiensis
  misc_feature (1)..(139): tr|A0A1E5T2R7|A0A1E5T2R7_9BACT 6-carboxytetrahydropteri n synthase QueD OS=Fabibacter misakiensis OX=1563681 GN =BFP71_06025 PE=4 SV=1
MVYVSRKEHFNAAHKLYNPNWSEEKNQEVFGPCANANWHGHNFELITTVKGLPDPDTGFVVDLKALSVLIKNEVIEKLDHKNLNIDVDFMQGKMASCEILVMEIWKILAPKVNEITKEGGLHSLKLYETPRNFVEYFGE

SEQ ID NO: 20267 - protein, 135 aa, Fabibacter misakiensis
  misc_feature (1)..(135): tr|A0A1E5SYD3|A0A1E5SYD3_9BACT 6-pyruvoyl tetrahydrobio pterin synthase OS=Fabibacter misakiensis OX=1563681 GN =BFP71_11630 PE=4 SV=1
MKVAVYRKEHFNAAHRLHNPNWSDEKNEEIFGKCNNKYYHGHNYELIVKVSGESDPDTGYVYDMKLLSDLIKEHVADKFDHKNLNLDVEEFKSLNPTAENIVVVIYDILRNKIEEHLDLKVTLYETERNYVEYPA

SEQ ID NO: 20268 - protein, 135 aa, Fabibacter pacificus
  misc_feature (1)..(135): tr|A0A1I0R693|A0A1I0R693_9BACT 6-carboxy-5,6,7,8-tetrah ydropterin synthase OS=Fabibacter pacificus OX=1267423 GN=SAMN05216290_3139 PE=3 SV=1
MKVAVFRKEHFNAAHRLHNADWSDEMNQKVFGKCNNPNYHGHNYELVVKLTGETNPETGYVYDMKVLSDIIKEHVTKRFDHKNLNLDVEEFKTLNPTAENIAVVIYNILREQIEADYDLKVTLYETERNYVEYPA

SEQ ID NO: 20269 - protein, 138 aa, Fabibacter pacificus
  misc_feature (1)..(138): tr|A0A1I0M3M0|A0A1I0M3M0_9BACT 6-pyruvoyltetrahydropter in/6-carboxytetrahydropterin synthase OS=Fabibacter pac ificus OX=1267423 GN=SAMN05216290_0014 PE=4 SV=1
MVYVSRKEHFNAAHKLYNPNWSLEKNVEVFGPCANANWHGHNFELITTVKGEPNPETGFVIDLKQLSTLIRREVIDKLDHKNLNMDVDFLEGKMASCEILVMEIWKILAPKIKKISETGELHSLKLYETPRNYVEYFG

SEQ ID NO: 20270 - protein, 135 aa, Fabibacter sp.
  misc_feature (1)..(135): tr|A0A1E5SQP5|A0A1E5SQP5_9BACT 6-carboxy-5,6,7,8-tetrah ydropterin synthase OS=Fabibacter sp. 4D4 OX=1889784 GN =BFP97_07835 PE=3 SV=1
MKVAVFRKEHFNAAHRLHNPNWSEEKNEQVFGKCNNKYYHGHNYELIVKVSGEPDPETGYVYDMKVLSDLIKENVSDKLDHKNLNLDVPEFENLNPTAENIVVVIYNILREKIEPELDLKVTLYETERNYVEYPA

SEQ ID NO: 20271 - protein, 139 aa, Fabibacter sp.
  misc_feature (1)..(139): tr|A0A1E5SWI5|A0A1E5SWI5_9BACT 6-carboxytetrahydropteri n synthase QueD OS=Fabibacter sp. 4D4 OX=1889784 GN=BFP 97_18590 PE=4 SV=1
MVYVSRKEHFNAAHKLYNPNWSLEKNQEVFGPCANVNWHGHNFELITTVKGNPDPDTGFVVDLKALSVLINKEVIDKLDHKNLNLDVDFMKGKMASCEILVMEIWRILAPKVKELANDGELHSLKLYETPRNFVEYLGE

SEQ ID NO: 20272 - protein, 187 aa, Faecalibacterium sp.
  misc_feature (1)..(187): tr|A0A1Y4SVM0|A0A1Y4SVM0_9FIRM Rubredoxin OS=Faecalibac terium sp. An122 OX=1965551 GN=B5E67_14815 PE=4 SV=1
MRSITTLDLQYAHRFYGFKGEAQYLHGHTGVLTIEVEDTVEPGVNMVFPCNEIQKTAWSVLKNFDHALILRQDDPLLPAILKVYEEQGIRNGAPQNQMKGPAFQTELATAYPECRLVVTKETMTVEGMIKIVYDLLKDKLNIAKITFSSGVNAASQEFTPQNVIDRCPLCGIALNENGVCPKCGYKK

SEQ ID NO: 20273 - protein, 144 aa, Falsibacillus pallidus
  misc_feature (1)..(144): tr|A0A370GIG9|A0A370GIG9_9BACI 6-carboxy-5,6,7,8-tetrah ydropterin synthase OS=Falsibacillus pallidus OX=493781 GN=DFR59_104215 PE=3 SV=1
MIQQIYPSPAHNYSYELNKDFQFASAHYVPDERAGKCMNVHGHTYFANVTIAGDLLDETGFLINFQKIKQLIHDRFDHSLLNEDGLFSDENAEDYPTTEVVARKVAEIIQEHLDTLSNKPVCLQVFLRETPTSYVIYRPKRGNS

SEQ ID NO: 20274 - protein, 146 aa, Falsibacillus sp.
  misc_feature (1)..(146): tr|A0A3L7JXB7|A0A3L7JXB7_9BACI 6-carboxy-5,6,7,8-tetrah ydropterin synthase OS=Falsibacillus sp. GY 10110 OX=24 78915 GN=queD PE=3 SV=1
MIQQIYPSVDHGFSFELNKDFQFAAAHYIPDERAGKCHQVHGHTYFANVTIVGDQLDDTGFLVNFQQIKKLIHDRFDHTLLNDDSLFSDEAPEQYPTTEIVAQSIFEVIQNHLDELENKPRCVQVFLRETPTSYVVYRPKRGGKNE

SEQ ID NO: 20275 - protein, 118 aa, Falsochrobactrum sp.
  misc_feature (1)..(118): tr|A0A316JCG0|A0A316JCG0_9RHIZ 6-carboxy-5,6,7,8-tetrah ydropterin synthase OS=Falsochrobactrum sp. HN4 OX=2201 899 GN=queD PE=3 SV=1
MFRITKEFHFSASHQLTELPADHQCARLHGHNYIVVVELCADKLDQHGFVRDYHELAPLKHYIDDAFDHRHLNEVLGHNRVTAECLARHFYDWCRVRWPEISAVRVSETPKTWAEYRL

SEQ ID NO: 20276 - protein, 118 aa, Fermentimonas caenicola
  misc_feature (1)..(118): tr|A0A098C2D0|A0A098C2D0_9PORP 6-carboxy-5,6,7,8-tetrah ydropterin synthase OS=Fermentimonas caenicola OX=15629 70 GN=EWM46_02095 PE=3 SV=1
MYKISKEFAFSAAHSLFGLPEEHPCSRLHGHNYVVTVHLKADKLNPQGFVRDYNELSFVKDYIDKNLDHRNLNDIMAPLNSSAENIAKMLFEAFKPKLPELYAVEVSETPKTSAIYEP

SEQ ID NO: 20277 - protein, 117 aa, Ferrimicrobium acidiphilum
  misc_feature (1)..(117): tr|A0A0D8FT82|A0A0D8FT82_9ACTN 6-carboxy-5,6,7,8-tetrah ydropterin synthase OS=Ferrimicrobium acidiphilum DSM 1 9497 OX=1121877 GN=queD PE=3 SV=1
MEIFKEFTFEAAHRLPNVSEGHKCAQLHGHSYRVEVHVSGQVDAVTGWVMDFADITEAFAPIRSQLDHHLLNEIEGLTNPTSEHLAIWIWSQLKNLLPLSSIVVRETPTSGSIYRGD

SEQ ID NO: 20278 - protein, 122 aa, Ferrimonas balearica
  misc_feature (1)..(122): tr|E1SMP8|E1SMP8_FERBD 6-carboxy-5,6,7,8-tetrahydropter in synthase OS=Ferrimonas balearica (strain DSM 9799 / CCM 4581 / PAT) OX=550540 GN=Fbal_1383 PE=3 SV=1
MSVEIYKEFTFEAAHKLPHVPAGHKCGRLHGHSFLVRISVAGDVDPHTGWVMDFAELKAHFKPIWERLDHHYLNDIPGLENPTSEVLAKWVWAELKPSLPQLSEVAIKETCTSGCIYRGPDA

SEQ ID NO: 20279 - protein, 293 aa, Ferrimonas balearica
  misc_feature (1)..(293): tr|E1SVZ4|E1SVZ4_FERBD Uncharacterized protein OS=Ferri monas balearica (strain DSM 9799 / CCM 4581 / PAT) OX=5 50540 GN=Fbal_3246 PE=4 SV=1
MKLFVNDLTVIDSSVVHVERGIVGESWIVDLQLSGDLNNESMVLDFGIVKKQIKSLIDELVDHCLLVPASASSLEFCQEPERTWVKNNHSRHATFYVQGPEQAFCFIDADSIDEQSVSLFLEESILPQLPSNVQGLKLTLRSEQIDEPYYHYSHGLKKHSGNCQRIAHGHRSRVRVFNDGQLDRELQTLWAKRWEDIYLITEDDIAEVEAMSMHAQDIRLENAIGASYVSPQGYFEILLPVERVEVMVADSTVECIAEYIATRLAELRPNHKIEVHAFEGVGKGAIAEQILIV

SEQ ID NO: 20280 - protein, 291 aa, Ferrimonas marina
  misc_feature (1)..(291): tr|A0A1M5RJF1|A0A1M5RJF1_9GAMM 6-pyruvoyl-tetrahydropte rin synthase OS=Ferrimonas marina OX=299255 GN=SAMN0274 5129_1642 PE=4 SV=1
MKLFVNDLTVIDSSFVDTTRGIVGESWIVDLQLTGGLNEESMVLDFGVVKKQIKALIDDLADHRLIVPTQAPELALHRDVDATWVSNSATRQGSFFVQGPEQAFCFIEAPRIDEQSVAQYLERMILPQLPSNVKAMSLSLRSEAIDEPYYHYSHGLKKHSGNCQRIAHGHRSRIRIYKDGQLDPQLQALWAERWEDIYLITEEDIVELDTLSEGVQGLPAEDLICASYQSPQGHFEIALPRERSEVMTTDSTVERIAEYIAEQVAQMQPGHAIEVYAYEGVSKGAIAESRV

SEQ ID NO: 20281 - protein, 119 aa, Ferrimonas sediminum
  misc_feature (1)..(119): tr|A0A1G8R8I6|A0A1G8R8I6_9GAMM 6-carboxy-5,6,7,8-tetrah ydropterin synthase OS=Ferrimonas sediminum OX=718193 G N=SAMN04488540_10593 PE=3 SV=1
MSTEIYKEFHFEAAHHLPNVPEGHKCGRLHGHSFLVRIYISGEVDAHTGWIMDFGDLKAAFKPIYDRLDHYYLNEIPGLENPTSEVLARWIWNELKPTLPQLSMVEIKETCTSGCRYRG

SEQ ID NO: 20282 - protein, 120 aa, Ferrimonas sp.
  misc_feature (1)..(120): tr|A0A4V5NUX7|A0A4V5NUX7_9GAMM 6-carboxy-5,6,7,8-tetrah ydropterin synthase OS=Ferrimonas sp. IMCC35001 OX=2569 538 GN=queD PE=3 SV=1
MSTEIYKEFYFEAAHKLPHVPEGHKCGRLHGHSFLVRIYIQGQVDAHTGWIMDFADLKAAFKPIYDRLDHHYLNEIPGLENPTSEVLARWVWEQLKPALPELSMVEIKETCTAGCRYRGE

SEQ ID NO: 20283 - protein, 120 aa, Ferrimonas sp.
  misc_feature (1)..(120): tr|A0A4U1BSV7|A0A4U1BSV7_9GAMM 6-carboxy-5,6,7,8-tetrah ydropterin synthase OS=Ferrimonas sp. IMCC35002 OX=2569 539 GN=queD PE=3 SV=1
MSTEIYKEFYFEAAHRLPHVPEGHKCGRLHGHSFLVRIYISGEVDPHTGWIMDFGDLKATFKPIYDRLDHHYLNDIPGLENPTSEVLAKWIWNELKPLLPQLSMVEIKETCTAGCRYRGE

SEQ ID NO: 20284 - protein, 148 aa, Ferriphaselus amnicola
  misc_feature (1)..(148): tr|A0A2Z6GAK9|A0A2Z6GAK9_9PROT 6-carboxy-5,6,7,8-tetrah ydropterin synthase OS=Ferriphaselus amnicola OX=118831 9 GN=OYT1_ch0770 PE=3 SV=1
MQITRRLEFDAGHRIPNHNSQCRHLHGHRYALEITLSGDIITTEGVSEQGMVMDFSEVKRIANEVVVEVWDHAFLVYRGDRAVLDFLETMPGHKTVVLDVPPTAEHLAMIAFNLLNSAYRDTYGNHLRLERVRLYETPNNWADHLRTE

SEQ ID NO: 20285 - protein, 346 aa, Ferrovum sp.
  misc_feature (1)..(346): tr|A0A149VWN9|A0A149VWN9_9PROT 6-carboxy-5,6,7,8-tetrah ydropterin synthase OS=Ferrovum sp. Z-31 OX=1789004 GN= queD PE=4 SV=1
MKAEATESAGARHDWQARGFEASRRVPGAADLRLQGRHGHSFRVEVCHPLQGESSGGLGDLLSNVVERLDYQDLDLLFSQRHDGEIWHWIEKQLDLAPGSHGCLASGPRQGVVRDTAGRLHGWMRDRFESAHFLPNVPAGHKCGRLHGHGFEAVLFFPWEEGQVMQLKTQWARLHAQLHGQCLNELRGLDIPTSEILASWIWSRLQAQGQVLTQVTVYETASSGSSFDGTRYRIWKEQSFDSALRSPEGGLWGHTYRLRLGLSAPLDEMMGWTQDFGEVKRLFDPLYRELDHQPLHDKVPAGTTLALLDWIVARTRPLLPALDRLDLYDTPGSGKVWTLPIHGPLR

SEQ ID NO: 20286 - protein, 331 aa, Ferrovum sp.
  misc_feature (1)..(331): tr|A0A149VSQ1|A0A149VSQ1_9PROT 6-carboxy-5,6,7,8-tetrah ydropterin synthase OS=Ferrovum sp. PN-J185 OX=1356306 GN=queD PE=4 SV=1
MVQELYLSSAGFEAARHSALTEGAKPILHGHSFRVDCVSYECMSPQLTQLCTSLNLTHLNDKLTDTNNESLMTWFIKQLGHENIKRLQIWSGPHYGITFVSGYQQNTWFRSRFEAAHFLPQVGKDHKCGRLHGHGFEVLIHCALQQYEKVYAYWQQLHNQLHHQVLNEINGLTNPTSEMIAYWIWQQFTQGGLSITEVTVFETRSTGSVFNGRDFYIWKEFSFDSATRLPNSQQIVGHTYLLRVGLSSSLDKVFQWVEDFGDVKKVFSPLMNQLDHQPLQDVFGQGQLQDCLHAIEKETLGLLPKIARVSLWQTPSEGLRRNYSELPTWVE

SEQ ID NO: 20287 - protein, 136 aa, Ferruginibacter sp.
  misc_feature (1)..(136): tr|A0A3M9NRP5|A0A3M9NRP5_9BACT 6-carboxytetrahydropteri n synthase OS=Ferruginibacter sp. BO-59 OX=2294116 GN=E FY79_01290 PE=4 SV=1
MIFLTRVEHFNAAHKLYNEAWSKEKNEEEFGKCANENWHGHNYDLHVTVKGEVSADTGFVINASTLGKLINKFVIEEIDHKNLNVDVAMMKGKLCSAENLAIAIWQQLSLHLPPGVILHSVKLYETPRIFVEYFGS

SEQ ID NO: 20288 - protein, 138 aa, Ferruginibacter sp.
  misc_feature (1)..(138): tr|A0A3M9NSD5|A0A3M9NSD5_9BACT 6-carboxy-5,6,7,8-tetrah ydropterin synthase OS=Ferruginibacter sp. BO-59 OX=229 4116 GN=EFY79_01295 PE=3 SV=1
MNKKVSVFRKQHFCAAHRLNNPEWDVNKNVAVFGKCNNPNYHGHNYELVVKVTGEPAPDTGFVIDLKLLSDLIKQHVTNKLDHRNLNLDIAEFSHMNPTTENIAILIYNILREKIDDELQLQVRLYETERNFVEYPAA

SEQ ID NO: 20289 - protein, 151 aa, Fervidicella metallireducens
  misc_feature (1)..(151): tr|A0A017RVB2|A0A017RVB2_9CLOT Precorrin-3B C17-methylt ransferase OS=Fervidicella metallireducens AeB OX=14035 37 GN=Q428_11085 PE=4 SV=1
MDNISVTKEFTWDMAHMLAHHEGMCQNLHGHTYKMQVEIVRFTGNLIKGSDPSKGMVLDFKDLKDIVNERIVKELDHAFMYWVNSPDKTEHEIARILIESGKKVVKVDYRPTAEEMALNFLRILRDEFKKFDVDVKSVKVWETPTSYAKAW

SEQ ID NO: 20290 - protein, 117 aa, Fervidicella metallireducens
  misc_feature (1)..(117): tr|A0A017RXR0|A0A017RXR0_9CLOT 6-carboxy-5,6,7,8-tetrah ydropterin synthase OS=Fervidicella metallireducens AeB OX=1403537 GN=Q428_02805 PE=3 SV=1
MILIKEFEFDAAHNLIHYHGKCEKLHGHTYKMVVKLEGQPDDEGMVYDFVELKKLVKEKIIDKFDHAYLNDIIPQPTAENIAVYVWDALVDVVKRDNCRLYEVEIWETKTSGIIYRG

SEQ ID NO: 20291 - protein, 125 aa, Fervidicola ferrireducens
  misc_feature (1)..(125): tr|A0A140LAE3|A0A140LAE3_9THEO 6-carboxy-5,6,7,8-tetrah ydropterin synthase OS=Fervidicola ferrireducens OX=520 764 GN=queD PE=3 SV=1
MFLIKEFKFDAAHNLVSYKGKCEKLHGHTYRLVVVLDGVPDREGMIMDFLELKEIVNEKVLKKLDHSYINDIIKQPSAENIAVWVWEQLEKSVRRENCRLYEVQVWETATSGVVYRGESLEGRSK

SEQ ID NO: 20292 - protein, 119 aa, Fervidobacterium changbaicum
  misc_feature (1)..(119): tr|A0A1G8F382|A0A1G8F382_9BACT 6-carboxy-5,6,7,8-tetrah ydropterin synthase OS=Fervidobacterium changbaicum OX= 310769 GN=SAMN04488510_1326 PE=3 SV=1
MLCVVKEFTFDAAHNLVQYHGKCEKLHGHTYKLQIIVCGEKDEEGMVIDFVELKEIVKKEVLNYLDHAYINEIIPQPSAENIAEWIWDRLEKHLTTKRYKLSEVRLWETPTSFVIYRKD

SEQ ID NO: 20293 - protein, 118 aa, Fervidobacterium gondwanense
  misc_feature (1)..(118): tr|A0A1M7RVM9|A0A1M7RVM9_FERGO 6-carboxy-5,6,7,8-tetrah ydropterin synthase OS=Fervidobacterium gondwanense DSM 13020 OX=1121883 GN=SAMN02745226_00238 PE=3 SV=1
MLCVVKEFTFDAAHNLVEYHGKCEKLHGHTYKLQIMVCGEKDREGMVIDFVELKEIVKREVLNYLDHAYINEIIPQPSAENIAEWIWKKLEPHLSNERYKLSEIRLWETPTSFVIYRK

SEQ ID NO: 20294 - protein, 119 aa, Fervidobacterium islandicum
  misc_feature (1)..(119): tr|A0A1B0VLP3|A0A1B0VLP3_FERIS 6-carboxy-5,6,7,8-tetrah ydropterin synthase OS=Fervidobacterium islandicum OX=2 423 GN=NA23_10390 PE=3 SV=1
MLCVVKEFTFDAAHNLVQYHGKCEKLHGHTYKLQIIVCGEKDEEGMVIDFVELKEIVKKEVLNYLDHAYINEIIPQPSAENIAEWIWDRLEKHLTTERYKLTEVRLWETPTSWVVYRKE

SEQ ID NO: 20295 - protein, 118 aa, Fervidobacterium nodosum
  misc_feature (1)..(118): tr|A7HNY0|A7HNY0_FERNB 6-carboxy-5,6,7,8-tetrahydropter in synthase OS=Fervidobacterium nodosum (strain ATCC 35 602 / DSM 5306 / Rt17-B1) OX=381764 GN=Fnod_1780 PE=3 S V=1
MFCVVKEFTFDAAHNLVEYHGKCEKLHGHTYKLQIMVCGERDKEGMVIDFIDLKKIVQEEVLSYLDHAYINEIIPQPSAENIAEWIWNKLEEKLSSERYKLSEVRLWETPTSFVIYRK

SEQ ID NO: 20296 - protein, 119 aa, Fervidobacterium pennivorans
  misc_feature (1)..(119): tr|A0A172T4B6|A0A172T4B6_FERPE 6-carboxy-5,6,7,8-tetrah ydropterin synthase OS=Fervidobacterium pennivorans OX= 93466 GN=JM64_07550 PE=3 SV=1
MLCVVKEFTFDAAHNLVQYHGKCEKLHGHTYKLQIVVCGEKDEEGMVIDFVELKEIVKREVLSYLDHAYINEIIPQPSAENIAEWIWDKLEKHLTTERYKLTEVRLWETPTSWVVYRKD

SEQ ID NO: 20297 - protein, 119 aa, Fervidobacterium pennivorans
  misc_feature (1)..(119): tr|H9UF07|H9UF07_FERPD 6-carboxy-5,6,7,8-tetrahydropter in synthase OS=Fervidobacterium pennivorans (strain DSM 9078 / Ven5) OX=771875 GN=Ferpe_2054 PE=3 SV=1
MLCVVKEFTFDAAHNLVQYHGKCEKLHGHTYKLQIVVCGEKDEEGMVIDFIELKEIVKREVLNYLDHAYINEIIPQPSAENIAEWIWERLEKYLTTERYKLTEVRLWETPTSWVVYRKD

SEQ ID NO: 20298 - protein, 121 aa, Fervidobacterium sp.
  misc_feature (1)..(121): tr|A0A3D3E0X0|A0A3D3E0X0_9BACT 6-carboxy-5,6,7,8-tetrah ydropterin synthase OS=Fervidobacterium sp. OX=1871331 GN=queD PE=3 SV=1
MLCVVKEFTFDAAHNLVSYHGKCEKLHGHTYKLQIVVCGEKDEEGMVIDFTQLKELVNEYVLKYLDHAYINDIIQQPSAENIAQWIWDRIEVPLSSERYSLKEVRLWETPTSHVIYSKYNK

SEQ ID NO: 20299 - protein, 118 aa, Fervidobacterium thailandense
  misc_feature (1)..(118): tr|A0A1E3G215|A0A1E3G215_9BACT 6-carboxy-5,6,7,8-tetrah ydropterin synthase OS=Fervidobacterium thailandense OX =1008305 GN=A4H02_08385 PE=3 SV=1
MLCVVKEFTFDAAHNLVSYKGKCEKLHGHTYKLQVVVCGERDEEGMVIDFIELKRIVQEHVLSVLDHSYINEILQQPSAENIAEWIWNRLYPHLSTERYRLSEIRLWETPTSFVIYSK

SEQ ID NO: 20300 - protein, 144 aa, Fibrella aestuarina
  misc_feature (1)..(144): tr|I0K9X5|I0K9X5_9BACT Uncharacterized protein OS=Fibre lla aestuarina BUZ 2 OX=1166018 GN=FAES_2919 PE=4 SV=1
MMDPNGAEAPRVAVFRKEHFNAAHRLNNPNWSDEKNTRVYGKCNNPNYHGHNYELTVQVVGPIDPETGYVIDMKVLGDLIKTQVTDRFDHKNLNLDTDEFRDLNPSAENIAIVIYTILRKHIEPSLDLKIRLHETERNFVEYPV

SEQ ID NO: 20301 - protein, 138 aa, Fibrella aestuarina
  misc_feature (1)..(138): tr|I0K9H4|I0K9H4_9BACT Uncharacterized protein OS=Fibre lla aestuarina BUZ 2 OX=1166018 GN=FAES_2768 PE=4 SV=1
MVYISRKEHFNAAHRLYNPNWSDERNKEVFGPCANHNWHGHNFELIVTVKGELDPDTGFVIDLKVLGDVIKREIIEQLDHKNINLDVPFMQGKMASCEVLVMEIWKILETALQPLTEARLYQIRLIETPKNFVDYYGE

SEQ ID NO: 20302 - protein, 138 aa, Fibrella sp.
  misc_feature (1)..(138): tr|A0A1W6EC54|A0A1W6EC54_9BACT 6-pyruvoyl tetrahydrobio pterin synthase OS=Fibrella sp. ES10-3-2-2 OX=1834519 G N=A6C57_23140 PE=4 SV=1
MVYISRKEHFNAAHRLFNPNWSDERNKEVFGPCANHNWHGHNFELIVTVKGEPDPDTGFVIDLKVLGDVIKREIIEQLDHKNINLDVPFMQGKMASCEILVMEIWRLLEQALSPLTEARLYQIRLYETERNFVDYYGE

SEQ ID NO: 20303 - protein, 145 aa, Fibrella sp.
  misc_feature (1)..(145): tr|A0A1W6EB00|A0A1W6EB00_9BACT 6-pyruvoyl tetrahydrobio pterin synthase OS=Fibrella sp. ES10-3-2-2 OX=1834519 G N=A6C57_20905 PE=4 SV=1
MTETIGEDTPRVAVFRKEHFNAAHRLNNPNWTDEKNARVYGKCNNPNYHGHNYDLIVQVNGPIHPETGYVIDMKYLGDLIKTHVTDRFDHKNLNLDTDEFRDLNPSAENIAITIYNILRTQLEPTLDLKIRLYETERNFVEYPVN

SEQ ID NO: 20304 - protein, 159 aa, Fibrisoma limi
  misc_feature (1)..(159): tr|I2GF46|I2GF46_9BACT Uncharacterized protein OS=Fibri soma limi BUZ 3 OX=1185876 GN=BN8_01528 PE=4 SV=1
MDTLQAESPRVNTAGMVVPRVAVFRKEHFNAAHRLHNPNWSDEKNERVYGKCNNPHYHGHNYELIVQVVGPVDPETGYVIDMKYLGDLIKEHVTERFDHKNLNLDTEEFADLNPSAENIAIVIYNILRNVLSDSLDLKIRLYETERNFVEYPVNPDRVA

SEQ ID NO: 20305 - protein, 138 aa, Fibrisoma limi
  misc_feature (1)..(138): tr|I2GMQ1|I2GMQ1_9BACT Uncharacterized protein OS=Fibri soma limi BUZ 3 OX=1185876 GN=BN8_04420 PE=4 SV=1
MVYINRIEHFNAAHRLYNPAWSDEKNKEVFGPCANHNWHGHNFELIVTVKGEPDPDTGFVIDLKLLGDIIRREVIEKVDHKNLNLDVDFMQGKMASCEIFIMEIWKILERALAPVTEAHLHQIRLYETPKNFVDYFGE

SEQ ID NO: 20306 - protein, 154 aa, Fibrisoma sp.
  misc_feature (1)..(154): tr|A0A418M6S4|A0A418M6S4_9BACT 6-carboxytetrahydropteri n synthase OS=Fibrisoma sp. HYT19 OX=2305895 GN=DYU11_1 8805 PE=4 SV=1
MDILQVESPRVNTTDVVVPRVAVFRKEHFNAAHRLHNPNWSDEKNERVYGKCNNPHYHGHNYELIVQVAGPVDPETGYVIDMKYLGDLIKEHVTERFDHKNLNLDTEEFADLNPSAENIAIVIYNILRNLLSDSLDLKIRLYETERNFVEYPVA

SEQ ID NO: 20307 - protein, 138 aa, Fibrisoma sp.
  misc_feature (1)..(138): tr|A0A418MDN7|A0A418MDN7_9BACT 6-carboxytetrahydropteri n synthase OS=Fibrisoma sp. HYT19 OX=2305895 GN=DYU11_0 6205 PE=4 SV=1
MVYINRIEHFNAAHRLYNPAWSDEKNKEVFGPCANHNWHGHNFELIVTVKGEPDPDTGFVIDLKLLGDIIRREVIEKVDHKNLNLDVDFMQGKMASCEIFIMEIWKILERALAPVTEAHLHQLRLYETPKNFVDYFGE

SEQ ID NO: 20308 - protein, 109 aa, Fibrobacter sp.
  misc_feature (1)..(109): tr|A0A1M6XW60|A0A1M6XW60_9BACT 6-pyruvoyltetrahydropter in/6-carboxytetrahydropterin synthase OS=Fibrobacter sp . UWH4 OX=1896210 GN=SAMN05720762_104192 PE=4 SV=1
MYRVIKRMEISGAHRLNLPYESKCSGLHGHNWIITVYCQSETLDENGMVVDFSHIKEIVKGKLDHKFLNDVMDANPTAENMARWICEQVPHCYKVQIQESEGNLVEYEV

SEQ ID NO: 20309 - protein, 113 aa, Fibrobacter sp.
  misc_feature (1)..(113): tr|A0A254SVY6|A0A254SVY6_9BACT 6-carboxy-5,6,7,8-tetrah ydropterin synthase OS=Fibrobacter sp. UWB1 OX=1964355 GN=B7988_02930 PE=3 SV=1
MYRVCKRLEISGAHRLELPYPSKCSNLHGHNWLVTIFCKSKTLDNDGMVIDFTHIKKIIMEKLDHAYINDVVDFNPTAENMAKWICDQVPFCHKVVIQESEGNLAQYDKDEED

SEQ ID NO: 20310 - protein, 109 aa, Fibrobacter succinogenes
  misc_feature (1)..(109): tr|A0A380RWV0|A0A380RWV0_FIBSU 6-pyruvoyltetrahydropter in/6-carboxytetrahydropterin synthase OS=Fibrobacter su ccinogenes OX=833 GN=SAMN05661053_0593 PE=4 SV=1
MYRVIKRIEISGAHKLSLPYESKCRGLHGHNWIITVFCQSETLDENGMVVDFSRIKEIVKGKLDHQFLNDVVDFNPTAENMARWICEQVPHCYKVQVQESEGNTVEYEV

SEQ ID NO: 20311 - protein, 109 aa, Fibrobacter succinogenes
  misc_feature (1)..(109): tr|C9RPK0|C9RPK0_FIBSS Putative 6-pyruvoyl tetrahydrobi opterin synthase OS=Fibrobacter succinogenes (strain AT CC 19169 / S85) OX=59374 GN=FSU_0217 PE=4 SV=1
MYRVIKRIEISGAHKLSLPYESKCRGLHGHNWIITVFCQSETLDENGMVVDFSRIKEIVKGKLDHQFLNDVVNFNPTAENMARWICEQVPHCYKVQVQESEGNTVEYEV

SEQ ID NO: 20312 - protein, 161 aa, Fictibacillus aquaticus
  misc_feature (1)..(161): tr|A0A235FA86|A0A235FA86_9BACI 6-carboxytetrahydropteri n synthase QueD OS=Fictibacillus aquaticus OX=2021314 G N=queD PE=4 SV=1
MMEFKIPEKVQKFNVDIKKEELKYHNKRVAVTKEFTFDAAHHLHHYEGKCKNLHGHTYRLIITISGYVDEVGIAVDFGDIKRIYKEVIDSKLDHRYLNEVLPNMNTTAENMIVWIWEQLDERLEEEGLKKQGHRLEELKLYETPTSYATLKREWMISDENI

SEQ ID NO: 20313 - protein, 157 aa, Fictibacillus arsenicus
  misc_feature (1)..(157): tr|A0A1V3GAR9|A0A1V3GAR9_9BACI 6-carboxytetrahydropteri n synthase QueD OS=Fictibacillus arsenicus OX=255247 GN =UN64_01660 PE=4 SV=1
MTYKIPKDVQMLDRDIKREQLKYHNKRVAVCKEFTFDAAHHLHCYEGKCKNLHGHTYKLVITMSGYVNEIGIAVDFGEIKEIFKKAIDEKLDHRYLNEVLPPMNTTAENMIVWIWEQIDAELEERSLSEQGHRLEELKLYETPTSYAVIKREWMVGE

SEQ ID NO: 20314 - protein, 157 aa, Fictibacillus arsenicus
  misc_feature (1)..(157): tr|A0A1B1Z715|A0A1B1Z715_9BACI 6-carboxytetrahydropteri n synthase QueD OS=Fictibacillus arsenicus OX=255247 GN =ABE41_014665 PE=4 SV=1
MTYKIPKDVQMLDRDIKREQLKYHNKRVAVCKEFTFDAAHHLHCYEGKCKNLHGHTYKLVITMSGYVNEIGISVDFGEIKEIFKTAIDEKLDHRYLNEVLPPMNTTAENMVVWMWEQIDAELKQRGLSEKGHRIEELKLYETPTSFAVMKREWMVGE

SEQ ID NO: 20315 - protein, 160 aa, Fictibacillus enclensis
  misc_feature (1)..(160): tr|A0A0V8J9M8|A0A0V8J9M8_9BACI 6-pyruvoyl tetrahydrobio pterin synthase OS=Fictibacillus enclensis OX=1017270 G N=AS030_13775 PE=4 SV=1
MEFEIPKKVQKIDEDIQREKLKYHNKRVAVTKEFTFDAAHHLHCYEGKCKNLHGHTYRLVLTISGFVDPVGISMDFGDIKKIYKEAIESRLDHRYLNDVLPPMNTTAENMIVWIWEEFDQKLDDYQWKEKGFLLEEIVLYETPTSYATMKREWMDHDESL

SEQ ID NO: 20316 - protein, 160 aa, Fictibacillus macauensis
  misc_feature (1)..(160): tr|I8J1A3|I8J1A3_9BACI 6-pyruvoyl tetrahydrobiopterin s ynthase OS=Fictibacillus macauensis ZFHKF-1 OX=1196324 GN=A374_09698 PE=4 SV=1
MEFTIPKKVQTLGQDIEQHQLKYHHKRVAVTKEFTFDAAHHLHCYEGKCKSLHGHTYKLIVTVSGFVDEIGISMDFGDLKRIYKETIDAKLDHRYLNDVLPLMNTTAENMIVWIWEQFDDKLACYGWKDKAFRIEEMVLYETPTSYATMKREWMEDDRSL

SEQ ID NO: 20317 - protein, 145 aa, Fictibacillus macauensis
  misc_feature (1)..(145): tr|I8AK51|I8AK51_9BACI Uncharacterized protein OS=Ficti bacillus macauensis ZFHKF-1 OX=1196324 GN=A374_06396 PE =4 SV=1
MASTNGPISATTLAVQNKVYIDRVLTDYGYVPKYPIINVTIGVSNTKPIFPEPGFIIDALTVQDVFNRLIRSRYDRRTLVQEGEPVPPEIKYPPAFVPFSPSLEQTSRYFYNILRPVFTKLGVRLDFVAVTTPIATARFTGQGIL

SEQ ID NO: 20318 - protein, 159 aa, Fictibacillus phosphorivorans
  misc_feature (1)..(159): tr|A0A160IQ23|A0A160IQ23_9BACI 6-pyruvoyl tetrahydrobio pterin synthase OS=Fictibacillus phosphorivorans OX=122 1500 GN=ABE65_015850 PE=4 SV=1
MTYKIPKDVQILGRDIQSEQLKYHNKRVAVCKEFTFDAAHHLHCYEGKCKNLHGHTYKLVITMSGFVNAIGIAVDFGEIKEIFKSAIDSKLDHQYLNEVLPPMNTTAENMVVWIWEQIDSELNNRGLSEQGHRLEELKLYETPTSYAVMKREWMVERDV

SEQ ID NO: 20319 - protein, 155 aa, Fictibacillus phosphorivorans
  misc_feature (1)..(155): tr|A0A163Q6I0|A0A163Q6I0_9BACI 6-pyruvoyl tetrahydrobio pterin synthase OS=Fictibacillus phosphorivorans OX=122 1500 GN=AWM68_10790 PE=4 SV=1
MNYKIPTDVQVLNRDIKREQLKYHNKRVAVCKEFTFDAAHHLHCYEGKCKNLHGHTYKLVITMSGFVNEIGIAVDFGEIKEIFKTAIDSKLDHRYLNEVLPPMNTTAENMVVWIWEQIDIELQKRGLSEQGHRLEELKLFETPTSFAIMKREWMV

SEQ ID NO: 20320 - protein, 160 aa, Fictibacillus solisalsi
  misc_feature (1)..(160): tr|A0A1G9X295|A0A1G9X295_9BACI 6-pyruvoyltetrahydropter in/6-carboxytetrahydropterin synthase OS=Fictibacillus solisalsi OX=459525 GN=SAMN04488137_2526 PE=4 SV=1
MEFEIPKKVQKIDEDIQRDKLKYHHKRVAVTKEFTFDAAHHLHCYEGKCKNLHGHTYRLVLTISGFVDPVGISMDFGDIKKIYKEAIESRLDHRYLNDVMPPMNTTAENMIVWIWEEFDKKLDQYQWKEKGFRLEEIVLYETPTSYATMKREWMEHDESL

SEQ ID NO: 20321 - protein, 160 aa, Fictibacillus sp.
  misc_feature (1)..(160): tr|A0A4Q2I2J3|A0A4Q2I2J3_9BACI 6-carboxytetrahydropteri n synthase QueD OS=Fictibacillus sp. S7 OX=2212476 GN=q ueD PE=4 SV=1
MEFEIPKKVQKIDEDIQREKLKYHHKRVAVTKEFTFDAAHHLHCYEGKCKNLHGHTYRLVLTISGFVDPVGISMDFGDIKKIYKEAIESRLDHRYLNDVLPPMNTTAENMIVWIWEEFDQKLDDYQWKEKGFRLEEIVLYETPTSYATMKREWMDHDESL

SEQ ID NO: 20322 - protein, 157 aa, Fictibacillus sp.
  misc_feature (1)..(157): tr|A0A4Q7QPM3|A0A4Q7QPM3_9BACI 6-pyruvoyltetrahydropter in/6-carboxytetrahydropterin synthase OS=Fictibacillus sp. BK138 OX=2512121 GN=EV282_1073 PE=4 SV=1
MTYKIPKDVQMLDRDIQREQLKYHNKRVAVCKEFTFDAAHHLHCYEGKCKNLHGHTYKLVITMSGYVNEIGIAVDFGEIKEIFKKAIDEKLDHRYLNEVLPPMNTTAENMVVWIWEQIDAELKERGLSAQGHRIEELKLYETPTSYAVIKREWMVGE

SEQ ID NO: 20323 - protein, 129 aa, Unknown
  misc_feature (1)..(129): tr|A0A2T1DP80|A0A2T1DP80_9CYAN 6-carboxy-5,6,7,8-tetrah ydropterin synthase OS=filamentous cyanobacterium CCP2 OX=2107700 GN=C7B76_04610 PE=3 SV=1
MPTWKLSTEFSFDAAHFIRDYDGPCGRMHGHTYKVRIEATAHQLHGSAYCPHPVMVTDFRTLRWAKQDALKGGLDHCVLNEVLPEGYETTAEMIAQYIYEKTKKQVPEGVRLKVAVSETPNSWVEYTDD

SEQ ID NO: 20324 - protein, 129 aa, Unknown
  misc_feature (1)..(129): tr|A0A2P8WB08|A0A2P8WB08_9CYAN 6-carboxy-5,6,7,8-tetrah ydropterin synthase OS=filamentous cyanobacterium CCT1 OX=2107702 GN=C7293_00295 PE=3 SV=1
MPKWSVKTEFSFDAAHYIKDYDGPCGRMHGHTYRVRVEATTSQLRASEFCPYPVMVADFRTLRWAKKDMLKGGLDHCVLNDVLPEGYETTAEMIAQYIYDKTKKSLPDGIQLKVAVSETPNSWVEYEDD

SEQ ID NO: 20325 - protein, 136 aa, Filimonas endophytica
  misc_feature (1)..(136): tr|A0A561I9E8|A0A561I9E8_9BACT 6-pyruvoyltetrahydropter in/6-carboxytetrahydropterin synthase OS=Filimonas endo phytica OX=1500311 GN=FHW48_112105 PE=4 SV=1
MVYLTRLEHFNAAHKLYNPNWSKEQNDAVFGVCANENWHGHNFDLYITIKGTVDPDTGFLMDVKKLSKLVQEKVIKKVDHRNLNLDVDFLRGKMCSTENLAIGIWNELAPHLPEHVKLHCVKLYETQRIYVEYFGE

SEQ ID NO: 20326 - protein, 138 aa, Filimonas endophytica
  misc_feature (1)..(138): tr|A0A561I9N8|A0A561I9N8_9BACT 6-pyruvoyltetrahydropter in/6-carboxytetrahydropterin synthase OS=Filimonas endo phytica OX=1500311 GN=FHW48_112106 PE=4 SV=1
MPDNKVAVFRHEHFNAAHRLHVPEWDEARNNTVFGKCNNANYHGHNYELIVKVTGVPDTVTGYVIDLKILSDIIKVQVLDRFDHKNLNLDTVEFAQVNPTAENIVVVIYHLLRPHIDASLDLQVRLYETPRNFVEYPA

SEQ ID NO: 20327 - protein, 138 aa, Filimonas lacunae
  misc_feature (1)..(138): tr|A0A173M9G2|A0A173M9G2_9BACT 6-pyruvoyltetrahydropter in/6-carboxytetrahydropterin synthase OS=Filimonas lacu nae OX=477680 GN=SAMN05421788_10483 PE=4 SV=1
MPDNKVAVYRLEHFNAAHRLHVPEWNDVKNDAVFGKCNNANYHGHNYELIVKVVGVPDATTGYVIDLKILSDIIKEQVLDRFDHKNLNLDTAEFKELNPTAENIAVVIYNLLRPCIDASLDMQVRLYETPRNFVEYPV

SEQ ID NO: 20328 - protein, 136 aa, Filimonas lacunae
  misc_feature (1)..(136): tr|A0A173M9H1|A0A173M9H1_9BACT 6-pyruvoyltetrahydropter in/6-carboxytetrahydropterin synthase OS=Filimonas lacu nae OX=477680 GN=SAMN05421788_10484 PE=4 SV=1
MVYLTRLEHFNAAHKLYNPNWSKEQNDAVFGVCANENWHGHNFDLYITIKGTVDPDTGFLMDVKKLSKLVQEKVIKKVDHKNLNLDVDFLRGKMCSTENLAMGIWHELAPHLPEHVKLHCVKLYETQRIYVEYFGD

SEQ ID NO: 20329 - protein, 138 aa, Filimonas sp.
  misc_feature (1)..(138): tr|A0A2U0ZR19|A0A2U0ZR19_9BACT 6-pyruvoyltetrahydropter in/6-carboxytetrahydropterin synthase OS=Filimonas sp. YR581 OX=2135469 GN=C7485_105436 PE=4 SV=1
MPDNKVAVYRHEHFNAAHRLHVPGWDNATNDAVFGKCNNANYHGHNYELIVKVVGIPDAITGYVIDLKILSDIIKAQVLDRFDHKNLNLDTVEFASLNPTAENIAVVIYNLLRPHLDEGLELQVRLYETPRNFVEYPV

SEQ ID NO: 20330 - protein, 138 aa, Filimonas sp.
  misc_feature (1)..(138): tr|A0A4Q1D253|A0A4Q1D253_9BACT 6-carboxytetrahydropteri n synthase OS=Filimonas sp. TTM-71 OX=2508721 GN=ESB13_ 20865 PE=4 SV=1
MENNKVAVFRTEHFNAAHRLHVPDWSKAMNESVFGKCNNPNYHGHNYELTVKVTGVPDERTGYVIDLKILSDIIQKQVLDKFDHKNLNLDTEEFRQLNPTAENIAIVIYYLLRPHIDERLLLQVRLYETPRNFVEYPV

SEQ ID NO: 20331 - protein, 155 aa, Filobacillus milosensis
  misc_feature (1)..(155): tr|A0A4Y8IM34|A0A4Y8IM34_9BACI 6-carboxytetrahydropteri n synthase QueD OS=Filobacillus milosensis OX=94137 GN= queD PE=4 SV=1
MYGFTIVEKLEKIDQDIQRHELKYHNKRVLVSKEFTFDAAHHLHCYEGKCKNLHGHTYKVIFGISGYTDEIGLVIDFGDIKKIWKEQIEVHLDHRYLNDTLPNMNTSAENMVVWIYEKMEEALKKDPNDCRVEFVKLYETPTSYAEARREWMRGE

SEQ ID NO: 20332 - protein, 134 aa, Filomicrobium sp.
  misc_feature (1)..(134): tr|A0A2D7FG02|A0A2D7FG02_9RHIZ Uncharacterized protein OS=Filomicrobium sp. OX=2024831 GN=CMB79_18735 PE=4 SV= 1
MFAVEVREAIMIAHSLPDPFFGPAQNKHGATFVVDVTFFRKELSEHNVVVDIGRAGTALKKVLSPLNYSDLDTTPQFAGKLTTTEFLCKHIFDEMRSCIASGELGPGSEDLVKMRVTLGETHLARAWYEGDLGD

SEQ ID NO: 20333 - protein, 157 aa, Fimbriiglobus ruber
  misc_feature (1)..(157): tr|A0A225DCZ0|A0A225DCZ0_9BACT 6-carboxytetrahydropteri n synthase OS=Fimbriiglobus ruber OX=1908690 GN=FRUB_09 861 PE=4 SV=1
MSSESRSSPLAFSVGPTIPGGTAVYRVTKEIPFCYGHRLLNYTGKCRHLHGHNGKAVVTLQSPELDDLGMVVDFTDVKRVLGRWIDENLDHRLLLHKDDPLIPELRRQGEPFVTLDANPTAENIARLIYHFAANQHLPVVEVTLWETENSYATYRGE

SEQ ID NO: 20334 - protein, 165 aa, Fimbriiglobus ruber
  misc_feature (1)..(165): tr|A0A225DF51|A0A225DF51_9BACT 6-carboxytetrahydropteri n synthase OS=Fimbriiglobus ruber OX=1908690 GN=FRUB_08 342 PE=4 SV=1
MGTERFKVRVTKDHLVFCCGHFISYEGHRCERLHGHNYRAAVEVEGPLNATDFYVFDFVALKARTKTITDELDHHMLLATRNPVIRVDEHPANVRVAYKDREWVFPRGDCVLLPIENTTAELLARYIAGRLLDSLRKHHAFTPDALRVEVEENVGQSATYEWRPA

SEQ ID NO: 20335 - protein, 271 aa, Fimbriimonas ginsengisoli
  misc_feature (1)..(271): tr|A0A068NYY6|A0A068NYY6_9BACT Putative 6-pyruvoyl tetr ahydropterin synthase OS=Fimbriimonas ginsengisoli Gsoi l 348 OX=661478 GN=OP10G_4271 PE=4 SV=1
MVKMTRRVTFSSGHRYWVPALSESENRALFGPWASPYNHGHNYVLDVTVEGNVDPQTGMVVNIKRIDAVLKGGLVKEFDGKSLNDEVAWFYDRPSTLENLIEYIRGRLDGTLPSEARMVGVRLEEMPTFWAEWQDGKGMTLTRSYEFAAAHRLHVPALSHEENLDLFGKCNNPAGHGHNYVLEVSVAGDPDPATGMLLDIGELDAAVHREVVDRYDHKNLNEDLPEFAGKATTSEVVAQEIFSRLQNKIPGRLARVRLWETARNAFDVEAA

SEQ ID NO: 20336 - protein, 156 aa, Fimbriimonas ginsengisoli
  misc_feature (1)..(156): tr|A0A068NU21|A0A068NU21_9BACT Queuosine biosynthesis Q ueD, PTPS-I OS=Fimbriimonas ginsengisoli Gsoil 348 OX=6 61478 GN=OP10G_1701 PE=4 SV=1
MPRFRVCKTFTVESGHMLSKHPDRCRFPHGHTRKVEVIVSSERLDENDMVIDFKALKLAVADYIERYDHAMAINSEDPLLPEILRVHPTSAIVFEGVDPTTEVIAKDLYDHVACILRDGFAGSSSTGIPYTIHANAVSLERVRVWETPSSWAEYGD

SEQ ID NO: 20337 - protein, 142 aa, Firmicutes bacterium
  misc_feature (1)..(142): tr|R6ERG3|R6ERG3_9FIRM Uncharacterized protein OS=Firmi cutes bacterium CAG:145 OX=1263005 GN=BN497_00790 PE=4 SV=1
MVFPCNEIQKTAWDVLKNFDHALILREDDPLLPAILDVYEKQDIKNGAPQNKMKGEAFKTELATAYPDCRLVVTKETMTVEGMIKIVYDLLKDKLNIAKLTFTSGVNAATSEFETKNKIDRCPLCGIVLNENGVCPKCGYKK

SEQ ID NO: 20338 - protein, 126 aa, Firmicutes bacterium
  misc_feature (1)..(126): tr|A0A350NRG3|A0A350NRG3_9FIRM 6-carboxy-5,6,7,8-tetrah ydropterin synthase OS=Firmicutes bacterium OX=1879010 GN=queD PE=3 SV=1
MYEVTVSAHFDSAHYLREYHGRCENLHGHRWQVEASVRSNKLNQIGLALDFTELKKALRETVAQLDHVCLNDLPEFSNINPSSENIASAIFEKVTKRLHEQGLDFTIYSIKVYESPDAWVTYYGAC

SEQ ID NO: 20339 - protein, 290 aa, Fischerella major
  misc_feature (1)..(290): tr|A0A1U7GUQ0|A0A1U7GUQ0_9CYAN 6-pyruvoyl tetrahydropte rin synthase OS=Fischerella major NIES-592 OX=210994 GN =NIES592_20265 PE=4 SV=1
MQCVVNRRAQFSASHRYWLPELSKAENLKKFGACSRFPGHGHNYILFVSLIGELDKYGMVLNLSDVKHVIKQEVTSQLDFSYLNDVWAEFQQTLPTTENIARVIWQRLAPHLPLVRVQLFENPELWADYMGNGMEAYLSVSTHFSAAHRLAHPDLSDQDNFEIYGKCARPNGHGHNYHLEVTVKGEIDPRTGMIVDLGALNQVIENYVVEPFDHTFLNKDISYFSEVVPTAENIALYISNLLRSPIQKLGAKLYKVKLIESPNNSCEIYCTDTESNSVNVAANQPVLARI

SEQ ID NO: 20340 - protein, 129 aa, Fischerella major
  misc_feature (1)..(129): tr|A0A1U7GT63|A0A1U7GT63_9CYAN 6-carboxy-5,6,7,8-tetrah ydropterin synthase OS=Fischerella major NIES-592 OX=21 0994 GN=NIES592_22895 PE=3 SV=1
MPKWKLVTEFSFNSAHYIKDYDGPCGRMHGHNYTVRIEATSSKLHSSQYCPHPVMVADFRTLRWAKQDVSKGGLDHCILNEVLPPEYETTAEMIAKYIYDETKKRVPADVQLKVAVSETPNSWAEYEDD

SEQ ID NO: 20341 - protein, 290 aa, Fischerella muscicola
  misc_feature (1)..(290): tr|A0A2N6JWD1|A0A2N6JWD1_FISMU 6-pyruvoyl tetrahydropte rin synthase OS=Fischerella muscicola CCMEE 5323 OX=201 9572 GN=CEN44_25065 PE=4 SV=1
MQCVVNRRAQFSASHRYWLPELSEAENLEKFGACSRFPGHGHNYVLFVSLIGELDKYGMVLNLSDVKHVIKQEVTSQLDFSYLNDVWSEFQQTLPTTENIARVIWQRLAPHLPLVRVQLFENPELWADYMGNGMEAYLNVSTHFSAAHRLAHPDLSDQDNFEIYGKCARPNGHGHNYHLEVTVKGEIDPRTGMIVDLGALNQVIEDYVVEPFDHTFLNKDISYFSEVVPTAENIALHISNLLRSPIQKLGASLYKVKLIESPNNSCEIYCTQTESNSVNVAANQPVLARI

SEQ ID NO: 20342 - protein, 128 aa, Fischerella muscicola
  misc_feature (1)..(128): tr|A0A2N6K141|A0A2N6K141_FISMU 6-carboxy-5,6,7,8-tetrah ydropterin synthase OS=Fischerella muscicola CCMEE 5323 OX=2019572 GN=CEN44_15935 PE=3 SV=1
MPKWKLVTEFSFNSAHYIKDYDGPCGRMHGHNYMVRIEATSSKLHSSQYCPHPVMVADFRTLRWAKQDVSKGGLDHCILNEVLPPEYETTAEMIAKYIYDETKKRVPADVQLKVAVSETPNSWAEYEE

SEQ ID NO: 20343 - protein, 290 aa, Fischerella sp.; identical to SEQ ID NO: 20339
  misc_feature (1)..(290): tr|A0A0S3TUI8|A0A0S3TUI8_9CYAN Uncharacterized protein OS=Fischerella sp. NIES-3754 OX=1752063 GN=FIS3754_4707 0 PE=4 SV=1

SEQ ID NO: 20344 - protein, 129 aa, Fischerella sp.; identical to SEQ ID NO: 20340
  misc_feature (1)..(129): tr|A0A0S3TVE0|A0A0S3TVE0_9CYAN 6-carboxy-5,6,7,8-tetrah ydropterin synthase OS=Fischerella sp. NIES-3754 OX=175 2063 GN=FIS3754_49970 PE=3 SV=1

SEQ ID NO: 20345 - protein, 129 aa, Fischerella thermalis; identical to SEQ ID NO: 20340
  misc_feature (1)..(129): tr|A0A2N6LQE6|A0A2N6LQE6_9CYAN 6-carboxy-5,6,7,8-tetrah ydropterin synthase OS=Fischerella thermalis CCMEE 5319 OX=2019665 GN=CEN47_14010 PE=3 SV=1

SEQ ID NO: 20346 - protein, 129 aa, Fischerella thermalis
  misc_feature (1)..(129): tr|A0A2N6MS21|A0A2N6MS21_9CYAN 6-carboxy-5,6,7,8-tetrah ydropterin synthase OS=Fischerella thermalis CCMEE 5205 OX=2019671 GN=CEN40_04575 PE=3 SV=1
MPKWKLVTEFSFNSAHYIKDYDGPCGRMHGHNYTVRIEVTSSKLHSSQYCPHPVMVADFRTLRWAKQDVSKGGLDHCILNEVLPPEYETTAEMIAKYIYDETKKRVPADVQLKVAVSETPNSWAEYEDD

SEQ ID NO: 20347 - protein, 149 aa, Flagellimonas aquimarina
  misc_feature (1)..(149): tr|A0A316L508|A0A316L508_9FLAO 6-carboxy-5,6,7,8-tetrah ydropterin synthase OS=Flagellimonas aquimarina OX=2201 895 GN=DKG77_03975 PE=3 SV=1
MGSIRITKQFTFETGHALFGYDGKCRNVHGHSYKLSVTVIGTPITDTDHVKLGMVIDFGDLKTIVKEEVVDKFDHATVFNKNTPHIELAKELSKRGHNVILADYQPTSENMVIDFASKIRARLPKNIQLHSLKLQETETSFAEWFAEDN

SEQ ID NO: 20348 - protein, 135 aa, Flagellimonas aquimarina
  misc_feature (1)..(135): tr|A0A316KWW8|A0A316KWW8_9FLAO 6-carboxy-5,6,7,8-tetrah ydropterin synthase OS=Flagellimonas aquimarina OX=2201 895 GN=DKG77_16105 PE=3 SV=1
MKVKVSRKANFNAAHRLYRPDWSFEKNDAVFGKCNNPNYHGHNYDLIVSVTGEIDQQTGFVMDLKVLKDLIKEHVEEALDHKNLNKDVPEFEDLNPTAENIAVVIWNKIRPHIEKTKELEVVLYETPRNFVTYSG

SEQ ID NO: 20349 - protein, 135 aa, Flagellimonas eckloniae
  misc_feature (1)..(135): tr|A0A0Q1DL40|A0A0Q1DL40_9FLAO 6-carboxy-5,6,7,8-tetrah ydropterin synthase OS=Flagellimonas eckloniae OX=34618 5 GN=AAY42_06810 PE=3 SV=1
MKVKVSRKANFNAAHRLYRSDWSFEKNDEVFGKCNNPNYHGHNYDLIVSVKGEIDQETGYVMDMKVLKDLIKEHVEEALDHKNLNEDVPDFKNLNPTAENIAVVIWNKLRPHIKKTNELEVLLYETPRNFVTYSG

SEQ ID NO: 20350 - protein, 136 aa, Flagellimonas eckloniae
  misc_feature (1)..(136): tr|A0A0Q1HCI8|A0A0Q1HCI8_9FLAO 6-carboxy-5,6,7,8-tetrah ydropterin synthase OS=Flagellimonas eckloniae OX=34618 5 GN=AAY42_15765 PE=3 SV=1
MIATICRKAHFNAAHRLHNPKWSNEKNREVFGKCNSPNYHGHNFDLEVRIRGEVNPDTGFVMDLAVLGTLIEEEIEDRFDHKNLNTDCPEFEGLLPSTEHFVKVIYDILKPKLGKEQLLHISLHETQKNSAEYGDW

SEQ ID NO: 20351 - protein, 149 aa, Flagellimonas flava
  misc_feature (1)..(149): tr|A0A1M5KSZ7|A0A1M5KSZ7_9FLAO 6-carboxy-5,6,7,8-tetrah ydropterin synthase OS=Flagellimonas flava OX=570519 GN =SAMN04488116_1759 PE=3 SV=1
MGKIRITKQFAFETGHALYGYDGKCRNVHGHSYKLSVTVIGTPITDANHVKLGMVIDFGDLKKIVNQEIVDKFDHATVFNKNTPHKELAKELSERGHQIILADYQPTSENMVLDFAEKIKTRLPKGIELYALKLQETETSYAEWFAGDN

SEQ ID NO: 20352 - protein, 135 aa, Flagellimonas flava
  misc_feature (1)..(135): tr|A0A1M5PK40|A0A1M5PK40_9FLAO 6-carboxy-5,6,7,8-tetrah ydropterin synthase OS=Flagellimonas flava OX=570519 GN =SAMN04488116_3239 PE=3 SV=1
MKVKVSRKASFNAAHRLYRPDWSDSKNDAVFGKCNNPRFHGHNYELIVSVNGEIDQETGFVMDLKVLKDLIKEHVEEALDHKNLNMDVPEFKDLNPTAENIAVVIWNKLRPHIEKNKELEVVLYETPRNFVTYSG

SEQ ID NO: 20353 - protein, 135 aa, Flagellimonas maritima
  misc_feature (1)..(135): tr|A0A2Z4LUR7|A0A2Z4LUR7_9FLAO 6-carboxy-5,6,7,8-tetrah ydropterin synthase OS=Flagellimonas maritima OX=138388 5 GN=HME9304_02498 PE=3 SV=1
MKVKVSRKANFNAAHRLYRPDWSFDKNDAVFGKCNNPNYHGHNYDLIVSITGEIDKETGFVMDLKVLKDLIKEYVEEALDHKNLNEDVPEFKKLNPTAENIAVVIWNKLRPYIAETKELEIVLYETPRNFVTYSG

SEQ ID NO: 20354 - protein, 136 aa, Flagellimonas maritima
  misc_feature (1)..(136): tr|A0A2Z4LRA6|A0A2Z4LRA6_9FLAO 6-carboxy-5,6,7,8-tetrah ydropterin synthase OS=Flagellimonas maritima OX=138388 5 GN=queD PE=3 SV=1
MIATICRKAHFNAAHRLHNPNWSDAKNIEVFGKCNSPNYHGHNFDLEVRIRGEVNPDTGFVMDLAVLGILIKEEVEDRFDHKNLNIDCPEFDEILPTTEYFVKIIYDILRPKLQKEQLLHITLHETQKNSAEYGDW

SEQ ID NO: 20355 - protein, 136 aa, Flagellimonas pacifica
  misc_feature (1)..(136): tr|A0A285MWC7|A0A285MWC7_9FLAO 6-carboxy-5,6,7,8-tetrah ydropterin synthase OS=Flagellimonas pacifica OX=124752 0 GN=SAMN06265377_3337 PE=3 SV=1
MIATICRKAHFNAAHRLHNPKWSQEKNIEVFGKCNSPNYHGHNFDLEVRIRGNVNPDTGFVMDLAVLGNLIQKEIEDRFDHKNLNEDCPEFENLLPSTEHFVKVIYDILKPKLEKDQLLHITLYETKKNSAEYGDW

SEQ ID NO: 20356 - protein, 149 aa, Flagellimonas pacifica
  misc_feature (1)..(149): tr|A0A285MDU1|A0A285MDU1_9FLAO 6-carboxy-5,6,7,8-tetrah ydropterin synthase OS=Flagellimonas pacifica OX=124752 0 GN=SAMN06265377_0534 PE=3 SV=1
MGKIRITKQFNFEAGHALYGYDGKCRNVHGHSYKLSVTVIGTPISDADHVKHGMVIDFGDLKKVVNEEIVDQFDHATIFNKNSPHVELANELSERGHSIILADYQPTSENMVIDFASKIKARLPENIQLHSIKLQETETSFAEWYASDN

SEQ ID NO: 20357 - protein, 135 aa, Flagellimonas sp.
  misc_feature (1)..(135): tr|A0A5C8V099|A0A5C8V099_9FLAO 6-carboxy-5,6,7,8-tetrah ydropterin synthase OS=Flagellimonas sp. 176CP5-101 OX= 2603628 GN=FVB32_17130 PE=3 SV=1
MMVKVSRKANFNAAHRLYRPDWSDEKNDAVFGKCNNPNYHGHNYDLVVSVTGEIDQQTGFVMDLKVLKGLIKEHVEEALDHKNLNKDVPEFEGLNPTAENIAVVIWNKLRPHIEKTKTLEIVLYETPRNFVTYSG

SEQ ID NO: 20358 - protein, 136 aa, Flagellimonas sp.
  misc_feature (1)..(136): tr|A0A5C8V005|A0A5C8V005_9FLAO 6-carboxy-5,6,7,8-tetrah ydropterin synthase OS=Flagellimonas sp. 176CP5-101 OX= 2603628 GN=FVB32_08950 PE=3 SV=1
MISTICRKAHFNAAHRLHNPNWSDEKNVEIFGKCNSRNYHGHNFDLEVRIRGEIDPNTGFVMDLAVLGALIADEIEERFDHKNLNEDCPEFKELLPTTEYFVKVIYDILKPKLDKEQLLHITLHETQKNSAEYGDW

SEQ ID NO: 20359 - protein, 136 aa, Flammeovirga kamogawensis
  misc_feature (1)..(136): tr|A0A553GCY9|A0A553GCY9_9BACT 6-carboxy-5,6,7,8-tetrah ydropterin synthase OS=Flammeovirga kamogawensis OX=373 891 GN=EO216_03975 PE=3 SV=1
MKVTVSRKAHFNAAHRLHNSALSPEENTKIFGKCNNPYYHGHNYDLYVKVTGEIDPITGYVIDMKILKDIMKEHVLDRLDHKNLNEEVDEFKGLNPTAENICVVIWQILRDQLESKFDLKVILYETERNFVEYPSI

SEQ ID NO: 20360 - protein, 139 aa, Flammeovirga kamogawensis
  misc_feature (1)..(139): tr|A0A553GIE4|A0A553GIE4_9BACT 6-carboxytetrahydropteri n synthase OS=Flammeovirga kamogawensis OX=373891 GN=EO 216_14470 PE=4 SV=1
MIYINRREFFNAAHKLYNPKWTKEQNEDFFGPCANENWHGHNFEMLVTVKGLPDPDTGYVMNMKDLGKIMNEFIIDKVDHKNLNLDVDFLKDKMTSCETLAIEFWKILAPKVKEFAPNADLHCIELHETRKNFVQYYGE

SEQ ID NO: 20361 - protein, 118 aa, Flammeovirga pacifica
  misc_feature (1)..(118): tr|A0A1S1YY94|A0A1S1YY94_9BACT 6-carboxy-5,6,7,8-tetrah ydropterin synthase OS=Flammeovirga pacifica OX=915059 GN=NH26_06275 PE=3 SV=1
MKIFKSYMFEAAHFLPHMPEGHPCRRIHGHSWKMELHFDGELVMPYEWVIDFNEIDEVVNPIWKVLDHNFLNEVEGLENPTSEVISMWVWNKIKTALPALYKVVIFETPEAGTEYCGK

SEQ ID NO: 20362 - protein, 136 aa, Flammeovirga pacifica
  misc_feature (1)..(136): tr|A0A1S1Z3T3|A0A1S1Z3T3_9BACT 6-carboxy-5,6,7,8-tetrah ydropterin synthase OS=Flammeovirga pacifica OX=915059 GN=NH26_17160 PE=3 SV=1
MKVTVSRTAHFNAAHRLHNPDLSDELNKKIFGKCNNPYYHGHNYNLTVKVTGKIDEVTGYVIDMKILRDIIQQHVLDRLDHKNLNEEVEEFSSLNPTAENICVVIWQILRDQLEEKFDLKVILYETERNFVEYPSV

SEQ ID NO: 20363 - protein, 136 aa, Flammeovirga sp.
  misc_feature (1)..(136): tr|A0A1B1FYS7|A0A1B1FYS7_9BACT 6-carboxy-5,6,7,8-tetrah ydropterin synthase OS=Flammeovirga sp. MY04 OX=1191459 GN=MY04_3944 PE=3 SV=1
MKVTVSRTAHFNAAHRLHNPNLSDELNKKIFGKCNNPYYHGHNYNLTVKVTGEIDEVTGYVIDMKILRDIIQKHVLDKFDHKNLNEEVEEFSSLNPTAENICVVIWQLLRNQLEEKFDLKVILYETERNFVEYPSI

SEQ ID NO: 20364 - protein, 136 aa, Flammeovirga sp.
  misc_feature (1)..(136): tr|A0A150AJE7|A0A150AJE7_9BACT 6-carboxy-5,6,7,8-tetrah ydropterin synthase OS=Flammeovirga sp. SJP92 OX=177543 0 GN=AVL50_14325 PE=3 SV=1
MKVTVSRKAHFNAAHRLHNEQLSAEENRKMFGKCNNPYYHGHNYNLIVKVTGEIDPISGYVIDMKILKDIIQEHVLDYLDHKNLNEEVKEFSSLNPTAENICVVIWNILRDQLDDKFALKIILYETERNFVEYPSA

SEQ ID NO: 20365 - protein, 135 aa, Flammeovirgaceae bacterium
  misc_feature (1)..(135): tr|A0A2D6AS89|A0A2D6AS89_9BACT 6-pyruvoyl tetrahydrobio pterin synthase OS=Flammeovirgaceae bacterium OX=202674 0 GN=CMB80_16195 PE=4 SV=1
MKIAVYRKEHFNAAHRLNNPEWSDEKNDEVFGKCNNPNWHGHNYELVVKLVGEPNPDTGYVYDMKELSDLIKENVLVRFDHKNLNLDTEEFKELNPTAENIAVVIFNILRPKIDERLEMKITLYETERNYVEYPA

SEQ ID NO: 20366 - protein, 139 aa, Flammeovirgaceae bacterium
  misc_feature (1)..(139): tr|A0A1Z9SCK4|A0A1Z9SCK4_9BACT 6-carboxytetrahydropteri n synthase QueD OS=Flammeovirgaceae bacterium TMED262 O X=1986699 GN=CBE22_03185 PE=4 SV=1
MIYISRKEHFNAAHKLFNPLWSDERNREEFGVCSNENWHGHNYEIIVTVKGTVNKESGMIINLKMLSDIIKEEILDKVDHKNLNIDVPFLKGIITTTENVTIKFWEVLEKRLKEKNICKLHRIRVYETPRNFIDYYGEK

SEQ ID NO: 20367 - protein, 138 aa, Flaviaesturariibacter sp.
  misc_feature (1)..(138): tr|A0A4R4E0N3|A0A4R4E0N3_9BACT 6-carboxy-5,6,7,8-tetrah ydropterin synthase OS=Flaviaesturariibacter sp. 17J68- 15 OX=2545761 GN=E0486_15275 PE=3 SV=1
MGERVSVYRREHFNAAHRLFNREWSDDLNTKVFGKCSLPHYHGHNYELEIKVTGDVDPRTGFVMDMKVLSELVQEQVVERFDHKNLNLDTKEFRELNPTAENIAIVIYRLLRPYIDNQLDLKLRLYETPRNYVEYPAE

SEQ ID NO: 20368 - protein, 138 aa, Flaviaesturariibacter sp.
  misc_feature (1)..(138): tr|A0A4R1BKJ5|A0A4R1BKJ5_9BACT 6-carboxytetrahydropteri n synthase OS=Flaviaesturariibacter sp. 17J68-12 OX=250 2780 GN=EPD60_06670 PE=4 SV=1
MVFLTRVEHFNAAHKLYNPNWSEEQNEAVFGKCANSNWHGHNYELYVTVKGRPNPDTGFVMDVKRLSGIIKEQVIEKVDHRNLNLDVDFLEGQFCSTENLAIGIWNQLVPHLPEDVRLHCIKLYETPRIFVEYFGDEG

SEQ ID NO: 20369 - protein, 118 aa, Flavihumibacter petaseus
  misc_feature (1)..(118): tr|A0A0E9N1D6|A0A0E9N1D6_9BACT 6-carboxy-5,6,7,8-tetrah ydropterin synthase OS=Flavihumibacter petaseus NBRC 10 6054 OX=1220578 GN=queD PE=3 SV=1
MLLFKEFTFDSAHFLPNVPEGHKCREMHGHTYRLKVWLEGPLHPELQWVMDFAELKKVVKPVVERLDHKCLNNIEGLTNPTCERIAVYIWDAIKPFLPLLVKVELHETPTSGVIYHGN

SEQ ID NO: 20370 - protein, 137 aa, Flavihumibacter petaseus
  misc_feature (1)..(137): tr|A0A0E9N799|A0A0E9N799_9BACT 6-pyruvoyltetrahydrobiop terin synthase OS=Flavihumibacter petaseus NBRC 106054 OX=1220578 GN=queD PE=4 SV=1
MGNKVAVYRKEHFNAAHRLHRSDWDDAQNYEVFGKCSYPNYHGHNYELVVKVVGEINPATGFVIDMKTLSDIIQQEILNRFDHRNLNLDTAEFADRNPTAENIVMVIYNLLRPHIDPEHDLFVRLYETERNFVEYPI

SEQ ID NO: 20371 - protein, 138 aa, Flavihumibacter solisilvae
  misc_feature (1)..(138): tr|A0A0C1IGD0|A0A0C1IGD0_9BACT 6-pyruvoyl tetrahydrobio pterin synthase OS=Flavihumibacter solisilvae OX=134942 1 GN=OI18_18505 PE=4 SV=1
MVKKVSVFRKEHFNAAHRLHNPDWDDAQNFEVFGKCSFPNYHGHNYDLIVKVTGEPNAATGYVIDLKILSDIIQREIIERFDHRNLNTDTQEFRKLNPTAENIAIVIYDLLRPHIDPKHELGIRLYETERNFVEYNGN

SEQ ID NO: 20372 - protein, 118 aa, Flavihumibacter solisilvae
  misc_feature (1)..(118): tr|A0A0C1KZG7|A0A0C1KZG7_9BACT 6-carboxy-5,6,7,8-tetrah ydropterin synthase OS=Flavihumibacter solisilvae OX=13 49421 GN=OI18_19350 PE=3 SV=1
MLLFKEFTFDSAHFLPNVPEGHKCKEMHGHTYRLRVWLEGPLHPELGWVMDFADLKRVVKPVVASLDHKCLNNLVGLENPTCERIAVYIWDQIKPHLSLLTKVELHETPTSGVIYDGK

SEQ ID NO: 20373 - protein, 138 aa, Flavihumibacter sp.
  misc_feature (1)..(138): tr|A0A0C1KP41|A0A0C1KP41_9BACT 6-pyruvoyl tetrahydrobio pterin synthase OS=Flavihumibacter sp. ZG627 OX=1463156 GN=HY58_16895 PE=4 SV=1
MGNKVAVFRKEHFNAAHRLYHAGWDEARNLEMFGKCSYPNYHGHNYNLEVKVTGIPDKDTGYVMDMKHLSDLIHAVIIERFDHKNLNLDTVEFSQLNPTAENIAIVIYDLLRPHIDAQHDLMIRLYETERNFVEYPAS

SEQ ID NO: 20374 - protein, 118 aa, Flavihumibacter sp.
  misc_feature (1)..(118): tr|A0A162N5H6|A0A162N5H6_9BACT 6-carboxy-5,6,7,8-tetrah ydropterin synthase OS=Flavihumibacter sp. CACIAM 22H1 OX=1812911 GN=A1D16_03230 PE=3 SV=1
MLLFKEFTFDSAHFLPNVPEGHKCKEMHGHTYRLRVWVEGPLDPVLGWVMDFADLKKVVKPVVNRLDHKCLNKIEGLENPTCERIAVYIWDQVKPLLPLLAKIELHETPSSGVIYTGQ

SEQ ID NO: 20375 - protein, 137 aa, Flavipsychrobacter stenotrophus
  misc_feature (1)..(137): tr|A0A2S7SYW8|A0A2S7SYW8_9BACT 6-pyruvoyl tetrahydrobio pterin synthase OS=Flavipsychrobacter stenotrophus OX=2 077091 GN=CJD36_008410 PE=4 SV=1
MAERIAIYRKEHFNSAHRLHNPDLPDEENKRLYGKCNNENYHGHNYDLVVKVTGEVDKVTGFVIDTKQLSDIIKTFVIEEFDHRNMNLDVEMMQGINPTTENVAIAIYNVLRQKIDARAEVKIFLYETERNFVEYPA

SEQ ID NO: 20376 - protein, 136 aa, Flavipsychrobacter stenotrophus
  misc_feature (1)..(136): tr|A0A2S7SXY5|A0A2S7SXY5_9BACT 6-pyruvoyl tetrahydrobio pterin synthase OS=Flavipsychrobacter stenotrophus OX=2 077091 GN=CJD36_008335 PE=4 SV=1
MIYLTRVEHFNAAHKLYNPNWTEEKNKEVFGKCSNTNWHGHNYELHVTVKGNPHPETGFVYNAKTLGNLIKDVIIEKVDHSNLNMDVDFMKDKFTSAENLAIGIWNELRPHIDSEETKLHCVKLVETKSIFVEYFG

SEQ ID NO: 20377 - protein, 151 aa, Flaviramulus basaltis
  misc_feature (1)..(151): tr|A0A1K2IDJ6|A0A1K2IDJ6_9FLAO 6-pyruvoyltetrahydropter in/6-carboxytetrahydropterin synthase OS=Flaviramulus b asaltis OX=369401 GN=SAMN05428642_101875 PE=4 SV=1
MSNHIRITKQFSFETGHALYGYDGKCKNVHGHSYKLSVTVIGKPISDSTNVKFGMVIDFADLKKIVKEEIVNVFDHATVFNKNTPHVELAKELQDRGHNVLLVDYQPTSEMMVIDFAKKIKKRLPSHISLHSLKLQETESSFAEWFDYDNI

SEQ ID NO: 20378 - protein, 136 aa, Flaviramulus basaltis
  misc_feature (1)..(136): tr|A0A1K2IJT2|A0A1K2IJT2_9FLAO 6-carboxy-5,6,7,8-tetrah ydropterin synthase OS=Flaviramulus basaltis OX=369401 GN=SAMN05428642_102848 PE=3 SV=1
MKVTVSRKAHFNAAHRLYRKDWSFEKNDEIFGKCNNPNFHGHNYELIVSVNGEIDQETGYVIDMKVLKDIIKSEVEDAFDHKNLNLEVPEFQDLNPTAENIAVVIYNKMKPKLDANLDLEITLYETPRNFVTYSGK

SEQ ID NO: 20379 - protein, 137 aa, Flavisolibacter ginsengisoli
  misc_feature (1)..(137): tr|A0A1M5FCX7|A0A1M5FCX7_9BACT 6-carboxy-5,6,7,8-tetrah ydropterin synthase OS=Flavisolibacter ginsengisoli DSM 18119 OX=1121884 GN=SAMN02745131_03793 PE=3 SV=1
MNNKVAVVRREHFNAAHRLYRPDWSSEANTATFGKCSLPNFHGHNYELEVKVVGDINKETGFVMDLKMLSDLVNDKVLEKFDHKNLNIDLEEFKNLNPTAENIAVVIYNILRPHIEPSLELFIRLFETPRNYVEYPA

SEQ ID NO: 20380 - protein, 118 aa, Flavisolibacter ginsengisoli
  misc_feature (1)..(118): tr|A0A1M5BY54|A0A1M5BY54_9BACT 6-carboxy-5,6,7,8-tetrah ydropterin synthase OS=Flavisolibacter ginsengisoli DSM 18119 OX=1121884 GN=SAMN02745131_02729 PE=3 SV=1
MEIYKEFSFDSAHFLPNVPDGHKCKNMHGHTYRLRVFIKGPIDPQLGWIMDFKELKDALSGVIDQLDHQLINDIKGLENPTAENITSWIWTQIKPLLPLLFKIELYETPTTGVIYYGD

SEQ ID NO: 20381 - protein, 118 aa, Flavisolibacter ginsenosidimutans
  misc_feature (1)..(118): tr|A0A5B8UI71|A0A5B8UI71_9BACT 6-carboxy-5,6,7,8-tetrah ydropterin synthase OS=Flavisolibacter ginsenosidimutan s OX=661481 GN=queD PE=3 SV=1
MEIYKDFSFDSAHFLPHVPEGHKCKNMHGHTYRLRVFVKGERHPHLGWIMDFKELKDIINPLIDQLDHKLINDIKGLENPTAENITVWIWDNIKPLLSNLSKIELYETPTTGVIYNGE

SEQ ID NO: 20382 - protein, 138 aa, Flavisolibacter ginsenosidimutans
  misc_feature (1)..(138): tr|A0A5B8UIJ7|A0A5B8UIJ7_9BACT 6-carboxy-5,6,7,8-tetrah ydropterin synthase OS=Flavisolibacter ginsenosidimutan s OX=661481 GN=FSB75_07935 PE=3 SV=1
MKQKVAVVRREHFNAAHRLYRKDWSDEQNTQTFGKCSLPHYHGHNYELEIKVVGEIDEATGFVMDLGELSNIVNEQVLERFDHKNLNVDVEEFKTLNPTAENIAVVIYNLLRPHIAGENELFIRLFETPRNYVEYPAK

SEQ ID NO: 20383 - protein, 138 aa, Flavisolibacter tropicus
  misc_feature (1)..(138): tr|A0A172TTW9|A0A172TTW9_9BACT 6-carboxy-5,6,7,8-tetrah ydropterin synthase OS=Flavisolibacter tropicus OX=1492 898 GN=SY85_08210 PE=3 SV=1
MGQKVAVFRREHFNAAHRLYNMDWDEARNTEVFGKCSWPHFHGHNYELEIKVVGEIDDETGFVMDTKRLSLLANKYVLQKFDHKNLNLDTEEFKSLNPTAENIAIVIYNLLRPHLEEKLELYIRLYETPRNYVEYPVA

SEQ ID NO: 20384 - protein, 136 aa, Flavisolibacter tropicus
  misc_feature (1)..(136): tr|A0A172TTP6|A0A172TTP6_9BACT 6-pyruvoyl tetrahydrobio pterin synthase OS=Flavisolibacter tropicus OX=1492898 GN=SY85_08215 PE=4 SV=1
MVYLTRVEHFNAAHKLYNPSWSKEKNEEVFGKCANENWHGHNYELLVTVKGKPHPDTGFVMDVKRLSLLIKDQVIEKVDHRNLNMDVDFLEGQFCSTENLAIGIWKQLAKHLPEGVQLYCIKLYETPRIYVEYFGE

SEQ ID NO: 20385 - protein, 136 aa, Flavivirga eckloniae
  misc_feature (1)..(136): tr|A0A2K9PMF2|A0A2K9PMF2_9FLAO 6-carboxy-5,6,7,8-tetrah ydropterin synthase OS=Flavivirga eckloniae OX=1803846 GN=C1H87_05755 PE=3 SV=1
MKVTVSRKAHFNAAHRLYRKDWSFEKNDAVFGKCNNPNFHGHNYELIVSITGEIDKETGYVIDMKILKDIIKTEVEDVFDHKNLNVEVPEFQDLNPTAENIAVVIYNKMKPKLAAHLELEVTLFETPRNFVTYSGK

SEQ ID NO: 20386 - protein, 151 aa, Flavivirga eckloniae
  misc_feature (1)..(151): tr|A0A2K9PSP9|A0A2K9PSP9_9FLAO 6-carboxytetrahydropteri n synthase QueD OS=Flavivirga eckloniae OX=1803846 GN=C 1H87_12960 PE=4 SV=1
MDNNIRITKQFSFETGHALYGYDGKCKNVHGHSYKLSVTVIGKPITDNTNVKFGMVIDFGDLKKIVKEEIVYVFDHATVFNKNTPHVELAKELENRGHNVLLVDYQPTSEMMVIDFSKKIKSRLPEHISLHSLKLQETDSSFAEWYASDNV

SEQ ID NO: 20387 - protein, 151 aa, Flavivirga sp.
  misc_feature (1)..(151): tr|A0A4S1DZA8|A0A4S1DZA8_9FLAO 6-carboxytetrahydropteri n synthase OS=Flavivirga sp. RZ03 OX=2559571 GN=EM932_0 5510 PE=4 SV=1
MSHNIRITKQFSFETGHALYGYDGKCKNVHGHSYKLSVTVIGQPITDNTNVKFGMVIDFGDLKKIVKEEIVNVFDHATVFNKNTPHVELAKELEDRGHNVLLVDYQPTSEMMVIDFSKKIKKRLPKHISLHSLKLQETDTSFAEWYASDNN

SEQ ID NO: 20388 - protein, 136 aa, Flavivirga sp.
  misc_feature (1)..(136): tr|A0A4S1DRU5|A0A4S1DRU5_9FLAO 6-carboxy-5,6,7,8-tetrah ydropterin synthase OS=Flavivirga sp. RZ03 OX=2559571 G N=EM932_19020 PE=3 SV=1
MKVTVSRKAHFNAAHRLYRKDWSFEKNDAIFGKCNNPNFHGHNYELIVSITGEIDQETGYVIDMKILKEIIKAEVEDAFDHKNLNVEVPEFKDLNPTAENIAVVIYNKMKSKLASHLELEITLFETPRNFVTYSGK

SEQ ID NO: 20389 - protein, 150 aa, Flavobacteria bacterium
  misc_feature (1)..(150): tr|Q26GK8|Q26GK8_FLABB 6-pyruvoyl-tetrahydropterin synt hase OS=Flavobacteria bacterium (strain BBFL7) OX=15658 6 GN=BBFL7_01749 PE=4 SV=1
MKKVRITKEFTFETGHALYGYDGKCRNVHGHSYKLAVTVIGTPINDTSNVKHGMVIDFTDLKKIVKEEIVDPFDHATVFNKNTPHVELAQELRERGHEVILADYQPTSEMMILDFANKIKSRLPENIELFSLRLRETETSYAEWHASDQL

SEQ ID NO: 20390 - protein, 136 aa, Flavobacteria bacterium
  misc_feature (1)..(136): tr|A3J1P0|A3J1P0_9FLAO 6-carboxy-5,6,7,8-tetrahydropter in synthase OS=Flavobacteria bacterium BAL38 OX=391598 GN=FBBAL38_02275 PE=3 SV=1
MRVTVSRKAHFNAAHRLYRKDWSMEKNQEVFGKCNNPNFHGHNYELIVSVTGEVDPETGYVMDTKILSDLIKEHIEEAFDHKNLNKDVPEFKDLNPTAEHIAYIIWNKLRVLIATTIDLEITLYETPRNFITYKGN

SEQ ID NO: 20391 - protein, 148 aa, Flavobacteriaceae bacterium
  misc_feature (1)..(148): tr|A0A3L9MG39|A0A3L9MG39_9FLAO 6-carboxy-5,6,7,8-tetrah ydropterin synthase OS=Flavobacteriaceae bacterium YIM 102668 OX=2479857 GN=queD PE=3 SV=1
MVRLTKTFNFETAHALHGYDGKCKNIHGHSYKLFVTVKGQPSEDVSDVKLGMVMDFGDLKKIVNEEVVDIFDHAILLNQNSPHKSLGDNLMKEGHQVIFTDYQPSCENMMLWMVDRIKNRLPENIELVALKLHETENSYGEWLAEDNQ

SEQ ID NO: 20392 - protein, 135 aa, Flavobacteriaceae bacterium
  misc_feature (1)..(135): tr|A0A5B7SL28|A0A5B7SL28_9FLAO 6-carboxy-5,6,7,8-tetrah ydropterin synthase OS=Flavobacteriaceae bacterium F202 Z8 OX=2583587 GN=FGM00_03640 PE=3 SV=1
MKVKVSRRAHFNAAHRLFRADWSFEKNDAIFGKCNNPNYHGHNYELIVSVTGEIDQETGFVMDVKILKDLIKSEIEDAFDHKNLNVDVPDFKDLNPTAENIAVVIWNKLRKHIDTDKQLEVILYETPRNFVTFSG

SEQ ID NO: 20393 - protein, 137 aa, Flavobacteriales bacterium
  misc_feature (1)..(137): tr|A0A2H0GEP9|A0A2H0GEP9_9FLAO 6-pyruvoyl tetrahydrobio pterin synthase OS=Flavobacteriales bacterium CG18_big_ fil_WC_8_21_14_2_50_32_9 OX=1974008 GN=COW67_01840 PE=4 SV=1
MIYLTRRERFNAAHRLFLSEWSDEKNLEVFGKCSNPNWHGHNYELFVTVKGEINPKIGFVINLKHLSKIVRELIIEKVDHKNLNIDVPFMLGKITSAENIAISFWEELEPEINKLNCELHCIKIVETENNYIEYFGK

SEQ ID NO: 20394 - protein, 140 aa, Flavobacteriales bacterium
  misc_feature (1)..(140): tr|A0A357K5R1|A0A357K5R1_9FLAO 6-pyruvoyl tetrahydrobio pterin synthase OS=Flavobacteriales bacterium OX=202139 1 GN=DEA66_05525 PE=4 SV=1
MKNVYVTRRARFNAAHKLWNDEWDEAKNLEVFGKCANPNWHGHNYELHVTVKGVPAEDTGYCMNLKDLKDIIKEHVEEPLDHRNLNIDVPFMKGKRTSTEILIIAIWEELEGPIAEHGCHLHHIRLYETENNYADYYGGE

SEQ ID NO: 20395 - protein, 136 aa, Flavobacteriia bacterium
  misc_feature (1)..(136): tr|A0A432IN50|A0A432IN50_9BACT 6-carboxy-5,6,7,8-tetrah ydropterin synthase OS=Flavobacteriia bacterium OX=2044 941 GN=DSY83_15700 PE=3 SV=1
MIATICRKAHFNAAHRLHNPKWSKEKNIEVFGKCNSPSYHGHNFDLEVRIKGEVDPDTGFVMDLAVLGNLIRDEVEERFDHKNLNEDCPEFQVLLPTTEHFVKVIYDILKPKLKKDQLLQIILHETQKNSAEYGDW

SEQ ID NO: 20396 - protein, 134 aa, Flavobacteriia bacterium
  misc_feature (1)..(134): tr|A0A1Q3ZGP5|A0A1Q3ZGP5_9BACT 6-carboxy-5,6,7,8-tetrah ydropterin synthase OS=Flavobacteriia bacterium 40-80 O X=1895763 GN=BGO87_06750 PE=3 SV=1
MKICRRETFNAAHRLYNPDFDEATNQRIYDKCSNPNYHGHNYVLEVWVEGQIDAETGYLIDLKTLSDVIHEEVLERFDHRNLNLDCPEFSNLIPTVENIAVVIWDLLKARIDAKYGLEIRLWETDKNSVWYNGK

SEQ ID NO: 20397 - protein, 150 aa, Flavobacterium aciduliphilum
  misc_feature (1)..(150): tr|A0A328YDZ6|A0A328YDZ6_9FLAO 6-pyruvoyltetrahydropter in/6-carboxytetrahydropterin synthase OS=Flavobacterium aciduliphilum OX=1101402 GN=CLV55_106111 PE=4 SV=1
MSTIRITKIFNFETGHALFGYDGKCKNVHGHSYKLYVTVIGKPITDTKNTKYGMVIDFSDLKKIVKEEIVDVFDHATVFNKNTPHIELAAELQTRGHHVILVEYQPTSENMVIDFAKKITNRLPEGIQLHALKLQETESSYAEWYASDNE

SEQ ID NO: 20398 - protein, 136 aa, Flavobacterium aciduliphilum
  misc_feature (1)..(136): tr|A0A328YAJ7|A0A328YAJ7_9FLAO 6-carboxy-5,6,7,8-tetrah ydropterin synthase OS=Flavobacterium aciduliphilum OX= 1101402 GN=CLV55_11128 PE=3 SV=1
MRVTVSRKAHFNAAHRLYRKDWSMEQNDLVFGKCNNPNFHGHNYELIVSVTGEIDSETGYVIDTKVLSDFIRMYVEDAFDHKNLNLDVPEFADLNPTAENIAVVIWNKLRKHIDETKELEVVLYETPRNFVTYKGN

SEQ ID NO: 20399 - protein, 150 aa, Flavobacterium akiainvivens
  misc_feature (1)..(150): tr|A0A0M8MJC9|A0A0M8MJC9_9FLAO 6-pyruvoyl tetrahydropte rin synthase OS=Flavobacterium akiainvivens OX=1202724 GN=AM493_12540 PE=4 SV=1
MSKIRITKQFTFETGHALYGYDGKCKNVHGHSYKLSVTVIGEPIADKNNVKYGMVIDFGDLKHIVKEEVVDIFDHATVFNQNTPHVELAAELKNRGHHVILVDYQPTSENMVIDFAAKISSRLPENIKLHSLRLQETETSYAEWYLSDNQ

SEQ ID NO: 20400 - protein, 136 aa, Flavobacterium akiainvivens
  misc_feature (1)..(136): tr|A0A0M8MAL6|A0A0M8MAL6_9FLAO 6-carboxy-5,6,7,8-tetrah ydropterin synthase OS=Flavobacterium akiainvivens OX=1 202724 GN=AM493_08510 PE=3 SV=1
MKVTVSRSAHFNAAHRLYRKDWDEQRNAEIFGKCNNPNYHGHNYELIVSVTGAIDPETGYVIDIKILKDIITQEVEEPFDHKNLNLDVPEFANLNPTAENIVVVIWNRIRRRIDSQMELEVTLYETPRNFVTYKGQ

SEQ ID NO: 20401 - protein, 136 aa, Flavobacterium album
  misc_feature (1)..(136): tr|A0A2S1QTK1|A0A2S1QTK1_9FLAO 6-carboxy-5,6,7,8-tetrah ydropterin synthase OS=Flavobacterium album OX=2175091 GN=HYN59_00835 PE=3 SV=1
MKVTVSRNAHFNAAHRLYRKDWDDAQNEAVFGKCNNHNFHGHNYELTVSVTGEIDPQTGYVMDMKILKDIIADEVETPFDHKNLNLDVPEFADLNPTAENIAVVIWNRIRKRIEPAMALEVVLYETPRNFVTYKGE

SEQ ID NO: 20402 - protein, 150 aa, Flavobacterium album
  misc_feature (1)..(150): tr|A0A2S1QVF2|A0A2S1QVF2_9FLAO 6-carboxytetrahydropteri n synthase QueD OS=Flavobacterium album OX=2175091 GN=H YN59_04195 PE=4 SV=1
MSRIRITKQFTFETGHALYGYDGKCKNVHGHSYKLSVTVIGTPITDSGNVKFGMVIDFGDLKKIVKEEIVDVFDHATVFNQNTPHIELANELKDRGHHVILVDYQPTSENMVIDFADKIKKRLPSSIALHSLKLQETETSFAEWYQSDNQ

SEQ ID NO: 20403 - protein, 136 aa, Flavobacterium alvei
  misc_feature (1)..(136): tr|A0A2S4ZZI4|A0A2S4ZZI4_9FLAO 6-carboxy-5,6,7,8-tetrah ydropterin synthase OS=Flavobacterium alvei OX=2080416 GN=C3L50_15935 PE=3 SV=1
MKVTVSRKAHFNAAHRLYRKDWTFEQNDAVFGKCNNPNFHGHNYELIVSVTGEINPETGYVIDIKDLSDLILEEVEKPFDHKNLNLDVPEFENLNPTAENIVVVIWNKIRKKIEPELDLEVVLFETPRNFVTYKGE

SEQ ID NO: 20404 - protein, 150 aa, Flavobacterium alvei
  misc_feature (1)..(150): tr|A0A2S5AAV9|A0A2S5AAV9_9FLAO 6-carboxytetrahydropteri n synthase QueD OS=Flavobacterium alvei OX=2080416 GN=C 3L50_07615 PE=4 SV=1
MSKIRITKQFGFETGHALYGYDGKCKNVHGHSYKLSVTVIGTPITDRNNAKFGMVIDFTDLKKIVKEEIVDQFDHASVFNGTTPHIELANELKSRGHHVILVDYQPTSENMVVDFSKRIIGRLPENIKLFSLKLQETESSFAEWFASDNL

SEQ ID NO: 20405 - protein, 150 aa, Flavobacterium anhuiense
  misc_feature (1)..(150): tr|A0A444W0C0|A0A444W0C0_9FLAO 6-pyruvoyl tetrahydrobio pterin synthase OS=Flavobacterium anhuiense OX=459526 G N=NU08_1607 PE=4 SV=1
MSNIRITKQFSFETGHALYGYDGKCKNVHGHSYKLSVTVIGSPITDRSNVKFGMVIDFSDLKKIVKEEIVDQFDHATVFNQTTPHVELAAELKNRGHHVILVDYQPTSENMVVDFAERIVARLPEGISLFSLKLQETESSFAEWYASDNL

SEQ ID NO: 20406 - protein, 136 aa, Flavobacterium anhuiense
  misc_feature (1)..(136): tr|A0A1G5JBT9|A0A1G5JBT9_9FLAO 6-carboxy-5,6,7,8-tetrah ydropterin synthase OS=Flavobacterium anhuiense OX=4595 26 GN=NU08_4376 PE=3 SV=1
MRVTISRKAHFNAAHRLHRKDWSFEKNDAVFGKCNNPNFHGHNYGLTVSVTGKIDPETGFVLDVKVLADIIREEVEIPFDHKNLNLDVPEFADLNPTAENIAVVIWNKIRQRIHADFDLEVVLNETERNFVTYKGE

SEQ ID NO: 20407 - protein, 136 aa, Flavobacterium aquaticum
  misc_feature (1)..(136): tr|A0A327YP01|A0A327YP01_9FLAO 6-pyruvoyltetrahydropter in/6-carboxytetrahydropterin synthase OS=Flavobacterium aquaticum OX=1236486 GN=B0I03_104166 PE=4 SV=1
MRVTVSRKAHFNAAHRLYRKDWSMEKNQEVFGKCNNPNFHGHNYELIVSVTGEVDKETGYVIDTKILSDLIKEHIEEAFDHKNLNEDVPEFKDLNPTAEHIAYIIWNKLRVLIDADKELEITLYETPRNFVTYKGL

SEQ ID NO: 20408 - protein, 150 aa, Flavobacterium aquaticum
  misc_feature (1)..(150): tr|A0A327YKM9|A0A327YKM9_9FLAO 6-pyruvoyltetrahydropter in/6-carboxytetrahydropterin synthase OS=Flavobacterium aquaticum OX=1236486 GN=B0I03_106173 PE=4 SV=1
MSNIRITKQFNFETGHALYGYDGKCKNVHGHSYKLSVTVIGKPIKDTSNVKYGMVIDFGDLKKIVKEQIVDVFDHATVFNKNTPHIELAHELKSRGHDVILVDYQPTSENMVIDFSNKIKNLLPENIKLHSLRLQETETSFAEWYASDNE

SEQ ID NO: 20409 - protein, 149 aa, Flavobacterium aquatile
  misc_feature (1)..(149): tr|A0A095SWS6|A0A095SWS6_9FLAO 6-carboxy-5,6,7,8-tetrah ydropterin synthase OS=Flavobacterium aquatile LMG 4008 = ATCC 11947 OX=1453498 GN=LG45_05575 PE=3 SV=1
MSKIRITKQFSFETGHALYGYDGKCKNVHGHSYKLSVTVIGTPITDNSNVKFGMVIDFTDLKKIVREEIVDLFDHATVFNKNTPHVELAQELKNRGHHVILVDYQPTSENMVIDFAKKIQDRLPNDIQLHSLKLQETESSFAEWYASDN

SEQ ID NO: 20410 - protein, 136 aa, Flavobacterium aquatile
  misc_feature (1)..(136): tr|A0A095U0Q3|A0A095U0Q3_9FLAO 6-pyruvoyl tetrahydrobio pterin synthase OS=Flavobacterium aquatile LMG 4008 = A TCC 11947 OX=1453498 GN=LG45_07740 PE=4 SV=1
MKVTVSRKAHFNAAHRLYRKDWTMEQNDLVFGKCNNPNFHGHNYELIVSVTGEIDQETGFVIDVKILSDLIKAHIENAFDHKNLNLDVSDFVDLNPTAENIAVVIWNKLRKFIDANKELEVVLYETPRNFVTYKGT

SEQ ID NO: 20411 - protein, 136 aa, Flavobacterium aquicola
  misc_feature (1)..(136): tr|A0A3E0EJI2|A0A3E0EJI2_9FLAO 6-carboxy-5,6,7,8-tetrah ydropterin synthase OS=Flavobacterium aquicola OX=16827 42 GN=C8P67_107242 PE=3 SV=1
MRVTISRKAHFNAAHRLYRKDWTFEQNDAVFGKCNNPNFHGHNYELIVSVTGEIDQETGYVMDVKFLTDIIKEEVENQMDHKNLNLDVPEFQDLNPTAENIVVVIWNKIRKKVKPELDLEVILYETPRNFVTYKGE

SEQ ID NO: 20412 - protein, 150 aa, Flavobacterium aquicola
  misc_feature (1)..(150): tr|A0A3E0EP86|A0A3E0EP86_9FLAO 6-pyruvoyltetrahydropter in/6-carboxytetrahydropterin synthase OS=Flavobacterium aquicola OX=1682742 GN=C8P67_105346 PE=4 SV=1
MSNIRITKQFNFETGHALYGYDGKCKNVHGHSYKLSVTVIGKPITDRNNVKFGMVIDFSDLKKIVKEEIVDQFDHATVFNETTPHIELAKELKSRDHHVILVNYQPTSENMVVDFSQRIIRRLPENIKLFSLKLQETESSFAEWFASDNQ

SEQ ID NO: 20413 - protein, 150 aa, Flavobacterium aquidurense
  misc_feature (1)..(150): tr|A0A0N8VN20|A0A0N8VN20_9FLAO 6-pyruvoyl-tetrahydropte rin synthase OS=Flavobacterium aquidurense OX=362413 GN =RC62_4273 PE=4 SV=1
MSNIRITKQFSFETGHALYGYDGKCKNVHGHSYKLSVTVIGSPITDRSNVKFGMVIDFSDLKKIVKEEIVDQFDHATVFNETTPHIELANELKNRGHHVILVDYQPTSENMVVDFADRIIARLPKDISLYSLKLQETESSFAEWYASDNL

SEQ ID NO: 20414 - protein, 136 aa, Flavobacterium aquidurense
  misc_feature (1)..(136): tr|A0A0Q0SBZ9|A0A0Q0SBZ9_9FLAO 6-carboxy-5,6,7,8-tetrah ydropterin synthase OS=Flavobacterium aquidurense OX=36 2413 GN=RC62_3952 PE=3 SV=1
MKVTISRKAHFNAAHRLHRKDWTFEKNNAVFGKCNNPNFHGHNYGLTVSVTGKIDPETGFVLDVKVLADIINEEVEIPFDHKNLNLDVPEFQDLNPTAENIAVVIWNKIRKRIQPDFDLEIVLNETDRNFVTYKGE

SEQ ID NO: 20415 - protein, 137 aa, Flavobacterium araucananum
  misc_feature (1)..(137): tr|A0A227PGY9|A0A227PGY9_9FLAO 6-carboxy-5,6,7,8-tetrah ydropterin synthase OS=Flavobacterium araucananum OX=94 6678 GN=B0A64_05215 PE=3 SV=1
MKVTISRKAHFNAAHRLHRKDWTFEKNDAVFGKCNNPNFHGHNYGLTVSVTGKIDPETGFVVDVKVLADIIHEEVEIPFDHKNLNLDVPEFQDLNPTAENIAVVIWNKIKKRIQPDFDLEIVLNETDRNFVTYKGEE

SEQ ID NO: 20416 - protein, 150 aa, Flavobacterium araucananum
  misc_feature (1)..(150): tr|A0A227PF20|A0A227PF20_9FLAO 6-carboxytetrahydropteri n synthase QueD OS=Flavobacterium araucananum OX=946678 GN=B0A64_07855 PE=4 SV=1
MSNIRITKQFSFETGHALYGYDGKCKNVHGHSYKLSVTVIGSPITDRSNVKFGMVIDFSDLKKIVKEEIVDQFDHATVFNETTPHVELANELKNRGHHVILVDYQPTSENMVVDFAERIIARLPKEIALFSLKLQETESSFAEWYASDNI

SEQ ID NO: 20417 - protein, 136 aa, Flavobacterium arcticum
  misc_feature (1)..(136): tr|A0A345H964|A0A345H964_9FLAO 6-carboxy-5,6,7,8-tetrah ydropterin synthase OS=Flavobacterium arcticum OX=17847 13 GN=DVK85_02325 PE=3 SV=1
MKVTVSRKAHFNAAHRLYRPDWAEERNDAVFGKCNNPNFHGHNYDLIVSVTGDIDPDTGYVIDIKVLKDIIKEEVEDAFDHKNLNLDVPEFADLNPTAENIVVVIWNKIRKRIANTMALEVVLYETPRNFVTYKGE

SEQ ID NO: 20418 - protein, 149 aa, Flavobacterium arcticum
  misc_feature (1)..(149): tr|A0A345HBU7|A0A345HBU7_9FLAO 6-carboxy-5,6,7,8-tetrah ydropterin synthase OS=Flavobacterium arcticum OX=17847 13 GN=DVK85_07275 PE=3 SV=1
MSKIRITKQFTFETGHALYGYDGKCKNVHGHSYKLSVTVIGIPITDNNHVKYGMVIDFGDLKKIVKEEIVDVFDHATVFNQNTPHIELAKELQKREHHVILVDYQPTSENMVIDFAKKIKNRLPDSIKLHSLKLQETESSFAEWYQSDN

SEQ ID NO: 20419 - protein, 136 aa, Flavobacterium aurantiibacter
  misc_feature (1)..(136): tr|A0A256ABV5|A0A256ABV5_9FLAO 6-pyruvoyl tetrahydrobio pterin synthase OS=Flavobacterium aurantiibacter OX=202 3067 GN=CHX27_00785 PE=4 SV=1
MRVTVSRHAHFNAAHRLYRKDWTFEKNQEVFGKCNNPNYHGHNYELIAAVTGEVDPETGYVIDVKILADIIKAEVEQKFDHKNLNLDCEEFANLNPTAEHIAYVIYHKVKPKLPEHLDLNITLYETPRNFVSYDGR

SEQ ID NO: 20420 - protein, 150 aa, Flavobacterium aurantiibacter
  misc_feature (1)..(150): tr|A0A255ZRF3|A0A255ZRF3_9FLAO 6-carboxytetrahydropteri n synthase QueD OS=Flavobacterium aurantiibacter OX=202 3067 GN=CHX27_10340 PE=4 SV=1
MSKIRITKQFNFETGHALYGYDGKCKNVHGHSYKLSVTVIGVPIADPNNVKFGMVIDFSDLKRIVKEEIVDQFDHATVFNKNTPHVELAAELIQRQHHVLLVDYQPTSENMVIDFAARIKARLPQNIELHSLKLQETGTSFAEWYAADQA

SEQ ID NO: 20421 - protein, 136 aa, Flavobacterium beibuense
  misc_feature (1)..(136): tr|A0A444WIC7|A0A444WIC7_9FLAO 6-carboxy-5,6,7,8-tetrah ydropterin synthase OS=Flavobacterium beibuense OX=6573 26 GN=NU09_0210 PE=3 SV=1
MRVTVSRKAHFNAAHRLYRKDWSEEQNDTVFGKCNNPNFHGHNYELIVGVTGEIDPQTGYVIDIKVLKDIIAEEVEVPFDHKNLNLDVPEFKDLNPTAENIVVVIWNRIRRRIDSQMDLEVVLYETPRNFVTYKGI

SEQ ID NO: 20422 - protein, 149 aa, Flavobacterium beibuense
  misc_feature (1)..(149): tr|A0A0A2LJ82|A0A0A2LJ82_9FLAO 6-carboxy-5,6,7,8-tetrah ydropterin synthase OS=Flavobacterium beibuense F44-8 O X=1406840 GN=Q763_12320 PE=3 SV=1
MSKIRITKQFNFETGHALYGYDGKCKNVHGHSYKLSVTVIGSPITDTSNVKYGMVIDFGDLKKIVKEEIVDIFDHATVFNQNTPHIELANELKTRGHHVILVDYQPTSENMVIDFAAKIKSRLPENIALHSLRLQETETSFAEWYQSDN

SEQ ID NO: 20423 - protein, 136 aa, Flavobacterium branchiophilum
  misc_feature (1)..(136): tr|A0A543G4E7|A0A543G4E7_9FLAO 6-carboxy-5,6,7,8-tetrah ydropterin synthase OS=Flavobacterium branchiophilum OX =55197 GN=BC670_1810 PE=3 SV=1
MIVTVSRKAHFNAAHRLYRKDWSMQQNDAVFGKCNNPHFHGHNYELIVSVTGAVNPETGFVIDVKILADLIKIHIEEAFDHRNLNLDVPEFEHLNPTAEHIAVVIWNKLRPYIDPAHLLEIQLYETNRNFVTYKGT

SEQ ID NO: 20424 - protein, 136 aa, Flavobacterium branchiophilum
  misc_feature (1)..(136): tr|G2Z712|G2Z712_FLABF 6-carboxy-5,6,7,8-tetrahydropter in synthase OS=Flavobacterium branchiophilum (strain FL -15) OX=1034807 GN=ygcM PE=3 SV=1
MIVTVSRKAHFNAAHRLYRKDWSMQQNDAVFGKCNNPHFHGHNYELIVSVTGAVNPETGFVIDVKILADLIKIHIEEAFDHRNLNLDVPEFEHLNPTAEHIAVVIWNKLRPYIDPAHLLEIQLYETNRNFVTYKGS

SEQ ID NO: 20425 - protein, 136 aa, Flavobacterium caeni
  misc_feature (1)..(136): tr|A0A1G5FNS4|A0A1G5FNS4_9FLAO 6-carboxy-5,6,7,8-tetrah ydropterin synthase OS=Flavobacterium caeni OX=490189 G N=SAMN02927903_01353 PE=3 SV=1
MRVTVSRKSHFNAAHRLYRKDWSMEKNDSVFGKCNNANFHGHNYEVIASVTGEIDPETGYVIDIKELAQYIYEEVELPLDHKNLNLDVPEFANLNPTAEHIVVVIWNKLRKRVKSEHELEVVLYETPRNFVSYRGQ

SEQ ID NO: 20426 - protein, 150 aa, Flavobacterium caeni
  misc_feature (1)..(150): tr|A0A1G5HA66|A0A1G5HA66_9FLAO 6-pyruvoyltetrahydropter in/6-carboxytetrahydropterin synthase OS=Flavobacterium caeni OX=490189 GN=SAMN02927903_01830 PE=4 SV=1
MTKIRITKQFSFETGHALFGYDGKCKNVHGHSYKLSVTVIGTPITDRDNVKFGMVIDFSDLKTIVKEEIVDLFDHATVFNQTTPHVELAKELKQRGHHVILVDYQPTSENMVVDFAKKIINRLPNSIALHSLRLQETETSYAEWYASDNL

SEQ ID NO: 20427 - protein, 136 aa, Flavobacterium cauense
  misc_feature (1)..(136): tr|V6S3D3|V6S3D3_9FLAO 6-carboxy-5,6,7,8-tetrahydropter in synthase OS=Flavobacterium cauense R2A-7 OX=1341154 GN=IP98_01674 PE=3 SV=1
MRVTVSRKAHFNAAHRLYRKDWTAEQNEAVFGKCNNPNFHGHNYELIVSVTGKINPETGYVMDIKDLADIIYEEVETQFDHKNLNLDVPEFQDLNPTAENIVVVIWNKIRKRIMAGNDLEVVLYETPRNFVTYKGE

SEQ ID NO: 20428 - protein, 149 aa, Flavobacterium cauense
  misc_feature (1)..(149): tr|V6S0C8|V6S0C8_9FLAO 6-carboxy-5,6,7,8-tetrahydropter in synthase OS=Flavobacterium cauense R2A-7 OX=1341154 GN=IP98_01493 PE=3 SV=1
MSNIRITKQFTFETGHALYGYDGKCKNVHGHSYKLSVTVIGKPITDTSNVKFGMVIDFGDLKKIVKEEIVDVFDHATVFNQNTPHIELANELKSRGHHVILVDYQPTSENMVIDFAEKIKSRLPQNIRLHSLKLQETESSFAEWYQSDN

SEQ ID NO: 20429 - protein, 136 aa, Flavobacterium cheniae
  misc_feature (1)..(136): tr|A0A562KNY8|A0A562KNY8_9FLAO 6-pyruvoyltetrahydropter in/6-carboxytetrahydropterin synthase OS=Flavobacterium cheniae OX=295428 GN=IP97_00575 PE=4 SV=1
MRVTVSRKAHFNAAHRLYRKDWSMEKNQEVFGKCNNPNFHGHNYELIVSVTGEVDMETGYVIDTKILSDLIKEHIEEAFDHKNLNEDVPEFKDLNPTAEHIAYIIWNKLRVLIASDKELEITLYETPRNFVTYKGN

SEQ ID NO: 20430 - protein, 150 aa, Flavobacterium cheniae
  misc_feature (1)..(150): tr|A0A562KFP4|A0A562KFP4_9FLAO 6-pyruvoyltetrahydropter in/6-carboxytetrahydropterin synthase OS=Flavobacterium cheniae OX=295428 GN=IP97_01816 PE=4 SV=1
MSNIRITKQFNFETGHALYGYDGKCKNVHGHSYKLSVTVIGKPIKDTSNVKYGMVIDFGDLKKIVKEQIVDVFDHATVFNKNTPHIELAHELKSRGHDVILVDYQPTSENMVIDFSNKIKNLLPNNIKLHSLRLQETETSFAEWFASDNE

SEQ ID NO: 20431 - protein, 150 aa, Flavobacterium chilense
  misc_feature (1)..(150): tr|A0A1M7DVD6|A0A1M7DVD6_9FLAO 6-pyruvoyltetrahydropter in/6-carboxytetrahydropterin synthase OS=Flavobacterium chilense OX=946677 GN=SAMN05444484_102739 PE=4 SV=1
MSNIRITKQFSFETGHALYGYDGKCKNVHGHSYKLSVTVIGSPITDRSNVKFGMVIDFSDLKKIVKEEIVDQFDHATVFNETTPHIELANELKNRGHHVILVDYQPTSENMVVDFADRIRARLPKEISLFSLKLQETESSFAEWYASDNL

SEQ ID NO: 20432 - protein, 137 aa, Flavobacterium chilense
  misc_feature (1)..(137): tr|A0A1M7GKL9|A0A1M7GKL9_9FLAO 6-carboxy-5,6,7,8-tetrah ydropterin synthase OS=Flavobacterium chilense OX=94667 7 GN=SAMN05444484_104258 PE=3 SV=1
MKVTISRKAHFNAAHRLHRKDWTFEKNDAVFGKCNNPNFHGHNYGLTVSVTGKIDPETGFVLDVKVLADIIRDEVEIPFDHKNLNLDVPEFQDLNPTAENIAVVIWNKIKKRIQPDFDLEIVLNETDRNFVTYKGEE

SEQ ID NO: 20433 - protein, 150 aa, Flavobacterium circumlabens
  misc_feature (1)..(150): tr|A0A4Y7U7Z0|A0A4Y7U7Z0_9FLAO 6-carboxytetrahydropteri n synthase OS=Flavobacterium circumlabens OX=2133765 GN =D0809_19440 PE=4 SV=1
MSNIRITKQFSFETGHALYGYDGKCKNVHGHSYKLSVTVIGSPITDRSNVKYGMVIDFSDLKKIVKEEIVDQFDHATVFNETTPHIELANELKNRGHHVILVDYQPTSENMVVDFSDRIIARLPAGISLFSLKLQETESSFAEWFASDNV

SEQ ID NO: 20434 - protein, 135 aa, Flavobacterium circumlabens
  misc_feature (1)..(135): tr|A0A4Y7UAB0|A0A4Y7UAB0_9FLAO 6-carboxytetrahydropteri n synthase OS=Flavobacterium circumlabens OX=2133765 GN =D0809_17225 PE=4 SV=1
MNITVCRKAYFNACHRMHNPNWSDAKNKSVFGVCNNANYHGHNYELIVKLTGQINPETGYIMDMKILADLIKVEIEDRFDHKNLNLDCPEFAHKIASTENFALVIFSILQPLIPKEHQMAITLFETNKNYVEIRE

SEQ ID NO: 20435 - protein, 135 aa, Flavobacterium columnare
  misc_feature (1)..(135): tr|A0A2T4HKN7|A0A2T4HKN7_9FLAO 6-carboxy-5,6,7,8-tetrah ydropterin synthase OS=Flavobacterium columnare OX=996 GN=C6N29_01740 PE=3 SV=1
MRVTVSRKAHFNAAHRLYRKDWTDEQNQKVFGKCNNPNFHGHNYELIVSVTGSINPETGYVIDIKDLADIIYEEVEIPFDHKNLNLDVPEFENVIPTAENIVVVIWNKIRKRIKKENDLEVTLFETPRNFVTYKG

SEQ ID NO: 20436 - protein, 150 aa, Flavobacterium columnare
  misc_feature (1)..(150): tr|A0A2T4HDC5|A0A2T4HDC5_9FLAO 6-carboxytetrahydropteri n synthase OS=Flavobacterium columnare OX=996 GN=C6N29_ 04455 PE=4 SV=1
MSKIRITKQFNFETGHALYGYDGKCKNVHGHSYKLSVTVIGSPIADRENVKYGMVIDFSDLKKIVKDEIVDVFDHATVFNATTPHIELANELKQRGHHVILVDYQPTSENMVIDFAAKISKHLPSQIKLHSLRLQETESSFAEWYASDNL

SEQ ID NO: 20437 - protein, 136 aa, Flavobacterium commune
  misc_feature (1)..(136): tr|A0A1D9P794|A0A1D9P794_9FLAO 6-carboxy-5,6,7,8-tetrah ydropterin synthase OS=Flavobacterium commune OX=130651 9 GN=BIW12_02970 PE=3 SV=1
MRVTISRKAHFNAAHRLYRKDWTFEKNDAVFGKCNNPNFHGHNYELIVSVTGAIDPETGFVMDAKILAAIIKEEVEDAFDHKNLNLDVAEFENLNPTAENIAVVIWNKVRKRIDSQFDLEVVLYETPRNFVTYKGE

SEQ ID NO: 20438 - protein, 150 aa, Flavobacterium commune
  misc_feature (1)..(150): tr|A0A1D9PB61|A0A1D9PB61_9FLAO 6-carboxytetrahydropteri n synthase QueD OS=Flavobacterium commune OX=1306519 GN =BIW12_07705 PE=4 SV=1
MSNIRITKQFSFETGHALYGYDGKCKNVHGHSYKLSVTVIGKPITNRNDVKFGMVIDFSDLKKIVKEEIVDQFDHATVFNETTPHVELAQELKNRGHHVILVDYQPTSENMVVDFAERIIRRLPERITLFSLKLQETESSFAEWFASDNL

SEQ ID NO: 20439 - protein, 150 aa, Flavobacterium crassostreae
  misc_feature (1)..(150): tr|A0A1B9E667|A0A1B9E667_9FLAO 6-pyruvoyl tetrahydropte rin synthase OS=Flavobacterium crassostreae OX=1763534 GN=LPBF_05060 PE=4 SV=1
MSNIRITKQFNFETGHALYGYDGKCKNVHGHSYKLSVTVIGRPITNREDAKFGMVIDFSDLKKIVKEEIVDQFDHATVFNQTTPHIELAMELKKRGHHVILVDYQPTSENMVIDFAQRIKSRLPIGIQLFSLKLQETESSFAEWFASDNI

SEQ ID NO: 20440 - protein, 136 aa, Flavobacterium crassostreae
  misc_feature (1)..(136): tr|A0A1B9E3J4|A0A1B9E3J4_9FLAO 6-carboxy-5,6,7,8-tetrah ydropterin synthase OS=Flavobacterium crassostreae OX=1 763534 GN=LPBF_06200 PE=3 SV=1
MKVTISRKAHFNAAHRLYRKDWSLEKNDAVFGKCNNPNFHGHNYDLIVSVTGPIDPETGFVMDVKFLAEIIKEEVELQLDHKNLNLDVPEFQDLNPTAENIAVVIWNKIRKRIQKTFELEVVLYETARNFVTYKGE

SEQ ID NO: 20441 - protein, 136 aa, Flavobacterium croceum
  misc_feature (1)..(136): tr|A0A2S4N912|A0A2S4N912_9FLAO 6-pyruvoyltetrahydropter in/6-carboxytetrahydropterin synthase OS=Flavobacterium croceum DSM 17960 OX=1121886 GN=Q361_10561 PE=4 SV=1
MKATVSRKAHFNAAHRLYRKDWDNAKNEAVFGKCNNPNFHGHNYELIVSVTGEISQETGYVVDTKVLSDLIKIHIEDVLDHKNLNLDVPDFQNLIPTAENIAVVIWNKLRPYIDINCKLEITLYETPRNFVTFCGE

SEQ ID NO: 20442 - protein, 152 aa, Flavobacterium croceum
  misc_feature (1)..(152): tr|A0A2S4NBD9|A0A2S4NBD9_9FLAO 6-pyruvoyltetrahydropter in/6-carboxytetrahydropterin synthase OS=Flavobacterium croceum DSM 17960 OX=1121886 GN=Q361_101125 PE=4 SV=1
MQQKIRITKIFNFETGHALYGYDGKCKNVHGHSYKLFVTVIGVPIHDTSHVKYGMVIDFSDLKKIVKEEIVDVFDHATVFNQNTPHIELAHELKQRGHHVILVNYQPTSENMVIDFAKKIQSRLPQDIVLYSLKLQETESSFAEWYAEDNTL

SEQ ID NO: 20443 - protein, 136 aa, Flavobacterium crocinum
  misc_feature (1)..(136): tr|A0A2S1YFY9|A0A2S1YFY9_9FLAO 6-carboxy-5,6,7,8-tetrah ydropterin synthase OS=Flavobacterium crocinum OX=21838 96 GN=HYN56_01390 PE=3 SV=1
MRVTISRKAHFNAAHRLHRKDWSFEKNDAVFGKCNNPNFHGHNYGLTVSVTGKIDPETGFVLDVKVLADIIREEVEIPFDHKNLNLDVPEFLDLNPTAENIAVVIWNKIRQRIHTDFDLEVVLNETDRNFVTYKGE

SEQ ID NO: 20444 - protein, 150 aa, Flavobacterium crocinum
  misc_feature (1)..(150): tr|A0A2S1YGS3|A0A2S1YGS3_9FLAO 6-carboxytetrahydropteri n synthase QueD OS=Flavobacterium crocinum OX=2183896 G N=HYN56_03065 PE=4 SV=1
MSNIRITKQFSFETGHALYGYDGKCKNVHGHSYKLSVTVIGSPITDRSNVKFGMVIDFSDLKKIVKEEIVDQFDHATVFNQTTPHIELANELKNRGHHVILVDYQPTSENMVVDFAERIKNRLPAGIALFSLKLQETESSFAEWYASDNV

SEQ ID NO: 20445 - protein, 136 aa, Flavobacterium cucumis
  misc_feature (1)..(136): tr|A0A1M7ZWC2|A0A1M7ZWC2_9FLAO 6-pyruvoyltetrahydropter in/6-carboxytetrahydropterin synthase OS=Flavobacterium cucumis OX=416016 GN=SAMN05443547_1535 PE=4 SV=1
MRVTVSRKAHFNAAHRLYRKDWSMEKNQDVFGKCNNPNFHGHNYELIVSVTGVVDKETGYVIDTKILSDLIKEHIEEAFDHKNLNEDVLEFKDLNPTAEHIAYVIWNKLRVLIDVDKELEITLYETPRNFVTYKGL

SEQ ID NO: 20446 - protein, 149 aa, Flavobacterium cucumis
  misc_feature (1)..(149): tr|A0A1M7ZV47|A0A1M7ZV47_9FLAO 6-carboxy-5,6,7,8-tetrah ydropterin synthase OS=Flavobacterium cucumis OX=416016 GN=SAMN05443547_1021 PE=3 SV=1
MSKIRITKQFSFETGHALYGYDGKCKNVHGHSYKLSVTVIGTPITDTNNVKYGMVIDFGDLKKIVKEQIVDVFDHATVFNKNTPHIELANELKSRGHDVILVDYQPTSENMVIDFSNKIKNLLPENIRLHSLKLQETETSFAEWYASDN

SEQ ID NO: 20447 - protein, 150 aa, Flavobacterium cupreum
  misc_feature (1)..(150): tr|A0A434A1R0|A0A434A1R0_9FLAO 6-carboxytetrahydropteri n synthase OS=Flavobacterium cupreum OX=2133766 GN=D081 7_22425 PE=4 SV=1
MSNIRITKQFSFETGHALYGYDGKCKNVHGHSYKLSVTVIGSPITDRSNVKYGMVIDFSDLKKIVKEEIVDQFDHATVFNETTPHIELANELKNRGHHVILVDYQPTSENMVVDFSERIIARLPAGISLFSLKLQETESSFAEWFASDNV

SEQ ID NO: 20448 - protein, 136 aa, Flavobacterium cupreum
  misc_feature (1)..(136): tr|A0A434A7G1|A0A434A7G1_9FLAO 6-carboxy-5,6,7,8-tetrah ydropterin synthase OS=Flavobacterium cupreum OX=213376 6 GN=D0817_11070 PE=3 SV=1
MRVTISRKAHFNAAHRLHRKDWTSEKNSAVFGKCNNPNFHGHNYGLTVSVTGKIDPETGFVLDVKVLADIILEEVEIPFDHKNLNLDVPEFQDLNPTAENIAVVIWNKIRKRIQPDFDLEIVLNETDRNFVTYKGE

SEQ ID NO: 20449 - protein, 150 aa, Flavobacterium cutihirudinis
  misc_feature (1)..(150): tr|A0A3D9FV56|A0A3D9FV56_9FLAO 6-pyruvoyltetrahydropter in/6-carboxytetrahydropterin synthase OS=Flavobacterium cutihirudinis OX=1265740 GN=BD847_1316 PE=4 SV=1
MSNIRITKQFSFETGHALYGYDGKCKNVHGHSYKLSVTVIGSPITDRSNVKFGMVIDFSDLKKIVKEEIVDQFDHATVFNQTTPHIELANELKNRGHHVILVDYQPTSENMVVDFAERIIGRLPAGISLFSLKLQETESSFAEWYASDNL

SEQ ID NO: 20450 - protein, 136 aa, Flavobacterium cutihirudinis
  misc_feature (1)..(136): tr|A0A3D9FK32|A0A3D9FK32_9FLAO 6-carboxy-5,6,7,8-tetrah ydropterin synthase OS=Flavobacterium cutihirudinis OX= 1265740 GN=BD847_3827 PE=3 SV=1
MKVTISRKAHFNAAHRLHRKDWTFEKNEAVFGKCNNPNFHGHNYGLTVSVTGKIDPETGFVLDVKVLADIIRDEVEIPFDHKNLNLDVPEFQDLNPTAENIAVVIWNKIRKRIHTDFDLEIVLNETDRNFVTYKGE

SEQ ID NO: 20451 - protein, 136 aa, Flavobacterium cyanobacteriorum
  misc_feature (1)..(136): tr|A0A256A2U4|A0A256A2U4_9FLAO 6-carboxy-5,6,7,8-tetrah ydropterin synthase OS=Flavobacterium cyanobacteriorum OX=2022802 GN=CHU92_00910 PE=3 SV=1
MKVTVSRSAHFNAAHRLYRKDWPDERNQAVFGKCSNPNFHGHNYELIVNVKGEIDPETGYVMDMKILKDIIAQEVEEPFDHKNLNLEVPDFADLNPTAENIAVVIWNRLRRRIENTMELEVVLYETPRNFVTYKGE

SEQ ID NO: 20452 - protein, 149 aa, Flavobacterium cyanobacteriorum
  misc_feature (1)..(149): tr|A0A255YZU1|A0A255YZU1_9FLAO 6-carboxy-5,6,7,8-tetrah ydropterin synthase OS=Flavobacterium cyanobacteriorum OX=2022802 GN=CHU92_12650 PE=3 SV=1
MSTIRITKQFSFETGHALYGYDGKCKNVHGHSYKLSVTVIGTPITDTDNVKYGMVIDFGDLKNIVKQHIVDVFDHATVFNKNTPHVELANELRERGHDVILVDYQPTSENMVIDFAEKIKRHLPPSIQLHSLRLQETETSYAEWYQSDN

SEQ ID NO: 20453 - protein, 136 aa, Flavobacterium daejeonense
  misc_feature (1)..(136): tr|A0A0Q0W476|A0A0Q0W476_9FLAO 6-carboxy-5,6,7,8-tetrah ydropterin synthase OS=Flavobacterium daejeonense OX=35 0893 GN=RCH33_1594 PE=3 SV=1
MKVTISRKAHFNAAHRLYRKDWTFEQNDAVFGKCNNPNFHGHNYELVVSVTGAVDPETGFVMDAKILADIIKIEIEDAFDHKNLNLDVPEFENLNPTAENIAIVIWNKIRKRIESKFELEVVLYETPRNFVTYKGL

SEQ ID NO: 20454 - protein, 150 aa, Flavobacterium daejeonense
  misc_feature (1)..(150): tr|A0A0Q0WGN9|A0A0Q0WGN9_9FLAO Queuosine biosynthesis Q ueD, PTPS-I OS=Flavobacterium daejeonense OX=350893 GN= RCH33_592 PE=4 SV=1
MSKIRITKQFSFETGHALYGYDGKCKNVHGHSYKLSVTVIGKPIKNRNDVKFGMVIDFGDLKKIVKEEVVDQFDHATVFNETTPHVELAAELKNRGHHVILVDYQPTSENMVIDFAQRISGRLPEGIELFSLKLQETDSSFAEWFASDNL

SEQ ID NO: 20455 - protein, 149 aa, Flavobacterium dankookense
  misc_feature (1)..(149): tr|A0A4R6QDM5|A0A4R6QDM5_9FLAO 6-carboxy-5,6,7,8-tetrah ydropterin synthase OS=Flavobacterium dankookense OX=70 6186 GN=BC748_1280 PE=3 SV=1
MSNIRITKQFSFETGHALYGYDGKCKNVHGHSYKLSVTVIGKPITDNSNVKFGMVIDFSDLKKIVKEEIVDIFDHATVFNQNTPHIELANELKNRGHHVILVEYQPTSENMVIDFAKKIKDRLPKEILLHSLKLQETETSFAEWYASDN

SEQ ID NO: 20456 - protein, 136 aa, Flavobacterium dankookense
  misc_feature (1)..(136): tr|A0A4R6QAN7|A0A4R6QAN7_9FLAO 6-carboxy-5,6,7,8-tetrah ydropterin synthase OS=Flavobacterium dankookense OX=70 6186 GN=BC748_1494 PE=3 SV=1
MKVTVSRKAHFNAAHRLYRKDWTMEQNDLVFGKCNNPNYHGHNYELIVSVTGEIDQETGFVIDVKILSDLIKEHIENAFDHKNLNLDVVDFADLNPTAENIAVVIWNKLRKFIDANKELEVVLYETPRNFVTYKGN

SEQ ID NO: 20457 - protein, 150 aa, Flavobacterium defluvii
  misc_feature (1)..(150): tr|A0A1M5LRL8|A0A1M5LRL8_9FLAO 6-pyruvoyltetrahydropter in/6-carboxytetrahydropterin synthase OS=Flavobacterium defluvii OX=370979 GN=SAMN05443663_103445 PE=4 SV=1
MSNIRITKQFSFETGHALYGYDGKCKNVHGHSYKLSVTVIGSPITDRSNVKFGMVIDFSDLKKIVKEEIVDQFDHATVFNQTTPHVELANELKNRGHHVILVDYQPTSENMVVDFAERIMARLPKGISLFSLKLQETESSFAEWYASDNL

SEQ ID NO: 20458 - protein, 136 aa, Flavobacterium defluvii
  misc_feature (1)..(136): tr|A0A1M5NP75|A0A1M5NP75_9FLAO 6-carboxy-5,6,7,8-tetrah ydropterin synthase OS=Flavobacterium defluvii OX=37097 9 GN=SAMN05443663_104263 PE=3 SV=1
MRVTISRKAHFNAAHRLHRKDWSLEKNNAVFGKCNNPNFHGHNYGLTVSVTGKIDPETGFVLDVKVLADIILEEVEIPFDHKNLNLDVPEFQDLNPTAENIAVVIWNKIRKRIQPDFDLEVVLYETDRNFVTYKGE

SEQ ID NO: 20459 - protein, 150 aa, Flavobacterium degerlachei
  misc_feature (1)..(150): tr|A0A1H3D4L7|A0A1H3D4L7_9FLAO 6-pyruvoyltetrahydropter in/6-carboxytetrahydropterin synthase OS=Flavobacterium degerlachei OX=229203 GN=SAMN05444338_11279 PE=4 SV=1
MSNIRITKKFSFETGHALYGYDGKCKNVHGHSYKLSVTVIGSPIENRNDVKFGMVIDFTDLKKIVKEEIVDQFDHATVFNETTPHVELAHELKNRGHHVILVDYQPTSENMVIDFAQRIIGRLPADIRLFSLKLQETDSSFAEWYASDNL

SEQ ID NO: 20460 - protein, 136 aa, Flavobacterium degerlachei
  misc_feature (1)..(136): tr|A0A1H2W0M5|A0A1H2W0M5_9FLAO 6-carboxy-5,6,7,8-tetrah ydropterin synthase OS=Flavobacterium degerlachei OX=22 9203 GN=SAMN05444338_104201 PE=3 SV=1
MRVTISRKAHFNAAHRLYRKDWTFEQNDTVFGKCNNPNFHGHNYDLIVSVTGEIDQETGFVMDVKILADLIKEEVENKFDHKNLNVDVPEFENLNPTAENIVVVIWDKLRKKIKSEFDLEVVLYETPRNFVTYKGE

SEQ ID NO: 20461 - protein, 149 aa, Flavobacterium endophyticum
  misc_feature (1)..(149): tr|A0A495MNT3|A0A495MNT3_9FLAO 6-carboxy-5,6,7,8-tetrah ydropterin synthase OS=Flavobacterium endophyticum OX=1 540163 GN=CLV94_1100 PE=3 SV=1
MSKIRITKQFSFETGHALYGYDGKCKNVHGHSYKLSVTVIGTPISDNTNVKFGMVIDFSDLKKIVREEVVDVFDHATVFNKNTPHIELAEELKSRDHHVILVNYQPTSENMVIDFAAKIKSRLPENITLHSLRLQETETSFAEWFQSDN

SEQ ID NO: 20462 - protein, 136 aa, Flavobacterium endophyticum
  misc_feature (1)..(136): tr|A0A495M6T2|A0A495M6T2_9FLAO 6-carboxy-5,6,7,8-tetrah ydropterin synthase OS=Flavobacterium endophyticum OX=1 540163 GN=CLV94_2369 PE=3 SV=1
MRVTVSRKAHFNAAHRLYRKDWSDEKNNSVFGKCNNPNFHGHNYELVASVTGSINPDTGYVIDIKDLADIILEEVEKPFDHKNLNLDVPEFFELNPTAENIAVVIWNKIRKRLGADMDLEIVLYETPRNFVSYKGE

SEQ ID NO: 20463 - protein, 136 aa, Flavobacterium enshiense
  misc_feature (1)..(136): tr|A0A0A2MX16|A0A0A2MX16_9FLAO 6-carboxy-5,6,7,8-tetrah ydropterin synthase OS=Flavobacterium enshiense DK69 OX =1107311 GN=Q767_01040 PE=3 SV=1
MRVTVSRKAHFNAAHRLYRKDWSDEQNNRVFGKCNNPNFHGHNYELIVSVTGKINPETGYVMDIKDLADIIYEEVESRFDHKNLNLDVVEFQELNPTAENIVVVIWNLIRKRITPENDLEVVLYETPRNFVTYSGK

SEQ ID NO: 20464 - protein, 149 aa, Flavobacterium enshiense
  misc_feature (1)..(149): tr|V6SB98|V6SB98_9FLAO 6-carboxy-5,6,7,8-tetrahydropter in synthase OS=Flavobacterium enshiense DK69 OX=1107311 GN=Q767_07800 PE=3 SV=1
MSNIRITKQFSFETGHALYGYDGKCKNVHGHSYKLSVTVIGKPITDTSNVKYGMVIDFGDLKKIVKEEIVDLFDHATVFNKNTPHIELANELKNRGHHVILVDYQPTSENMVIDFAEKIKSRLPQDIRLHSLKLQETESSFAEWYHSDN

SEQ ID NO: 20465 - protein, 150 aa, Flavobacterium faecale
  misc_feature (1)..(150): tr|A0A2S1LC07|A0A2S1LC07_9FLAO 6-carboxytetrahydropteri n synthase QueD OS=Flavobacterium faecale OX=1355330 GN =FFWV33_05835 PE=4 SV=1
MSNIRITKQFNFETGHALYGYDGKCKNVHGHSYKLSVTVMGRPIKDRTNVKFGMVIDFSDLKKIVTEEVVDQFDHATVFNETTPHVELAKELQIRGHHVILVDYQPTSENMVIDFAERIKRRLPVGIELFSLKLQETESSFAEWYASDNL

SEQ ID NO: 20466 - protein, 136 aa, Flavobacterium faecale
  misc_feature (1)..(136): tr|A0A2S1LCL9|A0A2S1LCL9_9FLAO 6-carboxy-5,6,7,8-tetrah ydropterin synthase OS=Flavobacterium faecale OX=135533 0 GN=FFWV33_08065 PE=3 SV=1
MKVTISRKAHFNAAHRLYRKDWSFEKNDAIFGKCNNPNYHGHNYELIVSVTGPIDPETGFVVDVKILSDIIKEEVENPFDHKNLNLDVAEFQDLNPTAENIAVVIWNKIKKRINPDFDLEVVLYETPRNFVTYKGE

SEQ ID NO: 20467 - protein, 150 aa, Flavobacterium flevense
  misc_feature (1)..(150): tr|A0A4Y4AUS1|A0A4Y4AUS1_9FLAO 6-carboxytetrahydropteri n synthase QueD OS=Flavobacterium flevense OX=983 GN=FF L01_15000 PE=4 SV=1
MSNIRITKQFSFETGHALYGYDGKCKNVHGHSYKLSVTVIGKPITNRNDVKFGMVIDFSDLKKIVKEEIVDQFDHATVFNETTPHIELAMELKNRGHHVILVDYQPTSENMVVDFAQRIIGRLPAGITLFSLKLQETESSFAEWFASDNL

SEQ ID NO: 20468 - protein, 136 aa, Flavobacterium flevense
  misc_feature (1)..(136): tr|A0A4Y4B2H6|A0A4Y4B2H6_9FLAO 6-carboxy-5,6,7,8-tetrah ydropterin synthase OS=Flavobacterium flevense OX=983 G N=ygcM PE=3 SV=1
MIVTISRKAHFNAAHRLYRKDWTFEQNDAVFGKCNNPNFHGHNYELIVSVTGAVDPETGFVMDAKVLAAIIKEEVEDPFDHKNLNVDVAEFENLNPTAENIAVVIWNKIRKKIASKFELEVVLYETPRNFVTYKGL

SEQ ID NO: 20469 - protein, 136 aa, Flavobacterium fluvii
  misc_feature (1)..(136): tr|A0A1M5K2E1|A0A1M5K2E1_9FLAO 6-carboxy-5,6,7,8-tetrah ydropterin synthase OS=Flavobacterium fluvii OX=468056 GN=SAMN05443549_104152 PE=3 SV=1
MRVTISRKAHFNAAHRLYRKDWTFEQNDAVFGKCNNPNFHGHNYELIVSVTGKINPETGYVMDVKDLSDLIFEEVEKPFDHKNLNLDVAEFENLNPTAENIVVVIWNKIRKRIKPELDLEITLYETPRNFVTYKGE

SEQ ID NO: 20470 - protein, 150 aa, Flavobacterium fluvii
  misc_feature (1)..(150): tr|A0A1M5EDD6|A0A1M5EDD6_9FLAO 6-pyruvoyltetrahydropter in/6-carboxytetrahydropterin synthase OS=Flavobacterium fluvii OX=468056 GN=SAMN05443549_101295 PE=4 SV=1
MSKIRITKQFGFETGHALYGYDGKCKNVHGHSYKLSVTVIGTPITDRKNVKFGMVIDFTDLKKIVKEEIVDQFDHATVFNETTPHIELANELKSRGHHVILVDYQPTSENMVVDFSKRIISRLPENINLFSLKLQETESSFAEWFASDNL

SEQ ID NO: 20471 - protein, 150 aa, Flavobacterium fontis
  misc_feature (1)..(150): tr|A0A1M4YNX5|A0A1M4YNX5_9FLAO 6-pyruvoyltetrahydropter in/6-carboxytetrahydropterin synthase OS=Flavobacterium fontis OX=1124188 GN=SAMN05444377_103175 PE=4 SV=1
MSTIRITKQFSFETGHALYGYDGKCKNVHGHSYKLSVTVIGQPITDTAHVKYGMVIDFTDLKKIVKEEVVDVFDHATVFNKNTPHIELAQELQQRGHHVILVDYQPTSENMVIDFAAKISNRLPATIQLFSLRLQETETSYAEWYASDNT

SEQ ID NO: 20472 - protein, 136 aa, Flavobacterium fontis
  misc_feature (1)..(136): tr|A0A1M5CJJ2|A0A1M5CJJ2_9FLAO 6-carboxy-5,6,7,8-tetrah ydropterin synthase OS=Flavobacterium fontis OX=1124188 GN=SAMN05444377_11228 PE=3 SV=1
MRVTVSRKAHFNAAHRLYRKDWTMEQNQAVFGKCNNPNFHGHNYELIVSVTGEIDPETGYVIDVKIISDLVKTLVEDAFDHKNLNLDVPEFHDLNPTAENIAVVIWHKLRPHIGLDKDLEVVLYETPRNFVTYKGN

SEQ ID NO: 20473 - protein, 150 aa, Flavobacterium frigidimaris
  misc_feature (1)..(150): tr|A0A1M5WJF3|A0A1M5WJF3_FLAFR 6-pyruvoyltetrahydropter in/6-carboxytetrahydropterin synthase OS=Flavobacterium frigidimaris OX=262320 GN=SAMN05444481_1379 PE=4 SV=1
MSNIRITKQFSFETGHALYGYDGKCKNVHGHSYKLSVTVIGSPITDRSNVKFGMVIDFSDLKKIVKEEIVDQFDHATVFNETTPHIELANELKNRGHHVILVDYQPTSENMVVDFADRIVARLPNDISLFSLKLQETESSFAEWYASDNI

SEQ ID NO: 20474 - protein, 136 aa, Flavobacterium frigidimaris
  misc_feature (1)..(136): tr|A0A1M5P3Z8|A0A1M5P3Z8_FLAFR 6-carboxy-5,6,7,8-tetrah ydropterin synthase OS=Flavobacterium frigidimaris OX=2 62320 GN=SAMN05444481_109163 PE=3 SV=1
MKVTISRKAHFNAAHRLHRKDWTSEKNNAVFGKCNNPNFHGHNYGLTVSVTGKIDPETGFVVDVKVLADIIHEEVEIPFDHKNLNLDVPEFQDLNPTAENIAVVIWNKIRKRIQPDFDLEIVLNETDRNFVTYKGE

SEQ ID NO: 20475 - protein, 136 aa, Flavobacterium frigoris
  misc_feature (1)..(136): tr|H7FM42|H7FM42_FLAFP 6-carboxy-5,6,7,8-tetrahydropter in synthase OS=Flavobacterium frigoris (strain PS1) OX= 1086011 GN=HJ01_00240 PE=3 SV=1
MRVTISRKAHFNSAHRLYRKDWTLEKNDMVFGKCNNPNFHGHNYDLIVSVTGEIDQETGFVMDVKILADIIKEEVENQFDHKNLNLDVPEFENLNPTAENIVVVIWNKIRKRIESEFDLEVVLYETARNFVTYKGE

SEQ ID NO: 20476 - protein, 136 aa, Flavobacterium frigoris
  misc_feature (1)..(136): tr|A0A1H9QUZ7|A0A1H9QUZ7_FLAFI 6-carboxy-5,6,7,8-tetrah ydropterin synthase OS=Flavobacterium frigoris OX=22920 4 GN=SAMN05444355_1186 PE=3 SV=1
MKVTISRKAHFNAAHRLYRKDWTFEKNDAVFGKCNNPNYHGHNYELIVGVTGEIDPETGYVMDIKILSDIIKDEVENQFDHKNLNVDVPEFENLNPTAENIVVVIWNKIRKRIKAEFDLEVILYETPRNFVTYKGE

SEQ ID NO: 20477 - protein, 136 aa, Flavobacterium fryxellicola
  misc_feature (1)..(136): tr|A0A167UNK2|A0A167UNK2_9FLAO 6-carboxy-5,6,7,8-tetrah ydropterin synthase OS=Flavobacterium fryxellicola OX=2 49352 GN=FBFR_14655 PE=3 SV=1
MKVTISRKAHFNAAHRLHRKDWSFEQNDAIFGKCNNPNFHGHNYELIVSVTGEIDPETGYVMDVKFLSDIIKEDVENQFDHKNLNLDVPEFQDLNPTAENIVVVIWNKIRKKIKSEFELEVVLYETPRNFVTYKGE

SEQ ID NO: 20478 - protein, 154 aa, Flavobacterium fryxellicola
  misc_feature (1)..(154): tr|A0A168ABK6|A0A168ABK6_9FLAO 6-pyruvoyl tetrahydropte rin synthase OS=Flavobacterium fryxellicola OX=249352 G N=FBFR_00275 PE=4 SV=1
MSNIRITKQFSFETGHALYGYDGKCKNVHGHSYKLSVTVIGSPITDRSNVKYGMVIDFTDLKKIVKEEIVDQFDHATVFNGTTPHIELANELITRGHHVILVDYQPTSENMVIDFAQRISNRLPEGIALFSLKLQETESSFAEWFASDNLKSIL

SEQ ID NO: 20479 - protein, 150 aa, Flavobacterium gillisiae; identical to SEQ ID NO: 20459
  misc_feature (1)..(150): tr|A0A1H4E9L3|A0A1H4E9L3_9FLAO 6-pyruvoyltetrahydropter in/6-carboxytetrahydropterin synthase OS=Flavobacterium gillisiae OX=150146 GN=SAMN05443667_10968 PE=4 SV=1

SEQ ID NO: 20480 - protein, 136 aa, Flavobacterium gillisiae
  misc_feature (1)..(136): tr|A0A1H4EXM5|A0A1H4EXM5_9FLAO 6-carboxy-5,6,7,8-tetrah ydropterin synthase OS=Flavobacterium gillisiae OX=1501 46 GN=SAMN05443667_11156 PE=3 SV=1
MKVTISRKAHFNAAHRLYRKDWTFEKNDAVFGKCNNPNYHGHNYELIVGVTGEIDRETGYVMDIKILSDIIKEEVENQFDHKNLNVDVPEFENLNPTAENIVVVIWNKIRKRIKAEFDLEVVLYETPRNFVTYKGE

SEQ ID NO: 20481 - protein, 136 aa, Flavobacterium gilvum
  misc_feature (1)..(136): tr|A0A085EI13|A0A085EI13_9FLAO 6-carboxy-5,6,7,8-tetrah ydropterin synthase OS=Flavobacterium gilvum OX=1492737 GN=FEM08_23460 PE=3 SV=1
MRVTISRKAHFNAAHRLYRKDWTFEQNETVFGKCNNPNFHGHNYELIVSVTGEIDQETGYVMDVKFLTDIIKEQVEDQFDHKNLNLDVPEFQDLNPTAENIVVVIWNKIRKKVKSELDLEVVLYETPRNFVTYKGE

SEQ ID NO: 20482 - protein, 150 aa, Flavobacterium gilvum
  misc_feature (1)..(150): tr|A0A085EGA1|A0A085EGA1_9FLAO 6-pyruvoyl tetrahydropte rin synthase OS=Flavobacterium gilvum OX=1492737 GN=FEM 08_30160 PE=4 SV=1
MSNIRITKQFNFETGHALYGYDGKCKNVHGHSYKLSVTVIGKPITDRSNVKFGMVIDFSDLKKIVKEEIVDQFDHATVFNQTTPHIELAQELKERGHHVILVDYQPTSENMVVDFSQRIIRRLPQNIELFSLKLQETESSFAEWFASDNQ

SEQ ID NO: 20483 - protein, 154 aa, Flavobacterium glaciei
  misc_feature (1)..(154): tr|A0A562PYM7|A0A562PYM7_9FLAO 6-pyruvoyltetrahydropter in/6-carboxytetrahydropterin synthase OS=Flavobacterium glaciei OX=386300 GN=IQ02_00898 PE=4 SV=1
MSNIRITKQFSFETGHALYGYDGKCKNVHGHSYKLSVTVIGTPITDRSNVKFGMVIDFTDLKKIVKEEIVDQFDHATVFNGTTPHIELANELMSRGHHVILVDYQPTSENMVVDFSQRIISRLPQGIMLFSLKLQETDSSFAEWYASDNMNSIL

SEQ ID NO: 20484 - protein, 136 aa, Flavobacterium glaciei
  misc_feature (1)..(136): tr|A0A562Q5R4|A0A562Q5R4_9FLAO 6-carboxy-5,6,7,8-tetrah ydropterin synthase OS=Flavobacterium glaciei OX=386300 GN=IQ02_00211 PE=3 SV=1
MKVTISRKAHFNAAHRLYRKDWTFEQNDAIFGKCNNPNFHGHNYELIVSVTGEIDPETGYVMDVKFLSDIIKEDVENQFDHKNLNLDVPEFQDLNPTAENIVVVIWNKIRKRIKSEFELEVVLYETPRNFVTYRGE

SEQ ID NO: 20485 - protein, 136 aa, Flavobacterium glycines
  misc_feature (1)..(136): tr|A0A1B9DH35|A0A1B9DH35_9FLAO 6-carboxy-5,6,7,8-tetrah ydropterin synthase OS=Flavobacterium glycines OX=55199 0 GN=ygcM PE=3 SV=1
MRVTISRKAHFNAAHRLYRKDWTFEQNNAVFGKCNNPNFHGHNYELIVSVTGAIDPETGYVMDAKILADIIKEEVEDAFDHKNLNLDVAEFENLNPTAENIVVVIWNKIRKRVASEFELEVVLYETPRNFVSYKGL

SEQ ID NO: 20486 - protein, 150 aa, Flavobacterium glycines
  misc_feature (1)..(150): tr|A0A1B9DSE7|A0A1B9DSE7_9FLAO 6-carboxytetrahydropteri n synthase QueD OS=Flavobacterium glycines OX=551990 GN =FBGL_08295 PE=4 SV=1
MSKIRITKQFSFETGHALYGYDGKCKNVHGHSYKLSVTVIGSPITNRNDVKFGMVIDFSDLKKIVKEEIVDQFDHATVFNETTPHVELAEELKNRGHHVILVDYQPTSENMVVDFAQRIVRRLPNGIELFSLKLQETESSFAEWFASDNF

SEQ ID NO: 20487 - protein, 152 aa, Flavobacterium granuli
  misc_feature (1)..(152): tr|A0A1M5PEI3|A0A1M5PEI3_9FLAO 6-pyruvoyltetrahydropter in/6-carboxytetrahydropterin synthase OS=Flavobacterium granuli OX=280093 GN=SAMN05443373_10622 PE=4 SV=1
MAMSNIRITKKFSFETGHALYGYDGKCKNVHGHSYKLSVTVIGSPIENRNDVKFGMVIDFTDLKKIVKEEIVDQFDHATVFNETTPHVELAEELKNRGHHVILVDYQPTSENMVIDFSKRIMSRLPENIRLFSLKLQETESSFAEWYASDNL

SEQ ID NO: 20488 - protein, 136 aa, Flavobacterium granuli
  misc_feature (1)..(136): tr|A0A1M5QNX7|A0A1M5QNX7_9FLAO 6-carboxy-5,6,7,8-tetrah ydropterin synthase OS=Flavobacterium granuli OX=280093 GN=SAMN05443373_10870 PE=3 SV=1
MRVTISRKAHFNAAHRLYRKDWTFEQNDAVFGKCNNPNFHGHNYDLIVSVTGQVNQETGFVMDVKILSDIIREEVESQFDHKNLNLDVPEFKNLNPTAENIVVVIWNKIRKRIKSEFDLEVVLYETPRNFVTYKGE

SEQ ID NO: 20489 - protein, 136 aa, Flavobacterium haoranii
  misc_feature (1)..(136): tr|A0A1M6BSA2|A0A1M6BSA2_9FLAO 6-carboxy-5,6,7,8-tetrah ydropterin synthase OS=Flavobacterium haoranii OX=68312 4 GN=SAMN05444337_0186 PE=3 SV=1
MKVTVSRKAHFNAAHRLYRKDWSMEQNDAVFGKCNNPKFHGHNYEMIVSVTGEIDPETGFVMDVKILSDLIKEHIEEAFDHKNLNEDVEEFKNLNPTAENICVVIWNKLRKQIASDKDLEVVLYETPRNFVTYRGN

SEQ ID NO: 20490 - protein, 176 aa, Flavobacterium haoranii
  misc_feature (1)..(176): tr|A0A1M6DUP8|A0A1M6DUP8_9FLAO 6-pyruvoyltetrahydropter in/6-carboxytetrahydropterin synthase OS=Flavobacterium haoranii OX=683124 GN=SAMN05444337_0747 PE=4 SV=1
MSKCSSKNNTKITLFNFIPLQNNIFRMSTIRITKQFNFETGHALYGYDGKCKNVHGHSYKLSVTVVGKPITDTNNVKYGMVIDFSDLKKIVKEEIVDIFDHATVFNQNTPHIELANELKNRGHHVILVDYQPTSENMVIDFAAKIKARLPESINLFSLRLQETETSYAEWYQSDNE

SEQ ID NO: 20491 - protein, 149 aa, Flavobacterium hercynium
  misc_feature (1)..(149): tr|A0A226H134|A0A226H134_9FLAO 6-carboxy-5,6,7,8-tetrah ydropterin synthase OS=Flavobacterium hercynium OX=3870 94 GN=B0A66_16400 PE=3 SV=1
MSNIRITKQFSFETGHALYGYDGKCKNVHGHSYKLSVTVIGSPITDRSNVKFGMVIDFSDLKKIVKEEIVDQFDHATVFNETTPHIELANELKSRDHHVILVDYQPTSENMVVDFANRIMKRLPAGISLFSLKLQETESSFAEWYASDN

SEQ ID NO: 20492 - protein, 137 aa, Flavobacterium hercynium
  misc_feature (1)..(137): tr|A0A226HFL8|A0A226HFL8_9FLAO 6-carboxy-5,6,7,8-tetrah ydropterin synthase OS=Flavobacterium hercynium OX=3870 94 GN=B0A66_10860 PE=3 SV=1
MRVTISRKAHFNAAHRLHRKDWTFEKNDAVFGKCNNANFHGHNYGLTVSVTGKIDPETGFVLDVKVLADIILEEVEIPFDHKNLNLDVPEFEDLNPTAENIAVVIWNKIRKRIQPDFDLEIVLNETDRNFVTYKGEE

SEQ ID NO: 20493 - protein, 150 aa, Flavobacterium hibernum
  misc_feature (1)..(150): tr|A0A0D0EY40|A0A0D0EY40_9FLAO 6-pyruvoyl tetrahydropte rin synthase OS=Flavobacterium hibernum OX=37752 GN=IW1 8_14045 PE=4 SV=1
MSNIRITKQFSFETGHALYGYDGKCKNVHGHSYKLSVTVIGSPITDRSNVKFGMVIDFSDLKKIVKEEIVDQFDHATVFNETTPHIELANELKNRGHHVILVDYQPTSENMVVDFADRIIARLPADISLFSLKLQETESSFAEWYASDNL

SEQ ID NO: 20494 - protein, 137 aa, Flavobacterium hibernum
  misc_feature (1)..(137): tr|A0A0D0F829|A0A0D0F829_9FLAO 6-carboxy-5,6,7,8-tetrah ydropterin synthase OS=Flavobacterium hibernum OX=37752 GN=IW18_04355 PE=3 SV=1
MKVTISRKAHFNAAHRLHRKDWSFEKNDAVFGKCNNPNFHGHNYGLTVSVTGKIDPETGFVLDVKVLADIIREEVEIPFDHKNLNLDVPEFQDLNPTAENIAVVIWNKIRKRIQADFDLEIVLNETDRNFVTYKGEE

SEQ ID NO: 20495 - protein, 150 aa, Flavobacterium hydatis
  misc_feature (1)..(150): tr|A0A086AUC6|A0A086AUC6_FLAHY 6-pyruvoyl tetrahydropte rin synthase OS=Flavobacterium hydatis OX=991 GN=IW20_0 0585 PE=4 SV=1
MSNIRITKQFSFETGHALYGYDGKCKNVHGHSYKLSVTVIGSPITDRDNVKHGMVIDFSDLKKIVKEEIVDQFDHATVFNETTPHIELANELKNRGHHVILVKYQPTSENMVVDFSERIIKRLPTNISLFSLKLQETESSFAEWYASDNL

SEQ ID NO: 20496 - protein, 136 aa, Flavobacterium hydatis
  misc_feature (1)..(136): tr|A0A086ANF4|A0A086ANF4_FLAHY 6-carboxy-5,6,7,8-tetrah ydropterin synthase OS=Flavobacterium hydatis OX=991 GN =IW20_04765 PE=3 SV=1
MRVTISRKAHFNAAHRLYRKDWTLEKNDAVFGKCNNPNFHGHNYDLTVSVTGEVDPETGFVIDVKILADIIYEEVELPFDHKNLNLDVPEFQDLNPTAEHIAVVIWNKIRKKINPDFDLEIVLYETARNFVTYKGE

SEQ ID NO: 20497 - protein, 149 aa, Flavobacterium indicum
  misc_feature (1)..(149): tr|H8XP16|H8XP16_FLAIG 6-carboxy-5,6,7,8-tetrahydropter in synthase OS=Flavobacterium indicum (strain DSM 17447 / CIP 109464 / GPTSA100-9) OX=1094466 GN=KQS_01450 PE= 3 SV=1
MSKIRITKQFNFETGHALYGYDGKCKNVHGHSYKLSVTVIGEPITNTENVKFGMVIDFGDLKKIVKEEVVDIFDHATVFNKNTPHIELAKELQDRGHHVILVDYQPTSENMVIDFAAKISARLPHSIQLHSLKLQETETSFAEWYASDN

SEQ ID NO: 20498 - protein, 136 aa, Flavobacterium indicum
  misc_feature (1)..(136): tr|H8XVS1|H8XVS1_FLAIG 6-carboxy-5,6,7,8-tetrahydropter in synthase OS=Flavobacterium indicum (strain DSM 17447 / CIP 109464 / GPTSA100-9) OX=1094466 GN=ygcM PE=3 SV= 1
MRVTVSRKAHFNAAHRLYRKDWSMEQNDAVFGKCNNPNYHGHNYELIVSVTGEIDPETGFVMDVKILSDLIKEQIENKFDHKNLNLDVPEFAELNPTAENIVVVIWNKLRNHIAAKLDLEVVLYETPRNFVTYKGN

SEQ ID NO: 20499 - protein, 136 aa, Flavobacterium johnsoniae; identical to SEQ ID NO: 20458
  misc_feature (1)..(136): tr|A5FNA9|A5FNA9_FLAJ1 6-carboxy-5,6,7,8-tetrahydropter in synthase OS=Flavobacterium johnsoniae (strain ATCC 1 7061 / DSM 2064 / UW101) OX=376686 GN=Fjoh_0268 PE=3 SV =1

SEQ ID NO: 20500 - protein, 136 aa, Flavobacterium johnsoniae
  misc_feature (1)..(136): tr|A0A1M5KX98|A0A1M5KX98_FLAJO 6-carboxy-5,6,7,8-tetrah ydropterin synthase OS=Flavobacterium johnsoniae OX=986 GN=DFS20_3955 PE=3 SV=1
MRVTISRKAHFNAAHRLHRKDWSLEKNNAVFGKCNNPNFHGHNYGLTVSVTGKIDPETGFVLDVKVLADIILEEVEIPFDHKNLNLDVPEFQDLNPTAENIAVVIWNKIRKRIQPDFDLEIVLYETDRNFVTYKGE

SEQ ID NO: 20501 - protein, 150 aa, Flavobacterium kingsejongi
  misc_feature (1)..(150): tr|A0A2S1LK96|A0A2S1LK96_9FLAO 6-carboxytetrahydropteri n synthase QueD OS=Flavobacterium kingsejongi OX=167872 8 GN=FK004_02575 PE=4 SV=1
MSKIRITKQFSFETGHALYGYDGKCKNVHGHSYKLSVTVIGTPITQRDNVKFGMVIDFGDLKKIVKEEIVDVFDHATVFNETTPHIELANELKSRGHDVILVNYQPTSENMVIDFAKKIKNRLPDSISLFSLRLQETETSFAEWFQSDNL

SEQ ID NO: 20502 - protein, 136 aa, Flavobacterium kingsejongi
  misc_feature (1)..(136): tr|A0A2S1LP25|A0A2S1LP25_9FLAO 6-carboxy-5,6,7,8-tetrah ydropterin synthase OS=Flavobacterium kingsejongi OX=16 78728 GN=FK004_09255 PE=3 SV=1
MRVTVSRKAHFNAAHRLYRKDWSFEKNDAVFGKCNNPNFHGHNYELTVSVTGEIDAETGYVIDIKELREIIEQEVEKPFDHKNLNLDVPEFEDLNPTAENIVVVIWNKIRKRLPLTLELEVIVYETPRNFVSYRGA

SEQ ID NO: 20503 - protein, 150 aa, Flavobacterium lacus
  misc_feature (1)..(150): tr|A0A328WUE4|A0A328WUE4_9FLAO 6-pyruvoyltetrahydropter in/6-carboxytetrahydropterin synthase OS=Flavobacterium lacus OX=1353778 GN=B0I10_103274 PE=4 SV=1
MAKIRITKQFSFETGHALYGYDGKCKNVHGHSYKLSVTVIGTPIMDNTNVKFGMVIDFGDLKKIVKEEIVDLFDHATVFNQNTPHIELAHELKNRDHHVILVDYQPTSENMVIDFAEKIKNRLPDSIKLHSLKLQETETSFAEWFASDNV

SEQ ID NO: 20504 - protein, 136 aa, Flavobacterium lacus
  misc_feature (1)..(136): tr|A0A328WS04|A0A328WS04_9FLAO 6-carboxy-5,6,7,8-tetrah ydropterin synthase OS=Flavobacterium lacus OX=1353778 GN=B0I10_11637 PE=3 SV=1
MKVTVSRKAHFNAAHRLYRKDWSMEKNDLVFGKCNNPNYHGHNYELIVSVTGEIDQETGFVMDVKILSDLIKEHIENAFDHKNLNVDVPDFADLNPTAENIAVVIWNKLRNHIKTALDLEVVLYETPRNFVTYKGN

SEQ ID NO: 20505 - protein, 136 aa, Flavobacterium limicola
  misc_feature (1)..(136): tr|A0A495RSF8|A0A495RSF8_9FLAO 6-carboxy-5,6,7,8-tetrah ydropterin synthase OS=Flavobacterium limicola OX=18044 1 GN=BC952_2896 PE=3 SV=1
MKVTISRKAHFNAAHRLYRKDWSFEQNDAIFGKCNNPNFHGHNYELIVSVTGAIDPETGYVMDVKFLSDIIKEDVENQFDHKNLNLDVPEFQDLNPTAENIVVVIWNKIRKRIKPEFELEVVLYETPRNFVTYRGE

SEQ ID NO: 20506 - protein, 154 aa, Flavobacterium limicola
  misc_feature (1)..(154): tr|A0A495S655|A0A495S655_9FLAO 6-pyruvoyltetrahydropter in/6-carboxytetrahydropterin synthase OS=Flavobacterium limicola OX=180441 GN=BC952_0697 PE=4 SV=1
MSNIRITKQFSFETGHALYGYDGKCKNVHGHSYKLSVTVIGTPITDRSNVKFGMVIDFTDLKKIVKEEIVDQFDHATVFNGTTPHIELANELMSRGHHVILVDYQPTSENMVVDFSQRIINRLPQGITLFSLKLQETESSFAEWFASDNMKSIL

SEQ ID NO: 20507 - protein, 136 aa, Flavobacterium limnosediminis
  misc_feature (1)..(136): tr|V6SHQ1|V6SHQ1_9FLAO 6-carboxy-5,6,7,8-tetrahydropter in synthase OS=Flavobacterium limnosediminis JC2902 OX= 1341181 GN=FLJC2902T_29310 PE=3 SV=1
MRVTVSRKAHFNAAHRLYRKDWTDAQNEHVFGKCNNPNFHGHNYELIVSVTGKINPETGYVMDIKELADIIYEEVESRFDHKNLNLDVPEFQELNPTAENIVVVIWNKIRKRIAPGNDLEVVLYETPRNFVTYSGE

SEQ ID NO: 20508 - protein, 149 aa, Flavobacterium limnosediminis
  misc_feature (1)..(149): tr|V6SS80|V6SS80_9FLAO 6-carboxy-5,6,7,8-tetrahydropter in synthase OS=Flavobacterium limnosediminis JC2902 OX= 1341181 GN=FLJC2902T_10770 PE=3 SV=1
MSNIRITKQFSFETGHALYGYDGKCKNVHGHSYKLSVTVIGKPITDTSNVKFGMVIDFGDLKKIVKEEIVDVFDHATVFNQNTPHIELANELKNRGHHVILVDYQPTSENMVVDFAAKIKSRLPDNIQLHSLKLQETESSFAEWYQSDN

SEQ ID NO: 20509 - protein, 149 aa, Flavobacterium lindanitolerans
  misc_feature (1)..(149): tr|A0A497V3J5|A0A497V3J5_9FLAO 6-carboxy-5,6,7,8-tetrah ydropterin synthase OS=Flavobacterium lindanitolerans O X=428988 GN=CLV50_0663 PE=3 SV=1
MSKIRITKQFSFETGHALYGYDGKCKNVHGHSYKLSVTVIGTPISDTANVKFGMVIDFSDLKKIVREEVVDVFDHATVFNKNTPHVELAEQLRNRGHHVILVGYQPTSENMVIDFAEKIKSRLPENIALHSLRLQETETSYAEWFQSDN

SEQ ID NO: 20510 - protein, 139 aa, Flavobacterium lindanitolerans
  misc_feature (1)..(139): tr|A0A497UGS8|A0A497UGS8_9FLAO 6-carboxy-5,6,7,8-tetrah ydropterin synthase OS=Flavobacterium lindanitolerans O X=428988 GN=CLV50_3108 PE=3 SV=1
MRVTVSRKAHFNAAHRLYRKDWSDEKNDLVFGKCNNPNFHGHNYELIVSVTGKINPDTGYVIDIKDLADIILEEVERPFDHKNLNLDVPEFSDLNPTAENIAVVIWNKIRKRIEADKDLEVILYETPRNFVSYKGESAN

SEQ ID NO: 20511 - protein, 149 aa, Flavobacterium macacae
  misc_feature (1)..(149): tr|A0A3P3WDJ3|A0A3P3WDJ3_9FLAO 6-carboxytetrahydropteri n synthase OS=Flavobacterium macacae OX=2488993 GN=EG84 9_07370 PE=4 SV=1
MSKIRITKQFSFETGHALYGYDGKCKNVHGHSYKLSVTVIGSPITDVNNVKFGMVIDFTDLKKIVKEEIVDNFDHATVFNKNTPHIELAKELQNRDHHVILVDYQPTSENMVIDFAAKIKSRLPENINLHSLRLQETDTSFAEWFQSDN

SEQ ID NO: 20512 - protein, 136 aa, Flavobacterium macacae
  misc_feature (1)..(136): tr|A0A3P3WEU9|A0A3P3WEU9_9FLAO 6-carboxytetrahydropteri n synthase OS=Flavobacterium macacae OX=2488993 GN=EG84 9_06335 PE=4 SV=1
MKVTVSRKAHFNAAHRLHRKDWTDEKNNAVFGKCNNANFHGHNYELTVSVSGAIDPETGYVIDIKDLADLILEEVEKPFDHKNLNLDVPEFFDLNPTAENIAVVIWNKIRKKIDMALDLEVILYETPRNFVSYRGA

SEQ ID NO: 20513 - protein, 136 aa, Flavobacterium magnum
  misc_feature (1)..(136): tr|A0A2S0RGH3|A0A2S0RGH3_9FLAO 6-carboxy-5,6,7,8-tetrah ydropterin synthase OS=Flavobacterium magnum OX=2162713 GN=HYN48_06825 PE=3 SV=1
MKATISRKAHFNAAHRLFRSDWTDERNNAVFGKCNNPNFHGHNYELIVSVTGDIDPETGYVMDIKDLSMMISEEVEDAFDHKNLNLDVPEFKNLNPTAENISVVIWNKLRNRIKADSQLEVVLYETPRNFVTYRGE

SEQ ID NO: 20514 - protein, 149 aa, Flavobacterium magnum
  misc_feature (1)..(149): tr|A0A2S0RJJ9|A0A2S0RJJ9_9FLAO 6-carboxytetrahydropteri n synthase QueD OS=Flavobacterium magnum OX=2162713 GN= HYN48_03955 PE=4 SV=1
MSKIRITKQFSFETGHALYGYDGKCKNVHGHSYKLSVTVIGTPISDAGNVKFGMVIDFTDLKHIVKEEIVDHFDHATVFNKNTPHVELASELKTRGHHVILVDYQPTSENMVIDFAQKIQKRLPAGISLFSLKLQETETSFAEWYASDN

SEQ ID NO: 20515 - protein, 136 aa, Flavobacterium marinum
  misc_feature (1)..(136): tr|A0A1H6IV98|A0A1H6IV98_9FLAO 6-carboxy-5,6,7,8-tetrah ydropterin synthase OS=Flavobacterium marinum OX=115901 6 GN=SAMN02927937_00026 PE=3 SV=1
MRVTVCRKAHFNAAHRLYRKDWTDEKNQEIFGKCNNPNFHGHNYELIVEVTGTVNPETGYVIDIKDLSDMIYEEVELPFDHKNLNLDVPEFQELNPTAEHIAYVIWHKIRKRLPLKLDLEIILYETPRNFVKYCGL

SEQ ID NO: 20516 - protein, 150 aa, Flavobacterium marinum
  misc_feature (1)..(150): tr|A0A1H6JSE0|A0A1H6JSE0_9FLAO 6-pyruvoyltetrahydropter in/6-carboxytetrahydropterin synthase OS=Flavobacterium marinum OX=1159016 GN=SAMN02927937_00540 PE=4 SV=1
MSFIRITKQFTFETGHALYGYDGKCRNVHGHSYKLSVTVIGEPISDKNHVKYGMVIDFTDLKVIVKEEVVDQFDHATVFNQNTPHVELAKELEQRGHHVILVDYQPTSENMVIDFAQRIKNRLPQNIKLLSLRLQETESSYAEWFATDNE

SEQ ID NO: 20517 - protein, 150 aa, Flavobacterium micromati
  misc_feature (1)..(150): tr|A0A1M5FSZ2|A0A1M5FSZ2_9FLAO 6-pyruvoyltetrahydropter in/6-carboxytetrahydropterin synthase OS=Flavobacterium micromati OX=229205 GN=SAMN05444372_101266 PE=4 SV=1
MSNIRITKQFSFETGHALYGYDGKCKNVHGHSYKLSVTVIGTPITDRSNVKFGMVIDFTDLKHIVKEEVVDQFDHATVFNGTTPHVELAHELINRGHHVILVDYQPTSENMVVDFSTRISRRLPEGITLFSLKLQETESSFAEWFASDNS

SEQ ID NO: 20518 - protein, 136 aa, Flavobacterium micromati
  misc_feature (1)..(136): tr|A0A1M5H3D0|A0A1M5H3D0_9FLAO 6-carboxy-5,6,7,8-tetrah ydropterin synthase OS=Flavobacterium micromati OX=2292 05 GN=SAMN05444372_102271 PE=3 SV=1
MKVTISRKAHFNAAHRLYRKDWTFEKNDAIFGKCNNPNFHGHNYDLTVSVTGEIDPETGYVMDVKFLSDIIKEDVENQFDHKNLNLDVPDFKDLNPTAENIVVVIWNKIRKRIKPEFELEVVLYETPRNFVTYKGE

SEQ ID NO: 20519 - protein, 136 aa, Flavobacterium nitrogenifigens
  misc_feature (1)..(136): tr|A0A521EFX3|A0A521EFX3_9FLAO 6-carboxy-5,6,7,8-tetrah ydropterin synthase OS=Flavobacterium nitrogenifigens O X=1617283 GN=SAMN06265220_104195 PE=3 SV=1
MRVTISRKAHFNAAHRLYRKDWSFEKNDAVFGKCNNPNFHGHNYGLTVSVTGKIDPETGFVLDVKVLADIIREEVEIPFDHKNLNLDVPEFVDLNPTAENIAVVIWNKIRQRIHADFDLEVVLNETERNFVTYKGE

SEQ ID NO: 20520 - protein, 150 aa, Flavobacterium nitrogenifigens
  misc_feature (1)..(150): tr|A0A521D464|A0A521D464_9FLAO 6-pyruvoyltetrahydropter in/6-carboxytetrahydropterin synthase OS=Flavobacterium nitrogenifigens OX=1617283 GN=SAMN06265220_1021026 PE= 4 SV=1
MSNIRITKQFSFETGHALYGYDGKCKNVHGHSYKLSVTVIGSPITDRSNVKFGMVIDFSDLKKIVKEEIVDQFDHATVFNQTTPHIELANELKNRGHHVILVDYQPTSENMVVDFAERIKSRLPEGIILFSLKLQETESSFAEWYASDNI

SEQ ID NO: 20521 - protein, 149 aa, Flavobacterium noncentrifugens
  misc_feature (1)..(149): tr|A0A1G8S8U3|A0A1G8S8U3_9FLAO 6-carboxy-5,6,7,8-tetrah ydropterin synthase OS=Flavobacterium noncentrifugens O X=1128970 GN=SAMN04487935_0456 PE=3 SV=1
MSNIRITKQFSFETGHALYGYDGKCKNVHGHSYKLSVTVIGTPITDRNNVKFGMVIDFSDLKKIVKEEIVDLFDHATVFNETTPHIELANELKNRGHHVILVDYQPTSENMVTDFAEKIKNRLPDSIKLHSLKLQETETSFAEWYACDN

SEQ ID NO: 20522 - protein, 136 aa, Flavobacterium noncentrifugens
  misc_feature (1)..(136): tr|A0A1G8VC48|A0A1G8VC48_9FLAO 6-carboxy-5,6,7,8-tetrah ydropterin synthase OS=Flavobacterium noncentrifugens O X=1128970 GN=SAMN04487935_1278 PE=3 SV=1
MKVTVSRKAHFNAAHRLHRKDWSFEKNDAVFGKCNNANFHGHNYELTVSVTGEIDPETGYVMDIKELADLILEEVEKPFDHKNLNLDVPEFADLNPTAENIVVVIWNKIRSKINPDFDLEIVLYETPRNFVTYSGK

SEQ ID NO: 20523 - protein, 154 aa, Flavobacterium omnivorum
  misc_feature (1)..(154): tr|A0A1G7VSJ0|A0A1G7VSJ0_9FLAO 6-pyruvoyltetrahydropter in/6-carboxytetrahydropterin synthase OS=Flavobacterium omnivorum OX=178355 GN=SAMN04488062_101146 PE=4 SV=1
MSNIRITKQFSFETGHALYGYDGKCKNVHGHSYKLSVTVIGSPITDRSNVKYGMVIDFTDLKKIVKEEIVDQFDHATVFNATTPHIELANELMTRGHHVILVDYQPTSENMVVDFSQRIINRLPQGITLFSLKLQETESSFAEWFACDNVKSIL

SEQ ID NO: 20524 - protein, 136 aa, Flavobacterium omnivorum
  misc_feature (1)..(136): tr|A0A1G8BU00|A0A1G8BU00_9FLAO 6-carboxy-5,6,7,8-tetrah ydropterin synthase OS=Flavobacterium omnivorum OX=1783 55 GN=SAMN04488062_106153 PE=3 SV=1
MKVTISRKAHFNAAHRLHRKDWSFEQNDAIFGKCNNPNFHGHNYELIVSVTGEIDPETGYVMDVKFLSDIIKEDVENQFDHKNLNLDVAEFQDLNPTAENIVVVIWNKIRKRIKSEFELEVVLYETPRNFVTYKGE

SEQ ID NO: 20525 - protein, 150 aa, Flavobacterium oncorhynchi
  misc_feature (1)..(150): tr|A0A226I1U0|A0A226I1U0_9FLAO 6-carboxytetrahydropteri n synthase QueD OS=Flavobacterium oncorhynchi OX=728056 GN=B0A75_11060 PE=4 SV=1
MSNIRITKQFSFETGHALYGYDGKCKNVHGHSYKLSVTVIGSPITDRSNVKFGMVIDFSDLKKIVKEEIVDQFDHATVFNQTTPHIELANELKNRGHHVILVDYQPTSENMVVDFADRIIARLPKGISLFSLKLQETESSFAEWYASDNI

SEQ ID NO: 20526 - protein, 136 aa, Flavobacterium oncorhynchi
  misc_feature (1)..(136): tr|A0A226HT09|A0A226HT09_9FLAO 6-carboxy-5,6,7,8-tetrah ydropterin synthase OS=Flavobacterium oncorhynchi OX=72 8056 GN=B0A75_15750 PE=3 SV=1
MRVTISRKAHFNAAHRLHRKDWTLEKNTAVFGKCNNPNFHGHNYGLTVSVTGKIDPETGFVLDVKVLADIILEEVEVPFDHKNLNLDVPEFRDLNPTAENIAVVIWNKIRKRIQPDFDLEIVLYETDRNFVTYKGE

SEQ ID NO: 20527 - protein, 136 aa, Flavobacterium pallidum
  misc_feature (1)..(136): tr|A0A2S1SH53|A0A2S1SH53_9FLAO 6-carboxy-5,6,7,8-tetrah ydropterin synthase OS=Flavobacterium pallidum OX=21720 98 GN=HYN49_07185 PE=3 SV=1
MKATISRKAHFNAAHRLYRSDWSDAKNNAVFGKCNNPNFHGHNYELIVSVTGNIDPETGYVMDIKELSTMISEEVEEAFDHKNLNLDVPDFSNLNPTAENISVVIWNKLRRRITREFSLEIVLYETPRNFVTYRGE

SEQ ID NO: 20528 - protein, 151 aa, Flavobacterium pallidum
  misc_feature (1)..(151): tr|A0A2S1SFH1|A0A2S1SFH1_9FLAO 6-carboxytetrahydropteri n synthase QueD OS=Flavobacterium pallidum OX=2172098 G N=HYN49_04045 PE=4 SV=1
MAKIRITKQFSFETGHALYGYDGKCKNVHGHSYKLSVTVIGTPIADSTNVKYGMVIDFTDLKYIVKEEVVDQFDHATVFNKNTPHLELANELKERGHHVILVDYQPTSENMVIDFAEKIQKRLPAGISLFSLRLQETDTSFAEWFASDNVI

SEQ ID NO: 20529 - protein, 150 aa, Flavobacterium pectinovorum
  misc_feature (1)..(150): tr|A0A1M7NZZ5|A0A1M7NZZ5_9FLAO 6-pyruvoyltetrahydropter in/6-carboxytetrahydropterin synthase OS=Flavobacterium pectinovorum OX=29533 GN=SAMN05444387_4074 PE=4 SV=1
MSNIRITKQFNFETGHALYGYDGKCKNVHGHSYKLSVTVIGSPITDRSNVKFGMVIDFSDLKKIVKEEIVDQFDHATVFNETTPHIELANELKNRGHHVILVDYQPTSENMVVDFSKRIISRLPAGISLHSLKLQETESSFAEWYASDNQ

SEQ ID NO: 20530 - protein, 136 aa, Flavobacterium pectinovorum
  misc_feature (1)..(136): tr|A0A502ERN6|A0A502ERN6_9FLAO 6-carboxy-5,6,7,8-tetrah ydropterin synthase OS=Flavobacterium pectinovorum OX=2 9533 GN=EAH81_12735 PE=3 SV=1
MKVTISRKAHFNAAHRLHRKDWTFEKNNAVFGKCNNPNFHGHNYGLTVSVTGKIDPETGFVLDVKVLADIIHEEVEIPFDHKNLNLDVPEFQDLNPTAENIAVVIWNKIRKRIQSDFDLEIVLNETDRNFVTYKGE

SEQ ID NO: 20531 - protein, 150 aa, Flavobacterium phragmitis
  misc_feature (1)..(150): tr|A0A1I1RY10|A0A1I1RY10_9FLAO 6-pyruvoyltetrahydropter in/6-carboxytetrahydropterin synthase OS=Flavobacterium phragmitis OX=739143 GN=SAMN05216297_107220 PE=4 SV=1
MSNIRITKQFSFETGHALYGYDGKCKNVHGHSYKLSVTVIGSPITDRSNVKFGMVIDFSDLKKIVKEEIVDQFDHATVFNQTTPHIELANELKNRGHHVILVDYQPTSENMVVDFAERIKNRLPAGITLFSLKLQETESSFAEWYASDNL

SEQ ID NO: 20532 - protein, 136 aa, Flavobacterium phragmitis
  misc_feature (1)..(136): tr|A0A1I1US66|A0A1I1US66_9FLAO 6-carboxy-5,6,7,8-tetrah ydropterin synthase OS=Flavobacterium phragmitis OX=739 143 GN=SAMN05216297_11175 PE=3 SV=1
MRVTISRKAHFNAAHRLHRKDWSFEKNDAVFGKCNNPNFHGHNYGLTVSVTGKIDPETGFVLDVKVLADIIREEVEIPFDHKNLNLDVPEFLDLNPTAENIAVVIWNKIRKRIQPDFDLEVVLNETERNFVTYKGE

SEQ ID NO: 20533 - protein, 136 aa, Flavobacterium psychrolimnae; identical to SEQ ID NO: 20505
  misc_feature (1)..(136): tr|A0A366AZH9|A0A366AZH9_9FLAO 6-carboxy-5,6,7,8-tetrah ydropterin synthase OS=Flavobacterium psychrolimnae OX= 249351 GN=DR980_09120 PE=3 SV=1

SEQ ID NO: 20534 - protein, 154 aa, Flavobacterium psychrolimnae
  misc_feature (1)..(154): tr|A0A366B2C9|A0A366B2C9_9FLAO 6-carboxytetrahydropteri n synthase QueD OS=Flavobacterium psychrolimnae OX=2493 51 GN=DR980_04925 PE=4 SV=1
MSNIRITKQFSFETGHALYGYDGKCKNVHGHSYKLSVTVIGTPITDRSNVKFGMVIDFTDLKKIVKEEIVDQFDHATVFNGTTPHIELANELMTRGHHVILVDYQPTSENMVVDFSQRIINRLPQGITLFSLKLQETESSFAEWFASDNMKSIL

SEQ ID NO: 20535 - protein, 150 aa, Flavobacterium psychrophilum
  misc_feature (1)..(150): tr|A0A076P6E5|A0A076P6E5_FLAPS 6-carboxy-5,6,7,8-tetrah ydropterin synthase OS=Flavobacterium psychrophilum OX= 96345 GN=queD PE=4 SV=1
MSKIRITKQFSFETGHALYGYDGKCKNVHGHSYKLSVTVIGTPISDRNNVKFGMVIDFSDLKKIVKEDIVDIFDHATVFNQTTPHIELAQELKSRGHEVILVDYQPTSENMVIDFAEKIKRRLPSHVSLHSLRLQETETSFAEWFADDNA

SEQ ID NO: 20536 - protein, 150 aa, Flavobacterium psychrophilum; identical to SEQ ID NO: 20535
  misc_feature (1)..(150): tr|A6H1T0|A6H1T0_FLAPJ Probable 6-pyruvoyltetrahydrobio pterin synthase OS=Flavobacterium psychrophilum (strain JIP02/86 / ATCC 49511) OX=402612 GN=FP2248 PE=4 SV=1

SEQ ID NO: 20537 - protein, 136 aa, Flavobacterium reichenbachii
  misc_feature (1)..(136): tr|A0A085ZL56|A0A085ZL56_9FLAO 6-carboxy-5,6,7,8-tetrah ydropterin synthase OS=Flavobacterium reichenbachii OX= 362418 GN=IW19_06320 PE=3 SV=1
MKVTISRKAHFNAAHRLHRKDWTPEKNNAVFGKCNNPNFHGHNYGLTVSVTGKIDPETGFVLDVKVLADIILEEVEIPFDHKNLNLDVPEFHDLNPTAENIAVVIWNKIRKRIQPDFDLEIVLYETDRNFVTYKGE

SEQ ID NO: 20538 - protein, 149 aa, Flavobacterium reichenbachii
  misc_feature (1)..(149): tr|A0A085ZKC2|A0A085ZKC2_9FLAO 6-carboxy-5,6,7,8-tetrah ydropterin synthase OS=Flavobacterium reichenbachii OX= 362418 GN=IW19_04800 PE=3 SV=1
MSNIRITKQFNFETGHALYGYDGKCKNVHGHSYKLSVTVIGSPITDRSNVKFGMVIDFSDLKKIVKEEIVDQFDHATVFNQTTPHIELANELKNRGHHVILVDYQPTSENMVVDFAERIIGRLPAEISLFSLKLQETESSFAEWYASDN

SEQ ID NO: 20539 - protein, 136 aa, Flavobacterium resistens
  misc_feature (1)..(136): tr|A0A521EQ88|A0A521EQ88_9FLAO 6-carboxy-5,6,7,8-tetrah ydropterin synthase OS=Flavobacterium resistens OX=4436 12 GN=SAMN06265349_105236 PE=3 SV=1
MRVTISRKAHFNAAHRLYRKDWTSEKNNAVFGKCNNPNFHGHNYGLTVSVTGKIDPETGFVLDVKVLADIILEEVEIPFDHKNLNLDVPEFQDLNPTAENIAVVIWNKIRKRIQPDFDLEIVLNETDRNFVTYKGE

SEQ ID NO: 20540 - protein, 150 aa, Flavobacterium resistens
  misc_feature (1)..(150): tr|A0A521EB59|A0A521EB59_9FLAO 6-pyruvoyltetrahydropter in/6-carboxytetrahydropterin synthase OS=Flavobacterium resistens OX=443612 GN=SAMN06265349_104314 PE=4 SV=1
MSNIRITKQFSFETGHALYGYDGKCKNVHGHSYKLSVTVIGSPITDRSNVKFGMVIDFSDLKKIVKEEIVDQFDHATVFNQTTPHIELANELKNRGHHVILVDYQPTSENMVVDFAERIVARLPKGISLFSLKLQETESSFAEWYASDNQ

SEQ ID NO: 20541 - protein, 150 aa, Flavobacterium rivuli
  misc_feature (1)..(150): tr|A0A0A2M4N4|A0A0A2M4N4_9FLAO 6-pyruvoyl tetrahydropte rin synthase OS=Flavobacterium rivuli WB 3.3-2 = DSM 21 788 OX=1121895 GN=Q765_05970 PE=4 SV=1
MSNIRITKQFTFETGHALYGYDGKCKNVHGHSYKLSVTVIGKPITDVSNVKYGMVIDFGDLKKIVKEEIVDIFDHATVFNKNTPHVELAKELSDRGHDTILVDYQPTSENMVIDFARKIKAQLPENIKLHSLRLQETDTSFAEWFQSDNE

SEQ ID NO: 20542 - protein, 136 aa, Flavobacterium rivuli
  misc_feature (1)..(136): tr|A0A0A2LZ27|A0A0A2LZ27_9FLAO 6-carboxy-5,6,7,8-tetrah ydropterin synthase OS=Flavobacterium rivuli WB 3.3-2 = DSM 21788 OX=1121895 GN=Q765_20750 PE=3 SV=1
MKVTVSRSAHFNAAHRLYRKDWTEEQNNAVFGKCNNPNYHGHNYELIVGITGEVDPETGYVIDIKILKDIIADEVETPFDHKNLNLDVPEFADLNPTAENIVVVIWNRMRSRINPAHDIEVTLYETPRNFVTYKGN

SEQ ID NO: 20543 - protein, 149 aa, Flavobacterium saccharophilum
  misc_feature (1)..(149): tr|A0A1M6Z4M4|A0A1M6Z4M4_9FLAO 6-pyruvoyltetrahydropter in/6-carboxytetrahydropterin synthase OS=Flavobacterium saccharophilum OX=29534 GN=SAMN05444366_0119 PE=4 SV=1
MSNIRITKQFNFETGHALYGYDGKCKNVHGHSYKLSVTVIGSPITDRSNVKYGMVIDFSDLKKIVKEEIVDQFDHATVFNETTPHIELANELKNRGHHVILVDYQPTSENMVVDFAERIIARLPAGITLFSLKLQETESSFAEWYASDN

SEQ ID NO: 20544 - protein, 136 aa, Flavobacterium saccharophilum
  misc_feature (1)..(136): tr|A0A1M7K4G1|A0A1M7K4G1_9FLAO 6-carboxy-5,6,7,8-tetrah ydropterin synthase OS=Flavobacterium saccharophilum OX =29534 GN=SAMN05444366_3640 PE=3 SV=1
MKVTISRKAHFNAAHRLHRKDWTFEKNNAVFGKCNNPNFHGHNYGLTVSVTGKIDPETGFVLDVKVLADIIHEEVEIPFDHKNLNLDVPEFQDLNPTAENIAVVIWNKIRKKIHADFDLEVVLNETDRNFVTYKGE

SEQ ID NO: 20545 - protein, 149 aa, Flavobacterium saliperosum
  misc_feature (1)..(149): tr|A0A1G4VA45|A0A1G4VA45_9FLAO 6-carboxy-5,6,7,8-tetrah ydropterin synthase OS=Flavobacterium saliperosum OX=32 9186 GN=SAMN02927925_00693 PE=3 SV=1
MSNIRITKQFTFETGHALYGYDGKCKNVHGHSYKLSVTVIGKPITDTSNVKFGMVIDFGDLKKIVKEEIVDVFDHATVFNQNTPHIELANELKNRGHHVILVNYQPTSENMVIDFAEKIKNRLPHNIQLHSLKLQETESSFAEWYQSDN

SEQ ID NO: 20546 - protein, 136 aa, Flavobacterium saliperosum
  misc_feature (1)..(136): tr|A0A1G4VPT6|A0A1G4VPT6_9FLAO 6-carboxy-5,6,7,8-tetrah ydropterin synthase OS=Flavobacterium saliperosum OX=32 9186 GN=SAMN02927925_01499 PE=3 SV=1
MRVTVSRKAHFNAAHRLYRKDWSVEQNETVFGKCNNPNFHGHNYELIVSVTGKINPETGYVMDIKDLADIIYEEVETQFDHKNLNLDVPEFQDLNPTAENIVVVIWNKIRKRIVAGNDLEVVLYETPRNFVTYKGE

SEQ ID NO: 20547 - protein, 149 aa, Flavobacterium sediminis
  misc_feature (1)..(149): tr|A0A2U8QTC6|A0A2U8QTC6_9FLAO 6-carboxy-5,6,7,8-tetrah ydropterin synthase OS=Flavobacterium sediminis OX=2201 181 GN=DI487_05755 PE=3 SV=1
MSKIRITKQFTFETGHALYGYDGKCKNVHGHSYKLSVTVIGKPIQDTSNVKYGMVIDFGDLKKIVKEDIVDIFDHATVFNQNTPHIELANELKKRGHHVILVDYQPTSENMVIDFAEKIKRRLPEDIKLFSLRLQETETSFAEWFASDN

SEQ ID NO: 20548 - protein, 136 aa, Flavobacterium sediminis
  misc_feature (1)..(136): tr|A0A2U8QT15|A0A2U8QT15_9FLAO 6-pyruvoyl tetrahydrobio pterin synthase OS=Flavobacterium sediminis OX=2201181 GN=DI487_03285 PE=4 SV=1
MRATVSRKAHFNAAHRLYRKDWSMEKNESVFGKCNNPNFHGHNYELVVSVTGQIDVETGFVMDIKILADLIKEHIEEAFDHKNLNMDVEEFKDLNPTAENIAVVIWNKLRSLISTDKELEVTLYETPRNFVTYKGE

SEQ ID NO: 20549 - protein, 136 aa, Flavobacterium segetis
  misc_feature (1)..(136): tr|A0A1M5GRC3|A0A1M5GRC3_9FLAO 6-carboxy-5,6,7,8-tetrah ydropterin synthase OS=Flavobacterium segetis OX=271157 GN=SAMN05444396_104108 PE=3 SV=1
MKVTISRKAHFNAAHRLYRKDWTFEQNDAIFGKCNNPNFHGHNYDLTVSVTGEIDPETGYVMDVKFLSDIIKEDVENQFDHKNLNLDVPDFKDLNPTAENIVVVIWNKIRKRIKPEFDLEVVLYETPRNFVTYKGE

SEQ ID NO: 20550 - protein, 150 aa, Flavobacterium segetis
  misc_feature (1)..(150): tr|A0A1M5FWK9|A0A1M5FWK9_9FLAO 6-pyruvoyltetrahydropter in/6-carboxytetrahydropterin synthase OS=Flavobacterium segetis OX=271157 GN=SAMN05444396_10399 PE=4 SV=1
MSNIRITKQFSFETGHALYGYDGKCKNVHGHSYKLSVTVIGTPITDRSNVKFGMVIDFTDLKNIVKEEVVDQFDHATVFNGTTPHIELANELINRGHHVILVDYQPTSENMVVDFSTRISRRLPEGITLFSLKLQETESSFAEWFASDNS

SEQ ID NO: 20551 - protein, 136 aa, Flavobacterium seoulense
  misc_feature (1)..(136): tr|A0A066WTW1|A0A066WTW1_9FLAO 6-carboxy-5,6,7,8-tetrah ydropterin synthase OS=Flavobacterium seoulense OX=1492 738 GN=FEM21_09170 PE=3 SV=1
MRVTISRKAHFNAAHRLYRKDWTFEQNDKVFGKCNNPNFHGHNYELIVSVTGAIDPETGYVMDAKILADIIKEEVEDAFDHKNLNLDVPEFENLNPTAENIVVVIWNKIRKRIDAQFDLEVVLYETPRNFVTYKGE

SEQ ID NO: 20552 - protein, 150 aa, Flavobacterium seoulense
  misc_feature (1)..(150): tr|A0A066WVY2|A0A066WVY2_9FLAO 6-pyruvoyl tetrahydropte rin synthase OS=Flavobacterium seoulense OX=1492738 GN= FEM21_17100 PE=4 SV=1
MSNIRITKQFSFETGHALYGYDGKCKNVHGHSYKLSVTVIGKPITNRNDVKFGMVIDFSDLKKIVKEEIVDQFDHATVFNETTPHVELAQELKNRGHHVILVNYQPTSENMVVDFAERIISRLPAGITLFSLKLQETESSFAEWFASDNL

SEQ ID NO: 20553 - protein, 154 aa, Flavobacterium sinopsychrotolerans
  misc_feature (1)..(154): tr|A0A1H8J2C6|A0A1H8J2C6_9FLAO 6-pyruvoyltetrahydropter in/6-carboxytetrahydropterin synthase OS=Flavobacterium sinopsychrotolerans OX=604089 GN=SAMN04487942_0832 PE= 4 SV=1
MSNIRITKQFSFETGHALYGYDGKCKNVHGHSYKLSVTVIGTPITDRSNVKFGMVIDFTDLKKIVKEEIVDQFDHATVFNGTTPHIELANELMTRGHHVILVDYQPTSENMVVDFSQRIISRLPEGITLFSLKLQETESSFAEWFASDNMKSIL

SEQ ID NO: 20554 - protein, 136 aa, Flavobacterium sinopsychrotolerans
  misc_feature (1)..(136): tr|A0A1H8NYB4|A0A1H8NYB4_9FLAO 6-carboxy-5,6,7,8-tetrah ydropterin synthase OS=Flavobacterium sinopsychrotolera ns OX=604089 GN=SAMN04487942_2519 PE=3 SV=1
MKVTISRKAHFNAAHRLYRKDWTFEQNDAIFGKCNNPNFHGHNYELTVSVTGQIDPETGYVMDVKFLSDIIKEDVEDQFDHKNLNLDVPEFQDLNPTAENIVVVIWNKIRKRIKPEFELEVVLYETPRNFVTYKGE

SEQ ID NO: 20555 - protein, 136 aa, Flavobacterium sp.
  misc_feature (1)..(136): tr|A0A2N0HEY6|A0A2N0HEY6_9FLAO 6-carboxy-5,6,7,8-tetrah ydropterin synthase OS=Flavobacterium sp. 5 OX=2035199 GN=CLU82_2704 PE=3 SV=1
MRVTISRKAHFNAAHRLYRKDWSFEQNDAVFGKCNNPNFHGHNYELIVSVTGEIDKETGYVLDVKFLTDIIKEEVEDKFDHKNLNLDVPEFQDLNPTAENIVVVIWNKIRRKVKPELDLEVVLYETPRNFVTYKGE

SEQ ID NO: 20556 - protein, 151 aa, Flavobacterium sp.
  misc_feature (1)..(151): tr|A0A0J1BRD3|A0A0J1BRD3_9FLAO 6-pyruvoyl tetrahydropte rin synthase OS=Flavobacterium sp. ABG OX=1423322 GN=AB 674_19345 PE=4 SV=1
MSNIRITKQFSFETGHALYGYDGKCKNVHGHSYKLSVTVIGSPITDRSNVKYGMVIDFSDLKKIVKEEIVDQFDHATVFNETTPHVELANELKNRGHHVILVDYQPTSENMVVDFAERIIARLPAEISLFSLKLQETESSFAEWYASDNLK

SEQ ID NO: 20557 - protein, 137 aa, Flavobacterium spartansii
  misc_feature (1)..(137): tr|A0A1S1J508|A0A1S1J508_9FLAO 6-carboxy-5,6,7,8-tetrah ydropterin synthase OS=Flavobacterium spartansii OX=127 8819 GN=BHE19_12730 PE=3 SV=1
MKVTISRKAHFNAAHRLYRKDWTFEKNDAVFGKCNNPNFHGHNYGLTVSVTGKIDPETGFVLDVKVLADIIREEVEIPFDHKNLNLDVPEFQDLNPTAEHIAVVIWNKIKKRIQPDFDLEIVLNETDRNFVTYKGEE

SEQ ID NO: 20558 - protein, 149 aa, Flavobacterium spartansii
  misc_feature (1)..(149): tr|A0A1S1JF26|A0A1S1JF26_9FLAO 6-carboxy-5,6,7,8-tetrah ydropterin synthase OS=Flavobacterium spartansii OX=127 8819 GN=BHE19_04890 PE=3 SV=1
MSNIRITKQFSFETGHALYGYDGKCKNVHGHSYKLSVTVIGSPITDRSNVKFGMVIDFSDLKKIVKEEIVDQFDHATVFNQTTPHIELANELKNRGHHVILVDYQPTSENMVVDFADRIIARLPKEISLFSLKLQETESSFAEWYASDN

SEQ ID NO: 20559 - protein, 150 aa, Flavobacterium subsaxonicum
  misc_feature (1)..(150): tr|A0A0A2MIM9|A0A0A2MIM9_9FLAO 6-pyruvoyl tetrahydropte rin synthase OS=Flavobacterium subsaxonicum WB 4.1-42 = DSM 21790 OX=1121898 GN=Q766_18840 PE=4 SV=1
MSKIRITKQFTFETGHALYGYDGKCKNVHGHSYKLSVTVIGSPITDSGNVKFGMVIDFGDLKKIVKEEIVDLFDHATVFNQNTPHIELAAELKARDHHVILVDYQPTSENMVIDFAKKIKDRLPANINLHSLRLQETETSFAEWFQSDNL

SEQ ID NO: 20560 - protein, 136 aa, Flavobacterium subsaxonicum
  misc_feature (1)..(136): tr|A0A0A2MPJ2|A0A0A2MPJ2_9FLAO 6-carboxy-5,6,7,8-tetrah ydropterin synthase OS=Flavobacterium subsaxonicum WB 4 .1-42 = DSM 21790 OX=1121898 GN=Q766_08890 PE=3 SV=1
MRVTVSRSAHFNAAHRLYRKDWTEERNNAVFGKCNNANFHGHNYELIASVTGNIDPETGYVIDIKILKDIIADEVETPFDHKNLNLDVPEFANLNPTAENIAVVIWNRMRPRLDPKLTLEITLYETPRNFVTYKGE

SEQ ID NO: 20561 - protein, 150 aa, Flavobacterium succinicans
  misc_feature (1)..(150): tr|A0A199XQM9|A0A199XQM9_9FLAO 6-pyruvoyl tetrahydropte rin synthase OS=Flavobacterium succinicans OX=29536 GN= FLB_19100 PE=4 SV=1
MSNIRITKKFSFETGHALYGYDGKCKNVHGHSYKLSVTVIGSPITDRSNVKLGMVIDFTDLKKIVKEEVVDQFDHATVFNQTTPHVELAKELKDRGHHVILVDYQPTSENMIVDFAERIKSRLPEGINLFSLKLQETESSFAEWFASDNV

SEQ ID NO: 20562 - protein, 136 aa, Flavobacterium succinicans
  misc_feature (1)..(136): tr|A0A1I4SJY5|A0A1I4SJY5_9FLAO 6-carboxy-5,6,7,8-tetrah ydropterin synthase OS=Flavobacterium succinicans OX=29 536 GN=SAMN05444143_101860 PE=3 SV=1
MRVTISRKAHFNAAHRLYRKDWSFEQNDAVFGKCNNPNFHGHNYELIVSVTGEIDQETGYVMDVKFLTDIIKSEVEDQMDHKNLNLDVPEFENLNPTAENIVVVIWNKLRAKVKSTLDLEVVLYETPRNFVTYKGE

SEQ ID NO: 20563 - protein, 152 aa, Flavobacterium suncheonense
  misc_feature (1)..(152): tr|A0A0A2MDK1|A0A0A2MDK1_9FLAO 6-pyruvoyl tetrahydropte rin synthase OS=Flavobacterium suncheonense GH29-5 = DS M 17707 OX=1121899 GN=Q764_05510 PE=4 SV=1
MSNIRITKQFTFETGHALYGYDGKCKNVHGHSYKLSVTVIGKPITDTSNVKFGMVIDFGDLKKIVKEEIVDIFDHATVFNQNTPHLELASELKNRGHHVILVDYQPTSENMVIDFADKIKNRLPQNIQLHSLKLQETETSFAEWYQSDNQQS

SEQ ID NO: 20564 - protein, 136 aa, Flavobacterium suncheonense
  misc_feature (1)..(136): tr|A0A0A2MAZ3|A0A0A2MAZ3_9FLAO 6-carboxy-5,6,7,8-tetrah ydropterin synthase OS=Flavobacterium suncheonense GH29 -5 = DSM 17707 OX=1121899 GN=Q764_08695 PE=3 SV=1
MRVTVSRKAHFNAAHRLYRKDWSDEQNQRVFGKCNNPNFHGHNYELIVSVTGEINPETGYVMDIKDLADIIYEEVETRFDHKNLNLDVPEFEHLNPTAENIVVVIWNKIRKRIDQTHDLEVVLYETPRNFVTYKGL

SEQ ID NO: 20565 - protein, 150 aa, Flavobacterium swingsii
  misc_feature (1)..(150): tr|A0A1I0YDK3|A0A1I0YDK3_9FLAO 6-pyruvoyltetrahydropter in/6-carboxytetrahydropterin synthase OS=Flavobacterium swingsii OX=498292 GN=SAMN05660845_1692 PE=4 SV=1
MSKIRITKQFSFETGHALYGYDGKCKNVHGHSYKLSVTVIGTPISDRNNVKFGMVIDFSDLKKIVREDIVDVFDHATVFNETTPHIELAQELKSRGHEVILVDYQPTSENMVIDFAEKIKRRLPESIKLHSLRLQETETSFAEWFAEDNA

SEQ ID NO: 20566 - protein, 136 aa, Flavobacterium swingsii
  misc_feature (1)..(136): tr|A0A1I0UXK0|A0A1I0UXK0_9FLAO 6-carboxy-5,6,7,8-tetrah ydropterin synthase OS=Flavobacterium swingsii OX=49829 2 GN=SAMN05660845_0017 PE=3 SV=1
MKVTISRKAHFNAAHRLYRKDWTFEKNDAVFGKCNNPNFHGHNYDLTVSVTGEIDPETGYVMDVKLLSEIIKEEIEDKFDHKNLNLDVSEFEDLNPTAENIVVVIWNKIRKKINPEMDLEVILYETPRNFVTYKGE

SEQ ID NO: 20567 - protein, 151 aa, Flavobacterium terrae
  misc_feature (1)..(151): tr|A0A1M6BEK0|A0A1M6BEK0_9FLAO 6-pyruvoyltetrahydropter in/6-carboxytetrahydropterin synthase OS=Flavobacterium terrae OX=415425 GN=SAMN05444363_0709 PE=4 SV=1
MSRIRITKQFNFETGHALFGYDGKCKNVHGHSYKLSVTVIGTPITDRNNVKYGMVIDFSDLKKIVKEDIVDIFDHATVFNATTPHIELANELKERGHHVILVDYQPTSENMVIDFAAKIKKRLPEFVQLHSLRLQETETSFAEWYAEDNTK

SEQ ID NO: 20568 - protein, 135 aa, Flavobacterium terrae
  misc_feature (1)..(135): tr|A0A1M6DAX5|A0A1M6DAX5_9FLAO 6-carboxy-5,6,7,8-tetrah ydropterin synthase OS=Flavobacterium terrae OX=415425 GN=SAMN05444363_1343 PE=3 SV=1
MRVTVNRKAHFNAAHRLYRKDWSDEKNQLVFGKCNNPNFHGHNYELIVSVTGNIDPETGYVIDIKILADIIFEEVESQFDHKNLNLDVPDFENLNPTAENIVVVIWNKIKARLKVDQDLEVTLYETPRNFVTYKG

SEQ ID NO: 20569 - protein, 136 aa, Flavobacterium terrigena
  misc_feature (1)..(136): tr|A0A1H6Y862|A0A1H6Y862_9FLAO 6-carboxy-5,6,7,8-tetrah ydropterin synthase OS=Flavobacterium terrigena OX=4027 34 GN=SAMN05660918_0052 PE=3 SV=1
MRAKISRKAHFNAAHRLYRKDWSMEKNDAIFGKCNNPNYHGHNYELIVSVTGEISPETGFIMDVKILADLVKLHIEDAFDHKNLNLDVPEFENLNPTAENIAVVIWQKLRNQIEIKYDLEVVLYETPRNYVTYSGN

SEQ ID NO: 20570 - protein, 150 aa, Flavobacterium terrigena
  misc_feature (1)..(150): tr|A0A1H6SXD7|A0A1H6SXD7_9FLAO 6-pyruvoyltetrahydropter in/6-carboxytetrahydropterin synthase OS=Flavobacterium terrigena OX=402734 GN=SAMN05660918_1550 PE=4 SV=1
MSKIRITKQFNFETGHALYGYDGKCKNVHGHSYKLSVTVIGEPITDSNNVKFGMVIDFSDLKKIVKEDIVDVFDHATVFNQNTPHVELAKELQNRGHHVILVDYQPTSENMVVDFANKIMARLPKDILLHSLRLQETESSFAEWFASDNL

SEQ ID NO: 20571 - protein, 145 aa, [Flavobacterium] thermophilum
  misc_feature (1)..(145): tr|A0A377FYB0|A0A377FYB0_9BACL 6-carboxy-5,6,7,8-tetrah ydropterin synthase OS=[Flavobacterium] thermophilum OX =1414643 GN=queD PE=3 SV=1
MMHQLYPQVMHPYRYELNKDMHIAAAHFIPHEAAGSCANVHGHTYIVNVTVAGDELDESGFLVNFQTLKQLVHRKLDHTLLNDHSDWFDGHDPNRFPTSEVVARTIYETIQRYLDTLPHKPTCLQVFVRETPTSYVVYRPKAGER

SEQ ID NO: 20572 - protein, 154 aa, Flavobacterium tiangeerense
  misc_feature (1)..(154): tr|A0A562KVS7|A0A562KVS7_9FLAO 6-pyruvoyltetrahydropter in/6-carboxytetrahydropterin synthase OS=Flavobacterium tiangeerense OX=459471 GN=IQ05_03064 PE=4 SV=1
MSNIRITKQFSFETGHALYGYDGKCKNVHGHSYKLSVTVIGTPITDRSNVKFGMVIDFTDLKKIVKEEIVDQFDHATVFNGTTPHIDLANELIARGHHVILVDYQPTSENMVIDFAQRISNRLPEGIALFSLKLQETESSFAEWYASDNVKSIL

SEQ ID NO: 20573 - protein, 150 aa, Flavobacterium tibetense
  misc_feature (1)..(150): tr|A0A365NZ17|A0A365NZ17_9FLAO 6-carboxytetrahydropteri n synthase QueD OS=Flavobacterium tibetense OX=2233533 GN=DPN68_11825 PE=4 SV=1
MSNIRITKQFSFETGHALYGYDGKCKNVHGHSYKLSVTVIGKPITDTSNVKYGMVIDFGDLKKIVKEEVVDVFDHATVFNQNTPHIELAHELQNRGHHVILVDYQPTSENMVIDFAAKISNRLPQNITLHSLKLQETETSFAEWYASDNI

SEQ ID NO: 20574 - protein, 136 aa, Flavobacterium tibetense
  misc_feature (1)..(136): tr|A0A365P3Q9|A0A365P3Q9_9FLAO 6-carboxytetrahydropteri n synthase OS=Flavobacterium tibetense OX=2233533 GN=DP N68_03150 PE=4 SV=1
MKVTVSRKAHFNAAHRLYRKDWSMEKNQEVFGKCNNPNFHGHNYELIVSVTGEVDKETGYVIDTKILSDLIKEHIEEAFDHKNLNVDVSEFQDLIPTAEHIAYVIWQKLRVLIASDKDLEVTLYETPRNFVTYKGE

SEQ ID NO: 20575 - protein, 150 aa, Flavobacterium ummariense
  misc_feature (1)..(150): tr|A0A1I5E798|A0A1I5E798_9FLAO 6-pyruvoyltetrahydropter in/6-carboxytetrahydropterin synthase OS=Flavobacterium ummariense OX=913024 GN=SAMN05421741_11913 PE=4 SV=1
MSFIRITKQFTFETGHALYGYDGKCRNVHGHSYKLSVTVIGQPITDKNHVKYGMVIDFTDLKAIVKEEVVDQFDHATVFNQNTPHVELAKELEQRGHHVILVDYQPTSENLVIDYAERIKSRLPQNIKLFSLRLQETESSYAEWFASDNL

SEQ ID NO: 20576 - protein, 136 aa, Flavobacterium ummariense
  misc_feature (1)..(136): tr|A0A1I5A148|A0A1I5A148_9FLAO 6-carboxy-5,6,7,8-tetrah ydropterin synthase OS=Flavobacterium ummariense OX=913 024 GN=SAMN05421741_10759 PE=3 SV=1
MRVTVCRKAHFNAAHRLYRKDWSDEKNQKIFGKCNNPNFHGHNYELIVDVTGTVNPETGYVIDIKDLSDIIYEEVEVPFDHKNLNLDVPEFQDLNPTAEHIAYVIWHKLRKRLPLKLDLEITLYETPRNFVKYCGL

SEQ ID NO: 20577 - protein, 150 aa, Flavobacterium urocaniciphilum
  misc_feature (1)..(150): tr|A0A1H9DGR1|A0A1H9DGR1_9FLAO 6-pyruvoyltetrahydropter in/6-carboxytetrahydropterin synthase OS=Flavobacterium urocaniciphilum OX=1299341 GN=SAMN05444005_1073 PE=4 S V=1
MSKIRITKQFNFETGHALYGYDGKCKNVHGHSYKLSVTVIGEPISDTNNVKYGMVIDFSDLKKIVKEDIVDVFDHATVFNKNTPHIELAKELKDRGHHVILVDYQPTSENMVIDFAEKIMARLPKDIQLHSLRLQETETSFAEWFASDNL

SEQ ID NO: 20578 - protein, 136 aa, Flavobacterium urocaniciphilum
  misc_feature (1)..(136): tr|A0A1H9E6V9|A0A1H9E6V9_9FLAO 6-carboxy-5,6,7,8-tetrah ydropterin synthase OS=Flavobacterium urocaniciphilum O X=1299341 GN=SAMN05444005_11026 PE=3 SV=1
MRATISRKAHFNAAHRLYRKDWSDEQNDLVFGKCNNPNFHGHNYELIVNITGEISPETGFVMDVKILADLIKLHIEDEFDHKNLNLDVPEFKDLNPTAENIAVVIWRKLRNQIEIKYDLEVVLYETPRNYVTYSGN

SEQ ID NO: 20579 - protein, 136 aa, Flavobacterium urumqiense
  misc_feature (1)..(136): tr|A0A1H6AFA8|A0A1H6AFA8_9FLAO 6-carboxy-5,6,7,8-tetrah ydropterin synthase OS=Flavobacterium urumqiense OX=935 224 GN=SAMN04488130_11520 PE=3 SV=1
MRVTISRKAHFNAAHRLYRKDWTFEQNDAIFGKCNNPNYHGHNYELIVSVTGEIDPETGFVMDVKFLSEIIKEEVENQFDHKNLNIDVPEFENLNPTAENIVVVIWNKIRKKIEPQFDLEVILYETPRNFVTYKGE

SEQ ID NO: 20580 - protein, 154 aa, Flavobacterium urumqiense
  misc_feature (1)..(154): tr|A0A1H5UP43|A0A1H5UP43_9FLAO 6-pyruvoyltetrahydropter in/6-carboxytetrahydropterin synthase OS=Flavobacterium urumqiense OX=935224 GN=SAMN04488130_102353 PE=4 SV=1
MSNIRITKQFSFETGHALYGYDGKCKNVHGHSYKLSVTVIGTPITDRNNVKFGMVIDFTDLKKIVKEEIVDQFDHATVFNETTPHIELANELISRGHHVILVNYQPTSENMVVDFSQRIIGRLPEGIKLFSLKLQETDSSFAEWYASDNFKSIL

SEQ ID NO: 20581 - protein, 150 aa, Flavobacterium weaverense
  misc_feature (1)..(150): tr|A0A3L9ZX00|A0A3L9ZX00_9FLAO 6-pyruvoyltetrahydropter in/6-carboxytetrahydropterin synthase OS=Flavobacterium weaverense OX=271156 GN=BC961_1230 PE=4 SV=1
MSNIRITKQFSFETGHALYGYDGKCKNVHGHSYKLSVTVIGSPITDRSNVKFGMVIDFTDLKKIVKEEIVDQFDHATVFNGTTPHVELANELISRGHHVILVDYQPTSENMVVDFSKRIIDRLPEGIRLFSLKLQETDSSFAEWFASDNS

SEQ ID NO: 20582 - protein, 139 aa, Flavobacterium weaverense
  misc_feature (1)..(139): tr|A0A3L9ZYU6|A0A3L9ZYU6_9FLAO 6-carboxy-5,6,7,8-tetrah ydropterin synthase OS=Flavobacterium weaverense OX=271 156 GN=BC961_0430 PE=3 SV=1
MKVTISRKAHFNAAHRLHRKDWTFEQNDAIFGKCNNPNFHGHNYELIVSVTGPIDPDTGYVMDVKFLTDIIKEDVENQFDHKNLNLDVPEFKDLNPTAENIVVVIWDKIRKRIKPEFELEVVLYETPRNFVTYKGEQWN

SEQ ID NO: 20583 - protein, 136 aa, Flavobacterium xanthum
  misc_feature (1)..(136): tr|A0A1M7HMV4|A0A1M7HMV4_9FLAO 6-carboxy-5,6,7,8-tetrah ydropterin synthase OS=Flavobacterium xanthum OX=69322 GN=SAMN05443669_102929 PE=3 SV=1
MKVTISRKAHFNAAHRLHRKDWSFEQNDAIFGKCNNPNFHGHNYELIVSVTGEIDPETGYVMDVKFLSDIIKEDVENQFDHKNLNLDVPEFQDLNPTAENIVVVIWNKIRKRIKSEFELEVVLYETPRNFVTYKGE

SEQ ID NO: 20584 - protein, 154 aa, Flavobacterium xanthum
  misc_feature (1)..(154): tr|A0A1M7KV30|A0A1M7KV30_9FLAO 6-pyruvoyltetrahydropter in/6-carboxytetrahydropterin synthase OS=Flavobacterium xanthum OX=69322 GN=SAMN05443669_10585 PE=4 SV=1
MSNIRITKQFSFETGHALYGYDGKCKNVHGHSYKLSVTVIGSPITDRSNVKYGMVIDFTDLKKIVKEEIVDQFDHATVFNGTTPHIELANELINRGHHVILVDYQPTSENMVVDFSHRIISRLPEGITLFSLKLQETESSFAEWFASDNMKSIL

SEQ ID NO: 20585 - protein, 136 aa, Flavobacterium xinjiangense
  misc_feature (1)..(136): tr|A0A1M7MZK8|A0A1M7MZK8_9FLAO 6-carboxy-5,6,7,8-tetrah ydropterin synthase OS=Flavobacterium xinjiangense OX=1 78356 GN=SAMN05216269_109132 PE=3 SV=1
MKVTISRKAHFNAAHRLYRKDWTFEQNDAVFGKCNNPNYHGHNYELIVGVTGEIDTETGFVMDVKFLSEIIKEEVEDQFDHKNLNLDVPEFENLNPTAENIVVVIWNKIRKKIELQFDLEVILYETPRNFVTYKGE

SEQ ID NO: 20586 - protein, 154 aa, Flavobacterium xinjiangense
  misc_feature (1)..(154): tr|A0A1M7LMA5|A0A1M7LMA5_9FLAO 6-pyruvoyltetrahydropter in/6-carboxytetrahydropterin synthase OS=Flavobacterium xinjiangense OX=178356 GN=SAMN05216269_10752 PE=4 SV=1
MSNIRITKQFSFETGHALYGYDGKCKNVHGHSYKLSVTVIGTPITDRNNVKFGMVIDFTDLKKIVKEEIVDQFDHATVFNETTPHIELAKELISRGHHVILVDYQPTSENMVVDFSKRIIGRLPEGITLFSLKLQETESSFAEWYASDNFKSIL

SEQ ID NO: 20587 - protein, 154 aa, Flavobacterium xueshanense
  misc_feature (1)..(154): tr|A0A1I2HGZ1|A0A1I2HGZ1_9FLAO 6-pyruvoyltetrahydropter in/6-carboxytetrahydropterin synthase OS=Flavobacterium xueshanense OX=935223 GN=SAMN04488131_11434 PE=4 SV=1
MSNIRITKQFSFETGHALYGYDGKCKNVHGHSYKLSVTVIGTPITDRSNVKFGMVIDFTDLKKIVKEEIVDQFDHATVFNGTTPHIELAEELISRGHHVILVEYQPTSENMVVDFSQRIISRLPEGISLFSLKLQETDSSFAEWFASDNMKSIM

SEQ ID NO: 20588 - protein, 136 aa, Flavobacterium xueshanense
  misc_feature (1)..(136): tr|A0A1I2GIQ8|A0A1I2GIQ8_9FLAO 6-carboxy-5,6,7,8-tetrah ydropterin synthase OS=Flavobacterium xueshanense OX=93 5223 GN=SAMN04488131_11068 PE=3 SV=1
MKVTISRKAHFNAAHRLHRKDWTFEQNDAVFGKCNNPNFHGHNYDLTVSVTGEIDPETGYVMDVKFLSDIIKEEVENQFDHKNLNLDVPEFEHLNPTAENIVVVIWNKIRKRIKAEFELEVVLYETPRNFVTYKGE

SEQ ID NO: 20589 - protein, 188 aa, Flavonifractor sp.
  misc_feature (1)..(188): tr|A0A1Y3SDC8|A0A1Y3SDC8_9FIRM Rubredoxin OS=Flavonifra ctor sp. An82 OX=1965660 GN=B5G34_16495 PE=4 SV=1
MRSITTLDLQYAHRFYGFKGEAQYLHGHTGVLTIEVEDTIEPGVNMVFPCNEIQKTAWSVLKNFDHALILREDDPLLPAVLKVYEEQGIRNGAPQNQMKGPAFQTELATAYPECRLVVTKETLTVEGMIKIVYDLLKDKLNIAKITFTSGVNAASAEFETHNQIDRCPLCGIALNENGVCPKCGYKKK

SEQ ID NO: 20590 - protein, 139 aa, Flectobacillus sp.
  misc_feature (1)..(139): tr|A0A267TE81|A0A267TE81_9BACT 6-carboxytetrahydropteri n synthase QueD OS=Flectobacillus sp. BAB-3569 OX=15094 83 GN=BWI92_10295 PE=4 SV=1
MVYVVRKEHFNAAHRLYNPNWTEEKNREVFGPCANVNWHGHNFELIVTVKGIPDPDTGFVIDMKVMSQIIKDEIIERVDHKNLNLDVDFMQGKMASCEIFAMEIWKILAPKLNEQIPHGQLHCIELIETPKNSVKYYGE

SEQ ID NO: 20591 - protein, 139 aa, Flectobacillus sp.
  misc_feature (1)..(139): tr|A0A267T6A8|A0A267T6A8_9BACT 6-carboxy-5,6,7,8-tetrah ydropterin synthase OS=Flectobacillus sp. BAB-3569 OX=1 509483 GN=BWI92_19745 PE=3 SV=1
MSTKRVAVFRKEHFNAAHRLHNPNWTDEKNERVYGKCNNPTFHGHNYELIVQVIGELDPETGYVIDMKVLSDIIKVEILDRFDHRNLNLDTEEFKDLNPSAENIAIVIYDILRNKLNPNLDIKIRLYETERNFVEYPVG

SEQ ID NO: 20592 - protein, 139 aa, Flexibacter flexilis
  misc_feature (1)..(139): tr|A0A1I1L2T2|A0A1I1L2T2_9BACT 6-pyruvoyltetrahydropter in/6-carboxytetrahydropterin synthase OS=Flexibacter fl exilis DSM 6793 OX=927664 GN=SAMN05421780_107196 PE=4 S V=1
MVYVCRKEHFNAAHKLYNPNWSEEKNREMFGPCANHNWHGHNFVLTVYVKGVPHPETGFVIDLKVLSKLINELVIEKLDHKNLNMDVDFMIGKMASCEILVMEIWKILAPAISAAAPNAQLHKLVLDETPRNFVEYYGE

SEQ ID NO: 20593 - protein, 136 aa, Flexibacter flexilis
  misc_feature (1)..(136): tr|A0A1I1NK86|A0A1I1NK86_9BACT 6-carboxy-5,6,7,8-tetrah ydropterin synthase OS=Flexibacter flexilis DSM 6793 OX =927664 GN=SAMN05421780_1164 PE=3 SV=1
MKVAVFRKEHFNAAHRLHNPAWSDEQNKAVFGRCNNPHYHGHNYEVVVKVVGEIDPQTGYVIDTKILSDLVKELVVSKFDHRNLNLDTEEFKSLNPTAENIAVVIWQKLRERLDAKLELKVILYETERNYVEYPAN

SEQ ID NO: 20594 - protein, 157 aa, [Flexibacter] sp.
  misc_feature (1)..(157): tr|A0A1V2AU93|A0A1V2AU93_9BACT Uncharacterized protein OS=[Flexibacter] sp. ATCC 35208 OX=1936242 GN=BW716_346 65 PE=4 SV=1
MSIVICCSFAKIRERSVLQITKIFNFETAHALYGYAGKCRNLHGHSYKLHVTVSSKTPEEGYLGGTGILMDFKDLKKLVNEKVVDKFDHRLILSKAYLAANPNLGELENLEIWDIEPSAENIILYIKQELQGGFPEDVELVKLVLYETSDSYAEWIK

SEQ ID NO: 20595 - protein, 136 aa, [Flexibacter] sp.
  misc_feature (1)..(136): tr|A0A1V2B1V2|A0A1V2B1V2_9BACT 6-pyruvoyl tetrahydrobio pterin synthase OS=[Flexibacter] sp. ATCC 35208 OX=1936 242 GN=BW716_21050 PE=4 SV=1
MIYLTRVENFNAAHKLSNPAWSKEKNKEVFGKCANENWHGHNYELHVTVKGNPDPETGFVFNAKTLGNLIEEYVVEKVDHRNLNMDVDFMAGKFTSAENLAIGIWEQLAPHLPESVQLHCIKLYETPRIYVEYYGG

SEQ ID NO: 20596 - protein, 141 aa, Flexibacter sp.
  misc_feature (1)..(141): tr|A0A2M7ND10|A0A2M7ND10_9BACT 6-carboxytetrahydropteri n synthase QueD OS=Flexibacter sp. CG_4_10_14_3_um_filt er_32_15 OX=1975530 GN=COZ18_16825 PE=4 SV=1
MVYLCRKEHFCASHRLFNPAWSDERNEEEFGICSNQYFHGHNFELIVKVKGKINSDTGCVLDLKKLGKLIREEIIDKVDHKNLNIEVEFLKNKIPSCEIVIMEFWKILAPKIIDLSEKNAVLHSLTLFETEKNYVEYFGEE

SEQ ID NO: 20597 - protein, 119 aa, Flexistipes sinusarabici
  misc_feature (1)..(119): tr|F8E702|F8E702_FLESM 6-carboxy-5,6,7,8-tetrahydropter in synthase OS=Flexistipes sinusarabici (strain DSM 494 7 / MAS 10) OX=717231 GN=Flexsi_1210 PE=3 SV=1
MYKVKVTDNFSSAHNLREYEGNCEKLHGHNWQIEVSLKGEELDELGMLVDFRELKKEVKNILNTLDHTYLNDHEYFSRVNPTSENIAHFIYKKLKSRFKDRMDSVTVWESNNSSAEYYE

SEQ ID NO: 20598 - protein, 119 aa, Flexistipes sinusarabici
  misc_feature (1)..(119): tr|A0A5D0MXT7|A0A5D0MXT7_FLESI 6-carboxy-5,6,7,8-tetrah ydropterin synthase OS=Flexistipes sinusarabici OX=2352 GN=queD PE=3 SV=1
MYKVKITDSFSSAHNLREYEGNCERLHGHNWQIEVSLKGEQLDELGMLVDFRELKKEVKKILSTLDHTYLNDHKYFSRVNPTSENIAHFIYKKLKPKFSDKMDKVTVWESNNSAAEYYE

SEQ ID NO: 20599 - protein, 127 aa, Fluoribacter bozemanae
  misc_feature (1)..(127): tr|A0A0W0RQZ1|A0A0W0RQZ1_FLUBO 6-pyruvoyl tetrahydropte rin synthase OS=Fluoribacter bozemanae OX=447 GN=Lboz_2 073 PE=4 SV=1
MHHLMLRKNFIAQHFLIGKDFGAENLRHSHHYSFELEIENTKLDPFNFLIDIVEVRAHIDQLISYFQDKILNELPEFKNQNPSLELFSKILWQKFNNHIELPVDSQITVRLWEDDIAQASYRETKCV

SEQ ID NO: 20600 - protein, 168 aa, Fluoribacter bozemanae
  misc_feature (1)..(168): tr|A0A0W0RZE5|A0A0W0RZE5_FLUBO 6-pyruvoyl tetrahydropte rin synthase OS=Fluoribacter bozemanae OX=447 GN=Lboz_0 605 PE=4 SV=1
MNRKKYLTTVELQKESMKFSAGHTTIFSATEREPLHGHMYGVYLALTTWVEENGMTFDYRYYKERIHKLCRYLNQTFLMPQFSPFLEYAEDEEYYYFTFNHKKIPFLKEDVTLLPVTNITVEELSRWFVHELIKDKAELDRHRIDTVLVKVFSAPGQSASHQWQRANE

SEQ ID NO: 20601 - protein, 126 aa, Fluoribacter dumoffii
  misc_feature (1)..(126): tr|A0A377G888|A0A377G888_9GAMM Queuosine biosynthesis p rotein QueD OS=Fluoribacter dumoffii OX=463 GN=NCTC1137 0_00616 PE=4 SV=1
MHCLMLRKNFIAQHFLIGKDFGAENSRHSHHYSFELEIENTQLDQFNFLIDIVEVKNHIELMISYFNDKTLNELPEFENQNPSLELFSKILWQKFNHFKLPANSQITVRLWEDDIAQASYREKICA

SEQ ID NO: 20602 - protein, 168 aa, Fluoribacter dumoffii
  misc_feature (1)..(168): tr|A0A377G5Z9|A0A377G5Z9_9GAMM Queuosine biosynthesis p rotein QueD OS=Fluoribacter dumoffii OX=463 GN=NCTC1137 0_00114 PE=4 SV=1
MTIKKYLTTVELQKESMKFSAGHTTIFSATEREPLHGHMYGVYLALTTWVEENGMTFDYRYYKERIHKLCRFLNQTFLMPQFSPFLEFAEDEEYYYFTFNHKKIPFLKEDVTLLPVSNITVEELSRWFVNELIKDKAELDRHRIETVVVKVFSAPGQSASHQWQRVHE

SEQ ID NO: 20603 - protein, 168 aa, Fluoribacter gormanii
  misc_feature (1)..(168): tr|A0A377GFI3|A0A377GFI3_9GAMM Queuosine biosynthesis p rotein QueD OS=Fluoribacter gormanii OX=464 GN=NCTC1140 1_00124 PE=4 SV=1
MNIKRYLTTVELQKESMKFSAGHTTIFSATEREPLHGHMYGVYLALTTWVEENGMTFDYRYYKERIHKLCRYLNQTFLMPQFSPFLQYAEDEEYYYFTFNQKKIPFLKEDVTLLPVTNITVEELSRWFVQELIKDKAELDRHRIEHVVVKVFSAPGQSANHQWHRAHE

SEQ ID NO: 20604 - protein, 135 aa, Fluviibacterium aquatile
  misc_feature (1)..(135): tr|A0A4R6AVL1|A0A4R6AVL1_9RHOB 6-carboxytetrahydropteri n synthase OS=Fluviibacterium aquatile OX=2552766 GN=E2 L05_11050 PE=4 SV=1
MFALEVRDHIMIAHSLPGEAFGPAQGMHGATFVIDVAFFRETLTENDIVVDIGLAAEALGRVTATVNYKNLDELDLFGGKRSTTEVLCKYVFDAMAAEIAAGRLGEDAREITKLKVTLNESHVARAWLEGPVAQG

SEQ ID NO: 20605 - protein, 198 aa, Fluviicoccus keumensis
  misc_feature (1)..(198): tr|A0A4Q7Z4R7|A0A4Q7Z4R7_9GAMM 6-pyruvoyltetrahydropter in/6-carboxytetrahydropterin synthase OS=Fluviicoccus k eumensis OX=1435465 GN=EV700_2126 PE=4 SV=1
MLIRKLFRFENAHIVRNCSSDRCSRSLHGHSYQVEFLLEAHALDNGQMVYDFGLMKGAVRTLTDSFDHAVAFWDKDNADYITACKTFSARWISLPVSPSAEQFSRLMFVLADAVLKQTEMKNGEADVRLYSVIVHETQTGYAQCFREDIDNPRMGLIRLEDIIFSDQVRAEWPDPEMYEKLKRGERFINPEVVPQVRL

SEQ ID NO: 20606 - protein, 139 aa, Fluviicola sp.
  misc_feature (1)..(139): tr|A0A316KIK2|A0A316KIK2_9FLAO 6-carboxy-5,6,7,8-tetrah ydropterin synthase OS=Fluviicola sp. XM-24bin1 OX=2133 950 GN=DCO96_10960 PE=3 SV=1
MAGETIRICRRETFNAAHRLYRKEWSDEKNYEVFGKCSHPNYHGHNYVIEVWLEGPIDPVTGYLMDLKELKTIIQREVCDRFDHRNFNLDCEEFKDRIPTAENIAVVCWQLIQPQLPDNLRLEVHIQETEKNKVSYSGG

SEQ ID NO: 20607 - protein, 143 aa, Fluviicola sp.
  misc_feature (1)..(143): tr|A0A556MNU4|A0A556MNU4_9FLAO 6-carboxytetrahydropteri n synthase OS=Fluviicola sp. MAH-3 OX=2597671 GN=FO442_ 14280 PE=4 SV=1
METVYITRREHFNAAHKLWREEWSDEKNEEVFGKCSNKNWHGHNFELFVTVKGAPNPETGFVINLKDLSVIIKELVIEQLDHKNLNLDVPFLKGKLASTENLAIEIWKIINDPIQQAGGQLCKIKLVETENNYVEYFGGKEPY

SEQ ID NO: 20608 - protein, 134 aa, Fluviicola taffensis
  misc_feature (1)..(134): tr|F2IK39|F2IK39_FLUTR 6-carboxy-5,6,7,8-tetrahydropter in synthase OS=Fluviicola taffensis (strain DSM 16823 / NCIMB 13979 / RW262) OX=755732 GN=Fluta_0937 PE=3 SV=1
MKIFRVEQFNAAHRLFNPNWDDETNNRIFGKCNNPNFHGHNYKLEVELDGPINPETGYVMDMKKLSEIIKLEILERFDHRNLNLDCPEFKNLIPSAENIALVCWNILRQHLPSELKLKVRLWETPKNGVEYDGN

SEQ ID NO: 20609 - protein, 190 aa, Fluviicola taffensis
  misc_feature (1)..(190): tr|F2I9N5|F2I9N5_FLUTR Uncharacterized protein OS=Fluvi icola taffensis (strain DSM 16823 / NCIMB 13979 / RW262 ) OX=755732 GN=Fluta_1033 PE=4 SV=1
MPYFSVYFQLENGLISSSQNLHFFNKLPVLKRTFSAKISNFASNILRLETVYITRREHFNAAHKLWREEWSDEKNEEVFGKCSNKNWHGHNFELFVTVKGEPNPETGFVINLKDLSVIIKELVIEEVDHKNLNLDVPFLKGKLASTENLAIEIWKIIDAPIQEAGGQLCKIKLVETENNYVEYFGGKEPF

SEQ ID NO: 20610 - protein, 129 aa, Fodinibius salinus
  misc_feature (1)..(129): tr|A0A5D3YN77|A0A5D3YN77_9BACT 6-carboxy-5,6,7,8-tetrah ydropterin synthase OS=Fodinibius salinus OX=860790 GN= LX73_0671 PE=3 SV=1
MPKWILNTKFKFDAAHLIEGYEGKCGRMHGHSYKVHVEAKSNTLHPSKYLDTDDMVCDFRELKWASKGSEKGGLDHAVLNDELPVNPTAERIAEFIYKETNRRIPDDVSLKITVWETESCWVEYTEDDV

SEQ ID NO: 20611 - protein, 150 aa, Fodinibius salinus
  misc_feature (1)..(150): tr|A0A5D3YNX2|A0A5D3YNX2_9BACT 6-pyruvoyltetrahydropter in/6-carboxytetrahydropterin synthase OS=Fodinibius sal inus OX=860790 GN=LX73_0883 PE=4 SV=1
MVFVTRKAHFNAAHRLHNPDKSDQWNKEKFGKCNHENWHGHNYIIKVTVAGIPDSESGYVIDLSELKDIIQLHIIEKCDHKNLNLDVDFLDGIMPSTENLVKAFFEQIEIPIREATDENGFLYEVELEETERNSAKYCPYLLDKEVPVKS

SEQ ID NO: 20612 - protein, 164 aa, Fontibacillus panacisegetis
  misc_feature (1)..(164): tr|A0A1G7Q231|A0A1G7Q231_9BACL 6-pyruvoyltetrahydropter in/6-carboxytetrahydropterin synthase OS=Fontibacillus panacisegetis OX=670482 GN=SAMN04488542_12069 PE=4 SV=1
MNTMPGEFTIVDSLQKFGADINLKQLKYHNRRVLVSKEFTFDAAHHLHAYEGKCKNLHGHTYKVVFGISGIPNEIGIAIDFGTIKTIWKKEIEGFLDHRYLNETLPPMNTTAENMVVWLYEKLEAALQSPQHLSALTGARTEFVRLYETPTSYAEARREWMSGD

SEQ ID NO: 20613 - protein, 163 aa, Fontibacillus panacisegetis
  misc_feature (1)..(163): tr|A0A1G7GVE7|A0A1G7GVE7_9BACL 6-pyruvoyltetrahydropter in/6-carboxytetrahydropterin synthase OS=Fontibacillus panacisegetis OX=670482 GN=SAMN04488542_103217 PE=4 SV= 1
MNKMPGQFVIVDALQKFKEDITQEQLKYHQRRVLVSKEFTFDAAHHLHAYEGKCKNLHGHTYKVVFGVSGYTNEIGMTIDFGMIKTIWREQIEPYLDHRYLNETLPLMNTTAENMVVWLYEQMETALSTDKYSSKDVDARTEFVRLFETPTSYAEARREWMAD

SEQ ID NO: 20614 - protein, 165 aa, Fontibacillus phaseoli
  misc_feature (1)..(165): tr|A0A369BFM5|A0A369BFM5_9BACL 6-pyruvoyltetrahydropter in/6-carboxytetrahydropterin synthase OS=Fontibacillus phaseoli OX=1416533 GN=DFP94_10372 PE=4 SV=1
MMNREPGVFRIVERLHVFGEDISENQLRYHRRRVLVSKQFTFDAAHHLHAYDGKCKNLHGHTYEVVFGISGKPDERGIAIDFGTVKQIWKDEIEGYLDHRYLNETLPPMNTTAENMVVWLYEKMEAALSSGRYLSSLPDARTEFVRLYETPTSFAEARREWMQDE

SEQ ID NO: 20615 - protein, 125 aa, Fonticella tunisiensis
  misc_feature (1)..(125): tr|A0A4R7KAF9|A0A4R7KAF9_9CLOT 6-carboxy-5,6,7,8-tetrah ydropterin synthase OS=Fonticella tunisiensis OX=109634 1 GN=EDD71_11830 PE=3 SV=1
MILIKEFEFDAAHNLVKYHGKCERLHGHTYKLVVKLEGTPDSEGMVFDFVELKRIVKEKVVDKFDHAYINDIISQPTAENIAVYVWNELVEVLKRSNCRLYEVEVWETKTSGVIYRGEAHERLAE

SEQ ID NO: 20616 - protein, 155 aa, Fonticella tunisiensis
  misc_feature (1)..(155): tr|A0A4R7KVE3|A0A4R7KVE3_9CLOT PreQ(0) biosynthesis pro tein QueD OS=Fonticella tunisiensis OX=1096341 GN=EDD71 _10116 PE=4 SV=1
MVNVSITKEFTWDMAHMLACHEGLCKNIHGHTYKMQVEVTRKSKDLITSPGNSEEGMVIDFNHLKNIVKDKIIDPLDHAFMYWCQSPDSLEHEIAELLRKHGRKVVTVTYKPTAEEMARNFLEILSHEFDKHDILIRSVKVWETPTSFATAVREE

SEQ ID NO: 20617 - protein, 281 aa, Fontimonas thermophila
  misc_feature (1)..(281): tr|A0A1I2IC98|A0A1I2IC98_9GAMM 6-pyruvoyl tetrahydropte rin synthase OS=Fontimonas thermophila OX=1076937 GN=SA MN04488120_103215 PE=4 SV=1
MTCLFVEQLTVIDCAYLDAARGLVGESWIVDVELEGHLDAESMLLDFAELKRRCKQVIDRSVDHRLLVPAAAPELQLTEDGEDLHLVFRSDIGVIEHLSPRVAVTLVDTAEIDAQTVSAHLHPRLRAVLPDNVGTLRVLLRHERIDGAYYHYVHGLKKHRGACQRIAHGHRSKIEVCVDGVRDPSLERAVAHRWLDIYLGTREDIVARGNGRIRFAYRAAEGHYQLALPETHVDLLDGDSTVERIAEHLARRLAYERPGQTVAVRAYEGIMKGASAQARIG

SEQ ID NO: 20618 - protein, 144 aa, Fontimonas thermophila
  misc_feature (1)..(144): tr|A0A1I2HBZ6|A0A1I2HBZ6_9GAMM 6-pyruvoyltetrahydropter in/6-carboxytetrahydropterin synthase OS=Fontimonas the rmophila OX=1076937 GN=SAMN04488120_101293 PE=4 SV=1
MTSEARPIVYLTRRETFCAGHRLWSDALSADENRRLFGPCAYEHGHGHNYVLEVTLRGPVDPKTGVVVNLTEVRDAIRTLVLDDVDHRFLNHDSVLCRGINPSVENLAVLFWDVLHARFGDLLYEVRLHETEKNWAVYRGERRS

SEQ ID NO: 20619 - protein, 197 aa, Formivibrio citricus
  misc_feature (1)..(197): tr|A0A1I5CEZ4|A0A1I5CEZ4_9NEIS 6-pyruvoyltetrahydropter in/6-carboxytetrahydropterin synthase OS=Formivibrio ci tricus OX=83765 GN=SAMN05660284_02397 PE=4 SV=1
MLIRKLFRFESAHIVRNCSSLRCSTSIHGHSYKVEVLLEAHALDHGQMVYDFGLMKGNIRDVIDAFDHAICFWDKDDPEYIRLCKQFSARWISMPVSPSAEQFARLFFVIIEAILRQTIMGNGEGVVRLHSVIAHETETGYAQAFPEDAHNERMGPIRLEEIEFSEQCRKEWRDPQMYEKLQAGEPFINSAPPLQVK

SEQ ID NO: 20620 - protein, 150 aa, Formosa agariphila
  misc_feature (1)..(150): tr|T2KH93|T2KH93_FORAG 6-pyruvoyl tetrahydrobiopterin s ynthase OS=Formosa agariphila (strain DSM 15362 / KCTC 12365 / LMG 23005 / KMM 3901) OX=1347342 GN=BN863_560 P E=4 SV=1
MSNIRITKQFTFETGHALYGYDGKCKNVHGHSYKLSVTVIGKPITDNTNVKYGMVIDFGDLKKIVKTEIVDVFDHATVFNKNTPHVELAKELSDRGHNVLLVDYQPTSEMMVIDFASKIKTYLPSHIALHSLRLQETDSSFAEWYASDNL

SEQ ID NO: 20621 - protein, 136 aa, Formosa agariphila
  misc_feature (1)..(136): tr|T2KP09|T2KP09_FORAG 6-carboxy-5,6,7,8-tetrahydropter in synthase OS=Formosa agariphila (strain DSM 15362 / K CTC 12365 / LMG 23005 / KMM 3901) OX=1347342 GN=BN863_2 4790 PE=3 SV=1
MIAKVSRQGYFNAAHRLYRKDWTDEKNQLIFGRCNNPNYHGHNYEIIVSVTGEIDQETGFVIDLKILKQLIKDEVEEAFDHKNLNLDVPEFKDLNPTAENIAVVIYNKLKPKLNDYLDLEITLYETPRNFVSYSGK

SEQ ID NO: 20622 - protein, 136 aa, Formosa algae
  misc_feature (1)..(136): tr|A0A2K2Z704|A0A2K2Z704_9FLAO 6-carboxy-5,6,7,8-tetrah ydropterin synthase OS=Formosa algae OX=225843 GN=BKP44 _13020 PE=3 SV=1
MIAKVSRQGYFNAAHRLYRKDWSDEKNQDIFGRCNNANYHGHNYDVIVSVSGEIDQETGFVIDLKILKQLIKDEVEEAFDHKNLNLDVPDFKDLNPTAENIAVVIYNKLKPRLASHLDLEITLYETPRNFVSYCGN

SEQ ID NO: 20623 - protein, 150 aa, Formosa algae
  misc_feature (1)..(150): tr|A0A2K2Z6J2|A0A2K2Z6J2_9FLAO 6-carboxytetrahydropteri n synthase QueD OS=Formosa algae OX=225843 GN=BKP44_140 10 PE=4 SV=1
MSNIRITKQFTFETGHALYGYDGKCKNVHGHSYKLSVTVIGKPITDNTNVKYGMVIDFGDLKHIVKREIVDVFDHATVFNKNTPHVELARELEKRDHNVLLVDYQPTSEMMVIDFAQKIKQYLPTHIALHSLKLQETDSSFAEWYASDNS

SEQ ID NO: 20624 - protein, 110 aa, Formosa sp.
  misc_feature (1)..(110): tr|A0A2D4WYL4|A0A2D4WYL4_9FLAO 6-pyruvoyl tetrahydrobio pterin synthase (Fragment) OS=Formosa sp. OX=2018467 GN =CMP78_06465 PE=4 SV=1
MKVTVSRRAHFNAAHRLYRHNWSDEKNEAIFGKCNNPHFHGHNYELIVSVTGEVDPETGYVVDVKILKDFIKSEVEDTLDHKNLNLEVPEFKETNPTAENIVIFIYNKLK

SEQ ID NO: 20625 - protein, 136 aa, Formosa sp.
  misc_feature (1)..(136): tr|A0A5D0G742|A0A5D0G742_9FLAO 6-carboxy-5,6,7,8-tetrah ydropterin synthase OS=Formosa sp. 1494 OX=2592046 GN=F VF61_08270 PE=3 SV=1
MEVTVSRKAHFNAAHRLYRKDWSNEKNEAVFGKCNNPNYHGHNYELIVSVTGKIDKETGYVIDMKILKDIIKEEVEDAFDHKNLNEDVAIFKNLNPTAENIVVVIYNKLKPKLKSDLKLEVTLFETPRNYVSYSGN

SEQ ID NO: 20626 - protein, 136 aa, Formosa spongicola
  misc_feature (1)..(136): tr|A0A316DKS9|A0A316DKS9_9FLAO 6-carboxy-5,6,7,8-tetrah ydropterin synthase OS=Formosa spongicola OX=570520 GN= LX78_02062 PE=3 SV=1
MKVTVSRKAHFNAAHRLYRKDWSNEKNDVVFGKCNNPNYHGHNYELIVSVTGQIDKETGYVIDMKVLKELIKEEVEDVLDHKNLNEDVEAFKNLNPTAENIVVVIYNILKPKLNSSLELEVTLFETPRNFVSYSGK

SEQ ID NO: 20627 - protein, 152 aa, Formosa spongicola
  misc_feature (1)..(152): tr|A0A316DTA0|A0A316DTA0_9FLAO 6-pyruvoyltetrahydropter in/6-carboxytetrahydropterin synthase OS=Formosa spongi cola OX=570520 GN=LX78_00119 PE=4 SV=1
MSKIRITKQFSFETGHALYGYDGKCKNVHGHSYKLSVTVIGTPISNTDNVKFGMVIDFGDLKKIVKNEIVDVFDHATVFNKNTPHVELAKELEDRGHNVLLVDYQPTSEMMVIDFANKIKTQLPSHIALHSLKLQETDTSFAEWYASDNNSL

SEQ ID NO: 20628 - protein, 188 aa, Fournierella massiliensis
  misc_feature (1)..(188): tr|A0A4R1R8F8|A0A4R1R8F8_9FIRM 6-pyruvoyltetrahydropter in/6-carboxytetrahydropterin synthase OS=Fournierella m assiliensis OX=1650663 GN=EDD77_10196 PE=4 SV=1
MRSITTLDLQYAHRFYGFKGEAQYLHGHTGVLTIEVEDTVEPGVNMVFPCNEIQKTAWEVLKNFDHALILRQDDPLLPAVLKVYEEQGIRDGAPQNQMKGPAFQTELATAYPECRLVVTKETLTVEGMIKIVYDLLKDKLNIAKITFTSGVNAASAEFETHNNIDRCPLCGIALNENGVCPKCGYKKH

SEQ ID NO: 20629 - protein, 178 aa, Francisella adeliensis
  misc_feature (1)..(178): tr|A0A2Z4XXB9|A0A2Z4XXB9_9GAMM Uncharacterized protein OS=Francisella adeliensis OX=2007306 GN=CDH04_00820 PE= 4 SV=1
MWQISKSFDFCYGHRVWAQELNSEFSENKKCSCRHLHGHNGTATINLVSESLDKQGMVTDFGNLSWFKTWLKNHIDHKFILDINDPLFMSLTHSKELQNQSFEGLQIAQAIVQDGSLDKHLQEYLNSFVVVNFIPTSENLAKWLCQIISHKMKQLNIKVHSVELYETPKSKSIYYNNQ

SEQ ID NO: 20630 - protein, 143 aa, Francisella sp.
  misc_feature (1)..(143): tr|A0A2W6RTM8|A0A2W6RTM8_9GAMM 6-carboxy-5,6,7,8-tetrah ydropterin synthase OS=Francisella sp. OX=2047875 GN=DI 619_05595 PE=3 SV=1
MTETFKVTREFRFEAAHLLDHHDGKCKNLHGHGYVLQVELMAPLHISGPKEGMVWDFADLKSLVWEKILESFDHSFIYNTHSERESKIANLLISLDSKVTPLPFRTTAEALAKYIFDILTQAGAPISAVRLWESAYSFCEYRR

SEQ ID NO: 20631 - protein, 120 aa, Franconibacter pulveris
  misc_feature (1)..(120): tr|A0A0J8VLT7|A0A0J8VLT7_9ENTR 6-carboxy-5,6,7,8-tetrah ydropterin synthase OS=Franconibacter pulveris OX=43591 0 GN=ACH50_09785 PE=3 SV=1
MPTTLFKDFMFEAAHRLPHVPEGHKCGRLHGHSFMVRLEVTGEVDPHTGWIIDFAELKAAFKPVYDQLDHYYLNDIPGLENPTSEVLAKWIWDQMKPKMPLLSAVMIKETCTAGCVYRGE

SEQ ID NO: 20632 - protein, 130 aa, Frankia alni
  misc_feature (1)..(130): tr|Q0RM63|Q0RM63_FRAAA 6-carboxy-5,6,7,8-tetrahydropter in synthase OS=Frankia alni (strain ACN14a) OX=326424 G N=ptp PE=3 SV=1
MTMPAFEISKTFEFSASHRLSGLPADHKCARLHGHNYTVRVQLRGETLDPVGFLLDYGELSPVRDWIDAALDHQHLNACLDFNPTAELLAQHLAGTVRQLVPIPDGVRVAVGVSETPRTWAFYREAEAAQ

SEQ ID NO: 20633 - protein, 124 aa, Frankia casuarinae
  misc_feature (1)..(124): tr|Q2J7K6|Q2J7K6_FRACC 6-carboxy-5,6,7,8-tetrahydropter in synthase OS=Frankia casuarinae (strain DSM 45818 / C ECT 9043 / CcI3) OX=106370 GN=Francci3_3381 PE=3 SV=1
MEIFREFTFEAAHRLPEVPEGHKCARLHGHSFRIAIQVVGPVDPRAGWVMDFADLRAAFAPLHDQLDHRYLNEVPGLDNPTSENLARWIWDRLAGELPLSAVTVRETCTSGCIYRGDEPDRTPA

SEQ ID NO: 20634 - protein, 144 aa, Frankia casuarinae
  misc_feature (1)..(144): tr|Q2JC61|Q2JC61_FRACC 6-carboxy-5,6,7,8-tetrahydropter in synthase OS=Frankia casuarinae (strain DSM 45818 / C ECT 9043 / CcI3) OX=106370 GN=Francci3_1755 PE=3 SV=1
MGSCANWFAALAVGLAWKGQPVFAIRKEFGFSASHVLDHLPADHPCSRMHGHNYTVVLELKAQESGLNEAGFVRDYRDLGEFKAWTDDTLDHRHLNDVIIDLNPSAEQLARWIFTTWREKLPELVAVSVSETPKTWAEFRPRVD

SEQ ID NO: 20635 - protein, 156 aa, Frankia irregularis
  misc_feature (1)..(156): tr|A0A0S4QZW8|A0A0S4QZW8_9ACTN 6-pyruvoyltetrahydropter in/6-carboxytetrahydropterin synthase OS=Frankia irregu laris OX=795642 GN=Ga0074812_15220 PE=4 SV=1
MASQIQVGGDRFVFSAAHAALHDGHLEPLHGHSYVPTVLLSGEVDTAGIVVDFGIVEKALGAVVARLHCRTLLAENAPGVDVAVSGAEVNMCCGPDRYRFPRSAVVLLPIVNTTTEALASWILSEVVGLVGHRPGLIAGVELAETSGLRATVRQEP

SEQ ID NO: 20636 - protein, 136 aa, Frankia sp.
  misc_feature (1)..(136): tr|A0A0Q0XM95|A0A0Q0XM95_9ACTN 6-carboxy-5,6,7,8-tetrah ydropterin synthase OS=Frankia sp. ACN1ag OX=102891 GN= UK82_12785 PE=3 SV=1
MTFSSVPMPPGTYTISKTFDFEGGHRLPGLPSEHKCSRQHGHSYEVEVILTAPRLEEPGFVTDFGALAPFKEFLAADLDHHNLHEILPFEPTSELLAQFLAGWFIQNVEPTIPGRLVAVGVRETRRSWARFEVEGQ

SEQ ID NO: 20637 - protein, 127 aa, Frankia sp.
  misc_feature (1)..(127): tr|A0A062X7U7|A0A062X7U7_9ACTN 6-carboxy-5,6,7,8-tetrah ydropterin synthase OS=Frankia sp. BMG5.23 OX=683305 GN =BMG523Draft_00742 PE=3 SV=1
MEYRIGKRFSFDAAHHLEGLASGHKCSRVHGHTYTVEVVLTADRLSGPGFVTDFGDLAPFSDFLDKHFDHRDLNEVLDVPPTSELVATHLAHWFIDNLEPLIPGRLVSMRVAETPGSWAEYTPPGRH

SEQ ID NO: 20638 - protein, 132 aa, Frankineae bacterium
  misc_feature (1)..(132): tr|A0A1G8QE27|A0A1G8QE27_9ACTN 6-pyruvoyl-tetrahydropte rin synthase OS=Frankineae bacterium MT45 OX=1882833 GN =SAMN05444157_1367 PE=4 SV=1
MFSVTVRDHLMIAHSFQGEVFGPAQRLHGATYVVDATFRRPELDDDGIVVDIGQATQQLHKVLADLTYRNLDEVPEFAGVNTSTEFLARVIADRLAARVHAGSLGAGAGGLTGLTVTLHESHVAWAGYERSL

SEQ ID NO: 20639 - protein, 127 aa, Frateuria aurantia
  misc_feature (1)..(127): tr|H8L1G3|H8L1G3_FRAAD 6-carboxy-5,6,7,8-tetrahydropter in synthase OS=Frateuria aurantia (strain ATCC 33424 / DSM 6220 / NBRC 3245 / NCIMB 13370) OX=767434 GN=Fraau_ 0194 PE=3 SV=1
MHIFKIFTIEAAHHLPKVPAGHKCSRLHGHSFRIELHVAGPIGEDTGWVMDFGDLKQAFAPIYDQLDHHYLNDIEGLDNPTSEILARWIYHKTLPRVPGLDQVVVHETCTSGASYRRKDYLAEQVGA

SEQ ID NO: 20640 - protein, 120 aa, Frateuria sp.
  misc_feature (1)..(120): tr|A0A0Q9Q793|A0A0Q9Q793_9GAMM 6-carboxy-5,6,7,8-tetrah ydropterin synthase OS=Frateuria sp. Soil773 OX=1736407 GN=ASG87_17695 PE=3 SV=1
MHIFKVFQIEAAHRLPNVPAGHKCARLHGHSFRIEIHVAGEPSPELGWVMDFADVKAAFAPLYDQLDHHYLNDIAGLENPTSETLARWIFRRLEPALPGLDKVVVHETCTSGASCSRDSF

SEQ ID NO: 20641 - protein, 120 aa, Frateuria terrea
  misc_feature (1)..(120): tr|A0A1H6SS38|A0A1H6SS38_9GAMM 6-carboxy-5,6,7,8-tetrah ydropterin synthase OS=Frateuria terrea OX=529704 GN=SA MN04487997_1383 PE=3 SV=1
MHIHKVFQIEAAHRLPNVPAGHKCARLHGHSFRVEVHVEGEPDPALGWVMDFADIKTAFAPLFEQLDHHYLNDIEGLDNPTSEMLARWIFRRLEPRLPGLDRVVVHETCTSAASCSRTSF

SEQ ID NO: 20642 - protein, 140 aa, Frederiksenia canicola
  misc_feature (1)..(140): tr|A0A3N4W997|A0A3N4W997_9PAST 6-carboxy-5,6,7,8-tetrah ydropterin synthase OS=Frederiksenia canicola OX=123824 GN=EDC49_1451 PE=3 SV=1
MFKIAKEFSFDMAHMLDGHDGKCQNLHGHTYTLQVEIGGELRTSGAKSGMVMDYSDLKAIVKTHILDKMDHAFIYDSTSERECQVANLLNSLNSKTFAIPTRTTAEQMAKYIFDTLCDVGLPVSLIRLWETPTSYCEYSR

SEQ ID NO: 20643 - protein, 128 aa, Fremyella diplosiphon
  misc_feature (1)..(128): tr|A0A1Z4ME89|A0A1Z4ME89_MICDP 6-carboxy-5,6,7,8-tetrah ydropterin synthase OS=Fremyella diplosiphon NIES-3275 OX=1973485 GN=NIES3275_38400 PE=3 SV=1
MPEWKLVTEFTFDSAHYIKDYDGPCGRMHGHTYKVRMEAKSSQLHSSEFCPHPVMVADFRTLRWAKQDVTKGGLDHCVLNEVLPPEYETTAEMIAKYIYDRTKQQLPPNVELKVRVSETANSWVEYQE

SEQ ID NO: 20644 - protein, 290 aa, Fremyella diplosiphon
  misc_feature (1)..(290): tr|A0A1Z4MFH6|A0A1Z4MFH6_MICDP Putative 6-pyruvoyl tetr ahydropterin synthase OS=Fremyella diplosiphon NIES-327 5 OX=1973485 GN=NIES3275_42090 PE=4 SV=1
MQCIVNRRAQFSASHRYWLPELSEAENTQQFGACSRFPGHGHNYVLFISLIGELDEYGMVLNLSDVKQVIKREVTSQLDFSYLNDVWPDFQQTLPTTENIARVIWQRLAPHLPLVRVQLFEHPELWADYMGNSMEAYLTISTHFSAAHRLAHPNLSNEENAEIYGKCARTHGHGHNYHLEVTVKGEIDQRTGMIVDLGALNQVIEDYVVEPFDHTFLNKDIPYFGEVVPTAENIALYISNLLRSPVQKLGAKLHKVKLIESPNNSCEIYCTDAESTSVSANANQPMLARV

SEQ ID NO: 20645 - protein, 133 aa, Frigoribacterium sp.
  misc_feature (1)..(133): tr|A0A1R4G2Y5|A0A1R4G2Y5_9MICO PTPS-like type 4 OS=Frig oribacterium sp. JB110 OX=1434829 GN=CZ774_11335 PE=4 S V=1
MTFTVTVRDHMMIAHSLSGDVFGPAQNLHGATYVVDASFRASELSADGVVVDIGRAASALHEITSSLTNRNLDDDPRFAGTNTTTEHLCRVVADALAERAGDGALGAEGRLLTTITVTLHESHIAWASFERQL

SEQ ID NO: 20646 - protein, 139 aa, Frischella perrara
  misc_feature (1)..(139): tr|A0A0A7RXU0|A0A0A7RXU0_FRIPE 6-carboxy-5,6,7,8-tetrah ydropterin synthase OS=Frischella perrara OX=1267021 GN =queD PE=3 SV=1
MYKIAKEFQFDACHMLDGHNGKCHNLHGHTYRLIIEISANLIEQGSSADMVMDFADIKQTVKQHVIDKLDHAFLYNQHNNNESQIADLLQKMQRKTFAFPCRTTAEGMSKFIFNVLKQYLPISSVTLWETPTSYCQYSE

SEQ ID NO: 20647 - protein, 133 aa, Frondihabitans australicus
  misc_feature (1)..(133): tr|A0A495IHL0|A0A495IHL0_9MICO 6-pyruvoyl-tetrahydropte rin synthase OS=Frondihabitans australicus OX=386892 GN =C8E83_2387 PE=4 SV=1
MSFTVTVRDHMMIAHSFTGEAFGPAQRLHGATFVVDASFGAADLDADGVVVDIGWASAALAGVVGVLSYRNLDDEPLFTGVNTTTEVLCRHVADRLADALDEVGDSRVETVAVTLHESHVAWASYSRARRVAR

SEQ ID NO: 20648 - protein, 167 aa, Fuerstia marisgermanicae
  misc_feature (1)..(167): tr|A0A1P8WFF1|A0A1P8WFF1_9PLAN Queuosine biosynthesis p rotein QueD OS=Fuerstia marisgermanicae OX=1891926 GN=F uma_02388 PE=4 SV=1
MTETFEACVTKDSLVFSAAHFITFNGNICERLHGHNWRLDVSIAGHLDENHYVFDFIAMRDACQSIVNELDHKVLLPDRHDSITVQTSDDGREVTARFEERRWVFPVEDCAILPLENTTAELIARLIGQQLMTALDLASVRNVTSLKVSVEENFGQWATVTLPVGAV

SEQ ID NO: 20649 - protein, 169 aa, Fuerstia marisgermanicae
  misc_feature (1)..(169): tr|A0A1P8WID6|A0A1P8WID6_9PLAN Queuosine biosynthesis p rotein QueD OS=Fuerstia marisgermanicae OX=1891926 GN=F uma_03437 PE=4 SV=1
MIIRKEYKFYAAHRNETLQDKCSNIHGHRYGLRIHFEVEREGDISTLFGDFDDKIEPYLKSNFDHGMLINCNDPLYQTLLDHTKRTGEHFRLKVFDGPTSVENLAWIMFSEITEMGFRLDRLEVQETDTSTLIYTREDWVRDNRHFAKSSGETSNDEKETSETPSNKTV

SEQ ID NO: 20650 - protein, 132 aa, Fulvimarina manganoxydans
  misc_feature (1)..(132): tr|A0A1W2CRP9|A0A1W2CRP9_9RHIZ 6-pyruvoyl-tetrahydropte rin synthase OS=Fulvimarina manganoxydans OX=937218 GN= SAMN06297251_11180 PE=4 SV=1
MFAVEVRDHIMIAHSLPREVFGPAQKMHGATFVVDAAFFTEDVDENGLGVDIGLATEVLSNTLKPLNYQNLDEMDVFAGKVTTTEVLAKHIFDALKAGVAGGDLGPGGARIKRIRVSLHESHVARAWYEAEL

SEQ ID NO: 20651 - protein, 132 aa, Fulvimarina pelagi
  misc_feature (1)..(132): tr|Q0G7E1|Q0G7E1_9RHIZ Uncharacterized protein OS=Fulvi marina pelagi HTCC2506 OX=314231 GN=FP2506_06276 PE=4 S V=1
MFAVEVTDHIMIAHSLPRPVFGPAQGMHGATFTVDAAFFTEDLDDDGLAVDIGAASEILSGVLKPLNYQNLDEITEFNGKVTTTEFLARHIFSKIAKEIAAGRMGEAGGRVMKLRVRLHESQVARAWYEAAL

SEQ ID NO: 20652 - protein, 132 aa, Fulvimarina sp.
  misc_feature (1)..(132): tr|A0A371X298|A0A371X298_9RHIZ 6-carboxytetrahydropteri n synthase OS=Fulvimarina sp. 85 OX=2293836 GN=DYI37_09 850 PE=4 SV=1
MFAVEVTDHIMIAHSLPRPVFGPAQGMHGATLTVDAAFFTEDLDEDGLAVDIGAATDILKEVLRPLNYQNLDEISEFSGKVTTTEFLARHIHRKIAEAIAGGRMGEAGGRVAKLRVRLHESQVARAWYEASL

SEQ ID NO: 20653 - protein, 132 aa, Fulvimarina sp.
  misc_feature (1)..(132): tr|A0A2E1HKA0|A0A2E1HKA0_9RHIZ Uncharacterized protein OS=Fulvimarina sp. OX=1969479 GN=CMP81_23590 PE=4 SV=1
MFAVEVRDHMMIAHSLPRPVFGAAQGMHGATFVVDAAFFTEDLDADGLAVDIGLASTLLKAVLEPLNYQNLDAIEGFRGKVTTTEFLAKHLFDRLAEEIAAGALGEGGARIRRLKVSLEESHVARAWYEGAL

SEQ ID NO: 20654 - protein, 120 aa, Fulvimonas soli
  misc_feature (1)..(120): tr|A0A316IYQ6|A0A316IYQ6_9GAMM 6-carboxy-5,6,7,8-tetrah ydropterin synthase OS=Fulvimonas soli OX=155197 GN=C74 56_102118 PE=3 SV=1
MHIFKVFQIEAAHRLPNVPAGHKCARLHGHSFRIEVHVEGEPDPALGWVMDFADVKAAFAPLFERLDHHYLNDVEGLENPTSENLARWIFSRLEPALPGLDKVVVHETCTAGASCSRASL

SEQ ID NO: 20655 - protein, 138 aa, Fulvivirga imtechensis
  misc_feature (1)..(138): tr|L8JMK1|L8JMK1_9BACT 6-pyruvoyl tetrahydrobiopterin s ynthase OS=Fulvivirga imtechensis AK7 OX=1237149 GN=C90 0_00200 PE=4 SV=1
MVFLSRQEHFNAAHKLYNPNWSEEKNVEVFGPCANANWHGHNFEMIVTVKGDPDPDTGFVVDLKKLSVLIRKEIIEKVDHKNLNVDVPFMKGKMASTENLVIEFWKILEKKLPEITSSAKLHCIKLYETPRNFVEYYG

SEQ ID NO: 20656 - protein, 150 aa, Fulvivirga imtechensis
  misc_feature (1)..(150): tr|L8JJQ6|L8JJQ6_9BACT 6-pyruvoyl tetrahydrobiopterin s ynthase OS=Fulvivirga imtechensis AK7 OX=1237149 GN=C90 0_00317 PE=4 SV=1
MSAKGVFFAKNINLILKVAVYRKEHFNAAHRLYNSEWDDDKNTQVFGKCSNPHFHGHNYELFVKITGEVDPETGYVYDMKKLSDLIKAHVIKKFDHKNLNLDTEYFKELNPTAENIAIVIYNILRGKLDGSLDLKIRLYETERNFVEYPA

SEQ ID NO: 20657 - protein, 135 aa, Fulvivirga sp.
  misc_feature (1)..(135): tr|A0A553FU98|A0A553FU98_9BACT 6-carboxytetrahydropteri n synthase OS=Fulvivirga sp. M361 OX=2594266 GN=FNH22_0 7250 PE=4 SV=1
MRVSVFRKEHFNAAHRLHNSEWTAEKNHIVFGKCNNPNYHGHNYELIVKVIGEVDPNTGYVYDMKKLSDLIKVQVLDRFDHKNLNLDTEEFKELNPTAENIAIVIYDLLRAKIDKALDLKITLYETERNFVEYPV

SEQ ID NO: 20658 - protein, 152 aa, Fulvivirga sp.
  misc_feature (1)..(152): tr|A0A553FS05|A0A553FS05_9BACT 6-carboxytetrahydropteri n synthase OS=Fulvivirga sp. M361 OX=2594266 GN=FNH22_0 8235 PE=4 SV=1
MYSHHKVRVTKEFSFEMAHALEGYDGKCRNIHGHSYHLSVTIIGTPINNLNNPKNGMVMDFGDLKGIVERVVIEPLDHSLVLFEESEFKKGIKNCSGQLVVFKPYNPTCENLIIDFARQIRFALPGGAQLHSLKLRETQTGYAEWHASDNGT

SEQ ID NO: 20659 - protein, 142 aa, Fusibacter sp.
  misc_feature (1)..(142): tr|A0A1B6BAH6|A0A1B6BAH6_9FIRM Queuosine biosynthesis Q ueD OS=Fusibacter sp. 3D3 OX=1048380 GN=F3D3_1302 PE=4 SV=1
MYFLKCEHSFDSAHFLKDYQGKCANIHGHRWRVVAEIYSEKLVEEGILRGMIVDFGDLKRDLKIEVDYFDHALIIEKGSMKAKTLACLIEDDFRVIEVMFRPTAESFSAHFYDQMTRRGYSVKSIEVYETPTNCASFEGVTL

SEQ ID NO: 20660 - protein, 143 aa, Fusibacter sp.
  misc_feature (1)..(143): tr|A0A4Q1ZZ22|A0A4Q1ZZ22_9FIRM 6-carboxy-5,6,7,8-tetrah ydropterin synthase OS=Fusibacter sp. A1 OX=2283630 GN= queD PE=3 SV=1
MFTITAQSHFDSAHFLSGYEGKCSNLHGHRWVVEATVLAEQLHDSGQLKGMVVDFGDIKKALKDLVDFYDHSMIYEEGTLKAKTIEALSDEGFRIIKIDFRPTAECFAKHFHDALKAQGFNLSGVTVFETPTNRATYSEVSHV

SEQ ID NO: 20661 - protein, 139 aa, Fusobacteriia bacterium
  misc_feature (1)..(139): tr|A0A1W9W0T3|A0A1W9W0T3_9BACT 6-carboxy-5,6,7,8-tetrah ydropterin synthase OS=Fusobacteriia bacterium 4572_74 OX=1972457 GN=B6227_02500 PE=3 SV=1
MYILKGEHSFDSAHFLADYQGKCSNIHGHRWRVIAEIYGEELKQEGQLRGMVTDFGDIKKDIKKIVDDHDHALIIEKGTTREITLQCLKEDNFNIIEVDFRPTAEEFSRYFYEILEGKGYSVKRVTVYETPTNSATYEK

SEQ ID NO: 20662 - protein, 139 aa, Fusobacteriia bacterium
  misc_feature (1)..(139): tr|A0A1W9TMX7|A0A1W9TMX7_9BACT 6-carboxy-5,6,7,8-tetrah ydropterin synthase OS=Fusobacteriia bacterium 4572_132 OX=1971640 GN=B6I28_02035 PE=3 SV=1
MYSLKTESHFDSAHFLANYDGKCGNIHGHRWKIEIEVVAEELKNEGQEIGMVVDFGILKRDLKEIADDYDHTLIIEKGTMRKETLNCLIEDSFKIIELDFRPTAENFAKSFFDIMAKKGYNVKQVTVYETPVNCATYSK

SEQ ID NO: 20663 - protein, 159 aa, Fusobacterium equinum
  misc_feature (1)..(159): tr|A0A133N8B7|A0A133N8B7_9FUSO Queuosine biosynthesis p rotein QueD OS=Fusobacterium equinum OX=134605 GN=HMPRE F3206_01726 PE=4 SV=1
MRDRLVVYPYFFIKEKFMYTLSSEASFDSAHFLKDYIGKCRNIHGHRWKVKIEIYAENLQSDGGFRGMVLDFGDIKKELKEITNYFDHAFILEKNSLKPSLFNALVEEGFRLIEVDFRPTAENFSKFFYEHFEKKGFPVLQATVYETPNNCASYSKGVR

SEQ ID NO: 20664 - protein, 142 aa, Fusobacterium gonidiaformans
  misc_feature (1)..(142): tr|E5BED4|E5BED4_9FUSO 6-carboxy-5,6,7,8-tetrahydropter in synthase OS=Fusobacterium gonidiaformans 3-1-5R OX=4 69605 GN=queD PE=3 SV=1
MYTLSSEASFDSAHFLKDYIGKCRNIHGHRWKVKIEIYAENLQSDGGFRGMVLDFGDIKKELKEITNYFDHAFILEKNSLKPSLFNALVEEGFRLIEVDFRPTAENFSKFFYEHFEKKGFPVLQATVYETPNNCASYSKGVR

SEQ ID NO: 20665 - protein, 146 aa, Fusobacterium hwasookii
  misc_feature (1)..(146): tr|A0A0S2ZCX6|A0A0S2ZCX6_9FUSO 6-carboxy-5,6,7,8-tetrah ydropterin synthase OS=Fusobacterium hwasookii ChDC F30 0 OX=1307444 GN=RN97_00820 PE=3 SV=1
MEIINKEFKFDTAHILPNHYGQCKNLHGHTYKLIVSCAGEHKKDLSSECMIIDFSKLKKIVQENIIDKFDHAFILGAGDQEVEKDIKAVLMKHNLKFIDLGYRSTAENISKYIFNKLKPILKSENIELIKITLYETETSYIEYTEL

SEQ ID NO: 20666 - protein, 188 aa, Fusobacterium mortiferum
  misc_feature (1)..(188): tr|C3WF96|C3WF96_FUSMR Uncharacterized protein OS=Fusob acterium mortiferum ATCC 9817 OX=469616 GN=FMAG_02114 P E=4 SV=1
MRSITSFDLQYAHRFYKFRGEAQYLHGHTGVLTIEVEDSINEGVNMVFPCNEIQKTAWEVLKNFDHSLILREDDPLLPAILKVYEETGIKDGTPQNVMKGPAFKTDLATAYPDARLVVTKETLTVEGMIKIVYDLLKDKLNIAKITFTSGVNAASAEFTTKNNIDRCPLCGISLDENGVCPKCGYKKR

SEQ ID NO: 20667 - protein, 142 aa, Fusobacterium mortiferum
  misc_feature (1)..(142): tr|C3WEG3|C3WEG3_FUSMR 6-carboxy-5,6,7,8-tetrahydropter in synthase OS=Fusobacterium mortiferum ATCC 9817 OX=46 9616 GN=queD PE=3 SV=1
MYTLISEASFDSAHFLSGYNGKCKNIHGHRWTIKMEIYGEKLQSEGHLRGMILDFGDIKSMLKELADYFDHSLIIERDSMRNATLNYLKEDGFKIVEIDFRPTAENFSRYIFDYFKERKIPVKKVIVYETPNNCATYSEEIK

SEQ ID NO: 20668 - protein, 142 aa, Fusobacterium necrogenes
  misc_feature (1)..(142): tr|A0A377GX98|A0A377GX98_9FUSO 6-carboxy-5,6,7,8-tetrah ydropterin synthase OS=Fusobacterium necrogenes OX=858 GN=queD PE=3 SV=1
MYTLISEASFDSAHFLSGYNGKCKNIHGHRWTIKMEICGEKLENEGHLRGMLLDFGDIKSMLKELADYFDHSLIIEKDSMRNATLNYLKEDGFRIIEIDFRPTAENFSKYIFDYFKERKIPVKKVIVYETPNNCATYSEGIK

SEQ ID NO: 20669 - protein, 187 aa, Fusobacterium necrogenes
  misc_feature (1)..(187): tr|A0A377GUX0|A0A377GUX0_9FUSO Queuosine biosynthesis p rotein QueD OS=Fusobacterium necrogenes OX=858 GN=NCTC1 0723_00199 PE=4 SV=1
MRSITSFDLQYAHRFYKFKGEAQYLHGHTGVLTIEVEDSVNEGVNMVFPCNEIKKTAWEVLQNFDHSLILREDDPLLPAILKVYEETGIKDGAPQNTMKGPAFKTELATAYPDARLVVTKETLTVEGMIKIVYDLLKDKLNIAKITFTSGVNAASAEFTTKNNIERCPLCGISLDEHGACPKCGYKK

SEQ ID NO: 20670 - protein, 147 aa, Fusobacterium necrophorum
  misc_feature (1)..(147): tr|J6GS39|J6GS39_9FUSO 6-carboxy-5,6,7,8-tetrahydropter in synthase OS=Fusobacterium necrophorum subsp. funduli forme Fnf 1007 OX=1161424 GN=queD PE=3 SV=1
MYTLHTEASFDSAHFLKDYQGKCRNIHGHRWKVRIEISGESLQKEGSCRGMILDFSEIKTELREITEYFDHALIIEKNSLKKSLLNALQEEQFRIIEVEFRPTAEHFAKFFYEHFQKKGFPISQALVYETPNNCASYSKDVISYAEV

SEQ ID NO: 20671 - protein, 147 aa, Fusobacterium necrophorum; identical to SEQ ID NO: 20670
  misc_feature (1)..(147): tr|A0A162IL84|A0A162IL84_9FUSO 6-carboxy-5,6,7,8-tetrah ydropterin synthase OS=Fusobacterium necrophorum subsp. funduliforme OX=143387 GN=queD PE=3 SV=1

SEQ ID NO: 20672 - protein, 146 aa, Fusobacterium nucleatum
  misc_feature (1)..(146): tr|A0A2B7YGF8|A0A2B7YGF8_FUSNP 6-carboxy-5,6,7,8-tetrah ydropterin synthase OS=Fusobacterium nucleatum subsp. p olymorphum OX=76857 GN=RN96_10600 PE=3 SV=1
MEIINKEFKFDTAHILPNHYEQCKNLHGHTYKLIVSCIGEHKTDSSSECMIIDFSKLKKIVEENIINMFDHAFILGAGNEEVEKDIKIVLMKHNLKFVDLGCRSTAENISKYIFNKLKPILKSENIELIKITLYETETSYIEYTEL

SEQ ID NO: 20673 - protein, 155 aa, Fusobacterium periodonticum
  misc_feature (1)..(155): tr|A0A2D3LVN8|A0A2D3LVN8_9FUSO 6-carboxytetrahydropteri n synthase QueD OS=Fusobacterium periodonticum OX=860 G N=CTM64_00420 PE=4 SV=1
MNFEILGEKMEIINKEFKFDTAHILPNHYGQCKNLHGHTYKLIVSCTGEHKKDSSSECMIIDFSKLKKIVEENIIKRFDHAFILGAGNEEVEKDIKIVLMKHNLKFVDLGCRSTAENISKYIFNKLKPILKSENIELIKITLYETETSYIEYTEL

SEQ ID NO: 20674 - protein, 120 aa, Fusobacterium sp.
  misc_feature (1)..(120): tr|R7J9V0|R7J9V0_9FUSO 6-carboxy-5,6,7,8-tetrahydropter in synthase OS=Fusobacterium sp. CAG:439 OX=1262899 GN= BN657_02201 PE=3 SV=1
MFEIKTQAFFAAAHHLLNYEGECENQHGHNWMVEVFVKGDTLDKSNILIDYKVLKKELNAVLNLLDHKDLNALPEFNGESPSSEMISMFIYNKLKERVVQLSKVTVWETQTSCCSYFEEA

SEQ ID NO: 20675 - protein, 187 aa, Fusobacterium sp.; identical to SEQ ID NO: 18813
  misc_feature (1)..(187): tr|R7LVM4|R7LVM4_9FUSO Uncharacterized protein OS=Fusob acterium sp. CAG:815 OX=1262901 GN=BN791_00612 PE=4 SV= 1

SEQ ID NO: 20676 - protein, 158 aa, Fusobacterium ulcerans
  misc_feature (1)..(158): tr|H1PS55|H1PS55_9FUSO Uncharacterized protein OS=Fusob acterium ulcerans 12-1B OX=457404 GN=HMPREF0402_01248 P E=4 SV=1
MRSITKLNIQYAHRFLGYEGEAEYLHGHSGFLTIEVEGDVDKRTGFVYPCNGIKSIAWDYLKNFDHALIMQENDPLLPKILEVYEKQGIKEGTKTNTNMGLPIENELAKAYPECRLVVVKKVATCENLIEVFYSLLKDKLNIKKMVFASGDNCASTEF

SEQ ID NO: 20677 - protein, 150 aa, Gaetbulibacter sp.
  misc_feature (1)..(150): tr|A0A2G5GFS8|A0A2G5GFS8_9FLAO 6-carboxytetrahydropteri n synthase QueD OS=Gaetbulibacter sp. 4G1 OX=1891971 GN =BFR04_05015 PE=4 SV=1
MSNIRITKQFSFETGHALYGYDGKCKNVHGHSYKLSVTVFGKPITDNNHVKFGMVIDFSDLKKIVKEEIVNVFDHATVFNKNTPHVELAKELENRGHNVLLVNYQPTSEMMVIDFAQKIKNRLPNHIALHSLKLQETDTSFAEWYASDNI

SEQ ID NO: 20678 - protein, 136 aa, Gaetbulibacter sp.
  misc_feature (1)..(136): tr|A0A2G5KSK2|A0A2G5KSK2_9FLAO 6-carboxy-5,6,7,8-tetrah ydropterin synthase OS=Gaetbulibacter sp. 5U11 OX=18897 80 GN=BFP78_11585 PE=3 SV=1
MKVTVSRKAHFNAAHRLYRKDWSMEKNDEVFGKCNNPNYHGHNYELIASVTGEIDQETGFVIDVKVLKDIIKTEVEDAFDHKNLNLDVTEFKDLNPTAENIAVVVYNKIKAKLKPSLDLVVTLYETPRNFVSYSGK

SEQ ID NO: 20679 - protein, 150 aa, Galbibacter marinus
  misc_feature (1)..(150): tr|K2PVZ9|K2PVZ9_9FLAO 6-pyruvoyl tetrahydrobiopterin s ynthase OS=Galbibacter marinus OX=555500 GN=I215_01510 PE=4 SV=1
MSTIRITKQFSFETGHALYGYDGKCRNVHGHSYKLSVTVIGSPITDPNNVKLGMVIDFGDLKKIVKEEIVDQFDHATVFNQNTPHKELAEELSNRGHHVILVDYQPTSENMVVDFAIKIQKRLPSHIKLFSLRLQETESSYAEWYASDNS

SEQ ID NO: 20680 - protein, 134 aa, Galbibacter marinus
  misc_feature (1)..(134): tr|K2Q4S1|K2Q4S1_9FLAO 6-carboxy-5,6,7,8-tetrahydropter in synthase OS=Galbibacter marinus OX=555500 GN=I215_06 162 PE=3 SV=1
MKLKVSRKAHFNAAHRLYKKQWDDTKNLEVFGKCSNPNFHGHNYELIVSVTGEVDEETGFVIDLKILKQLVRREIEEHLDHKNLNIEVEEFKNLNPTVENIAVVIYNRLKPHLQDFELEIVLYETPRNFVTYKG

SEQ ID NO: 20681 - protein, 120 aa, Gallaecimonas pentaromativorans
  misc_feature (1)..(120): tr|A0A3N1PPD1|A0A3N1PPD1_9GAMM 6-carboxy-5,6,7,8-tetrah ydropterin synthase OS=Gallaecimonas pentaromativorans OX=584787 GN=EDC28_102429 PE=3 SV=1
MKQTLYKDFSFDSAHRLPHVPAGHKCGNLHGHTFGVRVEVTGEVDPYTGWVMDFADLKAVVKPLIDQLDHCYLNEIEGLENPTSEVLAKWIWDQLAPKLPLLSAIWVRETCTSGCLYNGN

SEQ ID NO: 20682 - protein, 120 aa, Gallaecimonas xiamenensis
  misc_feature (1)..(120): tr|K2JDR1|K2JDR1_9GAMM 6-carboxy-5,6,7,8-tetrahydropter in synthase OS=Gallaecimonas xiamenensis 3-C-1 OX=74541 1 GN=B3C1_16561 PE=3 SV=1
MKQTLYKDFSFDSAHRLPHVPAGHKCGNLHGHTFGVRVEVTGEVDPYTGWVMDFADMKAVVKPLIDQLDHCYLNDIAGLENPTSEVLAKWIWDQLAPKLPLLSAVWVRETCTSGCLYQGD

SEQ ID NO: 20683 - protein, 142 aa, Gallibacterium anatis
  misc_feature (1)..(142): tr|A0A0A2YMH4|A0A0A2YMH4_9PAST 6-carboxy-5,6,7,8-tetrah ydropterin synthase OS=Gallibacterium anatis OX=750 GN= JP29_05595 PE=3 SV=1
MLKVAKEFSFDMAHLLDGHDGKCQNLHGHTYKLQVIVSGETEDNGAKKGMVIDFADLKRAVNELIISPMDHAFIYDQSSERETKIAQLLQQLNSKTFALPVRSTAENLAQFIFQRLQENVGFHLHSIRLWETPTSFAEYGEE

SEQ ID NO: 20684 - protein, 141 aa, Gallibacterium anatis
  misc_feature (1)..(141): tr|F4HCV9|F4HCV9_GALAU 6-carboxy-5,6,7,8-tetrahydropter in synthase OS=Gallibacterium anatis (strain UMN179) OX =1005058 GN=UMN179_00541 PE=3 SV=1
MKVAKEFSFDMAHLLDGHDGKCQNLHGHTYKLQVIVSGETEDNGAKKGMVIDFADLKRAVNELIISPMDHAFIYDQSSERETKIAQLLQQLNSKTFALPMRSTAENLAQFIFQRLQENVGFHLHSVRLWETPTSFAEYGEA

SEQ ID NO: 20685 - protein, 142 aa, Gallibacterium genomosp.
  misc_feature (1)..(142): tr|A0A1A7PJ76|A0A1A7PJ76_9PAST 6-carboxy-5,6,7,8-tetrah ydropterin synthase OS=Gallibacterium genomosp. 1 OX=15 5515 GN=QV04_10410 PE=3 SV=1
MLKVAKEFSFDMAHLLDGHDGKCQNLHGHTYKLQVIVSGETENNGAKKGMVIDFADLKRAVNELIISPMDHAFIYDQSSERETKIAQLLQQLNSKTFALPVRSTAENLAQFIFQRLQENVGFHLHSIRLWETPTSFAEYGEA

SEQ ID NO: 20686 - protein, 119 aa, Gallibacterium genomosp.
  misc_feature (1)..(119): tr|A0A0A2XGI7|A0A0A2XGI7_9PAST 6-carboxy-5,6,7,8-tetrah ydropterin synthase OS=Gallibacterium genomosp. 2 OX=15 5517 GN=P375_10965 PE=3 SV=1
MLKVAKEFSFDMAHLLDGHDGKCKNLHGHTYKLQVIVSGETENSGAKKGMVIDFADLKKVVNDLIISPMDHAFIYDQSSEREIKIAQFIFQRLKENVGFHLHSVRLWETPTSFAEYGEE

SEQ ID NO: 20687 - protein, 142 aa, Gallibacterium salpingitidis
  misc_feature (1)..(142): tr|A0A1A7P0I3|A0A1A7P0I3_9PAST 6-carboxy-5,6,7,8-tetrah ydropterin synthase OS=Gallibacterium salpingitidis OX= 505341 GN=QS62_01660 PE=3 SV=1
MYKVAKEFSFDMAHLLDGHDGKCQNLHGHTYKLQVIVTGDTYQEGAKKGMVIDFTDLKQAVNEIILQPMDHAFIYDQTSERECKIAALLTELNSKTFALPYRTTAENLARFMFARLTQYTALKITCIRLWETPTSFAEYEAD

SEQ ID NO: 20688 - protein, 147 aa, Gallionella capsiferriformans
  misc_feature (1)..(147): tr|D9SH39|D9SH39_GALCS Uncharacterized protein OS=Galli onella capsiferriformans (strain ES-2) OX=395494 GN=Gal f_1826 PE=4 SV=1
MLITRRLEFDAGHRIPNHNSQCRHLHGHRYAIEITLSGEIIKTEGQSEQGMVMDFSDVKRIAQEKLVNVWDHAFLVYRGDKQVCDFLATMPDHKTVVFDVVPTAENLAQTAFELLDPAYQDSYGNHLKLERIRLFETPNNWADCVRS

SEQ ID NO: 20689 - protein, 147 aa, Gallionella sp.
  misc_feature (1)..(147): tr|A0A522X8I7|A0A522X8I7_9PROT 6-carboxy-5,6,7,8-tetrah ydropterin synthase OS=Gallionella sp. OX=2052161 GN=qu eD PE=3 SV=1
MLITRRLEFDAGHRIPNHNSQCKHLHGHRYAIEITLSGEVITAEGQSGQGMVMDFSDVKRIANEKLVDAWDHAFLAYRGDKAVCDFLAALPGHKTVILDVVPTAENLAQTAFNILDPAYRDTYGNSLRLERVRLYETPNNWADCTRG

SEQ ID NO: 20690 - protein, 147 aa, Gallionella sp.
  misc_feature (1)..(147): tr|A0A3D2H3D5|A0A3D2H3D5_9PROT 6-carboxy-5,6,7,8-tetrah ydropterin synthase OS=Gallionella sp. OX=2052161 GN=qu eD PE=3 SV=1
MLITRRLEFDAGHRIPNHNSQCRHLHGHRYAIEITLSGEIIKTEGQSEQGMVMDFSDVKRIAQEKLVNVWDHAFLVFRSDKQVCDFLATMPDHKTVVFDVVPTAENLAQAAFELLDPAYQDSYGNHLKLERIRLFETPNNWADCVRG

SEQ ID NO: 20691 - protein, 146 aa, Gallionellaceae bacterium
  misc_feature (1)..(146): tr|A0A1J4TER7|A0A1J4TER7_9PROT 6-carboxy-5,6,7,8-tetrah ydropterin synthase OS=Gallionellaceae bacterium CG1_02 _60_325 OX=1805162 GN=AUJ80_03705 PE=3 SV=1
MQITRRLEFDAGHRIPNHTSQCKHLHGHRYAIEITLAGDVITAEGVSEQGMVMDFSDVKRIARERVVDAWDHAFLVWRKDKVVLDFLQALPDHKTVILEAVPTAENLARIAFDLLHEAYRDTFGNHLRLVRVRLFETPNNWADCTL

SEQ ID NO: 20692 - protein, 146 aa, Gallionellaceae bacterium; identical to SEQ ID NO: 20691
  misc_feature (1)..(146): tr|A0A2H0NJK7|A0A2H0NJK7_9PROT 6-carboxy-5,6,7,8-tetrah ydropterin synthase OS=Gallionellaceae bacterium CG11_b ig_fil_rev_8_21_14_0_20_60_62 OX=1974012 GN=queD PE=3 S V=1

SEQ ID NO: 20693 - protein, 148 aa, Gallionellales bacterium
  misc_feature (1)..(148): tr|A0A1G0DX73|A0A1G0DX73_9PROT 6-carboxy-5,6,7,8-tetrah ydropterin synthase OS=Gallionellales bacterium RIFCSPL OWO2_02_58_13 OX=1798252 GN=A2Z65_07195 PE=3 SV=1
MLITRRLEFDAGHRIPSHNSQCRHLHGHRYAIEITLSGDIIATEGLPEQGMVMDFSDVKRIAREKLVDAWDHAFLVYRGDRAVCDFLAGLPEHKTVILDAVPTAENLAQIAFNILSPAYRDTYGNHLRLEKIRLYETPNNWADCVRNG

SEQ ID NO: 20694 - protein, 150 aa, Gallionellales bacterium
  misc_feature (1)..(150): tr|A0A1G0CY81|A0A1G0CY81_9PROT 6-carboxytetrahydropteri n synthase QueD OS=Gallionellales bacterium GWE2_58_10 OX=1798248 GN=A2X75_02005 PE=4 SV=1
MLITRRLEFDAGHRIPNHASQCKHLHGHRYAIEITLSGDIITTEGQSEQGMVMDFSDVKRIAKEKLVDAWDHAFLVYRGDTAVCDFLASLAEHKTVVLDAVPTAENLAQIAFNILNVAYRDVYGNNLRLERVRLYETPNNWADCMRVANS

SEQ ID NO: 20695 - protein, 117 aa, Unknown
  misc_feature (1)..(117): tr|B8KHC1|B8KHC1_9GAMM 6-carboxy-5,6,7,8-tetrahydropter in synthase OS=gamma proteobacterium NOR5-3 OX=566466 G N=queD PE=3 SV=1
MEIFKDFHFEAAHRLPKVPAGHKCERLHGHSFQLRVYVAGEPGEATGWIMDFGDIKAACKPVIAQLDHYYLNDIEGLENPTSENLCRWIWERLLPALPTLSGVEIRETCTSGCVYRG

SEQ ID NO: 20696 - protein, 139 aa, Unknown
  misc_feature (1)..(139): tr|A0A2T6N1H3|A0A2T6N1H3_9GAMM 6-pyruvoyl tetrahydrobio pterin synthase OS=gamma proteobacterium symbiont of Ct ena orbiculata OX=1968598 GN=DBO99_11355 PE=4 SV=1
MYAVTKEIHFCYGHRLLNHQGKCRHLHGHNAKAVIRLETEQLDPLGMVCDFSAIGDYVKRWVDETLDHNMLLHSDDPVLPLLRQAGESVYVMENNPTAENIARLIFEYVEAGGFPVVEVSIFETESALASYRPKPPATP

SEQ ID NO: 20697 - protein, 117 aa, Gammaproteobacteria bacterium
  misc_feature (1)..(117): tr|W2UH75|W2UH75_9GAMM 6-carboxy-5,6,7,8-tetrahydropter in synthase OS=Gammaproteobacteria bacterium MOLA455 OX =1411685 GN=queD PE=3 SV=1
MQIYKEFSIEAAHRLPNVPEGHKCSRLHGHSFLVTVAVEGPVGEQSGWIMDFGDIKAAFAPIYDQLDHHYLNDIEGLENPTSENLAIWIWQHLKPTLPLLSCITIKETCTSGCIYRG

SEQ ID NO: 20698 - protein, 164 aa, Gammaproteobacteria bacterium
  misc_feature (1)..(164): tr|A0A1G0IAE9|A0A1G0IAE9_9GAMM Uncharacterized protein OS=Gammaproteobacteria bacterium RIFCSPHIGHO2_12_FULL_4 3_28 OX=1798287 GN=A3F14_02710 PE=4 SV=1
MVRVANLEIHKEELAFSAGHFTIFSATEREQLHGHNYYVSADFLLSIGPNGLAFDYRHYKKKLITLCDKLDRHFLLPSKSPYMPITEEGDYWVAHYNHKKLFFLKEDVILLPLTNITIEELAHWFLQNMLVNEEEMRAHAIYNLAIKVYNGPGQSARAAWEVRT

SEQ ID NO: 20699 - protein, 132 aa, Gandjariella thermophila
  misc_feature (1)..(132): tr|A0A4D4J7A7|A0A4D4J7A7_9PSEU Uncharacterized protein OS=Gandjariella thermophila OX=1931992 GN=ptpS PE=4 SV= 1
MFSVTVRDHVMVAHSFRGEVFGPAQRLHGATFVVDATFRRPELDGDNIVVDIGLATQQLGEVLAELNYRNLDDEPAFAGVNTSTEFLARVIADRLAERVRAGSLGAGARGLTGITVTLHESHVARASYDLTL

SEQ ID NO: 20700 - protein, 118 aa, Gardnerella vaginalis
  misc_feature (1)..(118): tr|A0A2N6QVJ5|A0A2N6QVJ5_GARVA Uncharacterized protein OS=Gardnerella vaginalis OX=2702 GN=CJ225_08245 PE=4 SV =1
MENETYRLTFFLNATHMVVIDGKSSSIHPHTFEINCFIKSKKIIAFEIMEDNINQILNQLNNQYLNGLEAFQNIIPTLENLTRLLYRAMSANLKSVSCRLVKLEVSESPVRTFMIEAK

SEQ ID NO: 20701 - protein, 130 aa, Geitlerinema sp.
  misc_feature (1)..(130): tr|K9S709|K9S709_9CYAN 6-carboxy-5,6,7,8-tetrahydropter in synthase OS=Geitlerinema sp. PCC 7407 OX=1173025 GN= GEI7407_1448 PE=3 SV=1
MPKWKLVTEFTFDSAHQIRDYDGPCGRLHGHTYRVRIEATSHQLHASQYCPHPVMVADFRTLRWAKRDVTKGGLDHGVLNEVMPPEYETTAEMIAQYIYDRTKKDLPEGIKLKVAVSETPNTWAEYEDDD

SEQ ID NO: 20702 - protein, 290 aa, Geitlerinema sp.
  misc_feature (1)..(290): tr|K9S9P4|K9S9P4_9CYAN Uncharacterized protein OS=Geitl erinema sp. PCC 7407 OX=1173025 GN=GEI7407_2458 PE=4 SV =1
MKCTINRRAEFSASHRYWLPELTDAENAQRFGLCARAPGHGHNYVLYVSMAGDLDEYGMVLNLSDVKHVIKQEVTQQLNFSFLNEAWPEFTQTLPTTENIARVVWQRLAPHLPLVRIQLYEHPELWADYLGNDMEAFLTISTHFSAAHRLARPDLSYEENCEIYGKCARPNGHGHNYHLEVTVKGQIDPRTGMIADLVELQKAIDEFVVEPFDHTFLNKDIAYFEQVVPTAENIAVHIRDLLVEPIRATGAELYKVKLVESPNNSCEVYTNLVAEGRVTAQAETPVLVQV

SEQ ID NO: 20703 - protein, 136 aa, Gelidibacter algens
  misc_feature (1)..(136): tr|A0A1A7R7Y6|A0A1A7R7Y6_9FLAO 6-carboxy-5,6,7,8-tetrah ydropterin synthase OS=Gelidibacter algens OX=49280 GN= A9996_01920 PE=3 SV=1
MIVTVSRKAHFNAAHRLFRKDWSDEKNEKVFGKCNNPNYHGHNYDLVVSVTGHIDQETGFVMDVKVLKDIIKEEVEDAFDHKNLNIEVDEFKDLNPTAENIAVVIYNKIKPKLKQSLALEITLYETPRNFVTYSGA

SEQ ID NO: 20704 - protein, 149 aa, Gelidibacter algens
  misc_feature (1)..(149): tr|A0A1A7R357|A0A1A7R357_9FLAO 6-carboxy-5,6,7,8-tetrah ydropterin synthase OS=Gelidibacter algens OX=49280 GN= A9996_03830 PE=3 SV=1
MSKIRITKQFSFETGHALYGYDGKCKNVHGHSYKLSVTVIGTPINDSSNVKFGMVIDFSDLKKIVKSEIVDVFDHATVFNKNTPHVELAKELKDRDHNVLLVNYQPTSEMMVIDFAEKIKKYLPETIQLHSLKLQETDTSFAEWYASDN

SEQ ID NO: 20705 - protein, 149 aa, Gelidibacter gilvus
  misc_feature (1)..(149): tr|A0A4Q0XK14|A0A4Q0XK14_9FLAO 6-carboxy-5,6,7,8-tetrah ydropterin synthase OS=Gelidibacter gilvus OX=59602 GN= ESZ48_01085 PE=3 SV=1
MSRIRITKQFSFETGHALYGYDGKCKNVHGHSYKLSVTVIGKPINDASNAKFGMVIDFSDLKTIVKDEIVDVFDHATVFNKNTPHVELAKELKDRGHSVLLVDYQPTSEMMVIDFAEKIKKHLPETIQLHSLKLQETDTSFAEWYASDN

SEQ ID NO: 20706 - protein, 136 aa, Gelidibacter gilvus
  misc_feature (1)..(136): tr|A0A4V1LN20|A0A4V1LN20_9FLAO 6-carboxy-5,6,7,8-tetrah ydropterin synthase OS=Gelidibacter gilvus OX=59602 GN= ESZ48_07290 PE=3 SV=1
MIVTVSRKAHFNAAHRLFRKDWSDEKNAEVFGKCSNPNYHGHNYELTVSVTGGIDHETGFVMDLKVLKDIIKEEIEDYLDHKNLNIEVEEFKTLNPTAENIAVVIYDKIKPRLKSTLDLTITLYETPRNFVTYSGT

SEQ ID NO: 20707 - protein, 149 aa, Gelidibacter salicanalis
  misc_feature (1)..(149): tr|A0A5C7AHT0|A0A5C7AHT0_9FLAO 6-carboxytetrahydropteri n synthase OS=Gelidibacter salicanalis OX=291193 GN=ES7 11_07225 PE=4 SV=1
MSKIRITKQFSFETGHALYGYDGKCKNVHGHSYKLSVTVIGTPISDPTNVKYGMVIDFSDLKKIVKTEIVDVFDHATVFNKNTPHVELAKELSDRDHNVLLVDYQPTSEMMVIDFAEKIKKHLPETIQLSALRLQETDSSFAEWFASDN

SEQ ID NO: 20708 - protein, 136 aa, Gelidibacter salicanalis
  misc_feature (1)..(136): tr|A0A5C7AUJ1|A0A5C7AUJ1_9FLAO 6-carboxy-5,6,7,8-tetrah ydropterin synthase OS=Gelidibacter salicanalis OX=2911 93 GN=ES711_05765 PE=3 SV=1
MRVTVSRKAHFNAAHRLYRKDWSAEQNEAIFGKCSNPNFHGHNYDLTVSVTGEIDQETGFVMDMKVLKDIIKDDIEEAFDHKNLNVEVEEFKTLNPTAENIAVVIYNKIKPKLQPDLQLSITLYETPRNFVTYSGS

SEQ ID NO: 20709 - protein, 136 aa, Gelidibacter sediminis
  misc_feature (1)..(136): tr|A0A4R7Q5C0|A0A4R7Q5C0_9FLAO 6-carboxy-5,6,7,8-tetrah ydropterin synthase OS=Gelidibacter sediminis OX=160871 0 GN=BXY82_0131 PE=3 SV=1
MMVTVSRKAHFNAAHRLFKKEWSDAQNESVFGKCSNPNYHGHNYDLIVSVTGEIDQETGFVIDMKVLKDIIKEEIEEAFDHKNLNVEVEEFKNLNPTAENIAVVIYNKLKPKLKSGLKLTITLYETQRNFVTYSGS

SEQ ID NO: 20710 - protein, 149 aa, Gelidibacter sediminis
  misc_feature (1)..(149): tr|A0A4R7Q961|A0A4R7Q961_9FLAO 6-carboxy-5,6,7,8-tetrah ydropterin synthase OS=Gelidibacter sediminis OX=160871 0 GN=BXY82_0813 PE=3 SV=1
MSKIRITKQFSFETGHALYGYDGKCKNVHGHSYKLSVTVIGTPISDTSNVKYGMVIDFSDLKKIVKTEIVDVFDHATVFNKNTPHVELAKELEARDHNVLLVDYQPTSEMMVIDFAQKIKKHLPENIQLYALRLQETDTSFAEWYASDN

SEQ ID NO: 20711 - protein, 290 aa, Geminocystis sp.
  misc_feature (1)..(290): tr|A0A0D6AQX3|A0A0D6AQX3_9CHRO 6-pyruvoyl tetrahydrobio pterin synthase OS=Geminocystis sp. NIES-3709 OX=161744 8 GN=GM3709_1850 PE=4 SV=1
MECIVNRRAKFSASHRYWLPELSDEENQARFGANSRFPGHGHNYLLYVSIIGELDKYGMVQNLSEVKKVIKQEVTSQLDYSYLNDTWVEFQETLPTTENIAKVIWERLSPHLPLVDIQLYEHSQLWVNYKGNNMEATLTVQTHFSAAHRLALPELSFEENSEIYGKCARPNGHGHNYHLEVSVTGEMDPRTGMIIDLVALQKVIDDYIVEPFDHTFLNKDIPYFAEVVPTAENIAVYIAQLLQEPISKLGAELDKVKLIESPNNSCEIFCRKLSLTNEKKSESTLQPALV

SEQ ID NO: 20712 - protein, 290 aa, Geminocystis sp.
  misc_feature (1)..(290): tr|A0A0D6AAL4|A0A0D6AAL4_9CHRO 6-pyruvoyl tetrahydrobio pterin synthase OS=Geminocystis sp. NIES-3708 OX=161590 9 GN=GM3708_267 PE=4 SV=1
MECVVNRRAKFSASHRYWLPELSESENQTKFGANSRFPGHGHNYVLYVSIIGELDKYGMVQNLSNVKKVIKQEVTSQLDYSYLNDTWAEFEVTLPTTENIAKVIWERLSPHLPLVDIQLYEHSQLWVNYQGNNMEATLTIQTHFSAAHRLALPELSFEENTEIYGKCARPNGHGHNYHLEVSVTGEMDARTGMIIDLVALQKVVDDYVVEPFDHTFLNKDIPYFAEIVPTAENIAVYIAQLLQEPISKLGAQLDKVKLIESPNNSCEIFCRKSILKGEKIGEFNLQPLLT

SEQ ID NO: 20713 - protein, 164 aa, Gemmata obscuriglobus
  misc_feature (1)..(164): tr|A0A2Z3GZE3|A0A2Z3GZE3_9BACT 6-carboxytetrahydropteri n synthase OS=Gemmata obscuriglobus OX=114 GN=C1280_063 40 PE=4 SV=1
MPTERFKVRVTKDHLVFCCGHFISYRGHQCERLHGHNYRCAVEVEGPLLPDDFYVFDFIALKKRTKEITDELDHHMLLATNNPVISVAPTPQCVQVRYEDREWLFPRGDCILLPIENTTAELIARYIAGRLWESLKTNENFTPEVLRVEVEEAPGQSATVEWRA

SEQ ID NO: 20714 - protein, 157 aa, Gemmata obscuriglobus
  misc_feature (1)..(157): tr|A0A2Z3H7G7|A0A2Z3H7G7_9BACT 6-carboxytetrahydropteri n synthase OS=Gemmata obscuriglobus OX=114 GN=C1280_298 80 PE=4 SV=1
MFRVTKEIHFCYGHRLLNYAGKCRNLHGHNGKAVVTVETESLDALGMVVDFTEIKRVIGKWIDDTLDHRMLLHQDDPIIPELERQGEPFIALDVNPTAETIARLIFDRAVAQGLPVTEVILWETENSFATYRPTPGVPSRPVAMREVVGGTPPAAPE

SEQ ID NO: 20715 - protein, 163 aa, Gemmata sp.
  misc_feature (1)..(163): tr|A0A142XE24|A0A142XE24_9BACT 6-pyruvoyl tetrahydropte rin synthase OS=Gemmata sp. SH-PL17 OX=1630693 GN=VT84_ 09765 PE=4 SV=1
MPSERFKVRVTKDHLTFCCGHFISYRGHQCERLHGHNYRTAVEVEGVLQEDYYVFDFIALKKRTKEITDELDHHMLLATRNPVIAVDDTPRCVRVKYEDREWQFPRGDCILLPIENTTAELLARYIAGRLWESLRTNENFTPEVLRVEVEEAPGQSATVEWRA

SEQ ID NO: 20716 - protein, 158 aa, Gemmata sp.
  misc_feature (1)..(158): tr|A0A142XSG6|A0A142XSG6_9BACT 6-carboxy-5,6,7,8-tetrah ydropterin synthase OS=Gemmata sp. SH-PL17 OX=1630693 G N=queD PE=4 SV=1
MFRVTKEIHFCYGHRLLNYAGKCRNLHGHNGKAVVTVETETLDALGMVVDFSEIKRVIGKWIDDTLDHRMLLHRDDPIIAELLRQGEPFVELDANPTAETIARLIFDRAVEHGLPVTEVTLWETENSFATYRPTPGVPTKSVAMREVAGNPAPVPTRA

SEQ ID NO: 20717 - protein, 133 aa, Gemmataceae bacterium
  misc_feature (1)..(133): tr|A0A5C1AC71|A0A5C1AC71_9BACT 6-carboxytetrahydropteri n synthase OS=Gemmataceae bacterium PX52 OX=2598579 GN= PX52LOC_03125 PE=4 SV=1
MFRVTKEIWFCYGHRLLNYNGKCAHLHGHNGKAVITLEAAALDPLGMVVDFTQVKQLVGRWIDDHLDHKMLLHKDDPVIPDLRRLGEQFVTLDVNPTAENIAKLIYDHAVQQRLPVVEVTLWETETSFATYRG

SEQ ID NO: 20718 - protein, 163 aa, Gemmataceae bacterium
  misc_feature (1)..(163): tr|A0A4V0I8Y4|A0A4V0I8Y4_9BACT Uncharacterized protein OS=Gemmataceae bacterium OX=2052164 GN=GCJUQL4_62630 PE =4 SV=1
MPTERFKVHVTKDHLVFCCGHFISYHGHKCERLHGHNYRCAVEIEGPLQEDHYVFDFVALKARTKAITDELDHHMLLATKNPVIKVDESATKVDVTYRDRAWLFPREDCVLLPIENTTAELIARYIAGRLVESLKTHENFVPEVLRVEVEEAPGQSATVEVRV

SEQ ID NO: 20719 - protein, 117 aa, Gemmatimonadaceae bacterium
  misc_feature (1)..(117): tr|A0A1V4R9T5|A0A1V4R9T5_9BACT 6-carboxy-5,6,7,8-tetrah ydropterin synthase OS=Gemmatimonadaceae bacterium 4484 _173 OX=1956166 GN=B1H09_07960 PE=3 SV=1
MEIYREFKFDAAHSLPHLPDGHKCGNIHGHTFAVIVYVSGPVGEKTGWVMDYGEIKSVCEPVIDQLDHSYLNDIPGLENPTSETIAVWLWSRIKTDIPQLSMVEVKETAATGCRYTG

SEQ ID NO: 20720 - protein, 149 aa, Gemmatimonadaceae bacterium
  misc_feature (1)..(149): tr|A0A2E8HBQ5|A0A2E8HBQ5_9BACT 6-carboxy-5,6,7,8-tetrah ydropterin synthase OS=Gemmatimonadaceae bacterium OX=2 026741 GN=CME04_23275 PE=4 SV=1
MSARPTQITAVRRLHFCAGHRVVGHEGKCANLHGHNYVAFVHVRSRGGDLDDVGRVIDFGVIKQKVGGWIDEHWDHGFIFWSQDPDLAALYDDQLAAMKYFRAEWNPTAENMASHLLAVATELLAGDLVVEKVEMWETENCYADAQPQD

SEQ ID NO: 20721 - protein, 163 aa, Gemmatimonadales bacterium
  misc_feature (1)..(163): tr|A0A524HP17|A0A524HP17_9BACT 6-carboxytetrahydropteri n synthase OS=Gemmatimonadales bacterium OX=2448054 GN= E4H38_01645 PE=4 SV=1
MGSSMNGTERSSGGSDSASRSDGNPMPISLTRIVTFRAWHHYRVARWSEAQNRERFGVLVESHPHDYRCEVTVRGPLAETTGMVIDLGELDGIVREEILQPLDGQQLNQAVPEVAAGITQPTCEVLAAHVYARLARRLPSGIVLERVRIAEDATLHADCTGIP

SEQ ID NO: 20722 - protein, 142 aa, Gemmatimonadales bacterium
  misc_feature (1)..(142): tr|A0A524GZ98|A0A524GZ98_9BACT 6-carboxytetrahydropteri n synthase (Fragment) OS=Gemmatimonadales bacterium OX= 2448054 GN=E4H41_10105 PE=4 SV=1
MRSYRVSVAKDYLSFSSAHFITFRGHKCESLHGHNYRLAVVVEGAVDAECLFVLDFAVLKQLIKPMVEAVDHKVILPTENEKIGLREEHDAVIVDYFGKGRFVFPKSDVALVPVKNTTVEMLAEYFATQVRDALLAEGHAHL

SEQ ID NO: 20723 - protein, 167 aa, Gemmatimonadetes bacterium
  misc_feature (1)..(167): tr|A0A1Q7AAT5|A0A1Q7AAT5_9BACT Uncharacterized protein OS=Gemmatimonadetes bacterium 13_2_20CM_2_69_23 OX=1805 204 GN=AUI13_04905 PE=4 SV=1
MADGKQFRVAVTKDNHVFASAHFITFPGHRCETLHGHNYRTQVAVEGGLDPEAHYVVDFSELKQLMKRLTDEIDHKVLLPLQNPKIQIREDGDSVAVAVNGRPRYVFPKADCALLPIPNTTVEMLAQYLAGRVSRELTPSPGVKLRAIEIEVEENFGQSATYRESLE

SEQ ID NO: 20724 - protein, 167 aa, Gemmatimonadetes bacterium
  misc_feature (1)..(167): tr|A0A2V7L7Z0|A0A2V7L7Z0_9BACT 6-pyruvoyl tetrahydrobio pterin synthase OS=Gemmatimonadetes bacterium OX=202674 2 GN=DMD33_10775 PE=4 SV=1
MAAHKEFKVTVTKDNHVFAAAHFITFPGHRCERLHGHNYRTHVVVEGGLDPEAFYVLDFSMLKQLMKRLTDEIDHKVLLPLENPKIQVREEGETVSVAVAGRPRYVFPRIDCALLPVPNTTVEMLAQYLAGRVHRELAGSGGVALRAVEVEVEENFGQSATYRESFE

SEQ ID NO: 20725 - protein, 137 aa, Gemmatimonas aurantiaca
  misc_feature (1)..(137): tr|C1A6G1|C1A6G1_GEMAT 6-carboxy-5,6,7,8-tetrahydropter in synthase OS=Gemmatimonas aurantiaca (strain T-27 / D SM 14586 / JCM 11422 / NBRC 100505) OX=379066 GN=GAU_07 79 PE=3 SV=1
MPIVTVTRRLRFNAAHRVHNPALSDADNTRLFGKCNNPNWHGHNYTLDVSVRGPVAEDTGYVIDLGALRAIVEREVLSQTDHRNFNIDVPYMQGINPTTENIVVAMWQVLGPAIAPATLQRLRLWETENNYVDYSGE

SEQ ID NO: 20726 - protein, 151 aa, Gemmatimonas aurantiaca
  misc_feature (1)..(151): tr|C1AB96|C1AB96_GEMAT 6-pyruvoyl tetrahydropterin synt hase family protein OS=Gemmatimonas aurantiaca (strain T-27 / DSM 14586 / JCM 11422 / NBRC 100505) OX=379066 G N=GAU_2460 PE=4 SV=1
MSFPFLRGPMPRTSLTRRVLFAAAHRYRRPDWSDQENADVFGACAHPNYHGHTYLCDVTVAGPVDEETGFVVDLGFLDRVLQREVRERFDHRNINLDVPEFAEGRLIPTGENLARFICERVQAALAHTTARVVRVHLAEDTTLSSTYEVDA

SEQ ID NO: 20727 - protein, 119 aa, Gemmatimonas phototrophica
  misc_feature (1)..(119): tr|A0A143BPH4|A0A143BPH4_9BACT 6-carboxy-5,6,7,8-tetrah ydropterin synthase OS=Gemmatimonas phototrophica OX=13 79270 GN=GEMMAAP_19360 PE=3 SV=1
MELYKEFTIEAAHRLPHVPPGHKCARLHGHSFRLEIRVRGPLDPTLGWVMDFADIKAAFKPLYDQLDHHYLNDIPGLENPTSEVLAVWIWERLHPVLPLLSAVVVRETCTSGCEYRGAR

SEQ ID NO: 20728 - protein, 142 aa, Gemmatimonas phototrophica
  misc_feature (1)..(142): tr|A0A143BLI7|A0A143BLI7_9BACT Uncharacterized protein OS=Gemmatimonas phototrophica OX=1379270 GN=GEMMAAP_124 20 PE=4 SV=1
MPRTSLTRRVMFAAAHRYRRPDWSDQENADIFGACAHPHYHGHSYVCDVTVAGPVDEETGFVVDLGFLDNVLQREVRERFDHRNISLDVPEFADGKMIPTGENLARFICDRVQAALSHTSARVIKVHLAEDAMLSCSYEVDA

SEQ ID NO: 20729 - protein, 140 aa, Gemmatimonas sp.
  misc_feature (1)..(140): tr|A0A1Q7VF54|A0A1Q7VF54_9BACT Uncharacterized protein OS=Gemmatimonas sp. 13_1_20CM_3_60_15 OX=1805208 GN=AUG 20_00205 PE=4 SV=1
MASASLTRRVSFSAAHRYSRPEWNDAQNMATFGACAWPNFHGHSYVCDVTVSGPIDDTTGFLVDLGVLDRILKEQVKDRFDHRNINLDVPDFGDGKMVPTGENLARFIFERVDKALPKPAKVTRVTVGEDDTLSATYSRD

SEQ ID NO: 20730 - protein, 132 aa, Gemmatimonas sp.
  misc_feature (1)..(132): tr|A0A0S7YND8|A0A0S7YND8_9BACT 6-pyruvoyl tetrahydropte rin synthase OS=Gemmatimonas sp. SG8_23 OX=1703356 GN=A MS19_13320 PE=4 SV=1
MYSLNVRDHFMIAHSFQGEIFGPAQRLHGATYVVDATFRRPELDTDGLVVDIGLASVQLREILEAMNYRNLDDMSDFAGQNTTTEFLAHEIWKRLVEAIEAGRLGEGARGVTSIRVKLNESHVAWGSFEGPV

SEQ ID NO: 20731 - protein, 144 aa, Gemmatirosa kalamazoonesis
  misc_feature (1)..(144): tr|W0RLX9|W0RLX9_9BACT Uncharacterized protein OS=Gemma tirosa kalamazoonesis OX=861299 GN=J421_3925 PE=4 SV=1
MARFSLTRRVSFAAAHRYRRPDWSDEKNAAVFGACARPNYHGHSYACDVTVSGPLDEATGFVADLGLLDRVLHEEVHARFDHANINLDVPEFADGRQIPSGENLARYVCERVQRRLDQALGTGTLRVTRVTVAEDRTLSATYEP

SEQ ID NO: 20732 - protein, 119 aa, Gemmatirosa kalamazoonesis
  misc_feature (1)..(119): tr|W0RDE3|W0RDE3_9BACT 6-carboxy-5,6,7,8-tetrahydropter in synthase OS=Gemmatirosa kalamazoonesis OX=861299 GN= J421_1597 PE=3 SV=1
MEIWKEFTFEAAHRLPNVPPGHKCARLHGHSFRVEVHVAGAVREPEGWVMDFGDLKTAWQPLDEALDHRYLNEIAGLENPTSEVLARWIWDRLLPWLPGLSAIVVRETCTTGCVYRGER

SEQ ID NO: 20733 - protein, 188 aa, Gemmiger sp.
  misc_feature (1)..(188): tr|A0A1Y3S4R2|A0A1Y3S4R2_9FIRM Rubredoxin OS=Gemmiger s p. An87 OX=1965662 GN=B5G38_01360 PE=4 SV=1
MRSITKLDLQYAHRFYGFKGEAQYLHGHTGVLTIEVEDTVEPGVNMVFPCNEIQKTAWEVLKNFDHALILREDDPLLPAVLKVYEEQGIRGGAPQNQMKGPAFKTELATAYPECRLVVTKETLTVEGMIKIVYDLLKDKLNIAKITFTSGVNAASAEFETHNNIDRCPLCGIALNENGVCPKCGYKKP

SEQ ID NO: 20734 - protein, 188 aa, Gemmiger sp.
  misc_feature (1)..(188): tr|A0A1Y4TM79|A0A1Y4TM79_9FIRM Rubredoxin OS=Gemmiger s p. An120 OX=1965549 GN=B5E65_02665 PE=4 SV=1
MRSITTLDLQYAHRFYGFKGEAQYLHGHTGVLTIEVEDTVEPGVNMVFPCNEIQKTAWSVLKNFDHALILRQDDPLLPAILKVYEEQGIRNGAPQNQMKGPAFETELAKAYPECRLVVTKETMTVEGMIKIVYDLLKDKLNIAKITFTSGVNAASAEFDTHNQIDRCPLCGIALNENGVCPKCGYKKG

SEQ ID NO: 20735 - protein, 123 aa, Geoalkalibacter ferrihydriticus
  misc_feature (1)..(123): tr|A0A1G9QZ82|A0A1G9QZ82_9DELT 6-carboxy-5,6,7,8-tetrah ydropterin synthase OS=Geoalkalibacter ferrihydriticus OX=392333 GN=SAMN05660860_01962 PE=3 SV=1
MYHLTIQTHFAAAHNLIHYQGDCENLHGHNWKVEVTVGAHELDKAGLAIDFKILKRETNLILDLLDHKYLNEIKPFDEISPSSENISRFIFEKLTESLNNGNVIVERITVWESDNACASYTAD

SEQ ID NO: 20736 - protein, 123 aa, Geoalkalibacter ferrihydriticus; identical to SEQ ID NO: 20735
  misc_feature (1)..(123): tr|A0A0C2EFL6|A0A0C2EFL6_9DELT 6-carboxy-5,6,7,8-tetrah ydropterin synthase OS=Geoalkalibacter ferrihydriticus DSM 17813 OX=1121915 GN=GFER_01325 PE=3 SV=1

SEQ ID NO: 20737 - protein, 123 aa, Geoalkalibacter subterraneus
  misc_feature (1)..(123): tr|A0A0B5FHL9|A0A0B5FHL9_9DELT 6-carboxy-5,6,7,8-tetrah ydropterin synthase OS=Geoalkalibacter subterraneus OX= 483547 GN=GSUB_10270 PE=3 SV=1
MFLLKIQSHFAAAHNLIHYQGDCENLHGHNWKVEVEVGAHELDKSGLAVDFKVLKRETNRVLDLLDHKYLNEVKPFDELSPSSENISRFVFEQLTESLNDGNVFVKRVTVWESDNACASYVAD

SEQ ID NO: 20738 - protein, 144 aa, Geobacillus galactosidasius
  misc_feature (1)..(144): tr|A0A226QSC6|A0A226QSC6_9BACI 6-carboxy-5,6,7,8-tetrah ydropterin synthase OS=Geobacillus galactosidasius OX=8 83812 GN=B9L23_05200 PE=3 SV=1
MIHQLYPQVFHNYRYELNKDMHIAAAHFIPHEKAGKCANMHGHIYTVNITVAGDELDDAGFLVNFQELKKLIHGKLDHSLMNEHQDWFNDQNSNDFPTSEVIARKIYETVQAYLDTMPNKPKCLQVFVRETPTSYVVYRPKAGK

SEQ ID NO: 20739 - protein, 145 aa, Geobacillus kaustophilus; identical to SEQ ID NO: 17819
  misc_feature (1)..(145): tr|A0A4D7Q9G7|A0A4D7Q9G7_GEOKU 6-carboxy-5,6,7,8-tetrah ydropterin synthase OS=Geobacillus kaustophilus NBRC 10 2445 OX=1220595 GN=queD PE=3 SV=1

SEQ ID NO: 20740 - protein, 134 aa, Geobacillus kaustophilus
  misc_feature (1)..(134): tr|Q5KZY1|Q5KZY1_GEOKA 6-pyruvoyltetrahydropterin synth ase(PTP synthase) OS=Geobacillus kaustophilus (strain H TA426) OX=235909 GN=GK1470 PE=4 SV=1
MTRRYYFSSAHRLHSDQLTNEENQRLFGKCNNRYGHGHNYCLEVTVIGKPDPITGMVVNLAELDEIVNREVLVKFDHKHLNLDTDEFKQINPTAENIVIVIWELLAPHLSSLYKIGLWETQKNYFEYFGPHKEK

SEQ ID NO: 20741 - protein, 145 aa, Geobacillus lituanicus
  misc_feature (1)..(145): tr|A0A223DZ34|A0A223DZ34_9BACI 6-carboxy-5,6,7,8-tetrah ydropterin synthase OS=Geobacillus lituanicus OX=169283 GN=GLN3_15180 PE=3 SV=1
MMHQLYPQVWHDYRYELNKDMHIAAAHFIPHEAAGSCANVHGHTYIVNVTVAGDELDESGFLVNFQTLKQLVHRKLDHTLLNDHSDWFDGHDPNRFPTSEVVARTIYETIQRYLDTLPHKPKCLQVFVRETPTSYVVYRPKAGDR

SEQ ID NO: 20742 - protein, 144 aa, Geobacillus proteiniphilus
  misc_feature (1)..(144): tr|A0A1Q5T7M3|A0A1Q5T7M3_9BACI 6-carboxy-5,6,7,8-tetrah ydropterin synthase OS=Geobacillus proteiniphilus OX=86 0353 GN=BRO54_0416 PE=3 SV=1
MHQLYPQVMHNYRYELNKDMHIAAAHFIPHEAAGSCANVHGHTYIVNVTVAGDELDESGFLVNFQTLKQLVHRKLDHTLLNDHSDWFDGHDPNRFPTSEVVARTIYETIQRYLDTLPHKPKCLQVFVRETPTSYVVYRPKAGER

SEQ ID NO: 20743 - protein, 51 aa, Geobacillus proteiniphilus
  misc_feature (1)..(51): tr|A0A1Q5T3S7|A0A1Q5T3S7_9BACI 6-pyruvoyl tetrahydrobio pterin synthase OS=Geobacillus proteiniphilus OX=860353 GN=BRO54_1360 PE=4 SV=1
MECGKNKAVFGLCSNPNGHGHDYRLDVTVKGPVNLLAGITVNMKVDSGETF

SEQ ID NO: 20744 - protein, 145 aa, Geobacillus sp.
  misc_feature (1)..(145): tr|L7ZWG9|L7ZWG9_9BACI 6-carboxy-5,6,7,8-tetrahydropter in synthase OS=Geobacillus sp. GHH01 OX=1233873 GN=queD PE=3 SV=1
MMHQLYPQVMHPYRYELNKDMHIAAAHFIPHEAAGSCANVHGHTYIVNVTIAGDELDESGFLVNFQTIKQLVHGKLDHTLLNDHSDWFDGHDPNRFPTTEVVARTIYETIQRYLDTLPHKPTCLQVFVRETPTSYVVYRPKAGER

SEQ ID NO: 20745 - protein, 145 aa, Geobacillus sp.
  misc_feature (1)..(145): tr|A0A1V9B1G8|A0A1V9B1G8_9BACI 6-carboxy-5,6,7,8-tetrah ydropterin synthase OS=Geobacillus sp. 44B OX=1963023 G N=BSK33_07930 PE=3 SV=1
MIHQLYPQVFHNYRYELNKDMHIAAAHFIPHEKAGKCANMHGHIYTVNITVAGDELDDAGFLVNFQELKKLIHGKLDHSLMNEHQDWFNDKNSNDFPTSEVIARKIYETVQAYLDTLPNKPTCLQVFVRETPTSYVVYRPKAGER

SEQ ID NO: 20746 - protein, 145 aa, Geobacillus stearothermophilus
  misc_feature (1)..(145): tr|A0A0K9I152|A0A0K9I152_GEOSE 6-carboxy-5,6,7,8-tetrah ydropterin synthase OS=Geobacillus stearothermophilus O X=1422 GN=queD PE=3 SV=1
MMHQLYPQVWHDYRYELNKDMHIAAAHFIPHEAAGSCANVHGHTYIVNVTVAGDELDESGFLVNFQTLKQLVHRKLDHTLLNDHSDWFDGHDPNRFPTSEVVARTIYETIQRYLDTLPHKPKCLQVFVRETSTSYVVYRPKAGDR

SEQ ID NO: 20747 - protein, 145 aa, Geobacillus stearothermophilus
  misc_feature (1)..(145): tr|A0A0K2HBE7|A0A0K2HBE7_GEOSE 6-carboxy-5,6,7,8-tetrah ydropterin synthase OS=Geobacillus stearothermophilus 1 0 OX=272567 GN=GT50_14590 PE=3 SV=1
MMHQLYPQVAHHYRYELNKDMHIAAAHFIPHEAAGSCANVHGHTYIVNVTIAGDELDESGFLVNFQTLKQLVHRKLDHTLLNDHSDWFDGHDPNRFPTSEVVARTIYETIQRYLDTLPHKPKCLQVFVRETPTSYVVYRPKAGER

SEQ ID NO: 20748 - protein, 145 aa, Geobacillus subterraneus
  misc_feature (1)..(145): tr|A0A143MJM4|A0A143MJM4_9BACI 6-carboxy-5,6,7,8-tetrah ydropterin synthase OS=Geobacillus subterraneus OX=1293 38 GN=GS3922_11485 PE=3 SV=1
MMHQLYPQVAHHYRYELNKDMQIAAAHFIPHEAAGRCANVHGHTYIVNVTVAGDELDESGFLVNFQTLKKLVHGKLDHTLLNDHTDWFDRYDPNRFPTTEVVARTIYEIVQGYLDALPHKPKCLQVFVRESPTSYVVYRPKAGER

SEQ ID NO: 20749 - protein, 145 aa, Geobacillus thermocatenulatus
  misc_feature (1)..(145): tr|A0A226Q2K5|A0A226Q2K5_9BACI 6-carboxy-5,6,7,8-tetrah ydropterin synthase OS=Geobacillus thermocatenulatus OX =33938 GN=GT3921_14540 PE=3 SV=1
MMHQLYPQVMHPYRYELNKDMHIAAAHFIPHEAAGSCANVHGHTYIVNVTIAGDELDESGFLVNFQTIKQLVHGKLDHTLLNDHADCFDENDPNRFPTTEVVARTIYETIQRYLDTLPHKPTCLQVFVRETPTSYVVYRPKAGER

SEQ ID NO: 20750 - protein, 145 aa, Geobacillus thermodenitrificans
  misc_feature (1)..(145): tr|A0A1W6VPP9|A0A1W6VPP9_GEOTD 6-carboxy-5,6,7,8-tetrah ydropterin synthase OS=Geobacillus thermodenitrificans OX=33940 GN=queD PE=3 SV=1
MIYQLYPQVAHPYRYELNKDMHIAAAHFIPHEAAGSCANVHGHTYVVNVTVAGDELDESGFLVNFQMLKKLIHGKLDHTLLNDHTDWFDRHDPNRFPTTEVVARTIYETIQRYLDTLPHKPKCLQVFVRETPTSYVIYRPKVGER

SEQ ID NO: 20751 - protein, 145 aa, Geobacillus thermodenitrificans; identical to SEQ ID NO: 20750
  misc_feature (1)..(145): tr|A4ILN8|A4ILN8_GEOTN 6-carboxy-5,6,7,8-tetrahydropter in synthase OS=Geobacillus thermodenitrificans (strain NG80-2) OX=420246 GN=GTNG_0864 PE=3 SV=1

SEQ ID NO: 20752 - protein, 145 aa, Geobacillus thermoleovorans; identical to SEQ ID NO: 17819
  misc_feature (1)..(145): tr|G8MYS9|G8MYS9_GEOTH 6-carboxy-5,6,7,8-tetrahydropter in synthase OS=Geobacillus thermoleovorans CCB_US3_UF5 OX=1111068 GN=GTCCBUS3UF5_11600 PE=3 SV=1

SEQ ID NO: 20753 - protein, 144 aa, Geobacillus thermoleovorans
  misc_feature (1)..(144): tr|A0A098L4I7|A0A098L4I7_GEOTH 6-carboxy-5,6,7,8-tetrah ydropterin synthase OS=Geobacillus thermoleovorans B23 OX=1406857 GN=B23_2928 PE=3 SV=1
MHQLYPQVAHHYRYELNKDMHIAAAHFIPHEAAGSCANVHGHTYIVNVTVAGDELDESGFLVNFQTLKQLVHRKLDHTLLNDHSDWFDGHDPNRFPTSEVVARTIYETIQRYLDTLPHKPKCLQVFVRETPTSYVVYRPKAGER

SEQ ID NO: 20754 - protein, 145 aa, Geobacillus zalihae; identical to SEQ ID NO: 20744
  misc_feature (1)..(145): tr|A0A1V9C3F1|A0A1V9C3F1_9BACI 6-carboxy-5,6,7,8-tetrah ydropterin synthase OS=Geobacillus zalihae OX=213419 GN =B1694_06905 PE=3 SV=1

SEQ ID NO: 20755 - protein, 123 aa, Geobacter argillaceus
  misc_feature (1)..(123): tr|A0A562VP01|A0A562VP01_9DELT 6-carboxy-5,6,7,8-tetrah ydropterin synthase OS=Geobacter argillaceus OX=345631 GN=JN12_01425 PE=3 SV=1
MFRLKILTSFAAAHCLINYQGDCENLHGHNWRVEVTVRAGGLDEAGLGIDFKILKAETNQLLKTLDHKYLNELPPFSGLSPSSENISRFLFRELSSKLNTDNIKVETITVWESDFACASYSEE

SEQ ID NO: 20756 - protein, 122 aa, Geobacter bemidjiensis
  misc_feature (1)..(122): tr|B5EI72|B5EI72_GEOBB 6-carboxy-5,6,7,8-tetrahydropter in synthase OS=Geobacter bemidjiensis (strain Bem / ATC C BAA-1014 / DSM 16622) OX=404380 GN=queD PE=3 SV=1
MFRLTIHTAFAAAHNLINYQGDCENLHGHNWKVEVSVTTNELDKAGLGIDFKILKRETNTLLKTLDHKYLNELPPFLEVSPSSENIARYLYHELTKILGSDKVKVEMVTVWESDFAAASYYE

SEQ ID NO: 20757 - protein, 122 aa, Geobacter daltonii
  misc_feature (1)..(122): tr|B9M259|B9M259_GEODF 6-carboxy-5,6,7,8-tetrahydropter in synthase OS=Geobacter daltonii (strain DSM 22248 / J CM 15807 / FRC-32) OX=316067 GN=queD PE=3 SV=1
MYKLRIETSFAAAHCLIHYQGDCENLHGHNWKVEVTVTARELDKSGLGIDFKVLKSETNALLKTLDHKYLNELPPFIESSPSSENIARYLFQELAKKFNSDNIGLTEVTVWESDFASASYYE

SEQ ID NO: 20758 - protein, 122 aa, Geobacter lovleyi
  misc_feature (1)..(122): tr|B3E1R1|B3E1R1_GEOLS 6-carboxy-5,6,7,8-tetrahydropter in synthase OS=Geobacter lovleyi (strain ATCC BAA-1151 / DSM 17278 / SZ) OX=398767 GN=Glov_1845 PE=3 SV=1
MYRLTIKTGFAAAHNLINYQGDCENLHGHNWKVEVTVTASELDQAGLAIDFKLLKRETNALLDELDHKYVNQHHFFLDLSPSSENISRYLFQELSKRLNDGNVKVERIGVWESDNACAEYYE

SEQ ID NO: 20759 - protein, 122 aa, Geobacter metallireducens
  misc_feature (1)..(122): tr|Q39V36|Q39V36_GEOMG 6-carboxy-5,6,7,8-tetrahydropter in synthase OS=Geobacter metallireducens (strain GS-15 / ATCC 53774 / DSM 7210) OX=269799 GN=queD PE=3 SV=1
MYKLAIHTSFAAAHCLINYQGDCENLHGHNWKVEVTVTARELDKAGLGIDFKILKQETNAILRTLDHKYLNELTPFREISPSSENISRFLYEELSKRLNDGNVKVESITVWESDNAAATYYE

SEQ ID NO: 20760 - protein, 122 aa, Geobacter pelophilus
  misc_feature (1)..(122): tr|A0A1W7QNR2|A0A1W7QNR2_9DELT 6-carboxy-5,6,7,8-tetrah ydropterin synthase OS=Geobacter pelophilus OX=60036 GN =GPEL0_01f0582 PE=3 SV=1
MFRLTIHTAFAAAHNLINYQGDCENLHGHNWKVEVSVTTNELDKAGLGIDFKILKRETNALLKTLDHKYLNELPPFSEVSPSSENIARYLYHELTKIFGSDKVKVEMVTVWESDFAAASYYE

SEQ ID NO: 20761 - protein, 122 aa, Geobacter pickeringii
  misc_feature (1)..(122): tr|A0A0B5BH40|A0A0B5BH40_9DELT 6-carboxy-5,6,7,8-tetrah ydropterin synthase OS=Geobacter pickeringii OX=345632 GN=GPICK_08165 PE=3 SV=1
MYRLKIVTSFAAAHCLINYQGDCENLHGHNWKVEVEVTASELDKAGLGIDFKVLKQETNSLLRTLDHKYLNELDPFREISPSSENISRYLYAELSRRLNDGNVTVASITVWESDNAAATYYE

SEQ ID NO: 20762 - protein, 122 aa, Geobacter soli
  misc_feature (1)..(122): tr|A0A0C1QVN7|A0A0C1QVN7_9DELT 6-carboxy-5,6,7,8-tetrah ydropterin synthase OS=Geobacter soli OX=1510391 GN=SE3 7_06125 PE=3 SV=1
MYRLTIHTSFAAAHCLINYQGDCENLHGHNWRVEVSVTARELDKAGLGIDFKVLKQETNGLLRTLDHKYLNELEPFKEISPSSENISCYLYHELSRRLNDGNVTVESITVWESDNAAATYYE

SEQ ID NO: 20763 - protein, 122 aa, Geobacter sp.
  misc_feature (1)..(122): tr|A0A212PFE1|A0A212PFE1_9DELT 6-carboxy-5,6,7,8-tetrah ydropterin synthase OS=Geobacter sp. DSM 9736 OX=127735 0 GN=SAMN06269301_1057 PE=3 SV=1
MFLLKIHTYFAAAHCLTHYQGDCENLHGHNWKVEVAVTARELDQAGLGIDFKILKSETNQLLKTLDHKYLNELPPFADLSPSSENIARYLYRELSEKLNTQNVNVHMVTVWESDYANASYYE

SEQ ID NO: 20764 - protein, 122 aa, Geobacter sp.
  misc_feature (1)..(122): tr|A0A3N9VPS9|A0A3N9VPS9_9DELT 6-carboxytetrahydropteri n synthase QueD OS=Geobacter sp. OX=46610 GN=queD PE=4 SV=1
MYQLTISSDFASAHNLMHYQGDCENLHGHNWKVDVSVTAKDLDKSGLGIDFKKLKAETKTLLKTLDHKYLNELEPFKDVSPSSENIARYIYQELSRTLNNDNVTVESITVWESDHACAKYYE

SEQ ID NO: 20765 - protein, 122 aa, Geobacter sulfurreducens
  misc_feature (1)..(122): tr|Q74CF4|Q74CF4_GEOSL 6-carboxy-5,6,7,8-tetrahydropter in synthase OS=Geobacter sulfurreducens (strain ATCC 51 573 / DSM 12127 / PCA) OX=243231 GN=queD PE=3 SV=1
MYRLTIHTSFAAAHCLINYQGDCENLHGHNWRVEVSVTARELDKAGLGIDFKVLKQETNGLLRTLDHKYLNELEPFKEISPSSENISRYLYHELSRRLNDGNVTVESITVWESDNAAATYYE

SEQ ID NO: 20766 - protein, 122 aa, Geobacter sulfurreducens; identical to SEQ ID NO: 20765
  misc_feature (1)..(122): tr|A0A0D5NB03|A0A0D5NB03_GEOSN 6-carboxy-5,6,7,8-tetrah ydropterin synthase OS=Geobacter sulfurreducens OX=3555 4 GN=RW64_17815 PE=3 SV=1

SEQ ID NO: 20767 - protein, 122 aa, Geobacter thiogenes
  misc_feature (1)..(122): tr|A0A1T4QNE5|A0A1T4QNE5_9DELT 6-carboxy-5,6,7,8-tetrah ydropterin synthase OS=Geobacter thiogenes OX=115783 GN =SAMN02745119_02475 PE=3 SV=1
MYRLTIKTGFAAAHNLINYQGDCENLHGHNWKVEVTVTARELDQAGLAIDFKVLKRETNALLDELDHKYVNQHHFFQDISPSSENISRYLFHELSKRLNDNNIKVERIGVWESDNACAEYYE

SEQ ID NO: 20768 - protein, 122 aa, Geobacter uraniireducens
  misc_feature (1)..(122): tr|A5G3E1|A5G3E1_GEOUR 6-carboxy-5,6,7,8-tetrahydropter in synthase OS=Geobacter uraniireducens (strain Rf4) OX =351605 GN=Gura_2121 PE=3 SV=1
MYKLKVETSFAAAHCLIHYQGDCENLHGHNWKVEVTVTAMELDKAGLGIDFKILKGETNTLLKTLDHKYLNELPPFIESSPSSENIARYLYRELANKFNNGNVKLDMVTVWESDFASASYYE

SEQ ID NO: 20769 - protein, 122 aa, Geobacteraceae bacterium
  misc_feature (1)..(122): tr|A0A1G0ME61|A0A1G0ME61_9DELT 6-carboxy-5,6,7,8-tetrah ydropterin synthase OS=Geobacteraceae bacterium GWC2_55 _20 OX=1798317 GN=A2X82_11910 PE=3 SV=1
MYMLTIKTSFAAAHNLINYQGDCENLHGHNWKVEVSVTARELDKSGLGIDFKVLKRDAGAIINELDHKYLNENPAFRDLSPSSEHIAKYLYDRISERMNNDNIKVDSITVWESDNASARYYE

SEQ ID NO: 20770 - protein, 132 aa, Geobacteraceae bacterium
  misc_feature (1)..(132): tr|A0A3N5QNJ7|A0A3N5QNJ7_9DELT 6-carboxytetrahydropteri n synthase OS=Geobacteraceae bacterium OX=2282154 GN=EH M38_09975 PE=4 SV=1
MYTLGVRRDFIARHFLIGGDWGPENSPNSHHYVLELRLEGRELDQHGYLVDIVDVEKHLDEIVDYYKEQMLNDKPEFAGLNPSIEHFARILATSLSERIKAANISTVKVVLWENELAWAAYKVERQRSNVEA

SEQ ID NO: 20771 - protein, 122 aa, Geodermatophilus aquaeductus
  misc_feature (1)..(122): tr|A0A521EY11|A0A521EY11_9ACTN 6-carboxy-5,6,7,8-tetrah ydropterin synthase OS=Geodermatophilus aquaeductus OX= 1564161 GN=SAMN06273567_106134 PE=3 SV=1
MTELWRTFSFDAAHYLPKVPAGHKCGNMHGHTYTVEIRLRGEVDPVAGWVRDFGDIKEAFRPLEAELDHKVLNDVPGLDNPTSELLAQWLWERLIDVLPDLYSVSVSETANSGVVYRGAPSV

SEQ ID NO: 20772 - protein, 129 aa, Geodermatophilus ruber
  misc_feature (1)..(129): tr|A0A1I4IMW6|A0A1I4IMW6_9ACTN 6-pyruvoyl-tetrahydropte rin synthase OS=Geodermatophilus ruber OX=504800 GN=SAM N04488085_11355 PE=4 SV=1
MYETGTARQVRAFHVMPGLPPPEGERHAHDYRLDVVVRRDDLDERGMVVDLDLLDGALGEAAARVDGADLDRVLPDVAAVTVEVFARWVHGQLATALGRLPGVTLAVRVWESPTAFGGYTAVLDGASSS

SEQ ID NO: 20773 - protein, 132 aa, Geodermatophilus sabuli
  misc_feature (1)..(132): tr|A0A285EKR9|A0A285EKR9_9ACTN 6-pyruvoyl-tetrahydropte rin synthase OS=Geodermatophilus sabuli OX=1564158 GN=S AMN06893097_111182 PE=4 SV=1
MFNVTVRDHMMIAHSFTGAVFGPAQQLHGATYVVDATFRRAELDDDGVVVDIGAAAGLLHEVLGALTYRNLDDDPDLAGTNTTTEVLARVIADRLALRIRDGALGPGGDRLEALAVTLHESHIAWASYDLPL

SEQ ID NO: 20774 - protein, 132 aa, Geodermatophilus sp.
  misc_feature (1)..(132): tr|A0A372IZY7|A0A372IZY7_9ACTN 6-carboxytetrahydropteri n synthase OS=Geodermatophilus sp. LHW52908 OX=2303986 GN=D0Z06_19120 PE=4 SV=1
MFSVTVRDHMMVAHSLRGEVFGPAQRLHGATFVVDATFRRRELDDDGVVVDIGAATELLRAVLGELTYRNLDDEPALAGTNTTTEVLARVVSDRLVAGLRAGALGPGADGLDGLAVTLHESHVAWAGYDRTL

SEQ ID NO: 20775 - protein, 149 aa, Geofilum rubicundum
  misc_feature (1)..(149): tr|A0A0E9M2C4|A0A0E9M2C4_9BACT Queuosine biosynthesis Q ueD, PTPS-I OS=Geofilum rubicundum JCM 15548 OX=1236989 GN=JCM15548_13629 PE=4 SV=1
MAKIRLTKEFRFEMAHALYNYDGLCKNIHGHSYILQVTVIGEPVPEDESPKLGMVMDFGDLKAIVNREIVNDLDHSVVVSHKVSADLLKQMGQMTERYFIMDYQPTCENMLIDFAARLQNALPERVALFSLKLHETANSFAEWYASDNI

SEQ ID NO: 20776 - protein, 121 aa, Geomicrobium sp.
  misc_feature (1)..(121): tr|A0A061N381|A0A061N381_9BACL 6-carboxy-5,6,7,8-tetrah ydropterin synthase OS=Geomicrobium sp. JCM 19055 OX=14 60649 GN=JCM19055_1424 PE=3 SV=1
MHFAAAHFIDDERAGVCKEMHGHTYFVNITVAGDDLDDTGFLINFKSLKKQVHGRFDHTLLNTHPEFPEGIPTTEVVAKVIWELVDELLSQEKHRPYCLQVIVRETPTSYAIYRPKRGEHR

SEQ ID NO: 20777 - protein, 141 aa, Geomicrobium sp.
  misc_feature (1)..(141): tr|A0A061PFA0|A0A061PFA0_9BACL 6-carboxy-5,6,7,8-tetrah ydropterin synthase OS=Geomicrobium sp. JCM 19039 OX=14 60636 GN=JCM19039_3181 PE=3 SV=1
MLQQFYPQVQHDYRYELNKDMHFAAAHFIDDPSAGICQEMHGHTYFVNVTVAGDELDSTGFLINFKELKKQVHGRFDHSLLNKHPEFKAGIPTTEVVASVIWDQVDELLSKEAHRPFCLQVIVRETPTSYAIYRPKQEEHR

SEQ ID NO: 20778 - protein, 122 aa, Geomonas terrae
  misc_feature (1)..(122): tr|A0A4S1CCS5|A0A4S1CCS5_9DELT 6-carboxy-5,6,7,8-tetrah ydropterin synthase OS=Geomonas terrae OX=2562681 GN=qu eD PE=3 SV=1
MFRLTIHTAFAAAHNLINYQGDCENLHGHNWKVEVSITTDELDKAGLGIDFKILKKETNNLLKTLDHKYLNELAPFSEISPSSENIARYLYHELTKIFGSDKVKVEMVTVWESDFAAASYYE

SEQ ID NO: 20779 - protein, 126 aa, Georgenia muralis
  misc_feature (1)..(126): tr|A0A3N5A187|A0A3N5A187_9MICO 6-pyruvoyltetrahydropter in/6-carboxytetrahydropterin synthase OS=Georgenia mura lis OX=154117 GN=EDD32_1580 PE=4 SV=1
MYRLTVRDHMMVAHSLPHPAFGPAQQLHGATFVVELTITRRDLDDAGIVIDIGEATTLLREALADLDYTNLDDHPDLAGTLTTTETLARVVAERVAARLAPGVYAGLDVVLREHPDAWAGYAMDLG

SEQ ID NO: 20780 - protein, 128 aa, Georgenia satyanarayanai
  misc_feature (1)..(128): tr|A0A2Y9A780|A0A2Y9A780_9MICO 6-pyruvoyltetrahydropter in/6-carboxytetrahydropterin synthase OS=Georgenia saty anarayanai OX=860221 GN=SAMN05216184_10469 PE=4 SV=1
MFSVTVRDHMMVAHSLPDPFFGPAQGLHGVTYVVELTFYRPELDEHGVVIDIGAATERLAEVTGELRYRNLDDLEVFAGTVTTTEVVARHVAHRVVEGLDTAPFTAVEVTLHEHPDAWATYRLDLTSP

SEQ ID NO: 20781 - protein, 125 aa, Georgenia soli
  misc_feature (1)..(125): tr|A0A2A9EM46|A0A2A9EM46_9MICO 6-pyruvoyltetrahydropter in/6-carboxytetrahydropterin synthase OS=Georgenia soli OX=638953 GN=ATJ97_1790 PE=4 SV=1
MFALTVRDRMMIAHSLPHPAFGPAQALHGATYVVELTIRRAELGEEGIVIDIGEATTLLKDALADLDYTNLDEHPELAGTLTTTEALAKLVADRVADRLPAGLYAGLDVTLREHPDAWATYTREL

SEQ ID NO: 20782 - protein, 125 aa, Georgenia sp.
  misc_feature (1)..(125): tr|A0A5B8BZ28|A0A5B8BZ28_9MICO 6-carboxytetrahydropteri n synthase OS=Georgenia sp. Z443 OX=2589797 GN=FE374_01 795 PE=4 SV=1
MYRLTVRDHMMVAHSLPHPAFGPAQQLHGATFVVELTFLRAELGEEAIVIDIGEATTLLREALADLDYSNLDDHPDLAGVLTTTETLARVVADRVAARLPGGRYAGLEVTLREHPDAWATYSLDL

SEQ ID NO: 20783 - protein, 128 aa, Georgenia sp.
  misc_feature (1)..(128): tr|A0A5B8APL2|A0A5B8APL2_9MICO 6-carboxytetrahydropteri n synthase OS=Georgenia sp. Z294 OX=2585135 GN=FE251_03 710 PE=4 SV=1
MFSVTVRDHMMVAHSLPDPFFGPAQGLHGVTYVVELTFFRPELDEHGVVIDIGAATQRLGEVTGALRYRNLDDLEEFAGVVTTTEVVARHVAHRVVEGLDTTPFTAVEVRLHEHPDAWATYRLELPGR

SEQ ID NO: 20784 - protein, 122 aa, Georhizobium profundi
  misc_feature (1)..(122): tr|A0A3Q8XRL3|A0A3Q8XRL3_9RHIZ 6-carboxytetrahydropteri n synthase OS=Georhizobium profundi OX=2341112 GN=D5400 _04755 PE=4 SV=1
MIAHSLPDPFFGPAQGMHGATFTVDVQFVADRLTDKNVVVDIGKAMEALSATLKPLNYQNLDEIPAFKGQITTTEFLARHIFDELAETARSGGLGEGSENIKQIRVYLHESHFARAGYNGTL

SEQ ID NO: 20785 - protein, 123 aa, Geothermobacter ehrlichii
  misc_feature (1)..(123): tr|A0A5D3WPM8|A0A5D3WPM8_9DELT 6-carboxy-5,6,7,8-tetrah ydropterin synthase OS=Geothermobacter ehrlichii OX=213 224 GN=EDC39_101470 PE=3 SV=1
MYRLTIQTHFAAAHNLINYQGDCENLHGHNWKVEVQVRAHQLDAAGLGIDFKVLKKEANRLLDELDHKYLNDLEPFKDISPSSEHICRFLFERLSARLNSDNVQVDEVRVWESDNACASYRLD

SEQ ID NO: 20786 - protein, 123 aa, Geothermobacter sp.
  misc_feature (1)..(123): tr|A0A1X0YER2|A0A1X0YER2_9DELT 6-carboxy-5,6,7,8-tetrah ydropterin synthase OS=Geothermobacter sp. EPR-M OX=196 9733 GN=B5V00_01775 PE=3 SV=1
MYRLTIQTQFAAAHNLVNYQGDCENLHGHNWKVEVRVAARELDKSGLGIDFKVLKRQTNAVLDGLDHKYLNKLEPFLDLSPSSENIARYLFEQLGEVLNTDNVTVEQVNVWESDNACASYSLD

SEQ ID NO: 20787 - protein, 123 aa, Geothermobacter sp.
  misc_feature (1)..(123): tr|A0A2K2H732|A0A2K2H732_9DELT 6-carboxy-5,6,7,8-tetrah ydropterin synthase OS=Geothermobacter sp. HR-1 OX=6548 45 GN=queD PE=3 SV=1
MYRLTIQTQFAAAHNLVNYQGDCENLHGHNWKVEVRVAARELDKSGLGIDFKVLKHRTNAVLDSLDHKYLNKLEPFLDLSPSSENIARYLFEQLGELLNTDNVTVEQVNVWESDNACASYSLD

SEQ ID NO: 20788 - protein, 119 aa, Geovibrio thiophilus
  misc_feature (1)..(119): tr|A0A3R5UXQ2|A0A3R5UXQ2_9BACT 6-carboxy-5,6,7,8-tetrah ydropterin synthase OS=Geovibrio thiophilus OX=139438 G N=queD PE=3 SV=1
MYRVRVIKSFASAHNLREYEGDCENLHGHNWKVEAYLASDKLDKIGMLVDFKVLKKHLNEILDGLDHKYINELEYFKTVNPTSENMCRYIYDRLKENFGSMVERVVVWESDNAAAEYWE

SEQ ID NO: 20789 - protein, 119 aa, Gibbsiella quercinecans
  misc_feature (1)..(119): tr|A0A250AZK9|A0A250AZK9_9ENTR 6-carboxy-5,6,7,8-tetrah ydropterin synthase OS=Gibbsiella quercinecans OX=92981 3 GN=AWC35_08345 PE=3 SV=1
MATTLFKDFTFEAAHLLPHVPEGHKCGRLHGHSFMVRLEVTGEVDPHTGWVIDFAELKAAFKPVWEQLDHHYLNEVEGLENPTSEVLAAWIWRQMKPRLPLLSAVMVKETCTAGCIYKG

SEQ ID NO: 20790 - protein, 120 aa, Giesbergeria anulus
  misc_feature (1)..(120): tr|A0A1H9IVR4|A0A1H9IVR4_9BURK 6-carboxy-5,6,7,8-tetrah ydropterin synthase OS=Giesbergeria anulus OX=180197 GN =SAMN02982919_01228 PE=3 SV=1
MQLTVSQRFFFDAAHTLQREIEAEGSRRIHGHTYHAEVFISGPRNPVSGMVIDLGHVRQRLVALREQLDHHLLDEVPNLGPATLENLCLFIANALADMQPPPSRVRVWRDAVGDSCTLDL

SEQ ID NO: 20791 - protein, 140 aa, Gilliamella apicola
  misc_feature (1)..(140): tr|A0A1B9JQ10|A0A1B9JQ10_9GAMM 6-carboxy-5,6,7,8-tetrah ydropterin synthase OS=Gilliamella apicola OX=1196095 G N=A9G10_10940 PE=3 SV=1
MFKIAKEFQFDACHMLDGHNKKCHNLHGHTYRLVVEISGELINKGSSEDMVMDYADLKSIVKKHIIDPLDHAYLYHQNNVNECRIATLLQEMDRKTFAFPCRTTAEGMSQYIFDCLSNYLPISKIKLWETPSSYCEYQRS

SEQ ID NO: 20792 - protein, 140 aa, Gilliamella apicola
  misc_feature (1)..(140): tr|A0A066T624|A0A066T624_9GAMM 6-carboxy-5,6,7,8-tetrah ydropterin synthase OS=Gilliamella apicola OX=1196095 G N=A9G37_10175 PE=3 SV=1
MFKIAKEFQFDACHMLDGHNKKCHNLHGHTYRLLVEISGELIDNGSSQDMVMDYADLKLIVKQHIVDPLDHAYLYYQHNPNECRIASLLQEMDRKIFAFPCRTTAEGMSKFIFDCLSQYLPVSMIKVWETPTSYCEYHRS

SEQ ID NO: 20793 - protein, 142 aa, Gilliamella apis
  misc_feature (1)..(142): tr|A0A242NWE7|A0A242NWE7_9GAMM 6-carboxy-5,6,7,8-tetrah ydropterin synthase OS=Gilliamella apis OX=1970738 GN=B 6D06_03345 PE=3 SV=1
MFKIAKEFQFDACHMLDGHNGKCHNLHGHTYRLLVEISNELITSGSSADMVMDYADIKSVVKQQIIDQLDHAYLYNQNNANESQIAELLQQMQRKIFAFPCRTTAEGMSKFIFDRLSQFLPVSMIKLWETPTSYCEYHRSEK

SEQ ID NO: 20794 - protein, 142 aa, Gilliamella apis
  misc_feature (1)..(142): tr|A0A242P7V2|A0A242P7V2_9GAMM 6-carboxy-5,6,7,8-tetrah ydropterin synthase OS=Gilliamella apis OX=1970738 GN=B 6C98_03170 PE=3 SV=1
MFKIAKEFQFDACHMLDGHNGKCHNLHGHTYRLLVEISNQLITSGSSADMVMDYADIKSIVKQQIIDQLDHAYLYNQNNANESQIAELLQQMQRKIFAFPCRTTAEGMSKFIFDRLSQFLPVSMIKLWETPTSYCEYHRSEK

SEQ ID NO: 20795 - protein, 140 aa, Gilliamella bombicola
  misc_feature (1)..(140): tr|A0A1C4D2J9|A0A1C4D2J9_9GAMM 6-carboxy-5,6,7,8-tetrah ydropterin synthase OS=Gilliamella bombicola OX=1798182 GN=GA0061081_1139 PE=3 SV=1
MFKIAKEFQFDACHMLDGHNKKCHNLHGHTYRLLVEISGDLINNGSSQDMVMDYADLKMVVKQHIIDPLDHAYLYNQNNPNERRIATLLQEMERKIFAFPCRTTAEAMSKFIFDCLSQYLPVSMIKLWETPTSYCEYHRS

SEQ ID NO: 20796 - protein, 140 aa, Gilliamella intestini
  misc_feature (1)..(140): tr|A0A1C4CZ87|A0A1C4CZ87_9GAMM 6-carboxy-5,6,7,8-tetrah ydropterin synthase OS=Gilliamella intestini OX=1798183 GN=GA0061080_10543 PE=3 SV=1
MFKIAKEFQFDACHMLDGHNKKCHNLHGHTYRLLVEVSGDLIDSGSSQDMVMDYADLKQIVKQHIVDRLDHAYLYNQNNPNECRIASLLQEMDRKIFAFPCRTTAEGMSQFIFDHLSQYLPVSMIKLWETPTSYCEYRRS

SEQ ID NO: 20797 - protein, 142 aa, Gilliamella sp.
  misc_feature (1)..(142): tr|A0A242PB41|A0A242PB41_9GAMM 6-carboxy-5,6,7,8-tetrah ydropterin synthase OS=Gilliamella sp. N-G2 OX=1970471 GN=B6C99_10480 PE=3 SV=1
MFKIAKEFQFDACHMLDGHNGKCHNLHGHTYRLLVEISNELITSGSSADMVMDYADIKSVVKQQIIDQLDHAYLYNQNNANESQIAELLQQMQRKIFAFPCRTTAEGMSKFIFDHLSQFLPVSMIKLWETPTSYCEYHRSEK

SEQ ID NO: 20798 - protein, 142 aa, Gilliamella sp.
  misc_feature (1)..(142): tr|A0A242P014|A0A242P014_9GAMM 6-carboxy-5,6,7,8-tetrah ydropterin synthase OS=Gilliamella sp. A7 OX=1970465 GN =B6D18_07675 PE=3 SV=1
MFKIAKEFQFDACHMLDGHNGKCHNLHGHTYRLLVEISNELITNGSSADMVMDYAEIKSIVKQQIIDQLDHAYLYNQNNANESQIAELLQKMQRKIFAFPCRTTAEGMSKFIFDHLSQFLPVSMIKLWETPTSYCEYHRSEK

SEQ ID NO: 20799 - protein, 136 aa, Gillisia hiemivivida
  misc_feature (1)..(136): tr|A0A5C6ZRZ5|A0A5C6ZRZ5_9FLAO 6-carboxy-5,6,7,8-tetrah ydropterin synthase OS=Gillisia hiemivivida OX=291190 G N=ES724_15725 PE=3 SV=1
MKVTVHRKAHFNAAHRLYRKDWDDQKNQNIFGKCSNPNFHGHNYELTVSVKGDIDPETGFVVDLKILKDLISSEIEEYLDHKNLNVEVEEFKTLNPTAENIAVVIWGKLRPRLKETLELSVTLYETPRNFVTYNGE

SEQ ID NO: 20800 - protein, 150 aa, Gillisia hiemivivida
  misc_feature (1)..(150): tr|A0A5C6ZSY9|A0A5C6ZSY9_9FLAO 6-carboxytetrahydropteri n synthase OS=Gillisia hiemivivida OX=291190 GN=ES724_0 9720 PE=4 SV=1
MSKIRITKQFSFETGHALYGYDGKCKNVHGHSYKLSVTVIGTPITDTNNVKYGMVIDFTDLKKIVKSEIVDKFDHATVFNKNTPHIELARELESRDHNVILVEYQPTSENMVIDFADKIKRQLPSQIKLFSLKLQETDTSFAEWYASDNF

SEQ ID NO: 20801 - protein, 153 aa, Gillisia limnaea
  misc_feature (1)..(153): tr|H2BTP4|H2BTP4_9FLAO Uncharacterized protein OS=Gilli sia limnaea DSM 15749 OX=865937 GN=Gilli_2026 PE=4 SV=1
MSTIRITKQFSFETGHALYGYDGKCKNVHGHSYKLSVTVIGNPITDKTNVKYGMVIDFGDLKKIVKSEIVDRFDHATVFNKNTPHIELAKELEKRDHNVILVEYQPTSENMVVDFSEKIKSRLPNHIKLHSLKLQETESSFAEWYASDQEPQE

SEQ ID NO: 20802 - protein, 135 aa, Gillisia limnaea
  misc_feature (1)..(135): tr|H2BU54|H2BU54_9FLAO 6-carboxy-5,6,7,8-tetrahydropter in synthase OS=Gillisia limnaea DSM 15749 OX=865937 GN= Gilli_0964 PE=3 SV=1
MKVTVHRKAHFNAAHRLYRKDWDDAKNLAVFGKCSNPNFHGHNYELTVSVTGTIDPETGFVIDMKVLKDLIYSEVETAFDHKNLNVEVADFQDLNPTAENIAVVIWNKLKPKLKNDLELSVTLYETPRNFVTFNG

SEQ ID NO: 20803 - protein, 150 aa, Gillisia mitskevichiae
  misc_feature (1)..(150): tr|A0A495PYA6|A0A495PYA6_9FLAO 6-pyruvoyltetrahydropter in/6-carboxytetrahydropterin synthase OS=Gillisia mitsk evichiae OX=270921 GN=BC962_0283 PE=4 SV=1
MNKIRITKQFSFETGHALYGYDGKCKNVHGHSYKLSVTVIGTPITDTNNVKYGMVIDFSDLKKIVKSEIVDKFDHATVFNKNTPHIELAKELENRDHSVILVEYQPTSENMVLDFADKIKSQLPSQIELFSLKLQETDTSFAEWYASDNS

SEQ ID NO: 20804 - protein, 136 aa, Gillisia mitskevichiae
  misc_feature (1)..(136): tr|A0A495PVQ6|A0A495PVQ6_9FLAO 6-carboxy-5,6,7,8-tetrah ydropterin synthase OS=Gillisia mitskevichiae OX=270921 GN=BC962_2115 PE=3 SV=1
MKVTVHRKAHFNAAHRLYRKDWDAQKNQDIFGKCSNPNFHGHNYELIVSVKGDIDQETGFVVDMKVLKELIASEIEEYLDHKNLNIEVEEFKQLNPTAENIAVVIWNKLRLKIKENLELSVTLYETPRNFVTYKGE

SEQ ID NO: 20805 - protein, 150 aa, Gillisia sp.
  misc_feature (1)..(150): tr|A0A559PL54|A0A559PL54_9FLAO 6-pyruvoyltetrahydropter in/6-carboxytetrahydropterin synthase OS=Gillisia sp. H el_I_86 OX=1249981 GN=JM83_1305 PE=4 SV=1
MNKIRITKQFSFETGHALYGYDGKCKNVHGHSYKLSVTVIGSPITDTSNVKYGMVIDFTDLKKIVKSEIVDKFDHATVFNKNTPHIQLAKELESRDHNVILVGYQPTSENMVLDFADKIKNRLPPQIKLFSLKLQETGTSFAEWFASDNS

SEQ ID NO: 20806 - protein, 150 aa, Gillisia sp.
  misc_feature (1)..(150): tr|A0A1H1MRT1|A0A1H1MRT1_9FLAO 6-pyruvoyltetrahydropter in/6-carboxytetrahydropterin synthase OS=Gillisia sp. H el1_33_143 OX=1336796 GN=SAMN04487764_0937 PE=4 SV=1
MSKIRITKQFSFETGHALYGYDGKCKNVHGHSYKLSVTVIGTPILDTNNVKYGMVIDFGDLKKIVKSEIVDKFDHATVFNKNTPHVELAKELENRDHNVILVDYQPTSENMVIDFAEKIKKNLPGHIQLHSLKLQETDSSFAEWYASDNS

SEQ ID NO: 20807 - protein, 148 aa, Gilvibacter sp.
  misc_feature (1)..(148): tr|A0A1Y0MW61|A0A1Y0MW61_9FLAO 6-pyruvoyl tetrahydrobio pterin synthase OS=Gilvibacter sp. SZ-19 OX=754429 GN=B TO09_13925 PE=4 SV=1
MLGSSALLERPTALKTAIVRREHFNAAHRLHNPNWSEAKNQAVFGKCNNPHYHGHNYELEVKVIGYCDPETGYVMDAKVLSDLIKEQILERFDHKNLNLEVAEFSNLNPTAENIARVIYELLKVQLPLDTELKITLYETPRNYVEYPY

SEQ ID NO: 20808 - protein, 149 aa, Gilvibacter sp.
  misc_feature (1)..(149): tr|A0A1Y0MPV6|A0A1Y0MPV6_9FLAO 6-carboxy-5,6,7,8-tetrah ydropterin synthase OS=Gilvibacter sp. SZ-19 OX=754429 GN=BTO09_05955 PE=3 SV=1
MSNIRITKQFSFETGHALWGYDGKCRNVHGHSYNLYVTVIGQPITDPSHVKHGMVIDFGDLKKIVKEEIVEVFDHATVFNKNTPHVELAKELQDRGHNVLLVDYQPTSEMMVIDFAEKIAKRLPDGIKLHSLKLQETATSFAEWFASEN

SEQ ID NO: 20809 - protein, 166 aa, Gimesia maris
  misc_feature (1)..(166): tr|A0A3D3RE92|A0A3D3RE92_9PLAN 6-carboxytetrahydropteri n synthase OS=Gimesia maris OX=122 GN=DIT97_26720 PE=4 SV=1
MGMTIMRRIKFNAGHRLFRHEGKCQFFHGHNYVADFYVTGPDTDAVGRIIDFAHLKSLLKGWIDENWDHGFLLNIEDENGLNAIRMVEPTKYFVLPYNPTAENMARYLLDEVCPNLLNDLGVQAVKVVIWETEESCAEATIDQKDKSEHSLLDAFQTDSFPTGLHW

SEQ ID NO: 20810 - protein, 166 aa, Gimesia maris; identical to SEQ ID NO: 20809
  misc_feature (1)..(166): tr|A6C2V8|A6C2V8_9PLAN 6-pyruvoyl tetrahydrobiopterin s ynthase OS=Gimesia maris DSM 8797 OX=344747 GN=PM8797T_ 09614 PE=4 SV=1

SEQ ID NO: 20811 - protein, 168 aa, Gimesia sp.
  misc_feature (1)..(168): tr|A0A5A8BBS4|A0A5A8BBS4_9PLAN 6-carboxytetrahydropteri n synthase OS=Gimesia sp. JC646 OX=2605989 GN=FYZ48_141 95 PE=4 SV=1
MKDSVPRYKVRVTKDHLVFSAAHFITFNGNICERLHGHNWRVAAELTGPLDENGYVFDFIALRDQLQKTVDALDHRVLLPTQHDKIKVREDQNEVEATFEERRWVFPREDCILLPIANTTAELIAHWIGQQLMTVIGSDAASQIELVQIEVEENFGQWAICELPVTRN

SEQ ID NO: 20812 - protein, 118 aa, Gimesia sp.
  misc_feature (1)..(118): tr|A0A2E7KDD7|A0A2E7KDD7_9PLAN 6-carboxy-5,6,7,8-tetrah ydropterin synthase OS=Gimesia sp. OX=2024833 GN=queD P E=3 SV=1
MDLYKEFRFEAAHRLPNVPENHKCARLHGHSFRVQLHLSGKVDDKYGWVVDFADIKAAFKPVHERLDHYYLNEIEGLDNPTSENIAIWIWRQLKPNLAQLSKVVVSETCDCGCSYSGE

SEQ ID NO: 20813 - protein, 296 aa, Glaciecola nitratireducens
  misc_feature (1)..(296): tr|G4QLJ1|G4QLJ1_GLANF Uncharacterized protein OS=Glaci ecola nitratireducens (strain JCM 12485 / KCTC 12276 / FR1064) OX=1085623 GN=GNIT_1988 PE=4 SV=1
MKLFVNDLTVMDFSYLCPTRGMVGESWIVDILLNGGLNEESMVQDFGKVKKELKHVIDEYVDHKLVVPAENQCTTITHDDSNERVQVDFSYQHDGAENAQSMHLYCPPEAYAFVYSDEVNMSSVTEYLKEVIKIHLPENVHSVELFLREEVIPTDFYHYTHGLKKHDGNCQRIAHGHRSKVLVFEDGKESETWQNYWAKRWADIYIGTHEDLVTSSELSFQHDNINDEKYYCFKYEASQGEFEMAIEKQACEIIETDSTVECLAQFMFDELKTMTDVKLEVRAFEGVGKGAIVADE

SEQ ID NO: 20814 - protein, 275 aa, Glaciecola pallidula
  misc_feature (1)..(275): tr|K6ZCU4|K6ZCU4_9ALTE Uncharacterized protein OS=Glaci ecola pallidula DSM 14239 = ACAM 615 OX=1121922 GN=GPAL _1299 PE=4 SV=1
MVGESWIVDILLNGGLNEESMVQDFGKVKKELKHVIDDYVDHKLVVPAEHACTTITHDDSNERVQVDFSYHHEGSENAQSLHLYCPPEAYAFVYADEVNMSSVKEYLKEVIKTHLPENVHSVELFLREEAIPTDFYHYTHGLKKHDGNCQRIAHGHRSKVLVFENGKESQKWQNYWAKRWADIYIGTKEDLVSPSQLSFQHDNINADSFYCFKYESSQGEFEMAIEKQACEIIQTDSTVECLAQFMFDELKTMSDMTLEVRAFEGVGKGAIVADE

SEQ ID NO: 20815 - protein, 295 aa, Glaciecola punicea
  misc_feature (1)..(295): tr|H5TA51|H5TA51_9ALTE Isocitrate dehydrogenase (NADP(+ )) OS=Glaciecola punicea ACAM 611 OX=1121923 GN=GPUN_10 47 PE=4 SV=1
MKLFVNDLTVMDFSYLCPQRGMVGESWIVDVILDGGLNDESMVQDFGIVKKQLKKVIDEYVDHKLVVPADHQNTRIYSPASDDRVQVDFVFADGLPIQLFCPPEAYAFVYKLEGEPSLITKKSLTAYLKDVITTHLPENVHDIDITLREEVINTPFYHYTHGLKKHDGNCQRIAHGHRSKILISQNGISSEKWQRYWADRWSDIYIGSTEDTVDAQALSFSLLNDAPVYCFKYEASQGLFEMAIASQVCELIDYDSTVECLAQYILEQTQKETDDPLTVMAFEGVGKGAMISANI

SEQ ID NO: 20816 - protein, 123 aa, Glaciecola sp.
  misc_feature (1)..(123): tr|A0A2Z6UBH0|A0A2Z6UBH0_GLASK Uncharacterized protein OS=Glaciecola sp. (strain KUL10) OX=2161813 GN=KUL10_27 810 PE=4 SV=1
MFSVKIRESIMIAHSLPDPFFGPAQNMHGATYVVDVSFQSKTVNAQNVVIDIGEAKTITKEVLSCLNYKNLDELDIFKGHLTTTEFLAKYIHDEIKAKAEFTGSLLVCLGETHDAWASYQGDS

SEQ ID NO: 20817 - protein, 290 aa, Glaciecola sp.
  misc_feature (1)..(290): tr|A0A2Z6U9J9|A0A2Z6U9J9_GLASK Uncharacterized protein OS=Glaciecola sp. (strain KUL10) OX=2161813 GN=KUL10_00 200 PE=4 SV=1
MKLFVNDLTVMDFSYLCPQRGMVGESWIVDIILDGGLNEESMVQDFGIVKKELKRVIDDYVDHKLVVPAEYHGTKVVHQEEQERVSVDFEFANDQHIHLYCPPEAYAFVYSEQVDKQSVNAYLKEVIAIHLPENVQSVEITLRDEEIPTPFYHYTHGLKKHEGNCQRIAHGHRSKVLIYENGEESLALQQAWAERWADIYIGTREDLVSVKALSHSLGLSDDDYFAFKYESSQGVFEMAIPKSVCEIIETDSTVECLAQYIYDEIKTENSNLIEVRAFEGVGKGAIVRDE

SEQ ID NO: 20818 - protein, 149 aa, Glaciimonas sp.
  misc_feature (1)..(149): tr|A0A2T6F0D3|A0A2T6F0D3_9BURK 6-carboxytetrahydropteri n synthase QueD OS=Glaciimonas sp. PCH181 OX=2133943 GN =queD PE=4 SV=1
MLTITRKLEFDAGHRIPDHKSQCRNLHGHRYTLEITLVGAIIEVEGSSDNGMIMDFSDIKTLAKQHLVDVWDHAFIVYEKDTAVREFLATLPDHKTVVIDRIPTVENLARAAYDILKAAYKDHYGTGLHLQKLVLHETPNCWAEISEDR

SEQ ID NO: 20819 - protein, 140 aa, Glaesserella parasuis
  misc_feature (1)..(140): tr|U4SF19|U4SF19_HAEPR 6-carboxy-5,6,7,8-tetrahydropter in synthase OS=Glaesserella parasuis D74 OX=1275971 GN= A2U20_01740 PE=3 SV=1
MFKIAKEFSFDMAHMLDGHDGKCKNLHGHTYTLQVEIAGELHTDGAKSGMVMDYSDLKAVVKQHILDKMDHAFIYDSTSEKECKVATLLQSLDSKTFGIPARTTAEQMAKYIFDTLTTEGLPVSLIRLWETPTSYCEYCQ

SEQ ID NO: 20820 - protein, 140 aa, Glaesserella parasuis
  misc_feature (1)..(140): tr|A0A0E1RLU2|A0A0E1RLU2_HAEPR 6-carboxy-5,6,7,8-tetrah ydropterin synthase OS=Glaesserella parasuis 29755 OX=4 56298 GN=pts PE=3 SV=1
MFKIAKEFSFDMAHMLDGHDGKCKNLHGHTYTLQVEIAGELHTDGAKSGMVMDYSDLKVAVKQHILDKMDHAFIYDSTSEKECKVATLLQSLDSKTFGIPARTTAEQMAKYIFDTLTTEGLPVSLIRLWETPTSYCEYCR

SEQ ID NO: 20821 - protein, 142 aa, Glaesserella sp.
  misc_feature (1)..(142): tr|A0A328BXQ6|A0A328BXQ6_9PAST 6-carboxy-5,6,7,8-tetrah ydropterin synthase OS=Glaesserella sp. HHC-2018 OX=209 4024 GN=queD PE=3 SV=1
MFKIAKEFSFDMAHMLDGHDGKCKNLHGHTYTLQVEISGELHADGAKSGMVMDYSDLKAVVKKHILDNMDHAFIYDLTSEKECKVADLLNSLDSKTFGIPARTTAEQMAKYMFDTLKAEGLPVSLIRLWETPTSYCEYSPSV

SEQ ID NO: 20822 - protein, 276 aa, Gloeobacter kilaueensis
  misc_feature (1)..(276): tr|U5QH04|U5QH04_9CYAN Uncharacterized protein OS=Gloeo bacter kilaueensis JS1 OX=1183438 GN=queD PE=4 SV=1
MTSCLIVRRSRFSAAHRYWLEELSAEENRRRFGAAANIHGHNYTILVSMNGPVDRFGMVLNLSEVKQIIRREVSGQLDSQLLNETWEEFVRTLPTTEHMARVIFERLRPHLPVVRVQLFESEDLWAEYQGEAMQAYLTIADHFAAAHRLALDELSLEENTEIYGLCARTHGHGHNYHVEITVKGEVDERTGMLVDLVALQRLLKDKVLLPFDHTFLNKDVPYFAQVVPTAENIALHIRDLLEEPVRALGARLHKVRLIESPNNSVEVYTESFAPIA

SEQ ID NO: 20823 - protein, 276 aa, Gloeobacter violaceus
  misc_feature (1)..(276): tr|Q7NFE7|Q7NFE7_GLOVI Glr3579 protein OS=Gloeobacter v iolaceus (strain ATCC 29082 / PCC 7421) OX=251221 GN=gl r3579 PE=4 SV=1
MGCLIVRRARFSAAHRYWLSELSEAENRSRFGPTTRIHGHNYVLFVSMLGPVDEYGMVLNLSDVKHVIKREVTAQLDTNLLNEAWPELAETLPTTEHLARVIFHRLVPHLPVVRVQLFESDDLWAEYQGEGMQAYLTISDHFAAAHRLALDSLSLEENTEIYGLCARPNGHGHNYHVEITVKGEVDGRTGMLVDLAALQQILKDKVLLPFDHTFLNKDVPYFAGVVPTAENIALHIRDLLEEPVRALGARLHKVRLIESPNNSVEVHTESYAPLVG

SEQ ID NO: 20824 - protein, 289 aa, Gloeocapsa sp.
  misc_feature (1)..(289): tr|K9XHX9|K9XHX9_9CHRO Uncharacterized protein OS=Gloeo capsa sp. PCC 7428 OX=1173026 GN=Glo7428_3783 PE=4 SV=1
MQCIVNRRAQFSASHRYWLPELSEAENTQRFGLCARTPGHGHNYVLYVSLAGELDEYGMVQNLSEVKQVIKREVTSQLDFSHLNDVWTEFQQTLPTTENIARVIWQRLAPYLPLVRIQLFEHPELWAEYQGNGMEAYLTLSTHFSAAHRLARPDLSYEENSEIYGKCARPNGHGHNYHLEVTVKGDIDPRTGMLVDLGALQQIVDDLVVEPLDHTFLNKDIAYFAEIVPTAENIAVYISNVLRSPIQELGATLHKVKLIESPNNSCEIYCDQTVQEISDQRSEVRELVH

SEQ ID NO: 20825 - protein, 139 aa, Gloeocapsa sp.
  misc_feature (1)..(139): tr|L8LQX2|L8LQX2_9CHRO 6-carboxy-5,6,7,8-tetrahydropter in synthase OS=Gloeocapsa sp. PCC 73106 OX=102232 GN=GL O73106DRAFT_00031020 PE=3 SV=1
MQTDSVWLIYKEFRFEAAHRLPHHQGKCRRLHGHSWLGKIYVKSNHLMTTGPEQGMVLDFGKIKQYLKPLLEDYLDHHYLNETTGLENPTSEAIAQWIFTQLKAKGLPGLHAVEIRETCTSGAYYQPLEENQIKSENVI

SEQ ID NO: 20826 - protein, 288 aa, Gloeomargarita lithophora
  misc_feature (1)..(288): tr|A0A1J0AHD3|A0A1J0AHD3_9CYAN Putative 6-pyruvoyl tetr ahydropterin synthase OS=Gloeomargarita lithophora Alch ichica-D10 OX=1188229 GN=ptpS PE=4 SV=1
MRCIINRRAQFSASHCYSIPQWSEAENFRCFGKGSQFPGHGHNYILYVAMVGEIDECGMVLNLSEVKHVIRREVTEPLDNSFLNRAWPEFSQTLPTTEFIAYAIWHRLVPHLPLAQIQLYEHPQLWAEYQGDAMNAYLTVGTHFSAAHRLARVDFSETENYTTYGKCARPHGHGHNYHLEVTVRGKIDPVTGMLVDLVALQGVIDREVVEPLDHTFLNKDIPYFGDVVPTAEHIALYIVQLLQEPVRRLGAALHKVKLVESPNNSCEIYADDVRTVTPVPSLAVAASR

SEQ ID NO: 20827 - protein, 129 aa, Gloeothece citriformis
  misc_feature (1)..(129): tr|B7K7H2|B7K7H2_GLOC7 6-carboxy-5,6,7,8-tetrahydropter in synthase OS=Gloeothece citriformis (strain PCC 7424) OX=65393 GN=PCC7424_1293 PE=3 SV=1
MEEWIIYKEFRFEAAHILPHHGGKCRRLHGHSWVGRVYVKGNELIAEGSQQGMIIDYGEIKHYIQPLLDHYLDHYFLNETTGLENPTSEAIAKWIFEKLEAAGLPGLYAVEIRETCTSGCTYKKLIIDN

SEQ ID NO: 20828 - protein, 287 aa, Gloeothece citriformis
  misc_feature (1)..(287): tr|B7K9H7|B7K9H7_GLOC7 Uncharacterized protein OS=Gloeo thece citriformis (strain PCC 7424) OX=65393 GN=PCC7424 _1504 PE=4 SV=1
MDCIINRRAQFSASHRYWLPELDEVENQRRFGACSRFPGHGHNYVLYVSLYGELDQYGMVENLSYVKKVIKEEITTQLDYGYLNEVWPEFKQTLPTTENLARVIWQRLAPHLPLVNIQLFEHPELWADYQGNDMEASLTVKTHFSAAHRLALPDLSLEENTEIYGKCARVHGHGHNYHLEVSVTGEIDPRTGMLVDLGALEKIIDDYVVEPFDHSFLNKDIPYFAQVVPTAENIALYIAQLLQQPVRELGAELDKVKLIESPNNSCEIHCRQKVNSQLKLKQEPALV

SEQ ID NO: 20829 - protein, 129 aa, Gloeothece verrucosa
  misc_feature (1)..(129): tr|E0UBN0|E0UBN0_GLOV7 6-carboxy-5,6,7,8-tetrahydropter in synthase OS=Gloeothece verrucosa (strain PCC 7822) O X=497965 GN=Cyan7822_1992 PE=3 SV=1
MEEWIIYKEFRFEAAHTLPHHDGKCRRLHGHSWVGRVYVKGYELMAEGPKQGMIIDYADVKQYMKPILDNYLDHYYLNETTGLENPTSEAIAKWVYEKLEAAGLPGLYAVEIRETCTSGCTYKKSSYML

SEQ ID NO: 20830 - protein, 288 aa, Gloeothece verrucosa
  misc_feature (1)..(288): tr|E0U810|E0U810_GLOV7 Uncharacterized protein OS=Gloeo thece verrucosa (strain PCC 7822) OX=497965 GN=Cyan7822 _4179 PE=4 SV=1
MYCIINRRAQFSASHRYWLPELTEAENQKLFGLCSRFPGHGHNYVLYVSLYGELDHYGMVENLSYVKRVIKDEITSQLDYAYLNEVWPEFEQTLPTTENIARVIWQRLAPHLPLVNIQLFEHPELWADYQGNLMEATLTVKTHFSAAHRLALPELSLEENSEIYGKCARIHGHGHNYHLEVSVTGEIDPRTGMLVDLGALQKIIDEYVVEPFDHSFLNKDIPYFAQVVPTAENIAFYIAQLLQQPILELGAELDKVKLIESPNNSCEIYCRTRLHSPLPIKQEVALVS

SEQ ID NO: 20831 - protein, 175 aa, Gluconacetobacter diazotrophicus
  misc_feature (1)..(175): tr|B5ZM19|B5ZM19_GLUDA Uncharacterized protein OS=Gluco nacetobacter diazotrophicus (strain ATCC 49037 / DSM 56 01 / PAl5) OX=272568 GN=Gdia_3393 PE=4 SV=1
MLDLVFTRRFSMGHRLIHGASESCALPHGHNEFVTVRLRPTAPRPLDGAGNMVVSFQRAKGRWHRFVDERLDHALQLAEDDPLLAWFRANEPERARRIVVTPGDPTTELTACLMMAKLNALLDADGGVLRCAGITLQETPTNTVEFEGEPLDVLPTPRPAAQCWWRRADDSIADI

SEQ ID NO: 20832 - protein, 181 aa, Gluconacetobacter diazotrophicus
  misc_feature (1)..(181): tr|A9HRF7|A9HRF7_GLUDA Uncharacterized protein OS=Gluco nacetobacter diazotrophicus (strain ATCC 49037 / DSM 56 01 / PAl5) OX=272568 GN=GDI2956 PE=4 SV=1
MSRTAPMLDLVFTRRFSMGHRLIHDASESCALPHGHNEFVTVRLRPTAPRPLDGAGNMVVSFQRAKGRWHRFVDERLDHALQLAEDDPLLAWFRANEPERARRIVVTPGDPTTELTACLMMAKLNALLDADGGVLRCAGITLQETPTNTVEFEGEPLDVLPTPRPAAQCWWRRADDSIADI

SEQ ID NO: 20833 - protein, 175 aa, Gluconacetobacter entanii
  misc_feature (1)..(175): tr|A0A318Q4L8|A0A318Q4L8_9PROT 6-pyruvoyl tetrahydropte rin synthase OS=Gluconacetobacter entanii OX=108528 GN= CFR72_04255 PE=4 SV=1
MLELVFTRRFCMAHRLLSGESERCALPHGHNEYVRVTLRPTNPARLDGTQNMVVPFHRAKGTWHGFVDNSLDHAFQLGEGDPLLSWFRTHEPERAGRIVVTPGDPTTELMACLMMAKLNAFLHADGDVLTCAEIVLEETPTNTVRYAGDPLLMLPTPRPPQECWWRRADMSISDN

SEQ ID NO: 20834 - protein, 175 aa, Gluconacetobacter liquefaciens
  misc_feature (1)..(175): tr|A0A370G7U7|A0A370G7U7_GLULI 6-pyruvoyltetrahydropter in/6-carboxytetrahydropterin synthase OS=Gluconacetobac ter liquefaciens OX=89584 GN=C7453_10440 PE=4 SV=1
MLDLVFTRRFSMGHRLIHGASESCALPHGHNEFVTVRLRPTAPRALDGAGNMVVSFQRAKSRWHRFVDERLDHALQLAEDDPLLAWFRAHEPERARRIIVTPGDPTTELMACLMMAKLNALLDADGALLRCAEITLQETPTNTVRYEGDPLDMLPAPRPPAQCWWLRADDSIADV

SEQ ID NO: 20835 - protein, 178 aa, Gluconacetobacter sp.
  misc_feature (1)..(178): tr|F3SDH5|F3SDH5_9PROT Tetrahydropterin synthase OS=Glu conacetobacter sp. SXCC-1 OX=1004836 GN=SXCC_04186 PE=4 SV=1
MFELVFTRRFSMAHRLLAGGSERCALPHGHNEYVRVSLRATAPTALDGHANMVLPFQRAKGIWHQFIDNHVDHALQLAQDDPLLGWFAQHEPQRAQRILVTPGDPTTELLACLLMAKLNAFLAADGGILSCASIEIDETPTNTIRYGGDPLAVLPQPRPAAQCWWRRADMTIADTGLS

SEQ ID NO: 20836 - protein, 175 aa, Gluconobacter albidus
  misc_feature (1)..(175): tr|A0A1U9KVY0|A0A1U9KVY0_9PROT 6-pyruvoyl tetrahydropte rin synthase OS=Gluconobacter albidus OX=318683 GN=A0U9 4_01875 PE=4 SV=1
MTAELVFTRRFCMGHRLITGASERCAIPHGHNEYVRVKLRPAKQTRLDGHANMILPFAEAKTRWHHFVDNSLDHALQLSETDPLLAWFRANEPDRASRIVVTPGDPTTELMAALMLAKLTAILADQGDILRVHEIELEETPTNTVRLGGNPQRYLPAVSRPPEQCWWNKADASIS

SEQ ID NO: 20837 - protein, 175 aa, Gluconobacter albidus
  misc_feature (1)..(175): tr|A0A149TGZ0|A0A149TGZ0_9PROT 6-pyruvoyl tetrahydropte rin synthase OS=Gluconobacter albidus OX=318683 GN=AD94 5_11115 PE=4 SV=1
MTAELVFTRRFCMGHRLITGASERCAIPHGHNEYVRVKLRPAKQTRLDGHANMILPFAEAKTRWHHFVDNSLDHALQLSETDPLLAWFRANEPDRASRIVVTPGDPTTELMAALMLAKLTAILADQGDILRVHEIELEETPTNTVRLGGNPQHYLPAVSRPPEQCWWNKADASIS

SEQ ID NO: 20838 - protein, 177 aa, Gluconobacter cerinus
  misc_feature (1)..(177): tr|A0A1B6VLK2|A0A1B6VLK2_9PROT 6-pyruvoyl tetrahydropte rin synthase OS=Gluconobacter cerinus OX=38307 GN=A0123 _00803 PE=4 SV=1
MTAELVFTRRFCMGHRLITGTSEKCAVPHGHNEYVKVTLRPVDEKRLDGHQNMILPFAEAKTRWHDFVDNSLDHALQLSEQDPLLAWFRDHEPERARRIVVTPGDPTTEVMTALLLAKLTAILADQGGKLRVHEIELEETPTNTVKLSGDPSFYLPQVERAAHACWWNRADMSISDL

SEQ ID NO: 20839 - protein, 177 aa, Gluconobacter frateurii
  misc_feature (1)..(177): tr|A0A0S6TFK6|A0A0S6TFK6_9PROT Uncharacterized protein OS=Gluconobacter frateurii NBRC 103465 OX=1307834 GN=GF GA_1d0274 PE=4 SV=1
MTAELVFTRRFCMGHRLITGGSEKCAIPHGHNEYVKVTLRPVEETRLDGHQNMILPFADAKTRWHDFVDNSLDHALQLSEHDPLLSWFRDHEPERARRIVVTPGDPTTEVMAALLLAKLTAILADQACNLRVHLLELEETPTNTVRLSGNPVSYLPQVSRAPQECWWNRADMSVSDF

SEQ ID NO: 20840 - protein, 177 aa, Gluconobacter frateurii
  misc_feature (1)..(177): tr|A0A0K8N4K5|A0A0K8N4K5_9PROT Uncharacterized protein OS=Gluconobacter frateurii NBRC 101659 OX=1104996 GN=GL F_2106 PE=4 SV=1
MTAELVFTRRFCMGHRLITGSSEKCAIPHGHNEYVKVTLRPVEETRLDGHQNMILPFADAKTRWHDFVDNSLDHALQLSEQDPLLAWFRDHEPERARRIVVTPGDPTTEVMAALLLAKLTAILADQGSILCVHALELEETPTNTVRLTGDPAFYLPKVSRAPRECWWNRADKSISDF

SEQ ID NO: 20841 - protein, 177 aa, Gluconobacter japonicus
  misc_feature (1)..(177): tr|A0A149TM48|A0A149TM48_GLUJA 6-pyruvoyl tetrahydropte rin synthase OS=Gluconobacter japonicus OX=376620 GN=AD 936_10355 PE=4 SV=1
MTAELVFTRRFCMGHRLITGSSEKCAIPHGHNEYVKVTLRPVEATRLDGHQNMILPFADAKTRWHDFVDNSLDHALQLSEHDPLLAWFRDHEPERARKIVVTPGDPTTEVMAALLLAKLTAILADQGAALRVHALELEETPTNTVRLTGDPAFYLPKVSRSPQKCWWNRADKSISDF

SEQ ID NO: 20842 - protein, 177 aa, Gluconobacter japonicus
  misc_feature (1)..(177): tr|A0A177G1C3|A0A177G1C3_GLUJA 6-pyruvoyl tetrahydropte rin synthase OS=Gluconobacter japonicus OX=376620 GN=A0 J51_01840 PE=4 SV=1
MTAELVFTRRFCMGHRLITGSSEKCAIPHGHNEYVKVTLRPVEETRLDGHQNMILPFAEAKTRWHDFVDNSLDHALQLSEHDPLLAWFRDHEPERARRIVVTPGDPTTEVMAALLLAKLTAILEDQGCALRVHSLELEETPTNTVRLTGDPAFYLPQVSRAPQECWWNRADMSISDV

SEQ ID NO: 20843 - protein, 175 aa, Gluconobacter kanchanaburiensis
  misc_feature (1)..(175): tr|A0A511BAG3|A0A511BAG3_9PROT Uncharacterized protein OS=Gluconobacter kanchanaburiensis NBRC 103587 OX=13079 48 GN=GKA01_19580 PE=4 SV=1
MTAELVFTRRFCMGHRLITGSSERCAIPHGHNEYVRVTLRPAKQTRLDGHANMILPFAEAKTRWHHFVDNSLDHALQLSETDPLLAWFRANEPERASRIVVTPGDPTTELMAALMLAKLTAILADQGDILRVHEIELEETPTNTVRLGGNPQHYLPAVSQPPEQCWWNRPDDSIS

SEQ ID NO: 20844 - protein, 178 aa, Gluconobacter morbifer
  misc_feature (1)..(178): tr|G6XFJ5|G6XFJ5_9PROT 6-pyruvoyl-tetrahydropterin synt hase OS=Gluconobacter morbifer G707 OX=1088869 GN=GMO_0 2600 PE=4 SV=1
MTAELIFTRRFCMGHRLITGSSERCAIPHGHNEYVRVTLRPAKQARLDGHVNMILPFAEAKARWHGFVDEALDHSLQLSETDPLLAWFRQNEPQRAERIVVTPGDPTTELMAALMLAKLTAFLADQGDILRVHEIELEETPTNTVRLGGNPQHYLPVVNRPAKDCWWNRPDQSISDLP

SEQ ID NO: 20845 - protein, 177 aa, Gluconobacter oxydans
  misc_feature (1)..(177): tr|K7T6M3|K7T6M3_GLUOY Uncharacterized protein OS=Gluco nobacter oxydans H24 OX=1224746 GN=B932_0498 PE=4 SV=1
MTAELVFTRRFCMGHRLITGSSEKCAIPHGHNEYVRVTLRPVEETRLDGHQNMILTFAEAKTRWHDFVDNSLDHALQLSEHDPLLAWFRAHEPERARRIVVTPGDPTTEVMAALLLAKLTAILADQGSSLRVHALELEETPTNTVRLTGDPAFYLPQVNRAPQECWWNRADMSISDV

SEQ ID NO: 20846 - protein, 175 aa, Gluconobacter oxydans
  misc_feature (1)..(175): tr|Q5FQR3|Q5FQR3_GLUOX Uncharacterized protein OS=Gluco nobacter oxydans (strain 621H) OX=290633 GN=GOX1541 PE= 4 SV=1
MTAELVFTRRFCMGHRLITGASERCAIPHGHNEYVRVTLRPAKQTRLDGHANMILPFAEAKTRWHHFVDNSLDHALQLSETDPLLAWFRTNEPERAQRIVVTPGDPTTELMAALMLAKLTAILADQGDILRVHEIELEETPTNTVRLGGNPQHYLPTVSRPPEQCWWNRPDASIA

SEQ ID NO: 20847 - protein, 175 aa, Gluconobacter roseus
  misc_feature (1)..(175): tr|A0A4Y3M3K3|A0A4Y3M3K3_9PROT Uncharacterized protein OS=Gluconobacter roseus NBRC 3990 OX=1307950 GN=GRO01_0 2420 PE=4 SV=1
MTAELVFTRRFCMGHRLITGASERCAIPHGHNEYVRVTLRPAKQARLDGHANMILPFAEAKTRWHHFVDNSLDHALQLSETDPLLAWFRENEPERASRIVVTPGDPTTELMAALMLAKLTAILADQGDILRVHEIELEETPTNTVRLGGNPQHYLPAVSRPPEQCWWNRPDASIS

SEQ ID NO: 20848 - protein, 177 aa, Gluconobacter sp.
  misc_feature (1)..(177): tr|A0A252BMT3|A0A252BMT3_9PROT 6-pyruvoyl tetrahydropte rin synthase OS=Gluconobacter sp. DsW_058 OX=1511210 GN =HK24_04010 PE=4 SV=1
MTAELVFTRRFCMGHRLITGTSEKCAVPHGHNEYVKVTLRPVDEKRLDGHQNMILPFTEAKTRWHDFIDNSLDHALQLSEQDPLLAWFRDHEPERARRIVVTPGDPTTEVMIALLLAKLTAILADQGGKLRVHEIELEETPTNTVKLSGDPSFYLPQVERAAQACWWNRADMSISDL

SEQ ID NO: 20849 - protein, 175 aa, Gluconobacter sphaericus
  misc_feature (1)..(175): tr|A0A4Y3Q8W2|A0A4Y3Q8W2_9PROT Uncharacterized protein OS=Gluconobacter sphaericus NBRC 12467 OX=1307951 GN=GS P01_00250 PE=4 SV=1
MTAELVFTRRFCMGHRLITGASERCAIPHGHNEYVRVTLRPAKQARLDGHANMILPFAEAKTRWHHFVDNSLDHALQLSETDPLLAWFRENEPERAQRIVVTPGDPTTELMAALMLAKLTAILADQGDILRVHEIELEETPTNTVRLGGNPQHYLPTISRQPEQCWWNRPDASIA

SEQ ID NO: 20850 - protein, 177 aa, Gluconobacter thailandicus
  misc_feature (1)..(177): tr|A0A5C0A637|A0A5C0A637_GLUTH 6-carboxytetrahydropteri n synthase OS=Gluconobacter thailandicus OX=257438 GN=F XF46_08080 PE=4 SV=1
MTAELVFTRRFCMGHRLITGSSEKCAIPHGHNEYVKVTLRPVEETRLDGHQNMILPFAEAKTRWHDFVDNSLDHALQLSEHDPLLAWFRAHEPERARRIVVTPGDPTTEVMAALLLAKLTAILADQGSSLRVHALELEETPTNTVRLTGDPAFYLPQVSRAPQECWWNRADMSISDV

SEQ ID NO: 20851 - protein, 177 aa, Gluconobacter thailandicus
  misc_feature (1)..(177): tr|A0A149SM18|A0A149SM18_GLUTH 6-pyruvoyl tetrahydropte rin synthase OS=Gluconobacter thailandicus OX=257438 GN =AD940_15415 PE=4 SV=1
MTAELVFTRRFCMGHRLITGSSEKCAIPHGHNEYVMVTLRPVEETRLDGHQNMILPFAEAKTRWHDFVDNSLDHALQLSEHDPLLAWFRAHEPERARRIVVTPGDPTTEVMAALLLAKLTAILADQGSSLRVHALELEETPTNTVRLTGDPAFYLPQVSRAPQECWWNRADMSISDV

SEQ ID NO: 20852 - protein, 126 aa, Gluconobacter wancherniae
  misc_feature (1)..(126): tr|A0A511B149|A0A511B149_9PROT Uncharacterized protein OS=Gluconobacter wancherniae NBRC 103581 OX=656744 GN=G WA01_19080 PE=4 SV=1
MIVPFADAKSRWHDFVDTSLDHALQLSEHDPLLTWFRTNEPERASRIVVTPGDPTTEMLAALLMAKLGAILLNQGDALRVHAIELQETPTNTVRLNGNPQDYLPLQHRPAEQCWWNRADNSISDPF

SEQ ID NO: 20853 - protein, 115 aa, Glycocaulis alkaliphilus
  misc_feature (1)..(115): tr|A0A3T0E6Y0|A0A3T0E6Y0_9RHOB Queuosine biosynthesis p rotein QueD OS=Glycocaulis alkaliphilus OX=1434191 GN=X 907_0429 PE=4 SV=1
MMLISAQVNIEAAHFTPIGDEDDTRRQIHGHSYLVRAWVQAEPGVEDLDRLREDLFSAALPLDHALLNEVEGLAGPSMEAIADFVAQRLAPLWPGLRKVSVARPTLGYEVVRELA

SEQ ID NO: 20854 - protein, 124 aa, Glycocaulis sp.
  misc_feature (1)..(124): tr|A0A550KLG1|A0A550KLG1_9RHOB 6-carboxy-5,6,7,8-tetrah ydropterin synthase OS=Glycocaulis sp. ZYF765 OX=251898 3 GN=FKB34_04290 PE=3 SV=1
MSDLRLEISKDFTFDAAHHFSHKGADHPFSRLHGHSFTGTVTLSGDPAADSGMVRDFWEIDAEIAKIRDQLDHRLLNEVEGLEHPSLEAIARWVFDRLDPVLPGLVAVEIRRPSCGERAVIRRG

SEQ ID NO: 20855 - protein, 120 aa, Glycomyces sp.
  misc_feature (1)..(120): tr|A0A426UU85|A0A426UU85_9ACTN 6-carboxy-5,6,7,8-tetrah ydropterin synthase OS=Glycomyces sp. YIM 121974 OX=249 3553 GN=EIW28_19105 PE=3 SV=1
MLTITKEFHFSASHVLEGLPKWHPCARMHGHNYVVVLELSAPDDKLVPPGFVRDYRDLDGFKQWMDKTLDHRHLNEVVEVQPTSELLARWIFDRWIGEFPELTAVRVHETPKTTAEYRPG

SEQ ID NO: 20856 - protein, 123 aa, Gordonia paraffinivorans
  misc_feature (1)..(123): tr|M3V7F1|M3V7F1_9ACTN 6-carboxy-5,6,7,8-tetrahydropter in synthase OS=Gordonia paraffinivorans NBRC 108238 OX= 1223543 GN=GP2_055_00010 PE=3 SV=1
MTHQMEIFRDFTFESAHRLPNVPEGHKCARLHGHSYRVTVTVGGPVDPHHGWVMDFGDLKKAVQPLVETLDHRVLNEIEGLTNPTSENLAVWFWDRLSDVVENLKCIQIQETATSGCRYFGPN

SEQ ID NO: 20857 - protein, 122 aa, Gordonia polyisoprenivorans
  misc_feature (1)..(122): tr|H0RJ63|H0RJ63_9ACTN 6-carboxy-5,6,7,8-tetrahydropter in synthase OS=Gordonia polyisoprenivorans NBRC 16320 = JCM 10675 OX=1077976 GN=GOPIP_077_00400 PE=3 SV=1
MEIFREFEFEAAHYLPHVPHGHKCRNLHGHSYHVRIDVRGPIDPEHGWVLDYADIDHAFAGLHRQLDHHCLNDIEGLDNPTSEMLAIWIWDRLPADLPRTCVTVWESKRGGCVYRGHATEGA

SEQ ID NO: 20858 - protein, 122 aa, Gordonia sp.; identical to SEQ ID NO: 20857
  misc_feature (1)..(122): tr|A0A1V4Q485|A0A1V4Q485_9ACTN 6-carboxy-5,6,7,8-tetrah ydropterin synthase OS=Gordonia sp. i37 OX=1961707 GN=B 1964_19760 PE=3 SV=1

SEQ ID NO: 20859 - protein, 129 aa, Gordonia sp.
  misc_feature (1)..(129): tr|A0A2W6R5R3|A0A2W6R5R3_9ACTN 6-pyruvoyl tetrahydrobio pterin synthase OS=Gordonia sp. OX=84139 GN=DI630_29770 PE=4 SV=1
MFGLTVRDHIMIAHSLPDPFFGPAQGLHGATLVVEATWRSPSLNDHAVVMDIGEASRHLSEVLDPLRYANLDEHPAFAGTLSTTEAVARHIANELAARLEADRGIASIGIVVREHPDAWVTFEIDLSGR

SEQ ID NO: 20860 - protein, 140 aa, Gordonibacter pamelaeae
  misc_feature (1)..(140): tr|D6EB09|D6EB09_9ACTN 6-carboxy-5,6,7,8-tetrahydropter in synthase OS=Gordonibacter pamelaeae 7-10-1-b OX=6573 08 GN=GPA_29860 PE=3 SV=1
MYGLKTEASFDSAHFLTDYYGKCENLHGHRWRAVVHLAVDDLQAEGTMKGMVLDFGVFKRAVRELAEALDHTFLVEEGSLAPATLAALEAEGFSLFIVPFRTTAENLARYFGDCLVEQGLPVSQVEMYETPNNCAVYRPQ

SEQ ID NO: 20861 - protein, 140 aa, Gordonibacter pamelaeae; identical to SEQ ID NO: 20860
  misc_feature (1)..(140): tr|A0A369M774|A0A369M774_9ACTN 6-carboxy-5,6,7,8-tetrah ydropterin synthase OS=Gordonibacter pamelaeae OX=47118 9 GN=C1877_03545 PE=3 SV=1

SEQ ID NO: 20862 - protein, 129 aa, Gordonibacter sp.
  misc_feature (1)..(129): tr|A0A369LUC6|A0A369LUC6_9ACTN 6-carboxy-5,6,7,8-tetrah ydropterin synthase OS=Gordonibacter sp. 28C OX=2078569 GN=queD PE=3 SV=1
MHLHVGGGHYELTVKDHFDAAHALPGYDGPCQYLHGHTWDVEITIAGQHLDEVGMLYDFKDIKRALHGVLENFDHRCLNDVPPFDEINPTAEHLARVVFYELEKTFPAHISLKEVAVWESPIAKVTYRP

SEQ ID NO: 20863 - protein, 140 aa, Gordonibacter sp.
  misc_feature (1)..(140): tr|A0A1Y4GV34|A0A1Y4GV34_9ACTN 6-carboxy-5,6,7,8-tetrah ydropterin synthase OS=Gordonibacter sp. An232A OX=1965 593 GN=B5F41_00090 PE=3 SV=1
MYGLKTEASFDSAHFLTDYYGKCENLHGHRWRAVVRLAVDDLQTEGTMKGMVLDFGVFKRAVRELAEALDHTFLVEEGSLAPATLAALEAEGFSLTVLPFRTTAENLARYFCDRLVEQGLPVSQVEMYETPNNCAVYRPQ

SEQ ID NO: 20864 - protein, 142 aa, Gordonibacter urolithinfaciens
  misc_feature (1)..(142): tr|A0A423UHK7|A0A423UHK7_9ACTN 6-carboxy-5,6,7,8-tetrah ydropterin synthase OS=Gordonibacter urolithinfaciens O X=1335613 GN=DMP12_12355 PE=3 SV=1
MYGLKTEASFDSAHFLTDYYGKCENLHGHRWRAVVHLAVDDLQTEGTMKGMVLDFGVFKRAVRELADALDHTFLVEEGSLAPATLAALEAEGFSLFIVPFRTTAENLARYFCDCLAEQGLPVSQVEMYETPNNCVVYRPLQR

SEQ ID NO: 20865 - protein, 129 aa, Gordonibacter urolithinfaciens
  misc_feature (1)..(129): tr|A0A1Y4FXU3|A0A1Y4FXU3_9ACTN 6-carboxy-5,6,7,8-tetrah ydropterin synthase OS=Gordonibacter urolithinfaciens O X=1335613 GN=queD PE=3 SV=1
MHLHVGGGHYELTVKDHFDAAHALPGYDGPCQYLHGHTWEVEATIAGQHLDEVGMLYDFKDVKRDLHGVLENFDHRCLNDVPPFDEINPTAEHLARVVFYELEKTFPAHISLVEVAVWESPAAKVVYRP

SEQ ID NO: 20866 - protein, 139 aa, Gottschalkia acidurici
  misc_feature (1)..(139): tr|K0B0P2|K0B0P2_GOTA9 6-carboxy-5,6,7,8-tetrahydropter in synthase OS=Gottschalkia acidurici (strain ATCC 7906 / DSM 604 / BCRC 14475 / CIP 104303 / NCIMB 10678 / 9a ) OX=1128398 GN=queD PE=3 SV=1
MYILKAQNTFDSAHFLSNYNGKCRNIHGHTWTVHAEVGSETLKESGEFKGMVTDFGDLKKDLKEMLDYFDHALIIEENSLRKETLENIVQDGFKVITIDFRSTAENFSKYFYDKLEEKGYNVRKITVFETPTNSATYER

SEQ ID NO: 20867 - protein, 155 aa, Gracilibacillus boraciitolerans
  misc_feature (1)..(155): tr|W4VQ87|W4VQ87_9BACI Queuosine biosynthesis QueD OS=G racilibacillus boraciitolerans JCM 21714 OX=1298598 GN= JCM21714_4201 PE=4 SV=1
MFGFQIVEELQKFNKDIHKGELQYHQKRVLVSKEFDFDAAHHLHCYDGKCKNLHGHTYKAVFGISGFVDEIGMVIDFGDIKKIWKEQIEIHLDHRYLNETLPKMNTTAENMVVWIFEKMEAALQGHNNQCRVEFVRLYETPTSYAEVRREWMVDE

SEQ ID NO: 20868 - protein, 161 aa, Gracilibacillus dipsosauri
  misc_feature (1)..(161): tr|A0A317L200|A0A317L200_9BACI 6-carboxytetrahydropteri n synthase QueD OS=Gracilibacillus dipsosauri OX=178340 GN=queD PE=4 SV=1
MSEHQEFRVVEGLQKYERDISYHELKYHHKRVLVSKEFTFDASHHLHAYEGKCKNLHGHTYKVIFGISGFVNDIGIVIDFGDIKKIWKNEIEIHLDHRYLNETLPKMNTTAENMVVWLYEKMEESIKCKEYALSEVRVEFVRLYETPTSYAEVKREWMEHE

SEQ ID NO: 20869 - protein, 155 aa, Gracilibacillus halophilus
  misc_feature (1)..(155): tr|N4WT39|N4WT39_9BACI 6-pyruvoyl tetrahydrobiopterin s ynthase OS=Gracilibacillus halophilus YIM-C55.5 OX=1308 866 GN=J416_11432 PE=4 SV=1
MYDFRIVDQLQKIDQDIQRNELKYHQKRVMVSKEFTFDASHHLHCYEGKCKNLHGHTYTAIFGISGYVNDIGLVIDFSEMKQIWKEQIEIYLDHRYLNETLPKMNTSAENMVVWLFEKMEAALADKPNDCRVEFVKLYETPTSYAEARREWMIDE

SEQ ID NO: 20870 - protein, 273 aa, Gracilibacillus halophilus
  misc_feature (1)..(273): tr|N4WN38|N4WN38_9BACI Putative 6-pyruvoyl tetrahydropt erin synthase OS=Gracilibacillus halophilus YIM-C55.5 O X=1308866 GN=J416_06008 PE=4 SV=1
MLYLSRRIDFSAMHHYRIDAWTEEQNRRIFGLCSNPNGHGHDYQLEVMVRGQLNPDYGVVVNTTDIKASVGEYVREELDGKYLNKEHPYFMKHVPTTEQLVTFLWQGIEPKLTNCELYRLRLHENPYIVAEKGDEHMVRLTRKYHFSAAHRLHSEQLSEQENQYFFGKCNNPYGHGHNYYLEVTVCGEPDPITGMITDLAELDATVDQVILEKMDHKHLNLDVAEFRDVNPTSEVVAKVIYDMLSPYISNLDKVGLWETEKNYFEYAGEEVDV

SEQ ID NO: 20871 - protein, 155 aa, Gracilibacillus kekensis
  misc_feature (1)..(155): tr|A0A1M7IFD6|A0A1M7IFD6_9BACI 6-pyruvoyltetrahydropter in/6-carboxytetrahydropterin synthase OS=Gracilibacillu s kekensis OX=1027249 GN=SAMN05216179_0034 PE=4 SV=1
MFGFQIVEELQKINKDIQKDELQYHQKRVLVSKEFTFDAAHHLHCYEGKCKNLHGHTYKVVFGISGYVDDIGIVIDFGDIKKIWKEQIEIHLDHRYLNETLPKMNTTAENMVVWIFEKMEAALLNDTYQCRVEFVRLFETPTSYAEARREWMLNE

SEQ ID NO: 20872 - protein, 155 aa, Gracilibacillus orientalis
  misc_feature (1)..(155): tr|A0A1I4GYJ3|A0A1I4GYJ3_9BACI 6-pyruvoyltetrahydropter in/6-carboxytetrahydropterin synthase OS=Gracilibacillu s orientalis OX=334253 GN=SAMN04487943_101108 PE=4 SV=1
MYGFQIVENLQKIDQDIKRHQLKYHQKRVMVSKEFTFDAAHHLHCYEGKCKNLHGHTYKVVFGISGLVDEIGIVIDFGDIKQIWKEEIEIHLDHRYLNETLPKMNTTAENMVVWIFEKMEEALHDLLNQCRVEFVRLFETPTSYAEARREWMISE

SEQ ID NO: 20873 - protein, 156 aa, Gracilibacillus ureilyticus
  misc_feature (1)..(156): tr|A0A1H9P6V7|A0A1H9P6V7_9BACI 6-pyruvoyltetrahydropter in/6-carboxytetrahydropterin synthase OS=Gracilibacillu s ureilyticus OX=531814 GN=SAMN04487944_104124 PE=4 SV= 1
MIYDFQIVDKLQKFGEDINKDELQYHQKRVLISKEFSFDAAHHLHCYEGKCKNLHGHTYKVIFGISGFVNEIGIVIDFSEIKKLWKEQIEIYLDHRYLNETLPKMNTSAENMVVWIYEKMEESLKEYPNQCKVEFVRLFETPTSYAEARREWMLSE

SEQ ID NO: 20874 - protein, 345 aa, Gracilibacillus ureilyticus
  misc_feature (1)..(345): tr|A0A1H9M4R8|A0A1H9M4R8_9BACI 6-pyruvoyltetrahydropter in/6-carboxytetrahydropterin synthase OS=Gracilibacillu s ureilyticus OX=531814 GN=SAMN04487944_101557 PE=4 SV= 1
MPKIAISLVDFTYIIDNWDRIIIKYSQLYPVHIIVHSESAKFFGGFIFILSYLKLTNPNLLKKTHGEVATLLYISRRIDFSAMHRYRVDSWTEEKNRQVFGPCSNRNGHGHDYKLEVMVKGKLNNHTGMVVNTGDIKLAVGNLIDKELDGKFLNEEHPYFKQNIPTAENIVAYLWEAISQVLENCSLNRLKLYENHYLFSEKEEGDMVTFTRRYHFSSAHRLHSDQLSDKENERIFGKCNNPYGHGHNYYLDVAVKGIPDNITGMVINMADLDEIVEKIVLEEFDHKHLNLDTAVFKGLNPTSEVMAKVVYDMLKPYIPKLYRIGVWETEKNYFEYINEEETVHG

SEQ ID NO: 20875 - protein, 129 aa, Gracilimonas mengyeensis
  misc_feature (1)..(129): tr|A0A521ARL7|A0A521ARL7_9BACT 6-carboxy-5,6,7,8-tetrah ydropterin synthase OS=Gracilimonas mengyeensis OX=1302 730 GN=SAMN06265219_101335 PE=3 SV=1
MPTWTLHTEFKFDAAHFIDGYDGKCGRMHGHSYKVKMTAKSHKLNPSKYLKSDDMVCDFKELKWAAKDSKKGGFDHGVLNELMPDNTTAERIAEYIHKETKNRIPEGIDLTVTVWETDNSWVEYTDQDV

SEQ ID NO: 20876 - protein, 143 aa, Gracilimonas mengyeensis
  misc_feature (1)..(143): tr|A0A521FD86|A0A521FD86_9BACT 6-carboxy-5,6,7,8-tetrah ydropterin synthase OS=Gracilimonas mengyeensis OX=1302 730 GN=SAMN06265219_11749 PE=3 SV=1
MIFVTRKSHFNAAHRLHNPDKSDEWNQETFGKCNYPNWHGHNYVIEVTVAGEPDPETGYVIDLGDLKAIIKEKVLDPCDHRNLNLDVPFLKGILPTTENLVRAFFQQLRPDVEEACKNGGKLYKVKLFETERNIAEYCPYRGV

SEQ ID NO: 20877 - protein, 143 aa, Gracilimonas sp.
  misc_feature (1)..(143): tr|A0A316TU30|A0A316TU30_9BACT 6-pyruvoyl tetrahydrobio pterin synthase OS=Gracilimonas sp. 8A47 OX=2079485 GN= DDZ15_06075 PE=4 SV=1
MIYVTRKAHFNASHRLHNPEKSDQWNRETFGKCNNPNWHGHNYVIEVTVQGLPDPETGYVIDLGDLKSIIKHKILDPCDHKNLNLEVDFLEGIIPTTENLVKVFFQRLNEQVSSAAYGESKLYSVKLFETERNVAEYCPFRRD

SEQ ID NO: 20878 - protein, 129 aa, Gracilimonas sp.
  misc_feature (1)..(129): tr|A0A316U1X5|A0A316U1X5_9BACT 6-carboxy-5,6,7,8-tetrah ydropterin synthase OS=Gracilimonas sp. 8A47 OX=2079485 GN=DDZ15_07240 PE=3 SV=1
MATWTLHTEFKFDAAHFIEGYDGKCGRMHGHTYKVHIAAKSHKLNPSKYLKSPDMVCDFKELKWAAADGKKGGFDHAVLNETIPVATTAERIAEYIHKETKKRIPADIDLRVTVWETESSWVEYTDQDV

SEQ ID NO: 20879 - protein, 136 aa, Gramella flava
  misc_feature (1)..(136): tr|A0A1L7I6G2|A0A1L7I6G2_9FLAO 6-carboxy-5,6,7,8-tetrah ydropterin synthase OS=Gramella flava JLT2011 OX=122972 6 GN=GRFL_2457 PE=3 SV=1
MRITVHRKAHFNAAHRLFRKDWDDSRNFEVFGKCSNPHYHGHNYELIVSVTGEPDPETGFVMDLKILKDLIFEEIEEAFDHKNLNLEVPEFQDLIPTAENIAVVIWNKLRKKIMQEHDLKVTLYETPRNFVTYKGD

SEQ ID NO: 20880 - protein, 150 aa, Gramella flava
  misc_feature (1)..(150): tr|A0A1L7I3L8|A0A1L7I3L8_9FLAO Queuosine biosynthesis Q ueD, PTPS-I OS=Gramella flava JLT2011 OX=1229726 GN=GRF L_1473 PE=4 SV=1
MNKIRITKQFNFETGHALYGYDGKCRNVHGHSYKLNVTVIGTPITDSENVKFGMVIDFGDLKKIVKSEIVDKFDHATVFNKNTPHVELAEELKSRGHHVILTNYQPTSENMVIDFAEKIQKHLPSHIRLHSLKLQETESSFAEWYASDNE

SEQ ID NO: 20881 - protein, 136 aa, Gramella forsetii
  misc_feature (1)..(136): tr|A0M3Y1|A0M3Y1_GRAFK 6-carboxy-5,6,7,8-tetrahydropter in synthase OS=Gramella forsetii (strain KT0803) OX=411 154 GN=GFO_2362 PE=3 SV=1
MRITVHRKAHFNAAHRLYRKDWDDERNFGVFGKCSNPHYHGHNYELIVSVTGEPDPETGFVMDLKILKELIYLEVEEAFDHKNLNVEVPEFEDLIPTAEHIAVVIWNKLRTRIQEDHDLKVTLYETPRNFVSYKGE

SEQ ID NO: 20882 - protein, 150 aa, Gramella forsetii
  misc_feature (1)..(150): tr|A0M6Q9|A0M6Q9_GRAFK 6-pyruvoyl tetrahydropterin synt hase OS=Gramella forsetii (strain KT0803) OX=411154 GN= GFO_3363 PE=4 SV=1
MSKIRITKQFSFETGHALYGYDGKCRNVHGHSYKLSVTVIGTPITDSEHVKFGMVIDFGDLKKIVKSEIVDQFDHATVFNKNTPHVELANELKDRGHDVILVEYQPTSENMVIDFAEKIKKHLPTHINLHSLKLQETETSFAEWYASDNT

SEQ ID NO: 20883 - protein, 136 aa, Gramella gaetbulicola
  misc_feature (1)..(136): tr|A0A2T6AEP3|A0A2T6AEP3_9FLAO 6-carboxy-5,6,7,8-tetrah ydropterin synthase OS=Gramella gaetbulicola OX=703340 GN=C8P64_2712 PE=3 SV=1
MRVTVHRKAHFNAAHRLFRKDWDDERNLEVFGKCSNPNYHGHNYELIVSVTGEPDPETGFVMDLKILKDLINSEVEEPFDHKNLNIEVPEFKELNPTAENIAVVIWNKLRKKINKSHELEVTLYETPRNFVTYKGD

SEQ ID NO: 20884 - protein, 150 aa, Gramella gaetbulicola
  misc_feature (1)..(150): tr|A0A2T6AMG4|A0A2T6AMG4_9FLAO 6-pyruvoyltetrahydropter in/6-carboxytetrahydropterin synthase OS=Gramella gaetb ulicola OX=703340 GN=C8P64_0954 PE=4 SV=1
MSNIRITKQFSFETGHALYGYDGKCRNVHGHSYKLSVTVIGKPITDSDNVKFGMVIDFGDLKKIVKSEIVDQFDHATVFNKNTPHIELAEELKSRGHHVILVEYQPTSENMVIDFAKKIKKHLPSHIQLHSLKLQETETSFAEWYASDNN

SEQ ID NO: 20885 - protein, 137 aa, Gramella jeungdoensis
  misc_feature (1)..(137): tr|A0A4Y8AUC9|A0A4Y8AUC9_9FLAO 6-carboxytetrahydropteri n synthase OS=Gramella jeungdoensis OX=708091 GN=E2488_ 08125 PE=4 SV=1
MNFKTAIVRREHFNSAHRLHNPMWPDEKNFAVFGKCNNPNYHGHNYELEVKIIGIVNEDTGYIIDTKYLSDLIKEHVLHKFDHKNLNLDVEDFKNLNPTAENIAIVIYNILRPLIEENYELKIKLYETRRNFVEYPY

SEQ ID NO: 20886 - protein, 136 aa, Gramella jeungdoensis
  misc_feature (1)..(136): tr|A0A4Y8AYM6|A0A4Y8AYM6_9FLAO 6-carboxy-5,6,7,8-tetrah ydropterin synthase OS=Gramella jeungdoensis OX=708091 GN=E2488_03790 PE=3 SV=1
MKVTVNRKAHFNAAHRLYNADWTDARNAIVFGKCANPNYHGHNYELIVAVKGDIHPETGFVMDMKVLKQLIETEIEAQFDHKNLNEEVPEFKTLNPTAENISVVIWNKLRNRIDKNLELSVTLYETPRNFVTYSGD

SEQ ID NO: 20887 - protein, 136 aa, Gramella salexigens
  misc_feature (1)..(136): tr|A0A1L3J4J9|A0A1L3J4J9_9FLAO 6-carboxy-5,6,7,8-tetrah ydropterin synthase OS=Gramella salexigens OX=1913577 G N=LPB144_06295 PE=3 SV=1
MRVTVHRKAHFNAAHRLFRKDWNDDKNLRVFGKCSNPNYHGHNYELIVSVTGEPDPETGFVMDLKLLKDLIQSKVEEPFDHKNLNLEVPEFKELNPTAENIAVVIWNKLRSEIKNEHDLEVTLYETPRNFVSYKGE

SEQ ID NO: 20888 - protein, 150 aa, Gramella salexigens
  misc_feature (1)..(150): tr|A0A1L3J6J3|A0A1L3J6J3_9FLAO 6-carboxytetrahydropteri n synthase QueD OS=Gramella salexigens OX=1913577 GN=LP B144_10180 PE=4 SV=1
MSKIRITKQFSFETGHALYGYDGKCRNVHGHSYKLSVTVIGTPITDTQNVKFGMVIDFGDLKKIVKSEIVDKFDHATVFNKNTPHVELAEELKSRGHDVILVDYQPTSENMVIDFAQKIKKNLPDHIQLHSLKLQETESSFAEWYASDNN

SEQ ID NO: 20889 - protein, 136 aa, Gramella sp.
  misc_feature (1)..(136): tr|A0A1H1PVA0|A0A1H1PVA0_9FLAO 6-carboxy-5,6,7,8-tetrah ydropterin synthase OS=Gramella sp. MAR_2010_102 OX=125 0231 GN=SAMN04488552_2267 PE=3 SV=1
MRITVHRKAHFNAAHRLYRKDWDDDRNFEVFGKCSNPHYHGHNYELIVSVTGEPNLETGFVMDLKILKELIYDEVEEAFDHKNLNVEVPEFKELIPTAENIAVVIWNKLRTKIQEDHDLEVTLYETPRNFVSYKGE

SEQ ID NO: 20890 - protein, 149 aa, Gramella sp.
  misc_feature (1)..(149): tr|A0A2R3Z3C6|A0A2R3Z3C6_9FLAO 6-carboxy-5,6,7,8-tetrah ydropterin synthase OS=Gramella sp. SH35 OX=2126553 GN= C7S20_05270 PE=3 SV=1
MSKIRITKQFSFETGHALYGYDGKCRNVHGHSYKLSVTVIGEPITDIENVKFGMVIDFGDLKKIVKSEIVDKFDHATVFNRNTPHLELARELKDRGHDVILVDYQPTSENMVIDFAKKINKHLPSHIKLHSLKLQETDTSFAEWYAIDN

SEQ ID NO: 20891 - protein, 130 aa, Granulibacter bethesdensis
  misc_feature (1)..(130): tr|Q0BPQ0|Q0BPQ0_GRABC 6-carboxy-5,6,7,8-tetrahydropter in synthase OS=Granulibacter bethesdensis (strain ATCC BAA-1260 / CGDNIH1) OX=391165 GN=GbCGDNIH1_2304 PE=3 SV =1
MTIVSSSMPRVLEIGKQFTFEAAHTLHREIETDSSLRIHGHSYRVEVVLRGGVDPDSGMLMDLGLLQRKMNAVRDALDHRLLDEVPGLAPATMENIALFIWRHLAPDLPALAEVSVFRDTLGERCTCRGA

SEQ ID NO: 20892 - protein, 130 aa, Granulibacter bethesdensis
  misc_feature (1)..(130): tr|A0A1L3RLX6|A0A1L3RLX6_9PROT 6-carboxy-5,6,7,8-tetrah ydropterin synthase OS=Granulibacter bethesdensis OX=36 4410 GN=GbCGDNIH6_2304 PE=3 SV=1
MTIVSSSTPRVLEIGKQFTFEAAHTLHREIETDSSLRIHGHSYRVEVVLRGGVDPDSGMLMDLGLLQRKMDAVRDALDHRLLDEVPGLAPATMENIALFIWRHLAPDLPALAEVSVFRDTLGERCTCRGA

SEQ ID NO: 20893 - protein, 137 aa, Granulicella mallensis
  misc_feature (1)..(137): tr|G8NYE0|G8NYE0_GRAMM Uncharacterized protein OS=Granu licella mallensis (strain ATCC BAA-1857 / DSM 23137 / M P5ACTX8) OX=682795 GN=AciX8_3618 PE=4 SV=1
MILLTRKADFSAAHFYWNDSWTEAENFRVFGKCANRQGHGHNYTLEVTVEGEVDPVSGFVVDLKQLKDILEQEVVSVYDHRHLNHEVPEFKTAVPTTENIAIAIWRRLDGKVPNAKLHRVRVYEMPELFADFYGEGA

SEQ ID NO: 20894 - protein, 145 aa, Granulicella mallensis
  misc_feature (1)..(145): tr|G8NYD9|G8NYD9_GRAMM Uncharacterized protein OS=Granu licella mallensis (strain ATCC BAA-1857 / DSM 23137 / M P5ACTX8) OX=682795 GN=AciX8_3617 PE=4 SV=1
MNGPIAHLSRRYRFSASHRLHVDAISPEQNREMFGKCNNPFGHGHNYIAQVTFSGPVDVATGMVTNLADLDSFAQRELLEHFDHANLNSLEFFRDRVPSTENVCVELWRMFAEYPYAKLERVRVEETGNNSFDYFGEGAKIQHEE

SEQ ID NO: 20895 - protein, 126 aa, Granulicella pectinivorans
  misc_feature (1)..(126): tr|A0A1I6MZ95|A0A1I6MZ95_9BACT 6-carboxy-5,6,7,8-tetrah ydropterin synthase OS=Granulicella pectinivorans OX=47 4950 GN=SAMN05421771_3931 PE=3 SV=1
MFEVTVEAGFSSGHYLRNYRGKCENPHGHNYKVYVTLIGEKLDDTGLLLDFKLLKQVMRPTVEYLDHRMINELEPFVTELNPSAENLAKYFFDQTSTQLHEMTNGRVRVKDCTIYETDTSFARYYA

SEQ ID NO: 20896 - protein, 137 aa, Granulicella pectinivorans
  misc_feature (1)..(137): tr|A0A1I6M2F1|A0A1I6M2F1_9BACT 6-pyruvoyltetrahydropter in/6-carboxytetrahydropterin synthase OS=Granulicella p ectinivorans OX=474950 GN=SAMN05421771_1711 PE=4 SV=1
MILLTRKAEFSSAHFYWVDAWTPEENERVFGKCANRNGHGHNYTLEVTVGGEVDPVTGFVVDLKLLKDILEKEVVSVYDHRHLNYEVPEFASTVPTTENIAIAIWRRLDGKIPHSTLHRVRVYEMPDLFADFYGESK

SEQ ID NO: 20897 - protein, 126 aa, Granulicella rosea
  misc_feature (1)..(126): tr|A0A239JLJ5|A0A239JLJ5_9BACT 6-carboxy-5,6,7,8-tetrah ydropterin synthase OS=Granulicella rosea OX=474952 GN= SAMN05421770_10420 PE=3 SV=1
MFEVTVQAGFSSGHYLRNYRGKCENPHGHNYKVFVTLVGEELDATGLLLDFKLLKQVMKPTVEYLDHFMINDLKPFDEEINPSAENLAKYFYQQTAQQMIEMTGGRVRVKDCTLYETDTSFARYYE

SEQ ID NO: 20898 - protein, 133 aa, Granulicella rosea
  misc_feature (1)..(133): tr|A0A239IX39|A0A239IX39_9BACT 6-pyruvoyltetrahydropter in/6-carboxytetrahydropterin synthase OS=Granulicella r osea OX=474952 GN=SAMN05421770_103326 PE=4 SV=1
MKAHLTRRYHFSASHRLHSDAYTAEENQAVFGKCNNPHGHGHNYVVAVTLAGEIDPATGMVCNLGDLDAFAREHLLARFDHMNLNTLEPFLTLVPTTENLTIEVNRIFQDFPFARLERVVVEETGNNSFVFGG

SEQ ID NO: 20899 - protein, 137 aa, Granulicella sibirica
  misc_feature (1)..(137): tr|A0A4Q0T1B4|A0A4Q0T1B4_9BACT 6-pyruvoyl tetrahydrobio pterin synthase OS=Granulicella sibirica OX=2479048 GN= GRAN_4425 PE=4 SV=1
MTFLTRKAEFSSAHFYWVEGWTEEENRRVFGKCANRNGHGHNYTLEVTVAGEVDPVSGFVVDLKELKEILEREVVHVYDHRHLNLEVPEFATKVPTTENIAIAIWRRLEGKIPNSRLHRVRVYEMADLFADFYGEGA

SEQ ID NO: 20900 - protein, 126 aa, Granulicella sibirica
  misc_feature (1)..(126): tr|A0A4Q0SZP6|A0A4Q0SZP6_9BACT 6-carboxy-5,6,7,8-tetrah ydropterin synthase OS=Granulicella sibirica OX=2479048 GN=GRAN_0103 PE=3 SV=1
MFEVTVEAGFSSGHYLRNYRGKCENPHGHNYKVYVTLVGKELDEAGMLLDFKLLKQVMRPTVDYLDHQMINDLEPFVSEINPSAENLAKYFFEKTSTQLHEMTAGRVRVKDCTVYETDTSFARYYE

SEQ ID NO: 20901 - protein, 136 aa, Granulicella sp.
  misc_feature (1)..(136): tr|A0A3N1JQW4|A0A3N1JQW4_9BACT 6-carboxy-5,6,7,8-tetrah ydropterin synthase OS=Granulicella sp. GAS466 OX=24851 70 GN=EDE14_1377 PE=3 SV=1
MIFLTRKAEFSSAHYYWNDSWSPEENERVFGKCANRNGHGHNYTLEVTVAGDVDPTSGFVVDLKQLKDILEREVVSVYDHRHLNLEVPEFKNAIPTTENIAIAIWRRLDNKIPHARLHRVRIYEIPDLFADYYGEL

SEQ ID NO: 20902 - protein, 142 aa, Granulicella sp.
  misc_feature (1)..(142): tr|A0A3N1JJX5|A0A3N1JJX5_9BACT 6-pyruvoyltetrahydropter in/6-carboxytetrahydropterin synthase OS=Granulicella s p. GAS466 OX=2485170 GN=EDE14_1376 PE=4 SV=1
MKAHLSRRYHFSASHRLHSEAYDAAQNFAVFGKCNNPHGHGHNYTVQVTLSGHVDPTTGMVCNLAELDAFAQKNLLARFDHTNLNAVDIFQNKVSTTENLSIEIYRIFKNFTGAHLERVHVEETSNNSFDYAGDGTPAAGTI

SEQ ID NO: 20903 - protein, 125 aa, Granulicella tundricola
  misc_feature (1)..(125): tr|E8X155|E8X155_GRATM 6-carboxy-5,6,7,8-tetrahydropter in synthase OS=Granulicella tundricola (strain ATCC BAA -1859 / DSM 23138 / MP5ACTX9) OX=1198114 GN=AciX9_0853 PE=3 SV=1
MFEVTVEAGFSSGHYLRNYRGKCENPHGHNYKVFVTLVGAELDEAGLLLDFKLLKQVMRPVVDYLDHQMINDLKPFDEINPSAENLARYFFDNTATQLDEMTQGRVKVKDCTLYETDTSFARYYE

SEQ ID NO: 20904 - protein, 146 aa, Granulicella tundricola
  misc_feature (1)..(146): tr|E8X3Q1|E8X3Q1_GRATM 6-carboxy-5,6,7,8-tetrahydropter in synthase OS=Granulicella tundricola (strain ATCC BAA -1859 / DSM 23138 / MP5ACTX9) OX=1198114 GN=AciX9_2291 PE=3 SV=1
MILLTRKAEFSAAHFYWNDALSQQENERIFGKCANRNGHGHNYTLEVTVAGEVDPITGFVVDLKKLKDILEQEVVGVYDHRHLNLEIPDFATVIPTTENIAIAIWRRLAGKIPNATLHRVRVYEMPDLFADFYGDFGPEAEAGAGN

SEQ ID NO: 20905 - protein, 134 aa, Granulosicoccus antarcticus
  misc_feature (1)..(134): tr|A0A2Z2NML7|A0A2Z2NML7_9GAMM Uncharacterized protein OS=Granulosicoccus antarcticus IMCC3135 OX=1192854 GN=I MCC3135_05445 PE=4 SV=1
MYSLNVREHFMIAHSFKGEIFGPAQGMHGATYVVDLEMRRPQLDDDGLVVDIGLASQQLAAVLAELNYKNLDEVPEFAGKNTTTEFLAAVIFQRIADRIKTGDLGAAAKGLSAMKVTLHESHIAWAAFEGELQA

SEQ ID NO: 20906 - protein, 120 aa, Grimontella sp.
  misc_feature (1)..(120): tr|A0A318G5A1|A0A318G5A1_9GAMM 6-carboxy-5,6,7,8-tetrah ydropterin synthase OS=Grimontella sp. AG753 OX=2183905 GN=DFO55_13212 PE=3 SV=1
MSTTLFKDFMFEAAHRLPHVPAGHKCGRLHGHSFMVRLEITGEVDPHTGWIMDFAELKAAFKPTYDRLDHYYLNDIPGLENPTSEVLAKWIWDQLKPVVPLLSAVMIKETCTAGCIYRGE

SEQ ID NO: 20907 - protein, 120 aa, Grimontia celer
  misc_feature (1)..(120): tr|A0A128EZ41|A0A128EZ41_9GAMM 6-carboxy-5,6,7,8-tetrah ydropterin synthase OS=Grimontia celer OX=1796497 GN=qu eD PE=3 SV=1
MHTELFKEFMFEAAHRLPNVPEGHKCGRLHGHSFLVRIYVAGEVDPHTGWVIDFSEIKQAFKPIYDRLDHYYLNDIEGLENPTSEVLAKWIWDQLKPELPILSKVMIKETCTAGCIYTGE

SEQ ID NO: 20908 - protein, 120 aa, Grimontia hollisae
  misc_feature (1)..(120): tr|A0A377HLV7|A0A377HLV7_GRIHO 6-carboxy-5,6,7,8-tetrah ydropterin synthase OS=Grimontia hollisae OX=673 GN=que D PE=3 SV=1
MYTELFKEFMFEAAHRLPHVPEGHKCGRLHGHSFLVRLYVAGDVDPHTGWVIDFSEIKKVFQPIYDRLDHHYLNDIEGLENPTSEVLAKWIWDKLKPELPCLSKVMIKETCTAGCIYTGE

SEQ ID NO: 20909 - protein, 120 aa, Grimontia hollisae; identical to SEQ ID NO: 20908
  misc_feature (1)..(120): tr|D0IB19|D0IB19_GRIHO 6-carboxy-5,6,7,8-tetrahydropter in synthase OS=Grimontia hollisae CIP 101886 OX=675812 GN=VHA_002946 PE=3 SV=1

SEQ ID NO: 20910 - protein, 120 aa, Grimontia indica; identical to SEQ ID NO: 20907
  misc_feature (1)..(120): tr|R1J2Q4|R1J2Q4_9GAMM 6-carboxy-5,6,7,8-tetrahydropter in synthase OS=Grimontia indica OX=1056512 GN=D515_0003 3 PE=3 SV=1

SEQ ID NO: 20911 - protein, 169 aa, Grimontia indica
  misc_feature (1)..(169): tr|R1II37|R1II37_9GAMM Putative queD like 2 OS=Grimonti a indica OX=1056512 GN=D515_04686 PE=4 SV=1
MQIHALDKAQLISDIQLGGNLNHAVCQGRRSDFALMLALLSGDATETTPLNPPYPEKVTEAQLRKAFDLPEPTRLVAEERDYELCGSQADAFHKAGLVSAKLNDCVSPSALHFPAIGTHNLGEDVYHNLSGHQRRQLDSENGKTAALDPVNLYNQLVTAKRFNEMHIQA

SEQ ID NO: 20912 - protein, 120 aa, Grimontia marina
  misc_feature (1)..(120): tr|A0A128FES6|A0A128FES6_9GAMM 6-carboxy-5,6,7,8-tetrah ydropterin synthase OS=Grimontia marina OX=646534 GN=qu eD PE=3 SV=1
MHTELFKEFMFEAAHRLPHVPEGHKCGRLHGHSFLVRIYVAGEVDPHTGWVIDFSEIKSAFKPIYDRLDHYYLNDIDGLENPTSEVLAKWIWEQLKPELPILSKVMIKETCTAGCIYTGE

SEQ ID NO: 20913 - protein, 120 aa, Grimontia sp.; identical to SEQ ID NO: 20907
  misc_feature (1)..(120): tr|A0A0F5ZVK4|A0A0F5ZVK4_9GAMM 6-carboxy-5,6,7,8-tetrah ydropterin synthase OS=Grimontia sp. AD028 OX=1581149 G N=RN22_14825 PE=3 SV=1

SEQ ID NO: 20914 - protein, 169 aa, Grimontia sp.
  misc_feature (1)..(169): tr|A0A0F5ZRC9|A0A0F5ZRC9_9GAMM Queuosine biosynthesis p rotein QueD OS=Grimontia sp. AD028 OX=1581149 GN=RN22_2 2500 PE=4 SV=1
MQIHALDKAQLISDIQLGGNLNHAVCQGRRSDFALMLALLSGDATETTPLNPPYPEKVTETQLRKAFDLPEPTRLVAEERDYELCGSQADAFHKAGLVSAKLNDCVSPSALHFPAIGTHNLGEDVYHNLSGHQRRQLDSENGKTAALDPVNLYNQLVTAKRFNEMHIQA

SEQ ID NO: 20915 - protein, 133 aa, Gryllotalpicola sp.
  misc_feature (1)..(133): tr|A0A387BJI2|A0A387BJI2_9MICO 6-carboxytetrahydropteri n synthase OS=Gryllotalpicola sp. 2DFW10M-5 OX=2419771 GN=D7I44_01380 PE=4 SV=1
MNARFSVTVRDHMMIAHSLKGEAFGPAQALHGATFVVDASFSATELDEDGIVIDIGRATEALHELVGGFSYRNLDDVPELRGVNTTTERLAQLIGDGLAARARAGEFAPARLTGITVTLHESHVAWAAYEVEL

SEQ ID NO: 20916 - protein, 334 aa, Gulbenkiania indica
  misc_feature (1)..(334): tr|A0A0K6GRZ6|A0A0K6GRZ6_9NEIS 6-pyruvoyl-tetrahydropte rin synthase OS=Gulbenkiania indica OX=375574 GN=Ga0061 063_0332 PE=4 SV=1
MTLSTLATARFEAARRLPASPDPRSQGLHGHGFRVCASSPQPGLAEALAAAVAPLDYTDLNTRFARPDDRTLAEALLRALPQGSRVALFGAPEHGVELDATEALVSYRTEFEAAHCLPHVPPGHKCGRLHGHGFGIRLVADADRHASADLVAAWAPLFLQLNHRYLNDLPGLDNPTSEVMARWLHAALLPRLPGLRWVEVHETRTAGSLFDGEHFLIWKEQRFESATPLDTEGRYTGHSYLVRLMLAGSLDETMGWLLDFGDVKDRFKPLYRQLDHNPLDTLPGLRSGSTGDVAGWIAGRLAPQLPELARVDLMTSARDGVSLCLAHGRPWPLL

SEQ ID NO: 20917 - protein, 133 aa, Guyparkeria sp.
  misc_feature (1)..(133): tr|A0A426QPS9|A0A426QPS9_9GAMM 6-carboxy-5,6,7,8-tetrah ydropterin synthase OS=Guyparkeria sp. SCN-R1 OX=234111 3 GN=queD PE=3 SV=1
MSTAYSLPSGGSYTLTTEVEFAAAHRLHGYDGNCARLHGHNWRVVIEVTGQRLDQVGMVVDFKVIRARAREIAKELDHAYLNEVPPFDTVNPTAENLAAYFHQALATTFDTEAYRVSAVTVWENARSAVTFRP

SEQ ID NO: 20918 - protein, 268 aa, Gynuella sunshinyii
  misc_feature (1)..(268): tr|A0A0C5W0S3|A0A0C5W0S3_9GAMM 6-pyruvoyl-tetrahydropte rin synthase OS=Gynuella sunshinyii YC6258 OX=1445510 G N=YC6258_04230 PE=4 SV=1
MDFSYLHALRGIVGESWIVDIILEGELNNEGMVFDFGLVKKEIKRAIDEGMDHKFLIPASIAGLQVIEDDEDFRFCFENVTGMKLCYRSPREAVYLLDADRINTETVTPILEKHLKTIVPANVSNVKVKLRAQDIEGAYYHYSHGLKKHQGDCQRICHGHRSPIKVFIDGKRSGEEEFIIAKQWQDIYLVTREDVLHQDASYITLGYEAEQGYFELTLPKASCDFMSGDSTVELIAVHLAEHIKERHPNKKVEVQAYEGYKKGAFANA

SEQ ID NO: 20919 - protein, 162 aa, Gynuella sunshinyii
  misc_feature (1)..(162): tr|A0A0C5VS25|A0A0C5VS25_9GAMM 6-pyruvoyl-tetrahydropte rin synthase OS=Gynuella sunshinyii YC6258 OX=1445510 G N=YC6258_01024 PE=4 SV=1
MHGHEGLVHIFLEGENLTKGMVTDFKHLGWLKTFLDDSLDHKFIIDRHDPNFQKIMNTAHPISSTSQSFVTVDDHQLSFQNITIPGSNDIVACRLNTDTLDSPLEQEFYQSFVIVDFVPTSENLSKWIFDIATVRMEKLGIKVSQVDWFETPKSRSTYYRSA

SEQ ID NO: 20920 - protein, 185 aa, Haematospirillum jordaniae
  misc_feature (1)..(185): tr|A0A143DC04|A0A143DC04_9PROT 6-pyruvoyl tetrahydropte rin synthase OS=Haematospirillum jordaniae OX=1549855 G N=AY555_02215 PE=4 SV=1
MSDGHHFLITRRIGIDAGHRIMRHGSKCRHIHGHRYEVEAICHASSLHQGGEQDSMVLDFGFLKEEMMAIIDASCDHGFIAEMSDTDLLSMFCPAGKEQHEWIAGLQEAIARDGFVVTTDTHLATRLYIIPEAPTAEALARHWYRRLQDRVQIRSEGLAVLERIVVWETPNCRAEYSGQKTGVQR

SEQ ID NO: 20921 - protein, 141 aa, Haemophilus aegyptius
  misc_feature (1)..(141): tr|A0A3S4XXH2|A0A3S4XXH2_HAEAE 6-carboxy-5,6,7,8-tetrah ydropterin synthase OS=Haemophilus aegyptius OX=197575 GN=queD PE=3 SV=1
MFKISKEFSFDMAHLLDGHDGKCQNLHGHTYKLQVEISGDLYKSGAKKAMVIDFSDLKSIVKKVILDPMDHAFIYDQTNERESQIATLLQKLNSKTFGVPFRTTAEEIARFIFNRLKHDEQLSISSIRLWETPTSFCEYQE

SEQ ID NO: 20922 - protein, 140 aa, Haemophilus ducreyi
  misc_feature (1)..(140): tr|A0A448KIJ2|A0A448KIJ2_HAEDC 6-carboxy-5,6,7,8-tetrah ydropterin synthase OS=Haemophilus ducreyi OX=730 GN=qu eD PE=3 SV=1
MFKIAKEFSFDMAHMLDGHDGKCQNLHGHTYKLQVEVSGELVSNGAKRGMVMDYSDLKNIVKREILDLMDHAYIYDLNNERESQVAKLLLELDSKVYGIPSRTTAEQIAKYMFEKLAQVGLPVSLIRLWETPTSYCEYSK

SEQ ID NO: 20923 - protein, 140 aa, Haemophilus ducreyi
  misc_feature (1)..(140): tr|Q7VNH7|Q7VNH7_HAEDU 6-carboxy-5,6,7,8-tetrahydropter in synthase OS=Haemophilus ducreyi (strain 35000HP / AT CC 700724) OX=233412 GN=HD_0557 PE=3 SV=1
MFKIAKEFSFDMAHMLDGHDGKCQNLHGHTYKLQVEVSGELVSNGAKRGMVMDYSDLKSIVKREILDLMDHAYIYDLNNERESQVAQLLLELDSKVYGIPSRTTAEQIAKYMFEKLAQVGLPVSLIRLWETPTSYCEYSK

SEQ ID NO: 20924 - protein, 143 aa, [Haemophilus] felis
  misc_feature (1)..(143): tr|A0A1T0BC35|A0A1T0BC35_9PAST 6-carboxy-5,6,7,8-tetrah ydropterin synthase OS=[Haemophilus] felis OX=123822 GN =B0188_00940 PE=3 SV=1
MFKIAKEFSFDMAHMLDGHDGKCQNLHGHTYKLQVEIAGELHQSGAKSGMVMDYSDLKAMVKTHILEPMDHAFIYDTTSERECQVAKLLNELDSKTFGMPARTTAEQMAKFMFDRLTTVGLPVSLIRLWETPTSYCEYCQCNG

SEQ ID NO: 20925 - protein, 141 aa, Haemophilus haemolyticus
  misc_feature (1)..(141): tr|A0A502JI86|A0A502JI86_HAEHA 6-carboxy-5,6,7,8-tetrah ydropterin synthase OS=Haemophilus haemolyticus OX=726 GN=queD PE=3 SV=1
MFKISKEFSFDMAHLLDGHDGKCQNLHGHTYKLQVEISGDLYESGAKKAMVIDFSDLKSIVKKTILDPMDHAFIYNQTSERESQIAALLQELNSKTFGVPFRTTAEEMARFIFNRLKHDEQLAISAIRLWETPTSFCEYQE

SEQ ID NO: 20926 - protein, 141 aa, Haemophilus haemolyticus
  misc_feature (1)..(141): tr|A0A502KPP6|A0A502KPP6_HAEHA 6-carboxy-5,6,7,8-tetrah ydropterin synthase OS=Haemophilus haemolyticus OX=726 GN=queD PE=3 SV=1
MFKISKEFSFDMAHLLDGHDGKCQNLHGHTYKLQVEISGDLYESGAKKAMVIDFSDLKSIVKKTILDPMDHAFIYDQTSERESQIAALLQKLNSKTFGVPFRTTAEEMARFIFNRLKHDEQLAISAVRLWETPTSFCEYQE

SEQ ID NO: 20927 - protein, 141 aa, Haemophilus influenzae; identical to SEQ ID NO: 20921
  misc_feature (1)..(141): sp|P44123|QUED_HAEIN 6-carboxy-5,6,7,8-tetrahydropterin synthase OS=Haemophilus influenzae (strain ATCC 51907 / DSM 11121 / KW20 / Rd) OX=71421 GN=queD PE=3 SV=1

SEQ ID NO: 20928 - protein, 141 aa, Haemophilus influenzae
  misc_feature (1)..(141): tr|A0A2S9RCC6|A0A2S9RCC6_HAEIF 6-carboxy-5,6,7,8-tetrah ydropterin synthase OS=Haemophilus influenzae OX=727 GN =queD PE=3 SV=1
MFKISKEFSFDMAHLLDGHDGKCQNLHGHTYKLQVEISGDLYESGAKKAMVIDFSDLKSIVKKVILDPMDHAFIYDQTNERESQIATLLQKLNSKTFGVPFRTTAEEIARFIFNRLKHDEQLSISSIRLWETPASFCEYQE

SEQ ID NO: 20929 - protein, 140 aa, Haemophilus paracuniculus
  misc_feature (1)..(140): tr|A0A1T0AQV1|A0A1T0AQV1_9PAST 6-carboxy-5,6,7,8-tetrah ydropterin synthase OS=Haemophilus paracuniculus OX=734 GN=B0187_08245 PE=3 SV=1
MFKIAKEFSFDMAHMLDGHDGKCQNLHGHTYKLQVEVAGELFADGAKRGMVMDYSDLKAVVKTHILDQMDHAFIYDLHSEKECKVAQLLIDLDSKVYGIPTRTTAEEMAKYMFEKLEKVGLPVSLIRLWETPTSYCEYTK

SEQ ID NO: 20930 - protein, 147 aa, Haemophilus parahaemolyticus
  misc_feature (1)..(147): tr|A0A369ZII5|A0A369ZII5_HAEPH 6-carboxy-5,6,7,8-tetrah ydropterin synthase OS=Haemophilus parahaemolyticus OX= 735 GN=queD PE=3 SV=1
MFKIAKEFSFDMAHMLDGHDGKCKNLHGHTYKLQVEVAGELVAEGAKRGMVMDYADLKAAVKTHILDPMDHAFIYDLNSPKESKVANLLIDLDSKVYGIPSRSTAEEMAKYMFDKLRKEGLPVTLIRLWETPTSYCEYSQAPHLQAV

SEQ ID NO: 20931 - protein, 147 aa, Haemophilus parahaemolyticus
  misc_feature (1)..(147): tr|A0A5C1QQ39|A0A5C1QQ39_HAEPH 6-carboxy-5,6,7,8-tetrah ydropterin synthase OS=Haemophilus parahaemolyticus OX= 735 GN=queD PE=3 SV=1
MFKIAKEFSFDMAHMLDGHDGKCKNLHGHTYKLQVEVAGELVAEGAKRGMVMDYADLKATVKTHILDPMDHAFIYDLNSPKESKVANLLIDLDSKVYGIPSRSTAEEMAKYMFDKLRKEGLTVTLIRLWETPTSYCEYSQAPHLQAV

SEQ ID NO: 20932 - protein, 141 aa, Haemophilus parainfluenzae
  misc_feature (1)..(141): tr|A0A1B8T2Q1|A0A1B8T2Q1_HAEPA 6-carboxy-5,6,7,8-tetrah ydropterin synthase OS=Haemophilus parainfluenzae OX=72 9 GN=queD PE=3 SV=1
MFKVSKEFSFDMAHLLDGHDGKCQNLHGHTYKLQVEITGHLITHGAKKSMVMDFSDLKSIVKKSILDPMDHAFIYDQTSKRESKIAILLEELQSKTFGVNFRSTAEEMARFIFHRLKYDEKLPISAIRLWETPTSFCEYQE

SEQ ID NO: 20933 - protein, 151 aa, Haemophilus paraphrohaemolyticus
  misc_feature (1)..(151): tr|A0A369ZS17|A0A369ZS17_9PAST 6-carboxytetrahydropteri n synthase QueD OS=Haemophilus paraphrohaemolyticus OX= 736 GN=queD PE=4 SV=1
MFKIAKEFNFDMAHMLDGHDGKCKNLHGHTYKLQVEVAGELVAEGAKRGMVMDYVDLKAIVKTHILDPMDHAFIYDLNSPKESKVANLLIDLDSKVYGIPSRSTAEEMSKYIFDKLREVGLPVTLIRLWETPTSYCEYSQAPHLQAVKNGK

SEQ ID NO: 20934 - protein, 151 aa, Haemophilus paraphrohaemolyticus
  misc_feature (1)..(151): tr|I2NFS2|I2NFS2_9PAST Queuosine biosynthesis protein Q ueD OS=Haemophilus paraphrohaemolyticus HK411 OX=109574 3 GN=queD PE=4 SV=1
MFKIAKEFSFDMAHMLDGHDGKCKNLHGHTYKLQVEVAGELVADGAKRGMVMDYADLKAIVKTHILNPMDHAFIYDLNSPKESKVANLLIDLDSKVYGIPSRSTAEEMAKYMFDKLRKVGLPVTLIRLWETPTSYCEYSQAPHLQAVKNGK

SEQ ID NO: 20935 - protein, 140 aa, Haemophilus parasuis
  misc_feature (1)..(140): tr|A0A143CFU0|A0A143CFU0_HAEPR 6-carboxy-5,6,7,8-tetrah ydropterin synthase OS=Haemophilus parasuis OX=738 GN=A 4U84_03050 PE=3 SV=1
MFKIAKEFSFDMAHMLDGHDGKCKNLHGHTYTLQVEIAGELHTDGAKSGMVMDYSDLKAVVKQHILDKMDHAFIYDSTSEKECKVATLLQSLDSKTFGIPARTTAEQMAKYIFDTLTTEGLPVSLIRLWETPTSYCEYCR

SEQ ID NO: 20936 - protein, 140 aa, Haemophilus parasuis
  misc_feature (1)..(140): tr|A0A1T0AAZ2|A0A1T0AAZ2_HAEPR 6-carboxy-5,6,7,8-tetrah ydropterin synthase OS=Haemophilus parasuis OX=738 GN=p ts PE=3 SV=1
MFKIAKEFSFDMAHMLDGHDGKCKNLHGHTYTLQVEIAGELHTGGAKSGMVMDYSDLKAVVKQHILDKMDHAFIYDSTSEKECKVATLLQSLDSKTFGIPARTTAEQMAKYIFDTLTTEGLPVSLIRLWETPTSYCEYCR

SEQ ID NO: 20937 - protein, 141 aa, Haemophilus pittmaniae
  misc_feature (1)..(141): tr|F9Q7R5|F9Q7R5_9PAST 6-carboxy-5,6,7,8-tetrahydropter in synthase OS=Haemophilus pittmaniae HK 85 OX=1035188 GN=queD PE=3 SV=1
MFRVSKEFSFDMAHLLDGHDGKCQNLHGHTYKLQVEVAGDLLVDGAKKSMVMDFSDLKVVVKKAILDPMDHAFIYDQTSERESKIAMLLQELQSKTFGVNFRTTAEEMARFIFQRLKYDEKLPISAIRLWETPTSFCEYGE

SEQ ID NO: 20938 - protein, 141 aa, Haemophilus pittmaniae
  misc_feature (1)..(141): tr|A0A377J196|A0A377J196_9PAST 6-carboxy-5,6,7,8-tetrah ydropterin synthase OS=Haemophilus pittmaniae OX=249188 GN=queD PE=3 SV=1
MFRVSKEFSFDMAHLLDGHDGKCQNLHGHTYKLQVEVAGDLLVDGAKKSMVMDFSDLKAVVKKAILDPMDHAFIYDQTSERESKIAMLLQELQSKTFGVNFRTTAEEMARFIFQRLKYDEKLPISAIRLWETPTSFCEYGE

SEQ ID NO: 20939 - protein, 141 aa, Haemophilus sp.; identical to SEQ ID NO: 20932
  misc_feature (1)..(141): tr|A0A1S1FR33|A0A1S1FR33_9PAST 6-carboxy-5,6,7,8-tetrah ydropterin synthase OS=Haemophilus sp. HMSC61B11 OX=160 8882 GN=HMPREF3263_00105 PE=3 SV=1

SEQ ID NO: 20940 - protein, 141 aa, Haemophilus sp.
  misc_feature (1)..(141): tr|A0A1B8QPJ6|A0A1B8QPJ6_9PAST 6-carboxy-5,6,7,8-tetrah ydropterin synthase OS=Haemophilus sp. CCUG 66565 OX=18 59694 GN=A9501_04910 PE=3 SV=1
MFKISKEFSFDMAHLLDGHDGKCQNLHGHTYKLQVEISGDLYESGAKKAMVIDFSDLKSIVKKTILDPMDHAFIYDQTSERESQIAALLQKLNSKTFGVPFRTTAEEMARFIFNRLKHDEQLAISAIRLWETPTSFCEYQE

SEQ ID NO: 20941 - protein, 144 aa, Haemophilus sputorum
  misc_feature (1)..(144): tr|J4TU03|J4TU03_9PAST 6-carboxy-5,6,7,8-tetrahydropter in synthase OS=Haemophilus sputorum HK 2154 OX=1078483 GN=queD PE=3 SV=1
MFKIAKEFSFDMAHMLDGHDGKCKNLHGHTYKLQVEVSGKLVAEGAKRGMVMDYSDLKTIVKREILDPMDHAYIYDLNSEKESKIARLLIELDSKVYGIPSRSTAEEMTKYMFEKLTQVGLPVSLIRLWETPTSYCEYTADESL

SEQ ID NO: 20942 - protein, 144 aa, Haemophilus sputorum; identical to SEQ ID NO: 20941
  misc_feature (1)..(144): tr|A0A369YMB2|A0A369YMB2_9PAST 6-carboxy-5,6,7,8-tetrah ydropterin synthase OS=Haemophilus sputorum OX=1078480 GN=queD PE=3 SV=1

SEQ ID NO: 20943 - protein, 119 aa, Hafnia alvei
  misc_feature (1)..(119): tr|A0A0K0HL51|A0A0K0HL51_HAFAL 6-carboxy-5,6,7,8-tetrah ydropterin synthase OS=Hafnia alvei OX=569 GN=queD PE=3 SV=1
MTTTLFKDFQFEAAHHLPHVPEGHKCGRLHGHSFLVRIEITGEVDAYTGWVMDFAELKAAFKPILDRLDHYYLNDIPGLENPTSEVLAQWIWQQLKPELPLLSAVLVKETCTAGCTYRG

SEQ ID NO: 20944 - protein, 119 aa, Hafnia alvei; identical to SEQ ID NO: 20943
  misc_feature (1)..(119): tr|A0A097R4Z0|A0A097R4Z0_HAFAL 6-carboxy-5,6,7,8-tetrah ydropterin synthase OS=Hafnia alvei FB1 OX=1453496 GN=A T03_16285 PE=3 SV=1

SEQ ID NO: 20945 - protein, 119 aa, Hafnia paralvei; identical to SEQ ID NO: 20943
  misc_feature (1)..(119): tr|A0A2A2M930|A0A2A2M930_9GAMM 6-carboxy-5,6,7,8-tetrah ydropterin synthase OS=Hafnia paralvei OX=546367 GN=que D PE=3 SV=1

SEQ ID NO: 20946 - protein, 254 aa, Hahella chejuensis
  misc_feature (1)..(254): tr|Q2SK80|Q2SK80_HAHCH 6-pyruvoyl-tetrahydropterin synt hase OS=Hahella chejuensis (strain KCTC 2396) OX=349521 GN=HCH_02115 PE=4 SV=1
MDIELSGDLDEQGMVFDFGDVKKILRQAAEDMIDHKLVVPQDLLDMNVEQKGERIEVSCGFPGDAQFYISCPADAIAALPLTEIDIESVEPLLTKHLQSVVPDNVKKVKIRLREENIQGAYYHYTHGLKKHAGNCQRIAHGHRSKLEIFADGQRSQLTEYQWAKKWKDIYIGSWEDVVQEETINGVEHMRFKYTASQGDFELLMPKKRVYMIDTDSTVEWIAEHIAQTLKKQRPQNWFTVRAYEGVKKGAIAER

SEQ ID NO: 20947 - protein, 254 aa, Hahella sp.
  misc_feature (1)..(254): tr|A0A3T0VVZ8|A0A3T0VVZ8_9GAMM 6-pyruvoyl tetrahydropte rin reductase OS=Hahella sp. KA22 OX=1628392 GN=ENC22_1 0010 PE=4 SV=1
MDIELSGDLDEQGMVFDFGDVKKILRQAAEDMIDHKLVVPQDLLDMNVEQKGERIEVSCSFPGDAQFHISCPTDAIAALPLTEIDIESVEPLLTKHLQSVVPDNVKKVKIRLREENIQGAYYHYTHGLKKHAGNCQRIAHGHRSKLEIFADGQRSQLTEYQWAKKWKDIYIGSWEDVAQEETINGVEHIRFKYVASQGDFELLMPKKRVYMIDTDSTVEWIAEHIAQTLKKQRPQNWFTVRAYEGVKKGAIAER

SEQ ID NO: 20948 - protein, 283 aa, Hahella sp.
  misc_feature (1)..(283): tr|A0A261GII7|A0A261GII7_9GAMM 6-pyruvoyl tetrahydropte rin reductase OS=Hahella sp. CCB-MM4 OX=1926491 GN=BTA5 1_22055 PE=4 SV=1
MNRLFVDHLTVLDFSYLHPTRGIVGESWILDIELAGKLDEQGMVFDFGDVKKVLRDAAEDLIDHKLVIPEEIDGLEVNNDGDRIEVALNLQSNGRIECKCPTSAITLLPTNEITIDEIQPILNKHLQSVVPKNVKSVKVTLREELIQGAYYHYTHGLKKHGGNCQRIAHGHRSKLEIFTDGQRSQLIEYQWAKKWKDIYLGSKADVVKEESYQGTAHVRFGYEAQQGSFELLVPKHSTYLIDTDTTVEWIAEHIAQTLKQQRPQNVFLVRCYEGVKKGAIAER

SEQ ID NO: 20949 - protein, 133 aa, Hahellaceae bacterium
  misc_feature (1)..(133): tr|A0A2D8R7G6|A0A2D8R7G6_9GAMM Uncharacterized protein OS=Hahellaceae bacterium OX=2048971 GN=CME36_01145 PE=4 SV=1
MYSLTVRDHMMIAHSFKGAVFGLAQKLHGATFVVDLSFETEQLDDDNLVVDIGLASEALKAILQPLNYQNLDELPMFEGQNTTTEFLAKFIFDEMASQMTAGKLGKQATAVKRLTVQLKESHVAWASYSGSLA

SEQ ID NO: 20950 - protein, 368 aa, Hahellaceae bacterium
  misc_feature (1)..(368): tr|A0A2D8RIK1|A0A2D8RIK1_9GAMM 6-pyruvoyl tetrahydropte rin synthase OS=Hahellaceae bacterium OX=2048971 GN=CME 36_19890 PE=4 SV=1
MSASSNEHLLLVAASPFEAARKVEILAENHPSRRLHGHSFLAKARVEVAANGNSMDGTEIESLYQHLRDCVAELDYQYLNDHLPVPTDENLARWISHKISDSLINSIGIQSTRDQGVDLDSQQKAHVWRRFRFEAAHKLPNVPSGHQCGRMHGHGFEVILHCEQNISDQELGIDYDRLDELWQPLYRRLNNACLNEIEGLENPTSEVLSHWLWERVKPLCESLSWVSVYETATAGCHFNGSGYRIWKEQRFESALKLENAPAGDARRNLHGHSYLVRLHLTAPLDRVMGWTVDYGDVKRLFKPAYDQLDHYLISDLPGMEQEGSASIARWIKGQLSGVLPELDRIDIYEKPGCGVVLGWGEESPILPI

SEQ ID NO: 20951 - protein, 121 aa, Haliangium ochraceum
  misc_feature (1)..(121): tr|D0LW73|D0LW73_HALO1 6-carboxy-5,6,7,8-tetrahydropter in synthase OS=Haliangium ochraceum (strain DSM 14365 / JCM 11303 / SMP-2) OX=502025 GN=Hoch_3503 PE=3 SV=1
MRCQLSRDYRFEAAHQLPKVPPTHKCSRVHGHSYHLTITLSGDIDPEMGWLIDFADIDQVVDPVIERLDHRLLNDIEGLENPTSELLAVWLWRALAPGLPTLVEVMVAETPTSRCVYRGDQ

SEQ ID NO: 20952 - protein, 128 aa, Haliangium ochraceum
  misc_feature (1)..(128): tr|D0LLG1|D0LLG1_HALO1 6-pyruvoyl tetrahydropterin synt hase OS=Haliangium ochraceum (strain DSM 14365 / JCM 11 303 / SMP-2) OX=502025 GN=Hoch_0540 PE=4 SV=1
MFSLRIADYLKCAHSFKGEIFGIAQILHIITYEVEAVFIVEELDENNLVVDFGASQQALTAIIGTMNYKNLDELPELNGKNTTTEFLCRYIHEYMSKAVEDLFSGTLRITMRESTVAEVSYEKPVTKS

SEQ ID NO: 20953 - protein, 160 aa, Haliea salexigens
  misc_feature (1)..(160): tr|A0A3C1KRI6|A0A3C1KRI6_9GAMM 6-pyruvoyl tetrahydropte rin synthase OS=Haliea salexigens OX=287487 GN=DCP75_16 495 PE=4 SV=1
MERLTTLYIDKESHKFSAAHFTIFSATERERLHGHNYSVSAKIVAPMGDNGFAADYNVYKRRLKSLCDALDEYLLLAGDSPYQRIEDAEDYYRVHFAREEMLFLKADTRVLPLRNATVEEFSRYLLQQLLLASEGDDLREVELCVASGPGQKGCACWHKP

SEQ ID NO: 20954 - protein, 130 aa, Haliea sp.
  misc_feature (1)..(130): tr|A0A2D4TCQ0|A0A2D4TCQ0_9GAMM 6-carboxy-5,6,7,8-tetrah ydropterin synthase OS=Haliea sp. OX=1932666 GN=queD PE =3 SV=1
MDIFKEFHFEAAHRLPNVPAGHKCARLHGHSFQVRLVVSGEACEPSGWVMDFGDIKAAFKPVLNRLDHYYLNDIPGLENPTSENIARWIWNQLKPQLPGLSQIEIRETCTSGCIYRGSQDVTKPLQAGNM

SEQ ID NO: 20955 - protein, 118 aa, Haliea sp.
  misc_feature (1)..(118): tr|A0A2D5FB22|A0A2D5FB22_9GAMM 6-carboxy-5,6,7,8-tetrah ydropterin synthase OS=Haliea sp. OX=1932666 GN=queD PE =3 SV=1
MEIFKDFHFEAAHRLPNVPEGHKCARLHGHSFQLRVWVSGEVTEPRGWIMDFGDLKAAVKPVIERLDHYYLNEIPGLENPTSENLARWLWAALKPALPELSCIEIRETCTSGCRYRGE

SEQ ID NO: 20956 - protein, 118 aa, Halieaceae bacterium
  misc_feature (1)..(118): tr|A0A2A5WKK7|A0A2A5WKK7_9GAMM 6-carboxy-5,6,7,8-tetrah ydropterin synthase OS=Halieaceae bacterium MED-G26 OX= 1986253 GN=queD PE=3 SV=1
MELYNDFRFEAAHRLPMVPAGHPCERLHGHSYFVRLTIDGEVNPETGWVMDFDDINMAFAPILAKLDHYYLNEVEGLENPTSENLARWIWVRLKPRLPILTAVEIKETCTVGCIYRGE

SEQ ID NO: 20957 - protein, 130 aa, Halieaceae bacterium
  misc_feature (1)..(130): tr|A0A359ERW5|A0A359ERW5_9GAMM 6-carboxy-5,6,7,8-tetrah ydropterin synthase OS=Halieaceae bacterium OX=2026743 GN=queD PE=3 SV=1
MEIFKEFHFEAAHRLPNVPAGHKCARLHGHSFQVRLVVSGEACEPSGWVMDFGDIKAAFKPVLDRLDHYYLNDIPGLENPTSENIARWIWNELKPQLPGLSQIEVRETCTSGCIYRGSQDVTKPLQAGNM

SEQ ID NO: 20958 - protein, 159 aa, Halioglobus japonicus
  misc_feature (1)..(159): tr|A0A2N5YF96|A0A2N5YF96_9GAMM 6-pyruvoyl tetrahydropte rin synthase OS=Halioglobus japonicus OX=930805 GN=C002 9_00210 PE=4 SV=1
MTRTTTLHIDKESHKFSAAHYTIFSATERERLHGHNYSVSARIVAPMGDNGFAADYNVYKRRIASLCEKLDEYMILAADSPYQEIEEQGENYRVRFNGEEMSFLKCDSLLLPLRNATVEEFSHYLLQQLLAECADDGLVELEVWVASGPGQRASALWRQ

SEQ ID NO: 20959 - protein, 118 aa, Halioglobus japonicus
  misc_feature (1)..(118): tr|A0A2N5YDS6|A0A2N5YDS6_9GAMM 6-carboxy-5,6,7,8-tetrah ydropterin synthase OS=Halioglobus japonicus OX=930805 GN=queD PE=3 SV=1
MEIYKEFHFEAAHRLPNVPEGHKCARLHGHSFHVRLTVAGPVGDESGWVMDFGDLKAAFKPILDQLDHYYLNDIEGLENPTSENIARWIWDRLSPRLPQLSAVEIRETCTSGCVYRGQ

SEQ ID NO: 20960 - protein, 118 aa, Halioglobus lutimaris
  misc_feature (1)..(118): tr|A0A2N5WYJ4|A0A2N5WYJ4_9GAMM 6-carboxy-5,6,7,8-tetrah ydropterin synthase OS=Halioglobus lutimaris OX=1737061 GN=queD PE=3 SV=1
MEIYKEFHFEAAHRLPNVPEGHKCARLHGHSFHVRLCVVGDAKEPSGWVMDFGDIKTAFKPIYDQLDHYYLNEIEGLENPTSENLARWIWARLKPGLPALERVEIRETCTSGCIYRGD

SEQ ID NO: 20961 - protein, 160 aa, Halioglobus lutimaris
  misc_feature (1)..(160): tr|A0A2N5X5P2|A0A2N5X5P2_9GAMM 6-pyruvoyl tetrahydropte rin synthase OS=Halioglobus lutimaris OX=1737061 GN=C00 39_05900 PE=4 SV=1
MTEYTSLYIDKESHKFSAAHFTIFSATERERLHGHNYSVSASFLAPMGDNGFSADYNVYKNRLAQLCDELDEYMLLAADSPYQQVEEDGDFYRVHFNGEQMLFLRSDTLLLPLRNATVEEFAGYLLQKLVALSAGEGLRQIELFVASGPGQKAGAVWRSK

SEQ ID NO: 20962 - protein, 160 aa, Halioglobus sp.
  misc_feature (1)..(160): tr|A0A3L7E0U9|A0A3L7E0U9_9GAMM 6-pyruvoyl tetrahydropte rin synthase OS=Halioglobus sp. U0301 OX=2283635 GN=DWB 85_10395 PE=4 SV=1
MTDYTSLHIDKEKHKFSAAHYTIFSARERERLHGHNYSVSARFVAPLGDNGFSADYNVYKNRLAALCEELDEYMLLAAESPHQRIEEEGDYYRVHFNGEEMLFLRADTLVLPIRNATVEEFSRYLLHKLVDQSAGEGLIEIELFVASGPGQKAGSLWRGG

SEQ ID NO: 20963 - protein, 117 aa, Halioglobus sp.
  misc_feature (1)..(117): tr|A0A3L7DXU9|A0A3L7DXU9_9GAMM 6-carboxy-5,6,7,8-tetrah ydropterin synthase OS=Halioglobus sp. U0301 OX=2283635 GN=queD PE=3 SV=1
MEIYKEFHFEAAHRLPNVPEGHKCARLHGHSFHVRLSVSGDAPEPSGWVMDFGDIKSAFKPIYDQLDHYYLNDIPGLENPTSENLARWIWTRLQPALPGLTAVEIRETCTSGCVYRG

SEQ ID NO: 20964 - protein, 118 aa, Haliscomenobacter hydrossis
  misc_feature (1)..(118): tr|F4KYZ7|F4KYZ7_HALH1 6-carboxy-5,6,7,8-tetrahydropter in synthase OS=Haliscomenobacter hydrossis (strain ATCC 27775 / DSM 1100 / LMG 10767 / O) OX=760192 GN=Halhy_4 852 PE=3 SV=1
MELYKEFSFDAAHFLPNVSPDHKCAHMHGHTYYVRILLEGPLDPVLGWVVDFAEVKSAWKPLEKILDHKMLNDIVGLENPTAEIIAVWIWERMKPKLPLLKSIEVKETPTTGVVYSGK

SEQ ID NO: 20965 - protein, 148 aa, Haloactinopolyspora alba
  misc_feature (1)..(148): tr|A0A2P8DF17|A0A2P8DF17_9ACTN 6-pyruvoyltetrahydropter in/6-carboxytetrahydropterin synthase OS=Haloactinopoly spora alba OX=648780 GN=CLV30_12840 PE=4 SV=1
MTLHTVTVRHNFETAHRLPPLAGKCQNLHGHSWWADITVAGPIDEVGTVVEFGRLKAELRDWIDTHLDHGAMLGHDDPLVPLLRDMGSKVYVIGWDAYTRDLSWPTVESAALLLARVTTLILDSLDASADVTHVRVRETHVNEAGWSA

SEQ ID NO: 20966 - protein, 177 aa, Haloarcobacter mediterraneus
  misc_feature (1)..(177): tr|A0A4Q1B4Y9|A0A4Q1B4Y9_9PROT 6-pyruvoyl tetrahydrobio pterin synthase OS=Haloarcobacter mediterraneus OX=2023 153 GN=CP965_05865 PE=4 SV=1
MTWKISKSFDFCYGHRVWSQTLNSEYSLDPCLKCRHLHGHQGKIVIFLEASELKDGMVTDFKHLNWFKQFLDDVLDHKFIIDINDPLYPTLLPHIKKEDLIFFEQGYYIPNMDKLKDEPLHIKEMYEGYVIVEFVPTSENLSAWFLEIASKKMQKIGIKVASVQFEETPKSKSHVFA

SEQ ID NO: 20967 - protein, 155 aa, Halobacillus aidingensis
  misc_feature (1)..(155): tr|A0A1H0S7L8|A0A1H0S7L8_HALAD 6-pyruvoyltetrahydropter in/6-carboxytetrahydropterin synthase OS=Halobacillus a idingensis OX=240303 GN=SAMN05421677_11753 PE=4 SV=1
MYGFTIVENLQKMDQDIKHHELKYHQKRVLVSKEFTFDAAHHLHCYEGKCKNLHGHTYKVIFGVSGFVDDIGLIIDFGDIKKIWKEQIEVHLDHRYLNDTLPNMNTTAENMVVWIYEKMEEALKDDPNKCRVEFVKLYETPTSFAEARREWMMDE

SEQ ID NO: 20968 - protein, 155 aa, Halobacillus alkaliphilus
  misc_feature (1)..(155): tr|A0A1I2TFX0|A0A1I2TFX0_9BACI 6-pyruvoyltetrahydropter in/6-carboxytetrahydropterin synthase OS=Halobacillus a lkaliphilus OX=396056 GN=SAMN05216353_16912 PE=4 SV=1
MYGFTIVENLQKIDQDIKRHELKYHKKRVMVSKEFTFDAAHHLHCYEGKCKNLHGHTYRVVFGISGYVDDIGIVIDFGDIKNIWKEQIEIHLDHRYLNDTLPHMNTTAENMVVWIYEKMAAALIERSEGHRMEFVKLYETPTSFAEARREWMADE

SEQ ID NO: 20969 - protein, 155 aa, Halobacillus dabanensis
  misc_feature (1)..(155): tr|A0A1I3XV40|A0A1I3XV40_HALDA 6-pyruvoyltetrahydropter in/6-carboxytetrahydropterin synthase OS=Halobacillus d abanensis OX=240302 GN=SAMN04487936_109153 PE=4 SV=1
MYDFTIVENLQKIDQDIKRHELKYHQKRVLVSKEFTFDAAHHLHCYEGKCKNLHGHTYKVIFGVSGFTDDIGLVIDFGDLKKIWKEKIEVHLDHRYLNDTLPNMNTTAENMVVWIYEKMNEALKGNANDCRVEFVKLYETPTSYAEARREWMNCE

SEQ ID NO: 20970 - protein, 155 aa, Halobacillus faecis
  misc_feature (1)..(155): tr|A0A511WZ55|A0A511WZ55_9BACI 6-carboxytetrahydropteri n synthase QueD OS=Halobacillus faecis OX=360184 GN=ygc M PE=4 SV=1
MYGFTIVESLQKIDQDIKRHELKFHQKRVLVSKEFTFDAAHHLHCYEGKCKNLHGHTYKVIFGISGFTDDIGLVIDFGDIKNIWKKQIEVHLDHRYLNDTLPNMNTTAENMVVWIYEKMEEALKGDSNNCRVEFVKLYETPTSYAEARREWMINE

SEQ ID NO: 20971 - protein, 155 aa, Halobacillus halophilus
  misc_feature (1)..(155): tr|I0JJQ1|I0JJQ1_HALH3 6-pyruvoyl tetrahydrobiopterin s ynthase OS=Halobacillus halophilus (strain ATCC 35676 / DSM 2266 / JCM 20832 / NBRC 102448/ NCIMB 2269) OX=866 895 GN=ygcM PE=4 SV=1
MYGFTIVENLQKIDQDIKRHELKYHKKRVMVSKEFTFDAAHHLHCYEGKCKNLHGHTYRVIFGISGYVDDIGIVIDFGDIKDIWKEQIEIHLDHRYLNDTLPNMNTTAENMVVWIYEKMEAALAGQPEGHRVEFVKLYETPTSFAEARREWMENE

SEQ ID NO: 20972 - protein, 155 aa, Halobacillus karajensis
  misc_feature (1)..(155): tr|A0A024P512|A0A024P512_9BACI 6-carboxy-5,6,7,8-tetrah ydropterin synthase OS=Halobacillus karajensis OX=19508 8 GN=queD PE=4 SV=1
MYGFTIVENLQKFDEDIKRHELKYHQKRVLVSKEFTFDAAHHLHCYEGKCKNLHGHTYKVIFGISGFVDEIGLVIDFGDIKKIWKEQIEVHLDHRYLNDTLPNMNTTAENMVVWIYEKMEEALQGHSNHCRVEFVKLYETPTSYAEARREWMTVE

SEQ ID NO: 20973 - protein, 155 aa, Halobacillus litoralis
  misc_feature (1)..(155): tr|A0A410MAW9|A0A410MAW9_9BACI 6-carboxytetrahydropteri n synthase QueD OS=Halobacillus litoralis OX=45668 GN=q ueD PE=4 SV=1
MYGFTIVENLQKIDQDIKRQELKYHQKRVMVSKEFSFDAAHHLHCYEGKCKNLHGHTYKVIFGISGFVDDIGLVIDFGEIKKIWKEQIEIHLDHRYLNDTLPNMNTTAENMVVWIYEKMEESLESDQKDCRVEFVKLYETPTSFAEARREWMTHE

SEQ ID NO: 20974 - protein, 155 aa, Halobacillus mangrovi
  misc_feature (1)..(155): tr|A0A1W5ZY85|A0A1W5ZY85_9BACI 6-carboxytetrahydropteri n synthase QueD OS=Halobacillus mangrovi OX=402384 GN=H M131_16285 PE=4 SV=1
MYGFTIVENLQKIDEDIKRHELKYHKKRVMVSKEFTFDAAHHLHCYEGKCKNLHGHTYRVVFGISGFTDDIGIVMDFGDIKEIWKEQIEVHLDHRYLNDTLPNMNTTAENMVVWIYEKMEKALSTHPQDCRVEFVKLYETPTSYAEARREWMTHE

SEQ ID NO: 20975 - protein, 155 aa, Halobacillus salinus
  misc_feature (1)..(155): tr|A0A4Z0H3Y7|A0A4Z0H3Y7_9BACI 6-carboxytetrahydropteri n synthase QueD OS=Halobacillus salinus OX=192814 GN=qu eD PE=4 SV=1
MFGFTIVENLQKIDQDIKREELKYHQKRVMVSKEFTFDAAHHLHCYEGKCKNLHGHTYKVIFGISGFVDEIGIVMDFGDIKEIWKEQIEVHLDHRYLNDTLPNMNTTAENMVVWIYEKMEEALKGHPQICRVEFVKLYETPTSFAEVRREWMTNE

SEQ ID NO: 20976 - protein, 155 aa, Halobacillus sp.
  misc_feature (1)..(155): tr|A0A0B0D9U3|A0A0B0D9U3_9BACI 6-pyruvoyl tetrahydrobio pterin synthase OS=Halobacillus sp. BBL2006 OX=1543706 GN=LD39_02220 PE=4 SV=1
MYGFTIVENLQKIDQDIKRHELKYHQKRVMVSKEFTFDAAHHLHCYEGKCKNLHGHTYRVVFGISGLTDEIGIVMDFGDIKEIWKEQIEIHLDHRYLNDTLPNMNTTAENMVVWIYEKMEKALNGHPQECRVEFVKLYETPTSYAEARREWMNNE

SEQ ID NO: 20977 - protein, 155 aa, Halobacillus sp.
  misc_feature (1)..(155): tr|L5NEA1|L5NEA1_9BACI 6-pyruvoyl tetrahydrobiopterin s ynthase OS=Halobacillus sp. BAB-2008 OX=1246484 GN=D479 _01065 PE=4 SV=1
MFGFTIVENLQKIDEDIKRQDLKYHSKRVMVSKEFTFDAAHHLHCYEGKCKNLHGHTYKVIFGISGFVDDIGLVIDFGDIKQIWKESIEVHLDHRYLNDTLPNMNTTAENMVVWIYNQMEEALLNRGDGSRVEFVKLYETPTSYAEARREWMRDE

SEQ ID NO: 20978 - protein, 155 aa, Halobacillus trueperi
  misc_feature (1)..(155): tr|A0A3D8VT44|A0A3D8VT44_9BACI 6-carboxytetrahydropteri n synthase QueD OS=Halobacillus trueperi OX=156205 GN=q ueD PE=4 SV=1
MYGFTIVENLQKMNQDIKHHELKYHQKRVLVSKEFTFDAAHHLHCYEGKCKNLHGHTYKVIFGVSGFVDDIGLVIDFGDIKKIWKEQIEVHLDHRYLNDTLPNMNTTAENMVVWIYEKMEEALKDDPNKCRVEFVKLYETPTSFAEARREWMMDE

SEQ ID NO: 20979 - protein, 155 aa, Halobacillus trueperi
  misc_feature (1)..(155): tr|A0A3E0J6S1|A0A3E0J6S1_9BACI 6-carboxytetrahydropteri n synthase QueD OS=Halobacillus trueperi OX=156205 GN=q ueD PE=4 SV=1
MYGFTIVENLQKMDQDIKQHELKYHQKRVLVSKEFTFDAAHHLHCYEGKCKNLHGHTYKVIFGVSGFVDDIGLVIDFGDIKKIWKEQIEIHLDHRYLNDTLPNMNTTAENMVVWIYEKMEEALKEDPNKCRVEFVKLYETPTSFAEARREWMMDE

SEQ ID NO: 20980 - protein, 145 aa, Halobacteriovoraceae bacterium
  misc_feature (1)..(145): tr|A0A2E2U9F5|A0A2E2U9F5_9PROT 6-pyruvoyl tetrahydropte rin synthase OS=Halobacteriovoraceae bacterium OX=20267 45 GN=CME65_07140 PE=4 SV=1
MAKFRSTKLLKGYPCTHRQWKANSHCRFVHGYSRSFYFEFESSELTEEMWVMDFGGLKEVKVWLAHMFDHTFLAAEDDPYLDTFKKLDSEGVIQLRTLPNAGMEGTAEYVFTHVSQIINKNTNGRVWITKVEVRENEKNSAMYLP

SEQ ID NO: 20981 - protein, 206 aa, Halobacteriovoraceae bacterium
  misc_feature (1)..(206): tr|A0A2E3W5Z2|A0A2E3W5Z2_9PROT Uncharacterized protein OS=Halobacteriovoraceae bacterium OX=2026745 GN=CME64_1 7785 PE=4 SV=1
MYLFIYHLKTHGPRLGAKTRFALFSISECSYKLSHLKERLFLDFNYSIKVYKQYFNFAASHFLIFDDGSREPLHGHNYRVMVKGEAPKLEGDMVFDFLDIKPIVREVCDSLDHKLLLPKENQHLKIHDKGKSFKLTTPDESEFVIPKQDVLVLPISNTSAERLAIYICEEITRITQERFNFRFSAFEVEVEETPGQSAVYAHKETL

SEQ ID NO: 20982 - protein, 174 aa, Halobacteriovorax marinus
  misc_feature (1)..(174): tr|A0A1Y5F3N0|A0A1Y5F3N0_9PROT Uncharacterized protein OS=Halobacteriovorax marinus OX=97084 GN=A9Q84_17190 PE =4 SV=1
MQTNYTLKVFKEYFNFACAHFMIFKDGTREPLHGHNYRVSVNGHHNTLDGDMVLDFLDLKPIVRSVCDELDHKLLIQGENPQLEMSKSENQWEFKTPDGSRFSIPASDVLVLPIKNTSVERIAGHLAKVIDLELQKKFNFSFNILEVEVEESKGQSVIFRLIKEDQKEDQKEDI

SEQ ID NO: 20983 - protein, 147 aa, Halobacteriovorax marinus
  misc_feature (1)..(147): tr|E1X654|E1X654_HALMS Uncharacterized protein OS=Halob acteriovorax marinus (strain ATCC BAA-682 / DSM 15412 / SJ) OX=862908 GN=BMS_2613 PE=4 SV=1
MSDFISTKHFIGFPCTHRQWKADSHCKYVHGYSRSFYFEFKSTELTKEGWVVDFGGLKEIKKWLDYMFDHTFLASSDDPFLETFKQLDKDGVIQLRVLPNAGMEGTAQYVYDEVNPMIKKLTHNRAWISRLEVRENEKNSAILIPKD

SEQ ID NO: 20984 - protein, 161 aa, Halobacteriovorax sp.
  misc_feature (1)..(161): tr|A0A2D5YP91|A0A2D5YP91_9PROT Uncharacterized protein OS=Halobacteriovorax sp. OX=2020862 GN=CME69_07660 PE=4 SV=1
MKYAIKVYKEYFNFACSHFLIFKDGTREPLHGHNYKVTLKGDALDLEGDMVFDFLDIKPIVREVCDSLDHKLLLPSENLNLRLDTKDDNIEIRPKDGSFFSIPKSDVLVLPLPNTSAERLAIYLANEINDLTKKRFNFSFSSLEIEVEETKGQCAIYKLEN

SEQ ID NO: 20985 - protein, 147 aa, Halobacteriovorax sp.
  misc_feature (1)..(147): tr|A0A2G8HZB4|A0A2G8HZB4_9PROT 6-pyruvoyl tetrahydropte rin synthase OS=Halobacteriovorax sp. JY17 OX=2014617 G N=CES88_07690 PE=4 SV=1
MTEFISTKHFIGFPCTHRQWKADSHCKYVHGYSRSFYFEFKSTELTKEGWVVDFGGLKEVKVWLDDMFDHTFLASSDDPFLDTFKQLDIDGVIQLRVLPNAGMEGTAQYVYDQVNPMIKKLTNNRAWISRLEVRENEKNSAILIPKE

SEQ ID NO: 20986 - protein, 128 aa, Halodesulfovibrio marinisediminis
  misc_feature (1)..(128): tr|A0A1N6DN51|A0A1N6DN51_9DELT 6-carboxy-5,6,7,8-tetrah ydropterin synthase OS=Halodesulfovibrio marinisedimini s DSM 17456 OX=1121457 GN=SAMN02745161_0325 PE=3 SV=1
MAKGIWRLTVRSDFAAAHALRNYDGKCENIHGHNFAVEAVVEGDKLSEDVEILLDFKVMKNKLKEVTELIDHKDLNCTPPFDKMNPSSENLARFIYQELGKRIESYGVRVYSVTVSEKAAQSATYLEL

SEQ ID NO: 20987 - protein, 118 aa, Halodesulfovibrio marinisediminis
  misc_feature (1)..(118): tr|A0A1N6I893|A0A1N6I893_9DELT 6-carboxy-5,6,7,8-tetrah ydropterin synthase OS=Halodesulfovibrio marinisedimini s DSM 17456 OX=1121457 GN=SAMN02745161_2509 PE=3 SV=1
MEIYVSLSFDAAHRLPNVPEGHKCGNLHGHTFVAEIYVSGAVDEASGWVIDFGDIKTVAKPVIEQLDHHYLNDIAGLDNPTSENIAVWMWNKLKPTLPGLSKIVIKESPTSASIYTGA

SEQ ID NO: 20988 - protein, 128 aa, Halodesulfovibrio spirochaetisodalis
  misc_feature (1)..(128): tr|A0A1B7XQ60|A0A1B7XQ60_9DELT 6-carboxy-5,6,7,8-tetrah ydropterin synthase OS=Halodesulfovibrio spirochaetisod alis OX=1560234 GN=SP90_00795 PE=3 SV=1
MANGIWRLTVRSDFAAAHALRNYDGKCENIHGHNFAVEAVVEGDKLSDDVEILLDFKIMKTTLKEVTELLDHKDLNCTAPFDTMNPSSENLARFIYQELGKRIESYGVRVHSVTVSEKAAQSATYLEL

SEQ ID NO: 20989 - protein, 288 aa, Halomicronema excentricum
  misc_feature (1)..(288): tr|A0A4Q7E895|A0A4Q7E895_9CYAN 6-pyruvoyl tetrahydropte rin synthase OS=Halomicronema excentricum str. Lakshadw eep OX=2294035 GN=DYY88_07980 PE=4 SV=1
MECVINRRAQFSASHRYWLPELSEAENQAKFGPCSRAPGHGHNYVLYVSMVGELDEYGMVLNLSDVKQVIKREVTSQLDFAYLNDVWPEFQATLPTTEHMARVLWQRLSPHLPITKIQLFEHPELWAEYTGNNMEAYLTISTHFSAAHRLALPTLSFDENVEIYGKCARPNGHGHNYHLEVTVKGEIEPRTGMIADLEELQKAIDDHVVEPFDHTFLNKDIPYFEKVVPTAENIAVHIRDLLREPIAQTGAQLHKVKLIESPNNSAEVYCTADLTPTAESTRPELAAV

SEQ ID NO: 20990 - protein, 289 aa, Halomicronema hongdechloris
  misc_feature (1)..(289): tr|A0A1Z3HFU7|A0A1Z3HFU7_9CYAN 6-carboxy-5,6,7,8-tetrah ydropterin synthase OS=Halomicronema hongdechloris C220 6 OX=1641165 GN=queD PE=4 SV=1
MTCIIHRRAQFSASHRYWLPELSAADNADQFGLCTKAPGHGHNYVLYVSMAGQLDEYGMVLNLSDVKTVIKREVTSQLDFAYLNDVWPEFQQTLPTTEYMAYVLWHRLVSYLPLVNIRLYEHPELWADYTGDSMEAYLTISTHFSAAHRLALPQLSYEENCAIYGKCARPHGHGHNYHLEVTVCGEIDSRTGMIADLGELQVAIDTHVVEPFDHTFLNKDVPYFAEVVPTAENIAVHIRDRLRQPIQATGARLHKVKLIESPNNSVEVYCSSSASLADQNRVAAPAMAT

SEQ ID NO: 20991 - protein, 132 aa, Halomonadaceae bacterium
  misc_feature (1)..(132): tr|A0A139C7X4|A0A139C7X4_9GAMM Uncharacterized protein OS=Halomonadaceae bacterium T82-2 OX=1783518 GN=AWU55_2 436 PE=4 SV=1
MFSLTVRDQMMIAHSFQGEVFGPAQHRHGATYVVDVTFKRPELDEHDLVVDIGLAGDTLKAVLAEFHLTDLDELDAFRGRNTTTEFMAHAVFERMARRIRDGELGEGAKALTHLKVTLHESHIAWAGYEGAL

SEQ ID NO: 20992 - protein, 281 aa, Halomonadaceae bacterium
  misc_feature (1)..(281): tr|A0A139CD24|A0A139CD24_9GAMM Uncharacterized protein OS=Halomonadaceae bacterium T82-2 OX=1783518 GN=AWU55_9 12 PE=4 SV=1
MTLFVNGLSHLDASLWSPERGLIGVSWHVDVALHGKLGEDGMLFDFGGVKPWIKTVIDDGPDHTLLVPTAAAGVTVSECREGLMVRTTAPYPMEIRAPRQAYTLLPWARIDRERLATHLSEQLTRHAPPRVDGVEVMLRDEIIDAAGAYTYSHGLKHHDGNCQRIAHGHRSRLHIWCAGRRRPDLEHHWGEYLDDRYLLHAEDCEPDSEAGSTAIRYSARQGHFYLRLPAERCEILPTPTTVEHIARWVAEQTARHHAPGQRVRVQAFEGIDKGALAEAGP

SEQ ID NO: 20993 - protein, 132 aa, Halomonas aestuarii
  misc_feature (1)..(132): tr|A0A1J0VI07|A0A1J0VI07_9GAMM Uncharacterized protein OS=Halomonas aestuarii OX=1897729 GN=BOX17_12145 PE=4 S V=1
MYRLNVRDHFMIAHSFRGEVFGPAQRLHGATYVVDVTFQRRELDDNGLVVDIGLAGEALKRVLAEFNFQNLDEVEEFQGRNTTTEFMARVLFERLATAIQLGHLGEAALGLDSLCVTLHESHVAWASYEGAL

SEQ ID NO: 20994 - protein, 281 aa, Halomonas aestuarii
  misc_feature (1)..(281): tr|A0A1J0VBU3|A0A1J0VBU3_9GAMM 6-pyruvoyl tetrahydropte rin synthase-related protein OS=Halomonas aestuarii OX= 1897729 GN=BOX17_00090 PE=4 SV=1
MTLFVNRLTHLDVSLWCPTRGLVGASWRVDVELDGELGEDGMLFDFGEVKPWIKSSIDAGVDHTLLVPARARGVTLHDCREGLCLRSDTPYPLELRAPRQALSLLPWPEITPERLADYLSAELMRRPPPRVSDIRLTLSEEAIDGAAYTYSHGLKRHAGNCQRIAHGHRSRLHVWQGGQRMPALEERWADWLADRYLVDEADIVEDDEPDFRDLLTSRYRAEQGQFFLRLPRHRCAVLPTPTTVEHIAAWLAEAITRESGRATRVQAFEGIDKGAIAEARP

SEQ ID NO: 20995 - protein, 284 aa, Halomonas alkaliantarctica
  misc_feature (1)..(284): tr|A0A4R7Y4F7|A0A4R7Y4F7_9GAMM 6-pyruvoyl tetrahydropte rin synthase-like protein OS=Halomonas alkaliantarctica OX=232346 GN=BDK62_12320 PE=4 SV=1
MSLFVNQLTHIDVSIWCSERGLVGCSWQVDALLDGELGEDGMLFDFGEVKPWIKRTLDSGLDHTLLVPTQAPGVIVTECPEGVCIRTTTPYPMEVRGPKEAFSLLPWKTIELDTVAEYLSQQLTEQRPNNVHQVTLTLNDEAIEGAAYGYTHGLKRHLGNCQRIAHGHRSRLHILQQGVRQLKLEQQWAAWLDNRYLLEEADITSRDNDFLICAYRAAQGDFSITLPQSLCAILPGPTTVENIAAWLAKEVATQSGVTTRIQAFEGINKGAIAMSTPSATPSQL

SEQ ID NO: 20996 - protein, 132 aa, Halomonas alkaliantarctica
  misc_feature (1)..(132): tr|A0A4R7YMZ1|A0A4R7YMZ1_9GAMM 6-pyruvoyl-tetrahydropte rin synthase OS=Halomonas alkaliantarctica OX=232346 GN =BDK62_104157 PE=4 SV=1
MFRLCVRDHFMIAHSFNGEIFGPAQRTHGATYVVDVVFQRPELDEDGLVIDIGLASETVKLVLAGYNFCNLDEVPEFAGKNTTTEFMAKVIFDQLAKAIGEGKMGITAKGITHMEIKLHESHVAWASYEGAL

SEQ ID NO: 20997 - protein, 132 aa, Halomonas alkaliphila
  misc_feature (1)..(132): tr|A0A386WX03|A0A386WX03_9GAMM 6-carboxytetrahydropteri n synthase OS=Halomonas alkaliphila OX=272774 GN=CUU95_ 01315 PE=4 SV=1
MYRLCVRDHFMIAHSFNGEIFGPAQRTHGATYVVDVVFQRPELDQDGLVIDIGLASETVKEVLADYNYRNLDEVSEFSGKNTTTEFMAKVIFDQLAAAIKAGKMGTTAQGLTHMEIKLHESHVAWASYEGAL

SEQ ID NO: 20998 - protein, 279 aa, Halomonas alkaliphila
  misc_feature (1)..(279): tr|A0A386X4R2|A0A386X4R2_9GAMM 6-pyruvoyl tetrahydropte rin synthase-related protein OS=Halomonas alkaliphila O X=272774 GN=CUU95_16075 PE=4 SV=1
MALFVNRLSHIDVSLWCPTKGLVGCSWQVDAQLDGELGEDGMLFDFGEVKPWIKRTLDSGLDHTLLVPINAPGIKVTDCAEGICIRTATPYEMEVRGPAQAFTLLPWDTITVERVTHYLSSQLTKQEQRPANVHSVTLTLSDEPIDGAAYGYTHGLKRHLGNCQRIAHGHRSRLFIWQHQARQPALEQRWAAWLDNRYLLEKADIESQIDEKLTCRYQSAQGTFSITLPQERCCVLPKPTTVENIALWLAKSIAEHSGHKTLVQAFEGIDKGATAEASP

SEQ ID NO: 20999 - protein, 132 aa, Halomonas andesensis
  misc_feature (1)..(132): tr|A0A433KUR7|A0A433KUR7_9GAMM 6-carboxytetrahydropteri n synthase OS=Halomonas andesensis OX=447567 GN=ELY33_0 3280 PE=4 SV=1
MYRLCVRDHFMIAHSFNGEIFGPAQRTHGATYVVDVVFQRPELDQDGLVIDIGLASETVKEVLADYNYRNLDEVSEFTGKNTTTEFMAKVIFDQLAEAIKAGKMGATAQGLTHMEIKLHESHVAWASFEGAL

SEQ ID NO: 21000 - protein, 277 aa, Halomonas andesensis
  misc_feature (1)..(277): tr|A0A3S0W9U3|A0A3S0W9U3_9GAMM 6-pyruvoyl tetrahydropte rin synthase-related protein OS=Halomonas andesensis OX =447567 GN=ELY33_04055 PE=4 SV=1
MALFVNRLSHIDVSLWCPTKGLVGCSWQVDAQLDGELGEDGMLFDFGEVKPWIKRTLDSGLDHTLLVPINAPGIEVTDCNEGICIRTASPFEMEVRGPAQAFTLLPWGAITLECITNYLSAQLTEQRPANVHSVTLTLSDEPIVGAAYGYTHGLKRHLGNCQRIAHGHRSRLFIWQQQARQPALEEHWAAWLDNRYLLEKDDIESQIDGKLTCRYQSAQGAFSITLPQERCCVLPKPTTVENIALWLAKSIAEHSGHKTLVQAFEGIDKGATAEAMP

SEQ ID NO: 21001 - protein, 132 aa, Halomonas anticariensis
  misc_feature (1)..(132): tr|S2KL65|S2KL65_HALAF Uncharacterized protein OS=Halom onas anticariensis (strain DSM 16096 / FP35) OX=1121939 GN=L861_10065 PE=4 SV=1
MFSLTVRDHFMIAHSFNSETFGPAQRCHGATYVVDVTFKRPDLDRDDLVVDIAQANKALHEVLTEFNLHNLDEFEEFKGHNTTTEFMARVVFERLSKAVHKGRLGDTAKGLTAMCVTLHESHVAWASYEGAL

SEQ ID NO: 21002 - protein, 281 aa, Halomonas anticariensis
  misc_feature (1)..(281): tr|S2KVD0|S2KVD0_HALAF Uncharacterized protein OS=Halom onas anticariensis (strain DSM 16096 / FP35) OX=1121939 GN=L861_04340 PE=4 SV=1
MTLFVNALTQLDVSLWCPKRGLIGASWHIDAELDGELGEDGMLFDFGEVKPWIKSRLDAGADHTLLIPTRAPGITVHECNEGLCIRAQSPYPMEVRGPRQAFTLLPWSEITTERLGTHFSHELMRRPPARVSDIRLTLREENIDGEAYSYSHGLKRHTGNCQRIAHGHRSRLHIWKNGQRDAQLEAQWAKWLADRYLVDEEDLVADANDEVYGSLTTRYQAPQGRFFLRLPSERFAVLPSPTTIEHIATWLAAKIAHDIGHRIRVQAFEGINKGAIAEARP

SEQ ID NO: 21003 - protein, 277 aa, Halomonas aquamarina
  misc_feature (1)..(277): tr|A0A1H8IMX7|A0A1H8IMX7_9GAMM 6-pyruvoyl tetrahydropte rin synthase OS=Halomonas aquamarina OX=77097 GN=SAMN04 490369_102033 PE=4 SV=1
MALFVNHLTHIDVSLWCPTKGLVGCSWQVDAQLEGELGEDGMLFDFGEVKPWIKRTLDSGLDHTLLVPTQAPGVEVSECDEGLCIRTTTPYVMEVRGPTEAFTLLPWASITLERVTQYLSAQLTEQRPANVERVTLTLSDELINGAAYGYSHGLKRHSGNCQRIAHGHRSRLHIFQEQQRQPQLEQQWGAWLDNRYLLEEADIAEHSESQLTCRYEAAQGSFSITLPSERCSVLPKPTTVENIALWLADQIAKQTGTATHVYAFEGIDKGATAQASP

SEQ ID NO: 21004 - protein, 277 aa, Halomonas arcis
  misc_feature (1)..(277): tr|A0A1H0FA56|A0A1H0FA56_9GAMM 6-pyruvoyl tetrahydropte rin synthase OS=Halomonas arcis OX=416873 GN=SAMN044879 51_109173 PE=4 SV=1
MGLFVNQLTHIDASLWCPKTGLKGVSWQVDALLEGELGEDGMLFDFGDVKPWIKRTLDNGLDHTLLLPVDAPGVDVSPCEEGLCVRTTSPYPMEVRGPKEAFTLLTSTTVERASVAKLLSDTLTEQRPANVSRVQLTLSDEAIEGAAYGYSHGLKRHTGNCQRIAHGHRSRLYIWQRDSRQHVLEQQWATWLDNRYLVEAGDITAHDQQTLTCRYQAAQGTFTITLPSERCAVLPTPTTVENIARWLAERIATQSHETTRIQAFEGFNKGAIAQVNV

SEQ ID NO: 21005 - protein, 132 aa, Halomonas arcis
  misc_feature (1)..(132): tr|A0A1H0HBL2|A0A1H0HBL2_9GAMM 6-pyruvoyl-tetrahydropte rin synthase OS=Halomonas arcis OX=416873 GN=SAMN044879 51_1158 PE=4 SV=1
MYRLCVRDHFMIAHSFKGEIFGPAQRTHGATYVVDVIFQRPELDGDGLVIDIGLASETVKAVLSGYNYQNLDEVSELHGKNTTTEFMAKVIFDQLAAAINAGDMGTTARGLTHMEVKLHESHVAWASFEGAL

SEQ ID NO: 21006 - protein, 416 aa, Halomonas axialensis
  misc_feature (1)..(416): tr|A0A455VE37|A0A455VE37_9GAMM Uncharacterized protein OS=Halomonas axialensis OX=115555 GN=HAALTHF_35410n PE= 4 SV=2
MYLCDTDFNGTDGVNGGRFNTAQALAEHIKALWPQEANNAVPYVVFTGGEPLLQLDTELIATLHSEGFEVAVETNGTVPAPAGIDWLCVSPKGSNPLAITQGDELKLVFPQADAPPEQFSHLAFSHFFFTADGSQCRRSKEYCHRRRGDRSGHHRVLHGQPTVAAVTANAQNRRIRVMALFVNHLTHIDVSLWCPTKGLVGCSWQVDAQLEGELGEDGMLFDFGEVKPWIKRTLDSGLDHTLLVPTQAPGVEVRECDEGLCIRTTTPYVMEVRGPTEAFTLLPWASITLERVTQHLSAQLTEQRPANVERVTLTLSDELINGAAYGYSHGLKRHSGNCQRIAHGHRSRLHIFQEQQRQPQLEQQWGAWLDNRYLLEEADIAEHSESQLTCRYEAAQGSFSITCHLSAVACCQSPRQ

SEQ ID NO: 21007 - protein, 132 aa, Halomonas axialensis
  misc_feature (1)..(132): tr|A0A455VDV7|A0A455VDV7_9GAMM Uncharacterized protein OS=Halomonas axialensis OX=115555 GN=ptpS PE=4 SV=1
MYRLCVRDHFMIAHSFKGEIFGPAQRTHGATYVVDIIFQRPALDEDGLVIDIGLASETVKEVLAGYNYRNLDEVSEFTGQNTTTEFMAKVIFDQLAEAIRGGRMGETAKGLTRMEIKLHESHVAWASYEGEL

SEQ ID NO: 21008 - protein, 296 aa, Halomonas beimenensis
  misc_feature (1)..(296): tr|A0A291P7Z8|A0A291P7Z8_9GAMM 6-carboxytetrahydropteri n synthase OS=Halomonas beimenensis OX=475662 GN=BEI_19 95 PE=4 SV=1
MTLFVHRLTHLDISLWCPERGLVGASWLVDAELDGELGEDGMLFDFGEVKPWIKSRLDRGADHTLLVPTEAAGIAVRDCPEGLCVRAETPYPFEVRGPRQAFTLLPWDAVTPSRLAERLATELMRQPPPRVEAIRLALREEAIAGAHYTYSHGLRRHAGNCQRIAHGHRSRLHVWQGGERCPALEADWASRLADRYLVDEADVVEGQDASFLGRLTTRYRAEQGRFALSLPRERCVVMPCPTTVEHIAAWLAGEIAGETGRATRVQAFEGVDKGALAEARPEAGAPERRPETHATP

SEQ ID NO: 21009 - protein, 132 aa, Halomonas boliviensis
  misc_feature (1)..(132): tr|A0A265DX26|A0A265DX26_9GAMM 6-carboxytetrahydropteri n synthase OS=Halomonas boliviensis LC1 OX=1072583 GN=C E457_12875 PE=4 SV=1
MFRLCVRDHFMIAHSFNGEIFGPAQRTHGATYVVDVVFQRPELDEDGLVIDIGLASETVKSVLANYNFSNLDEVPEFAGKNTTTEFMAKVIFDQLAKAIGEGKMGITAKGISHLEVKLHESHVAWASYEGAL

SEQ ID NO: 21010 - protein, 285 aa, Halomonas boliviensis
  misc_feature (1)..(285): tr|A0A265DVU3|A0A265DVU3_9GAMM 6-pyruvoyl tetrahydropte rin synthase-related protein OS=Halomonas boliviensis L C1 OX=1072583 GN=CE457_15480 PE=4 SV=1
MSLFVQQLTHIDVSLWCPQRGLVGCSWQVDAVLDGELGEDGMLFDFGEVKPWIKRTLDSGLDHTLLVPTQAPGVTVTECPEGICIRTTTPYPMEVRGPKEAFSLLPWQAIDSDTVAEHLSQQLTEQRPENVHQVTLTLSDEAIDGAAYGYTHGLKRHLGNCQRIAHGHRSRLHIFQQGVRQPKLEQHWAKWLENRYLLEEADITKRDNDFLTCGYRAAQGDFSITLPQSLCAVLPGPTTVENIAAWLAKEVTTQSGVATRIQAFEGINKGAVAMFSPSAIPSARL

SEQ ID NO: 21011 - protein, 132 aa, Halomonas campaniensis; identical to SEQ ID NO: 20997
  misc_feature (1)..(132): tr|A0A060B803|A0A060B803_9GAMM 6-pyruvoyl tetrahydropte rin synthase OS=Halomonas campaniensis OX=213554 GN=FF3 2_10775 PE=4 SV=1

SEQ ID NO: 21012 - protein, 284 aa, Halomonas campaniensis
  misc_feature (1)..(284): tr|A0A246S0V2|A0A246S0V2_9GAMM 6-pyruvoyl tetrahydropte rin synthase-related protein OS=Halomonas campaniensis OX=213554 GN=JI62_09970 PE=4 SV=1
MSLFVQQLTHIDVSLWCSQRGLVGCSWQVDAVLDGELGEDGMLFDFGEVKPWIKRTLDGGLDHTLLVPTQAPGITVTECPEGLCVRTTTPYPMEVRGPKEAFSLLPWQAIEPDTVAEHLSQQLTEQRPKNVHQVTLTLSDEAIEGAAYGYTHGLKRHLGNCQRIAHGHRSRLHIFQQGVRQPKLEKQWAAWLDNRYLLEEADITSRDNDFLTCGYRAAQGDFSITLPQSLCAVLPGPTTVENIAAWLAKEVATQSGVATRIQAFEGINKGAIAMFTPSATPSRL

SEQ ID NO: 21013 - protein, 281 aa, Halomonas caseinilytica
  misc_feature (1)..(281): tr|A0A1M6NT56|A0A1M6NT56_9GAMM 6-pyruvoyl tetrahydropte rin synthase OS=Halomonas caseinilytica OX=438744 GN=SA MN05192556_101507 PE=4 SV=1
MTLFVNRLTHLDASLWCPEHGLIGASWRVDAELDGELGADGMLFDFGEVKPWIKSRLDRGVDHTLLVPTEAPGVNVQECYEGLRVRTETPYALEVRGPRQAFSLLPWPAVTPQRLAEHLDQGLMRQPPERVEAIRLTLSDEPIEGAGYRYSHGLKRHAGNCQRIAHGHRSRLHVWQNGQRCPALEADWAARLDARYLVDEADVDEGMEASWLGRLVTSYRAAQGYFTMSLPRERCVVMPTSTTVEHIAAWLAGEITRETGQATRVQAFEGIDKGAFAEAKP

SEQ ID NO: 21014 - protein, 281 aa, Halomonas chromatireducens
  misc_feature (1)..(281): tr|A0A0X8HDI9|A0A0X8HDI9_9GAMM 6-pyruvoyl tetrahydropte rin synthase OS=Halomonas chromatireducens OX=507626 GN =LOKO_01590 PE=4 SV=1
MTLFVNRLSHLDVSLWSPQHGLIGASWHVDAELDGELGEDGMLFDFGEVKPWIKSRLDGGVDHTLLIPTKAPGLEIFECSEGLCVRATQPYPMEVRAPRQAFTLLPWPAITTERLAELLAGEVMKRPPPRVTDIRLRLRDEVIDGAAYTYSHGLKRHLGNCQRIAHGHRSRLHIWQRGVRMPGLEAEWAERLGDRYLVDAADIATGPDSVVRGMMTSRYRAEQGRFMIRLPAERCLTLPTPTTVEHIAGWLARRITEETGRATRVQAFEGVDKGAIAEAQP

SEQ ID NO: 21015 - protein, 286 aa, Halomonas cupida
  misc_feature (1)..(286): tr|A0A1M7AT90|A0A1M7AT90_9GAMM 6-pyruvoyl tetrahydropte rin synthase OS=Halomonas cupida OX=44933 GN=SAMN056609 71_00636 PE=4 SV=1
MPLFVNQLTHLDVSLWCPERGLVGASWHLDAELFGELGEHGMLFDFGEVKPWIKSRIDGGADHTLLIPAKAPGIDISDCPEGMRIRTRTPYAMEVRGPRQAFTLLPCERIDTDNLAEHLSQSLGRRFPEQVERIVLRLREEIIDGASYSYSHGLKHHGGNCQRIAHGHRSRLEIHQHGERQPHLESHYASWLDNTYLVSAEDILADQARQQTLTTSYRSAQGQFVLTLPRERCRVLATATTVENIAIWLTHEITRATGVATQLYAYEGIDKGASHSATPEELAGDA

SEQ ID NO: 21016 - protein, 132 aa, Halomonas daqiaonensis
  misc_feature (1)..(132): tr|A0A1H7TE05|A0A1H7TE05_9GAMM 6-pyruvoyl-tetrahydropte rin synthase OS=Halomonas daqiaonensis OX=650850 GN=SAM N04488129_1177 PE=4 SV=1
MYRLNVRDHFMIAHSFRGEIFGPAQRMHGATYVVDVTFQRRELDDDGLVVDIGLAGEALKKVLAEFNFQNLDGVEEFQGHNTTTEFMARVVFERLATAIQLCHLGEGAMGLDSLCVTLHESHVAWASYEGEL

SEQ ID NO: 21017 - protein, 285 aa, Halomonas daqingensis
  misc_feature (1)..(285): tr|A0A1H5RNT8|A0A1H5RNT8_9GAMM 6-pyruvoyl tetrahydropte rin synthase OS=Halomonas daqingensis OX=419596 GN=SAMN 04487953_101104 PE=4 SV=1
MTLFVNRLTQLDSSLWCPQRGLIGVSWFVDAELDGELGEDGMLFDFGHVKPWIKSRLDASADHTLLVPTRAPGVEVSECSEGICVRASLPYAMEVRAPRQAFTLLPWQQVDPERLADHLARELMKRPPPRVSAIRLRLRPEAIEGAAYTYSHGLRHHSGNCQRIAHGHRSRLHIWQRGQRCPALEAHWAERLNDCYLVDKADIVAHPEPELRRSLTSRYRAEQGRFQLRLPLERCFVLDVPTTIEHIAVWLARQIAAETGITTRVQAFEGIDKGAIAEAKPEAKP

SEQ ID NO: 21018 - protein, 285 aa, Halomonas desiderata
  misc_feature (1)..(285): tr|A0A243T4Q8|A0A243T4Q8_9GAMM 6-pyruvoyl tetrahydropte rin synthase-related protein OS=Halomonas desiderata SP 1 OX=1191209 GN=BZY95_09260 PE=4 SV=1
MTLFVNRLTQLDSSLWCPQRGLIGVSWFVDAELDGELGEDGMLFDFGHVKPWIKSRLDASADHTLLVPTRAPGVEVSECSEGICVRASLPYAMEVRAPRQAFTLLPWQHVDPERLADHLARELMKRPPPRVSAIRLRLRPEAIEGAAYTYSHGLRHHSGNCQRIAHGHRSRLHIWQRGQRCPALEAHWAERLNDCYLVDKADIVAHPEPELRRSLTSRYRAEQGRFQLRLPLERCFVLDVPTTIEHIAVWLARQIAAETGTTTRVQAFEGIDKGAIAEAKPEAKP

SEQ ID NO: 21019 - protein, 281 aa, Halomonas elongata
  misc_feature (1)..(281): tr|E1VC56|E1VC56_HALED 6-carboxy-5,6,7,8-tetrahydropter in synthase OS=Halomonas elongata (strain ATCC 33173 / DSM 2581 / NBRC 15536 / NCIMB 2198 / 1H9) OX=768066 GN= queD PE=4 SV=1
MTLFVNRLTHLDASLWCPERGLIGASWRVDAELDGELGDDGMLFDFGEVKPWIKSRLDRGVDHTLLVPTEAPGVSVQECYEGLRVRTETPYALEVRGPRQAFSLLPWPEITAQRLGEYLGQGLMRQPPERVEAIRLTLGDEPIEGAGYSYSHGLKRHAGNCQRIAHGHRSRLHIWQNGQRCPSLEADWASRLDDRYLVDEADVDDGLEASFLGRLVTSYRAEQGHFVLSLPRERCVVMPTSTTVEHIAAWLAKEISRETGRATRVQAFEGIDKGAIAEARP

SEQ ID NO: 21020 - protein, 281 aa, Halomonas elongata
  misc_feature (1)..(281): tr|A0A1B8P2X6|A0A1B8P2X6_HALEL 6-pyruvoyl tetrahydropte rin synthase OS=Halomonas elongata OX=2746 GN=A8U91_009 21 PE=4 SV=1
MTLFVNRLTHLDASLWCPERGLIGASWRVDAELDGELGDDGMLFDFGEVKPWIKSRLDRGVDHTLLVPTEAPGVSVQECYEGLRVRTETPYALEVRGPRQAFSLLPWPEITAQRLGEYLGQGLMRQPPERVEAIRLTLGDEHIEGAGYSYSHGLKRHAGNCQRIAHGHRSRLHIWQNGQRCPSLEADWASRLDDRYLVDEADVDDGLEASFLGRLVTSYRAEQGHFVLSLPRERCVVMPTSTTVEHIAAWLAKEISRETGRATRVQAFEGIDKGAFAEARP

SEQ ID NO: 21021 - protein, 281 aa, Halomonas endophytica
  misc_feature (1)..(281): tr|A0A2N7TXN0|A0A2N7TXN0_9GAMM 6-pyruvoyl tetrahydropte rin synthase-related protein OS=Halomonas endophytica O X=2033802 GN=C1H69_19320 PE=4 SV=1
MTLFVNRLSHLDVSLWCPQRGLIGASWHVDAELDGELGEDGMLFDFGEVKPWIKSRLDGGADHTLLIPARAPDLEIVECGEGLCVRATRPYAMEIRAPRQAFTLMPWSAITTERLADQMAKELMKRPPPRVSAIRLRLREEAIEGASYTYSHGLKRHVGNCQRIAHGHRSRLHIWQRGVRMPGLEAEWAERLDDRYLIDQQDIATGDDAVAKGMMTTRYRADQGRFLLRLPVDRCIVLPTPTTVEHIASWLARRITEETGRTTRVQAFEGVDKGAIAEAQS

SEQ ID NO: 21022 - protein, 281 aa, Halomonas eurihalina
  misc_feature (1)..(281): tr|A0A5D9DBX8|A0A5D9DBX8_HALER 6-pyruvoyl tetrahydropte rin synthase-related protein OS=Halomonas eurihalina OX =42566 GN=FZZ93_04475 PE=4 SV=1
MTLFVNRLTHLDASLWCPERGLIGASWRVDAELDGEIGDDGMLFDFGEVKPWIKSRLDRGVDHTLLVPTEAPGVSVQECYEGLRVRTETPYALEVRGPRQAFSLLPWREITAQRLGKYLGQSLMRQPPERVEAIRLTLGEEPIEGAGYCYSHGLKRHAGNCQRIAHGHRSRLHIWQNGQRCPSLEADWASRLDDRYLVDEADVDDGLEASFLGRLVTSYRAEQGHFVLSLPRERCVVMPTSTTVEHIAAWLAGEITRETGRATRVQAFEGIDKGAIAEARP

SEQ ID NO: 21023 - protein, 132 aa, Halomonas gudaonensis
  misc_feature (1)..(132): tr|A0A1G8ZLA8|A0A1G8ZLA8_9GAMM 6-pyruvoyl-tetrahydropte rin synthase OS=Halomonas gudaonensis OX=376427 GN=SAMN 04487954_11240 PE=4 SV=1
MYSLTVRDHFMIAHSFRGEVFGPAQRTHGATYVVDATFQRRELDADDLVVDIGLAGAALKRVLGAFDLRNLDELDAFHGRNTTTEFLARRVFDDLAKTIADGELGPGAEGLEALRVTLHESHIAWASYEGAL

SEQ ID NO: 21024 - protein, 136 aa, Halomonas halmophila
  misc_feature (1)..(136): tr|A0A4Y4F333|A0A4Y4F333_9GAMM Uncharacterized protein OS=Halomonas halmophila OX=252 GN=ptpS PE=4 SV=1
MFSLTVRDHMMIAHSFNSEVFGPAQKLHGATYVVDVSFYRPALDDNDLVVDIGLASETLGDVLKAFTLTNLDEHAAFDGRNTTTEFMAQAVFQRMAEAIRAGRLGEGARALSAMKVTLHESHIAWASYEASLEEAA

SEQ ID NO: 21025 - protein, 284 aa, Halomonas halmophila
  misc_feature (1)..(284): tr|A0A4Y4F268|A0A4Y4F268_9GAMM Uncharacterized protein OS=Halomonas halmophila OX=252 GN=queD PE=4 SV=1
MTLFVNRLTQLDTSMWCPTRGLIGTSWQVDAELDGELGDDGMLFDFGRVKPWIKSSLDQSLDHTLLVPTEAPGVNVQSCPEGLRIRTETPYVMEVRGPRQAFSLLPWPTISLARLAEHLEQMLMRQPPTNVEGVRLTLSDEAIEGAHYTYSHGLRRHDGNCQRITHGHRSRLHIWQNGQRVPSLEADWAQRLADCYLVDEADVAEGLEASFMGRLIASYRADQGRFMINLPRERCVVMPHATTVENIAAWLASQIARESGQRTRVQAFEGIDKGAIAEAGGNEL

SEQ ID NO: 21026 - protein, 281 aa, Halomonas halophila
  misc_feature (1)..(281): tr|A0A510Z9U4|A0A510Z9U4_9GAMM Uncharacterized protein OS=Halomonas halophila OX=29573 GN=HHA04nite_04170 PE=4 SV=1
MTLFVNRLTHLDASLWCPERGLIGASWRVDAELDGELGEDGMLFDFGEVKPWIKSRIDQGPDHTLLVPTEAPGISVHECAEGLCVRAESPYPFEVRGPRQAFALLPWPAITAERLAEHLSASLSRQPPARVEAIRLTLTDEAIDGAAYTYSHGLKRHAGNCQRIAHGHRSRLHVWQDGERCPALETEWAERLADRYLVDEADVVEGLDAAFTGRLTTRYTAEQGRFALTLPRERCIPMPTPTTVEHIAAWLAGEIARETGRATRVQAFEGIDKGALAEAEA

SEQ ID NO: 21027 - protein, 132 aa, Halomonas heilongjiangensis
  misc_feature (1)..(132): tr|A0A2N7TGM4|A0A2N7TGM4_9GAMM Uncharacterized protein OS=Halomonas heilongjiangensis OX=1387883 GN=C1H66_1983 0 PE=4 SV=1
MYRLTVRDHFMIAHSLRGEIFGPAQRPHGATYVVDVCFQRRELDADDLVVDIGLAGETLSAVLAEFNYRNLDELDEFHGRNTTTEFMARVIFERLATAIQLGRLGDSAGGLHAMRVTLHESHVAWASYEGEL

SEQ ID NO: 21028 - protein, 279 aa, Halomonas heilongjiangensis
  misc_feature (1)..(279): tr|A0A2N7TIF7|A0A2N7TIF7_9GAMM 6-pyruvoyl tetrahydropte rin synthase-related protein OS=Halomonas heilongjiange nsis OX=1387883 GN=C1H66_17250 PE=4 SV=1
MTLFVNRLTQLDVSLWCPRRGLTAASWHVDAELDGELGGDGMLFDFGEVKPWIKSRLDAGPDHTLLVPTRAPGVEVQECLEGLCVRTSLPYPMEIRAPRQALTLLPWSEITTERLGDRLADDLMRRPPDRVDAIRLRLHEEAIDGPAYCYSHGLKRHAGNCQRIAHGHRSRLHVWQHGNRAPELERQWADWLADRYLVSEEDIVDGGESEYRGQLTTRYRSDQGSFLLRLPRERCAVLPTPTTVEQIAAWLATEIARESGHPTRVQAFEGIDKGAIAQA

SEQ ID NO: 21029 - protein, 287 aa, Halomonas huangheensis
  misc_feature (1)..(287): tr|W1NB10|W1NB10_9GAMM Uncharacterized protein OS=Halom onas huangheensis OX=1178482 GN=BJB45_15655 PE=4 SV=1
MSLFVNQLTHLDVSLWCPDKGLVGASWHLDAELFGELGEDGMLFDFGEVKPWIKSRIDAGADHTLLVPGKAPGVDISDCPEGMRIRMKTPYPMEVRGPRQAFTILPCTRIDTDNLAEHLTQSLGRRFPERVERIVLRLREEVIDGASYRYSHGLKRHAGNCQRIAHGHRSRLTIFQNGERQPHLESHYAAWLDNSYLVSAEDIVAEGGARDATLSTAYRSAQGQFHLTLPRERCRVLASATTVENIAIWLTREITRATGVATQLHAFEGIDKGACYEIAPEQLAREA

SEQ ID NO: 21030 - protein, 277 aa, Halomonas hydrothermalis
  misc_feature (1)..(277): tr|A0A291JWZ5|A0A291JWZ5_9GAMM 6-pyruvoyl tetrahydropte rin synthase-related protein OS=Halomonas hydrothermali s OX=115561 GN=CLM76_14500 PE=4 SV=1
MALFVHHLTHIDVSLWCPERGLTGCSWQVDAHLDGELGEDGMLFDFGEVKPWIKRTLDNGLDHTLLVPTKAPGVEVSEYPEGLCIRTTTPYPMEVRGPAQAFTLLPWEHISVARVTQLLSEELTRARPRNVTQVTLNLQEERIEGASYGYSHGLKRHLGNCQRIAHGHRSRLHIYQHQQRQPALEAQWSEWLDNRYLLEQADVAEQTNTTLTCRYTAEQGAFSITLPTHRCSVLPAPTTVENIARWLASSIAQQTQQETHVEAFEGINKGATAQAAP

SEQ ID NO: 21031 - protein, 132 aa, Halomonas hydrothermalis
  misc_feature (1)..(132): tr|A0A291JVA5|A0A291JVA5_9GAMM Uncharacterized protein OS=Halomonas hydrothermalis OX=115561 GN=CLM76_11080 PE =4 SV=1
MYRLCVRDHFMIAHSFKGEIFGPAQRTHGATYVVDVIFQRSALDEDGLVIDIGLASETVKEVLAGYNYRNLDEVSEFTGQNTTTEFMAKVIFDQLAEAIRGGRMGETAKGLTRMEIKLHESHVAWASYEGEL

SEQ ID NO: 21032 - protein, 132 aa, Halomonas ilicicola
  misc_feature (1)..(132): tr|A0A1M4XZT2|A0A1M4XZT2_9GAMM 6-pyruvoyl-tetrahydropte rin synthase OS=Halomonas ilicicola DSM 19980 OX=112194 2 GN=SAMN02745148_01533 PE=4 SV=1
MFSLTVRDHFMIAHSFKGDVFGPAQRQHGATYVVDVTFRRPCLDDDDLVVDIGLASSALSETLAEFNFRNLDEIPEFQGRNTTTEFMAKTVFDRLARAIDEGRLGQAASGLSHLKVTLHESHVAWADFEGAL

SEQ ID NO: 21033 - protein, 280 aa, Halomonas ilicicola
  misc_feature (1)..(280): tr|A0A1M4Z1N7|A0A1M4Z1N7_9GAMM 6-pyruvoyl-tetrahydropte rin synthase OS=Halomonas ilicicola DSM 19980 OX=112194 2 GN=SAMN02745148_01827 PE=4 SV=1
MTLFVNALTQLDVSLWCPRRGLIGASWQVDAQLDGEVGEDGMLFGFDEAKSWITSRLDTSPDHTLLVPTQAPKLTVQECSEGLCMRTTLPYDFEIRAPRQAFTLLPWSEIGIERLARHYSEALTRRPPPRVEAIRLKLREEQIDGAAYTYSHGLKRHPGNCQRIAHGHRSRLHIWCDGERSPLLETQWAQRLDDRYLVAAEDILDGDATSKEALTIGYRSTQGRFQLRLPRARCDVLPIPTSVEHIAAWLAEQVARDRGQGVRVQVFEGIGKGAIAEASP

SEQ ID NO: 21034 - protein, 132 aa, Halomonas korlensis
  misc_feature (1)..(132): tr|A0A1I7FZV0|A0A1I7FZV0_9GAMM 6-pyruvoyl-tetrahydropte rin synthase OS=Halomonas korlensis OX=463301 GN=SAMN04 487955_102135 PE=4 SV=1
MYRLTVRDHFMIAHSFVGEIFGPAQRTHGATYVVDVTFQRRELDEDGLVVDIGLASDTVKSVLGEFNFQNLDELEEFQGRNTTTECMARVIFERLATAIQLGRLGEGANGLEALCVTLHESHIAWASYEGAL

SEQ ID NO: 21035 - protein, 281 aa, Halomonas korlensis
  misc_feature (1)..(281): tr|A0A1I7F3G8|A0A1I7F3G8_9GAMM 6-pyruvoyl-tetrahydropte rin synthase OS=Halomonas korlensis OX=463301 GN=SAMN04 487955_101211 PE=4 SV=1
MTLFVNRLTQLDVSLWCPRRGLVGASWHVDVELDGELGEDGMLFDFGEVKPWIKMRLDAGADHTLLVPTRAAGVEVHDCREGLCVRASLPYAFEVRAPRQALTLLPWQEITTERLADHMAAELVRRPPPRVSDIRLHLREEAIEGPAYTYSHGLKRHAGNCQRIAHGHRSRLHIWQQGQRAPALEQQWSDWLTDRYLVDRQDIVDCGESGHRGQVASRYLSPQGSFFLSLPRERCAVLPTPTTVEQIAAWLAETITLETGTATRVQAFEGIDKGAIAAARP

SEQ ID NO: 21036 - protein, 277 aa, Halomonas meridiana
  misc_feature (1)..(277): tr|A0A0D7V3S3|A0A0D7V3S3_9GAMM 6-pyruvoyl tetrahydropte rin synthase-related protein OS=Halomonas meridiana OX= 29570 GN=VE30_02655 PE=4 SV=1
MALFVNHLTHIDVSLWCPTKGLVGCSWQVDAQLEGELGEDGMLFDFGEVKPWIKRTLDSGLDHTLLVPTQAPGVEVSECDEGLCIRTTTPYVMEVRGPTEAFTLLPWASITLERVTQHLSAQLTEQRPANVERVTLTLSDELINGAAYGYSHGLKRHSGNCQRIAHGHRSRLHIFQEQQRQPQLEQQWGAWLDNRYLLEEADIAEHSESQLTCRYEAAQGSFSITLPSERCSVLPKPTTVENIALWLADQIAKQTGTATHVYAFEGIDKGATAQASP

SEQ ID NO: 21037 - protein, 277 aa, Halomonas meridiana
  misc_feature (1)..(277): tr|A0A1N6D104|A0A1N6D104_9GAMM 6-pyruvoyl tetrahydropte rin synthase OS=Halomonas meridiana OX=29570 GN=SAMN058 78438_1537 PE=4 SV=1
MALFVNHLTHIDVSLWCPTKGLVGCSWQVDAQLEGELGEDGMLFDFGEVKPWIKRTLDSGLDHTLLVPTQAPGVEVSECDEGLCIRTATPYVMEVRGPTEAFTLLPWASITLERVTQYLSAQLTEQRPANVERVTLTLSDELINGAAYGYSHGLKRHSGNCQRIAHGHRSRLHIFQEQQRQPQLEQQWGAWLDNRYLLEEADIAEHSESQLTCRYEAAQGSFSITLPSERCSVLPKPTTVENIALWLADQIAKQTGTATHVYAFEGIDKGATAQASP

SEQ ID NO: 21038 - protein, 281 aa, Halomonas muralis
  misc_feature (1)..(281): tr|A0A1G9FRK5|A0A1G9FRK5_9GAMM 6-pyruvoyl tetrahydropte rin synthase OS=Halomonas muralis OX=119000 GN=SAMN0566 1010_00491 PE=4 SV=1
MTLFVNGLTQLDASLWCPSRGLIGASWQVDAQLDGELGEDGILFDFGEVKPWIKSRIDSEADHTLLVPTKAPGVTVHECSEGLSIRTTLPYAMEVRGPRQAFTLLPWGEVTAERLARHYGKALTRRPPSRVNEIRLNLRDESIAEAAYTYSHGLKHHAGNCQRIAHGHRSRLYIWCQGERAPQLEMQWAQRLTDRYLVDVADIVEGGDADMHGQLTTRYRSSQGLFCLRLPRECCEILPRSTTVEHIAAWLAEQIARDCGLPTRVQAFEGIGKGAIAEVSL

SEQ ID NO: 21039 - protein, 132 aa, Halomonas muralis
  misc_feature (1)..(132): tr|A0A1G9EM90|A0A1G9EM90_9GAMM 6-pyruvoyl-tetrahydropte rin synthase OS=Halomonas muralis OX=119000 GN=SAMN0566 1010_00028 PE=4 SV=1
MFSLTVRDHFMIAHSFKGEIFGPAQRQHGATYVVDVTFKRPELDANDLIVDIGLASKALSDVLADLNFRNLDDAPEFHGRNTTTEFMASVVFERLAAAVRAGGLGEQARGLTALCVTLHESHVAWASYEGAL

SEQ ID NO: 21040 - protein, 132 aa, Halomonas nigrificans
  misc_feature (1)..(132): tr|A0A2A4HL79|A0A2A4HL79_9GAMM Uncharacterized protein OS=Halomonas nigrificans OX=2042704 GN=CPA45_13985 PE=4 SV=1
MYRLCVRDHFMIAHSFKGEIFGPAQRTHGATYVVDVVFQRPELDQDGLVIDIGLASETVKEVLAGYNFQNLDEVSEFKGRNTTTEFMAKVIFDQLAAAIKAGRMGVTAQGLTHMEIKLHESHVAWASYEGAL

SEQ ID NO: 21041 - protein, 277 aa, Halomonas nigrificans
  misc_feature (1)..(277): tr|A0A2A4HLD8|A0A2A4HLD8_9GAMM 6-pyruvoyl tetrahydropte rin synthase-related protein OS=Halomonas nigrificans O X=2042704 GN=CPA45_14640 PE=4 SV=1
MSLFVNHLTHIDVSLWSPEKGLMGCSWQVDALLDGELGEDGMLFDFGEVKPWIKRTLDNGLDHTLLVPISAPGITVSDCDEGLCIRTNTPYPMEVRGPAEAFTLLPWETITIEDVADLLSDTLTKQRPANVHYVKLNLSDEAIEGAAYGYSHGLKRHLGNCQRIAHGHRSRLYIWQSGERQPSLEQQWADWLDNRYLLEEADIAHQDEETLTCHYGAAQGRFTITLPLERCCVLPKPTTVENIAAWLAAQVAEQCEKSTSVQAFEGINKGAMADALT

SEQ ID NO: 21042 - protein, 281 aa, Halomonas nitroreducens
  misc_feature (1)..(281): tr|A0A3S0R3R2|A0A3S0R3R2_9GAMM 6-pyruvoyl tetrahydropte rin synthase-related protein OS=Halomonas nitroreducens OX=447425 GN=EKG36_02535 PE=4 SV=1
MTLFVNRLTHLDVSLWCPEHGLMGASWRVDAELDGELGEDGMLFDFGEVKPWIKSRLDRGADHTLLVPTEAPGVSVRDCPEGLCVRTETPYPLEVRGPRQAFTLLPWHSVTPDRLADRLATELMRQPPERVGEIRLTLLEEAIEGASYTYSHGLRRHAGNCQRIAHGHRSRLHVWQDGERRPDLEAEWAQHLAHRYLVDEADIVEGREASFLGRLSSRYHADQGRFMLTLPRERCVVLPTPTTVEHIAAWLAGEIARDTGRPTRVQAFEGIDKGALAEARP

SEQ ID NO: 21043 - protein, 200 aa, Halomonas olivaria
  misc_feature (1)..(200): tr|A0A3T1DQF6|A0A3T1DQF6_9GAMM Uncharacterized protein OS=Halomonas olivaria OX=390919 GN=HORIV_32690 PE=4 SV= 1
MCVPPPLPDGSARPKEAFSLLPWQAIEPDTVAEHLSQQLTEQRPKNVHQVTLTLSDEAIEGAAYGYTHGLKRHLGNCQRIAHGHRSRLHIFQQGVRQPKLEQQWAAWLDNRYLLEEADIISRDNDFLTCGYRAAQGDFSITLPQSLCAVLPGPTTVENIAAWLAKEVATQNGVTTRIQAFEGINKGAIAMFTPSATPSRL

SEQ ID NO: 21044 - protein, 101 aa, Halomonas olivaria
  misc_feature (1)..(101): tr|A0A3T1DQD3|A0A3T1DQD3_9GAMM Uncharacterized protein OS=Halomonas olivaria OX=390919 GN=HORIV_32700 PE=4 SV= 1
MSLFVQQLTHIDVSLWCSQRGLVGCSWQVDAVLDGELGEDGMLFDFGEVKPWIKRTLDGGLDHTLLVPTQAPGITATECPEGLCVRTTTPTRWKCAAQRGL

SEQ ID NO: 21045 - protein, 281 aa, Halomonas pacifica
  misc_feature (1)..(281): tr|A0A510X3X4|A0A510X3X4_9GAMM Uncharacterized protein OS=Halomonas pacifica OX=77098 GN=queD PE=4 SV=1
MSLFVDNLTHLDASLWCPRRGLIGISWAVDAELDGELGEDGMLFDFGEVKPWIKSRLDDGADHTLLVPTRAPGVTIQECREGLRLTTRAPYPLELRAPRQAFTLLPWAEVRREALAEHLAGELMRRPPPRVSAIRLTLRDEAIDGAAYTYSHGLRQHAGNCQRIAHGHRSRLHIWRNGHRAPDLEARWAAHLADSYLVDGDDLVSDPDDDPRQLSCAYRAPQGEFRLRLPAERCRVLPSQTTVERIALWLAETIAAAEGGRIRVQAFEGIGKGAFAEAGTP

SEQ ID NO: 21046 - protein, 133 aa, Halomonas pantelleriensis
  misc_feature (1)..(133): tr|A0A1G9G7Y7|A0A1G9G7Y7_9GAMM 6-pyruvoyl-tetrahydropte rin synthase OS=Halomonas pantelleriensis OX=48727 GN=S AMN05192555_10253 PE=4 SV=1
MYRLTVRDHFMIAHSFNGDIFGPAQRTHGATYVVDVTFQRRELDDDDLIVDIGLASETLSTLLAEFNFQNLDDLEEFQGRNTTTEFMARVIFERLAAAIAAGRLGDSGRGLEALTVTLHESHIAWASYEGELQ

SEQ ID NO: 21047 - protein, 278 aa, Halomonas pantelleriensis
  misc_feature (1)..(278): tr|A0A1G9MDQ3|A0A1G9MDQ3_9GAMM 6-pyruvoyl-tetrahydropte rin synthase OS=Halomonas pantelleriensis OX=48727 GN=S AMN05192555_106183 PE=4 SV=1
MTLFVNRLTQLDVSLWCPNRGLIGASWHVDAELDGALGEDGMLFDFGEVKPWIKSRLDAGADHTLLVPSRAPGISVQECREGLSIRTQLPYPMEVRGPRQAFTLLPWQAVSAERLGEHLAKELMRRPPPRVEAIRLALRDEAIDGAAFTYSHGLKRHAGNCQRIAHGHRSRLEIWRQGQRDVGLEARWAAWLADRYLVDAEDVSSDADSDALTCRYRAPQGNFVMRLPRARCAILPCPTTVEHIAAWLAERIARECGERIKVKAFEGIDKGAMAEAGP

SEQ ID NO: 21048 - protein, 281 aa, Halomonas saccharevitans
  misc_feature (1)..(281): tr|A0A1I6ZPJ8|A0A1I6ZPJ8_9GAMM 6-pyruvoyl tetrahydropte rin synthase OS=Halomonas saccharevitans OX=416872 GN=S AMN04487956_11259 PE=4 SV=1
MTLFVNRLTQLDASLWCPRRGLVGASWQVDVELDGELGEDGMLFDFGEVKPWIKGAIDGGVDHTLLVPTEAPGVTLHDCREGLCLRSEVPYPLEMRAPRQALSLLPWSEITPERLARHLADELMRRPPPRVGDIRLTLREEAIEGAAYGYSHGLKRHVGNCQRIAHGHRSRLHVWQDGERQPALEARWADWLGERYLVDAADIVEDDESGLDDRLTTRYRAEQGQFFLRLPRRRCAVLPTPTTVEQIAAWLAEAIARESGRATRVQAFEGIDKGAIAEARP

SEQ ID NO: 21049 - protein, 132 aa, Halomonas saccharevitans
  misc_feature (1)..(132): tr|A0A1I7C6L1|A0A1I7C6L1_9GAMM 6-pyruvoyl-tetrahydropte rin synthase OS=Halomonas saccharevitans OX=416872 GN=S AMN04487956_1379 PE=4 SV=1
MYRLNVRDHFMIAHSFRGEVFGPAQRLHGATYVVDVTFQRRELDDDGLVVDIGLAGEALKRVLAEFNFQNLDEVEEFQGRNTTTEFMARVLFERLATAIQLGHLGEAALGLDSLCVTLNESHVAWASYEGAL

SEQ ID NO: 21050 - protein, 132 aa, Halomonas shengliensis
  misc_feature (1)..(132): tr|A0A1H0DL15|A0A1H0DL15_9GAMM 6-pyruvoyl-tetrahydropte rin synthase OS=Halomonas shengliensis OX=419597 GN=SAM N04487957_101457 PE=4 SV=1
MYRLSVRDHFMIAHSFSGELFGPAQRTHGATYVVDVSFARRELDDHDLVVDIGLASEALKAVLGEFNFENLDELSEFQGRNTTTEFMARVIFERLATAIQLGRLGEGATGLEAMTVTLHESHIAWASYEGTL

SEQ ID NO: 21051 - protein, 132 aa, Halomonas songnenensis
  misc_feature (1)..(132): tr|A0A2T0UZU5|A0A2T0UZU5_9GAMM 6-pyruvoyl-tetrahydropte rin synthase OS=Halomonas songnenensis OX=1176243 GN=B0 H98_10819 PE=4 SV=1
MYRLCVRDHFMIAHSFKGEIFGPAQRTHGATYVVDVIFQRPELDEDGLVIDIGLASETLKEVLSHLNYRNLDDEDEFAGKNTSTEFMAGVIFGRLADAIGEGTMGKTAQGITRMEVKLHESHIAWASYEGDL

SEQ ID NO: 21052 - protein, 277 aa, Halomonas songnenensis
  misc_feature (1)..(277): tr|A0A2T0V195|A0A2T0V195_9GAMM 6-pyruvoyl tetrahydropte rin synthase-like protein OS=Halomonas songnenensis OX= 1176243 GN=B0H98_10720 PE=4 SV=1
MALFVNQLTHIDVTLWCAERGLVGCSWQVDALLEGALGEDGMLFDFGEVKPWIKRTLDSGLDHTLLVPANAPGISISECEEGLCIRTTTPYAMEVRGPAEAFSLLPWEAITLEQVASHLSGELTDQRPTNVDRVTLTLSDEAIDGAAYGYTHGLKRHQGNCQRIAHGHRSRLAIWQSGQRQPALEARWADWLDNRYLLEQADIQDQDDETLTCRYQAAQGEFLIRLPISRCAVLPGPTTVENIAIWLARSLARDTGQATRVQAFEGINKGAFAESAP

SEQ ID NO: 21053 - protein, 281 aa, Halomonas sp.
  misc_feature (1)..(281): tr|A0A2N1AT84|A0A2N1AT84_9GAMM 6-pyruvoyl tetrahydropte rin synthase-related protein OS=Halomonas sp. MES3-P3E OX=2058321 GN=CXF87_02975 PE=4 SV=1
MALFVQQLTHIDISLWCAKRGLVGCSWQVDAVLEGELGEDGMLFDFGEVKPWIKRTLDSGLDHTLLVPTEASGISVSECPEGLCVRTTTPYPMEVRGPEEAFTLLPWQAITLEMVAEHLSHQLTEQRPENVDRVSLTLSDEPNDGAAYGYSHGLKRHAGNCQRIAHGHRSRLYIWQQEARQTLLEQQWAAWLNNRYLLEEADIAARNSETLTCRYRAAQGDFSITLPPSLCTVLPGPTTVENIAAWLAREVATQSGQVTRIQAFEGINKGAIAMFSPSAAL

SEQ ID NO: 21054 - protein, 275 aa, Halomonas sp.
  misc_feature (1)..(275): tr|A0A2D9FJQ0|A0A2D9FJQ0_HALSX 6-pyruvoyl tetrahydropte rin synthase-related protein OS=Halomonas sp. OX=148624 6 GN=CME76_01450 PE=4 SV=1
MALFVNHLTHIDVSLWCPTKGLVGCSWQVDAQLEGELGEDGMLFDFGEVKPWIKRTLDNGLDHTLLVPTQAPGVEVSECEEGLCLRTTTPYAMEVRGPKEAFTLLPWESITLQRVTRHLSDQLTEQRPVNVERVTLLLSDEHIDGAAYGYSHGLKRHAGNCQRIAHGHRSRLHIFQEQQRQPQLEQTWSAWLDNRYLLEEADIAELSDTRLTCRYEAAQGRFSITLPAERCSVLPKPTTVENIAQWLADQIAQQTATATTVHAFEGIDKGATAHA

SEQ ID NO: 21055 - protein, 132 aa, Halomonas subterranea
  misc_feature (1)..(132): tr|A0A1H9WD81|A0A1H9WD81_9GAMM 6-pyruvoyl-tetrahydropte rin synthase OS=Halomonas subterranea OX=416874 GN=SAMN 04487958_11424 PE=4 SV=1
MYRLCVRDHFMIAHSFKGDVFGPAQRTHGATYVVDVIFQRPELDDDGLVIDIGLAGETLKAVLAGYNYQNLDEVNELQGHNTTTEFMAKVIYDQLAAAINAGEMGKTARGLTHLEVKLHESHVAWASYEGAL

SEQ ID NO: 21056 - protein, 277 aa, Halomonas subterranea
  misc_feature (1)..(277): tr|A0A1H9VIW6|A0A1H9VIW6_9GAMM 6-pyruvoyl tetrahydropte rin synthase OS=Halomonas subterranea OX=416874 GN=SAMN 04487958_109151 PE=4 SV=1
MSLFVNQLTHIDASLWCPEKGLKGVSWQVDAVLEGELGKDGMLLDFGEVKPWIKHHLDSGLDHTLLVPVEASGVTVSPCEEGLCVRTSTPYAMEVKGPKQAFTLLPVATIERDAVAASLSQTLTEQRPAKVTRVQLSLSDEVIEGAAYGYSHGLKLHKGNCQRIAHGHRSRLHIWQRGTRQHELERQWAAWLDNRYLVEENDIIARDKQALTCRYQADQGTFTLTLPDERCAVLTTPTTVENIAHWLAEQLAAQSLETSTVHAFEGFNKGAIAKASP

SEQ ID NO: 21057 - protein, 239 aa, Halomonas sulfidaeris
  misc_feature (1)..(239): tr|A0A455UDA2|A0A455UDA2_9GAMM Uncharacterized protein OS=Halomonas sulfidaeris OX=115553 GN=HSBAA_36040 PE=4 SV=1
MSLFVKQLTHIDVSLWCSQRGLVGCSWLVDAVLDGELGEDGMLFDFGEVKPWIKRTLDSGLDHTLLVPTAASGISVSECPEGLSIRTTTPYPMEVRGPQEAFTLLPWQAITLDKVAEHLSQQLTEQRPKNVHQVTLTLSDEAIEGAAYGYTHGLKRHQGNCQRIAHGHRSRLHIFQQGARQPKLEQQWATWLDNRYLLEEADITSQEKTSLPAAIGPPKAIFPLRYQRRYALCSQAPPQ

SEQ ID NO: 21058 - protein, 285 aa, Halomonas sulfidaeris
  misc_feature (1)..(285): tr|A0A365TNG9|A0A365TNG9_9GAMM 6-pyruvoyl tetrahydropte rin synthase-related protein OS=Halomonas sulfidaeris O X=115553 GN=DQ400_10215 PE=4 SV=1
MSLFVKQLTHIDVSLWCSQRGLVGCSWLVDAVLDGELGEDGMLFDFGEVKPWIKRTLDSGLDHTLLVPTAASGISVSECPEGLSIRTTTPYPMEVRGPQEAFTLLPWQAITLDKVAEHLSQQLTEQRPKNVHQVTLTLSDEAIEGAAYGYTHGLKRHQGNCQRIAHGHRSRLHIFQQGARQPKLEQQWATWLDNRYLLEEADITSQEKDFLTCSYRAAQGDFSITLPATLCAVLPGPTTVENIAAWLAKEVATQSGQATRIQAFEGINKGAIAMFSPSALPSTRL

SEQ ID NO: 21059 - protein, 281 aa, Halomonas taeanensis
  misc_feature (1)..(281): tr|A0A1G7V693|A0A1G7V693_9GAMM 6-pyruvoyl tetrahydropte rin synthase OS=Halomonas taeanensis OX=284577 GN=SAMN0 5216571_11929 PE=4 SV=1
MTLFVNGLTHLDASLWCSTRGLIGVSWQVNAELDGELGEDGMLFDFGQVKPWIKSRLDDSADHTLIVPTEAPGVTVSECSEGLVIRTTTPYAMEVRGPHQAFTLVPWTQITPTALAEHFSEQMLQDPPPRVSAIRLSFEDEVLSGAAYTYSHGLRRHSGNCQRIAHGHRSPLHIWQAGKRAPALEADWAERLADRYLVDASDILDDPEAAAKGELTTRYRAPQGEFFLRLPRERCVTLPTATTIEQIAAWLAKKVAGETGEATRVQAFEGIGKGAIAERMP

SEQ ID NO: 21060 - protein, 279 aa, Halomonas taeanensis
  misc_feature (1)..(279): tr|A0A328XIU5|A0A328XIU5_9GAMM 6-pyruvoyl-tetrahydropte rin synthase OS=Halomonas taeanensis OX=284577 GN=BCL93 _11026 PE=4 SV=1
MTLFVNGLTHLDASLWCPTRGLIGVSWQVNAELDGELGEDGMLFDFGHVKPWIKSRLDDGADHTLIVPTEAPGVTVSECPEGLAIRTTTPYAMEVRGPHQAFTLVPWAEITPTGLAERFSEEMLQDPPPRVSAIRLTFEDEALSGAAYTYSHGLRRHAGNCQRIAHGHRSPLHIWQTGERAPALEAEWAGRMADRYLVDAGDIEDEGVAQGELTTRYRAPQGDFLLRLPRERCLILPTATTIEQIAAWLAGEIAAETGQVTRVQAFEGIGKGAIAERTP

SEQ ID NO: 21061 - protein, 283 aa, Halomonas titanicae
  misc_feature (1)..(283): tr|L9UBT2|L9UBT2_9GAMM 6-pyruvoyl tetrahydropterin synt hase-related protein OS=Halomonas titanicae BH1 OX=1204 738 GN=HALTITAN_1225 PE=4 SV=1
MSLFVNQLTHIDVSLWCSERGLVGCSWQVDAVLDGELGEDGILFDFGEVKPWIKRTLDSGLDHTLLVPTQAPGVTVTECPEGVCVRTTTPYPMEVRGPKEAFSLLPWQTIELDTVAEHLSQQLTEERPENVHQVTLTLSDEAVDGAAYGYSHGLKRHLGNCQRIAHGHRSRLHIFQQELRQPTLEQQWAAWLENRYLLEEADITSRDNDFLTCGYRAAQGDFSITLPQSLCAVLPGPTTVENIAAWLAKEVATQSGVTTRIQAFEGINKGAIAVCSPSPSARL

SEQ ID NO: 21062 - protein, 282 aa, Halomonas titanicae
  misc_feature (1)..(282): tr|A0A558J5K9|A0A558J5K9_9GAMM 6-pyruvoyl tetrahydropte rin synthase-related protein OS=Halomonas titanicae OX= 664683 GN=FQP89_17500 PE=4 SV=1
MSLFVQQLTHIDVSLWCSQRGLVGCSWQVDAVLDGELGEDGMLFDFGEVKPWIKRTLDSGLDHTLLVPTQAPGVTVTECPEGVCVRTTTPYPMEVRGPKEAFSLLPWQAIDMNTVAEHLSQQLTEQRPENVHQVTLTLSDETINGAAYGYTHGLKRHLGNCQRIAHGHRSRLHIFQQGVRQAELEQQWAAWLDNRYLLEEADITSRDNDFLTCGYRAAQGDFSITLPQSLCAVLPGPTTVENIAAWLAKEVATQSGVTTRIQAFEGINKGAIAAFSPSAIPR

SEQ ID NO: 21063 - protein, 132 aa, Halomonas urumqiensis
  misc_feature (1)..(132): tr|A0A2N7UDA8|A0A2N7UDA8_9GAMM Uncharacterized protein OS=Halomonas urumqiensis OX=1684789 GN=C1H70_16950 PE=4 SV=1
MYRLNVRDHFMIAHSFRGEIFGPAQRTHGATYVVDVTFQRRELDNDDLVVDIGLASEAVKAVLGEFNFHDLDELEEFHGRNTTTEFMARVIFERLVTAIQLGKLGEAANGLDAMTVTLNESHIAWASYEGTL

SEQ ID NO: 21064 - protein, 132 aa, Halomonas ventosae
  misc_feature (1)..(132): tr|A0A2T0VPA3|A0A2T0VPA3_9GAMM 6-pyruvoyl-tetrahydropte rin synthase OS=Halomonas ventosae OX=229007 GN=BCL64_1 0471 PE=4 SV=1
MYRLNVRDHFMIAHSFRGEVFGPAQRTHGATYVVDVTFQRRELDDDGLVVDIGLAGEALKRVLAEFNFHNLDEVEEFQGRNTTTEFMARVIFERLATAVQLGQLGEAAMGLDSLCVTLHESHVAWASYEGAL

SEQ ID NO: 21065 - protein, 281 aa, Halomonas ventosae
  misc_feature (1)..(281): tr|A0A2T0VET3|A0A2T0VET3_9GAMM 6-pyruvoyl-tetrahydropte rin synthase OS=Halomonas ventosae OX=229007 GN=BCL64_1 1626 PE=4 SV=1
MTLFVNRLTHLDVSLWCPQRGLVGASWQVDVELDGELGEDGMLFDFGEVKPWIKQRLDGELDHTLLVPTRARGVTLHDCREGLCVRSERPYPLEVRAPRQALSLLPWREITPERLADHLATELMRRPPPRVSDIRLRLREEAIEGPAYSYSHGLKQHAGNCQRIAHGHRSRLEVWQQGQRVPALEQHWAEWLADRYLVDEADVVDDDAPGFRDQLSCRYRAEQGHFFIRLPRSRCAVLPTPTTVEHIAAWLAGAIARESGQATRVRAFEGIDKGAIAQARP

SEQ ID NO: 21066 - protein, 279 aa, Halomonas venusta
  misc_feature (1)..(279): tr|A0A3S8YS76|A0A3S8YS76_9GAMM 6-pyruvoyl tetrahydropte rin synthase-related protein OS=Halomonas venusta OX=44 935 GN=EI420_08690 PE=4 SV=1
MALFVNRLSHIDVSLWCPTKGLVGCSWQVDAQLDGELGEDGMLFDFGEVKPWIKRTLDSGLDHTLLVPINAPGIKVTDCAEGICIRTATPFEMEVRGPVQAFTLLPWDTITVERVSHYLSSQLTKQEQRPANVHSVTLTLSDEPIDGAGYGYTHGLKRHLGNCQRIAHGHRSRLLIWQHQARQPALEQHWAAWLDNRYLLEQADIESQIDEKLTCRYQSAQGTFSITLPQQRCCVLPKPTTVENIALWLAKRIAEHSGHKTLVQAFEGIDKGATAEASP

SEQ ID NO: 21067 - protein, 132 aa, Halomonas venusta
  misc_feature (1)..(132): tr|A0A3S8YPR6|A0A3S8YPR6_9GAMM 6-carboxytetrahydropteri n synthase OS=Halomonas venusta OX=44935 GN=EI420_04790 PE=4 SV=1
MYRLCVRDHFMIAHSFNGEIFGPAQRTHGATYVVDVVFQRPELDQDGLVIDIGLASETVKEVLAEYNYRNLDEVSEFSGKNTTTEFMAKVIFDQLAAAIKAGKMGATAQGLTHMEIKLHESHVAWASYEGAL

SEQ ID NO: 21068 - protein, 286 aa, Halomonas xianhensis
  misc_feature (1)..(286): tr|A0A4R8G4H0|A0A4R8G4H0_9GAMM 6-pyruvoyl tetrahydropte rin synthase-like protein OS=Halomonas xianhensis OX=44 2341 GN=DFO67_104220 PE=4 SV=1
MTLFVNNLTHLDTSLWCPRRGLIGASWHVDAELDGQLGDDGMLFDFGEVKPWLKTHLDDGPDHTLLVPLESPGLSVQDCREGLCIRAQAPYAMEVRGPRQAFTLLPWSEITPQRLAEHYSNLLSRRPPPRVDAIRLRLHEEAIEGAAFTYSHGLKRHAGNCQRIAHGHRSRLCLWENGSRQPMLEAAWAERLQDRYLVSEEDISDPGLPGPRGQLTVRYQAGQGQFMLRLPRDRCIVMPTPTTIEHIAAWLAARILHETGRELRVQAFEGIGKGAYSGMSPLTHHD

SEQ ID NO: 21069 - protein, 286 aa, Halomonas xianhensis
  misc_feature (1)..(286): tr|A0A1I3A6N0|A0A1I3A6N0_9GAMM 6-pyruvoyl tetrahydropte rin synthase OS=Halomonas xianhensis OX=442341 GN=SAMN0 4487959_104161 PE=4 SV=1
MTLFVNNLTHLDASLWCPRRGLIGASWHVDVELDGQLGDDGMLFDFGEVKPWLKAHLDDGPDHTLLIPLESPGLSVQACREGLCIRAQAPYAMEVRGPRQAFTLLPWREITPQRLAEHYSNLLSRRPPPRVDAIRLRLHEEAIDGAAFTYSHGLKRHVGNCQRIAHGHRSRLCLWENGSRQPLLEAAWAKRLQDRYLVSEEDISDPGLPGPRGQLTVRYQAGQGQFMLRLPRDRCIVMPTPTTIEHIAAWLAARILHETGREVRVQAFEGIGKGAFSGMSPLTRHD

SEQ ID NO: 21070 - protein, 134 aa, Halopeptonella vilamensis
  misc_feature (1)..(134): tr|A0A4Q8CYQ4|A0A4Q8CYQ4_9GAMM 6-pyruvoyl-tetrahydropte rin synthase OS=Halopeptonella vilamensis OX=531306 GN= EV698_0308 PE=4 SV=1
MYRVNVRDHFMIAHSFKGETFGPAQALHGATYVTDATFFRDRLDADNVVVDIARATEVLHTILSRYNLTNLDGLPEFEGVNTTTEHLARHIADSLATAIHAGELGETARTLDRIRITLHESHIASAAYERPLQP

SEQ ID NO: 21071 - protein, 331 aa, Halorhodospira halochloris
  misc_feature (1)..(331): tr|A0A0X8X865|A0A0X8X865_HALHR Queuosine biosynthesis Q ueD OS=Halorhodospira halochloris OX=1052 GN=HH1059_007 80 PE=4 SV=1
MEQGYYTISLPFEAARRDHRGWHGHSFCLRLRSNATAISDHEWLLSEAARVVEPFDYSLLNEQVPDVADPALLSELEQRLRAVGLPLNRLALRSAPDRGAVIDLCDGQRWCWRSFRFEAAHQLPNVPPSHPCHRMHGHGYRVILEAANGEDAEALGQLWQPVAAQLHRSCLNDVLVNPTSERLAEWIWMRLRMYSSGLRRVHVQETEHSGCFFDGFHHTIWKAQRFEAATAHAAARSITGHGYRLRLYLSAPLDPDLGWTLDYADVKAAFAPLRDSLDHHRLDQLHGLAGGDLLSVAKWILNQANAQLPELYRVDVSEDEQRGVIAERDPG

SEQ ID NO: 21072 - protein, 258 aa, Halorhodospira halophila
  misc_feature (1)..(258): tr|A1WW30|A1WW30_HALHL Uncharacterized protein OS=Halor hodospira halophila (strain DSM 244 / SL1) OX=349124 GN =Hhal_1116 PE=4 SV=1
MLDELGRRLEAAGVVPHRLALRSAPDRGVGREGGAWAWRAFRFEAAHRLPYVPEGHPCGRMHGHGYLVVLEAAGGDPEALGEAWAPLGQALDRACLNDFLDNPTSELIAVWLWEQLRPRCPGLIRLHVHETEHSGCTYDGAQHTIWKAQRFEAATCVADADDTRARLHGHGYRLRVHVTAPLDRVLGWTLDYGDVKAAFAPVREALDHQRLDTIAGLESGDVASLAAWAARAARQRLPELLRVDCYERDGVGAIAWPE

SEQ ID NO: 21073 - protein, 280 aa, Halospina denitrificans
  misc_feature (1)..(280): tr|A0A4R7JQ95|A0A4R7JQ95_9GAMM 6-pyruvoyl tetrahydropte rin synthase-like protein OS=Halospina denitrificans OX =332522 GN=DES49_2263 PE=4 SV=1
MNRLFVDNLTVIDFAFLDPERGLVGESWIVDIELAGELNEAGMVFDFGHVKRTIKDEIDALVDHRLLVPRDHRGLSWTETGNLDWVTNGGWRISHAGPEESVIAVPGSHLQRERIETLLVTLLRQKLPANVHDIVVRLRPEVIEGALYHYTHGLRKHEGNCQRIAHGHRSRLEIYRNGARAPDLETYWAERWEDIYIATRDDEVGTFVEAGVEYTHYRYTANQGQFELILPSHRVETMDQDTTVEWIACYLRDETQKLEPDSRIIVKAFEGVNKGAYAGD

SEQ ID NO: 21074 - protein, 279 aa, Halotalea alkalilenta
  misc_feature (1)..(279): tr|A0A172YET9|A0A172YET9_9GAMM 6-pyruvoyl tetrahydropte rin synthase-related protein OS=Halotalea alkalilenta O X=376489 GN=A5892_09775 PE=4 SV=1
MNLFVHSLTALDASYWCAERGLVGASWQVDVELDGELGEDGMLFDFGEVKPWAKRQIDATLDHTLIVPTQMPGLSVSECAEGLCVRTQLPWPMEVRAPRQAFTLLPWSTIEPQRLSRYLGEQLGKRPPPRVGEVRVQLREEPIAPGFGYTYSHGLKHHAGNCQRIAHGHRSRLGIWRDGELDEALIQRWCARLADIYLADRADLVGSEEDESLRFAYESLQGQFRIRLPRERVVLMPFTTTVEQIAHWLAEETALAHGGRIRVQAFEGIGKGATAEAKR

SEQ ID NO: 21075 - protein, 290 aa, Halothece sp.
  misc_feature (1)..(290): tr|K9YEG6|K9YEG6_HALP7 Uncharacterized protein OS=Halot hece sp. (strain PCC 7418) OX=65093 GN=PCC7418_2639 PE= 4 SV=1
MKCVINRRAQFSAAHRYWLPELSAAENQAKFGAGSQFPGHGHNYVLYVSLEGEIDQYGMVMNLSEVKPVLREQITDQLNNSYLNEVWSEFSETLPTTENLAKVIWQRLAPYLPVVNIRLFEHPQLWADYQGNNMEASLTVGTHFSAAHRLARPDLSYEENCKIYGKCARPHGHGHNYHLEVTVTGEMDQRTGMIVNLEQLHHILEEVVVEPFDHYFLNEDIPYFAEVVPTAENIALYIAQLLQKPTAELGVMLDKVKLIESPNNSCEINCRSLAGNLSSEMNREPALANY

SEQ ID NO: 21076 - protein, 127 aa, Halothece sp.
  misc_feature (1)..(127): tr|K9YDF0|K9YDF0_HALP7 6-carboxy-5,6,7,8-tetrahydropter in synthase OS=Halothece sp. (strain PCC 7418) OX=65093 GN=PCC7418_2348 PE=3 SV=1
MDEWIIYKEFSFEAAHQLFHHEGKCRRLHGHSWVGRVYLKAQHLITEGSQQGMLMDYGEIKKYIQPLLDEYLDHYYLNESTGLTNPTSEEIAKWIFEKLEAAGLPHLYAVEIQETCTSGCRYTKSHD

SEQ ID NO: 21077 - protein, 126 aa, Halothiobacillaceae bacterium
  misc_feature (1)..(126): tr|A0A539DX79|A0A539DX79_9GAMM 6-carboxy-5,6,7,8-tetrah ydropterin synthase OS=Halothiobacillaceae bacterium OX =2268194 GN=FD130_1816 PE=3 SV=1
MTASYTLKVLLDFASAHSLRNYPGDCSRLHGHNWKLEAEVTAHALDEVGIGLDFKVIRLAAKEIADRLDHHYLNELEPFKAINPTAENIAAYFYHELGLKLNNARVRVSAVTLWETERACVRYTEH

SEQ ID NO: 21078 - protein, 129 aa, Halothiobacillaceae bacterium
  misc_feature (1)..(129): tr|A0A545SJU2|A0A545SJU2_9GAMM 6-carboxy-5,6,7,8-tetrah ydropterin synthase OS=Halothiobacillaceae bacterium OX =2268194 GN=queD PE=3 SV=1
MAAQYTLKVHAEFAAAHQLHGYPGNCARMHGHNWKVEVEVTGSRLNDVGMVVDFKAMKRAAREVAEHLDHAYLNDIPPFDRINPTAENIAAWFYQEVAQRLNGEHQQVSAVTLWETDRACVTYRETNDR

SEQ ID NO: 21079 - protein, 152 aa, Halothiobacillus neapolitanus
  misc_feature (1)..(152): tr|D0L1D2|D0L1D2_HALNC Uncharacterized protein OS=Halot hiobacillus neapolitanus (strain ATCC 23641 / c2) OX=55 5778 GN=Hneap_1680 PE=4 SV=1
MNTIAPQADASSALEPILDRLNKQLAASNGQFCLSVTVDFAAAHQLHGYEGNCARLHGHNWKIIVEVTGQKLDDVGMVIDFKAMKKAARAAAKTLDHQFLNQIEPFDRINPTAEHIAVWFFVELGRMLNQPNARVSAITVWENDYSAVTYRA

SEQ ID NO: 21080 - protein, 107 aa, Halothiobacillus sp.
  misc_feature (1)..(107): tr|A0A258QJL5|A0A258QJL5_9GAMM Uncharacterized protein OS=Halothiobacillus sp. 28-55-5 OX=1970386 GN=B7Y53_050 40 PE=4 SV=1
MLGYEGNCARLHGHNWKIMVEVTGQKLDGVGMVVDFKTMKKAAREAAKKLDHQFLNEIAPFDQINPTAEHIAVWFFVELSGVLNQPNARISAITVWENEYSAVTYRA

SEQ ID NO: 21081 - protein, 135 aa, Halothiobacillus sp.
  misc_feature (1)..(135): tr|A0A191ZGD9|A0A191ZGD9_9GAMM 6-carboxy-5,6,7,8-tetrah ydropterin synthase OS=Halothiobacillus sp. LS2 OX=1860 122 GN=A9404_05770 PE=3 SV=1
MNDSAALPIPANAQFTLTVEVEFAAAHHLRGYEGNCARLHGHNWKVIVEVTGNKLDKVGMVMDFKTMKKAARATAEQLDHYYLNEIPPFDTVNPTAENIAVWFFDELSSTLNRPNARLSGITIWENDRSAVTYRA

SEQ ID NO: 21082 - protein, 283 aa, Halovibrio sp.
  misc_feature (1)..(283): tr|A0A2A2F922|A0A2A2F922_9GAMM 6-pyruvoyl tetrahydropte rin reductase OS=Halovibrio sp. YL5-2 OX=2032626 GN=CK5 01_07185 PE=4 SV=1
MNRLFVDNLTVIDFAYLDRHRGLVGESWIVDIELAGELNDAGMVFDFGHVKSTIKAHIDDQVDHRLLIPADYSRLQWLDPQSPGHFRWHLEDGTWIEHRSPAQAVATVPGEAVERQAIATRLSESLQRVLPDNVHEVRINLRLEQIEGAWYHYAHGLKKHDGNCQRIAHGHRSRIQILRNGERAPDLEHYWGERWRDIYLATADDRNDTFDDAGISYHRFSYDSDQGHFEIALPAARTEIMGPDTTVEWIACYLWDETRKLEPESRIEVHAFEGVNKGAIAEG

SEQ ID NO: 21083 - protein, 132 aa, Halovibrio sp.
  misc_feature (1)..(132): tr|A0A2A2F8E6|A0A2A2F8E6_9GAMM Uncharacterized protein OS=Halovibrio sp. YL5-2 OX=2032626 GN=CK501_05875 PE=4 SV=1
MYQLTVRQHMMIAHSFSGEAFGPAQALHGATYVVDATFERPRLDDNDLVVDIGLATQVLGEVLGEFNMRNLDDHPDLKGRNTTTEFMAGMVFQRMADAIKAGRLGESAHGISGLAITLSESHIAWASYRGDL

SEQ ID NO: 21084 - protein, 132 aa, Halovibrio variabilis
  misc_feature (1)..(132): tr|A0A511USC3|A0A511USC3_9GAMM Uncharacterized protein OS=Halovibrio variabilis OX=31910 GN=ptpS PE=4 SV=1
MFRLCVRDHFMIAHSFKGEVFGPAQRTHGATYVVDVVFQRPELDDDGLVIDIGLASETLKAVLAGYNYQNLDEVSELQGKNTTTEFMAKVIFDQLAAAINAGEMGTTARGLTHLEVKLHESHVAWASFEGPL

SEQ ID NO: 21085 - protein, 249 aa, Halovibrio variabilis
  misc_feature (1)..(249): tr|A0A511UVQ8|A0A511UVQ8_9GAMM Uncharacterized protein OS=Halovibrio variabilis OX=31910 GN=HVA01_28780 PE=4 S V=1
MDGELGDDGMLFDFGEVKPWIKRTLDSGLDHTLLVPTEAPGVTVTDCPEGVCVRTTTPYSMEVRGPKEAFSLLPWRTITPDTIATYLSQQLTTQRPDNVHQVTLTLSDEAINGAAYGYTHGLKRHIGNCQRIAHGHRSRLYIWQRDTRQPLLEQQWSDWLDNRYLLEQADIAAQDSDTLTCRYQAAQGDFSITLPLARCAVLPGPTTVENIAAWLAQEVATQSGAATRIQAFEGINKGAIATFSPSVTP

SEQ ID NO: 21086 - protein, 126 aa, Hamiltonella defensa; identical to SEQ ID NO: 18820
  misc_feature (1)..(126): tr|C4K6X8|C4K6X8_HAMD5 6-carboxy-5,6,7,8-tetrahydropter in synthase OS=Hamiltonella defensa subsp. Acyrthosipho n pisum (strain 5AT) OX=572265 GN=sscR PE=3 SV=1

SEQ ID NO: 21087 - protein, 145 aa, Handelsmanbacteria sp.
  misc_feature (1)..(145): tr|A0A1F6CKU7|A0A1F6CKU7_HANXR Uncharacterized protein OS=Handelsmanbacteria sp. (strain RIFCSPLOWO2_12_FULL_6 4_10) OX=1817868 GN=A3F84_08545 PE=4 SV=1
METIRVISDFHAAHRQLGYDGKCRYVHGHTWVGTFVLKAERFPRNCLDMSIDFGRLKDILRHLDHKMMVCEQDEVFLKSGLFEPEGVVLMPGDSPSVENVAHYCVDRVIQVIRSEYPDRGISYDIEVTIRETDHNVFVVERRVTI

SEQ ID NO: 21088 - protein, 123 aa, Hansschlegelia zhihuaiae
  misc_feature (1)..(123): tr|A0A4Q0MNV6|A0A4Q0MNV6_9RHIZ 6-carboxy-5,6,7,8-tetrah ydropterin synthase OS=Hansschlegelia zhihuaiae OX=4050 05 GN=EK403_05335 PE=3 SV=1
MHELSKQFRFEAAHTLNRAIDVEPSRRIHGHSYRAEVTVRGAADPDSGMVVDLGLFSRALAEARDGLDHRFLDEVADLGPATLENLSAWIWRRVESVCPGLHKVTVYRDSEGDACSYFGPRAA

SEQ ID NO: 21089 - protein, 135 aa, Hansschlegelia zhihuaiae
  misc_feature (1)..(135): tr|A0A4Q0MHR1|A0A4Q0MHR1_9RHIZ 6-carboxytetrahydropteri n synthase OS=Hansschlegelia zhihuaiae OX=405005 GN=EK4 03_13510 PE=4 SV=1
MYAVEVRDRIMIAHSLKGEVFGPAQALHGATFVVDVAFFRAELDPDNIVVDIGRAIEALGEALKPLNYANLDEVEALKSEVTTTEFLCRHVFDAMAAAARDGRLGAHADGVEKIRVTLHESDVARAWFEGAVAGG

SEQ ID NO: 21090 - protein, 136 aa, Hanstruepera neustonica
  misc_feature (1)..(136): tr|A0A2K1E0A8|A0A2K1E0A8_9FLAO 6-carboxy-5,6,7,8-tetrah ydropterin synthase OS=Hanstruepera neustonica OX=14456 57 GN=C1T31_04925 PE=3 SV=1
MRVTVSRKAHFNAAHRLYRKDWSEEKNDAVFGKCNNPNFHGHNYELIVSVTGAIDSETGYVIDMKDLKDIIKSEVEDAFDHKNLNVEVPEFKNLNPTAENIVVVIYNKMKAKLPDDLDLEVTLYETPRNFVSYSGN

SEQ ID NO: 21091 - protein, 152 aa, Hanstruepera neustonica
  misc_feature (1)..(152): tr|A0A2K1E3M2|A0A2K1E3M2_9FLAO 6-carboxytetrahydropteri n synthase QueD OS=Hanstruepera neustonica OX=1445657 G N=C1T31_01640 PE=4 SV=1
MGTIRITKQFSFETGHALYGYDGKCKNVHGHSYKLSVTVIGKPIDDTNHVKHGMVIDFGDLKKIVKSEIVDVFDHATVFNKNTPHVELAKELEDRGHNVLLVNYQPTSEMMVIDFAKKIKKHLPEHITLHSLKLQETETSFAEWYASDNTSL

SEQ ID NO: 21092 - protein, 290 aa, Hapalosiphon sp.
  misc_feature (1)..(290): tr|A0A0M0SIJ0|A0A0M0SIJ0_9CYAN 6-pyruvoyl tetrahydropte rin synthase OS=Hapalosiphon sp. MRB220 OX=1704290 GN=A MR41_22075 PE=4 SV=1
MQCVVNRRAQFSASHRYWLPELSEAENLEKFGACSRFPGHGHNYVLFVSLIGELDKYGMVLNLSDVKHVIKQEVTSQLDFSYLNDVWAEFQQTLPTTENIARVIWQKLAPHLPLVRVQLFENPELWADYMGNGMEAYLSVSTHFSAAHRLAHPDLNDQDNFEIYGKCARPNGHGHNYHLEVTVKGEIDPRTGMIADLGALNQVIEDYVVEPFDHTFLNKDIPYFSEIVPTAENIALYISNLLRSPIQKLGAKLYKVKLIESPNNSCEIYCTGTESNSVSIAETQPVLARI

SEQ ID NO: 21093 - protein, 129 aa, Hapalosiphon sp.
  misc_feature (1)..(129): tr|A0A0M0SUS1|A0A0M0SUS1_9CYAN 6-carboxy-5,6,7,8-tetrah ydropterin synthase OS=Hapalosiphon sp. MRB220 OX=17042 90 GN=AMR41_00350 PE=3 SV=1
MPKWKLVTEFSFNSAHYIKDYDGPCGRMHGHNYTVRIEATALKLHSSQYCPNPVMVADFRTLRWAKQDVSKGGLDHCILNDVLPPEYETTAEMIAKYIYDETKKLLPADVQLKVAVSETPNSWVEYEDE

SEQ ID NO: 21094 - protein, 129 aa, Hapalosiphonaceae cyanobacterium
  misc_feature (1)..(129): tr|A0A328IGS3|A0A328IGS3_9CYAN 6-carboxy-5,6,7,8-tetrah ydropterin synthase OS=Hapalosiphonaceae cyanobacterium JJU2 OX=2109628 GN=C6Y22_08420 PE=3 SV=1
MPKWKLVTEFSFNSAHYIKDYDGPCGRMHGHNYTVRIEATALKLHSSQYCPHPVMVADFRTLRWAKQDVSKGGLDHCILNEILPPEYETTAEMIAKYIYDKTKKLLPADVQLKVAVSETPNSWVEYEDD

SEQ ID NO: 21095 - protein, 290 aa, Hapalosiphonaceae cyanobacterium
  misc_feature (1)..(290): tr|A0A328IGN9|A0A328IGN9_9CYAN 6-pyruvoyl tetrahydropte rin synthase OS=Hapalosiphonaceae cyanobacterium JJU2 O X=2109628 GN=C6Y22_01900 PE=4 SV=1
MQCVVNRRAQFSASHRYWLPELSEAENLEKFGACSRFPGHGHNYVLFVSLIGELDKYGMVLNLSDVKHVIKQEVTSQLDFSYLNDVWAEFQQILPTTENIARVIWQKLAPHLPLVRVQLFENPELWADYMGNGMEAYLSVSTHFSAAHRLAHPDISDQDNFEIYGKCARPNGHGHNYHLEVTVKGEIDSRTGMIVDLGALNQVIEDYVVEPFDHTFLNKDISYFSEVVPTAENIALHISNLLRSPIQKLGAKLYKVKLIESPNNSCEIYCTETESNSVNIAETQPVLARI

SEQ ID NO: 21096 - protein, 130 aa, Hartmannibacter diazotrophicus
  misc_feature (1)..(130): tr|A0A2C9DBA0|A0A2C9DBA0_9RHIZ Queuosine biosynthesis p rotein QueD OS=Hartmannibacter diazotrophicus OX=148207 4 GN=HDIA_4071 PE=4 SV=1
MFAVEVRDHIMIAHSLKRPVFGPAQGLHGATFVVDAAFFAESLDNDGLVVDIGLASEALSATLKPLNYANLDDIPEFAGKVTTTEFLCGHVFEKLREAAKSGALGASTLKKIRVTLHESHVARAWFEGDV

SEQ ID NO: 21097 - protein, 200 aa, Helicobacter acinonychis
  misc_feature (1)..(200): tr|Q17WX9|Q17WX9_HELAH Uncharacterized protein OS=Helic obacter acinonychis (strain Sheeba) OX=382638 GN=Hac_10 77 PE=4 SV=1
MIIRRLYKFCASHVVRNCSSLKCAQNIHGHNYEVEVFIETNRLDHANMALDFGLMQQEMQTFIDSFDHAHHFWDKESIEFQRFIENHCVRYVKCSFNLSAESYALMFLYYLSRILQKSVFSNHEGELKVSSVRVHETKNGYAESFLKDLENPHFKTLVYQNCVSFSQGIQSLWQDKDFFNKIISDEEKCFFHAKPLHQIP

SEQ ID NO: 21098 - protein, 208 aa, Helicobacter ailurogastricus
  misc_feature (1)..(208): tr|A0A0K2XEB3|A0A0K2XEB3_9HELI 6-carboxytetrahydropteri n synthase @ Queuosine biosynthesis QueD, PTPS-I OS=Hel icobacter ailurogastricus OX=1578720 GN=HAL011_04530 PE =4 SV=1
MQIRRSFHFCASHIVRNCTSRRCATSIHGHNYQVEIFLQAHKLDKAGMALDFGIFKNEIASFIDAFDHAHHFWDKEAEGFKNFITSTSARYVKLSFNPSAEHYALMFHLFISAILEATELHNNEAVGVCSVRVHETSYGYAQSETEDLSNPALMGAISLESVVFSPAILKDMPNPKLLEQLLNYHKAKKNSPCAPKKPFASPKPLVQI

SEQ ID NO: 21099 - protein, 208 aa, Helicobacter ailurogastricus
  misc_feature (1)..(208): tr|A0A0K2Y1J5|A0A0K2Y1J5_9HELI Queuosine biosynthesis Q ueD, PTPS-I OS=Helicobacter ailurogastricus OX=1578720 GN=HAL07_03430 PE=4 SV=1
MQIRRSFHFCASHIVRNCTSRRCATSIHGHNYQVEVFLQAHKLDKAGMALDFGIFKNEIASFIDAFDHAHHFWDKEAEGFKNFITSTSARYVKLSFNPSAEHYALMFHLFISAILEATELHNNEAVGVCSVRVHETSYGYAQSETEDLSNPALMGAISLESVVFSPAILKDMPNPKLLEQLLNYHKAKKNSPCAPKKPFASPKPLAQI

SEQ ID NO: 21100 - protein, 203 aa, Helicobacter anseris
  misc_feature (1)..(203): tr|A0A3D8JA34|A0A3D8JA34_9HELI Uncharacterized protein OS=Helicobacter anseris OX=375926 GN=CQA57_02290 PE=4 S V=1
MIIRRMFGFCAAHIVRNCSSIRCSRSLHGHNYKVEVFVRSDKLDNAGMILDFGIFKNQIADFIDGFDHAYHVWDREQNEIRDFAIKNSERYVILTHNPSAENYALLLLFFVDKFLQAMEFGNNEGSIVVESVRVHETDHGYAEAFSNDLKNLYFMQKVSLDSILFSEAIKQDWKDPFMLDKLKEFELDKIKKPFVFQTPLQQV

SEQ ID NO: 21101 - protein, 204 aa, Helicobacter bizzozeronii
  misc_feature (1)..(204): tr|F8KRX1|F8KRX1_HELBC Queuosine biosynthesis QueD, PTP S-I OS=Helicobacter bizzozeronii (strain CIII-1) OX=100 2804 GN=HBZC1_05340 PE=4 SV=1
MQIRRSFGFCASHVVRNCTSKRCATSIHGHNYTLEVFIEAHKFDYAGMLLDFGIFKQEIASFIDAFDHAHHFWDQESPEFQDFITTHSARYAKLSFNPSAEGYALMFHFFLNAILQATTLQNAEAPLSVSSVRVHETNYGYAQSFLEDLHNPDLMAGIGLHSVQFSPAILQDLPNPLLLEQLKNYHANPKSPKPFKSPPPLRQI

SEQ ID NO: 21102 - protein, 99 aa, Helicobacter bizzozeronii
  misc_feature (1)..(99): tr|H5V9K1|H5V9K1_HELBI Queuosine biosynthesis QueD, PTP S-I OS=Helicobacter bizzozeronii CCUG 35545 OX=1002805 GN=HBZS_103660 PE=4 SV=1
MFHFFLNAILQATTLQNAEAPLSVSSVRVHETNYGYAQSFLEDLHNPDLMAGIGLHSVQFSPAILQDLPNPLLLEQLKNYHANPKSPKPFKSPPPLRQI

SEQ ID NO: 21103 - protein, 200 aa, Helicobacter cetorum
  misc_feature (1)..(200): tr|I0EN08|I0EN08_HELC0 6-carboxy-5,6,7,8-tetrahydropter in synthase OS=Helicobacter cetorum (strain ATCC BAA-42 9 / MIT 00-7128) OX=182217 GN=HCW_05310 PE=4 SV=1
MIIRRLYKFCASHVVRNCSSLKCAQNIHGHNYEVEVFIETNRLDNACMALDFGIMQQEMQIFIDSFDHAHHFWDKESAEFQHFIEKNCVRYVKCSFNLSAESYALMFLYYLSLILQKSTFSNNEGELKVSSVRVHETKNGYAEAFLKDLENPNFKALVHKNCVSFSQGIQSLWQDKDFFNKIISDEEKCFFHAKPLHQIP

SEQ ID NO: 21104 - protein, 200 aa, Helicobacter cetorum
  misc_feature (1)..(200): tr|I0ETB9|I0ETB9_HELCM 6-carboxy-5,6,7,8-tetrahydropter in synthase OS=Helicobacter cetorum (strain ATCC BAA-54 0 / MIT 99-5656) OX=1163745 GN=HCD_05930 PE=4 SV=1
MIIRRLYKFCASHVVRNCSSLKCAQNIHGHNYEVEVFIETNRLDNACMALDFGLMQQEMQIFIDSFDHAHHFWDKESAEFQHFIETHCVRYVKCSFNLSAESYALMFLYYLNLILQKSAFSNNEGELKVSSVRVHETKNGYAESFLKDLENPHFKALVHKNCVSFSQGIQNLWQDKNFFNKIISDENKCFFHAKPPHQIP

SEQ ID NO: 21105 - protein, 208 aa, Helicobacter felis
  misc_feature (1)..(208): tr|E7A9W8|E7A9W8_HELFC 6-pyruvoyl tetrahydrobiopterin s ynthase OS=Helicobacter felis (strain ATCC 49179 / NCTC 12436 / CS1) OX=936155 GN=Hfelis_05120 PE=4 SV=1
MQIRRLFHFCASHIVRNCSSKRCATSIHGHNYQVEVFLEAHQLDKAGMALDFGIFKNEIASFIDCFDHAHHFWNKETQDLQDFITSTCARYVKLSFNPSAEHYALMFHLFLDAILRATELHNGEVVSVCSVRVHETSYGYAQSFSEDLKNPNLMDSISLESVQFSHGIIEEMPNPRLLEQLKTYHNTLECAICPPKKPFSSSPPLAQI

SEQ ID NO: 21106 - protein, 207 aa, Helicobacter heilmannii
  misc_feature (1)..(207): tr|A0A0K2Y1Y1|A0A0K2Y1Y1_HELHE 6-carboxytetrahydropteri n synthase @ Queuosine biosynthesis QueD, PTPS-I OS=Hel icobacter heilmannii OX=35817 GN=HHE01_01800 PE=4 SV=1
MQIRRLFHFCASHIVRNCTSRRCATSIHGHNYQVEVFLQAHKLDRAGMALDFGIFKNEIASFIDAFDHAHHFWDKETEGFQNFIISTCERHVKLSFNPSAEHYALMFHLFISAILEATELHNGEAIKVCSVRVHETSYGYAQSEAEDLKNPDLMGVISLEGVAFSPAILKDMPNPKLLEQLLNYHQAKENALNAAKPFKSPLPLAQI

SEQ ID NO: 21107 - protein, 205 aa, Helicobacter mustelae
  misc_feature (1)..(205): tr|D3UHV5|D3UHV5_HELM1 Putative 6-pyruvoyl tetrahydrobi opterin synthase OS=Helicobacter mustelae (strain ATCC 43772 / LMG 18044 / NCTC 12198 / 12198) OX=679897 GN=HM U08210 PE=4 SV=1
MIIRRSFSFCAAHIVRNCTSLRCSRSLHGHNYKVEIFLKADRLDNAGMILDFGIFKKEIATFIDSFDHAHHFWNREAEEWKEFCKKASKRYVELCLNPSAENYALIFLFFIDKILGAMEFGNNEGALWVDSVRVHETDHGYAQAFAQDLQNPNFLKHLSLDGVCFSPGITEEWQDPQLLQKLKNYYKDPTLPKPFVNPSPEQQIS

SEQ ID NO: 21108 - protein, 200 aa, Helicobacter pylori
  misc_feature (1)..(200): sp|O25587|QUED_HELPY 6-carboxy-5,6,7,8-tetrahydropterin synthase OS=Helicobacter pylori (strain ATCC 700392 / 26695) OX=85962 GN=queD PE=3 SV=1
MVIRRLYQFCASHVVRNCSSLKCAQNIHGHNYEVEVFIETNRLDNANMALDFGLMQQEMQVFIESFDHAHHFWDKESLEFQRFIENHCVRYVKCSFNLSAESYALMFLYYLTKILQKSVFSNDEGELKVSSVRVHETKNGYAESFLKDLENPHFKSLVHDHCVSFSQGIQNLWHDKDFFNKIISDEKQCFFHAKPLHQIP

SEQ ID NO: 21109 - protein, 167 aa, Helicobacter pylori
  misc_feature (1)..(167): tr|M5YFK7|M5YFK7_HELPX Putative 6-carboxy-5,6,7,8-tetra hydropterin synthase OS=Helicobacter pylori GAMchJs117A i OX=1159061 GN=HMPREF1433_00600 PE=4 SV=1
MEVFIETNRLDNANMVLDFGLMQQEMQVFIESFDHAHHFWDKESVEFQRFIETNCVRYVKCSFNLSAESYALMFLYYLTKILQKSVFSNNEGELKVSSVRVHETKNGYAESFLNDLENPNFKSLVHDHCVSFSQGIQSLWHDKDFFHKIISDEEKCFFHAKPLHQIP

SEQ ID NO: 21110 - protein, 204 aa, Helicobacter sp.
  misc_feature (1)..(204): tr|A0A553V156|A0A553V156_9HELI Uncharacterized protein OS=Helicobacter sp. L8b OX=2593541 GN=FNE76_01785 PE=4 SV=1
MQIRRSFGFCASHVVRNCTSKRCATSIHGHNYTLEVFIEAHKFDRAGMLLDFGIFKQEIASFIDAFDHAHHFWDQESPEFQDFITTHSARYVRLSFNPSAEGYALMFHFFLNAILQATALQNEEAPLSVSSVRVHETDYGYAQSFLKDLRNPDLMAGIGLHSVQFSPAILQDLPNPLLLEQLQNYHASPKALKPFKSPTPLRQI

SEQ ID NO: 21111 - protein, 205 aa, Helicobacter sp.
  misc_feature (1)..(205): tr|A0A268TSN3|A0A268TSN3_9HELI Uncharacterized protein OS=Helicobacter sp. 12S02232-10 OX=1476197 GN=BKH41_073 30 PE=4 SV=1
MVIRRSFGFCASHIVRNCTSKRCSTSIHGHNYKVEIFVGADSLDSAGMILDFGIFKNQIADFIDGFDHAHHFWDKEEPDFIDFILKNSARYIRLSLNPSAENYALILLFYIDKILGATEFGNSEGAIKVTSVRIHETDHGYAEAFREDLNNPNFMKHISLDSVEFSEQIRLEWRDSDMLEKLKAYDCHSLQKPFKNPLPLHQIKI

SEQ ID NO: 21112 - protein, 211 aa, Helicobacter suis
  misc_feature (1)..(211): tr|A0A510HEG8|A0A510HEG8_9HELI 6-carboxy-5,6,7,8-tetrah ydropterin synthase OS=Helicobacter suis OX=104628 GN=q ueD PE=4 SV=1
MQIRRLFSFCASHIVRNCTSRRCATSIHGHNYQVEVFVQAHKLDRAGMALDFGIFKNEIASFIDAFDHAHHFWDQEPLDFQESIKQISKRYVKLSFNPSAENYALMFHFFLDALLQATELHNDEAVCICSVRVHETDYGYAQSFKEDLENPHLMRFISLESVEFSEGILEQMANPHLLDQLKAYHKNMTNPSSKKPFSSPLPLEQICPSHL

SEQ ID NO: 21113 - protein, 216 aa, Helicobacter suis
  misc_feature (1)..(216): tr|E7G4C8|E7G4C8_9HELI 6-pyruvoyl tetrahydrobiopterin s ynthase OS=Helicobacter suis HS5 OX=710394 GN=ptpS PE=4 SV=1
MLQALMQIRRLFSFCASHIVRNCTSRRCATSIHGHNYQVEVFVQAHKLDRAGMALDFGIFKNEIASFIDAFDHAHHFWDQEPLDFQESIKQISKRYVKLSFNPSAENYALMFHFFLDALLQATELHNDEAVCICSVRVHETDYGYAQSFKEDLENPHLMRFISLESVEFSEGILEQMANPHLLDQLKAYHKNMTNPSSKKPFSSPLPLEQICPSHL

SEQ ID NO: 21114 - protein, 193 aa, Helicobacteraceae bacterium
  misc_feature (1)..(193): tr|A0A1J5F1M8|A0A1J5F1M8_9HELI 6-carboxytetrahydropteri n synthase QueD OS=Helicobacteraceae bacterium CG2_30_3 6_10 OX=1805215 GN=AUK54_07760 PE=4 SV=1
MIIRKLFKFENAHIVRGCSSVKCKQSIHGHSYKVELLFESNFLDNGQMVFDFGLMKQNIKALVESFDHAIALWSGDDKEYMSDMKRHSSRWVELPVSPSAEQFSRVIFVMIDNLLKLTTTVNGEKEVKLHSVIVHETDTGYAQGFKEDAYSQNMGVIELDKIIFSETIVNEWADSELWEKIKKKAIFINPKEV

SEQ ID NO: 21115 - protein, 193 aa, Helicobacteraceae bacterium
  misc_feature (1)..(193): tr|A0A1J4TSS2|A0A1J4TSS2_9HELI 6-carboxytetrahydropteri n synthase QueD OS=Helicobacteraceae bacterium CG1_02_3 6_14 OX=1805214 GN=AUJ81_08820 PE=4 SV=1
MIIRKLFKFENAHIVRGCSSKKCRESLHGHSYKVELLFESNFLDNGQMVYDFGLMKQNMKALIESFDHSIALWNGDEKEYINAMKKYSLRWVELPVSPSAEQFSRVIFVMIDKLLRLTTTLNGEKEVKLKSVIVHETDTGYAQAFKEDAYSENMGEIGLEKIIFSDEVISEWADCELWKKIKKGVVFVNPKEV

SEQ ID NO: 21116 - protein, 130 aa, Heliobacterium modesticaldum
  misc_feature (1)..(130): tr|B0TFF5|B0TFF5_HELMI 6-carboxy-5,6,7,8-tetrahydropter in synthase OS=Heliobacterium modesticaldum (strain ATC C 51547 / Ice1) OX=498761 GN=HM1_0437 PE=3 SV=1
MYELIVQTHFDAAHYLRDYPGDCARVHGHTWQVEVTLVGRQLDDLGMLIDFKEVKKAVKAICDQLDHRMINEHDYFLQRNPTAENLSCYFFHELAGWLKENHPHVRVGTVRIWESPRASICYRADDDISA

SEQ ID NO: 21117 - protein, 132 aa, Heliophilum fasciatum
  misc_feature (1)..(132): tr|A0A4R2S7P2|A0A4R2S7P2_9FIRM 6-carboxy-5,6,7,8-tetrah ydropterin synthase OS=Heliophilum fasciatum OX=35700 G N=EDD73_105153 PE=3 SV=1
MYELIVQSHFDAAHFLRDYPGKCANVHGHTWQVELAVGGTQLDSLGILVDFYQLKTQLNKVCDSLDHRMINEQEPFLTQNPTAENLSRYFYESLTAWLKTAYPGNVVRYVRVWESPKASVRYIPEGAEGLIP

SEQ ID NO: 21118 - protein, 121 aa, Henriciella algicola
  misc_feature (1)..(121): tr|A0A399R9N8|A0A399R9N8_9RHOB 6-carboxy-5,6,7,8-tetrah ydropterin synthase OS=Henriciella algicola OX=1608422 GN=D1222_13460 PE=3 SV=1
MFEISKAVTFEAAHFMGGKPEGHPYRNLHGHSFRLEAAVKGRVKPGEEWVEDFSKLTEALKATAEKLDHSLLNEIDGLSVPTLERICLWAAREIKAELPGLSRITLSRPSLNESCTLELGQ

SEQ ID NO: 21119 - protein, 121 aa, Henriciella barbarensis
  misc_feature (1)..(121): tr|A0A399QXH5|A0A399QXH5_9RHOB 6-carboxy-5,6,7,8-tetrah ydropterin synthase OS=Henriciella barbarensis OX=86342 GN=D1224_05030 PE=3 SV=1
MFEISKAVTFEAAHFMGGKPEGHPYRNLHGHSFRLEAAIKGRVKPGEEWVEDFSKLTEALKATAEKLDHSLLNEIDGLSVPTLERICLWAAREIKSELPRLSRITLSRPSLNESCTLDLGQ

SEQ ID NO: 21120 - protein, 122 aa, Henriciella sp.
  misc_feature (1)..(122): tr|A0A2E6L7C5|A0A2E6L7C5_9RHOB 6-carboxy-5,6,7,8-tetrah ydropterin synthase OS=Henriciella sp. OX=1968823 GN=CO A64_07030 PE=3 SV=1
MFEISKAVTFEAAHFMGGKPEGHPYRNMHGHSFRLEAAVKGKVKPGEEWVEDFSKLTAALKAAAEKLDHSLLNEIDGLSVPTLERICLWAAREIGAELPGLRRVTLSRPSLNESCTLELSGQ

SEQ ID NO: 21121 - protein, 146 aa, Henriciella sp.
  misc_feature (1)..(146): tr|A0A399RR89|A0A399RR89_9RHOB 6-carboxy-5,6,7,8-tetrah ydropterin synthase OS=Henriciella sp. JN25 OX=2305466 GN=D1223_00720 PE=3 SV=1
MATELTNPQTDRAALNPSGEVFEISKAVTFEAAHFMGGKPEGHPYRNLHGHSFRLEASVRGKVKPGEEWVEDFSKLTAALQDVAQQLDHTLLNEIEGLSVPTLERICLWVAKALRPTLPGLTRVTLSRPSLNETCTLDLAGQSNAQ

SEQ ID NO: 21122 - protein, 148 aa, Herbaspirillum aquaticum
  misc_feature (1)..(148): tr|A0A225SWZ1|A0A225SWZ1_9BURK 6-carboxy-5,6,7,8-tetrah ydropterin synthase OS=Herbaspirillum aquaticum OX=5687 83 GN=queD PE=3 SV=1
MLTITRKLEFDAGHRIPDHKSQCRNLHGHRYTLEITLTGAVIDIEGNSDNGMIMDFSDIKALAKEHLVDVWDHAFLVYEKDAPVRDFLASLPGHKTVIIGSIPTVENLAREAFAILKAAYKDRYGTGLHLQKLVLHETPNCWAEITAD

SEQ ID NO: 21123 - protein, 148 aa, Herbaspirillum hiltneri
  misc_feature (1)..(148): tr|A0A561JTJ0|A0A561JTJ0_9BURK 6-pyruvoyltetrahydropter in/6-carboxytetrahydropterin synthase OS=Herbaspirillum hiltneri OX=341045 GN=FHW60_104116 PE=4 SV=1
MLTITRKLEFDAGHRIPDHKSQCRNLHGHRYTLEITLVGKVIEVEGSSDNGMIMDFSDIKTLAKQHLVDVWDHAFLVYEKDQPVRDFLASLPDHKTVVIDRIPTVENLARTAFDILNAAYKDAYGTGLHLQKLVLHETPNCWAEITAD

SEQ ID NO: 21124 - protein, 148 aa, Herbaspirillum huttiense
  misc_feature (1)..(148): tr|A0A4R8JAS9|A0A4R8JAS9_9BURK 6-pyruvoyltetrahydropter in/6-carboxytetrahydropterin synthase OS=Herbaspirillum huttiense OX=863372 GN=DFS02_4921 PE=4 SV=1
MLTITRKLEFDAGHRIPDHKSQCRNLHGHRYTLEITLTGAVIDIEGNSDNGMIMDFSDIKALAKEHLVDVWDHAFLVYEKDTPVRDFLASLPGHKTVIIGSIPTVENLAREAFAILKAAYKDRYGTGLHLQKLVLHETPNCWAEITAD

SEQ ID NO: 21125 - protein, 148 aa, Herbaspirillum huttiense; identical to SEQ ID NO: 21122
  misc_feature (1)..(148): tr|A0A4P7AAM2|A0A4P7AAM2_9BURK 6-carboxy-5,6,7,8-tetrah ydropterin synthase OS=Herbaspirillum huttiense OX=8633 72 GN=queD PE=3 SV=1

SEQ ID NO: 21126 - protein, 148 aa, Herbaspirillum robiniae
  misc_feature (1)..(148): tr|A0A246WWN9|A0A246WWN9_9BURK 6-carboxytetrahydropteri n synthase QueD OS=Herbaspirillum robiniae OX=2014887 G N=queD PE=4 SV=1
MLTITRKLEFDAGHRIPDHKSQCRNLHGHRYTLEITLTGAVIDIEGNSDNGMIMDFSDIKSLAKEHLVDVWDHAFLVYEKDTPVRDFLASLPGHKTVIIDSIPTVENLARAAFNILKAAYKDRYGTGLHLQKIVLHETPNCWAEVTAD

SEQ ID NO: 21127 - protein, 148 aa, Herbaspirillum rubrisubalbicans; identical to SEQ ID NO: 21124
  misc_feature (1)..(148): tr|A0A328J4H0|A0A328J4H0_9BURK 6-carboxy-5,6,7,8-tetrah ydropterin synthase OS=Herbaspirillum rubrisubalbicans OX=80842 GN=RB24_02500 PE=4 SV=1

SEQ ID NO: 21128 - protein, 148 aa, Herbaspirillum rubrisubalbicans; identical to SEQ ID NO: 21124
  misc_feature (1)..(148): tr|A0A0U3LI90|A0A0U3LI90_9BURK 6-pyruvoyl-tetrahydropte rin synthase protein OS=Herbaspirillum rubrisubalbicans M1 OX=1078773 GN=Hrubri_2092 PE=4 SV=1

SEQ ID NO: 21129 - protein, 148 aa, Herbaspirillum seropedicae; identical to SEQ ID NO: 21124
  misc_feature (1)..(148): tr|D8IU48|D8IU48_HERSS 6-pyruvoyl-tetrahydropterin synt hase protein OS=Herbaspirillum seropedicae (strain SmR1 ) OX=757424 GN=Hsero_2211 PE=4 SV=1

SEQ ID NO: 21130 - protein, 148 aa, Herbaspirillum seropedicae; identical to SEQ ID NO: 21124
  misc_feature (1)..(148): tr|A0A4R8NTF7|A0A4R8NTF7_HERSE 6-pyruvoyltetrahydropter in/6-carboxytetrahydropterin synthase OS=Herbaspirillum seropedicae OX=964 GN=DFO49_3441 PE=4 SV=1

SEQ ID NO: 21131 - protein, 148 aa, Herbaspirillum sp.
  misc_feature (1)..(148): tr|J3DHF5|J3DHF5_9BURK Queuosine biosynthesis protein Q ueD OS=Herbaspirillum sp. CF444 OX=1144319 GN=PMI16_012 76 PE=4 SV=1
MLTITRKLEFDAGHRIPDHKSQCRNLHGHRYTLEITLVGKVIDVEGSSDNGMIMDFSDIKTLAKQHLVDVWDHAFLVYEKDKPVRDFLASLPDHKTVVIDRIPTVENLARTAFDILNAAYKDAYGTGLHLQKLVLHETPNCWAEITAD

SEQ ID NO: 21132 - protein, 148 aa, Herbaspirillum sp.
  misc_feature (1)..(148): tr|A0A418X160|A0A418X160_9BURK 6-carboxytetrahydropteri n synthase QueD OS=Herbaspirillum sp. K2R10-39 OX=23208 62 GN=queD PE=4 SV=1
MLTITRKLEFDAGHRIPDHKSQCRNLHGHRYTVEITLAGAVIEEEGSSDNGMIMDFSDVKALAKQHLVDVWDHAFLVYKKDSAVREFLESIPGHKTVIIDSIPTVENLARTAFNLLKAAYQDRYGTGLRLQKLVLHETPNCWAEITAD

SEQ ID NO: 21133 - protein, 149 aa, Herminiimonas arsenicoxydans
  misc_feature (1)..(149): tr|A4G4W5|A4G4W5_HERAR Putative 6-pyruvoyl tetrahydrobi opterin synthase OS=Herminiimonas arsenicoxydans OX=204 773 GN=HEAR1380 PE=4 SV=1
MLTITRKLEFDAGHRIPDHKSQCRNLHGHRYTLEITLVGNVIDEEGSSDNGMIMDFSDIKSLAKQHLVDVWDHSFLVYEKDVKVREFLESIPDHKTVVIDRIPTVENLAQTAFNILNAAYKDHYGTGLRLHKLVLHETPNCWAEITAEG

SEQ ID NO: 21134 - protein, 149 aa, Herminiimonas fonticola
  misc_feature (1)..(149): tr|A0A4R6G6U8|A0A4R6G6U8_9BURK 6-pyruvoyltetrahydropter in/6-carboxytetrahydropterin synthase OS=Herminiimonas fonticola OX=303380 GN=EV677_2299 PE=4 SV=1
MLTITRKLEFDAGHRIPDHKSQCRNLHGHRYTLEITLVGNVIDEEGSSDNGMIMDFSDIKSLAKQHLVDVWDHSFIVYEEDAKVREFLESIPGHKTVIIDRIPTVENLAQTAFNILNAAYKDHYGTGLRLHKLVLHETPNCWAEITAEG

SEQ ID NO: 21135 - protein, 149 aa, Herminiimonas sp.
  misc_feature (1)..(149): tr|A0A3N7CWH4|A0A3N7CWH4_9BURK 6-carboxytetrahydropteri n synthase QueD OS=Herminiimonas sp. KBW02 OX=2153363 G N=queD PE=4 SV=1
MLTITRKLEFDAGHRIPDHKSQCRNLHGHRYTLEITLLGEVIDVEGSSDNGMIMDFSDIKALAKEHLVDVWDHAFLVYEKDAKVREFLESIPGHKTVIIDRIPTVENLAQTAFNILNAAYQDRFGTGLRLHKLVLHETPNCWAEITAEG

SEQ ID NO: 21136 - protein, 273 aa, Herpetosiphon aurantiacus
  misc_feature (1)..(273): tr|A9B5F7|A9B5F7_HERA2 Uncharacterized protein OS=Herpe tosiphon aurantiacus (strain ATCC 23779 / DSM 785 / 114 -95) OX=316274 GN=Haur_0130 PE=4 SV=1
MDVFATRRFNFSASHRYWREEWSLEQNEAVFGKCTNRYGHGHNYELFVTVAGAVDPITGMVMNMVELKRLVTMVLDQFDHKHLNEDTPYFREVIPTTENLVRVLWGLIEPQLPKGVRLAKLRLYENSDLYAEYFGRQQQATFNRRYEFSAAHRLHAQSLTDEANREIYGKCNNPNGHGHNYQLEVTVDGLIDAQTGMVIDLVDMDRRVQSVLDNWDHRHLDYQVAEFAEQPSTAENIVVVLWQRLEALFGSQLKHLRLWETANNVFDYPLSQH

SEQ ID NO: 21137 - protein, 165 aa, Herpetosiphon aurantiacus
  misc_feature (1)..(165): tr|A9B2M7|A9B2M7_HERA2 6-pyruvoyl tetrahydrobiopterin s ynthase OS=Herpetosiphon aurantiacus (strain ATCC 23779 / DSM 785 / 114-95) OX=316274 GN=Haur_2840 PE=4 SV=1
MSQRIYRLQVTKDQLGFAAAHFITMRGKCERLHGHNYRVTVEVEGFLCEDQYVVDFGVLKKHAAEIARTLDHRVLLAAENPKIEYSQNEQHLTVRYEDKYYVFPIAEVIMLPIQNTTAELLATYFCAELCERLRQDGVDTLKMVGVWVSEGPGQQAFASREWVQS

SEQ ID NO: 21138 - protein, 133 aa, Herpetosiphon geysericola
  misc_feature (1)..(133): tr|A0A0P6YJJ8|A0A0P6YJJ8_9CHLR 6-carboxy-5,6,7,8-tetrah ydropterin synthase OS=Herpetosiphon geysericola OX=709 96 GN=SE18_16670 PE=3 SV=1
MHAILTKQFRFEAAHQLPNHRGKCARLHGHSYLLEVSVRGPIQPARGQSDDGMVIDLEQIKEVVNEILIARVDHYNLNDVLSVPSTAENIIHWMWDELEQQAPEFGALLWRMRLWETASGYVEISRAEREAQP

SEQ ID NO: 21139 - protein, 273 aa, Herpetosiphon geysericola
  misc_feature (1)..(273): tr|A0A0P6XEC5|A0A0P6XEC5_9CHLR 6-pyruvoyl tetrahydropte rin synthase OS=Herpetosiphon geysericola OX=70996 GN=S E18_22645 PE=4 SV=1
MDVFATRRFNFSASHRYWREEWSQEQNEAVFGKCTNRYGHGHNYELFVTVAGAVDPITGMVMNMVELKRLVTTVLDQFDHKHLNEDTPYFREIIPTTENLVQVLWGQIEPQLPKGVRLAKLRLYENNDLYAEYFGQQQRATFNRRYEFSAAHRLHAQQLSDEANRDLYGKCNNPNGHGHNYQLEVTVDGLIDAQTGMVIDLVDMDRRVQSVLDDWDHRHLDYQVAEFAEQPSTAENIVVVLWQRLEALFGSQLKHLRLWETANNVFDYPLSHN

SEQ ID NO: 21140 - protein, 124 aa, Hippea maritima
  misc_feature (1)..(124): tr|F2LW99|F2LW99_HIPMA 6-carboxy-5,6,7,8-tetrahydropter in synthase OS=Hippea maritima (strain ATCC 700847 / DS M 10411 / MH2) OX=760142 GN=Hipma_1067 PE=3 SV=1
MFEITITDDFAAAHRLNNYNGACENLHGHNFIVEVSVLCDKLDKAYIAIDFKELKSLTKEIVSKLDHRYLNELEPFKSTNPTSEMIAKYIFEELKKALKDRSCKPSKVSVFESLKAKATYFETQ

SEQ ID NO: 21141 - protein, 132 aa, Hoeflea sp.
  misc_feature (1)..(132): tr|A0A2E2X8I4|A0A2E2X8I4_9RHIZ Uncharacterized protein OS=Hoeflea sp. OX=1940281 GN=CME90_14400 PE=4 SV=1
MFAIEVRDHVMIAHSLPRPVFGLAQGMHGATFVVDAAFYTRELDEDGLAVDIGLATGVLSEVLKPLNYQNLDELEIFKGKVTTTEFLAKHVFDQIANAIKDGRLGEGGGRICKLRIMLHESHTARGWYEADL

SEQ ID NO: 21142 - protein, 116 aa, Holophagaceae bacterium
  misc_feature (1)..(116): tr|A0A3D6ELA4|A0A3D6ELA4_9BACT Uncharacterized protein OS=Holophagaceae bacterium OX=2052165 GN=DHV93_05385 PE =4 SV=1
MAITLSLRRPFVADHFHDLPGFQEDRHGHNWEVEAAVELASEAGEPAFAQALDTWVEAVDYRLLNDLPALAGRNPTAELLAEQAFLHLKDAALEPRWVRIREKANYWALCHAEMTP

SEQ ID NO: 21143 - protein, 166 aa, Hormoscilla sp.
  misc_feature (1)..(166): tr|A0A533PBI7|A0A533PBI7_9CYAN Uncharacterized protein OS=Hormoscilla sp. GUM202 OX=2480853 GN=EBE86_15630 PE= 4 SV=1
MASNSTNKKPVIKYVSTKVFDGFSTCFRQWKASGTHCKYLHGYGVSFKVWFEGELDECNWVWEFGGMKRAKCKIDGMNPKEWMDYMFDHTVIVAEDDPQLDEFYKLESLGLIQLRVVLAVGAEKFAELVFQKLDEFVQAETKGRVRVKRVEFREHAKNTAFVEVMS

SEQ ID NO: 21144 - protein, 166 aa, Hormoscilla sp.
  misc_feature (1)..(166): tr|A0A533NG99|A0A533NG99_9CYAN Uncharacterized protein OS=Hormoscilla sp. GUM007 OX=2480854 GN=EBE85_20230 PE= 4 SV=1
MASNSTSKKNVIKYVSTKVFDGFSTCFRQWKASGTHCKYLHGYGVSFKVWFEGELDECNWVWEFGGMKRAKCKIDGMNPKEWMDYMFDHTVIVAEDDPQLDEFYKLESLGLIQLRVVLAVGAEKFAELVFQKLDEFVQAETKGRVRVKRVEFREHAKNTAFVEVMS

SEQ ID NO: 21145 - protein, 132 aa, Hoyosella subflava
  misc_feature (1)..(132): tr|F6EF16|F6EF16_HOYSD Uncharacterized protein OS=Hoyos ella subflava (strain DSM 45089 / JCM 17490 / NBRC 1090 87 / DQS3-9A1) OX=443218 GN=AS9A_3715 PE=4 SV=1
MFSVTVREHMMIAHSLRGEVFGPAQRLHGATYVVDATFRRTELDPNGIVVDIGAATTALHSVLSDLNYRNLDDDPSLAGTNTTTEVLAKLVADRLVDRIHAGELGESASGLAGIMVTLRESHVAWASYERTP

SEQ ID NO: 21146 - protein, 132 aa, Humibacillus xanthopallidus
  misc_feature (1)..(132): tr|A0A543HTK9|A0A543HTK9_9MICO 6-pyruvoyl-tetrahydropte rin synthase OS=Humibacillus xanthopallidus OX=412689 G N=FBY41_1704 PE=4 SV=1
MFSVTVRDHMMIAHSFTGEVFGPAQRLHGATFVVDVTLRGPELDGDGILVDIGLATDQVRQVVGELSYRNLDDEPAFAGTNTTTEVLARTIAERVAQRVRAGDLGGAARQATGLAVRLHESHVAWATYECDL

SEQ ID NO: 21147 - protein, 132 aa, Humibacillus xanthopallidus
  misc_feature (1)..(132): tr|A0A543PQ87|A0A543PQ87_9MICO 6-pyruvoyl-tetrahydropte rin synthase OS=Humibacillus xanthopallidus OX=412689 G N=FHX52_2948 PE=4 SV=1
MFSVTVRDHMMIAHSFTGEVFGPAQRLHGATFVVDVTFRGPELDSDGILVDIGLATEQVRQVVGELSYRNLDDEPAFAGTNTTTEVLARTISERVAERVRAGDLGGAAGQVTGLAVRLHESHVAWATYECDL

SEQ ID NO: 21148 - protein, 137 aa, Humitalea rosea
  misc_feature (1)..(137): tr|A0A2W7IKS1|A0A2W7IKS1_9PROT 6-pyruvoyl-tetrahydropte rin synthase OS=Humitalea rosea OX=990373 GN=C8P66_1108 3 PE=4 SV=1
MFSLTVADHVMIAHSFRGEEFGPAQRVHGATFVVEAEFRAKALDQANLLVDIAAARVELRKILDGFDYTNLDTLPVFAGQNTTTEYLCFHIHAELCAALKQGKLGAGGHKVEALKVLLRESPLAWAAYEAPIDAALA

SEQ ID NO: 21149 - protein, 128 aa, Hungateiclostridium clariflavum
  misc_feature (1)..(128): tr|G8LWS1|G8LWS1_HUNCD 6-carboxy-5,6,7,8-tetrahydropter in synthase OS=Hungateiclostridium clariflavum (strain DSM 19732 / NBRC 101661 / EBR45) OX=720554 GN=Clocl_327 2 PE=3 SV=1
MKISKVSITKVFTFDSAHSLIDYPGKCKNIHGHTYKLEVTLKGMPDKNGLVIDFHDLNDLVENEILAQIDHKYLNDILDFNPTCEMLGLWIWDQIAKKIKDMECSLEKLVLWETPTSYITIDAKDMKE

SEQ ID NO: 21150 - protein, 127 aa, Hungateiclostridium saccincola
  misc_feature (1)..(127): tr|A0A2K9E768|A0A2K9E768_9FIRM 6-carboxy-5,6,7,8-tetrah ydropterin synthase OS=Hungateiclostridium saccincola O X=1677857 GN=queD PE=3 SV=1
MKIGKVGISKVFTFDSAHHLNDYQGKCKNIHGHTYKLEVTLKGIPDKKGFVIDFHDLDDIIENQVLSKIDHKYLNELFDFNPTCEMLGLWLWDEILKKISDLDLSLEKLVLWETPTSYITIDKKDME

SEQ ID NO: 21151 - protein, 187 aa, Hungateiclostridium sp.
  misc_feature (1)..(187): tr|A0A4Q0IBT9|A0A4Q0IBT9_9FIRM Rubredoxin OS=Hungateicl ostridium sp. N2K1 OX=2487273 GN=EFD62_01155 PE=4 SV=1
MRSFTTLDLQYAHRFYGFKGEAQYLHGHTGILTIEVEDDVNMGVNMVFPCNEIKKIAWDVLQNFDHALVLREDDPLLPAILGVYEAQGIKDGAPTNKQKGPAFKTELATAYPECRLVVTKETMTVEGMIKIVYDLLKDKLNIVKLTFTSGVNGATEEYEPKKDIERCPLCGIALNENGVCPKCGYKK

SEQ ID NO: 21152 - protein, 127 aa, Hungateiclostridium sp.
  misc_feature (1)..(127): tr|A0A4Q0I1X6|A0A4Q0I1X6_9FIRM 6-carboxy-5,6,7,8-tetrah ydropterin synthase OS=Hungateiclostridium sp. N2K1 OX= 2487273 GN=queD PE=3 SV=1
MKIGKVAITKVFTFDSAHHLVDYNGKCKNIHGHTYKLEVTLKGIPDKNGLVMDFHDMEDIIEDEVLEKIDHKYLNDVFDFNPTCEMIGLWLWEEIAKRVKDTQCSLERLMLWETPTSYITIDRHDME

SEQ ID NO: 21153 - protein, 128 aa, Hungateiclostridium straminisolvens
  misc_feature (1)..(128): tr|W4VA69|W4VA69_9FIRM 6-carboxy-5,6,7,8-tetrahydropter in synthase OS=Hungateiclostridium straminisolvens JCM 21531 OX=1294263 GN=JCM21531_3180 PE=3 SV=1
MMKIGKVAITKVFTFDSAHHLVDYNGKCRNIHGHTYKLEVTLKGTPDKNGLVMDFHDLEDIIEDEVLEKVDHKYLNDVFDFNPTCEMIGLWLWEEIAKRVQNTQCSLEKLVLWETPTSYITIDKHDME

SEQ ID NO: 21154 - protein, 127 aa, Hungateiclostridium thermocellum
  misc_feature (1)..(127): tr|A0A4V3Z863|A0A4V3Z863_HUNTH 6-carboxy-5,6,7,8-tetrah ydropterin synthase OS=Hungateiclostridium thermocellum OX=1515 GN=queD PE=3 SV=1
MKIGKVSITKLFTFDSAHHLIDYNGKCRNIHGHTYKLEITLKGLPDENGLVMDFHDLEAIIENEVLEKVDHKYLNDVFDFNPTCEMIGLWLWEEISKQVQNTRCTLEKLVLWETPTSYITIDRNDME

SEQ ID NO: 21155 - protein, 127 aa, Hungateiclostridium thermocellum; identical to SEQ ID NO: 21154
  misc_feature (1)..(127): tr|A3DK22|A3DK22_HUNT2 6-carboxy-5,6,7,8-tetrahydropter in synthase OS=Hungateiclostridium thermocellum (strain ATCC 27405 / DSM 1237 / JCM 9322 / NBRC 103400 / NCIMB 10682 / NRRL B-4536 / VPI 7372) OX=203119 GN=Ct

SEQ ID NO: 21156 - protein, 187 aa, Hungatella effluvii
  misc_feature (1)..(187): tr|A0A2V3Y856|A0A2V3Y856_9CLOT 6-pyruvoyltetrahydropter in/6-carboxytetrahydropterin synthase OS=Hungatella eff luvii OX=1096246 GN=DFR60_103219 PE=4 SV=1
MRSITKLDLQYAHRFYGFKGEAQYLHGHTGILTLEVEDTINTGVNMVFPCNEIQKTAWDVLKNFDHATILREDDPLLPALLGVYEAQGIKDGAPTNIMKGPAFKTELATAYPECRLVVTKETMTVEGMIKIVYDLLKDKLNIVKITFTSGVNAASEEFNPQMTKDRCPLCGIALDENGVCPKCGYRK

SEQ ID NO: 21157 - protein, 187 aa, Hungatella hathewayi; identical to SEQ ID NO: 21156
  misc_feature (1)..(187): tr|A0A174MQN1|A0A174MQN1_9CLOT Queuosine biosynthesis p rotein QueD OS=Hungatella hathewayi OX=154046 GN=DXC39_ 30870 PE=4 SV=1

SEQ ID NO: 21158 - protein, 187 aa, Hungatella hathewayi; identical to SEQ ID NO: 19345
  misc_feature (1)..(187): tr|A0A3E2UA67|A0A3E2UA67_9CLOT Rubredoxin OS=Hungatella hathewayi OX=154046 GN=DWZ21_26660 PE=4 SV=1

SEQ ID NO: 21159 - protein, 136 aa, Hwanghaeella grinnelliae
  misc_feature (1)..(136): tr|A0A437QX89|A0A437QX89_9PROT 6-carboxytetrahydropteri n synthase OS=Hwanghaeella grinnelliae OX=2500179 GN=EO I86_07835 PE=4 SV=1
MFALTVRDHLMIAHSFTGEVFGPAQKLHGATYIVDVEFQCAELDADGLVVDIGLASQALSKVMETYNYKNLDEVPSLSGMNTTTEQMAKVVFDDMAARIAAGDLGPGGPRLSGMKVSLHESHIAWASYEGALGNGA

SEQ ID NO: 21160 - protein, 131 aa, Hwanghaeicola aestuarii
  misc_feature (1)..(131): tr|A0A2W7NFE9|A0A2W7NFE9_9RHOB 6-pyruvoyl-tetrahydropte rin synthase OS=Hwanghaeicola aestuarii OX=568105 GN=LX 81_00842 PE=4 SV=1
MFAVEVRDHIMIGHSLPAPVFGPAQGMHGATFTVDAAFFTEGIDEHGLVVDIGLATQALAETLEPLRYKNLDEVPEFAGKFTTTEFLCGHIFETLAAQVRAGNLGDDGRVKKLRIMLHESHLARAWYEAEI

SEQ ID NO: 21161 - protein, 123 aa, Hyalangium minutum
  misc_feature (1)..(123): tr|A0A085WRD4|A0A085WRD4_9DELT 6-carboxy-5,6,7,8-tetrah ydropterin synthase OS=Hyalangium minutum OX=394096 GN= DB31_5289 PE=3 SV=1
MEIFKAFTFEAAHRLPFTPEGHKCRRLHGHSFSVEIHIRGAVDPQVGWIRDFADLKAAFQPLHETLDHHYLNEVPGLENPTSENLARWIWQRLKPSLPELSSVVVRETCTSGCIYAGEDEGRG

SEQ ID NO: 21162 - protein, 169 aa, Hyalangium minutum
  misc_feature (1)..(169): tr|A0A085WC69|A0A085WC69_9DELT Queuosine biosynthesis Q ueD, PTPS-I OS=Hyalangium minutum OX=394096 GN=DB31_139 8 PE=4 SV=1
MTSRHRIFVSKDVLKFSSAHMTVFPDGSKERLHGHNFQVLLEFELHTTKLVSLLDFGLVKQTLAQVCARWDQRLLLGTRCPAFELVKQDATEVEFKLCGKRYVVPADEVALLPLENVVVETLAEELAFVLVEQLGSLLKRDVVAAMIVTVSESTNQGGSYRWEWEPRPS

SEQ ID NO: 21163 - protein, 136 aa, Hydrobacter penzbergensis
  misc_feature (1)..(136): tr|A0A1H2SUI4|A0A1H2SUI4_9BACT 6-pyruvoyltetrahydropter in/6-carboxytetrahydropterin synthase OS=Hydrobacter pe nzbergensis OX=1235997 GN=SAMN05444410_10275 PE=4 SV=1
MVYLTRLEHFNAAHKLFNPAWSREKNEAVFGVCANENWHGHNYELFVTIKGHPDPDTGFLYDVKKLSVIIKEHVIDKLDHKNLNMDVDFMAGQLCSTENLAIGIWKQLEPHLPEQVKLHCIKLYETSRIYVEYFGE

SEQ ID NO: 21164 - protein, 137 aa, Hydrobacter penzbergensis
  misc_feature (1)..(137): tr|A0A1H2SUB1|A0A1H2SUB1_9BACT 6-pyruvoyltetrahydropter in/6-carboxytetrahydropterin synthase OS=Hydrobacter pe nzbergensis OX=1235997 GN=SAMN05444410_10274 PE=4 SV=1
MNHKVAVFRKEHFNAAHRLHNPAWSEEKNNAEFGLCNNEHYHGHNYELVVKLVGVPDPATGYVMNLKDLSEIIREEVHTRFDHKNLNLDAVEFANLNPTAENIAVVIYQLLRKRIPEHLELTVRLYETKRNFVEYPA

SEQ ID NO: 21165 - protein, 282 aa, Hydrocarboniclastica marina
  misc_feature (1)..(282): tr|A0A4P7XF71|A0A4P7XF71_9ALTE 6-pyruvoyl tetrahydropte rin reductase OS=Hydrocarboniclastica marina OX=2259620 GN=soil367_06415 PE=4 SV=1
MNRLFVENLTVIDFAFLHPRRGLVGESWIVDVELAGELDEQGMVFDFSSVKKIIKQIIDETVDHCLAYPTDAPNLHVIDAAQVTLHWQLDDGSRIEHYSPRTALCPVPGTAINADTLGPVLIAAIKGVLPGNVEDVELTLRPEVIEGAFYHYVHGLKKHLGNCQRIAHGHRSRLKVIRDDARDTQLEATWASQWQDIYIGTQEDICERFLENDIPYLRFRYQANQGDFELLVPEKRAYLIATDSTVEWIADHMATQIKQVHPQCRVRVQAFEGVGKGAIAER

SEQ ID NO: 21166 - protein, 282 aa, Hydrocarboniphaga daqingensis
  misc_feature (1)..(282): tr|A0A1M5KGJ9|A0A1M5KGJ9_9GAMM 6-pyruvoyl tetrahydropte rin synthase OS=Hydrocarboniphaga daqingensis OX=490188 GN=SAMN04488068_0551 PE=4 SV=1
MTSLFVEQLTVIDCAYLDATRGLVGESWIVDIELIGDLDEQSMVLDFGEVKRRIKKVIDQSADHTLIVPQQASGLSLHQAGERSSLSFRSARGLIEHHSPSIALSVADADRIDAAAVVAYLQPRVASVLPPNVDELRLSLRSERIDGAFYHYVHGLKKHDGHCQRIAHGHRSRIHIGIGGQRQPTLEAALAQRWADIYLGTIDDLVDSSGGQCRYAYTAAEGRFELALPAAHVENLPGDTTVERIAEWIASGRWLPDAPAALEVRAYEGVMKGAIARRPIAA

SEQ ID NO: 21167 - protein, 279 aa, Hydrocarboniphaga effusa
  misc_feature (1)..(279): tr|I8T4L0|I8T4L0_9GAMM Uncharacterized protein OS=Hydro carboniphaga effusa AP103 OX=1172194 GN=WQQ_38530 PE=4 SV=1
MEQLTVIDCAYLDARRGLVGESWIVDVELHGDLDEQSMVLDFGDVKKRLKRAIDGSVDHTLLVPQLAPELTIGQRDGDIELQFHSNAGLIEHRSPSVAVSLVDAESIDAQAVTDYLLPHLKAVVPANVAEIHLNLRTERIDGAYYHYVHGLKKHQGQCQRIAHGHRSRIEIRVDGIRSQALEAALAARWTDIYLATREDVVGAADGRLRFAYRSPEGRFELGLPESRVELIDSDTTVEKLAEWIAKRMSGNVKGGQTVQAKAYEGVMKGAIASCKNGDS

SEQ ID NO: 21168 - protein, 135 aa, Hydrocarboniphaga effusa
  misc_feature (1)..(135): tr|I8TCS9|I8TCS9_9GAMM Queuosine biosynthesis protein Q ueD OS=Hydrocarboniphaga effusa AP103 OX=1172194 GN=WQQ _15950 PE=4 SV=1
MYSITVRDHVMIAHSFRGEVFGPAQKLHGATYVIDVVFKRPELDADGLVVDIGLASRAVSAVLRAIDYRNLDDEPQFKGVNTTTEYLARYVFDRIVDAIRAGEIGETARGLAQLGVTLNESHVAAAGYEAALRDL

SEQ ID NO: 21169 - protein, 290 aa, Hydrococcus rivularis
  misc_feature (1)..(290): tr|A0A1U7HPS1|A0A1U7HPS1_9CYAN 6-pyruvoyl tetrahydropte rin synthase OS=Hydrococcus rivularis NIES-593 OX=19218 03 GN=NIES593_04180 PE=4 SV=1
MQCVIHRRAQFSASHRYWLPELDEAENWERFGAGSRFPGHGHNYVLYVSLAGEIDEYGMVQNLSNVKRVIQQEVTSQLDYAYLNDVWSEFQQTLPTTENIARVIWQRLAPHLPLVNIQLFEHPDLWADYKGNGMEATLTVKTHFSAAHQLALPELSQEENNEIYGKCARPNGHGHNYHLEVSVVGEIDPRTGMIVDLGDLQKAIDDYVVEPFDHTFLNKDIPHFAKVVPTAENIALYIAQLLQQPIRELGAELEKVKLIESPNNSCEIYCRQLAEGTTNLQTKKPALAAR

SEQ ID NO: 21170 - protein, 150 aa, Hydrocoleum sp.
  misc_feature (1)..(150): tr|A0A261KRJ1|A0A261KRJ1_9CYAN 6-carboxy-5,6,7,8-tetrah ydropterin synthase OS=Hydrocoleum sp. CS-953 OX=167169 8 GN=AFK68_13705 PE=4 SV=1
MELNEGKEGKSQTLKNESNSETWIIGKEFRFEASHQLPNHDGKCARLHGHSWRGIIYVSGNKLVNSGAKQGMIMDYGDIKKYLKPLLDNYLDHYHLNETTGLANPTSEAIAKWIYEQLEDKIPGLVAVRIDETCTSQCIYSKGESNFLIL

SEQ ID NO: 21171 - protein, 193 aa, Hydrogenimonas sp.
  misc_feature (1)..(193): tr|A0A432R0B3|A0A432R0B3_9PROT 6-carboxytetrahydropteri n synthase QueD OS=Hydrogenimonas sp. OX=2231112 GN=DSY 46_05095 PE=4 SV=1
MIIRKLYKFENAHIVRGCTSRRCSRSIHGHSYKVELLFTAPSLDRGQMVYDFGLTKGMIKDFIDAFDHAITLWSDDDPNYLADMKKWSERWVELPVNPSAEQFARTFFLLIDRVLEQTDMMNGESDVTLDSVIVHETETGYAQADRNDAYNRDMGAIKLDKIIFSEQVKAEWHNPKMFEELLEGKRFVNPSVV

SEQ ID NO: 21172 - protein, 193 aa, Hydrogenimonas sp.
  misc_feature (1)..(193): tr|A0A3G9GWG2|A0A3G9GWG2_9PROT 6-carboxytetrahydropteri n synthase OS=Hydrogenimonas sp. OX=2231112 GN=NNO_0203 PE=4 SV=1
MKIRKMFRFENAHIVRGCTTRRCSRSIHGHSYRVELIFSSEALDRGQMVYDFGLTKGMIKELIDSFDHAITLWEGDDPEYLSDMKRWSERWVQIPVNPSAEQYARLFFVMIDRVLRQTEMVNRESGVELDSVVVHETESGYAEASREDAYSPRLGEIELRRFIFSKRVREEWSDPYMFERLLEGHIFENPKVV

SEQ ID NO: 21173 - protein, 193 aa, Hydrogenimonas thermophila
  misc_feature (1)..(193): tr|A0A1I5R3D9|A0A1I5R3D9_9PROT 6-pyruvoyltetrahydropter in/6-carboxytetrahydropterin synthase OS=Hydrogenimonas thermophila OX=223786 GN=SAMN05216234_12424 PE=4 SV=1
MIIRKLYKFENAHIVRKCTSRRCSRSIHGHSYKVELFFTAPSLDRGEMVYDFGLTKGMIKDFIDAFDHAITLWSSDDPEYLRDMKKWSERWVELPVNPSAEQFARTFFLIIDRVLQQTDMVNGESDVTIDSVIVHETDTGYAKADHSDAYNEEMGTTDLSKIIFSDQVKAEWKNPKMFEELLDGKRFVNPFVA

SEQ ID NO: 21174 - protein, 164 aa, Hydrogenivirga caldilitoris
  misc_feature (1)..(164): tr|A0A497XSI3|A0A497XSI3_9AQUI 6-pyruvoyltetrahydropter in/6-carboxytetrahydropterin synthase OS=Hydrogenivirga caldilitoris OX=246264 GN=BCF55_1510 PE=4 SV=1
MRWEISKTFRFEAGHRVWKQNLTYGRGAEFTRNVEVPQNKCVNLHGHSYLLEVTVGSDTLSEQDMVMDFYHIKNALKELIDRIDHSFIVDRNDPIYPELEEVATKYGAMKVFPVDFCPTAEALAKFFYDFLTERLKDAGLLGEVQVVKVVLWETSTSKAEYRAE

SEQ ID NO: 21175 - protein, 114 aa, Hydrogenivirga caldilitoris
  misc_feature (1)..(114): tr|A0A497XQM8|A0A497XQM8_9AQUI 6-carboxy-5,6,7,8-tetrah ydropterin synthase OS=Hydrogenivirga caldilitoris OX=2 46264 GN=BCF55_1564 PE=3 SV=1
MPWTIRVKRKFNAAHFLTDYHGSPEPLHGHTWGVEVYLEAYELDKGGMGIDFVEIDNFLKDLLPDYKLLNELFDFSPSAENLAMWLYKKVKERYPTLKKVVVWETENCGAEYSE

SEQ ID NO: 21176 - protein, 115 aa, Hydrogenivirga sp.
  misc_feature (1)..(115): tr|A8V2T0|A8V2T0_9AQUI 6-carboxy-5,6,7,8-tetrahydropter in synthase OS=Hydrogenivirga sp. 128-5-R1-1 OX=392423 GN=HG1285_12307 PE=3 SV=1
MPYVVRVRKEFQAAHFLTDYHGKPEPLHGHTWEIEVFIRADKLDKGGMGYDFIEIDKFLDEILPNYKCMNDIYDFSPSAENVAKYLYDKIKEKYPSLQKVVVWETKHGGAEYYEE

SEQ ID NO: 21177 - protein, 80 aa, Hydrogenivirga sp.
  misc_feature (1)..(80): tr|A8V3A8|A8V3A8_9AQUI Uncharacterized protein (Fragmen t) OS=Hydrogenivirga sp. 128-5-R1-1 OX=392423 GN=HG1285 _10956 PE=4 SV=1
NQIDHSFIIDKNDPLYPKFKEDFGFLKLFVVDFCPTAEAIAKFIYDFLEKKLEEAGLLEDIKVVSITVWETETGKAVYRK

SEQ ID NO: 21178 - protein, 113 aa, Hydrogenobacter hydrogenophilus
  misc_feature (1)..(113): tr|A0A285P6E2|A0A285P6E2_9AQUI 6-pyruvoyltetrahydropter in/6-carboxytetrahydropterin synthase (Fragment) OS=Hyd rogenobacter hydrogenophilus OX=35835 GN=SAMN06265353_1 762 PE=4 SV=1
WTLVVKRKFNAAHFLTDYHGSPEPLHGHTWEVELHIRADALDTGGMGFDFVEIDNFLKEILPDYKLLNDLFDFSPSAENIAKWLYEKVKERYPSLQKVVVWETQNCGAEYFEL

SEQ ID NO: 21179 - protein, 164 aa, Hydrogenobacter hydrogenophilus
  misc_feature (1)..(164): tr|A0A285P3J8|A0A285P3J8_9AQUI 6-pyruvoyltetrahydropter in/6-carboxytetrahydropterin synthase OS=Hydrogenobacte r hydrogenophilus OX=35835 GN=SAMN06265353_1553 PE=4 SV =1
MKWQITKVFNFEAGHRVWKQNLTYGRGAQFTQKEGVPQNKCVNLHGHSYTLEVVLGSDTLSEQDMVMDFYHVKNALKDLIDTIDHSFIIDINDPIYQELKEVAEKYGALKIFPVDFCPTAEALAKYFYDFLKKKLQEAGLLGEVRVVKVVLWETKTSKAEYMPE

SEQ ID NO: 21180 - protein, 164 aa, Hydrogenobacter thermophilus
  misc_feature (1)..(164): tr|D3DI44|D3DI44_HYDTT 6-pyruvoyl tetrahydrobiopterin s ynthase OS=Hydrogenobacter thermophilus (strain DSM 653 4 / IAM 12695 / TK-6) OX=608538 GN=HTH_1038 PE=4 SV=1
MKWKITKVFNFEAGHRVWKQNLTHGRGAELTGRDVPLQNKCVNLHGHSYTLEVTLGSDTLSEQDMVMDFYHVKNALKDLIDTMDHSFIIDVNDPMYEELKSLAEKYGAFKIFPVPFCPTAEALAKYFYDFLTQKLEQAGLLKDVKVVSVVLWETKTSKAEYRPE

SEQ ID NO: 21181 - protein, 114 aa, Hydrogenobacter thermophilus
  misc_feature (1)..(114): tr|D3DH61|D3DH61_HYDTT 6-carboxy-5,6,7,8-tetrahydropter in synthase OS=Hydrogenobacter thermophilus (strain DSM 6534 / IAM 12695 / TK-6) OX=608538 GN=HTH_0703 PE=3 SV =1
MPWTVIVKREFQAAHFLTDYHGAPEPLHGHTWKVEVYIRADSLDSGGMGFDFVEIDGFLKEILPDYTLLNDIFDFSPSAENVAKWLYHKVKDRYPTVQKVVVWETQYCGAEYWE

SEQ ID NO: 21182 - protein, 113 aa, Hydrogenobaculum sp.
  misc_feature (1)..(113): tr|A0A2J6W7V0|A0A2J6W7V0_9AQUI 6-carboxy-5,6,7,8-tetrah ydropterin synthase OS=Hydrogenobaculum sp. OX=2053560 GN=C0170_06290 PE=3 SV=1
MPYTIRVKKKFNAAHFLTYYKGAPEPIHGHTFGIEVFIEAKELDQGGIGVDFVEVDNYLDDILPDYKLLNDVFDFSPSAENLAKYFFDTLKAKYNVKKVVVWETENCGAEYYE

SEQ ID NO: 21183 - protein, 162 aa, Hydrogenobaculum sp.
  misc_feature (1)..(162): tr|M1R8L2|M1R8L2_9AQUI 6-pyruvoyl-tetrahydropterin synt hase OS=Hydrogenobaculum sp. HO OX=547144 GN=HydHO_1278 PE=4 SV=1
MWYISKTFRFEAGHRVWKQNLSCSRGSSLGSDCIENKCVNLHGHSYEIEVVLCSNVLDNQDMVMDFHHLKSALNPLIDQFDHSFIIDKNDPLFEAFKKINQDFGLKLTTVDFCPTAEALAKYIYDYVKEKFEKAGLLNEVDIYKVVVWETKTSKAEYIGERL

SEQ ID NO: 21184 - protein, 144 aa, Hydrogenophaga intermedia
  misc_feature (1)..(144): tr|A0A1L1PKE6|A0A1L1PKE6_HYDIT Queuosine biosynthesis p rotein QueD OS=Hydrogenophaga intermedia OX=65786 GN=BN 948_03671 PE=4 SV=1
MFSITVRDHFMIAHSFRGEVFGPAQRLHGATYMVDLELRRAALDPDGIVADIGLATQVLREELARLNFRNLDELPEFAGRNTTTEFLAHALFQRLAARIAAGELGPHAVPGSASGGLTAMRVSLQESHVAWAAYEAVLAPLVAG

SEQ ID NO: 21185 - protein, 144 aa, Hydrogenophaga sp.
  misc_feature (1)..(144): tr|A0A1B3M405|A0A1B3M405_9BURK Uncharacterized protein OS=Hydrogenophaga sp. RAC07 OX=1842537 GN=BSY239_1732 P E=4 SV=1
MYAVNVRDHFMIAHSFQGAVFGPAQRMHGATYVVDLELRREALDADGIVVDIGLATQVLREELAALNFRNLDEEPQFNGRNTTTEFLARLIFDRVAARMAAGALGANALPSAGSAGVQHIRVTLNESHVAWASYEGAVPVRATA

SEQ ID NO: 21186 - protein, 141 aa, Hydrogenophaga sp.
  misc_feature (1)..(141): tr|A0A1Q3RDL3|A0A1Q3RDL3_9BURK Uncharacterized protein OS=Hydrogenophaga sp. 70-12 OX=1895769 GN=BGO22_06475 P E=4 SV=1
MFTLTVRDHFMIAHSFRGAVFGPAQALHGATYVVDLALRRPALDPDGLVVDIGLATQLLREELARLNFRNLDEAPEFAGRNTTTEFLAHALFERLAARIAAGALGPHAVPGGATGGLAAMRVTLNESHVASASYEAALPAA

SEQ ID NO: 21187 - protein, 120 aa, Hydrogenophilaceae bacterium
  misc_feature (1)..(120): tr|A0A1J4YZF9|A0A1J4YZF9_9PROT 6-carboxy-5,6,7,8-tetrah ydropterin synthase OS=Hydrogenophilaceae bacterium CG1 _02_62_390 OX=1805218 GN=AUJ86_03790 PE=3 SV=1
MDIFNIFHLESARRLPNLPAEHPCARVHGHSFQVEVHLSGPLDETLGWVTDFAEVEVAWAPVKAALDHRYLNDVPGLDNPTSERLAIWIWDRLKPMLPGLAKIIIRETASSGCVYEGERA

SEQ ID NO: 21188 - protein, 166 aa, Hydrogenophilales bacterium
  misc_feature (1)..(166): tr|A0A259ELV2|A0A259ELV2_9PROT Uncharacterized protein OS=Hydrogenophilales bacterium 17-64-11 OX=1970526 GN=B 7X91_09150 PE=4 SV=1
MPSAPFVTWVEPADLGFNSAHFITYGKVCENLHGHNFHARVAAHGGDSGEGYVLDFVALTRLARGICQQLSDRVILPGTSPVVKLAEEDGLIKAESFGKRFWVEKEGCVVLPIANVTAELLAFHIGERLVEALRRENLTAGVQLLEVGVEEADRQWGFSRHRPRHD

SEQ ID NO: 21189 - protein, 156 aa, Hydrogenophilales bacterium
  misc_feature (1)..(156): tr|A0A5C7EKR5|A0A5C7EKR5_9PROT 6-carboxytetrahydropteri n synthase QueD OS=Hydrogenophilales bacterium SM250 OX =2602750 GN=queD PE=4 SV=1
MLITRRLEFDAGHRIPNHSSNCRHLHGHRYALEVTLSGNIITSEGAPEQGMVMDFAEVKAIAQRHVVDAWDHAFLVYAQDTVVVEFLRSLPGHKTVVLAAPPTAENLALEAFRILDAAYRDVYGNQLKLERVRVYETPNCWADAVRGQDPSLQGKG

SEQ ID NO: 21190 - protein, 167 aa, Hydrogenophilus thermoluteolus
  misc_feature (1)..(167): tr|A0A2Z6DXH5|A0A2Z6DXH5_HYDTE Uncharacterized protein OS=Hydrogenophilus thermoluteolus OX=297 GN=HPTL_0882 P E=4 SV=1
MTLERQPDLPPGVEAEFAITRRLEFDAGHRIPDHRSLCRHVHGHRYVLELTLVGMPDQTPGSPERGMVMDFGDVKRIAWEQLVGHWDHAFLVWNEDPVADAIDAVLPNHRTVRLDVIPTAENLARIAFTTLAPHFRARYGRHLRLARVRLYETPNCWADYPLEIGAH

SEQ ID NO: 21191 - protein, 162 aa, Hydrogenothermus marinus
  misc_feature (1)..(162): tr|A0A3M0BN66|A0A3M0BN66_9AQUI 6-pyruvoyltetrahydropter in/6-carboxytetrahydropterin synthase OS=Hydrogenotherm us marinus OX=133270 GN=CLV39_0342 PE=4 SV=1
MRYEITKKFKFEAGHRVWKQNLMAGKGAKLMGNEIPPNPCLNIHGHSYKLEVTVGSDTLNEQEMVIDFYHIKAALKDLIDNQIDHSFIIDKNDPLYPKFKEDFGFLKLFIVDFCPTAEAIAKFIYEFLEKKLEEAGLLEDIKIVSITVWETETGKATYKGEK

SEQ ID NO: 21192 - protein, 115 aa, Hydrogenothermus marinus
  misc_feature (1)..(115): tr|A0A3M0BRL0|A0A3M0BRL0_9AQUI 6-carboxy-5,6,7,8-tetrah ydropterin synthase OS=Hydrogenothermus marinus OX=1332 70 GN=CLV39_0790 PE=3 SV=1
MPYIVRVRKEFQAAHFLTDYHGKPEPLHGHTWEVEIFIRADKLDKGGMGFDFIEIDKFLDEILPNYKCMNDIYDFSPSAENVAKYLYDKIKERYPSLQKVVVWETKHGGAEYYEE

SEQ ID NO: 21193 - protein, 115 aa, Hydrogenothermus sp.
  misc_feature (1)..(115): tr|A0A432REF0|A0A432REF0_9AQUI 6-carboxy-5,6,7,8-tetrah ydropterin synthase OS=Hydrogenothermus sp. OX=2231113 GN=DSY47_03515 PE=3 SV=1
MPYIVRVRKEFQAAHYLTDYHGKPEPLHGHTWEVEVFIRADKLDNGGMGYDFIEIDRFLDEILPNYKCMNDIYDFSPSAENVARYLYEKIKEKYPSLQKVVVWETKHGGAEYYEE

SEQ ID NO: 21194 - protein, 160 aa, Hydrogenothermus sp.
  misc_feature (1)..(160): tr|A0A432RBL7|A0A432RBL7_9AQUI 6-carboxy-5,6,7,8-tetrah ydropterin synthase OS=Hydrogenothermus sp. OX=2231113 GN=DSY47_05850 PE=4 SV=1
MKYEITKRFKFEAGHRVWKQNLMAGKGAKLMGNEIPPNPCLNIHGHSYKVEVTVGSDTLNEQDMVIDFYHIKAALKDLIDNQIDHSFIIDKNDPLYPKFKEDFGFLKLFVVDFCPTAEALAKFIYDFLTKKLEEAGLLDDIKVVGVTVWETETGKAVYKG

SEQ ID NO: 21195 - protein, 125 aa, Hydrogenovibrio crunogenus
  misc_feature (1)..(125): tr|Q31FT9|Q31FT9_HYDCU 6-carboxy-5,6,7,8-tetrahydropter in synthase OS=Hydrogenovibrio crunogenus (strain XCL-2 ) OX=317025 GN=Tcr_1389 PE=3 SV=1
MAQQFVLKTLLDFASAHSLRGYPGDCAKLHGHNWKIEVQVVGDKLNDIGMLVDFKEIKRHAKEVISELDHTFLNDHPHFKEKNPTAENIAEYIYKQIQQRIQSSTVKMHSLTVWENDRNCVIYSE

SEQ ID NO: 21196 - protein, 125 aa, Hydrogenovibrio crunogenus
  misc_feature (1)..(125): tr|A0A4P7P0I0|A0A4P7P0I0_9GAMM 6-carboxy-5,6,7,8-tetrah ydropterin synthase OS=Hydrogenovibrio crunogenus OX=39 765 GN=queD PE=3 SV=1
MAQQFVLKTLLDFASAHSLRGYPGDCAKLHGHNWKIEVQVVGDKLNDIGMLVDFKEIKRHAKEVISELDHTFLNDHPHFKEKNPTAENIAEYLYQQIQQRIESSTVNMHSLTVWENDRNCVIYSE

SEQ ID NO: 21197 - protein, 129 aa, Hydrogenovibrio marinus
  misc_feature (1)..(129): tr|A0A066ZSW1|A0A066ZSW1_HYDMR 6-carboxy-5,6,7,8-tetrah ydropterin synthase OS=Hydrogenovibrio marinus OX=28885 GN=EI16_03430 PE=3 SV=1
MAQQFVLKTLLDFASAHSLRGYPGDCANLHGHNWKIEVEIVGQELNDIGMVIDFKQIKKHAKEIVKELDHKFLNDIEYFKTVNPTAENIAQYLFRQIQQRIEAPNVTMHQITVWENDRNCVIYSEPSTS

SEQ ID NO: 21198 - protein, 125 aa, Hydrogenovibrio sp.
  misc_feature (1)..(125): tr|A0A2I2A4Q6|A0A2I2A4Q6_9GAMM 6-carboxy-5,6,7,8-tetrah ydropterin synthase OS=Hydrogenovibrio sp. SC-1 OX=2065 820 GN=queD PE=3 SV=1
MAQQFILKTLLDFASAHSLRGYPGDCAKLHGHNWKIEIEVIGHKLNEIGMLIDFKEIKRHAKAVIDELDHSFLNDHPHFKELNPTAEHIAQYIYREIQNRIGSNQLKMHRLTVWENDRNCVIYSE

SEQ ID NO: 21199 - protein, 127 aa, Hydrogenovibrio thermophilus
  misc_feature (1)..(127): tr|A0A410H3M1|A0A410H3M1_9GAMM 6-carboxy-5,6,7,8-tetrah ydropterin synthase OS=Hydrogenovibrio thermophilus OX= 265883 GN=queD PE=3 SV=1
MAQQFVLKTLLDFAAAHSLKNYPGDCAKLHGHNWKIEVQVQGSKLNEIGMLVDFKEIKKHAKQVVAELDHTFLNDHPYFKELNPTAENIAVFLYREIESRIQSDTVTMHSLTVWENDRNCVIYSEND

SEQ ID NO: 21200 - protein, 334 aa, Hydromonas duriensis
  misc_feature (1)..(334): tr|A0A4R6YAY6|A0A4R6YAY6_9BURK 6-pyruvoyltetrahydropter in/6-carboxytetrahydropterin synthase OS=Hydromonas dur iensis OX=1527608 GN=DFR44_10222 PE=4 SV=1
MTIESICCFNFEAARTLSSVASTHGHSFKVTARARVEQDVLEQSLADVCQPWQMQDLNAFFSNPTDVLIAQHIADTLQQQLGQVVKVELRSSPDVWVACTENAIFHGLTASFSAAHYLPNVPEGHQCGRLHGHGFKVKLWADARLSDASALEKAWLDVRAQLHHAYLNHIEGLENPTSEHLTEWLWQRLGAALPMRAVEVFETSTAGSRRDASGFTIWKELRFEAACPFDDAGRYTGHSYLTRLYLHGSQLDVHAGWLRDFAEVKAIFKPIYQQLDHYALDCISDLSTYDNGSLAAWLVGQLNDTLPELRAVEVFESEQRGAAAYVQRSCDVHC

SEQ ID NO: 21201 - protein, 340 aa, Hydromonas sp.
  misc_feature (1)..(340): tr|A0A345DD83|A0A345DD83_9BURK 6-carboxy-5,6,7,8-tetrah ydropterin synthase OS=Hydromonas sp. F02 OX=2268024 GN =queD PE=4 SV=1
MNNLLKQRFIAGMGFEAARRLGSSERHGHSFWVTVTCEVPLDVLKQALASVCAVWHMRDLNDFFIEPSDVTLAQCIRVTVQSQLAHVGDGGDREVSVELRSAPNVGVCYEGAQVCRWLSADFSAAHFLPNVPEGHQCGRLHGHGFKVKLSVDAQACAPERLAGAWQHLHAQLHHSHLNHIKGLENPTSEHLTEWLWQQLQSVVPLCSVEVFETSTAGSRRDAKGFTIWKEVRFEAAQPFDGAGRYTGHSYLARLYLQGETLDAQAGWLRDFADVKAVFKPIYNQLDHYALDAIADLTAYDSATLAAWMATQLSGALPELSRVDVFENESSGAAVFVQEGA

SEQ ID NO: 21202 - protein, 136 aa, Hydrotalea sandarakina
  misc_feature (1)..(136): tr|A0A2W7SBX8|A0A2W7SBX8_9BACT 6-pyruvoyltetrahydropter in/6-carboxytetrahydropterin synthase OS=Hydrotalea san darakina OX=1004304 GN=LX80_00755 PE=4 SV=1
MVYLTRQEHFNAAHKLYNPNWSKEKNEAVFGVCANENWHGHNYDLFVTIKGNPDPETGFLYDVKKLSQLIKTKVIDKLDHKNLNLDVDFMLGKMCSTENLAIAIWEQLQPHLPENVQLHCIKLYETARIYVEYFGE

SEQ ID NO: 21203 - protein, 139 aa, Hydrotalea sandarakina
  misc_feature (1)..(139): tr|A0A2W7SF80|A0A2W7SF80_9BACT 6-carboxy-5,6,7,8-tetrah ydropterin synthase OS=Hydrotalea sandarakina OX=100430 4 GN=LX80_02245 PE=3 SV=1
MMDLNKVAIYRKEHFNAAHRLHNANWSDEKNAEIFGLCNNKNFHGHNYELIVKVTGIPDANTGYVIDTKVLSTIIKEEVLNRFDHKNLNLDTVYFKELNPTAENIAKVIYQLLRNKLDENLELKIFLYETERNYVEYPA

SEQ ID NO: 21204 - protein, 158 aa, Hydrotalea sp.
  misc_feature (1)..(158): tr|A0A4Q0AWH8|A0A4Q0AWH8_9BACT 6-carboxytetrahydropteri n synthase OS=Hydrotalea sp. AMD OX=2501297 GN=EO766_10 940 PE=4 SV=1
MKASINKTEVMIQVTKIFKFEMAHAIYGYDGPCKNIHGHSYVLHVSVTLKNATDEYLLAPGFVIDFKMLKKIVNEAIVQQLDHSVVVSKAFIQAHPQLADLSNVRIWEMEPSAENIISYIQKQLQLLLPDAIQLQKLQLFETADSYAEWINTKSRFHE

SEQ ID NO: 21205 - protein, 138 aa, Hydrotalea sp.
  misc_feature (1)..(138): tr|A0A4Q0AVC9|A0A4Q0AVC9_9BACT 6-carboxy-5,6,7,8-tetrah ydropterin synthase OS=Hydrotalea sp. AMD OX=2501297 GN =EO766_13005 PE=3 SV=1
MKQNKVAVYRKEHFNAAHRLHNNAWSDEKNATVFGLCNNKNFHGHNYELIVKVTGEPNPDTGYVLDLKVLSALIKKEILDQFDHKNLNLDTGYFQQVNPTAENIAKVIYQLLRDKLDEQLELKIFLYETERNYVEYPA

SEQ ID NO: 21206 - protein, 289 aa, Hyella patelloides
  misc_feature (1)..(289): tr|A0A563W4T3|A0A563W4T3_9CYAN Uncharacterized protein OS=Hyella patelloides LEGE 07179 OX=945734 GN=H1P_87001 5 PE=4 SV=1
MKCIINRRAKFSASHRYWLPELDEAENQRLFGACSRFPGHGHNYVLYVSLEGELDQYGMVENLSTVKKVIKKEVTSQLDYGYLNDAWSEFSETLPTTENIARVIWQKLAPHLPLVDIQLYESPELWANYRGNNMESALTIKTHFSAAHRLAKPELSLQENTEVYGKCARVNGHGHNYHLEVSVVGQIDSRTGMLVDLGELQRVIDELVVEPMDHTFLNKDIPYFAEVVPTAENIALYIAQTLSSPIKELGAELDKVKLIESPNNSCEIFCRQGVSNLSSTENKKPAMAV

SEQ ID NO: 21207 - protein, 135 aa, Hymenobacter actinosclerus
  misc_feature (1)..(135): tr|A0A1I0AKF4|A0A1I0AKF4_9BACT 6-carboxy-5,6,7,8-tetrah ydropterin synthase OS=Hymenobacter actinosclerus OX=82 805 GN=SAMN04487998_0739 PE=3 SV=1
MPITICRQEHFNAAHRLHNPAWSDERNQEVFDKCNNANYHGHNYQLIVRLTGEIDPETGYVYDMKKLSDLIKREILDTFDHRNLNLDVADFQHLNPTAENIAVVSWNRLRPHLADNLALSVTLYETERNFVEYHG

SEQ ID NO: 21208 - protein, 139 aa, Hymenobacter actinosclerus
  misc_feature (1)..(139): tr|A0A1I0B4J7|A0A1I0B4J7_9BACT 6-pyruvoyltetrahydropter in/6-carboxytetrahydropterin synthase OS=Hymenobacter a ctinosclerus OX=82805 GN=SAMN04487998_0939 PE=4 SV=1
MIYISRQEHFNAAHKLHNPKWSDERNAEVFGPCANVNWHGHNYDLIVTVKGRPDPDTGFVIDLKQLSTLIRTHVIDQVDHKNLNLDVPFMAGQLASTENLVVAFWKILAPEIEAISPGRLHSLKLYETPRNFVEYFGEE

SEQ ID NO: 21209 - protein, 135 aa, Hymenobacter amundsenii
  misc_feature (1)..(135): tr|A0A246FMD8|A0A246FMD8_9BACT 6-carboxy-5,6,7,8-tetrah ydropterin synthase OS=Hymenobacter amundsenii OX=20066 85 GN=CDA63_06725 PE=3 SV=1
MTVTICRQEHFNAAHRLHNSAWTDARNEQVFGKCNNPNYHGHNYRLIVRLTGEIDPETGYVYDMKRLSDLIKREILDIFDHRNLNLDTAEFRDLNPTAENIAVVSWNRLRPHVASHLALSVTLYETERNSVEYHG

SEQ ID NO: 21210 - protein, 139 aa, Hymenobacter amundsenii
  misc_feature (1)..(139): tr|A0A246FND9|A0A246FND9_9BACT 6-carboxytetrahydropteri n synthase QueD OS=Hymenobacter amundsenii OX=2006685 G N=CDA63_04120 PE=4 SV=1
MIYISRQEHFNAAHKLHNPKWSEERNREVFGPCANVNWHGHNYDLIVTVKGQPDPETGFVIDLKELSTLIRTHVIDQVDHKNLNIDVPFMQGQLASTENLVVAFWKILQPEIEQISPARLHCLKLYETPRNFVEYYGEA

SEQ ID NO: 21211 - protein, 138 aa, Hymenobacter aquaticus
  misc_feature (1)..(138): tr|A0A4Z0PXM1|A0A4Z0PXM1_9BACT 6-carboxytetrahydropteri n synthase OS=Hymenobacter aquaticus OX=1867101 GN=E5K0 0_19730 PE=4 SV=1
MIYVSRQEHFNAAHKLYNPAWTEERNKEVFGPCANTNWHGHNYDLIVTVKGQPDPETGFVIDLKQLSTLIREHIVDQVDHKNLNLDVPFMKDQLASTENLVVAFWEILNREIPKISRAQLHCIKLYETPRNFVEYYGE

SEQ ID NO: 21212 - protein, 135 aa, Hymenobacter aquaticus
  misc_feature (1)..(135): tr|A0A4Z0PXJ9|A0A4Z0PXJ9_9BACT 6-carboxy-5,6,7,8-tetrah ydropterin synthase OS=Hymenobacter aquaticus OX=186710 1 GN=E5K00_18280 PE=3 SV=1
MNVTVCRTEHFNAAHRLHNPAWSDERNAQVFGKCNNPHYHGHNYVLTVRLTGSIDPATGYVYDLKRLSDLIKREILDTFDHRNLNLDTEEFRDLNPTAENIAVVIWNRLRAHVEPQLALSVTLYETDRNFVEYHG

SEQ ID NO: 21213 - protein, 138 aa, Hymenobacter chitinivorans
  misc_feature (1)..(138): tr|A0A2M9AR20|A0A2M9AR20_9BACT 6-pyruvoyltetrahydropter in/6-carboxytetrahydropterin synthase OS=Hymenobacter c hitinivorans DSM 11115 OX=1121954 GN=CLV45_4832 PE=4 SV =1
MIYVSRQEHFNAAHKLYNPAWTEERNKEVFGPCANTNWHGHNYDLIVTVKGQPDPETGFVIDLKQLSTIIRQHVVDQVDHKNLNLDVPFMKDQLASTENLVVAFWQILAREIPRISSAQLHCIKLYETPRNFVEYYGE

SEQ ID NO: 21214 - protein, 135 aa, Hymenobacter chitinivorans
  misc_feature (1)..(135): tr|A0A2M9BAQ9|A0A2M9BAQ9_9BACT 6-carboxy-5,6,7,8-tetrah ydropterin synthase OS=Hymenobacter chitinivorans DSM 1 1115 OX=1121954 GN=CLV45_3380 PE=3 SV=1
MQVTVGRTEHFNAAHRLHNPAWSDERNTQVFGKCNNPHYHGHNYEVTVRLTGPVDPATGYVYDLKRLSDLIKREILDTFDHRNLNLDTEDFRELNPTAENIAVVIWNRLRAHVEPHLVLSVTLYETDRNFVEYHG

SEQ ID NO: 21215 - protein, 137 aa, Hymenobacter coccineus
  misc_feature (1)..(137): tr|A0A1G1TLG0|A0A1G1TLG0_9BACT 6-carboxytetrahydropteri n synthase QueD OS=Hymenobacter coccineus OX=1908235 GN =BEN49_18745 PE=4 SV=1
MIYVSRHEHFNAAHKLHNPKWSDERNREVFGPCANVNWHGHNYDLVVTVKGTPDPDTGFVVDLKALSDLIKEHVTSQVDHKNLNLDVPFLAGQMASTENLAVAFWEIIARELPAITPAQLHCVKLYETPRNFVEYYG

SEQ ID NO: 21216 - protein, 135 aa, Hymenobacter coccineus
  misc_feature (1)..(135): tr|A0A1G1TJU9|A0A1G1TJU9_9BACT 6-pyruvoyl tetrahydrobio pterin synthase OS=Hymenobacter coccineus OX=1908235 GN =BEN49_20780 PE=4 SV=1
MSVTVCRAEHFNAAHRLHNPAWDEAQNQRVFGPCNNPNYHGHNYNLVVRLTGAVDPDTGYVYDMKRLSNLIKREVLDRYDHRNLNLDVEEFRTLNPTVEHIAVAIWQRLRPHLAAKLALSVTLHETERNFAEYHG

SEQ ID NO: 21217 - protein, 135 aa, Hymenobacter daecheongensis
  misc_feature (1)..(135): tr|A0A1M6CKW7|A0A1M6CKW7_9BACT 6-carboxy-5,6,7,8-tetrah ydropterin synthase OS=Hymenobacter daecheongensis DSM 21074 OX=1121955 GN=SAMN02745146_1182 PE=3 SV=1
MPITVCRKEHFNAAHRLHNPAWSDEQNQRVFGKCNNPHYHGHNYELTVRLTGDIDPETGYVYDLKRLSDLMKREILDTFDHRNLNLDTVDFRDLNPTAENIAVVIWNRLRPHLEPHLALSVTLYETDRNFVEYHG

SEQ ID NO: 21218 - protein, 138 aa, Hymenobacter daecheongensis
  misc_feature (1)..(138): tr|A0A1M6MG23|A0A1M6MG23_9BACT 6-pyruvoyltetrahydropter in/6-carboxytetrahydropterin synthase OS=Hymenobacter d aecheongensis DSM 21074 OX=1121955 GN=SAMN02745146_0272 PE=4 SV=1
MIYVSRQEHFNAAHKLYNPAWTQERNQQVFGPCANTNWHGHNYDLIVTVKGQPDPETGFVIDLKALSSLIREHVVDQVDHKNLNLDVPFMKDQLASTENLVVAFWQILAPEIAKISAAQLHCIKLYETPRNFVEYYGE

SEQ ID NO: 21219 - protein, 138 aa, Hymenobacter elongatus
  misc_feature (1)..(138): tr|A0A4Z0PEB2|A0A4Z0PEB2_9BACT 6-carboxytetrahydropteri n synthase OS=Hymenobacter elongatus OX=877208 GN=E5J99 _20500 PE=4 SV=1
MIYVSRQEHFNAAHKLYNPTWTAERNTEVFGPCSNANWHGHNYDLIVTVKGQPAPETGFVIDLKQLSTLIREHIVDQVDHKNLNLDVPFMAGQLASTENLVVAFWQILAREIPKISTAQLHCIKLYETPRNFVEYYGE

SEQ ID NO: 21220 - protein, 135 aa, Hymenobacter elongatus
  misc_feature (1)..(135): tr|A0A4Z0PR91|A0A4Z0PR91_9BACT 6-carboxy-5,6,7,8-tetrah ydropterin synthase OS=Hymenobacter elongatus OX=877208 GN=E5J99_03500 PE=3 SV=1
MKVTVCRTEHFNAAHRLHNPAWSDEKNAQVFGKCNNPHYHGHNYELTIRLTGEVDPATGYVYDLKRLSDLIKHEILDTFDHRNLNLDTEDFRALNPTAENIAVVIWNRLRTHVEPHLTLSVTLYETARNFVEYHG

SEQ ID NO: 21221 - protein, 135 aa, Hymenobacter gelipurpurascens
  misc_feature (1)..(135): tr|A0A212U9U7|A0A212U9U7_9BACT 6-carboxy-5,6,7,8-tetrah ydropterin synthase OS=Hymenobacter gelipurpurascens OX =89968 GN=SAMN06265337_2690 PE=3 SV=1
MQVTICRKEHFNAAHRLHNPAWSDEQNQRVFGKCNNPHYHGHNYELIVRLTGPIDPDTGYVYDMKRLSDLMKREILDTFDHRNLNLDTEDFRNLNPTAENIAVVIWNRLRPHLAAHLGLSVTLYETERNFVEYHG

SEQ ID NO: 21222 - protein, 140 aa, Hymenobacter gelipurpurascens
  misc_feature (1)..(140): tr|A0A212U8I8|A0A212U8I8_9BACT 6-pyruvoyltetrahydropter in/6-carboxytetrahydropterin synthase OS=Hymenobacter g elipurpurascens OX=89968 GN=SAMN06265337_2419 PE=4 SV=1
MVYISRQEHFNAAHKLYNPNWSEERNTEVFGPCANANWHGHNYDLIVTVKGKPNPETGFVIDLKQLSTVIRTHVVDQVDHKNLNLDVPFMQGQLASTENLVIAFWKILQPQIEQISPARLHSIKLFETPRNFVEYFGEEG

SEQ ID NO: 21223 - protein, 138 aa, Hymenobacter glacialis
  misc_feature (1)..(138): tr|A0A1G1T4E2|A0A1G1T4E2_9BACT 6-carboxytetrahydropteri n synthase QueD OS=Hymenobacter glacialis OX=1908236 GN =BEN48_14150 PE=4 SV=1
MIYVSRQEHFNAAHKLHNPKWSDERNREVFGPCANTNWHGHNYDLIVTVKGQPDPETGFVVDLKALSDLLREHITEQVDHKNLNLDVPFMAGQMASTENLAIAFWQILERELPAITQARLHCVKLYETPRNFVEYYGA

SEQ ID NO: 21224 - protein, 135 aa, Hymenobacter glacialis
  misc_feature (1)..(135): tr|A0A1G1T306|A0A1G1T306_9BACT 6-carboxy-5,6,7,8-tetrah ydropterin synthase OS=Hymenobacter glacialis OX=190823 6 GN=BEN48_14740 PE=3 SV=1
MQVTVCRTEHFNAAHRLHNPAWDAEQNQRVFGKCNNPNYHGHNYNLTVRLTGTVDPETGYVYDMKRLSDLIKVEVLNRYDHHNLNLDTEDFRNLNPTAENMAVVIWQRLRPHLAETLALSVTLYETDRNFVEYHG

SEQ ID NO: 21225 - protein, 139 aa, Hymenobacter gummosus
  misc_feature (1)..(139): tr|A0A431TY88|A0A431TY88_9BACT 6-carboxytetrahydropteri n synthase OS=Hymenobacter gummosus OX=1776032 GN=EJV47 _21900 PE=4 SV=1
MIYISRQEHFNAAHKLYNPAWSEERNKEVFGPCANANWHGHNYDLIVTVKGQPDPDTGFVVDLKALSTLIREHIIRHVDHKNLNLDVPFMSGKLASTENLAVAFWEILQRELPRITSTAQLHGIKIYETPRNFVEYFGE

SEQ ID NO: 21226 - protein, 135 aa, Hymenobacter gummosus
  misc_feature (1)..(135): tr|A0A3S0K610|A0A3S0K610_9BACT 6-carboxytetrahydropteri n synthase OS=Hymenobacter gummosus OX=1776032 GN=EJV47 _11335 PE=4 SV=1
MNVTVGRVESFNAAHRLYNPAWSDEQNVAFFGPCSNANYHGHNYVLTVRLTGAPDAATGYVYDLKDLSRLIKREILDTFDHRNLNLDTEDFRQLNPTAENIARVCWQRLRPHLAPHLALSVTLHETDRNFVEYHG

SEQ ID NO: 21227 - protein, 138 aa, Hymenobacter lapidarius
  misc_feature (1)..(138): tr|A0A1G1T8Q4|A0A1G1T8Q4_9BACT 6-carboxytetrahydropteri n synthase QueD OS=Hymenobacter lapidarius OX=1908237 G N=BEN47_11375 PE=4 SV=1
MIYVSRQEHFNAAHKLHNPKWSDERNREVFGPCANTNWHGHNYDLIVTVKGQPDPETGFVVDLKALSDLLREHITEQVDHKNLNLDVPFMAGQMASTENLAIAFWQILERELPAITQAQLHCVKLYETPRNFVEYYGA

SEQ ID NO: 21228 - protein, 135 aa, Hymenobacter lapidarius
  misc_feature (1)..(135): tr|A0A1G1T4Z3|A0A1G1T4Z3_9BACT 6-carboxy-5,6,7,8-tetrah ydropterin synthase OS=Hymenobacter lapidarius OX=19082 37 GN=BEN47_13885 PE=3 SV=1
MQVTVCRTEHFNAAHRLHNPAWDAEQNQRVFGKCNNPNYHGHNYNLTVRLTGPVDPETGYVYDMKRLSDLIKVEVLNRYDHHNLNLDTEDFRNLNPTAENMAVVIWQRLRPHLAEALALSVTLYETDRNFVEYHG

SEQ ID NO: 21229 - protein, 140 aa, Hymenobacter mucosus
  misc_feature (1)..(140): tr|A0A238VXJ4|A0A238VXJ4_9BACT 6-pyruvoyltetrahydropter in/6-carboxytetrahydropterin synthase OS=Hymenobacter m ucosus OX=1411120 GN=SAMN06269173_10211 PE=4 SV=1
MVYISRQEHFNAAHKLYNPAWSEERNREVFGPCANANWHGHNYDLIVTVKGKPDPETGFVIDLKQLSTVIRTHVVDQVDHKNLNIDVPFMQGQLASTENLVIAFWNILQPEIERISPARLHSIKLYETPRNFVEYFGEDN

SEQ ID NO: 21230 - protein, 135 aa, Hymenobacter mucosus
  misc_feature (1)..(135): tr|A0A238W5S6|A0A238W5S6_9BACT 6-carboxy-5,6,7,8-tetrah ydropterin synthase OS=Hymenobacter mucosus OX=1411120 GN=SAMN06269173_102252 PE=3 SV=1
MQVTVCRKEHFNAAHRLHNPEWSDEQNQRVFGKCNNPHYHGHNYELIVRLTGEIDPRTGYVYDMKILSDLMKREILDTFDHRNLNLDTEEFRNLNPTAENIAVVIWNRLRPHLEEHLTLSVTLYETERNFVEYHG

SEQ ID NO: 21231 - protein, 137 aa, Hymenobacter nivis
  misc_feature (1)..(137): tr|A0A502GZ49|A0A502GZ49_9BACT 6-carboxytetrahydropteri n synthase OS=Hymenobacter nivis OX=1850093 GN=EAH73_07 860 PE=4 SV=1
MIYVSRHEHFNAAHKLHNPKWSDERNREVFGPCANVNWHGHNYDLVVTVKGMPDPDTGFVVDLKALSDLIKEHVTDQVDHKNLNLDVPFLAGQMASTENLAVAFWQILARELPAITPAQLHCVKLYETPRNFVEYYG

SEQ ID NO: 21232 - protein, 135 aa, Hymenobacter nivis
  misc_feature (1)..(135): tr|A0A2Z3GV61|A0A2Z3GV61_9BACT 6-pyruvoyl tetrahydrobio pterin synthase OS=Hymenobacter nivis OX=1850093 GN=DDQ 68_11290 PE=4 SV=1
MSVTVCRVEHFNAAHRLHNPAWDDAQNQRVFGPCNNPNYHGHNYNLVVRLTGAVDPDTGYVYDMKRLSDLIKREVLDRYDHRNLNLDVEEFRTLNPTAEHIAVAIWQRLRPHLAAELALSVTLHETERNFVEYHG

SEQ ID NO: 21233 - protein, 135 aa, Hymenobacter perfusus
  misc_feature (1)..(135): tr|A0A428KH70|A0A428KH70_9BACT 6-carboxy-5,6,7,8-tetrah ydropterin synthase OS=Hymenobacter perfusus OX=1236770 GN=EI293_01030 PE=3 SV=1
MTVTICRKEHFNAAHRLHNSAWSDAQNQATFGKCNNPHYHGHNYELIVRLTGSIDPETGYVYDMKRLSDLIKREILDTFDHRNLNLDTAEFRHLNPTAENIAVVIWNRLRPHLEERLALSVTLYETERNFVEYHG

SEQ ID NO: 21234 - protein, 139 aa, Hymenobacter perfusus
  misc_feature (1)..(139): tr|A0A3R9NZY4|A0A3R9NZY4_9BACT 6-carboxytetrahydropteri n synthase OS=Hymenobacter perfusus OX=1236770 GN=EI293 _00055 PE=4 SV=1
MVYISRQEHFNAAHKLHNPNWSEERNREVFGPCANANWHGHNYDLIVTVKGRPDPETGFVIDLKQLSTVIRTHVVDEVDHKNLNLDVPFMQGQLASTENLVIAFWKILQPEIERISAAKLHSIKLYETPRNFVEYFGEE

SEQ ID NO: 21235 - protein, 139 aa, Hymenobacter psychrophilus
  misc_feature (1)..(139): tr|A0A1H3G090|A0A1H3G090_9BACT 6-pyruvoyltetrahydropter in/6-carboxytetrahydropterin synthase OS=Hymenobacter p sychrophilus OX=651662 GN=SAMN04488069_104296 PE=4 SV=1
MIYISRQEHFNAAHKLHNPKWSDERNKEVFGPCANTNWHGHNYDLIVTVKGRPDPETGFVIDLKELSTLIRTHVIDQVDHKNLNLDVPFMAGQLASTENLVVAFWKILQPEIEAISPARLHSLKLYETPRNFVEYFGEE

SEQ ID NO: 21236 - protein, 135 aa, Hymenobacter psychrophilus
  misc_feature (1)..(135): tr|A0A1H3FLA2|A0A1H3FLA2_9BACT 6-carboxy-5,6,7,8-tetrah ydropterin synthase OS=Hymenobacter psychrophilus OX=65 1662 GN=SAMN04488069_10495 PE=3 SV=1
MTITICRQEHFNAAHRLHNPAWSDERNQQVFDKCNNPNYHGHNYQLIVRLTGEIDPETGYVYDMKKLSDLIKREILDTFDHRNLNLDVAEFRNLNPTAENIAVVSWNRLRPHLAPQLALSVTLYETERNFVEYHG

SEQ ID NO: 21237 - protein, 138 aa, Hymenobacter psychrotolerans
  misc_feature (1)..(138): tr|A0A1M6WXL9|A0A1M6WXL9_9BACT 6-pyruvoyltetrahydropter in/6-carboxytetrahydropterin synthase OS=Hymenobacter p sychrotolerans DSM 18569 OX=1121959 GN=SAMN02746009_019 28 PE=4 SV=1
MIYISRQEHFNAAHKLYNPKWSEERNREVFGPCANANWHGHNFDLIVTVKGKPDPETGFVIDLKQLSTLIRTHVIEKVDHKNLNLDVPFMEGQMASTENLAIAFWKILAPEIEQISPARLHSIKLYETPRNFVEYLGE

SEQ ID NO: 21238 - protein, 135 aa, Hymenobacter psychrotolerans
  misc_feature (1)..(135): tr|A0A1M6TM27|A0A1M6TM27_9BACT 6-carboxy-5,6,7,8-tetrah ydropterin synthase OS=Hymenobacter psychrotolerans DSM 18569 OX=1121959 GN=SAMN02746009_01161 PE=3 SV=1
MPVTVCRKEHFNAAHRLHNPAWSEEQNQRVFGKCNNPHYHGHNYELTVRLTGEVDPATGYVYDMKRLSDLIKREILDTFDHRNLNLDTEEFRHLNPTAENIAVVIWNRLRPHLAAQLALSVTLYETERNFVEYHG

SEQ ID NO: 21239 - protein, 139 aa, Hymenobacter rigui
  misc_feature (1)..(139): tr|A0A3R9MQP1|A0A3R9MQP1_9BACT 6-carboxytetrahydropteri n synthase OS=Hymenobacter rigui OX=334424 GN=EI291_144 30 PE=4 SV=1
MVYISRQEHFNAAHKLHNPNWSEERNREVFGPCANANWHGHNYDLIVTVKGRPDPETGFVIDLKQLSTVIRTHIVDEVDHKNLNIDVPFMQGQLASTENLVIAFWNILQPEIERISSARLHSIKLYETPRNFVEYFGEE

SEQ ID NO: 21240 - protein, 135 aa, Hymenobacter rigui
  misc_feature (1)..(135): tr|A0A3R9VCM8|A0A3R9VCM8_9BACT 6-carboxy-5,6,7,8-tetrah ydropterin synthase OS=Hymenobacter rigui OX=334424 GN= EI291_03795 PE=3 SV=1
MTITICRKEHFNAAHRLHNPAWDDEQNQAAFGKCNNPHYHGHNYELIVRLTGSIDPETGYVYDMKRLSDLIKREILDTFDHRNLNLDTEEFRHLNPTAENIAVVIWNRLRPHLKDSLALSVTLYETERNFVEYHG

SEQ ID NO: 21241 - protein, 138 aa, Hymenobacter roseosalivarius
  misc_feature (1)..(138): tr|A0A1W1VWQ2|A0A1W1VWQ2_9BACT Uncharacterized protein OS=Hymenobacter roseosalivarius DSM 11622 OX=645990 GN= SAMN00120144_1628 PE=4 SV=1
MIYVSRQEHFNAAHKLHNPNWSDERNREVFGPCANTNWHGHNYDLIVTVKGQPDPETGFVIDLKQLSNLIREHVTNQVDHKNLNLDVPFMQGKMASTENLVVAFWEILTRELCSISSAQLHCIKLYETPRNFVEYYGE

SEQ ID NO: 21242 - protein, 135 aa, Hymenobacter roseosalivarius
  misc_feature (1)..(135): tr|A0A1W1VUN0|A0A1W1VUN0_9BACT 6-carboxy-5,6,7,8-tetrah ydropterin synthase OS=Hymenobacter roseosalivarius DSM 11622 OX=645990 GN=SAMN00120144_0286 PE=3 SV=1
MQVTVCRKEHFNAAHRLFNPAWDEARNQQVFDKCNNPNYHGHNYELIVRLTGTVDPETGYVYDLKRLSDLIKREILDTFDHRNLNLDTEEFRHLNPTAENIAVVIWRKLRAHVEPHLLLSVTLYETERNFVEYHG

SEQ ID NO: 21243 - protein, 138 aa, Hymenobacter rubripertinctus
  misc_feature (1)..(138): tr|A0A418R3W5|A0A418R3W5_9BACT 6-carboxytetrahydropteri n synthase OS=Hymenobacter rubripertinctus OX=2029981 G N=D0T11_05635 PE=4 SV=1
MIYISRQEHFNAAHKLHNPNWSEERNREVFGPCANVNWHGHNYDLIVTVKGQPDPETGFVIDLKQLSTLILTHVIDQVDHKNLNLDVPFMQGQLASTENLVVAFWKILQPEIERISSARLHCLKLYETPRNFVEYYGE

SEQ ID NO: 21244 - protein, 135 aa, Hymenobacter rubripertinctus
  misc_feature (1)..(135): tr|A0A418QUM7|A0A418QUM7_9BACT 6-carboxytetrahydropteri n synthase OS=Hymenobacter rubripertinctus OX=2029981 G N=D0T11_13800 PE=4 SV=1
MIVTICRKEHFNAAHRLHNPAWSAERNQATFGKCNNPNYHGHNYELIVRLTGAIDPETGYVYDMKRLSDLMKREILDTFDHRNLNLDTADFRHLNPTAENMTVVIWNRLRPHLDNRLALSVTLYETERNFVEYHG

SEQ ID NO: 21245 - protein, 135 aa, Hymenobacter sedentarius
  misc_feature (1)..(135): tr|A0A0U4AXA1|A0A0U4AXA1_9BACT 6-carboxy-5,6,7,8-tetrah ydropterin synthase OS=Hymenobacter sedentarius OX=1411 621 GN=AUC43_09875 PE=3 SV=1
MQVTVCRTEHFNAAHRLHNSNWSAEQNTRVFGKCNNPNYHGHNYNLTVRLTGPVDPETGYVYDLKRLSDLIKHEVLDRYDHRNLNLDTEEFRTLNPTAENIATVIWQRLRPHLDTGLALSVTLYETDRNFVEYHG

SEQ ID NO: 21246 - protein, 138 aa, Hymenobacter sedentarius
  misc_feature (1)..(138): tr|A0A0U4AY04|A0A0U4AY04_9BACT 6-pyruvoyl tetrahydrobio pterin synthase OS=Hymenobacter sedentarius OX=1411621 GN=AUC43_11315 PE=4 SV=1
MIYVSRQEHFNAAHKLHNPKWSDERNREVFGPCANANWHGHNYDLIVTVKGQPDPDTGFVVDLKALSDLLRVHITEQVDHKNLNLDVPFMAGQMASTENLVIAFWQILERELPAITEAKLHCVKLYETPRNFVEYYGG

SEQ ID NO: 21247 - protein, 138 aa, Hymenobacter sp.
  misc_feature (1)..(138): tr|A0A4Q5L9I8|A0A4Q5L9I8_9BACT 6-carboxytetrahydropteri n synthase OS=Hymenobacter sp. 1-3-3-3 OX=2025506 GN=EW M57_17985 PE=4 SV=1
MIYVSRQEHFNAAHKLYNPAWSQERNQEVFGPCANTNWHGHNYDLIVTVKGHPDPETGFVVDLKALSVLIRTHIVDQVDHKNLNLDVPFMKDQLASTENLVVAFWRILAPEIPKISGAQLHCIKLYETPRNFVEYYGE

SEQ ID NO: 21248 - protein, 135 aa, Hymenobacter sp.
  misc_feature (1)..(135): tr|A0A495VHM7|A0A495VHM7_9BACT 6-carboxy-5,6,7,8-tetrah ydropterin synthase OS=Hymenobacter sp. YR204 OX=213566 8 GN=C8J96_0233 PE=3 SV=1
MKVTVCRKEHFNAAHRLYNPAWTDERNAEVFGPCANVNYHGHNYELVVRVTGEIDPDTGYVYDMKRLSSLIKTEILDTFDHRNLNLDTADFRNLIPTAENIAVVIWQRLRPHLAAPLGLSVTLFETERNFVEYHG

SEQ ID NO: 21249 - protein, 139 aa, Hymenobacter swuensis
  misc_feature (1)..(139): tr|W8F3N6|W8F3N6_9BACT 6-pyruvoyltetrahydropterin synth ase OS=Hymenobacter swuensis DY53 OX=1227739 GN=Hsw_303 7 PE=4 SV=1
MVYISRQEHFNAAHKLHNPNWSEERNREVFGPCANANWHGHNYDLIVTVKGRPDAETGFVIDLKQLSTVIRTYVVDEVDHKNLNLDVPFMQGQLASTENLVIAFWKILQPEIERISAAKLHSIKLYETPRNFVEYLGEE

SEQ ID NO: 21250 - protein, 135 aa, Hymenobacter swuensis
  misc_feature (1)..(135): tr|W8F491|W8F491_9BACT 6-carboxy-5,6,7,8-tetrahydropter in synthase OS=Hymenobacter swuensis DY53 OX=1227739 GN =Hsw_3242 PE=3 SV=1
MTVTICRKEHFNAAHRLHNSAWSDAQNQDTFGKCNNPHYHGHNYELIVRLTGSIDPETGYVYDMKLLSDLIKREILDTFDHRNLNLDTVEFRHLNPTAENIAVVIWNRLRPHLEERLALSVTLYETERNFVEYHG

SEQ ID NO: 21251 - protein, 139 aa, Hymenobacter wooponensis
  misc_feature (1)..(139): tr|A0A4Z0MGS9|A0A4Z0MGS9_9BACT 6-carboxytetrahydropteri n synthase OS=Hymenobacter wooponensis OX=1525360 GN=EU 557_17215 PE=4 SV=1
MVYISRQEHFNAAHKLYNPNWSEERNREVFGPCANANWHGHNYDLIVTVKGKPDPETGFVIDLKQLSTVIRTHVVDQVDHKNLNMDVPFMEGQLASTENLVIAFWKILQPEIERISPARLHSIKLYETPRNFVEYFGEE

SEQ ID NO: 21252 - protein, 135 aa, Hymenobacter wooponensis
  misc_feature (1)..(135): tr|A0A4Z0MH01|A0A4Z0MH01_9BACT 6-carboxytetrahydropteri n synthase OS=Hymenobacter wooponensis OX=1525360 GN=EU 557_18810 PE=4 SV=1
MQVTVCRKEHFNAAHRLHNPAWSEEQNQRVFGKCNNPHYHGHNYELIARLTGPIDPDTGYVYDMKRLSDLMKREILDIFDHRNLNLDTEDFRNLNPTAENIAVVIWNRLRPHLAAHLSLSVTLYETERNFVEYHG

SEQ ID NO: 21253 - protein, 134 aa, Hyphomicrobiaceae bacterium; identical to SEQ ID NO: 20332
  misc_feature (1)..(134): tr|A0A3S5JEK0|A0A3S5JEK0_9RHIZ 6-carboxytetrahydropteri n synthase OS=Hyphomicrobiaceae bacterium TMED74 OX=198 6774 GN=CBC34_017860 PE=4 SV=1

SEQ ID NO: 21254 - protein, 145 aa, Hyphomicrobiaceae bacterium
  misc_feature (1)..(145): tr|A0A5C7M120|A0A5C7M120_9RHIZ 6-carboxytetrahydropteri n synthase OS=Hyphomicrobiaceae bacterium OX=2015799 GN =E6R03_05565 PE=4 SV=1
MPIQAHRYHDISVGHRVYNQGSKCEMLHGHNYRIHFNVEAQELNEIGMVLDFGVIKSTLCMWIKNNWDHKFLIWEQDPWSRYLLEIDPTVVWTSFNPTAENMAKFLVEVIGPELLVGHACRLVSVTVEETRKCSASFNLPQGYKE

SEQ ID NO: 21255 - protein, 181 aa, Hyphomicrobium denitrificans
  misc_feature (1)..(181): tr|D8JX66|D8JX66_HYPDA Uncharacterized protein OS=Hypho microbium denitrificans (strain ATCC 51888 / DSM 1869 / NCIB 11706 / TK 0415) OX=582899 GN=Hden_1390 PE=4 SV=1
MRRSKYRSATRQYEDRRPARIRPGQPAAKPSLGSTIFHDTAMPRAAGKGDWDVTVPHDATATDGQTIRITATYTFEAAHFLPKVHDGHKCRRLHGHNYRVDVSVAGGLDERGFVLDYAELDGIVQPVIDELDHRCLNDIPGLENPTSEILALWLRSRIAAKAGTKPMIRVWETPRYLVEVS

SEQ ID NO: 21256 - protein, 134 aa, Hyphomicrobium denitrificans
  misc_feature (1)..(134): tr|D8JX86|D8JX86_HYPDA Uncharacterized protein OS=Hypho microbium denitrificans (strain ATCC 51888 / DSM 1869 / NCIB 11706 / TK 0415) OX=582899 GN=Hden_1410 PE=4 SV=1
MFSVEVRDRIMIAHSLPDPFFGPAQNLHGATYVVDVAFFREKLTAENVVVDIGAALRVLNETLKPLGYQNLDALPQFKGHLTTTEFLCKYIFDRMAEAATSGKFGTEGQRLSRIRVTLSETDLARASYEGPISG

SEQ ID NO: 21257 - protein, 134 aa, Hyphomicrobium facile
  misc_feature (1)..(134): tr|A0A1I7NDD2|A0A1I7NDD2_9RHIZ 6-pyruvoyl-tetrahydropte rin synthase OS=Hyphomicrobium facile OX=51670 GN=SAMN0 4488557_1647 PE=4 SV=1
MYSVEVRDRIMIAHSLPNPFFGPAQNLHGATYVVDVAFFREKLTEQNVVVDIGAALSVLGATLQPLAYQNLDVLPQFKGALTTTEFLCKYIFDRIAKAAASGALGEEGKTLARIRVTLSETDLARASYEGPIGG

SEQ ID NO: 21258 - protein, 128 aa, Hyphomicrobium facile
  misc_feature (1)..(128): tr|A0A1I7NUY4|A0A1I7NUY4_9RHIZ 6-carboxy-5,6,7,8-tetrah ydropterin synthase OS=Hyphomicrobium facile OX=51670 G N=SAMN04488557_3685 PE=3 SV=1
MQIYKEFRFEAAHFLPSAAPGTPNARVHGHSFRARIVVEGEPGPTTGYIFHFDELSSALRETEDALDHRMLNDIDGLEAPTLERIAVWIWNRLSNRIPGLCQVEVHRDSCSEGCIYRGPSPEARLAAE

SEQ ID NO: 21259 - protein, 140 aa, Hyphomicrobium nitrativorans
  misc_feature (1)..(140): tr|V5SFQ8|V5SFQ8_9RHIZ 6-carboxy-5,6,7,8-tetrahydropter in synthase OS=Hyphomicrobium nitrativorans NL23 OX=102 9756 GN=W911_10905 PE=3 SV=1
MAPCPEISYLSPMRIYKDFLFEAAHYLPSAPIGHPNSRVHGHSFRARVVIDGQPDAKSGLVFHFDDLTAAIEEARDALDHRLLNEIEGLEAPTLERISIWLWNRLQNRVPGLAEIQVSRDSCNEGCIYRGDAPTLPHAAE

SEQ ID NO: 21260 - protein, 127 aa, Hyphomicrobium sp.
  misc_feature (1)..(127): tr|A0A258KZ69|A0A258KZ69_9RHIZ 6-carboxy-5,6,7,8-tetrah ydropterin synthase OS=Hyphomicrobium sp. 32-62-53 OX=1 970390 GN=B7Y80_13315 PE=3 SV=1
MRIYRDFLFEAAHFLPSAPPGHPNSRIHGHSFRARVWIDGEPNAETGVVFHFDDLSAALTDCQDALDHRMLNDVEGLSAPTLERIAMWIWERIDNRVPGLSQIEVHRDSCHEGVIYNGPHRLARAAE

SEQ ID NO: 21261 - protein, 134 aa, Hyphomicrobium sp.
  misc_feature (1)..(134): tr|F8J5A4|F8J5A4_HYPSM Uncharacterized protein OS=Hypho microbium sp. (strain MC1) OX=717785 GN=HYPMC_2597 PE=4 SV=1
MFSVEVRNRIMIAHSLPDPFFGPAQNMHGATFVVDVAFFREALTAQNVVVDIGAALDVLGQTLRPLAYQNLDTLPQFKGVLTTTEFICKYIFDQMAAAALSGALGDDGKTLARIRVTLSETDLARASYEGPIGG

SEQ ID NO: 21262 - protein, 128 aa, Hyphomicrobium sulfonivorans
  misc_feature (1)..(128): tr|A0A109BC44|A0A109BC44_HYPSL 6-carboxy-5,6,7,8-tetrah ydropterin synthase OS=Hyphomicrobium sulfonivorans OX= 121290 GN=APY04_2608 PE=3 SV=1
MRIYKEFLFEAAHYLPTAPPGHPNSRVHGHSFRARITVDGAPGADTGYVFHFDELSQMMAEAQDALDHRLLNEIEGLEAPTLERIAIWLWNRLQNRVPGLSQIEIARDSCREGAIYCGPAPETRIAAE

SEQ ID NO: 21263 - protein, 139 aa, Hyphomonadaceae bacterium
  misc_feature (1)..(139): tr|A0A0F2QF10|A0A0F2QF10_9RHOB 6-carboxy-5,6,7,8-tetrah ydropterin synthase OS=Hyphomonadaceae bacterium BRH_c2 9 OX=1629720 GN=VR75_12340 PE=3 SV=1
MATELANAQTDRAALSPEGRVFEITKAVHFEAAHFMGGKPEGHPYRNMHGHSFRVEATVAGVVKPGEQWVEDFSHLTACLNATAEKLDHKLLNEIDGLDVPTLERICLWVAADLAEALPGLKRVALARPSLNERCELVL

SEQ ID NO: 21264 - protein, 140 aa, Hyphomonadaceae bacterium
  misc_feature (1)..(140): tr|A0A352CBD3|A0A352CBD3_9RHOB 6-carboxy-5,6,7,8-tetrah ydropterin synthase OS=Hyphomonadaceae bacterium OX=202 6748 GN=DCZ49_03670 PE=3 SV=1
MALVAANAQDYGHSVTDALFSLCKTITFDAAHYLPQEDPAHPYGRLHGHSFALDVTIRGKAQPGAEWVEDFDAITQALAELRGLLDHRLLNEVEGLERPTLERLCQWTAARLQRRFPGLARVTVRRPSLGESCTLELAAS

SEQ ID NO: 21265 - protein, 119 aa, Hyphomonas adhaerens
  misc_feature (1)..(119): tr|A0A069E5M7|A0A069E5M7_9RHOB 6-carboxy-5,6,7,8-tetrah ydropterin synthase OS=Hyphomonas adhaerens MHS-3 OX=12 80949 GN=HAD_07920 PE=3 SV=1
MFEITKSVNFEAAHFMGGKPEGHPYRNMHGHSFRLEATVAGVVKPGEQWVEDFGHLTACLNATAEKLDHRLLNEIDGLDVPTLERICLWVAEDLREALPGLKRVALARPSLNERCELVL

SEQ ID NO: 21266 - protein, 139 aa, Hyphomonas atlantica
  misc_feature (1)..(139): tr|A0A059EB98|A0A059EB98_9RHOB 6-carboxy-5,6,7,8-tetrah ydropterin synthase OS=Hyphomonas atlantica OX=1280948 GN=HY36_00530 PE=3 SV=1
MTTQTDQTSQSSAATNPEGSVFAISKSVNFEAAHYMGGKPEGHPYRNVHGHSFVLEATVAGTVKPGEQWVEDFSHLTACLKETAAKLDHKLLNDIEGLEVPTLERICLWAAADLKAGLPGLTKVAISRPSLNERCELVL

SEQ ID NO: 21267 - protein, 139 aa, Hyphomonas atlantica
  misc_feature (1)..(139): tr|A0A356W951|A0A356W951_9RHOB 6-carboxy-5,6,7,8-tetrah ydropterin synthase OS=Hyphomonas atlantica OX=1280948 GN=DD728_15310 PE=3 SV=1
MTTQTDQTSQSSAATNPEGSVFAISKSVNFEAAHYMGGKPEGHPYRNVHGHSFVLEATVAGTVKPGEQWVEDFSHLTACLQETAAKLDHKLLNDIEGLEVPTLERICLWAAADLKAGLPGLTKVAISRPSLNERCELVL

SEQ ID NO: 21268 - protein, 139 aa, Hyphomonas beringensis
  misc_feature (1)..(139): tr|A0A062UGU7|A0A062UGU7_9RHOB 6-carboxy-5,6,7,8-tetrah ydropterin synthase OS=Hyphomonas beringensis OX=128094 6 GN=HY29_12480 PE=3 SV=1
MTTKLETSSAARPSLSPEGRVFEITKSVNFEAAHFMGGKPEGHPYRNMHGHSFQLEATVAGVVKPGEQWVEDFSHLTACLQATAAKLDHTLLNEVPGLEVPTLERICLWAAADLADGLPGLKRVALARPSLNERCELVL

SEQ ID NO: 21269 - protein, 123 aa, Hyphomonas chukchiensis
  misc_feature (1)..(123): tr|A0A062UEX5|A0A062UEX5_9RHOB 6-carboxy-5,6,7,8-tetrah ydropterin synthase OS=Hyphomonas chukchiensis OX=12809 47 GN=HY30_11980 PE=3 SV=1
MEGRVFEISKAVTFEAAHFMGGKPEGHPYRNVHGHSFRLEATVAGTVKAGEQWVEDFSHLTATLEATAAKLDHKLLNEIEGLDVPTLERICLWAAADLAPGLPGLTRVAVARPSLNERCELVL

SEQ ID NO: 21270 - protein, 132 aa, Hyphomonas hirschiana
  misc_feature (1)..(132): tr|A0A059G0R8|A0A059G0R8_9RHOB 6-carboxy-5,6,7,8-tetrah ydropterin synthase OS=Hyphomonas hirschiana VP5 OX=128 0951 GN=HHI_02560 PE=3 SV=1
MKEGLKAEGQIFEISKAVFFEAAHFMGGKPEGHPYRSVHGHSFRLEATVAGIVKPGEQWVEDFSHLTATLEATAAKLDHRLLNDIEGLEVPTLERICLWAAADLGQPLPGLARVAVARPSLNERCELVLKRI

SEQ ID NO: 21271 - protein, 119 aa, Hyphomonas jannaschiana
  misc_feature (1)..(119): tr|A0A059FEW3|A0A059FEW3_9RHOB 6-carboxy-5,6,7,8-tetrah ydropterin synthase OS=Hyphomonas jannaschiana VP2 OX=1 280952 GN=HJA_07617 PE=3 SV=1
MFEITKAVHFEAAHFMGGKPEGHPYRNMHGHSFRLEATVAGVVKEGEQWVEDFSHLTACLNATAEKLDHKLLNEIDGLEIPTLERICLWVAEDLREALPGLKRVALARPSLNERCELVL

SEQ ID NO: 21272 - protein, 119 aa, Hyphomonas johnsonii
  misc_feature (1)..(119): tr|A0A059FR66|A0A059FR66_9RHOB 6-carboxy-5,6,7,8-tetrah ydropterin synthase OS=Hyphomonas johnsonii MHS-2 OX=12 80950 GN=HJO_08357 PE=3 SV=1
MFEITKSVNFEAAHYMGGKPEGHPYRNVHGHSFRLEATVAGTVKPGEQWVEDFSHLTAALDATAAKLDHKLLNDIEGLDVPTLERICLWAAADLAPALPGLTRVAVARPSLNERCELVL

SEQ ID NO: 21273 - protein, 146 aa, Hyphomonas neptunium
  misc_feature (1)..(146): tr|Q0C4T0|Q0C4T0_HYPNA 6-carboxy-5,6,7,8-tetrahydropter in synthase OS=Hyphomonas neptunium (strain ATCC 15444) OX=228405 GN=HNE_0533 PE=3 SV=1
MAPELANTQTDRASLKEGLKAEGQIFEISKAVFFEAAHFMGGKPEGHPYRSVHGHSFRLEATVAGIVKPGEQWVEDFSHLTATLEATAAKLDHRLLNDIEGLEVPTLERICLWAAADLGQPLPGLARVAVARPSLNERCELVLKRI

SEQ ID NO: 21274 - protein, 139 aa, Hyphomonas oceanitis
  misc_feature (1)..(139): tr|A0A059GA99|A0A059GA99_9RHOB 6-carboxy-5,6,7,8-tetrah ydropterin synthase OS=Hyphomonas oceanitis SCH89 OX=12 80953 GN=HOC_04257 PE=3 SV=1
MATELANAQTDRASLSVEGRVFEISKAVTFEAAHYMGGKPEGHPYRNVHGHSFRLEATVAGTVKAGEQWVEDFSHLTATLEATAAKLDHKLLNEIEGLDVPTLERICLWAAADLAPGLPGLTRVAVARPSLNERCELVL

SEQ ID NO: 21275 - protein, 132 aa, Hyphomonas polymorpha
  misc_feature (1)..(132): tr|A0A062VKL7|A0A062VKL7_9RHOB 6-carboxy-5,6,7,8-tetrah ydropterin synthase OS=Hyphomonas polymorpha PS728 OX=1 280954 GN=HPO_02307 PE=3 SV=1
MNEGLKAEGQIFEISKAVFFEAAHFMGGKPEGHPYRSVHGHSFRLEATVAGVVKPGEQWVEDFSHLTATLEATAAKLDHKLLNEIEGLEVPTLERICLWAAADLGKTLPGLARVAVARPSLNERCELVLKRV

SEQ ID NO: 21276 - protein, 152 aa, Hyphomonas sp.
  misc_feature (1)..(152): tr|A0A1Z9Y0D2|A0A1Z9Y0D2_9RHOB 6-pyruvoyl tetrahydrobio pterin synthase OS=Hyphomonas sp. TMED17 OX=1986605 GN= CBB77_00620 PE=4 SV=1
MATKLANAQTDRPALSLSGQVFEITKSVRFEAAHFMSSSPEGHPYRNIHGHSFCLEATIAGCLDEDQDWVEDFSVFTDKLNEVAKMLDHKLLNEIDGLGVPSLERLCVWVANQLVVDFVGLQSVVISRPSLDERCKLVIPSVAHSGERPLQD

SEQ ID NO: 21277 - protein, 142 aa, Hyphomonas sp.
  misc_feature (1)..(142): tr|A0A258C039|A0A258C039_9RHOB 6-carboxy-5,6,7,8-tetrah ydropterin synthase OS=Hyphomonas sp. 32-62-5 OX=197039 1 GN=B7Z22_01655 PE=3 SV=1
MATELANPQTDRSSLKAEGQIFEISKAVFFEAAHFMGGKPEGHPYRSVHGHSFRLEATVAGVVKPGEQWVEDFSHLTATLEATAAKLDHKLLNEIEGLEVPTLERICLWAAADLGKTLPGLARVAVARPSLNERCELVLKRV

SEQ ID NO: 21278 - protein, 140 aa, Hypnocyclicus thermotrophus
  misc_feature (1)..(140): tr|A0A4R7L1R0|A0A4R7L1R0_9FUSO 6-carboxy-5,6,7,8-tetrah ydropterin synthase OS=Hypnocyclicus thermotrophus OX=1 627895 GN=EV215_1812 PE=3 SV=1
MYILQTEHSFDSAHFLKGYKGKCANIHGHRWRVVVEIKSDALVENGHLRGMVVDFGDLKKVVKEFVDFHDHALIVEKNSLSKELFNMLQGENFRLIEVEFRPTAENFSKYFYDEFNKKFDVKRVIVYETPNNSAIYEEQR

SEQ ID NO: 21279 - protein, 152 aa, Hyunsoonleella jejuensis
  misc_feature (1)..(152): tr|A0A1H9BA35|A0A1H9BA35_9FLAO 6-pyruvoyltetrahydropter in/6-carboxytetrahydropterin synthase OS=Hyunsoonleella jejuensis OX=419940 GN=SAMN05421824_0510 PE=4 SV=1
MQMSNIRITKQFSFETGHALYGYDGKCKNVHGHSYRLDVTVFGKPITDTSNVKYGMVIDFGDLKKIVKEEIVNVFDHATVFNKNTPHVELAKELENRGHNILLVDYQPTSEMMVIDFAKKIKARLPENIKLHSLKLQETATSFAEWFANDQD

SEQ ID NO: 21280 - protein, 136 aa, Hyunsoonleella jejuensis
  misc_feature (1)..(136): tr|A0A1H9J112|A0A1H9J112_9FLAO 6-carboxy-5,6,7,8-tetrah ydropterin synthase OS=Hyunsoonleella jejuensis OX=4199 40 GN=SAMN05421824_2353 PE=3 SV=1
MKVTVSRKAHFNAAHRLYRKDWSFEKNDTVFGKCNNPNFHGHNYELIVSVTGEIDVETGYVIDMKVLKDIIKSEVEDAFDHKNLNVEVAEFKNLNPTAENIAVVIYDKMKSKLDSNLDLEITLYETPRNFVTYAGD

SEQ ID NO: 21281 - protein, 136 aa, Hyunsoonleella pacifica
  misc_feature (1)..(136): tr|A0A4V2JBA2|A0A4V2JBA2_9FLAO 6-carboxy-5,6,7,8-tetrah ydropterin synthase OS=Hyunsoonleella pacifica OX=10802 24 GN=EYD46_00025 PE=3 SV=1
MKVTVSRKAHFNAAHRLYRKDWSFEKNDAVFGKCNNPNFHGHNYELIASVTGDIDKETGYVIDMKVLKGIIKTEVEDAFDHKNLNLEVPEFKDLNPTAENIAVVIYDKMKAKLDSKLDLEITLYETPRNFVTYSGN

SEQ ID NO: 21282 - protein, 150 aa, Hyunsoonleella pacifica
  misc_feature (1)..(150): tr|A0A4Q9FL98|A0A4Q9FL98_9FLAO 6-carboxytetrahydropteri n synthase OS=Hyunsoonleella pacifica OX=1080224 GN=EYD 46_13830 PE=4 SV=1
MSNIRITKQFSFEAGHALHGYDGKCKNIHGHSYSLEVTVIGKPITDTSHVKHGMVIDFGDLKKIVKTEIVDVFDHAIVFNQNTPHADLGRNLAAEGHNVLLVDYQPTSEMMIIDFAKKIQAYLPENIKLHSLKLRETATSYAEWYASDQD

SEQ ID NO: 21283 - protein, 136 aa, Hyunsoonleella sp.
  misc_feature (1)..(136): tr|A0A4Q9FDM9|A0A4Q9FDM9_9FLAO 6-carboxy-5,6,7,8-tetrah ydropterin synthase OS=Hyunsoonleella sp. T58 OX=252793 9 GN=EYD45_08600 PE=3 SV=1
MKVTVSRKAHFNAAHRLYRKDWSFEKNDTIFGKCNNPNFHGHNYELIASVTGEIDPETGYVIDMKVLKDIIKSEVEVAFDHKNLNLEVPEFENLNPTAENIAVVIYNKMKSKLDSDLDLEITLYETPRNFVTYSGG

SEQ ID NO: 21284 - protein, 150 aa, Hyunsoonleella sp.
  misc_feature (1)..(150): tr|A0A4Q9FBH2|A0A4Q9FBH2_9FLAO 6-carboxytetrahydropteri n synthase OS=Hyunsoonleella sp. T58 OX=2527939 GN=EYD4 5_15685 PE=4 SV=1
MSNIRITKQFSFETGHALYGYDGKCKNVHGHSYRLDVTVIGKPISDTSNVKYGMVIDFGDLKKIVKEEIVSVFDHATVFNKNTPHVELAKELQTRGHNILLVDYQPTSEMMVIDFAKKIKARLPENIKLHSLKLQETATSFAEWFANDQD

SEQ ID NO: 21285 - protein, 150 aa, Ichthyenterobacterium magnum
  misc_feature (1)..(150): tr|A0A420DX02|A0A420DX02_9FLAO 6-pyruvoyltetrahydropter in/6-carboxytetrahydropterin synthase OS=Ichthyenteroba cterium magnum OX=1230530 GN=BXY80_0830 PE=4 SV=1
MSNIRITKQFSFETGHALYGYDGKCKNVHGHSYRLSVTVIGKPINDKTNVKFGMVIDFSDLKKIVKEDIVNVFDHATVFNKNTPHVELAKELEDRGHNVLLVDYQPTSEMMVIDFASKIKKRLPENIKLHSLKLQETATSFAEWYASDNE

SEQ ID NO: 21286 - protein, 136 aa, Ichthyenterobacterium magnum
  misc_feature (1)..(136): tr|A0A420DV57|A0A420DV57_9FLAO 6-carboxy-5,6,7,8-tetrah ydropterin synthase OS=Ichthyenterobacterium magnum OX= 1230530 GN=BXY80_0129 PE=3 SV=1
MRVTVSRKAHFNAAHRLYRKDWTHEKNDAIFGKCNNPNFHGHNYELIVSVTGEIDKETGYVIDMKVLKDIIKSEVEDAFDHKNLNLEVLEFKDLNPTAENIVVVIYNKIKPKLDASFDIEITLYETPRNFVVYSGE

SEQ ID NO: 21287 - protein, 131 aa, Ideonella sp.
  misc_feature (1)..(131): tr|A0A437RRH1|A0A437RRH1_9BURK 6-carboxy-5,6,7,8-tetrah ydropterin synthase OS=Ideonella sp. KYPY4 OX=1862385 G N=EOE66_02110 PE=3 SV=1
MSLSQPAGAVYELSQRFYFEAAHTLRRSQETAGSLRIHGHTYEAEVTLSGRPDPATGMLIDLALVRAEIARVRSLLDHRFLDEVEGLGPATLENLCAYLRAQLQTGLPALCAVMVERRASGDRCVLRWPAA

SEQ ID NO: 21288 - protein, 372 aa, Ideonella sp.
  misc_feature (1)..(372): tr|A0A523Q3F8|A0A523Q3F8_9BURK 6-pyruvoyl tetrahydropte rin synthase OS=Ideonella sp. MAG2 OX=2083017 GN=C4K60_ 15180 PE=4 SV=1
MHSLTPTHLLHSASAGFEAALQVGLLPEGHRSRRLHGHSFFATVRAALPAGWAPFSGGEVAELQRRMEACTAPLDYALLNDTLPQPTDENLARWIRARLETEFDVPGIHQVGVQSTPHCGVDLDAAGQAHVWRRYRFQAAHRLPNVPAGHKCGRMHGHGFEVILHANQDVGGRDIGIDYDHLDALWAPLHFALNYHCLNEIPGLENPTSEVISAWLWQRLKPVLPELSWVTVYETGSCGANFDGTHYRIWKELTLDSAIRLRHAPEGSPLSAIHGHTYTLRLHLSAPLDAVMGWTVDFGDVKTLFDPIFKAIDHRPLYEIADLPDGDAMSLAHWVLAKGRAALPELDRVDLYETRGCGAIVSAQDETELLPV

SEQ ID NO: 21289 - protein, 294 aa, Idiomarina abyssalis
  misc_feature (1)..(294): tr|A0A370QCI7|A0A370QCI7_9GAMM 6-pyruvoyl tetrahydropte rin synthase-like protein OS=Idiomarina abyssalis OX=86 102 GN=DFO82_0474 PE=4 SV=1
MQLFVNDLTVIDCSYLCPERGIVGESWIVDIVLDGALNEQSMVLDFGRVKKQVKAIIDNSVDHKLVVPAEHSYTKVTHNSDDSANWVDFLRPEQGSIHLFCPADAFAFIDADVVSIETVTDYLKAVIKRELPVNVEGLQLFLRPENIDGFYYHYTHGLKKHDGNCQRIAHGHRSKIQIRLDNIRQPVLEKEWSDKWEDIYLGTTEDLRSKKELTLSEAATSVTSDSTHTYYSYVADQGLFELIVPNAENFVIETDSTVECIADFLAAEIKSKHAGQAVEVRAFEGVGKGAIAYA

SEQ ID NO: 21290 - protein, 293 aa, Idiomarina aestuarii
  misc_feature (1)..(293): tr|A0A2T4D6C8|A0A2T4D6C8_9GAMM Uncharacterized protein OS=Idiomarina aestuarii OX=624146 GN=C9927_02165 PE=4 S V=1
MQLFVNDLTVIDFSYLCPERGIVGESWIVDIVLDGSLNEQSMVLDFGRVKKQIKRIIDGAVDHKLAVPAEHAYTQVTHDADDTCYWVDFMRPNQKSIHLFCPADAFAFIDADAVTIATVTDYLRAVIQRELPDNVDGLTLLLRAEDIPGAFYHYTHGLKKHDGNCQRIAHGHRSRLYIALDDARQPQLEAEWARRWQDIYLGSQEDVKPISALQRSAAATNCNDKTHVGYSYVADQGLFELLVPESENYVIPTDSTVECIAEYLAQQVKSAHPLAKVTVTGFEGVGKGAIGYA

SEQ ID NO: 21291 - protein, 115 aa, Idiomarina aestuarii
  misc_feature (1)..(115): tr|A0A2T4CMN3|A0A2T4CMN3_9GAMM Uncharacterized protein (Fragment) OS=Idiomarina aestuarii OX=624146 GN=C9986_0 2200 PE=4 SV=1
MQLFVNDLTVIDFSYLCPERGIVGESWIVDIVLDGSLNEQSMVLDFGRVKKQIKRIIDGAVDHKLAVPAEHAYTQVTHDADDTCYWVDFMRPNQKSIHLFCPADAFAFIDADAVT

SEQ ID NO: 21292 - protein, 294 aa, Idiomarina aquatica
  misc_feature (1)..(294): tr|A0A4R6PTS3|A0A4R6PTS3_9GAMM 6-pyruvoyl tetrahydropte rin synthase-like protein OS=Idiomarina aquatica OX=132 7752 GN=DEU29_101209 PE=4 SV=1
MQLFVNDLTVIDCSYLCPERGIVGESWIVDIVLDGALNEQSMVLDFGRVKKQIKRIIDDSVDHKLVVPAEHAYTSVTYNDDESSQWVDFMRPNGKSIHLYCPADAFAYIDAEQVNELTVTDYLRAVIKRELPGNVEGLKLMLRPESIDGFYYHYTHGLKKHDGNCQRIAHGHRSKIQIFLDNIRQPVLEKQWSDRWADIYLGSTDDQADLKSLLRSANAKQAATAATHIGYSYTADQGLFELCVPKAENYLIDTDSTVECIAQYLADTIKTSVAEQAVQVRAYEGVGKGAIAYA

SEQ ID NO: 21293 - protein, 294 aa, Idiomarina aquimaris
  misc_feature (1)..(294): tr|A0A432XQ28|A0A432XQ28_9GAMM Uncharacterized protein OS=Idiomarina aquimaris OX=641841 GN=CWE21_01565 PE=4 S V=1
MQLFVNDLTVIDFSYLCAERGIVGESWIVDIILDGSLNEQSMVLDFGKVKKQIKRIIDDAVDHKLAVPADHAYTRVTHTDDDSSYWVDFLRPEGRSIHLFCPADAFAFIDAESVSMESVNAYLRAVIKRELPGNVAGLEVILREEAIPGAYYHYTHGLKKHDGNCQRIAHGHRSQLQVFIDSERATQVEQRWAKRWQDIYLGSQEDTCSVEDLSRSDAALAINDASHQSYRYIADQGLFELAVPHSENDLIASDSTVECIADYLAQTIAREEQAAGRVKVMAYEGVGKGAIGYA

SEQ ID NO: 21294 - protein, 294 aa, Idiomarina atlantica
  misc_feature (1)..(294): tr|A0A094IPZ0|A0A094IPZ0_9GAMM 6-pyruvoyl tetrahydropte rin synthase OS=Idiomarina atlantica OX=1517416 GN=IDAT _01240 PE=4 SV=1
MQLFVNDLTVIDFSYLCPERGIVGESWIVDIILDGSLNEQSMVLDFGRVKKQIKRIIDDAVDHKLAVPAEHPFTRVTHADDENSYWVDFLRPQQRSIHLFCPADAYAFIDADRVDMSSINAYLRAVIKRELPGNIEGLEVLLRSEQIDDAYYHYTHGLKKHDGNCQRIAHGHRSRLQIFIDGQRDRALEQLWAERWRDIYLGSQEDVAALANLQRSAAAADLSETTHIGYSYTADQGLFELIVPLPENDLIATDSTVECIATHLADAIRVQRPAANTVQVRAFEGVGKGAIAYA

SEQ ID NO: 21295 - protein, 293 aa, Idiomarina baltica
  misc_feature (1)..(293): tr|A0A348WR01|A0A348WR01_9GAMM Uncharacterized protein OS=Idiomarina baltica OX=190892 GN=DCR58_09305 PE=4 SV= 1
MLLFVDDLTVIDCSYLCAERGIVGESWIVDIELDGSLNEQSMVLDFGRVKKQIKAIIDRSVDHKLLVPSNHAYTRVTHSDDDESHWVDFMRPEGRSIHLFCPAEAFAYIDAEKVDALTVTDYLRAVIKRELPGNVQGLRLSLRPEAIDGFYYHYTHGLKKHDGNCQRIAHGHRSKIQIALDNIRQPVLEKQWSERWADIYIGSEEDKAEIKRLQRSESAKQLSEATHVGYSYVADQGLFELIVPKSENDFIDSDSTVECIAEFIAAKIKQDHPEQRVRVRAFEGVGKGAIAYA

SEQ ID NO: 21296 - protein, 297 aa, Idiomarina donghaiensis
  misc_feature (1)..(297): tr|A0A432XMH1|A0A432XMH1_9GAMM Uncharacterized protein OS=Idiomarina donghaiensis OX=519452 GN=CWE24_05385 PE= 4 SV=1
MQLFVNDLTVIDFSYLCPERGMVGESWIVDIILDGSLNEQSMVLDFGRVKKQIKRIIDDAVDHKLAVPAEHPYTNVTHHDDGNSHWVDFLRPNQRSIHLFCPADAFAFIDAQQVTMQSVTDYLRAVIKRELPENVQGLTLELRAEEIPGAFYHYTHGLKKHDGNCQRIAHGHRSRLYVALNGERNADLEQQWAQTWQDIYLGSEEDLAVIEQLQLSPVFAQKNLMVTTQTHMAYSYTADQGLFEILVPVAENYTIPTDSTVECIASYLAQSIKQEHPNDAVQVTGFEGVGKGAIGYA

SEQ ID NO: 21297 - protein, 293 aa, Idiomarina fontislapidosi
  misc_feature (1)..(293): tr|A0A432Y9V0|A0A432Y9V0_9GAMM Uncharacterized protein OS=Idiomarina fontislapidosi OX=263723 GN=CWE25_04465 P E=4 SV=1
MLLFVDDLTVIDCSYLCAERGIVGESWIVDIELDGSLNEQSMVLDFGRVKKQIKAIIDRSVDHKLLVPSGHAFTQVTHSADDESHWVDFMRPEGRSIHLFCPAEAFAYIDAEKVDALTVTDYLRAVIKRELPGNVQGLRLSLRPEAIDGFYYHYTHGLKKHDGNCQRIAHGHRSKIQIALDNIRQPVLEKQWSERWEDIYIGSEEDKVEIKRLQRSESAKQISEATHVGYSYVADQGLFELMVPKSENDFIDSDSTVECIAEFIAAQIKQTHPEQRVKVKAFEGVGKGAIAYA

SEQ ID NO: 21298 - protein, 294 aa, Idiomarina halophila
  misc_feature (1)..(294): tr|A0A432Y0K9|A0A432Y0K9_9GAMM Uncharacterized protein OS=Idiomarina halophila OX=1449799 GN=CWI69_03440 PE=4 SV=1
MQLFVNDLTVIDFSYLCPERGIVGESWIVDIVLDGSLNEQSMVLDFGRVKKQIKRIIDDAVDHKLAVPANHPYTLVTHDADDSCYWVDFLRPEQGSIHLFCPADAFAFIDAEQVTMASINAYLRAVIKRELPGNVAGLEVTLRAEEIEGAYYHYTHGLKKHDGNCQRIAHGHRSRIQVELDGARAPAVEQSWAERWRDIYLGSSEDVSPVAALQRSAEALKCSDETHVGYGYVADQGRFELIVPKAENYIIDNDSTVECIAEYLAQAIHAELKDKAAVTVKAYEGVGKGAIGYA

SEQ ID NO: 21299 - protein, 294 aa, Idiomarina homiensis
  misc_feature (1)..(294): tr|A0A432Y401|A0A432Y401_9GAMM Uncharacterized protein OS=Idiomarina homiensis OX=364198 GN=CWI70_02580 PE=4 S V=1
MQLFVNDLTVIDFSYLCAERGIVGESWIVDIILDGSLNEQSMVLDFGKVKKQIKRIIDDAVDHKLAVPADHSYTRVTHTDDDSSYWVDFLRPQERSIHLFCPADAFAFIDAEEVSMASVNAYLRAVIKRELPGNVAGLEVILREENIAGAYYHYTHGLKKHDGNCQRIAHGHRSQLQVFIDNARAPQVEERWARRWQDIYLGSQEDTCSVNELKLSSAGKLVSDSSHQAYRYTADQGLFELAVPHQENDLIASDSTVECIADYLAQTIALEENAQGRVKVMAYEGVGKGAIGYA

SEQ ID NO: 21300 - protein, 293 aa, Idiomarina indica
  misc_feature (1)..(293): tr|A0A1G6A5R2|A0A1G6A5R2_9GAMM 6-pyruvoyl tetrahydropte rin synthase OS=Idiomarina indica OX=1159017 GN=SAMN029 27930_00144 PE=4 SV=1
MQLFVNDLTVIDFSYLCPERGMVGESWIVDIVLDGSLNEQSMILDFGRVKKQIKRIIDGAVDHKLAIPAEHPFTQVTRHEDGNSYWVDFMRPEQRSIHLFCPADAFAFIDADTVTMASVTEYLRAVIKRELPENVEGLELLLRAEEIPGAFYHYTHGLKKHDGNCQRIAHGHRSRLYIAVDNERSASLEAEWAETWRDIYLGSAEDVVPLEQVNRSAAARDVSEQSHVAYSYTADQGLFELLVPRSENYIIPTDSTVECIAAYLATTIKQQRPQSAIRVTAFEGVGKGAISDA

SEQ ID NO: 21301 - protein, 294 aa, Idiomarina insulisalsae
  misc_feature (1)..(294): tr|A0A432YH46|A0A432YH46_9GAMM Uncharacterized protein OS=Idiomarina insulisalsae OX=575789 GN=CWI71_07700 PE= 4 SV=1
MQLFVNDLTVIDFSYLCPERGIVGESWIVDIILDGSLNEQSMVLDFGKVKKQIKRIIDDAVDHKLAVPADHPYTRVSHTDDDSSYWVDFLRPAGKSIHLFCPADAFAFIDADRVSMASVNAYLRAVIKRELPGNVAGLEVILREEVIAGAYYHYTHGLKKHDGNCQRIAHGHRSQLQIFIDGLRRQQVEQQWALRWQDIYLGSREDTCSCSELRRSIHAEAIDDNSHQAYRYTADQGLFELAVPQDENFIIANDSTVECIAEFLAAEIAVENQATGQVKVLAFEGVGKGAIGYA

SEQ ID NO: 21302 - protein, 294 aa, Idiomarina loihiensis
  misc_feature (1)..(294): tr|Q5QTY3|Q5QTY3_IDILO Uncharacterized conserved protei n OS=Idiomarina loihiensis (strain ATCC BAA-735 / DSM 1 5497 / L2-TR) OX=283942 GN=IL1256 PE=4 SV=1
MQLFVNDLTVIDCSYLCPERGIVGESWIVDIVLDGALNEQSMVLDFGRVKKQVKAIIDNSVDHKLVVPAEHSYTKVTHNSDDSANWVDFLRPEQGSIHLFCPADAFAFIDADVVSMETVTDYLKAVIKRELPVNVEGLQLFLRPENIDGFYYHYTHGLKKHDGNCQRIAHGHRSKIQIRLDNIRQPVLEKEWSDKWEDIYLGTTEDVRSKKELTLSEAATSATSDSTHTYYSYVADQGLFELIVPNAENFVIETDSTVECIADFLAAEIKSKHAGQAVEVRAFEGVGKGAIAYA

SEQ ID NO: 21303 - protein, 294 aa, Idiomarina loihiensis; identical to SEQ ID NO: 21302
  misc_feature (1)..(294): tr|A0A349C2H9|A0A349C2H9_9GAMM Uncharacterized protein OS=Idiomarina loihiensis OX=135577 GN=DCR51_03655 PE=4 SV=1

SEQ ID NO: 21304 - protein, 293 aa, Idiomarina marina
  misc_feature (1)..(293): tr|A0A432YJL2|A0A432YJL2_9GAMM Uncharacterized protein OS=Idiomarina marina OX=502366 GN=CWI76_02595 PE=4 SV=1
MQLFVNDLTVIDFSYLCPERGMVGESWIVDIILDGSLNEQSMVLDFGRVKKQIKRIIDGAVDHKLAVPAEHAYTHVTHHDDGNSYWVDFMRPEQRSIHLFCPADAFAFIDAQRVTMASVTDYLRAVIKRELPDNVQGLELQLRAEEIPGAFYHYTHGLKKHDGNCQRIAHGHRSRIYIALNGTRSESLEQQWASTWQDIYLGSEEDVVPVAQLQRSQYAQHVTAQSHVGYSYIADQGLFELLVPVAENYIIPTDSTVECIATYLAQTIKRSHPNESIQVTGFEGVGKGAIGYA

SEQ ID NO: 21305 - protein, 293 aa, Idiomarina maritima
  misc_feature (1)..(293): tr|A0A1I6GDG8|A0A1I6GDG8_9GAMM 6-pyruvoyl tetrahydropte rin synthase OS=Idiomarina maritima OX=519453 GN=SAMN04 488070_0509 PE=4 SV=1
MQLFVNDLTVIDFSYLCPERGMVGESWIVDIILDGSLNEQSMVLDFGRVKKQIKRIIDGAVDHKLAVPAEHQYTHVTHHDDGNSYWVDFMRPNQRSIHLFCPADAFAFIDAEQVTMASVTEYLRAVIKRELPDNVQGLELHLRAEEIPGAFYHYTHGLKKHDGNCQRIAHGHRSRLYIALDGVRSAQLEQQWAATWQDIYLGSQEDVAAIAQLQLSQYGQSVTEKSHIAYSYTADQGLFELIVPVAENYVIPTDSTVECIATYLADTIKQSYPSNAIKVTGFEGVGKGAIGYA

SEQ ID NO: 21306 - protein, 293 aa, Idiomarina maritima
  misc_feature (1)..(293): tr|A0A317QDV1|A0A317QDV1_9GAMM 6-pyruvoyl tetrahydropte rin synthase-like protein OS=Idiomarina maritima OX=519 453 GN=DET45_102114 PE=4 SV=1
MQLFVNDLTVIDFSYLCPERGMVGESWIVDIILDGSLNEQSMVLDFGRVKKQIKRIIDGAVDHKLAVPAEHPFTRVHHHADGNSYWVDFLRPQQASIHLFCPADAFAFIDAEAVTMATVTDYLRAVIKRELPDNVQGLELLLRPEQIDGAFYHYTHGLKKHDGNCQRIAHGHRSRLFIALDGNRDEALEQQWAAKWQDIYLGSTEDVVELAQLQLSPSATDVTPASHIGYSYTADQGLFELVVPVAENYLIPTDSTVECIATYLAQAVKQQHPDCAVKVTGFEGVGKGAIGYA

SEQ ID NO: 21307 - protein, 293 aa, Idiomarina piscisalsi
  misc_feature (1)..(293): tr|A0A432YWC5|A0A432YWC5_9GAMM Uncharacterized protein OS=Idiomarina piscisalsi OX=1096243 GN=CWI73_01785 PE=4 SV=1
MQLFVNDLTVIDCSYLCPQRGIVGESWIVDIVLDGNLNEQSMVLDFGKVKKQVKAIIDDSVDHKLLVPGDHPYTKVTHNKDDSSYWVDFERDNSRSIHLFCPSDSFAFIDAEVVSIETVTDYVKAVIKQELPVNVEGLKLTLRPEQIDGFYYHYTHGLKKHDGNCQRIAHGHRSKLQIFIDGIRQPALEKSWCDKWEDIYIGTEEDIATFNEMTLSKAAKVVDENTHIGYSYTSIQGLFELVMPRSENYVIESDSTVECIAQYLASTIGQEFAGKSVEVRAYEGVGKGAIAYA

SEQ ID NO: 21308 - protein, 293 aa, Idiomarina planktonica
  misc_feature (1)..(293): tr|A0A1Y6EST9|A0A1Y6EST9_9GAMM 6-pyruvoyl tetrahydropte rin synthase OS=Idiomarina planktonica OX=1323738 GN=SA MN06297229_1355 PE=4 SV=1
MQLFVNDLTVIDFSYLCPQRGIVGESWIVDIILDGALNEQSMVLDFGRVKKQIKAIIDDSVDHKLAVPAEHEYTQVTRNEDKSSYWVDFMRPNERSIHLHCPADAFAFIDSEQVTIDTVTDYLRAVIKRELPENVAGLQLQLRAEAIPGAFYHYTHGLKKHDGNCQRIAHGHRSRLYISLDGKRSETLEAAWCERWRDIYIGSLEDEVSLAEVDCSQTAGQCNEHTHVAYAYTADQGLFELLVPRGENYIIPTDSTVECLAQYLADQVKQQYPQAKVQVTAFEGVGKGAIGYA

SEQ ID NO: 21309 - protein, 294 aa, Idiomarina ramblicola
  misc_feature (1)..(294): tr|A0A432Z506|A0A432Z506_9GAMM Uncharacterized protein OS=Idiomarina ramblicola OX=263724 GN=CWI78_00525 PE=4 SV=1
MQLFVNDLTVIDCSYLCPERGIVGESWIVDIVLDGALNEQSMVLDFGRVKKQVKAIIDNSVDHKLVVPAEHPYTQVTHNSDDSANWVDFLRPDERSIHLFCPADAFAFIDADVVSIQTVTEYLKAVIKRELPGNVEGLRLLLRPESIDGFYYHYTHGLKKHDGNCQRIAHGHRSKIQIRLDDIRQPVLEKKWSDKWQDIYLGTTEDVCSHSRLKLSEAAHSATSDGSHTYYSYVADQGLFELIVPNAENFVIDTDSTVECIADFLATEIKREYPAKKVEVRAFEGVGKGAIAYA

SEQ ID NO: 21310 - protein, 293 aa, Idiomarina salinarum
  misc_feature (1)..(293): tr|A0A094LAL6|A0A094LAL6_9GAMM 6-pyruvoyl tetrahydropte rin synthase OS=Idiomarina salinarum OX=435908 GN=IDSA_ 04060 PE=4 SV=1
MQLFVNDLTVIDFSYLCPQRGIVGESWIVDIILDGSLNEQSMVLDFGRVKKQIKRIIDGAVDHKLAIPAEHPYTQVSYHPDGNSYWVDFMRPDDRSIHLFCPSDAFAFIDAQEVTLESITEYLRAVIKRELPENVAGLSLQLRPEEIPGAFYHYTHGLKKHDGNCQRIAHGHRSRLYITLDGDRNSELESQWCERWRDIYLGSAEDVEPLDNLLRSSSAVALTEETHIGYSYSADQGLFELIVPRPENYVIPTDSTVECIAVYLATKVKQQCADAEVQVTAFEGVGKGAIGYA

SEQ ID NO: 21311 - protein, 294 aa, Idiomarina sediminum
  misc_feature (1)..(294): tr|A0A432Z7N2|A0A432Z7N2_9GAMM Uncharacterized protein OS=Idiomarina sediminum OX=431675 GN=CWI80_00670 PE=4 S V=1
MQLFVNDLTVIDFSYVCPERGIVGESWIVDIILDGSLNEQSMVLDFGQVKKQIKRIIDDAVDHKLAIPAEHPYTHVTHSDDQNSHWVDFMRPNHRSIHLFCPAEAFAYIDADRVTKASVIAYLRGIIKRELPGNVAGLQLTLREEVIDGAYYHYTHGLKKHDGNCQRIAHGHRSRLQIFVDDTRQPELEALWAERWQDIYLGSTEDRCEPTALQRSVAAQQLTSSTHVAYAYEADQGRFELLVPTQENYCIATDSTVECIAEYLAAQVRSEQNPAGKIRVLAYEGVGKGAIMYA

SEQ ID NO: 21312 - protein, 294 aa, Idiomarina seosinensis
  misc_feature (1)..(294): tr|A0A432ZJU8|A0A432ZJU8_9GAMM Uncharacterized protein OS=Idiomarina seosinensis OX=281739 GN=CWI81_03425 PE=4 SV=1
MQLFVNDLTVIDCSYLCPQRGIVGESWIVDIVLDGALNEQSMVLDFGRVKKQIKRIIDDSVDHKLVVPTEHEYTNVTYHSDDSSQWVDFMRPNGKSIHLFCPADAFAYIDAQEVNALTVTDYLRAVIKRELPGNVEGLKLFLRPEAIDGFYYHYTHGLKKHDGNCQRIAHGHRSKLQIFLDNIRQPVLEKQWSDKWADIYLGSSEDQSELTNLLRSAQAKQAATAATHVGYSYTADQGLFELSVPKAENYLIETDSTVECIAQYLADTIKQQVPDQSVQVRAYEGVGKGAIAYA

SEQ ID NO: 21313 - protein, 294 aa, Idiomarina sp.
  misc_feature (1)..(294): tr|A0A2D8HXF7|A0A2D8HXF7_9GAMM Uncharacterized protein OS=Idiomarina sp. OX=1874361 GN=CMF11_08440 PE=4 SV=1
MQLFVNDLTVIDCSYLCPERGIVGESWIVDIVLDGALNEQSMVLDFGRVKKQVKAIIDNSVDHKLVVPAEHPYTKVTHNSDDSANWVDFVRPEQRSIHLFCPADAFAFIDAEVVSIETVTDYLKAVIKRELPVNVEGLSLFLRPENIDGFYYHYTHGLKKHDGNCQRIAHGHRSKIQIKLDNIRQPVLEKEWSDKWQDIYLGTTEDVCTRSNLQLSDAASDLSSDSSHTFYSYTADQGLFELAVPNAENFVIDTDSTVECIADYLVAEIKSQNPDKKVEVRAFEGVGKGAIAYA

SEQ ID NO: 21314 - protein, 293 aa, Idiomarina sp.
  misc_feature (1)..(293): tr|A0A1S2SWE7|A0A1S2SWE7_9GAMM Uncharacterized protein OS=Idiomarina sp. MD25a OX=1889913 GN=BFR57_12505 PE=4 SV=1
MLLFVDDLTVIDCSYLCAERGIVGESWIVDIELDGSLNEQSMVLDFGRVKKQIKAIIDRSVDHKLLVPSSHAYTRVTHSDDDESHWVDFMRPEGRSIHLFCPAEAFAYIDAEKVDALTVTDYLRAVIKRELPGNVQGLRLSLRPEAIDGFYYHYTHGLKKHDGNCQRIAHGHRSKIQIALDNIRQPVLEKQWSERWADIYIGSEEDKVEIKRLQRSESAKQLSEATHVGYSYVADQGLFELIVPKSENDFIDSDSTVECIAEFIAAKIKQDHPEQRVRVRAFEGVGKGAIAYA

SEQ ID NO: 21315 - protein, 293 aa, Idiomarina tainanensis; identical to SEQ ID NO: 21306
  misc_feature (1)..(293): tr|A0A368V408|A0A368V408_9GAMM 6-pyruvoyl tetrahydropte rin synthase-like protein OS=Idiomarina tainanensis OX= 502365 GN=DFO79_102115 PE=4 SV=1

SEQ ID NO: 21316 - protein, 293 aa, Idiomarina taiwanensis
  misc_feature (1)..(293): tr|A0A432ZN72|A0A432ZN72_9GAMM Uncharacterized protein OS=Idiomarina taiwanensis OX=337250 GN=CWI83_02180 PE=4 SV=1
MLLFVNDLTVIDFSYLCPERGIVGESWIVDIVLDGRLNEQSMVLDFGRVKKQIKKIIDESVDHKLAVPAEHPYTRVQKHAESEQYWVDFMRPEQASIHLYCPADAFAFIDAEQVDKASVMAYLRAVIRQQLPENVEQIELALREEQIDGAFYHYTHGLKKHDGNCQRIAHGHRSRIHIEVNGQRDTALEQKWAERWRDIYIGSSEDRCQLDALERSEAAQQVSDRTHIGYGYDADQGRFELILPQLENDLIDADSTVECIAEHIAQALKQQNPQATICVRAFEGVGKGAISYA

SEQ ID NO: 21317 - protein, 294 aa, Idiomarina tyrosinivorans
  misc_feature (1)..(294): tr|A0A432ZTV5|A0A432ZTV5_9GAMM Uncharacterized protein OS=Idiomarina tyrosinivorans OX=1445662 GN=CWI84_00480 PE=4 SV=1
MQLFVNDLTVMDFSYLCPQRGIVGESWIVDIVLDGALNEQSMVLDFGKVKKQIKAIIDDSVDHKLLVPTEHEYTAVKHNHDDTSQWVDFARPEGRSIHLYCPADAFAFIEAETITMQAVIDYLRAVIKRELPQNVEGLQLSLRTEQIDGFYYHYTHGLKKHDGNCQRIAHGHRSKITIALDNIRQPVLEKLWSNQWQDIYLGSRDDVVSVPELNRSEAAKQLTREATHVGYSYVAEQGLFELIVPKAENYLLETDSTVECIAEYLAQQIHQRHPKQKVMVRAFEGVGKGAIAYA

SEQ ID NO: 21318 - protein, 297 aa, Idiomarina woesei
  misc_feature (1)..(297): tr|A0A0K6GVH1|A0A0K6GVH1_9GAMM 6-pyruvoyl tetrahydropte rin synthase OS=Idiomarina woesei OX=1381080 GN=Ga00610 64_0188 PE=4 SV=1
MQLFVNDLTVIDFSYLCPERGMVGESWIVDIILDGSLNEQSMVLDFGRVKKQIKRIIDDAVDHKLAVPAEHPYTCVTHHDDGNSYWVDFLRPKQCSIHLFCPADAFAFIDAQQVTMQSVTDYLRAVIKRELPENVQGLSLQLRAEEIPGAFYHYTHGLKKHDGNCQRIAHGHRSRLYVALNGERNTTLELQWAQTWQDIYLGSEEDLVAIEQLQLSPVFAQRNLSVTTQTHKAYSYTADQGLFEILVPAAENYTIPTDSTVECIANYLAQTIKQAHPTDAVQVTGFEGVGKGAIGYA

SEQ ID NO: 21319 - protein, 293 aa, Idiomarina xiamenensis
  misc_feature (1)..(293): tr|K2LB65|K2LB65_9GAMM Uncharacterized protein OS=Idiom arina xiamenensis 10-D-4 OX=740709 GN=A10D4_02372 PE=4 SV=1
MQLFVNDLTVIDFSYLCARRGIVGESWIVDIVLDGDLNEQSMVLDFGRVKKQIKRIIDDAVDHKLAVPADSTLTQVTHNQDDSAYWVDFNRPDGRSIHLYCPADAYAFIEAEQIDQASVMAYLRAVIKQQLPDNIDGLQLFLRAESIDGFYYHYTHGLKKHDGNCQRIAHGHRSKIHIALDDIRQPALEKQWSDRWCDIYLGSEEDTCKVEQLTRSAAAQGCSDDSHQAYRYHADQGLFELLVPQAENDLIPTDSTVECIAQFVADSIKRRHPQQRVKVLAYEGVGKGAIAYA

SEQ ID NO: 21320 - protein, 293 aa, Idiomarina zobellii
  misc_feature (1)..(293): tr|A0A1G7NRX2|A0A1G7NRX2_9GAMM 6-pyruvoyl-tetrahydropte rin synthase OS=Idiomarina zobellii OX=86103 GN=SAMN045 15658_104139 PE=4 SV=1
MQLFVNDLTVIDCSYLCPQRGIVGESWIVDIVLDGNLNEQSMVLDFGKVKKQVKAIIDDSVDHKLLVPGDHPYTKVTHNEDDSSYWVDFERDNSRSIHLFCPSDSFAFIDAEVVSIETVTDYVKAVIKQELPVNVEGLKLTLRPEQIDGFYYHYTHGLKKHDGNCQRIAHGHRSKLQIFIDGIRQPALEKSWCDKWEDIYIGTEDDIATFNEMTLSKAANGVDENTHIGYSYTSIQGLFELVMPRSENYVIESDSTVECIAQYLASTIGQEHAGKSVEVRAYEGVGKGAIAYA

SEQ ID NO: 21321 - protein, 293 aa, Idiomarinaceae bacterium
  misc_feature (1)..(293): tr|A0A2E4SG00|A0A2E4SG00_9GAMM Uncharacterized protein OS=Idiomarinaceae bacterium OX=1898113 GN=CMF20_03410 P E=4 SV=1
  misc_feature (15)..(15): Xaa can be any naturally occurring amino acid
  misc_feature (17)..(17): Xaa can be any naturally occurring amino acid
  misc_feature (19)..(19): Xaa can be any naturally occurring amino acid
  misc_feature (66)..(66): Xaa can be any naturally occurring amino acid
  misc_feature (79)..(79): Xaa can be any naturally occurring amino acid
  misc_feature (122)..(122): Xaa can be any naturally occurring amino acid
  misc_feature (242)..(242): Xaa can be any naturally occurring amino acid
  misc_feature (245)..(245): Xaa can be any naturally occurring amino acid
MQLFVNDLTVIDCSXLXPXRGIVGESWIVDIVLDGNLNEQSMVLDFGKVKKQVKAIIDDSVDHKLXVPGDHPYTKVTHXEDDSSYWVDFERDNSRSIHLFCPSDSFAFIDAEVVSIETVTDXVKAVIKQELPVNVEGLKLTLRPEQIDGFYYHYTHGLKKHDGNCQRIAHGHRSKLQIFIDGIRQPALEKSWCDKWEDIYIGTEDDIATFNEMTLSKAANGVDENTHIGYSYTSIQGLFELXMPXSENYVIESDSTVECIAQYLASTIGQEHAGKSVEVRAYEGVGKGAIAYA

SEQ ID NO: 21322 - protein, 293 aa, Idiomarinaceae bacterium
  misc_feature (1)..(293): tr|A0A2E6UC81|A0A2E6UC81_9GAMM Uncharacterized protein OS=Idiomarinaceae bacterium OX=1898113 GN=CMF17_10295 P E=4 SV=1
MLLFVDDLTVIDCSYLCAERGIVGESWIVDIELDGSLNEQSMVLDFGRVKKQIKAIIDRSVDHKLLVPSSHAYTRVTHSDDDESHWVDFMRPEGRSIHLFCPAEAFAYIDAEKVDALTVTDYLRAVIKRELPGNVQGLRLSLRPEAIDGFYYHYTHGLKKHDGNCQRIAHGHRSKIQIALDNIRQPVLEKQWSERWADIYIGSEEDKAEIKRLQRSESAKQLSEATHVGYSYVADQGLFELIVPKSENDFIDSDSTVECIAEFIAAKIKQDHPEQRVRVRAFEGVGKGAIAYA

SEQ ID NO: 21323 - protein, 140 aa, Ignatzschineria cameli
  misc_feature (1)..(140): tr|A0A2U2ATV1|A0A2U2ATV1_9GAMM 6-carboxy-5,6,7,8-tetrah ydropterin synthase OS=Ignatzschineria cameli OX=218279 3 GN=DC077_02445 PE=3 SV=1
MLQQFYPTPAHNFRYELNKDMHFAAAHFIPNAAAGVCQNVHGHTYFANITIVGNELDECGFLINFQTLKALLHGVYDHTLMNDHPDFQNRPPSTEVVAEMAWRRIQAALDQEPHRPRCLQVLIRETPTSYVRYLPQAEDF

SEQ ID NO: 21324 - protein, 141 aa, Ignatzschineria indica
  misc_feature (1)..(141): tr|A0A2U2ALQ6|A0A2U2ALQ6_9GAMM 6-carboxy-5,6,7,8-tetrah ydropterin synthase OS=Ignatzschineria indica OX=472583 GN=DC082_00915 PE=3 SV=1
MLQQFYPTPAHSFRYELNKDMHFAAAHFIPNELAGVCQRVHGHTYFANITVVGNELDECGFLINFQTLKALLHGVYDHTLMNDHPDFYHEPPSTEVVAKMAWQRIQKALDQEPHQPRCIQILIRETPTSYVRYLPQEEDFK

SEQ ID NO: 21325 - protein, 140 aa, Ignatzschineria sp.; identical to SEQ ID NO: 21323
  misc_feature (1)..(140): tr|A0A256CIY2|A0A256CIY2_9GAMM 6-carboxy-5,6,7,8-tetrah ydropterin synthase OS=Ignatzschineria sp. F8392 OX=198 0117 GN=B9T19_08355 PE=3 SV=1

SEQ ID NO: 21326 - protein, 141 aa, Ignatzschineria ureiclastica
  misc_feature (1)..(141): tr|A0A2U2ACX8|A0A2U2ACX8_9GAMM 6-carboxytetrahydropteri n synthase QueD OS=Ignatzschineria ureiclastica OX=4725 82 GN=DC083_09420 PE=4 SV=1
MLQQFYPTPAHPFRYELNKDLHFAAAHHIPDPSAGICQQIHGHTYFANITIVGDALDECGFLVNFQLIKKLVHAPYDHTLLNNHEDFSTRPPSTEVVTEAIWRRIQDHLNTLPHQPRCLQVLVRETPTSYVCYRPKAEDFI

SEQ ID NO: 21327 - protein, 31 aa, Ignavibacteria bacterium
  misc_feature (1)..(31): tr|A0A2M7MQN7|A0A2M7MQN7_9BACT 6-pyruvoyl tetrahydrobio pterin synthase (Fragment) OS=Ignavibacteria bacterium CG_4_10_14_3_um_filter_37_18 OX=1974037 GN=COZ25_00625 PE=4 SV=1
WKELYHKIPVGKLYSVKLFETENNYVEYRGE

SEQ ID NO: 21328 - protein, 137 aa, Ignavibacteria bacterium
  misc_feature (1)..(137): tr|A0A1G0VEM0|A0A1G0VEM0_9BACT 6-carboxy-5,6,7,8-tetrah ydropterin synthase OS=Ignavibacteria bacterium RIFOXYB 2_FULL_37_11 OX=1798448 GN=A2299_18270 PE=3 SV=1
MVYVTRREIFSASHRLFNPNLSEEENNSLFGKCNNPNGHGHNYTLEVTICGEVNPKTGYLIDLKLLKQIIIDNVINKVDHKNLNLDVDFLAGKIPTAENIAIAVWDELENKIPNGKLYSIRLLETENNYIEYKGKNV

SEQ ID NO: 21329 - protein, 135 aa, Ignavibacteriae bacterium
  misc_feature (1)..(135): tr|A0A2G6E2V7|A0A2G6E2V7_9BACT 6-carboxy-5,6,7,8-tetrah ydropterin synthase OS=Ignavibacteriae bacterium OX=202 6749 GN=CR986_10255 PE=3 SV=1
MIYVTRREVFSASHRLHNENLSNEENKSIFGKCNNPNGHGHNYILEVVVAGEIDKKTGYVIDLKLLKTIIIENVIKKVDHKHLNFDVDFMKDINPTTENFVIAIWNQLKNKIPSGRLYAIRLHETENNFIEYKGE

SEQ ID NO: 21330 - protein, 145 aa, Ignavibacteriae bacterium
  misc_feature (1)..(145): tr|A0A2N1V7K9|A0A2N1V7K9_9BACT 6-carboxy-5,6,7,8-tetrah ydropterin synthase OS=Ignavibacteriae bacterium HGW-Ig navibacteriae-4 OX=2013811 GN=CVV25_03930 PE=3 SV=1
MLFITKSVEFSASHRLFNPEWDFAKNQEVYDKCNNPNGHGHNYVLEVTVKGKPNPDTGYVIDLKKLKSILVNNVLIHLDHKHLNVDVDFLKGVIPTVENITVLIWDIVKPHITDGELYKLKLYETPSSWVEYFGEPIEIKRFENE

SEQ ID NO: 21331 - protein, 98 aa, Ignavibacteriales bacterium
  misc_feature (1)..(98): tr|A0A2M7I2J9|A0A2M7I2J9_9BACT 6-carboxytetrahydropteri n synthase (Fragment) OS=Ignavibacteriales bacterium CG 12_big_fil_rev_8_21_14_0_65_30_8 OX=1974046 GN=COW08_04 855 PE=4 SV=1
MKIAKEFRWEMGHRLPDHFGKCKNIHGHSYKMMVEFEGELDKNGMIIDYYIVKEIIEPIVEELDHSFMVNKNDDLVLEFLEKLDSKKVIVDFDSTVEN

SEQ ID NO: 21332 - protein, 141 aa, Ignavibacteriales bacterium
  misc_feature (1)..(141): tr|A0A2M7ZIK4|A0A2M7ZIK4_9BACT 6-carboxytetrahydropteri n synthase OS=Ignavibacteriales bacterium CG_4_9_14_3_u m_filter_30_11 OX=1974043 GN=CO128_08965 PE=4 SV=1
MKIAKEFRWEMGHRLPDHFGKCKNIHGHSYKMMVEFEGELDKNGMIIDYYIVKEIIEPIVEKLDHSFMVNKKDNLVLDFLEKLNSKKMIVDFDSTVENITRYLIKEISKASLPKNVTGLKVRVCETPDDYAEETTNLNYEL

SEQ ID NO: 21333 - protein, 135 aa, Ignavibacterium album
  misc_feature (1)..(135): tr|I0AJ91|I0AJ91_IGNAJ 6-carboxy-5,6,7,8-tetrahydropter in synthase OS=Ignavibacterium album (strain DSM 19864 / JCM 16511 / NBRC 101810 / Mat9-16) OX=945713 GN=ptpS PE=3 SV=1
MVYITRRETFAAAHRLFIPELSDEENLKIFGKCSHPNWHGHNYTLEVVIAGEINPETGFVLDIKKLKEIIHKFVIDKVDHKNLNLDTDFMKGLIPTSENICIAIWNQLKDKIPSGKLYSVKLYETENNYFEYRGE

SEQ ID NO: 21334 - protein, 138 aa, Ignavibacterium album
  misc_feature (1)..(138): tr|I0AGF9|I0AGF9_IGNAJ 6-Pyruvoyl-tetrahydropterin synt hase OS=Ignavibacterium album (strain DSM 19864 / JCM 1 6511 / NBRC 101810 / Mat9-16) OX=945713 GN=ptpS PE=4 SV =1
MKIAKAFRWEMGHRLPEHFGLCKNIHGHSYKMIVEFEGELNKDQMVIDYYDVEKIINPIINQLDHAFMVNTNDKIVLDFLEKMNSKKVVVDFDATAENICKFLLSEISKSNLPENINSVKVRVYETQFDYAEDTLQLK

SEQ ID NO: 21335 - protein, 119 aa, Ilumatobacter fluminis
  misc_feature (1)..(119): tr|A0A4R7HWP6|A0A4R7HWP6_9ACTN 6-carboxy-5,6,7,8-tetrah ydropterin synthase OS=Ilumatobacter fluminis OX=467091 GN=BDK89_0141 PE=3 SV=1
MEIFREFTFEAAHRLPNVSEGHKCGRLHGHSYRIELHVDGEPDERTGWVMDFAEIKQAFAPILDRLDHHYLNDVPGLENPTSETLAAWLWSQLDGDLPLSKVVVRETCTSGCVYRGPAS

SEQ ID NO: 21336 - protein, 142 aa, Ilyobacter polytropus
  misc_feature (1)..(142): tr|E3HCY3|E3HCY3_ILYPC 6-carboxy-5,6,7,8-tetrahydropter in synthase OS=Ilyobacter polytropus (strain DSM 2926 / CuHBu1) OX=572544 GN=Ilyop_2278 PE=3 SV=1
MYILKAEHHFDSAHFLKGYQGKCANIHGHRWRVVAEVEGDKLFSEGQLRDMVVDFGDLKRDIKKMVDYYDHSLIIESGSMRKETLSFLIEDGFNIIEVDFRPTAERFASKFYEELENMGYRIKRIHVYETPTNCALYERQGG

SEQ ID NO: 21337 - protein, 164 aa, Imhoffiella purpurea
  misc_feature (1)..(164): tr|W9V734|W9V734_9GAMM Folate biosynthesis protein PTPS -III OS=Imhoffiella purpurea OX=1249627 GN=D779_1522 PE =4 SV=1
MADQTLTRIEISKDYLNFSAGHFTIFSASERENLHGHNFQVRCSVSAHVGADGMAFDYVVLKRILRELCDALDERVLLPELSPHLRLEHQEGQVIALFADERIGFLERDVLLLPVRNVTIEELAPLLLTRLRDRIEIADRGIRCMELGVSSGAGQWAYACWESD

SEQ ID NO: 21338 - protein, 365 aa, Imhoffiella purpurea
  misc_feature (1)..(365): tr|W9V6V5|W9V6V5_9GAMM Queuosine biosynthesis QueD, PTP S-I OS=Imhoffiella purpurea OX=1249627 GN=D779_1596 PE= 4 SV=1
MTEQLFHVAAAPFESARRVAILPEGHRARRLHGHSFLAKVRARLPQDWGGFRGAESGALLESLAGAVEALDYRDLNELLPVPTDENLARWLRDRLDVPGVASIGVQSTSEQGADLDDGEDRVHVWRRFRFEAAHRLPNVPEGHQCGRMHGHGFEVILHADQSLAGADMGIDFDRLAALWAPLQAELHHACLNEIPGLENPTSEMLSRWIWERLTPRLPALSWVTVYETATAGCHYDGEHYRIWKEQRFESALRLELAPEGDSRRRLHGHSYLLRLHLTAPLDAVLGWTVDYGDVKRLFDPVYRRLDHHRLDGLHGLSAADPGSLALWIREAALGGLPQLDRIDLHETPGCGASLCWGELGPALPS

SEQ ID NO: 21339 - protein, 139 aa, Imperialibacter sp.
  misc_feature (1)..(139): tr|A0A5E7ZWQ7|A0A5E7ZWQ7_9BACT 6-carboxytetrahydropteri n synthase QueD OS=Imperialibacter sp. EC-SDR9 OX=20383 71 GN=IMPR6_380009 PE=4 SV=1
MIYVSRKEHFNAAHKLYNPAWSKEKNEAVFGPCANENWHGHNFDLIITVKGMPDPETGFVIDLKKLSTLIRTRVIDKVDHKNLNLDVDFLEGKMASCENIVFEFWKILFPGVKEIAPNATLHAIKLYETPRNYVEYFGE

SEQ ID NO: 21340 - protein, 135 aa, Imperialibacter sp.
  misc_feature (1)..(135): tr|A0A5E8AS83|A0A5E8AS83_9BACT 6-carboxy-5,6,7,8-tetrah ydropterin synthase OS=Imperialibacter sp. EC-SDR9 OX=2 038371 GN=IMPR6_60091 PE=3 SV=1
MKVAVYRKEHFNAAHRLNNPAWSEEKNREVFGKCNNGNYHGHNYDLVVKLVGDPDPETGYVFDMKVLSDLVKEHVTRKFDHKNLNIDVEEFRSLNPTAENIAIVIYDLLRARIDSKLDLKITLYETERNFVEYPA

SEQ ID NO: 21341 - protein, 149 aa, Imtechella halotolerans
  misc_feature (1)..(149): tr|I0WJL2|I0WJL2_9FLAO 6-carboxy-5,6,7,8-tetrahydropter in synthase OS=Imtechella halotolerans K1 OX=946077 GN= W5A_01105 PE=3 SV=1
MTQIRITKQFSFETGHALYGYDGKCKNVHGHSYKLSVTVIGSPNIDTTNVKYGMVIDFGDLKKIVKEEIVDIFDHATVFNQNTPHIDLANELKSRNHNVILVDYQPTSENMVIDFANKIRRRLPKNINLFSLKLQETETSYAEWYASDN

SEQ ID NO: 21342 - protein, 136 aa, Imtechella halotolerans
  misc_feature (1)..(136): tr|I0WGV7|I0WGV7_9FLAO Putative 6-pyruvoyl tetrahydropt erin synthase OS=Imtechella halotolerans K1 OX=946077 G N=W5A_05393 PE=4 SV=1
MKVKVSRKAYFNAAHRLYRPDWSFEKNEAIFGKCNNPNYHGHNYELIASVFGNIDPETGYVIDIKILKDLIYKHIELAFDHKNLNEDVPEFKSLNPTAEHIAVVIWKKLRPHLPLNLDLEITLYETPRNFVTYRGE

SEQ ID NO: 21343 - protein, 139 aa, Indibacter alkaliphilus
  misc_feature (1)..(139): tr|S2DKN0|S2DKN0_9BACT 6-pyruvoyl tetrahydrobiopterin s ynthase OS=Indibacter alkaliphilus LW1 OX=1189612 GN=A3 3Q_0310 PE=4 SV=1
MIHVCRKEHFNAAHKLWNPNWSEEKNKEVFGPCSNVNWHGHNFELIVTVKGMPDPETGFVVDLKELSSVIKTLVIDKVDHKNLNLDVDFMQGKMASCENLVVEFWKILAPAINEIVTDGSLYKLTLYETPRNFVEYYGE

SEQ ID NO: 21344 - protein, 135 aa, Indibacter alkaliphilus
  misc_feature (1)..(135): tr|S2DI24|S2DI24_9BACT 6-carboxy-5,6,7,8-tetrahydropter in synthase OS=Indibacter alkaliphilus LW1 OX=1189612 G N=A33Q_2155 PE=3 SV=1
MLSITKIFSFESAHSISDYEGACSNLHGHSYVLHVTVSGEELEKDMLLDFKALKKIVKEEIIEKLDHTLVLKNTENHKRDFQQMWQKIFWMEHEPTAERMLLWMKDRIVPKLPSHVKLESLTLYETATCYACWKG

SEQ ID NO: 21345 - protein, 366 aa, Inhella sp.
  misc_feature (1)..(366): tr|A0A437LI10|A0A437LI10_9BURK 6-pyruvoyl tetrahydropte rin synthase OS=Inhella sp. CCP-18 OX=2499851 GN=EOD73_ 13050 PE=4 SV=1
MNPSLLHSAGAGFEAACHIPALPEGHRSRRLHGHSYFARVRGALPSGWAPFPGAEVATLRERLEAAVAPLDHGLLNDHLPNPTDENLARWLRAQLGDVPGLGQVSVASTPHSGVDLDTAGHAHVWRRYRFQSAHWLPNVPPGHQCGRLHGHGFEVIVHANQTLGANDDLAIDYDHLDDLWAPLHFQLNYRCLNELPGLDNPTSERLSSWIWAQLKPQLPALSWVTVFETGSSGANFDGANYRIWKEFSMDSAVQLRRAPQGHPLAGVHGHTFTLRLHLQAPLDAVLGWAVDYGDVKALFNPVFKRLDHHPLHQDPALSDGDCATLATHVLQAAREVLPATDRVDLFETRGSGAIATLGDTNELIPV

SEQ ID NO: 21346 - protein, 137 aa, Inmirania thermothiophila
  misc_feature (1)..(137): tr|A0A3N1YCL2|A0A3N1YCL2_9GAMM 6-pyruvoyltetrahydropter in/6-carboxytetrahydropterin synthase OS=Inmirania ther mothiophila OX=1750597 GN=EDC57_1054 PE=4 SV=1
MNSRYRVTRTVHFCYGHRLLGHPGRCRHLHGHSARAEITLAADGLDALGMVADFGEIQRAADAFIDAELDHNLLLQAGDPVLPTLQEAGERVFVMEAPPTAENIARLICERLRGAGLPVVEVAVWEGEASCARYRPA

SEQ ID NO: 21347 - protein, 134 aa, Inquilinus limosus
  misc_feature (1)..(134): tr|A0A211ZG15|A0A211ZG15_9PROT Uncharacterized protein OS=Inquilinus limosus OX=171674 GN=BWR60_26145 PE=4 SV= 1
MYTVSVRDHFMIAHSFRGAVFGPAQKLHGATYVVDLAFRRAELDADGIVVDIGLASEALKAVMGELNYRNLDDEAAFAGRNTTTEVLARTIFDRIAARIAAGGLGAGAAAIESLVVTLHESHVAWASYEGRLAR

SEQ ID NO: 21348 - protein, 118 aa, Inquilinus limosus
  misc_feature (1)..(118): tr|A0A211ZNX1|A0A211ZNX1_9PROT 6-carboxy-5,6,7,8-tetrah ydropterin synthase OS=Inquilinus limosus OX=171674 GN= BWR60_12740 PE=3 SV=1
MKITQAFTFEAAHRLPNVPATHRCHRMHGHSYRVELRLEGPVDPESGFVVDFFDVEAAFAPILARLDHYCLNEIEGLANPTAEHIAVWIWDRVRPSLPLLAAVTVYETPNCWAEYDGR

SEQ ID NO: 21349 - protein, 138 aa, Inquilinus sp.
  misc_feature (1)..(138): tr|A0A554SFH9|A0A554SFH9_9PROT 6-carboxytetrahydropteri n synthase OS=Inquilinus sp. KBS0705 OX=2578108 GN=FFF3 4_013875 PE=4 SV=1
MIHITRKEHFNAAHRMYREEWSAEKNEEVFGKCANPNWHGHNYNLFVTVKGEVTHATGYLIDLKELKVIINDYVIEKLDHKNINKDVDFMAGKMASTELLCIEIFNQLKGPIEAYPGVFLHSVKLYETENNFAEYFGG

SEQ ID NO: 21350 - protein, 185 aa, Insolitispirillum peregrinum
  misc_feature (1)..(185): tr|A0A1N7MVK3|A0A1N7MVK3_9PROT 6-pyruvoyltetrahydropter in/6-carboxytetrahydropterin synthase OS=Insolitispiril lum peregrinum OX=80876 GN=SAMN05421779_104387 PE=4 SV= 1
MSLMHVTRRLEIDAGHRIMLHGSKCRHLHGHRYAIEATVCSPQAELHQSGEQAGMVLDFGFLKQEMTACIDQPCDHGFMASLADLDVLRMFAPPAQAFDPWLAGVRQQVERDGYLATTDCRVGSKLYVVPFHPTAEELARHWFQRLQPRVLERSHGLAHLDRVRVWETPNCWAEYTGDGVLSSAG

SEQ ID NO: 21351 - protein, 142 aa, Intestinibacter bartlettii; identical to SEQ ID NO: 19341
  misc_feature (1)..(142): tr|B0A670|B0A670_9FIRM 6-carboxy-5,6,7,8-tetrahydropter in synthase OS=Intestinibacter bartlettii DSM 16795 OX= 445973 GN=SAMN02745147_0109 PE=3 SV=1

SEQ ID NO: 21352 - protein, 132 aa, Intrasporangium calvum
  misc_feature (1)..(132): tr|E6SDC9|E6SDC9_INTC7 Uncharacterized protein OS=Intra sporangium calvum (strain ATCC 23552 / DSM 43043 / JCM 3097 / NBRC 12989 / 7 KIP) OX=710696 GN=Intca_1028 PE=4 SV=1
MFSVTVRDHMMVAHSFRGEIFGPAQRLHGATFVVDVTFRGPALDRDNVLVDIGLATSEVHEVVSDLNYRNLDDEPAFAGVNTSAEALAKAVADRVAERVHGGRLRDAAQQVTEISVTLRESHVAWAGYERPL

SEQ ID NO: 21353 - protein, 132 aa, Intrasporangium oryzae
  misc_feature (1)..(132): tr|W9GCP6|W9GCP6_9MICO 6-pyruvoyl tetrahydropterin synt hase OS=Intrasporangium oryzae NRRL B-24470 OX=1386089 GN=N865_02685 PE=4 SV=1
MFSVTVRDHMMIAHSLRGEVFGPAQRLHGATYVVDATFRREALDPDSLVVDIGRAAEQLREVLGELGYRNLDDEPTLTGLTTTTEALAQVVADRLAERVHDGRLGEGARGLSAVAVTLHESHVAWATYERSL

SEQ ID NO: 21354 - protein, 198 aa, Iodobacter fluviatilis
  misc_feature (1)..(198): tr|A0A377ST37|A0A377ST37_9NEIS Queuosine biosynthesis p rotein QueD OS=Iodobacter fluviatilis OX=537 GN=NCTC111 59_03751 PE=4 SV=1
MLIRKLFKFENAHIVRNCSSERCRSSIHGHSYRVEVLLEANALDHGQMVYDFGLMKGTIRDVVDAFDHAVCFWDKDDAEYIRLCKQFSTRWIAMPVSPSAEQFARMFFVIIDALLQQTVMANGEADVTLHSVIAHETDTGYAQAFRADAINERMGIIRLEDVVFSEQCQAEWKDPEMYKKLLDGQRFINPAVPRQVEI

SEQ ID NO: 21355 - protein, 198 aa, Iodobacter sp.
  misc_feature (1)..(198): tr|A0A3S8ZWD2|A0A3S8ZWD2_9NEIS 6-carboxytetrahydropteri n synthase OS=Iodobacter sp. H11R3 OX=2496266 GN=EJO50_ 15410 PE=4 SV=1
MLIRKLFKFENAHIVRNCSSERCRSSIHGHSYRVEILLEANALDHGQMVYDFGLMKGTIRDVIDAFDHAICFWDRDDTEYIRLCKQFSTRWIAMPVSPSAEQFSRIFFVIIDALLQQTIMANGEADVTLHSVIAHETDTGYAQAFRADAINERMGIIRLEDIIFSEQCQAEWKDPDMYKKLLSGKHFSNPPAPRQIEV

SEQ ID NO: 21356 - protein, 198 aa, Iodobacter sp.
  misc_feature (1)..(198): tr|A0A2G3J5R7|A0A2G3J5R7_9NEIS 6-carboxytetrahydropteri n synthase QueD OS=Iodobacter sp. BJB302 OX=1506510 GN= CSQ88_20075 PE=4 SV=1
MLIRKLFKFENAHIVRNCSSERCRSSIHGHSYRVEVLLEANALDHGQMVYDFGLMKGTIRDVVDAFDHAVCFWDKDDAEYIRLCKQFSTRWIAMPVSPSAEQFSRMFFVIIDALLQQTVMANGEADVTLHSVIAHETDTGYAQAFRADAINERMGIIRLEDVVFSEQCQAEWKDPEMYKKLLDGQRFINPAVPRQVEA

SEQ ID NO: 21357 - protein, 177 aa, Isosphaera pallida
  misc_feature (1)..(177): tr|E8QZT4|E8QZT4_ISOPI Uncharacterized protein OS=Isosp haera pallida (strain ATCC 43644 / DSM 9630 / IS1B) OX= 575540 GN=Isop_2655 PE=4 SV=1
MTMPNPPALAGHYRVRVTKDHLVFAAGHFITYNGDHCERIHGHNYRVAVEVEGPLDDNHYVFDFIALLELSRSIVAEWDHRMLLPDGSGLIAVHDDPGEGPAHVRVCYKERRWVFPKEECVILPIPNTTTELLARLFGQRLWERMGQQGLKPPSVLRVEVEENFGQMAAAEWRNPSE

SEQ ID NO: 21358 - protein, 154 aa, Isosphaera pallida
  misc_feature (1)..(154): tr|E8QWX4|E8QWX4_ISOPI PreQ(0) biosynthesis protein Que D OS=Isosphaera pallida (strain ATCC 43644 / DSM 9630 / IS1B) OX=575540 GN=Isop_3456 PE=4 SV=1
MYRVTREMKFCYGHRLINYEGKCRHLHGHNGRVLVTLESPTLDHRGMLIDFADIKAVLQQWIDDTLDHNMLLCKDDPLVPILRERGERHYVMETNPTAENIARLIFERGREAGLPIVEVTLWETDTCHASFQGPLTITAVDVQANANGRVVAYG

SEQ ID NO: 21359 - protein, 133 aa, Isosphaeraceae bacterium
  misc_feature (1)..(133): tr|A0A432MPI7|A0A432MPI7_9BACT 6-carboxytetrahydropteri n synthase OS=Isosphaeraceae bacterium GM2012 OX=208075 5 GN=TsocGM_03850 PE=4 SV=1
MYRVAREIEFCYGHRLINYDGKCRHLHGHNGKAVILLEGEALDRRGMLVDFGDIKQHVQRWIDENLDHNMLLCRDDPILPVLQDLGERVFVMDANPTAENIAALIYRQARDAGLPVVRVTLWETPKCHAIFGD

SEQ ID NO: 21360 - protein, 168 aa, Isosphaeraceae bacterium
  misc_feature (1)..(168): tr|A0A432MEY8|A0A432MEY8_9BACT 6-pyruvoyl tetrahydropte rin synthase family protein OS=Isosphaeraceae bacterium GM2012 OX=2080755 GN=TsocGM_20530 PE=4 SV=1
MTSRRYTVRVTKDELVFSAGHFITFNGDECERIHGHNWRVAVEVDGPLDENHYVFDFIALRDLTRALVAELDHRMLLPDRNPHIRVGVEGRNVVCRHRDRLWSFPAEECVILPIENTTAERIADHLGDRLRAAIASRGMPFPRAMRVSVEENFGQWATAHWDAEEDGG

SEQ ID NO: 21361 - protein, 120 aa, Izhakiella australiensis
  misc_feature (1)..(120): tr|A0A1S8YLG9|A0A1S8YLG9_9ENTR 6-carboxy-5,6,7,8-tetrah ydropterin synthase OS=Izhakiella australiensis OX=1926 881 GN=BTJ39_13275 PE=3 SV=1
MSITLFKDFQFEAAHRLPHVPEGHKCGRLHGHSFMVRLEVTGDVDPYTGWVMDFAELKAAFKPVYDQLDHHYLNEIDGLENPTSEVLAQWIWQQMKPRVPGLSAVMVKETCTAGCVWRGE

SEQ ID NO: 21362 - protein, 128 aa, Izhakiella capsodis
  misc_feature (1)..(128): tr|A0A1I4W8Q3|A0A1I4W8Q3_9ENTR 6-carboxy-5,6,7,8-tetrah ydropterin synthase OS=Izhakiella capsodis OX=1367852 G N=SAMN05216516_102368 PE=3 SV=1
MSMTLFKDFQFEAAHRLPHVPDGHKCGRLHGHSFMVRLEVTGDVDPYTGWVMDFAELKSAFKPVYDRLDHYYLNEIDGLENPTSEVLAQWIWQQMKPHVPLLSAVMVKETCTAGCVWRGESSTGDSRC

SEQ ID NO: 21363 - protein, 121 aa, Izhakiella sp.
  misc_feature (1)..(121): tr|A0A4P8YNV5|A0A4P8YNV5_9ENTR 6-carboxy-5,6,7,8-tetrah ydropterin synthase OS=Izhakiella sp. KSNA2 OX=2579935 GN=queD PE=3 SV=1
MMSTTLFKEFTFEAAHRLPHVPEGHKCGRLHGHSFMVRLEVTGEVDPHTGWVIDFAELKAAFKPTWERLDHYYLNDIPGLENPTSEVLARWIWQQVKPQLPLLSAVQVKETCTAGCVYRGE

SEQ ID NO: 21364 - protein, 131 aa, Jannaschia pohangensis
  misc_feature (1)..(131): tr|A0A1I3NWC3|A0A1I3NWC3_9RHOB 6-pyruvoyl-tetrahydropte rin synthase OS=Jannaschia pohangensis OX=390807 GN=SAM N04488095_2273 PE=4 SV=1
MFAVEVRDHVMIAHSLPSPVFGPAQGMHGATFVVDAAFYTEDLDENGLVVDMGLATNALAEALEPLRYSNLDDVPAFAGKITTTEFLCHHIWSLLRDAAKTTGLGDGGRLRRIRVMLHESHVARGWYEADI

SEQ ID NO: 21365 - protein, 148 aa, Janthinobacterium agaricidamnosum
  misc_feature (1)..(148): tr|A0A3G2EA72|A0A3G2EA72_9BURK 6-carboxy-5,6,7,8-tetrah ydropterin synthase OS=Janthinobacterium agaricidamnosu m OX=55508 GN=queD PE=3 SV=1
MLTITRKLEFDAGHRIPDHKSQCRNLHGHRYTVEITLVGKVIEAEGNSDNGMIMDFSDVKTLAKQHLVDVWDHAFLVYEKDTAVRDFLASLPDHKTVVIDRIPTVENLARIAFEILKAAFTDHFGTGLHLHKLVLHETPNCWAEVTDD

SEQ ID NO: 21366 - protein, 148 aa, Janthinobacterium agaricidamnosum
  misc_feature (1)..(148): tr|W0V5Z4|W0V5Z4_9BURK Queuosine biosynthesis protein Q ueD OS=Janthinobacterium agaricidamnosum NBRC 102515 = DSM 9628 OX=1349767 GN=queD PE=4 SV=1
MLTITRKLEFDAGHRIPDHKSQCRNLHGHRYTVEITLVGQIIQAEGNSDNGMIMDFSDIKALAKEHLVDVWDHAFLVYEKDSVVRDFLATLPNHKTVVIDRIPTVENLAQIAFDILKAAYTDRFGTGLHLHKLVLHETPNCWAEITDA

SEQ ID NO: 21367 - protein, 148 aa, Janthinobacterium lividum
  misc_feature (1)..(148): tr|A0A377QQ53|A0A377QQ53_9BURK 6-carboxy-5,6,7,8-tetrah ydropterin synthase OS=Janthinobacterium lividum OX=295 81 GN=NCTC9796_03298 PE=3 SV=1
MLTITRKLEFDAGHRIPDHKSQCRNLHGHRYTVEITLVGKVIEAEGNSDNGMIMDFSDVKTLAKQHLVDVWDHAFLVYEKDTAVRDFLASLPDHKTVVIDRIPTVENLARLAFEILKAAFTDHFGTGLHLHKLVLHETPNCWAEVTDD

SEQ ID NO: 21368 - protein, 148 aa, Janthinobacterium lividum
  misc_feature (1)..(148): tr|A0A031GLU8|A0A031GLU8_9BURK 6-carboxy-5,6,7,8-tetrah ydropterin synthase OS=Janthinobacterium lividum OX=295 81 GN=queD PE=3 SV=1
MLTITRKLEFDAGHRIPDHKSQCRNLHGHRYTVEITLVGKVIEAEGNSDNGMIMDFSDVKTLAKQHLVDVWDHAFLVYEKDTAVRDFLASLPDHKTVVIDRIPTVENLARIAFDILKAAFTDHFGTGLHLHKLVLHETPNCWAEVTDD

SEQ ID NO: 21369 - protein, 148 aa, Janthinobacterium sp.
  misc_feature (1)..(148): tr|L9PAY0|L9PAY0_9BURK 6-carboxy-5,6,7,8-tetrahydropter in synthase OS=Janthinobacterium sp. HH01 OX=1198452 GN =queD PE=3 SV=1
MLTITRKLEFDAGHRIPDHKSQCRNLHGHRYTLEITLTGNIITAEGNSDNGMIMDFSDIKALAKEHLVDVWDHAFIVYEKDAAVREFLATLPGHKTVVIDRIPTVENLAHVAFGILKSAYKDRYGTGLHLHKLVLHETPNCWAEITDA

SEQ ID NO: 21370 - protein, 148 aa, Janthinobacterium sp.; identical to SEQ ID NO: 21365
  misc_feature (1)..(148): tr|A0A1E7VUM9|A0A1E7VUM9_9BURK 6-carboxy-5,6,7,8-tetrah ydropterin synthase OS=Janthinobacterium sp. HH106 OX=1 537278 GN=JAB8_53190 PE=3 SV=1

SEQ ID NO: 21371 - protein, 148 aa, Janthinobacterium svalbardensis; identical to SEQ ID NO: 21365
  misc_feature (1)..(148): tr|A0A290WXI6|A0A290WXI6_9BURK 6-carboxy-5,6,7,8-tetrah ydropterin synthase OS=Janthinobacterium svalbardensis OX=368607 GN=queD PE=3 SV=1

SEQ ID NO: 21372 - protein, 132 aa, Jatrophihabitans sp.
  misc_feature (1)..(132): tr|A0A286EVJ2|A0A286EVJ2_9ACTN 6-pyruvoyl-tetrahydropte rin synthase OS=Jatrophihabitans sp. GAS493 OX=1907575 GN=SAMN05892883_4110 PE=4 SV=1
MFSVTVRDHIMIAHSFRGEVFGPAQRLHGATYIVDATLRRPDLDADGIVVDIGRAAEELHRILAQLSYRNLDDEPEFAGVNTSTEMLAKVIADRMADRIQAGEFGAAARGLVGLCVTLHESHVAWATYERPL

SEQ ID NO: 21373 - protein, 150 aa, Jejuia pallidilutea
  misc_feature (1)..(150): tr|A0A362XDJ0|A0A362XDJ0_9FLAO 6-pyruvoyltetrahydropter in/6-carboxytetrahydropterin synthase OS=Jejuia pallidi lutea OX=504487 GN=CLV33_103130 PE=4 SV=1
MSNIRITKQFSFETGHALYGYDGKCKNVHGHSYRLDVTVIGKPITDNTNVKYGMVIDFGDLKKIVKEEIVNVFDHATVFNKNTPHVDLANELKKRGHNVLLVNYQPTSEMMVIDFAKKIKARLPQNIKLHSLKLQETATSFAEWFAYDQE

SEQ ID NO: 21374 - protein, 150 aa, Jejuia pallidilutea
  misc_feature (1)..(150): tr|A0A090VZ89|A0A090VZ89_9FLAO 6-carboxytetrahydropteri n synthase OS=Jejuia pallidilutea OX=504487 GN=JCM19301 _3974 PE=4 SV=1
MSNIRITKQFSFETGHALYGYDGKCKNVHGHSYRLDVTVIGKPITDNTNVKYGMVIDFGDLKKIVKEEIVNVFDHATVFNKNTPHVELANELKKRGHNVLLVNYQPTSEMMVIDFAKKIKARLPQNIKLHSLKLQETATSFAEWFAYDQE

SEQ ID NO: 21375 - protein, 198 aa, Jeongeupia sp.
  misc_feature (1)..(198): tr|A0A1D9BGL3|A0A1D9BGL3_9NEIS 6-carboxytetrahydropteri n synthase QueD OS=Jeongeupia sp. USM3 OX=1906741 GN=BJ P62_13375 PE=4 SV=1
MLIRKLFKFENAHIVRNCSSDRCRRSIHGHSYKVEVLLEAHALDHGQMVYDFGLMKGTIKDVIDAFDHAVCFWDKDDPDYIALCQRFSARWISLPVSPSAEQFARLFFVVIDALLRQTTMANGEGDVVLHSVIAHETDTGYAQAFRDDAYNPRMGTIALNDIVFSEQVCAEWRDPAMYDKLLAGELFANPPVELQVRP

SEQ ID NO: 21376 - protein, 147 aa, Jeotgalibacillus alimentarius
  misc_feature (1)..(147): tr|A0A0C2VXT3|A0A0C2VXT3_9BACL 6-carboxy-5,6,7,8-tetrah ydropterin synthase OS=Jeotgalibacillus alimentarius OX =135826 GN=KP77_19990 PE=3 SV=1
MMQQIYPAPAHDFSYELNKDFHFSAAHAIPSEDAGKCRYVHGHTYYVNITVAGDELDHAGFLINFKKIKELIHDRFDHSLLNDDQLFSQVDPDYFPTTEVVARSIWEIIEQHLEQTDNKPTCLQVFLRETPTSYVLYRPKGNRHGKS

SEQ ID NO: 21377 - protein, 144 aa, Jeotgalibacillus campisalis
  misc_feature (1)..(144): tr|A0A0C2S1F2|A0A0C2S1F2_9BACL 6-carboxy-5,6,7,8-tetrah ydropterin synthase OS=Jeotgalibacillus campisalis OX=2 20754 GN=KR50_20410 PE=3 SV=1
MIQQIYPSPDHPFSYELNKDFHFAAAHSIPHEAAGKCQQVHGHTYFANVTIAGDELDESGFLVNFKTIKNLLHDRFDHKVLNEDERFPSESGNTFPTTEVVARVMYEIIQEYLDKTMNKPTCLQIYLRETPTSYVIYRPKTGRV

SEQ ID NO: 21378 - protein, 145 aa, Jeotgalibacillus malaysiensis
  misc_feature (1)..(145): tr|A0A0B5ASZ5|A0A0B5ASZ5_9BACL 6-carboxy-5,6,7,8-tetrah ydropterin synthase OS=Jeotgalibacillus malaysiensis OX =1508404 GN=JMA_18370 PE=3 SV=1
MMQQIYPAPMHSFSYELNKDFHFSAAHAIPSDEAGKCRFVHGHTYYVNITVAGDDLDDAGFLINFKKIKQLVHDRFDHTLLNDDQLFSEDDSDRFPTTEVVARSIWEIIESHLRETDNQPTCLQVFLRETPTSYVLYRPKKEGNF

SEQ ID NO: 21379 - protein, 146 aa, Jeotgalibacillus marinus; identical to SEQ ID NO: 17871
  misc_feature (1)..(146): tr|A0A0M0L1S5|A0A0M0L1S5_9BACL 6-carboxy-5,6,7,8-tetrah ydropterin synthase OS=Jeotgalibacillus marinus OX=8666 7 GN=AMC98_02515 PE=3 SV=1

SEQ ID NO: 21380 - protein, 145 aa, Jeotgalibacillus proteolyticus
  misc_feature (1)..(145): tr|A0A2S5GFV1|A0A2S5GFV1_9BACL 6-carboxy-5,6,7,8-tetrah ydropterin synthase OS=Jeotgalibacillus proteolyticus O X=2082395 GN=queD PE=3 SV=1
MIQQIYPSPSHEFSYELNKDFQFAAAHYVPHEAAGKCQNIHGHTYFANITIAGDQLDESGFLVNFKTIKELLHDRFDHGILNEDELFSDKDETRFPTTEVVARIMYEVIQEYLNTTINKPQCLQVFLRETPTSYVIYRPKSGGLL

SEQ ID NO: 21381 - protein, 145 aa, Jeotgalibacillus salarius
  misc_feature (1)..(145): tr|A0A4Y8LIU8|A0A4Y8LIU8_9BACL 6-carboxy-5,6,7,8-tetrah ydropterin synthase OS=Jeotgalibacillus salarius OX=546 023 GN=queD PE=3 SV=1
MMQQIYPAPMHNYSYELNKDFHFSAAHAIPTEDAGKCQFVHGHTYYVNITVAGDDLDHAGFLINFKKIKQLVHDRFDHTLLNDDDLFSKNDPDRFPTTEVVARSIWEIIEKHLQQTENNPTCLQVFLRETPTSYVLYRPKKAGNQ

SEQ ID NO: 21382 - protein, 146 aa, Jeotgalibacillus soli
  misc_feature (1)..(146): tr|A0A0C2R514|A0A0C2R514_9BACL 6-carboxy-5,6,7,8-tetrah ydropterin synthase OS=Jeotgalibacillus soli OX=889306 GN=KP78_28940 PE=3 SV=1
MIQQIYPAPFHNFSYELNKDFHFAAAHYIPHDAAGKCQQVHGHTYFANVTIAGDQLDDSGFLVNFKTIKELLHDRFDHGVLNDDKHFTNEDSNFFPTTEIVARVMCEIIQEYLDTTSNKPACLQVFLRETPTSYVVYRPKKERTSS

SEQ ID NO: 21383 - protein, 146 aa, Jeotgalibacillus sp.
  misc_feature (1)..(146): tr|A0A4Y8LR01|A0A4Y8LR01_9BACL 6-carboxy-5,6,7,8-tetrah ydropterin synthase OS=Jeotgalibacillus sp. R-1-5s-1 OX =2555897 GN=queD PE=3 SV=1
MIQQIYPAPHHEYSYELNKDFHFSAAHSIPSEEAGKCQYVHGHTYFVNITIAGDELDHTGFLINFKTIKQLVHDRFDHKILNEDPAFSETDSDRFPTTEAAARIIWESIEAYLQTTENKPTCLQVFLRETPTSYVVYRPKKKGITS

SEQ ID NO: 21384 - protein, 145 aa, Jeotgalibacillus sp.
  misc_feature (1)..(145): tr|A0A4R5XTD0|A0A4R5XTD0_9BACL 6-carboxy-5,6,7,8-tetrah ydropterin synthase OS=Jeotgalibacillus sp. S-D1 OX=255 2189 GN=queD PE=3 SV=1
MIQQIYPAPTHEYSYELNKDFHFAAAHSIPDDEAGKCRYVHGHTYYANITVAGDELNSSGFLVNFKTIKELLHDRFDHGVLNDDERFSHEESNRFPTTEVVARVMYEIIQEHLDLTANKPTCLQIFLRETPTSYVIYRPKNGGTS

SEQ ID NO: 21385 - protein, 136 aa, Jeotgalicoccus halophilus
  misc_feature (1)..(136): tr|A0A1G8XQU6|A0A1G8XQU6_9STAP 6-pyruvoyltetrahydropter in/6-carboxytetrahydropterin synthase OS=Jeotgalicoccus halophilus OX=586411 GN=SAMN05216187_103226 PE=4 SV=1
MDIQEVKPPHMFKYFNRPVTIHKHYTFTCDNRIFFSDTAFKDLKNHRYSFNLEIQSHVGDLGLATDFHLIDKIYNDYISVKLNNCLINQTLPDMNTTAENIAYWIFEQFNKHLPAEDVLQSVTLYETDNQGITVTK

SEQ ID NO: 21386 - protein, 136 aa, Jeotgalicoccus halotolerans
  misc_feature (1)..(136): tr|A0A3E0AYR3|A0A3E0AYR3_9STAP 6-pyruvoyltetrahydropter in/6-carboxytetrahydropterin synthase OS=Jeotgalicoccus halotolerans OX=157227 GN=DFR63_1197 PE=4 SV=1
MSLENVKPPEQFQYFNHQIVINKHFEFTCHNRIFFSSTAFKDLKNHRYTFQLEILSMVNGLGLATDFHLIDQIYREHIALKLDNCVLNETLPVMNTTAENIAYWIFEQFNSHLPKENTLLKVTLYETEKQGVSVTK

SEQ ID NO: 21387 - protein, 136 aa, Jeotgalicoccus nanhaiensis
  misc_feature (1)..(136): tr|A0A4Y9HLE9|A0A4Y9HLE9_9STAP 6-pyruvoyl tetrahydrobio pterin synthase OS=Jeotgalicoccus nanhaiensis OX=568603 GN=E4T89_05615 PE=4 SV=1
MSLENVKPPEQFQYFNHQIVINKHFEFTCHNRIFFSSTAFKDLKNHRYTFQLEILSMVNELGLATDFHLIDQIYREHIALKLDNCVLNETLPAMNTTAENIAYWIFEQFSSHLPKEDTLLKVTLYENDKQGISVTK

SEQ ID NO: 21388 - protein, 144 aa, Jeotgalicoccus saudimassiliensis
  misc_feature (1)..(144): tr|A0A078M318|A0A078M318_9STAP 6-pyruvoyl tetrahydropte rin synthase OS=Jeotgalicoccus saudimassiliensis OX=146 1582 GN=BN1048_01553 PE=4 SV=1
MNINDVKPPAEFKYFEEQVTIHKHFSFICDNRIFFSNTAFKDLKNHHYSFSIEISSPVNALGLATDFHLIDKIYDEEIGIKLDNCLLNETLPEMNTTAENISYWLFEELSARLPENDVLLKVTLYENPRQGVTITKQMTLHKFT

SEQ ID NO: 21389 - protein, 132 aa, Jiella sp.
  misc_feature (1)..(132): tr|A0A4Y8RLJ7|A0A4Y8RLJ7_9RHIZ 6-carboxytetrahydropteri n synthase OS=Jiella sp. CBS5Q-3 OX=2558362 GN=E3C22_11 180 PE=4 SV=1
MYAVEVRDHMMIAHSLPRPVFGPAQGMHGATYVVDAAFFTNDLDADGLAVDIGLAIQLLKSVLEPLNYQNLDAVEAFQGKVTTTEFLARHLFDRLAERIAGGALGEGGGRIRRLKVSLEESHVARAWYEGEL

SEQ ID NO: 21390 - protein, 139 aa, Jishengella endophytica
  misc_feature (1)..(139): tr|A0A2W2CKH9|A0A2W2CKH9_9ACTN Uncharacterized protein OS=Jishengella endophytica OX=515350 GN=C1I93_04325 PE= 4 SV=1
MFSVTVRDHIMIAHSFRGAVFGPAQRLHGATFVVDASFRRPDLDEDGIVVDIGLATEQLKAVLGELNYRNLDDEPAFAGTNTTTEVLARTIADRLADRVHAGDLGPGARGLTGITVTLHESHVAWASYERTLGAGGDAA

SEQ ID NO: 21391 - protein, 142 aa, Jishengella sp.
  misc_feature (1)..(142): tr|A0A2W2EIA0|A0A2W2EIA0_9ACTN Uncharacterized protein OS=Jishengella sp. NA12 OX=1655439 GN=C1I95_23850 PE=4 SV=1
MFSVTVRDHIMVAHSFRGEVFGPAQRLHGATFVVDATFRRPDLDDDGIVVDIGLAIEQLKAVLGELNYRNLDDEPAFAGTNTTTEVLARTIADRLADRVHAGDFGAGAHGLAGITVTLHESHVAWASYERTLGPGGAGENLA

SEQ ID NO: 21392 - protein, 137 aa, Jiulongibacter sediminis
  misc_feature (1)..(137): tr|A0A0P7C4R2|A0A0P7C4R2_9BACT 6-carboxy-5,6,7,8-tetrah ydropterin synthase OS=Jiulongibacter sediminis OX=1605 367 GN=AFM12_16955 PE=3 SV=1
MIRITRREYFNAAHRLYNPKWSAEKNWEVFGPCSRMHGHNWELFVTVEGEVEEDTGFVMDLKKLKDLVREVIIDKVDHTYLNDDVDFLKGILPSCENFAIAVWNILEPVIKERYGVQLYEIKLQETENHFAQYFGKK

SEQ ID NO: 21393 - protein, 138 aa, Jiulongibacter sediminis
  misc_feature (1)..(138): tr|A0A0P7BYV9|A0A0P7BYV9_9BACT 6-pyruvoyl tetrahydrobio pterin synthase OS=Jiulongibacter sediminis OX=1605367 GN=AFM12_01895 PE=4 SV=1
MRKKVAVFRREHFNAAHRLHNPEWSDEKNQEVFGKCNNPNYHGHNYNLEVKLTGEIDPATGYVYDMKMLSDLINEHVCDRFDHKNLNLDVPEFKNLNPSAENIVVVIYEILEKAINNSELTLSVRLYETERNYVEYPA

SEQ ID NO: 21394 - protein, 158 aa, Jonquetella anthropi
  misc_feature (1)..(158): tr|C9M5H1|C9M5H1_9BACT Uncharacterized protein OS=Jonqu etella anthropi E3_33 E1 OX=645512 GN=GCWU000246_00184 PE=4 SV=1
MRSITKVSIQYAHRFLDYEGEAQYLHGHSGLLTIEVEGDVDKRTGFVYPCNSMKRIAWDYLKAFDHALIMQENDPLLPAILKVYEEQGIRNGAETNRTLGVAFDTPLAKSYPECRLVVVKKVATCENLIEIFYNLMKDQMNIKKMTFASGDNSASMDF

SEQ ID NO: 21395 - protein, 158 aa, Jonquetella anthropi; identical to SEQ ID NO: 21394
  misc_feature (1)..(158): tr|H0UJB9|H0UJB9_9BACT 6-pyruvoyl-tetrahydropterin synt hase OS=Jonquetella anthropi DSM 22815 OX=885272 GN=Jon anDRAFT_1526 PE=4 SV=1

SEQ ID NO: 21396 - protein, 157 aa, Joostella marina
  misc_feature (1)..(157): tr|I3C3K2|I3C3K2_9FLAO 6-pyruvoyl-tetrahydropterin synt hase OS=Joostella marina DSM 19592 OX=926559 GN=JoomaDR AFT_1176 PE=4 SV=1
MHKEPKVMSNIRITKQFNFETGHALYGYDGKCRNVHGHSYKLSVTVIGTPITDTANVKLGMVIDFGDLKKIVKEDIVDVFDHATVFNKNTPHVELAQELSTRGHNVILVDYQPTSENMVIDFAEKIKKRLPEHIQLHSLKLQETETSFAEWYATDNN

SEQ ID NO: 21397 - protein, 135 aa, Joostella marina
  misc_feature (1)..(135): tr|I3C817|I3C817_9FLAO 6-carboxy-5,6,7,8-tetrahydropter in synthase OS=Joostella marina DSM 19592 OX=926559 GN= JoomaDRAFT_2799 PE=3 SV=1
MNLKVSRKAHFNAAHRLFRPDWDDDKNKAVFGKCSNPNYHGHNYDLIVSVKGEIDPETGFVIDLKILKELIEREVEDHLDHKNLNIEVPEFKTLNPTVENIAIVIYNRLKPFLEEFELEVVLYETPRNYVTYTGA

SEQ ID NO: 21398 - protein, 119 aa, Kalamiella piersonii
  misc_feature (1)..(119): tr|A0A3A9IN39|A0A3A9IN39_9GAMM 6-carboxy-5,6,7,8-tetrah ydropterin synthase OS=Kalamiella piersonii OX=2364647 GN=queD PE=3 SV=1
MSTTLFKEFQFEAAHHLPNVPEGHKCGRLHGHSFLVRLEITGEVDAHTGWVMDFAELKAAFKPLYDRLDHHYLNEIPGLENPTSEVLAKWIWDEMKPLLPELSAVMIKETCTAGCVYKG

SEQ ID NO: 21399 - protein, 134 aa, Kandleria vitulina
  misc_feature (1)..(134): tr|A0A1H2QBI9|A0A1H2QBI9_9FIRM 6-carboxy-5,6,7,8-tetrah ydropterin synthase OS=Kandleria vitulina OX=1630 GN=SA MN04487759_102124 PE=3 SV=1
MYRVSTQASFDAAHFLKDYPGKCHNLHGHRWKVVIEVSSPELDEGSMVIDFTDIKKELKKMADHFDHCLIIEEGSLKKETYEALLSEDFRIVTVNFRPTAECFAKYFFDQLSSSFPVNKVQVYETPNNVATYEV

SEQ ID NO: 21400 - protein, 134 aa, Kandleria vitulina
  misc_feature (1)..(134): tr|A0A0R2HAJ7|A0A0R2HAJ7_9FIRM 6-carboxy-5,6,7,8-tetrah ydropterin synthase OS=Kandleria vitulina DSM 20405 OX= 1410657 GN=IV49_GL000422 PE=3 SV=1
MYRVSTQASFDAAHFLKDYPGKCHNLHGHRWKVVIEVSSPELDEGSMVIDFTDIKKELKKMADHFDHCLIIEEGSLKKETYEALVSEDFRIVTVNFRPTAECFAKYFFDQLSSSFPVNKVQVYETPNNVATYEV

SEQ ID NO: 21401 - protein, 283 aa, Kangiella geojedonensis
  misc_feature (1)..(283): tr|A0A0F6TQ99|A0A0F6TQ99_9GAMM 6-pyruvoyl tetrahydropte rin reductase OS=Kangiella geojedonensis OX=914150 GN=T Q33_0778 PE=4 SV=1
MPALFVDQLTVIDFAFFDIHRGIVGESWIVDLVLEGELDDQGMVFDFGDVKKRIKQAIDATVDHKFVVPANSKYVTTEHNDQGLKLTLSDTSGHRYYHQSPEQAVVLLDAEEVTMDDVIKVLNEACLEVVPANVAKINLKLSTEAITGNYYHYAHGLKKHLGDCQRIAHGHRSRIHIFDNGQRSQKLEAFWSEKWEDIYIGTEEDLVEPEVESSKDYYRFAYTSEQGYFSLEIPKARCHIMKNDSTVELIANHILKQLKVLEPNAKLEVKAFEGVNKGAIAHG

SEQ ID NO: 21402 - protein, 283 aa, Kangiella koreensis
  misc_feature (1)..(283): tr|C7RAS9|C7RAS9_KANKD Uncharacterized protein OS=Kangi ella koreensis (strain DSM 16069 / KCTC 12182 / SW-125) OX=523791 GN=Kkor_0951 PE=4 SV=1
MPALFVDQLTVIDFAFFDPARGIVGESWIVDLVLEGELDDQGMVFDFGDVKKRIKQAIDSTLDHKLAVPSQHSEMSIAEDSDSLTLDMRDKQGHFYRHQSPKQAVALVPAEIITRESVLPMLHEACSKVVPNNVKKIYLNLRTENISGDYYHYAHGLKKHLGDCQRIAHGHRSQIHIFENNQRHTDLETYWCELWRDIYIGTAEDLQKDFEDNGVQYFEFSYQSEQGEFSLIIPAERCHIMQQDSTVELIAQHIADQLKAKHPQSDIKVKAYEGVNKGAIAFA

SEQ ID NO: 21403 - protein, 283 aa, Kangiella profundi
  misc_feature (1)..(283): tr|A0A2K9A8W1|A0A2K9A8W1_9GAMM 6-pyruvoyl tetrahydropte rin reductase OS=Kangiella profundi OX=1561924 GN=CW740 _07865 PE=4 SV=1
MPALFVDQLTVIDFAFFDPVRGIVGESWIVDLVLEGDLDDQGMVFDFGDVKKRIKQAIDSTLDHKFAVPSQYAELSITEDGDKLTLDMRDKQGRFYQHKSPRQAVALIPTEIITRESALPLLHQACSEVVPDNVKKIFLNLRTEEISGDYYHYAHGLKKHLGDCQRIAHGHRSQIHIFENGQRNKDLEAYWCELWRDIYIGTAEDLQKDFEDDAIQYFEFAYRSEQGEFSLVIPAERCHIMEQDSTVELIAQHIADQLKEKHPKSEIEVRAFEGFNKGAIAFS

SEQ ID NO: 21404 - protein, 283 aa, Kangiella sediminilitoris
  misc_feature (1)..(283): tr|A0A1B3B9R8|A0A1B3B9R8_9GAMM 6-pyruvoyl tetrahydropte rin reductase OS=Kangiella sediminilitoris OX=1144748 G N=KS2013_819 PE=4 SV=1
MPALFVDQLTVIDFAFFDTHRGIVGESWIVDLVLEGELDDQGMVFDFGDVKKRIKQAIDATVDHKFVVPAKSEHVSSTTNEKGIELRLTDTSDNRYYHQSPEQAVVMLDADKVTMKAVSKVLNQACLNVVPENVVKIHLHLSTESIEGDYYHYAHGLKKHLGDCQRIAHGHRSQIHVFKNGQRNRELEALWCEKWEDIYIGTEEDMVGTEHEDPNDYYRFAYTSEQGHFSLELPQHRCHIMKSDSTVELIANHIAKQLKSIEPNASIRVKAFEGVNKGAIANA

SEQ ID NO: 21405 - protein, 284 aa, Kangiella sp.
  misc_feature (1)..(284): tr|A0A2G2L8G7|A0A2G2L8G7_9GAMM 6-pyruvoyl tetrahydropte rin reductase OS=Kangiella sp. OX=1920245 GN=COA86_0530 0 PE=4 SV=1
MPALFVNNLSVIDFAYFCPERGIVGESLILDVELLGELNEEGMLFDFSYVKKRIKSCVDSLVDHKLLVATNCEYSTVTKSPQQLELILKTKDERIYKHISPNQAVCLINASEVTKHSIAQLIKSEISKILPNNVTDTNINLRSEVIDGPFFHYAHGLKKHFGDCQRIAHGHRSKLEVFIDSTYSIEWSEHIAKLWKDIYLATEEDIKEEIKINGTDYWVFEYHANQGLFQLTIQKNCCHLIKTDTTVELIASYLAVYLKEKLPDSRIRIKAYEGVDKGAISEIN

SEQ ID NO: 21406 - protein, 283 aa, Kangiella spongicola
  misc_feature (1)..(283): tr|A0A318CZT6|A0A318CZT6_9GAMM 6-pyruvoyl tetrahydropte rin reductase OS=Kangiella spongicola OX=796379 GN=DL79 6_09035 PE=4 SV=1
MPALFVDQLTVIDFALFDIHRGIVGESWIVDLVLEGELDDQGMVFDFGDVKKRIKQAIDATVDHKLVVPANSDYVATEHNDKGLKLTLKDTSGHRYHHQSPEQAVVLLDAEEVTMDAVIKVLNKACLEVVPNNVAKVHLTLNTEAIAGHYYHYAHGLKKHLGDCQRIAHGHRSQIHIFENGKRSEDLEAFWCQKWEDIYIGTEEDLVETEVEDATEYYRFAYTSEQGYFSLELPKARCHLMKSDSTVELIASHIVKQLKAIKPDSAIRVKAFEGVNKGAIANG

SEQ ID NO: 21407 - protein, 118 aa, Keratinibaculum paraultunense
  misc_feature (1)..(118): tr|A0A4V2UUF1|A0A4V2UUF1_9CLOT 6-carboxy-5,6,7,8-tetrah ydropterin synthase OS=Keratinibaculum paraultunense OX =1278232 GN=EDD65_10413 PE=3 SV=1
MILVKEFEFDAAHNLVNYHGKCENLHGHTYKLVIKLEGKPDHEGMVYDFVELKKLVNEKIINIFDHSYLNNIIPQPTAENIAIYTWNNLKEHIDRNNCRLYEVQVWETKTSGIVYRGE

SEQ ID NO: 21408 - protein, 283 aa, Ketobacter alkanivorans
  misc_feature (1)..(283): tr|A0A2K9LMG3|A0A2K9LMG3_9GAMM 6-pyruvoyl tetrahydropte rin reductase OS=Ketobacter alkanivorans OX=1917421 GN= Kalk_05970 PE=4 SV=1
MSALFVKHLTVLDFSYVHLTRGILGESWIVDVELYGELDHQGMVFDFGHVKKKVRDAVESLFDHKLVLPKGLPTLQTRSVDDGLEITWRDAQNRHYRHLSPLEAVEWVDTDEITADALIPLLEDAAMAAVPDNVSRVVIELRSEEISGAFYHYSHGLKKHDGNCQRIAHGHRSRVKILRNGKRDPLLEKAWALKWKDIYIGTEEDLMSRLTEDGVDYCQFGYDAPQGRFELTLPESQVYLIPTDSTVEYLADHMAACLKKDDPEHQFEVKAYEGVMKGAIAFK

SEQ ID NO: 21409 - protein, 283 aa, Ketobacter sp.
  misc_feature (1)..(283): tr|A0A3L8B9V2|A0A3L8B9V2_9GAMM 6-pyruvoyl tetrahydropte rin reductase OS=Ketobacter sp. OX=2083498 GN=D9N14_188 60 PE=4 SV=1
MAALFVNHLTVLDFSYVHHARGILGESWIVDVELYGELDHQGMVFDFGLVKKQVRDAVESLVDHKLVLPQDLPGLATRELDSGLEIRWRDAKGRAYRHLSPLEAVEWVAGDSITQEALIPLLEDAAMAAVPDNVSRVAIELRNEEISGAFYQYSHGLKKHDGNCQRIAHGHRSRIKILRNGKRDPLLEKAWSLKWKDIYLGTEEDLMDRLSDDGVDYCQFGYDAPQGRFELTLPASQVYLIPTDSTVEYLADYIAGCLKQDDPDHQFEVKAYEGVMKGAISQR

SEQ ID NO: 21410 - protein, 283 aa, Ketobacter sp.; identical to SEQ ID NO: 17181
  misc_feature (1)..(283): tr|A0A3L8BDQ4|A0A3L8BDQ4_9GAMM 6-pyruvoyl tetrahydropte rin reductase OS=Ketobacter sp. OX=2083498 GN=D9N15_185 10 PE=4 SV=1

SEQ ID NO: 21411 - protein, 132 aa, Kibdelosporangium aridum
  misc_feature (1)..(132): tr|A0A428Z051|A0A428Z051_KIBAR 6-carboxytetrahydropteri n synthase OS=Kibdelosporangium aridum OX=2030 GN=DMH04 _35185 PE=4 SV=1
MFSITVRDHVMVAHSFHGEVFGPAQRLHGATFLVDATFSRAELDDDNIVVDIGLATEQLKDVLGPLNYRNLDDEPDFKGINTSTEFLAKVIADRLVDRIGEGKLGDGARGLSEITVTLHESHVAWASYRRQL

SEQ ID NO: 21412 - protein, 132 aa, Kibdelosporangium aridum
  misc_feature (1)..(132): tr|A0A1W2F6S5|A0A1W2F6S5_KIBAR 6-pyruvoyl-tetrahydropte rin synthase OS=Kibdelosporangium aridum OX=2030 GN=SAM N05661093_05584 PE=4 SV=1
MFSITVRDHVMVAHSFRGEVFGPAQRLHGATFLVDATFSRAELDDDNIVVDIGLATEQLGEVLAPLNYRNLDDEPDFKGINTSTEFLAKVIADRLAGRIGEGKLGDGARGLSEITVTLHESHVAWASYRRQL

SEQ ID NO: 21413 - protein, 150 aa, Kibdelosporangium phytohabitans
  misc_feature (1)..(150): tr|A0A0N9HWV1|A0A0N9HWV1_9PSEU 6-pyruvoyl tetrahydrobio pterin synthase OS=Kibdelosporangium phytohabitans OX=8 60235 GN=AOZ06_26045 PE=4 SV=1
MTQQTSVQVRHNFETAHRLPELGGKCVNLHGHSWWLEATVTAVAGDPGEVVCEFGALKIALREWVDVHLDHGAMLGIADPLLPTLADAGRVFVFGKDEPAADLPWPTVEATAHLLTRVTTAIASDLDPRLTVTHVRVTETHVNAAEVHTT

SEQ ID NO: 21414 - protein, 133 aa, Kibdelosporangium phytohabitans
  misc_feature (1)..(133): tr|A0A0N9I5S9|A0A0N9I5S9_9PSEU 6-pyruvoyl tetrahydropte rin synthase OS=Kibdelosporangium phytohabitans OX=8602 35 GN=AOZ06_34325 PE=4 SV=1
MFSITVRDHVMVAHSFRGEVFGPAQRLHGATFLVDATFHRAELDDDNIVVDIGLATEQLKDVLAPLNYRNLDDEPEFDGVNTSTEFLAKVIADRLAGRIGDGRLGDGARGLSEITVTLHESHVAWASYRRAVG

SEQ ID NO: 21415 - protein, 136 aa, Kibdelosporangium sp.
  misc_feature (1)..(136): tr|A0A0K3AZF9|A0A0K3AZF9_9PSEU PTPS-like type 4 OS=Kibd elosporangium sp. MJ126-NF4 OX=703222 PE=4 SV=1
MFSITVRDHVMVAHSFRGEVFGPAQRLHGATFLVDATFHRADLDEDNIVVDIGLATEQLKEVLAPLNYRNLDDEPEFKGVNTSTEFLAKVIADRLVERIGDGKLGDGARGLSEITVTLHESHVAWASYRRAVGSSL

SEQ ID NO: 21416 - protein, 118 aa, Kiloniella litopenaei
  misc_feature (1)..(118): tr|A0A0M2REI0|A0A0M2REI0_9PROT 6-carboxy-5,6,7,8-tetrah ydropterin synthase OS=Kiloniella litopenaei OX=1549748 GN=WH95_06100 PE=3 SV=1
MYRISKQFTFSASHQLMGVPEGHPCSRLHGHNYIVEIELSGEDLNSAGFVRDYLELSELKQYIDDVLDHRHLNEVLGDDNVTAERLSKHLFDWAFERWPEVTALRVSETPKTWAEYRP

SEQ ID NO: 21417 - protein, 118 aa, Kiloniella spongiae
  misc_feature (1)..(118): tr|A0A0H2MJ02|A0A0H2MJ02_9PROT 6-carboxy-5,6,7,8-tetrah ydropterin synthase OS=Kiloniella spongiae OX=1489064 G N=WH96_03210 PE=3 SV=1
MYRISKQFTFSASHQLMGVPEGHPCSRLHGHNYIVEIELSGENLNSAGFVRDYLELSELKQYIDDVLDHRHLNEVLGDDNVTAERLSKYLFDWSFERWPEVTALRVSETPKTWAEYRP

SEQ ID NO: 21418 - protein, 123 aa, Kineococcus radiotolerans
  misc_feature (1)..(123): tr|A6WGA6|A6WGA6_KINRD 6-carboxy-5,6,7,8-tetrahydropter in synthase OS=Kineococcus radiotolerans (strain ATCC B AA-149 / DSM 14245 / SRS30216) OX=266940 GN=Krad_4382 P E=3 SV=1
MEIFREFTFEAAHRLPHVPAGHKCARLHGHSYRVSVHVNGLPDPLLGWVMDFGDLKKLVAPVIERLDHYYLNEVEGLDNPTSEVLARWMWQQLSPTLALLSAVTVRETCTSGATYRGETDEHL

SEQ ID NO: 21419 - protein, 125 aa, Kineococcus rhizosphaerae
  misc_feature (1)..(125): tr|A0A2T0RAZ0|A0A2T0RAZ0_9ACTN 6-pyruvoyl-tetrahydropte rin synthase OS=Kineococcus rhizosphaerae OX=559628 GN= CLV37_101568 PE=4 SV=1
MYSLTVRDRVMVAHSFTGEVFGPAQRLHGATFVVEATFRRSALDADGLVVDIGVASRVLREVLAQLDYRNLDDVPELAGRNTTTEFLCGWIAGRLAEALPATGLEQISVLLRESDVAWAAYDVTL

SEQ ID NO: 21420 - protein, 141 aa, Kingella kingae
  misc_feature (1)..(141): tr|F5S5X0|F5S5X0_9NEIS 6-carboxy-5,6,7,8-tetrahydropter in synthase OS=Kingella kingae ATCC 23330 OX=887327 GN= queD PE=3 SV=1
MFKTAKEFTFDMAHMLDGHDGKCQNLHGHTYILQVEISGNLHESGAKKGMVMDFADLKAVVKTHILDKMDHAFIYDTTSERECQVANLLNQLNSKTYGINTRTTAEEMTRHIFNVLTAEANLPVSLIRLWETPSSYCEYAA

SEQ ID NO: 21421 - protein, 141 aa, Kingella negevensis
  misc_feature (1)..(141): tr|A0A238HGR3|A0A238HGR3_9NEIS 6-carboxy-5,6,7,8-tetrah ydropterin synthase OS=Kingella negevensis OX=1522312 G N=queD PE=3 SV=1
MFKTAKEFSFDMAHMLDGHDGKCQNLHGHTYILQVEITGSLHETGAKKGMVMDFADLKAQVKTHILDKMDHAFIYDTTSERESQVAQLLNQLNSKTYGIPTRTTAEEMTRHIYNVLKTQAQLPISLVRLWETPTSYCEYSE

SEQ ID NO: 21422 - protein, 142 aa, Kingella potus
  misc_feature (1)..(142): tr|A0A377QZB2|A0A377QZB2_9NEIS 6-carboxy-5,6,7,8-tetrah ydropterin synthase OS=Kingella potus OX=265175 GN=NCTC 13336_00276 PE=3 SV=1
MKITKIFSFDSSHLLDGHDGKCKNLHGHTYRLEITVSDGLIKGGAKDGMVMDFADLKAIAEREIIDPFDHAFLYHAGNARESQIAALLEGWQMKTLRLGCRTTAENMAAEIYGRLKKAGLNVCSVKLWETPTSCAEFEGAGQ

SEQ ID NO: 21423 - protein, 381 aa, Kinneretia asaccharophila
  misc_feature (1)..(381): tr|A0A4R6NBR1|A0A4R6NBR1_9BURK 6-pyruvoyltetrahydropter in/6-carboxytetrahydropterin synthase OS=Kinneretia asa ccharophila OX=582607 GN=DFR39_101434 PE=4 SV=1
MAAHVTLPPLPMSQIHSTLHTASGGFESACRIPALPSSHRSHGLHGHSYFATVRALLPQGWASFPGAEVEELRRRLEACVAPLDHALLNDSLAQPTDENIARWIRQRLETEFGVPGIQQVGIQSTQHSGVDLDVSGQAHVWRRYRFQAAHQLPNVPAGHKCGRMHGHGFEVILHANQDLGERDLAVDYDHLDEVWAPFHMQLNYQCLNSIEGLANPTSEVISAWLWERLKPQLPELSWVTVYETGSCGANYDGSRYRIWKELTLDSAIQLKRAPAEHPLRGIHGHTYTLRLHLSAPLDEVQGWTVDFGDVKTLFDPIFKAIDHRPLYEIADLPDGDAASLAAWVLAKGRAVLPQIDRVDLYETRGSGAIVSVDRADELIPV

SEQ ID NO: 21424 - protein, 124 aa, Kiritimatiella glycovorans
  misc_feature (1)..(124): tr|A0A0G3EHS9|A0A0G3EHS9_9BACT 6-carboxy-5,6,7,8-tetrah ydropterin synthase OS=Kiritimatiella glycovorans OX=13 07763 GN=queD PE=3 SV=1
MPTTELYCTFRFSAAHRLPSSGEEHKCRATHGHTFELVVTVAGEPDAEKGWVLDFADLRAAVDPVVAELDHKTLNDIPGLENPTSEHLCRWFWGRLIDALPGLAEIEVKESPECGCRYRGGGTG

SEQ ID NO: 21425 - protein, 118 aa, Kiritimatiellaceae bacterium
  misc_feature (1)..(118): tr|A0A2D7D638|A0A2D7D638_9BACT 6-carboxy-5,6,7,8-tetrah ydropterin synthase OS=Kiritimatiellaceae bacterium OX= 2026752 GN=queD PE=3 SV=1
  misc_feature (17)..(17): Xaa can be any naturally occurring amino acid
MKVEKTFSFDSAHFLPXVPADHKCRNLHGHTYTVKVEAEGELDEAMGWVVDFGEVKKVAGPLVKQLDHKLLNDIEGLENPTAENVALWFWHQMKPALPELSQVTVMENPTNVVRYRGD

SEQ ID NO: 21426 - protein, 150 aa, Kiritimatiellaceae bacterium
  misc_feature (1)..(150): tr|A0A1Z9TB80|A0A1Z9TB80_9BACT 6-carboxytetrahydropteri n synthase QueD OS=Kiritimatiellaceae bacterium TMED266 OX=1987167 GN=CBE26_01685 PE=4 SV=1
MTKIRVTKSFGFETGHALYGYDGLCKNVHGHSYKLYVTVIGSPIDDQNHVKNGMVIDFKDLKTIVKSEIVDVFDHATVFNQNTPHVDLAKTLSDSGHKVLLVDYQPTSEKMVVDFAHRIAARLPSHIKLHNVRLHETATAYAEWHASDQE

SEQ ID NO: 21427 - protein, 121 aa, Kitasatospora aureofaciens
  misc_feature (1)..(121): tr|A0A0L8P6Q9|A0A0L8P6Q9_KITAU 6-carboxy-5,6,7,8-tetrah ydropterin synthase OS=Kitasatospora aureofaciens OX=18 94 GN=ADK78_27910 PE=3 SV=1
MYAITKEFHFSASHQLGALPAGHQCARTHGHNYLVVLELRCDDTELTEPGFVRDYGELDEFKHWLDATFDHRHLNDAVPGMNPSAENLAWWVYHQWVERLPELSCVRVSETPRTWATYRGK

SEQ ID NO: 21428 - protein, 157 aa, Kitasatospora cineracea
  misc_feature (1)..(157): tr|A0A3N1YW53|A0A3N1YW53_9ACTN 6-pyruvoyltetrahydropter in/6-carboxytetrahydropterin synthase OS=Kitasatospora cineracea OX=88074 GN=EDD39_1065 PE=4 SV=1
MTHTVTVRHNFETAHRLPHLSGKCENLHGHSWWAEITVTAPVLAAGTVVEFGAFKRALREWIDTFLDHGAMLGANDPLAPVLAGQGSKLFRFGADDPTEQEQHAAGLQWPSVEAVAELLSRVAAEALRTLPRAAGAYVSHVRVAETAVNAAAWVVTA

SEQ ID NO: 21429 - protein, 118 aa, Kitasatospora niigatensis
  misc_feature (1)..(118): tr|A0A3N4REH8|A0A3N4REH8_9ACTN 6-carboxy-5,6,7,8-tetrah ydropterin synthase OS=Kitasatospora niigatensis OX=880 75 GN=EDD38_0044 PE=3 SV=1
MEIFREFTFEAAHRLPRVPEGHKCARLHGHSYRVIVHVEAPVDNEAGWVMDFGDIKRAFKPIEDRLDHYYLNEIEGMENPTSEVLARWIWDRLKSGLPALSALTIRETCTSGCTYRGD

SEQ ID NO: 21430 - protein, 132 aa, Kitasatospora sp.
  misc_feature (1)..(132): tr|A0A2H5AVZ1|A0A2H5AVZ1_9ACTN 6-carboxy-5,6,7,8-tetrah ydropterin synthase OS=Kitasatospora sp. MMS16-BH015 OX =2018025 GN=CFP65_1396 PE=3 SV=1
MSRRGSQRGTGLLSITKEFHFSASHILDVLPSWHQCARFHGHNYIVELELSATPDQLTEAGFVRDYRELDPFKKWLDETLDHRHLNEVVPPGLSPSSENLALWIFETWQGRFPELSAVSISETPKTWATYRP

SEQ ID NO: 21431 - protein, 131 aa, Kitasatospora sp.
  misc_feature (1)..(131): tr|A0A540W987|A0A540W987_9ACTN 6-carboxy-5,6,7,8-tetrah ydropterin synthase OS=Kitasatospora sp. MMS16-CNU292 O X=2567942 GN=E6W39_29115 PE=3 SV=1
MTALTGEHRIGKRFRFEAAHYLPGLPDGHQCARLHGHSYEVEFVLTADRLSGPGFVTDFGDLAPVKMMIDSALDHRVLNEALPELVPTSENLAAYLAGWFVEHVEPGLPGRLTAVRVSETASSWAQFEVAR

SEQ ID NO: 21432 - protein, 158 aa, Kitasatospora xanthocidica
  misc_feature (1)..(158): tr|A0A373A1W3|A0A373A1W3_9ACTN 6-carboxytetrahydropteri n synthase OS=Kitasatospora xanthocidica OX=83382 GN=DR 950_33750 PE=4 SV=1
MSHAVTVRHNFETAHRLPHLAGKCENLHGHSWVVEVTVTAPVLAAGTVVEFGAFKRALRTWIDSFLDHGAMLGASDPLAPVLAGQGSKLFRFGADDPTEQEQHAAGLGWPSVEAVAELLGRVATEALHTLPRAAGAYVSHVGVSETAVNAASWTAVAP

SEQ ID NO: 21433 - protein, 356 aa, Kitasatospora xanthocidica
  misc_feature (1)..(356): tr|A0A373A3M8|A0A373A3M8_9ACTN Uncharacterized protein OS=Kitasatospora xanthocidica OX=83382 GN=DR950_07105 P E=4 SV=1
MVNDLFPFSTLRRYAGVKLVAWENCAQDIPESRRACRRSFRSRSDIATLLGIWDRLWIGPSHCSRDAGGVCSVQHRLPLPPGRSWAPAPRCHALPRTPDLERCTMNSPCEADPAAGPLPNGWLPGLPAGGTYTIGKRANCDIARTVDGIDGSDLVTVELVLTATELTKPGFVCDFGDLSGFQQHVDQVLDHQDLDTILADPTGAGIVAHVRAWAQENLPDDVRQLLDDVRVFTGRLPDPAADEAVRFRARHWLCDLPDGHKCGRHHGHAYLVTLPDPDQPDNLLPVPGKLREVVLSRFHGQVLNTVFDFNPTSEHLAAVLTAWLVEQELTAVGGRPFTVRVSETASTWSQFTLEAA

SEQ ID NO: 21434 - protein, 121 aa, Klebsiella aerogenes
  misc_feature (1)..(121): tr|A0A377RJG2|A0A377RJG2_KLEAE 6-carboxy-5,6,7,8-tetrah ydropterin synthase OS=Klebsiella aerogenes OX=548 GN=q ueD PE=3 SV=1
MMSTTLFKDFTFEAAHHLPHVPEGHKCGRLHGHSFMVRLEITGEVDPHTGWIMDFAELKAAFKPTYDRLDHYYLNDIPGLENPTSEVLAKWIWDEMKPRVPLLSAVMVKETCTAGCVYRGE

SEQ ID NO: 21435 - protein, 120 aa, Klebsiella aerogenes
  misc_feature (1)..(120): tr|A0A447WH51|A0A447WH51_KLEAE 6-carboxy-5,6,7,8-tetrah ydropterin synthase OS=Klebsiella aerogenes OX=548 GN=q ueD_2 PE=3 SV=1
MKTTLYKDFTFEAAHRLPNVPDGHKCGRLHGHSFVVRLEITGEVDKHTGWIIDFAELKAIFKPTLDRLDHYYLNDIPGLENPTSEVLAQWIWNQVKPQLSILSAVIVKETCSAGCIYRGE

SEQ ID NO: 21436 - protein, 120 aa, Klebsiella grimontii
  misc_feature (1)..(120): tr|A0A285AXM9|A0A285AXM9_9ENTR 6-carboxy-5,6,7,8-tetrah ydropterin synthase OS=Klebsiella grimontii OX=2058152 GN=ygcM PE=3 SV=1
MSTTLFKDFTFEAAHHLPHVPEGHKCGRLHGHSFMVRLEITGEVDPHTGWIMDFAELKAAFKPTYDRLDHYYLNDIPGLSNPTSEVLAKWIWEQMKPRVPLLSAVMIKETCTAGCVYRGE

SEQ ID NO: 21437 - protein, 120 aa, Klebsiella grimontii
  misc_feature (1)..(120): tr|A0A564KR30|A0A564KR30_9ENTR 6-carboxy-5,6,7,8-tetrah ydropterin synthase OS=Klebsiella grimontii OX=2058152 GN=queD PE=3 SV=1
MSTTLFKDFTFEAAHHLPHVPEGHKCGRLHGHSFMVRLEITGEVDPHTGWIMDFAELKAAFKPIYDRLDHYYLNDIPGLSNPTSEVLAKWIWEQMKPRVPLLSAVMIKETCTAGCVYRGE

SEQ ID NO: 21438 - protein, 120 aa, Klebsiella michiganensis; identical to SEQ ID NO: 20134
  misc_feature (1)..(120): tr|A0A564LUD4|A0A564LUD4_9ENTR 6-carboxy-5,6,7,8-tetrah ydropterin synthase OS=Klebsiella michiganensis OX=1134 687 GN=queD PE=3 SV=1

SEQ ID NO: 21439 - protein, 120 aa, Klebsiella michiganensis; identical to SEQ ID NO: 21437
  misc_feature (1)..(120): tr|A0A249WKA2|A0A249WKA2_9ENTR 6-carboxy-5,6,7,8-tetrah ydropterin synthase OS=Klebsiella michiganensis OX=1134 687 GN=queD PE=3 SV=1

SEQ ID NO: 21440 - protein, 120 aa, Klebsiella oxytoca; identical to SEQ ID NO: 21437
  misc_feature (1)..(120): tr|A0A0G3S4K2|A0A0G3S4K2_KLEOX 6-carboxy-5,6,7,8-tetrah ydropterin synthase OS=Klebsiella oxytoca OX=571 GN=que D PE=3 SV=1

SEQ ID NO: 21441 - protein, 120 aa, Klebsiella oxytoca
  misc_feature (1)..(120): tr|A0A168IHZ4|A0A168IHZ4_KLEOX 6-carboxy-5,6,7,8-tetrah ydropterin synthase OS=Klebsiella oxytoca OX=571 GN=que D PE=3 SV=1
MSTTLFKDFTFEAAHRLPHVPEGHKCGRLHGHSFMVRLEITGEVDPHTGWIMDFAELKAAFKPTYDRLDHYYLNDIPGLSNPTSEVLAKWIWEQMKPLVPLLSAVMIKETCTAGCVYRGE

SEQ ID NO: 21442 - protein, 120 aa, Klebsiella pneumoniae
  misc_feature (1)..(120): tr|A0A485T846|A0A485T846_KLEPN 6-carboxy-5,6,7,8-tetrah ydropterin synthase OS=Klebsiella pneumoniae OX=573 GN= queD_2 PE=3 SV=1
MKTTLYKDFTFEAAHRLPNVPEGHKCGRLHGHSFVVRLEITGEVDKHTGWIIDFAELKAIFKPTLDRLDHYYLNDIPGLENPTSEVLAKWIWNQVKTQLPILSAVMVKETCSAGCVYRGE

SEQ ID NO: 21443 - protein, 121 aa, Klebsiella pneumoniae; identical to SEQ ID NO: 21434
  misc_feature (1)..(121): tr|W8UFV3|W8UFV3_KLEPN 6-carboxy-5,6,7,8-tetrahydropter in synthase OS=Klebsiella pneumoniae 30684/NJST258_2 OX =1420013 GN=KPNJ2_01150 PE=3 SV=1

SEQ ID NO: 21444 - protein, 120 aa, Klebsiella quasipneumoniae
  misc_feature (1)..(120): tr|A0A422X4Z3|A0A422X4Z3_9ENTR 6-carboxy-5,6,7,8-tetrah ydropterin synthase OS=Klebsiella quasipneumoniae subsp . quasipneumoniae OX=1667327 GN=queD PE=3 SV=1
MSTTLFKDFTFEAAHHLPHVPEGHKCGRLHGHSFMVRLEITGEVDPHTGWIMDFAELKAAFKPTYDRLDHYYLNDIPGLENPTSEVLAKWIWDEMKPRVPLLSAVMVKETCTAGCVYRGE

SEQ ID NO: 21445 - protein, 120 aa, Klebsiella quasipneumoniae; identical to SEQ ID NO: 21444
  misc_feature (1)..(120): tr|A0A5C6IJV0|A0A5C6IJV0_9ENTR 6-carboxy-5,6,7,8-tetrah ydropterin synthase OS=Klebsiella quasipneumoniae subsp . similipneumoniae OX=1463164 GN=queD PE=3 SV=1

SEQ ID NO: 21446 - protein, 121 aa, Klebsiella quasivariicola
  misc_feature (1)..(121): tr|A0A5E5W596|A0A5E5W596_9ENTR 6-carboxy-5,6,7,8-tetrah ydropterin synthase OS=Klebsiella quasivariicola OX=202 6240 GN=queD PE=3 SV=1
MMSTTLFKDFTFEAAHHLPHVPQGHKCGRLHGHSFMVRLEITGEVDPHTGWIMDFAELKAAFKPTYDRLDHYYLNDIPGLENPTSEVLAKWIWDQMKPQVPLLSAVMVKETCTAGCVYRGE

SEQ ID NO: 21447 - protein, 120 aa, Klebsiella quasivariicola
  misc_feature (1)..(120): tr|A0A223UIF7|A0A223UIF7_9ENTR 6-carboxy-5,6,7,8-tetrah ydropterin synthase OS=Klebsiella quasivariicola OX=202 6240 GN=queD PE=3 SV=1
MSTTLFKDFTFEAAHHLPHVPQGHKCGRLHGHSFMVRLEITGEVDPHTGWIMDFAELKAAFKPTYDRLDHYYLNDIPGLENPTSEVLAKWIWDQMKPQVPLLSAVMVKETCTAGCVYRGE

SEQ ID NO: 21448 - protein, 120 aa, Klebsiella sp.; identical to SEQ ID NO: 21437
  misc_feature (1)..(120): tr|J8W5W0|J8W5W0_9ENTR 6-carboxy-5,6,7,8-tetrahydropter in synthase OS=Klebsiella sp. OBRC7 OX=936565 GN=queD P E=3 SV=1

SEQ ID NO: 21449 - protein, 120 aa, Klebsiella sp.; identical to SEQ ID NO: 21444
  misc_feature (1)..(120): tr|A0A1F2M1E1|A0A1F2M1E1_9ENTR 6-carboxy-5,6,7,8-tetrah ydropterin synthase OS=Klebsiella sp. HMSC16C06 OX=1581 110 GN=HMPREF3142_14910 PE=3 SV=1

SEQ ID NO: 21450 - protein, 120 aa, Klebsiella variicola; identical to SEQ ID NO: 21444
  misc_feature (1)..(120): tr|A0A2V3KQ69|A0A2V3KQ69_KLEVA 6-carboxy-5,6,7,8-tetrah ydropterin synthase OS=Klebsiella variicola OX=244366 G N=queD PE=3 SV=1

SEQ ID NO: 21451 - protein, 120 aa, Klebsiella variicola
  misc_feature (1)..(120): tr|A0A4U2WEA0|A0A4U2WEA0_KLEVA 6-carboxy-5,6,7,8-tetrah ydropterin synthase OS=Klebsiella variicola OX=244366 G N=queD PE=3 SV=1
MSTTLFKDFTFEAAHHLPHVPEGHKCGRLHGHSFMVRLEITGEVDPHTGWIMDFAELKAAFKPTYDRLDHYYLNDIPGLENPTSEVLAKWIWDEMKPRVPLLSAVMVKETCTAGCIYRGE

SEQ ID NO: 21452 - protein, 121 aa, Kluyvera ascorbata
  misc_feature (1)..(121): tr|A0A378GJR2|A0A378GJR2_9ENTR 6-carboxy-5,6,7,8-tetrah ydropterin synthase OS=Kluyvera ascorbata OX=51288 GN=q ueD PE=3 SV=1
MMSTTLFKDFTFEAAHHLPHVPEGHKCGRLHGHSFMVRLEITGEVDPHTGWIMDFAELKAAFKPTYDRLDHYYLNDIPGLENPTSEVLSRWIWEQVKPVVPLLSAVMVKETCTAGCVYRGE

SEQ ID NO: 21453 - protein, 120 aa, Kluyvera ascorbata; identical to SEQ ID NO: 19310
  misc_feature (1)..(120): tr|A0A3N2SAE1|A0A3N2SAE1_9ENTR 6-carboxy-5,6,7,8-tetrah ydropterin synthase OS=Kluyvera ascorbata OX=51288 GN=q ueD PE=3 SV=1

SEQ ID NO: 21454 - protein, 121 aa, Kluyvera cryocrescens; identical to SEQ ID NO: 21452
  misc_feature (1)..(121): tr|A0A2X3EIX3|A0A2X3EIX3_KLUCR 6-carboxy-5,6,7,8-tetrah ydropterin synthase OS=Kluyvera cryocrescens OX=580 GN= queD PE=3 SV=1

SEQ ID NO: 21455 - protein, 121 aa, Kluyvera georgiana; identical to SEQ ID NO: 21452
  misc_feature (1)..(121): tr|A0A1B7K5H4|A0A1B7K5H4_9ENTR 6-carboxy-5,6,7,8-tetrah ydropterin synthase OS=Kluyvera georgiana ATCC 51603 OX =1354264 GN=M989_01075 PE=3 SV=1

SEQ ID NO: 21456 - protein, 120 aa, Kluyvera georgiana; identical to SEQ ID NO: 19310
  misc_feature (1)..(120): tr|A0A248KKX1|A0A248KKX1_9ENTR 6-carboxy-5,6,7,8-tetrah ydropterin synthase OS=Kluyvera georgiana OX=73098 GN=q ueD PE=3 SV=1

SEQ ID NO: 21457 - protein, 121 aa, Kluyvera intermedia
  misc_feature (1)..(121): tr|A0A3S5DAN0|A0A3S5DAN0_KLUIN 6-carboxy-5,6,7,8-tetrah ydropterin synthase OS=Kluyvera intermedia OX=61648 GN= queD PE=3 SV=1
MMSTTLFKDFTFEAAHHLPHVPEGHKCGRLHGHSFMVRLEITGDVDPHTGWIMDFAELKAAFKPTYDRLDHYYLNDIPGLENPTSEVLSRWIWEQIKPVVPLLSAVMIKETCTAGCVYRGE

SEQ ID NO: 21458 - protein, 120 aa, Kluyvera intermedia
  misc_feature (1)..(120): tr|A0A1X0X741|A0A1X0X741_KLUIN 6-carboxy-5,6,7,8-tetrah ydropterin synthase OS=Kluyvera intermedia OX=61648 GN= B2M27_18945 PE=3 SV=1
MSTTLFKDFMFEAAHRLPHVPAGHKCGRLHGHSFMVRLEITGEVDPHTGWIMDFAELKAAFKPTYDRLDHYYLNDIPGLENPTSEVLAKWIWDQVKPVVPLLSAVMIKETCTAGCIYRGE

SEQ ID NO: 21459 - protein, 120 aa, Kluyvera sp.; identical to SEQ ID NO: 20906
  misc_feature (1)..(120): tr|A0A2T3XA41|A0A2T3XA41_9ENTR 6-carboxy-5,6,7,8-tetrah ydropterin synthase OS=Kluyvera sp. Nf5 OX=2116543 GN=q ueD PE=3 SV=1

SEQ ID NO: 21460 - protein, 132 aa, Knoellia sinensis
  misc_feature (1)..(132): tr|A0A0A0J2Q1|A0A0A0J2Q1_9MICO 6-pyruvoyl tetrahydropte rin synthase OS=Knoellia sinensis KCTC 19936 OX=1385520 GN=N802_03075 PE=4 SV=1
MYSVTVRDHMMIAHSLPGEVFGPAQKLHGATYLVDATFRAQALDDDGLVVDIGRASEALGGVLGELTYRNLDDDPTLEGVTTTTERLAEVVADRLAARLRAGELGASAEQISTIAVTLHESHIAWASYERAP

SEQ ID NO: 21461 - protein, 132 aa, Knoellia sp.
  misc_feature (1)..(132): tr|A0A0Q9KS27|A0A0Q9KS27_9MICO 6-pyruvoyl tetrahydropte rin synthase OS=Knoellia sp. Soil729 OX=1736394 GN=ASG7 4_09360 PE=4 SV=1
MFSVTVRDSMMVAHSLRGEVFGPAQRLHGATYVVDVTFRVAELDADGLVVDIGRASQALRAVMGGLSYRNLDEDPSLSGVNTTTERLAQVVADRMADRLTSGELGVAAGRVSAIAVTLRESHVAWASYERAP

SEQ ID NO: 21462 - protein, 136 aa, Kocuria flava
  misc_feature (1)..(136): tr|A0A2N4SYX0|A0A2N4SYX0_9MICC 6-pyruvoyl tetrahydrobio pterin synthase OS=Kocuria flava OX=446860 GN=AUQ48_016 10 PE=4 SV=1
MFTLTVRDHIMIAHSLPDPFFGPAQRLHGATYEVETTWARPVLDEHGVVMDIGMASGLLGQVLDGLRHRNLDEHPDFAGRLSTTEVIAQHVGERLAAAAAGIEGLERLTVTLRENPDAWASYTLELPVLGGGSGRG

SEQ ID NO: 21463 - protein, 136 aa, Kocuria flava
  misc_feature (1)..(136): tr|A0A0U3G7X7|A0A0U3G7X7_9MICC 6-pyruvoyl tetrahydrobio pterin synthase OS=Kocuria flava OX=446860 GN=AS188_048 55 PE=4 SV=1
MFTLTVRDHIMIAHSLPDPFFGPAQRLHGATYEVETTWARPVLDEHGVVMDIGMASGLLGQVLDGLRHRNLDEHPDFAGRLSTTEVIAQHVGERLAAAAAGTEGLERLTVTLRENPDAWASYTLELPVLGGGSGRG

SEQ ID NO: 21464 - protein, 126 aa, Kocuria marina
  misc_feature (1)..(126): tr|A0A0B0DFY8|A0A0B0DFY8_9MICC 6-pyruvoyl tetrahydrobio pterin synthase OS=Kocuria marina OX=223184 GN=AS25_084 55 PE=4 SV=1
MYRLTVRDHVMIAHSLPDPFFGPAQALHGATLVVEVTWRRRELGPQSVVMDIGAATSMLSEVLEPLRYTNLDEHPAFAGRLSTTEAIAGHISDELRRHFDTTEFAGMEVLLREHPDAWAAHDVDFA

SEQ ID NO: 21465 - protein, 139 aa, Kocuria polaris
  misc_feature (1)..(139): tr|A0A0A6VVM2|A0A0A6VVM2_9MICC 6-pyruvoyl tetrahydrobio pterin synthase OS=Kocuria polaris OX=136273 GN=GY22_00 620 PE=4 SV=1
MFTLTVRDHMMIAHSLPDPFFGPAQNLHGATYVVETTWSRPVLDEHGVVMDIGVANDLLAGVLDGLRYRNLDEHPDFAGRLSTTEVLAQYVAERLAAGAAFVEGLERLTVTLRETPDAWASYTLELPVLSERGGPAPAR

SEQ ID NO: 21466 - protein, 139 aa, Kocuria polaris
  misc_feature (1)..(139): tr|A0A0W8IP02|A0A0W8IP02_9MICC 6-pyruvoyl tetrahydrobio pterin synthase OS=Kocuria polaris OX=136273 GN=AVL61_0 2010 PE=4 SV=1
MFTLTVRDHMMIAHSLPDPFFGPAQNLHGATYEVEATWSRPVLDEHGVVMDIGLAGDLLTGVLDGLRYRNLDEHPDLAGRLTTTEVLAQYVAERLAAGAASVEGLERLAVTLRENPDAWASYTLELPVLSERGGPVPAR

SEQ ID NO: 21467 - protein, 139 aa, Kocuria rosea; identical to SEQ ID NO: 21465
  misc_feature (1)..(139): tr|A0A2V1M9Z6|A0A2V1M9Z6_KOCRO 6-carboxy-5,6,7,8-tetrah ydropterin synthase OS=Kocuria rosea OX=1275 GN=queD PE =4 SV=1

SEQ ID NO: 21468 - protein, 127 aa, Kocuria sp.
  misc_feature (1)..(127): tr|A0A2A3ADW0|A0A2A3ADW0_9MICC 6-pyruvoyl tetrahydrobio pterin synthase OS=Kocuria sp. WRN011 OX=2029858 GN=CKW 39_11110 PE=4 SV=1
MYSLTVNDHVMIAHSLPDEFFGPAQGMHGATLTVEATFTRAELDEHAVVLDIGQAMEMLDDALSPLRYANLDEHPDFAGKLSTTEATAHYIGQRLADSLSDQPDVGITVTLTENPRAKVAYTVPERP

SEQ ID NO: 21469 - protein, 138 aa, Kocuria sp.
  misc_feature (1)..(138): tr|A0A1Q9SCJ2|A0A1Q9SCJ2_9MICC 6-pyruvoyl tetrahydrobio pterin synthase OS=Kocuria sp. CNJ-770 OX=1904964 GN=BJ F77_01940 PE=4 SV=1
MFTLTVRDHIMIAHSLPDPFFGPAQNLHGATFTVETTWARPVLDEHGVVLDIGVASQLLSGVLDGLRYRNLDDHPDFTGRLSTTEVLAQYIAERLAAGAAGIAGLDRLTVTLRENPDAWASYTLELPVLTERGGPTSR

SEQ ID NO: 21470 - protein, 138 aa, Kocuria turfanensis
  misc_feature (1)..(138): tr|A0A512IF69|A0A512IF69_9MICC Uncharacterized protein OS=Kocuria turfanensis OX=388357 GN=KTU01_24300 PE=4 SV =1
MFTLTVRDHIMIAHSLPDPFFGPAQALHGATFAVETTWARPVLDEHGVVMDIGVASELLSGVLDGLRYRNLDEHPDFTGRLSTMEVVAQHIAEWLAAGAAGIAGLERLTVTLRENPDAWASYTLELPVLSERGGPSPR

SEQ ID NO: 21471 - protein, 177 aa, Komagataeibacter cocois
  misc_feature (1)..(177): tr|A0A365Z1U5|A0A365Z1U5_9PROT 6-pyruvoyl tetrahydropte rin synthase OS=Komagataeibacter cocois OX=1747507 GN=N JLHNGOC_01845 PE=4 SV=1
MLELVFTRRFCMAHRLLSGESERCALPHGHNEYVRVTLRPTHPGHLDGTQNMVVPFHRAKGTWHDFVDNCLDHALQLGEDDPLLSWFRTHEPERAERIIVTPGDPTTELMACLMMAKLNAFLHADGNVLTCAAIALEETPTNTVRYEGDPLLMLPAPRPARQCWWRRADMSISDTGH

SEQ ID NO: 21472 - protein, 175 aa, Komagataeibacter europaeus
  misc_feature (1)..(175): tr|A0A0M0EMF6|A0A0M0EMF6_KOMEU 6-pyruvoyl tetrahydropte rin synthase OS=Komagataeibacter europaeus OX=33995 GN= KOEU_00830 PE=4 SV=1
MFELVFTRRFSMAHRLLAGESERCALPHGHNEYIRAHLRATNPTVLDGRTNMVMPFQRAKGVWHGFIDNHVDHALQLAEDDPLLAWFALNEPQRARRILVTPGDPTTELLACLLMAKLNAFLAADGGALTCASIEIEETPTNTVRYSGDPLAVLPRPRPAPHCWWRRADTTISDT

SEQ ID NO: 21473 - protein, 175 aa, Komagataeibacter europaeus
  misc_feature (1)..(175): tr|A0A0D6PXS2|A0A0D6PXS2_KOMEU Uncharacterized protein OS=Komagataeibacter europaeus NBRC 3261 OX=1234669 GN=G eu3261_0018_030 PE=4 SV=1
MFELVFTRRFSMAHRLLAGESERCALPHGHNEYIRAHLRATNPTVLDGRTNMVMPFQRAKGVWHGFIDNHVDHALQLAEDDPLLAWFALNEPQRARRILVTPGDPTTELLACLLMAKLNTFLAADGGALTCASIEIEETPTNTVRYSGDPLAVLPRPRPAPRCWWRRADMTISDT

SEQ ID NO: 21474 - protein, 175 aa, Komagataeibacter hansenii
  misc_feature (1)..(175): tr|D5QDE1|D5QDE1_KOMHA Uncharacterized protein OS=Komag ataeibacter hansenii ATCC 23769 OX=714995 GN=GXY_05738 PE=4 SV=1
MLELVFTRRFCMAHRLLSGESERCTLPHGHNEYVRVTLRPTRPDRLDGTQNMVVPFHRAKGTWHAFVDNSLDHAFQLGEGDPLLSWFRAHEPERAGRIVVTPGDPTTELMACLMMAKLNAFLHADGDLLTCAEIVLEETPTNTVRYAGDPLLMLPTPRPPQECWWRRADMSIADT

SEQ ID NO: 21475 - protein, 175 aa, Komagataeibacter hansenii
  misc_feature (1)..(175): tr|A0A318Q2X3|A0A318Q2X3_KOMHA 6-pyruvoyl tetrahydropte rin synthase OS=Komagataeibacter hansenii OX=436 GN=CFR 74_14550 PE=4 SV=1
MLELVFTRRFCMAHRLLSGESERCTLPHGHNEYVRVTLRPTRPDRLDGTQNMVVPFHRAKGTWHAFVDNSLDHAFQLGEGDPLLSWFRAHEPERAGRIVVTPGDPTTELMACLMMAKLNAFLHADGDLLTCAEIVLEETPTNTVRYTGDPLLMLPTPRPPQECWWRRADMSIADT

SEQ ID NO: 21476 - protein, 175 aa, Komagataeibacter intermedius
  misc_feature (1)..(175): tr|A0A0N1FL96|A0A0N1FL96_9PROT 6-pyruvoyl tetrahydropte rin synthase OS=Komagataeibacter intermedius AF2 OX=145 8464 GN=GLUCOINTEAF2_0202306 PE=4 SV=1
MFELVFTRRFSMAHRLLSGDSERCALPHGHNEYIRAHLRATNPTALDGHANMVMPFQRAKGVWHGFIDNHVDHALQLAENDPLLAWFAGNEPQRARRILVTPGDPTTELLACLLMAKLNAFLAADGGALTCASIEIEETPTNTVRYSGDPLAVLPQPRTAPHCWWRRADTTISDT

SEQ ID NO: 21477 - protein, 175 aa, Komagataeibacter maltaceti
  misc_feature (1)..(175): tr|A0A2S3W546|A0A2S3W546_9PROT Uncharacterized protein OS=Komagataeibacter maltaceti OX=1203393 GN=KMAL_02560 PE=4 SV=1
MLELVFTRRFCMAHRLLSGESERCALPHGHNEYVRVTLRPTNPVRLDGTQNMVVPFHRAKGTWHDFVDNSLDHAFQLGEGDPLLSWFRAHEPERAARIIVTPGDPTTELMACLMMAKLNAFLHADGDILTCAEIVLEETPTNTVRYAGDPLLMLPAPRPPHECWWRRADMSISDS

SEQ ID NO: 21478 - protein, 175 aa, Komagataeibacter medellinensis
  misc_feature (1)..(175): tr|G2I224|G2I224_KOMMN Uncharacterized protein OS=Komag ataeibacter medellinensis (strain NBRC 3288 / BCRC 1168 2 / LMG 1693 / Kondo 51) OX=634177 GN=GLX_00280 PE=4 SV =1
MFELVFTRRFSMAHRLLAGESERCALPHGHNEYVRVSLRATQPGALDGRTNMVLPFQRAKSVWHQFIDNHVDHALQLAQDDPLLGWFMQHEPQRARRILVTPGDPTTELLACLLMAKLNAFLAADGGVLTCALIEIDETPTNTIRYSGDPLAMLPQPRPAGQCWWRRADMTITDT

SEQ ID NO: 21479 - protein, 175 aa, Komagataeibacter nataicola
  misc_feature (1)..(175): tr|A0A1U9RNR3|A0A1U9RNR3_9PROT 6-pyruvoyl tetrahydropte rin synthase OS=Komagataeibacter nataicola OX=265960 GN =B0W47_14790 PE=4 SV=1
MFELVFSRRFSMAHRLLAGSSERCALPHGHNEYVRVHLRATTPAPLDGGTNMVMPFERAKGVWHGFIDNHVDHALQLAEGDPLLAWFRTHEPGRAARIMVTPGDPTTELLACLLMAKLNAFLAADGGALSCAAIEIEETPTNTVRYTGDPLAVLPQPRAAPHCWWRRADMTLADT

SEQ ID NO: 21480 - protein, 175 aa, Komagataeibacter oboediens
  misc_feature (1)..(175): tr|A0A318R7Y4|A0A318R7Y4_9PROT 6-pyruvoyl tetrahydropte rin synthase OS=Komagataeibacter oboediens OX=65958 GN= CFR80_06520 PE=4 SV=1
MFELVFTRRFSMAHRLLAGESERCALPHGHNEYIRAYLRATAPTALDGYANMVMPFQRAKGVWHGFIDDHVDHALQLAEDDPLLAWFTHNEPQRAQRILVTPGDPTTELLACLLMAKLNAFLAADGGALTCASIEIEETPTNTVRYSGDPLAVLPCPRPAPQCWWRRPDMTLSDT

SEQ ID NO: 21481 - protein, 177 aa, Komagataeibacter pomaceti
  misc_feature (1)..(177): tr|A0A318QCJ6|A0A318QCJ6_9PROT 6-pyruvoyl tetrahydropte rin synthase OS=Komagataeibacter pomaceti OX=2021998 GN =CFR71_04135 PE=4 SV=1
MLELVFTRRFCMAHRLLSGESERCALPHGHNEYVRATLRPTHPGRLDGTQNMVVPFHRAKGTWHAFVDNCLDHALQLGEDDPLLSWFRAHEPERAQRIIVTPGDPTTELMACLMMAKLNAFLHADGNVLTCAAIALEETPTNTVRYEGDPLLMLPAPRPARQCWWRRADMSISDMGH

SEQ ID NO: 21482 - protein, 178 aa, Komagataeibacter rhaeticus; identical to SEQ ID NO: 20835
  misc_feature (1)..(178): tr|A0A181C953|A0A181C953_9PROT 6-pyruvoyl tetrahydropte rin synthase OS=Komagataeibacter rhaeticus OX=215221 GN =KRIGEM_01028 PE=4 SV=1

SEQ ID NO: 21483 - protein, 178 aa, Komagataeibacter rhaeticus
  misc_feature (1)..(178): tr|A0A070A9K5|A0A070A9K5_9PROT 6-pyruvoyl tetrahydropte rin synthase OS=Komagataeibacter rhaeticus AF1 OX=14320 55 GN=GLUCORHAEAF1_15955 PE=4 SV=1
MFELVFTRRFSMAHRLLAGGSERCALPHGHNEYVRVSLRATAPTALDGHANMVLPFQRAKGIWHQFIDNHVDHALQLAQDDPLLGWFAQHEPQRAQRILVTPGDPTTELLACLLMAKLNAFLAADGGILSCASIEIDETPTNTIRYSGDPLAVLPQPRPAAQCWWRRADMTIADTGLS

SEQ ID NO: 21484 - protein, 175 aa, Komagataeibacter saccharivorans
  misc_feature (1)..(175): tr|A0A347W804|A0A347W804_9PROT 6-pyruvoyl tetrahydropte rin synthase OS=Komagataeibacter saccharivorans OX=2659 59 GN=CD178_00167 PE=4 SV=1
MFELVFTRRFSMAHRLLAGESERCALPHGHNEYVRVSLRATNPGVLDGHTNMVLPFQRAKETWHRFIDEQVDHALQLSEHDPLLDWFGRNEPQRARRILVTPGDPTTELLACLLMAKLNAFLADDGGLLTCASIEIEETPTNTVRYTGNPFAVLPQPRPAPKCWWRRADMTIADT

SEQ ID NO: 21485 - protein, 175 aa, Komagataeibacter sp.
  misc_feature (1)..(175): tr|A0A4P5NY78|A0A4P5NY78_9PROT Uncharacterized protein OS=Komagataeibacter sp. MSKU15 OX=1932664 GN=MSKU15_005 2 PE=4 SV=1
MFELVFTRRFSMAHRLLAGESERCALPHGHNEYIRVHLRATNPTALDGRTNMVMPFQRAKGIWHGFIDNHVDHALQLSEDDPLRAWFARHEPQRAQRILVTPGDPTTELLACLLMAKLNAFLAADNGTLTCASIEIEETPTNTVRYSGDPLAVLPQPRPAPHCWWRRADTTISDT

SEQ ID NO: 21486 - protein, 175 aa, Komagataeibacter sp.; identical to SEQ ID NO: 21485
  misc_feature (1)..(175): tr|A0A4P5NN68|A0A4P5NN68_9PROT Uncharacterized protein OS=Komagataeibacter sp. MSKU9 OX=1932662 GN=MSKU9_0058 PE=4 SV=1

SEQ ID NO: 21487 - protein, 175 aa, Komagataeibacter sucrofermentans
  misc_feature (1)..(175): tr|A0A318QHK4|A0A318QHK4_9PROT 6-pyruvoyl tetrahydropte rin synthase OS=Komagataeibacter sucrofermentans OX=105 3551 GN=CFR77_08175 PE=4 SV=1
MFELVFSRRFSMAHRLLAGSSERCALPHGHNEYVRVHLRATTPAPLDGGTNMVVPFERAKGVWHGFIDNHVDHALQLGEGDPLLDWFRVHEPGRAARIMITPGDPTTELLACLLMAKLNAFLAADGGALRCAAIEIEETPTNTVRYAGDPLAALPQPRAAAHCWWRRADMTIADT

SEQ ID NO: 21488 - protein, 175 aa, Komagataeibacter swingsii
  misc_feature (1)..(175): tr|A0A2V4R463|A0A2V4R463_9PROT 6-pyruvoyl tetrahydropte rin synthase OS=Komagataeibacter swingsii OX=215220 GN= CFR76_09470 PE=4 SV=1
MFELVFTRRFSMAHRLLAGESERCALPHGHNEYIRAHLRATNPTALDGRTNMVMPFQRAKGVWHGFIDNHVDHALQLAEDDPLLAWFASNEPRRARRILVTPGDPTTELLACLLMAKLNAFLAADGGALTCASIEIEETPTNTVRYSGDPLAVLPRPRAAPQCWWRRADTSISDT

SEQ ID NO: 21489 - protein, 178 aa, Komagataeibacter xylinus; identical to SEQ ID NO: 20835
  misc_feature (1)..(178): tr|A0A2D3HC93|A0A2D3HC93_KOMXY 6-pyruvoyl tetrahydropte rin synthase OS=Komagataeibacter xylinus OX=28448 GN=CT 154_04670 PE=4 SV=1

SEQ ID NO: 21490 - protein, 175 aa, Komagataeibacter xylinus
  misc_feature (1)..(175): tr|A0A143WGU0|A0A143WGU0_KOMXY 6-pyruvoyl tetrahydropte rin synthase OS=Komagataeibacter xylinus OX=28448 GN=AT CC53582_00886 PE=4 SV=1
MLELVFTRRFCMAHRLLSGESERCTLPHGHNEYVRVTLRPTRPDRLDGTQNMVVPFHRAKGTWHAFVDNSLDHAFQLGEGDPLLSWFRTHEPERAGRIVVTPGDPTTELMACLMMAKLNAFLHADGDLLTCAEIVLEETPTNTVRYAGDPLLMLPTPRPPQECWWRRADMSIADT

SEQ ID NO: 21491 - protein, 155 aa, Kordia algicida
  misc_feature (1)..(155): tr|A9DSL9|A9DSL9_9FLAO Uncharacterized protein OS=Kordi a algicida OT-1 OX=391587 GN=KAOT1_17358 PE=4 SV=1
MKMKMSKIRITKQFNFETGHALYGYDGKCKNVHGHSYKLSVTVIGTPITDNTNVKWGMVIDFSDLKKIVKEEVVDVFDHAIVFNKNTPHINLAMNMREEGHNVILADYQPTSENMVIDFAEKIKKRLPKTIKLFSLRLQETDSSCAEWFASDNEA

SEQ ID NO: 21492 - protein, 136 aa, Kordia algicida
  misc_feature (1)..(136): tr|A9E217|A9E217_9FLAO 6-carboxy-5,6,7,8-tetrahydropter in synthase OS=Kordia algicida OT-1 OX=391587 GN=KAOT1_ 22661 PE=3 SV=1
MNVTVSRRAHFNAAHRLYRPDWDDAKNNEIFGKCNNPNYHGHNYELIVSVTGPINPETGFVMDVKVLKDLIRSEVEDAFDHKNLNLDVPEFKNLNPTAENIVVVIWNKLRTHISTSLDLEVVLYETPRNFVKYTGE

SEQ ID NO: 21493 - protein, 136 aa, Kordia periserrulae
  misc_feature (1)..(136): tr|A0A2T6BSI6|A0A2T6BSI6_9FLAO 6-carboxy-5,6,7,8-tetrah ydropterin synthase OS=Kordia periserrulae OX=701523 GN =C8N46_111118 PE=3 SV=1
MKVTVSRRAHFNAAHRLYRPDWDDAKNDAVFGKCNNPNYHGHNYEMIVSVTGPINPETGFVMDVKVLKDLIKAEVEDAFDHKNLNLDVPEFKNLNPTAENIVVVIWNKLRKHIAASLALEVVLYETPRNFVKYAGE

SEQ ID NO: 21494 - protein, 150 aa, Kordia periserrulae
  misc_feature (1)..(150): tr|A0A2T6BWX1|A0A2T6BWX1_9FLAO 6-pyruvoyltetrahydropter in/6-carboxytetrahydropterin synthase OS=Kordia periser rulae OX=701523 GN=C8N46_106220 PE=4 SV=1
MSKIRITKQFNFETGHALYGYDGKCKNVHGHSYKLSVTVIGTPITDNSNVKWGMVIDFSDLKKIVKEEVVDVFDHAIVFNKNTPHLSLALTMREEGHNVILADYQPTSENMVIDFAEKIKNRLPKEIQLFSLRLQETDSSCAEWFASDNE

SEQ ID NO: 21495 - protein, 150 aa, Kordia sp.
  misc_feature (1)..(150): tr|A0A501I4U0|A0A501I4U0_9FLAO 6-carboxytetrahydropteri n synthase OS=Kordia sp. TARA_039_SRF OX=2530203 GN=EZY 14_00555 PE=4 SV=1
MSKIRITKQFNFETGHALYGYDGKCKNVHGHSYKLSVTVIGTPITDNSNVKWGMVIDFSDLKKIVKEEVVDVFDHAIVFNKNTPHLSLAMTMREEGHNVILADYQPTSENMVIDFAEKIKNRLPREIQLFSLRLQETDSSCAEWFASDNE

SEQ ID NO: 21496 - protein, 150 aa, Kordia sp.
  misc_feature (1)..(150): tr|A0A2G2KAN0|A0A2G2KAN0_9FLAO 6-carboxytetrahydropteri n synthase QueD OS=Kordia sp. OX=1965332 GN=COA88_08560 PE=4 SV=1
MSKIRITKLFTFETGHALYGYDGKCKNVHGHSYKLSVTVIGSPITKLGAVKLGMVIDFGDLKKVVKEEIVDGFDHATVFNKNTPHLELAKELQDRGHNVILVDYQPTSENMVIDFAAKIKDRLPENIQLHSLKLSETDTSFAEWYASDNE

SEQ ID NO: 21497 - protein, 130 aa, Kordiimonas sp.
  misc_feature (1)..(130): tr|A0A2E1CW65|A0A2E1CW65_9PROT 6-carboxy-5,6,7,8-tetrah ydropterin synthase OS=Kordiimonas sp. OX=1970157 GN=CM F31_07520 PE=3 SV=1
MEIYKIFNFDAAHHLACNVPDGHPYSRLHGHSFQAEVFLRGEPDIDTGWIVDFAQIDTALQQLRNELDHNYLNEIPGLELPTVENIACWIWNRLSPDFPQLCRIIIRRGSFGEGCIYEGPAKEPAARHHG

SEQ ID NO: 21498 - protein, 135 aa, Koribacter versatilis
  misc_feature (1)..(135): tr|Q1IPJ0|Q1IPJ0_KORVE 6-pyruvoyl tetrahydropterin synt hase OS=Koribacter versatilis (strain Ellin345) OX=2046 69 GN=Acid345_2209 PE=4 SV=1
MKAHLTRRYWFVASHRLHTPRLSEAENREVYGKCNNPFGHGHNYALEVTVGGQVAPDTGMVYNLADVDRVVRKHILERYDHQNLNCLKEFQELVPTTENLCLAIFEILKRNLAEIHLDKVRLEETSQNSFEVVNE

SEQ ID NO: 21499 - protein, 137 aa, Koribacter versatilis
  misc_feature (1)..(137): tr|Q1IPI9|Q1IPI9_KORVE 6-carboxy-5,6,7,8-tetrahydropter in synthase OS=Koribacter versatilis (strain Ellin345) OX=204669 GN=Acid345_2210 PE=3 SV=1
MVVYLTRKSEFSASHHYHNPDFTAEENLRVFGKCNNSNGHGHNYTLEVTVKGTVDATTGFVVDLKQLKEIMNREVVDAMDHRYLNHEVPEFKSQIPTTENIAIAIWKRLEGKLHVAKLHRVRLYEMHDLWVDYLGEA

SEQ ID NO: 21500 - protein, 120 aa, Kosakonia arachidis
  misc_feature (1)..(120): tr|A0A1I6XL41|A0A1I6XL41_9ENTR 6-carboxy-5,6,7,8-tetrah ydropterin synthase OS=Kosakonia arachidis OX=551989 GN =SAMN05192562_10139 PE=3 SV=1
MPTTLFKDFTFEAAHHLPHVPQGHKCGRLHGHSFLVRLEITGEVDPYTGWIMDFAELKAAFKPLYDRLDHYYLNEIPGLENPTSEVLAKWIWDQMKPVVPLLSAVMVKETCTAGCVYRGE

SEQ ID NO: 21501 - protein, 119 aa, Kosakonia cowanii
  misc_feature (1)..(119): tr|A0A3R5YHJ9|A0A3R5YHJ9_9ENTR 6-carboxy-5,6,7,8-tetrah ydropterin synthase OS=Kosakonia cowanii OX=208223 GN=q ueD PE=3 SV=1
MSTTLFKDFTFEAAHHLPHVPEGHKCGRLHGHSFMVRLEITGEVDPYTGWIMDFAELKAAFKPLYDRLDHYYLNEIPGLENPTSEVLAKWIWDQMKPVVPLLSAVMVKETCTAGCVYRG

SEQ ID NO: 21502 - protein, 120 aa, Kosakonia oryzae
  misc_feature (1)..(120): tr|A0A1T5G1X4|A0A1T5G1X4_9ENTR 6-carboxy-5,6,7,8-tetrah ydropterin synthase OS=Kosakonia oryzae OX=497725 GN=SA MN05216168_0323 PE=3 SV=1
MSTTLFKDFTFEAAHHLPHVPQGHKCGRLHGHSFMVRLEITGEVDPYTGWIMDFAELKAAFKPLYDRLDHYYLNEIPGLENPTSEVLAKWIWDQMKPVVPLLSAVMVKETCTAGCVYRGE

SEQ ID NO: 21503 - protein, 119 aa, Kosakonia oryzendophytica
  misc_feature (1)..(119): tr|A0A1C4AUS6|A0A1C4AUS6_9ENTR 6-carboxy-5,6,7,8-tetrah ydropterin synthase OS=Kosakonia oryzendophytica OX=100 5665 GN=GA0061071_103354 PE=3 SV=1
MSTTLFKDFTFEAAHHLPHVPQGHKCGRLHGHSFMVRLEITGEVDPYTGWIMDFAELKAAFKPLYDRLDHYYLNEIPGLENPTSEVLAKWIWDQMKPVVPLLSAVMVKETCTAGCVYRG

SEQ ID NO: 21504 - protein, 120 aa, Kosakonia oryziphila
  misc_feature (1)..(120): tr|A0A1C4DTJ6|A0A1C4DTJ6_9ENTR 6-carboxy-5,6,7,8-tetrah ydropterin synthase OS=Kosakonia oryziphila OX=1005667 GN=GA0061070_101850 PE=3 SV=1
MSTTLFKDFTFEAAHHLPHVPQGHKCGRLHGHSFMVRLEITGEVDPYTGWIMDFAELKAAFKPLYNRLDHYYLNEIPGLENPTSEVLAKWIWDQMKPVVPLLSAVMVQETCTAGCVYRGE

SEQ ID NO: 21505 - protein, 120 aa, Kosakonia radicincitans; identical to SEQ ID NO: 21502
  misc_feature (1)..(120): tr|A0A1V0LIG9|A0A1V0LIG9_9ENTR 6-carboxy-5,6,7,8-tetrah ydropterin synthase OS=Kosakonia radicincitans DSM 1665 6 OX=1177180 GN=Y71_21530 PE=3 SV=1

SEQ ID NO: 21506 - protein, 120 aa, Kosakonia radicincitans; identical to SEQ ID NO: 21502
  misc_feature (1)..(120): tr|A0A5E8B7Z7|A0A5E8B7Z7_9ENTR 6-carboxy-5,6,7,8-tetrah ydropterin synthase OS=Kosakonia radicincitans OX=28368 6 GN=queD PE=3 SV=1

SEQ ID NO: 21507 - protein, 120 aa, Kosakonia sp.
  misc_feature (1)..(120): tr|A0A1I2GUN4|A0A1I2GUN4_9ENTR 6-carboxy-5,6,7,8-tetrah ydropterin synthase OS=Kosakonia sp. S29 OX=1855371 GN= SAMN05216563_11611 PE=3 SV=1
MSTTLFKDFMFEAAHRLPHVPAGHKCGRLHGHSFMVRLEITGEVDPHTGWIMDFAELKAAFKPTYDRLDHYYLNDIPGLENPTSEVLAKWIWEQLKPVVPLLSAVMIKETCTAGCIYRGE

SEQ ID NO: 21508 - protein, 120 aa, Kosakonia sp.
  misc_feature (1)..(120): tr|A0A4V6N3K3|A0A4V6N3K3_9ENTR 6-carboxy-5,6,7,8-tetrah ydropterin synthase OS=Kosakonia sp. WCHEs120001 OX=252 9380 GN=queD PE=3 SV=1
MSTTLFKDFTFEAAHHLPHVPLGHKCGRLHGHSFMVRLEITGEVDPYTGWIMDFAELKAAFKPLYERLDHYYLNEIPGLENPTSEVLAQWIWDQMKPVVPLLSAVMVKETCTAGCVYRGE

SEQ ID NO: 21509 - protein, 120 aa, Kosmotoga arenicorallina
  misc_feature (1)..(120): tr|A0A176K069|A0A176K069_9BACT 6-carboxy-5,6,7,8-tetrah ydropterin synthase OS=Kosmotoga arenicorallina S304 OX =1453497 GN=AT15_00530 PE=3 SV=1
MYYVTKEFSFDAAHNLIRYHGKCEKLHGHTYKLRVTVAGKPDSEGMVIDFIELKEVVRNEILRHLDHSYINEIIEQPTAENIAKWIFDRLKHLINDEHRKLHEITLWETPTSFVRYLEEE

SEQ ID NO: 21510 - protein, 119 aa, Kosmotoga olearia
  misc_feature (1)..(119): tr|C5CGV8|C5CGV8_KOSOT 6-carboxy-5,6,7,8-tetrahydropter in synthase OS=Kosmotoga olearia (strain ATCC BAA-1733 / DSM 21960 / TBF 19.5.1) OX=521045 GN=Kole_1946 PE=3 S V=1
MFYITKEVTFDAAHNLTSYHGKCEKLHGHTYRLQVTIKGEPDEEGMVIDFAELKKVIKEKILDKLDHSYINDLIPQPTAEYIARWIFDELEPLVKTDKRKLFEIVLWETPTSFVRYRKE

SEQ ID NO: 21511 - protein, 120 aa, Kosmotoga pacifica
  misc_feature (1)..(120): tr|A0A0G2ZD75|A0A0G2ZD75_9BACT 6-carboxy-5,6,7,8-tetrah ydropterin synthase OS=Kosmotoga pacifica OX=1330330 GN =IX53_09470 PE=3 SV=1
MFYITKEFTFDAAHNLVKYHGKCEKLHGHTYRLRVTVVGEPNDEGMVIDFLELKEVVKENVLKHLDHAYINEIIEQPTAEYIAKWIYDRLKKLINNERRKLHEVVLWETPTSFVRYLEEK

SEQ ID NO: 21512 - protein, 121 aa, Kosmotoga sp.
  misc_feature (1)..(121): tr|A0A5D0SFJ6|A0A5D0SFJ6_9BACT 6-carboxy-5,6,7,8-tetrah ydropterin synthase OS=Kosmotoga sp. OX=1955248 GN=queD PE=3 SV=1
MFYVTKEFTFDAAHKLLSYHGKCENLHGHTYKLRVTVYGKPDDEGMVIDFIELKKMVKNNVLNKLDHSYINEFIEQPSAENISKWIYDRLKPVIDNDRRELHEITLWETPTSFVCYKGENK

SEQ ID NO: 21513 - protein, 120 aa, Kosmotogaceae bacterium
  misc_feature (1)..(120): tr|A0A3B8N8Q2|A0A3B8N8Q2_9BACT 6-carboxy-5,6,7,8-tetrah ydropterin synthase OS=Kosmotogaceae bacterium OX=20535 67 GN=queD PE=3 SV=1
MFLVTKEFTFDAAHRLERYHGKCEELHGHTYRLSISVKGELDDEGMVIDFLELKALIKEHVLSHLDHKYLNEVIEQPTAENIAKWVFDAVKPLIDSEKRKLHEVRVWETVTSSATYRESQ

SEQ ID NO: 21514 - protein, 164 aa, Kouleothrix aurantiaca
  misc_feature (1)..(164): tr|A0A0P9CZX9|A0A0P9CZX9_9CHLR Uncharacterized protein OS=Kouleothrix aurantiaca OX=186479 GN=SE17_17170 PE=4 SV=1
MSAYRIHVSRDNLMFAAGHFASYDGTIVEPLHGHNYRLGVTLEGPTEENAYVFNFVTLKRIMKRLTDELDHHMLLPLHNALIAIEECDDGGVIVRTADRWYRFPRQDVVLLDLPNTTVEMMARYLCGRLREDLAARPEAAHLTAVEIALEESFGQTAFYREELA

SEQ ID NO: 21515 - protein, 270 aa, Kouleothrix aurantiaca
  misc_feature (1)..(270): tr|A0A0P9DHW4|A0A0P9DHW4_9CHLR 6-pyruvoyl tetrahydropte rin synthase OS=Kouleothrix aurantiaca OX=186479 GN=SE1 7_12280 PE=4 SV=1
MVGASRRFDFSASHRYWRDEWSQQENERVFGKCTSPYGHGHNYTLDVTIRGTPDPATGMIMNMVDLKALVNEVLDAFDHKHLNEDTPYFKDLIPTTENIVRVLWRLIAPRLPAGVALAHLRLYEMRDLWADYDGSDEASFSRSYVFSAAHRLHSAQLSDAENQQLYGKCNNPNGHGHNYTLEVTVDGAVDPQTGMVIDMVALDGQVRGVIDTLDHKHIDREVPWFAARASTGEHIVLYLWELLAARLEGQLRHLRLWETQNNVFEYSGER

SEQ ID NO: 21516 - protein, 177 aa, Kozakia baliensis
  misc_feature (1)..(177): tr|A0A1D8UV74|A0A1D8UV74_9PROT 6-pyruvoyl tetrahydropte rin synthase OS=Kozakia baliensis OX=153496 GN=A0U89_10 770 PE=4 SV=1
MSDIELTFTRRFSMGHRLIAGASERCAIPHGHNEFVTVRLRATQPRLLDGRQNMVVPFAQAKQRWHDFIDTSLDHALQLSESDPLLGWFRSHEPLRAERIVVTPGDPTTELMAALMLAKLRAILRDEGELLQCDNIELQETPTNTVRLTGDPMDYIPIVGRSGVECWWHRPDLSIAD

SEQ ID NO: 21517 - protein, 147 aa, Krasilnikovia cinnamomea
  misc_feature (1)..(147): tr|A0A4V2G701|A0A4V2G701_9ACTN 6-pyruvoyltetrahydropter in/6-carboxytetrahydropterin synthase OS=Krasilnikovia cinnamomea OX=349313 GN=EV385_2475 PE=4 SV=1
MASIRQMFELATPVFFDAAHQLPDSVDLVSKKCARLHGHTYHALIRVEVIDNSRHGMTIDFKELKDAIGGRLDHRYVNEVFDDHYGANAKEATAENIALFIVELISGVLHTRQVPCTSITVALAEGYKGPDNTVYVTVRGNDGNDQV

SEQ ID NO: 21518 - protein, 132 aa, Krasilnikovia cinnamomea
  misc_feature (1)..(132): tr|A0A4Q7ZCC8|A0A4Q7ZCC8_9ACTN 6-pyruvoyl-tetrahydropte rin synthase OS=Krasilnikovia cinnamomea OX=349313 GN=E V385_0020 PE=4 SV=1
MFSVTVRDHIMVAHSFTGEVFGPAQRLHGATFVVDATFRRAELDADNIVVDIGRALEQLHAICGALSYRNLDDEPDFAGVNTSTEFLAKVIADRLADQARAGGLGAGARDLTGIAVTLHESHIAWASYERTL

SEQ ID NO: 21519 - protein, 120 aa, Krasilnikoviella flava
  misc_feature (1)..(120): tr|A0A1T5KS33|A0A1T5KS33_9MICO 6-carboxy-5,6,7,8-tetrah ydropterin synthase OS=Krasilnikoviella flava OX=526729 GN=SAMN04324258_2317 PE=3 SV=1
MELFKEFTFEAAHRLPNVPPGHKCSRLHGHSYKVQVEVTGPVDTDLGWVIDFGDIKAAWGDLDDALDHRYLNEVPGLENPTSELLAVWIWDRLSAALPNLLSAVTVKETCTSGSTYRGTA

SEQ ID NO: 21520 - protein, 121 aa, Kribbella sp.
  misc_feature (1)..(121): tr|A0A4R0IS14|A0A4R0IS14_9ACTN 6-carboxy-5,6,7,8-tetrah ydropterin synthase OS=Kribbella sp. YM55 OX=1572660 GN =queD PE=3 SV=1
MEIYREFTFEAAHRLPTVPAGHKCGRLHGHSYRVEVHVSGEVDASTGWLIDFGDIKKAFRPLEDQLDHHYLNDVEGLDNPTSENLAQWIWARLVGVLPLSEIHVRETCTSGCVYRGREDAR

SEQ ID NO: 21521 - protein, 122 aa, Kribbella sp.
  misc_feature (1)..(122): tr|A0A4R7ZM92|A0A4R7ZM92_9ACTN 6-carboxy-5,6,7,8-tetrah ydropterin synthase OS=Kribbella sp. VKM Ac-2570 OX=251 2221 GN=EV650_5566 PE=3 SV=1
MTYTAEIYREFTFEAAHLLPNVPTGHKCGRLHGHSYRVEVHLVGSVGDDTGWVQDFGDLKAAFKPLEAQLDHNFLNEVEGLKNPTSEVLAKWIWDRLVTELPNLSEIRVRETCTSGCVYRGA

SEQ ID NO: 21522 - protein, 137 aa, Kriegella aquimaris
  misc_feature (1)..(137): tr|A0A1G9WIH7|A0A1G9WIH7_9FLAO 6-carboxy-5,6,7,8-tetrah ydropterin synthase OS=Kriegella aquimaris OX=192904 GN =SAMN04488514_115125 PE=3 SV=1
MGMKVKVSRKAHFNAAHRLYSPEWDNAKNAEVFGKCSNPNFHGHNYELIVSVSGEIDEQTGFVMDMKILKELIKDKVEDALDHKNLNVEVPEFKEVNPTAENIAVVIWNKLRPHIASNKELEVVLYETPRNFVTYAG

SEQ ID NO: 21523 - protein, 149 aa, Kriegella aquimaris
  misc_feature (1)..(149): tr|A0A1G9LMU3|A0A1G9LMU3_9FLAO 6-carboxy-5,6,7,8-tetrah ydropterin synthase OS=Kriegella aquimaris OX=192904 GN =SAMN04488514_102120 PE=3 SV=1
MSKIRITKQFTFETGHALYGYDGKCKNVHGHSYKLSVTVIGKPITDPEAVKLGMVIDFGDLKTIVKEEVINPFDHATVFNKNTPHKELAQELIDRGHKVILADYQPTSENMVIDFAAKIRARIPAGLKLHSLRLRETETAYAEWFAEDN

SEQ ID NO: 21524 - protein, 161 aa, Kroppenstedtia eburnea; identical to SEQ ID NO: 19729
  misc_feature (1)..(161): tr|A0A1N7Q3K1|A0A1N7Q3K1_9BACL PreQ(0) biosynthesis pro tein QueD OS=Kroppenstedtia eburnea OX=714067 GN=SAMN05 421790_11727 PE=4 SV=1

SEQ ID NO: 21525 - protein, 136 aa, Ktedonobacter racemifer
  misc_feature (1)..(136): tr|D6TG00|D6TG00_9CHLR 6-carboxy-5,6,7,8-tetrahydropter in synthase OS=Ktedonobacter racemifer DSM 44963 OX=485 913 GN=Krac_12260 PE=3 SV=1
MVYLTRRVTFSAAHRLWSEYLSEDENYNVYDKCANPHGHGHNYILEVTVRGEPEPTTGMVLNLTDMKRIINELVVDGVDHKHLNYDVAWLEGVIPTAEMLVIKFWERLAPAFEGRLYEITLHETENNYASYRGLEA

SEQ ID NO: 21526 - protein, 166 aa, Ktedonobacter racemifer
  misc_feature (1)..(166): tr|D6TII7|D6TII7_9CHLR Uncharacterized protein OS=Ktedo nobacter racemifer DSM 44963 OX=485913 GN=Krac_10788 PE =4 SV=1
MSGERIARKVKIEGGYLNFSSAHFITYGGKCERLHGHNYGVLVEVEGTLGEDMLVFDFTVLKRLTKEICKRLDHHFLLPLHNPHLQLASTENEWEVHFVGKRYIFPRADVAELPIDNSTAERLAEYICNELCHELQAFNTSNLSSIMVGVEEAPTQMAYYKLSLNE

SEQ ID NO: 21527 - protein, 130 aa, Ktedonobacter sp.
  misc_feature (1)..(130): tr|A0A1Q6YXQ9|A0A1Q6YXQ9_9CHLR 6-carboxy-5,6,7,8-tetrah ydropterin synthase OS=Ktedonobacter sp. 13_2_20CM_53_1 1 OX=1805233 GN=AUH05_06740 PE=3 SV=1
MRYAIVTKIFHFESAHHLPGHRGKCAHLHGHSYRLEVTIRGPIKDAPGESDHGMVMDFDDLSRTVKNSVIERLDHRDLNEVTGLQTTAENLAHWIWNELMNQGLLQALLHRIRLWETESGYVEITQAERD

SEQ ID NO: 21528 - protein, 130 aa, Ktedonobacter sp.
  misc_feature (1)..(130): tr|A0A1Q7UR53|A0A1Q7UR53_9CHLR 6-carboxy-5,6,7,8-tetrah ydropterin synthase OS=Ktedonobacter sp. 13_1_20CM_4_53 _11 OX=1805225 GN=AUG82_04875 PE=3 SV=1
MRYAIVTKIFHFESAHHLPGHRGKCAHLHGHSYRLEVTIRGPIKDAPGESDHGMVMDFDDLSRTVKNSVIERLDHRDLNEVTGLQTTAENLAHWIWNELMNHGLLQALLHRIRLWETESGYVEITQAERD

SEQ ID NO: 21529 - protein, 167 aa, Ktedonobacterales bacterium
  misc_feature (1)..(167): tr|A0A4P6JT39|A0A4P6JT39_9CHLR 6-pyruvoyl tetrahydropte rin synthase family protein OS=Ktedonobacterales bacter ium SCAWS-G2 OX=2509675 GN=EPA93_19420 PE=4 SV=1
MSSKQVLRKVKIEGGYLDFNAAHFITYGGKCERLHGHNYCVMVEIEGELGEDKLVFDFTVLKRITKDICRTLNHRFLLPLHNTHLELIPTSREWEIRFRDKRYIFPRADVVELPIDNSSAERLAEYICHELSTILSREYDISRLHTIMVGVSEAPTQMAYYQRSLLG

SEQ ID NO: 21530 - protein, 153 aa, Ktedonobacterales bacterium
  misc_feature (1)..(153): tr|A0A4P6K5D4|A0A4P6K5D4_9CHLR 6-carboxytetrahydropteri n synthase OS=Ktedonobacterales bacterium SCAWS-G2 OX=2 509675 GN=EPA93_47270 PE=4 SV=1
MPRYAIITRLFPFEACHHLPGHQGKCRRPHGHSYQLEVSLRGPIKETQGLSDEGMVLDFAELKALVNRTILEQLDPRVPRGPEAGMIEQGGMDHNDLNVLTGIRTTAENLVHWIWEALVAGGVPEEFLYRIRLWETEKGYVEITQAERGQEGR

SEQ ID NO: 21531 - protein, 121 aa, Kuenenia stuttgartiensis
  misc_feature (1)..(121): tr|Q1Q1D3|Q1Q1D3_KUEST 6-carboxy-5,6,7,8-tetrahydropter in synthase OS=Kuenenia stuttgartiensis OX=174633 GN=KS MBR1_1056 PE=3 SV=1
MFELIIDTDFAAAHNLRGYKGQCENLHGHNWKVQVVLKSEKLDNLGMVIDFREAKKLIGDVTKKFDHTYLNDMEHFKAENPTTENISRMIYRELTSAMPSGIKVEKVTTWESDRCGATYFE

SEQ ID NO: 21532 - protein, 143 aa, Kurthia sp.
  misc_feature (1)..(143): tr|A0A433RYI8|A0A433RYI8_9BACL 6-carboxy-5,6,7,8-tetrah ydropterin synthase OS=Kurthia sp. 3B1D OX=1562256 GN=Q I30_01155 PE=3 SV=1
MLMQYYPHPQHDYSYELNKDMNFSAAHFIPDEQAGKCANMHGHTYVVNITIAGDTLDDTGFLVNFQKLKELVHKRYDHRILNDLEEFSGVNFPTTEVIAQVIWQRIENYLKTVPNQPSCLQILVRETPTSYVLYRPKKDENHG

SEQ ID NO: 21533 - protein, 132 aa, Kushneria avicenniae
  misc_feature (1)..(132): tr|A0A1I1GIG0|A0A1I1GIG0_9GAMM 6-pyruvoyl-tetrahydropte rin synthase OS=Kushneria avicenniae OX=402385 GN=SAMN0 5421848_0591 PE=4 SV=1
MYSLTVRDHVMIAHSFNGQIFGPAQKLHGATYIVDVTFKRPELDQDDLIVDIGLASQTLSDVLSDINMQNLDEIEEFKGRNTTTEFMARVIFDRMAASIEADQLGDTGKGLTALSVTLHESHIAWASYEGSL

SEQ ID NO: 21534 - protein, 282 aa, Kushneria avicenniae
  misc_feature (1)..(282): tr|A0A1I1FQD7|A0A1I1FQD7_9GAMM 6-pyruvoyl tetrahydropte rin synthase OS=Kushneria avicenniae OX=402385 GN=SAMN0 5421848_0232 PE=4 SV=1
MMLFVNALSALDVSIWCPQRGLIGASYHVDVELEGPLGEDGMLFDFGEVKPWIKSRIDNSVDHTLLVPAKAHDISVNECPEGLRLQTRHPWSMELRAPRQAYTLLPWQQITPERLGDYLSTELSRRPPAQVEKIRVTLREESHEIGGYTYSHGLRRHKGNCQRIAHGHRSRLAIWHNGQRSEVLEAQWSQRLEDIYLIDQADLISEENDICHVGYESAQGRFSIRLPRERAEILPTPTTVEQIANWMAGEIASLHGGSVRVQAFEGIDKGAVATAWGDRMPT

SEQ ID NO: 21535 - protein, 282 aa, Kushneria indalinina
  misc_feature (1)..(282): tr|A0A3D9DZE6|A0A3D9DZE6_9GAMM 6-pyruvoyl tetrahydropte rin synthase-like protein OS=Kushneria indalinina DSM 1 4324 OX=1122140 GN=C8D72_0821 PE=4 SV=1
MILFVNALSALDVSIWCPERGLIGASYHIDVELEGPLGEDGMLFDFGDVKPWIKSRIDATVDHTLLVPTKAHDIKVDECSEGLRLQTRHPWPMELRAPRQAYTLLPWQRITPERLGDYLSAELSRRPPAQVEKIRVSLREEPHASGGYTYSHGLRRHKGNCQRIAHGHRSRLAIWHNGQRSEALEAQWSHRLEDSYLIDRADLIDADNEIYHVGYESAQGRFSIRLPQERAEILPTPTTVEQIAHWMAKEIASLHGGSVRVQAFEGIDKGAVATAHGVREPA

SEQ ID NO: 21536 - protein, 132 aa, Kushneria indalinina
  misc_feature (1)..(132): tr|A0A3D9DYG6|A0A3D9DYG6_9GAMM 6-pyruvoyl-tetrahydropte rin synthase OS=Kushneria indalinina DSM 14324 OX=11221 40 GN=C8D72_0497 PE=4 SV=1
MYSLTVRDHVMIAHSFNGQIFGPAQKLHGATYIVDVTFKRPDLDQDDLIVDIGLASQTLSEVLSDINMQNLDEIEEFKGRNTTTEFMARVIFDRMAASIEADQLGETGKGLTALSVTLHESHIACASYEGSL

SEQ ID NO: 21537 - protein, 282 aa, Kushneria konosiri
  misc_feature (1)..(282): tr|A0A2Z2HEL5|A0A2Z2HEL5_9GAMM 6-pyruvoyl tetrahydropte rin synthase-related protein OS=Kushneria konosiri OX=6 98828 GN=B9G99_14345 PE=4 SV=1
MILFVNALSALDVSIWCPQRGLVGASFHIDVELEGQLGEDGMLFDFGEVKPWIKSRIDASVDHTLLVPTKAHDITVSECVEGLRLQTRHPWPMELRAPRQAYTLLPWQQITPERLGEYLSAELSRRPPAQVEKIRVTLREEAHDAGGYTYSHGLRRHQGNCQRIAHGHRSRLAIWHNGQRSETLETQWSQRLEDIYLIDQADLIGTDNETCHVGYESAQGRFSIRLPRERTEILPTPTTVEQIANWMAQEIASLHGGSVRVQAFEGIDKGAVATAHGARDSA

SEQ ID NO: 21538 - protein, 132 aa, Kushneria konosiri
  misc_feature (1)..(132): tr|A0A2Z2H8D4|A0A2Z2H8D4_9GAMM Uncharacterized protein OS=Kushneria konosiri OX=698828 GN=B9G99_12735 PE=4 SV= 1
MYSLTVRDHVMIAHSFNGQIFGPAQKLHGATYIVDVTFKRPDLDQDDLIVDIGLASQTLSEVLSDINMQNLDEVEEFKGRNTTTEFMARVIFDRMAASIEADQLGETGKGLTAMSVTLHESHIAWASYEGSL

SEQ ID NO: 21539 - protein, 282 aa, Kushneria marisflavi
  misc_feature (1)..(282): tr|A0A240UL00|A0A240UL00_9GAMM 6-pyruvoyl tetrahydropte rin synthase-related protein OS=Kushneria marisflavi OX =157779 GN=B9H00_00645 PE=4 SV=1
MILFVNALSALDVSIWCPQRGLVGASYHIDVELEGQLGDDGMLFDFGEVKPWIKSRIDAGVDHTLLVPTKAHDISVSECSEGLRLQTRHPWPMELRAPRQAYTLLPWQQITPERLGDYLSAELSRRPPAQVEKIRVTLREESHDAGGYTYSHGLRRHSGNCQRIAHGHRSRLAIWHNGQRSETLETQWSQRLEDIYLIDQADLIGTDNETCHVGYESAQGRFSIRLPRDRAEILPTPTTVEQIANWMAQEIASLHGGSVRVQAFEGIDKGAVATAQGARDSA

SEQ ID NO: 21540 - protein, 132 aa, Kushneria marisflavi
  misc_feature (1)..(132): tr|A0A240ULZ0|A0A240ULZ0_9GAMM Uncharacterized protein OS=Kushneria marisflavi OX=157779 GN=B9H00_02260 PE=4 S V=1
MYSLTVRDHVMIAHSFNGQIFGPAQKLHGATYIVDVTFKRPDLDQDDLIVDIGLASQTLSDVLSDINMQNLDEIEEFKGRNTTTEFMARVIFDRMAASIEADQLGETGKGLTALSVTLHESHIAWASYEGSL

SEQ ID NO: 21541 - protein, 132 aa, Kushneria phyllosphaerae
  misc_feature (1)..(132): tr|A0A2R8CKS3|A0A2R8CKS3_9GAMM Uncharacterized protein OS=Kushneria phyllosphaerae OX=2100822 GN=KSP9073_01484 PE=4 SV=1
MYSLTVRDHVMIAHSFNGQIFGPAQKLHGATYIVDVTFKRPDLDQDDLIVDIGLASQTLSDVLSDINMQNLDEIEEFKGRNTTTEFMARVIFDRMAASIEADQLGETGKGLTALNVTLHESHIAWASYEGTL

SEQ ID NO: 21542 - protein, 282 aa, Kushneria phyllosphaerae
  misc_feature (1)..(282): tr|A0A2R8CP87|A0A2R8CP87_9GAMM Uncharacterized protein OS=Kushneria phyllosphaerae OX=2100822 GN=KSP9073_02724 PE=4 SV=1
MILFVNALSALDVSIWCPQRGLVGASYHIDVELEGSLGEDGMLFDFGDVKPWIKSRIDSTMDHTLLVPTKAHDITVIECNEGLRLQTRHPWPMELRAPRQAYTLLPWQQITPERLGDHLSAELSRRPPAQVEKIRVTLREEPHEAGGYTYSHGLRRHKGNCQRIAHGHRSRLAIWHNGQRSEALETQWSQRLEDIYLIDRADLMDTDNDMYHVGYESAQGRFAIRLPQERAEILPTPTTVEQIAHWMAKEIASLHGGSVRVQAFEGIDKGAVATAHGARDPA

SEQ ID NO: 21543 - protein, 132 aa, Kushneria sinocarnis
  misc_feature (1)..(132): tr|A0A420WV58|A0A420WV58_9GAMM 6-pyruvoyl-tetrahydropte rin synthase OS=Kushneria sinocarnis OX=595502 GN=C7446 _2128 PE=4 SV=1
MFSLTIRDHMMIAHSFHGEIFGPAQRLHGATYVVDVTFKRPELDQDDLIVDIALAGQVLGEVLAEFNMRNLDEIDAFRGRNTTTEFMASVVFKRMSQAIGDGRLGETGRGLTTLSVTLHESHLAWASYEGAL

SEQ ID NO: 21544 - protein, 278 aa, Kushneria sinocarnis
  misc_feature (1)..(278): tr|A0A420WYR9|A0A420WYR9_9GAMM 6-pyruvoyl-tetrahydropte rin synthase OS=Kushneria sinocarnis OX=595502 GN=C7446 _1224 PE=4 SV=1
MTLFVNDLTNLDVSLLCPQRGMMGASWQVNLTLDGELGDDGMLFDFGEVKPWVKSRIDSESDHTLLVPSRADWVSVTECAEGLCVRTSKPWGMEIRAPRQAFTLLPWDTITLERLNERLSLELMKRPPARVSDIRVELDEEWIDGAAFTYSHGLRRHAGNCQRIAHGHRSRLLVWRNGQLDEPLAEAWANRLQHIYLADRNDRMSTASADECAFGYEAPQGRFRIQLPAERVMTLPTTTTVELIARWLAETIAREAGGHIRVQAFEGIGKGAVAEAHG

SEQ ID NO: 21545 - protein, 278 aa, Kushneria sp.
  misc_feature (1)..(278): tr|A0A1S1P050|A0A1S1P050_9GAMM 6-pyruvoyl tetrahydropte rin synthase-related protein OS=Kushneria sp. YCWA18 OX =657387 GN=BH688_03980 PE=4 SV=1
MTLFVNDLTNLDVSLLCPQRGLVGASWQVNLELEGELGEDGMLFDFGEVKPWAKSRLDGEVDHTLLVPAQADWISVTECAEGLCVRTSSPWEMEIRAPRQAFTLLPWTTVTPEQLEQRLSQDLMKRPPARVSDIRVTLDEEWIEGAAYTYSHGLRRHAGNCQRIAHGHRSRLFVWRNGHLDEPLAEAWANRLQHIYLADQHDQVATADNERCAFAYESPQGRFRIQLPARRVMMLPSPTTVELIARWLAEVIAREAGGHVRVQAFEGIGKGAMAEARH

SEQ ID NO: 21546 - protein, 132 aa, Kushneria sp.
  misc_feature (1)..(132): tr|A0A1S1NSD4|A0A1S1NSD4_9GAMM Uncharacterized protein OS=Kushneria sp. YCWA18 OX=657387 GN=BH688_05770 PE=4 S V=1
MFSLTIRDHMMIAHSFHGEIFGPAQRLHGATYVVDVTFKRPELDQDDLIVDIAQAGQVLSEVLGEFNMRNLDEIDAFRGRNTTTEFMASIIFKRLARAIGEGQLGETGRGLTAMSVTLHESHLAWASYEGAL

SEQ ID NO: 21547 - protein, 121 aa, Kutzneria albida
  misc_feature (1)..(121): tr|W5WGZ3|W5WGZ3_9PSEU 6-carboxy-5,6,7,8-tetrahydropter in synthase OS=Kutzneria albida DSM 43870 OX=1449976 GN =KALB_4070 PE=3 SV=1
MAYRISKEFHFSASHRLDGLPQEHPCGRLHGHNYVVELELSAAADGLDGVGFVRDYGDLAPFRRWLDEEVDHRHLNDLLADRNPSAENLARWLYERWLPRFPELSSVRVSETAKTWAEYRP

SEQ ID NO: 21548 - protein, 132 aa, Kutzneria buriramensis
  misc_feature (1)..(132): tr|A0A3E0HDJ3|A0A3E0HDJ3_9PSEU 6-pyruvoyl-tetrahydropte rin synthase OS=Kutzneria buriramensis OX=1045776 GN=BC F44_110376 PE=4 SV=1
MFSITVRDHIMVAHSFRGEVFGPAQRLHGATFVVDATFRRTELDDDNIVVDIGLASQQLSELLGELNYRNLDEEPAFAGVNTSTEFLAKVIADRLADRVHAGALGPSASGLSGISVALHESHNAWANYERSL

SEQ ID NO: 21549 - protein, 120 aa, Kutzneria buriramensis
  misc_feature (1)..(120): tr|A0A3E0HK69|A0A3E0HK69_9PSEU 6-carboxy-5,6,7,8-tetrah ydropterin synthase OS=Kutzneria buriramensis OX=104577 6 GN=BCF44_10627 PE=3 SV=1
MTFRITKKFEFSASHQLAGLAPEHQCARMHGHNYVIELELGAEDAALSPVGFVRDYGELSTIKAWIDKQLDHRHLNDVMDNNPTAENMAAWVYRTWSMEFPELTCVRVSETPKTWAEYRP

SEQ ID NO: 21550 - protein, 132 aa, Kutzneria sp.
  misc_feature (1)..(132): tr|W7SZL7|W7SZL7_9PSEU 6-pyruvoyl tetrahydropterin synt hase OS=Kutzneria sp. 744 OX=345341 GN=KUTG_03510 PE=4 SV=1
MFSITVRDHIMVAHSFKGEVFGPAQRLHGATFVVDATFKRAELDDDNIVVDIGLAGQQLGELLGELNYRNLDEEPAFAGINTSTEYLAKVIADRLADRVKAGALGPSASGLSGIAVALHESHNAWASYERSL

SEQ ID NO: 21551 - protein, 151 aa, Kyrpidia spormannii
  misc_feature (1)..(151): tr|A0A2K8N5V6|A0A2K8N5V6_9BACL 6-carboxytetrahydropteri n synthase QueD OS=Kyrpidia spormannii OX=2055160 GN=qu eD PE=4 SV=1
MEREVGIVVAQNPLRYRALPVSVVKQFTFDAAHRLEAYEGKCAQLHGHTYRLEVEIKGHPDPRGLVIDFNEIKALVERVVLERFDHRYLNDEVPFNTTAENLVVFLYEELAKALRQTPLATDVNLERVRLWETPTSYAEVQREDIIRRETE

SEQ ID NO: 21552 - protein, 144 aa, Kyrpidia tusciae
  misc_feature (1)..(144): tr|D5WTQ7|D5WTQ7_KYRT2 6-carboxy-5,6,7,8-tetrahydropter in synthase OS=Kyrpidia tusciae (strain DSM 2912 / NBRC 15312 / T2) OX=562970 GN=Btus_0459 PE=3 SV=1
MVAQNPLRYRALPVSVVKQFTFDAAHRLEAYEGKCAQLHGHTYRLEVEIKGHPDPRGLVIDFNEIKALVERVVLERFDHRYLNDEVPFNTTAENLVVFLYEELAKALRQTPRATDVNLERVRLWETPTSYAEVQREDIIRRETE

SEQ ID NO: 21553 - protein, 132 aa, Labedaea rhizosphaerae
  misc_feature (1)..(132): tr|A0A4V3CXP0|A0A4V3CXP0_9PSEU 6-pyruvoyl-tetrahydropte rin synthase OS=Labedaea rhizosphaerae OX=598644 GN=EV1 86_10910 PE=4 SV=1
MFSITVRDHVMIAHSFRGDVFGPAQRLHGATYVVDAEFHRAELDADNVVVDIGLATDQLSAVLADLNYRNLDEEPAFSGINTTTEYLAKVIADRLADRIHGGALGESARGIAELVVTLKESHVASATYRRTL

SEQ ID NO: 21554 - protein, 148 aa, Labilibaculum antarcticum
  misc_feature (1)..(148): tr|A0A1Y1CIG3|A0A1Y1CIG3_9BACT 6-carboxy-5,6,7,8-tetrah ydropterin synthase OS=Labilibaculum antarcticum OX=171 7717 GN=ALGA_1773 PE=3 SV=1
MTKVRLTKEFCFEMAHALWNYDGLCKNIHGHSYILFVTVIGEPITDANNSKLGMVMDFGDLKKIVSEEVVDKLDHSLVLSKATPNLEKLNIEQMFDRYFITDYQPTCENMIVDFAEKIGRRLPVDVKLHSLKLHETATSFAEWYAEDN

SEQ ID NO: 21555 - protein, 149 aa, Labilibaculum filiforme
  misc_feature (1)..(149): tr|A0A2N3HZN5|A0A2N3HZN5_9BACT 6-carboxy-5,6,7,8-tetrah ydropterin synthase OS=Labilibaculum filiforme OX=19405 26 GN=BZG02_09125 PE=3 SV=1
MAKVRLTKEFRFEMAHALWNYDGLCKNIHGHSYILFVTVIGEPITDTNNSKLGMVMDFGDLKKIVAEEIVDQLDHSVVLSKATPNLEQLNIEQMFDRFFITDYQPTCENMIVDFAEKIRIRLPLEVKLHSLKLHETATSFAEWYADDNE

SEQ ID NO: 21556 - protein, 148 aa, Labilibaculum manganireducens
  misc_feature (1)..(148): tr|A0A2N3HR11|A0A2N3HR11_9BACT 6-carboxy-5,6,7,8-tetrah ydropterin synthase OS=Labilibaculum manganireducens OX =1940525 GN=BZG01_20940 PE=3 SV=1
MAKVRLTKEFHFEMAHALWNYDGLCKNIHGHSYILFVTVIGEPITDVNSSKLGMVMDFGDLKKIVNEEIVDQLDHSVVLSKATPNLEQLDIEQMFERFFITDYQPTCENMIVDFAEKIKMRLPLDVKLHSLKLHETATSFAEWYAEDN

SEQ ID NO: 21557 - protein, 120 aa, Labilithrix luteola
  misc_feature (1)..(120): tr|A0A0K1PU51|A0A0K1PU51_9DELT 6-carboxy-5,6,7,8-tetrah ydropterin synthase OS=Labilithrix luteola OX=1391654 G N=AKJ09_03724 PE=3 SV=1
MNVRLVKEFRFEAAHRLPLVPEGHKCRRLHGHSFKIELTVAGPVDPKTGWFIDYDIIHDIWQPIWNKLDHNYLNEIPGLENPTSEILAKWIWDQMKPTLPSLTQVTVFETCDARCEYTGD

SEQ ID NO: 21558 - protein, 132 aa, Labilithrix luteola
  misc_feature (1)..(132): tr|A0A0K1PRS6|A0A0K1PRS6_9DELT PTPS-like type 4 OS=Labi lithrix luteola OX=1391654 GN=AKJ09_02760 PE=4 SV=1
MFSVGVSDHVMIAHSFADPTFGPAQKLHGATYGVEVEIRAPALNPHHVVMDIGALRTLLREVLNGLDYSCLDDHPAFPGRTSTTERVAEFVANELVKACASLPADARPVGKASMRVMLRESPVAFAAFEREM

SEQ ID NO: 21559 - protein, 132 aa, Labrenzia aggregata
  misc_feature (1)..(132): tr|A0A0M6Y7V2|A0A0M6Y7V2_9RHOB Queuosine biosynthesis p rotein QueD OS=Labrenzia aggregata OX=187304 GN=LAL4801 _03787 PE=4 SV=1
MFAVEVRDHVMIAHSFKGELFGPAQALHGATFVIDAAFLADSLDANGVVIDIGRAHDALKEVLQPLNYKNLDEVPEFAGINTTTEFLTKHIHDHLAKAARADKLGRPGSELKAIRVTISESHVARAWYEAGI

SEQ ID NO: 21560 - protein, 127 aa, Labrenzia aggregata
  misc_feature (1)..(127): tr|A0A0M6Y7S6|A0A0M6Y7S6_9RHOB 6-carboxy-5,6,7,8-tetrah ydropterin synthase OS=Labrenzia aggregata OX=187304 GN =queD PE=3 SV=1
MFRITKEFHFSASHQILGLGEDHPCARLHGHNYVVEVELMSEELNGIGFVRDYRELSEFKRFIDDTLDHRHLNDVLGNDCVTAETMARYFYNWCRQRWPETSAVRVKETPKTCAEFRPLVYPGARAA

SEQ ID NO: 21561 - protein, 128 aa, Labrenzia alba
  misc_feature (1)..(128): tr|A0A0M6Z3R4|A0A0M6Z3R4_9RHOB 6-carboxy-5,6,7,8-tetrah ydropterin synthase OS=Labrenzia alba OX=311410 GN=queD PE=3 SV=1
MYRITKEFHFSASHQLKGLGDDHPCSRFHGHNYVVEVELASETLNSIGFVRDYNELKTLKAYIDETLDHRHLNDVLGDDCVTAERLAKHLFDWCWAEWPETVAVRIKETPKTCAEYRPLSQLGIEARP

SEQ ID NO: 21562 - protein, 132 aa, Labrenzia alba
  misc_feature (1)..(132): tr|A0A0M6YXN7|A0A0M6YXN7_9RHOB Queuosine biosynthesis p rotein QueD OS=Labrenzia alba OX=311410 GN=LP7551_03235 PE=4 SV=1
MFAVEVRDHVMIAHSFKGALFGPAQALHGATFVIDAAFLAETLDENGVVIDIGRAHEALKEVLEPLNYKNLDDVPEFAGKNTTTEFLTKHVHDHLAKAARENRLGRKGGELGAIRVTISESHVARAWYEDKI

SEQ ID NO: 21563 - protein, 132 aa, Labrenzia alexandrii
  misc_feature (1)..(132): tr|A0A0M7AH79|A0A0M7AH79_9RHOB Queuosine biosynthesis p rotein QueD OS=Labrenzia alexandrii OX=388408 GN=LAX511 2_03647 PE=4 SV=1
MFAVEVRDHVMIAHSFKGELFGPAQALHGATFVIDAAFLSEELDENGVVIDIGRAHEALKEVLAPLNYKNLDEVPEFAGINTTTEFLTKHIHDHLAEAARQDRLGRKGGELAAIRVTISESHVARAWYEAKI

SEQ ID NO: 21564 - protein, 132 aa, Labrenzia alexandrii
  misc_feature (1)..(132): tr|A0A5E8GXP4|A0A5E8GXP4_LABAD 6-pyruvoyl-tetrahydropte rin synthase OS=Labrenzia alexandrii (strain DSM 17067 / NCIMB 14079 / DFL-11) OX=244592 GN=SADFL11_2026 PE=4 SV=1
MFAVEVRDHVMIAHSFKGELFGPAQALHGATFVIDASFLSEDLDENGVVIDIGRAHEALKEVLAPLNYKNLDEVPEFAGINTTTEFLTKHIHGYLAEAARQDRLGRKGGELAAIRVTISESHVARAWHEAKI

SEQ ID NO: 21565 - protein, 132 aa, Labrenzia marina
  misc_feature (1)..(132): tr|A0A2S3V2T8|A0A2S3V2T8_9RHOB 6-pyruvoyl-tetrahydropte rin synthase OS=Labrenzia marina OX=281252 GN=CLV41_101 756 PE=4 SV=1
MYAVEVRDHVMIAHSFKGELFGPAQALHGATFVIDAAFLAETLDANGVVIDIGRAHDALKEVLQPLNYKNLDEVPAFAGINTTTEFLTRHIHDHLAKAARDNRLGRPGSELGAIRVTISESHVARAWYEAAI

SEQ ID NO: 21566 - protein, 128 aa, Labrenzia sp.
  misc_feature (1)..(128): tr|A0A222F818|A0A222F818_9RHOB 6-carboxy-5,6,7,8-tetrah ydropterin synthase OS=Labrenzia sp. VG12 OX=2021862 GN =queD PE=3 SV=1
MYRITKEFHFSASHQLKGLGDDHPCARFHGHNYVVEVELAAEELDAIGFVRDYNELKLLKTYIDDTLDHRHLNDVLGDDCVTAERIAKHLFDWCKAAWPETAAVRVKETPKTCAEYRPLVYLPVEARP

SEQ ID NO: 21567 - protein, 117 aa, Labrenzia sp.
  misc_feature (1)..(117): tr|A0A163TZ03|A0A163TZ03_9RHOB 6-carboxy-5,6,7,8-tetrah ydropterin synthase OS=Labrenzia sp. OB1 OX=1561204 GN= OA90_23350 PE=3 SV=1
MFRIRKEFHFSASHQLSHLPDDHQCAWLHGHNYIVVVELASETLNTEGFVRDYHDLKPLKTYIDATFDHRHLNDVLEVPSTAENMAKHFHDWCAARWPETSAVLVSETPKTWAEYRP

SEQ ID NO: 21568 - protein, 132 aa, Labrenzia suaedae
  misc_feature (1)..(132): tr|A0A1M7I044|A0A1M7I044_9RHOB 6-pyruvoyl-tetrahydropte rin synthase OS=Labrenzia suaedae OX=735517 GN=SAMN0544 4272_2385 PE=4 SV=1
MFAVEVRDHIMIAHSLPRPVFGPAQGMHGATFVVDAAFFTKDVDEDGLAVDIGAATEVLGEVLKPLNYQNLDEVPVFQGKVTTTEVIAKHIFDRLAEAVRDKKLGEGSHRICRLKVTLHESHAARGWYEADL

SEQ ID NO: 21569 - protein, 118 aa, Labrenzia suaedae
  misc_feature (1)..(118): tr|A0A1M7N3J6|A0A1M7N3J6_9RHOB 6-carboxy-5,6,7,8-tetrah ydropterin synthase OS=Labrenzia suaedae OX=735517 GN=S AMN05444272_3683 PE=3 SV=1
MFRIFKEFHFSASHQLHGLAEDHPCARLHGHNYVVEVELQSETLDSTGFVRDYRELAPFKAYVDDQLDHRHLNDVLGDDCVTAERMARHFYNWCKARWPEVSAVRVKETPKTCAEYRP

SEQ ID NO: 21570 - protein, 117 aa, Labrys neptuniae
  misc_feature (1)..(117): tr|A0A5C1WFX4|A0A5C1WFX4_9RHIZ 6-carboxy-5,6,7,8-tetrah ydropterin synthase OS=Labrys neptuniae OX=376174 GN=qu eD PE=3 SV=1
MKITQAFTFEAAHRLPNVPQTHRCHRMHGHSYRVELGLEGPVDPHTGFVVDFFDVEAAFGPLLQRLDHYCLNEIEGLENPTAENIAIWIWDRVKPLLPLVASVKVYETPQCWAEYEG

SEQ ID NO: 21571 - protein, 131 aa, Laceyella sacchari
  misc_feature (1)..(131): tr|A0A4R4AI03|A0A4R4AI03_LACSH 6-carboxy-5,6,7,8-tetrah ydropterin synthase OS=Laceyella sacchari OX=37482 GN=E DC32_10221 PE=3 SV=1
MRIMPGKYTLVKHFWISCAHRVPGAGKCDRLHGHNYKITFCVEGTQLDEQQMLIDFRQVKHAIEKKYDHNLLNEFPEFDPAQGGHAPTTEKVAEVFFLTIEELCEQKSNRPIVKWVEVEETNEAFARYERV

SEQ ID NO: 21572 - protein, 128 aa, Laceyella sacchari
  misc_feature (1)..(128): tr|A0A2I7SV46|A0A2I7SV46_LACSH 6-carboxy-5,6,7,8-tetrah ydropterin synthase OS=Laceyella sacchari OX=37482 GN=C 1X05_13715 PE=3 SV=1
MPGKYTLVKHFWISCAHRVPGAGKCDRLHGHNYKITFCVEGTQLDEQQMLIDFRQVKHAIEKKYDHHLLNEFPEFDPAQGGHAPTTEKVAEVFFLAIEELCEQKSNRPIVKWVEVEETNEAFARYERV

SEQ ID NO: 21573 - protein, 131 aa, Laceyella sediminis
  misc_feature (1)..(131): tr|A0A2T0YHU6|A0A2T0YHU6_9BACL 6-carboxy-5,6,7,8-tetrah ydropterin synthase OS=Laceyella sediminis OX=573074 GN =CLV36_10522 PE=3 SV=1
MRIMPGKYTLVKHFWISCAHRVPGAGKCDRLHGHNYKITFCVEGTQLDEQQMLIDFRQVKHAIEKKYDHHLLNEFPEFDPAQGGHAPTTEKVAEVFFLAIEELCEQKSNRPIVKWVEVEETNEAFARYERV

SEQ ID NO: 21574 - protein, 133 aa, Lachnobacterium bovis
  misc_feature (1)..(133): tr|A0A1H9UMG6|A0A1H9UMG6_9FIRM 6-carboxy-5,6,7,8-tetrah ydropterin synthase OS=Lachnobacterium bovis OX=140626 GN=SAMN02910429_02178 PE=3 SV=1
MYSVSTEGSFDAAHFLANYQGKCRNLHGHRWRVVIEVKSETLKEGMVIDFTDIKKDLKDMLENYDHSLIIEENTASEKLLEALKEDDYKINIVKFRPTAENFAYFFFTELKKKYNISKVKVYETPNNCATYEE

SEQ ID NO: 21575 - protein, 133 aa, Lachnobacterium bovis
  misc_feature (1)..(133): tr|A0A1H3LS64|A0A1H3LS64_9FIRM 6-carboxy-5,6,7,8-tetrah ydropterin synthase OS=Lachnobacterium bovis DSM 14045 OX=1122142 GN=SAMN02910414_02093 PE=3 SV=1
MYSVRTEGSFDAAHFLANYQGKCRNLHGHRWRVIIEVKSETLENGMVIDFTEIKKDLKDMLEQYDHSLIIEENTASEKLLEALNEDDYKINIVKFRPTAENFAHFFFSELKKKYNISKVKVYETPNNCAIYEE

SEQ ID NO: 21576 - protein, 158 aa, Lachnoclostridium sp.
  misc_feature (1)..(158): tr|A0A3D1FRB9|A0A3D1FRB9_9FIRM Rubredoxin OS=Lachnoclos tridium sp. OX=2028282 GN=DEQ64_18260 PE=4 SV=1
MRSITKLNIQYSHRFLNYEGEAQYLHGHTGLLTIEVDGDVDGRTGFVYPCNSIKRIAWDYLKNFDHALILQKEDPILPEILKVYEAQGIRNGAETNTMIGEPFDTALAKAYPECRLVVVEKVATCENLIEVFYSLLKDKLNIKKMTFASGDNCASAEF

SEQ ID NO: 21577 - protein, 151 aa, Lachnoclostridium sp.
  misc_feature (1)..(151): tr|A0A3B9K4F2|A0A3B9K4F2_9FIRM 6-carboxytetrahydropteri n synthase QueD OS=Lachnoclostridium sp. OX=2028282 GN= DCG70_00535 PE=4 SV=1
MYRIRNEQSFDSAHFLKDYIGKCHNLHGHRWRVVVEAAGERLSRETQTRGMLFDFGDMKAALKELCDALDHCFIYEEGSLRESTVKALREEDFRLVEVPFRPTAENFARYFFEEMRKKGFSMSRVEVYETPNNCAVYEETETGTDTGVFGE

SEQ ID NO: 21578 - protein, 135 aa, Lachnospira multipara
  misc_feature (1)..(135): tr|A0A1H5UE47|A0A1H5UE47_9FIRM 6-carboxy-5,6,7,8-tetrah ydropterin synthase OS=Lachnospira multipara OX=28051 G N=SAMN05216537_10737 PE=3 SV=1
MYSVTTKAEFDAAHFLAGYPGKCKNLHGHRWSIEATLKGEELDELGMLVDFTDIKRDLKEICDNFDHSLIMKKDSLKPATLEALMDEGFKINIMDFMPTAEGFAKFFFEELEKKNYPIVEIKVYETPKNYAIYTK

SEQ ID NO: 21579 - protein, 140 aa, Lachnospira pectinoschiza
  misc_feature (1)..(140): tr|A0A174G5E5|A0A174G5E5_9FIRM 6-carboxy-5,6,7,8-tetrah ydropterin synthase OS=Lachnospira pectinoschiza OX=280 52 GN=ERS852499_00011 PE=3 SV=1
MYTLKTEHSFDAAHFLYGYEGKCSNIHGHRWRVVAEVSSDELETTGQNRGMYVDFGDLKKDLKEIVDYLDHCLIIETGSLKETTLKALQDENFRIIQFAFRPTAENMAKYFYDKMIGRGYRVKQITVYETPNNAASYTQD

SEQ ID NO: 21580 - protein, 154 aa, Lachnospira pectinoschiza
  misc_feature (1)..(154): tr|A0A174MS35|A0A174MS35_9FIRM 6-pyruvoyl tetrahydropte rin synthase-related domain OS=Lachnospira pectinoschiz a OX=28052 GN=ERS852499_01989 PE=4 SV=1
MAVKLYREYRIKFYLNMRHYIIIDGKKGEIHPHTWEFALDIKFGRSSFVEFNIFEKGIANFLEKYQNKVLNDEEPFDSIMPTLENVTDYFSSEFYRIIHDIGGMMTRLEASETPTRSYIVNMAEQEGNAQINADTENIILSEVMDAVLDDLTEG

SEQ ID NO: 21581 - protein, 139 aa, Lachnospiraceae bacterium; identical to SEQ ID NO: 17474
  misc_feature (1)..(139): tr|R5Z0T1|R5Z0T1_9FIRM 6-carboxy-5,6,7,8-tetrahydropter in synthase OS=Lachnospiraceae bacterium CAG:25 OX=1262 984 GN=BN562_02042 PE=3 SV=1

SEQ ID NO: 21582 - protein, 187 aa, Lachnospiraceae bacterium
  misc_feature (1)..(187): tr|A0A350V7X3|A0A350V7X3_9FIRM Rubredoxin OS=Lachnospir aceae bacterium OX=1898203 GN=DCX82_02960 PE=4 SV=1
MRSITTLNLQYAHRFYGFKGEAQYLHGHTGTLTIEVEDSVNSGVNMVFPCNEIQKTAWGVLKNFDHALILREDDPLLPAILGVYEQQGIKDGAPNNQMKGPAFKTALATAYPECRLVVTKETMTVEGMIKIVYDLLKDKLNIAKLTFTSGDNAASEEFQTNNKIDRCPLCGIALDANGVCPKCGYRK

SEQ ID NO: 21583 - protein, 146 aa, Lachnotalea glycerini
  misc_feature (1)..(146): tr|A0A255IR36|A0A255IR36_9FIRM 6-carboxy-5,6,7,8-tetrah ydropterin synthase OS=Lachnotalea glycerini OX=1763509 GN=queD PE=3 SV=1
MYYLKSEQCFDSAHFLADYEGKCKNIHGHRWRVVVEVMSLVLQDEKQLKGMVVDFAKLKQDIKKEVDYLDHALLIEKNSLKITTLQALREEGFRIIELDFRPTAELFARYFYNKMVKKGYQMKRATIYETPNNCASYEEDSCLSIR

SEQ ID NO: 21584 - protein, 151 aa, Lacibacter cauensis
  misc_feature (1)..(151): tr|A0A562SQA3|A0A562SQA3_9BACT 6-pyruvoyltetrahydropter in/6-carboxytetrahydropterin synthase OS=Lacibacter cau ensis OX=510947 GN=IQ13_1514 PE=4 SV=1
MLLLTKIFDFETAHAIDGYNGLCKNIHGHSYELHVTVGSIVNENAFLPAPGFLLDFKDLKTIVQKAVVDLFDHKLVLSHNYIAQHPEVLEQENLVSWDAEPTAENLLLFIKWAIQDELPTDMKLVELRLYETKNSYATWKEEVEVYQGDIW

SEQ ID NO: 21585 - protein, 136 aa, Lacibacter cauensis
  misc_feature (1)..(136): tr|A0A562SFE3|A0A562SFE3_9BACT 6-pyruvoyltetrahydropter in/6-carboxytetrahydropterin synthase OS=Lacibacter cau ensis OX=510947 GN=IQ13_3869 PE=4 SV=1
MVYLTRLEHFNAAHKLYNPNWTPEKNEAMFGKCANENWHGHNYDLFVTIKGHVNEDTGFLFDVKKLSEIIKEHILEKLDHKNLNIDVDFMRGKMCSTENLAKAIWQQLAPHLPEEVKLHCIKLYETPRIYVEYFGE

SEQ ID NO: 21586 - protein, 137 aa, Lacibacter sp.
  misc_feature (1)..(137): tr|A0A4Q1CPY8|A0A4Q1CPY8_9BACT 6-carboxytetrahydropteri n synthase OS=Lacibacter sp. TTM-7 OX=2508719 GN=ESA94_ 07330 PE=4 SV=1
MQKKVSVFRHEHFNAAHRLYNPAWTDEKNDAVFGKCNNPSFHGHNYELVVKVTGVPDAATGYVMDLKMLSDLIHREVHDRFDHKNLNLDTEEFKNINPTAENIAIVIYELLRPHIDADKEMQIRLYETPRNFVEYPA

SEQ ID NO: 21587 - protein, 151 aa, Lacibacter sp.
  misc_feature (1)..(151): tr|A0A4Q1CHD3|A0A4Q1CHD3_9BACT 6-carboxytetrahydropteri n synthase OS=Lacibacter sp. TTM-7 OX=2508719 GN=ESA94_ 11745 PE=4 SV=1
MLLLTKIFDFETAHAIDGYNGMCRNIHGHSYELHVTVGSLVNENMFLPAPGFLLDFKDLKQIVQKAVVDLFDHKLVLSHNYIAQHPEVMDQENLVAWDAEPTAENLLLFIKWAIQDELPDDMKLVELRLYETKNSYATWKEEVEVYQGDIW

SEQ ID NO: 21588 - protein, 190 aa, Lacimicrobium alkaliphilum
  misc_feature (1)..(190): tr|A0A0U3AH35|A0A0U3AH35_9ALTE QueD like protein OS=Lac imicrobium alkaliphilum OX=1526571 GN=AT746_03115 PE=4 SV=1
MELTLILLMILIVIGVAAVKLNGETLAFPFKKRTNLFTPVERSFLDMLEKAIGDQYRVICRVKLSDVVALRQGTDKKTARSAMSRAGSRHLDFVLCDREDLSPVVAIDLVSPKGKEGYKGQRDWFVSSTLDAARIPHLRIKIKSGYSKEEIRNCIEAKLAPVRYKEPAKPLIQGTNKSQDKPGMRRPVTA

SEQ ID NO: 21589 - protein, 293 aa, Lacimicrobium alkaliphilum
  misc_feature (1)..(293): tr|A0A0U2ZHX2|A0A0U2ZHX2_9ALTE 6-pyruvoyl tetrahydropte rin synthase OS=Lacimicrobium alkaliphilum OX=1526571 G N=AT746_10105 PE=4 SV=1
MQLFVNDLTVMDFSYLCPERGMVGESWIVDVILDGGLNEESMVLDFAKVKKQLKRLIDDHVDHKLLIPAEHPYSQITHEQQSDQVWVDFMRSHGRSIHLYCPAEAYAFIYAAQISMDSVSSYLKEVIATHLPQNVEGLTLMLRCEEINEPYYHYTHGLKKHEGNCQRIAHGHRSRVKVFADGAPETDAQQYWARRWRDIYIGTREDLVSETSLHLSQLARAQDLNEHCLFSYESSQGLFELAIAESECDLIDTDSTVECLAQFMADELKALQPEKSFTVRAYEGVGKGAIASA

SEQ ID NO: 21590 - protein, 136 aa, Lacinutrix sp.
  misc_feature (1)..(136): tr|A0A4U0EX20|A0A4U0EX20_9FLAO 6-carboxy-5,6,7,8-tetrah ydropterin synthase OS=Lacinutrix sp. CAU 1491 OX=25653 67 GN=E5167_06740 PE=3 SV=1
MKVTVSRKAHFNAAHRLYRKDWSHEKNDEVFGKCNNPNFHGHNYELIVSVTGDIDQETGYVIDMKVLKDIIKEEVEDAFDHKNLNIEVPEFKDLNPTAENIVVVIYNKIKPKLKASFDLEITLYETPRNFVTYPGN

SEQ ID NO: 21591 - protein, 135 aa, Lacinutrix sp.
  misc_feature (1)..(135): tr|F6GE76|F6GE76_LACS5 6-carboxy-5,6,7,8-tetrahydropter in synthase OS=Lacinutrix sp. (strain 5H-3-7-4) OX=9835 44 GN=Lacal_1837 PE=3 SV=1
MKVTVSRRAHFNAAHRLYRKDWSETKNNAVFGKCNNPNYHGHNYELIASVTGNIDQETGYVIDMKVLKQIIKTEIEDAFDHKNLNLDVPEFKTLNPTAENIVVIIYNKIKAKLESHLDLEITLYETPRNFVTYSG

SEQ ID NO: 21592 - protein, 149 aa, Lacinutrix venerupis
  misc_feature (1)..(149): tr|A0A420ZGQ2|A0A420ZGQ2_9FLAO 6-carboxy-5,6,7,8-tetrah ydropterin synthase OS=Lacinutrix venerupis OX=1486034 GN=CLV86_1742 PE=3 SV=1
MGNIRITKLFTFETGHALYGYDGKCKNVHGHSYKLSVTVFGQPISDNTNVKFGMVIDFSDLKKIVKEEIVDVFDHATVFNKNTPHVDLARELQNRGHNVLLVDYQPTSEMMVIDFAKKIKKRLPENIQLHSLKLQETESSYAEWYASEN

SEQ ID NO: 21593 - protein, 135 aa, Lacinutrix venerupis
  misc_feature (1)..(135): tr|A0A420ZIB6|A0A420ZIB6_9FLAO 6-carboxy-5,6,7,8-tetrah ydropterin synthase OS=Lacinutrix venerupis OX=1486034 GN=CLV86_1664 PE=3 SV=1
MRVTVSRKAHFNAAHRLYRKDWSDEKNDLIFGKCNNPNYHGHNYDLIVSVTGEIDTETGYVIDLKLLKEIIESEVEIAFDHKNLNLDVPEFKALNPTAENIAIVIYNKIKPKLPSHLDLEITLYETPRNFVSYSG

SEQ ID NO: 21594 - protein, 121 aa, Lactobacillus acidophilus
  misc_feature (1)..(121): tr|A0A3A9YA85|A0A3A9YA85_LACAI 6-pyruvoyl tetrahydropte rin synthase OS=Lactobacillus acidophilus OX=1579 GN=D7 H66_09845 PE=4 SV=1
MVKIKKNYKITSFLNASFTINYKRETDHKRANTFEIVCFISTNEKFIPFSDFENAIEKVIKPLSNKYLNDLPQFESKFFSTEMLSEYLATEISKELKIIKSKLHRIEVSEDPIRTVCLEVK

SEQ ID NO: 21595 - protein, 121 aa, Lactobacillus acidophilus; identical to SEQ ID NO: 21594
  misc_feature (1)..(121): tr|Q5FMK3|Q5FMK3_LACAC Putative 6-pyruvoyl-tetrahydropt erin synthase OS=Lactobacillus acidophilus (strain ATCC 700396 / NCK56 / N2 / NCFM) OX=272621 GN=LBA0170 PE=4 SV=1

SEQ ID NO: 21596 - protein, 123 aa, Lactobacillus alimentarius
  misc_feature (1)..(123): tr|A0A2K9HPS5|A0A2K9HPS5_9LACO 6-pyruvoyl tetrahydropte rin synthase OS=Lactobacillus alimentarius DSM 20249 OX =1423720 GN=LA20249_10155 PE=4 SV=1
MNKYYHTYKIKYYVNASHAMRWKDGEGKQHNHTWEIICEIHSKGDHMIVFNDIEDEMKSIFNTFSGKFLNKLPYFKKVNPTTENVTVWLFNRLTPVLEKLDAELVRIEVGESPTRSYCIDIRH

SEQ ID NO: 21597 - protein, 121 aa, Lactobacillus amylovorus
  misc_feature (1)..(121): tr|E4SK51|E4SK51_LACAR Putative 6-pyruvoyl-tetrahydropt erin synthase OS=Lactobacillus amylovorus (strain GRL 1 112) OX=695560 GN=LA2_00990 PE=4 SV=1
MEKGRGSYKIISFLNAFTTFRMGNHIGSRNANTFEITCYIQTTKNFVTFSELEDAVNNVVRSLTDKDLNMLPKFANKDFSVEILTEYLAVMINNELFVNGNRLVKIEVAQSPTKIFCLDFE

SEQ ID NO: 21598 - protein, 124 aa, Lactobacillus apodemi
  misc_feature (1)..(124): tr|A0A0R1U5J5|A0A0R1U5J5_9LACO Uncharacterized protein OS=Lactobacillus apodemi DSM 16634 = JCM 16172 OX=14237 24 GN=FC32_GL001854 PE=4 SV=1
MIKKHHLKITSYLNAGHAIRWKDTTGKIHIHTWQIICMIGTLDALTFPQYKFTTIEKVLDEVLEPFSQSTLNHIPPFDQLNPTIENFTDYLFDRFNEALKKLDCQLLSLEVSESPTRTCVITAL

SEQ ID NO: 21599 - protein, 76 aa, Lactobacillus aquaticus
  misc_feature (1)..(76): tr|A0A0R2D4I0|A0A0R2D4I0_9LACO Uncharacterized protein OS=Lactobacillus aquaticus DSM 21051 OX=1423725 GN=FC19 _GL002160 PE=4 SV=1
MIFSDIEKALNGVFENISGGFLNTLEDFKERNPTVENVTLWLYRLITHALEQLDVQLTRLEVSESPTRTYCITISD

SEQ ID NO: 21600 - protein, 148 aa, Lactobacillus brevis
  misc_feature (1)..(148): tr|A0A3B8F0R0|A0A3B8F0R0_LACBR 6-pyruvoyl tetrahydropte rin synthase OS=Lactobacillus brevis OX=1580 GN=D8911_0 4525 PE=4 SV=1
MPKQRSYKIKSYVNASHAVRWKSGTGKKHNHTWEIVCELHVFEGMVSFFDIEKSLNKAIDALSGKYLNDLPEFKVINPTVENVTEYLFNQIDGILRQNNAVLLRIEVSDSPTRSYCIDITERQFPTKEAVLAQEDAAGKPATQADDHA

SEQ ID NO: 21601 - protein, 142 aa, Lactobacillus brevis
  misc_feature (1)..(142): tr|U2PK36|U2PK36_LACBR 6-pyruvoyl tetrahydropterin synt hase domain protein OS=Lactobacillus brevis ATCC 14869 = DSM 20054 OX=649758 GN=HMPREF0495_01153 PE=4 SV=1
MKQRSYKIKSYVNASHAVRWESGTGKKHNHTWEIVCELHVFEGMVSFFEIEKSLNKAINALSGQYLNDLPEFQVINPTVENVTEYLFNEIDSILRQNNAVLLRIEVSDSPTRSYCIDITERQFPTEAEVLPDQSASQDDIDA

SEQ ID NO: 21602 - protein, 123 aa, Lactobacillus capillatus
  misc_feature (1)..(123): tr|A0A0R1M9Y8|A0A0R1M9Y8_9LACO Uncharacterized protein OS=Lactobacillus capillatus DSM 19910 OX=1423731 GN=FC8 1_GL001589 PE=4 SV=1
MAQLNYSYRIKTFFNAGHAVRWEKGTGKRHSHTWEVVCELRSQSEQTVIFSDIEETLNSIFEKISGSFLNTLDEFKEVNPTVENITLWLYRLMTPVLEPLGVSLIRLEVSESPTRSYCITVSD

SEQ ID NO: 21603 - protein, 127 aa, Lactobacillus collinoides
  misc_feature (1)..(127): tr|A0A0R2B5D9|A0A0R2B5D9_LACCL 6-pyruvoyl-tetrahydropte rin synthase OS=Lactobacillus collinoides DSM 20515 = J CM 1123 OX=1423733 GN=FC82_GL000157 PE=4 SV=1
MPEEEQYHTYKIKSYVNASHAMRWKDGEGKEHNHTWEITCEIHSLNDHMIIFNDLENTIKDILNSFAGKFLNQLPYFKEINPTVENVTIWLFNLISPALREEQAKLIRIEVSESPTRAYCISVRDDE

SEQ ID NO: 21604 - protein, 127 aa, Lactobacillus collinoides; identical to SEQ ID NO: 21603
  misc_feature (1)..(127): tr|A0A166GPF7|A0A166GPF7_LACCL 6-pyruvoyl tetrahydropte rin synthase OS=Lactobacillus collinoides OX=33960 GN=T Y91_09800 PE=4 SV=1

SEQ ID NO: 21605 - protein, 56 aa, Lactobacillus concavus
  misc_feature (1)..(56): tr|A0A0R1VTI4|A0A0R1VTI4_9LACO Uncharacterized protein OS=Lactobacillus concavus DSM 17758 OX=1423735 GN=FC15_ GL001852 PE=4 SV=1
MNELPYFKTINPTVENVTEWLFDLITPKLEELSARLIRIEVSESPTRSYCISVEDD

SEQ ID NO: 21606 - protein, 122 aa, Lactobacillus crispatus
  misc_feature (1)..(122): tr|E3R437|E3R437_9LACO 6-pyruvoyl tetrahydropterin synt hase-related domain protein OS=Lactobacillus crispatus CTV-05 OX=440496 GN=LBKG_01062 PE=4 SV=1
MTTKYHTYIFTTYLNASHAIRWSKGIGQAHSHTYEIRYSFHINNGKLIRFNEIENKIAEIIKKFNNQFLNEVEPFTKVNPTLENLTDYLFNRFGEELNKLNCSLDEISVSESPMRTYQISIR

SEQ ID NO: 21607 - protein, 122 aa, Lactobacillus crispatus; identical to SEQ ID NO: 21606
  misc_feature (1)..(122): tr|D0DEI7|D0DEI7_9LACO 6-pyruvoyl tetrahydropterin synt hase-related domain protein OS=Lactobacillus crispatus MV-3A-US OX=575597 GN=HMPREF0508_00076 PE=4 SV=1

SEQ ID NO: 21608 - protein, 127 aa, Lactobacillus crustorum
  misc_feature (1)..(127): tr|A0A512GUP5|A0A512GUP5_9LACO 6-pyruvoyltetrahydropter in synthase OS=Lactobacillus crustorum OX=392416 GN=LCR 01_13180 PE=4 SV=1
MNIEGYQTYNTYKLTSYINASHAVRWEGGMGKEHMHTWAVVCEIHVNNDLMVPFNEIENQLKEVSSRVSGKFLNEVPPFDHVNPTLENLTTYFFQVINDLLRKNNAVLTRLEIGESPTRFYCIEMKH

SEQ ID NO: 21609 - protein, 98 aa, Lactobacillus crustorum
  misc_feature (1)..(98): tr|A0A1L7IE15|A0A1L7IE15_9LACO Uncharacterized protein OS=Lactobacillus crustorum OX=392416 GN=BI355_1475 PE=4 SV=1
MGKEHMHTWAVVCEIHVNNDLMVPFNEIENQLKEVSSRVSGKFLNEVPPFDHVNPTLENLTTYFFQVINDLLRKNNAVLTRLEIGESPTRFYCIEMKH

SEQ ID NO: 21610 - protein, 123 aa, Lactobacillus fabifermentans
  misc_feature (1)..(123): tr|W6TCP2|W6TCP2_9LACO 6-pyruvoyl-tetrahydropterin synt hase OS=Lactobacillus fabifermentans T30PCM01 OX=140052 0 GN=LFAB_05810 PE=4 SV=1
MPQVHTYKIISYINASHAVRWAGGTGKPHNHTWEVISEIQLDQEQLIPFNDIEALINSVFEPYTNQYLNEVPPFDQTNPTLENITKLVFKKLSAVMAANQSRLVRLEVGESPTRFYCISLKGD

SEQ ID NO: 21611 - protein, 89 aa, Lactobacillus fabifermentans
  misc_feature (1)..(89): tr|A0A0R2NHX4|A0A0R2NHX4_9LACO Uncharacterized protein OS=Lactobacillus fabifermentans DSM 21115 OX=1413187 GN =DY78_GL001248 PE=4 SV=1
MISEIQLDQEQLIPFNDIEALINSVFEPYTNQYLNEVPPFDQTNPTLENITKLVFKKLSAVMAANQSRLVRLEVGESPTRFYCISLKGD

SEQ ID NO: 21612 - protein, 103 aa, Lactobacillus farciminis
  misc_feature (1)..(103): tr|A0A4R5NHS6|A0A4R5NHS6_9LACO Uncharacterized protein OS=Lactobacillus farciminis OX=1612 GN=C5L30_001252 PE= 4 SV=1
MRWENGEGKQHNHTWEIVCEIHSKNDQMIVFNDIEKKLKEVCDTFEGKFLNKLPAFQYVNPTTENVAMWLFNLFTPRLEELNAELVRLEVGESPTRSYCKSSA

SEQ ID NO: 21613 - protein, 123 aa, Lactobacillus farciminis
  misc_feature (1)..(123): tr|A0A0H4LBN1|A0A0H4LBN1_9LACO 6-pyruvoyl tetrahydropte rin synthase OS=Lactobacillus farciminis OX=1612 GN=ABB 44_05960 PE=4 SV=1
MMRYQYHTYKIKYYVNASHAMRWENGEGQQHNHTWEIVCEIHSKNDQMIVFNDIEKKIKEVCDTFEGKFLNKLPAFQYVNPTTENVTMWLFNLFTPRLEELNAELVRLEVGESPTRSYCISLY

SEQ ID NO: 21614 - protein, 129 aa, Lactobacillus formosensis
  misc_feature (1)..(129): tr|A0A2P4R786|A0A2P4R786_9LACO 6-pyruvoyl tetrahydropte rin synthase OS=Lactobacillus formosensis OX=1617889 GN =C2R26_04780 PE=4 SV=1
MKLNIEGYQTYNTYKLTSYINASHAVRWEGGMGKEHMHTWAVVCEIHVNNDLMVPFNEIENQLKEVSSRVSGKFLNEVPPFDHVNPTLENLTTYFFQVINDLLRKNNAVLTRLEIGESPTRFYCIEMKH

SEQ ID NO: 21615 - protein, 73 aa, Lactobacillus futsaii
  misc_feature (1)..(73): tr|A0A5B7T114|A0A5B7T114_9LACO 6-pyruvoyl tetrahydropte rin synthase OS=Lactobacillus futsaii OX=938155 GN=FG05 1_01890 PE=4 SV=1
MCHIEKKLKEVCDTFEGKFLNKLPAFQYVNPTTENVTMWLFNLFTPRLEELNAELVRLEVGESPTRSYCISLY

SEQ ID NO: 21616 - protein, 142 aa, Lactobacillus hammesii
  misc_feature (1)..(142): tr|A0A0R1UJ44|A0A0R1UJ44_9LACO Uncharacterized protein OS=Lactobacillus hammesii DSM 16381 OX=1423753 GN=FD28_ GL001150 PE=4 SV=1
MQKQRSYKIKSYVNASHAVRWKSGTGKKHNHTWEIVCELHVFEGMVSFFDIEKSLNTAIDELSGKYLNDLPEFKVINPTVENVTEYLFNEIDGILRKNNAVLLRIEVSDSPTRSFCIDITERQFPTQAEVMADQAKQEDDHA

SEQ ID NO: 21617 - protein, 126 aa, Lactobacillus heilongjiangensis
  misc_feature (1)..(126): tr|A0A0K2LF17|A0A0K2LF17_9LACO 6-pyruvoyl tetrahydropte rin synthase OS=Lactobacillus heilongjiangensis OX=1074 467 GN=JP39_11150 PE=4 SV=1
MNIDGYETYSTYKLTSYINASHAVRWEGGMGKEHMHTWAVICEIHVNNNQMVPFNQIENELKEVSSRVSGKFLNEVPPFDHVNPTLENLTTYFFQVITELLRRNNAVLTRLEIGESPTRFYCITLK

SEQ ID NO: 21618 - protein, 110 aa, Lactobacillus hordei
  misc_feature (1)..(110): tr|A0A0R1MSV9|A0A0R1MSV9_9LACO 6-pyruvoyl-tetrahydropte rin synthase OS=Lactobacillus hordei DSM 19519 OX=14237 59 GN=FC92_GL001856 PE=4 SV=1
MRWENGTGEKHNHTWELICEIGINDEKMIIFNDIDKVIDGVTSYFSGKFLNDLPEFEDKNPSLENLTEILFKLFEAPLHEINASLIKLEVGESPTRFYAITSSLFFGEKQ

SEQ ID NO: 21619 - protein, 129 aa, Lactobacillus hordei
  misc_feature (1)..(129): tr|A0A3S6QPC4|A0A3S6QPC4_9LACO 6-pyruvoyl tetrahydropte rin synthase OS=Lactobacillus hordei OX=468911 GN=BSQ49 _04455 PE=4 SV=1
MSKLYRTYRIRSYVNASHAMRWENGTGEKHNHTWELICEIGINDEKMIIFNDIDKVIDGVTSYFSGKFLNDLPEFEDKNPSLENLTEILFKLFEAPLHEINASLIKLEVGESPTRFYAITSSLFFGEKQ

SEQ ID NO: 21620 - protein, 125 aa, Lactobacillus ingluviei
  misc_feature (1)..(125): tr|A0A0R2H3K6|A0A0R2H3K6_9LACO 6-pyruvoyl tetrahydropte rin synthase OS=Lactobacillus ingluviei OX=148604 GN=IV 41_GL000452 PE=4 SV=1
MKKMEKRYSYRLHFYLNASHAMRWNNQLGEEHPHTWELICQVARGSDEHFIRFNEIEEQIQTIIDPLQGQFLNLVPPFDQENPSLEQLGEYFFDQIDHQLATVHCFLTQLEIGESPTRFFLVKRG

SEQ ID NO: 21621 - protein, 125 aa, Lactobacillus ingluviei
  misc_feature (1)..(125): tr|A0A0R1U582|A0A0R1U582_9LACO 6-pyruvoyl tetrahydropte rin synthase OS=Lactobacillus ingluviei DSM 15946 OX=14 23760 GN=FC43_GL000343 PE=4 SV=1
MKKMEKRYSYRLHFYLNASHAMRWNNQMGEEHPHTWELICQVARGSDEHFIRFNEIEEQIQTIIDPLQGQFLNLVPPFDQENPSLEKLGEYFFDQIDHQLATVHCFLTQLEIGESPTRFFLVKRG

SEQ ID NO: 21622 - protein, 121 aa, Lactobacillus kalixensis
  misc_feature (1)..(121): tr|A0A0R1UI10|A0A0R1UI10_9LACO 6-pyruvoyl-tetrahydropte rin synthase OS=Lactobacillus kalixensis DSM 16043 OX=1 423763 GN=FC46_GL001750 PE=4 SV=1
MTKYHTYIFTTYLNASHAIRWIKGTGQAHPHTYEIRYSFHLNKDKLIQFNEIEEAIEKILKPFNNQFLNEVKPFDKTNPTLENLTNFLCDSFSEELEKANCSLDEISVSESPMRTYKITLN

SEQ ID NO: 21623 - protein, 113 aa, Lactobacillus kimchiensis
  misc_feature (1)..(113): tr|A0A0R2LJL6|A0A0R2LJL6_9LACO 6-pyruvoyl-tetrahydropte rin synthase OS=Lactobacillus kimchiensis OX=993692 GN= IV57_GL002107 PE=4 SV=1
MTSYINASHAVRWEGGMGKEHMHTWAVICEIHVNNDRMVRFDAIEEELKEVSANVSGKFLNTVPPFDRINPTLENLTTYFFQVITDILRKSNAVLTRLEIGESPTRFYCITLR

SEQ ID NO: 21624 - protein, 123 aa, Lactobacillus koreensis
  misc_feature (1)..(123): tr|A0A0R1L1Q2|A0A0R1L1Q2_9LACO 6-pyruvoyl-tetrahydropte rin synthase OS=Lactobacillus koreensis JCM 16448 OX=14 23819 GN=FC99_GL001343 PE=4 SV=1
MGEVHTYKIKSYINASHAMRWESGTGQKHNHTWEVITEIQLDTEHLVRFNDIEDDLKGVSARYSGQFLNEIPPFDKINPSLENITRYFYKELTAVLAKSQAKLMRLEVGESPTRFYCIQHTDD

SEQ ID NO: 21625 - protein, 79 aa, Lactobacillus malefermentans
  misc_feature (1)..(79): tr|A0A4R5NL65|A0A4R5NL65_9LACO Uncharacterized protein OS=Lactobacillus malefermentans OX=176292 GN=C5L31_0003 14 PE=4 SV=1
MVIFNDMEKSVNEVLSLINGKFLNDLAYFETVNPSVENVTVYLFNLIRKELKKIHARLSRIEVGESPTRFYCLSVDEDE

SEQ ID NO: 21626 - protein, 110 aa, Lactobacillus mali
  misc_feature (1)..(110): tr|A0A0R2FXL2|A0A0R2FXL2_9LACO 6-pyruvoyl-tetrahydropte rin synthase OS=Lactobacillus mali OX=1618 GN=IV36_GL00 0852 PE=4 SV=1
MKWKDGVGEKHTHTWELICEIGSNDGEMIIFNDIDKAINRVTTYFSGEFLNDLPEFAKKNPSLENLTEILFNLLENSLHEINASLMRLEVGESPTHFYALTSSLFFGRDE

SEQ ID NO: 21627 - protein, 126 aa, Lactobacillus manihotivorans
  misc_feature (1)..(126): tr|A0A0R1RF74|A0A0R1RF74_9LACO 6-pyruvoyl tetrahydropte rin synthase OS=Lactobacillus manihotivorans DSM 13343 = JCM 12514 OX=1423769 GN=FD01_GL002615 PE=4 SV=1
MSKVYSYKLKSYLNASHAVRWKGGTGQVHNHTWEIVCELHTIQDMVAFDRLEQALHGVLDNLSGKFLNDLPEFETVNPSVENVASYLFDQIDTVLRAEGARLVRIEVSDSPTRAYCIDIRDTPLPD

SEQ ID NO: 21628 - protein, 97 aa, Lactobacillus mindensis
  misc_feature (1)..(97): tr|A0A0R1QE71|A0A0R1QE71_9LACO Uncharacterized protein OS=Lactobacillus mindensis DSM 14500 OX=1423770 GN=FD29 _GL001208 PE=4 SV=1
MHTWAVICEIHVNNDCMVPFNAIEAELKEVSARVSGKFLNEVPPFDRINPTLENLTTYFFEVISNILRKSNAVLTRLEIGESPTRFYCMTLDQWSGQ

SEQ ID NO: 21629 - protein, 122 aa, Lactobacillus nagelii
  misc_feature (1)..(122): tr|A0A0R1QND5|A0A0R1QND5_9LACO 6-pyruvoyl-tetrahydropte rin synthase OS=Lactobacillus nagelii DSM 13675 OX=1122 150 GN=FD45_GL002276 PE=4 SV=1
MTLKYSYKIRSFFNASHAVRWENGIGQQHTHTWEVVCELSSSADKTVIFKEIEDTIHKVFQTFSGKFLNNLPYFKETNPTVENVTVWLYQLLTEAFLALGIQLIRIEVGESPTRSYCISVAD

SEQ ID NO: 21630 - protein, 126 aa, Lactobacillus nantensis
  misc_feature (1)..(126): tr|A0A0R1WNN5|A0A0R1WNN5_9LACO 6-pyruvoyl-tetrahydropte rin synthase OS=Lactobacillus nantensis DSM 16982 OX=14 23774 GN=FD31_GL002364 PE=4 SV=1
MNINGFETYSTYKLTSYINASHAVRWEGGMGKEHMHTWAVICEIHVNDNQMVPFNQIENELKEVSSRISGKFLNEVPPFDHVNPTLENLTTYFFQVITELLRKNNAILTRLEIGESPTRFYCITLK

SEQ ID NO: 21631 - protein, 142 aa, Lactobacillus nodensis
  misc_feature (1)..(142): tr|A0A0R1K9K4|A0A0R1K9K4_9LACO 6-pyruvoyl tetrahydropte rin synthase OS=Lactobacillus nodensis DSM 19682 = JCM 14932 = NBRC 107160 OX=1423775 GN=FD03_GL000057 PE=4 SV =1
MEKQRSYKIKSYVNASHAVRWKSGTGKKHNHTWEITCELHAFEGMVSFFDIEKSLHRAIDALSGKYLNDLPEFKTVNPTVENVTEYLFDEIDSILRANGAMLMRIEVSDSPTRAYCIDVTERQLPTEAEIKSEQNKQDESDA

SEQ ID NO: 21632 - protein, 79 aa, Lactobacillus paracollinoides
  misc_feature (1)..(79): tr|A0A0R1T485|A0A0R1T485_9LACO Uncharacterized protein OS=Lactobacillus paracollinoides DSM 15502 = JCM 11969 OX=1423785 GN=FC17_GL002607 PE=4 SV=1
MIIFNDLENTIKDILNSFAGKFLNTLPYFKDINPTVENVTVWLFDLISPALREEQAKLIRIEVSESPTRAYCISVRDDE

SEQ ID NO: 21633 - protein, 127 aa, Lactobacillus paracollinoides
  misc_feature (1)..(127): tr|A0A1B2IUH0|A0A1B2IUH0_9LACO 6-pyruvoyl tetrahydropte rin synthase OS=Lactobacillus paracollinoides OX=240427 GN=AYR63_00120 PE=4 SV=1
MGEERQYHTYKIKSYVNASHAMRWEDGEGKEHNHTWEIVCEIHSLNDHMIIFNDLENTIKDILNSFAGKFLNTLPYFKDINPTVENVTVWLFDLISPALREEQAKLIRIEVSESPTRAYCISVRDDE

SEQ ID NO: 21634 - protein, 122 aa, Lactobacillus paraplantarum
  misc_feature (1)..(122): tr|A0A370AC98|A0A370AC98_9LACO 6-pyruvoyl tetrahydropte rin synthase OS=Lactobacillus paraplantarum OX=60520 GN =DQM08_06390 PE=4 SV=1
MTTKQRTYKIKSYVNASHAVRWATGSGKKHTHTWEIVCELHTVDAMVAFYDIEKNLHQALDELSGKFLNDLPEFKTVNPTVENVTEYLFTKIDKTLRDNGAQLMRIEVSDSPTRAYCISVTE

SEQ ID NO: 21635 - protein, 122 aa, Lactobacillus paraplantarum
  misc_feature (1)..(122): tr|A0A512FG22|A0A512FG22_9LACO 6-pyruvoyltetrahydropter in synthase OS=Lactobacillus paraplantarum OX=60520 GN= LPA07_01920 PE=4 SV=1
MTTKQRTYKIKSYVNASHAVRWATGSGKKHTHTWEIVCELHTVDAMVAFYDIEKNLHQALDELSGKFLNGLPEFKTVNPTVENVTEYLFTKIDKTLRDNGAQLMRIEVSDSPTRAYCISVTE

SEQ ID NO: 21636 - protein, 122 aa, Lactobacillus pentosus
  misc_feature (1)..(122): tr|A0A2S9VU01|A0A2S9VU01_LACPE 6-pyruvoyl tetrahydropte rin synthase OS=Lactobacillus pentosus OX=1589 GN=C6Y09 _02565 PE=4 SV=1
MTTKQRSYKIKSYVNASHAIRWATGSGKKHTHTWEIVCELHTVDAMVAFYDIEKNLHQALDELSGKFLNDLPEFKTVNPTVENVTEYLFKKIDNTLRENGAQLMRIEVSDSPTRAYCISVTD

SEQ ID NO: 21637 - protein, 122 aa, Lactobacillus pentosus; identical to SEQ ID NO: 21636
  misc_feature (1)..(122): tr|I9L4H3|I9L4H3_LACPE 6-pyruvoyl-tetrahydropterin synt hase family protein OS=Lactobacillus pentosus KCA1 OX=1 136177 GN=KCA1_0042 PE=4 SV=1

SEQ ID NO: 21638 - protein, 122 aa, Lactobacillus plantarum
  misc_feature (1)..(122): tr|A0A494RWI2|A0A494RWI2_LACPN 6-pyruvoyltetrahydropter in synthase OS=Lactobacillus plantarum subsp. argentora tensis OX=271881 GN=LPL03_24240 PE=4 SV=1
MPTKQRTYKIKSYVNASHAVRWATGSGKKHTHTWEIVCELHTVDAMVAFYDIEKNLHQALDELSGKFLNDLPEFKTVNPTVENVTEYLFTKIDKTLRDNGAQLLRIEVSDSPTRAYCISVTE

SEQ ID NO: 21639 - protein, 122 aa, Lactobacillus plantarum; identical to SEQ ID NO: 21638
  misc_feature (1)..(122): tr|A0A151G617|A0A151G617_LACPN 6-pyruvoyl tetrahydropte rin synthase OS=Lactobacillus plantarum OX=1590 GN=queD PE=4 SV=1

SEQ ID NO: 21640 - protein, 124 aa, Lactobacillus saerimneri
  misc_feature (1)..(124): tr|A0A0R1T3P4|A0A0R1T3P4_9LACO 6-pyruvoyl tetrahydropte rin synthase OS=Lactobacillus saerimneri DSM 16049 OX=1 122153 GN=FC54_GL000615 PE=4 SV=1
MKKTYGYRLRTYLNATHAMRWENSDGATHPHTWEIICKVRQNNDDEFLRFNEIEAAIQEVVTPLQGRLLNNVAPFTEINPSLENLGDYFFDEIDAHLQKLDCYLEQLEIGESPTRFFRVTRGEQ

SEQ ID NO: 21641 - protein, 124 aa, Lactobacillus saerimneri; identical to SEQ ID NO: 21640
  misc_feature (1)..(124): tr|M5J4M1|M5J4M1_9LACO 6-pyruvoyl-tetrahydropterin synt hase OS=Lactobacillus saerimneri 30a OX=1227363 GN=D271 _02844 PE=4 SV=1

SEQ ID NO: 21642 - protein, 122 aa, Lactobacillus salivarius
  misc_feature (1)..(122): tr|C2EFI5|C2EFI5_9LACO 6-pyruvoyl tetrahydropterin synt hase-related domain protein OS=Lactobacillus salivarius DSM 20555 = ATCC 11741 OX=1423799 GN=HMPREF0545_0407 P E=4 SV=1
MGKIYSYRLKFYLNATHAMRWSDQIGEEHPHTWEIICQVMKKEQNHFIRFNDIEDQIQKIIEPLQNQFLNTLAPFDKTNPSLENLGDYFFDEINLQLHEINCYLHQLEIGESPTRFYVVNNE

SEQ ID NO: 21643 - protein, 122 aa, Lactobacillus salivarius; identical to SEQ ID NO: 21642
  misc_feature (1)..(122): tr|A0A089QCX1|A0A089QCX1_9LACO 6-pyruvoyl tetrahydropte rin synthase OS=Lactobacillus salivarius OX=1624 GN=A8C 48_09020 PE=4 SV=1

SEQ ID NO: 21644 - protein, 125 aa, Lactobacillus selangorensis
  misc_feature (1)..(125): tr|A0A0R2FPL4|A0A0R2FPL4_9LACO Uncharacterized protein OS=Lactobacillus selangorensis OX=81857 GN=IV38_GL00069 3 PE=4 SV=1
MATKYRTYKIRAFFNASHSLATTTVKRDKKTHNHTWEVVCEVHLNDPEKADADQANRLISNTLNTLSGHKLNHLEPFRKLEPTLENVTEYLADELDVDLAAKKVQLLRIEVGISPLRYYCITMMR

SEQ ID NO: 21645 - protein, 112 aa, Lactobacillus similis
  misc_feature (1)..(112): tr|A0A0R2EY73|A0A0R2EY73_9LACO 6-pyruvoyl-tetrahydropte rin synthase OS=Lactobacillus similis DSM 23365 = JCM 2 765 OX=1423804 GN=FD14_GL001101 PE=4 SV=1
MNASHAMRWADGQGKQHNHTWEIISEFKSAGDHMIIFNDIERTLNDIFQTFSGKFLNELPAFQKINPTVENVTIWLFKLITDALDGLHADLIRLEVGESPTRSYCITVEDDE

SEQ ID NO: 21646 - protein, 125 aa, Lactobacillus sp.
  misc_feature (1)..(125): tr|A0A3D1DSQ2|A0A3D1DSQ2_9LACO 6-pyruvoyl tetrahydropte rin synthase OS=Lactobacillus sp. OX=1591 GN=DEQ50_0208 5 PE=4 SV=1
MEGYQTYNTYKLTSYINASHAVRWEGGMGKEHMHTWAVVCEIHVNNDLMVPFNEIENQLKEVSSRVSGKFLNEVPPFDHVNPTLENLTTYFFQVINDLLRKNNAVLTRLEIGESPTRFYCIEMKH

SEQ ID NO: 21647 - protein, 122 aa, Lactobacillus sp.; identical to SEQ ID NO: 21638
  misc_feature (1)..(122): tr|A0A5D0DD72|A0A5D0DD72_9LACO 6-pyruvoyl tetrahydropte rin synthase OS=Lactobacillus sp. LSI2-1 OX=2604481 GN= FXE14_02090 PE=4 SV=1

SEQ ID NO: 21648 - protein, 87 aa, Lactobacillus sucicola
  misc_feature (1)..(87): tr|A0A0R2DTS0|A0A0R2DTS0_9LACO Uncharacterized protein OS=Lactobacillus sucicola DSM 21376 = JCM 15457 OX=1423 806 GN=FD15_GL002307 PE=4 SV=1
MCELSSQSEQTVIFSDIEKALNGVLGDISGVFLNTLSAFKETNPTVENVTLWLYQLIVPVLKPLAVRLTRLEVSESPTRTYCITVSD

SEQ ID NO: 21649 - protein, 128 aa, Lactobacillus tucceti
  misc_feature (1)..(128): tr|A0A0R1IYF5|A0A0R1IYF5_9LACO 6-pyruvoyl tetrahydropte rin synthase OS=Lactobacillus tucceti DSM 20183 OX=1423 811 GN=FC72_GL000582 PE=4 SV=1
MRWKSGTGKKHNHTWEITCELHVFEGMVSFFDIEKSLHRAIDALSGKFLNDLPEFKVVNPTVENVTEYLFNEIDAILRANGAMLMRIEVSDSPTRAYCIDITERTLPTEAEVEAETKSEQKQQEKPDA

SEQ ID NO: 21650 - protein, 93 aa, Lactobacillus uvarum
  misc_feature (1)..(93): tr|A0A0R1Q3Q9|A0A0R1Q3Q9_9LACO Uncharacterized protein OS=Lactobacillus uvarum DSM 19971 OX=1423812 GN=FD20_GL 001023 PE=4 SV=1
MHTWEVVCELSSQSKQTVIFSDIEKALNGVFENISGTFLNTLDDFKELNPTVENVTLWLYHLIIPALNQLDVHLTRLEVSESPTRTYCITSSN

SEQ ID NO: 21651 - protein, 127 aa, Lactobacillus vaccinostercus
  misc_feature (1)..(127): tr|A0A0R2A2E6|A0A0R2A2E6_9LACO 6-pyruvoyl-tetrahydropte rin synthase OS=Lactobacillus vaccinostercus DSM 20634 OX=1423813 GN=FC26_GL001498 PE=4 SV=1
MSEMMPEEYHTYKIKSYVNASHAMRWEDGEGKQHNHTWEIICEIHTSNDHMIIFNDLEKAVNRVLAGISGQFLNQLAYFEKVNPTLENVTIYLFHLIGPELEKMQANLIRIEVGESPTRFYCISATE

SEQ ID NO: 21652 - protein, 123 aa, Lactobacillus vini
  misc_feature (1)..(123): tr|A0A0R2C9Z7|A0A0R2C9Z7_9LACO 6-pyruvoyl-tetrahydropte rin synthase OS=Lactobacillus vini DSM 20605 OX=1133569 GN=FD21_GL002032 PE=4 SV=1
MANLVFSYRIKSFFNASHAIRWDSGIGQRHSHTWEVNCEFRSQQGQTVVFKDLEDKLNNIFQKFSGSFLNQLEYFQEINPTVENVAVWLYKLVTPAVETLKVRLIRLEVAESPTRSYCISVVD

SEQ ID NO: 21653 - protein, 122 aa, Lactococcus garvieae
  misc_feature (1)..(122): tr|K2NY66|K2NY66_9LACT 6-pyruvoyl-tetrahydropterin synt hase-like protein OS=Lactococcus garvieae DCC43 OX=1231 377 GN=C426_0093 PE=4 SV=1
MKRIYRLKFYINASHAIRWEKGIGQKHNHTWEIVCEFKGLNDKFISFFEAEKVVRNILDKFEGTYLNETPTFQNINPTLENVTEVFFERLSQDIKKVDGQLVQVEIAEKPTHIFRIEAEDDL

SEQ ID NO: 21654 - protein, 122 aa, Lactococcus lactis
  misc_feature (1)..(122): tr|A0A0V8ASH7|A0A0V8ASH7_LACLL 6-pyruvoyl tetrahydropte rin synthase OS=Lactococcus lactis subsp. lactis OX=136 0 GN=E34_0707 PE=4 SV=1
MNNMRKNYKLKFYVNASHAIRWEKGEGKQHNHTWEIICEITTKNDHMIVFSDIEKAIELYFHKFLGVFLNEVYPFDELNPTLENFADFLFKEISKLVESFAAELIRIEVGETPVRFYCITKI

SEQ ID NO: 21655 - protein, 151 aa, Lacunisphaera limnophila
  misc_feature (1)..(151): tr|A0A1D8AUQ8|A0A1D8AUQ8_9BACT 6-carboxy-5,6,7,8-tetrah ydropterin synthase OS=Lacunisphaera limnophila OX=1838 286 GN=queD_2 PE=4 SV=1
MPYRIAKTLTIESGHLLTKHRGRCRFPHGHSRTVEVVIAADQLDANDMVCDFKALKHALNEFLDRWDHAFCLNTADPQFAFFQQTYAERVIPFVATDPTSEVMARTIFDTLQRTLQEQAQDPTREYPIPTGVRLERVRVTETATSWAEYSA

SEQ ID NO: 21656 - protein, 159 aa, Lacunisphaera limnophila
  misc_feature (1)..(159): tr|A0A1D8ARI8|A0A1D8ARI8_9BACT 6-carboxy-5,6,7,8-tetrah ydropterin synthase OS=Lacunisphaera limnophila OX=1838 286 GN=queD_1 PE=4 SV=1
MPKKSSPQKSREPSVRALAGTVFITRQVHFNSAHRLYNPTKSLAWNQKQYGMCTNPHWHGHNYVLEVTLKGQPDPVTGYIMDLARLKKVLHTAVVDKCDHRNLNDEVDFLRGIIPSTENLVIAFWHEIAPRIHLPARLHCVRLYETPRNFAEFFGPAHH

SEQ ID NO: 21657 - protein, 159 aa, Lacunisphaera sp.
  misc_feature (1)..(159): tr|A0A4Q1C8G4|A0A4Q1C8G4_9BACT 6-carboxytetrahydropteri n synthase OS=Lacunisphaera sp. TWA-58 OX=2508720 GN=ES B00_04355 PE=4 SV=1
MPKKTNTRKNREPSVRALAGTVFITRQVHFNSAHRLYNPTKSLAWNQKQYGLCTNPHWHGHNYVLEVTVKGQPDPVTGYIIDLARLKKILHRAVVDKCDHRNLNDEVDFLRGIIPSTENLVIAFWHEIVSHIPLPARLHCVRLYETPRNYAEFFGPAHH

SEQ ID NO: 21658 - protein, 151 aa, Lacunisphaera sp.
  misc_feature (1)..(151): tr|A0A4Q1C868|A0A4Q1C868_9BACT 6-carboxytetrahydropteri n synthase OS=Lacunisphaera sp. TWA-58 OX=2508720 GN=ES B00_03830 PE=4 SV=1
MPYRIAKTLTFESGHILSKHKGRCRFPHGHSRTVEVVLAAEQLDANDMVCDFKAVKRSLESLLDRWDHALCLNTADPGFIDLQRTYGERVVAFAGTDPTTEVMARTIFEALQQRLHEATKESAAEFPISPGVRLERVRVTETATSWAEYSA

SEQ ID NO: 21659 - protein, 121 aa, Lampropedia sp.
  misc_feature (1)..(121): tr|A0A4V3YX97|A0A4V3YX97_9BURK 6-carboxy-5,6,7,8-tetrah ydropterin synthase OS=Lampropedia sp. YIM MLB12 OX=256 2762 GN=E8K88_06920 PE=3 SV=1
MQYELSQRFFFDAAHTLHRAIEVESSRRIHGHTYEAEVTVRGLPDPKSGMLIDLGFLRSEIARLRDKLDHRLLDEVEGIGPATLENLCTYIRTQLEPAVPNLCAVMVERRTSGDRCVLRWK

SEQ ID NO: 21660 - protein, 132 aa, Lapillicoccus jejuensis
  misc_feature (1)..(132): tr|A0A542DZX4|A0A542DZX4_9MICO 6-pyruvoyl-tetrahydropte rin synthase OS=Lapillicoccus jejuensis OX=402171 GN=FB 458_1574 PE=4 SV=1
MFGVTLRDHMMIAHSLPGEAFGPAQRLHGATYVVDATISAAELDDLGVVVDIARAADVLHDVLAGLTMRNLDDEPSLAGVLTTTERLAQVVADRLVERAHGGDLGTDPARLAGVRVVLHESHVASASYERPL

SEQ ID NO: 21661 - protein, 334 aa, Laribacter hongkongensis
  misc_feature (1)..(334): tr|A0A248LI65|A0A248LI65_9NEIS Putative 6-pyruvoyltetra hydrobiopterin synthase OS=Laribacter hongkongensis OX= 168471 GN=LHGZ1_1245 PE=4 SV=1
MPCLHQACCGFEAARSLPLANGINQRHGHSFRLHARADMPLPDLRAQLARIAAPLNYADLDHYLGHADDQSLLEWLASQLPTPAALSLRSAPGLESELDPDGQRRICISGHFDAAHWLPHVPDGHQCGRLHGHGFGVRLVADAGQHDAAALYSAWQPLHATLHHRLLNDIAGLSNPTSEMLACWIWQQLQPSLSGLQAVEVFETASAGSRYDGQEFRIWKEQRFEAAVPFDHAGRYTGHSYLVRLVLTGIMSNHTGWVRDFGEIKARFKPVYAQLDHHPLDRLPAIDATDCAGIARWIAREFAESVPELCRIDLLENPDEGAVLFLPAAKGQQS

SEQ ID NO: 21662 - protein, 331 aa, Laribacter hongkongensis
  misc_feature (1)..(331): tr|C1D6K9|C1D6K9_LARHH Probable 6-pyruvoyltetrahydrobio pterin synthase OS=Laribacter hongkongensis (strain HLH K9) OX=557598 GN=LHK_01124 PE=4 SV=1
MPCLHQACCGFEAARSLPLANGINQRHGHSFRLHARADMPLPDLREQLARIAAPLNYADLDHYLGHADDQSLLEWLASQLPTPAALSLRSAPGLESELDPDGQRRICISGHFDAAHWLPHVPDGHQCGRLHGHGFGVRLVADAGQHDAAALYSAWQPLHATLHHRLLNDIAGLSNPTSEMLACWIWQQLQPSLSGLQAVEVFETASAGSRYDGQEFRIWKEQRFEAAVPFDHAGHYTGHSYLVRLVLTGIMSNHTGWVRDFGEIKARFKPVYAQLDHHPLDRLPAIDATDCAGIARWIAREFAESVPELCRIDLLENPDEGAVLFLPAANG

SEQ ID NO: 21663 - protein, 138 aa, Larkinella arboricola
  misc_feature (1)..(138): tr|A0A327X2Q0|A0A327X2Q0_9BACT 6-pyruvoyltetrahydropter in/6-carboxytetrahydropterin synthase OS=Larkinella arb oricola OX=643671 GN=LX87_01540 PE=4 SV=1
MVYVSRKEHFNAAHRLFNPAWSDEKNKEVFGACANVNGHGHNFELIVTVKGQPHPDTGFVIDLKVLGDLVKEEIIDKVDHKNLNVDVDFMQGKMASCEVFIVQIWNILERALARISDARLHQVRLYETPKNYVDYYGE

SEQ ID NO: 21664 - protein, 138 aa, Larkinella arboricola
  misc_feature (1)..(138): tr|A0A327X225|A0A327X225_9BACT 6-carboxy-5,6,7,8-tetrah ydropterin synthase OS=Larkinella arboricola OX=643671 GN=LX87_02138 PE=3 SV=1
MDKKRVAVFRKEHFNAAHRLHNPEWSEEENQRVFGKCNNPHFHGHNYELIVQVIGEVNPVTGYVMDMKVLSDLIKSQVTDRFDHKNLNLDTEEFKSLNPSAENIAIVIYDSLRSQLDSSLDLKIRLYETERNFVEYPV

SEQ ID NO: 21665 - protein, 138 aa, Larkinella knui
  misc_feature (1)..(138): tr|A0A3P1CVN0|A0A3P1CVN0_9BACT 6-carboxytetrahydropteri n synthase OS=Larkinella knui OX=2025310 GN=EHT87_03560 PE=4 SV=1
MVYISRKEHFNAAHRLFNPTWSDEKNKEVFGPCANVNGHGHNFELIVTVKGEPNPDTGFVIDLKVLGDLVKEEIIDKVDHKNLNLDVDFMRGKMASCEIFIVEIWKILDRALEKITEARLHRIRLYETPKNYVDYYGE

SEQ ID NO: 21666 - protein, 138 aa, Larkinella knui
  misc_feature (1)..(138): tr|A0A3P1CY73|A0A3P1CY73_9BACT 6-carboxytetrahydropteri n synthase OS=Larkinella knui OX=2025310 GN=EHT87_05965 PE=4 SV=1
MDKKRVAVFRKEHFNAAHRLHNPEWSDEENQRVFGKCNNPHYHGHNYELFVQVTGEVDPVTGFVMDMKLLSDLIKARVTDKFDHKNLNLDTEEFKNLNPSAEHIAIVIYDSLRSQLDSSLDLKIRLYETERNFVEYPV

SEQ ID NO: 21667 - protein, 138 aa, Larkinella rosea
  misc_feature (1)..(138): tr|A0A3P1C1G8|A0A3P1C1G8_9BACT 6-carboxytetrahydropteri n synthase OS=Larkinella rosea OX=2025312 GN=EHT25_0406 5 PE=4 SV=1
MDKKRVAVFRKEHFNAAHRLHNPEWSDEENQRIFGKCNNPHFHGHNYEVIVQVIGEVDPVTGFVVDLKVLSDLIKTQVTDKFDHKNLNLDTEEFKNLNPSAENIAIVIYDSLRSQLAASLDLKIRLYETERNFVEYPV

SEQ ID NO: 21668 - protein, 138 aa, Larkinella rosea
  misc_feature (1)..(138): tr|A0A3P1C267|A0A3P1C267_9BACT 6-carboxytetrahydropteri n synthase OS=Larkinella rosea OX=2025312 GN=EHT25_0606 0 PE=4 SV=1
MVYISRKEHFNAAHRLFNPAWSDEKNKEVFGPCANVNGHGHNFELIVTVKGEPNPDTGFVIDLKVLAELVKEHIIDRVDHKNLNLDVDFMRGKMASCEIFIVEIWKILDRALARITEARLHRIRLYETPKNYVDYYGE

SEQ ID NO: 21669 - protein, 138 aa, Larkinella sp.
  misc_feature (1)..(138): tr|A0A4R8D0D1|A0A4R8D0D1_9BACT 6-carboxy-5,6,7,8-tetrah ydropterin synthase OS=Larkinella sp. BK230 OX=2512173 GN=EV590_2668 PE=3 SV=1
MDKKRVAVFRKEHFNAAHRLHNPAWSEEENQWVFGKCNNPHYHGHNYELIVQVIGEVNPVTGYVMDMKVLSDLIKAQVTDKFDHKNLNLDTEEFKNLNPSAEHIAIVIYDSLRSQLDSSLDLKIRLYETERNFVEYPV

SEQ ID NO: 21670 - protein, 138 aa, Larkinella sp.
  misc_feature (1)..(138): tr|A0A368JMM7|A0A368JMM7_9BACT 6-carboxy-5,6,7,8-tetrah ydropterin synthase OS=Larkinella sp. ZZJ9 OX=2315727 G N=DUE52_13620 PE=3 SV=1
MDKKRVAVFRKEHFNAAHRLHIPEWSDEENKRVFGKCNNPHYHGHNYELIVQVTGEVDPVTGFVMDMKLLSDLIKDRVTDRFDHKNLNLDTEEFKTLNPSAEHIAIVIYDSLRSQLDSSLDLKIRLYETERNFVEYPV

SEQ ID NO: 21671 - protein, 140 aa, Lautropia mirabilis
  misc_feature (1)..(140): tr|E7S061|E7S061_9BURK 6-carboxy-5,6,7,8-tetrahydropter in synthase OS=Lautropia mirabilis ATCC 51599 OX=887898 GN=queD PE=3 SV=1
MLKIAKEFSFDIAHMLDGHDGKCRNLHGHTYRLQVEVGGPLHASGPKAGMVMDYADLKDIVKRHVVDPMDHAFLYDTGSPRECRVATLLQELDSKVHGLPMRTTAENISAHIFHVLQDQGLPVSLIRLWETPTSYCEYSG

SEQ ID NO: 21672 - protein, 140 aa, Lautropia sp.
  misc_feature (1)..(140): tr|A0A3R8MSB1|A0A3R8MSB1_9BURK 6-carboxy-5,6,7,8-tetrah ydropterin synthase OS=Lautropia sp. KCOM 2505 OX=24908 57 GN=queD PE=3 SV=1
MIRIAKEFSFDIAHMLDGHDGKCKNLHGHTYRLQVEVTGELHATGPKAGMVMDYGDLKAMVNRHIIEPMDHAFIYDTTSARECRLAATLRELDSKQYGLPLRTTAENIAQHIYRTLRGHGLPVSLIRLWETPTSYAEYAE

SEQ ID NO: 21673 - protein, 374 aa, Lautropia sp.
  misc_feature (1)..(374): tr|A0A1D2TNP0|A0A1D2TNP0_9BURK 6-pyruvoyl tetrahydropte rin synthase OS=Lautropia sp. SCN 70-15 OX=1660105 GN=A BS55_00885 PE=4 SV=1
MPDHLLHVAAAGFESACRIDVLPEGHRSRRLHGHSFLAKVRARLPQGWASFPGGEVDDLRARLSEAIAPLDYALLNEQVAHPTDENLARWIRARLEASGSGGSGAGVPGLEQVGIQSTLHSGVDLDARDHAHVWRRYVFEAAHQLTGVPAGHKCGRMHGHGFEVILHADQDLGARDLGIDYDHLDACWAPIHAQFHHACLNDIPGLENPTSEIIGAWIWERLKPQLPELSWVTVYETATCGAHYDGRHYRIWKELSLDSSLRLRRAPEGDARRRIHGHTYNLRLHLCAPLDEVRGWTVDFGDVKALFDPIFRDLDHQPLHELPGVEDNDPASLAQWIRDRALPVLPALDRIDLYETRGSGAILSWGEEGPALPV

SEQ ID NO: 21674 - protein, 126 aa, Lawsonia intracellularis
  misc_feature (1)..(126): tr|Q1MRR2|Q1MRR2_LAWIP 6-carboxy-5,6,7,8-tetrahydropter in synthase OS=Lawsonia intracellularis (strain PHE/MN1 -00) OX=363253 GN=LI0258 PE=3 SV=1
MSKPTWHLTVRSEFCAAHALRHYKGKCERLHGHNYGIKIIVGGHELTSDTELLIDFTELKAILKDVLEPLDHRYLNNIPPFDQINPSAENLARYIWQNVKKRLPPNVYMVQATVAERNVQSATYME

SEQ ID NO: 21675 - protein, 136 aa, Leadbetterella byssophila
  misc_feature (1)..(136): tr|E4RQ78|E4RQ78_LEAB4 6-carboxy-5,6,7,8-tetrahydropter in synthase OS=Leadbetterella byssophila (strain DSM 17 132 / KACC 11308 / 4M15) OX=649349 GN=Lbys_1746 PE=3 SV =1
MIQITRRETFNAAHRLFNPKWSEEKNYEVFGPCSKVHGHNWELFVTVIGEVAEDTGFVVDLKALSRTMREEVISKVDHTYLNEDVAFLAGKLPTTENFAIAIWDILKPAIKQKHGVDLYKIKLTETANHYVEYFGH

SEQ ID NO: 21676 - protein, 145 aa, Leadbetterella byssophila
  misc_feature (1)..(145): tr|E4RZB4|E4RZB4_LEAB4 Uncharacterized protein OS=Leadb etterella byssophila (strain DSM 17132 / KACC 11308 / 4 M15) OX=649349 GN=Lbys_0691 PE=4 SV=1
MCSTQTLYMTRVSVFRKEHFNAAHRLHCEEWDQETNARIFGKCNNPNYHGHNYELHVKVTGEVDPKSGFVFDLKILSDLIREHVLEVFDHKNLNLDLPYFKDINPTAENICVVIYDILRPKIEEKYDIKIRLFETERNYVEYPEN

SEQ ID NO: 21677 - protein, 194 aa, Lebetimonas natsushimae
  misc_feature (1)..(194): tr|A0A292YEI5|A0A292YEI5_9PROT 6-pyruvoyltetrahydropter in/6-carboxytetrahydropterin synthase OS=Lebetimonas na tsushimae OX=1936991 GN=LNAT_P1033 PE=4 SV=1
MIIRKLFKFENAHIVRNCTSRRCSRSIHGHSYKIEILLESNFLDNGQMVYDFGLMKTTIKELIDSFDHAITLWSEDNSEYLEFAKKFSERWVMLPVNPSAEQFSRVFFLMVERVLNLTVFQNNEKNIKVNSVIVHETDTGYAQCFREDAYNFENMGKIELKNIIFSEQIKREWSDYNMWDKILNGERFINPKSL

SEQ ID NO: 21678 - protein, 126 aa, Lechevalieria deserti
  misc_feature (1)..(126): tr|A0A316HYP5|A0A316HYP5_9PSEU 6-pyruvoyl tetrahydropte rin synthase-like protein OS=Lechevalieria deserti OX=5 31939 GN=C8D88_111209 PE=4 SV=1
MIAHSFRGEVFGPAQRLHGATFLVDATFKRAELDSDNIVVDIGLATQELNKVLAAFNYRNLDEEPQFAGINTSTEWLAKHIADQLAEKISEGALGEGAHGIDAIAVTLHESHVAWASYERALRTAG

SEQ ID NO: 21679 - protein, 229 aa, Lechevalieria deserti
  misc_feature (1)..(229): tr|A0A316I2C6|A0A316I2C6_9PSEU 6-pyruvoyl-tetrahydropte rin synthase OS=Lechevalieria deserti OX=531939 GN=C8D8 8_108160 PE=4 SV=1
MKAAEDKRVADGQTTISQSFDFSASHELRLLPTSHKCSRNHGHNYTVTASALVHDDAPGDLSTLGEYLTATFDHRLLNEQVTFHPTSELLAAHLAEWFRDNVESATSITLVAMIVSETESTSARCDGVTGEVTISKTFTTSHGDVTLVLGADGLDEVGFITDFGDLKPFEAYLQAPGADEGLRATGPALVAHLAGWFVDNVEPEIRGRLVSLRVDSRTTTGLWERGDAS

SEQ ID NO: 21680 - protein, 126 aa, Lechevalieria fradiae
  misc_feature (1)..(126): tr|A0A1G7SRV5|A0A1G7SRV5_9PSEU 6-pyruvoyl tetrahydropte rin synthase OS=Lechevalieria fradiae OX=200378 GN=SAMN 05216553_106397 PE=4 SV=1
MIAHSFRGEVFGPAQRLHGATFLVDATFKRAELDSDNIVVDIGLATQELNKVLAAFNYRNLDEEPQFAGINTSTEWLAKHIADQLAEKISEGALGEGAHGIDGISVTLHESHVAWASYERALRPSG

SEQ ID NO: 21681 - protein, 126 aa, Lechevalieria xinjiangensis
  misc_feature (1)..(126): tr|A0A1H9ULX7|A0A1H9ULX7_9PSEU 6-pyruvoyl tetrahydropte rin synthase OS=Lechevalieria xinjiangensis OX=402600 G N=SAMN05216188_12212 PE=4 SV=1
MIAHSFRGEVFGPAQRLHGATFLVDATFKRAELDSDNIVVDIGLATQELGKVLAAFNYRNLDEEPQFAGINTSTEWLAKHIADQLADKIAEGALGEGAHGINAITVTLHESHVAWASYERALRPSG

SEQ ID NO: 21682 - protein, 120 aa, Leclercia adecarboxylata
  misc_feature (1)..(120): tr|A0A5B7XK77|A0A5B7XK77_9ENTR 6-carboxy-5,6,7,8-tetrah ydropterin synthase OS=Leclercia adecarboxylata OX=8365 5 GN=queD PE=3 SV=1
MSTTLFKDFMFEAAHHLPHVPEGHKCGRLHGHSFMVRLEITGEVDPHTGWIMDFSELKAAFKPTYDRLDHYYLNDIPGLENPTSEVLAKWIWNEMKPLVPLLSAVMIKETCTAGCIYRGE

SEQ ID NO: 21683 - protein, 120 aa, Leclercia adecarboxylata
  misc_feature (1)..(120): tr|A0A352U3L5|A0A352U3L5_9ENTR 6-carboxy-5,6,7,8-tetrah ydropterin synthase OS=Leclercia adecarboxylata OX=8365 5 GN=queD PE=3 SV=1
MSTTLFKDFIFEAAHHLPHVPEGHKCGRLHGHSFMVRLEITGEVDPHTGWIMDFAELKAAFKPTYDRLDHYYLNDIPGLENPTSEVLAKWIWDEIKPLVPLLSAVMIKETCTAGCVYRGE

SEQ ID NO: 21684 - protein, 120 aa, Leclercia sp.
  misc_feature (1)..(120): tr|A0A345C6U2|A0A345C6U2_9ENTR 6-carboxy-5,6,7,8-tetrah ydropterin synthase OS=Leclercia sp. W17 OX=2282309 GN= queD PE=3 SV=1
MSTTLFKDFIFEAAHHLPHVPEGHKCGRLHGHSFMVRLEITGEVDPHTGWIMDFAELKAAFKPTYDRLDHYYLNDIPGLENPTSEVLAKWIWNEIKPLVPLLSAVMIKETCTAGCVYRGE

SEQ ID NO: 21685 - protein, 120 aa, Leclercia sp.; identical to SEQ ID NO: 20153
  misc_feature (1)..(120): tr|A0A0J6QAG7|A0A0J6QAG7_9ENTR 6-carboxy-5,6,7,8-tetrah ydropterin synthase OS=Leclercia sp. LK8 OX=1628210 GN= VK95_13410 PE=3 SV=1

SEQ ID NO: 21686 - protein, 136 aa, Leeuwenhoekiella aequorea
  misc_feature (1)..(136): tr|A0A4Q0P1X0|A0A4Q0P1X0_9FLAO 6-carboxy-5,6,7,8-tetrah ydropterin synthase OS=Leeuwenhoekiella aequorea OX=283 736 GN=DSM00_3063 PE=3 SV=1
MKVTVKRKAHFNAAHRLFRKEWDADKNLDVFGKCSLPNYHGHNYDLIVAVTGEIDQETGFVIDLKILKDLIKTEIEEPFDHRNLNLDVPEFKHLNPTAENICVVIYDKLRKKLEAKFDIEITLYETARNFVTYSGN

SEQ ID NO: 21687 - protein, 151 aa, Leeuwenhoekiella aequorea
  misc_feature (1)..(151): tr|A0A4Q0PC00|A0A4Q0PC00_9FLAO 6-pyruvoyltetrahydropter in/6-carboxytetrahydropterin synthase OS=Leeuwenhoekiel la aequorea OX=283736 GN=DSM00_52 PE=4 SV=1
MSNIRITKQFSFETGHALYGYDGKCRNVHGHSYKLSVTVIGTPISQSDNVKFGMVIDFGDLKKIVKAEIVDVFDHATVFNKNTPHVELAKELSDRGHNVLLVDYQPTSEMMVIDFAEKIKKHLPSNITLFSLKLQETDSSFAEWYASDNKE

SEQ ID NO: 21688 - protein, 150 aa, Leeuwenhoekiella blandensis
  misc_feature (1)..(150): tr|A3XRB5|A3XRB5_LEEBM Uncharacterized protein OS=Leeuw enhoekiella blandensis (strain CECT 7118 / CCUG 51940 / MED217) OX=398720 GN=MED217_18726 PE=4 SV=1
MSNIRITKQFSFETGHALYGYDGKCRNVHGHSYKLSVTVIGTPISDSNNVKFGMVIDFGDLKRIVKSEIVDVFDHATVFNKNTPHVELAKELSDRGHNVLLVDYQPTSEMMVIDFAEKIKKHLPENINLFSLKLQETDTSFAEWYAADNA

SEQ ID NO: 21689 - protein, 137 aa, Leeuwenhoekiella blandensis
  misc_feature (1)..(137): tr|A3XR13|A3XR13_LEEBM 6-carboxy-5,6,7,8-tetrahydropter in synthase OS=Leeuwenhoekiella blandensis (strain CECT 7118 / CCUG 51940 / MED217) OX=398720 GN=MED217_14001 PE=3 SV=1
MKTVTVKRKAHFNAAHRLYRADWDDAKNLEVFGKCSYPNYHGHNYELIVAVTGEIDPKTGFVIDLKVLKDLIKSEVEEPFDHKNLNLDVAEFSQLNPTAENICVVIYDRLKAKLDAKFAIEVTLYETPRNSVTYSGN

SEQ ID NO: 21690 - protein, 151 aa, Leeuwenhoekiella marinoflava
  misc_feature (1)..(151): tr|A0A4Q0PQY4|A0A4Q0PQY4_9FLAO 6-pyruvoyltetrahydropter in/6-carboxytetrahydropterin synthase OS=Leeuwenhoekiel la marinoflava OX=988 GN=DSL99_132 PE=4 SV=1
MSNIRITKQFSFETGHALYGYDGKCRNVHGHSYKLSVTVIGTPISDSENVKFGMVIDFGDLKKIVKDEIVDVFDHATVFNKNTPHVELAKELSDRGHNVLLVDYQPTSEMMVIDFAEKIQKHLPQNIKLFSLKLQETDSSFAEWYASDNTN

SEQ ID NO: 21691 - protein, 136 aa, Leeuwenhoekiella marinoflava
  misc_feature (1)..(136): tr|A0A4Q0PI38|A0A4Q0PI38_9FLAO 6-carboxy-5,6,7,8-tetrah ydropterin synthase OS=Leeuwenhoekiella marinoflava OX= 988 GN=DSL99_3334 PE=3 SV=1
MKVTVSRKAHFNAAHRLYRSEWDDAKNLEVFGKCSYPNYHGHNYELIVAVTGEIDPETGFVIDLKILKDIIKSEVEDPFDHKNLNLDVSEFAELNPTAENICVVIYNKMRKKLEAEFEIEVTLYETPRNFVSYNGK

SEQ ID NO: 21692 - protein, 154 aa, Leeuwenhoekiella nanhaiensis
  misc_feature (1)..(154): tr|A0A2G1VV90|A0A2G1VV90_9FLAO 6-carboxytetrahydropteri n synthase QueD OS=Leeuwenhoekiella nanhaiensis OX=1655 491 GN=CJ305_00200 PE=4 SV=1
MSNIRITKQFSFETGHALYGYDGKCRNVHGHSYKLSVTVIGTPISQSENVKFGMVIDFGDLKKIVKNEIVDVFDHATVFNKNTPHVELAKELSDRGHNVLLVDYQPTSEMMVIDFARKIQKHLPQNIKLFSLKLQETDTSFAEWYASDNEADLS

SEQ ID NO: 21693 - protein, 137 aa, Leeuwenhoekiella nanhaiensis
  misc_feature (1)..(137): tr|A0A2G1VNC3|A0A2G1VNC3_9FLAO 6-carboxy-5,6,7,8-tetrah ydropterin synthase OS=Leeuwenhoekiella nanhaiensis OX= 1655491 GN=CJ305_16035 PE=3 SV=1
MTRVTVKRKAHFNAAHRLFRADWDDQKNLEVFGKCSYPNYHGHNYDLIVSVTGAIDPETGFVIDLKVLKDLIKEEIEDHFDHKNLNEDLPEFKNLNPTAENICVVIYNKLKSRLDTKFDLEITLYETARNFVTYSGT

SEQ ID NO: 21694 - protein, 137 aa, Leeuwenhoekiella palythoae
  misc_feature (1)..(137): tr|A0A1M5UKC1|A0A1M5UKC1_9FLAO 6-carboxy-5,6,7,8-tetrah ydropterin synthase OS=Leeuwenhoekiella palythoae OX=57 3501 GN=SAMN04487999_0703 PE=3 SV=1
MKQVTVKRKAHFNAAHRLYRVDWDDAKNLEVFGKCSYPNYHGHNYELIVAVTGPIDPETGFVIDLKVLKDLIKAEVEEPFDHKNLNLDVPEFSTINPTAENICVVIYDRLKRHLSETFKIEVTLYETPRNSVTYSGE

SEQ ID NO: 21695 - protein, 150 aa, Leeuwenhoekiella palythoae
  misc_feature (1)..(150): tr|A0A1M5W117|A0A1M5W117_9FLAO 6-pyruvoyltetrahydropter in/6-carboxytetrahydropterin synthase OS=Leeuwenhoekiel la palythoae OX=573501 GN=SAMN04487999_0995 PE=4 SV=1
MSNIRITKQFSFETGHALYGYDGKCRNVHGHSYKLSVTVIGTPISDNNNVKFGMVIDFGDLKKIVKSEIVDVFDHATVFNKNTPHVELAKELSDRGHNVLLVDYQPTSEMMVIDFAEKIKKHLPENITLFSLKLQETDTSFAEWYAADNA

SEQ ID NO: 21696 - protein, 150 aa, Leeuwenhoekiella polynyae
  misc_feature (1)..(150): tr|A0A4Q0P924|A0A4Q0P924_9FLAO 6-pyruvoyltetrahydropter in/6-carboxytetrahydropterin synthase OS=Leeuwenhoekiel la polynyae OX=1550906 GN=DSM02_1604 PE=4 SV=1
MSNIRITKQFSFETGHALYGYDGKCRNVHGHSYKLSVTVIGTPISDTKNVKFGMVIDFGDLKKIVKGEIVDVFDHATVFNKNTPHVELAKELSDRGHNVLLVDYQPTSEMMVIDFAEKIQKHLPQNIKLFSLKLQETDSSFAEWYASDNV

SEQ ID NO: 21697 - protein, 136 aa, Leeuwenhoekiella polynyae
  misc_feature (1)..(136): tr|A0A4Q0NUI8|A0A4Q0NUI8_9FLAO 6-carboxy-5,6,7,8-tetrah ydropterin synthase OS=Leeuwenhoekiella polynyae OX=155 0906 GN=DSM02_3525 PE=3 SV=1
MRVTVSRKAHFNAAHRLYRSDWNDAKNLDVFGKCSYPNYHGHNYELIVAVTGEIDMETGFVIDLKILKDIIKSEVEDPFDHKNLNLDVPEFAELNPTAENICVVIYTKMRKKIGAEFDIEVTLYETPRNFVSYSGQ

SEQ ID NO: 21698 - protein, 150 aa, Leeuwenhoekiella sp.; identical to SEQ ID NO: 21688
  misc_feature (1)..(150): tr|A0A2D9E4H9|A0A2D9E4H9_9FLAO 6-carboxytetrahydropteri n synthase OS=Leeuwenhoekiella sp. OX=1977054 GN=CMF32_ 11765 PE=4 SV=1

SEQ ID NO: 21699 - protein, 136 aa, Leeuwenhoekiella sp.
  misc_feature (1)..(136): tr|A0A4Q0NT88|A0A4Q0NT88_9FLAO 6-carboxy-5,6,7,8-tetrah ydropterin synthase OS=Leeuwenhoekiella sp. R-50232 OX= 2249425 GN=DSM04_1055 PE=3 SV=1
MRVTVSRKAHFNAAHRLYRSDWDDAKNLDVFGKCSYPNYHGHNYELIVAVTGEIDIETGFVIDLKILKDIIKSEVEDPFDHKNLNLDVPEFAELNPTAENICVVIYTKMRKKIGAEFDIEVTLYETPRNFVSYSGQ

SEQ ID NO: 21700 - protein, 165 aa, Legionella adelaidensis
  misc_feature (1)..(165): tr|A0A0W0R153|A0A0W0R153_9GAMM 6-pyruvoyl tetrahydropte rin synthase OS=Legionella adelaidensis OX=45056 GN=Lad e_2122 PE=4 SV=1
MAKYLTTVELQKESMKFSAGHTTIFSATEREPLHGHLYGVYLALTTWVEENGMTFDYRYYKERIHKLCRKLNQTFLMPQYSPFLEYAEDDEYFYFTFNGKKIPFLKEDVTLMPLSNITVEELSRWFVNELIKDKNELERHRLEKIVVKVFSAPGQSASHCWEKEQ

SEQ ID NO: 21701 - protein, 127 aa, Legionella anisa
  misc_feature (1)..(127): tr|A0A2Z3KSA0|A0A2Z3KSA0_9GAMM 6-carboxytetrahydropteri n synthase OS=Legionella anisa OX=28082 GN=DLD14_05595 PE=4 SV=1
MHHLMLRKNFIAQHFLIGKDFGAENLRHSHHYSFELEIENTKLDQFNFLIDIVEVRAHIEHLISYFQDKILNDLPEFKNQNPSLELFSKILWQKFNNHIELPIDSQITIRLWEDDIAQASYREPKCA

SEQ ID NO: 21702 - protein, 168 aa, Legionella anisa
  misc_feature (1)..(168): tr|A0A2Z3KJ54|A0A2Z3KJ54_9GAMM 6-pyruvoyl tetrahydrobio pterin synthase OS=Legionella anisa OX=28082 GN=DLD14_0 2250 PE=4 SV=1
MNRKKYLTTVELQKESMKFSAGHTTIFSATEREPLHGHMYGVYLALTTWVEENGMTFDYRYYKERIHKLCRYLNQTFLMPQFSPFLEYAEDEEYYYFTFNHKKIPFLKEDVTLLPVTNITVEELSRWFVQELIKDKAELERHRIEKVVVKVFSAPGQSASHQWQRENE

SEQ ID NO: 21703 - protein, 165 aa, Legionella beliardensis
  misc_feature (1)..(165): tr|A0A378I4Q0|A0A378I4Q0_9GAMM 6-pyruvoyl tetrahydrobio pterin synthase OS=Legionella beliardensis OX=91822 GN= NCTC13315_02752 PE=4 SV=1
MTKYLTTVELQKESMKFSAGHTTIFSATEREPLHGHMYAVYLALTTWVEENGMTFDYRYYKERIHTLCRFLNQTFLMPQYSPFLTMSEDETYYYFTFNHKKIPFLKEDVTLLPLTNITVEELSRWFVSELIKDREELVRHRIEKVVVKVFSAPGQSASHEWSRQK

SEQ ID NO: 21704 - protein, 169 aa, Legionella birminghamensis
  misc_feature (1)..(169): tr|A0A378IDH1|A0A378IDH1_9GAMM 6-pyruvoyl tetrahydrobio pterin synthase OS=Legionella birminghamensis OX=28083 GN=NCTC12437_00087 PE=4 SV=1
MSKYLTTVELQKESMKFSAGHTTIFSATEREPLHGHMYGVYLALTTWVEDNGMTFDYRYYKHRVHHLCRFLNQTFLMPQYSPFLEFSEDEEYYYFVFNKKKIPFLKEDVTLMPLTNITVEELSRWFVEELIKEKEELDKHRIEKVVVKVFSAPGQSASHQWQRHAKASQ

SEQ ID NO: 21705 - protein, 152 aa, Legionella birminghamensis
  misc_feature (1)..(152): tr|A0A378IB01|A0A378IB01_9GAMM Queuosine biosynthesis p rotein QueD OS=Legionella birminghamensis OX=28083 GN=N CTC12437_01737 PE=4 SV=1
MYISTKKFIGYPCAHRQWKDTGHCRLVHGYSREFTFWFKATSLDDKSWVMDFGAFKEFKTFLDDYFDHSCLINSNDPELPLFRELDKKGIIRLRVLENVGMEGTSEFLHQKMNEYLDQKTDGRVYCFRVETRENEKNSGIFELEKENLQQYR

SEQ ID NO: 21706 - protein, 165 aa, Legionella brunensis
  misc_feature (1)..(165): tr|A0A0W0SUU0|A0A0W0SUU0_9GAMM 6-pyruvoyl tetrahydropte rin synthase OS=Legionella brunensis OX=29422 GN=Lbru_0 186 PE=4 SV=1
MMKKYLTTVELQKESMKFSAGHTTIFSATEREPLHGHMYAVYLALTTWVEENGMTFDYRYYKERIHKLCRYLNQTFLMPQFSPFLQMAEDDEYYYFTFNKKKIPFLKEDVTLMPLTNITVEELSRWFVQELIKDTQELDKHRIEKVVVKVFSAPGQSASHEWQRR

SEQ ID NO: 21707 - protein, 166 aa, Legionella busanensis
  misc_feature (1)..(166): tr|A0A378JSX0|A0A378JSX0_9GAMM 6-pyruvoyl tetrahydrobio pterin synthase OS=Legionella busanensis OX=190655 GN=N CTC13316_02996 PE=4 SV=1
MTKYLTTVELQKESMKFSAGHTTIFSATEREPLHGHMYGVYLALTTWVEENGMTFDYRYYKDRIHKLCRFLNQTFLMPTYSPFLTMSEDEEYYYFIFNKKKIPFLKEDVTLLPLTNITVEELSRWFVNELIKDSEELIKHRIEKVVVKVFSAPGQSASHEWVKQSN

SEQ ID NO: 21708 - protein, 168 aa, Legionella cherrii
  misc_feature (1)..(168): tr|A0A0W0SCM3|A0A0W0SCM3_9GAMM 6-pyruvoyl tetrahydropte rin synthase OS=Legionella cherrii OX=28084 GN=Lche_279 2 PE=4 SV=1
MKIKKYLTTVELQKESMKFSAGHTTIFSATEREPLHGHMYGVYLALTTWVEENGMTFDYRYYKERIHKLCRYLNQTFLMPQFSPFLEYAEDKEYYYFTFNHKKIPFLKEDVTLLPVTNITVEELSRWFVNELIKDKAELDRHRIEQVVVKVFSAPGQSASHQWQRVHE

SEQ ID NO: 21709 - protein, 168 aa, Legionella cincinnatiensis
  misc_feature (1)..(168): tr|A0A378IGG1|A0A378IGG1_9GAMM 6-pyruvoyl tetrahydrobio pterin synthase OS=Legionella cincinnatiensis OX=28085 GN=NCTC12438_00162 PE=4 SV=1
MNEKKYLTTVELQKESMKFSAGHTTIFSATEREPLHGHMYGVYLALTTWVEENGMTFDYRYYKERIHKLCRYLNQTFLMPQFSPFLEYAEDEAYYYFTFNHKKIPFLKEDVTLLPVTNITVEELSKWFVHELIQDKEELERHRIEKVIVKVFSAPGQSASHEWQRADE

SEQ ID NO: 21710 - protein, 166 aa, Legionella clemsonensis
  misc_feature (1)..(166): tr|A0A222P697|A0A222P697_9GAMM 6-pyruvoyl tetrahydropte rin synthase OS=Legionella clemsonensis OX=1867846 GN=c lem_14165 PE=4 SV=1
MMKKYLTTVELQKESMKFSAGHTTIFSATEREPLHGHMYGVYLALTTWVEENGLTFDYRYYKERIHKLCRYLNQTFLMPQFSPFLQFAEDEDYYYFTFNNKKIPFLKEDVTLMPLTNITVEELSRWFVQELIKDTAELNKHRIEKVVVKVFSAPGQSASHEWYRQQ

SEQ ID NO: 21711 - protein, 164 aa, Legionella donaldsonii
  misc_feature (1)..(164): tr|A0A378IZ84|A0A378IZ84_9GAMM 6-pyruvoyl tetrahydrobio pterin synthase OS=Legionella donaldsonii OX=45060 GN=N CTC13292_00164 PE=4 SV=1
MKKYLTTVELQKESMKFSAGHTTIFSATEREPLHGHMYTVYLALTTWVEENGMTFDYRYYKERIYKLCHHLNQTFLMPQFSPFLQFSEDNEHYYFTFNHKRIPFLKEDVTLMPLTNITVEELSRWFVEELIKDKTELDRHRIEKIVVKVFSAPGQSASHEWQRS

SEQ ID NO: 21712 - protein, 163 aa, Legionella donaldsonii
  misc_feature (1)..(163): tr|A0A378J8B9|A0A378J8B9_9GAMM 6-pyruvoyl tetrahydropte rin synthase/QueD family protein OS=Legionella donaldso nii OX=45060 GN=NCTC13292_01989 PE=4 SV=1
MTYIITKTFKIDVAERNWKKGRAQTRGKDHYDLNDMCPEFQIHGHTLHFDISLKGHELDETGFILDTDILKNLMKEKIKALDHSFLLHKLDPLYADIEVLVEKHRIKIYATEYVISYENIAKDIFLYCAKQLKQHGLEDSVSVDSVCVYSKTISGTYTESQAN

SEQ ID NO: 21713 - protein, 167 aa, Legionella drancourtii
  misc_feature (1)..(167): tr|G9EJJ7|G9EJJ7_9GAMM 6-pyruvoyl tetrahydropterin synt hase OS=Legionella drancourtii LLAP12 OX=658187 GN=LDG_ 5363 PE=4 SV=1
MKIKKYLTTVELQKEAMKFSAGHTTIFSATEREPLHGHLYGVYLALTTWVEENGMTFDYRYYKERIHKLCRHLNQTFLMPEFSPFLEYAEDETYYYFTFNHKKIPFLKEDVTILPVTNITVEELSRWFVNELIKDTAELDRHRIDKVVVKVFSAPGQSASHDWQRPA

SEQ ID NO: 21714 - protein, 127 aa, Legionella drozanskii
  misc_feature (1)..(127): tr|A0A0W0SMZ8|A0A0W0SMZ8_9GAMM 6-pyruvoyl tetrahydropte rin synthase OS=Legionella drozanskii LLAP-1 OX=1212489 GN=Ldro_2922 PE=4 SV=1
MHCLMLRKNFIAQHFLIGKDFGCENLTHSHHYRFELEIENKHLDQYNFLIDIVEVRAYIDQLISYFQDKILNDLPEFINQNPSLELFSKILWQKFDNHFEFPANSQIIVRLWEDEIAQASYREAIYA

SEQ ID NO: 21715 - protein, 165 aa, Legionella drozanskii
  misc_feature (1)..(165): tr|A0A0W0SYP5|A0A0W0SYP5_9GAMM 6-pyruvoyl tetrahydropte rin synthase OS=Legionella drozanskii LLAP-1 OX=1212489 GN=Ldro_1672 PE=4 SV=1
MIKKYLTTVELQKESMKFSAGHTTIFSATEREPLHGHMYAVYLALTTWVEENGMTFDYRYYKERIHKLCRYLNQTFLMPQFSPFLEYAEDENYYYFTFNHKKIPFLKEDVTLMPVTNITVEELSRWFVEELIKDKAELDRHRIEKVVIKVFSAPGQSASHEWQRS

SEQ ID NO: 21716 - protein, 165 aa, Legionella erythra
  misc_feature (1)..(165): tr|A0A0W0TV72|A0A0W0TV72_LEGER 6-pyruvoyl tetrahydropte rin synthase OS=Legionella erythra OX=448 GN=Lery_0221 PE=4 SV=1
MSKYLTTVELQKESMKFSAGHTTIFSATEREPLHGHMYSVYLALTTWVEENGMTFDYRYYKERIHKLCRQLNQTFLMPQFSPFLKYAEDENYLYFTFNHKKIPFLKEDVTLMPLTNITVEELSRWFVQELIKDTAELNRHRIDKVVVKVFSAPGQSASHEWQRAS

SEQ ID NO: 21717 - protein, 164 aa, Legionella fallonii
  misc_feature (1)..(164): tr|A0A098GA82|A0A098GA82_9GAMM 6-pyruvoyl tetrahydrobio pterin synthase OS=Legionella fallonii LLAP-10 OX=12124 91 GN=LFA_3596 PE=4 SV=1
MIKRYLTTVELQKESMKFSAGHTTIFSATEREPLHGHMYNVYLALTTWVEENGMTFDYRYYKERIHKLCRQLNQTFLMPQYSPFLEYGEDKEYYYFTFNHKKIPFLKEDVTLMPLTNITVEELSRWFVNELIKEHEELDRHRIEKVVVKVFSAPGQSASHEWLR

SEQ ID NO: 21718 - protein, 163 aa, Legionella feeleii
  misc_feature (1)..(163): tr|A0A378ISZ0|A0A378ISZ0_9GAMM 6-pyruvoyl tetrahydropte rin synthase/QueD family protein OS=Legionella feeleii OX=453 GN=NCTC11978_01170 PE=4 SV=1
MTYIITKTFKIDVAERNWKKGRAQTRGKDHYDLNDMCPEFQIHGHTLHFDISLKGHELDETGFILDTDILKNLMKEKIKALDHSFLLHKLDPLYADIEVLVEKHRIKIYATDYVISYENIAKDIFLYCAKQLKQKGLEDSVSVDSVCVYSKTISGTYTESQAN

SEQ ID NO: 21719 - protein, 166 aa, Legionella feeleii
  misc_feature (1)..(166): tr|A0A0W0U804|A0A0W0U804_9GAMM 6-pyruvoyl tetrahydrobio pterin synthase OS=Legionella feeleii OX=453 GN=Lfee_03 20 PE=4 SV=1
MIMKKYLTTVELQKESMKFSAGHTTIFSATEREPLHGHMYTVYLALTTWVEENGMTFDYRYYKERIYKLCNHLNQTFLMPQFSPFLQFSEDNEHYYFTFNHKRIPFLKEDVTLMPLTNITVEELSRWFVEELIKDKTELDRHRIEKIVVKVFSAPGQSASHEWQRS

SEQ ID NO: 21720 - protein, 164 aa, Legionella geestiana
  misc_feature (1)..(164): tr|A0A0W0TNW0|A0A0W0TNW0_9GAMM 6-pyruvoyl tetrahydrobio pterin synthase OS=Legionella geestiana OX=45065 GN=E4T 54_06415 PE=4 SV=1
MKRYLTTVELQKESMKFAAGHTTIFSATEREPLHGHQYNVYLALTTWVEDNGMTFDYRYYKERIHTLCRRVNQTFLMPQFSPYLSHREDEEYHYFTFNGKTMPFLKEDVTLMPLCNITVEELSRWFVQELIADAAELERHRIEELVIKVFSAPGQCASHRWKRG

SEQ ID NO: 21721 - protein, 168 aa, Legionella gratiana
  misc_feature (1)..(168): tr|A0A378J0J2|A0A378J0J2_9GAMM 6-pyruvoyl tetrahydrobio pterin synthase OS=Legionella gratiana OX=45066 GN=NCTC 12388_00138 PE=4 SV=1
MNEKKYLTTVELQKESMKFSAGHTTLFSATEREPLHGHMYGVYLALTTWVEENGMTFDYRYYKERIHKLCRYLNQTFLMPQFSPFLEYAEDEAYYYFTFNHKKIPFLKEDVTLLPLTNITVEELSRWFVYELVQDKDELDRHRIEKIVVKVFSAPGQSASHEWQRVDE

SEQ ID NO: 21722 - protein, 165 aa, Legionella hackeliae
  misc_feature (1)..(165): tr|A0A0A8UKB8|A0A0A8UKB8_LEGHA Uncharacterized protein OS=Legionella hackeliae OX=449 GN=LHA_0207 PE=4 SV=1
MKKYLTTVELQKESMKFSAGHTTIFSATEREPLHGHMYGVYLALTTWVEENGMTFDYRYYKERIHKLCRHLNQTFLMPEYSPFLQFAEDEEYYYFTFNHKKIPFLKEDVTLMPLTNITVEELSRWFVQELIKDKEELDKHRIEKVVVKVFSAPGQSANHEWQRPR

SEQ ID NO: 21723 - protein, 164 aa, Legionella israelensis
  misc_feature (1)..(164): tr|A0A0W0WQI0|A0A0W0WQI0_9GAMM 6-pyruvoyl tetrahydrobio pterin synthase OS=Legionella israelensis OX=454 GN=FOG 18_03275 PE=4 SV=1
MKKYLTTVELQKESMKFSAGHTTIFSATEREPLHGHQYGVYLALTTWVEENGLTFDYRYYKEKIHTLCKYLNQTFLMPQYSPFLSIEEDEDYYYFTFNRKKMPFLKEDVTLLPLTNITVEELSRWFVNELIKNKEELEKHRIEQITVKIFSAPGQSASHQWSRS

SEQ ID NO: 21724 - protein, 173 aa, Legionella israelensis
  misc_feature (1)..(173): tr|A0A516MY02|A0A516MY02_9GAMM 6-carboxy-5,6,7,8-tetrah ydropterin synthase OS=Legionella israelensis OX=454 GN =FOG18_02680 PE=4 SV=1
MSYRITKLFKLDMGHRTWSQDMRKGRGKEFYMADSPYPYNKCANIHGHSLIISITLGSNTLDQQNFVMDTDLFKIPFQKRIIDQMDHSFVIDKNDPLFNDFKTIASKDNLRLYVVDFSPSFEALAEFFFNCMNDIIKEVSLEKEINIIEAKVTGEHMTVEAVYNKTSHDLKRM

SEQ ID NO: 21725 - protein, 171 aa, Legionella jamestowniensis
  misc_feature (1)..(171): tr|A0A0W0UIX9|A0A0W0UIX9_9GAMM 6-pyruvoyl tetrahydropte rin synthase OS=Legionella jamestowniensis OX=455 GN=Lj am_2053 PE=4 SV=1
MMKKYLTTVELQKESMKFSAGHTTIFSATEREPLHGHMYGVYLALTTWVEENGLTFDYRYYKERIHKLCRYLNQTFLMPQFSPFLQFAEDEEYYYFTFNHKKIPFLKEDVTLMPVTNITVEELSRWFVQELISDPVELDKHRIEKVVVKVFSAPGQSASHEWQRPRESAIA

SEQ ID NO: 21726 - protein, 166 aa, Legionella jordanis
  misc_feature (1)..(166): tr|A0A0W0VCD2|A0A0W0VCD2_9GAMM 6-pyruvoyl tetrahydropte rin synthase OS=Legionella jordanis OX=456 GN=Ljor_2099 PE=4 SV=1
MMKRYLTTVELQKESMKFSAGHTTIFSATEREPLHGHMYAVYLALSTWVEENGLTFDYRYYKERIHKLCRSLNQTFLMPQYSPFLQYAEDDDYYYFTFNHKKIPFLKEDVTLMPLTNITVEELSRWFVQELIKDKEELDKHRIEKVVVKVFSAPGQSASHDWQRQA

SEQ ID NO: 21727 - protein, 166 aa, Legionella lansingensis
  misc_feature (1)..(166): tr|A0A0W0VLD0|A0A0W0VLD0_9GAMM 6-pyruvoyl tetrahydropte rin synthase OS=Legionella lansingensis OX=45067 GN=Lla n_1630 PE=4 SV=1
MMKKYLTTVELQKESMKFSAGHTTIFSATEREPLHGHMYGVYLALTTWVEENGMTFDYRYYKERIHKLCRSLNQTFLMPKFSPFLQLIEDEDYYYFTFNQKKIPFLKEDVTLMPLTNITVEELSRWFVQELIKDTKELDKHRIEKVVVKVYSAPGQSASHEWQRQQ

SEQ ID NO: 21728 - protein, 165 aa, Legionella londiniensis
  misc_feature (1)..(165): tr|A0A0W0VIF0|A0A0W0VIF0_9GAMM 6-pyruvoyl tetrahydropte rin synthase OS=Legionella londiniensis OX=45068 GN=Llo n_2065 PE=4 SV=1
MMAKYLTTVELQKESMQFSAGHTTIFSATEREPLHGHHYGVYLALTTWVEDNGLTFDYRYYKKRIHSLCRALNQTFLMPKFSPFLQFEEDETYYYFTFNHKKMPFLKEDVTLMPLSNITVEELSRWFVNELIKDEEELKRHRIERIVVKVFSAPGQSASHTWQRP

SEQ ID NO: 21729 - protein, 163 aa, Legionella longbeachae
  misc_feature (1)..(163): tr|A0A378L6W0|A0A378L6W0_LEGLO 6-pyruvoyl tetrahydrobio pterin synthase OS=Legionella longbeachae OX=450 GN=NCT C11477_02606 PE=4 SV=1
MAKYLTTVELQKESMKFSAGHTTIFSATEREPLHGHQYGVYLALTTWVEDNGMTFDYRYYKERIHTLCRHLNQTFLMPQYSPFLQYDEDDIYYYFTFNHKKIPFLKEDVTLMPLTNITVEELSRWFVNELIKDETELKRHRIERIVVKVFSAPGQSASHIWQR

SEQ ID NO: 21730 - protein, 168 aa, Legionella longbeachae
  misc_feature (1)..(168): tr|D3HNN9|D3HNN9_LEGLN Uncharacterized protein OS=Legio nella longbeachae serogroup 1 (strain NSW150) OX=661367 GN=LLO_0174 PE=4 SV=1
MNEKKYLTTVELQKESMKFSAGHTTIFSATEREPLHGHMYGVYLALTTWVEENGMTFDYRYYKERIHKLCRYLNQTFLMPQYSPFLEYAEDEAYYYFTFNHKKIPFLKEDVTLLPVTNITVEELSKWFVHELIQDKDELDRHRIEKVVVKVFSAPGQSASHEWQRADE

SEQ ID NO: 21731 - protein, 165 aa, Legionella maceachernii
  misc_feature (1)..(165): tr|A0A0W0W1V9|A0A0W0W1V9_9GAMM 6-pyruvoyl tetrahydropte rin synthase OS=Legionella maceachernii OX=466 GN=Lmac_ 1481 PE=4 SV=1
MMKKYLTTVELQKESMKFSAGHTTIFSATEREPLHGHMYAVYLALTTWVEENGMTFDYRYYKERIHNLCRSLNQTFLMPQFSPFLEFAEDEAYYYFTFNHKKIPFLKEDVTLMPLTNITVEELSRWFVNELIKNKTELERHRIEKVVVKVFSAPGQSASHEWQRS

SEQ ID NO: 21732 - protein, 165 aa, Legionella massiliensis
  misc_feature (1)..(165): tr|A0A078KWF6|A0A078KWF6_9GAMM Queuosine biosynthesis p rotein QueD OS=Legionella massiliensis OX=1034943 GN=BN 59_00277 PE=4 SV=1
MKKYLTTVELQKESMKFSAGHTTIFSSTEREPLHGHMYGVYLALTTWVEENGMTFDYRYYKERIHKLCRHLNQTFLMPQFSPFLQFAEDDSYYYFTFNHKKIPFLKEDVTLMPLTNITVEELSRWFVEELVKDKAELIRHRLEKVVVKVFSAPGQSASHEWQRSE

SEQ ID NO: 21733 - protein, 164 aa, Legionella moravica
  misc_feature (1)..(164): tr|A0A378JZB2|A0A378JZB2_9GAMM 6-pyruvoyl tetrahydrobio pterin synthase OS=Legionella moravica OX=39962 GN=NCTC 12239_03016 PE=4 SV=1
MKKYLTTVELQKESMKFSAGHTTIFSATEREPLHGHMYGVYLALSTWVEENGMTFDYRYYKERIHKLCRQLNQTFLMPQFSPFLEYAEDAEYYYFTFNGKKIPFLKEDVTLMPLTNITVEELSRWFVNELIKEHEELDKHRIDKVVVKVFSAPGQSASHEWHRD

SEQ ID NO: 21734 - protein, 165 aa, Legionella nautarum
  misc_feature (1)..(165): tr|A0A0W0WP18|A0A0W0WP18_9GAMM 6-pyruvoyl tetrahydropte rin synthase OS=Legionella nautarum OX=45070 GN=Lnau_20 54 PE=4 SV=1
MIKKYLTTVELQKESMKFSAGHTTIFSATEREPLHGHMYAVYLALTTWVEENGMTFDYRYYKERVHKLCRYLNQTFLMPQFSPFLEYAEDEAYYYFTFNHKKIPFLKEDVTLMPVTNITVEELSRWFVEELIKDKGELDRHRIEKVLIKVFSAPGQSASHEWQRS

SEQ ID NO: 21735 - protein, 164 aa, Legionella norrlandica
  misc_feature (1)..(164): tr|A0A0A2TA30|A0A0A2TA30_9GAMM 6-pyruvoyl tetrahydrobio pterin synthase OS=Legionella norrlandica OX=1498499 GN =EP47_00065 PE=4 SV=1
MKKYLTTVELQKESMKFSAGHTTIFSATEREPLHGHLYSVYLALTTWVEENGMTFDYRYYKERIHKLCRYLNQTFLMPQFSPFLEYSEDKEYYYFTFNKKKIPFLKEDVTLMPLTNITVEELSRWFINELIKEKEELDKHRIEKIVVKVFSAPGQSASHEWLRS

SEQ ID NO: 21736 - protein, 163 aa, Legionella oakridgensis; identical to SEQ ID NO: 21729
  misc_feature (1)..(163): tr|A0A0W0X1F0|A0A0W0X1F0_9GAMM 6-pyruvoyl tetrahydropte rin synthase OS=Legionella oakridgensis OX=29423 GN=Loa k_1330 PE=4 SV=1

SEQ ID NO: 21737 - protein, 163 aa, Legionella oakridgensis; identical to SEQ ID NO: 21729
  misc_feature (1)..(163): tr|W0BID2|W0BID2_9GAMM 6-pyruvoyl-tetrahydropterin synt hase OS=Legionella oakridgensis ATCC 33761 = DSM 21215 OX=1268635 GN=Loa_02933 PE=4 SV=1

SEQ ID NO: 21738 - protein, 168 aa, Legionella parisiensis
  misc_feature (1)..(168): tr|A0A1E5JM02|A0A1E5JM02_9GAMM Uncharacterized protein OS=Legionella parisiensis OX=45071 GN=lpari_03314 PE=4 SV=1
MNRKKYLTTVELQKESMKFSAGHTTIFSATEREPLHGHMYGVYLALTTWVEENGMTFDYRYYKERIHKLCRYLNQTFLMPQFSPFLEYAEDEEYYYFTFNHKRIPFLKEDVTLLPVTNITVEELSRWFVHELIRDKAELDRHRIEKVVVKVFSAPGQSASHQWQREND

SEQ ID NO: 21739 - protein, 127 aa, Legionella parisiensis
  misc_feature (1)..(127): tr|A0A1E5JUF3|A0A1E5JUF3_9GAMM Uncharacterized protein OS=Legionella parisiensis OX=45071 GN=lpari_00799 PE=4 SV=1
MHHLMLRKNFIAQHFLIGKDFGAENLRHSHHYSFELEIENTKLDPLNFLIDIVEIRAHIDQLISYFQDKILNELPEFKNQNPSLELFSKILWQKFNNHIELPVDSQITVRLWEDDIAQASYRENKCA

SEQ ID NO: 21740 - protein, 164 aa, Legionella pneumophila
  misc_feature (1)..(164): tr|A0A140IZG0|A0A140IZG0_LEGPN 6-pyruvoyl tetrahydrobio pterin synthase OS=Legionella pneumophila subsp. pascul lei OX=91890 GN=AXF37_14310 PE=4 SV=1
MKKYLTTVELQKESMKFSAGHTTIFSATEREPLHGHMYSVYLALTTWVEENGMTFDYRYYKERIHKLCRYLNQTFLMPQFSPFLEYSEDEEYYYFIFNKKKIPFLKEDVTLMPLTNITVEELSRWFVNELIKEKEELDKHRIEKVVVKVFSAPGQSASHEWLRS

SEQ ID NO: 21741 - protein, 164 aa, Legionella pneumophila
  misc_feature (1)..(164): tr|Q5ZRL6|Q5ZRL6_LEGPH 6-pyruvoyl tetrahydropterin synt hase, putative OS=Legionella pneumophila subsp. pneumop hila (strain Philadelphia 1 / ATCC 33152 / DSM 7513) OX =272624 GN=lpg2865 PE=4 SV=1
MKKYLTTVELQKESMKFSAGHTTIFSATEREPLHGHMYSVYLALTTWVEENGMTFDYRYYKERIHKLCRYLNQTFLMPQFSPFLEYSEDEEYYYFIFNKKKIPFLKEDITLMPLTNITVEELSRWFVNELIKEKEELDNHRIEKVVVKVFSAPGQSASHEWLRS

SEQ ID NO: 21742 - protein, 164 aa, Legionella quateirensis
  misc_feature (1)..(164): tr|A0A378L0P7|A0A378L0P7_9GAMM 6-pyruvoyl tetrahydrobio pterin synthase OS=Legionella quateirensis OX=45072 GN= NCTC12376_03206 PE=4 SV=1
MKKYLTTVELQKESMKFSAGHTTIFSATEREPLHGHMYGVYLALSTWVEENGMTFDYRYYKERIHKLCRQLNQTFLMPQFSPFLEYAEDTEYYYFTFNGKKIPFLKEDVTLMPLTNITVEELSRWFVNELIKEHQELDKHRIDKVVVKVFSAPGQSASHEWQRD

SEQ ID NO: 21743 - protein, 169 aa, Legionella quinlivanii
  misc_feature (1)..(169): tr|A0A0W0Y580|A0A0W0Y580_9GAMM 6-pyruvoyl tetrahydropte rin synthase OS=Legionella quinlivanii OX=45073 GN=Lqui _0948 PE=4 SV=1
MNKYLTTVELQKESMKFSAGHTTIFSATEREPLHGHMYGVYLALTTWVEENGMTFDYRYYKQRIHNLCRFLNQTFLMPQYSPFLTFSEDEEYYYFVFNKKKIPFLKEDVTLMPLTNITVEELSRWFVEELIKEKEELDRHRIEKVLVKVFSAPGQSASHEWQRQPQAGK

SEQ ID NO: 21744 - protein, 170 aa, Legionella quinlivanii
  misc_feature (1)..(170): tr|A0A364LKQ1|A0A364LKQ1_9GAMM 6-pyruvoyl tetrahydrobio pterin synthase OS=Legionella quinlivanii OX=45073 GN=B 1207_03825 PE=4 SV=1
MSKYLTTVELQKESMKFSAGHTTIFSATEREPLHGHMYGVYLALTTWVEENGMTFDYRYYKQRIHNLCRFLNQTFLMPQYSPFLQFSEDEEYYYFVFNKKKIPFLKEDVTLMPLTNITVEELSRWFVEELIKEKEELDRHRIEKVVVKVFSAPGQSASHGWQRQHRQAND

SEQ ID NO: 21745 - protein, 164 aa, Legionella rubrilucens
  misc_feature (1)..(164): tr|A0A0W0XMC8|A0A0W0XMC8_9GAMM 6-pyruvoyl tetrahydropte rin synthase OS=Legionella rubrilucens OX=458 GN=Lrub_2 556 PE=4 SV=1
MSKYLTTVELQKESMKFSAGHTTLFSATEREPLHGHMYNVYLALTTWVEENGMTFDYRYYKERIHKLCRQLNQTFLMPQFSPFLQYAEDETYLYFTFNHKKIPFLKEDVTLMPLTNITVEELSRWFVQELIKDTAELDRHRIEKVVVKVFSAPGQSASHEWQRT

SEQ ID NO: 21746 - protein, 90 aa, Legionella sainthelensi
  misc_feature (1)..(90): tr|A0A3S4L5N4|A0A3S4L5N4_9GAMM 6-pyruvoyl tetrahydrobio pterin synthase OS=Legionella sainthelensi OX=28087 GN= NCTC12450_00123 PE=4 SV=1
MTFDYRYYKERIHKLCRYLNQTFLMPQFSPFLEYAEDEAYYYFTFNYKKIPFLKEDVTLLPVTNITVEELSKWFVHELIQDKDELDRPSH

SEQ ID NO: 21747 - protein, 168 aa, Legionella sainthelensi
  misc_feature (1)..(168): tr|A0A2H5FIU2|A0A2H5FIU2_9GAMM 6-pyruvoyl tetrahydrobio pterin synthase OS=Legionella sainthelensi OX=28087 GN= CAB17_04895 PE=4 SV=1
MNEKKYLTTVELQKESMKFSAGHTTIFSATEREPLHGHMYGVYLALTTWVEENGMTFDYRYYKERIHKLCRYLNQTFLMPQFSPFLEYAEDEAYYYFTFNYKKIPFLKEDVTLLPVTNITVEELSKWFVHELIQDKDELDRHRIEKVVVKVFSAPGQSASHEWQRADE

SEQ ID NO: 21748 - protein, 168 aa, Legionella santicrucis
  misc_feature (1)..(168): tr|A0A0W0Y9G4|A0A0W0Y9G4_9GAMM 6-pyruvoyl tetrahydropte rin synthase OS=Legionella santicrucis OX=45074 GN=Lsan _3613 PE=4 SV=1
MNEKKYLTTVELQKESMKFSAGHTTIFSATEREPLHGHMYGVYLALTTWVEENGMTFDYRYYKERIHKLCRYLNQTFLMPQFSPFLEYAEDEAYYYFTFNHKKIPFLKEDVTLLPVTNITVEELSKWFVHELIQDKDELDRHRIERVVVKIFSAPGQSASHEWQRADE

SEQ ID NO: 21749 - protein, 165 aa, Legionella shakespearei
  misc_feature (1)..(165): tr|A0A0W0YKW2|A0A0W0YKW2_9GAMM 6-pyruvoyl tetrahydropte rin synthase OS=Legionella shakespearei DSM 23087 OX=11 22169 GN=Lsha_2347 PE=4 SV=1
MKRYLTTVELQKESMKFSAGHTTIFSATEREPLHGHMYCVYLALTTWVEENGMTFDYRYYKERIHVLCHQLNQTFLMPQFSPFLQYAEDDEYYYFTFNHKKIPFLKEDVTLMPLSNITVEELSRWFVNELIKDTEELDRHRIEKVVVKVFSAPGQSANHEWHRVK

SEQ ID NO: 21750 - protein, 163 aa, Legionella sp.
  misc_feature (1)..(163): tr|A0A3S0XTJ0|A0A3S0XTJ0_9GAMM 6-pyruvoyl tetrahydrobio pterin synthase OS=Legionella sp. km714 OX=2498110 GN=E KM59_04485 PE=4 SV=1
MGKYLTTVELQKESMKFSAGHTTIFSATEREPLHGHMYGVYLALTTWVEDNGMTFDYRYYKKRIHELCRQLNQTFLMPQFSPFLQYAEDDEYYYFTFNHKKIPFLKEDVTLMPLANITVEELSRWFINELIKDTAELERHRIERIVVKVFSAPGQSASHSWER

SEQ ID NO: 21751 - protein, 168 aa, Legionella sp.
  misc_feature (1)..(168): tr|A0A1Q3TWN2|A0A1Q3TWN2_9GAMM 6-pyruvoyl tetrahydrobio pterin synthase OS=Legionella sp. 39-23 OX=1895902 GN=B GO44_16850 PE=4 SV=1
MNIKKYLTTVELQKESMKFSAGHTTIFSATEREPLHGHMYGVYLALTTWVEENGMTFDYRYYKERIHKLCRHLNQTFLMPQFSPFLEYAEDKEYYYFTFNHKKIPFLKEDVTLLPVTNITVEELSRWFVNELIKDKAELDRHRIEQVLVKVFSAPGQSASHQWQRVHE

SEQ ID NO: 21752 - protein, 172 aa, Legionella spiritensis
  misc_feature (1)..(172): tr|A0A0W0ZAU7|A0A0W0ZAU7_LEGSP 6-pyruvoyl tetrahydropte rin synthase OS=Legionella spiritensis OX=452 GN=Lspi_0 040 PE=4 SV=1
MTMSRYLTTVELQKESMKFSAGHTTLFSATEREPLHGHMYTVYLALTTWVEENGMTFDYRYYKDRIHQLCRHLNQTFLMPKFSPFLTFAEDDTYYYFTFNHKKIPFLKEDVTIMPLTNITVEELSRWFVEELIKDREELIRHRIEKIVIKVFSAPGQSASHQWLRPQESGQE

SEQ ID NO: 21753 - protein, 168 aa, Legionella steelei
  misc_feature (1)..(168): tr|A0A0W0ZK87|A0A0W0ZK87_9GAMM 6-pyruvoyl tetrahydropte rin synthase OS=Legionella steelei OX=947033 GN=Lste_27 53 PE=4 SV=1
MNIKKYLTTVELQKESMKFSAGHTTIFSATEREPLHGHMYGVYLALTTWVEENGMTFDYRYYKERIHKLCRHLNQTFLMPQFSPFLEYAEDKEYYYFTFNHKRIPFLKEDVTLLPVTNITVEELSRWFVNELIKDKAELDRHRIEQVLVKVFSAPGQSASHQWQRMHE

SEQ ID NO: 21754 - protein, 168 aa, Legionella steigerwaltii
  misc_feature (1)..(168): tr|A0A378L7B4|A0A378L7B4_9GAMM 6-pyruvoyl tetrahydrobio pterin synthase OS=Legionella steigerwaltii OX=460 GN=N CTC11991_00137 PE=4 SV=1
MNKKKYLTTVELQKESMKFSAGHTTIFSATEREPLHGHMYGVYLALTTWVEENGMTFDYRYYKERIHKLCRYLNQTFLMPQFSPFLEYAEDEEYYYFTFNHKKIPFLKEDVTLLPVTNITVEELSRWFVNELIKDRAELDRHRIENVLVKVFSAPGQSASHQWQRVHE

SEQ ID NO: 21755 - protein, 164 aa, Legionella taurinensis
  misc_feature (1)..(164): tr|A0A3A5LGL1|A0A3A5LGL1_9GAMM 6-pyruvoyl tetrahydrobio pterin synthase OS=Legionella taurinensis OX=70611 GN=D 6J04_09875 PE=4 SV=1
MSKYLTTVELQKESMKFSAGHTTIFSATEREPLHGHMYNVYLALTTWVEENGMTFDYRYYKERIHKLCRQLNQTFLMPQFSPFLQYAEDETYLYFTFNHKKIPFLKEDVTLMPLTNITVEELSRWFVQELIKDTAELDRHRIEKVVVKVFSAPGQSASHEWQRT

SEQ ID NO: 21756 - protein, 168 aa, Legionella tucsonensis
  misc_feature (1)..(168): tr|A0A0W0ZSX7|A0A0W0ZSX7_9GAMM 6-pyruvoyl tetrahydropte rin synthase OS=Legionella tucsonensis OX=40335 GN=Ltuc _0140 PE=4 SV=1
MNRKKYLTTVELQKESMKFSAGHTTIFSATEREPLHGHMYGVYLALTTWVEENGMTFDYRYYKERIHKLCRYLNQTFLMPQFSPFLEYAEDEEYYYFTFNHKKIPFLKEDVTLLPVTNITVEELSRWFVHELIKDTAELDRHRIEKVVVKVFSAPGQSASHQWQRANE

SEQ ID NO: 21757 - protein, 127 aa, Legionella tucsonensis
  misc_feature (1)..(127): tr|A0A0W0ZXK2|A0A0W0ZXK2_9GAMM 6-pyruvoyl tetrahydropte rin synthase OS=Legionella tucsonensis OX=40335 GN=Ltuc _1732 PE=4 SV=1
MHHLMLRKNFIAQHFLIGKDFGAENLRHSHHYSFELEIENTKLDPFNFLIDIVEVRTHIDQLISYFQDKILNELPEFKNQNPSLELFSKILWQKFNNHIELPVDSQITVRLWEDDIAQASYRENKCA

SEQ ID NO: 21758 - protein, 125 aa, Legionella wadsworthii
  misc_feature (1)..(125): tr|A0A378LUL8|A0A378LUL8_9GAMM Queuosine biosynthesis p rotein QueD OS=Legionella wadsworthii OX=28088 GN=NCTC1 1532_01706 PE=4 SV=1
MHSLIIRKDFIAQHFLIGKDFGFESSIHSHNYGFELEIENALLNQYNFLVDVEDINKQINTLIDYFQDRILNDLPEFKDQNPSLEFFSKILWKKFNEDFFIPANSLVTVRLSEDRIAQAAYREIR

SEQ ID NO: 21759 - protein, 168 aa, Legionella wadsworthii
  misc_feature (1)..(168): tr|A0A378LQ38|A0A378LQ38_9GAMM 6-pyruvoyl tetrahydrobio pterin synthase OS=Legionella wadsworthii OX=28088 GN=N CTC11532_00119 PE=4 SV=1
MNKKKYLTTVELQKESMKFSAGHTTIFSATEREPLHGHMYGVYLALTTWVEENGMTFDYRYYKERTHKLCRYLNQTFLMPQFSPFLEYAEDDEYYYFTFNHKKIPFLKEDVTLLPVSNITVEELSRWFVQELIKDKEELDRHRIEKIIVKVFSAPGQSASHQWQRENE

SEQ ID NO: 21760 - protein, 165 aa, Legionella waltersii
  misc_feature (1)..(165): tr|A0A0W1A571|A0A0W1A571_9GAMM 6-pyruvoyl tetrahydropte rin synthase OS=Legionella waltersii OX=66969 GN=Lwal_2 090 PE=4 SV=1
MSKYLTTVELQKETMKFSAGHTTIFSATEREPLHGHMYTVYLALSTWVEENGMTFDYRYYKERIHKLCRYLNQTFLMPEFSPFLEYDEDKEYYYFTFNKKKMPFLKEDVTILPVTNITVEELSRWFVNELIKDEVELERHRIERVVVKVFSAPGQSASHEWQKSK

SEQ ID NO: 21761 - protein, 164 aa, Legionella worsleiensis
  misc_feature (1)..(164): tr|A0A0W1AEP1|A0A0W1AEP1_9GAMM 6-pyruvoyl tetrahydropte rin synthase OS=Legionella worsleiensis OX=45076 GN=Lwo r_1328 PE=4 SV=1
MKKYLTTVELQKESMKFSAGHTTIFSATEREPLHGHMYGVYLALSTWVEENGMTFDYRYYKERIHKLCRQLNQTFLMPQFSPFLQYAEDEEYYYFTFNGKKIPFLKEDVTLMPLTNITVEELSRWFVNELIKEHEELDKHRIDKVVVKVFSAPGQSASHEWHRD

SEQ ID NO: 21762 - protein, 167 aa, Legionellales bacterium
  misc_feature (1)..(167): tr|A0A1G0WVR7|A0A1G0WVR7_9GAMM 6-pyruvoyl tetrahydrobio pterin synthase OS=Legionellales bacterium RIFCSPHIGHO2 _12_FULL_37_14 OX=1798568 GN=A3F18_04570 PE=4 SV=1
MTKRYVSTIELQKESMKFAAGHTTIFSATEREPLHGHHYTVYFALTTWVFENGMTFDYRYYKAKLKELCSKLHQTFLMPMNSPYLTFSEDEEYYYFVFNNKKIPFLKEDVTLMPLTNITVEELAKWFIDNLLKDKRELDKHRVEKMVIKVFSAPGQSGSHTWEKEAK

SEQ ID NO: 21763 - protein, 118 aa, Legionellales bacterium
  misc_feature (1)..(118): tr|A0A2E6KSL6|A0A2E6KSL6_9GAMM 6-carboxy-5,6,7,8-tetrah ydropterin synthase OS=Legionellales bacterium OX=20267 54 GN=queD PE=3 SV=1
MEIYKSFRIEAAHRLPNLPSHHKCSRLHGHSFVIEVHLSGEIDKKHGWVMDFADISGAFQSVYKRLDHHYLNDIDGLENPTSENLAKWIWNELIINLPSLHSVVVKETCNSGCVYKGE

SEQ ID NO: 21764 - protein, 120 aa, Leifsonia aquatica
  misc_feature (1)..(120): tr|U2RXJ8|U2RXJ8_LEIAQ 6-carboxy-5,6,7,8-tetrahydropter in synthase OS=Leifsonia aquatica ATCC 14665 OX=1358026 GN=N136_00380 PE=3 SV=1
MQPLRTEISFEFTFQAAHTLPWHSGKCRNMHGHSYRCELFFAGQLTDEGIVVDFDAVDSFVAGELMPVLDHTYLNDSMPNPTAELIAARIFLIADAAGLPISGVRLWETATSSAIVRPTP

SEQ ID NO: 21765 - protein, 127 aa, Leifsonia flava
  misc_feature (1)..(127): tr|A0A4Y9QUN4|A0A4Y9QUN4_9MICO 6-carboxy-5,6,7,8-tetrah ydropterin synthase OS=Leifsonia flava OX=2561933 GN=qu eD PE=3 SV=1
MTFYAELARTFSFESAHYLPNVPDGHKCGRMHGHSYTVEVQVAGNVGDKSGFVQDFGDLSVAFAPVQEQLDHHLLNEIEGLENPTSEHLARWIWLRLVDELPLLSAIVVSETLRSTCTYRGEPNGAK

SEQ ID NO: 21766 - protein, 131 aa, Leifsonia sp.
  misc_feature (1)..(131): tr|A0A3D8N878|A0A3D8N878_9MICO 6-carboxytetrahydropteri n synthase OS=Leifsonia sp. ku-ls OX=2220072 GN=DOE76_0 7675 PE=4 SV=1
MPYTVTVRDHMMVAHSFTGEAFGPAQRLHGATLVVDATFGADELDADGVVVDIGRASAALAEVTGALTYRNLDELPDFAGRNTTTEVLCRTIADRLAERVSASELGGGAVTSITVTLHESHIAWASYSRTL

SEQ ID NO: 21767 - protein, 131 aa, Leifsonia sp.
  misc_feature (1)..(131): tr|A0A0Q8V2M1|A0A0Q8V2M1_9MICO 6-pyruvoyl tetrahydropte rin synthase OS=Leifsonia sp. Root227 OX=1736496 GN=ASE 16_00975 PE=4 SV=1
MPYTVTVRDHMMVAHSFTGEVFGPAQRLHGATFIVDATFGADDVDADGIVVDIGLVTAVLGEITGSLTYRNLDDEPEFAGTNTTTEVLCRVIADRLAARAADGGLGTNSIASVSVTLHESHIAWASYSRPL

SEQ ID NO: 21768 - protein, 193 aa, Leifsonia xyli
  misc_feature (1)..(193): tr|A0A2W5RKF9|A0A2W5RKF9_9MICO 6-pyruvoyl tetrahydrobio pterin synthase OS=Leifsonia xyli OX=1575 GN=DI534_1484 0 PE=4 SV=1
MSYKVIRTHEICAGHRVVGHESKCRHLHGHNYMFHFHVAPKMKTVAVATGKARHVEGQGFKQTYRDMTVNDRTKLDAVGRVIDFSVVKSTLCEWLELNWDHKFLHWEKDDLINGLAALAKNDQTFDEDQRDVGQKDFHHFTDSLVALPFNPTAENLAAYMVNVIGPRLLDEHDVELVQCVIEETSKCHVEYTK

SEQ ID NO: 21769 - protein, 128 aa, Leifsonia xyli
  misc_feature (1)..(128): tr|A0A172X5H5|A0A172X5H5_9MICO 6-pyruvoyl tetrahydropte rin synthase OS=Leifsonia xyli OX=1575 GN=A0130_09595 P E=4 SV=1
MPYTVTVRDHLMVAHSFRGEVFGPAQRLHGATFVVDASFGADELDADGVVVDIGRASAALADITGALTYRNLDEDPDFAGVNTTTEVLCRTIADRLAERAGDLGGALTSITVTLHESHIAWASYSRSL

SEQ ID NO: 21770 - protein, 117 aa, Leisingera aquaemixtae
  misc_feature (1)..(117): tr|A0A0P1HEG5|A0A0P1HEG5_9RHOB 6-carboxy-5,6,7,8-tetrah ydropterin synthase OS=Leisingera aquaemixtae OX=139682 6 GN=queD PE=3 SV=1
MFRITKEFHFSASHQLTHLPPDHQCARLHGHNYVVVVELAAKELNSDGFVRDYHELKPLKDYIDGTFDHRHLNDVLDGYSTAENMAKHFYDWCNARWPEVAAVKVSETPKTWAEYRP

SEQ ID NO: 21771 - protein, 117 aa, Leisingera methylohalidivorans
  misc_feature (1)..(117): tr|V9VP58|V9VP58_9RHOB 6-carboxy-5,6,7,8-tetrahydropter in synthase OS=Leisingera methylohalidivorans DSM 14336 OX=999552 GN=METH_07025 PE=3 SV=1
MFRITKEFHFSASHQLTHLPSDHQCARLHGHNYVVVVELAAQELNSDGFVRDYHELKPLKEYIDSTFDHRHLNDVLEGHSTAENMAKHFYDWCHIRWPEVAAVKISETPKTWAEYRP

SEQ ID NO: 21772 - protein, 117 aa, Leisingera sp.
  misc_feature (1)..(117): tr|A0A0B4FI63|A0A0B4FI63_9RHOB 6-carboxy-5,6,7,8-tetrah ydropterin synthase OS=Leisingera sp. ANG1 OX=1002340 G N=GC1_04230 PE=3 SV=1
MFRITKEFHFSASHQLTHLPSDHQCARLHGHNYVVVVELAAKELNSDGFVRDYHELKPLKDYIDGTFDHRHLNDVLDGHSTAENMARHFYDWCHARWPEVSAVKVSETPKTWAEYRP

SEQ ID NO: 21773 - protein, 117 aa, Leisingera sp.
  misc_feature (1)..(117): tr|A0A481PJE7|A0A481PJE7_9RHOB 6-carboxy-5,6,7,8-tetrah ydropterin synthase OS=Leisingera sp. NJS204 OX=2508307 GN=queD PE=3 SV=1
MFRITKEFHFSASHQLTHLPTDHQCARLHGHNYVVVVELTAKELNADGFVRDYHELKPLKEYIDGTFDHRHLNDVLEGHSTAENMAKHFYDWCHARWPEVAAVKVSETPKTWAEYRP

SEQ ID NO: 21774 - protein, 120 aa, Lelliottia amnigena
  misc_feature (1)..(120): tr|A0A1A9FI57|A0A1A9FI57_LELAM 6-carboxy-5,6,7,8-tetrah ydropterin synthase OS=Lelliottia amnigena OX=61646 GN= A8A57_16735 PE=3 SV=1
MSTTLFKDFTFEAAHHLPHVPAGHKCGRLHGHSFMVRLEITGEVDPHTGWIMDFSELKAAFKPTYDRLDHYYLNDIPGLENPTSEVLAKWIWDVMKPLVPLLSAVMIKETCTAGCVYRGE

SEQ ID NO: 21775 - protein, 121 aa, Lelliottia amnigena
  misc_feature (1)..(121): tr|A0A3S5XT95|A0A3S5XT95_LELAM 6-carboxy-5,6,7,8-tetrah ydropterin synthase OS=Lelliottia amnigena OX=61646 GN= queD PE=3 SV=1
MMSTTLFKDFIFEAAHHLPHVPQGHKCGRLHGHSFMVRLEITGEVDPHTGWIMDFSELKAAFKPTYDRLDHYYLNDIPGLENPTSEVLAKWIWDQMKPRVPLLSSVMIKETCTAGCVYRGE

SEQ ID NO: 21776 - protein, 120 aa, Lelliottia nimipressuralis; identical to SEQ ID NO: 20131
  misc_feature (1)..(120): tr|A0A4Y8IU64|A0A4Y8IU64_9ENTR 6-carboxy-5,6,7,8-tetrah ydropterin synthase OS=Lelliottia nimipressuralis OX=69 220 GN=queD PE=3 SV=1

SEQ ID NO: 21777 - protein, 120 aa, Lelliottia nimipressuralis; identical to SEQ ID NO: 20154
  misc_feature (1)..(120): tr|A0A1J5VMF8|A0A1J5VMF8_9ENTR 6-carboxy-5,6,7,8-tetrah ydropterin synthase OS=Lelliottia nimipressuralis OX=69 220 GN=queD PE=3 SV=1

SEQ ID NO: 21778 - protein, 121 aa, Lelliottia sp.
  misc_feature (1)..(121): tr|A0A2S5C9N2|A0A2S5C9N2_9ENTR 6-carboxy-5,6,7,8-tetrah ydropterin synthase OS=Lelliottia sp. 7254-16 OX=208084 2 GN=queD PE=3 SV=1
MMSTTLFKDFMFEAAHHLPHVPEGHKCGRLHGHSFMVRLEITGEVDPHTGWIMDFSELKAAFKPTYNRLDHYYLNDIPGLENPTSEVLAKWIWDQMKPLVPLLSAVTIKETCTAGCVYRGE

SEQ ID NO: 21779 - protein, 157 aa, Lentibacillus sp.
  misc_feature (1)..(157): tr|A0A4Q3X944|A0A4Q3X944_9BACI 6-carboxytetrahydropteri n synthase QueD OS=Lentibacillus sp. SSKP1-9 OX=2510307 GN=queD PE=4 SV=1
MHGFRIVDKLQKIDEDIGRNQLKYHSKRVMVSKEFTFDAAHHLHEYEGKCMNLHGHTYKVIFGISGFVDDRGLVIDFGDVKEIWTNEIKNFLDHKYLNETLPPMNTTAENMVVWIYEKMKDALEREEQHQGARVEFVRLYETPTSYGEARREWMESE

SEQ ID NO: 21780 - protein, 150 aa, Lentimicrobiaceae bacterium
  misc_feature (1)..(150): tr|A0A2E2XYW0|A0A2E2XYW0_9BACT 6-carboxytetrahydropteri n synthase QueD OS=Lentimicrobiaceae bacterium OX=20267 56 GN=CMF58_04660 PE=4 SV=1
MKQSTIRITKEFKFEMAHALKGYDGPCKNIHGHSYELSVTISGKPINDENNPKLGMVMDFGELKQIIKREVVDLFDHALVLNNSMDTDLLKSLSKNFEKVILTDYQPTSEMMIIDFASRISSELPSHVTLKYLLLRETVTSFAEWYADEN

SEQ ID NO: 21781 - protein, 136 aa, Lentimicrobiaceae bacterium
  misc_feature (1)..(136): tr|A0A2E2XZQ6|A0A2E2XZQ6_9BACT 6-pyruvoyl tetrahydrobio pterin synthase OS=Lentimicrobiaceae bacterium OX=20267 56 GN=CMF58_05855 PE=4 SV=1
MIHITRRERFNAAHRLFRADYSDEKNNEVFGKCSNPNWHGHNYELFVTVKGDINNETGFLINLKVLSKIIKTNVINKLDHKNINLEVDFMKGKLASTENLAASIWNELEGSVNVLGAELHCVKVVESENNFVEYYG

SEQ ID NO: 21782 - protein, 148 aa, Lentimicrobium saccharophilum
  misc_feature (1)..(148): tr|A0A0S7BXF2|A0A0S7BXF2_9BACT 6-carboxy-5,6,7,8-tetrah ydropterin synthase OS=Lentimicrobium saccharophilum OX =1678841 GN=TBC1_1151 PE=3 SV=1
MSVIRLTKEFKFEMAHALPGYDGPCRHIHGHSYELYVTIKGEPIRDPASPHYGMVMDFRQLKEIVRGKIVDEFDHSLVLHRATAPEEFSGMKDFVGRLILVDYQPTSENLLSDFADRLKNSLPEGVNLHSLRLRETVTSYAEWVAGDN

SEQ ID NO: 21783 - protein, 137 aa, Lentimicrobium saccharophilum
  misc_feature (1)..(137): tr|A0A0S7BRI4|A0A0S7BRI4_9BACT 6-pyruvoyl-tetrahydropte rin synthase OS=Lentimicrobium saccharophilum OX=167884 1 GN=TBC1_111614 PE=4 SV=1
MIFITRKEHFNAAHRLFKAEYSDEKNLEVFGKCSNPNWHGHNYELFVTVKGPVDPETGFLINLKDLSKIINQFVVDKLDHKNVNLEVDFMSGKLASTENLAIAIWEQLEQPISETGARLHCVKLFETERNFVEYFGN

SEQ ID NO: 21784 - protein, 144 aa, Lentisphaera araneosa
  misc_feature (1)..(144): tr|A6DNS1|A6DNS1_9BACT Uncharacterized protein OS=Lenti sphaera araneosa HTCC2155 OX=313628 GN=LNTAR_18825 PE=4 SV=1
MYRSTKSFFYLPCAHRQWRDDGDCQLVHGYDRSIHFTFESDGLDDKCWVMDFGGLKHIKAWLEDKFDHTLLINEDDPEMAFFEEMDRKGLCRLRVLPNIGMEGSAKYIFDYVDPWVQEQTDGRVRVFSVECRENEKNSAIYYRD

SEQ ID NO: 21785 - protein, 154 aa, Lentisphaerae bacterium
  misc_feature (1)..(154): tr|A0A1G0W942|A0A1G0W942_9BACT Uncharacterized protein OS=Lentisphaerae bacterium GWF2_38_69 OX=1798570 GN=A2X 47_07735 PE=4 SV=1
MYRICKIMWIETGHFLSSSKNSSNCRMPHGHSRKVEIVLASKKLDENSMVCDFQIIKSAFGEFIDSFDHAMLINKNSKHYSYFKENFERVIPFDTDPTSEIISEYFFKHIESQLIREKVYTNKDGVTYAIGDYVFLERVRVWETSSCWAEYSGE

SEQ ID NO: 21786 - protein, 122 aa, Lentisphaerae bacterium
  misc_feature (1)..(122): tr|A0A1V5V742|A0A1V5V742_9BACT 6-carboxy-5,6,7,8-tetrah ydropterin synthase OS=Lentisphaerae bacterium ADurb.Bi n242 OX=1852900 GN=queD PE=3 SV=1
MFELDIRREFSAAHSLRGYNGNCSNLHGHNWVVQIFIRSEKLDEVGIAMDFKILKRELDVILEGLDHKNLNEHPAFKEKNPTSEHLAMYIFRELASKINTENIHVSKVRVCESSNSGASYCE

SEQ ID NO: 21787 - protein, 122 aa, Lentisphaerales bacterium
  misc_feature (1)..(122): tr|A0A524MSQ7|A0A524MSQ7_9BACT 6-carboxy-5,6,7,8-tetrah ydropterin synthase OS=Lentisphaerales bacterium OX=244 8604 GN=queD PE=3 SV=1
MHEISIRTHFSAAHRLAGYEGTCANLHGHNWEVEVVVCGEELDETGMLVDFRKLKSAVREATSGLDHADLNALAAFKSSNPTSENIARHLFERLRETLAGHGCRLDHVTVRETPDSSATYRA

SEQ ID NO: 21788 - protein, 151 aa, Lentisphaeria bacterium
  misc_feature (1)..(151): tr|A0A348XHG0|A0A348XHG0_9BACT 6-carboxytetrahydropteri n synthase QueD OS=Lentisphaeria bacterium OX=2053569 G N=DCR55_08430 PE=4 SV=1
MNGTTQITRIIEWDMGHRVPNHKSKCRNPHGHRYRLELTVRGAVIATQGDSSEGMVHDFGDLKTALTKHIHDVLDHGFMLAESDTTMRAFYESCDEEFRVVVVPFIPTAENIACWCYEQLNGVIPRSLKIARLRLFETPNSWADYLPENAE

SEQ ID NO: 21789 - protein, 187 aa, Lentisphaeria bacterium
  misc_feature (1)..(187): tr|A0A356JQ79|A0A356JQ79_9BACT Rubredoxin OS=Lentisphae ria bacterium OX=2053569 GN=DD673_06940 PE=4 SV=1
MRSITKFELQYAHRFYKFQGEAQYLHGHTGVLTIEVEDAIEPGVNMVYPCNEIQKVAWNVLKNFDHALVLREDDPLLPAILDVYEKQGIRNGAPANKMKGEAFRTGLATAYPDCRLVVTKETMTVEGMIKIVYDLLKDKLNIAKITFTSGVNAAAQEYAPGKTIDRCPLCGVALIDGVCPKCGYRKH

SEQ ID NO: 21790 - protein, 162 aa, Lentzea aerocolonigenes
  misc_feature (1)..(162): tr|A0A0F0H3P4|A0A0F0H3P4_LENAE 6-pyruvoyl tetrahydrobio pterin synthase OS=Lentzea aerocolonigenes OX=68170 GN= UK23_11200 PE=4 SV=1
MSAHSVSVRHNFETAHRLPHLAGKCVNLHGHSWWMEAEVSAPALHAGAVVEFGALKARVREWIDVHLDHGAMLGADDPLVNVLAEHKSKVYRFGAQDPEPAEQLAHGLAHPTVEAVAELLARVVEDALRSLPAAPGARVAEVTVRETHVNSASWRSTEKDSS

SEQ ID NO: 21791 - protein, 136 aa, Lentzea aerocolonigenes
  misc_feature (1)..(136): tr|A0A0F0H4A9|A0A0F0H4A9_LENAE 6-pyruvoyl tetrahydropte rin synthase OS=Lentzea aerocolonigenes OX=68170 GN=UK2 3_11100 PE=4 SV=1
MFSITVRDHVMIAHSFRGEVFGPAQRLHGATFLVDATFKRLELDSDNIVVDIGLATQELNKVLAAFNYRNLDEEPQFAGINTSTEWLAKHIADQLAEKISEGALGEGAHGIDAIAVTLHESHVAWAGYERALRTAG

SEQ ID NO: 21792 - protein, 103 aa, Lentzea albida
  misc_feature (1)..(103): tr|A0A1H9TQS5|A0A1H9TQS5_9PSEU 6-pyruvoyl tetrahydropte rin synthase OS=Lentzea albida OX=65499 GN=SAMN04488000 _114130 PE=4 SV=1
MDATFKRTELDSDNIVVDIGLATQELSGVLAEFNYRNLDEEPQFAGINTSTEWLAKHIADQLADKISAGALGEGAHGIDAIAVTLHESHVAWASYERALRPSG

SEQ ID NO: 21793 - protein, 103 aa, Lentzea albidocapillata
  misc_feature (1)..(103): tr|A0A1W2FE66|A0A1W2FE66_9PSEU 6-pyruvoyl tetrahydropte rin synthase OS=Lentzea albidocapillata OX=40571 GN=SAM N05660733_05691 PE=4 SV=1
MDATFKRAELDSDNIVVDIGLATQELNKVLAAFNYRNLDEEPQFAGINTSTEWLAKHIADQLADRISEGALGEGAHGIDAIAVTLHESHVAWAGYERALRPSG

SEQ ID NO: 21794 - protein, 104 aa, Lentzea flaviverrucosa
  misc_feature (1)..(104): tr|A0A1H9VJS6|A0A1H9VJS6_9PSEU 6-pyruvoyl tetrahydropte rin synthase OS=Lentzea flaviverrucosa OX=200379 GN=SAM N05216195_110117 PE=4 SV=1
MVDATFKRAELDSDNIVVDIGLATQELNKVLAAFNYRNLDEEPQFAGINTSTEWLAKHIADQLADKISEGALGEGAHGIDAIAVTLHESHVAWAGYERALRPSG

SEQ ID NO: 21795 - protein, 136 aa, Lentzea guizhouensis
  misc_feature (1)..(136): tr|A0A1B2HDL9|A0A1B2HDL9_9PSEU Uncharacterized protein OS=Lentzea guizhouensis OX=1586287 GN=BBK82_06695 PE=4 SV=1
MFSITVRDHVMIAHSFRGEVFGPAQRLHGATFVVDATFKRAELDQDNIVVDIGLATQELGKVLAAFNYRNLDEEPQFAGINTSTEWLAKHIADQLADAIVAGALGEGAHGIDGITVTLHESHVAWASYERALRTAG

SEQ ID NO: 21796 - protein, 229 aa, Lentzea guizhouensis
  misc_feature (1)..(229): tr|A0A1B2HE43|A0A1B2HE43_9PSEU Uncharacterized protein OS=Lentzea guizhouensis OX=1586287 GN=BBK82_07920 PE=4 SV=1
MKTTEEKCVADGQITISQSFGFSASHELRLLPASHKCRRNHGHNYTVTASALVRGDASGDLLPLGDYLAATFDHRLLNEQVPFHPTSELLAAHLAEWFRDNMESAMPITLVAMVVSETATTSARCDGVIGEVTISKTFTTSHGDVTLVLGADGLDKVGFITDFGDLKPFGAYLQASDADAGLRAAGPALVAHLAGWFVDSVEPGIRGRLVSVRVESGTTTGLWERGDAS

SEQ ID NO: 21797 - protein, 103 aa, Lentzea jiangxiensis
  misc_feature (1)..(103): tr|A0A1H0R7G1|A0A1H0R7G1_9PSEU 6-pyruvoyl tetrahydropte rin synthase OS=Lentzea jiangxiensis OX=641025 GN=SAMN0 5421507_106192 PE=4 SV=1
MDATFKRAELDSDNIVVDIGLATQELGKVLAVFNYRNLDEEPQFAGINTSTEWLAKHIADQLAEKISEGALGEGAHGIDAIAVTLHESHVAWASYERALRPTG

SEQ ID NO: 21798 - protein, 130 aa, Lentzea sp.
  misc_feature (1)..(130): tr|A0A563EY42|A0A563EY42_9PSEU 6-carboxytetrahydropteri n synthase QueD OS=Lentzea sp. FXJ1.1311 OX=2591470 GN= FKR81_08675 PE=4 SV=1
MYEISEHYTFVATHEILGLQSTHPCHGVHMHQWSVEVVLFAASLLPTDGPAETAALEPLRRYVTTELEARHLNDVLVGDPTPARLAGHLVRWCRSHLGGYVTETLHSVAVSAGRASRARCLAIRGRDGVR

SEQ ID NO: 21799 - protein, 132 aa, Lentzea sp.
  misc_feature (1)..(132): tr|A0A563EPU4|A0A563EPU4_9PSEU 6-carboxytetrahydropteri n synthase OS=Lentzea sp. FXJ1.1311 OX=2591470 GN=FKR81 _24520 PE=4 SV=1
MFSITVRDHVMIAHSFRGEVFGPAQRLHGATFVVDARFKRAELDADNIVVDIGLATQELHSVLADLNYRNLDEVPEFEGINTSTEFLAKHIADRLVALVHAGALGEGARGLTGIEVTLAESHVAWASYERSL

SEQ ID NO: 21800 - protein, 126 aa, Lentzea violacea
  misc_feature (1)..(126): tr|A0A1G9IXM1|A0A1G9IXM1_9PSEU 6-pyruvoyl tetrahydropte rin synthase OS=Lentzea violacea OX=128104 GN=SAMN04488 074_11079 PE=4 SV=1
MIAHSFRGEVFGPAQRLHGATFLVDATFKRAELDSDNIVVDIGLATQELNKVLAAFNYRNLDEEPQFAGINTSTEWLAKHIADQLADKISEGALGEGAHGIDAIAVTLHESHVAWAGYERALRPSG

SEQ ID NO: 21801 - protein, 103 aa, Lentzea waywayandensis
  misc_feature (1)..(103): tr|A0A1I6EXH9|A0A1I6EXH9_9PSEU 6-pyruvoyl tetrahydropte rin synthase OS=Lentzea waywayandensis OX=84724 GN=SAMN 04488564_106163 PE=4 SV=1
MDATFKRAELDSDNIVVDIGLATQELNKVLAAFNYRNLDEEPQFAGINTSTEWLAKHIADQLADKISEGSLGEGAHGIDAIAVTLHESHVAWAGYERALRPSR

SEQ ID NO: 21802 - protein, 288 aa, Leptolyngbya antarctica
  misc_feature (1)..(288): tr|A0A2W4W960|A0A2W4W960_9CYAN 6-pyruvoyl tetrahydropte rin synthase OS=Leptolyngbya antarctica OX=268115 GN=DC F17_11260 PE=4 SV=1
MKCIINRRAQFSASHRYWLSELSDAENARRFGPCINFPGHGHNYVLYVAMAGDLDEYGMVLNLSDVKHVIKKEVTSQLDFSYLNDVWPEFQATLPTTEFIAKVIWDRLAPHLPIVNIQLFEHPELWSDYSGNAMEAFLTVSTHFSAAHRLASPRLSFEENCEIYGKCARPNGHGHNYHLEVTVKGQIDPRTGMLVDLPALQAAIDDHVVEPFDHTFLNKDISYFAEVVPTAENIAVHIRDLLQGPIAALGASLHKVKLIESPNNSAEVYAAVPQIEAVATAQPELAAV

SEQ ID NO: 21803 - protein, 129 aa, Leptolyngbya boryana
  misc_feature (1)..(129): tr|A0A1Z4JPU1|A0A1Z4JPU1_LEPBY 6-carboxy-5,6,7,8-tetrah ydropterin synthase OS=Leptolyngbya boryana NIES-2135 O X=1973484 GN=NIES2135_56080 PE=3 SV=1
MPKWTVTTEFTFNAAHWIRDYDGPCGRMHGHTYTVRISAITSQLHASEFCPHPVMVADFRTLKWAKKDVLKGGLDHCVLNEVLPEGYETTAEMIAKYIYDKTKKDLPAEIKLKVAVSETPNSWAEYEDD

SEQ ID NO: 21804 - protein, 289 aa, Leptolyngbya boryana
  misc_feature (1)..(289): tr|A0A1Z4JM70|A0A1Z4JM70_LEPBY Uncharacterized protein OS=Leptolyngbya boryana NIES-2135 OX=1973484 GN=NIES213 5_46670 PE=4 SV=1
MKCIIDRRAQFSASHRYYLPELSEAENIERFGACTRFPGHGHNYVLYVSMLGDLDEYGMVLNLSDVKHVIRQEVTSQLDFSYLNDAWPEFQQTLPTTENIARSIWKRLESHLPIVNIRLYEHPELWADYLGNNMEAYLTISTHFSAAHRLARPDLSFEKNCEIYGKCARPNGHGHNYHLEVTIKGEIDPRTGMIADLVAFQKAVDDYVVEPFDHTFLNKDIPYFEKVVPTAENIAVHIRDLLEDPIQQIGARLYKVKLIESPNNSCEVFGASVSDVMPLLMREPAFAGA

SEQ ID NO: 21805 - protein, 294 aa, Leptolyngbya foveolarum
  misc_feature (1)..(294): tr|A0A2W4U2G9|A0A2W4U2G9_9CYAN 6-pyruvoyl tetrahydropte rin synthase OS=Leptolyngbya foveolarum OX=47253 GN=DCF 25_14260 PE=4 SV=1
MTCLPLTCVINRRSQFSASHRYWLDELSELENIRRFGKCTRVPGHGHNYVLNVSIASELDPYGMVLNLTEAKRIIQQQIIESLDFSYLNDVWPEFQQTLPTTEHIAQAIWQRLTPHLPLVNIQLFETPELWADYKGNGMEAYLTVSAHFSAAHRLALSHLSDEENSKIYGKCARSNGHGHNYQVEVTVKGEVDARTGMIVDLVALNQVVDQYVIEPFDHTFLNKDVPYFSQVVPTAENIVVRVCNLLHDPVKEIGATLYKVKISESPNNSAEVFAQSCVDDSLLKIQTQALATV

SEQ ID NO: 21806 - protein, 129 aa, Leptolyngbya foveolarum
  misc_feature (1)..(129): tr|A0A2W4URG5|A0A2W4URG5_9CYAN 6-carboxy-5,6,7,8-tetrah ydropterin synthase OS=Leptolyngbya foveolarum OX=47253 GN=DCF25_01970 PE=3 SV=1
MPKWKLSTEFTFSAAHFIRDYDGPCGRMHGHTYHVRVEATADRLQASEFCPHPAMVADFRTLKWAKKDVMKGGLDHCVLNDVMPPEYETTAEMIAQYIHEKTCDRLPKAVKLKVSVSETPNSWAEYESD

SEQ ID NO: 21807 - protein, 289 aa, Leptolyngbya frigida
  misc_feature (1)..(289): tr|A0A2T1DUW1|A0A2T1DUW1_9CYAN 6-pyruvoyl tetrahydropte rin synthase OS=Leptolyngbya frigida ULC18 OX=2107698 G N=C7B82_27605 PE=4 SV=1
MKCIIDRRAQFSASHRYWLPEVSEAENFERFGACARSPGHGHNYVLFVSMAGELDEYGMVLNLSDVKQVIKREVTSQLDFSFLNDAWSEFQETLPTTEAIARTIWQRLAPHLPIVRIQLFEQPELWADYYGNNMEAYLTISTHFSAAHRLARPDLSYEKNCEIYGKCARPNGHGHNYHLEVTIKGEIDPRTGMIADLVVFQKAVDDYVVEPFDHTFLNKDIPYFAEVVPTAENIAVHIRSLLEQPIRNIGAQLHKIKLIESPNNSCEVYSTEAEAAVTSMSVREAAMVK

SEQ ID NO: 21808 - protein, 295 aa, Leptolyngbya sp.
  misc_feature (1)..(295): tr|K9FLA6|K9FLA6_9CYAN 6-pyruvoyl-tetrahydropterin synt hase OS=Leptolyngbya sp. PCC 7375 OX=102129 GN=Lepto737 5DRAFT_4171 PE=4 SV=1
MKCTINRRAQFSASHRYWLPELSDAENQTRFGLCTRAPGHGHNYELFVSMEGDLDEYGMVLNLSDVKQVIKREVTSQLDFSYLNDVWPEFQIDKPEAGLTTTENIARVIWQRLVPHLPITNVQLFETSTLWADYKGNAMEAYLTISTHFSAAHRLALPTLTLEQNSEIYGLCARVNGHGHNYHLEVTIKGEMDPRTGMIADLVEFQNAVKTHVVKPFDHTFLNKDIPYFAEVVPTAENIAVHIRDLLRGPIKEIGASLHKVKLIESPNNSAEVYCEATAETTTPKQSATPELAAV

SEQ ID NO: 21809 - protein, 129 aa, Leptolyngbya sp.
  misc_feature (1)..(129): tr|A0A0S3U9Y4|A0A0S3U9Y4_9CYAN 6-carboxy-5,6,7,8-tetrah ydropterin synthase OS=Leptolyngbya sp. NIES-3755 OX=17 52064 GN=LEP3755_48150 PE=3 SV=1
MPKWTLSTEFTFSAAHWIRDYNGPCGRMHGHTYTVRISAIASQLHTSEYCPHPVMVADFRTLRWAKKDVFKGGLDHCVLNEVLPEGYETTAEMIAKYIYDKTKKELPADIKLKVAVSETPNSWAEYEDD

SEQ ID NO: 21810 - protein, 130 aa, Leptolyngbya valderiana
  misc_feature (1)..(130): tr|A0A168W324|A0A168W324_9CYAN Uncharacterized protein OS=Leptolyngbya valderiana BDU 20041 OX=322866 GN=AY599 _20020 PE=4 SV=1
MFEITAEASFNAQHAILIHGDREPVHGHDWVVRATIAGPALDREGLLCDFHAVESALRGITDPWNHDDLNHSEAFRGRKLEPTAENVAMVVAVELARALKDILPEGARVARVSVTEAPRCVATYLLPRED

SEQ ID NO: 21811 - protein, 124 aa, Leptolyngbya valderiana
  misc_feature (1)..(124): tr|A0A168SZR8|A0A168SZR8_9CYAN 6-carboxy-5,6,7,8-tetrah ydropterin synthase OS=Leptolyngbya valderiana BDU 2004 1 OX=322866 GN=AY599_13645 PE=3 SV=1
MSDLTLTISKDFTFDAAHHFAHKDADHPFSRLHGHSFQGTVTLTGAREADSGMVRDFWEIEAELSKIRDQLDHRLLNEVDGLENPSLENIAHWVFERLDAVLPGLVSVEIRRPSWGEKALVKRG

SEQ ID NO: 21812 - protein, 117 aa, Leptonema illini
  misc_feature (1)..(117): tr|H2CLA3|H2CLA3_9LEPT 6-carboxy-5,6,7,8-tetrahydropter in synthase OS=Leptonema illini DSM 21528 OX=929563 GN= Lepil_3699 PE=3 SV=1
MEIIKSFRFEAAHYLPKLPETHKCRRMHGHSFKFDVHVEGPLDPELGWVMDFGDISRLVKPLVEELDHYLLNEISGLENPTSEVIAVWIWNRLKPGLPGLSRIVVYETCTARCEYRG

SEQ ID NO: 21813 - protein, 126 aa, Leptospira adleri
  misc_feature (1)..(126): tr|A0A2M9YK26|A0A2M9YK26_9LEPT 6-carboxy-5,6,7,8-tetrah ydropterin synthase OS=Leptospira adleri OX=2023186 GN= queD PE=3 SV=1
MEEIELTKEFRFDAAHLLPNVPDGHKCKRLHGHSFRFKLHLKGRIDPHTGWLIDYAEVSKIVKPLIENHLDHYYLNDVPGLENPTSENISVWLWNHLKPLLPLLYKITLNETCTSACIYEGPKNSH

SEQ ID NO: 21814 - protein, 133 aa, Leptospira adleri
  misc_feature (1)..(133): tr|A0A2M9YMF8|A0A2M9YMF8_9LEPT 6-carboxy-5,6,7,8-tetrah ydropterin synthase OS=Leptospira adleri OX=2023186 GN= CH380_13270 PE=3 SV=1
MFFEETGRFYIRIEERFESSHYLYRYFPDGSDEPIHGHSWKVELFLSGTKNIGEDGISFDFLTSKQKLKELVGKLDHILINDLEEFKKINPTSENIARWFYHYLKESVRSAGGKVDRIVIHEGPENLAYFEPA

SEQ ID NO: 21815 - protein, 61 aa, Leptospira alexanderi
  misc_feature (1)..(61): tr|V6I7J0|V6I7J0_9LEPT 6-pyruvoyl tetrahydropterin synt hase domain protein OS=Leptospira alexanderi serovar Ma nhao 3 str. L 60 OX=1049759 GN=LEP1GSC062_3349 PE=4 SV= 1
MFFEESGRFYIRIEERFESSHFLYKYFPDGSDEPIHGHSWKVELYLSGKKISVRTESVLIF

SEQ ID NO: 21816 - protein, 62 aa, Leptospira alexanderi
  misc_feature (1)..(62): tr|V6I011|V6I011_9LEPT 6-pyruvoyl tetrahydropterin synt hase domain protein OS=Leptospira alexanderi serovar Ma nhao 3 str. L 60 OX=1049759 GN=LEP1GSC062_3350 PE=4 SV= 1
MDHILINELEEFKKINPTSENIARWFYHYLKESVHSAGGRVDKIVIHEGPENLAFFEPTSLP

SEQ ID NO: 21817 - protein, 130 aa, Leptospira alstonii
  misc_feature (1)..(130): tr|M6D772|M6D772_9LEPT 6-carboxy-5,6,7,8-tetrahydropter in synthase OS=Leptospira alstonii serovar Sichuan str. 79601 OX=1218565 GN=queD PE=3 SV=1
MEEIELTKEFRFDAAHLLPNVPDGHKCKRLHGHSFRFKLHLRGKIDSKTGWLIDYAEVSKIVKPLIENHLDHYYLNDVPGLENPTSENISIWLWNHLKPLLPLLYKITLNETCTSACIYEGPKGSVSRHF

SEQ ID NO: 21818 - protein, 130 aa, Leptospira alstonii; identical to SEQ ID NO: 21817
  misc_feature (1)..(130): tr|T0HAA9|T0HAA9_9LEPT 6-carboxy-5,6,7,8-tetrahydropter in synthase OS=Leptospira alstonii serovar Pingchang st r. 80-412 OX=1218564 GN=queD PE=3 SV=1

SEQ ID NO: 21819 - protein, 133 aa, Leptospira andrefontaineae
  misc_feature (1)..(133): tr|A0A4R9H995|A0A4R9H995_9LEPT 6-carboxy-5,6,7,8-tetrah ydropterin synthase OS=Leptospira andrefontaineae OX=24 84976 GN=EHO65_04710 PE=3 SV=1
MFFQETGKFYIRIEERFESSHYLYKYFPDGSDEPIHGHSFKVEVYLSGQKNIGEDGISFDFLTSKRKLKELVAELDHILINDHADFKKTNPTSENMARWFYYGLKDSVAEAKGKVDRIVIHEGPENLAYYEPN

SEQ ID NO: 21820 - protein, 125 aa, Leptospira andrefontaineae
  misc_feature (1)..(125): tr|A0A4V3JFL4|A0A4V3JFL4_9LEPT 6-carboxy-5,6,7,8-tetrah ydropterin synthase OS=Leptospira andrefontaineae OX=24 84976 GN=queD PE=3 SV=1
MEEIELTKEFRFDAAHFLPNVPEGHKCRRMHGHSFRFKLHLKGKVDEKTGWLMDFAEVSKVVKPLLENYLDHYLLNEIEGLENPTSENISIWLWKKLKPQLSLLYKITLNETCTSACVYNGPSEK

SEQ ID NO: 21821 - protein, 124 aa, Leptospira bandrabouensis
  misc_feature (1)..(124): tr|A0A4Z1AL54|A0A4Z1AL54_9LEPT 6-carboxy-5,6,7,8-tetrah ydropterin synthase OS=Leptospira bandrabouensis OX=248 4903 GN=queD PE=3 SV=1
MEELELSKTFGFEAAHFLPNVPEGHKCKRMHGHSFRFAVYLKGEIDPHTGWIMDFGELKSIVKPILDEHLDHYVLNDVPGLENPTSENIAVWLWNQLKPKLPLLDKITLYETCSSSCVYRGPKK

SEQ ID NO: 21822 - protein, 132 aa, Leptospira bandrabouensis
  misc_feature (1)..(132): tr|A0A4Z1ARN4|A0A4Z1ARN4_9LEPT 6-carboxy-5,6,7,8-tetrah ydropterin synthase OS=Leptospira bandrabouensis OX=248 4903 GN=EHR07_13195 PE=3 SV=1
MFTQENGKFYVRIEGRFESAHFLYQYFADGSDEPIHGHSWKVEVFLEGNTNIRPDGISYDFLTARTKLMELVHSIDHILINDHPDFKGINPTSENVARWFYSGLKEDVKSSEGRIRRIVIHEGPENLAYFEP

SEQ ID NO: 21823 - protein, 128 aa, Leptospira barantonii
  misc_feature (1)..(128): tr|A0A5F2AYW5|A0A5F2AYW5_9LEPT 6-carboxy-5,6,7,8-tetrah ydropterin synthase OS=Leptospira barantonii OX=2023184 GN=queD PE=3 SV=1
MEEIELTKEFRFDAAHLLPNVPDGHKCKRLHGHSFRFKLHLKGKIDPKTGWLIDYAEVSKIVKPLIENHLDHYYLNDVPGLENPTSENISIWLWNHIKPLLPLLYKITLNETCTSASIYEGPKNSFQG

SEQ ID NO: 21824 - protein, 128 aa, Leptospira barantonii
  misc_feature (1)..(128): tr|A0A2M9Z436|A0A2M9Z436_9LEPT 6-carboxy-5,6,7,8-tetrah ydropterin synthase OS=Leptospira barantonii OX=2023184 GN=queD PE=3 SV=1
MEEIELTKEFRFDAAHLLPNVPDGHKCKRLHGHSFRFKLHLKGKIDPKTGWLIDYAEVSKIVKPLIENHLDHYYLNEVPGLENPTSENISIWLWNHIKPLLPLLYKITLNETCTSASIYEGPKNSSQG

SEQ ID NO: 21825 - protein, 134 aa, Leptospira biflexa
  misc_feature (1)..(134): tr|B0SQ26|B0SQ26_LEPBP 6-carboxy-5,6,7,8-tetrahydropter in synthase OS=Leptospira biflexa serovar Patoc (strain Patoc 1 / ATCC 23582 / Paris) OX=456481 GN=LEPBI_I3112 PE=3 SV=1
MFTQENGKFYVRIEGRFESAHFLYQYFADGTDEPIHGHSWKVEVYLEGKTNIRPDGISYDFLTARNKLLALVHSIDHILINDHPDFKGINPTSENVARWFYSGLKEEVKASDGKIQRIVIHEGPENLAFFEPET

SEQ ID NO: 21826 - protein, 134 aa, Leptospira biflexa
  misc_feature (1)..(134): tr|A0A5F2CHA8|A0A5F2CHA8_LEPBI 6-carboxytetrahydropteri n synthase OS=Leptospira biflexa OX=172 GN=EHQ88_11195 PE=4 SV=1
MFTQENGKFYVRIEGRFESAHFLYQYFADGTDEPIHGHSWKVEVYLEGKTNIRPDGISYDFLTARNKLLVLVHSIDHILINDHPDFKGINPTSENVARWFYSGLKEEVKASEGKIQRIVIHEGPENLAFFEPET

SEQ ID NO: 21827 - protein, 136 aa, Leptospira borgpetersenii
  misc_feature (1)..(136): tr|A0A2U9XHK0|A0A2U9XHK0_LEPBO 6-carboxy-5,6,7,8-tetrah ydropterin synthase OS=Leptospira borgpetersenii serova r Hardjo-bovis OX=338217 GN=B9T54_11110 PE=3 SV=1
MFFEESGRFYIRIEERFESSHFLYKYFPDGSDEPIHGHSWKVELYLSGRKNIGEDGISFDFLTSKQRLKELVGKLDHILINELEEFKKINPTSENIARWFYHYLKESVHSAGGRVDKIVIHEGPENLAFFEPTSLP

SEQ ID NO: 21828 - protein, 61 aa, Leptospira borgpetersenii
  misc_feature (1)..(61): tr|M6VZW9|M6VZW9_LEPBO 6-pyruvoyl tetrahydropterin synt hase domain protein OS=Leptospira borgpetersenii serova r Pomona str. 200901868 OX=1192866 GN=LEP1GSC133_1130 P E=4 SV=1
MFFEESGRFYIRIEERFESSHFLYKYFPDGSDEPIHGHSWKVELYLSGKKISARTGSVLIF

SEQ ID NO: 21829 - protein, 124 aa, Leptospira bourretii
  misc_feature (1)..(124): tr|A0A4V3JLK7|A0A4V3JLK7_9LEPT 6-carboxy-5,6,7,8-tetrah ydropterin synthase OS=Leptospira bourretii OX=2484962 GN=queD PE=3 SV=1
MEELELSKTFGFEAAHFLPNVPEGHKCKRMHGHSFRFAVYLKGEIDPHTGWIMDFGELKSIVKPILDEHLDHYVLNNVPGLENPTSENIAVWLWNQLKPKLPLLDKITLYETCTSSCVYRGPKK

SEQ ID NO: 21830 - protein, 139 aa, Leptospira bourretii
  misc_feature (1)..(139): tr|A0A4R9IQ01|A0A4R9IQ01_9LEPT 6-carboxytetrahydropteri n synthase OS=Leptospira bourretii OX=2484962 GN=EHQ23_ 03100 PE=4 SV=1
MFTQENGKFYVRIEGRFESAHFLYQYFADGSDEPIHGHSWKVEVFLEGNTNIRPDGISYDFLTARTRLSELVHSIDHILINDHPDFKGVNPTSENVARWFYAGLKSDVKSSDGRIRRIVIHEGPENLAFFEPDENSDLS

SEQ ID NO: 21831 - protein, 134 aa, Leptospira bouyouniensis
  misc_feature (1)..(134): tr|A0A4R9HUH7|A0A4R9HUH7_9LEPT 6-carboxytetrahydropteri n synthase OS=Leptospira bouyouniensis OX=2484911 GN=EH Q10_04500 PE=4 SV=1
MFTQENGKFYVRIEGRFESAHFLYQYFADGTDEPIHGHSWKVEVFLEGKTNIRPDGISYDFLTARNKLLELVHSIDHILINDHPDFKGINPTSENVARWFYYGLKEEVKASEGKIRRIVIHEGPENLAFFEPEA

SEQ ID NO: 21832 - protein, 124 aa, Leptospira bouyouniensis
  misc_feature (1)..(124): tr|A0A4R9HRY7|A0A4R9HRY7_9LEPT 6-carboxy-5,6,7,8-tetrah ydropterin synthase OS=Leptospira bouyouniensis OX=2484 911 GN=queD PE=3 SV=1
MEEIELSKTFGFEAAHFLPNVPEGHKCKRMHGHSFRFAVYLKGEIDPHTGWIMDFGELKSIVKPILDEHLDHYVLNDVPGLENPTSENIAVWLWNQLKPKLPLLDKITLYETCTSSCVYRGPKK

SEQ ID NO: 21833 - protein, 124 aa, Leptospira brenneri
  misc_feature (1)..(124): tr|A0A2M9Y3S5|A0A2M9Y3S5_9LEPT 6-carboxy-5,6,7,8-tetrah ydropterin synthase OS=Leptospira brenneri OX=2023182 G N=queD PE=3 SV=1
MEELELSKTFGFEAAHFLPNVPEGHKCKRMHGHSFRFAVYLKGEIDPHTGWIMDFGELKSIVKPILDEHLDHFVLNDVPGLENPTSENIAVWLWNQLKPKLPLLDKITLHETCTSSCVYRGPKK

SEQ ID NO: 21834 - protein, 134 aa, Leptospira brenneri
  misc_feature (1)..(134): tr|A0A2M9Y7L1|A0A2M9Y7L1_9LEPT 6-carboxytetrahydropteri n synthase OS=Leptospira brenneri OX=2023182 GN=CH361_0 2490 PE=4 SV=1
MFTQEKGKFYVRIEGRFESAHFLYQYFADGSDEPIHGHSWKVEVFLEGNTNIRPDGISYDFLTARTKLMDLVHSIDHILINDHPDFKGVNPTSENVARWFYSGLKADVKSSAGKIRRIVIHEGPENLAFFEPEN

SEQ ID NO: 21835 - protein, 126 aa, Leptospira broomii
  misc_feature (1)..(126): tr|T0F2Y1|T0F2Y1_9LEPT 6-carboxy-5,6,7,8-tetrahydropter in synthase OS=Leptospira broomii serovar Hurstbridge s tr. 5399 OX=1049789 GN=queD PE=3 SV=1
MEEIELTKEFRFDAAHFLPNVPQGHKCRRMHGHSFRFKLHLKGTIDPVTGWLMDFAEVSKFVKPLLDNYLDHYLLNEIEGLENPTSENICVWLWEKLRPRLPLLTKITLHETCTSACIYEGPRHIA

SEQ ID NO: 21836 - protein, 135 aa, Leptospira broomii
  misc_feature (1)..(135): tr|T0GCW8|T0GCW8_9LEPT 6-carboxy-5,6,7,8-tetrahydropter in synthase OS=Leptospira broomii serovar Hurstbridge s tr. 5399 OX=1049789 GN=LEP1GSC050_2294 PE=3 SV=1
MFFQEAGKFYIRIEERFESSHFLYKYFPDGSDEPIHGHSFKVEVYLSGRKNIGKDGISFDFLTSKKKLRELVSELDHILINEHIDFRKINPTSENMARWFYSGLKESVSAADGRVERIVIHEGPENLAFFEPLQG

SEQ ID NO: 21837 - protein, 132 aa, Leptospira congkakensis
  misc_feature (1)..(132): tr|A0A4Z1A464|A0A4Z1A464_9LEPT 6-carboxytetrahydropteri n synthase OS=Leptospira congkakensis OX=2484932 GN=EHQ 70_08950 PE=4 SV=1
MFTQENGKFYVRIEGRFESAHFLYQYFADGSDEPIHGHSWKVEVFLEGNTNIRPDGISYDFLTARTKLMELVHSIDHILINDHPDFKGINPTSENVARWFYSGLKADVKSSEGKIRRIVIHEGPENLAFFEP

SEQ ID NO: 21838 - protein, 124 aa, Leptospira congkakensis
  misc_feature (1)..(124): tr|A0A4Z0ZZL5|A0A4Z0ZZL5_9LEPT 6-carboxy-5,6,7,8-tetrah ydropterin synthase OS=Leptospira congkakensis OX=24849 32 GN=queD PE=3 SV=1
MEELELSKTFGFEAAHFLPNVPEGHKCKRMHGHSFRFAVYLKGEIDPHTGWIMDFGELKSIVKPILDEHLDHYVLNDVPGLENPTSENIAVWLWNQLKPKLPLLDKITLYETCTSSCVYRGPKK

SEQ ID NO: 21839 - protein, 136 aa, Leptospira dzianensis
  misc_feature (1)..(136): tr|A0A5F2APF7|A0A5F2APF7_9LEPT 6-carboxy-5,6,7,8-tetrah ydropterin synthase OS=Leptospira dzianensis OX=2484905 GN=EHQ72_11675 PE=3 SV=1
MFFEESGRFYIRIEERFESSHFLYRYFPDGSDEPIHGHSWKVELYLSGRKNIGEDGISFDFLTSKQKLKELVGKLDHILINDLAEFKTINPTSENIARWFYHYLKESVHSAGGKVDRIVIHEGPENLAYFEPTSFP

SEQ ID NO: 21840 - protein, 126 aa, Leptospira dzianensis
  misc_feature (1)..(126): tr|A0A5F2ATE2|A0A5F2ATE2_9LEPT 6-carboxy-5,6,7,8-tetrah ydropterin synthase OS=Leptospira dzianensis OX=2484905 GN=queD PE=3 SV=1
MEEIELTKEFRFDAAHLLPNVPDGHKCKRLHGHSFRFKLHLKGKIDSKTGWLIDYAEVSKIVKPLIENHLDHYYLNDVPGLENPTSENISIWLWNHLKPLLPLLYKITLNETCTSACIYEGPKGSV

SEQ ID NO: 21841 - protein, 134 aa, Leptospira dzoumogneensis
  misc_feature (1)..(134): tr|A0A4Z1AR88|A0A4Z1AR88_9LEPT 6-carboxy-5,6,7,8-tetrah ydropterin synthase OS=Leptospira dzoumogneensis OX=248 4904 GN=EHR06_05485 PE=3 SV=1
MFFQETGKFYIRIEERFESSHYLYKYFPDGSDEPIHGHSFKVEVYLSGQKNIGEDGISFDFLTSKRKLKELVAELDHILINDHADFQKTNPTSENMARWFYHGLKDSVAEAQGKVDRIVIHEGPENLAYYEPIS

SEQ ID NO: 21842 - protein, 125 aa, Leptospira dzoumogneensis
  misc_feature (1)..(125): tr|A0A4Z1AX88|A0A4Z1AX88_9LEPT 6-carboxy-5,6,7,8-tetrah ydropterin synthase OS=Leptospira dzoumogneensis OX=248 4904 GN=queD PE=3 SV=1
MEEIELTKEFRFDAAHFLPNVPEGHKCRRMHGHSFRFKLHLKGKVDEKTGWLMDFAEVSKVVKPLLENYLDHYLLNEIEGLENPTSENISIWLWKKLKPQLSLLHKITLNETCTSACVYNGPSEK

SEQ ID NO: 21843 - protein, 134 aa, Leptospira ellinghausenii
  misc_feature (1)..(134): tr|A0A2P2DGM0|A0A2P2DGM0_9LEPT 6-carboxy-5,6,7,8-tetrah ydropterin synthase OS=Leptospira ellinghausenii OX=191 7822 GN=LPTSP2_30770 PE=3 SV=1
MFTQENGKFYVRIEGRFESAHFLYQYFADGTDEPIHGHSWKVEVFLEGKTNIRPDGISFDFLTARNKLMELVHSIDHLLINDHPDFKGINPTSENVARWFYSGLKKEVKESEGKIRRIVIHEGPENLAFFEPET

SEQ ID NO: 21844 - protein, 124 aa, Leptospira ellinghausenii; identical to SEQ ID NO: 21832
  misc_feature (1)..(124): tr|A0A2P2DF56|A0A2P2DF56_9LEPT 6-carboxy-5,6,7,8-tetrah ydropterin synthase OS=Leptospira ellinghausenii OX=191 7822 GN=LPTSP2_25640 PE=3 SV=1

SEQ ID NO: 21845 - protein, 133 aa, Leptospira elllisii
  misc_feature (1)..(133): tr|A0A2N0BMT0|A0A2N0BMT0_9LEPT 6-carboxy-5,6,7,8-tetrah ydropterin synthase OS=Leptospira elllisii OX=2023197 G N=CH375_05930 PE=3 SV=1
MFFEESGRFYIRIEERFESSHFLYKYFPDGSDEPIHGHSWKVELYLSGKKNIGEDGISFDFLTSKRRLKELVGKLDHILINDLEEFKTINPTSENIARWFYHYLKESVHSAGGKVDRIVIHEGPENLAFFEPA

SEQ ID NO: 21846 - protein, 128 aa, Leptospira elllisii
  misc_feature (1)..(128): tr|A0A2N0B2Z0|A0A2N0B2Z0_9LEPT 6-carboxy-5,6,7,8-tetrah ydropterin synthase OS=Leptospira elllisii OX=2023197 G N=queD PE=3 SV=1
MEEIELTKEFRFDAAHLLPNVPDGHKCKRLHGHSFRFKLHLKGTIDPTTGWLIDYAEVSKIVKPLIENHLDHYYLNDVPGLENPTSENISIWLWNHLKPLLPLLYKITLNETCTSACIYEGPKDSSQR

SEQ ID NO: 21847 - protein, 135 aa, Leptospira fainei
  misc_feature (1)..(135): tr|S3UUH1|S3UUH1_9LEPT 6-carboxy-5,6,7,8-tetrahydropter in synthase OS=Leptospira fainei serovar Hurstbridge st r. BUT 6 OX=1193011 GN=LEP1GSC058_2359 PE=3 SV=1
MFFREAGKFYIRIEERFESSHFLYKYFPDGSDEPIHGHSFKVEVYLSGKKNIGEDGISFDFLTSKKRLRALVAELDHILINEHSDFKKTNPTSENLARWFYSGLKESVHGAEGKVERIVIHEGPENLAFFEPAQG

SEQ ID NO: 21848 - protein, 135 aa, Leptospira fletcheri
  misc_feature (1)..(135): tr|A0A4R9GJB3|A0A4R9GJB3_9LEPT 6-carboxy-5,6,7,8-tetrah ydropterin synthase OS=Leptospira fletcheri OX=2484981 GN=EHO60_09770 PE=3 SV=1
MFFQETGKFYIRIEERFESSHFLYKYFQDGSDEPIHGHSFKVEVYLSGKRNIGEDGISFDFLTSKKRLRELVSELDHILINQHADFIRTNPTSENMARWFYHHIKDSVHASSGRVDRIVIHEGPENLAFFEPSEG

SEQ ID NO: 21849 - protein, 126 aa, Leptospira fletcheri
  misc_feature (1)..(126): tr|A0A4R9GIH3|A0A4R9GIH3_9LEPT 6-carboxy-5,6,7,8-tetrah ydropterin synthase OS=Leptospira fletcheri OX=2484981 GN=queD PE=3 SV=1
MEEIELTKEFRFDAAHFLPNVPEGHKCRRMHGHSFRFKLHLKGKIDPGTGWLMDFAEVSKSVKPLLENHLDHYLLNDVAGLENPTSENICLWLWKRLKPQLPLLRKITLHETCTSACIYEGPKDIV

SEQ ID NO: 21850 - protein, 126 aa, Leptospira fluminis
  misc_feature (1)..(126): tr|A0A4R9GRX2|A0A4R9GRX2_9LEPT 6-carboxy-5,6,7,8-tetrah ydropterin synthase OS=Leptospira fluminis OX=2484979 G N=queD PE=3 SV=1
MEEIELTKEFRFDAAHFLPNVPEGHKCRRMHGHSFRFKLHLKGKIDPGTGWLMDFAEVSKSVKPLLENHLDHYLLNDVEGLENPTSENICLWLWKRLKPHLPLLRKITLHETCTSACIYEGPKDIV

SEQ ID NO: 21851 - protein, 135 aa, Leptospira fluminis
  misc_feature (1)..(135): tr|A0A4R9GMJ9|A0A4R9GMJ9_9LEPT 6-carboxy-5,6,7,8-tetrah ydropterin synthase OS=Leptospira fluminis OX=2484979 G N=EHO61_15625 PE=3 SV=1
MFFQETGKFYIRIEERFESSHFLYKYFPDGSDEPIHGHSFKVEVYLSGKRNIGEDGISFDFLTSKKRLRELVSELDHILINQHADFTRTNPTSENMARWFYHHIKDSVHASSGKVDRIVIHEGPENLAFFEPSEG

SEQ ID NO: 21852 - protein, 133 aa, Leptospira gomenensis
  misc_feature (1)..(133): tr|A0A5F1Z1K0|A0A5F1Z1K0_9LEPT 6-carboxy-5,6,7,8-tetrah ydropterin synthase OS=Leptospira gomenensis OX=2484974 GN=EHQ13_02655 PE=3 SV=1
MFFEESGRFYIRIEERFESSHFLYKYFPDGSDEPIHGHSWKVELFLSGSKNIGEDGISFDFLTSKRKLKELVGKLDHILINDLEDFQSVNPTSENIARWFYHFLKESVHASGGKVDRIVIHEGPENLAFFEPA

SEQ ID NO: 21853 - protein, 128 aa, Leptospira gomenensis
  misc_feature (1)..(128): tr|A0A5F1YEF2|A0A5F1YEF2_9LEPT 6-carboxy-5,6,7,8-tetrah ydropterin synthase OS=Leptospira gomenensis OX=2484974 GN=queD PE=3 SV=1
MEEIELTKEFRFDAAHLLPNVPDGHKCKRLHGHSFRFKLHLKGTIDPATGWLIDYAEVSKIVKPLIENHLDHYYLNDVPGLDNPTSENISIWLWNHLKPLLPLLYKITLNETCTSACIYEGPKTSSRT

SEQ ID NO: 21854 - protein, 134 aa, Leptospira haakeii
  misc_feature (1)..(134): tr|A0A2N0BSA9|A0A2N0BSA9_9LEPT 6-carboxy-5,6,7,8-tetrah ydropterin synthase OS=Leptospira haakeii OX=2023198 GN =CH377_16870 PE=3 SV=1
MFFQETGKFYIRIEERFESSHYLYKYFPDGSDEPIHGHSFKVEVYLSGQKNIGEDGISFDFLTSKRKLKELVAELDHILINDHADFKKTNPTSENMARWFYYGLKDSVSEAKGKVDRIVIHEGPENLAYYEPIS

SEQ ID NO: 21855 - protein, 125 aa, Leptospira haakeii
  misc_feature (1)..(125): tr|A0A2N0BZM3|A0A2N0BZM3_9LEPT 6-carboxy-5,6,7,8-tetrah ydropterin synthase OS=Leptospira haakeii OX=2023198 GN =queD PE=3 SV=1
MEEIELTKEFRFDAAHFLPNVPEGHKCRRMHGHSFRFKLHLKGRVDEKTGWLMDFAEVSKVVKPLLENYLDHYLLNEIEGLENPTSENISIWLWKKLKPELSLLYKITLNETCTSACVYNGPSEK

SEQ ID NO: 21856 - protein, 124 aa, Leptospira harrisiae; identical to SEQ ID NO: 21838
  misc_feature (1)..(124): tr|A0A2N0AHD8|A0A2N0AHD8_9LEPT 6-carboxy-5,6,7,8-tetrah ydropterin synthase OS=Leptospira harrisiae OX=2023189 GN=queD PE=3 SV=1

SEQ ID NO: 21857 - protein, 133 aa, Leptospira harrisiae
  misc_feature (1)..(133): tr|A0A2N0AK90|A0A2N0AK90_9LEPT 6-carboxytetrahydropteri n synthase QueD OS=Leptospira harrisiae OX=2023189 GN=C H364_11210 PE=4 SV=1
MFTQENGKFYVRIEGRFESAHFLYQYFADGSDEPIHGHSWKVEVFLEGNTNIRPDGISYDFLTARTRLTELVHSIDHILINDHPDFKGTNPTSENVARWFYAGLKSEVNSSEGKIRRIVIHEGPENLAFFEPE

SEQ ID NO: 21858 - protein, 133 aa, Leptospira hartskeerlii
  misc_feature (1)..(133): tr|A0A2M9X934|A0A2M9X934_9LEPT 6-carboxy-5,6,7,8-tetrah ydropterin synthase OS=Leptospira hartskeerlii OX=20231 77 GN=CH357_18110 PE=3 SV=1
MFFQETGKFYIRIEERFESSHYLYKYFPDGSDEPIHGHSFKVEVYLSGQKNIGEDGISFDFLTSKRKLKELVAELDHILINDHADFKKTNPTSENMARWFYHGLKDSVAEAKGKVDRIVIHEGPENLAYYEPA

SEQ ID NO: 21859 - protein, 125 aa, Leptospira hartskeerlii
  misc_feature (1)..(125): tr|A0A2M9XI77|A0A2M9XI77_9LEPT 6-carboxy-5,6,7,8-tetrah ydropterin synthase OS=Leptospira hartskeerlii OX=20231 77 GN=queD PE=3 SV=1
MEEIELTKEFRFDAAHFLPNVPEGHKCRRMHGHSFRFKLHLKGKVDEKTGWLMDFAEVSKVVKPLLENYLDHYLLNDIEGLENPTSENISIWLWKKLKPQLSLLYKITLNETCTSACVYNGPSEK

SEQ ID NO: 21860 - protein, 140 aa, Leptospira idonii
  misc_feature (1)..(140): tr|A0A4R9LUD5|A0A4R9LUD5_9LEPT 6-carboxy-5,6,7,8-tetrah ydropterin synthase OS=Leptospira idonii OX=1193500 GN= EHS15_17840 PE=3 SV=1
MFTSEFGKFYVRIEGRFESAHFLYDYFPDGSDEPIHGHSWKVEVFLSGNENIRPDGISYDFLTARNRLQELVHSIDHILINDHPDFKGVNPTSENVARWFFSGLKDEVAKTKGQIKRIVIHEGPENLAFFEPDPSGSESK

SEQ ID NO: 21861 - protein, 124 aa, Leptospira idonii
  misc_feature (1)..(124): tr|A0A4R9M175|A0A4R9M175_9LEPT 6-carboxy-5,6,7,8-tetrah ydropterin synthase OS=Leptospira idonii OX=1193500 GN= queD PE=3 SV=1
MEEIELSKTFGFEAAHFLPNVPEGHKCKRMHGHSFRFSVTLKGEIDPHTGWVMDFGELKSIVKPIIDEHLDHYILNDVKGLENPTSENVAVWIWNKIKPQLPLLDQITVYETCTSSCVYRGPKR

SEQ ID NO: 21862 - protein, 124 aa, Leptospira ilyithenensis
  misc_feature (1)..(124): tr|A0A4R9LPS9|A0A4R9LPS9_9LEPT 6-carboxy-5,6,7,8-tetrah ydropterin synthase OS=Leptospira ilyithenensis OX=2484 901 GN=queD PE=3 SV=1
MEEIELSKTFGFEAAHFLPNVPEGHKCKRMHGHSFRFSVSLKGKIDPHTGWIMDFGELKGIVKPIITESLDHYVLNDVPGLENPTSENLAVWLWNHLKPNLPLLDKITVYETCSSSCVYSGPKK

SEQ ID NO: 21863 - protein, 132 aa, Leptospira ilyithenensis
  misc_feature (1)..(132): tr|A0A4R9LRF6|A0A4R9LRF6_9LEPT 6-carboxy-5,6,7,8-tetrah ydropterin synthase OS=Leptospira ilyithenensis OX=2484 901 GN=EHS11_04760 PE=3 SV=1
MFTEESGKFYVRIEGRFESAHYLYDYFPDGSDEPIHGHSWKVEVFLSGKENIRPDGISYDFLTARNRLQELVHSIDHLLINEHPDFKGINPTSENVARWFFVGLKEEVAKTNGKIIRIVIHEGPENLAFFEP

SEQ ID NO: 21864 - protein, 135 aa, Leptospira inadai
  misc_feature (1)..(135): tr|V6HAU8|V6HAU8_9LEPT 6-carboxy-5,6,7,8-tetrahydropter in synthase OS=Leptospira inadai serovar Lyme str. 10 O X=1049790 GN=LEP1GSC047_3087 PE=3 SV=1
MFFQEAGKFYIRIEERFESSHFLYKYFSDGSDEPIHGHSFKVEVYLSGRKNIGEDGISFDFLTSKKKLRELVSELDHILINEHIDFKKTNPTSENMARWFYNGLKESVHAAEGRVERIVIHEGPENLAFFEPLQG

SEQ ID NO: 21865 - protein, 76 aa, Leptospira inadai
  misc_feature (1)..(76): tr|V6H9Y5|V6H9Y5_9LEPT 6-pyruvoyl tetrahydropterin synt hase OS=Leptospira inadai serovar Lyme str. 10 OX=10497 90 GN=LEP1GSC047_1158 PE=4 SV=1
MDFAEVSKFVKPLLDNYLDHYLLNEIEGLENPTSENICIWLWEKLKPQLPLLRKITLHETCTSACIYEGPRHVASK

SEQ ID NO: 21866 - protein, 136 aa, Leptospira interrogans
  misc_feature (1)..(136): tr|M3ETV1|M3ETV1_LEPIR 6-carboxy-5,6,7,8-tetrahydropter in synthase OS=Leptospira interrogans serovar Lora str. TE 1992 OX=1193028 GN=LEP1GSC067_0732 PE=3 SV=1
MFFQESGRFYIRIEERFESSHYLYKYFPDGSDEPIHGHSWKVELYLSGKKIIGDDGISFDFLTSKQKLKELVGRLDHILINDLEEFKKINPTSENIARWFYHYLKESVHTAGGKVDRIVIHEGPENLAFFEPTSLS

SEQ ID NO: 21867 - protein, 128 aa, Leptospira interrogans
  misc_feature (1)..(128): tr|N1UGM9|N1UGM9_LEPIR 6-carboxy-5,6,7,8-tetrahydropter in synthase OS=Leptospira interrogans serovar Australis str. 200703203 OX=1085541 GN=queD PE=3 SV=1
MEEIELTKEFRFDAAHLLPNVPDGHKCKRLHGHSFRFKLHLKGTIDPKTGWLIDYAAVSKIVKPLIENHLDHYYLNDVPGLENPTSENLSIWLWNHLKPLLPLLYKITLNETCTSACIYEGPNKNSSV

SEQ ID NO: 21868 - protein, 135 aa, Leptospira jelokensis
  misc_feature (1)..(135): tr|A0A5F2BB29|A0A5F2BB29_9LEPT 6-carboxy-5,6,7,8-tetrah ydropterin synthase OS=Leptospira jelokensis OX=2484931 GN=EHQ79_13460 PE=3 SV=1
MFTQENGKFYVRIEGRFESAHFLYQYFADGTDEPIHGHSWKVEVFLEGKTNIRPDGISYDFLTARNKLLELVHSIDHILINDHPDFKGTNPTSENIARWFYFGLKDEVKSSEGKIKRIVIHEGPENLAFFEPEDF

SEQ ID NO: 21869 - protein, 124 aa, Leptospira jelokensis; identical to SEQ ID NO: 21832
  misc_feature (1)..(124): tr|A0A4Z0ZRG3|A0A4Z0ZRG3_9LEPT 6-carboxy-5,6,7,8-tetrah ydropterin synthase OS=Leptospira jelokensis OX=2484931 GN=queD PE=3 SV=1

SEQ ID NO: 21870 - protein, 134 aa, Leptospira johnsonii
  misc_feature (1)..(134): tr|A0A2P2D291|A0A2P2D291_9LEPT 6-carboxy-5,6,7,8-tetrah ydropterin synthase OS=Leptospira johnsonii OX=1917820 GN=LPTSP1_17470 PE=3 SV=1
MFFQETGKFYIRIEERFESSHYLYKYFPDGSDEPIHGHSFKVEVYLSGQKNIGDDGISFDFLTSKRRLKELVAELDHILINDHADFKKTNPTSENMARWFYYGLKDSVSAAQGKVDRIVIHEGPENLAYYEPFY

SEQ ID NO: 21871 - protein, 125 aa, Leptospira johnsonii
  misc_feature (1)..(125): tr|A0A2P2D474|A0A2P2D474_9LEPT 6-carboxy-5,6,7,8-tetrah ydropterin synthase OS=Leptospira johnsonii OX=1917820 GN=ptpS PE=3 SV=1
MEEIELTKEFRFDAAHFLPNVPEGHKCRRMHGHSFRFKLHLKGKVDEKTGWLMDFAEVSKVVKPLLENYLDHYLLNEIEDLENPTSENISIWLWKKLKPQLPLLYKITLNETCTSACVYSGPSEK

SEQ ID NO: 21872 - protein, 132 aa, Leptospira kanakyensis; identical to SEQ ID NO: 21837
  misc_feature (1)..(132): tr|A0A4R9HPV3|A0A4R9HPV3_9LEPT 6-carboxytetrahydropteri n synthase OS=Leptospira kanakyensis OX=2484968 GN=EHQ1 1_09685 PE=4 SV=1

SEQ ID NO: 21873 - protein, 124 aa, Leptospira kanakyensis; identical to SEQ ID NO: 21838
  misc_feature (1)..(124): tr|A0A4R9HP31|A0A4R9HP31_9LEPT 6-carboxy-5,6,7,8-tetrah ydropterin synthase OS=Leptospira kanakyensis OX=248496 8 GN=queD PE=3 SV=1

SEQ ID NO: 21874 - protein, 124 aa, Leptospira kemamanensis; identical to SEQ ID NO: 21832
  misc_feature (1)..(124): tr|A0A4R9JLB1|A0A4R9JLB1_9LEPT 6-carboxy-5,6,7,8-tetrah ydropterin synthase OS=Leptospira kemamanensis OX=24849 42 GN=queD PE=3 SV=1

SEQ ID NO: 21875 - protein, 135 aa, Leptospira kemamanensis
  misc_feature (1)..(135): tr|A0A4R9JQ73|A0A4R9JQ73_9LEPT 6-carboxytetrahydropteri n synthase OS=Leptospira kemamanensis OX=2484942 GN=EHQ 59_11490 PE=4 SV=1
MFTQENGKFYVRIEGRFESAHFLYQYFADGTDEPIHGHSWKVEVFLEGKTNIRPDGISFDFLTARNKLMALVHSIDHILINDHPDFKGINPTSENIARWFYFGLKEEVKSSEGRIRRIIIHEGPENLAFFEPELD

SEQ ID NO: 21876 - protein, 133 aa, Leptospira kirschneri
  misc_feature (1)..(133): tr|M6I6Z1|M6I6Z1_9LEPT 6-carboxy-5,6,7,8-tetrahydropter in synthase OS=Leptospira kirschneri serovar Bim str. 1 051 OX=1049941 GN=queD PE=3 SV=1
MIIPEGTMEEIELTKEFRFDAAHLLPNVPDGHKCKRLHGHSFRFKLHLKGTIDPKTGWLIDYAEVSKIVKPLTENHLDHYYLNDVPGLENPTSENISIWLWNHLKPLLPLLYKITLHETCTSACVYEGPKTIR

SEQ ID NO: 21877 - protein, 135 aa, Leptospira kirschneri
  misc_feature (1)..(135): tr|M6I2P7|M6I2P7_9LEPT 6-carboxy-5,6,7,8-tetrahydropter in synthase OS=Leptospira kirschneri serovar Bim str. 1 051 OX=1049941 GN=LEP1GSC046_0612 PE=3 SV=1
MFFEESGRFYIRIEERFESSHYLYKYFPDGSDEPIHGHSWKVEIYLSGKKNIGDDGISFDFLTSKLKLKELVGKLDHILINDLEEFKKVNPTSENIARWFYHYIKESVHTVGGRVDRIVIHEGPENLAFFEPTSL

SEQ ID NO: 21878 - protein, 136 aa, Leptospira kmetyi
  misc_feature (1)..(136): tr|A0A2M9XK26|A0A2M9XK26_9LEPT 6-carboxy-5,6,7,8-tetrah ydropterin synthase OS=Leptospira kmetyi OX=408139 GN=C H370_20270 PE=3 SV=1
MFFEESGRFYIRIEERFESSHFLYRYFPDGSDEPIHGHSWKVELYLSGKKNIGEDGISFDFLTSKQKLKELVAKLDHILINDLEEFKTINPTSENIARWFYHYLKESVHTAGGKVDRIVIHEGPENLAYFEPTSFP

SEQ ID NO: 21879 - protein, 128 aa, Leptospira kmetyi
  misc_feature (1)..(128): tr|A0A2M9XNT0|A0A2M9XNT0_9LEPT 6-carboxy-5,6,7,8-tetrah ydropterin synthase OS=Leptospira kmetyi OX=408139 GN=q ueD PE=3 SV=1
MEEIELTKEFRFDAAHLLPNVPDGHKCKRLHGHSFRFKLHLKGKIDSKTGWLIDYAEVSKIVKPLIENHLDHYYLNDVPGLENPTSENISIWLWNHLKPLLPLLYKITLNETCTSACIYEGPKNSSQG

SEQ ID NO: 21880 - protein, 125 aa, Leptospira kobayashii
  misc_feature (1)..(125): tr|A0A2P2DT73|A0A2P2DT73_9LEPT 6-carboxy-5,6,7,8-tetrah ydropterin synthase OS=Leptospira kobayashii OX=1917830 GN=ptpS PE=3 SV=1
MEEIELSKTFGFEAAHFLPNVPEGHKCKRMHGHSFRFSVSLKGAIDPHTGWIMDFGELKGIVKPIITESLDHYVLNEVPGLENPTSENLAVWLWNHLKPNLPLLDKITVYETCSSSCVYSGPKNK

SEQ ID NO: 21881 - protein, 132 aa, Leptospira kobayashii
  misc_feature (1)..(132): tr|A0A2P2DTT0|A0A2P2DTT0_9LEPT 6-carboxy-5,6,7,8-tetrah ydropterin synthase OS=Leptospira kobayashii OX=1917830 GN=LPTSP3_33610 PE=3 SV=1
MFTEESGKFYVRIEGRFESAHYLYDYFPDGSDEPIHGHSWKVEVFLSGKENIRPDGISYDFLTARNRLQELVHSIDHLLINEHPDFKGVNPTSENVARWFFAGLKEEVAKTNGKVMRIVIHEGPENLAFFEP

SEQ ID NO: 21882 - protein, 133 aa, Leptospira koniamboensis
  misc_feature (1)..(133): tr|A0A4R9J8Z8|A0A4R9J8Z8_9LEPT 6-carboxy-5,6,7,8-tetrah ydropterin synthase OS=Leptospira koniamboensis OX=2484 950 GN=EHQ52_12655 PE=3 SV=1
MFFQETGKFYIRIEERFESSHYLYKYFPDGSDEPIHGHSFKVEVYLSGQKNIGEDGISFDFLTSKRKLKELVAELDHILINDHSDFKKTNPTSENMARWFYYGLKDSVAEAKGKVDRIVIHEGPENLAYYEPN

SEQ ID NO: 21883 - protein, 125 aa, Leptospira koniamboensis
  misc_feature (1)..(125): tr|A0A4R9J8R9|A0A4R9J8R9_9LEPT 6-carboxy-5,6,7,8-tetrah ydropterin synthase OS=Leptospira koniamboensis OX=2484 950 GN=queD PE=3 SV=1
MEEIELTKEFRFDAAHFLPNVPEGHKCRRMHGHSFRFKLHLKGTVDEKTGWLMDFAEVSKVVKPLLENYLDHYLLNEIEGLENPTSENISIWLWKKLKPQLSLLYKITLNETCTSACVYNGPSEK

SEQ ID NO: 21884 - protein, 133 aa, Leptospira langatensis
  misc_feature (1)..(133): tr|A0A5F1ZRL3|A0A5F1ZRL3_9LEPT 6-carboxy-5,6,7,8-tetrah ydropterin synthase OS=Leptospira langatensis OX=248498 3 GN=EHQ53_10480 PE=3 SV=1
MFFKETGKFYIRIEERFESSHYLYKYFPDGSDEPIHGHSFKVEVYLSGKDNIGEDGISFDFLTSKRRLKELVAELDHILINEHSDFKTINPTSENMARWFYHGLKDSVIAANGKVDRIVIHEGPENLAYYEPL

SEQ ID NO: 21885 - protein, 124 aa, Leptospira langatensis
  misc_feature (1)..(124): tr|A0A5F1ZX20|A0A5F1ZX20_9LEPT 6-carboxy-5,6,7,8-tetrah ydropterin synthase OS=Leptospira langatensis OX=248498 3 GN=queD PE=3 SV=1
MEEIELTKEFRFDAAHFLPNVPEGHKCRRMHGHSFRFKIHLKGQIDKHTGWLMDFAEVSKVVKPLLENHLDHYLLNEVQGLENPTSENISVWLWKKLKPELPLLHRITLHETCTSACVYDGPAE

SEQ ID NO: 21886 - protein, 134 aa, Leptospira levettii
  misc_feature (1)..(134): tr|A0A2N0AT60|A0A2N0AT60_9LEPT 6-carboxy-5,6,7,8-tetrah ydropterin synthase OS=Leptospira levettii OX=2023178 G N=CH368_17030 PE=3 SV=1
MFTQENGKFYVRIEGRFESAHFLYQYFADGSDEPIHGHSWKVEVFLEGKTNIRPDGISYDFLTARNKLMELVHSIDHLLINDHPDFKGINPTSENVARWFYSGLKNEVKESEGKIRRIVIHEGPENLAFFEPET

SEQ ID NO: 21887 - protein, 124 aa, Leptospira levettii; identical to SEQ ID NO: 21832
  misc_feature (1)..(124): tr|A0A2N0AX80|A0A2N0AX80_9LEPT 6-carboxy-5,6,7,8-tetrah ydropterin synthase OS=Leptospira levettii OX=2023178 G N=queD PE=3 SV=1

SEQ ID NO: 21888 - protein, 125 aa, Leptospira licerasiae
  misc_feature (1)..(125): tr|I0XW66|I0XW66_9LEPT 6-carboxy-5,6,7,8-tetrahydropter in synthase OS=Leptospira licerasiae serovar Varillal s tr. VAR 010 OX=1049972 GN=queD PE=3 SV=1
MEEIELTKEFRFDAAHFLPNVPEGHKCRRMHGHSFRFKLHLKGKVDQKTGWLMDFAEVSKVVKPLLENYLDHYLLNEIEGLENPTSENISIWLWKKLKPQLSLLYKITLNETCTSACVYNGPSEK

SEQ ID NO: 21889 - protein, 134 aa, Leptospira licerasiae
  misc_feature (1)..(134): tr|I0XUJ7|I0XUJ7_9LEPT 6-carboxy-5,6,7,8-tetrahydropter in synthase OS=Leptospira licerasiae serovar Varillal s tr. VAR 010 OX=1049972 GN=LEP1GSC185_2296 PE=3 SV=1
MFFQETGKFYIRIEERFESSHYLYKYFPDGSDEPIHGHSFKVEVYLSGQKNIGEDGISFDFLTSKRKLKELVAELDHILINDHTDFKKTNPTSENMARWFYHGLKDSVAEAKGKVDRIVIHEGPENLAYYEPSP

SEQ ID NO: 21890 - protein, 124 aa, Leptospira macculloughii
  misc_feature (1)..(124): tr|A0A2N0C524|A0A2N0C524_9LEPT 6-carboxy-5,6,7,8-tetrah ydropterin synthase OS=Leptospira macculloughii OX=2023 202 GN=queD PE=3 SV=1
MEELELSKTFGFEAAHFLPNVPEGHKCKRMHGHSFRFAVYLKGEIDPHTGWIMDFGELKSIVKPILDEHLDHYVLNDVPGLENPTSENIAVWLWNQLKPKLPLLDKITLYETCTSSCVYRGPKN

SEQ ID NO: 21891 - protein, 124 aa, Leptospira macculloughii; identical to SEQ ID NO: 21832
  misc_feature (1)..(124): tr|A0A2N0C6S1|A0A2N0C6S1_9LEPT 6-carboxy-5,6,7,8-tetrah ydropterin synthase OS=Leptospira macculloughii OX=2023 202 GN=queD PE=3 SV=1

SEQ ID NO: 21892 - protein, 126 aa, Leptospira mayottensis
  misc_feature (1)..(126): tr|A0A3S9KNJ2|A0A3S9KNJ2_9LEPT 6-carboxy-5,6,7,8-tetrah ydropterin synthase OS=Leptospira mayottensis 200901116 OX=1192864 GN=queD PE=3 SV=1
MEEIELTKEFRFDAAHLLPNVPDGHKCKRLHGHSFRFKLHLKGRIDSNTGWLIDYAEVSRIVKPLIEDHLDHYYLNEVPGLENPTSENTAIWLWKHLKPLLPLLYKITLNETCTSACIYEGPKGSV

SEQ ID NO: 21893 - protein, 136 aa, Leptospira mayottensis
  misc_feature (1)..(136): tr|A0A5F2EKG9|A0A5F2EKG9_9LEPT 6-carboxy-5,6,7,8-tetrah ydropterin synthase OS=Leptospira mayottensis OX=113760 6 GN=EHR03_01710 PE=3 SV=1
MFFEESGRFYIRIEERFESSHFLYRYFPDGSDEPIHGHSWKVELYLSGEKNIDENGISFDFLTSKRKLKELVGKLDHILINELEEFKKINPTSENIARWFYHYLKESVHSAGGRVEKIVIHEGPENLAFFEPTSLP

SEQ ID NO: 21894 - protein, 139 aa, Leptospira meyeri
  misc_feature (1)..(139): tr|A0A5F1ZLV2|A0A5F1ZLV2_LEPME 6-carboxytetrahydropteri n synthase OS=Leptospira meyeri OX=29508 GN=EHQ50_06070 PE=4 SV=1
MFTQENGKFYVRIEGRFESAHFLYQYFADGSDEPIHGHSWKVEVFLEGNTNIRPDGISYDFLTARTRLSELVHSIDHILINDHPDFKGVNPTSENVARWFYAGLKFDVKSSDGKIRRIVIHEGPENLAFFEPDENASMT

SEQ ID NO: 21895 - protein, 124 aa, Leptospira meyeri; identical to SEQ ID NO: 21890
  misc_feature (1)..(124): tr|A0A4R8MU32|A0A4R8MU32_LEPME 6-carboxy-5,6,7,8-tetrah ydropterin synthase OS=Leptospira meyeri OX=29508 GN=qu eD PE=3 SV=1

SEQ ID NO: 21896 - protein, 124 aa, Leptospira montravelensis; identical to SEQ ID NO: 21838
  misc_feature (1)..(124): tr|A0A4Z0ZM46|A0A4Z0ZM46_9LEPT 6-carboxy-5,6,7,8-tetrah ydropterin synthase OS=Leptospira montravelensis OX=248 4961 GN=queD PE=3 SV=1

SEQ ID NO: 21897 - protein, 132 aa, Leptospira montravelensis
  misc_feature (1)..(132): tr|A0A4Z0ZT59|A0A4Z0ZT59_9LEPT 6-carboxytetrahydropteri n synthase OS=Leptospira montravelensis OX=2484961 GN=E HQ31_12105 PE=4 SV=1
MFTQENGKFYVRIEGRFESAHFLYQYFADGSDEPIHGHSWKVEVFLEGNKNIRPDGISYDFLTARTKLMELVHSIDHILINDHPDFKGVNPTSENVARWFYFGMKEDVKSSEGRIRRIIIHEGPENLAYFEP

SEQ ID NO: 21898 - protein, 132 aa, Leptospira mtsangambouensis
  misc_feature (1)..(132): tr|A0A5F2DDK4|A0A5F2DDK4_9LEPT 6-carboxytetrahydropteri n synthase OS=Leptospira mtsangambouensis OX=2484912 GN =EHR01_12915 PE=4 SV=1
MFTQENGKFYVRIEGRFESAHFLYQYFADGSDEPIHGHSWKVEVFLEGNTNIRPDGISYDFLTARTKLLELVHSIDHILINDHPDFKGINPTSENVARWFYYGLKEDVKSSDGKIRRIVIHEGPENLAFFEP

SEQ ID NO: 21899 - protein, 124 aa, Leptospira mtsangambouensis; identical to SEQ ID NO: 21829
  misc_feature (1)..(124): tr|A0A5F2DGR9|A0A5F2DGR9_9LEPT 6-carboxy-5,6,7,8-tetrah ydropterin synthase OS=Leptospira mtsangambouensis OX=2 484912 GN=queD PE=3 SV=1

SEQ ID NO: 21900 - protein, 125 aa, Leptospira neocaledonica
  misc_feature (1)..(125): tr|A0A2N0A267|A0A2N0A267_9LEPT 6-carboxy-5,6,7,8-tetrah ydropterin synthase OS=Leptospira neocaledonica OX=2023 192 GN=queD PE=3 SV=1
MEEIELTKEFRFDAAHFLPNVPEGHKCRRMHGHSFRFKLHLKGKVDEKTGWLMDFAEVSKVVKPLLENYLDHYLLNEIEGLENPTSENISIWLWKRLKPGLPLLYKITLNETCTSACVYNGPSEK

SEQ ID NO: 21901 - protein, 134 aa, Leptospira neocaledonica
  misc_feature (1)..(134): tr|A0A2M9ZTY0|A0A2M9ZTY0_9LEPT 6-carboxy-5,6,7,8-tetrah ydropterin synthase OS=Leptospira neocaledonica OX=2023 192 GN=CH365_19045 PE=3 SV=1
MFFQETGKFYIRIEERFESSHYLYKYFPDGSDEPIHGHSFKVEVYLSGQKNIGEDGISFDFLTSKRRLKELVAELDHILINDHADFKKTNPTSENMARWFYYGLKDSVSAAKGKVDRIVIHEGPENLAYFEPIS

SEQ ID NO: 21902 - protein, 136 aa, Leptospira noguchii
  misc_feature (1)..(136): tr|M6VF50|M6VF50_9LEPT 6-carboxy-5,6,7,8-tetrahydropter in synthase OS=Leptospira noguchii OX=28182 GN=LEP1GSC1 72_2030 PE=3 SV=1
MFFEESGRFYIRIEERFESSHYLYKYFPDGSDEPIHGHSWKVELYLSGKKNIGDNGISFDFLTSKQKLKELVGKLDHILINDLEEFKKINPTSENIARWFYHYLKESVHTAGGRVDRIVIHEGPENLAYFEPTSLS

SEQ ID NO: 21903 - protein, 123 aa, Leptospira noguchii
  misc_feature (1)..(123): tr|T0FSJ1|T0FSJ1_9LEPT 6-carboxy-5,6,7,8-tetrahydropter in synthase OS=Leptospira noguchii serovar Panama str. CZ214 OX=1001595 GN=queD PE=3 SV=1
MEEIELTKEFRFDAAHLLPNLPDGHKCKRLHGHSFRFKLHLKGKIDPKTGWLIDYAEVSKIVKPLIEDQLDHYYLNDVPGLENPTSENISIWLWNHFKPLLPLLYKITLNETCTSACIYKGPK

SEQ ID NO: 21904 - protein, 123 aa, Leptospira noumeaensis
  misc_feature (1)..(123): tr|A0A4R9I7D6|A0A4R9I7D6_9LEPT 6-carboxy-5,6,7,8-tetrah ydropterin synthase OS=Leptospira noumeaensis OX=248496 4 GN=queD PE=3 SV=1
MEELELSKTFGFEAAHFLPNVPEGHKCKRMHGHSFRFAVYLKGEIDPHTGWIMDFGELKSIVKPILDEHLDHYVLNDVPGLENPTSENIAVWLWNQLKPKLPLLDKITLYETCTSSCVYRGPK

SEQ ID NO: 21905 - protein, 132 aa, Leptospira noumeaensis; identical to SEQ ID NO: 21837
  misc_feature (1)..(132): tr|A0A4R9I951|A0A4R9I951_9LEPT 6-carboxytetrahydropteri n synthase OS=Leptospira noumeaensis OX=2484964 GN=EHQ2 4_09505 PE=4 SV=1

SEQ ID NO: 21906 - protein, 133 aa, Leptospira ognonensis
  misc_feature (1)..(133): tr|A0A4R9JUI6|A0A4R9JUI6_9LEPT 6-carboxytetrahydropteri n synthase OS=Leptospira ognonensis OX=2484945 GN=EHQ58 _17745 PE=4 SV=1
MFQEESGNFYVRIEGRFESAHFLYDYFPDGSDEPIHGHSWKVEVFLTGERNIGPDGISYDFLTARTRLLELVHSIDHILINDHADFKGINPTSENVARWFYRGLKNEVTKTNGRIKRIVIHEGPENLAFFEPS

SEQ ID NO: 21907 - protein, 124 aa, Leptospira ognonensis
  misc_feature (1)..(124): tr|A0A4R9JWC9|A0A4R9JWC9_9LEPT 6-carboxy-5,6,7,8-tetrah ydropterin synthase OS=Leptospira ognonensis OX=2484945 GN=queD PE=3 SV=1
MEEIELSKTFGFEAAHFLPNVPEGHKCKRMHGHSFRFAVYLKGQIDPHTGWLMDFSELKRIVKPILEEHLDHFVLNEVKGLENPTSENLAVWLWNQLKPKLPLLDKITLYETCTSSCVYRGPKT

SEQ ID NO: 21908 - protein, 124 aa, Leptospira perdikensis; identical to SEQ ID NO: 21832
  misc_feature (1)..(124): tr|A0A4R9JIC5|A0A4R9JIC5_9LEPT 6-carboxy-5,6,7,8-tetrah ydropterin synthase OS=Leptospira perdikensis OX=248494 8 GN=queD PE=3 SV=1

SEQ ID NO: 21909 - protein, 138 aa, Leptospira perdikensis
  misc_feature (1)..(138): tr|A0A4R9JG35|A0A4R9JG35_9LEPT 6-carboxytetrahydropteri n synthase OS=Leptospira perdikensis OX=2484948 GN=EHQ4 9_11485 PE=4 SV=1
MFTQENGKFYVRIEGRFESAHFLYQYFADGSDEPIHGHSWKVEVFLEGNTNIRPDGISYDFLTARTKLMELVHSIDHLLINDHPDFKGINPTSENVARWFYSGLKADVKSSEGRIRRIVIHEGPENLAFFEPTNDSHS

SEQ ID NO: 21910 - protein, 127 aa, Leptospira perolatii
  misc_feature (1)..(127): tr|A0A2M9ZS58|A0A2M9ZS58_9LEPT 6-carboxy-5,6,7,8-tetrah ydropterin synthase OS=Leptospira perolatii OX=2023191 GN=queD PE=3 SV=1
MEEIELTKEFRFDAAHFLPNVPEGHKCRRMHGHSFRFKLHLKGRLDPHTGWLMDFAEVSKYVKPLVEKYLDHYLLNDIEGLENPTSEQICIWLWNKLRPQLPLLYKITLHETCTSACIYSGPNLEPA

SEQ ID NO: 21911 - protein, 135 aa, Leptospira perolatii
  misc_feature (1)..(135): tr|A0A2M9ZJ45|A0A2M9ZJ45_9LEPT 6-carboxy-5,6,7,8-tetrah ydropterin synthase OS=Leptospira perolatii OX=2023191 GN=CH373_16655 PE=3 SV=1
MFFQESGKFYIRIEDKFESSHYLYKYFPDGSDEPIHGHSFKIEVYLSGNKNIGEDGISFDFLTSKKRLKELVHELDHILINEHPDFKTINPTSENMARWFYHGLKHSVHSADGRVDRIVIYEGPENLAYYEPSEG

SEQ ID NO: 21912 - protein, 136 aa, Leptospira putramalaysiae
  misc_feature (1)..(136): tr|A0A4R9L5R6|A0A4R9L5R6_9LEPT 6-carboxy-5,6,7,8-tetrah ydropterin synthase OS=Leptospira putramalaysiae OX=248 4984 GN=EHO98_13755 PE=3 SV=1
MFFEETGRFYIRIEERFESSHYLYRYFPDGSDEPIHGHSWKVELFLSGKKNIGEDGISFDFLTSKQKLKELVAKLDHILINDLEEFKKINPTSENIARWFYHYLKESVHSAGGKVDRIVIHEGPENLAYFEPTSSS

SEQ ID NO: 21913 - protein, 126 aa, Leptospira putramalaysiae
  misc_feature (1)..(126): tr|A0A4V3JUP9|A0A4V3JUP9_9LEPT 6-carboxy-5,6,7,8-tetrah ydropterin synthase OS=Leptospira putramalaysiae OX=248 4984 GN=queD PE=3 SV=1
MEEIELTKEFRFDAAHLLPNVPDGHKCKRLHGHSFRFKLHLKGKIDPHTGWLIDYAEVSKIVKPLVENHLDHYYLNDVPGLENPTSENISIWLWNHLKPLLPLLYKITLNETCTSACIYEGPKNSH

SEQ ID NO: 21914 - protein, 134 aa, Leptospira ryugenii
  misc_feature (1)..(134): tr|A0A2P2E2G2|A0A2P2E2G2_9LEPT 6-pyruvoyl-tetrahydropte rin synthase OS=Leptospira ryugenii OX=1917863 GN=LPTSP 4_25650 PE=4 SV=1
MFLEESGNFYIRIEGRFESAHFLYDYFPDGSDEPIHGHSWKVEVFLTGDGSLRKDSISYDFLTAKTRLQELVHSIDHILINEHKDFQGVNPTSENVARWFYAGLKGEVIKTGGKILRIVIYEGPENLAFFEPRD

SEQ ID NO: 21915 - protein, 126 aa, Leptospira ryugenii
  misc_feature (1)..(126): tr|A0A2P2E2P2|A0A2P2E2P2_9LEPT 6-carboxy-5,6,7,8-tetrah ydropterin synthase OS=Leptospira ryugenii OX=1917863 G N=ptpS PE=3 SV=1
MMEEIELEKTFGFEAAHYLPNVPEGHKCRRMHGHSFRFSVCLKGQIDSHTGWLMDFADLKSVVKPIIEKDLDHYVLNEVKGLENPTSEKLAVWLWNRLKPELPLLYKITVFETCTSSCVYYGPKQP

SEQ ID NO: 21916 - protein, 125 aa, Leptospira saintgironsiae; identical to SEQ ID NO: 21820
  misc_feature (1)..(125): tr|A0A2M9YGY8|A0A2M9YGY8_9LEPT 6-carboxy-5,6,7,8-tetrah ydropterin synthase OS=Leptospira saintgironsiae OX=202 3183 GN=queD PE=3 SV=1

SEQ ID NO: 21917 - protein, 136 aa, Leptospira saintgironsiae
  misc_feature (1)..(136): tr|A0A2M9Y827|A0A2M9Y827_9LEPT 6-carboxy-5,6,7,8-tetrah ydropterin synthase OS=Leptospira saintgironsiae OX=202 3183 GN=CH362_17510 PE=3 SV=1
MFFQETGKFYIRIEERFESSHYLYKYFPDGSDEPIHGHSFKVEVYLSGQKNIGEDGISFDFLTSKRKLKELVAELDHILINDHADFKKTNPTSENMARWFYYGLKDSVAEAKGKVDRIVIHEGPENLAYFEPFERP

SEQ ID NO: 21918 - protein, 136 aa, Leptospira santarosai
  misc_feature (1)..(136): tr|A0A0E2BVD9|A0A0E2BVD9_9LEPT 6-carboxy-5,6,7,8-tetrah ydropterin synthase OS=Leptospira santarosai str. MOR08 4 OX=1049984 GN=LEP1GSC179_1096 PE=3 SV=1
MFFEESGRFYIRIEERFESSHFLYKYFPDGSDEPIHGHSWKVELYLSGKKNIGEDGISFDFLTSKRKLKELVGKLDHILINELEEFKKINPTSENIARWFYHYLKESVHSAGGKVDKIVIHEGPENLAFFEPTSLS

SEQ ID NO: 21919 - protein, 136 aa, Leptospira santarosai; identical to SEQ ID NO: 21918
  misc_feature (1)..(136): tr|A0A1V2EIM2|A0A1V2EIM2_9LEPT 6-carboxy-5,6,7,8-tetrah ydropterin synthase OS=Leptospira santarosai OX=28183 G N=BWD14_13050 PE=3 SV=1

SEQ ID NO: 21920 - protein, 126 aa, Leptospira sarikeiensis
  misc_feature (1)..(126): tr|A0A4R9K9D9|A0A4R9K9D9_9LEPT 6-carboxy-5,6,7,8-tetrah ydropterin synthase OS=Leptospira sarikeiensis OX=24849 43 GN=queD PE=3 SV=1
MEEIELTKEFRFDAAHFLPNVPEGHKCRRMHGHSFRFKLHLKGALDEKTGWLMDFAEVSKVVKPLLENYLDHYLLNEIEGLENPTSENISIWLWQKLKPGLPLLYKITLNETCTSACVYNGPSVKN

SEQ ID NO: 21921 - protein, 134 aa, Leptospira sarikeiensis
  misc_feature (1)..(134): tr|A0A4R9KFB3|A0A4R9KFB3_9LEPT 6-carboxy-5,6,7,8-tetrah ydropterin synthase OS=Leptospira sarikeiensis OX=24849 43 GN=EHQ64_01055 PE=3 SV=1
MFFQETGKFYIRIEERFESSHYLYKYFPDGSDEPIHGHSFKVEVYLSGQKNIGEDGISFDFLTSKKRLKELVHELDHILINDHADFKKINPTSENMARWFYYGLKDSVSAAKGKVDRIVIHEGPENLAYYEPFE

SEQ ID NO: 21922 - protein, 133 aa, Leptospira selangorensis; identical to SEQ ID NO: 21882
  misc_feature (1)..(133): tr|A0A4R9G278|A0A4R9G278_9LEPT 6-carboxy-5,6,7,8-tetrah ydropterin synthase OS=Leptospira selangorensis OX=2484 982 GN=EHO58_12400 PE=3 SV=1

SEQ ID NO: 21923 - protein, 125 aa, Leptospira selangorensis; identical to SEQ ID NO: 21842
  misc_feature (1)..(125): tr|A0A4R9GAN2|A0A4R9GAN2_9LEPT 6-carboxy-5,6,7,8-tetrah ydropterin synthase OS=Leptospira selangorensis OX=2484 982 GN=queD PE=3 SV=1

SEQ ID NO: 21924 - protein, 133 aa, Leptospira semungkisensis
  misc_feature (1)..(133): tr|A0A4R9FT74|A0A4R9FT74_9LEPT 6-carboxy-5,6,7,8-tetrah ydropterin synthase OS=Leptospira semungkisensis OX=248 4985 GN=EHO59_11115 PE=3 SV=1
MFFQETGKFYIRIEERFESAHYLYKYFPDGSDEPIHGHSFKVEVYLSGKDNIREDGISFDFLTSKLRLKELVSELDHILINDHPDFKTINPTSENMARWFYFGLKESVIAANGKVERIVVHEGPENLAYFEPT

SEQ ID NO: 21925 - protein, 123 aa, Leptospira semungkisensis
  misc_feature (1)..(123): tr|A0A4R9G6Z8|A0A4R9G6Z8_9LEPT 6-carboxy-5,6,7,8-tetrah ydropterin synthase OS=Leptospira semungkisensis OX=248 4985 GN=queD PE=3 SV=1
MEEIELTKEFRFDAAHFLPNVPEGHKCRRMHGHSFRFKLHLKGQVDQHTGWLMDFAEVSKVVKPLVENHLDHYLLNDVEGLENPTSENISIWLWKKLKPELPLLYKITLHETCTSASVYNGPA

SEQ ID NO: 21926 - protein, 136 aa, Leptospira sp.; identical to SEQ ID NO: 21918
  misc_feature (1)..(136): tr|M5UYK3|M5UYK3_9LEPT 6-carboxy-5,6,7,8-tetrahydropter in synthase OS=Leptospira sp. Fiocruz LV4135 OX=1193013 GN=LEP1GSC076_2030 PE=3 SV=1

SEQ ID NO: 21927 - protein, 134 aa, Leptospira sp.
  misc_feature (1)..(134): tr|A0A2M8HQB8|A0A2M8HQB8_9LEPT 6-carboxy-5,6,7,8-tetrah ydropterin synthase OS=Leptospira sp. OX=178 GN=CK427_0 3945 PE=3 SV=1
MFLEEKGNFYIRIEGRFESSHYLYKYFADGSDEPHHGHSWKVEVYLSGKNGLREDGISYDFMDAKKKLRELVDTLEHTLINDLPDFKGVNPTSENIAKWFYHGLKEEVLNTGGIVKRIVIHEGPENLAYYEPLN

SEQ ID NO: 21928 - protein, 126 aa, Leptospira stimsonii
  misc_feature (1)..(126): tr|A0A396ZA13|A0A396ZA13_9LEPT 6-carboxy-5,6,7,8-tetrah ydropterin synthase OS=Leptospira stimsonii OX=2202203 GN=queD PE=3 SV=1
MEEIELTKEFRFDAAHLLPNVPDGHKCKRLHGHSFRFKLHLKGKIDPHTGWLIDYAEVSKIVKPLIENHLDHYYLNDVPGLENPTSENISIWLWNHLKPLLPLLYKITLNETCTSACIYEGPKNSH

SEQ ID NO: 21929 - protein, 136 aa, Leptospira stimsonii
  misc_feature (1)..(136): tr|A0A396YTC6|A0A396YTC6_9LEPT 6-carboxy-5,6,7,8-tetrah ydropterin synthase OS=Leptospira stimsonii OX=2202203 GN=DLM75_20170 PE=3 SV=1
MFFEETGRFYIRIEERFESSHYLYRYFPDGSDEPIHGHSWKVELFLSGKKNIGEDGISFDFLTSKQKLKELVAKLDHILINDLEEFKKINPTSENIARWFYHYLKESVHSAGGKVDRIVIHEGPENLAYFEPTSSP

SEQ ID NO: 21930 - protein, 123 aa, Leptospira terpstrae
  misc_feature (1)..(123): tr|N1W1Z0|N1W1Z0_9LEPT 6-carboxy-5,6,7,8-tetrahydropter in synthase OS=Leptospira terpstrae serovar Hualin str. LT 11-33 = ATCC 700639 OX=1257025 GN=queD PE=3 SV=1
MEEIELSKTFGFEAAHFLPNVPDGHKCKRMHGHSFRFAVYLKGQIDPHTGWIMDFGELKSIVKPILDEHLDHFVLNDVPGLQNPTSENIAVWLWNQLKPKLPLLDKITLYETCTSSCVYRGPK

SEQ ID NO: 21931 - protein, 91 aa, Leptospira terpstrae
  misc_feature (1)..(91): tr|N1W3E6|N1W3E6_9LEPT 6-pyruvoyl tetrahydropterin synt hase OS=Leptospira terpstrae serovar Hualin str. LT 11- 33 = ATCC 700639 OX=1257025 GN=LEP1GSC203_3648 PE=4 SV= 1
MEGNTNLRPDGISYDFLTARTRLTELVHSIDHILINDHPDFKGINPTSENVARWFYFGLKADVKSSEGRIRRIVIHEGPENLAFFEPNLEP

SEQ ID NO: 21932 - protein, 126 aa, Leptospira tipperaryensis
  misc_feature (1)..(126): tr|A0A1D7V190|A0A1D7V190_9LEPT 6-carboxy-5,6,7,8-tetrah ydropterin synthase OS=Leptospira tipperaryensis OX=256 4040 GN=A0128_17990 PE=3 SV=1
MEEIELTKEFRFDAAHLLPNVPDGHKCKRLHGHSFRFKLHLKGRIDSHTGWLIDYAEVSKIVKPLIENHLDHYYLNDVPGLENPTSENISIWLWNHLKPLLPLLYKITLNETCTSACIYEGPKNSH

SEQ ID NO: 21933 - protein, 136 aa, Leptospira tipperaryensis
  misc_feature (1)..(136): tr|A0A1D7UYV6|A0A1D7UYV6_9LEPT 6-carboxy-5,6,7,8-tetrah ydropterin synthase OS=Leptospira tipperaryensis OX=256 4040 GN=A0128_13460 PE=3 SV=1
MFFEETGRFYIRIEERFESSHYLYRYFPDGSDEPIHGHSWKVELFLSGKKNIGEDGISFDFLTSKQKLKELVGKLDHILINDLEEFKKINPTSENIARWFYHYLKESVHSAGGQVDRIVIHEGPENLAYFEPTSSP

SEQ ID NO: 21934 - protein, 141 aa, Leptospira vanthielii
  misc_feature (1)..(141): tr|N1W594|N1W594_9LEPT 6-pyruvoyl tetrahydropterin synt hase OS=Leptospira vanthielii serovar Holland str. Waz Holland = ATCC 700522 OX=1218591 GN=LEP1GSC199_2918 PE= 4 SV=1
MDYALFVNGMFTQENGKFYVRIEGRFESAHFLYQYFADGSDEPIHGHSWKVEVFLEGNTNIRPDGISYDFLTARTKLMELVHSIDHILINDHPDFKGINPTSENVARWFYFGLKEGVKSSEGRIRRIVIHEGPENLAFFEP

SEQ ID NO: 21935 - protein, 132 aa, Leptospira vanthielii
  misc_feature (1)..(132): tr|A0A4R9LEY3|A0A4R9LEY3_9LEPT 6-carboxytetrahydropteri n synthase OS=Leptospira vanthielii OX=293085 GN=EHQ95_ 16175 PE=4 SV=1
MFTQENGKFYVRIEGRFESAHFLYQYFADGSDEPIHGHSWKVEVFLEGNTNIRPDGISYDFLTARTKLMELVHSIDHILINDHPDFKGINPTSENVARWFYFGLKEGVKSSEGRIRRIVIHEGPENLAFFEP

SEQ ID NO: 21936 - protein, 126 aa, Leptospira weilii
  misc_feature (1)..(126): tr|M3G6J0|M3G6J0_9LEPT 6-carboxy-5,6,7,8-tetrahydropter in synthase OS=Leptospira weilii serovar Topaz str. LT2 116 OX=1088540 GN=queD PE=3 SV=1
MEEIELTKEFHFDAAHLLPNVSDGHKCKRLHGHSFRFKLHLKGRIDSNTGWLIDYAEVSRIVKPLIEDHLDHYYLNEVPGLENPTSENIAIWLWNHLKPLLPLLYKITLNETCTSACIYEGPKGSA

SEQ ID NO: 21937 - protein, 136 aa, Leptospira weilii
  misc_feature (1)..(136): tr|M6M2Z3|M6M2Z3_9LEPT 6-carboxy-5,6,7,8-tetrahydropter in synthase OS=Leptospira weilii str. LNT 1234 OX=10885 41 GN=LEP1GSC086_4109 PE=3 SV=1
MFFEESGRFYIRIEERFESSHFLYKYFPDGSDEPIHGHSWKVELYLSGKKNIGEDGISFDFLTSKQKLKELVGKLDHILINELEEFKKINPTSENIARWFYHYLKESVHSAGGRVDKIVIHEGPENLAFFEPTSVP

SEQ ID NO: 21938 - protein, 141 aa, Leptospira wolbachii
  misc_feature (1)..(141): tr|R9A5B8|R9A5B8_9LEPT 6-pyruvoyl tetrahydropterin synt hase OS=Leptospira wolbachii serovar Codice str. CDC OX =1218599 GN=LEP1GSC195_3672 PE=4 SV=1
MDYALFVNGMFTQENGKFYVRIEGRFESAHFLYQYFADGSDEPIHGHSWKVEVFLEGNTNIRPDGISYDFLTARTKLMELVHSIDHILINDHPDFKGINPTSENVARWFYFGLKEDVKSSEGRIRRIVIHEGPENLAFFEP

SEQ ID NO: 21939 - protein, 123 aa, Leptospira wolbachii
  misc_feature (1)..(123): tr|R9A5Z0|R9A5Z0_9LEPT 6-carboxy-5,6,7,8-tetrahydropter in synthase OS=Leptospira wolbachii serovar Codice str. CDC OX=1218599 GN=queD PE=3 SV=1
MEEIELSKTFGFEAAHFLPNVPEGHKCRRMHGHSFRFSVTLKGQIDPHTGWLMDFGELKGLVKPILDAKLDHYVLNDVVGLENPTSENIAVWLWNQLKPKLPLLDKITIYETCTSSCVYRGPK

SEQ ID NO: 21940 - protein, 126 aa, Leptospira wolffii
  misc_feature (1)..(126): tr|S3UFT6|S3UFT6_9LEPT 6-carboxy-5,6,7,8-tetrahydropter in synthase OS=Leptospira wolffii serovar Khorat str. K horat-H2 OX=1193069 GN=queD PE=3 SV=1
MEEIELTKEFRFDAAHYLPNLPEGHKCKRMHGHSFRFKVHLKGQIDPHTGWLMDFAEVSKVIKPLLENYLDHYLLNEIQGLENPTSENISIWLWQRIKPQLPLLYKITLNETCTSACVYEGPSKKV

SEQ ID NO: 21941 - protein, 134 aa, Leptospira wolffii
  misc_feature (1)..(134): tr|A0A2M9ZH77|A0A2M9ZH77_9LEPT 6-carboxy-5,6,7,8-tetrah ydropterin synthase OS=Leptospira wolffii OX=409998 GN= CH371_07255 PE=3 SV=1
MFFQETGKFYIRIEERFESSHYLYKYFPDGSDEPIHGHSFKVEVYLSGRKNIGEDGISFDFLTSKKRLKELVGELDHILINDHADFKTTNPTSENMARWFYYGLKDSVSAADGKVDRIVIHEGPENLAYFEPNS

SEQ ID NO: 21942 - protein, 124 aa, Leptospira yanagawae; identical to SEQ ID NO: 21832
  misc_feature (1)..(124): tr|A0A5E8HGF8|A0A5E8HGF8_9LEPT 6-carboxy-5,6,7,8-tetrah ydropterin synthase OS=Leptospira yanagawae serovar Sao paulo str. Sao Paulo = ATCC 700523 OX=1249483 GN=queD P E=3 SV=1

SEQ ID NO: 21943 - protein, 124 aa, Leptospira yanagawae; identical to SEQ ID NO: 21832
  misc_feature (1)..(124): tr|A0A4R9J0A4|A0A4R9J0A4_9LEPT 6-carboxy-5,6,7,8-tetrah ydropterin synthase OS=Leptospira yanagawae OX=293069 G N=queD PE=3 SV=1

SEQ ID NO: 21944 - protein, 126 aa, Leptospira yasudae
  misc_feature (1)..(126): tr|A0A418ABD0|A0A418ABD0_9LEPT 6-carboxy-5,6,7,8-tetrah ydropterin synthase OS=Leptospira yasudae OX=2202201 GN =queD PE=3 SV=1
MEEIELTKEFRFDAAHLLPNVPDGHKCKRLHGHSFRFKLHLKGKIDSKTGWLIDYAEVSKIVKPLIENHLDHYYLNDVPGLENPTSENISIWLWNHLKPLLPLLYKITLNETCTSACIYEGPKGSA

SEQ ID NO: 21945 - protein, 136 aa, Leptospira yasudae
  misc_feature (1)..(136): tr|A0A418A889|A0A418A889_9LEPT 6-carboxy-5,6,7,8-tetrah ydropterin synthase OS=Leptospira yasudae OX=2202201 GN =DLM77_12950 PE=3 SV=1
MFFEESGRFYIRIEERFESSHFLYRYFPDGSDEPIHGHSWKVELYLSGKKNIGEDGISFDFLTSKQKLKELVGKLDHILINDLEEFKTINPTSENIARWFYHYLKESVHSAGGKVDRIVIHEGPENLAYFEPTSFP

SEQ ID NO: 21946 - protein, 126 aa, Leptospiraceae bacterium
  misc_feature (1)..(126): tr|A0A357J1I5|A0A357J1I5_9LEPT 6-carboxy-5,6,7,8-tetrah ydropterin synthase OS=Leptospiraceae bacterium OX=2026 757 GN=queD PE=3 SV=1
MSQEVEIVKKYRFEAAHFLPNVPEGHKCRRMHGHSFRFELVLRGPVDPNTGWLIDFGDISKIVKPLIDNHLDHYLLNDVEGLENPTSEQISIWLWNRIKPHLADLVEIVVHETCTARCIYRGPGGA

SEQ ID NO: 21947 - protein, 153 aa, Leptospiraceae bacterium
  misc_feature (1)..(153): tr|A0A357ISA6|A0A357ISA6_9LEPT 6-carboxytetrahydropteri n synthase OS=Leptospiraceae bacterium OX=2026757 GN=DE A96_00250 PE=4 SV=1
MDQNAHPHLLKDLQGFSEKPGEFLIRIEGRFESSHYLYRYFPDGSDEPVHGHSWLVEVFLARADGGLGADGISYDFLSARLRLNELVDRMEHVTINNLPEFKGVNPTAENIGRWFYAGLKEVVEKEGACVREIRIHEGPSNYAVYRPFKEEAT

SEQ ID NO: 21948 - protein, 128 aa, Leptospirillum ferriphilum
  misc_feature (1)..(128): tr|J9Z7K2|J9Z7K2_LEPFM 6-carboxy-5,6,7,8-tetrahydropter in synthase OS=Leptospirillum ferriphilum (strain ML-04 ) OX=1048260 GN=LFML04_0117 PE=3 SV=1
MFLISVTATFAASHILPGYPGLCSKLHGHNWTVEVSWSSRGLDPLGMALDFHEAEALLGPLIKELDHSHLNDHPFFRERLPTSEQVAFFLYTRLKEIMSSRTDSTVRLDQVAVTEMAPYKAIYRETSG

SEQ ID NO: 21949 - protein, 128 aa, Leptospirillum ferriphilum; identical to SEQ ID NO: 21948
  misc_feature (1)..(128): tr|A0A1V3SUK4|A0A1V3SUK4_9BACT 6-carboxy-5,6,7,8-tetrah ydropterin synthase OS=Leptospirillum ferriphilum OX=17 8606 GN=BOX24_07640 PE=3 SV=1

SEQ ID NO: 21950 - protein, 128 aa, Leptospirillum ferrodiazotrophum
  misc_feature (1)..(128): tr|C6HXY4|C6HXY4_9BACT Uncharacterized protein OS=Lepto spirillum ferrodiazotrophum OX=412449 GN=UBAL3_93200098 PE=4 SV=1
MMGFSVSARRSFAASHIIVGYPGLCARLHGHNWTVEATFRTLELDALGMAFDFHEIERFLDPLVAELDHTHLNDHPFFSDRTTTAENIALYFYRGLVRNLSVSSHPGVSVARVSVCEMDGYVATYEEP

SEQ ID NO: 21951 - protein, 131 aa, Leptospirillum ferrooxidans
  misc_feature (1)..(131): tr|I0IKQ1|I0IKQ1_LEPFC Putative 6-pyruvoyl tetrahydrobi opterin synthase OS=Leptospirillum ferrooxidans (strain C2-3) OX=1162668 GN=LFE_0121 PE=4 SV=1
MFDITVTTQFSAAHQIPGYPGACARLHGHNWKIEVTIRALTLDHLGMALDYHQAEQMLFPIISELDHTNLNDHPFFSDRTTTSENVAFFIHSRMKQALGNDLQAKNRKLSLMAVTVYETDIYRTTYRETDG

SEQ ID NO: 21952 - protein, 128 aa, Leptospirillum sp.; identical to SEQ ID NO: 21948
  misc_feature (1)..(128): tr|A0A0K0WQB0|A0A0K0WQB0_9BACT 6-carboxy-5,6,7,8-tetrah ydropterin synthase OS=Leptospirillum sp. Group II 'CF- 1' OX=1660083 GN=ABH19_00565 PE=3 SV=1

SEQ ID NO: 21953 - protein, 128 aa, Leptospirillum sp.
  misc_feature (1)..(128): tr|B6AMM9|B6AMM9_9BACT 6-carboxy-5,6,7,8-tetrahydropter in synthase OS=Leptospirillum sp. Group II '5-way CG' O X=419541 GN=CGL2_11181002 PE=3 SV=1
MFLISVTATFAASHILPGYPGLCSKLHGHNWTVEVAWSSQGLDPLGMALDFHEAETLLGPLIKELDHSHLNDHPFFRERLPTSEQVAFFLYTRLKEIMSSRTDSTVRLDQVAVTEMAPYKAIYRETSG

SEQ ID NO: 21954 - protein, 125 aa, Leuconostoc citreum
  misc_feature (1)..(125): tr|A0A5A5TXC3|A0A5A5TXC3_LEUCI 6-pyruvoyltetrahydropter in synthase OS=Leuconostoc citreum OX=33964 GN=LCIT_060 20 PE=4 SV=1
MSNKVLTYRLRTFINATHAVRWQGVQGVAHPHTWELILDIQPMTYPQPMKFEDIETVINDSIAVFSGKFLNTVAPFDDINPTLENFAEVLFDILTTALLKISCQLLDLSVGESPTRFINIALAQD

SEQ ID NO: 21955 - protein, 125 aa, Leuconostoc citreum
  misc_feature (1)..(125): tr|B1N004|B1N004_LEUCK 6-pyruvoyl-tetrahydropterin synt hase OS=Leuconostoc citreum (strain KM20) OX=349519 GN= LCK_01281 PE=4 SV=1
MSNKVLTYRLRTFINATHAVRWQGVQGVAHPHTWELILDIQPMTYPQPMKFEDIETVINDSIAVFSGEFLNTVAPFDDINPTLENFAEVLFDILTTALLKISCQLLDLSVGESPTRFINIALAQD

SEQ ID NO: 21956 - protein, 120 aa, Leuconostoc fallax
  misc_feature (1)..(120): tr|A0A4R5N7W2|A0A4R5N7W2_9LACT Uncharacterized protein OS=Leuconostoc fallax OX=1251 GN=C5L23_000271 PE=4 SV=1
MMKSRSYKFKTYLNASHAVQWDSGRGVVHPHTWEIICEVKEGDDLVKFEVVEAIIEQQLSAFSNQTLNDVAPFNEINPTLENFTDFVFDRLSQSLVDISCHLIRIEVSESPTRTCCISLE

SEQ ID NO: 21957 - protein, 127 aa, Leuconostoc lactis
  misc_feature (1)..(127): tr|A0A1B2A1T6|A0A1B2A1T6_LEULA 6-pyruvoyl tetrahydropte rin synthase OS=Leuconostoc lactis OX=1246 GN=BCR17_062 05 PE=4 SV=1
MRQKSYTYKLRTFINASHAVRWQGVLGAEHPHTWELILEIRPTAEQFSLKFEDIEAVIADSIAPFHGQLLNNVQPFDQIVPTLENFAEQLFDLLADALTEIACQLHDLSVGESPTRYYSVALRELND

SEQ ID NO: 21958 - protein, 125 aa, Leuconostoc lactis
  misc_feature (1)..(125): tr|A0A1B2A1U9|A0A1B2A1U9_LEULA 6-pyruvoyl tetrahydropte rin synthase OS=Leuconostoc lactis OX=1246 GN=BCR17_062 25 PE=4 SV=1
MGNKVFTYKLSTFINASHAVRWPDEMEAEHRHTWELILNIRPITAGKLLKIDDIEEVIEASLQTFSGRFLNDMSRFDNVNPTLENFTEILFDDLTQALSGISMQLVELSVGNSPTRFYHITLEDN

SEQ ID NO: 21959 - protein, 126 aa, Leuconostoc mesenteroides
  misc_feature (1)..(126): tr|A0A095CV71|A0A095CV71_LEUME 6-pyruvoyl tetrahydropte rin synthase OS=Leuconostoc mesenteroides P45 OX=142988 8 GN=LH61_04190 PE=4 SV=1
MNLVGTYHLKYYIHASHAIRWENGEGEEHAHSWEIAVEFRSTNENMIVFDKIESSLDDLFKAYSGKFLNTVEPFTTIDPTLENITKFFFTLVEKQILPMHAQLNKIELGESPMRFYYVTRDDISGE

SEQ ID NO: 21960 - protein, 126 aa, Leuconostoc mesenteroides
  misc_feature (1)..(126): tr|A0A5B8TWP5|A0A5B8TWP5_LEUME 6-pyruvoyl tetrahydropte rin synthase OS=Leuconostoc mesenteroides OX=1245 GN=FG L74_08790 PE=4 SV=1
MNLVGTYHLKYYIHATHAIRWENGEGEEHAHSWEIAVEFRSTNEDMIVFDKIEGSLDELFKTYSGKFLNKVEPFTTIDPTLENITKFFFTLVAKQISPMHAQLNKIEIGESPMRFYYVTRDDMSGE

SEQ ID NO: 21961 - protein, 126 aa, Leuconostoc pseudomesenteroides
  misc_feature (1)..(126): tr|A0A370AE82|A0A370AE82_LEUPS 6-pyruvoyl tetrahydropte rin synthase OS=Leuconostoc pseudomesenteroides OX=3396 8 GN=DQM11_04270 PE=4 SV=1
MIKKNYQYKLRTFINASHAIRWADGQGTIHPHTWEVVLNIIPPVASTSEVVKFEDIELLVQNYLQKYAGQTLNDIAPFRTINPTLENFADVLFDELTAALDVIHFQLVQLDLGESAKRFYSISLAD

SEQ ID NO: 21962 - protein, 126 aa, Leuconostoc pseudomesenteroides
  misc_feature (1)..(126): tr|A0A5B8T3Q9|A0A5B8T3Q9_LEUPS 6-pyruvoyl tetrahydropte rin synthase OS=Leuconostoc pseudomesenteroides OX=3396 8 GN=FGL85_08225 PE=4 SV=1
MIKKIYQYKLRTFINASHAIRWSDGQGAIHPHTWEVVLNIIPPAESTSEVVKFEDIELLVQNYLQKYSGQTLNEMAPFRKINPTLENFADVLFDELTAALNVIQFQLVQLDLGESAKRFYSISLAN

SEQ ID NO: 21963 - protein, 83 aa, Leuconostoc sp.
  misc_feature (1)..(83): tr|W1UVH8|W1UVH8_9LACT Uncharacterized protein (Fragmen t) OS=Leuconostoc sp. DORA_2 OX=1403934 GN=Q611_LSC0040 4G0002 PE=4 SV=1
MTYPQPMKFEDIETVINDSIAVFSGEFLNTVAPFDDINPTLENFAEVLFDILTTALLKISCQLLDLSVGESPTRFINIALAQD

SEQ ID NO: 21964 - protein, 126 aa, Leuconostoc suionicum
  misc_feature (1)..(126): tr|A0A2N9K8I0|A0A2N9K8I0_9LACT 6-pyruvoyl tetrahydropte rin synthase OS=Leuconostoc suionicum OX=1511761 GN=LES 9216_00762 PE=4 SV=1
MSLVGTYHLKYYIHASHAIRWENGEGEEHAHSWEIAVEFRSTNENMIVFDKIESSLDDLFKAYSGKFLNTVEPFTTIDPTLENITKFFFTLVEKQILPMHAQLNKIELGESPMRFYYVTRDDMSGE

SEQ ID NO: 21965 - protein, 118 aa, Leucothrix pacifica
  misc_feature (1)..(118): tr|A0A317C9T8|A0A317C9T8_9GAMM 6-carboxy-5,6,7,8-tetrah ydropterin synthase OS=Leucothrix pacifica OX=1247513 G N=queD PE=3 SV=1
MFRISKEFQFSASHQLKQMPADHQCARLHGHNYIVVVELSSPTLDQYGFVRDYTELKPLKDYIDDTLDHRHLNDVLGDDCATAELLAKHLYDWCKAKWPETSGVKVSETPKTWAEYRP

SEQ ID NO: 21966 - protein, 118 aa, Leucothrix sp.
  misc_feature (1)..(118): tr|A0A317C9D2|A0A317C9D2_9GAMM 6-carboxy-5,6,7,8-tetrah ydropterin synthase OS=Leucothrix sp. IMCC9719 OX=14818 94 GN=queD PE=3 SV=1
MFRISKEFQFSASHQLKQMPDDHQCARLHGHNYVVVVELSSETLDQYGFVRDYSELKLLKTYIDDVLDHRHLNDVLGDDCATAELLAKHLFDWCKPHWPETTAVKVSETPKTWAEYRP

SEQ ID NO: 21967 - protein, 148 aa, Lewinella agarilytica
  misc_feature (1)..(148): tr|A0A1H9L014|A0A1H9L014_9BACT 6-pyruvoyltetrahydropter in/6-carboxytetrahydropterin synthase OS=Lewinella agar ilytica OX=478744 GN=SAMN05444359_12263 PE=4 SV=1
MLNFAPMLYLTRRETFNAAHKLHNPDWSDEKNKATFGKCSNHNWHGHNYELFVTVVGEPDPVTGFVMDAKVLSTIVKKEIVDQVDHRNINLDVEWFSSDLQPTTENLARAFWNRIEALINERGAQLYCVKLKETENIFAEYFGPQGRK

SEQ ID NO: 21968 - protein, 142 aa, Lewinella marina
  misc_feature (1)..(142): tr|A0A2G0CFA3|A0A2G0CFA3_9BACT 6-carboxy-5,6,7,8-tetrah ydropterin synthase OS=Lewinella marina OX=438751 GN=CG L56_09275 PE=3 SV=1
MHYLTRRETFNAAHKLAVEEWPDDRNKEVFGKCANRNWHGHNYDLRVTVCGEPDPITGFVMDAKVLSGIVKAEVVDQLDHSNLNLDIDWFKDGRQPTTENLTSEIWKHLEEKIAAAGSRLYRVRLYETENIYADYYGPAGRP

SEQ ID NO: 21969 - protein, 136 aa, Lewinella nigricans
  misc_feature (1)..(136): tr|A0A2D0N5Z1|A0A2D0N5Z1_9BACT 6-pyruvoyl tetrahydrobio pterin synthase OS=Lewinella nigricans DSM 23189 = NBRC 102662 OX=1122177 GN=CRP01_24610 PE=4 SV=1
MVYLTRRERFNAAHKLWVDQWSEEQNLATFGKCANKNWHGHNYWLYVTVKGRPDPVTGFIIDVKKLSRLIKESIVDKVDHCNLNMDVPFIPKGMQPTTENLVILFWQQLEPLLEECELHSIKLYETENIYAEYFGP

SEQ ID NO: 21970 - protein, 136 aa, Lewinella nigricans
  misc_feature (1)..(136): tr|A0A2D0N7C6|A0A2D0N7C6_9BACT 6-carboxy-5,6,7,8-tetrah ydropterin synthase OS=Lewinella nigricans DSM 23189 = NBRC 102662 OX=1122177 GN=CRP01_24240 PE=3 SV=1
MRIAVFRKAHFNAAHRLYRPDWSDERNFEVFGVCSNNNYHGHNYELEVKVVGETDPETGYLIDLKVLKEIIFEEVEQRFDHKNLNLDTEEFRELNPTAENICYVIWQLLRKRLEDRLDLKVRLYETPRNYVEYPAD

SEQ ID NO: 21971 - protein, 142 aa, Lewinella sp.
  misc_feature (1)..(142): tr|A0A5C7FVP2|A0A5C7FVP2_9BACT 6-carboxytetrahydropteri n synthase OS=Lewinella sp. SSH13 OX=2602767 GN=FUA23_0 4555 PE=4 SV=1
MLYLTRRETFNAAHKLHIADWSDEQNRAVFGKCSNPNWHGHNYELFVTVAGNPDPNTGFVMDAKLLSTIMKEEIVDEVDHRNFNLDVEWVPKSIQPTTENLLILFWNRIEERVNAGGATLYSIKLRETENIYAEYFGPNGRK

SEQ ID NO: 21972 - protein, 141 aa, Lewinella sp.
  misc_feature (1)..(141): tr|A0A180EPQ6|A0A180EPQ6_9BACT 6-carboxy-5,6,7,8-tetrah ydropterin synthase OS=Lewinella sp. 4G2 OX=1803372 GN= A3850_012380 PE=3 SV=1
MVYLTRRVTFNAAHKLHVEGWSEEKNRSIFGKCSNKNWHGHNYELFVTVKGQPDPLTGFVLDAKALRDLIKKEVTDDLDHSNLNLDVDWMPKDVQPTTENIAIRIFERIEAQVNELGAQLYSVRLHETENIYAEYFGPNGK

SEQ ID NO: 21973 - protein, 141 aa, Lewinella xylanilytica
  misc_feature (1)..(141): tr|A0A2S6I0D9|A0A2S6I0D9_9BACT 6-pyruvoyltetrahydropter in/6-carboxytetrahydropterin synthase OS=Lewinella xyla nilytica OX=1514080 GN=CLV84_4088 PE=4 SV=1
MHYVTRRETFNAAHKLALPTWSDERNREVFGKCANANWHGHNYDLRVTVSGSPDPVTGFVMDAKVLSQIIKRTVVDVLDHSNLNLDVDWFRDRLPTTENLTTAIWERLVDEVSAAGSALYRVRLYETENIYADYYGPAGRP

SEQ ID NO: 21974 - protein, 136 aa, Lewinellaceae bacterium
  misc_feature (1)..(136): tr|A0A2C6CUA8|A0A2C6CUA8_9BACT 6-carboxy-5,6,7,8-tetrah ydropterin synthase OS=Lewinellaceae bacterium SD302 OX =2014804 GN=CEQ90_09675 PE=3 SV=1
MVYLTRRMRFNAAHKLWVREWSEEQNLATFGKCANKNWHGHNYDLHVTVKGEPDPTTGFVMDAKKLRDIIQAEVIDDLDHSNLNLDVDWLPKDLQPTTENVVIHIWRRLADKVNDGKLHCVKLYETENIYAEYLGE

SEQ ID NO: 21975 - protein, 135 aa, Lewinellaceae bacterium
  misc_feature (1)..(135): tr|A0A2C6BB18|A0A2C6BB18_9BACT 6-carboxy-5,6,7,8-tetrah ydropterin synthase OS=Lewinellaceae bacterium SD302 OX =2014804 GN=CEQ90_02945 PE=3 SV=1
MKIAAFRRAHFNAAHRLFRADWSDEKNREIFGPCSNPFYHGHNYEVEVKVVGEIDPETGFVIDLSLLKRYIKEEVEDYLDHKNLNEQIPEFKDLNPTAEHICILIWNRLKPRLDERYELTVRLWETERNYVEYPA

SEQ ID NO: 21976 - protein, 118 aa, Liberibacter asiaticus
  misc_feature (1)..(118): tr|C6XGK2|C6XGK2_LIBAP 6-carboxy-5,6,7,8-tetrahydropter in synthase OS=Liberibacter asiaticus (strain psy62) OX =537021 GN=CLIBASIA_04670 PE=3 SV=1
MKITQAFTFEAAHRLPRVPKTHKCHRMHGHSYRVELVMEGDVDPKTGFVDDFFNIEQYFSPLLEKLDHHCLNEIEELENPTAENIAIWIWKRLSTSLSILSSVRVYETPMSWVEYQGF

SEQ ID NO: 21977 - protein, 118 aa, Liberibacter crescens
  misc_feature (1)..(118): tr|L0ET90|L0ET90_LIBCB 6-carboxy-5,6,7,8-tetrahydropter in synthase OS=Liberibacter crescens (strain BT-1) OX=1 215343 GN=B488_07620 PE=3 SV=1
MKITQAFTFEAAHHLSHLPKTHKCHRMHGHSYRVEITLQGNINPETGFVEDFFNIESSMSHVLALLDHQSLNDIDGLEKPSVENIALWIWNKINHTIPLLFSVRVYETSMSWAEYQGE

SEQ ID NO: 21978 - protein, 118 aa, Liberibacter solanacearum; identical to SEQ ID NO: 18841
  misc_feature (1)..(118): tr|E4UAY2|E4UAY2_LIBSC 6-carboxy-5,6,7,8-tetrahydropter in synthase OS=Liberibacter solanacearum (strain CLso-Z C1) OX=658172 GN=CKC_03120 PE=3 SV=1

SEQ ID NO: 21979 - protein, 128 aa, Lihuaxuella thermophila
  misc_feature (1)..(128): tr|A0A1H8C195|A0A1H8C195_9BACL 6-carboxy-5,6,7,8-tetrah ydropterin synthase OS=Lihuaxuella thermophila OX=11731 11 GN=SAMN05444955_10321 PE=3 SV=1
MRGKYTLVKHFWLSCAHRVPGAGKCERIHGHNYKVTFCVEGYELDEQQMLIDFRQVKHAIEKKFDHHLLNDFPEFDPGRGGSAPTTEKVAEVFFSIIEELCLQKENRPTVKWVEVQETEEAYARYEKV

SEQ ID NO: 21980 - protein, 122 aa, Limimaricola cinnabarinus
  misc_feature (1)..(122): tr|A0A2G1MH90|A0A2G1MH90_9RHOB 6-carboxy-5,6,7,8-tetrah ydropterin synthase OS=Limimaricola cinnabarinus OX=112 5964 GN=queD PE=3 SV=1
MYTITKEFHFSASHQLCGLPEDHPCARLHGHNYIAVVELQAEELDENGFVLDYKALKPLKTWIDDHLDHRHLNEVFGHDRVTSEVLAKEIYDWARARWAQVSAVRISETPKTWAEYRPRSAA

SEQ ID NO: 21981 - protein, 118 aa, Limimaricola cinnabarinus
  misc_feature (1)..(118): tr|U3AL09|U3AL09_9RHOB 6-carboxy-5,6,7,8-tetrahydropter in synthase OS=Limimaricola cinnabarinus LL-001 OX=1337 093 GN=MBELCI_1480 PE=3 SV=1
MYTITKEFHFSASHQLCGLPGDHPCARLHGHNYIAEVELRAETLDENGFVLDYRALDPLKRWIDDHLDHRHLNEVFGHDGVTSEVLARAIFDWARARWDQVSAVRISETPKTWAEYRP

SEQ ID NO: 21982 - protein, 123 aa, Limimaricola hongkongensis
  misc_feature (1)..(123): tr|A0A017HDN6|A0A017HDN6_9RHOB 6-carboxy-5,6,7,8-tetrah ydropterin synthase OS=Limimaricola hongkongensis DSM 1 7492 OX=1122180 GN=Lokhon_01271 PE=3 SV=1
MFTITKEFHFSASHQLCDLPEDHPCARLHGHNYIAEIELQAETLDENGFVLDYRALKPLKSWIDDHLDHRHLNEVFGHDHVTSEVLAKEIFDWARARWDQVSAVRISETPKTWAEYRPRRSAA

SEQ ID NO: 21983 - protein, 125 aa, Limimaricola soesokkakensis
  misc_feature (1)..(125): tr|A0A1X6YY80|A0A1X6YY80_9RHOB 6-carboxy-5,6,7,8-tetrah ydropterin synthase OS=Limimaricola soesokkakensis OX=1 343159 GN=queD PE=3 SV=1
MYTITKEFHFSASHQLCGLPGDHPCARLHGHNYIAEVELQSEELDENGFVLDYRALDPLKRWIDDHLDHRHLNEVFGHDGVTSEVLAWAIYDWAAARWDQVSAVRVSETPKTWAEYRPQPGRRAA

SEQ ID NO: 21984 - protein, 136 aa, Limimonas halophila
  misc_feature (1)..(136): tr|A0A1G7P137|A0A1G7P137_9PROT 6-pyruvoyl-tetrahydropte rin synthase OS=Limimonas halophila OX=1082479 GN=SAMN0 5216241_102367 PE=4 SV=1
MYAVTVRDRMMIAHSFQGEAFGPAQRLHGATYVVDVTLWRPDLNADGVAVDIAAAGELLSSVVGGLTFRNLDDEPAFAGRNTTTEVLAKAVFDRLAARIRDGALGGDGHALTALRVTLNESDIASASYEGPLTAGT

SEQ ID NO: 21985 - protein, 116 aa, Limnobacter sp.
  misc_feature (1)..(116): tr|A0A151QK51|A0A151QK51_9BURK 6-carboxy-5,6,7,8-tetrah ydropterin synthase OS=Limnobacter sp. CACIAM 66H1 OX=1 813033 GN=A0129_00870 PE=3 SV=1
MKVFKQFTFDVAHQLPDWPGLHGHSYTAEVWFEGPATDGYVVPESLLTQHVGAVHKRLDHSYLNELIELPTSENIARWIWDQLRPVGPLIKVKVFRGSIGFGVEFDLEDAKAEGRA

SEQ ID NO: 21986 - protein, 116 aa, Limnobacter sp.
  misc_feature (1)..(116): tr|A0A520TBW6|A0A520TBW6_9BURK 6-carboxy-5,6,7,8-tetrah ydropterin synthase OS=Limnobacter sp. OX=2003368 GN=EV A59_09825 PE=3 SV=1
MKVFKQFTFDVAHQLPDWPGLHGHSYTAEVWFEGPAIDGYVVPESLLTQHVGAVHKRLDHSYLNELIELPTSENIARWIWDQLRPVGPLIKVKVFRGSIGFGVEFDLEDAKAEGRA

SEQ ID NO: 21987 - protein, 121 aa, Limnobaculum parvum
  misc_feature (1)..(121): tr|A0A2Y9U2M3|A0A2Y9U2M3_9ENTR 6-carboxy-5,6,7,8-tetrah ydropterin synthase OS=Limnobaculum parvum OX=2172103 G N=queD PE=3 SV=1
MMVTTLFKDFTFEAAHRLPNVPEGHKCARLHGHSFVVRIEVTGEVSPNTGWVMDFSEIKAAFKPILNRLDHYYLNDIPGLENPTSEVLAHWIWQQLKPGLPLLSGVRVKETCSAGCIYNGE

SEQ ID NO: 21988 - protein, 123 aa, Limnohabitans curvus
  misc_feature (1)..(123): tr|A0A315EP32|A0A315EP32_9BURK 6-carboxy-5,6,7,8-tetrah ydropterin synthase OS=Limnohabitans curvus OX=323423 G N=B9Z44_02210 PE=3 SV=1
MKYELSQRFYFEAAHTLRRKIDSEGSLRIHGHTYHAEVTIAGKPDPESGMMMDLAFLRQEVEKVREKLDHHFLDEVPGIGPATLENLCAFIYNDLKATLPNIHCIKIERPASGDTCCLLPNED

SEQ ID NO: 21989 - protein, 123 aa, Limnohabitans sp.
  misc_feature (1)..(123): tr|A0A2S7JJH0|A0A2S7JJH0_9BURK 6-carboxy-5,6,7,8-tetrah ydropterin synthase OS=Limnohabitans sp. TS-CS-82 OX=20 94193 GN=C5F52_25055 PE=3 SV=1
MTYELSQRFYFEAAHTLRRKIDAEGSLRIHGHTYHAEVTLAGKPDPESGMMMDLGFLRQEVDKVREKLDHHFLDEVAGLGPATLENLCAFIYNDLKATLPNIRRIKIERPASGDTCCLLPNED

SEQ ID NO: 21990 - protein, 123 aa, Limnohabitans sp.
  misc_feature (1)..(123): tr|A0A315C4P3|A0A315C4P3_9BURK 6-carboxy-5,6,7,8-tetrah ydropterin synthase OS=Limnohabitans sp. JirII-29 OX=18 35756 GN=B9Z39_11510 PE=3 SV=1
MTFELSQRFYFEAAHTLRRTIDAQGSLRIHGHTYHAEVTIAGTPDPATGMMMDLAYLRQEVEKVRTQLDHHFLDEVAGLGPATLENLCLFLHTQLKDALPNLARVVVERPASGDKCCLKVPQS

SEQ ID NO: 21991 - protein, 288 aa, Limnoraphis robusta
  misc_feature (1)..(288): tr|A0A0F5YI65|A0A0F5YI65_9CYAN 6-pyruvoyl tetrahydropte rin synthase OS=Limnoraphis robusta CS-951 OX=1637645 G N=WN50_08730 PE=4 SV=1
MECVITRREEFSASHRYWMSELSEAENFERFGPTARAPGHGHNYVLYISMVGQLDEYGMVLNLSDVKHVIKREVTSQLDFSLLNEVWPEFQHTLPTTEYLAQVIWQRLTPHLPLTNIQVFEHPKLWADYQGNSMEAYLTVSTHFSAAHRLAHPDLSFEENCQIYGKCARPNGHGHNYHLEVTVKGEIDPRTGMIVDLAALQQAIDDYVVEPFDHTFLNKDIAYFAKVVPTAENIAVYIRHLLQNPIRQLGTQLHKVKLIESPNNSCEVYCTETPADSTVTKTPVFATV

SEQ ID NO: 21992 - protein, 144 aa, Limnoraphis robusta
  misc_feature (1)..(144): tr|A0A0F5YE44|A0A0F5YE44_9CYAN 6-carboxy-5,6,7,8-tetrah ydropterin synthase OS=Limnoraphis robusta CS-951 OX=16 37645 GN=WN50_17215 PE=3 SV=1
MTSNTEKEEIKSNSESWIIGKEFKFEASHQLPNHDGKCARLHGHSWRGVIYVSGNKLIDAGAKQDMIMDYEDIKKYLKPLLDDYLDHYHLNETTGLANPTSEAIAKWIYEQLEDQIPGLVAVRIDETCTSQCVYSKEKSNFLLL

SEQ ID NO: 21993 - protein, 290 aa, Limnospira indica; identical to SEQ ID NO: 17691
  misc_feature (1)..(290): tr|H1WHD1|H1WHD1_9CYAN 6-pyruvoyl tetrahydrobiopterin s ynthase OS=Limnospira indica PCC 8005 OX=376219 GN=ptpS PE=4 SV=1

SEQ ID NO: 21994 - protein, 130 aa, Limnospira indica; identical to SEQ ID NO: 17690
  misc_feature (1)..(130): tr|H1W622|H1W622_9CYAN 6-carboxy-5,6,7,8-tetrahydropter in synthase OS=Limnospira indica PCC 8005 OX=376219 GN= ygcM PE=3 SV=1

SEQ ID NO: 21995 - protein, 126 aa, Limnothrix rosea
  misc_feature (1)..(126): tr|A0A1Q4R7F4|A0A1Q4R7F4_9CYAN 6-carboxy-5,6,7,8-tetrah ydropterin synthase OS=Limnothrix rosea IAM M-220 OX=45 4133 GN=NIES208_04760 PE=3 SV=1
MEQWQLYKEFRFEAAHRLPHHDGKCARLHGHSWVCRVYIRGDRLIESGAKQGMLMDFSDLKSSMKPLLEDYLDHYYLNETLEMESPTSEAIAKWIYEQLEAKKLMGLCAVEILETCTSGCIYSRPK

SEQ ID NO: 21996 - protein, 302 aa, Limnothrix sp.
  misc_feature (1)..(302): tr|A0A372DE81|A0A372DE81_9CYAN 6-pyruvoyl tetrahydropte rin synthase OS=Limnothrix sp. CACIAM 69d OX=1890733 GN =BJG00_015850 PE=4 SV=1
MSDLCTISRRVQFSASYRYWLPELTEAENHRRFGIAARSPGSTFTLWVQVQGPIDPFGMVANLSTTVKRALQREVLEPLHGANLNQIWPEFANTLPTSEWLAQVLWQRLGQCWQRQGLQLRQVQLSPDPGLVVEYRGQAMEAHLTVHTHFSAAHRLALPTLTLAQNSEIYGKCSRPSGHGHNYQLWVTVCGQIDPRTGMVVELNRLHDLIEMQVVEPLDHTFLNQDIAYFQDIVPTAENIAVYIRDQLLEPVRELGVQLVKIRLDETENNSCEVYVETEAPWVDLPVTSAIDPGKPAGVGAN

SEQ ID NO: 21997 - protein, 302 aa, Limnothrix sp.
  misc_feature (1)..(302): tr|A0A1C0V3G2|A0A1C0V3G2_9CYAN 6-pyruvoyl tetrahydropte rin synthase OS=Limnothrix sp. P13C2 OX=1880902 GN=BCR1 2_06445 PE=4 SV=1
MSDLCTISRRVQFSASYRYWLPELTEAENHRRFGIAARSPGSTFTLWVQVQGPIDPFGMVANLSTTIKRALQREVLEPLHGANLNQVWPEFANTLPTSEWLAQVLWQRLGQCWQRQGLQLRQVQLSPDPGLVVEYRGQAMEAHLTVHTHFSAAHRLALPTLTLAQNSEIYGKCSRPSGHGHNYQLWVTVRGQIDPRTGMVVELNRLHDLIEMQVVEQLDHTFLNQDIAYFQDIVPTAENIAVYIRDQLLEPLRELGVQLVKIRLDETENNSCEVYVQTEALWVDRPVTSAIDQGKPAGVGAN

SEQ ID NO: 21998 - protein, 136 aa, Lishizhenia tianjinensis
  misc_feature (1)..(136): tr|A0A1I7BW02|A0A1I7BW02_9FLAO 6-carboxy-5,6,7,8-tetrah ydropterin synthase OS=Lishizhenia tianjinensis OX=4776 90 GN=SAMN05216474_3130 PE=3 SV=1
MKLKICRRETFNAAHRLNNPNWDEQTNAEVFGKCNSPNYHGHNYVLETYVSGEPDPETGYLMDLKILKEIIKEEICERFDHRNLNLDTEEFKNLNPTAENIVMVCYRLLREKIDPKLGLYLRLYETQKNWVEYGEE

SEQ ID NO: 21999 - protein, 143 aa, Lishizhenia tianjinensis
  misc_feature (1)..(143): tr|A0A1I7BNS2|A0A1I7BNS2_9FLAO 6-carboxy-5,6,7,8-tetrah ydropterin synthase OS=Lishizhenia tianjinensis OX=4776 90 GN=SAMN05216474_2946 PE=3 SV=1
MKTVYITRREHFNAAHKLWREEWSDEKNEAVFGKCSNKNWHGHNFVIYVTVKGKPNPDTGFVIDLKDLSKIVKEEVVEQLDHRNLNLDVPFMKGKLASTENLVIEIWEQIKDSIQRAGGELAKIKLVETENNFVEYFGGNEPF

SEQ ID NO: 22000 - protein, 142 aa, Listeria booriae
  misc_feature (1)..(142): tr|A0A099WEB9|A0A099WEB9_9LIST 6-carboxy-5,6,7,8-tetrah ydropterin synthase OS=Listeria booriae OX=1552123 GN=E P57_05840 PE=3 SV=1
MMKIAKEFTFDMGHMLDGHDGKCHNLHGHTYTLQVEVAGALITTGSSAGMVLDYGDIKRIVKEHVTAKLDHAFAYFEENENECRVAKLLQEMERKTVALPCRSTAEGLAMVIYDWLAPYLPVSAIRLGETPTSFCEYTGELS

SEQ ID NO: 22001 - protein, 141 aa, Listeria cornellensis
  misc_feature (1)..(141): tr|W7BZB2|W7BZB2_9LIST 6-carboxy-5,6,7,8-tetrahydropter in synthase OS=Listeria cornellensis FSL F6-0969 OX=126 5820 GN=PCORN_08822 PE=3 SV=1
MRIAKEFTFDMAHMLDGHDGKCHNLHGHTYTLQVEVAGDLIANGPKAGMVLDYGDIKRIVKEHVTAKLDHAFAYFEGNENECRIAKLLQEMDRKTVALPCRTTAEGMAVVIHDWLAPYLSVCAIRLGETPTSFCEYRGELS

SEQ ID NO: 22002 - protein, 141 aa, Listeria grandensis
  misc_feature (1)..(141): tr|W7BCB8|W7BCB8_9LIST 6-carboxy-5,6,7,8-tetrahydropter in synthase OS=Listeria grandensis FSL F6-0971 OX=12658 19 GN=PGRAN_14517 PE=3 SV=1
MRIAKEFTFDMAHMLDGHDGKCHNLHGHTYTLQVEVSGDLIATGSSAEMVLDYGDIKRIVKEHVTAKLDHAFAYFEENENECRIAKLLQEMDRKTVALPCRSTAEGIAMVIYDWLTPYLPVSAIRLGETPTSFCEYTGEPS

SEQ ID NO: 22003 - protein, 143 aa, Listeria rocourtiae
  misc_feature (1)..(143): tr|A0A4R6ZLG9|A0A4R6ZLG9_9LIST 6-carboxy-5,6,7,8-tetrah ydropterin synthase OS=Listeria rocourtiae OX=647910 GN =DFP96_10536 PE=3 SV=1
MMKIAKEFTFDMAHMLDGHDGKCHNLHGHTYTLQVEVTGDLIATGSKAGMVLDYGDIKRVVKEHVTAKLDHAFAYFDGNENECRIAKLLEEMNRKTVALPCRTTAEGMAIVIYDWLTPYLPVSAIRLGETPTSFCEYVGDMHD

SEQ ID NO: 22004 - protein, 142 aa, Listeria sp.
  misc_feature (1)..(142): tr|A0A3N9UDH4|A0A3N9UDH4_9LIST 6-carboxy-5,6,7,8-tetrah ydropterin synthase OS=Listeria sp. SHR_NRA_18 OX=22690 46 GN=queD PE=3 SV=1
MMRIAKEFTFDMAHMLDGHDGKCHHLHGHTYTLQVEVAGDLIADGSKAGMVLDYGDIKRIVKEHVTAKLDHAFAYFEENENECRIAKLLQEMDRKTVAFPCRTTAEGMAMVIFDWLVPYLPVSAIRLGETPTSFCEYRGERA

SEQ ID NO: 22005 - protein, 142 aa, Listeriaceae bacterium; identical to SEQ ID NO: 22004
  misc_feature (1)..(142): tr|A0A099W908|A0A099W908_9LIST 6-carboxy-5,6,7,8-tetrah ydropterin synthase OS=Listeriaceae bacterium FSL A5-02 09 OX=1497679 GN=EP56_11700 PE=3 SV=1

SEQ ID NO: 22006 - protein, 148 aa, Litoricolaceae bacterium
  misc_feature (1)..(148): tr|A0A520SJ21|A0A520SJ21_9GAMM 6-carboxytetrahydropteri n synthase OS=Litoricolaceae bacterium OX=2510333 GN=EV A60_00690 PE=4 SV=1
MSVYQTIKTFDNFPCSHRQWRHSGHCKFIHGYSRSFKMTFGCKELTESGFGVDFGEFSEIKSWLSHWFDHTLLINEDDPERALFQELHEKQIVDLRVLPNVSMERTAEFVFHYVDGWIRQQTHDRSFLLEVECRENDKNAGVYRPATH

SEQ ID NO: 22007 - protein, 295 aa, Litorilituus sediminis
  misc_feature (1)..(295): tr|A0A4P6P0V2|A0A4P6P0V2_9GAMM Uncharacterized protein OS=Litorilituus sediminis OX=718192 GN=EMK97_02075 PE=4 SV=1
MQLFVNDLTVIDFSYLCQQRGIVGESWIVDVLLDGSLNEMSMVLDFAVVKKQIKAIIDEAVDHKLLLPMQCEGLTLESSSHHEDHQTIDFLSDIASYHLQSPSCAFAQLECSAITIEDVTSHLTQIILAQLPENVQGLELTLRPEVIPSDYYHYTHGLKLHDGNCQRIAHGHRSKIKIFVDNKRNSELEKAWCLRWQDIYIASEADRVAQSDIQLSEKASGYLKPDHQFFAYQAPQGRFDIAVQKRVLDVVDCDSTVELLADFILRQILTAKPTLKGRLKVMAYEGVAKGAIVNG

SEQ ID NO: 22008 - protein, 295 aa, Litorilituus sp.
  misc_feature (1)..(295): tr|A0A502KRZ1|A0A502KRZ1_9GAMM Uncharacterized protein OS=Litorilituus sp. RZ04 OX=2491017 GN=EPA86_15295 PE=4 SV=1
MQLFVDDLTVIDFSYLCPKRGIVGESWIVDVLLDGSLNEMSMVLDFAVVKKQIKAIIDEAVDHKLLLPILSKSVILKESSHQVNHQTIDFFSGVGSYHLQSPACAFASIESKSITIDAVTQHLTKVILEQLPENVEGLILTLRPEYIPGDYYHYTHGLKLHDGNCQRIAHGHRSKIQIFVDGEKDISLEHQWCQRWKDIYIASEADRISRKDIQLSNEIDEHLKPDHQFFAYRAPQGRFDIAVPTNILDVVDCDSTVELLADFIARQIVKAQPELSTRLKVIAYEGVAKGAIVNG

SEQ ID NO: 22009 - protein, 129 aa, Litorimonas taeanensis
  misc_feature (1)..(129): tr|A0A420WK19|A0A420WK19_9RHOB 6-carboxy-5,6,7,8-tetrah ydropterin synthase OS=Litorimonas taeanensis OX=568099 GN=DES40_0558 PE=3 SV=1
MAAYLEIEKDFQFEAAHYFGHPDANDLFKHIHGHSFTGKVIVRGDAQSDKGWIRDLWKIETLVKEVVEPLDHSLLNNIEGLEQPALEQIAMWIFERLSLKLPGLICVEVGRPTCGERARYCVLPDSSVT

SEQ ID NO: 22010 - protein, 117 aa, Loktanella sp.
  misc_feature (1)..(117): tr|A0A1H9HDV2|A0A1H9HDV2_9RHOB 6-carboxy-5,6,7,8-tetrah ydropterin synthase OS=Loktanella sp. DSM 29012 OX=1881 056 GN=SAMN05428995_105274 PE=3 SV=1
MYRITKEFHFSASHKLSHLPADHQCARLHGHNYIVVVELAAPTLDSDGFVRDYGELKALKTYIDDTFDHRHLNDVLDVHSTGENMARHFYDWCRARWPETTAVKVSETPKTWAEYRP

SEQ ID NO: 22011 - protein, 117 aa, Loktanella sp.
  misc_feature (1)..(117): tr|A0A0F4RKF4|A0A0F4RKF4_9RHOB 6-carboxy-5,6,7,8-tetrah ydropterin synthase OS=Loktanella sp. S4079 OX=579483 G N=TW80_04445 PE=3 SV=1
MFRISKEFHFSASHQLSHLPADHQCARLHGHNYIVVVELASPTLNSDGFVRDYHELKPLKTYIDDEFDHRHLNDVLDGPSTAENMAFHFYSWCKSRWPETSAVKVSETPKTWAEYRP

SEQ ID NO: 22012 - protein, 140 aa, Lonepinella koalarum
  misc_feature (1)..(140): tr|A0A4R1L0M3|A0A4R1L0M3_9PAST 6-carboxy-5,6,7,8-tetrah ydropterin synthase OS=Lonepinella koalarum OX=53417 GN =queD PE=3 SV=1
MFKVSKEFSFDMAHILDGHDGKCQNLHGHTYKLQVEVSGDLVANGAKKGMVIDFTDVKTVVKKAILDPMDHAFIYDTNSPRECKIANLLNELDSKTFGIPMRTTAEQMARFIFNQLKNELPISAIRLWETPTSFCEYRES

SEQ ID NO: 22013 - protein, 164 aa, Longibacter salinarum
  misc_feature (1)..(164): tr|A0A2A8D0D6|A0A2A8D0D6_9BACT 6-carboxytetrahydropteri n synthase QueD OS=Longibacter salinarum OX=1850348 GN= CRI94_04360 PE=4 SV=1
MKVSKRFRWEAAHRLPWHEGSCRFMHGHSYRMMVELEGEPTENTPGGSAMLIDFKHVKRIVKPLVDAMDHATIVNASDTELREAIEALESKVYVMPYDSTAENIARHVAESVRDDGASVLRTHGVHTIRVQVWETETCYAEVEREVPEGRSDPASAEEVLAAMR

SEQ ID NO: 22014 - protein, 141 aa, Longibacter salinarum
  misc_feature (1)..(141): tr|A0A2A8CTW9|A0A2A8CTW9_9BACT 6-carboxy-5,6,7,8-tetrah ydropterin synthase OS=Longibacter salinarum OX=1850348 GN=CRI94_16605 PE=3 SV=1
MSTVYVTRKVHFNAAHRLHNPEKSDEWNRETFGPCNHPNWHGHNYVLKVTVAGEPDPDTGYVIDLSDLKSLLHEEVVDQVDHKNLNLDVDFLDGVIPSTENFAIAIWNQLEGKLPSGRLHCVRLYETERNYVEYYGDQEPR

SEQ ID NO: 22015 - protein, 132 aa, Longimonas halophila
  misc_feature (1)..(132): tr|A0A2H3P1T9|A0A2H3P1T9_9BACT 6-pyruvoyl tetrahydropte rin synthase OS=Longimonas halophila OX=1469170 GN=CRI9 3_02070 PE=4 SV=1
MYTLTVKDDLIAQHYLTVPNCGPENEWHSHHFTVEVVLESNSLNKWGYVCDITDVKSALASLKDHVSDQTLNDLPAFKGLNPSVEHFARIAAEHIRGSLDKETRQRCHRMHVRIWEDDEAAAQYTTPLTDEV

SEQ ID NO: 22016 - protein, 164 aa, Longimonas halophila
  misc_feature (1)..(164): tr|A0A2H3NLE8|A0A2H3NLE8_9BACT 6-carboxytetrahydropteri n synthase QueD OS=Longimonas halophila OX=1469170 GN=C RI93_07430 PE=4 SV=1
MTVAKRFRWEAAHRLADHPSLCRNLHGHSYTCWIELDGTPGPSEMLIDFQEVKRVVSPLIDAWDHCTYVNRDDTALREALATLGVKHYVLDGRSTTEALADYVARYLCTHGFAMLQDHGVTAVQVRVQETETCYAITRATVADYADTPAPDLEQALVETEAVAG

SEQ ID NO: 22017 - protein, 121 aa, Lonsdalea britannica
  misc_feature (1)..(121): tr|A0A1X3RM35|A0A1X3RM35_9GAMM 6-carboxy-5,6,7,8-tetrah ydropterin synthase OS=Lonsdalea britannica OX=1082704 GN=AU510_16690 PE=3 SV=1
MPTMLFKDFQFEAAHRLPHVPDGHKCGRLHGHSFMVRLEITGEVDAYTGWVMDFAELKAISRPIWEQLDHHYLNEIPGLENPTSEILAQWIWQRLKPILPLLTAVRVKETCTAGCVYRGEE

SEQ ID NO: 22018 - protein, 122 aa, Lonsdalea iberica
  misc_feature (1)..(122): tr|A0A1X3S1E2|A0A1X3S1E2_9GAMM 6-carboxy-5,6,7,8-tetrah ydropterin synthase OS=Lonsdalea iberica OX=1082703 GN= AU511_01945 PE=3 SV=1
MPTMLFKDFQFEAAHRLPHVPDGHKCGRLHGHSFMVRLEITGEVDAYTGWVMDFAELKAISRPIWEQLDHHYLNEIPGLENPTSEILAQWIWQRLKPILPLLTAVRVKETCTAGCVYRGEEK

SEQ ID NO: 22019 - protein, 121 aa, Lonsdalea populi
  misc_feature (1)..(121): tr|A0A3N0UQA9|A0A3N0UQA9_9GAMM 6-carboxy-5,6,7,8-tetrah ydropterin synthase OS=Lonsdalea populi OX=1172565 GN=q ueD PE=3 SV=1
MPTMLFKDFQFEAAHRLPHVPDGHKCGRLHGHSFMVRLEITGEVDAYTGWVMDFAELKAISRPIWEQLDHHYLNEIPGLENPTSEILAQWIWQRLKPILPLLSAVRVKETCTAGCVYRGEE

SEQ ID NO: 22020 - protein, 122 aa, Lonsdalea quercina
  misc_feature (1)..(122): tr|A0A1H4AGZ5|A0A1H4AGZ5_9GAMM 6-carboxy-5,6,7,8-tetrah ydropterin synthase OS=Lonsdalea quercina OX=71657 GN=S AMN02982996_01420 PE=3 SV=1
MPTMLFKDFQFEAAHRLPHVPDGHKCGRLHGHSFMVRLEITGEVDAYTGWVMDFAELKAISRPIWEQLDHHYLNEIPGLENPTSEILAQWIWQRLKPILPLLTAVRVKETCTAGCVYRGEDK

SEQ ID NO: 22021 - protein, 126 aa, Lucifera butyrica
  misc_feature (1)..(126): tr|A0A498RAB4|A0A498RAB4_9FIRM 6-carboxy-5,6,7,8-tetrah ydropterin synthase OS=Lucifera butyrica OX=1351585 GN= LUCI_3180 PE=3 SV=1
MFELTITTDFEAAHRIPEYPGKCQRLHGHNWKVEVAVSGEGLDHLGMLVDFRVLKQEVAKVIATLDHYYLNELAAFQTICPTAENIACHIYKKLVKSASLPAAVTVSYVKVWESPYSAVSYREGGQ

SEQ ID NO: 22022 - protein, 120 aa, Lujinxingia litoralis
  misc_feature (1)..(120): tr|A0A328C400|A0A328C400_9DELT 6-carboxy-5,6,7,8-tetrah ydropterin synthase OS=Lujinxingia litoralis OX=2211119 GN=queD PE=3 SV=1
MIVELVKEFRFESAHRLPNVPEGHKCRRLHGHSYRVTVTVRGEVDPEMGWLVDYGDIKDAVKPLIEQLDHYFLNEIEGLENPTSEVLAGWLWTRIKPVLPQLHALQIHETCESSCIYRGE

SEQ ID NO: 22023 - protein, 86 aa, Luminiphilus syltensis
  misc_feature (1)..(86): tr|B8KXT4|B8KXT4_9GAMM Queuosine biosynthesis protein Q ueD OS=Luminiphilus syltensis NOR5-1B OX=565045 GN=NOR5 1B_707 PE=4 SV=1
MTIDGEVDEHTGWLMDFAEIKAAVTPVIDRLDHYFLNEIPGLENPTSEVLAMWLWEEIAPRLEGLVQIEVKETCNAGCIYRGPGTS

SEQ ID NO: 22024 - protein, 171 aa, Luminiphilus syltensis
  misc_feature (1)..(171): tr|B8KQC4|B8KQC4_9GAMM 6-pyruvoyl tetrahydropterin synt hase OS=Luminiphilus syltensis NOR5-1B OX=565045 GN=NOR 51B_1509 PE=4 SV=1
MRLLFLAERAMTRTTTLYIDKEAHKFSAAHYTIFTATERERLHGHNYSVSVRLEALMGDNGFSADYNVYKRRIQALCDRLDEYMLLAANSPHQTLELGETEIKATHNGKTITFPADETIVLPIVNVTVEELAHYLLGELIATYDDPSLTGVELCVSTGPGQTGAAVWAPEP

SEQ ID NO: 22025 - protein, 136 aa, Lunatimonas lonarensis
  misc_feature (1)..(136): tr|R7ZLQ2|R7ZLQ2_9BACT 6-pyruvoyl tetrahydrobiopterin s ynthase OS=Lunatimonas lonarensis OX=1232681 GN=ADIS_45 02 PE=4 SV=1
MKASVYRKEHFNAAHRLNNPNWPAEKNQEVFGKCNLPNYHGHNYDLIVQLYGPIDPDTGYVYDMKLLKDLIKAQVLDRFDHKNLNLDTDEFKHLNPTAENIAVVIWNILRQLIDTKFELTIRLYETERNFVEYKGY

SEQ ID NO: 22026 - protein, 111 aa, Lunatimonas lonarensis
  misc_feature (1)..(111): tr|R7ZYD2|R7ZYD2_9BACT 6-pyruvoyl tetrahydrobiopterin s ynthase OS=Lunatimonas lonarensis OX=1232681 GN=ADIS_04 16 PE=4 SV=1
MFGPCANANWHGHNFELIVTVKGKPDPETGFVVDLKKLSTLIRQEIIAKVDHKNLNLDVPFMEGKMASCENLVIEFWKILEPKVAALVKEGGLYKLTLYETPRNFVEYFGE

SEQ ID NO: 22027 - protein, 117 aa, Luteibacter pinisoli
  misc_feature (1)..(117): tr|A0A4Y5Z827|A0A4Y5Z827_9GAMM 6-carboxy-5,6,7,8-tetrah ydropterin synthase OS=Luteibacter pinisoli OX=2589080 GN=queD PE=3 SV=1
MRIFKTFNIEAAHRLPNVPEGHKCSRLHGHSFRVELHVEGPVDPVFGWVMDFGDLKARFLPLYDRLDHHYLNDIEGLENPTSESLARWIFEHLRPDVPLLCKVVVHETCTSGAEYTA

SEQ ID NO: 22028 - protein, 120 aa, Luteibacter rhizovicinus
  misc_feature (1)..(120): tr|A0A0G9HD77|A0A0G9HD77_9GAMM 6-carboxy-5,6,7,8-tetrah ydropterin synthase OS=Luteibacter rhizovicinus DSM 165 49 OX=1440763 GN=BJI69_05870 PE=3 SV=1
MRIFKTFHIEAAHRLPNVPEGHKCSRLHGHSFRVELHVEGPIDPVFGWVMDFGDLKARFQPLYDRLDHHYLNDIDGLDNPTSENLARWIFERLRVDVPGLARVVVHETCTSGAEFSADMV

SEQ ID NO: 22029 - protein, 126 aa, Luteibacter rhizovicinus
  misc_feature (1)..(126): tr|A0A4R3YUL3|A0A4R3YUL3_9GAMM 6-carboxy-5,6,7,8-tetrah ydropterin synthase OS=Luteibacter rhizovicinus OX=2426 06 GN=EC912_102641 PE=3 SV=1
MFFRRPMRIFKIFHIEAAHRLPNVPEGHKCSRLHGHSFKVELHVEGEPDPHFGWVMDFADLKARFAPLYDRLDHHYLNDIEGLENPTSENLCRWIFERLRVDVPGLAKVVIHETCTSGAEFGVADV

SEQ ID NO: 22030 - protein, 118 aa, Luteibacter sp.
  misc_feature (1)..(118): tr|A0A1T5EQR9|A0A1T5EQR9_9GAMM 6-carboxy-5,6,7,8-tetrah ydropterin synthase OS=Luteibacter sp. 22Crub2.1 OX=128 3288 GN=SAMN05660880_02973 PE=3 SV=1
MRIYKTFNIEAAHRLPNVPEGHKCARLHGHSFRVELHVEGPVDPVFGWVMDFGDLKARFQPLYDRLDHNYLNDIEGLENPTSENLARWIFQRLRVDVPGLAKVVVNETCTSGAEYTGD

SEQ ID NO: 22031 - protein, 117 aa, Luteibacter sp.
  misc_feature (1)..(117): tr|A0A1I0QKT4|A0A1I0QKT4_9GAMM 6-carboxy-5,6,7,8-tetrah ydropterin synthase OS=Luteibacter sp. 329MFSha OX=1798 239 GN=SAMN04515660_3531 PE=3 SV=1
MRIFKTFNIEAAHRLPNVPEGHKCSRLHGHSFRVELHVEGPTDPVLGWVMDFGDLKARFQPLYDRLDHHYLNDIEGLENPTSENLARWIFDRLRPDVPGLAKVVVHETCTSGAEYAP

SEQ ID NO: 22032 - protein, 117 aa, Luteibacter yeojuensis
  misc_feature (1)..(117): tr|A0A561H5K0|A0A561H5K0_9GAMM 6-carboxy-5,6,7,8-tetrah ydropterin synthase OS=Luteibacter yeojuensis OX=345309 GN=FHW30_105109 PE=3 SV=1
MRIFKTFNIEAAHRLPNVPEGHKCSRLHGHSFRVELHVEGPVDPVLGWVMDFGDLKARFKPLYERLDHHYLNDIEGLDNPTSESLARWIFERLRPDVPLLCKVVVHETCTSGAEYTA

SEQ ID NO: 22033 - protein, 117 aa, Luteibacter yeojuensis
  misc_feature (1)..(117): tr|A0A0F3KVQ5|A0A0F3KVQ5_9GAMM 6-carboxy-5,6,7,8-tetrah ydropterin synthase OS=Luteibacter yeojuensis OX=345309 GN=VI08_08380 PE=3 SV=1
MRIFKTFNIEAAHRLPNVPEGHKCARLHGHSFHVELHVEGPIDPVFGWVMDFGDLKAAFKPLYERLDHNYLNDIAGLENPTSENLARWIFDHLRPDVPLLCKVVVHETCTSGAEYAP

SEQ ID NO: 22034 - protein, 140 aa, Luteibaculum oceani
  misc_feature (1)..(140): tr|A0A5C6V176|A0A5C6V176_9FLAO 6-carboxytetrahydropteri n synthase OS=Luteibaculum oceani OX=1294296 GN=FRX97_0 8660 PE=4 SV=1
MALIYITRREHFNAAHKLWNDEWSKEKNHEIFGKCANENWHGHNYDLFVTVKGEPQEDTGYVCDLKALSDLIKEEITEKLDHKNINLDVPFMKGIMASTENLVIAMWKILEPKIKSSLKCDLHCIKLYETRNNFAEYYGE

SEQ ID NO: 22035 - protein, 120 aa, Luteimonas aestuarii
  misc_feature (1)..(120): tr|A0A4R5TS73|A0A4R5TS73_9GAMM 6-carboxy-5,6,7,8-tetrah ydropterin synthase OS=Luteimonas aestuarii OX=453837 G N=queD PE=3 SV=1
MDIFKVFTLEAAHRLPNVPPGHKCARVHGHSFRVEIHVSGEPGTDTGWVMDFGDIKQAFLPLYEQLDHHYLNDVPGLDNPTSERLAIWIWDRLKPVLPGLSAVVVHETCTSGCRYTGPSP

SEQ ID NO: 22036 - protein, 117 aa, Luteimonas cucumeris
  misc_feature (1)..(117): tr|A0A562LEF4|A0A562LEF4_9GAMM 6-carboxy-5,6,7,8-tetrah ydropterin synthase OS=Luteimonas cucumeris OX=985012 G N=IP90_00324 PE=3 SV=1
MDIFKVFTIEAAHRLPNVPEGHKCARLHGHSFRIEVHVSGEPGVHSGWVMDYADIKAAFKPLFDRLDHHYLNEIDGLENPTSERLAVWVWEQLKPALPQLSEVVVHETCTSGCRYRG

SEQ ID NO: 22037 - protein, 118 aa, Luteimonas marina
  misc_feature (1)..(118): tr|A0A5C5U0S4|A0A5C5U0S4_9GAMM 6-carboxy-5,6,7,8-tetrah ydropterin synthase OS=Luteimonas marina OX=488485 GN=q ueD PE=3 SV=1
MDIFKSFTLEAAHRLPSVPPGHKCARLHGHSFGVELHVSGEPGADSGWVMDFADIKAAFRPLYEQLDHHYLNDVPGLENPTSERLAVWIWDRLKPTLPALSAVVVRETCTSGCRYAGE

SEQ ID NO: 22038 - protein, 118 aa, Luteimonas sp.
  misc_feature (1)..(118): tr|A0A0H1ATB6|A0A0H1ATB6_9GAMM 6-carboxy-5,6,7,8-tetrah ydropterin synthase OS=Luteimonas sp. FCS-9 OX=1547516 GN=WQ56_02850 PE=3 SV=1
MDIFKVFSVEAAHRLPNVPPGHKCARLHGHSFQIEIHVSGEPGETSGWIMDFGDLKAAFAPLYAQLDHHYLNEIPGLENPTSERLAIWIWERLKPALPALSAVVIRETCTSGCRYTGP

SEQ ID NO: 22039 - protein, 118 aa, Luteimonas sp.
  misc_feature (1)..(118): tr|A0A290XC93|A0A290XC93_9GAMM 6-carboxy-5,6,7,8-tetrah ydropterin synthase OS=Luteimonas sp. 100111 OX=2006110 GN=queD PE=3 SV=1
MDIFKVFTLEAAHRLPNVPPGHKCARLHGHSFQVEVHVSGEPGPETGWIMDFGDLKAAFRPLYDQLDHHYLNDIDGLENPTSERLAIWIWERLKPTLPALSAIVIRETCTSGCRYTGP

SEQ ID NO: 22040 - protein, 118 aa, Luteimonas terrae
  misc_feature (1)..(118): tr|A0A4R5U8Q8|A0A4R5U8Q8_9GAMM 6-carboxy-5,6,7,8-tetrah ydropterin synthase OS=Luteimonas terrae OX=1530191 GN= queD PE=3 SV=1
MDIFKVFTLEAAHRLPNVPPGHKCARLHGHSFQVEVHVSGEPGPETGWIMDFGDLKAAFAPLYAQLDHHYLNDIPGLENPTSERLAIWIWERLKPALPQLSAIVIRETCTSGCRYTGP

SEQ ID NO: 22041 - protein, 145 aa, Luteitalea pratensis
  misc_feature (1)..(145): tr|A0A143PNQ5|A0A143PNQ5_9BACT Queuosine biosynthesis p rotein QueD OS=Luteitalea pratensis OX=1855912 GN=LuPra _02952 PE=4 SV=1
MEKIIVHSHFHTGHRQLGYPGKCKFVHGHTWRGTVTVSCEAFPRDHLDMALDFGDLKAVMRLLDHKMLVTEQDATFLDSDLFEPEGVVMLKGKGPSVENVALYIWDKVVDHIRDKFPGHGVAYTVEVLIQETENNIFVVEKIATI

SEQ ID NO: 22042 - protein, 136 aa, Lutibacter agarilyticus
  misc_feature (1)..(136): tr|A0A238XME0|A0A238XME0_9FLAO 6-carboxy-5,6,7,8-tetrah ydropterin synthase OS=Lutibacter agarilyticus OX=11097 40 GN=SAMN06265371_106112 PE=3 SV=1
MKVTVHRKAHFNAAHRLYNADWTDARNATVFGKCANPNYHGHNYDLIVAVKGEVHPETGFVMDMKVLKKLIEVEIEDQFDHKNLNEEVSEFKNLNPTAENIAVVIWNKLRPKIDSNLEISITLYETPRNYVTYSGE

SEQ ID NO: 22043 - protein, 137 aa, Lutibacter agarilyticus
  misc_feature (1)..(137): tr|A0A238YQI9|A0A238YQI9_9FLAO 6-pyruvoyltetrahydropter in/6-carboxytetrahydropterin synthase OS=Lutibacter aga rilyticus OX=1109740 GN=SAMN06265371_11096 PE=4 SV=1
MNYKVAVTRREHFNSAHRLHNVNWSNEKNASVFGKCNNPNFHGHNYELEVKLIGTIDEDTGYVIDTKHLSDLIKINVLDKFDHKNLNLDVEEFKVLNPTTENIAMIIYMILRPLIEDKYELKIKLYETPRNFVEFPY

SEQ ID NO: 22044 - protein, 136 aa, Lutibacter flavus
  misc_feature (1)..(136): tr|A0A238VWI9|A0A238VWI9_9FLAO 6-carboxy-5,6,7,8-tetrah ydropterin synthase OS=Lutibacter flavus OX=691689 GN=S AMN04488111_1080 PE=3 SV=1
MKVTVNRKAHFNAAHRLYNADWTDARNANVFGKCANPNYHGHNYELIVSVKGEIHPETGFVMDMKILKSLIETEIEDQFDHKNLNEEVPEFKTLNPTAENISVIIWNKLRSKIENNLELTITLYETPRNFVTYSGD

SEQ ID NO: 22045 - protein, 137 aa, Lutibacter flavus
  misc_feature (1)..(137): tr|A0A238VT12|A0A238VT12_9FLAO 6-pyruvoyltetrahydropter in/6-carboxytetrahydropterin synthase OS=Lutibacter fla vus OX=691689 GN=SAMN04488111_1003 PE=4 SV=1
MNNKFAVTRKEHFNSAHRLHNALWSDEKNTAVFGKCNNPNYHGHNYELEVKVIGVVDKDTGYVIDTKQLSDLIKEHVLDKFDHKNLNLDVEDFKTLNPTTENIAMIVYMILRPLMEEKYELKIKLYETPRNFVEYPY

SEQ ID NO: 22046 - protein, 137 aa, Lutibacter maritimus
  misc_feature (1)..(137): tr|A0A1I6NQ02|A0A1I6NQ02_9FLAO 6-carboxy-5,6,7,8-tetrah ydropterin synthase OS=Lutibacter maritimus OX=593133 G N=SAMN04488006_0347 PE=3 SV=1
MKVTVSRKAHFNAAHRLYNSDWTDARNATVFGKCANPNYHGHNYELIVSVKGEIHPETGFVMDMKILKYLIEKEVEEQFDHKNLNEEVAEFKTLNPTAENIVVVIWNKLRAEIDNKLELSITLYETPRNFVTYSGEV

SEQ ID NO: 22047 - protein, 150 aa, Lutibacter maritimus
  misc_feature (1)..(150): tr|A0A1I6PNZ5|A0A1I6PNZ5_9FLAO 6-pyruvoyltetrahydropter in/6-carboxytetrahydropterin synthase OS=Lutibacter mar itimus OX=593133 GN=SAMN04488006_1232 PE=4 SV=1
MSKIRITKQFDFETGHALYGYDGKCKNVHGHSYKLSVTVIGKPIKDTSNVKLGMVIDFGDLKKIVASEIVDKFDHATVFNKNTPHIELAAELEKRGHSVILVDYQPTSEMMLIDFAQKIKSRLPENIELYSLKLRETGTSHAEWYASDQE

SEQ ID NO: 22048 - protein, 137 aa, Lutibacter oceani
  misc_feature (1)..(137): tr|A0A3D9RIU6|A0A3D9RIU6_9FLAO 6-carboxy-5,6,7,8-tetrah ydropterin synthase OS=Lutibacter oceani OX=1853311 GN= BX611_2666 PE=3 SV=1
MKVTVNRKAHFNAAHRLYNADWTDARNAIVFGKCANPNYHGHNYELIVSVKGEIYPETGFVMDMKVLKQLIETEIEEQFDHKNLNEEVPEFEILNPTAENISVIIWNKLRSKIDANLELSITLYETPRNFVTYSGEQ

SEQ ID NO: 22049 - protein, 150 aa, Lutibacter oceani
  misc_feature (1)..(150): tr|A0A3D9RVQ8|A0A3D9RVQ8_9FLAO 6-pyruvoyltetrahydropter in/6-carboxytetrahydropterin synthase OS=Lutibacter oce ani OX=1853311 GN=BX611_0840 PE=4 SV=1
MSNIRITKQFDFETGHALYGYDGKCKNVHGHSYKLSVTVIGTPINDSSNVKYGMVIDFGDLKKIVLSEIVDKFDHATVFNKNTPHIELAAELEKRGHSVILVDYQPTSEMMLIDFAKKIKKRLPETIKLHSLKLQETGTSHAEWYESDNN

SEQ ID NO: 22050 - protein, 149 aa, Lutibacter oricola
  misc_feature (1)..(149): tr|A0A1H3A9I4|A0A1H3A9I4_9FLAO 6-pyruvoyltetrahydropter in/6-carboxytetrahydropterin synthase OS=Lutibacter ori cola OX=762486 GN=SAMN05444411_10456 PE=4 SV=1
MFNFAFIKLNTIKLKVAITRKEHFNSAHRLHNPKWSNEKNKEIFGKCNNVNYHGHNYDLEVKVIGYVDEETGYVIDTKYLSEIIKSKVLEKFDHKNLNLDVEEFKFLNPTVENIAILVFRLLRPHIEKKYELKIKLYETPRNFVEYPYE

SEQ ID NO: 22051 - protein, 149 aa, Lutibacter oricola
  misc_feature (1)..(149): tr|A0A1H3D995|A0A1H3D995_9FLAO 6-carboxy-5,6,7,8-tetrah ydropterin synthase OS=Lutibacter oricola OX=762486 GN= SAMN05444411_10787 PE=3 SV=1
MSNIRITKQFDFETGHALYGYDGKCKNVHGHSYKLSVTVIGVPISDTSNVKYGMVIDFGDLKKIVKSEIVDKFDHATVFNKNTPHIELAKELETRGHNVILVDYQPTSEMMLIDFAEKIKKHLPETIKLHSLKLQETGTSHAEWFASDN

SEQ ID NO: 22052 - protein, 136 aa, Lutibacter profundi
  misc_feature (1)..(136): tr|A0A0X8G5F2|A0A0X8G5F2_9FLAO 6-carboxy-5,6,7,8-tetrah ydropterin synthase OS=Lutibacter profundi OX=1622118 G N=Lupro_03705 PE=3 SV=1
MKVTVNRKAHFNAAHRLYNADWSDARNATVFGKCANPNYHGHNYELIVSVKGEIHPDTGFVMDMKVLKNLIETEIEEKFDHKNLNEEVIEFKTLNPTAENIVVVIWNILRSKIAKELELSITLYETPRNFVTYCGA

SEQ ID NO: 22053 - protein, 150 aa, Lutibacter profundi
  misc_feature (1)..(150): tr|A0A0X8G783|A0A0X8G783_9FLAO 6-pyruvoyl tetrahydropte rin synthase OS=Lutibacter profundi OX=1622118 GN=Lupro _08905 PE=4 SV=1
MSTIRITKKFHFETGHALYGYDGKCRNVHGHSYKLSVTVIGTPISNSTNVKYGMVIDFGDLKKIVASEIVDKFDHATVFNKNTPHIELANELEKRGHNIILVDYQPTSEMMLVDFAKKIKNRLPKTIKLHALKLQETGTSHAEWYAEDQY

SEQ ID NO: 22054 - protein, 149 aa, Lutibacter sp.
  misc_feature (1)..(149): tr|A0A559S2A2|A0A559S2A2_9FLAO 6-carboxy-5,6,7,8-tetrah ydropterin synthase OS=Lutibacter sp. Hel_I_33_5 OX=156 6289 GN=OD91_1765 PE=3 SV=1
MSTIRITKQFNFETGHALYGYDGKCKNVHGHSYKLSVTVSGQPITDNSNVKFGMVIDFSDLKKIVKEEIVDLFDHATVFNKNTPHVELAKELKDRGHHVILVDYQPTSEMMVIDFAKKIKKRLPENINLFSLKLQETDTSFAEWFASDQ

SEQ ID NO: 22055 - protein, 138 aa, Lutibacter sp.
  misc_feature (1)..(138): tr|A0A1D8P734|A0A1D8P734_9FLAO 6-pyruvoyl tetrahydrobio pterin synthase OS=Lutibacter sp. LPB0138 OX=1850246 GN =LPB138_06695 PE=4 SV=1
MSNYKTAVIRREHFNAAHRLHNTFWSDKKNKEIFGKCNNPNFHGHNYELEVKVIGYTDPETGYVIDTKIVSDIIKKEVLEKFDHKNLNLDVEEFKSLNPTVENIAMVIFNIIRKELDEKFELKIKLYETQRNFVEYPY

SEQ ID NO: 22056 - protein, 288 aa, Lyngbya aestuarii
  misc_feature (1)..(288): tr|U7QIW1|U7QIW1_9CYAN Queuosine biosynthesis protein Q ueD OS=Lyngbya aestuarii BL J OX=1348334 GN=queD PE=4 S V=1
MECVITRRAEFSASHRYWLPELSETENFERFGPTARAPGHGHNYVLYISMVGQLDEYGMVLNLSDVKHVIKAEVTSQLDFSFLNDAWPEFQQTLPTTEYLAQVIWQRLAPHLPLTNIQVFEHPKLWADYQGNSMEAHLTVSTHFSAAHRLAHPDLSFEDNCEIYGKCARPNGHGHNYHLEVSVKGEIDPRTGMIVDLAALQQVIDDYVVEPFDHTFLNKDIAHFAKVVPTAENIAVYIRDLLQNPVQELGAKLHKVRLIESPNNSCEVYCTDTPADSTPTQTPVLATV

SEQ ID NO: 22057 - protein, 123 aa, Lyngbya confervoides
  misc_feature (1)..(123): tr|A0A0C1VH08|A0A0C1VH08_9CYAN 6-pyruvoyl tetrahydropte rin synthase OS=Lyngbya confervoides BDU141951 OX=15746 23 GN=QQ91_05835 PE=4 SV=1
MFSVTIRQHIMIAHSLPHPDFGPAQRLHGATYVTDVTFYSPQLTEMGIVIDIALAHDALRKALAPLDYQNLDELPQFKGKLTTTEFLAQYIHGQVKAAVAGQFDGRIKVVLGESHEAWAAYEA

SEQ ID NO: 22058 - protein, 288 aa, Lyngbya confervoides; identical to SEQ ID NO: 20989
  misc_feature (1)..(288): tr|A0A0C1YJX7|A0A0C1YJX7_9CYAN 6-pyruvoyl tetrahydropte rin synthase OS=Lyngbya confervoides BDU141951 OX=15746 23 GN=QQ91_32275 PE=4 SV=1

SEQ ID NO: 22059 - protein, 148 aa, Lyngbya sp.
  misc_feature (1)..(148): tr|A0YX06|A0YX06_LYNSP 6-carboxy-5,6,7,8-tetrahydropter in synthase OS=Lyngbya sp. (strain PCC 8106) OX=313612 GN=L8106_20268 PE=3 SV=1
MTSNQEEIPKIKRAESNSETWMIGKEFRFEASHQLPNHDGKCARLHGHSWRGVIYVSGNKLIDAGAKQGMIMDYEDIKKYLKPLLDDYLDHYHLNETTGLNNPTSEAIAKWIYEQLEDKIPGLVAVRIDETCTSQCVYSKGTSHVFLL

SEQ ID NO: 22060 - protein, 150 aa, Lyngbya sp.
  misc_feature (1)..(150): tr|A0YS60|A0YS60_LYNSP Uncharacterized protein OS=Lyngb ya sp. (strain PCC 8106) OX=313612 GN=L8106_20218 PE=4 SV=1
MNSNEEKNKISQVRRDESNSESWTIGKEFRFEASHQLPNHDGKCARLHGHSWRCTIYVSGNRLIYSGAKQGMIMDYDDIKKYVKPIMDNYLDHYHLNDTTGLANPTSEAIAQWIYEKLETEIPGLIAVRVDETCTSQCVYSKGKGNVLIL

SEQ ID NO: 22061 - protein, 156 aa, Lysinibacillus boronitolerans
  misc_feature (1)..(156): tr|A0A0A3IP74|A0A0A3IP74_9BACI 6-pyruvoyl tetrahydrobio pterin synthase OS=Lysinibacillus boronitolerans JCM 21 713 = 10a = NBRC 103108 OX=1294264 GN=CD31_12565 PE=4 S V=1
MSDFKIVERLQKMDVDIQRNQLKYHAKRVLISKEFTFDAAHHLHHYEGKCKNLHGHTYRVILGLSGYTDERGLIIDFGDIKEIWKRKIEIHLDHRYLNETLPPMNTTAENIVVWIYEKLTEALLDEGYNGARVEFIKLYETPTSYAEARREWMEVE

SEQ ID NO: 22062 - protein, 157 aa, Lysinibacillus chungkukjangi
  misc_feature (1)..(157): tr|A0A318TUX8|A0A318TUX8_9BACI 6-pyruvoyltetrahydropter in/6-carboxytetrahydropterin synthase OS=Lysinibacillus chungkukjangi OX=1202712 GN=BJ095_10710 PE=4 SV=1
MREFRIVDQLQKLDVDIKKNQLKYHSKRVLVSKEFTFDAAHHLHNYEGKCKNLHGHTYRAVLGISGYTDERGLVIDFGDIKEIWKQQIEIDLDHRYLNETLPLMNTTAENIVVWIYGKLAEALLNTQDYNGLRVEFVRLYETPTSYAEARREWMELE

SEQ ID NO: 22063 - protein, 157 aa, Lysinibacillus composti
  misc_feature (1)..(157): tr|A0A3N9UJF8|A0A3N9UJF8_9BACI 6-carboxytetrahydropteri n synthase QueD OS=Lysinibacillus composti OX=720633 GN =queD PE=4 SV=1
MSEFRIVDRLQKIDVDIQQDQLKYHSKRVLVSKEFTFDAAHHLHNYEGKCKNLHGHTYRAVLGISGYTEERGLVIDFGDIKEIWKEKIEVYLDHRYLNETLPLMNTTAENIVVWIYEKLVDALREKQQYKGARVEFVRLYETPTSYAEVRREWMDVE

SEQ ID NO: 22064 - protein, 157 aa, Lysinibacillus fusiformis
  misc_feature (1)..(157): tr|A0A2I0UXB6|A0A2I0UXB6_9BACI 6-carboxytetrahydropteri n synthase QueD OS=Lysinibacillus fusiformis OX=28031 G N=queD PE=4 SV=1
MSDFRIVERLQKIDVDIQRNQLNYHAKRVLVSKEFTFDAAHHLHHYEGKCKNLHGHTYRVVLGLSGYTDERGLMIDFGDIKKIWKRKIEIHLDHRYLNETLPPMNTTAENIVVWIYEKLAEALLDEPSYSGACVEFIRLYETPTSYAEARREWMEGE

SEQ ID NO: 22065 - protein, 156 aa, Lysinibacillus fusiformis
  misc_feature (1)..(156): tr|D7WZC9|D7WZC9_9BACI 6-pyruvoyl tetrahydrobiopterin s ynthase OS=Lysinibacillus fusiformis ZC1 OX=714961 GN=B FZC1_22709 PE=4 SV=1
MSDFKIVERLQRIDVDIQRNQLKYHAKRVLISKEFTFDAAHHLHHYEGKCKNLHGHTYRAILGLSGYTDERGLMIDFGDIKEIWKHKIEIHLDHRYLNETLPLMNTTAENIVVWIYEKLTEALLDEGYNGVRVEFIRLYETPTSYAEARREWMEVE

SEQ ID NO: 22066 - protein, 157 aa, Lysinibacillus halotolerans
  misc_feature (1)..(157): tr|A0A3M8H9H1|A0A3M8H9H1_9BACI 6-carboxytetrahydropteri n synthase QueD OS=Lysinibacillus halotolerans OX=13684 76 GN=queD PE=4 SV=1
MPNFRIVDKLQKMDEDIQRSQLKYHSKRVLVSKEFTFDAAHHLHNYEGKCKNLHGHTYRAVLGLSGFTDERGLMIDFGDIKDIWKQKIEIYLDHHYLNETLPPMNTTAENIVVWIYEKLKEALLDEQRYHGARVEFIRLYETPTSYAEARREWMEFE

SEQ ID NO: 22067 - protein, 274 aa, Lysinibacillus massiliensis
  misc_feature (1)..(274): tr|A0A0A3JTD4|A0A0A3JTD4_9BACI 6-pyruvoyl tetrahydropte rin synthase OS=Lysinibacillus massiliensis 4400831 = C IP 108448 = CCUG 49529 OX=1211035 GN=CD30_12390 PE=4 SV =1
MLYLSRRVDFSATHTYNIPSWSKELNRQVFGKCNNPNGHGHDYKLEVMVRGKLNMESGIVVNTTDIKHIVNTFLAEELDGKFLDREHPYFIRNLPTTENLVNYIWNSLKDKMEGCELYQLRLHENHYLHAERKINEMTYLTRQYHFSAAHRLHSIHLSDEENVKLFGKCNNPNGHGHNYYVDVQVKGEPSKETGMIINLADLDEIVEREIMDKFDHMNLNLDTEEFKELNPTSEVVAMVFYNLLKPHIPNLHKIGLWETEKNYFEYLGEDDYGI

SEQ ID NO: 22068 - protein, 157 aa, Lysinibacillus odysseyi
  misc_feature (1)..(157): tr|A0A0A3IL18|A0A0A3IL18_9BACI 6-pyruvoyl tetrahydrobio pterin synthase OS=Lysinibacillus odysseyi 34hs-1 = NBR C 100172 OX=1220589 GN=CD32_09595 PE=4 SV=1
MSNFRIVDKLQKIDEDIQRSQLNYHTKRVLVSKEFTFDAAHHLHNYEGKCKNLHGHTYRAVLGLSGYTDERGLMIDFGDIKEIWKEKIEIYLDHRYLNETLPPMNTTAENIVVWIYEKLQEALLEKHQNNGARVEFIRLYETPTSYAEARREWMEVE

SEQ ID NO: 22069 - protein, 142 aa, Lysinibacillus saudimassiliensis
  misc_feature (1)..(142): tr|A0A078M9X8|A0A078M9X8_9BACI 6-carboxy-5,6,7,8-tetrah ydropterin synthase OS=Lysinibacillus saudimassiliensis OX=1461583 GN=queD PE=3 SV=1
MIQQIYPTVAHPFRYELNKDMHFSAAHFIPAEAAGVCARMHGHTYFVNLTIAGDELDAIGFLIDFKALKDAVHGAFDHTVINDHPAFRTQNPTTEAVAAYIWQAIQALLDSKGNHARCLQVFVRETPTSYVCYRPKEEDFDA

SEQ ID NO: 22070 - protein, 162 aa, Lysinibacillus sp.
  misc_feature (1)..(162): tr|A0A544UPS7|A0A544UPS7_9BACI 6-carboxytetrahydropteri n synthase QueD OS=Lysinibacillus sp. SDF0063 OX=213375 3 GN=queD PE=4 SV=1
MSANFDFRIVDRMQALGTHIQKSQLRYHNKRVLVSKEFTFDAAHHLHAYEGKCKNLHGHTYTVVFGISGFPDEIGLVIDFGDIKQIWKEHIEIYLDHRYLNEMLPPMNTTAENMVVWIFEEMEKQLQSDAYRDRYDGARVEFVRLFETPTSYAEARREWMME

SEQ ID NO: 22071 - protein, 157 aa, Lysinibacillus sp.
  misc_feature (1)..(157): tr|A0A4R7U510|A0A4R7U510_9BACI 6-pyruvoyltetrahydropter in/6-carboxytetrahydropterin synthase OS=Lysinibacillus sp. YR326 OX=1855296 GN=A9A36_1129 PE=4 SV=1
MSDFKIVEKLQKIDEDIQRNQLNYHAKRVLVSKEFTFDAAHHLHDYEGKCKNLHGHTYRVVLALSGYTDERGLMIDFGDIKAIWKEKIEIHLDHRYLNETLPPMNTTAENIVVWIYEKLAAALLDVQRNNGARVEFIRLYETPTSYAEARREWMEVE

SEQ ID NO: 22072 - protein, 157 aa, Lysinibacillus sphaericus
  misc_feature (1)..(157): tr|R7ZDN3|R7ZDN3_LYSSH 6-pyruvoyl tetrahydrobiopterin s ynthase OS=Lysinibacillus sphaericus OT4b.31 OX=1285586 GN=H131_12573 PE=4 SV=1
MFHFKIVEKLQKIDEDIQRNQLNYHSKRVLVSKEFTFDAAHHLHDYDGKCKNLHGHTYRAVLGLSGFTDERGLMIDFGDIKEIWKQKIDIYLDHRYLNETLPPMNTTAENIVVWIYEKLAEALHDEQRYNGARVEFIRLYETPTSYAEARREWMEVE

SEQ ID NO: 22073 - protein, 145 aa, Lysinibacillus sphaericus
  misc_feature (1)..(145): tr|A0A1D8JFL8|A0A1D8JFL8_LYSSH 6-carboxy-5,6,7,8-tetrah ydropterin synthase OS=Lysinibacillus sphaericus OX=142 1 GN=BI350_08115 PE=3 SV=1
MMQQIYPVTPHAYAYEINKDFHFAAAHYVPSTDAGKCQHIHGHTYFANITIVGDMLDHSGFLVNFKTIKDLVHRRFDHRVLNKDAAFSDEDPSCFPTSEVIARTIYEIVQAHLDTLDNQPKCVQVFLRETPTSYCVYRPKEASAQ

SEQ ID NO: 22074 - protein, 274 aa, Lysinibacillus telephonicus
  misc_feature (1)..(274): tr|A0A3S0HHE1|A0A3S0HHE1_9BACI 6-pyruvoyl tetrahydropte rin synthase OS=Lysinibacillus telephonicus OX=1714840 GN=EKG35_16710 PE=4 SV=1
MLYLSRKSEFSATHTYNNPRWNKEKNRKIFGKCNNPNGHGHDYKLEVMVRGTLNLSSGIVVNTADIKQIVNHFLAEELDGKFLDREHPFFIKNIPTTENIVNYIWESLKPQFKGCELYRLRLYENHYLSAERKIDSMTYLTRQYHFSAAHRLHSIYLSDEENKKLFGKCNNPNGHGHNYYVDIQVKGEPSKETGMIINLADLDEIVEREIIDRFDHMNLNLDTEEFKELNPTSEAVAMVIYKILKSHIPNLHKVGIWETDKNYFEYLGEGDYAI

SEQ ID NO: 22075 - protein, 157 aa, Lysinibacillus xylanilyticus
  misc_feature (1)..(157): tr|A0A2M9Q9K0|A0A2M9Q9K0_9BACI 6-carboxytetrahydropteri n synthase QueD OS=Lysinibacillus xylanilyticus OX=5824 75 GN=queD PE=4 SV=1
MSDFRIVEKLQKIDEDIQRNQLNYHSKRVLVSKEFTFDAAHHLHNYEGKCKNLHGHTYRVVLALSGYTDERGLMIDFGDIKAIWKEKIEIHLDHRYLNETLPPMNTTAENIVVWIYEKLAAALLDEQRYNGARVEFIRLYETPTSYAEARREWMEVE

SEQ ID NO: 22076 - protein, 157 aa, Lysinibacillus xylanilyticus
  misc_feature (1)..(157): tr|A0A0K9FDI4|A0A0K9FDI4_9BACI 6-pyruvoyl tetrahydrobio pterin synthase OS=Lysinibacillus xylanilyticus OX=5824 75 GN=ACZ11_08655 PE=4 SV=1
MSDFRIVEKLQKIDEDIQRNQLNYHSKRVLVSKEFSFDAAHHLHDYEGKCKNLHGHTYRVVLALSGYTDERGLMIDFGDIKAIWKEKIEIHLDHRYLNETLPPMNTTAENIVVWIYEKLAAALLDEQRYNGARVELIRLYETPTSYAEARREWMEVE

SEQ ID NO: 22077 - protein, 117 aa, Lysobacter aestuarii
  misc_feature (1)..(117): tr|A0A508ADU5|A0A508ADU5_9GAMM 6-carboxy-5,6,7,8-tetrah ydropterin synthase OS=Lysobacter aestuarii OX=1706195 GN=queD PE=3 SV=1
MDIFKAFTLEAAHRLPHVPEGHKCARLHGHSFRIELHVSGDIDPHAGWVMDFADLKQAFKPLYEQLDHHYLNDIEGLENPTSERLAVWIWERLKPALPLLSEVVVHETCTSGCRYRG

SEQ ID NO: 22078 - protein, 117 aa, Lysobacter antibioticus
  misc_feature (1)..(117): tr|A0A0S2FG02|A0A0S2FG02_9GAMM 6-carboxy-5,6,7,8-tetrah ydropterin synthase OS=Lysobacter antibioticus OX=84531 GN=queD PE=3 SV=1
MNIFKVFTLEAAHRLPNVPEGHKCARLHGHSFRIEVHLTGELGEHTGWVMDYADVKKAFQPTYDRLDHHYLNDIPGLENPTSERLAVWIWDQLKPVLPLLSEIVVHETCTAGCRYRG

SEQ ID NO: 22079 - protein, 122 aa, Lysobacter arseniciresistens
  misc_feature (1)..(122): tr|A0A0A0F146|A0A0A0F146_9GAMM 6-carboxy-5,6,7,8-tetrah ydropterin synthase OS=Lysobacter arseniciresistens ZS7 9 OX=913325 GN=N799_13345 PE=3 SV=1
MDIFKTFTLEAAHRLPNVPEGHKCARLHGHSFRVEIHLRGDIGADTGWVMDFADVKRAFQPLYDRLDHHYLNDIEGLENPTSERLAVWIWERLKPALPLLAEVVVHETCTSGCRYRGDQSQA

SEQ ID NO: 22080 - protein, 120 aa, Lysobacter capsici
  misc_feature (1)..(120): tr|A0A0S2FL00|A0A0S2FL00_9GAMM 6-carboxy-5,6,7,8-tetrah ydropterin synthase OS=Lysobacter capsici OX=435897 GN= queD PE=3 SV=1
MTAVDIFKVFTLEAAHRLPNVPEGHKCARLHGHSFRIEVHLRGELGEHTGWVMDYADVKKAFQPIYDRLDHHYLNDIEGLENPTSERLAVWVWDQLKPVLPLLSEIVVHETCTAGCRYRG

SEQ ID NO: 22081 - protein, 120 aa, Lysobacter capsici; identical to SEQ ID NO: 22080
  misc_feature (1)..(120): tr|A0A120AGK2|A0A120AGK2_9GAMM 6-carboxy-5,6,7,8-tetrah ydropterin synthase OS=Lysobacter capsici AZ78 OX=14443 15 GN=AZ78_2250 PE=3 SV=1

SEQ ID NO: 22082 - protein, 117 aa, Lysobacter concretionis
  misc_feature (1)..(117): tr|A0A0A0ELL8|A0A0A0ELL8_9GAMM 6-carboxy-5,6,7,8-tetrah ydropterin synthase OS=Lysobacter concretionis Ko07 = D SM 16239 OX=1122185 GN=N792_12465 PE=3 SV=1
MNIFKIFTLEAAHRLPNVPPGHKCARLHGHSFRVEIHLEGEPGADTGWVVDFADIKAAFRPLYEQLDHNYLNDIEGLDNPTSERIAMWIWERLKPTLPLLSEVVVHETCTSGCRYRG

SEQ ID NO: 22083 - protein, 118 aa, Lysobacter daejeonensis
  misc_feature (1)..(118): tr|A0A0A0ERK8|A0A0A0ERK8_9GAMM 6-carboxy-5,6,7,8-tetrah ydropterin synthase OS=Lysobacter daejeonensis GH1-9 OX =1385517 GN=N800_07310 PE=3 SV=1
MDIFKAFTLEAAHRLPNVPPGHKCARLHGHSFRVELHVSGDVGADTGWVMDFGDVKQAFQPLYDQLDHHYLNDIPGLENPTSERLAMWIWEKLKPALPLLSEVVVHETCTSGCRYRGP

SEQ ID NO: 22084 - protein, 117 aa, Lysobacter defluvii
  misc_feature (1)..(117): tr|A0A0A0M3Q9|A0A0A0M3Q9_9GAMM 6-carboxy-5,6,7,8-tetrah ydropterin synthase OS=Lysobacter defluvii IMMIB APB-9 = DSM 18482 OX=1385515 GN=N791_08360 PE=3 SV=1
MEIFKAFTLEAAHRLPNVPEGHKCARLHGHSFRVEIRVEGELQPGTEWVMDYADIKAAFEPLYRQLDHHYLNEIEGLENPTSERLAVWIWERLKPALPQLSEVVVHETCTSGCRYRG

SEQ ID NO: 22085 - protein, 118 aa, Lysobacter dokdonensis
  misc_feature (1)..(118): tr|A0A0A2WIY7|A0A0A2WIY7_9GAMM 6-carboxy-5,6,7,8-tetrah ydropterin synthase OS=Lysobacter dokdonensis DS-58 OX= 1300345 GN=LF41_1559 PE=3 SV=1
MDIFKSFTLEAAHRLPNVPPGHKCARLHGHSFRVEIHVSGEPGADTGWVMDFADIKSAFRPLYDQLDHHYLNDIDGLENPTSEVLAKWIWTRLKPALPQLSEIVVNETCTSGCRYRGN

SEQ ID NO: 22086 - protein, 121 aa, Lysobacter enzymogenes
  misc_feature (1)..(121): tr|A0A0S2DC28|A0A0S2DC28_LYSEN 6-carboxy-5,6,7,8-tetrah ydropterin synthase OS=Lysobacter enzymogenes OX=69 GN= queD PE=3 SV=1
MPAIDIFKVFTLEAAHRLPNVPEGHKCARLHGHSFRVEVHLRGDIGEHSGWLMDYADVKKAFQPIHDRLDHHYLNDIEGLDNPTSERLAVWIWEQLKPALPLLSEIVVHETCTAGSRYRGE

SEQ ID NO: 22087 - protein, 121 aa, Lysobacter enzymogenes
  misc_feature (1)..(121): tr|A0A1J1EBS1|A0A1J1EBS1_LYSEN 6-carboxy-5,6,7,8-tetrah ydropterin synthase OS=Lysobacter enzymogenes OX=69 GN= LEN_4226 PE=3 SV=1
MPAIDIFKVFTLEAAHRLPNVPEGHKCARLHGHSFRVEVHLRGDIGEHSGWLMDYADVKKAFQPIYDRLDHHYLNDIEGLDNPTSERLAVWIWEQLKPALPLLSEIVVHETCTAGSRYRGE

SEQ ID NO: 22088 - protein, 120 aa, Lysobacter gummosus
  misc_feature (1)..(120): tr|A0A0S2G1K1|A0A0S2G1K1_9GAMM 6-carboxy-5,6,7,8-tetrah ydropterin synthase OS=Lysobacter gummosus OX=262324 GN =queD PE=3 SV=1
MTAIDIFKVFTLEAAHRLPNVPEGHKCARLHGHSFRIEVHLHGELGEHTGWVMDYADVKKAFQPIYDRLDHHYLNDIEGLENPTSERLAVWVWDQLKPVLPLLSEIVVHETCTAGCRYRG

SEQ ID NO: 22089 - protein, 121 aa, Lysobacter lycopersici
  misc_feature (1)..(121): tr|A0A516V5G9|A0A516V5G9_9GAMM 6-carboxy-5,6,7,8-tetrah ydropterin synthase OS=Lysobacter lycopersici OX=132479 6 GN=queD PE=3 SV=1
MDIFKVFTLEAAHRLPNVPPGHKCARLHGHSFRVEIHVRGEPGADSGWVMDFAELKAAFKPLYEQLDHHYLNEVPGLENPTSERLAAWIWEHLAPSLPLLAEVVVHETCTSGCRYRGPGAV

SEQ ID NO: 22090 - protein, 117 aa, Lysobacter maris
  misc_feature (1)..(117): tr|A0A2U9T7J7|A0A2U9T7J7_9GAMM 6-carboxy-5,6,7,8-tetrah ydropterin synthase OS=Lysobacter maris OX=1605891 GN=q ueD PE=3 SV=1
MDIFKVFTIEAAHRLPNVPDGHKCARLHGHSFRIEIHLSGELDPRAGWVMDFADVKTAFKPLYERLDHHYLNDIEGLENPTSERLAVWIWERLKPELPLLSEVVVHETCTSGCRYRG

SEQ ID NO: 22091 - protein, 118 aa, Lysobacter pythonis
  misc_feature (1)..(118): tr|A0A3M2HSY6|A0A3M2HSY6_9GAMM 6-carboxy-5,6,7,8-tetrah ydropterin synthase OS=Lysobacter pythonis OX=2483112 G N=queD PE=3 SV=1
MDIFKIFTLEAAHRLPNVPAGHKCARLHGHSFRVELHVSGPVDPQLGWVMDFADLKAAFKPLYEQLDHHYLNDVEGLENPTSERLAQWIWQRLKPEVPLLSAVVVHETCTAGSRYAGP

SEQ ID NO: 22092 - protein, 118 aa, Lysobacter ruishenii
  misc_feature (1)..(118): tr|A0A562LRX6|A0A562LRX6_9GAMM 6-carboxy-5,6,7,8-tetrah ydropterin synthase OS=Lysobacter ruishenii OX=686800 G N=IP93_01876 PE=3 SV=1
MDIFKAFTLEAAHRLPNVPPGHKCARLHGHSFRVELHVSGEVGADTGWVMDFGDVKQAFQPLYDQLDHHYLNDIAGLENPTSERLAMWIWDQLKPSLPLLSEVVVHETCTSGCRYRGP

SEQ ID NO: 22093 - protein, 117 aa, Lysobacter silvestris
  misc_feature (1)..(117): tr|A0A2K1Q1Y0|A0A2K1Q1Y0_9GAMM 6-carboxy-5,6,7,8-tetrah ydropterin synthase OS=Lysobacter silvestris OX=1645665 GN=Lysil_0665 PE=3 SV=1
MDIFKVFTLEAAHRLPNVPDGHKCARLHGHSFRIEIRVRGEPGADSGWVMDFADLKTAFQPLYDQLDHHYLNDIPGLDNPTSERLAIWIWDRLKPHLPLLAEIVVHETCTSGCRYAG

SEQ ID NO: 22094 - protein, 117 aa, Lysobacter soli
  misc_feature (1)..(117): tr|A0A3D8VEC2|A0A3D8VEC2_9GAMM 6-carboxy-5,6,7,8-tetrah ydropterin synthase OS=Lysobacter soli OX=453783 GN=que D PE=3 SV=1
MKIFKAFTLEAAHRLPNVPEGHKCARLHGHSFRIEIHVEGDIDPHFGWVMDFADLKAAFKPIYDRLDHHYLNDIEGLENPTSEVLAKWIWDQLRPSLPLLSEVVVHETCTSGCHYKA

SEQ ID NO: 22095 - protein, 134 aa, Lysobacter sp.
  misc_feature (1)..(134): tr|A0A5C8KN23|A0A5C8KN23_9GAMM 6-carboxytetrahydropteri n synthase OS=Lysobacter sp. Alg18-2.2 OX=2603204 GN=FU 658_11355 PE=4 SV=1
MYSLSVREHIMIAHSFRGEVFGPARKLHGATYVVDVTFKRRTLDADGLVVDIGRAGELVRATLAPLNYTNLDEHPEFAGKNTTTEFMAHAIHGRIARAIAEGALGDSGRGIERLAVRLGESHLAWATFEDELAP

SEQ ID NO: 22096 - protein, 117 aa, Lysobacter sp.
  misc_feature (1)..(117): tr|A0A0D0R7I9|A0A0D0R7I9_9GAMM 6-carboxy-5,6,7,8-tetrah ydropterin synthase OS=Lysobacter sp. A03 OX=1199154 GN =TI01_0839 PE=3 SV=1
MNIFKSFTLEAAHRLPNVPAGHKCARLHGHSFRIEIHVEGEPGEHTGWIMDFSDIKLAFQPLYDQLDHHYLNEVPGLENPTSERLALWIWERLKPTLPLLSEVVVHETCTSGCRYRG

SEQ ID NO: 22097 - protein, 128 aa, Lysobacter spongiicola
  misc_feature (1)..(128): tr|A0A1T4QN66|A0A1T4QN66_9GAMM 6-carboxy-5,6,7,8-tetrah ydropterin synthase OS=Lysobacter spongiicola DSM 21749 OX=1122188 GN=SAMN02745674_01699 PE=3 SV=1
MAGRPGDTMAAMDIFKIFTLEAAHRLPNVPEGHKCARVHGHSFRVELHLQGEVGADSGWVMDFGDIKAAFQPLYDQLDHHYLNDVPGLENPTSERIAIWIWDRLKPELPLLAEVVVHETCTSGCRYRG

SEQ ID NO: 22098 - protein, 121 aa, Lysobacter tolerans
  misc_feature (1)..(121): tr|A0A1N6Y5Y8|A0A1N6Y5Y8_9GAMM 6-carboxy-5,6,7,8-tetrah ydropterin synthase OS=Lysobacter tolerans OX=1604334 G N=SAMN05421546_2388 PE=3 SV=1
MDIFKVFTLEAAHRLPNVPEGHKCARLHGHSFRVELHVSGPVNPQMGWVMDFADVKRAFQPLYDQLDHHYLNDIPGLENPTSERLAEWIWDQLKPDLPLLSAVVVHETCTSGCRYSGPAAA

SEQ ID NO: 22099 - protein, 137 aa, Macrococcus bohemicus
  misc_feature (1)..(137): tr|A0A328A518|A0A328A518_9STAP 6-carboxy-5,6,7,8-tetrah ydropterin synthase OS=Macrococcus bohemicus OX=1903056 GN=queD PE=3 SV=1
MMQQIYPQVNHNYAFELNKDMNFSAAHYIPDERAGVCSRTHGHTYFVNVTIAGNQLDEMGFLVNFRDIKSIINDTFDHTLINDLPELKDKMPSTELVAKTIFDMIDNHLNTLPHAPKVLQVFLRETPTSYVVYRGLQ

SEQ ID NO: 22100 - protein, 137 aa, Macrococcus bohemicus
  misc_feature (1)..(137): tr|A0A4R5Y018|A0A4R5Y018_9STAP 6-carboxy-5,6,7,8-tetrah ydropterin synthase OS=Macrococcus bohemicus OX=1903056 GN=queD PE=3 SV=1
MMQQIYPQVNHNYAFELNKDINFSAAHFIPDERAGVCSRTHGHTYFVNVTIAGNHLDEMGFLVNFRDIKSIINDTFDHTLINDLPELKDKMPSTELVAKTIFDMIDNHLKTLPHAPKVLQVFLRETPTSYVVYRGVR

SEQ ID NO: 22101 - protein, 137 aa, Macrococcus bovicus
  misc_feature (1)..(137): tr|A0A4R6C0N2|A0A4R6C0N2_9STAP 6-carboxy-5,6,7,8-tetrah ydropterin synthase OS=Macrococcus bovicus OX=69968 GN= queD PE=3 SV=1
MIGQIYPQVTHSYRFELNKDMNFSSAHYIPDARAGACARIHGHTYFLNLTIAGNELDDLGFLVNFSELKKLIHARFDHQLLNELPEVEGLIPSTEKMAELIYTIVQAYLDGLDNQPICLQVFLRETPTSYVVYRGAL

SEQ ID NO: 22102 - protein, 142 aa, Macrococcus bovicus
  misc_feature (1)..(142): tr|A0A4R6BZX2|A0A4R6BZX2_9STAP 6-pyruvoyl tetrahydropte rin synthase OS=Macrococcus bovicus OX=69968 GN=ERX55_0 6440 PE=4 SV=1
MHIFGDIQAPDVFKIYDASPVLKLKFSFHAHCRIYFSPDRYKDLENHLYVFYVTVSSPLNDMGMAVDFFHIEDIFTTHIKPFVDQQLLNQTLPSMNMTTENIAHWLYETFEEHLPANTTMETLELFETANHSVLLMQYNRPQ

SEQ ID NO: 22103 - protein, 137 aa, Macrococcus brunensis
  misc_feature (1)..(137): tr|A0A4R6BGJ9|A0A4R6BGJ9_9STAP 6-carboxy-5,6,7,8-tetrah ydropterin synthase OS=Macrococcus brunensis OX=198483 GN=queD PE=3 SV=1
MIGQIYPQVPHSYRFELNKDMNFSSAHYIPDERAGACARVHGHTYFLCLTIAGNELDDLGFLVNFSELKKLIHGRFDHQLLNELPEVKGMIPSTEKMAELIYTLVQDYLDELDNGAKCLQVFLRETPTSYVVYRGDL

SEQ ID NO: 22104 - protein, 141 aa, Macrococcus brunensis
  misc_feature (1)..(141): tr|A0A4R6BF45|A0A4R6BF45_9STAP 6-pyruvoyl tetrahydropte rin synthase OS=Macrococcus brunensis OX=198483 GN=ERX2 7_02845 PE=4 SV=1
MNLFNDIKVPASFKAFSGTPSLKLKFAFRAHCRIFFTPEKYKDLENHLYIFYVTVNSPVNDIGMGVDFFEVEHIFENHIKPLVDHQLLNQTLPAMNMTAENIGHWLYQTFEAHLPVNTTIEALELFETAEHSVILTQQNRH

SEQ ID NO: 22105 - protein, 144 aa, Macrococcus canis
  misc_feature (1)..(144): tr|A0A4P9CEU0|A0A4P9CEU0_9STAP Uncharacterized protein OS=Macrococcus canis OX=1855823 GN=EST43_02715 PE=4 SV= 1
MSLNHIQNKTSAYYRQAIDIEVDFQFKTSNRIFFPGNHYKDLVDHSYSFTLTVTSNVDEYGLGIDFFEIRRLYNEHIAPTVNAPIINEVLPHINTTVENLCYFLWQSFDKVLPETASIQSIVLSENDTHRAILKREYLNNGGLL

SEQ ID NO: 22106 - protein, 144 aa, Macrococcus canis
  misc_feature (1)..(144): tr|A0A1W7AAW4|A0A1W7AAW4_9STAP 6-pyruvoyl tetrahydropte rin synthase OS=Macrococcus canis OX=1855823 GN=MCCS_05 890 PE=4 SV=1
MSLDQIQNKTSAYYRQAIDIEVDFQFKTSNRIFFPGNHYKDLVDHSYSFTLTVTSNVDEYGLGIDFFEIRRLYNEHIAPTVNAPIINEVLPHINTTVENLCYFLWQSFDKVLPETVSIQSIVLSENDTHRAILKREYLNNGGLL

SEQ ID NO: 22107 - protein, 137 aa, Macrococcus carouselicus
  misc_feature (1)..(137): tr|A0A4R6BP60|A0A4R6BP60_9STAP 6-carboxy-5,6,7,8-tetrah ydropterin synthase OS=Macrococcus carouselicus OX=6996 9 GN=ERX40_00280 PE=3 SV=1
MIGQIYPQVTHSYRFELNKDMNFSSAHYIPDARAGACARVHGHTYFLNLTIGGNELDELGFLINFSELKKLIHGRFDHQLLNELPELDGIIPSTEKMAELIHTIVQDHLDTLANQPKCLQVFLRETPTSYVIYRGEL

SEQ ID NO: 22108 - protein, 137 aa, Macrococcus caseolyticus
  misc_feature (1)..(137): tr|B9EAB0|B9EAB0_MACCJ 6-carboxy-5,6,7,8-tetrahydropter in synthase OS=Macrococcus caseolyticus (strain JCSC540 2) OX=458233 GN=MCCL_0464 PE=3 SV=1
MMQQLYPQVNHNYAFELNKDINFSAAHLIPNEKAGVCSRVHGHTYFVNVTIGGNELDEMGFLVNFRDIKSIINDTFDHRLMNDLEAFQNTPPSTENVAKLIFEKIEAHLDTLSHGPKVLQVYLRETPTSYVLYRGKR

SEQ ID NO: 22109 - protein, 137 aa, Macrococcus caseolyticus; identical to SEQ ID NO: 22108
  misc_feature (1)..(137): tr|A0A2N0VS98|A0A2N0VS98_9STAP 6-carboxy-5,6,7,8-tetrah ydropterin synthase OS=Macrococcus caseolyticus OX=6996 6 GN=queD PE=3 SV=1

SEQ ID NO: 22110 - protein, 137 aa, Macrococcus epidermidis
  misc_feature (1)..(137): tr|A0A327ZVB0|A0A327ZVB0_9STAP 6-carboxy-5,6,7,8-tetrah ydropterin synthase OS=Macrococcus epidermidis OX=19025 80 GN=queD PE=3 SV=1
MMQQIYPQVNHNYAFELNKDMNFSAAHYIPDERAGVCSRTHGHTYFVNVTIACNHLDEMGFLVNFRDIKSIINDTFDHTLINDLPELKDKMPSTELVAKTIFDMIDNHLNTLPHAPKVLQVFLRETPTSYVIYRGVR

SEQ ID NO: 22111 - protein, 138 aa, Macrococcus epidermidis
  misc_feature (1)..(138): tr|A0A327ZUL7|A0A327ZUL7_9STAP 6-pyruvoyl tetrahydrobio pterin synthase OS=Macrococcus epidermidis OX=1902580 G N=BHU61_00665 PE=4 SV=1
MSLLEHIQQPQKTAYYEKDILLNLTFTFTTNNRIFFPNGKHKDLFNHNYKFDISIKSPVDTYGLAIDFYQIERDYNEKIAPLLNAPILNESLPEMNTTVENIAYFIWEQFEHLLDHVSSIQTLTLYETKNHSVTINKN

SEQ ID NO: 22112 - protein, 138 aa, Macrococcus goetzii
  misc_feature (1)..(138): tr|A0A4R6CFG2|A0A4R6CFG2_9STAP 6-pyruvoyl tetrahydrobio pterin synthase OS=Macrococcus goetzii OX=1891097 GN=ET I08_04785 PE=4 SV=1
MSLLEHIQQPKKTVYYEKDILLNLTFTFTTNNRIFFPNGKHKDLFNHNYKFDISIKSPVDTYGLAIDFYQIERDYNEKIAPLLNAPILNESLPEMNTTVENIAYFIWEQFEHLIDHASSIQTLTLYETKNHSVTINKN

SEQ ID NO: 22113 - protein, 137 aa, Macrococcus goetzii
  misc_feature (1)..(137): tr|A0A395G929|A0A395G929_9STAP 6-carboxy-5,6,7,8-tetrah ydropterin synthase OS=Macrococcus goetzii OX=1891097 G N=queD PE=3 SV=1
MMQQIYPQVNHTYAFELNKDMNFSAAHYIPDERAGVCSRTHGHTYFVNVTIAGNHLDEMGFLVNFRDIKSIINDTFDHTLINDLPELKDKMPSTELVAKTIFDMIDNHLNTLPHAPKVLQVFLRETPTSYVIYRGVR

SEQ ID NO: 22114 - protein, 137 aa, Macrococcus hajekii
  misc_feature (1)..(137): tr|A0A4V3BDV8|A0A4V3BDV8_9STAP 6-carboxy-5,6,7,8-tetrah ydropterin synthase OS=Macrococcus hajekii OX=198482 GN =ERX37_08445 PE=3 SV=1
MIPQLYPQVPHNYIFELNKDMNFSSAHYIPDERAGACARVHGHTYFLNLTIGGNELDELGFLINFSELKQLIHGRFDHQLLNELPELAGRIPSTEKMAELIHELVQSHLNTLPNQPQCLQVFLRETPTSYVVYRGAK

SEQ ID NO: 22115 - protein, 142 aa, Macrococcus hajekii
  misc_feature (1)..(142): tr|A0A4R6BJZ5|A0A4R6BJZ5_9STAP 6-pyruvoyl tetrahydrobio pterin synthase OS=Macrococcus hajekii OX=198482 GN=ERX 37_06920 PE=4 SV=1
MTKFTDITAPQNFKIYDSCPLLKLKFEFNAHCRIFFTVDKYKDLSHHHYAFYLTVSSPINHMGLGVDFFEVEKIYTTYLAPKLNDQLLNHTLPEMNMTAENIAYWLWQQFEQYLPSDVDIETLELFEAPTHSVILNRQIMNE

SEQ ID NO: 22116 - protein, 138 aa, Macrococcus lamae
  misc_feature (1)..(138): tr|A0A4R6BV99|A0A4R6BV99_9STAP 6-carboxy-5,6,7,8-tetrah ydropterin synthase OS=Macrococcus lamae OX=198484 GN=q ueD PE=3 SV=1
MIQQIYPQVAHNYRFELNKDMNFSSAHYIPHHDAGACSRIHGHTYFLNLTIGGNTLDEAGFLINFSTLKQLIHGRFDHQLLNELPELENIIPSTEKMAERIYELVQEHLNTLPNRPVCLQVFLRETPTSYVIYRGGSQ

SEQ ID NO: 22117 - protein, 142 aa, Macrococcus sp.
  misc_feature (1)..(142): tr|A0A4Q1B9Z9|A0A4Q1B9Z9_9STAP 6-pyruvoyl tetrahydrobio pterin synthase OS=Macrococcus sp. DPC7161 OX=2507060 G N=ER639_06895 PE=4 SV=1
MLNHIQMTKPTNNNQQPVLLNLSFQFTTNNRIFFPNGKHKDLFNHAYHFTVSIQSPVDEYGLGIDFYKIEQNYHDDLAKKLNNPILNEMLPFNTTVENIASYIYQSFSRYLDKNASVHSVTLYETKSHSVTINEQNMYLFEL

SEQ ID NO: 22118 - protein, 123 aa, Macrococcus sp.
  misc_feature (1)..(123): tr|A0A4Q1AZ14|A0A4Q1AZ14_9STAP 6-carboxy-5,6,7,8-tetrah ydropterin synthase OS=Macrococcus sp. DPC7161 OX=25070 60 GN=ER639_06775 PE=3 SV=1
MKRCVYEIEKQFHFSSSHVLNGLPESHPCGRLHGHNYIAVFVLGADELNEVGFVVDYRELDSIKNYIDNELDHRHLNDVLPMQPTAENIAKYLFDKTKNELGIKEIVEVKISETPKTWASYRP

SEQ ID NO: 22119 - protein, 138 aa, Magnetococcales bacterium
  misc_feature (1)..(138): tr|A0A2E3C594|A0A2E3C594_9PROT 6-pyruvoyl tetrahydrobio pterin synthase OS=Magnetococcales bacterium OX=2026759 GN=CMF62_12810 PE=4 SV=1
MIEAIRYHDFCAGHRVAGHENKCAHLHGHNYRIYFHCTAEATDNLGRVIDFSVIKATLCNWLEDNWDHRFLVWEEDPLANDIAKLDDATVKLPFNPTAENMAQYLVETVAPQQLKGSGVTLHKCVVEETRKCSASYSK

SEQ ID NO: 22120 - protein, 142 aa, Magnetococcus marinus
  misc_feature (1)..(142): tr|A0L5B3|A0L5B3_MAGMM 6-carboxy-5,6,7,8-tetrahydropter in synthase OS=Magnetococcus marinus (strain ATCC BAA-1 437 / JCM 17883 / MC-1) OX=156889 GN=Mmc1_0635 PE=3 SV= 1
MKIARMFKFESAHRLPYHDGKCHRLHGHSYRLEMIFSGTVRQPDEKDPQSGFVADFGIVNDLVKEQLIDRYLDHRDLNASVPGIPYTSAEYLSAWIVGWCMRELEGHPQLGDLKIERVRVWETINAWAEADRQDAEGMNFHV

SEQ ID NO: 22121 - protein, 141 aa, Magnetococcus massalia
  misc_feature (1)..(141): tr|A0A1S7LMQ3|A0A1S7LMQ3_MAGMO 6-carboxy-5,6,7,8-tetrah ydropterin synthase OS=Magnetococcus massalia (strain M O-1) OX=451514 GN=MAGMO_2879 PE=3 SV=1
MKIARMFKFESAHQLPYHDGKCQRLHGHSYRLELVFTGTPRKPDASDPQSGFVADFGLIDELVKGELINPQLDHYHLNETIPELPYTSAEYLAAWIVGWCMKNMDGRAELGDCRIETARLWETVNAWAEADRNDAEQLGFA

SEQ ID NO: 22122 - protein, 145 aa, Magnetofaba australis
  misc_feature (1)..(145): tr|A0A1Y2K5D4|A0A1Y2K5D4_9PROT 6-carboxy-5,6,7,8-tetrah ydropterin synthase OS=Magnetofaba australis IT-1 OX=14 34232 GN=MAIT1_02450 PE=3 SV=1
MKITKQFRFEAAHRLPYHDGRCRREHGHSYLLELTFEGPVRAVDPNDPQSGFVVDFGRIKQIVQPELIDRYLDHHDLNQTVPEIPYTSAEHLAAWIVGWCMRHVDGQPGIGAARVHSARLWETISALAEADRNDAIALGYAPPTP

SEQ ID NO: 22123 - protein, 174 aa, Magnetospirillum caucaseum
  misc_feature (1)..(174): tr|M3AFQ0|M3AFQ0_9PROT 6-pyruvoyl-tetrahydropterin synt hase OS=Magnetospirillum caucaseum OX=1244869 GN=H261_0 1911 PE=4 SV=1
MSTFRVRRRIEIDAGHRIMTHGSKCRNLHGHRYVIEVECEAAHLHPSGEQTDMVVDFGFLKHEMMRLIDAPCDHGFIAASADAELLALFAPQGAQDWTESILAEVRENGAALTTRTRMGTKLYVVPFQPTAECLAKHWFEVLKEPVRERSDSTARLVAVRVWETPNCMAEYAPG

SEQ ID NO: 22124 - protein, 176 aa, Magnetospirillum gryphiswaldense
  misc_feature (1)..(176): tr|V6F6Y1|V6F6Y1_MAGGM Putative 6-carboxy-5,6,7,8-tetra hydropterin synthase OS=Magnetospirillum gryphiswaldens e (strain DSM 6361 / JCM 21280 / NBRC 15271 / MSR-1) OX =431944 GN=MGMSRv2__3917 PE=4 SV=1
MSAPYRISRRIEIDAGHRIMTHGSKCRHVHGHRYGIEAVCEAVDLHHDGEQTDMVLDFGFLKEEMLKAIDEPCDHGFIAALADVELLTMFAPTGNDTAEWLADLEAQVREKGEATTTRTQLMTKLTVVPFQPTAECLARHWFVKLAEPVKQRSGGAARLLLVRVFETPNCAAEYGE

SEQ ID NO: 22125 - protein, 176 aa, Magnetospirillum gryphiswaldense
  misc_feature (1)..(176): tr|A4TYV7|A4TYV7_9PROT Uncharacterized protein OS=Magne tospirillum gryphiswaldense OX=55518 GN=MGR_3378 PE=4 S V=1
MSAPYRISRRIDIDAGHRIMTHGSKCRHVHGHRYGIEAVCEAVDLHHDGEQTDMVLDFGFLKEEMLKAIDEPCDHGFIAALADVELLTMFTPLGGDTAEWLADLEAQVREKGEATTTRTRLLTKLTVVPFQPTAECLARHWFIKLAEPVKQRSGGAARLLLVRVFETPNCAAEYGE

SEQ ID NO: 22126 - protein, 176 aa, Magnetospirillum kuznetsovii
  misc_feature (1)..(176): tr|A0A364NXT7|A0A364NXT7_9PROT 6-carboxytetrahydropteri n synthase OS=Magnetospirillum kuznetsovii OX=2053833 G N=CU669_12140 PE=4 SV=1
MPAFRVSRRIEIDAGHRIMTHGSKCRNLHGHRYVIEAECEARQLHADGEQTDMVVDFGFLKEEMMRLIDAPCDHGFIAASADDELLSLFAPQGRDADPWLAEIRGKVAASGAALTVETRMLTKLYVVPFQPTAECLAKHWYGLLAEPVKSRSDGCARLVSLRVWETPNCMAEYAPG

SEQ ID NO: 22127 - protein, 148 aa, Magnetospirillum magneticum
  misc_feature (1)..(148): tr|Q2W0Y7|Q2W0Y7_MAGSA Uncharacterized protein OS=Magne tospirillum magneticum (strain AMB-1 / ATCC 700264) OX= 342108 GN=amb3684 PE=4 SV=1
MVIDFGNVKAYMMDIFDSIFDHAFIVSAADAVMMEMFYPGEDPRAILALYQKSIAEQLEFYCSTADKKPIRLPRTCYSEQDPDGMKVVPVPYSPTAENLAAHMFELLGQPLKAHFEKTPIRLVNIRLFETPNGWVDHTADGFNPGIMG

SEQ ID NO: 22128 - protein, 174 aa, Magnetospirillum magneticum
  misc_feature (1)..(174): tr|Q2WAS3|Q2WAS3_MAGSA 6-pyruvoyl-tetrahydropterin synt hase OS=Magnetospirillum magneticum (strain AMB-1 / ATC C 700264) OX=342108 GN=amb0248 PE=4 SV=1
MSTFRVRRRIEIDAGHRIMTHGSKCRNLHGHRYVVEVECEASRLHPSGEQTDMVVDFGFLKDEMMRLIDAPCDHGFIASAADGELLALFAPQGAAGWTESILAEVKAKGAALTTSTRMGTKLYVVPFQPTAECLAKHWFEVLVAPVRTRSDSTARLVAVRVWETPNCMAEYAPA

SEQ ID NO: 22129 - protein, 174 aa, Magnetospirillum magnetotacticum
  misc_feature (1)..(174): tr|A0A0C2UZ79|A0A0C2UZ79_MAGMG 6-carboxytetrahydropteri n synthase Queuosine biosynthesis QueD PTPS-I OS=Magnet ospirillum magnetotacticum MS-1 OX=272627 GN=CCC_01172 PE=4 SV=1
MSTFRVRRRIEIDAGHRIMTHGSKCRNLHGHRYVIEVECEASHLHPSGEQTDMVVDFGFLKDEMMRLIDAPCDHGFIASSADGELLALFAPQGAVGWAESILAEVKEKGAALTTSTRMGTKLYVVPFQPTAECLAKHWFEVLVAPVRKRSDATARLVAVRVWETPNCMAEYAPA

SEQ ID NO: 22130 - protein, 148 aa, Magnetospirillum marisnigri
  misc_feature (1)..(148): tr|A0A178MIU7|A0A178MIU7_9PROT Uncharacterized protein OS=Magnetospirillum marisnigri OX=1285242 GN=A6A04_0462 5 PE=4 SV=1
MVIDFGNVKAYMMDIFDAIFDHAFIVSVADAVMMEMFYPGEDPKAILDLYQESIAEQLDVYCSTADKKPIRLPRTCYSEQDPDGMKVVPVQYSPTAENLAAHMFEMLDQPLKAHFEKTPIRLVNIRLFETPNGWVDHTADGFNPGIMG

SEQ ID NO: 22131 - protein, 176 aa, Magnetospirillum marisnigri
  misc_feature (1)..(176): tr|A0A178MSE8|A0A178MSE8_9PROT 6-pyruvoyl tetrahydropte rin synthase OS=Magnetospirillum marisnigri OX=1285242 GN=A6A04_01045 PE=4 SV=1
MSSFRVRRRIEIDAGHRIMTHGSKCRNLHGHRYVVEVECEARRLHADGEQTDMVVDFGFLKDEMMRLIDAPCDHGFIAAAADAELLGLFAPVGAQAESWVGGIRAQVAADGAALTTDTRMLTKLYVVPFQPTAECLAMHWYGLLEQPVAARSDGCARLVAVRVWETPNCMAEYAPG

SEQ ID NO: 22132 - protein, 176 aa, Magnetospirillum moscoviense
  misc_feature (1)..(176): tr|A0A178MR88|A0A178MR88_9PROT 6-pyruvoyl tetrahydropte rin synthase OS=Magnetospirillum moscoviense OX=1437059 GN=A6A05_12375 PE=4 SV=1
MNAPYRITRRIEIDAGHRIMTHGSKCRHLHGHRYAIEAVCEAADLHHGGEQTDMVLDFGFLKDEMLTAIDGPCDHGFIAALADRELLTMFCPMGRDVDGWLAGLDAQVRAHGEATTTDTRLGTKLTVVPFQPTAECLARHWFTRLAEPVGRRSDGQARLVSVKVWETPNCTAEFSG

SEQ ID NO: 22133 - protein, 175 aa, Magnetospirillum sp.
  misc_feature (1)..(175): tr|A0A1W6CPA3|A0A1W6CPA3_9PROT 6-pyruvoyl tetrahydropte rin synthase OS=Magnetospirillum sp. ME-1 OX=1639348 GN =WV31_13830 PE=4 SV=1
MSTFRVRRRIEIDAGHRIMTHGSKCRNLHGHRYVVEVECEASHLHPSGEQTDMVVDFGFLKDEMMRLIDAPCDHGFIAASADAELLALFAPVGGGEAWVQVLRDTVAAQGAALTTDTRMGTKLYVVPFQPTAECLAKHWFEVLVAPVRKRSDATARLVAVRVWETPNCMAEYAPA

SEQ ID NO: 22134 - protein, 203 aa, Magnetospirillum sp.
  misc_feature (1)..(203): tr|A0A1M3LLF3|A0A1M3LLF3_9PROT 6-carboxytetrahydropteri n synthase QueD OS=Magnetospirillum sp. 64-120 OX=18957 78 GN=BGO92_09735 PE=4 SV=1
MIIRKLFRFENAHVVRNGSTRRCALSLHGHSYRVELLLTAARLDNAGMILDFGLLKGAIKELIDSWDHAACFWDRDDPEYIAFIKRHSERWVSMPVNPSAEQFSRVFFVLVDAVLAATEFGNGEQGVALDSAIVHETDTGYAQCWRADAVDPDMGGPIALNQIVFSERIREEWSDPHLWARVVDAHKRGTVLFRHTLPEQQVQ

SEQ ID NO: 22135 - protein, 117 aa, Magnetovibrio blakemorei
  misc_feature (1)..(117): tr|A0A1E5QC14|A0A1E5QC14_9PROT 6-carboxy-5,6,7,8-tetrah ydropterin synthase OS=Magnetovibrio blakemorei OX=2818 1 GN=BEN30_01830 PE=3 SV=1
MDIYKIFTFEAAHDLPNVPEGHKCKRLHGHSFEVTLTVSGPVDEVTGWVVDFADIKAAFKPTLDRLDHYYLNDIKGLENPTSENIAKWIWAQVKPALPGLSKVAVKETCTAGCVYTG

SEQ ID NO: 22136 - protein, 118 aa, Magnetovibrio sp.
  misc_feature (1)..(118): tr|A0A2D8Z1B3|A0A2D8Z1B3_9PROT 6-carboxy-5,6,7,8-tetrah ydropterin synthase OS=Magnetovibrio sp. OX=2024836 GN= CMF64_14020 PE=3 SV=1
MTVYHGFSFESARRLPRLPDSHICSRLHGNTFLLRVAVTGPVRESEGWVIDFAEVAARVEPVLAEIDHHYLNEVPGLENPTTENIAVWLWDRIATHLQGLSEIEIRENATTGCVYRGA

SEQ ID NO: 22137 - protein, 131 aa, Magnetovibrio sp.
  misc_feature (1)..(131): tr|A0A2D7A9Y5|A0A2D7A9Y5_9PROT 6-carboxytetrahydropteri n synthase QueD OS=Magnetovibrio sp. OX=2024836 GN=CMF6 5_08065 PE=4 SV=1
MSFEITQEFTFDCAHFLTGNGRRDEYSAVHGHSFVCAVTVSGLPVDHADWVVDFAEFKSVLIKIGQQLDHKILNDIPGLETPTMENICVWIASHVSEWLTVGIPADQLVKLISVKLMRKTIGQSCVYRLEK

SEQ ID NO: 22138 - protein, 129 aa, Malikia granosa
  misc_feature (1)..(129): tr|A0A2S9K284|A0A2S9K284_9BURK 6-carboxy-5,6,7,8-tetrah ydropterin synthase OS=Malikia granosa OX=263067 GN=C6P 64_13750 PE=3 SV=1
MSAAYIPRPARCELSQRFYFEAAHTLERSIDAEGSRRIHGHTYHAEVTLQGNPDPVSGMLVDLAYLRREIERLRDRLDHRFLDEVAGLGPATLENLCAFIRADLEPIFPQLCAVSVERQASGDRCTLSW

SEQ ID NO: 22139 - protein, 129 aa, Malikia spinosa
  misc_feature (1)..(129): tr|A0A2S9KCR0|A0A2S9KCR0_9BURK 6-carboxy-5,6,7,8-tetrah ydropterin synthase OS=Malikia spinosa OX=86180 GN=C6P6 1_12740 PE=3 SV=1
MSAAYTPRPARCELSQRFYFEAAHTLERSIDAEGSRRIHGHTYHAEVTLLGNPDPASGMLVDLAYLRREVERLRDRLDHRFLDEVAGLGPATLENLCAFIRADLEPVFPQLCAVSVERQASGDRCRLSW

SEQ ID NO: 22140 - protein, 123 aa, Malonomonas rubra
  misc_feature (1)..(123): tr|A0A1M6K8R3|A0A1M6K8R3_MALRU 6-carboxy-5,6,7,8-tetrah ydropterin synthase OS=Malonomonas rubra DSM 5091 OX=11 22189 GN=SAMN02745165_02621 PE=3 SV=1
MYHLTIQTHFAAAHNLLNYDGDCENLHGHNWKVEVTVKTSTLDDAGLGIDFKILKKKTNKVMDFLDHKYLNDLEPFKGVSTSSERISKYVFDELVDDLQGSGVIVERVTVWESDNACASYTAD

SEQ ID NO: 22141 - protein, 117 aa, Mameliella alba
  misc_feature (1)..(117): tr|A0A0B3RZK1|A0A0B3RZK1_9RHOB 6-carboxy-5,6,7,8-tetrah ydropterin synthase OS=Mameliella alba OX=561184 GN=que D PE=3 SV=1
MFRIRKEFHFSASHQLAHLPAGHQCARLHGHNYIVVVELAADALNADGFVRDYHDLKPLKVYIDDTFDHRHLNDVLDVPSTAENMAKHFFDWCKARWPEVSAVLVSETPKTWAEYRP

SEQ ID NO: 22142 - protein, 121 aa, Mangrovibacter phragmitis
  misc_feature (1)..(121): tr|A0A1B7KZ36|A0A1B7KZ36_9ENTR 6-carboxy-5,6,7,8-tetrah ydropterin synthase OS=Mangrovibacter phragmitis OX=169 1903 GN=A9B99_16090 PE=3 SV=1
MATSLFKDFTFEAAHRLPHVPEGHKCGRLHGHSFMVRLEVTGEVDPYTGWIIDFAELKAVFKPTWERLDHHYLNDIPGLENPTSEVLAKWIWDQLKPQLPLLSAVMVKETCTAGCVYRGEV

SEQ ID NO: 22143 - protein, 121 aa, Mangrovibacter plantisponsor
  misc_feature (1)..(121): tr|A0A317Q8G7|A0A317Q8G7_9ENTR 6-carboxy-5,6,7,8-tetrah ydropterin synthase OS=Mangrovibacter plantisponsor OX= 451513 GN=DES37_101257 PE=3 SV=1
MATSLFKDFTFEAAHRLPHVPEGHKCGRLHGHSFMVRLEVTGEVDPYTGWIIDFAELKAVFKPTWERLDHHYLNDIPGLENPTSEVLAKWVWDQLKPQLPLLSAVMVQETCTAGCVYRGEA

SEQ ID NO: 22144 - protein, 121 aa, Mangrovibacter sp.
  misc_feature (1)..(121): tr|A0A071M1L0|A0A071M1L0_9ENTR 6-carboxy-5,6,7,8-tetrah ydropterin synthase OS=Mangrovibacter sp. MFB070 OX=122 4318 GN=DT73_00720 PE=3 SV=1
MATSLFKDFTFEAAHRLPHVPEGHKCGRLHGHSFMVRLEVTGEVDPYTGWIIDFAELKAVFKPTWERLDHHYLNDIPGLENPTSEVLAKWVWDQLKPQLPLLSAVMVKETCTAGCVYRGEA

SEQ ID NO: 22145 - protein, 116 aa, Mangrovibacterium diazotrophicum
  misc_feature (1)..(116): tr|A0A419W466|A0A419W466_9BACT 6-carboxy-5,6,7,8-tetrah ydropterin synthase OS=Mangrovibacterium diazotrophicum OX=1261403 GN=BC643_0579 PE=3 SV=1
MIWTIKKTFEISASHQLDLPYESKCNNLHGHNWIVDIYVASRELENGMVVDFNYLKEEVFQKLDHKHLNDIIPVPTVENMAHWIANTIGTKEAGKRFWCTKVVIQESQGNVCELNC

SEQ ID NO: 22146 - protein, 116 aa, Mangrovibacterium marinum
  misc_feature (1)..(116): tr|A0A2T5BZW0|A0A2T5BZW0_9BACT 6-carboxy-5,6,7,8-tetrah ydropterin synthase OS=Mangrovibacterium marinum OX=163 9118 GN=C8N47_11386 PE=3 SV=1
MIWTVKKTFEISASHQLDLPYESKCNNLHGHNWIVDIYVASHELENGMVVDFNYLKETIFQQLDHKHLNDIIPVPTVENMALWIANTIGTKEAGKRFWCTKVVIQESQGNVCELNC

SEQ ID NO: 22147 - protein, 150 aa, Mangrovimonas sp.
  misc_feature (1)..(150): tr|A0A1V1ZJR1|A0A1V1ZJR1_9FLAO 6-carboxytetrahydropteri n synthase QueD OS=Mangrovimonas sp. DI 80 OX=1779330 G N=BKM32_04990 PE=4 SV=1
MSNIRITKQFSFETGHALYGYDGKCKNVHGHSYKLSVTVIGQPISDTSNVKFGMVIDFGDLKKIVKEEIVDVFDHATVFNKNTPHIELAKELEDRGHNVLLVEYQPTSEMMVIDFAQKIKNRLPQNIQLHSLKLQETDSSYAEWFASDNN

SEQ ID NO: 22148 - protein, 149 aa, Mangrovimonas sp.
  misc_feature (1)..(149): tr|A0A3R9UWI0|A0A3R9UWI0_9FLAO 6-carboxy-5,6,7,8-tetrah ydropterin synthase OS=Mangrovimonas sp. HN-E26 OX=2494 697 GN=EJA19_01625 PE=3 SV=1
MSHIRITKLFSFETGHALYGYDGKCKNVHGHSYKLSVTVIGKPINDTSNVKYGMVIDFGDLKKIVKEDIVDVFDHATVFNKNTPHVELAKELQDRGHNVMLVDYQPTSEMMVIDFAKKIKKRLPDNIKLHALKLQETDTSYAEWYACDN

SEQ ID NO: 22149 - protein, 136 aa, Mangrovimonas yunxiaonensis
  misc_feature (1)..(136): tr|A0A084TNQ2|A0A084TNQ2_9FLAO 6-carboxy-5,6,7,8-tetrah ydropterin synthase OS=Mangrovimonas yunxiaonensis OX=1 197477 GN=IA57_01505 PE=3 SV=1
MKVTVSRKAHFNAAHRLFRKDWSHAKNEQVFGLCNNPNFHGHNYELIVSVTGEIDPETGYVIDMKVLKNVIKEEVEEAFDHKNLNVEVPEFKALNPTAENIAVVIYNKIKPRLNADLSLEITLFETPRNFVRFSGE

SEQ ID NO: 22150 - protein, 152 aa, Mangrovimonas yunxiaonensis
  misc_feature (1)..(152): tr|A0A084TKU2|A0A084TKU2_9FLAO 6-pyruvoyl tetrahydropte rin synthase OS=Mangrovimonas yunxiaonensis OX=1197477 GN=IA57_05725 PE=4 SV=1
MSKIRITKQFSFETGHALYGYDGKCKNVHGHSYKLSVTVIGTPINNTDHVKYGMVIDFGDLKKIVKEEIVDVFDHATVFNKNTPHVELAKALKDRGHSVMLVDYQPTSEMMVIDFAEKITQRLPKHISLFALKLQETETSYAEWYASDNASL

SEQ ID NO: 22151 - protein, 140 aa, Mannheimia granulomatis
  misc_feature (1)..(140): tr|A0A011NEX7|A0A011NEX7_9PAST 6-carboxy-5,6,7,8-tetrah ydropterin synthase OS=Mannheimia granulomatis OX=85402 GN=AK33_01475 PE=3 SV=1
MFKIAKEFSFDMAHMLDGHDGKCQNLHGHTYKLQVEVTGDLHQNGAKRGMVMDYSDLKTVVKTYILEPMDHAFIYDLNSERESQVAQLLVDLKSKVYGIPSRTTAEEMAKYMFEKLERVGLPVSLIRLWETPTSYCEYSK

SEQ ID NO: 22152 - protein, 140 aa, Mannheimia haemolytica
  misc_feature (1)..(140): tr|A0A248ZZA2|A0A248ZZA2_MANHA 6-carboxy-5,6,7,8-tetrah ydropterin synthase OS=Mannheimia haemolytica OX=75985 GN=queD PE=3 SV=1
MFKIAKEFSFDMAHMLDGHDGKCQNLHGHTYKLQVEVAGELFQEGAKRGMVMDYSDLKAVVKQHILEPMDHAFIYDLQSERESQVAQLLIDLNSKVYGIPTRTTAEEMAKYMFEKLEKVGLPVSLIRLWETPTSYCEYSK

SEQ ID NO: 22153 - protein, 140 aa, Mannheimia sp.
  misc_feature (1)..(140): tr|W0Q6B3|W0Q6B3_9PAST 6-carboxy-5,6,7,8-tetrahydropter in synthase OS=Mannheimia sp. USDA-ARS-USMARC-1261 OX=1 432056 GN=X781_5890 PE=3 SV=1
MFKIAKEFSFDMAHMLDGHDGKCQNLHGHTYKLQVEVAGELFQEGAKRGMVMDYSDLKAIVKTHILDPMDHAFIYDLHNERESQVAQLLIDLKSKVYGIPSRTTAEEMAKYMFEKLEKVGLTVSLIRLWETPTSYCEYSK

SEQ ID NO: 22154 - protein, 142 aa, Mannheimia succiniciproducens
  misc_feature (1)..(142): tr|Q65RE7|Q65RE7_MANSM 6-carboxy-5,6,7,8-tetrahydropter in synthase OS=Mannheimia succiniciproducens (strain MB EL55E) OX=221988 GN=MS1856 PE=3 SV=1
MFKVSKEFSFDMAHILDGHDGKCQNLHGHTYKLQVEVMSAQLHQSGAKKGMVVDFSDLKTVVKKFILDPMDHAFIYDNTSERECKIARLLVELDSKTFGIPVRTTAEEMSRFIFNRLKHDAGLPVSAIRLWETPTSFCEYRE

SEQ ID NO: 22155 - protein, 140 aa, Mannheimia varigena
  misc_feature (1)..(140): tr|W0QE03|W0QE03_9PAST 6-carboxy-5,6,7,8-tetrahydropter in synthase OS=Mannheimia varigena USDA-ARS-USMARC-1296 OX=1433287 GN=X808_15680 PE=3 SV=1
MFKIAKEFSFDMAHMLDGHDGKCQNLHGHTYKLQVEVTGDLYESGAKRGMVMDYSDLKAIVKCHILDPMDHAFIYDLHNERESQVAQLLIDLKSKVYGIPSRTTAEEMAKYMFEKLEKVGLPVSLIRLWETPTSYCEYSK

SEQ ID NO: 22156 - protein, 149 aa, Maribacter aquivivus
  misc_feature (1)..(149): tr|A0A1M6K2I4|A0A1M6K2I4_9FLAO 6-carboxy-5,6,7,8-tetrah ydropterin synthase OS=Maribacter aquivivus OX=228958 G N=SAMN04488007_0635 PE=3 SV=1
MSNIRITKQFNFETGHALYGYDGKCRNVHGHSYKLSVTVIGRPITDTSHVKLGMVIDFGDLKKIVKEDIVDIFDHSTVFNKNTPHVELAKELTDRGHSVILADYQPTSENMVIDFAAKIKSRLPENISLFSLKLQETDTSFAEWYASDN

SEQ ID NO: 22157 - protein, 136 aa, Maribacter aquivivus
  misc_feature (1)..(136): tr|A0A1M6U5Q9|A0A1M6U5Q9_9FLAO 6-pyruvoyltetrahydropter in/6-carboxytetrahydropterin synthase OS=Maribacter aqu ivivus OX=228958 GN=SAMN04488007_3499 PE=4 SV=1
MNKLAIVRCEHFNAAHRLHNSNWSDEKNKEIFGKCNNPNFHGHNYELEVKVIGYCNKDTGYVIDTKILSDLIEEKILNRFDHKNLNLDTEEFKTLNPTVENIAIVIYDILKIEIESNLELKIKLYETPRNYVEYPY

SEQ ID NO: 22158 - protein, 135 aa, Maribacter arcticus
  misc_feature (1)..(135): tr|A0A1T5C9C1|A0A1T5C9C1_9FLAO 6-carboxy-5,6,7,8-tetrah ydropterin synthase OS=Maribacter arcticus OX=561365 GN =SAMN05660866_02062 PE=3 SV=1
MKVKVSRKAHFNAAHRLYKKEWDDAKNTDIFGKCNNPNFHGHNYELIVSVTGEIDSETGFVMDMKELKDLIKQEIEDYLDHKNLNIEVEEFNNLNPTAENIAVIIWKRLRPHISSSNELEIVLFETPRNFVTFSG

SEQ ID NO: 22159 - protein, 149 aa, Maribacter arcticus
  misc_feature (1)..(149): tr|A0A1T5AFI9|A0A1T5AFI9_9FLAO 6-carboxy-5,6,7,8-tetrah ydropterin synthase OS=Maribacter arcticus OX=561365 GN =SAMN05660866_00914 PE=3 SV=1
MGNIRITKQFNFETGHALYGYDGKCRNVHGHSYKLSVTVIGRPITDTSHVKLGMVIDFGDLKKIVKEDIVDKFDHATVFNKNTPHVELAKELTDRGHNVILADYQPTSENMVIDFAAKIKSRLPKNISLFSLKLQETDTSFAEWYASDN

SEQ ID NO: 22160 - protein, 149 aa, Maribacter caenipelagi
  misc_feature (1)..(149): tr|A0A4R7CX60|A0A4R7CX60_9FLAO 6-carboxy-5,6,7,8-tetrah ydropterin synthase OS=Maribacter caenipelagi OX=144778 1 GN=DFQ03_3320 PE=3 SV=1
MSNIRITKQFNFETGHALYGYDGKCRNVHGHSYKLSVTVIGKPITDTSHVKLGMVIDFGDLKKIVKEDIVDVFDHATVFNKNTPHVELAKELTDRGHNVILADYQPTSENMVIDFAAKIKSRLPENISLFSLKLQETDTSFAEWYASDN

SEQ ID NO: 22161 - protein, 135 aa, Maribacter caenipelagi
  misc_feature (1)..(135): tr|A0A4R7D0N4|A0A4R7D0N4_9FLAO 6-carboxy-5,6,7,8-tetrah ydropterin synthase OS=Maribacter caenipelagi OX=144778 1 GN=DFQ03_2586 PE=3 SV=1
MKVKVSRKAHFNAAHRLYRKDWDDSKNTEIFGKCNNPNFHGHNYELVVSVTGEIDAETGFVMDMKVLKDLIKVEIEDYLDHKNLNIEVAEFKTLNPTAENISVIIWQKLRPHIQKSHDLEVVLYETPRNFVTFSG

SEQ ID NO: 22162 - protein, 149 aa, Maribacter cobaltidurans
  misc_feature (1)..(149): tr|A0A223V535|A0A223V535_9FLAO 6-carboxy-5,6,7,8-tetrah ydropterin synthase OS=Maribacter cobaltidurans OX=1178 778 GN=CJ263_08860 PE=3 SV=1
MSNIRITKQFNFETGHALYGYDGKCRNVHGHSYKLSVTVIGKPITDTSHVKLGMVIDFGDLKKIVKEEIVDKFDHATVFNKNTPHVDLAKELTERGHNVILAEYQPTSENMVIDFAKKIKSRLPDNIALFSLKLQETDTSFAEWYASDN

SEQ ID NO: 22163 - protein, 135 aa, Maribacter cobaltidurans
  misc_feature (1)..(135): tr|A0A223V7Q7|A0A223V7Q7_9FLAO 6-carboxy-5,6,7,8-tetrah ydropterin synthase OS=Maribacter cobaltidurans OX=1178 778 GN=CJ263_14445 PE=3 SV=1
MKVKVSRKAHFNAAHRLYRPDWKDSKNSEVFGKCNNPNFHGHNYELVVSVTGEIDPETGFVMDMKVLKDLIKDKIEDVFDHKNLNIEVPEFQDLNPTAENIAVVIWNRLRPSIDKDKELEVVLYETPRNFVTYSG

SEQ ID NO: 22164 - protein, 149 aa, Maribacter dokdonensis
  misc_feature (1)..(149): tr|A0A1H4KNK7|A0A1H4KNK7_9FLAO 6-carboxy-5,6,7,8-tetrah ydropterin synthase OS=Maribacter dokdonensis OX=320912 GN=SAMN05192540_1017 PE=3 SV=1
MSKIRITKQFNFETGHALYGYDGKCRNVHGHSYKLSVTVIGSPITDTNHVKLGMVIDFGDLKKIVKEDIVDIFDHATVFNKNTPHVELAKELTDRGHNVILADYQPTSENMVIDFAAKIKSRLPENISLFSLKLQETDTSFAEWYASDN

SEQ ID NO: 22165 - protein, 136 aa, Maribacter dokdonensis
  misc_feature (1)..(136): tr|A0A1H4J7K8|A0A1H4J7K8_9FLAO 6-carboxy-5,6,7,8-tetrah ydropterin synthase OS=Maribacter dokdonensis OX=320912 GN=SAMN05192540_0170 PE=3 SV=1
MMKVKVSRKAHFNAAHRLYRKDWDDNKNTEIFGKCNNPNFHGHNYEMVVSVTGEIDPETGFVMDMKVLKDLIKVEIEDYLDHKNLNVEVQEFKSLNPTAENIAVVIWKRLRSHIQKSHELEVVLYETPRNYVTFSG

SEQ ID NO: 22166 - protein, 135 aa, Maribacter flavus
  misc_feature (1)..(135): tr|A0A5B2TPG0|A0A5B2TPG0_9FLAO 6-carboxy-5,6,7,8-tetrah ydropterin synthase OS=Maribacter flavus OX=1658664 GN= F0361_10345 PE=3 SV=1
MKVKVSRKAHFNAAHRLYRPDWEDSKNWEVFGKCNNPSFHGHNYELIVSVTGEIDPETGFVMDMKELKDLIKEKIEDAFDHKNLNVEVPEFRELNPTAENIAVVIWNRLRPSIQDNKELEVVLYETPRNFVTYTG

SEQ ID NO: 22167 - protein, 149 aa, Maribacter flavus
  misc_feature (1)..(149): tr|A0A5B2TZZ7|A0A5B2TZZ7_9FLAO 6-carboxy-5,6,7,8-tetrah ydropterin synthase OS=Maribacter flavus OX=1658664 GN= F0361_07270 PE=3 SV=1
MGTIRITKQFNFETGHALYGYDGKCRNVHGHSYKLSVTVIGKPITDTSHVKLGMVIDFGDLKKIVKEEIVDKFDHATVFNKNTPHVDLAKELTERGHNVILADYQPTSENMVIDFAKKIKARLPKNIELFSLKLQETETSFAEWYASDN

SEQ ID NO: 22168 - protein, 149 aa, Maribacter orientalis
  misc_feature (1)..(149): tr|A0A1H7LHJ3|A0A1H7LHJ3_9FLAO 6-carboxy-5,6,7,8-tetrah ydropterin synthase OS=Maribacter orientalis OX=228957 GN=SAMN04488008_102568 PE=3 SV=1
MSNIRITKQFNFETGHALYGYDGKCRNVHGHSYKLSVTVIGKPITDTSHVKLGMVIDFGDLKKIVKEDIVDIFDHATVFNKNTPHVELAKELTDRGHNVILAAYQPTSENMVIDFAAKIKARLPKDISLFSLKLQETDSSFAEWYASDN

SEQ ID NO: 22169 - protein, 135 aa, Maribacter orientalis
  misc_feature (1)..(135): tr|A0A1H7V8J3|A0A1H7V8J3_9FLAO 6-carboxy-5,6,7,8-tetrah ydropterin synthase OS=Maribacter orientalis OX=228957 GN=SAMN04488008_108137 PE=3 SV=1
MKVKVSRKAHFNAAHRLYRKEWDDAKNTEIFGKCNNPNFHGHNYELIVSVTGEIDSDTGFVMDMKVLKDLIKQEIEDYLDHKNLNIEVEEFKNLNPTAENIAVVIWRKLRPHISSSNDLEIVLYETPRNFVTFSG

SEQ ID NO: 22170 - protein, 149 aa, Maribacter polysiphoniae
  misc_feature (1)..(149): tr|A0A316E699|A0A316E699_9FLAO 6-carboxy-5,6,7,8-tetrah ydropterin synthase OS=Maribacter polysiphoniae OX=4293 44 GN=LX92_00338 PE=3 SV=1
MSNIRITKQFTFESGHALYGYDGKCRNVHGHSYKLSVTVIGTPITDTSHVKLGMVIDFGDLKKIVKEEIVDPFDHATIFNKNTPHLELAKELMRRDHNVILADYQPTSENMVIDFAEKIKARLPESIKLHSLKLQETESSFAEWYASDN

SEQ ID NO: 22171 - protein, 136 aa, Maribacter polysiphoniae
  misc_feature (1)..(136): tr|A0A316E1P6|A0A316E1P6_9FLAO 6-carboxy-5,6,7,8-tetrah ydropterin synthase OS=Maribacter polysiphoniae OX=4293 44 GN=LX92_01502 PE=3 SV=1
MKVKVSRKAHFNAAHRLYRPGWDDAKNSAVFGKCNNPNYHGHNYDLVVSVYGEIDKETGFVMDMKRLKALIKDKIEDVLDHKNLNVEVPEFKNLNPTAENIAVFIWNKLRPHIDASKELEVVLYETPRNFVTYSGE

SEQ ID NO: 22172 - protein, 135 aa, Maribacter sp.
  misc_feature (1)..(135): tr|A4AW96|A4AW96_MARSH 6-carboxy-5,6,7,8-tetrahydropter in synthase OS=Maribacter sp. (strain HTCC2170 / KCCM 4 2371) OX=313603 GN=FB2170_16111 PE=3 SV=1
MKVKVSRKAHFNAAHRLYRKDWDNSRNNEVFGICNNPNYHGHNYDLVVSVTGEIDKETGFVMDMKVLKTLIKEKIEDSLDHKNLNVEVPEFENLNPTAENIAVVIWNKLRPYIDDSKELEVVLYETPRNFVTFSG

SEQ ID NO: 22173 - protein, 149 aa, Maribacter sp.; identical to SEQ ID NO: 22164
  misc_feature (1)..(149): tr|A0A3C0G2H0|A0A3C0G2H0_9FLAO 6-carboxy-5,6,7,8-tetrah ydropterin synthase OS=Maribacter sp. OX=1897614 GN=DCG 42_04620 PE=3 SV=1

SEQ ID NO: 22174 - protein, 135 aa, Maribacter spongiicola
  misc_feature (1)..(135): tr|A0A4V3EPH2|A0A4V3EPH2_9FLAO 6-carboxy-5,6,7,8-tetrah ydropterin synthase OS=Maribacter spongiicola OX=120675 3 GN=CLV90_3740 PE=3 SV=1
MKVKVSRKAHFNAAHRLYRKDWDDSKNTEIFGKCNNPNFHGHNYELVVSVTGEIDPVTGFVMDMKVLKDLIKVEIEDYLDHKNLNIEVEEFKTLNPTAENISVIIWQKLRPHIQKSHDLEVVLYETPRNFVTFSG

SEQ ID NO: 22175 - protein, 136 aa, Maribacter spongiicola
  misc_feature (1)..(136): tr|A0A4R7K221|A0A4R7K221_9FLAO 6-pyruvoyltetrahydropter in/6-carboxytetrahydropterin synthase OS=Maribacter spo ngiicola OX=1206753 GN=CLV90_1989 PE=4 SV=1
MNKLAIVRCEHFNAAHRLHNANWSDEKNKEIFGKCNNPNFHGHNYELEVKVIGYCNADTGYVIDTKILSDLIEEKILKRFDHKNLNLDTEEFKTLNPTVENIAIVIYDILKIEIEPNLELKIKLYETPRNYVEYPY

SEQ ID NO: 22176 - protein, 135 aa, Maribacter stanieri
  misc_feature (1)..(135): tr|A0A1I6KGS2|A0A1I6KGS2_9FLAO 6-carboxy-5,6,7,8-tetrah ydropterin synthase OS=Maribacter stanieri OX=440514 GN =SAMN04488010_3654 PE=3 SV=1
MKVKVSRKAHFNAAHRLYRKDWDDSKNTEIFGKCNNPNFHGHNYELIVSVTGEIDPETGFVMDMKVLKDLIKVEIEDYLDHKNLNIEVEEFKSLNPTAENIAVIIWKRLRQHITKSHDLEVVLYETPRNFVTFSG

SEQ ID NO: 22177 - protein, 149 aa, Maribacter stanieri
  misc_feature (1)..(149): tr|A0A1I6HQA3|A0A1I6HQA3_9FLAO 6-carboxy-5,6,7,8-tetrah ydropterin synthase OS=Maribacter stanieri OX=440514 GN =SAMN04488010_0601 PE=3 SV=1
MSNIRITKQFNFETGHALYGYDGKCRNVHGHSYKLSVTVIGRPITDTSHVKLGMVIDFGDLKKIVKEDIVDIFDHATVFNKNTPHVELAKELTDRGHNVILADYQPTSENMVIDFAAKIQSRLPKNISLFSLKLQETDTSFAEWYASDN

SEQ ID NO: 22178 - protein, 135 aa, Maribacter ulvicola
  misc_feature (1)..(135): tr|A0A1N6XR20|A0A1N6XR20_9FLAO 6-carboxy-5,6,7,8-tetrah ydropterin synthase OS=Maribacter ulvicola OX=228959 GN =SAMN05421797_105220 PE=3 SV=1
MKVKVSRKAHFNAAHRLYRKDWDETKNTEIFGKCNNPNFHGHNYELIVSVTGEIDVETGFVMDMKVLKHLIKVEIEDYLDHKNLNVEVEEFKKLNPTAENIAVIIWKKLRPHILESHNLEVILYETPRNFVTFSG

SEQ ID NO: 22179 - protein, 149 aa, Maribacter ulvicola
  misc_feature (1)..(149): tr|A0A1N6P766|A0A1N6P766_9FLAO 6-pyruvoyltetrahydropter in/6-carboxytetrahydropterin synthase OS=Maribacter ulv icola OX=228959 GN=SAMN05421797_101307 PE=4 SV=1
MGNIRITKQFNFETGHALYGYDGKCRNVHGHSYKLSVTVIGRPITDTNHVKLGMVIDFGDLKKIVKEDIVDVFDHATVFNKNTPHVELAKELIDRGHNVILADYQPTSENMVIDFAAKIKSRLPENISLFALKLQETDTSFAEWYASDN

SEQ ID NO: 22180 - protein, 135 aa, Maribacter vaceletii
  misc_feature (1)..(135): tr|A0A495DS69|A0A495DS69_9FLAO 6-carboxy-5,6,7,8-tetrah ydropterin synthase OS=Maribacter vaceletii OX=1206816 GN=CLV91_3388 PE=3 SV=1
MKVKVSRKAHFNAAHRLYRKDWDNAKNAEVFGKCNNPNFHGHNYELVVSVYGEIDPETGFVMDMKVLKSLIKLHIEEALDHKNLNIEIPAFKEVNPTAENIAVFIWKTLRPFIDKDKDLEVVLYETPRNYVTFCG

SEQ ID NO: 22181 - protein, 149 aa, Maribacter vaceletii
  misc_feature (1)..(149): tr|A0A495EDB9|A0A495EDB9_9FLAO 6-carboxy-5,6,7,8-tetrah ydropterin synthase OS=Maribacter vaceletii OX=1206816 GN=CLV91_0981 PE=3 SV=1
MSNIRITKQFNFETGHALFGYDGKCRNVHGHSYKLSVTVIGTPITDKSHVKLGMVIDFGDLKKIVKEEIVDQFDHATVFNKNTPHVELAKELTDRGHNVILADYQPTSENMVIDFSAKIKARLPKNIQLHSLKLQETDTSFAEWYASDN

SEQ ID NO: 22182 - protein, 131 aa, Maribius pelagius
  misc_feature (1)..(131): tr|A0A1H8DEN7|A0A1H8DEN7_9RHOB 6-pyruvoyl-tetrahydropte rin synthase OS=Maribius pelagius OX=387096 GN=SAMN0448 8011_102310 PE=4 SV=1
MFAVEVRDHIMIGHSLPSPVFGPAQGMHGATFTVDAAFFTEDIDEHGLVVDIGLATEGLSKVLEPLRYQNLDEVPEFKGKFTTTEFLCRHIFDGMAEFVKQGHLKDGGRLRKLRILLHESHVARAWYEGEV

SEQ ID NO: 22183 - protein, 131 aa, Maribius salinus; identical to SEQ ID NO: 22182
  misc_feature (1)..(131): tr|A0A1M6LXH9|A0A1M6LXH9_9RHOB 6-pyruvoyl-tetrahydropte rin synthase OS=Maribius salinus OX=313368 GN=SAMN04488 012_11821 PE=4 SV=1

SEQ ID NO: 22184 - protein, 169 aa, Maricaulis maris
  misc_feature (1)..(169): tr|A0A495DM99|A0A495DM99_9RHOB 6-pyruvoyltetrahydropter in/6-carboxytetrahydropterin synthase OS=Maricaulis mar is OX=74318 GN=C7435_0798 PE=4 SV=1
MAHLSTKSYGNERGLSCCSRQWAADSHCALLHGYSFGFHFVFAAEQLDKRGWVLDFGRGGFGPIKDWLHEMFDHTLLVAEDDPERPVLEALGERGLARVRIVQGTSCERMAELAFHKASEIVRAATGGRCWVESVECSEHASNSAIYRSSAAMAQLAEAERLQAELSGD

SEQ ID NO: 22185 - protein, 185 aa, Maricaulis maris
  misc_feature (1)..(185): tr|Q0APJ6|Q0APJ6_MARMM Uncharacterized protein OS=Maric aulis maris (strain MCS10) OX=394221 GN=Mmar10_1499 PE= 4 SV=1
MSQAIGAHRLRNGSSGMAHLSTKSYGNERGLTCCSRQWAADSHCALLHGYSFGFNFVFAAEQLDKRGWVLDFGKGGFGPIKDWLHEMFDHTLLIAEDDPERPVLEALGERGLARVKVVPGTSCERMAEMAFHKASQVVKAATGGRCWVESVECSEHASNSAIYRSATAMTRLVDVERMQDALTQD

SEQ ID NO: 22186 - protein, 174 aa, Maricaulis salignorans
  misc_feature (1)..(174): tr|A0A1G9P864|A0A1G9P864_9RHOB 6-pyruvoyltetrahydropter in/6-carboxytetrahydropterin synthase OS=Maricaulis sal ignorans OX=144026 GN=SAMN04488568_103142 PE=4 SV=1
MAHLSTKTYGNDRGLSCCSRQWAADSDCHLLHGYSFGFHFVFAAEQLDARGWVLDFGRGGFGLIRNWLHEMFDHTLLVARDDPERPALEALGTSGIARVRVVEGTSCERMAELTFRRADAIVRDATQGRCWVESVECSEHGANSAIYRSQPAIERLAESDRLRRALESNSGDAD

SEQ ID NO: 22187 - protein, 145 aa, Maricaulis sp.
  misc_feature (1)..(145): tr|A0A2D8BSQ9|A0A2D8BSQ9_9RHOB 6-carboxy-5,6,7,8-tetrah ydropterin synthase OS=Maricaulis sp. OX=1486257 GN=CMF 74_06165 PE=4 SV=1
MPQITCTRLIAWDALHRIPGHEGICRAFHGHRYSAEITCAADALDTAGRVVDFSVIKTKVGGWIDTNWDHTAILMRGDPDPAVKAVCESNASYGRPVYLMDVPPTAENIAAEIFRIATGLLTEDGVTVQRVRVWETPNCHAEVTA

SEQ ID NO: 22188 - protein, 167 aa, Maricaulis sp.
  misc_feature (1)..(167): tr|A0A2D7Y5I2|A0A2D7Y5I2_9RHOB 6-pyruvoyl tetrahydrobio pterin synthase OS=Maricaulis sp. OX=1486257 GN=CMF75_0 8165 PE=4 SV=1
MAHLSTKSYGNERGLSCCSRQWAADSHCNLLHGYSFGFHFVFAAEQLDKRGWVLDFGKGGFGLIKAWLHEMFDHTLLVAENDPERPTLEALGARGLADVRIVPGTSCEHMAELAFHKAEEIVRQATKGRCWVESVECSEHGSNSAIYRSSAALARSAECDRLRAELD

SEQ ID NO: 22189 - protein, 365 aa, Marichromatium gracile
  misc_feature (1)..(365): tr|A0A4R4AGT6|A0A4R4AGT6_MARGR 6-pyruvoyltetrahydropter in/6-carboxytetrahydropterin synthase OS=Marichromatium gracile OX=1048 GN=EDC29_102372 PE=4 SV=1
MTERLLHVAAAPFEAARHVSVLPAEHRCRALHGHSFLARVRTELAPGWAPFAGAETDALRERLAEAVAPLDYADLNTRLRVPTDENLARWVRDHLALDGVESVGIHSTRDQGVDLDADGHCHLWRRFRFESAHQLPNVPEGHQCGRMHGHGFEVILHADQTLAEDQDMGVDYDCIDALWAPLGATLDHACLNDIPGLENPTSEMLAAWIWARLKPEFAPLSWVSVYETATAGCQFDGSSYRIWKEQRFESALSLSAAPEGDARRRLHGHSYLLRLHLCAPLDRVMGWTVDYGDVKRLFKPVYARLDHHRLDTLPGIDQAAPGALARWIRAEVGDALPALDRIDLHQTPGCGAVLSWGPQGPALPV

SEQ ID NO: 22190 - protein, 164 aa, Marichromatium gracile
  misc_feature (1)..(164): tr|A0A4R4A9M5|A0A4R4A9M5_MARGR 6-pyruvoyltetrahydropter in/6-carboxytetrahydropterin synthase OS=Marichromatium gracile OX=1048 GN=EDC29_10688 PE=4 SV=1
MAKHPLTRIEISKEYLNFSAGHFTIFSSVARENLHGHNFRVRCAVTAGIGADGMTFDYVVLKRVLRELCDALDERMLLPELSPYLRIERGEGMVFACFDRERIPFLERDVLLLPLRNVTIEELAELLLARLRDRPELIGADVRGIELGVSSGLGQWAYSTWESE

SEQ ID NO: 22191 - protein, 164 aa, Marichromatium purpuratum
  misc_feature (1)..(164): tr|W0E4A8|W0E4A8_MARPU 6-pyruvoyl tetrahydropterin synt hase OS=Marichromatium purpuratum 984 OX=765910 GN=MARP U_11395 PE=4 SV=1
MAKHPLTRIEISKEYLNFSAGHFTIFSSVARENLHGHNFRVRCAVTAGIGADGMTFDYVVLKRVLRELCDALDERMLLPELSPYLRIERGDGMVFACFDRERIPFLERDVLLLPLRNVTIEELAELLLARLRDRPELIGADVRGIELGVSSGLGQWAYSTWESE

SEQ ID NO: 22192 - protein, 204 aa, Marichromatium purpuratum
  misc_feature (1)..(204): tr|W0E351|W0E351_MARPU 6-carboxy-5,6,7,8-tetrahydropter in synthase OS=Marichromatium purpuratum 984 OX=765910 GN=MARPU_08795 PE=4 SV=1
MLIRKLFKFENAHVVRGCSTRRCSHSIHGHSYKVELLLEAHAFDNGQMIYDFGLLKSHVRDLIDAFDHSIALWSGDDPEYLDAMRKHSERWVLIPVSPSAEQFSRLFFRLVDTALSLTDMANGETDVRLHSVIVHETETGYAQCFRADANNPRMGRIDLPAIEFAPAITEQWPDPDLFERIKRGERQVNPLSPCDQVSGPDERS

SEQ ID NO: 22193 - protein, 136 aa, Unknown
  misc_feature (1)..(136): tr|A0A1Q3GN82|A0A1Q3GN82_9BACT 6-pyruvoyl tetrahydrobio pterin synthase OS=marine bacterium AO1-C OX=1905359 GN =BKI52_31960 PE=4 SV=1
MKAKIARKEHFNAAYRLHNPEWSEAKNLEIFGPYNNPNYHGCNFDLEVQVIGEIDPTTGYVMRTEDLATLVKTYVLNKFDHKNLNLDLKEFERLNPTIENIAMVIWQILRERLDSKFDLKIRLYETERNFVEFPAA

SEQ ID NO: 22194 - protein, 158 aa, Unknown
  misc_feature (1)..(158): tr|A0A1Q3GMV5|A0A1Q3GMV5_9BACT 6-carboxytetrahydropteri n synthase QueD OS=marine bacterium AO1-C OX=1905359 GN =BKI52_31140 PE=4 SV=1
MVYICRRETFNASHKLYNPNWSKEQNEAMFGVCANENWHGHNFELVVTVKGIPDLESGMVIDYKVLSKIIRKEIIEKVHYKNLNLDVDFLQNKMPSCEILIIEFWKKLAPAIRAVSPKSELHHLKLIETKNNFVEYMGEGLEHYQDLTLKNQAINDAV

SEQ ID NO: 22195 - protein, 118 aa, Unknown
  misc_feature (1)..(118): tr|B7RXW8|B7RXW8_9GAMM 6-carboxy-5,6,7,8-tetrahydropter in synthase OS=marine gamma proteobacterium HTCC2148 OX =247634 GN=queD PE=3 SV=1
MEIYKEFHFEAAHRLPNVPAGHKCARLHGHSFQVRLSVRGDALEPSGWVMDFGEIKSAFKPIYEQLDHYYLNDISGLENPTSENIARWIWQHLKPALPALSRVEIRETCTSGCIYEGD

SEQ ID NO: 22196 - protein, 118 aa, Unknown
  misc_feature (1)..(118): tr|A0YB41|A0YB41_9GAMM 6-carboxy-5,6,7,8-tetrahydropter in synthase OS=marine gamma proteobacterium HTCC2143 OX =247633 GN=GP2143_04955 PE=3 SV=1
MEIYKEFTFEAAHLLPNVPDGHKCGRLHGHSFMARIYVSGDVDPRTGWIIDFSELKAHFAPIYQQLDHYYLNDIEGLENPTSENLARWIWNRLKADLPILSKVEIRETCTSGCIYQGD

SEQ ID NO: 22197 - protein, 274 aa, Mariniblastus fucicola
  misc_feature (1)..(274): tr|A0A5B9PFX9|A0A5B9PFX9_9PLAN 6-pyruvoyl tetrahydropte rin synthase OS=Mariniblastus fucicola OX=980251 GN=MFF C18_40210 PE=4 SV=1
MVRLSREIRFALVSPEELDQQTSDRDQKNSWAAWPNTCRIAPQLRLRAVVEGEPDEMTGYLCNVKLIDEALRRFVNQQLIPSLADCLLSQLPNAESVLQQALQFLENQSLDGATLISVSLSLSPFLSFNIDSGAPDMIQLTHQFEFSAAHRLHCDSMSAEENVATFGKCNNPAGHGHNYVVEVSVSRDVSKSGGGPTVVGAVELAGIVNRNVIDVLDHKHLNEDIAYFSDVNPSVENISAAIFGWLKSDIESAGCQLAEVKVFETPKTWASFRG

SEQ ID NO: 22198 - protein, 165 aa, Mariniblastus fucicola
  misc_feature (1)..(165): tr|A0A5B9PDB2|A0A5B9PDB2_9PLAN 6-carboxy-5,6,7,8-tetrah ydropterin synthase OS=Mariniblastus fucicola OX=980251 GN=queD_1 PE=4 SV=1
MSITVMRQVRFCAGHRLLNHEGKCANLHGHNYIVEFHVTGNDVDELGRVVDFAVINKLFKGWIDENWDHGFILWDQDDNAINALEQVTPNRIYQLPYNPTAENMARYLMREIGPRLIETIKGYDLKLSKVVVWETEKSSATVTCDVSRESADARLQFTNATRSFN

SEQ ID NO: 22199 - protein, 124 aa, Marinicauda algicola
  misc_feature (1)..(124): tr|A0A4V6RF42|A0A4V6RF42_9RHOB 6-carboxy-5,6,7,8-tetrah ydropterin synthase OS=Marinicauda algicola OX=2029849 GN=E5163_10930 PE=3 SV=1
MSKLSLEISKDFAFDAAHYFEHKEKDHPFSRLHGHSFQGTVTLAGTPAQDSGMVKDFWEIDAELKKITAQLDHRLLNEVEGLEHPSLEDIAMWVFEKLDPVLPGLVSVEIRRPSWGEKAVVKRG

SEQ ID NO: 22200 - protein, 124 aa, Marinicauda pacifica
  misc_feature (1)..(124): tr|A0A4V3RZE4|A0A4V3RZE4_9RHOB 6-carboxy-5,6,7,8-tetrah ydropterin synthase OS=Marinicauda pacifica OX=1133559 GN=E5162_01380 PE=3 SV=1
MSNLRLEISKDFAFDAAHYFEHKEKDHPFSRLHGHSFQGTVTLSGSPAEDSGMVKDFWEIDSEIKALRDRLDHRLLNEVEGLEHPSLEAVALWVFERLDAVLPGLVSVEIRRPSCGEKAVIRRG

SEQ ID NO: 22201 - protein, 124 aa, Marinicauda sp.
  misc_feature (1)..(124): tr|A0A2U2BRP0|A0A2U2BRP0_9RHOB 6-carboxy-5,6,7,8-tetrah ydropterin synthase OS=Marinicauda sp. WD6-1 OX=2135793 GN=DDZ18_10745 PE=3 SV=1
MSDLRLEISKDFAFDAAHYFQFKDGDHPFSRMHGHSFAGTVTLSGEPAAESGMVKDFWEIDAEIAKLRDQLDHRLLNEVEGLEHPSLEALARWVFERLDPVLPGLIAVEIRRPSCGEKAVVRRG

SEQ ID NO: 22202 - protein, 118 aa, Marinicaulis flavus
  misc_feature (1)..(118): tr|A0A2S7K9Y9|A0A2S7K9Y9_9PROT 6-carboxy-5,6,7,8-tetrah ydropterin synthase OS=Marinicaulis flavus OX=2058213 G N=queD PE=3 SV=1
MRIVKSMSFDAAHFLDHDPEARPYARLHGHSFKMEVVIDGEPQEETGWVVDFGDVAEALQDLHDALDHRLLNEVEGLERPTLENICQWAAKKLKARFPGLAEVRVSRPSNGETCIYTV

SEQ ID NO: 22203 - protein, 117 aa, Marinicella litoralis
  misc_feature (1)..(117): tr|A0A4R6XM97|A0A4R6XM97_9GAMM 6-carboxy-5,6,7,8-tetrah ydropterin synthase OS=Marinicella litoralis OX=644220 GN=C8D91_2333 PE=3 SV=1
MDIYKEFYLESAHWLPHVPDGHKCGNLHGHSFKVILTVSGEPDSKMGWIVDFADIKSVFQPLYDQLDHACLNHIEGLDNPTSENLAIWIWQKLKPELNQLSQIEVCETCTSGCIYRG

SEQ ID NO: 22204 - protein, 149 aa, Marinifilaceae bacterium
  misc_feature (1)..(149): tr|A0A434AWW5|A0A434AWW5_9BACT 6-carboxy-5,6,7,8-tetrah ydropterin synthase OS=Marinifilaceae bacterium T3-2 S1 -C OX=2487017 GN=DLK05_06735 PE=3 SV=1
MTKVRLTKEFHFEMAHALWNYDGLCKNIHGHSYILFVTVIGEPNKDIKNPKFGMVMDFGDLKRIVNQEIVDQLDHALVLSEATPNLERLNIPQMFERFFITPYQPTCENMIADFAERIISKLPNEVNLHSLKLHETATSFAEWYASDNL

SEQ ID NO: 22205 - protein, 149 aa, Marinifilum breve
  misc_feature (1)..(149): tr|A0A2V3ZVE5|A0A2V3ZVE5_9BACT 6-carboxy-5,6,7,8-tetrah ydropterin synthase OS=Marinifilum breve OX=2184082 GN= DF185_18430 PE=3 SV=1
MAKIRLTKEFHFEMAHALWNYDGLCKNIHGHSYILFVTVIGEPITDKSNPKLGMVMDFGDLKGIVAEEIVDQLDHALVLSKDTPDIDQLNIPQMFDRFFVMDYQPTCENMIADFAERIKNRLPQGVELHSLKLHETATSFAEWYASDNE

SEQ ID NO: 22206 - protein, 149 aa, Marinifilum flexuosum
  misc_feature (1)..(149): tr|A0A419X5W6|A0A419X5W6_9BACT 6-carboxy-5,6,7,8-tetrah ydropterin synthase OS=Marinifilum flexuosum OX=1117708 GN=BXY64_0101 PE=3 SV=1
MTKIRLTKEFRFEMAHALWNYDGLCKNIHGHSYILFVTVIGEPITDKTNPKLGMVMDFGELKGIVSEEVVDQLDHALVLSKDTPNIDQLNIPQMFDRFFVMDYQPTCENMIADFAERIKARLPKGVELHSLKLHETATSFAEWYASDNQ

SEQ ID NO: 22207 - protein, 128 aa, Marinifilum sp.
  misc_feature (1)..(128): tr|A0A4T2ADK0|A0A4T2ADK0_9BACT 6-carboxy-5,6,7,8-tetrah ydropterin synthase OS=Marinifilum sp. JC120 OX=2302941 GN=queD PE=3 SV=1
MSKGKWKLKVKKDFSAAHQLRNYGGKCENMHGHNFGVEVEIEGDRLDPKVEILMDFKELKKELSELLDTLDHKHLNSTEYFEHRNPSSENIARYIYQEMKKRVESEHIKMVYASVSEKESSVASYSEE

SEQ ID NO: 22208 - protein, 136 aa, Mariniflexile fucanivorans
  misc_feature (1)..(136): tr|A0A4R1RE28|A0A4R1RE28_9FLAO 6-carboxy-5,6,7,8-tetrah ydropterin synthase OS=Mariniflexile fucanivorans OX=26 4023 GN=EV196_1085 PE=3 SV=1
MKVKVSRKAHFNAAHRLYRKDWTHEKNDEIFGKCNNPNFHGHNYELIVSVTGEIDKETGYVIDMKVLKDIIKDEVEDAFDHKNLNLEVSEFKNLNPTAENIVVVIYNKIRPKLDSKLDLEITLFETPRNFVSYTGA

SEQ ID NO: 22209 - protein, 150 aa, Mariniflexile fucanivorans
  misc_feature (1)..(150): tr|A0A4R1RHT8|A0A4R1RHT8_9FLAO 6-pyruvoyltetrahydropter in/6-carboxytetrahydropterin synthase OS=Mariniflexile fucanivorans OX=264023 GN=EV196_105320 PE=4 SV=1
MSFIRITKQFSFETGHALYGYDGKCKNVHGHSYKLSVTVIGKPISDIKNVKYGMVIDFGDLKKIVKEDIVNVFDHATVFNKNTPHVELAKELENRGHNVLLVDYQPTSEMMVIDFAKKIKRRLPENIELHSLKLQETDSSFAEWYAYDNI

SEQ ID NO: 22210 - protein, 150 aa, Mariniflexile sp.
  misc_feature (1)..(150): tr|A0A385BNP5|A0A385BNP5_9FLAO 6-pyruvoyl tetrahydropte rin synthase OS=Mariniflexile sp. TRM1-10 OX=2027857 GN =CJ739_1634 PE=4 SV=1
MSFIRITKQFSFETGHALYGYDGKCKNVHGHSYKLSVTVIGKPISDTKNVKYGMVIDFGDLKKIVKEEIVNVFDHATVFNKNTPHVELAKELEDRGHNVLLVDYQPTSEMMVIDFAKKIKRRLPENIDLHSLKLQETDSSFAEWFAYDNI

SEQ ID NO: 22211 - protein, 136 aa, Mariniflexile sp.
  misc_feature (1)..(136): tr|A0A385BRL4|A0A385BRL4_9FLAO 6-carboxy-5,6,7,8-tetrah ydropterin synthase OS=Mariniflexile sp. TRM1-10 OX=202 7857 GN=CJ739_2715 PE=3 SV=1
MKVTVSRKAHFNAAHRLYRKDWTHEKNDEVFGKCNNPNFHGHNYELIVSVTGEIDKETGYVIDMKVLKDIIKDEVEDAFDHKNLNIEVPEFKDLNPTAENIAVVIYNKMKPKIDSKLSLEITLFETPRNFVTYSGT

SEQ ID NO: 22212 - protein, 149 aa, Marinilabilia salmonicolor
  misc_feature (1)..(149): tr|A0A2T0XSI1|A0A2T0XSI1_9BACT 6-pyruvoyltetrahydropter in/6-carboxytetrahydropterin synthase OS=Marinilabilia salmonicolor OX=989 GN=BY457_102308 PE=4 SV=1
MSKIRLTKEFRFEMAHALWNYDGLCKNIHGHSYIFQVTVIGEPEPDENSPKYGMVMDFGDLKKIVKEEVVDPMDHSIVISDRAPVEKLLQVPQMADRYHVVSYQPTCENLLVDYAQRIRARLPENVSLFSLKLHETANSFAEWFASDND

SEQ ID NO: 22213 - protein, 149 aa, Marinilabilia sp.
  misc_feature (1)..(149): tr|A0A2U2B9G7|A0A2U2B9G7_9BACT 6-carboxy-5,6,7,8-tetrah ydropterin synthase OS=Marinilabilia sp. WTE OX=2162893 GN=DDZ16_09770 PE=3 SV=1
MAKIRLTKEFRFEMAHALWNYDGLCKNIHGHSYILQVTVIGEPCSDENNPKYGMVMDFGDLKKIVKEEVVEPMDHSIVVSEKADAEKLLGVPQMTERYHITPYQPTCENLLVDFSERISSKLPEGISLFSLKLHETGNSFAEWYASDNA

SEQ ID NO: 22214 - protein, 144 aa, Marinilabiliaceae bacterium
  misc_feature (1)..(144): tr|A0A4Q8RPV5|A0A4Q8RPV5_9BACT 6-carboxytetrahydropteri n synthase OS=Marinilabiliaceae bacterium JC017 OX=2234 116 GN=DMA11_17820 PE=4 SV=1
MTKEFRFEMAHALWNYDGLCKNIHGHSYILAVTIIGEPVADENNPKLGMVMDFGVLKKIVNEEIVGRLDHTLVVSSKAPAEQLKSIPQMVERYEIVDYQPTCENLLIDFASRLKNRLPEEVALHSLKLNETSNSYAQWYAADNK

SEQ ID NO: 22215 - protein, 149 aa, Marinilabiliaceae bacterium
  misc_feature (1)..(149): tr|A0A353TX49|A0A353TX49_9BACT 6-carboxy-5,6,7,8-tetrah ydropterin synthase OS=Marinilabiliaceae bacterium OX=2 053574 GN=DDW62_02170 PE=3 SV=1
MAKIRLTKEFRFESAHALYNYDGLCRNIHGHSYILQVTVIGEPETDINNPKLGMVMDFGELKDIVNREIVKDLDHAVVVSNKVSKDTLLQLGQMSERSFIMDYQPTCENMLIDFADRLQKVLPPKVKLHSLKLNETANSFAEWYAEDNI

SEQ ID NO: 22216 - protein, 148 aa, Marinilabiliales bacterium
  misc_feature (1)..(148): tr|A0A2N5YZH0|A0A2N5YZH0_9BACT 6-carboxy-5,6,7,8-tetrah ydropterin synthase OS=Marinilabiliales bacterium OX=20 53303 GN=queD PE=3 SV=1
MSKIRVTKMFEFEMAHALHNYDGLCRNIHGHTYKLSVTVIGEPEPNPDSTKLGMVMDFGNLKRIVKQNIVDKFDHSVLLSHKEDTKYFEEENKLLKRIHIVNFQPTAENMVIHFADIIKPLLPENIKLHSIKLHETTNSFAEWYASDQ

SEQ ID NO: 22217 - protein, 137 aa, Marinilabiliales bacterium
  misc_feature (1)..(137): tr|A0A351HHE5|A0A351HHE5_9BACT 6-pyruvoyl tetrahydrobio pterin synthase OS=Marinilabiliales bacterium OX=205330 3 GN=DCY97_03435 PE=4 SV=1
MVYLTRRERFNSAHRLFNPKLTDEENNELYGKCANPNWHGHNYDLFVTVKGEVDPETGVVINLKDLSQIIKTKVIDKLDHRNLNVEVDFLQNTIVSTENIIVAIWKELQVELDKTPARLSKIKLVETENNFAEYYGD

SEQ ID NO: 22218 - protein, 135 aa, Marinimicrobia bacterium
  misc_feature (1)..(135): tr|A0A101IAQ8|A0A101IAQ8_9BACT 6-carboxy-5,6,7,8-tetrah ydropterin synthase OS=Marinimicrobia bacterium 46_43 O X=1635280 GN=XE04_0820 PE=3 SV=1
MTQLFEISKTFHFDMTHRLSFHQGKCRHLHGHTYTLEVYVRGVPDKHGFVMDFGDLKHIVKEEIVDILDHSVAIYEKDLLLVDALSGKFRSVMLPFETTAENLCAWIARRLQARNLDISKIILWETPTSKAVLTL

SEQ ID NO: 22219 - protein, 140 aa, Marinimicrobia bacterium
  misc_feature (1)..(140): tr|A0A117LL78|A0A117LL78_9BACT 6-pyruvoyl tetrahydrobio pterin synthase OS=Marinimicrobia bacterium 46_47 OX=16 35279 GN=XD77_0644 PE=4 SV=1
MESSNPILEIYTRILFSAAHSYRDKHKSPEENRGKYGKYSRIHGHNYEVILGLRGPIDMKSGMMINFFEVEQILKEKIISILDISHLEEDIPWFREHLPTTENISLFVYHQLKRAFPPSVILVSVEVRETPDLGAKISNE

SEQ ID NO: 22220 - protein, 280 aa, Marinimicrobium koreense
  misc_feature (1)..(280): tr|A0A3N1NYW7|A0A3N1NYW7_9GAMM 6-pyruvoyl tetrahydropte rin synthase-like protein OS=Marinimicrobium koreense O X=306545 GN=EDC38_0184 PE=4 SV=1
MLLFVDNLATVDFSFLDARRGLLGETWLADVQLEGALDEQGMVCDFSTVKKTLKAWLDNELDHRLLVPRHSHQLELEDEGDVLSLRWHFGDRSETIDLRCPKEAVALVDAEELTRESVAEWCIQRLNEEQLFPEGTRLHLSFSTEYIESVFYHYSHGLKKHDGNCQRIAHGHRSKIAIWADDIPSPALEGEWASRFRDIYLATREDLVAEEGDYFRFAYTAPQGDFEITLPQRCCYLMDTDTTVELIADHIAKTTKSEYPTSTIRVQAYEGMNKGAIAEA

SEQ ID NO: 22221 - protein, 280 aa, Marinimicrobium sp.
  misc_feature (1)..(280): tr|A0A2D8WNE8|A0A2D8WNE8_9GAMM Uncharacterized protein OS=Marinimicrobium sp. OX=2024837 GN=CMG77_12750 PE=4 S V=1
  misc_feature (89)..(89): Xaa can be any naturally occurring amino acid
  misc_feature (206)..(207): Xaa can be any naturally occurring amino acid
MLLFVDNLATVDFSFLDARRGLLGETWLADVQLEGALDEQGMVCDFSTVKKTLKAWLDNELDHRLLVPRHSHQLELEDEGDVLSLRWHXGDRSETIDLRCPKEAVALVDAEELTRESVAEWCIQRLNEEQLFPEGTRLHLSFSTEYIESVFYHYSHGLKKHDGNCQRIAHGHRSKIAIWADDIPSPALEGEWASRFRDIYLATREXXVAEEGDYFRFAYTAPQGDFEITLPQRCCYLMDTDTTVELIADHIAKTTKSEYPTSTIRVQAYEGMNKGAIAEA

SEQ ID NO: 22222 - protein, 161 aa, Marininema halotolerans
  misc_feature (1)..(161): tr|A0A1I6R7M6|A0A1I6R7M6_9BACL 6-pyruvoyl tetrahydropte rin synthase OS=Marininema halotolerans OX=1155944 GN=S AMN05444972_104228 PE=4 SV=1
MSNKRLKRNALQGRVIQKKETTFSELLVPFPMYSERVMPGSDQVIAYPLLEVNVALSKKNLSGIFVVDILLVTSLFNRSVGNQLNNKTIVKRGIDVPPTASKPILRVDFAPTIENLARYVYTKVRPAFARTLERRNIQLDYVTATTTIGKASFGRRRPSSS

SEQ ID NO: 22223 - protein, 158 aa, Marininema halotolerans
  misc_feature (1)..(158): tr|A0A1I6SMP6|A0A1I6SMP6_9BACL 6-pyruvoyltetrahydropter in/6-carboxytetrahydropterin synthase OS=Marininema hal otolerans OX=1155944 GN=SAMN05444972_107202 PE=4 SV=1
MEFKIPDQVERLGVDIKPSELRYHRKRVAVTKSFTFDAAHHLHAYEGKCKNLHGHTYQLAVTISGLTDDVGIAVDFGDIKTMYQEEIDARLDHRYLNEVLPNMNTSAENMIVWIWEQFDARLEQDGLKKKGHRLEEIVLHETPTSWATLKREWMEEDE

SEQ ID NO: 22224 - protein, 158 aa, Marininema mesophilum
  misc_feature (1)..(158): tr|A0A1H3BAX2|A0A1H3BAX2_9BACL PreQ(0) biosynthesis pro tein QueD OS=Marininema mesophilum OX=1048340 GN=SAMN05 444487_11626 PE=4 SV=1
MEFKIPDRVERLGVDIKQSELRYHRKRVAVTKSFTFDAAHHLHAYEGKCKNLHGHTYQLTVMMSGLTDEVGIAVDFGDIKQMFKEEIDARLDHRYLNEVLPNMNTSAENMIVWIWEQFDARLERDGLKARGHRLEEIVLHETPTSWATMKREWMEENE

SEQ ID NO: 22225 - protein, 150 aa, Mariniphaga anaerophila
  misc_feature (1)..(150): tr|A0A1M5CWH7|A0A1M5CWH7_9BACT 6-pyruvoyltetrahydropter in/6-carboxytetrahydropterin synthase OS=Mariniphaga an aerophila OX=1484053 GN=SAMN05444274_106296 PE=4 SV=1
MPKIRVTKRFHFEMAHALYQYDGVCRNIHGHSYKLEVTLKGEPLNRPGHPKDGMVMDFGELKNMVKENVVSRFDHVMMVNRLVPEEQVAMLKKISERIFVVDFQPTTENIATFIAEILKQQLPEEIELFSIRLYETATSFAEWFAADNAE

SEQ ID NO: 22226 - protein, 149 aa, Mariniphaga sediminis
  misc_feature (1)..(149): tr|A0A399D3U8|A0A399D3U8_9BACT 6-carboxy-5,6,7,8-tetrah ydropterin synthase OS=Mariniphaga sediminis OX=1628158 GN=queD PE=3 SV=1
MPKIRVTKRFHFEMAHTLHGYDGLCRNIHGHSYNLEITLIGEPRNQPGHPKDGMVMDFSDLKHIVKSQIVSRFDHALMVNRLVSEEQIALLQKTSERVLIVDFQPTTENIAAYIADILQQHLPEEISLFSVRLFETVTSFAEWLAEDND

SEQ ID NO: 22227 - protein, 136 aa, Mariniradius saccharolyticus
  misc_feature (1)..(136): tr|M7X7K6|M7X7K6_9BACT 6-pyruvoyl tetrahydrobiopterin s ynthase OS=Mariniradius saccharolyticus AK6 OX=1239962 GN=C943_02757 PE=4 SV=1
MKIAVYRKEHFNAAHRLHNPDWSDEQNKAVFGKCNNPNFHGHNYELIVKLLGPIDPQTGYVFDMKILSDLIKENVLDKFDHKNLNLDTDEFKKLNPTAENIAVVIWNILRKKIDNKYELTIRLYETERNFVEYDGN

SEQ ID NO: 22228 - protein, 140 aa, Mariniradius saccharolyticus
  misc_feature (1)..(140): tr|M7X8J7|M7X8J7_9BACT 6-pyruvoyl tetrahydrobiopterin s ynthase OS=Mariniradius saccharolyticus AK6 OX=1239962 GN=C943_02436 PE=4 SV=1
MVHVCRKEHFNAAHKLWNPNWSEEKNKEVFGPCSNVNWHGHNFELIVTVKGLPDPETGFVVDLKELSRLIKTLVIDKVDHKNLNMDVDFMLGKMASCENLVMEFWKILEPAVNAIVPNGHLYKLTLYETPRNFVEYFGEG

SEQ ID NO: 22229 - protein, 160 aa, Marinirhabdus gelatinilytica
  misc_feature (1)..(160): tr|A0A370QJA1|A0A370QJA1_9FLAO 6-pyruvoyltetrahydropter in/6-carboxytetrahydropterin synthase OS=Marinirhabdus gelatinilytica OX=1703343 GN=C8D94_101293 PE=4 SV=1
MSNIRITKSFSFETGHALYGYDGKCRNVHGHSYKLFVTVIGTPIADTNHVKYGMVIDFGDLKKIVKEEIVDVFDHATVFNKNTPHVELAKELSNRGHNVLLVNYQPTSEMMVIDFAEKIKTRLPENIQLYSLKLQETATSYAEWYASDNPSTPLRVLKTN

SEQ ID NO: 22230 - protein, 135 aa, Marinirhabdus gelatinilytica
  misc_feature (1)..(135): tr|A0A370Q985|A0A370Q985_9FLAO 6-carboxy-5,6,7,8-tetrah ydropterin synthase OS=Marinirhabdus gelatinilytica OX= 1703343 GN=C8D94_104273 PE=3 SV=1
MSLTVYRKAHFNAAHRLFKKEWSDEKNLEVFGKCSNPLYHGHNYELEVGVTGEIDPDTGFLIDLKILKDLIYTEVEVPFDHKNLNEEVPEFKNLNPTVENIAMVIYDKLRSKLDGKYAISIKLYETPRNYVVYTG

SEQ ID NO: 22231 - protein, 147 aa, Marinisporobacter balticus
  misc_feature (1)..(147): tr|A0A4R2KHS0|A0A4R2KHS0_9CLOT 6-carboxy-5,6,7,8-tetrah ydropterin synthase OS=Marinisporobacter balticus OX=20 18667 GN=EV214_11769 PE=3 SV=1
MYLLKAEHSFDSAHFLANYNGKCRNIHGHRWKVIVEVQAETLINEGQLDGMVVDFGDLKKDVKEMVDHYDHALIIQENTMRRETLTYLIEDGFKIINVAFRPTAENFAYLFFKTMEKRRYNVKRTIVYETPTNCATYEKSEGKICIR

SEQ ID NO: 22232 - protein, 147 aa, Marinitenerispora sediminis
  misc_feature (1)..(147): tr|A0A368T2H0|A0A368T2H0_9ACTN 6-carboxy-5,6,7,8-tetrah ydropterin synthase OS=Marinitenerispora sediminis OX=1 931232 GN=DEF24_17555 PE=3 SV=1
MNRVTVRHNFETAHRLPHLGGKCRNLHGHSWWVEVTVAGDLDERGIVVDFGSLKKRLRDWIDTHLDHGAMLGDADPLVPALLADGSKLFQFGVSEPSKGLDWPTVENVADLVARVAANEIEAAGWTGVTVSAVRVSETHVNAAEVLR

SEQ ID NO: 22233 - protein, 129 aa, Marinithermus hydrothermalis
  misc_feature (1)..(129): tr|F2NQ97|F2NQ97_MARHT 6-carboxy-5,6,7,8-tetrahydropter in synthase OS=Marinithermus hydrothermalis (strain DSM 14884 / JCM 11576 / T1) OX=869210 GN=Marky_0658 PE=3 S V=1
MPRWKLVTEFTFDSAHYITDYDGPCGRMHGHTYRVRVEATSDRLYPSAHTPHPVMVADFKTLRWAKKDVTEGGLDHAVLNEVLPPEYATTAEMIAKYIHDETKRRLPEGVRLKVTVWETPTSWVEYEDA

SEQ ID NO: 22234 - protein, 118 aa, Marinitoga hydrogenitolerans
  misc_feature (1)..(118): tr|A0A1M4VHZ0|A0A1M4VHZ0_9BACT 6-carboxy-5,6,7,8-tetrah ydropterin synthase OS=Marinitoga hydrogenitolerans DSM 16785 OX=1122195 GN=SAMN02745164_00936 PE=3 SV=1
MLVKRVFNFAAAHNLIKYHGKCESLHGHNYRLEVTVKGTTNDEGMVIDFLELKKIVKEEVLNILDHSYLNDIIEQPTAENISMWIWNKLEKKLKRKNCNLYEIALYETENNIVYYRGE

SEQ ID NO: 22235 - protein, 283 aa, Marinobacter adhaerens
  misc_feature (1)..(283): tr|A0A1E3CBB3|A0A1E3CBB3_9ALTE 6-pyruvoyl tetrahydropte rin reductase OS=Marinobacter adhaerens OX=1033846 GN=A 6779_07815 PE=4 SV=1
MNHLFVDNLTVIDFAYLDPTRGLVGESWIADVVLGGELDEQGMVFDFSNVKRTIKRVIDERVDHRLVIPRGYHGLSWNEEEPDTFNWSLTDGSQITHRSPDEAIVWLSADRVVPSAVASLLEQEIKAVLPANVISVEINLREEEIDGAYYHYVHGLKKHLGNCQRIAHGHRSPIRIDRNGHRDYDLERRWAKLWRDIYVGSEEDVVRRHVGEDGVRYVTFEYEANQGEFALTLPEERVYMLDTDTTVELIAAHMADKLKVEFATDTIRVKAYEGVGKGAIAER

SEQ ID NO: 22236 - protein, 132 aa, Marinobacter adhaerens
  misc_feature (1)..(132): tr|A0A349SYF4|A0A349SYF4_9ALTE 6-carboxytetrahydropteri n synthase OS=Marinobacter adhaerens OX=1033846 GN=DC04 5_13475 PE=4 SV=1
MFGLTVRDHMMIAHSFNGEIFGPAQKVHGATYVVDVTFERHQLDKDDLVVDIGLASELLKSILSEFNMQNLDELPELRGRNTTTEFMAKLVFDRMAAAIHGGRLGETGEGIVSLKVTLSESHIAWASYHAGI

SEQ ID NO: 22237 - protein, 132 aa, Marinobacter algicola
  misc_feature (1)..(132): tr|A6EWU1|A6EWU1_9ALTE Uncharacterized protein OS=Marin obacter algicola DG893 OX=443152 GN=MDG893_05959 PE=4 S V=1
MFSLTVRDHMMIAHSFKGDIFGPAQGLHGATYVVDVTFEREALDRDDLIVDIGLASEVLSSVIAEFNMKNLDDIEEFANRNTTTEFMAMTVFERMAAAIRQGRLAETGKGLCSMKVTLGESHIAWASYHGKL

SEQ ID NO: 22238 - protein, 283 aa, Marinobacter algicola
  misc_feature (1)..(283): tr|A6F1F3|A6F1F3_9ALTE Uncharacterized protein OS=Marin obacter algicola DG893 OX=443152 GN=MDG893_00370 PE=4 S V=1
MNHLFVDNLTVIDFAYLDASRGLVGESWIVDVVLGGELDDQGMVFDFSNVKRTIKRVIDERVDHRLVIPRAYKGLEWNEDEPDSFTWHLTDGTRILHRSPDEAVVWLSSDRVVPSAVARLLEQELRAVLPANVTDVDIALREDVIEGAHYHYVHGLKKHMGNCQRIAHGHRSPIRIDRNEHRDRDLENQWAKRWQDIYVGSEEDVTQRWVAEDGTAYVTFEYEANQGEFALTLPENRVYMLDSDTTVELIAAHIAGQLKSEFPEDAIRVKAYEGVGKGAIASR

SEQ ID NO: 22239 - protein, 283 aa, Marinobacter antarcticus
  misc_feature (1)..(283): tr|A0A1M6S862|A0A1M6S862_9ALTE 6-pyruvoyl tetrahydropte rin synthase OS=Marinobacter antarcticus OX=564117 GN=S AMN05216369_1899 PE=4 SV=1
MNHLFVDNLTVIDFAYLDPTRGLVGESWIADVVLGGELDDQGMVFDFSNVKRTIKRIIDERVDHRLVIPRGYEGLSWNQDTPDTFTWRLNDGSHIVHRSPDEAIVWLSSERVVPSAVATLLERELMAVLPANVTSVEINLREDVIEGAYYHYVHGLKKHLGNCQRIAHGHRSPIRIDRNGHRDYDLERTWAKLWQDIYVGSEEDVARRHVGEDGVPYITFEYEANQGEFALTLPEARVYMMNTDTTVELIAAHIADQLKLQSPSDTILVKAYEGVGKGAIASR

SEQ ID NO: 22240 - protein, 132 aa, Marinobacter antarcticus
  misc_feature (1)..(132): tr|A0A1M6SKS8|A0A1M6SKS8_9ALTE 6-pyruvoyl-tetrahydropte rin synthase OS=Marinobacter antarcticus OX=564117 GN=S AMN05216369_2107 PE=4 SV=1
MFSLTVRDHMMIAHSFNGEIFGPAQKTHGATYVVDMTFERHELDSDDLIIDIGLASEVLKQVLSEFNMKNLDNIEDFRGRNTTTEFMAKKVFDRMVAAIHAGRLGETAKAVHALKVTLAESHIAWASYHAEV

SEQ ID NO: 22241 - protein, 132 aa, Marinobacter confluentis
  misc_feature (1)..(132): tr|A0A4Z1CBX0|A0A4Z1CBX0_9ALTE 6-carboxytetrahydropteri n synthase OS=Marinobacter confluentis OX=1697557 GN=E5 Q11_02870 PE=4 SV=1
MFSLTVRDHMMIAHSFKGEVFGPAQKLHGATYVVDVTFERKALDQDDLIVDIGLASEVLSSVLAEFNMQNLDELPALAGRNTTTEFMAATVFDRLEKAIHEGRLGETGKGLCGIKVTLGESHVAWASYHGEL

SEQ ID NO: 22242 - protein, 290 aa, Marinobacter confluentis
  misc_feature (1)..(290): tr|A0A4Z1CBI5|A0A4Z1CBI5_9ALTE 6-pyruvoyl tetrahydropte rin reductase OS=Marinobacter confluentis OX=1697557 GN =E5Q11_01755 PE=4 SV=1
MNHLFVDNLTVIDFAYLDASRGLVGESWIVDVVLGGELDDQGMVFDFSNVKRTIKRVIDERVDHRLVIPRGYSGLQWDENDPQAFSWVLTDGTALTHRSPDEAVVWLSSDRVVPSAVSTLLQQELRAVLPGNVTDIDIQLREEVIEGAYYHYVHGLKKHLGNCQRIAHGHRSPIRIDRNGQRDRDLERRWARLWEDIYVGTEEDVTGRWVAEDGTAYVSFEYEAEQGEFSLTLPEKRVYMLATDTTVELIAAHIADQLKADFPDDTIMVKAYEGVGKGAVATRGLSPNGD

SEQ ID NO: 22243 - protein, 282 aa, Marinobacter daqiaonensis
  misc_feature (1)..(282): tr|A0A1I6H4H1|A0A1I6H4H1_9ALTE 6-pyruvoyl-tetrahydropte rin synthase OS=Marinobacter daqiaonensis OX=650891 GN= SAMN05216203_0865 PE=4 SV=1
MNHLFIDNLTVIDFAYLDPSRGLVGESWIADIVLGGELDEQGMVFDFGNVKRTIKRVIDERVDHRLVVPAEASCLQRGDTPGSLTWRLADGSHIRHEGPEQSVVFLDHHQVVPSAVARLLEQELKAVLPTNVTAVEVTLREELIEGAYYHYVHGLKKHLGNCQRIAHGHRSPICIDLNGRRSPELEKQWARQWQDIYIGTREDLGQSWSDADGTEYVSFHYDAEQGEFRLTLPRQRVWLLDTDTTVELIAAYLADEIKKAHPADEVRVKAFEGVGKGAIAVR

SEQ ID NO: 22244 - protein, 132 aa, Marinobacter daqiaonensis
  misc_feature (1)..(132): tr|A0A1I6H0F7|A0A1I6H0F7_9ALTE 6-pyruvoyl-tetrahydropte rin synthase OS=Marinobacter daqiaonensis OX=650891 GN= SAMN05216203_0673 PE=4 SV=1
MYALTVRDHVMIAHSFTGQIFGPAQKLHGATYVVDVSFEREQLDDDDLVVDIGLASDVLKKVLAHINMQNLDEMEEFRGRNTTTEFMARHIFDRMSQAVKNGDLGEGARALTAIKVTLAESHIAWASYRGQL

SEQ ID NO: 22245 - protein, 132 aa, Marinobacter excellens
  misc_feature (1)..(132): tr|A0A0P7YLG8|A0A0P7YLG8_9ALTE 6-pyruvoyl-tetrahydropte rin synthase OS=Marinobacter excellens HL-55 OX=1305731 GN=HLUCCX14_02325 PE=4 SV=1
MFSLTVRDHMMIAHSFTGELFGPAQGLHGATYVVDVTFERHVLDDNDLIVDIGLASDVLKAVLGEFNMKNLDDLPQFNGRNTTTEFMAKTVFDRMAQAIHEGRLGEDGKGIVSLKVTLGESHVAWASYHAGI

SEQ ID NO: 22246 - protein, 132 aa, Marinobacter excellens
  misc_feature (1)..(132): tr|A0A137SH53|A0A137SH53_9ALTE PTPS-like type 4 OS=Mari nobacter excellens LAMA 842 OX=1306954 GN=J122_615 PE=4 SV=1
MFSLTVRDHMMIAHSFKGEIFGPAQGLHGATYVVDVTFERHVLDDNDLIVDIGQASDLLKEVLSEFNMKNLDDLPEFEGRNTTTEFMAQVVFNRMAAAIHAGRLGEEGRQVAGLKVTLGESHLAWASYHAGI

SEQ ID NO: 22247 - protein, 132 aa, Marinobacter flavimaris; identical to SEQ ID NO: 22236
  misc_feature (1)..(132): tr|A0A3D8H7P1|A0A3D8H7P1_9ALTE 6-carboxytetrahydropteri n synthase OS=Marinobacter flavimaris OX=262076 GN=DXI2 3_03525 PE=4 SV=1

SEQ ID NO: 22248 - protein, 283 aa, Marinobacter flavimaris
  misc_feature (1)..(283): tr|A0A3D8H731|A0A3D8H731_9ALTE 6-pyruvoyl tetrahydropte rin reductase OS=Marinobacter flavimaris OX=262076 GN=D XI23_02365 PE=4 SV=1
MNHLFVDNLTVIDFAYLDPTRGLVGESWIADVVLGGELDEQGMVFDFSNVKRTIKRVIDESVDHRLVIPRGYQGLSWSEEQPDTFTWALTDGSQIIHRSPDEAIVWLSADRVVPSAVASLLEQEIKAVLPANVISVEINLREEEIDGAYYHYVHGLKKHLGNCQRIAHGHRSPIRIDRNGHRDYDLERRWAKLWRDIYVGSEEDVVRRHVGEDGVRYVTFEYEANQGEFALTLPEDRVYMLDTDTTVELIAAHMADKLKVEFATDTIRVKAYEGVGKGAIAER

SEQ ID NO: 22249 - protein, 284 aa, Marinobacter fuscus
  misc_feature (1)..(284): tr|A0A2T1K5N7|A0A2T1K5N7_9ALTE 6-pyruvoyl tetrahydropte rin reductase OS=Marinobacter fuscus OX=2109942 GN=C7H0 9_15520 PE=4 SV=1
MNHLFVDNLTVIDFAYLDPKRGLVGESWIADVVLGGELDEQGMVFDFSNVKRTIKRVIDERVDHRLVIPRGYPGLQWDEDRPDTFRWQLVDGNYIEHTSPDEAVVWLSADRVLPSAVAELLEKELKAVLPGNVTSIEINLREDVIEGAYYHYVHGLKKHLGNCQRIAHGHRSPIRIDRNGHRDTGLEKHWAKLWEDIYVGTEEDVTRRFVEGNGEAYISFEYEANQGEFALTLPESRVYMLATDTTVELIAAHIADTLQAEYPGDSIRVKAYEGVGKGAIAHRA

SEQ ID NO: 22250 - protein, 132 aa, Marinobacter gudaonensis
  misc_feature (1)..(132): tr|A0A1I6GE08|A0A1I6GE08_9ALTE 6-pyruvoyl-tetrahydropte rin synthase OS=Marinobacter gudaonensis OX=375760 GN=S AMN04488073_0564 PE=4 SV=1
MFGLTVRDHMMIAHSFNGEVFGPAQKLHGATYVVDVTFERHQLDEDDLIVDIGLASEVLKDVLSEFNMKNLDEIPELAGRNTTTEFMARMVFDRMARAIHEGRLGETGRGIASLKVTLSESHIAWASYHAGI

SEQ ID NO: 22251 - protein, 283 aa, Marinobacter gudaonensis
  misc_feature (1)..(283): tr|A0A1I6GGX3|A0A1I6GGX3_9ALTE 6-pyruvoyl tetrahydropte rin synthase OS=Marinobacter gudaonensis OX=375760 GN=S AMN04488073_0777 PE=4 SV=1
MNHLFVDNLTVIDFAYLDPTRGLVGESWIADVVLGGELDEQGMVFDFSNVKRTIKRVIDERVDHRLVIPRGYQGLSWNEEKPDTFSWALTDGSEILHRSPDEAIVWLSADRVVPSAVAELLEREIKAVLPANVTSVEINLREEEIDGAYYHYVHGLKKHLGNCQRIAHGHRSPIRIDRNGHRDYDLERRWATLWRDIYVGSEEDVVRRHVGEDGVRYVTFEYEANQGEFALVLPEERVYMLDTDTTVELIAAHMADKLKVEFPTDSIRVKAFEGVGKGAIAIR

SEQ ID NO: 22252 - protein, 132 aa, Marinobacter guineae
  misc_feature (1)..(132): tr|A0A2G1VHX4|A0A2G1VHX4_9ALTE Uncharacterized protein OS=Marinobacter guineae OX=432303 GN=CLH62_01985 PE=4 S V=1
MFGLTVRDHMMIAHSFNGEIFGPAQKLHGATYVVDVTFERHQLDKDDLVVDIGLASEVLKGILAEFNMQNLDELPELSGRNTTTEFMARMVFDRMAAAIHGGKLGETGQGIVSLKVALSESHIAWASYHAGI

SEQ ID NO: 22253 - protein, 283 aa, Marinobacter guineae
  misc_feature (1)..(283): tr|A0A2G1VIQ5|A0A2G1VIQ5_9ALTE 6-pyruvoyl tetrahydropte rin reductase OS=Marinobacter guineae OX=432303 GN=CLH6 2_03250 PE=4 SV=1
MNHLFVDNLTVIDFAYLDPTRGLVGESWIADVVLGGELDDQGMVFDFSNVKRTIKRVIDERVDHRLVIPRGFQGLSWSEEQPDTFTWALTDGSQIVHRSPDEAIVWLSAERVVPSAVAALLEQEIKAVLPANVTSVEIHLREEEIDGAYYHYVHGLKKHLGNCQRIAHGHRSPIRIDRNRHRDYDLERRWAKLWRDIYVGSEEDVVRRHVGDDGVRYVTFEYEANQGEFALTLPEERVYMLDTDTTVELIAAHIADKLKVEFAADAIRVKAYEGVGKGAIASR

SEQ ID NO: 22254 - protein, 132 aa, Marinobacter halophilus
  misc_feature (1)..(132): tr|A0A2T1K8P3|A0A2T1K8P3_9ALTE Uncharacterized protein OS=Marinobacter halophilus OX=1323740 GN=C7H08_15515 PE =4 SV=1
MYSLTVRDHMMIAHSFNGELFGPAQGLHGATYVVDVTFERPVLDADDLIVDIGLASDVLKAVLAEFNMKNLDDLPQFKGHNTTTEFMAKAVFDRMAAAVKDGRLGEEGRGIASLKVTLGESHVAWASYHAGI

SEQ ID NO: 22255 - protein, 284 aa, Marinobacter halophilus
  misc_feature (1)..(284): tr|A0A2T1K957|A0A2T1K957_9ALTE 6-pyruvoyl tetrahydropte rin reductase OS=Marinobacter halophilus OX=1323740 GN= C7H08_16470 PE=4 SV=1
MNHLFVDNLTVIDFAYLDPSRGLVGESWIADVVLGGELDDQGMVFDFSLVKRTIKRVIDERVDHRLVIPRGYQGLHWNEETPDTFLWDLAGGGRIEHRSPDEAVVWLSSDRVLPSAVAALLEKELKAVLPANVTTVEISLREDVIEGAYYHYVHGLKKHLGNCQRIAHGHRSPIRIDRNGHRDYDLERRWAKLWQDIYVGTEEDVTRRYVGEDGFAYITFEYEANQGEFALTLPESRVYMLATDTTVELIAAHIADELKAEFPEDEIRVKAYEGVGKGAIAARV

SEQ ID NO: 22256 - protein, 284 aa, Marinobacter hydrocarbonoclasticus
  misc_feature (1)..(284): tr|A0A3B8WRL4|A0A3B8WRL4_MARHY 6-pyruvoyl tetrahydropte rin reductase OS=Marinobacter hydrocarbonoclasticus OX= 2743 GN=DCF82_15975 PE=4 SV=1
MNHLFVDNLTVIDFAYLDPARGLVGESWIADVVLGGELDEQGMVFDFSNVKRTIKRVIDERVDHRLVIPRGYEGLQWSEDAPNTFRWALSGGGHIEHSSPDEAVVWLSSDRVVPSAVAALLEKELKAVLPGNVTSVDINLREEVIEGAYYHYVHGLKKHLGNCQRIAHGHRSPIRIDRNGHRAYDLEERWAKLWQDIYVGTEEDVARRFVGEDGIGYITFEYEANQGEFALTLPEHRVYMLETDTTVELIAAHIADKLKAEFSGEEIRVKAYEGVGKGAIAIRA

SEQ ID NO: 22257 - protein, 284 aa, Marinobacter hydrocarbonoclasticus
  misc_feature (1)..(284): tr|A0A455W970|A0A455W970_MARHY Uncharacterized protein OS=Marinobacter hydrocarbonoclasticus OX=2743 GN=queD P E=4 SV=1
MNHLFVDNITVIDFAYLDPARGLVGESWITDVVLGGELDDQGMVFDFSLVKRTIKRVIDERVDHRLVIPRGYEGLNWDEETPDAFIWNLTDGSHIEHRSPDEAVVWLSSDRVVPSAVAALLEKELKAVLPGNVTSVEINLREDVIEGAYYHYVHGLKKHLGNCQRIAHGHRSPIRIDRNGHRDYELENRWAKLWKDIYVGTEEDVTRRFVGEDGVGYITFEYEANQGEFALTLPESRVYMLDTDTTVELIAAHIADKLKAEFPEDEIRVKAYEGVGKGAIASRV

SEQ ID NO: 22258 - protein, 283 aa, Marinobacter lipolyticus
  misc_feature (1)..(283): tr|R8B5R5|R8B5R5_9ALTE 6-pyruvoyl tetrahydropterin synt hase-like protein OS=Marinobacter lipolyticus SM19 OX=1 318628 GN=MARLIPOL_00363 PE=4 SV=1
MNHLFVDNLTVIDFAYLDPNRGLVGESWIADVVLGGELDEQGMVFDFSNVKRTIKRVIDERVDHRLVVPRGYSGAAWTEEEPDSFTWTLTDGSRIVHRSPDEAVVWLSAERVVPSAVAALLERELMAVLPGNVTDVEVNLREEVIEGAYYHYVHGLKKHLGNCQRIAHGHRSPIRIDRNDHRDYELEKRWAKLWQDIYVGSEEDVTQRWVAEDGVAYVTFEYEANQGEFALTLPENRVYMMETDTTVELIAAHMADQLKTEFPADAIRVKAYEGVGKGAIASR

SEQ ID NO: 22259 - protein, 283 aa, Marinobacter litoralis
  misc_feature (1)..(283): tr|A0A3M2RKR5|A0A3M2RKR5_9ALTE 6-pyruvoyl tetrahydropte rin synthase OS=Marinobacter litoralis OX=187981 GN=DOQ 08_00618 PE=4 SV=1
MNHLFVDNLTVIDFAYLDPARGLVGESWIADVVLGGELDEQGMVFDFSNVKRTIKRVIDERVDHRLVIPRGYEGLHWDEDQPHTFRWDLTDGSHITHTSPDEAVVWLSSERVEKPAVAALLETELKAVLPGNVTTVEINLREDVIEGAYYHYVHGLKKHLGNCQRIAHGHRSPIRIDRNGQRDTELEKRWAKLWEDIYVGTEEDVTRRFVGDDSQHYISFEYEANQGEFALTLPESRVYMLETDTTVELIAAHMADVLKAEFPADEIRVKAYEGVGKGAIAVR

SEQ ID NO: 22260 - protein, 283 aa, Marinobacter lutaoensis
  misc_feature (1)..(283): tr|A0A1V2DWR4|A0A1V2DWR4_9ALTE 6-pyruvoyl tetrahydropte rin reductase OS=Marinobacter lutaoensis OX=135739 GN=B TO32_01770 PE=4 SV=1
MDHLFVDNLTVIDFAYLDARRGLVGESWIVDVVLGGELDEQGMVFDFSNVKRTIKRVIDERVDHRLVIPRGYPGLSWSEESPDTFSWILADGRRIVHRSPDEAVVWLSAEHVVPSAVARLLEQELRDVLPANVTSVTIDLREDVIEGAYYHYVHGLKKHLGNCQRIAHGHRSPIRIDRNGHRDRELERRWATRWQDIYIGSEEDVVRRHVDSTGTPYVTFEYEANQGEFALTLPEERVYLLDTDTTVELIAAHIADTLKGEFPNDRIRVKAYEGVGKGAIAER

SEQ ID NO: 22261 - protein, 132 aa, Marinobacter manganoxydans; identical to SEQ ID NO: 22236
  misc_feature (1)..(132): tr|G6YRP3|G6YRP3_9ALTE Uncharacterized protein OS=Marin obacter manganoxydans MnI7-9 OX=1094979 GN=KYE_07612 PE =4 SV=1

SEQ ID NO: 22262 - protein, 283 aa, Marinobacter manganoxydans
  misc_feature (1)..(283): tr|G6YW62|G6YW62_9ALTE Uncharacterized protein OS=Marin obacter manganoxydans MnI7-9 OX=1094979 GN=KYE_15594 PE =4 SV=1
MNHLFVDNLTVIDFAYLDPTRGLVGESWIADVVLGGELDEQGMVFDFSNVKRTIKRVIDERVDHRLVIPRGYQGLSWSEEQPDTFTWALTDGSQIIHRSPDEAIVWLSADRVVPSAVASLLEQEIKAVLPANVISVEINLREEEIDGAYYHYVHGLKKHLGNCQRIAHGHRSPIRIDRNGHRDYDLECRWAKLWRDIYVGSEEDVVRRHVDEDGVRYVTFEYEANQGEFALTLPEERVYMLDTDTTVELIAAHMADKLKVEFATDTIRVKAYEGVGKGAIAER

SEQ ID NO: 22263 - protein, 304 aa, Marinobacter mobilis
  misc_feature (1)..(304): tr|A0A1H2Z154|A0A1H2Z154_9ALTE 6-pyruvoyl tetrahydropte rin synthase OS=Marinobacter mobilis OX=488533 GN=SAMN0 4487960_106152 PE=4 SV=1
MQRIFARIRWSIKYTSTGLSLMNHLFVDNLTVIDFAYLDASRGLVGESWIVDVVLGGELDDQGMVFDFSNVKRTIKRVIDERVDHRLVVPTGYSGLSRDADQPDAFRWQLKNGHYIDHHSPQEAVVWLEADRVVPSAVATLLQQELHSVLPANVIDIDINLREEVIEGPYYHYVHGLKKHLGNCQRIAHGHRSPIRIDRNNHRDHALEQAWAERWKDIYVGSEEDITTRFVDTNGVGYIRFDYEANQGEFSLTLPEERVYLLNTDTTVELIAAHIADQCKAEWPNDAIRVKAYEGVGKGAISIR

SEQ ID NO: 22264 - protein, 132 aa, Marinobacter nanhaiticus
  misc_feature (1)..(132): tr|N6WTH9|N6WTH9_9ALTE 6-carboxytetrahydropterin syntha se OS=Marinobacter nanhaiticus D15-8W OX=626887 GN=J057 _23125 PE=4 SV=1
MFSLTVRDHMMIAHSFNSPRFGPAQKLHGATYVVDVSFFREQLDQDDLVIDIGLASEQLKAVVDEFNLTNLDEQAEFEGRNTTTEFMAKVIFDRLAKRIDSGSLGEEAQGLSRMRVCLSESHIAWATFEDAL

SEQ ID NO: 22265 - protein, 283 aa, Marinobacter nanhaiticus
  misc_feature (1)..(283): tr|N6WR98|N6WR98_9ALTE 6-pyruvoyl tetrahydropterin redu ctase OS=Marinobacter nanhaiticus D15-8W OX=626887 GN=J 057_19365 PE=4 SV=1
MNHLFVDNLTVIDFAYLDHHRGLVGESWIVDVMLAGELDEQGMVFDFGSVKRTIKRVIDERVDHRLVVPRDQAGLQVREHGDRVELECPLSDGSVITHSSPVEAVLLVGGREVLPSAVSALLQDELRAVLPGNVIGIEVHLREEEIDGPYYHYVHGLKKHLGNCQRIAHGHRSRIQIQRNHARDQQLEREWARRWQDIYIGTEEDISARFVEDEINYVSFTYEANQGEFSLTLSANRVYLMETDTTVELIAAHLADACKRSHSDDEIRVKAFEGVGKGALAIR

SEQ ID NO: 22266 - protein, 283 aa, Marinobacter nitratireducens
  misc_feature (1)..(283): tr|A0A072N3C4|A0A072N3C4_9ALTE NADPH dependent preQ0 re ductase OS=Marinobacter nitratireducens OX=1137280 GN=D 777_00645 PE=4 SV=1
MNHLFVDNLTVIDFAYLDPTRGLVGESWIVDVVLGGNLDEQGMVFDFSNVKRTIKRIIDERVDHRLVVPRGYQGLTIDEDQQDTFTWALTDGSELVHKGPDEAVAWLSTDRVLPSAVAALLERELKSVLPANVVSIEINLREEVIEGAYYHYVHGLKKHLGNCQRIAHGHRSPIRIDRNGHRDYDLEKHWATLWRDIYVGSEEDVARRHVGDDGVPYVTFEYEANQGEFALTLPEERVYMLDTDTTVELIAAHIADTLKVEFPTDAIRVKAFEGVGKGAIAER

SEQ ID NO: 22267 - protein, 283 aa, Marinobacter pelagius
  misc_feature (1)..(283): tr|A0A1I4TP19|A0A1I4TP19_9ALTE 6-pyruvoyl tetrahydropte rin synthase OS=Marinobacter pelagius OX=379482 GN=SAMN 04487961_1226 PE=4 SV=1
MNHLFVDNLTVIDFAYLDATRGLVGESWIADVVLGGELDEQGMVFDFSNVKRTIKRVIDERVDHRLVIPRGYQGLIWNEDQPDTFTWKLTDGSQIVHRSPDEAVVWLSAEHVVPSAVARLLEHELMEVLPANVTSVTINLREEVIEGAYYHYVHGLKKHLGNCQRIAHGHRSPIRIDRNGHRDYDLERRWATLWRDIYVGSEEDVVRRHVGADGVRYVTFEYEANQGEFALTLPEERVYMLDTDTTVELIAAHMAEKLKVEFPTDAIRVKAYEGVGKGAIAER

SEQ ID NO: 22268 - protein, 132 aa, Marinobacter pelagius
  misc_feature (1)..(132): tr|A0A1I4T2F2|A0A1I4T2F2_9ALTE 6-pyruvoyl-tetrahydropte rin synthase OS=Marinobacter pelagius OX=379482 GN=SAMN 04487961_0966 PE=4 SV=1
MFSLTVRDHMMIAHSFHGEIFGPAQKLHGATYVVDVTFERRQLDQDDLVVDIGLASQLLKDVLAEFNMQNLDEIEAFRGRNTTTEFMAGVVFDRMASAIQAGKLGEGAREISGMKVTLSESHVAHASYHAGL

SEQ ID NO: 22269 - protein, 132 aa, Marinobacter persicus
  misc_feature (1)..(132): tr|A0A2S6G8Z2|A0A2S6G8Z2_9ALTE 6-pyruvoyl-tetrahydropte rin synthase OS=Marinobacter persicus OX=930118 GN=B0H2 4_1004106 PE=4 SV=1
MFGLTVRDQMMVTHSLNGDVFGPAQKLHGTTYVVDVTFERHQLDKNDLIVEADLAVQLLREVLGEFDMQNLDERLEFEGRNTTTEFMAGVVFERMANAVRQGRLGDSGKGLSSLRVTLSGSQVVWATYHAGI

SEQ ID NO: 22270 - protein, 283 aa, Marinobacter persicus
  misc_feature (1)..(283): tr|A0A1I3S9K4|A0A1I3S9K4_9ALTE 6-pyruvoyl tetrahydropte rin synthase OS=Marinobacter persicus OX=930118 GN=SAMN 05216429_103237 PE=4 SV=1
MDHLFVDNLTVIDFAYLHASRGLVGESWIADVVLGGELDEQGMVFDFSNVKRTIKRVIDERVDHRLVVPRGYLGLRWQEDTPDTFAWHLTDGSHIEHRSPDEAVVWLNAETVVPSAVAELLEKELKAVLPANVTSVEIHLREEEIDGAYYHYVHGLKKHLGNCQRIAHGHRSPIRIDRNGHRDYDLETRWARLWQDIYVGTEEDVTRRFVGEDGNLYITFEYEANQGEFALTLPEERVYMIDTDSTVEFIAAHIADKLKVEFPQDDIRVKAFEGVGKGAIAKR

SEQ ID NO: 22271 - protein, 132 aa, Marinobacter psychrophilus
  misc_feature (1)..(132): tr|A0A0H4I0J9|A0A0H4I0J9_9ALTE 6-pyruvoyl tetrahydropte rin synthase OS=Marinobacter psychrophilus OX=330734 GN =ABA45_08555 PE=4 SV=1
MYSLTVRDHIMIAHSFNGEIFGPAQKTHGATYIVDVSFERKTLDHDDLIVDIGLASEQLKALLAEFNMKNLDDVEEFKGRNTTTEFMAKVIFERLAAAIRAGQLGESGRGVERLKVTLAESHIAWASYHGDI

SEQ ID NO: 22272 - protein, 283 aa, Marinobacter psychrophilus
  misc_feature (1)..(283): tr|A0A0H4I1W4|A0A0H4I1W4_9ALTE 6-pyruvoyl tetrahydropte rin reductase OS=Marinobacter psychrophilus OX=330734 G N=ABA45_11680 PE=4 SV=1
MNHLFVDNLTVIDFAYLDATRGLVGESWIADIVLGGELDEQGMVFDFSHVKRVIKQVIDAQVDHRLVVPKGHPGLLRNDQTPQHFVWPLTNGEQIAHTGPDEAVLWLAGDTVTKAAVATLLEHELKAVLPKNVISVDVHLREEVLEGPYYHYVHGLKKHLGNCQRIAHGHRSPICIHRNEQRDTALEALWAKLWKDTYVGTEEDVSRRFVDDHGTEYIHFEYEANQGEFALTLPASRVYMMDTDTTVELIAGHIADQLKQEFPEDSIRVKAYEGVGKGGMASR

SEQ ID NO: 22273 - protein, 132 aa, Marinobacter salarius
  misc_feature (1)..(132): tr|W5Z0Z0|W5Z0Z0_9ALTE 6-pyruvoyl tetrahydropterin synt hase OS=Marinobacter salarius OX=1420917 GN=AU15_15535 PE=4 SV=1
MFSLTVRDHMMIAHSFKGDIFGPAQGLHGATYVVDVSFEREALDNDDLIVDIGLASEVLSSVIAEFNMKNLDDIEEFANRNTTTEFMAMTVFDRLAAAIRQGRLGETGKGLCSMKVTLGESHIAWASYHGEL

SEQ ID NO: 22274 - protein, 283 aa, Marinobacter salarius
  misc_feature (1)..(283): tr|A0A1W6K8C9|A0A1W6K8C9_9ALTE 6-pyruvoyl tetrahydropte rin synthase OS=Marinobacter salarius OX=1420917 GN=MAR SALSMR5_01611 PE=4 SV=1
MNHLFVDNLTVIDFAYLDASRGLVGESWIVDVVLGGELDDQGMVFDFSNVKRTIKRVIDERVDHRLVIPRAYKGLEWNEDEPDSFTWHLTDGTRILHRSPDQAVVWLSSDRVVPSAVARLLEQELRAVLPANVTDVDIELREDVIEGAYYHYVHGLKKHMGNCQRIAHGHRSPIRIDRNEHRDRDLENQWAKRWQDIYVGSEEDVTQRWVAEDGTAYVTFEYEANQGEFALTLPESRVYMLDSDTTVELIAAHIAGQLKSEFPEDAIRVKAYEGVGKGAIASR

SEQ ID NO: 22275 - protein, 132 aa, Marinobacter salinus
  misc_feature (1)..(132): tr|A0A1D9GIQ3|A0A1D9GIQ3_9ALTE Uncharacterized protein OS=Marinobacter salinus OX=1874317 GN=BKP64_04450 PE=4 SV=1
MFSLTVRDHMMIAHSFNGEIFGPAQKTHGATYVVDVSFEREQLDHDDLVVDIGLASTVLKEVLGEFNMQNLDELDVFAGRNTTTEFMAGVVFDRLAEAVKSGRLGESGKGISSLKVTLSESHIAWASYHASI

SEQ ID NO: 22276 - protein, 283 aa, Marinobacter salinus
  misc_feature (1)..(283): tr|A0A1D9GI42|A0A1D9GI42_9ALTE 6-pyruvoyl tetrahydropte rin reductase OS=Marinobacter salinus OX=1874317 GN=BKP 64_03250 PE=4 SV=1
MNHLFVDNLTVIDFAYLDPTRGLVGESWIADVVLGGELDDQGMVFDFSNVKRTIKRVIDERVDHRLVIPRGYAGLSWNEDEPDTFHWALTDGSKIIHRSPDEAVVWLSAERVVPSAVATLLEHELKAVLPSNVISVDIHLREEVIEGAYYHYVHGLKKHLGNCQRIAHGHRSPIRIDRNGHRDYDLERQWARLWRDIYVGSEEDVVRRHVGNDGVRYVTFEYEANQGEFALTLPEERVYMLDTDTTVELIAAHIAEKLKVEFPTDTIRVKAYEGVGKGAIASR

SEQ ID NO: 22277 - protein, 283 aa, Marinobacter santoriniensis
  misc_feature (1)..(283): tr|M7DDP0|M7DDP0_9ALTE 6-pyruvoyl tetrahydropterin synt hase-like protein OS=Marinobacter santoriniensis NKSG1 OX=1288826 GN=MSNKSG1_07973 PE=4 SV=1
MDHLFVDNLTVIDFAYLDGQRGLVGESWITDVVLGGELDEQGMVFDFSNVKRTIKRVIDERVDHRLVVPREYEGFVPSEDHPDTFYWTLKDGRRIVHRSPEEAVVWLPTRQVVPSAVAALLEQELMAVLPSNVTSVSINLREEVIEGAYYHYVHGLKKHLGNCQRIAHGHRSPIRIERNGHRDYDQERQWAKLWQDIYVGSEEDVVQRKVAADGTHYVTFEYEANQGEFALTLPEDRVYMLDTDTTVEFIAAHIANTLKQTFPNDTIRVKAYEGVGKGAIAER

SEQ ID NO: 22278 - protein, 132 aa, Marinobacter segnicrescens
  misc_feature (1)..(132): tr|A0A1I0GG08|A0A1I0GG08_9ALTE 6-pyruvoyl-tetrahydropte rin synthase OS=Marinobacter segnicrescens OX=430453 GN =SAMN04487962_11819 PE=4 SV=1
MYTLTVRDNVMIAHSFTGEVFGPAQKLHGATYVVDVSFERPELDDHDLVVDIGLASEVLGKVLAPINMQNLDELPQFSGHNTTTEFMARYVFDSVAQAVRNGELGEGARALTALKVTLSESHIAWASYRGEL

SEQ ID NO: 22279 - protein, 282 aa, Marinobacter segnicrescens
  misc_feature (1)..(282): tr|A0A1H9YZR3|A0A1H9YZR3_9ALTE 6-pyruvoyl tetrahydropte rin synthase OS=Marinobacter segnicrescens OX=430453 GN =SAMN04487962_101391 PE=4 SV=1
MNHLFIDNLTVIDFAYLDHHRGLVGESWIADIVLGGELDEQGMVFDFGNVKRTIKRVIDERVDHRLVVPAGANCLARSDSPGHLTWTLADGSQIRHEGPEQSVVFLDHTEVVPSAVARLLEQELKAVLPANVTDVEVTLREELIEGAYYHYVHGLKKHLGNCQRIAHGHRSPIRIDINGRRDAELEKHWARQWQDIYIGTREDLSQSWTDGDGTEYVSFHYDAEQGEFRLTLPRQRVWFLETDTTVELIAAYLADQIKASHPGDEVRVRAFEGVGKGAIAVR

SEQ ID NO: 22280 - protein, 290 aa, Marinobacter shengliensis
  misc_feature (1)..(290): tr|A0A2T1KLJ3|A0A2T1KLJ3_9ALTE 6-pyruvoyl tetrahydropte rin reductase OS=Marinobacter shengliensis OX=1389223 G N=C7H10_14665 PE=4 SV=1
MNHLFVDNITVIDFAYLDPARGLVGESWITDVVLGGELDDQGMVFDFSLVKRTIKRVIDERVDHRLVIPRGYEGLNWDEETPDAFIWNLTDGSRIEHRSPDEAVVWLSSDRVVPSAVAALLEKELKAVLPGNVTSVEINLREDVIEGAYYHYVHGLKKHLGNCQRIAHGHRSPIRIDRNGHRDYDLENRWAKLWKDIYVGTEEDVTRRFVGEDGVGYITFEYEANQGEFALTLPESRVYMLDTDTTVELIAAHIADKLKAEFPEDEIRVKAYEGVGKGAIASRVCPRGLS

SEQ ID NO: 22281 - protein, 132 aa, Marinobacter shengliensis
  misc_feature (1)..(132): tr|A0A2T1KNE6|A0A2T1KNE6_9ALTE Uncharacterized protein OS=Marinobacter shengliensis OX=1389223 GN=C7H10_15840 PE=4 SV=1
MFSLTVRDHMMIAHSFKGEIFGPAQGLHGATYVVDVTFERPELDGNDLIVDIGQASDLLKEVLSEFNMKNLDDLPEFEGRNTTTEFMAQVVFNRMAAAIQAGRLGEEGRQVAGLKVTLGESHLAWASYHAGI

SEQ ID NO: 22282 - protein, 132 aa, Marinobacter similis
  misc_feature (1)..(132): tr|W5YEX1|W5YEX1_9ALTE 6-pyruvoyl tetrahydropterin synt hase OS=Marinobacter similis OX=1420916 GN=AU14_00865 P E=4 SV=1
MFSLTVRDHMMIAHSFRGEIFGPAQQVHGATYVVDVAFERQELDADNLVVDIGLAASVLKDVLAEFNMKNLDDLEQLQNQNTTTEFMASQVFERLAAAIRAGRLGESAQGMNSLKVTLSESHIAWASFHGKL

SEQ ID NO: 22283 - protein, 283 aa, Marinobacter sp.
  misc_feature (1)..(283): tr|A0A1E7PYX1|A0A1E7PYX1_9ALTE 6-pyruvoyl tetrahydropte rin reductase OS=Marinobacter sp. X15-166B OX=1897620 G N=BG841_12170 PE=4 SV=1
MNHLFVDNLTVIDFAYLDPSRGLVGESWIADVILSGELDDQGMVFDFSDVKRTIKRVIDDQVDHCLLIPSRYAGLTRLEGHQDTFEWQLEDGSTIHHSSPQQAVVWLDSDHITTSDVSALLAAELKAALPDNVTGIQLELREEEISGAFYHYVHGLKKHDGNCQRIAHGHRSPIRIDRNGHRDLELERQWAQLWRDIYIGTEEDVSRRFVGEDGVHYIRFDYQANQGAFSLTLPENRVYMLTTDTTVELIAAHIADECKAVYPNDRIRVKAYEGVGKGAIAER

SEQ ID NO: 22284 - protein, 132 aa, Marinobacter sp.; identical to SEQ ID NO: 22273
  misc_feature (1)..(132): tr|A0A434AKK9|A0A434AKK9_9ALTE 6-carboxytetrahydropteri n synthase OS=Marinobacter sp. NP-6 OX=2488666 GN=EHM94 _06980 PE=4 SV=1

SEQ ID NO: 22285 - protein, 132 aa, Marinobacter subterrani
  misc_feature (1)..(132): tr|A0A0J7J9K6|A0A0J7J9K6_9ALTE 6-pyruvoyl-tetrahydropte rin synthase OS=Marinobacter subterrani OX=1658765 GN=M sub_10840 PE=4 SV=1
MFGLTVRDHMMIAHSFNGEIFGPAQKLHGATYVVDVTFERHQLDRDDLIVDIGLASQVLKDVLGEFNMQNLDDLPELSGRNTTTEFMARMVFDRMAAAIHAGKLGETGKGIVSLKVTLSESHIAWASYHAGI

SEQ ID NO: 22286 - protein, 283 aa, Marinobacter subterrani
  misc_feature (1)..(283): tr|A0A0J7J8R0|A0A0J7J8R0_9ALTE 6-pyruvoyl tetrahydropte rin synthase OS=Marinobacter subterrani OX=1658765 GN=M sub_11066 PE=4 SV=1
MNHLFVDNLTVIDFAYLDPTRGLVGESWIADVVLGGDLDEQGMVFDFSNVKRTIKRVIDERVDHRLVIPRGYQGLSWGEEQPDRFTWALTDGSQIIHRSPDEAIVWLSADRAVPSAVATLLEQEIKAVLPANVTSVEIQLREEEIDGAYYHYVHGLKKHLGNCQRIAHGHRSPIRIDRNGHRDYDLERRWATLWRDVYVGSEEDVVRRHVGDDGVRYVTFEYEANQGEFALTLPEERVYMLDTDTTVELIAAHMADKLKVEFPTDTIRVKAYEGVGKGAIAER

SEQ ID NO: 22287 - protein, 283 aa, Marinobacter vinifirmus
  misc_feature (1)..(283): tr|A0A259W4F5|A0A259W4F5_9ALTE 6-pyruvoyl tetrahydropte rin reductase OS=Marinobacter vinifirmus OX=355591 GN=F HK81_05505 PE=4 SV=1
MNHLFVDNLTVIDFAYLDPSRGLVGESWIADVVLGGELDEQGMVFDFSLVKRTIKRVIDERVDHRLVIPRGYEGLHWDEETPDTFVWDLTDGSRIEHRSPDEAVVWLSSDRVVPSAVAALLEKELMAVLPGNVTSVEINLREDVIEGAYYHYVHGLKKHLGNCQRIAHGHRSPIRIDRNGHRDYDLENRWAKLWKDIYVGTEEDVTRRFVGDDGAAYITFEYEANQGEFALTLPESRVYMLDTDTTVELIAAHIADTLKAEFPEDEIRVKAYEGVGKGAIAAR

SEQ ID NO: 22288 - protein, 283 aa, Marinobacter zhejiangensis
  misc_feature (1)..(283): tr|A0A1I4NV60|A0A1I4NV60_9ALTE 6-pyruvoyl tetrahydropte rin synthase OS=Marinobacter zhejiangensis OX=488535 GN =SAMN04487963_1632 PE=4 SV=1
MNHLFVDNLTVIDFAYLDASRGLVGESWIVDVVLGGELDEQGMVFDFSNVKRTIKQVIDERVDHRLVIPAQYSGLILNEDEPDSFRWQLTCGRYIDHHSPQEAIVWLDADKVVPSAVAALLQQELHSVLPANVIDIAITLREEVIEGPYYHYVHGLKKHLGNCQRIAHGHRSPIRIDRNHHRDHTLEREWAERWKDIYVGSEEDITTRFVDADGVSYIRFDYEANQGEFSLTLPEDLVYMLDTDTTVELIAAHIADQCKVESPEDSIRVKAYEGVGKGAIAIR

SEQ ID NO: 22289 - protein, 278 aa, Marinobacterium aestuarii
  misc_feature (1)..(278): tr|A0A1A9F3M5|A0A1A9F3M5_9GAMM Uncharacterized protein OS=Marinobacterium aestuarii OX=1821621 GN=A8C75_22210 PE=4 SV=1
MKLFVDNLTNVDFSYLHPQRGLLGESWLVQLVLDGRLNDQGMICDFGIVKKAVKAWMDKHIDHALLVATGLPRLQHARQDGETRIDWLYPDGQHFYCRSPEQAITLVGEPDINPHTLAAWCKEQLLALFPDEVQGLELAFVPERIDGAFYHYSHGLHQHDGNCQRIAHGHRSKIEIHLNDQREEALEAVWGERLRDIYIGTRSHLISEADGMHHYRYDAPQGEFELKLPAQYCYDIETETTVEQIAQHLAVAIKQEHPDSDVQVRAFEGVGKGAIAVA

SEQ ID NO: 22290 - protein, 278 aa, Marinobacterium georgiense
  misc_feature (1)..(278): tr|A0A1H4GJL0|A0A1H4GJL0_9GAMM 6-pyruvoyl tetrahydropte rin synthase OS=Marinobacterium georgiense DSM 11526 OX =1122198 GN=SAMN02745729_11727 PE=4 SV=1
MKLFVDNLTHVDFSYLHPKRGLVGESWAVQLVLDGSLDPQGMICDFGVVKRRVKQWLDAHLDHMLAVPAQLPGLQLEQVGGMTEVRWHYPEGGLFRCRAPEQAIAVLPCTEIDELSVAHWCRDQLRQLFPEQVQGVELAFTAESIDGHYYHYSHGLQQHDGNCQRIAHGHRSRIMIYRNGHRDEVLEGRWAECFRDIYIGTRSHLKNQSAGAHHYAYTAPQGAFELELPARCCYLIDTESTVEQIAAHLAEQIKIDHPQDEVVVRAFEGIGKGAIATA

SEQ ID NO: 22291 - protein, 278 aa, Marinobacterium halophilum
  misc_feature (1)..(278): tr|A0A2P8EM06|A0A2P8EM06_9GAMM 6-pyruvoyl tetrahydropte rin synthase-like protein OS=Marinobacterium halophilum OX=267374 GN=CLV44_12625 PE=4 SV=1
MKLFVDNLTHVDFSYLHPERGLLGESWAVQLVLDGSLDAQGMICDFGVVKRRVKQWLDTHVDHQLVVPTGMARLALTTAEGMTDVDWQYPDGSRFHCRAPEQAIAAVPVEAIDERGLAEWCRDQLLALFPDQVKGVELAFVAESIDGHFYHYSHGLQQHDGNCQRIAHGHRSKIEIYRNHQRDEALEGEWAERFRDIYVGTRAHLQADANGEHRYAYTAPQGEFELSLPAKACYLIDTETTVEQIAMHLAAEIKAAYPHDEIIVRAFEGIGKGAIATA

SEQ ID NO: 22292 - protein, 277 aa, Marinobacterium lutimaris
  misc_feature (1)..(277): tr|A0A1H6D586|A0A1H6D586_9GAMM 6-pyruvoyl tetrahydropte rin synthase OS=Marinobacterium lutimaris OX=568106 GN= SAMN05444390_10527 PE=4 SV=1
MKLFVENLTHVDFSYLDAQRGLLGESWKVNLILDGSLDDQGMICDFGVVKKRVKQWLDDFVDHCLVVAEEMPGLEVCRQQERTELSWTYPDGGELRCSAPKQAIAVVPGAAVTPTELADWCRQQLLALFPEQVQGVELEFIAEQIDGAYYHYSHGLQKHAGNCQRIAHGHRSRIQLLRNGQRDAALEAVWAEKFRDIYIGTREHLQAEGAIHHYVYDAPQGHFELSLPSRCCYDIDTESTVELIADHLAKQIKAACPQDRIEVRAFEGIGKGAVATA

SEQ ID NO: 22293 - protein, 277 aa, Marinobacterium mangrovicola
  misc_feature (1)..(277): tr|A0A4R1G9Q6|A0A4R1G9Q6_9GAMM 6-pyruvoyl tetrahydropte rin synthase-like protein OS=Marinobacterium mangrovico la OX=1476959 GN=CLV83_3429 PE=4 SV=1
MKLFVENLTHVDFSYLDAQRGLLGESWKVNLILDGSLDDQGMICDFGVVKKRVKQWLDDFVDHCLVVAEEMPGLEVFRGEERTELTWNYPAAGQLRCSAPKQAIALVPGSAVTPTDLADWCRQQLLALFPQQVQGVELEFVAEQIDGAYYHYSHGLQKHAGNCQRIAHGHRSRIQLLRNGQRDAALEAHWAEKFRDIYIGTREHLRAEGETHHYVYDAPQGHFELSLPASCCYDIDTESTVELIADHLAKQIKVDYPQDRIEVRAFEGIGKGAVATA

SEQ ID NO: 22294 - protein, 277 aa, Marinobacterium sp.
  misc_feature (1)..(277): tr|A0A081G2A0|A0A081G2A0_9GAMM NADPH dependent preQ0 re ductase OS=Marinobacterium sp. AK27 OX=1232683 GN=ADIMK _0607 PE=4 SV=1
MKLFVENLTHVDFSYIDPERGLLGESWAVNLILDGSLDQQGMICDFGTVKKRVKQWLDAQVDHCLVVATGLKGLNASRENGITRLSWTYPQGGEIRCSAPDQAIALIEVERVEEYSLAQWCRAQLLAIFPEQVSGVQLEFVPEHIDGAYYHYSHGLQQHAGNCQRIAHGHRSRIQLLRNGKRDFALEAQWAEALRDIYIGSRDHLQVVGDVHHYVYDAPQGHFELSLPARVCYDIETESTVERIAQHLAERIKFDYPQDAIEVRAFEGIGKGAIATA

SEQ ID NO: 22295 - protein, 107 aa, Marinobacterium sp.
  misc_feature (1)..(107): tr|A0A081FT93|A0A081FT93_9GAMM Putative queD like OS=Ma rinobacterium sp. AK27 OX=1232683 GN=ADIMK_4205 PE=4 SV =1
MEWIILLVVAFFVFVLVVQKLYANTPKHGEAEHRYRQRKTLFTAAERSFLGVLDSIIDPQQHRVFGKVRVADLIEPEPNRNRSQWQKAFNRISAKHFDFVICKADDL

SEQ ID NO: 22296 - protein, 280 aa, Marinobacterium stanieri
  misc_feature (1)..(280): tr|A0A1N6XPQ3|A0A1N6XPQ3_9GAMM 6-pyruvoyl tetrahydropte rin synthase OS=Marinobacterium stanieri OX=49186 GN=SA MN05421647_11525 PE=4 SV=1
MKLFVDNLTHVDFSYLHPERGLLGESWAVNLVLDGSLDTQGMICDFGVVKRRVKQWLDDQVDHRLVVPAQMERLTLEQDQGRTRVEWRYPSGERFICDAPEQAIAAVPLAEIDELGLAQWCRDQLLALFPDQVRGVDLAFVPESIDGHFYHYSHGLQQHDGNCQRIAHGHRSRIEIYRNDQRDEALEGIWAERFRDIYIGTRSHLQAESAEEHHYAYTAPQGEFELILPASVCYLMDSESTVEQIAAHLAAELQAEYPHDRIIVRAFEGIGKGAIAGDIA

SEQ ID NO: 22297 - protein, 146 aa, Marinococcus halophilus
  misc_feature (1)..(146): tr|A0A510Y6C8|A0A510Y6C8_MARHA 6-carboxy-5,6,7,8-tetrah ydropterin synthase OS=Marinococcus halophilus OX=1371 GN=queD PE=3 SV=1
MIYSYYPQWPHNYRYELNKDMHLSAAHYIPSEEAGKCRRVHGHTYTINVTVAGDELNQNGFLIDFTVLKKWIHKRYDHTMLNDHPEFASEETEAAYPTTEVVAQVIWKTVQQKLDETSNKPKCLQVLVRETPTSYAVFRPKEGDFS

SEQ ID NO: 22298 - protein, 146 aa, Marinococcus luteus
  misc_feature (1)..(146): tr|A0A1H2VFC0|A0A1H2VFC0_9BACI 6-carboxy-5,6,7,8-tetrah ydropterin synthase OS=Marinococcus luteus OX=1122204 G N=SAMN05421781_2062 PE=3 SV=1
MIYSYYPQWPHNYRYELNKDMHLSAAHYIPSEDAGKCRRVHGHTYTINVTVVGDELNRNGFLIDFTVLKKWIHKRYDHTLLNDHPEFASEETEAAYPTTEVVAQVIWKTVQQKLDETSNKPKCLQVLVRETPTSYAVFRPKEGDFA

SEQ ID NO: 22299 - protein, 293 aa, Marinomonas alcarazii
  misc_feature (1)..(293): tr|A0A318V725|A0A318V725_9GAMM 6-pyruvoyl tetrahydropte rin synthase-like protein OS=Marinomonas alcarazii OX=4 91949 GN=DFP75_101650 PE=4 SV=1
MKLFVKNLTHVDFSYFDAKRGLLGESWQTDIVLTGKLNDESMICDFSIVKKQIKKWLDDNIDHMLAIPAEHNGSTLTPLAGDRVSFHFDHSKEAAGDKRVFQCDAPAQAICVLPMTEVTPDAVAKWVEAQILNLLPAELEAVSVRFSPEHISGAQYQYSHGLKKHAGNCQRIAHGHRSTVEIYANGERNAAMEHDWATRWEDIYLGTQEDLINQVTENDVSYHCFSYTSQQGLFELKIDSNQVYMLDCDTTVESLSAHIADVLAEENPGTHIEAHGFEGIGKGAISEKVKARV

SEQ ID NO: 22300 - protein, 287 aa, Marinomonas aquimarina
  misc_feature (1)..(287): tr|A0A1A8T4N2|A0A1A8T4N2_9GAMM 6-pyruvoyl tetrahydropte rin synthase OS=Marinomonas aquimarina OX=295068 GN=MAQ 5080_00736 PE=4 SV=1
MKLFVKNLTHVDLSYFCPARGLLGESWQADIVLTGKLNDESMVCDFSIVKKMIKQWLDAHLDHTLAVPAQHPNTQLVTLDDERLRFVFAHDNGQRFECVAPSQAIAQLPMAEITPEQAAKWVEQQILNLLPAELEAVSVRFKPEATDEAHYQYSHGLKKHSGNCQRIAHGHRSVIEIYRNGERDRTLEQDWAERWHDIYLGTQEDLIGIIEEQGERYHHFSYAANQGLFELIIRSPQVYMLACDTTVESLSAHIAEQLAKENIGDSIEVHAFEGIGKGAISEVRIEK

SEQ ID NO: 22301 - protein, 287 aa, Marinomonas aquiplantarum
  misc_feature (1)..(287): tr|A0A366CW48|A0A366CW48_9GAMM 6-pyruvoyl tetrahydropte rin synthase-like protein OS=Marinomonas aquiplantarum OX=491951 GN=DFP76_107201 PE=4 SV=1
MKLFVKNLTHVDFSYYDAERGLLGESWQADIVLTGKLNDESMICDFSIVKKQIKKWLDDNIDHMLAIPAEHPSSQLIKLENNRVSFQFDHEDGRHFRCDAPSQAICSLPCQQITPSLAATWVEQQILDLLPAELEAVSIRFTPEPIAGAQYQYSHGLKKHAGNCQRIAHGHRSTIEIYRDGKADTALEHDWATRWQDIYLGTQEDLQEIVDINGRPHHYFSYTSQQGLFELTINSQQVYMLDCDTTVESLSAHVAYVLAHEHVGSLIEAHGFEGIGKGAISEYKVTK

SEQ ID NO: 22302 - protein, 287 aa, Marinomonas balearica
  misc_feature (1)..(287): tr|A0A4R6MEQ7|A0A4R6MEQ7_9GAMM 6-pyruvoyl tetrahydropte rin synthase-like protein OS=Marinomonas balearica OX=4 91947 GN=DFP79_0947 PE=4 SV=1
MKLFVKNLTHVDLSYFCPEHGVLGESWHTDVIITGGLNDESMICDFSIVKKQIKKWLDDNIDHTLALPMNHADSTLSALDDGRLRFVFKQADGYTFECDAPEQAYCSLPFDQITPDQVATWVETQILDLLPADVQGIEVRFYKEAISGSEYQYTHGLKKHAGNCQRIAHGHRSTIEIYRNGERDSALEQDWATRWENIYLGTNEDLLGIIDSNGKRHHHFSYVSQQGKFELKTRSDRVYMLDCDTTVESLSAHVADVLANENPGDQIEVHAFEGIGKGAISVKSINR

SEQ ID NO: 22303 - protein, 287 aa, Marinomonas communis
  misc_feature (1)..(287): tr|A0A4R6X7J7|A0A4R6X7J7_9GAMM 6-pyruvoyl tetrahydropte rin synthase-like protein OS=Marinomonas communis OX=28 254 GN=C8D85_0358 PE=4 SV=1
MKLFVKNLTHVDLSYFCPTRGVLGESWQADIVLTGKLNDESMVCDFSIVKKMIKQWLDAHLDHTLAVPGKNSATHLEELSDDRVAFSFQHENGQRFQCNAPTQAISVLPVEHITPENAARWVEEQILDLLPAELEAVSVKFHPESTTEAQYQYSHGLKKHDGNCQRIAHGHRSVIEIYRNGERDRTLEQDWSTRWNDIYLGTQDDLIGIIEEDQNRYHHFTYVAKQGLFELIIRSEQVYMLSCDTTVESLSAHIAEQLAQENPNDMIEVHAFEGIGKGAISEFKVSK

SEQ ID NO: 22304 - protein, 293 aa, Marinomonas foliarum
  misc_feature (1)..(293): tr|A0A368ZNA1|A0A368ZNA1_9GAMM 6-pyruvoyl tetrahydropte rin synthase-like protein OS=Marinomonas foliarum OX=49 1950 GN=DFP77_13939 PE=4 SV=1
MKLFVKNLTHVDFSYFDATRGLLGESWQTDIVLTGKLNDESMICDFSIVKKQIKKWLDDHIDHMLAIPAEHSGSAVTPLANDRVSFHFDHNKEISSDKRVFQCDAPTQAICVLPMTEITPEAVAKWVESQILNLLPAELEAVSVRFSPEHITGAQYQYSHGLKKHAGNCQRIAHGHRSTVEIYADGARNATIEHDWARRWEDIYLGTQEDLISQATENGVSYHCFSYTSQQGLFELKIDSNQVYMLDCDTTVESLSAHIADVLAEENPGVHIEAHGFEGIGKGAISEKLKART

SEQ ID NO: 22305 - protein, 287 aa, Marinomonas fungiae
  misc_feature (1)..(287): tr|A0A0K6IJS8|A0A0K6IJS8_9GAMM 6-pyruvoyl tetrahydropte rin synthase OS=Marinomonas fungiae OX=1137284 GN=Ga006 1065_103204 PE=4 SV=1
MKLFVKNLTHVDLSYFCPVRGVLGESWQADIVLTGKLNDESMVCDFSIVKKMIKQWLDAHLDHTLAIPAHHPNTRLVEMENERVSFKFQHDNGQRFECNAPSQAIAQLPVAEITPENAAQWVEQQILNLLPAELEAVSVRFHPEATDEANYQYSHGLKKHGGNCQRIAHGHRSVIEIYRNGERDRTLEQDWATRWQDIYLGTQEDLIGIIEEQGQRYHHFSYAANQGLFELTIRSPQVYMLPCDTTVESLSAHIAEQLAKENTGDTIEVHAFEGIGKGAISEMKVEK

SEQ ID NO: 22306 - protein, 287 aa, Marinomonas gallaica
  misc_feature (1)..(287): tr|A0A1C3JQ05|A0A1C3JQ05_9GAMM 6-pyruvoyl tetrahydropte rin synthase OS=Marinomonas gallaica OX=1806667 GN=MGA5 115_01351 PE=4 SV=1
MKLFVKNLTHVDLSYFCPVRGVLGESWQADIVLTGKLNDESMVCDFSIVKKMIKQWLDTHIDHKLAVPANHESSAIKTLDDGRSSFSFEHQNGQRFACTAPEQAFAQLPVDEITADNAAKWVEEQILDLLPAELEAVSVHFHPEHSNEAQYQYSHGLKKHDGNCQRIVHGHRSVIEIYRNGERDRTLDQDWSARWNDIYLGTQEDLIGIIDEDGQRYHHFSYAASQGLFELIIRSDQVYMLDCDSTVESLSSHVAQQLAKENPGDTIEVHAFEGIGKGAISEVKVEK

SEQ ID NO: 22307 - protein, 293 aa, Marinomonas hwangdonensis
  misc_feature (1)..(293): tr|A0A3M8Q7H0|A0A3M8Q7H0_9GAMM Uncharacterized protein OS=Marinomonas hwangdonensis OX=1053647 GN=EBI00_03440 PE=4 SV=1
MKLFVKNLTHVDFSYFDAKRGLLGESWQTDIVLTGKLNDESMICDFSIVKKQIKKWLDDNIDHMLAIPAEHEGSMLTPLANDRFAFLFDHSKETADDKRVFQCDAPTQAICVLPMTEVTPVAVAKWVESQILNLLPAELEAVSVRFTPEHITGAQYQYSHGLKKHAGNCQRIAHGHRSTVEIYADGARNATMEHDWAKRWEDIYLGTQEDLDKEITENDVNYHCFRYTSQQGLFELKIDSNQVYMLDCDTTVESLSAHIADVLAEENPGTHIEAHGFEGIGKGAISEKIQAKK

SEQ ID NO: 22308 - protein, 287 aa, Marinomonas mediterranea
  misc_feature (1)..(287): tr|F2K268|F2K268_MARM1 Uncharacterized protein OS=Marin omonas mediterranea (strain ATCC 700492 / JCM 21426 / N BRC 103028 / MMB-1) OX=717774 GN=Marme_1893 PE=4 SV=1
MKLFVKNLTHVDLSYFCPEQGVLGESWHTDVILDGGLNDESMICDFSIVKKQIKKWLDDNIDHTLALPMSHAKSTLRAMEDGRLHYLFEQEDGYTFECEAPEQAYCSLPFERITPDQVAQWVETQIVDLLPADIESVKVRFYKENIDGSEYQYTHGLKKHGGNCQRIAHGHRSTIEIYRNGDRDSSLEQDWAKRWEDIYLGTNEDLLGIIENNGKRHHHFAYVSMQGKFELKTRSDRVYMLDCDTTVESLSEHVAEVLAHENPGDQIEVHAFEGIGKGAISVKSINR

SEQ ID NO: 22309 - protein, 293 aa, Marinomonas polaris
  misc_feature (1)..(293): tr|A0A1M5CXQ6|A0A1M5CXQ6_9GAMM 6-pyruvoyl tetrahydropte rin synthase OS=Marinomonas polaris DSM 16579 OX=112220 6 GN=SAMN02745753_02283 PE=4 SV=1
MKLFVKNLTHVDFSYFDATRGLLGESWQTDIVLTGKLNDESMICDFSIVKKQIKKWLDDNIDHMLAIPAEHSGSTMTPLADDRVSFHFDHSKTTADDKRVFQCDAPTQAICVLPMTEVTPEAVAKWVESQILNLLPAELEAVSVRFSPEQITGAQYQYSHGLKKHAGNCQRIAHGHRSTVEIYTDGARNAAMEHDWAKRWEDIYLGTQEDLISQVTENGVHYHCFSYTSQQGLFELKIDSNQVYMLDCDTTVESLSAHIAEVLAEENPGTHIEAHGFEGIGKGAISEKIKARI

SEQ ID NO: 22310 - protein, 287 aa, Marinomonas pollencensis
  misc_feature (1)..(287): tr|A0A3E0DKS4|A0A3E0DKS4_9GAMM 6-pyruvoyl tetrahydropte rin synthase-like protein OS=Marinomonas pollencensis O X=491954 GN=DFP81_106204 PE=4 SV=1
MKLFVKNLTHVDLSYFDAERGLLGESWQTDIVLAGKLNDESMICDFSLVKKYIKKWLDDHIDHMLAIPTQHPNATLSPLKDDRVSFRFNHADGRRFQCDAPSQAICSLPMSEITPQAAAQWVEAQILDLLPAELEAVSVRFSSEKIDGAEYQYSHGLKKHAGNCQRIAHGHRSTIEIYEDGVRSAEREQDWAKRWEDSYLGTQEDLLGLIDEEQQHYHHFGYESAQGQFELIIDSQQVYMLDSDTTVESLSAHIANTLAMENPGKHFEVHAFEGIGKGAISEKTVSA

SEQ ID NO: 22311 - protein, 287 aa, Marinomonas posidonica
  misc_feature (1)..(287): tr|F6CYK7|F6CYK7_MARPP Uncharacterized protein OS=Marin omonas posidonica (strain CECT 7376 / NCIMB 14433 / IVI A-Po-181) OX=491952 GN=Mar181_1575 PE=4 SV=1
MKLFVKNLTHVDFSYFDAERGLLGESWQTDIVLTGKLNDESMICDFSIVKKQIKKWLDDNIDHMLAIPTEHPSSRLIELDNDRVSFQFDHEDGRHFQCDAPSQAICSLPCQQITPSLAAAWVEQQILDLLPAELEAVSIRFTPESISGAQYQYSHGLKKHAGNCQRIAHGHRSTIEIYRDGKADAALEQDWAKRWQDIYLGTQEDLQKVVDINGRPHHYFSYTSQQGLFELTIDSQQVYMLNCDTTVESLSAHVAYVLAHEQVGSLIEAHGFEGIGKGAISEYKVTK

SEQ ID NO: 22312 - protein, 292 aa, Marinomonas primoryensis
  misc_feature (1)..(292): tr|A0A2Z4PST4|A0A2Z4PST4_9GAMM Uncharacterized protein OS=Marinomonas primoryensis OX=178399 GN=A8139_11455 PE =4 SV=1
MKLFVKNLTHVDLSYFDTERGLLGESWQTDIVLTGKLNDESMICDFSIVKKHIKKWLDDHIDHMLAIPAEHVGSSLTKLSNDRVSFRFDHSKENPDDSRRFQCDAPTQAICVLPMAKITPDAAAKWVESQILNLLPAELEAVSVRFSPEKIDGAEYQYSHGLKKHAGNCQRIAHGHRSTVGIYADGIRNDAMEKDWADRWKDIYLGTQEDLDKFIEEDGRRYHCFSYTSQQGLFELMIDSNQVYMLDCDTTVESLSAHIANVLAQENPGTHIEAHGFEGIGKGAISDHKVSL

SEQ ID NO: 22313 - protein, 293 aa, Marinomonas profundimaris
  misc_feature (1)..(293): tr|W1S4T7|W1S4T7_9GAMM Uncharacterized protein OS=Marin omonas profundimaris OX=1208321 GN=D104_02795 PE=4 SV=1
MKLFVKNLTHVDLSYFDAQRGLLGESWQTDIVLAGKLNDESMICDFSIVKKQIKKWLDEHIDHMLAIPAEYAGTTLTPLANDRVSFQFDHSKETPNDHRRFQCDAPTQAICVLPMNDITPDAAAKWVESQILDLLPAELEAVSVRFFPEKIDGAEYQYSHGLKKHAGNCQRIAHGHRSTVEIYADGVRNDVMEQDWATRWNDIYLGTQDDLDKIIEENGRQYHGFRYTSQQGLFELVIDSNQVYMLDCDTTVESLSAHIADVLAEENPGVHIEAHGFEGIGKGAISEKIKART

SEQ ID NO: 22314 - protein, 293 aa, Marinomonas rhizomae
  misc_feature (1)..(293): tr|A0A366JDD3|A0A366JDD3_9GAMM 6-pyruvoyl tetrahydropte rin synthase-like protein OS=Marinomonas rhizomae OX=49 1948 GN=DFP80_103329 PE=4 SV=1
MKLFVKNLTHVDFSYFDAKRGLLGESWQTDIVLTGKLNDESMICDFSIVKKQIKKWLDDNIDHMLAIPAEHSGSRLTPLANDRASFLFDHSKATPDDKRVFQCDAPTQAICVLPMTDITPEAVAKWVESQILNLLPAELEAVSVHFAPEQIIGAQYQYSHGLKKHAGNCQRIAHGHRSTVEIYADGVRNQAMEHDWAQRWEDIYLGTQEDLVSQTFENGINYHGFSYTSQQGLFELKIDSNQVYMLDCDTTVESLSAHIADILAEENPGTHIEAHGFEGIGKGAISEKMKARI

SEQ ID NO: 22315 - protein, 293 aa, Marinomonas sp.
  misc_feature (1)..(293): tr|A0A2M8K122|A0A2M8K122_9GAMM Uncharacterized protein OS=Marinomonas sp. BSi20584 OX=1594462 GN=TY87_20065 PE =4 SV=1
MKLFVKNLTHVDFSYFDAKRGLLGESWQTDIVLTGKLNDESMICDFSIVKKQIKKWLDDNIDHMLAIPAEHSGSTMTPLADDRVSFHFDHSKATADDKRVFQCDAPTQAICVLPMTEVTPEAVAKWVESQILNLLPAELEAVSVRFSPEQITGAQYQYSHGLKKHSGNCQRIAHGHRSTVEIYTDGARNAAMEYDWAKRWEDIYLGTQEDLISQVTENGVNYHCFSYTSQQGLFELKIDSNQVYMLDCDTTVESLSAHIAEVLAEENLGTHIEAHGFEGIGKGAISEKIKARI

SEQ ID NO: 22316 - protein, 287 aa, Marinomonas sp.
  misc_feature (1)..(287): tr|A0A161YX46|A0A161YX46_9GAMM Uncharacterized protein OS=Marinomonas sp. TW1 OX=1561203 GN=OA79_00390 PE=4 SV =1
MKLFVKNLTHVDFSYYDAERGLLGESWQTDIVLTGKLNDESMICDFSIVKKQIKKWLDDNIDHMLAIPAEHPSSQLIELDHDRVSFQFDHEDGRHFQCDAPSQAICSLPCQQITPSLAARWVEQQILDLLPAELDAVSIRFTPEPIAGAQYQYSHGLKKHAGNCQRIAHGHRSTIEIYRDGKADSALEHDWAKRWQDIYLGTQEDLQKIVDINGRPHHYFRYTSQQGLFELTIDSQQVYMLDCDTTVESLSAHVAYVLAHEHVGSLIEAHGFEGIGKGAISEYKVTK

SEQ ID NO: 22317 - protein, 291 aa, Marinomonas spartinae
  misc_feature (1)..(291): tr|A0A1A8TJN2|A0A1A8TJN2_9GAMM 6-pyruvoyl tetrahydropte rin synthase OS=Marinomonas spartinae OX=1792290 GN=MSP 8886_02834 PE=4 SV=1
MKLFVNNLTQVDLSYFDAQRGLLGESWQTDVVLTGKLNDESMICDFSIVKKQIKKWLDEHIDHMLAIPVNHPNAHLTDMTQGRVSFQFDHDDGSRFRCDAPVQAICALPMENITPQTAASWVESQILDLLPAELEAVSIRFTPENIEGAQYQYSHGLKKHAGNCQRIAHGHRSTIKIYSDGQQDSELENQWAQRWHDIYLGTEDDLLGIIEEHGHHYHHFGYVSQQGFFELTINSQQVYMLNGDTTVESLSAHIAQTLAEENPGKHIEVHAFEGIGKGAISEKTFLKDVDA

SEQ ID NO: 22318 - protein, 161 aa, Marinoscillum furvescens
  misc_feature (1)..(161): tr|A0A3D9KWH0|A0A3D9KWH0_9BACT 6-pyruvoyltetrahydropter in/6-carboxytetrahydropterin synthase OS=Marinoscillum furvescens DSM 4134 OX=1122208 GN=C7460_12910 PE=4 SV=1
MGYRLPQISFLSLQPDFSRGMIYVSRKEHFNAAHKLYNTNWSHERNVEVFGPCANENWHGHNFELITTVKGMPDPETGFVVDLKQLSNLIRRDIIEKVDHKNLNLDVDFMKGKLASCESLIVEFWKILAPQVGDLGKQCELHSLKLYETPRNFVEFFGEGL

SEQ ID NO: 22319 - protein, 135 aa, Marinoscillum furvescens
  misc_feature (1)..(135): tr|A0A3D9L7D2|A0A3D9L7D2_9BACT 6-pyruvoyltetrahydropter in/6-carboxytetrahydropterin synthase OS=Marinoscillum furvescens DSM 4134 OX=1122208 GN=C7460_104278 PE=4 SV= 1
MKVAVFRKEHFNAAHRLYNPDWSEEQNEKVFGKCNNPNWHGHNYELVVKLVGEPDPDTGYVYDMKKLSDLIKEHVLKKFDHKNLNLDTEEFKSVNPTAENIAVVIYNTLREHIDDNLEMKVTLYETERNFVEYPA

SEQ ID NO: 22320 - protein, 139 aa, Marinoscillum sp.; identical to SEQ ID NO: 20366
  misc_feature (1)..(139): tr|A0A2D7TGQ5|A0A2D7TGQ5_9BACT 6-carboxytetrahydropteri n synthase QueD OS=Marinoscillum sp. OX=2024838 GN=CMG9 4_05230 PE=4 SV=1

SEQ ID NO: 22321 - protein, 117 aa, Marinovum algicola
  misc_feature (1)..(117): tr|A0A0H4L0Z1|A0A0H4L0Z1_9RHOB 6-carboxy-5,6,7,8-tetrah ydropterin synthase OS=Marinovum algicola DG 898 OX=988 812 GN=MALG_04175 PE=3 SV=1
MFRIRKEFHFSASHQLSHLPPDHQCARLHGHNYVVVVELAAETLNDDGFVRDYHDLKPLKSYIDDQFDHRHLNDIFDVPSTAEHMARHFYDWCAARWPETSAVMISETPKTWAEYRP

SEQ ID NO: 22322 - protein, 150 aa, Marinovum sp.; identical to SEQ ID NO: 21426
  misc_feature (1)..(150): tr|A0A2D7D2Q7|A0A2D7D2Q7_9RHOB 6-carboxytetrahydropteri n synthase QueD OS=Marinovum sp. OX=2024839 GN=CMH04_08 870 PE=4 SV=1

SEQ ID NO: 22323 - protein, 118 aa, Marinovum sp.
  misc_feature (1)..(118): tr|A0A2E7WGB0|A0A2E7WGB0_9RHOB 6-carboxy-5,6,7,8-tetrah ydropterin synthase OS=Marinovum sp. OX=2024839 GN=queD PE=3 SV=1
MYRISKEFHFSASHQLIDLPEDHQCARLHGHNYIVVVELTAESLNSHGFIRDYQDLTALKQYIDNNLDHRHLNEVLGHDQTTAERLAKHLYDWCAPHWPEVSAVKVSETPKTWAEYRP

SEQ ID NO: 22324 - protein, 124 aa, Mariprofundus aestuarium
  misc_feature (1)..(124): tr|A0A2K8L4U0|A0A2K8L4U0_9PROT 6-carboxy-5,6,7,8-tetrah ydropterin synthase OS=Mariprofundus aestuarium OX=1921 086 GN=Ga0123461_1591 PE=3 SV=1
MATFELSIQTHFSAAHSLRDYPGDCARLHGHNWHVKLYVECEELDELGLGIDYKIMKTELKAALEPWDHYNLNDVAPFDSINPSSENVARELYNEMSARLDDDRVRVSRVEISETCTAKVTYRP

SEQ ID NO: 22325 - protein, 122 aa, Mariprofundus ferrinatatus
  misc_feature (1)..(122): tr|A0A2K8L5Y7|A0A2K8L5Y7_9PROT 6-carboxy-5,6,7,8-tetrah ydropterin synthase OS=Mariprofundus ferrinatatus OX=19 21087 GN=Ga0123462_0789 PE=3 SV=1
MFELSIQTHFSAAHSLRGYPGDCARLHGHNWHVKLFVECKELDEIGLGIDYKIMKTELKAALDPWDHYNLNDVPPFDTINPSSENVARELYNEMSARLDNDRIRVSRIEISETCTAKVTYRP

SEQ ID NO: 22326 - protein, 124 aa, Mariprofundus ferrooxydans
  misc_feature (1)..(124): tr|Q0EY66|Q0EY66_9PROT 6-carboxy-5,6,7,8-tetrahydropter in synthase OS=Mariprofundus ferrooxydans PV-1 OX=31434 5 GN=SPV1_05347 PE=3 SV=1
MARFELSIETHFSAAHSLRDYPGDCARLHGHNWHVKLYVECTELDELGLGIDYKVLKSELKEALEPWDHYNLNDVPPFDRINPSSENVAAELYKKMSSRLDNERVRVSRIEICETCTAMVTYWP

SEQ ID NO: 22327 - protein, 124 aa, Mariprofundus micogutta
  misc_feature (1)..(124): tr|A0A1L8CJM3|A0A1L8CJM3_9PROT 6-carboxy-5,6,7,8-tetrah ydropterin synthase OS=Mariprofundus micogutta OX=19210 10 GN=MMIC_P0053 PE=3 SV=1
MARFELSIETHFSAAHSLRDYPGDCARLHGHNWHVKLYVECEELDSLGLGIDYKIMKTELKAALEPWDHYNLNDVAPFDVINPSSENVALELYKEMSGRLDNARLRVSRIEISETCTAKVTYWP

SEQ ID NO: 22328 - protein, 125 aa, Mariprofundus sp.
  misc_feature (1)..(125): tr|A0A498DIX0|A0A498DIX0_9PROT 6-carboxy-5,6,7,8-tetrah ydropterin synthase OS=Mariprofundus sp. EBB-1 OX=26509 71 GN=D8Y20_05320 PE=3 SV=1
MSATFELSIETHFSAAHSLRDYPGDCARLHGHNWHVKLYVVCEELDELGLGIDYKIMKTELKAALEPWDHYNLNDVAPFDAINPSSENVARELYHTMSSKLDDDRIHVSRIDISETCTAKVTYRP

SEQ ID NO: 22329 - protein, 291 aa, Marisediminitalea aggregata
  misc_feature (1)..(291): tr|A0A1M5IT04|A0A1M5IT04_9ALTE 6-pyruvoyl tetrahydropte rin synthase OS=Marisediminitalea aggregata OX=634436 G N=SAMN05216361_1797 PE=4 SV=1
MQLFVNDLTVMDFSYLCPERGMVGESWIVDVLLDGTLNEESMVQDFGIVKKNLKRLIDSYVDHKLLVPAECQATSIRHDDDTDYVEVNFTLAEQKAIQMYCPADAYAFIYAPTITMESVSEYLREVIATHLPDNVDNLTILLRTEVINTPFYHYTHGLKKHDGNCQRIAHGHRSKVDIITDGEIDLDSQAYWADRWCDIYIASEEDRISAEQLKLQQKLPSYQAHVCFAYEATQGYFEIVLPESQCEVITTDSTVECLAQFIYQQQKQRKPDTHCCVLAYEGVGKGARVSD

SEQ ID NO: 22330 - protein, 121 aa, Marispirochaeta aestuarii
  misc_feature (1)..(121): tr|A0A1Y1S031|A0A1Y1S031_9SPIO 6-carboxy-5,6,7,8-tetrah ydropterin synthase OS=Marispirochaeta aestuarii OX=196 3862 GN=B4O97_05480 PE=3 SV=1
MYQLRINGDFAAAHFLKNYHGKCENLHGHNYKVRVYLSGSRLDAGGMLIDFGIVKGHLKEVLAGLDHSNLNEHPFFSSGNPSAELIARYIYEEMAPRIPSVHLDRVEVFETENNVASYLPD

SEQ ID NO: 22331 - protein, 117 aa, Maritalea myrionectae
  misc_feature (1)..(117): tr|A0A2R4MHJ4|A0A2R4MHJ4_9RHIZ 6-carboxy-5,6,7,8-tetrah ydropterin synthase OS=Maritalea myrionectae OX=454601 GN=MXMO3_03014 PE=3 SV=1
MFRIRKEFHFSASHQLDHLPADHQCARLHGHNYIVVVELAAETLNEDGFVRDYHDLKPLKTYIDDHFDHRHLNDVMDGPSTAENMALHFYKWCHARWPETSAVLVSETPKTWAEYRP

SEQ ID NO: 22332 - protein, 118 aa, Maritimibacter sp.
  misc_feature (1)..(118): tr|A0A2U2CL92|A0A2U2CL92_9RHOB 6-carboxy-5,6,7,8-tetrah ydropterin synthase OS=Maritimibacter sp. 55A14 OX=2174 844 GN=queD PE=3 SV=1
MYRITKQFHFSAAHQLVGLPEDHPCARLHGHNYIAEVELSAETLDENGFVIDYRALEPLKRYIDETLDHRHLNEVFGHDGVTSEWLARRLFDWARARWPQVTAMRISETPKTWAEYRP

SEQ ID NO: 22333 - protein, 136 aa, Marivirga lumbricoides
  misc_feature (1)..(136): tr|A0A2T4DUM2|A0A2T4DUM2_9BACT 6-carboxy-5,6,7,8-tetrah ydropterin synthase OS=Marivirga lumbricoides OX=104611 5 GN=C9994_02600 PE=3 SV=1
MRVSVFRREHFNAAHRLHNSNWTDEKNEQVFGKCNNPNFHGHNYELEVKVTGEISPETGYVVDMKVLSDIIKSNIIDKFDHKNLNLDTEEFENLNPTAENIAVVIYQLLREKIETSLDVKIKLYETEKNYVEYPTE

SEQ ID NO: 22334 - protein, 139 aa, Marivirga lumbricoides
  misc_feature (1)..(139): tr|A0A2T4DHN2|A0A2T4DHN2_9BACT 6-carboxytetrahydropteri n synthase QueD OS=Marivirga lumbricoides OX=1046115 GN =C9994_13140 PE=4 SV=1
MVYVNRKEHFNAAHKLFNPNWSREKNEEVFGPCANENWHGHNFELIVTVKGTPDPDTGFVVDLKKLSTLIREDVINKVDHKNLNLDVPFLVGKMASCEVIISEFWKILAPKVAELQKGASLHKLTLYETPRNYVEYFGE

SEQ ID NO: 22335 - protein, 138 aa, Marivirga sericea
  misc_feature (1)..(138): tr|A0A1X7K0R6|A0A1X7K0R6_9BACT 6-pyruvoyltetrahydropter in/6-carboxytetrahydropterin synthase OS=Marivirga seri cea OX=1028 GN=SAMN05661096_02148 PE=4 SV=1
MVYVNRKEHFNAAHKLFNPNWSREKNEEVFGPCANENWHGHNFELIVTVKGEPDPDTGFVVDLKKLSNLIKSEVIDKVDHKNLNMDVPFLEGKMASCEIIIAEFWKILEPKVKDLQEGSSLHKLTLYETPRNFVEFYG

SEQ ID NO: 22336 - protein, 135 aa, Marivirga sericea
  misc_feature (1)..(135): tr|A0A1X7I8N7|A0A1X7I8N7_9BACT 6-carboxy-5,6,7,8-tetrah ydropterin synthase OS=Marivirga sericea OX=1028 GN=SAM N05661096_00333 PE=3 SV=1
MKVAVFRKEHFNAAHRLNNPKWTEEENREVFGKCNNPNFHGHNYELIVKVTGETDPDTGYVMDMKVLSDLIKERVLDRFDHKNLNLDTKEFSNLNPTAENIAVVIFNLLRGEIDPDKELKIKLYETERNYVEYPA

SEQ ID NO: 22337 - protein, 143 aa, Marivirga tractuosa
  misc_feature (1)..(143): tr|E4TR27|E4TR27_MARTH 6-carboxy-5,6,7,8-tetrahydropter in synthase OS=Marivirga tractuosa (strain ATCC 23168 / DSM 4126 / NBRC 15989 / NCIMB 1408 / VKM B-1430 / H-43 ) OX=643867 GN=Ftrac_2730 PE=3 SV=1
MKIYSDFMISITKEFSFETAHRISNHPASCKHIHGHSYRLFVTVSADEIQENDMIIDFKELKQIINEKVIKTFDHALVLKRNDENTKLAQNIDSNIFWMEFEPTVERLLDYIRKQIQNSLAEPVFLKKLKLYETATSFGEWEK

SEQ ID NO: 22338 - protein, 138 aa, Marivirga tractuosa
  misc_feature (1)..(138): tr|E4TP00|E4TP00_MARTH Uncharacterized protein OS=Mariv irga tractuosa (strain ATCC 23168 / DSM 4126 / NBRC 159 89 / NCIMB 1408 / VKM B-1430 / H-43) OX=643867 GN=Ftrac _3564 PE=4 SV=1
MVYVNRKEHFNAAHKLFNPNWSREKNEEVFGPCANENWHGHNFELIVTVKGEPDPDTGFVVDLKKLSNLIKSEVIDKVDHKNLNMDVPFLVGKMASCEVIIAEFWKILEPKVKQLQEGSSLHKLTLYETPRNFVEYYG

SEQ ID NO: 22339 - protein, 131 aa, Marivita cryptomonadis
  misc_feature (1)..(131): tr|A0A1X4NVB4|A0A1X4NVB4_9RHOB 6-pyruvoyl tetrahydropte rin synthase OS=Marivita cryptomonadis OX=505252 GN=MCR Y_15635 PE=4 SV=1
MFAVEVRDHIMIGHSLPSPVFGPAQGMHGATFTVDAAFFTDDIDEHGLVVDIGLATEALAETLAPLRYKNLDEVPEFKGKFTTTEFLCGHIFKTLADHVRTGKLADNSRVKKIRIMLHESHVARAWYEAEV

SEQ ID NO: 22340 - protein, 131 aa, Marivita hallyeonensis
  misc_feature (1)..(131): tr|A0A1M5S755|A0A1M5S755_9RHOB 6-pyruvoyl-tetrahydropte rin synthase OS=Marivita hallyeonensis OX=996342 GN=SAM N05443551_2028 PE=4 SV=1
MFAVEVRDHIMIAHSLPSPVFGPAQGMHGATFVVDAAFYTKDLDENGLVVDIGLATEALSKVLAPLNYANLDEVPAFKGKITTTEFLCHRIWTQLRETVKTTGLGDGGRVCRIKVSLEESHVARGWYEADV

SEQ ID NO: 22341 - protein, 117 aa, Marivivens niveibacter
  misc_feature (1)..(117): tr|A0A251WYF5|A0A251WYF5_9RHOB 6-carboxy-5,6,7,8-tetrah ydropterin synthase OS=Marivivens niveibacter OX=193066 7 GN=BVC71_11595 PE=3 SV=1
MFRISKEFHFSASHQLTHLPDDHQCARLHGHNYIVVVELSGAELNSDGFVRDYHELKPLKSYIDDNFDHRHLNDVMEGYSTAENMAKHFYDWCKARWPETSAVKVSETPKTWAEYRP

SEQ ID NO: 22342 - protein, 136 aa, Marixanthomonas ophiurae
  misc_feature (1)..(136): tr|A0A3E1Q677|A0A3E1Q677_9FLAO 6-carboxy-5,6,7,8-tetrah ydropterin synthase OS=Marixanthomonas ophiurae OX=3876 59 GN=DZ858_15040 PE=3 SV=1
MSLTVFRKAHFNAAHRLFVKEWSDEKNREFFGKCSNPNYHGHNYELEVGVTGEIDFKTGYLIDLDFLKTIIKEEVEDPFDHKNLNVEVEQFKSLNPTVENIAIVIWNKLRKRLDDKFEISVKLYETPRNFVVYTGK

SEQ ID NO: 22343 - protein, 149 aa, Marixanthomonas ophiurae
  misc_feature (1)..(149): tr|A0A3E1QAS8|A0A3E1QAS8_9FLAO 6-carboxy-5,6,7,8-tetrah ydropterin synthase OS=Marixanthomonas ophiurae OX=3876 59 GN=DZ858_03995 PE=3 SV=1
MSKIRITKQFSFETGHALYGYDGKCRNVHGHSYKLSVTVIGTPIDNNNNVKYGMVIDFSDLKKIVKEDIVDVFDHATVFNKNTPHVELAKELQDRDHNVLLVDYQPTSEMMVIDFAEKIKNRLPNTIQLHSLKLQETATSYAEWYASDN

SEQ ID NO: 22344 - protein, 149 aa, Marixanthomonas sp.
  misc_feature (1)..(149): tr|A0A2U0I298|A0A2U0I298_9FLAO 6-carboxy-5,6,7,8-tetrah ydropterin synthase OS=Marixanthomonas sp. HN-E44 OX=21 74845 GN=DDV96_07410 PE=3 SV=1
MSKIRITKQFSFETGHALYGYDGKCRNVHGHSYKLSVTVIGTPIDDTDHVKYGMVIDFGDLKKIVKEEIVDVFDHATVFNKNTPHVELAKELKNRDHNVLLVDYQPTSEMMVIDFAEKLKKRLPHNLQLHSLKLQETATSYAEWYASDN

SEQ ID NO: 22345 - protein, 135 aa, Marixanthomonas sp.
  misc_feature (1)..(135): tr|A0A2U0I5F2|A0A2U0I5F2_9FLAO 6-carboxy-5,6,7,8-tetrah ydropterin synthase OS=Marixanthomonas sp. HN-E44 OX=21 74845 GN=DDV96_03500 PE=3 SV=1
MSLTVFRKAHFNAAHRLYVKEWSDEKNRDYFGKCSNPNYHGHNYELEVGVTGKVDPKTGYLINLETLKTIIKEEVEVPLDHKNLNIEVEEFKTLNPTVENIAIVIWNKLRNRLDDTFEISVKLYETPRNFVIYTG

SEQ ID NO: 22346 - protein, 130 aa, Marmoricola pocheonensis
  misc_feature (1)..(130): tr|A0A3N0GRF8|A0A3N0GRF8_9ACTN 6-carboxytetrahydropteri n synthase OS=Marmoricola pocheonensis OX=661485 GN=EFL 26_09910 PE=4 SV=1
MFRVNVRDHVMIAHSLQGEVFGPAQRLHGATYVVDATFAGERLDTDGIVVDIGRASEEVRSVLADLNYRNLDDDPGLGNTTTEALAQLVADRLADRVHAGALGEAARDLATITVTLHESHVAWASYERAL

SEQ ID NO: 22347 - protein, 126 aa, Marmoricola solisilvae
  misc_feature (1)..(126): tr|A0A3N0DYF6|A0A3N0DYF6_9ACTN 6-carboxytetrahydropteri n synthase OS=Marmoricola solisilvae OX=1542737 GN=EFL9 5_14720 PE=4 SV=1
MFSVTVRDHVMIAHSFTGEVFGPAQRLHGATYVVDATFRGPDLGPDGILLDIGLAASELKDVLAAVNYRNLDDEDEFKGTNTSTEAVARWVADRLADRLGDDPLLTGLQVTLHESHVAWAAYERPL

SEQ ID NO: 22348 - protein, 132 aa, Martelella endophytica
  misc_feature (1)..(132): tr|A0A0D5LQ75|A0A0D5LQ75_9RHIZ 6-pyruvoyl tetrahydropte rin synthase OS=Martelella endophytica OX=1486262 GN=TM 49_09850 PE=4 SV=1
MFAVEVRDHIMIAHSLPRPVFGPAQAMHGATFVTDAAFFTNDLDEDGLAVDIGAATTVLGEVLKPLNYQNLDELEALKGKVTTTEVIAKYIFDQLARAVSESRLGPGSGRIRKIRVTLHESHAARGWYEAEL

SEQ ID NO: 22349 - protein, 132 aa, Martelella mediterranea
  misc_feature (1)..(132): tr|A0A1U9Z427|A0A1U9Z427_9RHIZ Queuosine biosynthesis p rotein QueD OS=Martelella mediterranea DSM 17316 OX=112 2214 GN=Mame_03145 PE=4 SV=1
MFAVEVRDHIMIAHSLPRPVFGPAQGMHGATFVVDAAFFTEDVDDDGLAVDIGAATETLAEVLKPLNYQNLDEVEAFNGKISTTEVIAKHIFDRLAAAVGEKKLGPGSHRIAKIRVTLHESHAARGWYEGAL

SEQ ID NO: 22350 - protein, 132 aa, Martelella mediterranea
  misc_feature (1)..(132): tr|A0A2T0JE88|A0A2T0JE88_9RHIZ 6-pyruvoyl-tetrahydropte rin synthase OS=Martelella mediterranea OX=293089 GN=BC L66_11585 PE=4 SV=1
MFAVEVRDHIMIAHSLPRPVFGPAQAMHGATFVTDAAFFTQDLDQDGLAVDIGAATEVLSEVLKPLNYQNLDELDALKGKVTTTEVIAKFIFDRLAEAVAEGRLGAGSHRICRIRVTLHESHAARGWYEADL

SEQ ID NO: 22351 - protein, 132 aa, Martelella sp.
  misc_feature (1)..(132): tr|A0A127CMT6|A0A127CMT6_9RHIZ 6-pyruvoyl tetrahydropte rin synthase OS=Martelella sp. AD-3 OX=686597 GN=AZF01_ 18955 PE=4 SV=1
MFAVEVRDHIMIAHSLPRPVFGPAQAMHGATFVTDAAFFTADLDEDGLAVDIGAATTVLGDVLKPLNYQNLDELQAFSGKVTTTEVIAKYIFDQLAEAVAEGRLGPGSDRIRKIRVTLHESHAARGWYEADL

SEQ ID NO: 22352 - protein, 132 aa, Martelella sp.
  misc_feature (1)..(132): tr|A0A2E1B865|A0A2E1B865_9RHIZ Uncharacterized protein OS=Martelella sp. OX=1969699 GN=CMH13_11370 PE=4 SV=1
MFAVEVRDHIMIAHSLPRPVFGPAQGMHGATFVVDAAFFTEDVDDDGLAVDIGAATATLAEVLKPLNYQNLDEVEAFNGKISTTEVIAKHIFDQLAAAVGDKKLGPGSHRIAKIRVTLHESHAARGWYEGAL

SEQ ID NO: 22353 - protein, 148 aa, Massilia albidiflava
  misc_feature (1)..(148): tr|A0A411WY80|A0A411WY80_9BURK 6-carboxy-5,6,7,8-tetrah ydropterin synthase OS=Massilia albidiflava OX=321983 G N=queD PE=3 SV=1
MLTITRKLEFDAGHRIPDHKSQCRNLHGHRYTLEITLTGEVIAAEGNSDNGMIMDFSDVKALAKEHLVDVWDHAFLVYEKDSAVKEFLASLPGHKTVVIDRIPTVENLAAVAFGILKAAYKDRYGTGLKLHKLVLHETPNCWAEITDA

SEQ ID NO: 22354 - protein, 148 aa, Massilia armeniaca
  misc_feature (1)..(148): tr|A0A2R4CB25|A0A2R4CB25_9BURK 6-carboxy-5,6,7,8-tetrah ydropterin synthase OS=Massilia armeniaca OX=2072590 GN =queD PE=3 SV=1
MLTITRKLEFDAGHRIPDHKSQCRNLHGHRYTLEITLTGQVITAEGNSDNGMIMDFSDVKAIAKAHLVDVWDHAFLVYDKDTAVKEFLASLPNHKTVVIDRIPTVENLAAVAFGILKAAFKDRYGTGLHLHKLVLHETPNCWAEIVEG

SEQ ID NO: 22355 - protein, 147 aa, Massilia aurea
  misc_feature (1)..(147): tr|A0A422QN72|A0A422QN72_9BURK 6-carboxy-5,6,7,8-tetrah ydropterin synthase OS=Massilia aurea OX=373040 GN=NM04 _06930 PE=3 SV=1
MLTITRKLEFDAGHRIPDHKSQCRNLHGHRYTLEITLTGQVIDSDGNSDNGMIMDFSDVKALAKQHLVDVWDHAFIVYEKDDKVREFLASLPDHKTIVIDRIPTVENLAQVAFDILKAVFIDRYGTGLRLHKLVLHETPNCWAEITE

SEQ ID NO: 22356 - protein, 148 aa, Massilia eurypsychrophila
  misc_feature (1)..(148): tr|A0A2G8TGE0|A0A2G8TGE0_9BURK 6-carboxytetrahydropteri n synthase QueD OS=Massilia eurypsychrophila OX=1485217 GN=queD PE=4 SV=1
MLTITRKLEFDAGHRIPDHKSQCRNLHGHRYTLEITLTGAVIDVEGSSDNGMIMDFSDIKSLAKEHLVDVWDHAFIVYERDDAVREFLATLPGHKTVVIDRIPTVENLARVAFDILKAVFKDRFGTGLHLHKLVLHETPNCWAEITDA

SEQ ID NO: 22357 - protein, 148 aa, Massilia flava
  misc_feature (1)..(148): tr|A0A562PQ23|A0A562PQ23_9BURK 6-carboxy-5,6,7,8-tetrah ydropterin synthase OS=Massilia flava OX=871742 GN=IP92 _02868 PE=3 SV=1
MLTITRKLEFDAGHRIPDHKSQCRNLHGHRYTLEITLTGQVIAAEGNSDNGMIMDFSDVKALAKEHLVDVWDHAFLVYEKDTAVKEFLASLPNHKTVVIDRIPTVENLAAVAFDILKAAYKDRYGTGLKLHKLVLHETPNCWAEITDN

SEQ ID NO: 22358 - protein, 148 aa, Massilia glaciei
  misc_feature (1)..(148): tr|A0A2U2HJP1|A0A2U2HJP1_9BURK 6-carboxytetrahydropteri n synthase QueD OS=Massilia glaciei OX=1524097 GN=queD PE=4 SV=1
MLTITRKLEFDTGHRIPDHKSQCRNLHGHRYTLEITLTGAVIEVEGNSDNGMIMDFSDIKALAKEHLVDIWDHAFIVYEKDDKVREFLASLPGHKTVVIDRIPTVENLAQVAFGILKAAYSDRFGTGLRLHKLVLHETPNCWAEITDA

SEQ ID NO: 22359 - protein, 151 aa, Massilia lurida
  misc_feature (1)..(151): tr|A0A562RJT2|A0A562RJT2_9BURK 6-pyruvoyltetrahydropter in/6-carboxytetrahydropterin synthase OS=Massilia lurid a OX=1036180 GN=IP91_00249 PE=4 SV=1
MLTITRKLEFDAGHRIPDHKSQCRNLHGHRYTLEITLTGQVITAEGNSDNGMIMDFSDVKALAKAHLVDVWDHAFLVYDRDTSVKEFLSSLPDHKTVVIDRIPTVENLAAVAFDILKAAYKDRYGTGLRLHKLVLHETPNCWAEISDDGHA

SEQ ID NO: 22360 - protein, 148 aa, Massilia lutea
  misc_feature (1)..(148): tr|A0A4P6L4D4|A0A4P6L4D4_9BURK 6-carboxytetrahydropteri n synthase QueD OS=Massilia lutea OX=321985 GN=queD PE= 4 SV=1
MLTITRKLEFDAGHRIPDHKSQCRNLHGHRYTLEITLAGEVISAEGNSDNGMIMDFSDVKALAKEHLVDVWDHAFLVYDKDAAVKEFLASLPGHKTVVIDRIPTVENLAAVAFNILKAAYKDRYGTGLKLHKLVLHETPNCWAEITDA

SEQ ID NO: 22361 - protein, 149 aa, Massilia namucuonensis
  misc_feature (1)..(149): tr|A0A1I7M648|A0A1I7M648_9BURK 6-carboxy-5,6,7,8-tetrah ydropterin synthase OS=Massilia namucuonensis OX=103570 7 GN=SAMN05216552_10619 PE=3 SV=1
MLTITRKLEFDAGHRIPDHKSQCRNLHGHRYTLEITLTGQVINAEGNSDNGMIMDFSDVKALAKEHLVDVWDHAFLVYEKDSAVKEFLASLPNHKTVVIDRIPTVENLAQVAFDILKAAYKDRYGTGLHLHKLVLHETPNCWAEITDGA

SEQ ID NO: 22362 - protein, 147 aa, Massilia oculi; identical to SEQ ID NO: 22355
  misc_feature (1)..(147): tr|A0A2S2DQ58|A0A2S2DQ58_9BURK 6-carboxy-5,6,7,8-tetrah ydropterin synthase OS=Massilia oculi OX=945844 GN=queD PE=3 SV=1

SEQ ID NO: 22363 - protein, 148 aa, Massilia phosphatilytica
  misc_feature (1)..(148): tr|A0A2S8HAD5|A0A2S8HAD5_9BURK 6-carboxy-5,6,7,8-tetrah ydropterin synthase OS=Massilia phosphatilytica OX=2026 176 GN=queD PE=3 SV=1
MLTITRKLEFDAGHRIPDHKSQCRNLHGHRYTLEITLTGAVIDVEGNSDNGMIMDFSDIKALAKEHLVDVWDHAFLVYEKDEAVRGFLASLPNHKTVVIDRIPTVENLAQVAWNILKAAYTDRYGTGLRLQKLVLHETPNCWAEITDV

SEQ ID NO: 22364 - protein, 148 aa, Massilia plicata
  misc_feature (1)..(148): tr|A0A4P7B9I4|A0A4P7B9I4_9BURK 6-carboxy-5,6,7,8-tetrah ydropterin synthase OS=Massilia plicata OX=321984 GN=qu eD PE=3 SV=1
MLTITRKLEFDAGHRIPDHKSQCRNLHGHRYTLEITLTGQVITAEGNSDNGMIMDFSDVKAIAKAHLVDVWDHAFLVYEKDHAVKEFLASLPDHKTVVIDRIPTVENLAAVAFGILKAAFKDRYGTGLHLHKLVLHETPNCWAEIVED

SEQ ID NO: 22365 - protein, 148 aa, Massilia psychrophila
  misc_feature (1)..(148): tr|A0A2G8T3G1|A0A2G8T3G1_9BURK 6-carboxy-5,6,7,8-tetrah ydropterin synthase OS=Massilia psychrophila OX=1603353 GN=queD PE=3 SV=1
MLTITRKLEFDAGHRIPDHKSQCRNLHGHRYTLEITLTGAVIEVEGNSDNGMIMDFSDIKSLAKEHLVDVWDHAFLVYQKDDAVREFLATLPGHKTVVIDRIPTVENLARVAFDILKAAYTDRFGTGLHLHKLVLHETPNCWAEITDG

SEQ ID NO: 22366 - protein, 148 aa, Massilia sp.
  misc_feature (1)..(148): tr|A0A0Q5HTL0|A0A0Q5HTL0_9BURK 6-carboxy-5,6,7,8-tetrah ydropterin synthase OS=Massilia sp. Leaf139 OX=1736272 GN=ASF77_05450 PE=4 SV=1
MLTITRKLEFDAGHRIPDHKSQCRNLHGHRYTLEITLVGEVIQAEGNSDNGMIMDFSDIKALAKEHLVDVWDHAFIVYEKDEKVREFLASLPGHKTVVIDRIPTVENLAQVAFGILKAAYTDRFGTGLHLHKLVLHETPNCWAEITDA

SEQ ID NO: 22367 - protein, 148 aa, Massilia sp.; identical to SEQ ID NO: 20099
  misc_feature (1)..(148): tr|A0A344JCS5|A0A344JCS5_9BURK 6-carboxy-5,6,7,8-tetrah ydropterin synthase OS=Massilia sp. YMA4 OX=1593482 GN= queD PE=3 SV=1

SEQ ID NO: 22368 - protein, 147 aa, Massilia timonae; identical to SEQ ID NO: 22355
  misc_feature (1)..(147): tr|A0A1S2N7V8|A0A1S2N7V8_9BURK 6-carboxy-5,6,7,8-tetrah ydropterin synthase OS=Massilia timonae OX=47229 GN=que D PE=3 SV=1

SEQ ID NO: 22369 - protein, 147 aa, Massilia timonae; identical to SEQ ID NO: 22355
  misc_feature (1)..(147): tr|K9DRF9|K9DRF9_9BURK 6-carboxy-5,6,7,8-tetrahydropter in synthase OS=Massilia timonae CCUG 45783 OX=883126 GN =HMPREF9710_04793 PE=3 SV=1

SEQ ID NO: 22370 - protein, 148 aa, Massilia umbonata
  misc_feature (1)..(148): tr|A0A4P8HLJ7|A0A4P8HLJ7_9BURK 6-carboxytetrahydropteri n synthase QueD OS=Massilia umbonata OX=864828 GN=queD PE=4 SV=1
MLTITRKLEFDAGHRIPDHKSQCRNLHGHRYTLEITLTGEVISSEGNSDNGMIMDFSDVKALAKEHLVDVWDHAFLVYDKDSAVKEFLASLPGHKTVVIDRIPTVENLAAVAFGILKAAYKDRYGTGLKLHKLVLHETPNCWAEITDA

SEQ ID NO: 22371 - protein, 148 aa, Massilia violaceinigra
  misc_feature (1)..(148): tr|A0A2D2DQ29|A0A2D2DQ29_9BURK 6-carboxytetrahydropteri n synthase QueD OS=Massilia violaceinigra OX=2045208 GN =queD PE=4 SV=1
MLTITRKLEFDAGHRIPDHKSQCRNLHGHRYTLEITLTGAVIHAEGNSDNGMIMDFSDIKALAKEHLVDVWDHAFLVYEKDDKVREFLASLPGHKTVVIDRIPTVENLAQIAFDILKAAYTDRFGTGLHLHKLVLHETPNCWAEITDA

SEQ ID NO: 22372 - protein, 148 aa, Massilia yuzhufengensis
  misc_feature (1)..(148): tr|A0A1I1QXE5|A0A1I1QXE5_9BURK 6-pyruvoyltetrahydropter in/6-carboxytetrahydropterin synthase OS=Massilia yuzhu fengensis OX=1164594 GN=SAMN05216204_12074 PE=4 SV=1
MLTITRKLEFDAGHRIPDHKSQCRNLHGHRYTLEITLTGEVIDAEGNSDNGMIMDFSDVKTLAKAHLVDVWDHAFLVYEKDDKVREFLASLPGHKTVVIDCIPTVENLARVAFTILKTVFTDRYGTGLRLHKLVLHETPNCWAEVTDA

SEQ ID NO: 22373 - protein, 129 aa, Mastigocladus laminosus; identical to SEQ ID NO: 21094
  misc_feature (1)..(129): tr|A0A4D9CEU5|A0A4D9CEU5_MASLA 6-carboxy-5,6,7,8-tetrah ydropterin synthase OS=Mastigocladus laminosus UU774 OX =1594576 GN=BLD44_019690 PE=3 SV=1

SEQ ID NO: 22374 - protein, 290 aa, Mastigocladus laminosus
  misc_feature (1)..(290): tr|A0A4D9CFV0|A0A4D9CFV0_MASLA 6-pyruvoyl tetrahydropte rin synthase OS=Mastigocladus laminosus UU774 OX=159457 6 GN=BLD44_011750 PE=4 SV=1
MQCVVNRRAQFSASHRYWLPELSEAENLEKFGACSRFPGHGHNYVLFVSLIGELDKYGMVLNLSDVKHVIKQEVTSQLDFSYLNDVWAEFQQILPTTENIARVIWQKLAPHLPLVRVQLFENPELWADYMGNGMEAYLSVSTHFSAAHRLAHPDISDQDNFEIYGKCARPNGHGHNYHLEVTVKGEIDSRTGMIVDLGALNQVIEDYVVEPFDHTFLNKDISYFSEVVPTAENIALHISNLLRSPIEKLGAKLYKVKLIESPNNSCEIYCTDTESNSVNIAETQPVLARI

SEQ ID NO: 22375 - protein, 290 aa, Mastigocoleus testarum
  misc_feature (1)..(290): tr|A0A0V7ZVB6|A0A0V7ZVB6_9CYAN 6-pyruvoyl tetrahydropte rin synthase OS=Mastigocoleus testarum BC008 OX=371196 GN=BC008_33600 PE=4 SV=1
MQCIVNRRAQFSASHRYWLPELSESENKDKFGACSRFPGHGHNYVLFISLAGELDEYGMVLNLSDVKQVIKKEVTSQLDFSYLNDVWEEFQETLPTTENIARIIWQRLVPQLPLVRVQLFEHPELWAEYMGNGMESYLTVSTHFSAAHRLAHPDLSLENNFEIYGKCARPNGHGHNYHLEVTVKGEIDGRTGMIVDLGELNQVIEDLVVEPFDHTFLNKDIPHFASVVPTAENIALHISNLLQSPIKELGAKLHKVKLIESPNNSCEIYCTESGDNSQTGVQNQPVLMQV

SEQ ID NO: 22376 - protein, 129 aa, Mastigocoleus testarum
  misc_feature (1)..(129): tr|A0A0V7ZS14|A0A0V7ZS14_9CYAN 6-carboxy-5,6,7,8-tetrah ydropterin synthase OS=Mastigocoleus testarum BC008 OX= 371196 GN=BC008_29825 PE=3 SV=1
MPKWKLVTEFSFSSAHYIKDYDGPCGRMHGHNYTVKMEATASELHTSEYCPHPVMVADFRTLRWAKRDVTKGGLDHCILNEVMPPEYETTAEMIAKYIYDKTKKILPTGVKLKVSVSETPNSWAEYEDD

SEQ ID NO: 22377 - protein, 111 aa, Mediterranea sp.
  misc_feature (1)..(111): tr|A0A1Y4HMW3|A0A1Y4HMW3_9BACT 6-carboxy-5,6,7,8-tetrah ydropterin synthase OS=Mediterranea sp. An20 OX=1965586 GN=B5F34_06765 PE=3 SV=1
MYTVIKRMEISAAHRLQLSYPSKCQQLHGHNWIITVYCRARELNQDGMVTDFTHIKQLVQDTLDHRNLNDILSFNPTAENIARWLCDRIEHCYRVDVQESEGNTAIYEKED

SEQ ID NO: 22378 - protein, 125 aa, Megamonas funiformis
  misc_feature (1)..(125): tr|H3K495|H3K495_9FIRM 6-carboxy-5,6,7,8-tetrahydropter in synthase OS=Megamonas funiformis YIT 11815 OX=742816 GN=HMPREF9454_00068 PE=3 SV=1
MFELVVNGAFEAAHRLVDYPGKCNRLHGHSWTVEMSVSGDKLDNIGMVADFKVLKSMLMEVLDAMDHQYLNELPQFKELNPTAEHLAKYIYETIEANDLFKTNCKLNYIKVWESPKAAVIYRKDA

SEQ ID NO: 22379 - protein, 61 aa, Megamonas funiformis
  misc_feature (1)..(61): tr|H3K9I0|H3K9I0_9FIRM Uncharacterized protein OS=Megam onas funiformis YIT 11815 OX=742816 GN=HMPREF9454_01903 PE=4 SV=1
MRSITKLDLQYAHRFYGFKGEAQYLHGHTGVLTIEVEGSINSGVNMVFPCNEIQKTAWEVF

SEQ ID NO: 22380 - protein, 188 aa, Megamonas hypermegale
  misc_feature (1)..(188): tr|A0A239U2V8|A0A239U2V8_9FIRM Queuosine biosynthesis p rotein QueD OS=Megamonas hypermegale OX=158847 GN=SAMEA 4364220_01986 PE=4 SV=1
MRSITKLDLQYAHRFYGFKGEAQYLHGHTGVLTIEVEGSINSGVNMVFPCNEIQKTAWEVLKNFDHALILREDDPLLPAILDVYEKQGIKGGAPNNIMKGPAFKTELATAYPDCRLVVTKETMTVEGMIKIVYDLLKDKLNIVKLTFSSGVNLASEEYEPHLDVDRCPLCGIALENGVCPKCGYKKPN

SEQ ID NO: 22381 - protein, 188 aa, Megamonas hypermegale
  misc_feature (1)..(188): tr|A0A378NV65|A0A378NV65_9FIRM Queuosine biosynthesis p rotein QueD OS=Megamonas hypermegale OX=158847 GN=NCTC1 0571_02422 PE=4 SV=1
MRSITKLDLQYAHRFYGFKGEAQYLHGHTGVLTIEVEGSINSGVNMVFPCNEIQKTAWEVLKNFDHALILREDDPLLPAILGVYEKQGIKDGAPNNVMKGPAFKTELATAYPDCRLVVTKETMTVEGMIKIVYELLKDKLNIVKLTFSSGVNLASEEYEPHLEVDRCPLCGIALNENGVCPKCGYKKP

SEQ ID NO: 22382 - protein, 125 aa, Megamonas rupellensis; identical to SEQ ID NO: 22378
  misc_feature (1)..(125): tr|A0A412CEP2|A0A412CEP2_9FIRM 6-carboxy-5,6,7,8-tetrah ydropterin synthase OS=Megamonas rupellensis OX=491921 GN=queD PE=3 SV=1

SEQ ID NO: 22383 - protein, 188 aa, Megamonas rupellensis
  misc_feature (1)..(188): tr|A0A412CD53|A0A412CD53_9FIRM Rubredoxin OS=Megamonas rupellensis OX=491921 GN=DWY77_09465 PE=4 SV=1
MRSITKLDLQYAHRFYGFKGEAQYLHGHTGVLTIEVEGSINSGVNMVFPCNEIQKTAWEVLKNFDHALILREDDPLLPAILGVYEKQGIKDGAPNNVMKGPAFKTELATAYPDCRLVVTKETMTVEGMIKIVYELLKDKLNIVKLTFSSGVNLASEEYAPHLEVDRCPLCGIALNENGVCPKCGYKKP

SEQ ID NO: 22384 - protein, 125 aa, Megamonas sp.; identical to SEQ ID NO: 22378
  misc_feature (1)..(125): tr|A0A1H8G0D2|A0A1H8G0D2_9FIRM 6-carboxy-5,6,7,8-tetrah ydropterin synthase OS=Megamonas sp. Calf98-2 OX=185533 0 GN=SAMN05216340_11636 PE=3 SV=1

SEQ ID NO: 22385 - protein, 109 aa, Megasphaera cerevisiae
  misc_feature (1)..(109): tr|A0A0J6X0Y5|A0A0J6X0Y5_9FIRM 6-pyruvoyl tetrahydropte rin synthase OS=Megasphaera cerevisiae DSM 20462 OX=112 2219 GN=AB840_00045 PE=4 SV=1
MYTVIKKLEISAAHHLVLDYESKCENLHGHNWIIYVTCQAESLDANGMVIDFKKIKELIHGTMDHHNLNDVFDFNPTAENIAKWICDTVPNCVRAEVRESEGNTAVYEK

SEQ ID NO: 22386 - protein, 109 aa, Megasphaera elsdenii
  misc_feature (1)..(109): tr|G0VPJ6|G0VPJ6_MEGEL Putative queuosine biosynthesis protein QueD OS=Megasphaera elsdenii DSM 20460 OX=10645 35 GN=MELS_1152 PE=4 SV=1
MYTVTKRMEVSAAHHLVLDYESKCEHLHGHNWIIYVTCQAEALDRNGMVVDFKKIKELVHAKMDHQNLNDVFDFNPTAENIAKWICDTVPHCVKVTVQESEGNVATYEL

SEQ ID NO: 22387 - protein, 109 aa, Megasphaera elsdenii
  misc_feature (1)..(109): tr|R7MWS5|R7MWS5_9FIRM Putative queuosine biosynthesis protein QueD OS=Megasphaera elsdenii CAG:570 OX=1263087 GN=BN715_00675 PE=4 SV=1
MYTVTKRMEVSAAHHLVLDYESKCEHLHGHNWIIYVTCQAEALDHNGMVVDFKKIKEMVHAKMDHQNLNDVFDFNPTAENIAKWICDTVPHCVKVTVQESEGNVATYEL

SEQ ID NO: 22388 - protein, 109 aa, Megasphaera genomosp.
  misc_feature (1)..(109): tr|A0A2J8BA05|A0A2J8BA05_9FIRM 6-carboxytetrahydropteri n synthase QueD OS=Megasphaera genomosp. type_2 OX=6991 93 GN=CAL30_05045 PE=4 SV=1
MFTVRKRLEISAAHQLHLDYESKCRHLHGHNWIIYVTCQAAELNEQGMIVDFKQIKELVHGKLDHQYLNELFPFNPTAENLAKWICDTVPYCVKVEIQESEGNVAIYEK

SEQ ID NO: 22389 - protein, 109 aa, Megasphaera genomosp.
  misc_feature (1)..(109): tr|D3LT29|D3LT29_9FIRM Putative queuosine biosynthesis protein QueD OS=Megasphaera genomosp. type_1 str. 28L O X=699218 GN=HMPREF0889_0015 PE=4 SV=1
MYTVRKRLEISAAHHLQLDYESKCTHLHGHNWIIYVTCQAETLDKNGMVIDFKQIKELVHAKMDHQDLNEIFSFNPTAENIAKWICDTVPHCVKAEVRESEGNVAVYEK

SEQ ID NO: 22390 - protein, 139 aa, Megasphaera hexanoica
  misc_feature (1)..(139): tr|A0A344MIY3|A0A344MIY3_9FIRM 6-carboxy-5,6,7,8-tetrah ydropterin synthase OS=Megasphaera hexanoica OX=1675036 GN=ACT01_06290 PE=3 SV=1
MYYLKTEQSFDAAHFLKGYAGKCHNLHGHRWRVIVEIRSDKLRTDAQCRSMVVDFSDLKKSLKDICDFYDHSLIYETGSLKETTVAALKEEDFCLHEVPFRPTAEEFSRHIYETMQQQGYDVSRVDVYETPNNCASYGG

SEQ ID NO: 22391 - protein, 139 aa, Megasphaera micronuciformis
  misc_feature (1)..(139): tr|E2ZCX4|E2ZCX4_9FIRM Putative queuosine biosynthesis protein QueD OS=Megasphaera micronuciformis F0359 OX=70 6434 GN=HMPREF9429_01078 PE=4 SV=1
MYYISSEATFDGAHFLKNYEGKCHNLHGHRWLVRAHAKAEALKETRQEKGMLTDFGNLKKSLKEACDFFDHALIYEKGSLKDTTLACLEEENFLLREVSFRPTAENLSKYFYDLLKNDCPELCRVEVYETPTNKAAYEE

SEQ ID NO: 22392 - protein, 109 aa, Megasphaera sp.
  misc_feature (1)..(109): tr|S7HR92|S7HR92_9FIRM 6-pyruvoyl tetrahydrobiopterin s ynthase OS=Megasphaera sp. NM10 OX=1273103 GN=NM10_0532 1 PE=4 SV=1
MYTVTKRMEISAAHYLVLDYESKCEHLHGHNWIISVTCQAETLDRNGMVVDFKKIKEMVHAKMDHQNLNDVFDFNPTAENIAKWICDTVPHCVKVTVQESEGNVATYEL

SEQ ID NO: 22393 - protein, 112 aa, Megasphaera sp.
  misc_feature (1)..(112): tr|A0A3C1CP23|A0A3C1CP23_9FIRM 6-carboxy-5,6,7,8-tetrah ydropterin synthase OS=Megasphaera sp. OX=2023260 GN=DC P59_02875 PE=3 SV=1
MYIVEKTFTVSAAHKLRLDYESPCQNLHGHNWKITITCESPKLDVNGMVIDFKTIKRLIEKRLDHHVLNQELPGMNPTAENIAKWITEVVPYCVRAAVQETEGNVAIYDSRI

SEQ ID NO: 22394 - protein, 109 aa, Megasphaera stantonii
  misc_feature (1)..(109): tr|A0A346AZY1|A0A346AZY1_9FIRM 6-carboxytetrahydropteri n synthase QueD OS=Megasphaera stantonii OX=2144175 GN= queD PE=4 SV=1
MYTVTKRLEIAAAHRLSLNYESQCENLHGHNWIIYVTCRREELNENGMVVDFKEISNIVKGKLDHAYLNDVIPGNPTAENIAKWICDSIPFCVKVSVQESEGNVATYEV

SEQ ID NO: 22395 - protein, 146 aa, Mehylophilales bacterium
  misc_feature (1)..(146): tr|A0A258LPA8|A0A258LPA8_9PROT 6-carboxy-5,6,7,8-tetrah ydropterin synthase OS=Mehylophilales bacterium 35-46-6 OX=1970535 GN=B7Y72_01215 PE=3 SV=1
MQITTRLEFDSGHRIPNHKSQCRNLHGHRYVLEITLSGDIITQENASENGMVMDFSDVKSIAKESVVNVWDHAFLVYQHDTEVLNFLNTLPDHKTVVFPTVPTAENMALEAFKILKSKYHDSYGNHLKLEKVRLYETPNSWADALG

SEQ ID NO: 22396 - protein, 128 aa, Melaminivora alkalimesophila
  misc_feature (1)..(128): tr|A0A317RFD0|A0A317RFD0_9BURK 6-carboxy-5,6,7,8-tetrah ydropterin synthase OS=Melaminivora alkalimesophila OX= 1165852 GN=DFR36_102183 PE=3 SV=1
MPHPAMPQQYTVHQRIFFDAAHTLRREIEAEGSRRIHGHTYHAEVSLTGPLDPATGMVQDLGYLRQRLAVLRERLDHHLLDEVPGLGAPTLENLCRFIAEALSDMQPPPSRVRVWRDALGDGCTLDLS

SEQ ID NO: 22397 - protein, 161 aa, Melghirimyces algeriensis
  misc_feature (1)..(161): tr|A0A521DL75|A0A521DL75_9BACL PreQ(0) biosynthesis pro tein QueD OS=Melghirimyces algeriensis OX=910412 GN=SAM N06264849_106119 PE=4 SV=1
MEFKIPDQVERLGVDIHRDELRYHRKRVAVTKEFTFDAAHHLHLYDGKCKNLHGHTYRLLITISGFVNEIGIVVDFGEVKRMFKEEIESRLDHRYLNEVLPNMNTSAENMVVWIWEQLEAWMDREGWSSQGHRLEELTLFETPTSRVTIKRTWMEAGDSDA

SEQ ID NO: 22398 - protein, 161 aa, Melghirimyces profundicolus
  misc_feature (1)..(161): tr|A0A2T6BW23|A0A2T6BW23_9BACL PreQ(0) biosynthesis pro tein QueD OS=Melghirimyces profundicolus OX=1242148 GN= C8P63_10948 PE=4 SV=1
MEFKIPDRVERLGMDIGRHELRYHRKRVAVTREFTFDAAHHLHLYEGKCKNLHGHTYRLVITVSGFVDEVGIAVDFGEIKRMYKEEIEERLDHRYLNEVLPHMNTSAENMVVWMWERLDARLERDGWKSRGHRLEELVLYETPTSRVTMKREWMEAGDPDE

SEQ ID NO: 22399 - protein, 178 aa, Melghirimyces thermohalophilus
  misc_feature (1)..(178): tr|A0A1G6K2I9|A0A1G6K2I9_9BACL 6-pyruvoyltetrahydropter in/6-carboxytetrahydropterin synthase OS=Melghirimyces thermohalophilus OX=1236220 GN=SAMN04488112_10535 PE=4 SV=1
MSLPCGCFPSPWKGAFFMEFKIPDQVERLGVDIHQDELRYHRKRVAVSKEFTFDAAHHLHRYEGKCKNLHGHTYRLVITVSGFVNEIGIAIDFGELKRMYKEEIEYRLDHRYLNEVLPKMNTSAENMVVWMWEQLDARLERDGWKAAGFRLEELTLYETPTSRATIKREWMEAGDSVD

SEQ ID NO: 22400 - protein, 138 aa, Melioribacter roseus
  misc_feature (1)..(138): tr|I7A1D7|I7A1D7_MELRP 6-carboxy-5,6,7,8-tetrahydropter in synthase OS=Melioribacter roseus (strain JCM 17771 / P3M-2) OX=1191523 GN=MROS_0553 PE=3 SV=1
MKIAKEFKWEMGHRLPFHKGKCKNLHGHTYRCMVEIDGAPDENGMVLDYYELKRIIDPIIEEMDHSFMVCSKDTELMNILKSLETKTVVVDFDSTAENICLYLLDRIKKAGLPENIKKVKVRVLETENSYAEDELSLR

SEQ ID NO: 22401 - protein, 135 aa, Melioribacter roseus
  misc_feature (1)..(135): tr|I7A5N8|I7A5N8_MELRP 6-carboxy-5,6,7,8-tetrahydropter in synthase OS=Melioribacter roseus (strain JCM 17771 / P3M-2) OX=1191523 GN=MROS_1984 PE=3 SV=1
MIYITRREVFSASHRIYNPQLSDEENFSLYGKCSNPNGHGHNYTLEVTITGEVNPETGYLIDLKKLKSIIRENVIDKLDHKNLNLDVDFLKDKIPTSENIVLGIWNQLAGKIPNGKLYSIKLYETENNYIEYRGE

SEQ ID NO: 22402 - protein, 137 aa, Melioribacter sp.
  misc_feature (1)..(137): tr|A0A1G1BFB5|A0A1G1BFB5_9BACT 6-carboxy-5,6,7,8-tetrah ydropterin synthase OS=Melioribacter sp. GWF2_38_21 OX= 1801612 GN=A2X65_10670 PE=3 SV=1
MKIAKEYNWEMGHRLPFHQGKCKNLHGHSYKCMVEISGEPDANGMILDYYDMKTIIQPVIDELDHAFMVYQDDKEVLEFLDKINSRKVVVDFQSTAENICLYLLKKIKETDLPENIKSVKVKVLETENTYAEEEISF

SEQ ID NO: 22403 - protein, 137 aa, Melioribacter sp.; identical to SEQ ID NO: 21328
  misc_feature (1)..(137): tr|A0A1G1BBS3|A0A1G1BBS3_9BACT 6-carboxy-5,6,7,8-tetrah ydropterin synthase OS=Melioribacter sp. GWF2_38_21 OX= 1801612 GN=A2X65_03620 PE=3 SV=1

SEQ ID NO: 22404 - protein, 146 aa, Melittangium boletus
  misc_feature (1)..(146): tr|A0A250IB90|A0A250IB90_9DELT 6-pyruvoyl tetrahydrobio pterin synthase OS=Melittangium boletus DSM 14713 OX=12 94270 GN=MEBOL_002464 PE=4 SV=1
MEQIHAVRRIQFAAGHRVFQHESKCRNLHGHNYVAFFHARAESGLDAIGRVIDFSVLKEKLGGWVDENWDHGFLAWEKDTEALEAIRKVPGQKVYVTKRNPTAENMALELLLEVAPKVLAGTGVTLSRVVLWETENCYAEVQVDVR

SEQ ID NO: 22405 - protein, 165 aa, Melittangium boletus
  misc_feature (1)..(165): tr|A0A250IJH2|A0A250IJH2_9DELT Folate biosynthesis prot ein OS=Melittangium boletus DSM 14713 OX=1294270 GN=MEB OL_004769 PE=4 SV=1
MARTTTIELHKEDMKFAAGHFTIFSATHRENLHGHNFAVFVSLTGEVLADGMLADYDIFKGAALKQCRAWNETFMLPGNSRHLHVEKDARGDVLARFNGEELRFLARDVTILPAENVSLEELARLFGEGLVGDGGSFRANRISHVVVKISSEPGQWCSWEWRDHG

SEQ ID NO: 22406 - protein, 149 aa, Meridianimaribacter sp.
  misc_feature (1)..(149): tr|A0A4Q9RWP9|A0A4Q9RWP9_9FLAO 6-carboxy-5,6,7,8-tetrah ydropterin synthase OS=Meridianimaribacter sp. CL38 OX= 2213021 GN=DMZ43_04870 PE=3 SV=1
MSNIRITKQFSFETGHALYGYDGKCKNVHGHSYKLSVTVIGQPIADNTNVKFGMVIDFSDLKKIVKEEIVDVFDHATVFNKNTPHVELAKELEDRGHNVLLVNYQPTSEMMVIDFAEKIKTRLPKNIKLHSLKLQETETSFAEWYASDN

SEQ ID NO: 22407 - protein, 136 aa, Meridianimaribacter sp.
  misc_feature (1)..(136): tr|A0A4Q9RWD0|A0A4Q9RWD0_9FLAO 6-carboxy-5,6,7,8-tetrah ydropterin synthase OS=Meridianimaribacter sp. CL38 OX= 2213021 GN=DMZ43_00475 PE=3 SV=1
MIVTVSRKAHFNAAHRLYRKDWSDEKNADVFGKCSNPNFHGHNYELIVSVTGPINKETGYVIDIQDLKDIIKEEVEDAFDHKNLNVEVEEFKDLNPTAENIAVVIYNKVKPRLNSTLDLEIKLFETPRNFVTYSGL

SEQ ID NO: 22408 - protein, 290 aa, Merismopedia glauca
  misc_feature (1)..(290): tr|A0A2T1C978|A0A2T1C978_9CYAN 6-pyruvoyl tetrahydropte rin synthase OS=Merismopedia glauca CCAP 1448/3 OX=1296 344 GN=C7B64_02350 PE=4 SV=1
MKCVINRRAQFSASHRYWLPELSADENVEQFEQCSAFPGHGHNYVLYISLFGELDDYGMVLNLSDVKQVIKREITSQLDYSYLNQVWAEFEETLPTTENIARVIWNRLAPHLPLVKIQLFEHPELWAEYLGNGMEAYLTIGTHFSAAHRLALNELSEDENYQIYGKCARPNGHGHNYHLEVTIKGEIDSRTGMIVNLVDLHKLVEDTVIEPFDHTFLNKDIPYFAQVVPTAENIAIHICQLIETPIRKVGAELHKVKLIESPNNSCEIYWGETGTKSLNMESSGQLLALV

SEQ ID NO: 22409 - protein, 118 aa, Mesoaciditoga sp.
  misc_feature (1)..(118): tr|A0A2J6WJ29|A0A2J6WJ29_9BACT 6-carboxy-5,6,7,8-tetrah ydropterin synthase OS=Mesoaciditoga sp. OX=2060323 GN= queD PE=3 SV=1
MLISKEFKFDAAHNLVNYHGKCEKLHGHTYKLRVTLNGKVDDEGMIIDFAELKRIVNDLVISKLDHNYINEIIPQPSAENIAMWIWNVLEKPLNGPNYRLYSVDLWETESAFVTYMGD

SEQ ID NO: 22410 - protein, 141 aa, Mesocricetibacter intestinalis
  misc_feature (1)..(141): tr|A0A4R6VB86|A0A4R6VB86_9PAST 6-carboxy-5,6,7,8-tetrah ydropterin synthase OS=Mesocricetibacter intestinalis O X=1521930 GN=EDC45_0158 PE=3 SV=1
MFRVSKEFSFDMAHILDGHDGKCRNLHGHTYRLQVEISGELHGSGAKKGMVADFSDIKALVQRLILDPMDHAFIYDTSSERECRIAALLQELDSKTFGIPVRTTAEEMARFIFQRLSREAQLPVSAVRLWETPTSFCEYRE

SEQ ID NO: 22411 - protein, 150 aa, Mesoflavibacter aestuarii
  misc_feature (1)..(150): tr|A0A2T1NDG9|A0A2T1NDG9_9FLAO 6-carboxytetrahydropteri n synthase QueD OS=Mesoflavibacter aestuarii OX=1266046 GN=C7H52_04140 PE=4 SV=1
MSQIRITKKFSFETGHALYGYDGKCKNVHGHSYKLNVTVIGTPISDQNHVKFGMVIDFTDLKKIVKEEIVDVFDHATVFNKNTPHVDLAKELKDRGHTVLLVDYQPTSEMMVIDFAEKIKQRLPENISLHSLKLQETESSFAQWFASDNE

SEQ ID NO: 22412 - protein, 136 aa, Mesoflavibacter aestuarii
  misc_feature (1)..(136): tr|A0A2T1N4V0|A0A2T1N4V0_9FLAO 6-pyruvoyl tetrahydrobio pterin synthase OS=Mesoflavibacter aestuarii OX=1266046 GN=C7H52_11470 PE=4 SV=1
MKVTVSRRAHFNAAHRLYRKDWSDQKNDAVFGLCNNPNYHGHNYELIASVTGEIDPETGFVIDVKVLKDYIKSEIEDAFDHKNLNLDVPEFKDLNPTAENIVVVIYNKLKAKLDQQLDLEVTLFETPRNFVKYAGK

SEQ ID NO: 22413 - protein, 150 aa, Mesoflavibacter sabulilitoris
  misc_feature (1)..(150): tr|A0A2T1N6P5|A0A2T1N6P5_9FLAO 6-carboxytetrahydropteri n synthase QueD OS=Mesoflavibacter sabulilitoris OX=152 0893 GN=C7H61_14300 PE=4 SV=1
MSNIRITKQFSFETGHALYGYDGKCKNVHGHSYKLDVTVIGQPITDTKNVKFGMVIDFGDLKKIVKEEIVDVFDHATVFNKNTPHVELAKELQDRGHDVLLVDYQPTSEMMVIDFAKKIKDRLPNTIKLHSLKLSETATSYAQWYASDNE

SEQ ID NO: 22414 - protein, 136 aa, Mesoflavibacter sabulilitoris
  misc_feature (1)..(136): tr|A0A2T1NPH7|A0A2T1NPH7_9FLAO 6-carboxy-5,6,7,8-tetrah ydropterin synthase OS=Mesoflavibacter sabulilitoris OX =1520893 GN=C7H61_00075 PE=3 SV=1
MKVTVSRKAHFNAAHRLYRKDWTEDKNNDVFGKCNNPSFHGHNYELIAHVTGDIDPETGYVIDMKILKDIIKEEVEDAFDHKNLNIDVPEFKNLNPTAENIVVVVYNKIKAKLDPKFELQVTLYETPRNYVTYPSK

SEQ ID NO: 22415 - protein, 136 aa, Mesoflavibacter sp.
  misc_feature (1)..(136): tr|A0A2T1NKJ7|A0A2T1NKJ7_9FLAO 6-carboxy-5,6,7,8-tetrah ydropterin synthase OS=Mesoflavibacter sp. HG96 OX=2109 944 GN=C7H62_13125 PE=3 SV=1
MKVTVSRKAHFNAAHRLYRKDWDNEKNAQIFGKCNNPSYHGHNYELIAHVTGDIDPETGYVIDMKILKDIIKEEVEDAFDHKNLNVDVPEFKNLNPTAENIVVVIYNKIKAKLDSKFDLKITLYETPRNFVTYPSL

SEQ ID NO: 22416 - protein, 150 aa, Mesoflavibacter sp.; identical to SEQ ID NO: 22413
  misc_feature (1)..(150): tr|A0A2T1NMK4|A0A2T1NMK4_9FLAO 6-carboxytetrahydropteri n synthase QueD OS=Mesoflavibacter sp. HG96 OX=2109944 GN=C7H62_06830 PE=4 SV=1

SEQ ID NO: 22417 - protein, 138 aa, Mesonia algae
  misc_feature (1)..(138): tr|A0A2W7HVU9|A0A2W7HVU9_9FLAO 6-carboxy-5,6,7,8-tetrah ydropterin synthase OS=Mesonia algae OX=213248 GN=LX95_ 02545 PE=3 SV=1
MAVTVSRKAHFNAAHRLFRKDWSDEKNLKVFGKCSYPNYHGHNYELIVSVTGNIDEETGFVMDLKVLKDLIKTEIEDYLDHKNLNVDILEFKNLNPTAENIVVFIWQKLKSKLENHLSLEVVLYETPRNFVSYKGEFE

SEQ ID NO: 22418 - protein, 149 aa, Mesonia algae
  misc_feature (1)..(149): tr|A0A2W7IBP3|A0A2W7IBP3_9FLAO 6-carboxy-5,6,7,8-tetrah ydropterin synthase OS=Mesonia algae OX=213248 GN=LX95_ 00454 PE=3 SV=1
MSQIRLTKQFNFETGHALYGYDGKCKNVHGHSYKLNVTVIGQPINDRNHVKNGMVIDFSDLKKIVKEEIVDQFDHATVLNKTTPHIELAEELIKRDHNVILVDYQPTSEQMIIDFAEKIKARLPKEIQLHSLKLQETETSFAEWFASDN

SEQ ID NO: 22419 - protein, 149 aa, Mesonia phycicola
  misc_feature (1)..(149): tr|A0A1M6EBH4|A0A1M6EBH4_9FLAO 6-carboxy-5,6,7,8-tetrah ydropterin synthase OS=Mesonia phycicola OX=579105 GN=S AMN04488096_1054 PE=3 SV=1
MSNIRITKQFNFETGHALYGYDGKCKNVHGHSYKLNVTVIGQPINDANHVKFGMVIDFGDLKKIVKEEIVDKFDHATVFNKNTPHLELAKELQKRDHSVILVDYQPTSEMMVIDFAEKIKSRLPENIQLHSLKLQETETSFAEWYASDN

SEQ ID NO: 22420 - protein, 136 aa, Mesonia phycicola
  misc_feature (1)..(136): tr|A0A1M6GFV2|A0A1M6GFV2_9FLAO 6-pyruvoyltetrahydropter in/6-carboxytetrahydropterin synthase OS=Mesonia phycic ola OX=579105 GN=SAMN04488096_10812 PE=4 SV=1
MGEVTVSRKAHFNAAHRLFKKEWSNEKNKLVFGKCSNPNYHGHNYELIVSVTGTVDKETGFVMDMKLLRDLIYEKVEKLLDHKNLNVEVDEFKNLNPTAENISIVIWNKLRTEINSNLSLEVTLYETPRNFVTYKG

SEQ ID NO: 22421 - protein, 150 aa, Mesonia sp.
  misc_feature (1)..(150): tr|A0A5C8L801|A0A5C8L801_9FLAO 6-carboxytetrahydropteri n synthase OS=Mesonia sp. HuA40 OX=2602761 GN=FT993_075 05 PE=4 SV=1
MSKIRITKQFNFETGHALYGYDGKCKNVHGHSYKLNVTVIGTPIHDSNHVKNGMVIDFGDLKKIVKEEIVDQFDHATVLNKNTPHIELAEELMKRDHNVILVDYQPTSEKMITDFADKIKARLPKNIELFSLRLQETETSFAEWFASDQD

SEQ ID NO: 22422 - protein, 150 aa, Mesonia sp.
  misc_feature (1)..(150): tr|A0A2W1K4B2|A0A2W1K4B2_9FLAO 6-carboxytetrahydropteri n synthase QueD OS=Mesonia sp. K7 OX=2218606 GN=DNG35_0 8795 PE=4 SV=1
MATIRITKQFNFETGHALYGYDGKCKNVHGHSYKLDVTVIGQPIEDQKNVKYGMVIDFSDLKKIVKEEIVDRFDHATVLNKNTPHLELAHELQKRDHNIILVDYQPTSEMMIIDFAHKIKARLPENIQLHSLKLQETETSYAQWFATDNL

SEQ ID NO: 22423 - protein, 124 aa, Mesorhizobium albiziae
  misc_feature (1)..(124): tr|A0A1I4DR00|A0A1I4DR00_9RHIZ 6-carboxy-5,6,7,8-tetrah ydropterin synthase OS=Mesorhizobium albiziae OX=335020 GN=SAMN04488498_11951 PE=3 SV=1
MKIVQAFTFEAAHRLPNVPDTHRCHRMHGHSYRVELRLEGPVDPHTGFVVDFFDVEAAFGPLLKRLDHYCLNDIEGLQNPTAENIAIWIWERVKPLLPQTTAVVVFETPDCWAEYEGTVAGSMQ

SEQ ID NO: 22424 - protein, 118 aa, Mesorhizobium albiziae
  misc_feature (1)..(118): tr|A0A1I4EZE8|A0A1I4EZE8_9RHIZ 6-carboxy-5,6,7,8-tetrah ydropterin synthase OS=Mesorhizobium albiziae OX=335020 GN=SAMN04488498_13330 PE=3 SV=1
MFRITKEFHFSASHQLTSLPPDHQCARLHGHNYIVEVELAAKEMNGHGFVRDYHDLAPLKRYIDESFDHRHLNDVLGHEQVTAEYLARHFYEWCKARLPETSAVRVSETPKTWAEYRP

SEQ ID NO: 22425 - protein, 117 aa, Mesorhizobium alhagi
  misc_feature (1)..(117): tr|H0HUG4|H0HUG4_9RHIZ 6-carboxy-5,6,7,8-tetrahydropter in synthase OS=Mesorhizobium alhagi CCNWXJ12-2 OX=11078 82 GN=MAXJ12_19028 PE=3 SV=1
MVETYKEFTFEAAHQLQPFSGLHGHTFRVRVHFKGSPDAVFGWPANLYEVEPRISSVQKVLDHTYLNDIDGLAVPSLENVAKWIWDKLAPHSPQIDRITVSRGPDGQAEGCTYWRNP

SEQ ID NO: 22426 - protein, 117 aa, Mesorhizobium amorphae
  misc_feature (1)..(117): tr|A0A212DQU6|A0A212DQU6_9RHIZ 6-carboxy-5,6,7,8-tetrah ydropterin synthase OS=Mesorhizobium amorphae CCBAU 015 83 OX=1449348 GN=AJ88_28155 PE=3 SV=1
MVETYKEFTFEAAHQLQPFSGLHGHTFRVRVHFKGSPDAVFGWPANLYEVEPRISSVQKVLDHTYLNDIDGLAVPSLENIAKWIWEKLAPHSPQIDRITVSRGPDGQAEGCTYSRSP

SEQ ID NO: 22427 - protein, 118 aa, Mesorhizobium amorphae
  misc_feature (1)..(118): tr|G6YIG0|G6YIG0_9RHIZ 6-carboxy-5,6,7,8-tetrahydropter in synthase OS=Mesorhizobium amorphae CCNWGS0123 OX=108 2933 GN=MEA186_28912 PE=3 SV=1
MFRITKEFHFSASHQLMSLPPDHQCARLHGHNYIVEVELSAKELNEHGFVRDYHDLAPLKRYIDESFDHRHLNDVLGHGQVTAEYLARHFYEWCKARLPETSAVRVSETPKTWAECRP

SEQ ID NO: 22428 - protein, 118 aa, Mesorhizobium australicum
  misc_feature (1)..(118): tr|L0KVB8|L0KVB8_MESAW 6-carboxy-5,6,7,8-tetrahydropter in synthase OS=Mesorhizobium australicum (strain HAMBI 3006 / LMG 24608 / WSM2073) OX=754035 GN=Mesau_05612 PE =3 SV=1
MFRITKEFHFSASHQLTSLPPEHQCARLHGHNYIVVVELSAKELNSHGFVRDYHDLAPLKHYIDESLDHRHLNDALAHEQVTAEYLARHFYEWCKARLPETAAVRVSETPKTWAEYRP

SEQ ID NO: 22429 - protein, 118 aa, Mesorhizobium ciceri
  misc_feature (1)..(118): tr|A0A143NGT4|A0A143NGT4_9RHIZ 6-carboxy-5,6,7,8-tetrah ydropterin synthase OS=Mesorhizobium ciceri OX=39645 GN =A4R28_21950 PE=3 SV=1
MFHISKEFHFSASHQLTSLPPNHQCARLHGHNYVVVVELSAKELDAHGFVRDYHDLAPLKRYIDESFDHRHLNDVLGHEKVTAECLARHFYEWCKARLPQTAAVRVSETPKTWAEYRP

SEQ ID NO: 22430 - protein, 118 aa, Mesorhizobium ciceri; identical to SEQ ID NO: 18077
  misc_feature (1)..(118): tr|A0A3G8FVJ8|A0A3G8FVJ8_9RHIZ 6-carboxy-5,6,7,8-tetrah ydropterin synthase OS=Mesorhizobium ciceri OX=39645 GN =queD PE=3 SV=1

SEQ ID NO: 22431 - protein, 133 aa, Mesorhizobium delmotii
  misc_feature (1)..(133): tr|A0A2P9AMT2|A0A2P9AMT2_9RHIZ 6-carboxy-5,6,7,8-tetrah ydropterin synthase OS=Mesorhizobium delmotii OX=163124 7 GN=BQ8482_290038 PE=3 SV=1
MERSASVAMVETYKEFTFEAAHQLQPFSGLHGHTFRVRVHFKGSPDAVFGWPANLYEVEPRISSVQKILDHTYLNDIDGLAVPSLENIGKWIWDNLAPHCPQIDRITVSRGPDGQAEGCTYRGGPDCRGPIGP

SEQ ID NO: 22432 - protein, 118 aa, Mesorhizobium delmotii
  misc_feature (1)..(118): tr|A0A2P9ASU5|A0A2P9ASU5_9RHIZ 6-carboxy-5,6,7,8-tetrah ydropterin synthase OS=Mesorhizobium delmotii OX=163124 7 GN=BQ8482_40019 PE=3 SV=1
MYRITKEFHFSASHQLTSLPREHQCARLHGHNYIVQVELSARELSQHGFVRDYHDLAALKHYIDETLDHRHLNDVLGNDHVTAECLAKHFYDWCKAQLPETSAVRVSETPKTWAEYRP

SEQ ID NO: 22433 - protein, 118 aa, Mesorhizobium erdmanii
  misc_feature (1)..(118): tr|A0A4V1P518|A0A4V1P518_9RHIZ 6-carboxy-5,6,7,8-tetrah ydropterin synthase OS=Mesorhizobium erdmanii OX=177786 6 GN=B5V01_21910 PE=3 SV=1
MFRITKEFHFSASHQLTSLPPDHQCARLHGHNYIVEVELSANGLNDNGFVRDYHDLAPFKRYIDESFDHRHLNDVLGHEQVTAECLARHFYLWCKARLPETSAVRVSETPKTWAEYRP

SEQ ID NO: 22434 - protein, 118 aa, Mesorhizobium hawassense
  misc_feature (1)..(118): tr|A0A330H311|A0A330H311_9RHIZ 6-carboxy-5,6,7,8-tetrah ydropterin synthase OS=Mesorhizobium hawassense OX=1209 954 GN=queD PE=3 SV=1
MFRITKEFHFSASHQLTSLPPDHQCARLHGHNYIVEVELSGKELNEHGFVRDYHDLAPLKRYIDDKFDHRHLNDVLGHEKVTAECLARHFYEWCKARLPETTAVRVSETPKTWAECRP

SEQ ID NO: 22435 - protein, 119 aa, Mesorhizobium hawassense
  misc_feature (1)..(119): tr|A0A330HBM9|A0A330HBM9_9RHIZ 6-carboxy-5,6,7,8-tetrah ydropterin synthase OS=Mesorhizobium hawassense OX=1209 954 GN=queD PE=3 SV=1
MKITQAFTFEAAHCLPKAPENHRCHQMHGHSYHVELRLEGPVDPDTGFVVDFVHVEATFRPLLQRLDHQCLNQINGLENPTAESVAIWIWDQTKPLLPELTSVKVAETPTCWAEYEGQS

SEQ ID NO: 22436 - protein, 118 aa, Mesorhizobium helmanticense
  misc_feature (1)..(118): tr|A0A2T4INB0|A0A2T4INB0_9RHIZ 6-carboxy-5,6,7,8-tetrah ydropterin synthase OS=Mesorhizobium helmanticense OX=1 776423 GN=queD PE=3 SV=1
MFRITKEFHFSASHQLTSLPPDHQCARLHGHNYIVVVELSGGELDEHGFVRDYQDLAAFKHYIDGTFDHRHLNDVLGHDHATAECLARHFYDWCKVRLPETSAVRVSETPKTWAEYRP

SEQ ID NO: 22437 - protein, 117 aa, Mesorhizobium helmanticense
  misc_feature (1)..(117): tr|A0A2T4IL89|A0A2T4IL89_9RHIZ 6-carboxy-5,6,7,8-tetrah ydropterin synthase OS=Mesorhizobium helmanticense OX=1 776423 GN=queD PE=3 SV=1
MKITQAFTFEAAHCLPRVPKTHRCHRVHGHSYRVELRLEGPVDPDTGFVIDFFDVEAVFGPLLQRLDHQHLNEVEGLDNPTAENIAVWIWNQTKPLLGQMCSVTVYETPLCWAEYEG

SEQ ID NO: 22438 - protein, 118 aa, Mesorhizobium huakuii
  misc_feature (1)..(118): tr|A0A068DI40|A0A068DI40_9RHIZ 6-carboxy-5,6,7,8-tetrah ydropterin synthase OS=Mesorhizobium huakuii 7653R OX=7 63057 GN=queD PE=3 SV=1
MFRITKEFHFSASHQLTSLPPDHQCARLHGHNYIVEVELSAKELNDDGFVRDYHDLAPFKRYIDEGFDHRHLNDVLGHEQVTAECLARHFYLWCKARLPEASAVRVSETPKTWAEYRP

SEQ ID NO: 22439 - protein, 118 aa, Mesorhizobium japonicum; identical to SEQ ID NO: 22433
  misc_feature (1)..(118): tr|A0A3M9X433|A0A3M9X433_9RHIZ 6-carboxy-5,6,7,8-tetrah ydropterin synthase OS=Mesorhizobium japonicum OX=20660 70 GN=queD PE=3 SV=1

SEQ ID NO: 22440 - protein, 117 aa, Mesorhizobium japonicum
  misc_feature (1)..(117): tr|Q98AM2|Q98AM2_RHILO 6-carboxy-5,6,7,8-tetrahydropter in synthase OS=Mesorhizobium japonicum (strain LMG 2941 7 / CECT 9101 / MAFF 303099) OX=266835 GN=mll8751 PE=3 SV=1
MKITQAFTFEAAHCLPRVPATHRCHRIHGHSYRVELRLEGPVDPDTGFVIDFFDVEAVFGPLLQRLDHQYLNEIEGLDNPTAENIAVWIWNQTKPLLGQMCSVTVYETPLCWAEYEG

SEQ ID NO: 22441 - protein, 118 aa, Mesorhizobium kowhaii; identical to SEQ ID NO: 22438
  misc_feature (1)..(118): tr|A0A2W7BXS2|A0A2W7BXS2_9RHIZ 6-carboxy-5,6,7,8-tetrah ydropterin synthase OS=Mesorhizobium kowhaii OX=1300272 GN=B5V02_29970 PE=3 SV=1

SEQ ID NO: 22442 - protein, 118 aa, Mesorhizobium mediterraneum; identical to SEQ ID NO: 22429
  misc_feature (1)..(118): tr|A0A271KSE6|A0A271KSE6_9RHIZ 6-carboxy-5,6,7,8-tetrah ydropterin synthase OS=Mesorhizobium mediterraneum OX=4 3617 GN=queD PE=3 SV=1

SEQ ID NO: 22443 - protein, 69 aa, Mesorhizobium metallidurans
  misc_feature (1)..(69): tr|M5F1V1|M5F1V1_9RHIZ Uncharacterized protein OS=Mesor hizobium metallidurans STM 2683 OX=1297569 GN=MESS2_167 0005 PE=4 SV=1
MRDYHDLAPLKRYIDESLDHRHLNEVLGHEQVTAEYLARHFYEWCKARLPETAAVRVSETPKTWAEYRP

SEQ ID NO: 22444 - protein, 133 aa, Mesorhizobium metallidurans; identical to SEQ ID NO: 22431
  misc_feature (1)..(133): tr|M5EFE0|M5EFE0_9RHIZ 6-carboxy-5,6,7,8-tetrahydropter in synthase OS=Mesorhizobium metallidurans STM 2683 OX= 1297569 GN=MESS2_1000076 PE=3 SV=1

SEQ ID NO: 22445 - protein, 118 aa, Mesorhizobium muleiense; identical to SEQ ID NO: 22429
  misc_feature (1)..(118): tr|A0A1G9GN31|A0A1G9GN31_9RHIZ 6-carboxy-5,6,7,8-tetrah ydropterin synthase OS=Mesorhizobium muleiense OX=10042 79 GN=SAMN05428953_12531 PE=3 SV=1

SEQ ID NO: 22446 - protein, 118 aa, Mesorhizobium opportunistum; identical to SEQ ID NO: 22428
  misc_feature (1)..(118): tr|F7Y1I6|F7Y1I6_MESOW 6-carboxy-5,6,7,8-tetrahydropter in synthase OS=Mesorhizobium opportunistum (strain LMG 24607 / HAMBI 3007 / WSM2075) OX=536019 GN=Mesop_6143 P E=3 SV=1

SEQ ID NO: 22447 - protein, 118 aa, Mesorhizobium plurifarium
  misc_feature (1)..(118): tr|A0A090EP81|A0A090EP81_MESPL 6-carboxy-5,6,7,8-tetrah ydropterin synthase OS=Mesorhizobium plurifarium OX=699 74 GN=MPLDJ20_130082 PE=3 SV=1
MFRITKEFHFSASHQLTSLPPDHQCARLHGHNYIVEVELSGEQLNEHGFVRDYHDLAPLKRYIDENFDHRHLNDVLGHEQVTAECLARHFYEWCKARLPETSAVRVSETPKTWAECRP

SEQ ID NO: 22448 - protein, 118 aa, Mesorhizobium plurifarium; identical to SEQ ID NO: 22434
  misc_feature (1)..(118): tr|A0A090FYW4|A0A090FYW4_MESPL 6-carboxy-5,6,7,8-tetrah ydropterin synthase OS=Mesorhizobium plurifarium OX=699 74 GN=MPL3356_270083 PE=3 SV=1

SEQ ID NO: 22449 - protein, 118 aa, Mesorhizobium prunaredense
  misc_feature (1)..(118): tr|A0A1R3V7P5|A0A1R3V7P5_9RHIZ 6-carboxy-5,6,7,8-tetrah ydropterin synthase OS=Mesorhizobium prunaredense OX=16 31249 GN=BQ8794_180160 PE=3 SV=1
MFRITKEFHFSASHQLTSLPPDHQCARLHGHNYIVEVELSAKDLDAHGFVRDYHDLAPLKRYIDESLDHRHLNEVLGHEQVTAEYLARHFYEWCKARLPETAAVRVSETPKTWAEYRP

SEQ ID NO: 22450 - protein, 118 aa, Mesorhizobium qingshengii; identical to SEQ ID NO: 22438
  misc_feature (1)..(118): tr|A0A1G5ZZ18|A0A1G5ZZ18_9RHIZ 6-carboxy-5,6,7,8-tetrah ydropterin synthase OS=Mesorhizobium qingshengii OX=116 5689 GN=SAMN02927914_06795 PE=3 SV=1

SEQ ID NO: 22451 - protein, 118 aa, Mesorhizobium sanjuanii
  misc_feature (1)..(118): tr|A0A2A6FAG5|A0A2A6FAG5_9RHIZ 6-carboxy-5,6,7,8-tetrah ydropterin synthase OS=Mesorhizobium sanjuanii OX=20379 00 GN=queD PE=3 SV=1
MFRITKEFHFSASHQLTSLPPDHQCARLHGHNYIVVVELSGGELNEHGFVRDYQDLAALKHYIDGTFDHRHLNDVLGHDRVTAECLARHFYDWCKVRLPQTSAVRVSETPKTWAEYRP

SEQ ID NO: 22452 - protein, 117 aa, Mesorhizobium sanjuanii
  misc_feature (1)..(117): tr|A0A2A6FDR3|A0A2A6FDR3_9RHIZ 6-carboxy-5,6,7,8-tetrah ydropterin synthase OS=Mesorhizobium sanjuanii OX=20379 00 GN=queD PE=3 SV=1
MKITQAFTFEAAHRLPHVPLTHRCHRMHGHSYRIELRLEGPVDAHTGFVVDFFDVEAAFNPLLLQLDHYCLNDVEGLENPTAENIAIWIWNRIKPAVPQTSAVVVYETPDCWAEYEG

SEQ ID NO: 22453 - protein, 118 aa, Mesorhizobium sp.
  misc_feature (1)..(118): tr|X5PS54|X5PS54_9RHIZ 6-carboxy-5,6,7,8-tetrahydropter in synthase OS=Mesorhizobium sp. LSJC280B00 OX=1287336 GN=X772_29695 PE=3 SV=1
MFRITKEFHFSASHQLTSLPPDHQCARLHGHNYIVEVELSANGLNENGFVRDYHDLAPFKRYIDESFDHRHLNDVLGHEQVTAEYLARHFYEWCKARLPETSAVRVSETPKTWAEYRP

SEQ ID NO: 22454 - protein, 118 aa, Mesorhizobium sp.; identical to SEQ ID NO: 18073
  misc_feature (1)..(118): tr|A0A5F2J8U5|A0A5F2J8U5_9RHIZ 6-carboxy-5,6,7,8-tetrah ydropterin synthase OS=Mesorhizobium sp. M2D.F.Ca.ET.14 8.01.1.1 OX=2496665 GN=queD PE=3 SV=1

SEQ ID NO: 22455 - protein, 118 aa, Mesorhizobium tamadayense
  misc_feature (1)..(118): tr|A0A3P3FS86|A0A3P3FS86_9RHIZ 6-carboxytetrahydropteri n synthase QueD OS=Mesorhizobium tamadayense OX=425306 GN=queD PE=4 SV=1
MFRITKEFHFSASHQLTSLPPDHQCARLHGHNYIVEVELSAKELNEHGFVRDYHELAPLKRYIDEGFDHRHLNDVLGHKQVTAEYLARHFYQWCKARLPETAAVRVSETPKTWAEYRP

SEQ ID NO: 22456 - protein, 118 aa, Mesorhizobium temperatum
  misc_feature (1)..(118): tr|A0A271LSL4|A0A271LSL4_9RHIZ 6-carboxy-5,6,7,8-tetrah ydropterin synthase OS=Mesorhizobium temperatum OX=2414 16 GN=queD PE=3 SV=1
MFRITKEFHFSASHQLTSLPPDHQCARLHGHNYIVVVELSGGELDEHGFVRDYQDLAALKHYIDETFDHRHLNDVLGHDRVTAECLARHFYDWCKVRLPQTSAVRVSETPKTWAEYRP

SEQ ID NO: 22457 - protein, 117 aa, Mesorhizobium temperatum; identical to SEQ ID NO: 22426
  misc_feature (1)..(117): tr|A0A271LS61|A0A271LS61_9RHIZ 6-carboxy-5,6,7,8-tetrah ydropterin synthase OS=Mesorhizobium temperatum OX=2414 16 GN=CIT26_09060 PE=3 SV=1

SEQ ID NO: 22458 - protein, 118 aa, Mesorhizobium tianshanense
  misc_feature (1)..(118): tr|A0A562N4D2|A0A562N4D2_9RHIZ 6-carboxy-5,6,7,8-tetrah ydropterin synthase OS=Mesorhizobium tianshanense OX=39 844 GN=IQ26_05700 PE=3 SV=1
MFRITKEFHFSASHQLTSLPPDHQCARLHGHNYIVEVELSAKELNEHGFVRDYRDLAPLKRYIDESFDHRHLNDVLGHEQVTAEYLARHFYEWCKARLPETSAVRVSETPKTWAEYRP

SEQ ID NO: 22459 - protein, 118 aa, Mesorhizobium waimense
  misc_feature (1)..(118): tr|A0A3A5K369|A0A3A5K369_9RHIZ 6-carboxy-5,6,7,8-tetrah ydropterin synthase OS=Mesorhizobium waimense OX=130030 7 GN=queD PE=3 SV=1
MFRITKEFHFSASHQLTSLPPDHQCARLHGHNYIVEVELSAKELNEHGFVRDYHDLALLKRYIDQSFDHRHLNDVLGHAQVTAEYLARHFYEWCKARLPETSAVRVSETPKTWAEWRP

SEQ ID NO: 22460 - protein, 118 aa, Mesorhizobium wenxiniae
  misc_feature (1)..(118): tr|A0A271KNT3|A0A271KNT3_9RHIZ 6-carboxy-5,6,7,8-tetrah ydropterin synthase OS=Mesorhizobium wenxiniae OX=20148 05 GN=queD PE=3 SV=1
MFHISKEFHFSASHQLTSLPPNHQCARQHGHNYIVVVELSAKELDALGFVRDYHDLAPLKRYIDESFDHRHLNDVLGHEKVTAECLARHFYEWCKARLPQTTAVRVSETPKTWAEYRP

SEQ ID NO: 22461 - protein, 137 aa, Mesosutterella multiformis
  misc_feature (1)..(137): tr|A0A388SD99|A0A388SD99_9BURK 6-pyruvoyl tetrahydrobio pterin synthase OS=Mesosutterella multiformis OX=225913 3 GN=MESMUL_15600 PE=4 SV=1
MFTVTRYHDISCGHRVCGHENKCSHLHGHNYRITFCCAGELDSLGRVIDFSVIKEKLCVWLEEHFDHRFLIWTEDPLADALLSLDPKVVQVPFNPTAENIAEYLVTVVGPEQLRGTGVKLIRCDVEETRKCTATFTL

SEQ ID NO: 22462 - protein, 122 aa, Mesotoga infera
  misc_feature (1)..(122): tr|A0A101I7W0|A0A101I7W0_9BACT 6-carboxy-5,6,7,8-tetrah ydropterin synthase OS=Mesotoga infera OX=1236046 GN=qu eD PE=3 SV=1
MFFLTKEFTFDAAHNLTSYHGKCEKLHGHTYKLQITVAGEKNQEDMVVDFLQLKDIVKSEVLNLLDHAYINDVIPQPTAENIAEWIFKRLASKVGGSYYELYEVAVWETPTNFVRYRERDVW

SEQ ID NO: 22463 - protein, 122 aa, Mesotoga prima
  misc_feature (1)..(122): tr|I2F6H0|I2F6H0_9BACT 6-carboxy-5,6,7,8-tetrahydropter in synthase OS=Mesotoga prima MesG1.Ag.4.2 OX=660470 GN =Theba_1873 PE=3 SV=1
MFFITKEFTFDAAHNLTMYHGKCEKLHGHTYKLQVTVAGEKQEEDMVIDFLKMKEIVRDEVLSVLDHSYINDVLSQPTAENIAEWIFNKLAGKIRGNSFELYEVALWETPTSFVRYRERDGW

SEQ ID NO: 22464 - protein, 122 aa, Mesotoga prima
  misc_feature (1)..(122): tr|A0A117M3E0|A0A117M3E0_9BACT 6-carboxy-5,6,7,8-tetrah ydropterin synthase OS=Mesotoga prima OX=1184387 GN=XD9 4_0117 PE=3 SV=1
MFFLTKEFTFDAAHNLTSYHGKCEKLHGHTYKLQITVAGEKNQEDMVIDFLRLKDIVKSEVLSLLDHAYINDVIPQPTAENIAEWIFKRLASRVGGSDYELYEVAVWETPTSFVRYRERDVW

SEQ ID NO: 22465 - protein, 122 aa, Mesotoga sp.; identical to SEQ ID NO: 22463
  misc_feature (1)..(122): tr|A0A421CED2|A0A421CED2_9BACT 6-carboxy-5,6,7,8-tetrah ydropterin synthase OS=Mesotoga sp. H07pep.5.4 OX=14636 64 GN=Y696_12100 PE=3 SV=1

SEQ ID NO: 22466 - protein, 122 aa, Mesotoga sp.; identical to SEQ ID NO: 22464
  misc_feature (1)..(122): tr|A0A318CHN9|A0A318CHN9_9BACT 6-carboxy-5,6,7,8-tetrah ydropterin synthase OS=Mesotoga sp. SC_NapDC OX=1499972 GN=EU77_08980 PE=3 SV=1

SEQ ID NO: 22467 - protein, 120 aa, Metakosakonia sp.; identical to SEQ ID NO: 20906
  misc_feature (1)..(120): tr|A0A348D910|A0A348D910_9ENTR 6-carboxy-5,6,7,8-tetrah ydropterin synthase OS=Metakosakonia sp. MRY16-398 OX=2 487150 GN=ygcM PE=3 SV=1

SEQ ID NO: 22468 - protein, 118 aa, Metallibacterium scheffleri
  misc_feature (1)..(118): tr|A0A4S3KHY8|A0A4S3KHY8_9GAMM 6-carboxy-5,6,7,8-tetrah ydropterin synthase OS=Metallibacterium scheffleri OX=9 93689 GN=B1806_13240 PE=3 SV=1
MDIFKVFTIEAAHRLTAVPPGHKCARLHGHSIRIEVHVSGEPDPALGWVCDFADIKRAFRPLYAQLDHNYLNDLPGLDNPTSELIARWIWQRLKPELPSLSCIVVHETCTAGASYRGD

SEQ ID NO: 22469 - protein, 126 aa, Methylacidimicrobium cyclopophantes
  misc_feature (1)..(126): tr|A0A5E6MPV7|A0A5E6MPV7_9BACT 6-carboxy-5,6,7,8-tetrah ydropterin synthase OS=Methylacidimicrobium cyclopophan tes OX=1041766 GN=queD PE=3 SV=1
MRVTIEKDFRFEAAQQLPGFPEGHKCRRLHGHSFELRVAVEGEVDPATGILYDHARISRAVEPLLAQLDHRFLNEIPGLENPTIESMARWFWEKLESLLPGLAQITICETPRVRCLYRGPASSIRS

SEQ ID NO: 22470 - protein, 127 aa, Methylacidimicrobium tartarophylax
  misc_feature (1)..(127): tr|A0A5E6MG99|A0A5E6MG99_9BACT 6-carboxy-5,6,7,8-tetrah ydropterin synthase OS=Methylacidimicrobium tartarophyl ax OX=1041768 GN=queD PE=3 SV=1
MRVTIEKDFRFEAAQQLPGFPEGHKCRRLHGHSFEVRVAIEGEVDPATGILYDHARISRAVEPLLTELDHRFLNEIPGLENPTIESMAHWFWERLVPLLPGLAQITICETPRVRCLYRGPTSSPARS

SEQ ID NO: 22471 - protein, 120 aa, Methylacidiphilum fumariolicum
  misc_feature (1)..(120): tr|A0A5F0I1P6|A0A5F0I1P6_9BACT 6-carboxy-5,6,7,8-tetrah ydropterin synthase OS=Methylacidiphilum fumariolicum O X=591154 GN=A7K73_08305 PE=3 SV=1
MQVILSKDFDFEAAQALPSFPEGHKCRRVHGHSFKLTVAVRGEVDPIRGILYDHAKISEAVIPLIEQLDHSYLNDIEGLQNPTIENMAGWFWKKLQDKLPGLYEITVQETARTRCIYRGE

SEQ ID NO: 22472 - protein, 120 aa, Methylacidiphilum fumariolicum; identical to SEQ ID NO: 22471
  misc_feature (1)..(120): tr|I0JYI7|I0JYI7_METFB 6-carboxy-5,6,7,8-tetrahydropter in synthase OS=Methylacidiphilum fumariolicum (strain S olV) OX=1156937 GN=ygcM PE=3 SV=1

SEQ ID NO: 22473 - protein, 161 aa, Methylacidiphilum infernorum
  misc_feature (1)..(161): tr|B3DVJ6|B3DVJ6_METI4 6-pyruvoyl-tetrahydropterin synt hase OS=Methylacidiphilum infernorum (isolate V4) OX=48 1448 GN=Minf_1295 PE=4 SV=1
MMGFLIFLFYRKALKVMPYYCIVYFFVCPKLTLGNNQEKDSMHVILSKDFDFEAAQALPSFPEGHKCRRTHGHSFKLTVSVRGEVDPQKGVLYDHGKISEAVCPLIEQLDHYYLNDIEGLSNPTIENMAGWFWNKLKDKLPGLYEITIQETARTRCIYRGD

SEQ ID NO: 22474 - protein, 120 aa, Methylacidiphilum kamchatkense
  misc_feature (1)..(120): tr|A0A0C1V6W4|A0A0C1V6W4_9BACT 6-carboxy-5,6,7,8-tetrah ydropterin synthase OS=Methylacidiphilum kamchatkense K am1 OX=1202785 GN=kam1_1283 PE=3 SV=1
MQVILSKDFDFEAAQALPSFPEGHKCRKIHGHSFKLTVAVRGEVDPTRGILYDHAKISEAVIPLIEQLDHSYLNDIEGLQNPTIENMAGWFWKKLQDKLPGLYEITVQETARTRCIYRGE

SEQ ID NO: 22475 - protein, 120 aa, Methylacidiphilum sp.
  misc_feature (1)..(120): tr|A0A4Y8P7J5|A0A4Y8P7J5_9BACT 6-carboxy-5,6,7,8-tetrah ydropterin synthase OS=Methylacidiphilum sp. Phi OX=184 7729 GN=A7Q10_02625 PE=3 SV=1
MHVILSKDFDFEAAQALPSFPEGHKCQRIHGHSFKLTVAVRGEVDPQKGILYDHGKISEAVSPLIDQLDHQYLNDIEGLKNPTIENLAGWFWNKLKDKLPGLFEITIQETARTRCIYRGD

SEQ ID NO: 22476 - protein, 120 aa, Methylacidiphilum sp.
  misc_feature (1)..(120): tr|A0A4Y8P873|A0A4Y8P873_9BACT 6-carboxy-5,6,7,8-tetrah ydropterin synthase OS=Methylacidiphilum sp. Yel OX=184 7730 GN=A7Q09_09735 PE=3 SV=1
MQVILSKDFDFEAAQALPSFPEGHKCRRIHGHSFKLTVAVRGEVDPSRGILYDHAKISEAVIPLIEQLDHSYLNDIEGLQNPTIENMAGWFWKKLQDKLPGLYEITVQETARTRCIYRGE

SEQ ID NO: 22477 - protein, 117 aa, Methylarcula marina
  misc_feature (1)..(117): tr|A0A422QXS9|A0A422QXS9_9RHOB 6-carboxy-5,6,7,8-tetrah ydropterin synthase OS=Methylarcula marina OX=72022 GN= A7A09_010280 PE=3 SV=1
MYRIAKEFHFSASHQLSHLPPEHQCARLHGHNYVVIVELAAQELNAAGFVRDYHELGLLKAYIDENFDHRHLNDIIDGPSTAENLAKHFFDWCKARWPETAAVRVSETPKTWAEYRP

SEQ ID NO: 22478 - protein, 129 aa, Methylibium petroleiphilum
  misc_feature (1)..(129): tr|A2SD50|A2SD50_METPP 6-carboxy-5,6,7,8-tetrahydropter in synthase OS=Methylibium petroleiphilum (strain ATCC BAA-1232 / LMG 22953 / PM1) OX=420662 GN=Mpe_A0527 PE=3 SV=1
MFELSQSFYFESAHTLRRQVERNEADGSRRVHGHTYTAEVTVRGEADPATGMVVDLALLRSAIATVREQLDHHFLDEVPGLGLPTLENLCRFIHERLLTTVPAIASVSVGRQSSGDRCTFRPVLADRRR

SEQ ID NO: 22479 - protein, 129 aa, Methylibium sp.
  misc_feature (1)..(129): tr|A0A0Q7CM24|A0A0Q7CM24_9BURK 6-carboxy-5,6,7,8-tetrah ydropterin synthase OS=Methylibium sp. Root1272 OX=1736 441 GN=ASC67_15185 PE=3 SV=1
MFELSQSFYFESAHTLRRQVERNEADGSRRVHGHTYTAEVTVRGEADPATGMVVDLALLRSAIAAVREQLDHHFLDEVPGLGLPTLENLCRFIHERLLPTVPAIASVSVGRQSSGDRCVFRPVPADCRR

SEQ ID NO: 22480 - protein, 129 aa, Methylibium sp.; identical to SEQ ID NO: 22478
  misc_feature (1)..(129): tr|W7WNY4|W7WNY4_9BURK 6-carboxy-5,6,7,8-tetrahydropter in synthase OS=Methylibium sp. T29-B OX=1437443 GN=queD PE=3 SV=1

SEQ ID NO: 22481 - protein, 146 aa, Methylobacillus flagellatus
  misc_feature (1)..(146): tr|Q1H192|Q1H192_METFK 6-carboxy-5,6,7,8-tetrahydropter in synthase OS=Methylobacillus flagellatus (strain KT / ATCC 51484 / DSM 6875) OX=265072 GN=Mfla_1477 PE=3 SV= 1
MQITTRLEFDAGHRIPSHKSQCRNLHGHRYALEITLSGNIIEQEGASDHGMVMDFSDVKAIAKRCVVDQWDHAFLVYEGDKVVLEFLRSLPNHKTVIFSSVPTAENMAAEAFRILKAQYHDTYGTQLKLERVRLYETPNSWADALA

SEQ ID NO: 22482 - protein, 146 aa, Methylobacillus rhizosphaerae
  misc_feature (1)..(146): tr|A0A238ZU04|A0A238ZU04_9PROT 6-carboxy-5,6,7,8-tetrah ydropterin synthase OS=Methylobacillus rhizosphaerae OX =551994 GN=SAMN05192560_1508 PE=3 SV=1
MQITTRLEFDAGHRIPHHKSQCRNLHGHRYAMEITLSGNIIELDGASDNGMVMDFSDVKAIAKRCVVDVWDHAFLVYKDDTVVLEFLRSLPDHKTVIFNQVPTAENMAAEAFRILKAEYHDTYGTQLQLERVRLYETPNSWADALS

SEQ ID NO: 22483 - protein, 147 aa, Methylobacillus sp.
  misc_feature (1)..(147): tr|A0A1A9NRG0|A0A1A9NRG0_9PROT 6-carboxy-5,6,7,8-tetrah ydropterin synthase OS=Methylobacillus sp. MM3 OX=18480 39 GN=A7976_09215 PE=3 SV=1
MQITTRLEFDAGHRIPCHKSQCRNLHGHRYAIEITLSGDVIQQEGSSEQGMVMDFSDVKAIARKAVVDVWDHAFLVYQGDTAVREFLETLPDHKTVIMQSVPTAENMAAEAFRILDALYRDTYGNHLRLERVRLFETPNSWADALSR

SEQ ID NO: 22484 - protein, 134 aa, Methylobacter sp.
  misc_feature (1)..(134): tr|A0A522WWA0|A0A522WWA0_9GAMM 6-carboxy-5,6,7,8-tetrah ydropterin synthase OS=Methylobacter sp. OX=2051955 GN= EPN17_07335 PE=3 SV=1
MYTITKEVYFCYGHRLMNHPGKCRNLHGHSVKASISIEQEQLNDQAMVCDFSDIRDCVEAYIDRQLDHNFLLHKDDPIIPMLTANKERFLALDEHPTAEVLSKMIYQHLKQSGFNVAQVVLWETASAHACYREN

SEQ ID NO: 22485 - protein, 134 aa, Methylobacter sp.
  misc_feature (1)..(134): tr|A0A2P5MFI5|A0A2P5MFI5_9GAMM 6-carboxy-5,6,7,8-tetrah ydropterin synthase OS=Methylobacter sp. OX=2051955 GN= CTY24_03240 PE=3 SV=1
MYTITKEVYFCYGHRLMNHGGKCRNLHGHSVKAAISVEQPQLNEQSMVCDFAEIRDCVESFVDKHLDHNFLLHKDDPLIPALIANNERFWALDEHPTAEVLSKMIYRHLKVSGFNVTQVVLWETASAYASYHES

SEQ ID NO: 22486 - protein, 118 aa, Methylobacter tundripaludum
  misc_feature (1)..(118): tr|A0A2S6GXY7|A0A2S6GXY7_9GAMM 6-carboxy-5,6,7,8-tetrah ydropterin synthase OS=Methylobacter tundripaludum OX=1 73365 GN=B0F88_109185 PE=3 SV=1
MNHPGKCRNLHGHSVKASISIEQEQLNDQGMVCDFSDIRDSVEAFIDQTLDHNFLLHKDDPIIPMLIANKERFLALDEHPTAEVLSKMIYRHLKQSGFNVAQVVLWETASAHACYREN

SEQ ID NO: 22487 - protein, 134 aa, Methylobacter tundripaludum
  misc_feature (1)..(134): tr|G3IUC3|G3IUC3_METTV 6-carboxy-5,6,7,8-tetrahydropter in synthase OS=Methylobacter tundripaludum (strain ATCC BAA-1195 / DSM 17260 / SV96) OX=697282 GN=Mettu_0299 P E=3 SV=1
MYTITKEVYFCYGHRLMNHPGKCRNLHGHSVKASISIEQEQLNDQGMVCDFSDIRDSVEAFIDQKLDHNFLLHKDDPIIPMLIANKERFLALDEHPTAEVLSKMIYQHLKQSGFNVAQVVLWETASAHACYREN

SEQ ID NO: 22488 - protein, 133 aa, Methylobacterium aquaticum
  misc_feature (1)..(133): tr|A0A0J6SWH4|A0A0J6SWH4_9RHIZ 6-pyruvoyl tetrahydropte rin synthase OS=Methylobacterium aquaticum OX=270351 GN =VP06_07280 PE=4 SV=1
MYAVEVRDHVMIAHSFKGELFGPAQALHGATFVVDVAFFRETLTADGVVVDIGRASEALKTILAPLTFRNLDDLPEFAGQNTTTEFLCGHIHRAMAAATRAGDLGPGGEGVSRLRVTLHESHLARAWFEAPLA

SEQ ID NO: 22489 - protein, 118 aa, Methylobacterium aquaticum
  misc_feature (1)..(118): tr|A0A0J6V9S7|A0A0J6V9S7_9RHIZ 6-carboxy-5,6,7,8-tetrah ydropterin synthase OS=Methylobacterium aquaticum OX=27 0351 GN=VP06_11120 PE=3 SV=1
MKITQAFTFEAAHRLPNVPETHRCHRMHGHSYRVELTLDGPVDPETGWVVDFFDVEAAFGPVLERLDHYCLNEVPGLENPTAEHIAIWIWEKTRPALPLLSSVKVFETPMSWAEYTGV

SEQ ID NO: 22490 - protein, 118 aa, Methylobacterium brachiatum
  misc_feature (1)..(118): tr|A0A1I3G257|A0A1I3G257_9RHIZ 6-carboxy-5,6,7,8-tetrah ydropterin synthase OS=Methylobacterium brachiatum OX=2 69660 GN=queD PE=3 SV=1
MNITQAFTFEAAHRLPNVPATHRCHRMHGHSYRVELTVSGPVDPHTGWVIDFYDIESIFGPLLARLDHHCLNEIEGLENPTAENIAAWIWHRLRPDLPGLARVRVAETPMSWAEYDGD

SEQ ID NO: 22491 - protein, 118 aa, Methylobacterium currus
  misc_feature (1)..(118): tr|A0A2R4WSQ2|A0A2R4WSQ2_9RHIZ 6-carboxy-5,6,7,8-tetrah ydropterin synthase OS=Methylobacterium currus OX=20515 53 GN=queD PE=3 SV=1
MKITQAFTFEAAHRLPNVPPTHRCHRMHGHSYRVELTLDGPVDPATGWVVDFFDVEAAFGPVLARLDHYCLNEVPGLENPTAEHIAVWIWEKTRPALPLLSSVKVFETPMSWAEYTGA

SEQ ID NO: 22492 - protein, 133 aa, Methylobacterium currus
  misc_feature (1)..(133): tr|A0A2R4WL41|A0A2R4WL41_9RHIZ 6-carboxytetrahydropteri n synthase OS=Methylobacterium currus OX=2051553 GN=DA0 75_16115 PE=4 SV=1
MYAVEVRDHVMIAHSFRGELFGPAQGLHGATFVVDVAFFRESLTPDGVVVDIGRASEALKAILAPLNYRNLDDLPEFSGENTTTEFLCGHIHRAMAAATRAGALGPGGEGVSRLRVTLHESHLARAWFEAPLA

SEQ ID NO: 22493 - protein, 132 aa, Methylobacterium dankookense
  misc_feature (1)..(132): tr|A0A564G1J0|A0A564G1J0_9RHIZ 6-carboxy-5,6,7,8-tetrah ydropterin synthase OS=Methylobacterium dankookense OX= 560405 GN=queD PE=3 SV=1
MPGIADIADLKNKAMKITQAFTFEAAHRLPNVPETHRCHRMHGHSYRVELTVAGAIDPHSGWVIDFYDVEDIFRPLLERLDHHTLNDIEGLENPTAENIAAWIWHRAKAGLPGLALVRVYETPMSWAEYAGE

SEQ ID NO: 22494 - protein, 118 aa, Methylobacterium frigidaeris
  misc_feature (1)..(118): tr|A0A2G8MBG9|A0A2G8MBG9_9RHIZ 6-carboxy-5,6,7,8-tetrah ydropterin synthase OS=Methylobacterium frigidaeris OX= 2038277 GN=queD PE=3 SV=1
MKITQAFTFEAAHRLPNVPPTHRCHRMHGHSYRVELTLDGPVDPETGWVVDFFDVEAAFGPVLERLDHYCLNEVPGLENPTAEHIAVWIWEKTRPALPLLSSVKVFETPMSWAEYTGA

SEQ ID NO: 22495 - protein, 114 aa, Methylobacterium frigidaeris
  misc_feature (1)..(114): tr|A0A2G8MI08|A0A2G8MI08_9RHIZ Uncharacterized protein OS=Methylobacterium frigidaeris OX=2038277 GN=CS379_155 75 PE=4 SV=1
MFGPAQGLHGATFVVDVAFFRESLTPDGVVVDIGRASEALKTILAPLNYRNLDDLPDFSGKNTTTEFLCGHIHAAMAAATRAGALGPGGEGVSRLRVTLHESHLARAWFEAPLA

SEQ ID NO: 22496 - protein, 118 aa, Methylobacterium gnaphalii
  misc_feature (1)..(118): tr|A0A512JLS4|A0A512JLS4_9RHIZ 6-carboxy-5,6,7,8-tetrah ydropterin synthase OS=Methylobacterium gnaphalii OX=10 10610 GN=ptps PE=3 SV=1
MKITQAFTFEAAHRLPNVPQTHRCSRMHGHSYRVELTVSGPVDATSGWVIDFYDVESAFKPILERLDHHTLNEIEGLENPTAEHIAAWIWQRTKPLLPGLTNVKVMETPLSWADYDGD

SEQ ID NO: 22497 - protein, 127 aa, Methylobacterium gossipiicola
  misc_feature (1)..(127): tr|A0A1I2REC4|A0A1I2REC4_9RHIZ 6-carboxy-5,6,7,8-tetrah ydropterin synthase OS=Methylobacterium gossipiicola OX =582675 GN=SAMN05192565_102106 PE=3 SV=1
MKITQAFTFEAAHRLPNVPETHRCHRMHGHSYRVELTLTGAVDPQTGWVVDFFDVEHAFAPVLLQLDHYCLNDIPGLENPTAEHIAAWVWTRIKGALPALSSVKVYETPMSWAEYEGEGAPKGGGHP

SEQ ID NO: 22498 - protein, 118 aa, Methylobacterium haplocladii
  misc_feature (1)..(118): tr|A0A512IJ67|A0A512IJ67_9RHIZ 6-carboxy-5,6,7,8-tetrah ydropterin synthase OS=Methylobacterium haplocladii OX= 1176176 GN=ptps PE=3 SV=1
MKITQAFTFEAAHRLPNVPQTHRCFRMHGHSYRVELQVSGPVDHTSGWVIDFYDVESAFAPILDQLDHHCLNEIEGLDNPTAEHIAAWIWHRTKPLLPGLSSVKVMETPLSWAEYDGD

SEQ ID NO: 22499 - protein, 118 aa, Methylobacterium indicum
  misc_feature (1)..(118): tr|A0A0J6R683|A0A0J6R683_9RHIZ 6-carboxy-5,6,7,8-tetrah ydropterin synthase OS=Methylobacterium indicum OX=1775 910 GN=NS229_02125 PE=3 SV=1
MKITQAFTFEAAHRLPTVPATHRCARMHGHSYRVELTLDGPVDPQTGWVVDFYDVEHAFRPVLERLDHHCLNEVPGLEVPTAEHIAMWIWEQTRPAMPLLALVKVFETPMCWAEYSGA

SEQ ID NO: 22500 - protein, 133 aa, Methylobacterium indicum
  misc_feature (1)..(133): tr|A0A0J6RBR7|A0A0J6RBR7_9RHIZ 6-pyruvoyl tetrahydropte rin synthase OS=Methylobacterium indicum OX=1775910 GN= NS229_04845 PE=4 SV=1
MYAVEVRDHVMIAHSFRGDLFGPAQALHGATFVVDVAFFRESLTPDGVVVDIGRASEALKRILAPLNYRNLDDLPEFSGENTTTEFLCGHIHRAMAAATRAGDLGPGGEGVSRLRVTLHESHLARAWFEAPLA

SEQ ID NO: 22501 - protein, 118 aa, Methylobacterium mesophilicum
  misc_feature (1)..(118): tr|M7YGV1|M7YGV1_9RHIZ 6-carboxy-5,6,7,8-tetrahydropter in synthase OS=Methylobacterium mesophilicum SR1.6/6 OX =908290 GN=MmSR116_5169 PE=3 SV=1
MKITQAFTFEAAHRLPNVPETHRCHRMHGHSYRVELTVAGPVDPHTGWVIDFYDIESIFGPLLARLDHHCLNEIEGLENPTAENIAAWIWHRLRPDLPGLARVRVAETPMSWAEYDGE

SEQ ID NO: 22502 - protein, 118 aa, Methylobacterium nodulans
  misc_feature (1)..(118): tr|B8IG27|B8IG27_METNO 6-carboxy-5,6,7,8-tetrahydropter in synthase OS=Methylobacterium nodulans (strain LMG 21 967 / CNCM I-2342 / ORS 2060) OX=460265 GN=Mnod_6746 PE =3 SV=1
MKITQAFTFEAAHWLPNVPETHRCRRMHGHSYRVELTLDGPVDPHTGWVVDFYDVEHAFAPLLAELDHHCLNDLPGLENPTAEHIAIWIWNRARPALPALSSVKVFETPLSWAEYTGD

SEQ ID NO: 22503 - protein, 134 aa, Methylobacterium nodulans
  misc_feature (1)..(134): tr|B8IEF8|B8IEF8_METNO Uncharacterized protein OS=Methy lobacterium nodulans (strain LMG 21967 / CNCM I-2342 / ORS 2060) OX=460265 GN=Mnod_4663 PE=4 SV=1
MYAVEVRDHVMIAHSFRGALFGPAQALHGATFVVDVAFFRESLTPEGVVVDIGRAGEVLKRILAPLNYCNLDDLPDFAGINTTTEFLCGHIHRAMAAAVRAGDLGPGGEGVSRLRVTLHESHVARAWCEGPLDP

SEQ ID NO: 22504 - protein, 118 aa, Methylobacterium organophilum
  misc_feature (1)..(118): tr|A0A2U1EWN7|A0A2U1EWN7_METOR 6-carboxy-5,6,7,8-tetrah ydropterin synthase OS=Methylobacterium organophilum OX =410 GN=C7388_10744 PE=3 SV=1
MKITQAFTFEAAHRLPNVPETHRCHRMHGHSYRVELTVAGPVDPRTGWVIDFYDIESIFGPLLARLDHHCLNEIEGLENPTAENIAAWIWHRLRPDLPGLALVRVAETPMSWAEYDGE

SEQ ID NO: 22505 - protein, 118 aa, Methylobacterium oryzae
  misc_feature (1)..(118): tr|A0A089Q6C1|A0A089Q6C1_9RHIZ 6-carboxy-5,6,7,8-tetrah ydropterin synthase OS=Methylobacterium oryzae CBMB20 O X=693986 GN=queD PE=3 SV=1
MKITQAFTFEAAHRLPNVPETHRCHRMHGHSYRVELTVAGPVDAHTGWVIDFYDIESIFGPLLARLDHHCLNEIEGLENPTAENIAAWIWQRLRPDLPGLALVRVAETPMSWAEYDGE

SEQ ID NO: 22506 - protein, 118 aa, Methylobacterium oxalidis
  misc_feature (1)..(118): tr|A0A512IXC1|A0A512IXC1_9RHIZ 6-carboxy-5,6,7,8-tetrah ydropterin synthase OS=Methylobacterium oxalidis OX=944 322 GN=MOX02_02870 PE=3 SV=1
MKITQAFTFEAAHRLPNVPETHRCHRMHGHSYRVELTVEGEVDPHTGWIVDFYDMERVFAPILARLDHHTLNEIEGLENPTAENIAAWIWHRTKGGLPGLSRVKVCETPMSWAEYEGD

SEQ ID NO: 22507 - protein, 118 aa, Methylobacterium phyllostachyos
  misc_feature (1)..(118): tr|A0A1G9Y1S3|A0A1G9Y1S3_9RHIZ 6-carboxy-5,6,7,8-tetrah ydropterin synthase OS=Methylobacterium phyllostachyos OX=582672 GN=SAMN05216360_105111 PE=3 SV=1
MKITQAFTFEAAHRLPNVPATHRCHRMHGHSYRVELTVAGPVDPHTGWVIDFYDIESIFGPLLARLDHHCLNEIEGLENPTAENIAAWIWHRLRPDLPGLARVRVAETPMSWAEYDGD

SEQ ID NO: 22508 - protein, 133 aa, Methylobacterium platani
  misc_feature (1)..(133): tr|A0A179SAF7|A0A179SAF7_9RHIZ 6-pyruvoyl tetrahydropte rin synthase OS=Methylobacterium platani OX=427683 GN=A 5481_12695 PE=4 SV=1
MYAVEVREHVMIAHSFRGALFGPAQGLHGATFVVDVAFFRESLTADGVVVDIGRAGEALKAVLAPLNYRNLDDLPDFAGTNTTTEFLCGHIHGAMAAAARAGALGPGGEGVSRIRVTLHESHLARAWFEAPLA

SEQ ID NO: 22509 - protein, 118 aa, Methylobacterium platani
  misc_feature (1)..(118): tr|A0A179SAT9|A0A179SAT9_9RHIZ 6-carboxy-5,6,7,8-tetrah ydropterin synthase OS=Methylobacterium platani OX=4276 83 GN=A5481_11615 PE=3 SV=1
MKITQAFTFEAAHRLPNVPPTHRCHRMHGHSYRVELTLDGPVDPATGWVVDFFDVEAAFAPVLARLDHYCLNEVPGLENPTAEHIAAWIWNETKPALPLLASVKVFETPMSWAEYAGA

SEQ ID NO: 22510 - protein, 118 aa, Methylobacterium pseudosasicola
  misc_feature (1)..(118): tr|A0A1I4HXR4|A0A1I4HXR4_9RHIZ 6-carboxy-5,6,7,8-tetrah ydropterin synthase OS=Methylobacterium pseudosasicola OX=582667 GN=SAMN05192568_1005121 PE=3 SV=1
MNITQAFTFEAAHRLPNVPATHRCHRMHGHSYRVELTVAGPVDPHTGWVIDFYDIEKIFGPLLERLDHHCLNEIEGLENPTAENIAAWIWHRLRPDLPGLARVRVAETPMSWAEYDGD

SEQ ID NO: 22511 - protein, 118 aa, Methylobacterium radiotolerans; identical to SEQ ID NO: 22504
  misc_feature (1)..(118): tr|B1LTL7|B1LTL7_METRJ 6-carboxy-5,6,7,8-tetrahydropter in synthase OS=Methylobacterium radiotolerans (strain A TCC 27329 / DSM 1819 / JCM 2831 / NBRC 15690 / NCIMB 10 815 / 0-1) OX=426355 GN=Mrad2831_1968 PE=3 SV=1

SEQ ID NO: 22512 - protein, 118 aa, Methylobacterium radiotolerans; identical to SEQ ID NO: 22504
  misc_feature (1)..(118): tr|A0A2M8V928|A0A2M8V928_9RHIZ 6-carboxy-5,6,7,8-tetrah ydropterin synthase OS=Methylobacterium radiotolerans O X=31998 GN=queD PE=3 SV=1

SEQ ID NO: 22513 - protein, 118 aa, Methylobacterium sp.
  misc_feature (1)..(118): tr|A0A0Q5YU13|A0A0Q5YU13_9RHIZ 6-carboxy-5,6,7,8-tetrah ydropterin synthase OS=Methylobacterium sp. Leaf399 OX= 1736364 GN=ASG40_10930 PE=3 SV=1
MKITQAFTFEAAHRLPNVPESHRCHRMHGHSYRVELTLTAPVDPHTGWVVDFFDVETAFAPILARLDHYCLNEVEGLENPTAEHIAAWIWHRTKPSLPVLSSVRVFETPMSWAEYEGD

SEQ ID NO: 22514 - protein, 133 aa, Methylobacterium sp.
  misc_feature (1)..(133): tr|A0A4Z0NXP7|A0A4Z0NXP7_9RHIZ 6-carboxytetrahydropteri n synthase OS=Methylobacterium sp. 6HR-1 OX=1141884 GN= EU555_00240 PE=4 SV=1
MYAVEVRDHVMIAHSFKGALFGPAQGLHGATFVVDVAFFRDSLTADGVVVDIGRAGEALKAVLAPLNYRNLDDLPEFAGRNTTTEFLCGHIHGAMAAAARAGALGPGGEGVSRIRVTLHESHLARAWFEAPVA

SEQ ID NO: 22515 - protein, 133 aa, Methylobacterium tarhaniae
  misc_feature (1)..(133): tr|A0A0J6T6N3|A0A0J6T6N3_9RHIZ 6-pyruvoyl tetrahydropte rin synthase OS=Methylobacterium tarhaniae OX=1187852 G N=VQ03_09455 PE=4 SV=1
MYAVEVRDHVMIAHSFRGELFGPAQGLHGATFVVDVAFFRESLTPDGVVVDIGRASEALKAILAPLNYRNLDDLPDFSGQNTTTEFLCGHIHAAMAAATRAGDLGPGGEGVSRLRVTLHESHLARAWFEAPPA

SEQ ID NO: 22516 - protein, 118 aa, Methylobacterium tarhaniae
  misc_feature (1)..(118): tr|A0A0J6SJ15|A0A0J6SJ15_9RHIZ 6-carboxy-5,6,7,8-tetrah ydropterin synthase OS=Methylobacterium tarhaniae OX=11 87852 GN=VQ03_24855 PE=3 SV=1
MKITQAFTFEAAHRLPNVPATHRCHRMHGHSYRVELTLDGPVDPETGWVVDFFDVEAAFGPVLERLDHYCLNEVPGLENPTAEHIAVWIWEKTRPALPLLSSVKVFETPMSWAEYTGV

SEQ ID NO: 22517 - protein, 118 aa, Methylobacterium variabile
  misc_feature (1)..(118): tr|A0A0J6SBP8|A0A0J6SBP8_9RHIZ 6-carboxy-5,6,7,8-tetrah ydropterin synthase OS=Methylobacterium variabile OX=29 8794 GN=VQ02_26915 PE=3 SV=1
MKITQAFTFEAAHRLPNVPPTHRCHRMHGHSYRVELTLDGPVDPATGWVVDFFDVESAFAPVLARLDHYCLNEVPGLENPTAEHIAVWIWEKTRPALPLLASVKVFETPMSWAEYTGV

SEQ ID NO: 22518 - protein, 133 aa, Methylobacterium variabile
  misc_feature (1)..(133): tr|A0A0J6TB50|A0A0J6TB50_9RHIZ 6-pyruvoyl tetrahydropte rin synthase OS=Methylobacterium variabile OX=298794 GN =VQ02_00835 PE=4 SV=1
MYAVEVRDHVMIAHSFKGDLFGPAQGLHGATFVVDVAFFRESLTPDGVVVDIGRASEALRRVLAPLNYRNLDDLPDFAGQNTTTEFLCGYIHGAMAAAVRAGDLGPGGEGVSRIRVTLHESHLARAWFEAPLA

SEQ ID NO: 22519 - protein, 132 aa, Methylobrevis pamukkalensis
  misc_feature (1)..(132): tr|A0A1E3H5B5|A0A1E3H5B5_9RHIZ 6-carboxy-5,6,7,8-tetrah ydropterin synthase OS=Methylobrevis pamukkalensis OX=1 439726 GN=queD PE=4 SV=1
MYAVEVRDHVMIAHSLNRPVFGPARGLHGATYVVDAAFCADELDEDGLVVDIGLATTALRGILKPLDYANLDERPEFAGKITTTEFLARHIFDGLAAAAKGGDLGPAGRALARLKVTLHESHVARAWYEAAL

SEQ ID NO: 22520 - protein, 124 aa, Methylocaldum marinum
  misc_feature (1)..(124): tr|A0A250L160|A0A250L160_9GAMM 6-pyruvoyl tetrahydrobio pterin synthase OS=Methylocaldum marinum OX=1432792 GN= sS8_3887 PE=4 SV=1
MYQLAITRDFIARHFLIGGDWGDETLEHSHHYKAEVLIEGEQLDRHGYLIDIVDLEQATMTLIGEFRDRVLNDLEPFRGLNPSLERFARIFWERLRDRLTLRGVKMTVKLWENETDWAAFGGSL

SEQ ID NO: 22521 - protein, 138 aa, Methylocaldum marinum
  misc_feature (1)..(138): tr|A0A250KP12|A0A250KP12_9GAMM 6-carboxy-5,6,7,8-tetrah ydropterin synthase OS=Methylocaldum marinum OX=1432792 GN=sS8_1347 PE=3 SV=1
MSRFMFTITKEVYFCYGHRLMKHTGKCRHLHGHSVKAAITVVAESLNEQGMVCDFADIGAAASEYIDRQLDHNLLLHKDDPLLPALASAGERFLALDEHPTAEYLAKLIFGHVASRGYKVRSVTLWETSSACATYSEY

SEQ ID NO: 22522 - protein, 124 aa, Methylocaldum sp.
  misc_feature (1)..(124): tr|A0A4V3DR94|A0A4V3DR94_9GAMM 6-pyruvoyltetrahydropter in/6-carboxytetrahydropterin synthase OS=Methylocaldum sp. 0917 OX=2485163 GN=EDE06_11950 PE=4 SV=1
MYQLAITRDFIARHFLIGGDWGAENHEHSHHYKAEVLIEGEQLDRHGYLIDIVDLEQATMALIGEFKDRVLNDLEPFRGLNPSLERFARIFWERLRDRVTLHGVKMTIKLWENDRDWAAFGGTL

SEQ ID NO: 22523 - protein, 134 aa, Methylocaldum sp.
  misc_feature (1)..(134): tr|A0A4R7AKQ2|A0A4R7AKQ2_9GAMM 6-carboxy-5,6,7,8-tetrah ydropterin synthase OS=Methylocaldum sp. 0917 OX=248516 3 GN=EDE06_10175 PE=3 SV=1
MFTITKEVYFCYGHRLMEHTGKCRHLHGHSVKAAITVIAESLNEQGMVCDFAEISAVASEYIDRQLDHNLLLHKDDPLLPALVSAGERFLALDEHPTAEYLAKLIFGHVASRGYNVRSVTLWETSSACATYSEF

SEQ ID NO: 22524 - protein, 118 aa, Methylocapsa palsarum
  misc_feature (1)..(118): tr|A0A1I3ZVA8|A0A1I3ZVA8_9RHIZ 6-carboxy-5,6,7,8-tetrah ydropterin synthase OS=Methylocapsa palsarum OX=1612308 GN=SAMN05444581_108175 PE=3 SV=1
MKITQAFSFEAAHRLPNVPEKHRCHRLHGHSYRVELKLEGPVDPFTGFVVDFFDIEAVFGPLLEQLDHQYLNEIEGLQNPTAENISIFIFERIVKTLPQLASVVVFETPDCWAEYNGQ

SEQ ID NO: 22525 - protein, 126 aa, Methyloceanibacter caenitepidi
  misc_feature (1)..(126): tr|A0A0A8K4T9|A0A0A8K4T9_9RHIZ 6-carboxy-5,6,7,8-tetrah ydropterin synthase OS=Methyloceanibacter caenitepidi O X=1384459 GN=GL4_2124 PE=3 SV=1
MRIYKEFFFEAAHFLPSAPPGHPNARVHGHSFRARITVDGQPDEETGIIIHFGELEAAVQDAKDALDHRMLNEIEGLAAPTLERIAMWLWDRLHNRLPGLVEVVVARDSCHEGCVYHGPPMRLAAE

SEQ ID NO: 22526 - protein, 126 aa, Methyloceanibacter marginalis
  misc_feature (1)..(126): tr|A0A1E3W399|A0A1E3W399_9RHIZ 6-carboxy-5,6,7,8-tetrah ydropterin synthase OS=Methyloceanibacter marginalis OX =1774971 GN=AUC71_03535 PE=3 SV=1
MRIYKEFFFEAAHFLPSAPPGHPNARVHGHSFRVRVTVDGEPDEDTGIVVHFDDLETAVADARDALDHRMLNDVEGLAYPTLERIAMWLWDRLHNRLPGLAEIVVARDSCHEGCVYQGPPMRLAAE

SEQ ID NO: 22527 - protein, 126 aa, Methyloceanibacter methanicus
  misc_feature (1)..(126): tr|A0A1E3W5C8|A0A1E3W5C8_9RHIZ 6-carboxy-5,6,7,8-tetrah ydropterin synthase OS=Methyloceanibacter methanicus OX =1774968 GN=AUC68_13405 PE=3 SV=1
MRIYKEFLFEAAHFLPSAPPGHPNARLHGHSFRARITVDGQPDEETGIVLHFDELEAAVAEARDALDHRMLNEIEGLSAPTLERIAMWLWDRLHNRLPGLVEIVVARDSCHEGCVYYGPPLRLAAE

SEQ ID NO: 22528 - protein, 126 aa, Methyloceanibacter sp.
  misc_feature (1)..(126): tr|A0A353IQZ7|A0A353IQZ7_9RHIZ 6-carboxy-5,6,7,8-tetrah ydropterin synthase OS=Methyloceanibacter sp. OX=196532 1 GN=DDW48_09780 PE=3 SV=1
MRIYKEFFFEAAHFLPSAPPGHPNARVHGHSFRARISVDGQPDEDTGIIVHFDELEAAVSDARDALDHRMLNEIEGLSAPTLERIAMWLWDRLHNRLPGLVEIVVARDSCHEGCVYHGPPMRLAAE

SEQ ID NO: 22529 - protein, 126 aa, Methyloceanibacter stevinii
  misc_feature (1)..(126): tr|A0A1E3VLI6|A0A1E3VLI6_9RHIZ 6-carboxy-5,6,7,8-tetrah ydropterin synthase OS=Methyloceanibacter stevinii OX=1 774970 GN=AUC70_06795 PE=3 SV=1
MRIYKEFFFEAAHFLPSAPPGHPNARVHGHSFRARITVDGQPDEDTGIIIHFGELEAAVQDAKDALDHRMLNDIEGLSAPTLERIAMWLWDRLHNRLPGLVEVVVARDSCHEGCVYHGPPMRLAAE

SEQ ID NO: 22530 - protein, 126 aa, Methyloceanibacter superfactus
  misc_feature (1)..(126): tr|A0A1E3VP96|A0A1E3VP96_9RHIZ 6-carboxy-5,6,7,8-tetrah ydropterin synthase OS=Methyloceanibacter superfactus O X=1774969 GN=AUC69_02290 PE=3 SV=1
MRIYKEFFFEAAHFLPSAPPGHPNSRVHGHSFRARITVDGEPDEETGIIVHFDELEAAVADARAALDHRMLNDVEGLAFPTLERIAMWLWDRLHNRLPGLVEIVVARDSCHEGCVYNGPPMRLAAE

SEQ ID NO: 22531 - protein, 118 aa, Methylocella silvestris
  misc_feature (1)..(118): tr|B8ESN9|B8ESN9_METSB 6-carboxy-5,6,7,8-tetrahydropter in synthase OS=Methylocella silvestris (strain DSM 1551 0 / CIP 108128 / LMG 27833 / NCIMB 13906 / BL2) OX=3959 65 GN=Msil_1409 PE=3 SV=1
MKITQAFHFEAAHRLPHVAETHRCHRLHGHSYRVELELQGPVDPVTGFVVDFFDIEAAFGPLLARLDHHFLNEIEGLENPTAELIAIWIFERIRGPLPQLSCVKVFETPDCWAEYEGA

SEQ ID NO: 22532 - protein, 118 aa, Methylocella silvestris
  misc_feature (1)..(118): tr|A0A2J7TJV2|A0A2J7TJV2_METSI 6-carboxy-5,6,7,8-tetrah ydropterin synthase OS=Methylocella silvestris OX=19959 6 GN=queD PE=3 SV=1
MKITQAFHFEAAHRLPHVAETHRCHRLHGHSYRVELELQGPVDPVTGFVVDFFDIEAAFGPLLARLDHHYLNEIEGLENPTAELIAIWIFERIRGPLPQLSCVKVFETPDCWAEYEGV

SEQ ID NO: 22533 - protein, 118 aa, Methylocella tundrae
  misc_feature (1)..(118): tr|A0A4U8Z191|A0A4U8Z191_METTU 6-carboxy-5,6,7,8-tetrah ydropterin synthase OS=Methylocella tundrae OX=227605 G N=ygcM PE=3 SV=1
MKITQAFHFEAAHRLPHVGEKHRCYRLHGHSYRVEVNLEGAVDQKSGFVVDFFDIEAAFGPLLERLDHHYLNEIEGLENPTAELIAVWIFDRIKPKLPQLAGVKVFETPDCWADYDGA

SEQ ID NO: 22534 - protein, 118 aa, Methylococcaceae bacterium
  misc_feature (1)..(118): tr|A0A1Z9UHW0|A0A1Z9UHW0_9GAMM 6-carboxy-5,6,7,8-tetrah ydropterin synthase OS=Methylococcaceae bacterium TMED2 82 OX=1986758 GN=CBE42_03225 PE=3 SV=1
MEIFVKFDFAASRRLTKLPEAHPCSRVHGHTFEVQITLVGEVDPSTGFMVDFSFVEQKLDDVKAVVDHRYLNDINGLENPTTEILAQWLWQYLSRDLSTLTTISVQEHYSRGVTYRGD

SEQ ID NO: 22535 - protein, 364 aa, Methylococcaceae bacterium
  misc_feature (1)..(364): tr|A0A4Q5L778|A0A4Q5L778_9GAMM 6-pyruvoyl tetrahydropte rin synthase OS=Methylococcaceae bacterium FWC3 OX=2516 328 GN=EWI61_06325 PE=4 SV=1
MNTRLLHVAATNFEAACRIPVLPDGHRSRRLHGHSFLARVRAAVPEDWGGFRGAGTSALSTALGACLAPLDYADLNEHLPIPTDENLARWIRERLEVSGIESVGVQSTSEQGADLDPHDRAHIWRRFRFEAAHQLPNVPPGHRCGRMHGHGFEVIVHAEQELTQRDMGVDFDHLGRLWEPLQAELHYACLNDVPGLENPTSEKLAAWIWRRLAAVLPELSWVTVYETHTAGCHYDGRHYRIWKEHRFESALRLIQAPDGDPRRRLHGHSYIVRLHLTAPLDVVHGWTVDYGDVKELFTPVYRQLDHDLLNELPGLVDADPGSLALWIRSAMATRLPSLDRIDLYETPGCGVLLSWGEEGPALPA

SEQ ID NO: 22536 - protein, 134 aa, Methylococcales bacterium
  misc_feature (1)..(134): tr|A0A3A2J143|A0A3A2J143_9GAMM 6-carboxy-5,6,7,8-tetrah ydropterin synthase OS=Methylococcales bacterium OX=230 4002 GN=D0530_04480 PE=3 SV=1
MFTITKEVYFCYGHRLMNHPGKCRNLHGHSVKAAISIQQEQLNDQGMVCDFSDIRDCVEAYIDDQLDHNFLLYKDDPIIPMLTANNERFLALDEHPTAEVLSKMIYKHLKQAGFNVAEVTLWETASAHACYREN

SEQ ID NO: 22537 - protein, 150 aa, Methylococcales bacterium
  misc_feature (1)..(150): tr|A0A418RRI3|A0A418RRI3_9GAMM 6-carboxytetrahydropteri n synthase OS=Methylococcales bacterium OX=2304002 GN=D 0528_05205 PE=4 SV=1
MTINQKIEHWLTAHKRNLSQAKRPFVTLSYAQSWDGSIHYLIGGDWGSENQPHAHHYVVEVSIEGKQLDQQGYLVDIVAIEAGLDEIVGHFRDVLLNDQAEFAGLNPSIEHFSRIITEQLLAAINPPGSGALRVKLWENATCWAAFRQEF

SEQ ID NO: 22538 - protein, 137 aa, Methylococcus capsulatus
  misc_feature (1)..(137): tr|Q604L2|Q604L2_METCA 6-carboxy-5,6,7,8-tetrahydropter in synthase OS=Methylococcus capsulatus (strain ATCC 33 009 / NCIMB 11132 / Bath) OX=243233 GN=MCA2527 PE=3 SV= 1
MYSVTKEIFFCYGHRLMHHSGKCRHLHGHSVRAAITVSASDLNFQGMVCDFADISAAARDFIDTHLDHNLLLHRDDPLLPLLQQAGERVLALEQHPTAEALAEMIYRDLRRKGFAVQNVTLWETSSACASYREGSPP

SEQ ID NO: 22539 - protein, 124 aa, Methylococcus sp.
  misc_feature (1)..(124): tr|A0A3N9UU76|A0A3N9UU76_9GAMM 6-carboxytetrahydropteri n synthase OS=Methylococcus sp. OX=39769 GN=EHM62_06555 PE=4 SV=1
MYQLAITRDFIARHFLVGGDWGTENQEHSHHYRAEVIVAGEQLDRHGYLIDIVALDAALLDIIGGYADRILNQQPAFAGLNPSIEHFSRILWEALRDAVDLPGRRLTVKLWENDLDWAAYDGVL

SEQ ID NO: 22540 - protein, 123 aa, Methylococcus sp.
  misc_feature (1)..(123): tr|A0A432RJG3|A0A432RJG3_9GAMM 6-carboxytetrahydropteri n synthase OS=Methylococcus sp. OX=39769 GN=DSY87_07000 PE=4 SV=1
MYQLAITRDFIAQHYLIGGDWGRENERHSHHYKVEVRVQQQDLDQHGYLIDIVDLESSLGRIIDSYQENTLNDLVPFKDLNPSLERFARVLWEELVSRLDIDGSVLSVRLWENENDWAAYRQP

SEQ ID NO: 22541 - protein, 126 aa, Methylocystaceae bacterium
  misc_feature (1)..(126): tr|A0A5C9D408|A0A5C9D408_9RHIZ 6-carboxy-5,6,7,8-tetrah ydropterin synthase OS=Methylocystaceae bacterium OX=20 52174 GN=FD139_2247 PE=3 SV=1
MTVSSFEVFREFYFEAAHALYDPEAPEGGKYRNLHGHSFRVRVTLRGAPSLEEQWVMDLGKLGRRLAELRERLDHSFLNDLEGLGKPTLENLCAYIWRDLSPTLPGLAEVGVFRDSCFEGCVYRGD

SEQ ID NO: 22542 - protein, 125 aa, Methylocystaceae bacterium
  misc_feature (1)..(125): tr|A0A395CV31|A0A395CV31_9RHIZ 6-carboxy-5,6,7,8-tetrah ydropterin synthase OS=Methylocystaceae bacterium OX=20 52174 GN=C3F11_14685 PE=3 SV=1
MTTLFEVYREFCFEAAHALYDPEHPTGGKYRNLHGHSFRVRVTLRGPRLEGEEWVIDLGKLGRRLQELRERLDHSFLNELEGLGKPTLENLCAYIWRDLEPSLPNIHEVGIFRDTCDEGCVLKKQ

SEQ ID NO: 22543 - protein, 124 aa, Methylocystis bryophila
  misc_feature (1)..(124): tr|A0A1W6MS18|A0A1W6MS18_9RHIZ 6-carboxy-5,6,7,8-tetrah ydropterin synthase OS=Methylocystis bryophila OX=65501 5 GN=B1812_03820 PE=3 SV=1
MASFEIFREFYFEAAHALYDPEHPTGGKYRNLHGHSFRVRVTLRGAPSPEDEWVMDLGKLGRRLAELRERLDHSFLNDLEGLGKPTLENLSLYIWRDLQPFALGLSEVGVFRDSCFEGCVYRGD

SEQ ID NO: 22544 - protein, 132 aa, Methylocystis bryophila
  misc_feature (1)..(132): tr|A0A1W6N0Y9|A0A1W6N0Y9_9RHIZ Uncharacterized protein OS=Methylocystis bryophila OX=655015 GN=B1812_08755 PE= 4 SV=1
MYAVEVRDHIMIAHSFRGELFGPAQRLHGATFVVDVAFFRESLTEDAVVVDIGRAHAALKSVLEPLNYRNLDEIEAFAGKQTTTEFLSRHIFDAMAAAARSGALGPGGEGIARIRVTLHESHVARAWFEDSL

SEQ ID NO: 22545 - protein, 124 aa, Methylocystis heyeri
  misc_feature (1)..(124): tr|A0A4S4MH94|A0A4S4MH94_9RHIZ 6-carboxy-5,6,7,8-tetrah ydropterin synthase OS=Methylocystis heyeri OX=391905 G N=H2LOC_01827 PE=3 SV=1
MASFEVFREFYFEAAHALYDPEHPTGGKYRNLHGHSFRVRVTLRGERHPEEQWVMDLGRLGRRLAELREKLDHSFLNDLEGLGKPTLENLCVYVWRDLAPFAPGLCEVGIFRDSCFEGCVYRGD

SEQ ID NO: 22546 - protein, 115 aa, Methylocystis heyeri
  misc_feature (1)..(115): tr|A0A4S4MRM7|A0A4S4MRM7_9RHIZ 6-carboxytetrahydropteri n synthase OS=Methylocystis heyeri OX=391905 GN=H2LOC_0 2778 PE=4 SV=1
MYAVEVRDHIMIAHSFRGELFGPAQRLHGATFVVDVAFFRERLTEDNIVVDIGRAHEALKATLAPLNYRNLDEVEAFKGQQTTTEFLTRHVFEAIALAARSGALGPGGTAFPAFA

SEQ ID NO: 22547 - protein, 124 aa, Methylocystis hirsuta
  misc_feature (1)..(124): tr|A0A3M9XN90|A0A3M9XN90_9RHIZ 6-carboxy-5,6,7,8-tetrah ydropterin synthase OS=Methylocystis hirsuta OX=369798 GN=D1O30_01855 PE=3 SV=1
MSSFEVFREFYFEAAHALYDPEAPEGGKYRNLHGHSFRVRVTLRGEPSVEEQWVMDLGKLGRRLNELRERLDHSFLNDLEGLGKPTLENLCAYIWRDLAPDLPAIAEVGVFRDSCFEGCVYRGD

SEQ ID NO: 22548 - protein, 124 aa, Methylocystis rosea
  misc_feature (1)..(124): tr|A0A3G8MAT2|A0A3G8MAT2_9RHIZ 6-carboxytetrahydropteri n synthase OS=Methylocystis rosea OX=173366 GN=EHO51_14 150 PE=4 SV=1
MSSFEVFREFYFEAAHALYDPEAPEGGKYRNLHGHSFRVRVTLRGAPTLEEQWVMDLGKLGRRLAELRESLDHSFLNDLEGLGKPTLENLCAYIWRDLSPTLPGLAEVGVFRDSCFEGCVYRGD

SEQ ID NO: 22549 - protein, 124 aa, Methylocystis sp.
  misc_feature (1)..(124): tr|A0A2P5NTQ2|A0A2P5NTQ2_9RHIZ 6-carboxy-5,6,7,8-tetrah ydropterin synthase OS=Methylocystis sp. OX=1911079 GN= CTY15_00140 PE=3 SV=1
MPTFEVHREFYFEAAHALYDPEAKDGGKYRNLHGHSFRVRVTLRGERHPEEQWVIDLGKLGRRLAELRERLDHSFLNDLEGLGKPTLENLCLYIWGDLAASLPGLSEVGVFRDSCFEGCVYRGD

SEQ ID NO: 22550 - protein, 124 aa, Methylocystis sp.
  misc_feature (1)..(124): tr|J7Q4P3|J7Q4P3_METSZ 6-carboxy-5,6,7,8-tetrahydropter in synthase OS=Methylocystis sp. (strain SC2) OX=187303 GN=BN69_2258 PE=3 SV=1
MSTFEVFREFYFEAAHALYDPEAPEGGKYRNLHGHSFRVRVTLRGEPTLEEQWVMDLGKLGRRLAELRERLDHSFLNDLEGLGKPTLENLCAYVWRDLAPDLPGLAEVGIFRDSCFEGCVYRGD

SEQ ID NO: 22551 - protein, 136 aa, Methyloglobulus morosus
  misc_feature (1)..(136): tr|V5BWJ0|V5BWJ0_9GAMM 6-carboxy-5,6,7,8-tetrahydropter in synthase OS=Methyloglobulus morosus KoM1 OX=1116472 GN=MGMO_66c00630 PE=3 SV=1
MTMFTITKEVYFCYGHRLMNHAGKCRNLHGHSVKAAISVVQETLNEQGMVCDFADIRECVETYIDGHLDHNFLLHKDDPLIPALKANNERFCALDEHPTAEVLSKMIYLHLKESGFNVSQVVLWETASAYASYKEG

SEQ ID NO: 22552 - protein, 134 aa, Methylomagnum ishizawai
  misc_feature (1)..(134): tr|A0A1Y6D9T8|A0A1Y6D9T8_9GAMM 6-carboxy-5,6,7,8-tetrah ydropterin synthase OS=Methylomagnum ishizawai OX=17609 88 GN=SAMN02949497_3885 PE=3 SV=1
MFTITKEVYFCYGHRLMRHPGKCRHLHGHSVKAAITVQAAGLNEQGMVCDFADIARIASDYIDRELDHNLLLHRDDPLVPLLAAAGERYSLLDEHPTAEYLAQLIYRHAQSQGLAVASVTLWETASACATYSEP

SEQ ID NO: 22553 - protein, 138 aa, Methylomicrobium album
  misc_feature (1)..(138): tr|H8GIE3|H8GIE3_METAL 6-carboxy-5,6,7,8-tetrahydropter in synthase OS=Methylomicrobium album BG8 OX=686340 GN= Metal_3813 PE=3 SV=1
MYTITKEVYFCYGHRLMNHPGKCRHLHGHSVKASISIRQEQLNDQGMVCDFSDIRDAVEAYIDQYLDHNFLLHKDDPIIPMLIANNERFLALDEHPTAEVLSKMIYRYLRQAGLNVAQVVLWETASAHACYSEDSPRL

SEQ ID NO: 22554 - protein, 137 aa, Methylomicrobium album
  misc_feature (1)..(137): tr|H8GK10|H8GK10_METAL 6-carboxy-5,6,7,8-tetrahydropter in synthase OS=Methylomicrobium album BG8 OX=686340 GN= Metal_0100 PE=3 SV=1
MTRSVQTQPTCGLYTLKVHAQFCSAHALRDYPGDCRRLHGHNWKVETEVQARVLNDIGIAIDFKAIKAATRQLADSLDHRFLNDIEPFDRINPTAENLAAWFFRQLSAALNSTHVKVNAVTLWETDTACVRYTEVAA

SEQ ID NO: 22555 - protein, 134 aa, Methylomicrobium alcaliphilum
  misc_feature (1)..(134): tr|G4SVR1|G4SVR1_META2 6-carboxy-5,6,7,8-tetrahydropter in synthase OS=Methylomicrobium alcaliphilum (strain DS M 19304 / NCIMB 14124 / VKM B-2133 / 20Z) OX=1091494 GN =MEALZ_2440 PE=3 SV=1
MYTITKEVYFCYGHRLMNHPGKCRHLHGHSVKAAITIKQEHLNEQGMVCDFSDIKACVEDYINEHLDHNFLLHKNDPIIPYLTETQERFMALDEHPTAEVLSQMIYQHIKEQGFDVDQVTLWETASAHACYRED

SEQ ID NO: 22556 - protein, 122 aa, Methylomicrobium alcaliphilum
  misc_feature (1)..(122): tr|G4T1J2|G4T1J2_META2 Putative 6-pyruvoyl tetrahydrobi opterin synthase OS=Methylomicrobium alcaliphilum (stra in DSM 19304 / NCIMB 14124 / VKM B-2133 / 20Z) OX=10914 94 GN=ygcM PE=4 SV=1
MYQLAICRDFIAQHYLVGGDWGAENQRHSHHYRVEIQIEHDRLDSHGYLIDIVDLENALSAVIERFKDVTLNDLSEFDGLNPSLEHFARIIHEGLQSRLDFGEQKLIVKLWENERDWAGYRE

SEQ ID NO: 22557 - protein, 134 aa, Methylomicrobium buryatense
  misc_feature (1)..(134): tr|A0A4P9UP36|A0A4P9UP36_9GAMM 6-carboxy-5,6,7,8-tetrah ydropterin synthase OS=Methylomicrobium buryatense OX=9 5641 GN=EQU24_08610 PE=3 SV=1
MYTITKEVYFCYGHRLMNHPGKCRHLHGHSVKAAITIKQQHLNEQGMVCDFSDIKACVERYIDEHLDHNFLLHKNDPIIPYLTETQERFMALEEHPTAEVLSQMIYQHIKEQGFDVDQVTLWETASAHACYRED

SEQ ID NO: 22558 - protein, 122 aa, Methylomicrobium buryatense
  misc_feature (1)..(122): tr|A0A4P9ULZ1|A0A4P9ULZ1_9GAMM 6-carboxytetrahydropteri n synthase OS=Methylomicrobium buryatense OX=95641 GN=E QU24_03540 PE=4 SV=1
MYQLAICRDFIAQHYLVGGDWGAENQRHSHHYRVEIQIEHDRLDSHGYLVDIVDLENALSAVIERFKDVTLNDLSEFDGLNPSLEHFARIIHEGLQSRLDFGEQKLTVKLWENERDWAGYRE

SEQ ID NO: 22559 - protein, 134 aa, Methylomicrobium kenyense
  misc_feature (1)..(134): tr|A0A543VF56|A0A543VF56_9GAMM 6-carboxy-5,6,7,8-tetrah ydropterin synthase OS=Methylomicrobium kenyense OX=269 709 GN=IQ34_3918 PE=3 SV=1
MYMITKEVYFCYGHRLMNHPGKCRHLHGHSVKAAITIKQQRLNEQGMVCDFSDIKACVERYIDEHLDHNFLLHKNDPIIPYLIETNERFMALDEHPTAEVLSQMIYQHIKEQGFEVDQVTLWETASAHACYRED

SEQ ID NO: 22560 - protein, 122 aa, Methylomicrobium kenyense
  misc_feature (1)..(122): tr|A0A543VCC3|A0A543VCC3_9GAMM 6-pyruvoyltetrahydropter in/6-carboxytetrahydropterin synthase OS=Methylomicrobi um kenyense OX=269709 GN=IQ34_2872 PE=4 SV=1
MYQLAICRDFIAQHYLVGGDWGAENQRHSHHYRLEIQIEHDQLDKHGYLVDIVDLENALAGVIDRFKDVTLNDLSEFDGLNPSLEHFARIIHDGLRSRLDFGEQKLTVKLWENDRDWAAYRE

SEQ ID NO: 22561 - protein, 134 aa, Methylomonas denitrificans
  misc_feature (1)..(134): tr|A0A126T773|A0A126T773_9GAMM 6-carboxy-5,6,7,8-tetrah ydropterin synthase OS=Methylomonas denitrificans OX=15 38553 GN=JT25_015580 PE=3 SV=1
MYIITKEVYFCYGHRLMNHPGKCRNLHGHSVKASISIKQNQLNDQGMVCDFSDVKDCVDGFINKVLDHNFLLHKEDPIIPALIANNEQFLAIDEHPTAEVLSKMIYNHVKQQGFNVDQVVLWETASANACYREE

SEQ ID NO: 22562 - protein, 125 aa, Methylomonas denitrificans
  misc_feature (1)..(125): tr|A0A140E3K0|A0A140E3K0_9GAMM 6-pyruvoyl tetrahydropte rin synthase OS=Methylomonas denitrificans OX=1538553 G N=JT25_000475 PE=4 SV=1
MYSVAVSRDFIANHYLIGGDWGSENQPHAHHYIAEVRIDGQQLDRHGYLVDIVAIEAALDAIVADFRDQMLNDKAEFAGLNPSIEHFSRIICEKIAAAINPPGTGRLRVKLWENATCWAAYRLAF

SEQ ID NO: 22563 - protein, 134 aa, Methylomonas koyamae
  misc_feature (1)..(134): tr|A0A177P7I2|A0A177P7I2_9GAMM 6-carboxy-5,6,7,8-tetrah ydropterin synthase OS=Methylomonas koyamae OX=702114 G N=A1355_19070 PE=3 SV=1
MFVITKEVYFCYGHRLMNHPGKCRNLHGHSVKASISIRAAQLNEQAMVCDFSDVKACVETFIDDVLDHNFLLHKDDPLIPALTAHNEQFLALDEHPTAEVLSKMIYQYVKQRGFDVDQVVLWETSSACACYRED

SEQ ID NO: 22564 - protein, 125 aa, Methylomonas koyamae
  misc_feature (1)..(125): tr|A0A177NLB5|A0A177NLB5_9GAMM 6-pyruvoyl tetrahydropte rin synthase OS=Methylomonas koyamae OX=702114 GN=A1355 _06990 PE=4 SV=1
MYSVAVSRDFIANHYLIGGDWGSENQAHAHHYIAEVRIDGETLDRHGYLVDIVAIEAALDAAVADFRDRLLNDCPEFAGLNPSIEHFSRILCQRLFAEIQLPGNGRLRVKLWENPQCWAAFSRTF

SEQ ID NO: 22565 - protein, 137 aa, Methylomonas lenta
  misc_feature (1)..(137): tr|A0A177NE64|A0A177NE64_9GAMM 6-carboxy-5,6,7,8-tetrah ydropterin synthase OS=Methylomonas lenta OX=980561 GN= A1359_09140 PE=3 SV=1
MTNAEQTPPSCGLYTLKVHAQFCSAHALRDYPGDCRRIHGHNWKVETEMTAQVLDDIGIAIDFKAIKAVTRQLADSLDHQLLNDIEPFDRINPTAENLAAWFYRQLSATLNSTHVKVAAVTLWETDNACVRYSEVAA

SEQ ID NO: 22566 - protein, 134 aa, Methylomonas lenta
  misc_feature (1)..(134): tr|A0A177NFS5|A0A177NFS5_9GAMM 6-carboxy-5,6,7,8-tetrah ydropterin synthase OS=Methylomonas lenta OX=980561 GN= A1359_08125 PE=3 SV=1
MHVITKEVYFCYGHRLMNHAGKCRNLHGHSVKASISIKSEQLNQQGMVCDFADVRDAVESFVDQHLDHNFLLHKDDPIIPALVANNERFLAIDEHPTAEVLSKMIYQHLKQEGLAVDQVVLWETASAYACYRED

SEQ ID NO: 22567 - protein, 134 aa, Methylomonas methanica
  misc_feature (1)..(134): tr|A0A177MLI0|A0A177MLI0_METMH 6-carboxy-5,6,7,8-tetrah ydropterin synthase OS=Methylomonas methanica OX=421 GN =A1332_11685 PE=3 SV=1
MYIITKEVYFCYGHRLMNHPGKCRNLHGHSVKASISIKQNQLNDQGMVCDFSDVKDCVDGFINKVLDHNFLLHKDDPIIPALVANNEQFLAIDEHPTAEVLSKMIYQHVKQQGFNVDQVVLWETASANACYREE

SEQ ID NO: 22568 - protein, 134 aa, Methylomonas methanica
  misc_feature (1)..(134): tr|G0A4G7|G0A4G7_METMM 6-carboxy-5,6,7,8-tetrahydropter in synthase OS=Methylomonas methanica (strain MC09) OX= 857087 GN=Metme_3183 PE=3 SV=1
MHIITKEVYFCYGHRLMNHPGKCRNLHGHSVKASISIQSDQLNGQGMVCDFADVRDAVESFVDQHLDHNFLLHKDDPIIPALLANNERFLALDEHPTAEVLSKMIYRHLKQEGLNVDQVVLWETASAYACYRED

SEQ ID NO: 22569 - protein, 134 aa, Methylomonas sp.; identical to SEQ ID NO: 22485
  misc_feature (1)..(134): tr|A0A2P5N278|A0A2P5N278_METSP 6-carboxy-5,6,7,8-tetrah ydropterin synthase OS=Methylomonas sp. OX=418 GN=CTY18 _08440 PE=3 SV=1

SEQ ID NO: 22570 - protein, 134 aa, Methylomonas sp.
  misc_feature (1)..(134): tr|A0A172UAJ0|A0A172UAJ0_9GAMM 6-carboxy-5,6,7,8-tetrah ydropterin synthase OS=Methylomonas sp. DH-1 OX=1727196 GN=AYM39_14935 PE=3 SV=1
MYIITKEVYFCYGHRLMNHPGKCRNLHGHSVKASISIRQEQLNPQGMVCDFSDVKACVESFIDDVLDHNFLLHKDDPIIPALIANNEQYLAIDEHPTAEVLSKMIYQYVKQQGFNVDQVVLWETASANACYRED

SEQ ID NO: 22571 - protein, 127 aa, Methylomusa anaerophila
  misc_feature (1)..(127): tr|A0A348APR4|A0A348APR4_9FIRM 6-carboxy-5,6,7,8-tetrah ydropterin synthase OS=Methylomusa anaerophila OX=19300 71 GN=queD PE=3 SV=1
MYELTIIAEFEAAHRLPEYPGKCCRLHGHNWKVEVTIAGTKLNKQGMVIDFREFKSAVGKVIDQLDHYYLNELEAFQEVYPTAENIAKYIYDKLNDHPSFTDASDLNVRCITVWESPRSAVKYCPGE

SEQ ID NO: 22572 - protein, 99 aa, Methylophaga aminisulfidivorans
  misc_feature (1)..(99): tr|F5SUN7|F5SUN7_9GAMM 6-pyruvoyl-tetrahydropterin synt hase OS=Methylophaga aminisulfidivorans MP OX=1026882 G N=MAMP_02977 PE=4 SV=1
MHGHNWKLEVEVTAIDLNEHGMGMDFKTIKTATRELAKTLDHRYLNDIPPFDTINPTAENIARFFYQKLSDTLNNDIAKVSGVTLWETDRACVKYSEDN

SEQ ID NO: 22573 - protein, 126 aa, Methylophaga frappieri
  misc_feature (1)..(126): tr|I1YG07|I1YG07_METFJ 6-carboxy-5,6,7,8-tetrahydropter in synthase OS=Methylophaga frappieri (strain ATCC BAA- 2434 / DSM 25690 / JAM7) OX=754477 GN=Q7C_679 PE=3 SV=1
MSAFYTLKILADFASAHTLRDYPGDCRRMHGHNWKVEVEVVASALNQHGMGMDFKTIKTATRELAKTLDHRYLNDIPPFDEINPTAENIARYFFQQLSQTLNDDIARVSGVTLWETDRACVKYSED

SEQ ID NO: 22574 - protein, 102 aa, Methylophaga lonarensis
  misc_feature (1)..(102): tr|M7NYD0|M7NYD0_9GAMM Queuosine biosynthesis protein Q ueD OS=Methylophaga lonarensis MPL OX=1286106 GN=MPL1_0 2748 PE=4 SV=1
MHGHNWKLEVEVTATALNQHGMGMDFKTMKTATRELAKTLDHRYLNDIPPFDEINPTAENIARFFYQRLSSTLNTDTAKVSGVTVWETDRACVKYSEETPTP

SEQ ID NO: 22575 - protein, 126 aa, Methylophaga muralis
  misc_feature (1)..(126): tr|A0A1E3GSS1|A0A1E3GSS1_9GAMM 6-carboxy-5,6,7,8-tetrah ydropterin synthase OS=Methylophaga muralis OX=291169 G N=queD PE=3 SV=1
MSATYTLKILADFASAHTLRDYPGDCKRMHGHNWKLEVEVTANALNQHGMGMDFKAIKTATRELAKTLDHRYLNDIPPFDEINPTAENIAQFFYQRLSNTLNTDTAKVSGVTVWETDRACVKYSED

SEQ ID NO: 22576 - protein, 98 aa, Methylophaga nitratireducenticrescens
  misc_feature (1)..(98): tr|I1XHZ0|I1XHZ0_METNJ Queuosine biosynthesis QueD, PTP S-I OS=Methylophaga nitratireducenticrescens OX=754476 GN=Q7A_1171 PE=4 SV=1
MHGHNWKLEVEVTANTLNQHGMAMDFKTIKIATRELAKKLDHRYLNEIPPFDEINPTAENIAQFFYQHLSDTLNTDTARVSGVTVWETDRACVKYSED

SEQ ID NO: 22577 - protein, 126 aa, Methylophaga sp.
  misc_feature (1)..(126): tr|A0A1Y5EWU2|A0A1Y5EWU2_9GAMM 6-carboxy-5,6,7,8-tetrah ydropterin synthase OS=Methylophaga sp. 42_8_T64 OX=185 6286 GN=A9Q92_03735 PE=3 SV=1
MSATYTLKILADFASAHTLREYPGDCSRMHGHNWKLEVEVSATSLNDHGMGMDFKTIKTATRKLAKTLDHRYLNDIPPFDTINPTAENIAQYFYQNLSKTLNIDTAKISGVTLWETDRACVRYSED

SEQ ID NO: 22578 - protein, 126 aa, Methylophaga sp.
  misc_feature (1)..(126): tr|A0A2G2ESP5|A0A2G2ESP5_9GAMM 6-carboxy-5,6,7,8-tetrah ydropterin synthase OS=Methylophaga sp. OX=2024840 GN=q ueD PE=3 SV=1
MSATYTLKILADFASAHTLRDYPGDCRRMHGHNWKLEVEVTANALNQHGMGMDFKTIKTATRELAKTLDHRYLNDIPPFDEINPTAENIAQFFYQRLSDTLNNDTARVSGVTVWETDRACVKYSED

SEQ ID NO: 22579 - protein, 127 aa, Methylophaga sulfidovorans
  misc_feature (1)..(127): tr|A0A1I3V4I8|A0A1I3V4I8_9GAMM 6-carboxy-5,6,7,8-tetrah ydropterin synthase OS=Methylophaga sulfidovorans OX=45 496 GN=SAMN04488079_102231 PE=3 SV=1
MSATYTLKILADFASAHTLRDYPGDCRRMHGHNWKLEVEVTAIDLNEHGMGMDFKTIKTATRELAKTLDHRYLNDIPPFDTINPTAENIARFFYQKLSDTLNNDIAKVSGVTLWETDRACVKYSEDN

SEQ ID NO: 22580 - protein, 98 aa, Methylophaga thiooxydans
  misc_feature (1)..(98): tr|C0N3T5|C0N3T5_9GAMM 6-pyruvoyl tetrahydropterin synt hase superfamily OS=Methylophaga thiooxydans DMS010 OX= 637616 GN=MDMS009_889 PE=4 SV=1
MHGHNWKLEVEVTATALNEHGMGMDFKTIKTAARELAKTLDHRYLNDIPPFDTVNPTAENIAQYFYQKLSGTLNNETAKISGVTLWETDRACVKYSEE

SEQ ID NO: 22581 - protein, 98 aa, Methylophaga thiooxydans; identical to SEQ ID NO: 22580
  misc_feature (1)..(98): tr|A0A0A0BHB8|A0A0A0BHB8_9GAMM Queuosine biosynthesis Q ueD, PTPS-I OS=Methylophaga thiooxydans OX=392484 GN=LP 43_1731 PE=4 SV=1

SEQ ID NO: 22582 - protein, 145 aa, Methylophilaceae bacterium
  misc_feature (1)..(145): tr|A0A356CTB5|A0A356CTB5_9PROT 6-carboxytetrahydropteri n synthase QueD OS=Methylophilaceae bacterium OX=203081 6 GN=queD PE=4 SV=1
MDITTRLEFDTGHRIPNHKSNCKNLHGHRYAIEVTVTGPVHDDKKSSDFGMVIDFSDVKKIIKNLIVEPWDHAFIVYKEDKEIVNFLNTLPNHKTVIFPLVPTAENMASEAYRILNNEFNMRFDHQLKIKQIRIYETPNSWADAI

SEQ ID NO: 22583 - protein, 145 aa, Methylophilaceae bacterium
  misc_feature (1)..(145): tr|A0A4P5UA65|A0A4P5UA65_9PROT 6-carboxy-5,6,7,8-tetrah ydropterin synthase OS=Methylophilaceae bacterium OX=20 30816 GN=LBMAG28_03430 PE=3 SV=1
MDITTRLEFDAGHRIPNHKSNCKNLHGHRYAIEVTVTGPIHDDRKSSDFGMVIDFSDVKQIIKDLVVEPWDHAFIVYQDDKEVVNFLKTLPDHKTVIFPVVPTAENMASEAHRILNSEFNKRFDGQLKIKQIRMYETPNSWADAI

SEQ ID NO: 22584 - protein, 145 aa, Methylophilales bacterium
  misc_feature (1)..(145): tr|A0A0R2V8T9|A0A0R2V8T9_9PROT 6-carboxy-5,6,7,8-tetrah ydropterin synthase OS=Methylophilales bacterium BACL14 MAG-120920-bin58 OX=1655631 GN=ABS29_03460 PE=4 SV=1
MEITTRMEFDAGHRIPNHKSTCRNLHGHRYAIEVTISGDIINQENESDFGMVMDFKDAKDVIKRLIVEPWDHAFIVFEKDLEVLDFLNSMKDHKTIVFPKVPTAENMALVAFDILSQAFLKEFKGLIKPINVRLYETPNNWADAS

SEQ ID NO: 22585 - protein, 132 aa, Methylophilales bacterium
  misc_feature (1)..(132): tr|A0A258SUA1|A0A258SUA1_9PROT 6-carboxytetrahydropteri n synthase QueD OS=Methylophilales bacterium 16-45-9 OX =1970537 GN=B7Y34_02350 PE=4 SV=1
MPNHKSQCRNLHGHRYVLEITLSGDIITQENASENGMVMDFSDVKSIAKESVVNVWDHAFLVYQHDTEVLNFLNTLPDHKTVVFPTVPTAENMALEAFKILKSKYHDSYGNHLKLEKVRLYETPNSWADALG

SEQ ID NO: 22586 - protein, 148 aa, Methylophilus medardicus
  misc_feature (1)..(148): tr|A0A5B8CS37|A0A5B8CS37_9PROT 6-carboxy-5,6,7,8-tetrah ydropterin synthase OS=Methylophilus medardicus OX=2588 534 GN=queD PE=3 SV=1
MEITTRLEFDAGHRIPDHKSQCRNLHGHRYALEITLSGEIIDAEHASENGMVMDFADVKRIARETIVDRWDHAFLVYRGDTVVLDFLNSLPSHKTVIFPSVPTAENMAAEAFKLLKAQYQDTFGNQLKLVKVRLYETPNSWTDAFDLI

SEQ ID NO: 22587 - protein, 148 aa, Methylophilus rhizosphaerae
  misc_feature (1)..(148): tr|A0A1G9ATR6|A0A1G9ATR6_9PROT 6-pyruvoyltetrahydropter in/6-carboxytetrahydropterin synthase OS=Methylophilus rhizosphaerae OX=492660 GN=SAMN05192566_0808 PE=4 SV=1
MEITTRLEFDAGHRIPDHKSQCRNLHGHRYAIEITLSGDIIQAEHASDNGMVMDFADVKRIARETIVDRWDHAFLVYQGDTAVLDFLNSLPNHKTVVFPTIPTAENMAAEAFKLLKARYQGTFDNHLRLVKVRLYETPNSWTDAFNHA

SEQ ID NO: 22588 - protein, 152 aa, Methylophilus sp.
  misc_feature (1)..(152): tr|A0A3D5D024|A0A3D5D024_9PROT 6-carboxytetrahydropteri n synthase QueD OS=Methylophilus sp. OX=29541 GN=queD P E=4 SV=1
  misc_feature (139)..(139): Xaa can be any naturally occurring amino acid
MEITTRLEFDAGHRIPDHKSQCRNLHGHRYAIEITLSGDIIHAEHASENGMVMDFADVKRIARETIVDRWDHAFLVYQGDATVLDFLNSLPNHKTIVFPTIPTAENMAAEAFRLLKAQYRDTFGNHLKLMKVRLYETPXRQGHTKRLLKLGG

SEQ ID NO: 22589 - protein, 148 aa, Methylophilus sp.
  misc_feature (1)..(148): tr|A0A0Q6BM51|A0A0Q6BM51_9PROT 6-carboxy-5,6,7,8-tetrah ydropterin synthase OS=Methylophilus sp. Leaf416 OX=173 6373 GN=ASG34_00240 PE=4 SV=1
MEITTRLEFDAGHRIPDHKSQCRNLHGHRYAIEITLSGDIIQAEHASENGMVMDFADVKRIARETIVDRWDHAFLVYQGDTAVIDFLNSLPNHKTVIFPTIPTAENMAAEAFKLLKAQYHGTFDNHLKLMKVRLYETPNSWTDAFDQA

SEQ ID NO: 22590 - protein, 133 aa, Methylopila sp.
  misc_feature (1)..(133): tr|A0A2H6BGA7|A0A2H6BGA7_9RHIZ Uncharacterized protein OS=Methylopila sp. Yamaguchi OX=1437817 GN=METY_2415 PE =4 SV=1
MYAVEVRDHIMIAHSLKGETFGPAQALHGATFVVDVAFFREELDADDIVVDIGRATDALKAALAPINYANLDEALPGKRTTTEFLAKHIFDAMAEAARTGALGPNAAGLTKIRVTLNESHVARAWYEGPLGHG

SEQ ID NO: 22591 - protein, 118 aa, Methylopila sp.
  misc_feature (1)..(118): tr|A0A2H6BFW2|A0A2H6BFW2_9RHIZ 6-carboxy-5,6,7,8-tetrah ydropterin synthase OS=Methylopila sp. Yamaguchi OX=143 7817 GN=METY_2300 PE=3 SV=1
MRIVQAFTFEAAHRLPNVAPTHRCHRMHGHSYRVELALEGPIDPVTGFVVDFFDVEAAFGPVLKRLDHHTLNEIEGLENPTAELIALWIWDKVKPDLPQLAQVKVFETPFCWAEHDGA

SEQ ID NO: 22592 - protein, 117 aa, Methyloprofundus sedimenti
  misc_feature (1)..(117): tr|A0A1V8M8M0|A0A1V8M8M0_9GAMM 6-carboxy-5,6,7,8-tetrah ydropterin synthase OS=Methyloprofundus sedimenti OX=14 20851 GN=AU255_08350 PE=3 SV=1
MYTISKQFNFSASHIIEGLPEQHPCSRLHGHNYVVELVLAAEELNATGFVVDYNDLAVFKTMIDETLDHRHLNDVLTGPTTAESIAKYLYDHAKHIWHEVISVSVSETPKTNATYRP

SEQ ID NO: 22593 - protein, 118 aa, Methylorubrum extorquens
  misc_feature (1)..(118): tr|H1KQE1|H1KQE1_METEX 6-carboxy-5,6,7,8-tetrahydropter in synthase OS=Methylorubrum extorquens DSM 13060 OX=88 2800 GN=MetexDRAFT_4854 PE=3 SV=1
MKITQAFTFEAAHRLPNVPQTHRCHRMHGHSYRVELTVSGAVDPTSGWVVDFYDIESAFAPLLERLDHHCLNEIEGLENPTAEHIAAWIWHRAKPAIPGLSSVRIFETPYSWAEYEGD

SEQ ID NO: 22594 - protein, 118 aa, Methylorubrum extorquens; identical to SEQ ID NO: 22593
  misc_feature (1)..(118): tr|A0A1S1P5U8|A0A1S1P5U8_METEX 6-carboxy-5,6,7,8-tetrah ydropterin synthase OS=Methylorubrum extorquens OX=408 GN=ptpS PE=3 SV=1

SEQ ID NO: 22595 - protein, 118 aa, Methylorubrum populi
  misc_feature (1)..(118): tr|B1ZBZ1|B1ZBZ1_METPB 6-carboxy-5,6,7,8-tetrahydropter in synthase OS=Methylorubrum populi (strain ATCC BAA-70 5 / NCIMB 13946 / BJ001) OX=441620 GN=Mpop_1162 PE=3 SV =1
MKITQAFTFEAAHRLPNVPETHRCHRMHGHSYRVELTVAGAVDPTTGWVVDFYDIESAFAPLLERLDHHCLNEIEGLENPTAEHIAAWIWHRAKPAIPGLASVRIFETPYSWAEYEGT

SEQ ID NO: 22596 - protein, 118 aa, Methylorubrum populi
  misc_feature (1)..(118): tr|A0A514KK82|A0A514KK82_9RHIZ 6-carboxy-5,6,7,8-tetrah ydropterin synthase OS=Methylorubrum populi OX=223967 G N=queD PE=3 SV=1
MKITQAFTFEAAHRLPNVPETHRCHRMHGHSYRVELTVAGAVDPTTGWVVDFYDIESAFAPLLERLDHHCLNEIEGLENPTAEHIAAWIWHRAKPAIPGLASVRIFETPYSWAEYEGA

SEQ ID NO: 22597 - protein, 118 aa, Methylorubrum salsuginis
  misc_feature (1)..(118): tr|A0A1I3ZVD5|A0A1I3ZVD5_9RHIZ 6-carboxy-5,6,7,8-tetrah ydropterin synthase OS=Methylorubrum salsuginis OX=4147 03 GN=SAMN04488125_10293 PE=3 SV=1
MKITQAFTFEAAHRLPNVPVTHRCHRMHGHSYRVELTVSGEIDATTGWVVDFYDIESAFAPLLERLDHHCLNEIEGLENPTAEHIAAWIWHRAKPSIPGLSSVRVFETPLSWAEYEGT

SEQ ID NO: 22598 - protein, 118 aa, Methylorubrum sp.
  misc_feature (1)..(118): tr|A0A4Z0E6Y0|A0A4Z0E6Y0_9RHIZ 6-carboxy-5,6,7,8-tetrah ydropterin synthase OS=Methylorubrum sp. Q1 OX=2562453 GN=queD PE=3 SV=1
MKITQAFTFEAAHRLPNVPQTHRCHRMHGHSYRVELTVAGAVDPTSGWVVDFYDIESAFAPLLERLDHHCLNEIEGLENPTAEHIAAWIWHRAKPAIPGLSSVRIFETPYSWAEYEGD

SEQ ID NO: 22599 - protein, 118 aa, Methylorubrum zatmanii; identical to SEQ ID NO: 22593
  misc_feature (1)..(118): tr|A0A1W6RJG5|A0A1W6RJG5_9RHIZ 6-carboxy-5,6,7,8-tetrah ydropterin synthase OS=Methylorubrum zatmanii OX=29429 GN=B2G69_13400 PE=3 SV=1

SEQ ID NO: 22600 - protein, 132 aa, Methylosinus sp.
  misc_feature (1)..(132): tr|A0A177PJD5|A0A177PJD5_9RHIZ 6-pyruvoyl tetrahydropte rin synthase OS=Methylosinus sp. R-45379 OX=980563 GN=A 1351_08865 PE=4 SV=1
MYAVEVRDHIMIAHSFKGELFGPAQRMHGATFVVDVAFFRETLTVDEVVVDIGRAHDALKATLAPLNYQNLDEIEQFKGRQTTTEFLSRHIFDAMAAAARTGALGPGGEGISRIRVTLHESHVARAWFEGAV

SEQ ID NO: 22601 - protein, 125 aa, Methylosinus sp.
  misc_feature (1)..(125): tr|A0A1A6FI49|A0A1A6FI49_9RHIZ 6-carboxy-5,6,7,8-tetrah ydropterin synthase OS=Methylosinus sp. 3S-1 OX=1849840 GN=A8B73_21430 PE=3 SV=1
MTLEFEVYREFCFEAAHALCDPEHPTGGIYRNLHGHSFRVRVTLRGPRVEGEDWVMDLGKLGRRLALLRETLDHSFLNELDGLGKPTLENLCVFIWRDLEADLPAIFEVGVFRDTCNEGCVLRKR

SEQ ID NO: 22602 - protein, 125 aa, Methylosinus sporium
  misc_feature (1)..(125): tr|A0A549SDC6|A0A549SDC6_METSR 6-carboxy-5,6,7,8-tetrah ydropterin synthase OS=Methylosinus sporium OX=428 GN=F M996_19925 PE=3 SV=1
MTVLFEVYREFCFEAAHALYDPDHPTGGKYRNLHGHSFRVRVTLRGPRQDGDEWVMDLGKLGARLQQLRERLDHSFLNELEGLGKPTLENLCVYIWKDLEPSLPAIHEVGIFRDTCNEGCVLKKP

SEQ ID NO: 22603 - protein, 132 aa, Methylosinus sporium
  misc_feature (1)..(132): tr|A0A2U1ST17|A0A2U1ST17_METSR Uncharacterized protein OS=Methylosinus sporium OX=428 GN=C5689_06780 PE=4 SV=1
MYAVEVRDHIMIAHSFKGELFGPAQRLHGATFVVDVAFFRETLTADEVVVDIGRAHDALKATLAPLNYRNLDEIEQFEGRQTTTEFLSRHIFDAMAAAARSGALGPGGEGISRIRVTLHESHVARAWFEGPV

SEQ ID NO: 22604 - protein, 134 aa, Methylosinus trichosporium
  misc_feature (1)..(134): tr|A0A2D2D6P8|A0A2D2D6P8_METTR 6-carboxytetrahydropteri n synthase OS=Methylosinus trichosporium OB3b OX=595536 GN=CQW49_22175 PE=4 SV=1
MYAVEVRDHIMIAHSFRGELFGPAQRLHGATFVVDVAFFREQLTEDNVVVDIGRAHDALKAILAPLAYRNLDEVETFEGVQTTTEFLSRHIFDALAQAARAGALGPGGEGVSRIRVTLHESHVARAWFEGPVAG

SEQ ID NO: 22605 - protein, 125 aa, Methylosinus trichosporium; identical to SEQ ID NO: 22601
  misc_feature (1)..(125): tr|A0A2D2D3E2|A0A2D2D3E2_METTR 6-carboxy-5,6,7,8-tetrah ydropterin synthase OS=Methylosinus trichosporium OB3b OX=595536 GN=CQW49_17765 PE=3 SV=1

SEQ ID NO: 22606 - protein, 146 aa, Methylotenera mobilis
  misc_feature (1)..(146): tr|C6WWG7|C6WWG7_METML Uncharacterized protein OS=Methy lotenera mobilis (strain JLW8 / ATCC BAA-1282 / DSM 175 40) OX=583345 GN=Mmol_1360 PE=4 SV=1
MHITTRLEFDAGHRIPHHKSQCKNLHGHRYAIEITLSGDIITAENSSDNGMVMDFSDVKTIAKEAVVNVWDHAFLVYEHDTDVLNFLNTLPNHKTVVFPTVPTAENMAAEAFRILKARYQDTYGNHLKLEKVRLYETPNSWADALG

SEQ ID NO: 22607 - protein, 146 aa, Methylotenera mobilis
  misc_feature (1)..(146): tr|A0A351R927|A0A351R927_9PROT 6-carboxytetrahydropteri n synthase QueD OS=Methylotenera mobilis OX=359408 GN=q ueD PE=4 SV=1
MHITTRLEFDAGHRIPNHKSQCKNLHGHRYAIEITLSGDIITAENTSDNGMVMDFSDVKAIAKDAVVNVWDHAFLVYQHDTEVLNFLNTLKNHKTVVFPTVPTAENMAAEAFRILKARYQDTYGNHLKLEKVRLYETPNSWADALG

SEQ ID NO: 22608 - protein, 146 aa, Methylotenera sp.
  misc_feature (1)..(146): tr|A0A2S5LXW2|A0A2S5LXW2_9PROT 6-carboxy-5,6,7,8-tetrah ydropterin synthase OS=Methylotenera sp. OX=2051956 GN= queD PE=3 SV=1
MQITTRLEFDAGHRIPHHKSQCKNLHGHRYAMEITLSGDIISQENVSENGMVMDFSDVKAIAKMAIVDVWDHAFLVYQHDLEVLSFLNSLPDHKTVVFPTVPTAENMASEAFRILKSRYQDTYGNHLKLEKVRLYETPNNWADALQ

SEQ ID NO: 22609 - protein, 146 aa, Methylotenera sp.; identical to SEQ ID NO: 22607
  misc_feature (1)..(146): tr|A0A2S5LY83|A0A2S5LY83_9PROT 6-carboxytetrahydropteri n synthase QueD OS=Methylotenera sp. OX=2051956 GN=queD PE=4 SV=1

SEQ ID NO: 22610 - protein, 146 aa, Methylotenera versatilis
  misc_feature (1)..(146): tr|D7DIL3|D7DIL3_METV0 6-carboxy-5,6,7,8-tetrahydropter in synthase OS=Methylotenera versatilis (strain 301) OX =666681 GN=M301_1518 PE=3 SV=1
MQITTRLEFDAGHRIPSHKSQCKNLHGHRYAIEITLSGDIITLENASENGMVMDFSDVKAIAKRAVVDVWDHAFLVYQHDAEILDFLNSLPDHKTVVFPTVPTAENMAAEAFKILKNQYQDTYGNHLKLEKVRLYETPNNWADALS

SEQ ID NO: 22611 - protein, 135 aa, Methylothermaceae bacteria
  misc_feature (1)..(135): tr|A0A148N768|A0A148N768_9GAMM 6-carboxy-5,6,7,8-tetrah ydropterin synthase OS=Methylothermaceae bacteria B42 O X=1798802 GN=AXA67_10935 PE=3 SV=1
MGHYAVTKEVRFCYGHRLMNHPGKCKHLHGHSVRAAVTVATESLNDQGMVCDFADLKIAIASFVRQHLDHNLLLHESDPLVPLLREASERFLTLSQHPTAEVLAKLIYDHVKGKGYNVTEVILWETDSSYASYRE

SEQ ID NO: 22612 - protein, 363 aa, Methyloversatilis sp.
  misc_feature (1)..(363): tr|A0A1B3LMS2|A0A1B3LMS2_9PROT Queuosine biosynthesis p rotein QueD OS=Methyloversatilis sp. RAC08 OX=1842540 G N=queD PE=4 SV=1
MNDTLLHVAAADFEAARRLDHLPTAHRAHALHGHSFTGCVRAALPEGWGGVAGGEVDALAARLRTVLAPLDYRLLNDTVTRPGDEDLARWLRGQLDLPDAYAVGVRSTSQAGVQLDRHGDAHVWRRYVFQSAHQLPRVAPGHKCGRMHGHGFEVLLHAKPAPDAAVDPERIDAVWAPLHAQLHLACLNDIAGLDNPTSENIAAWIWHQLKPALPGLRWVTVYETASCGAQFDGRQHRVWKEFTLDSAVRLKRAPDGDPRRRIHGHTFTLRLHLAAPLDPIMGWTVDFGDVKAQFAPLFDRLDHAPLHELMEGGGSDADTASLARRIMTLATPLIPSLERLDLYETRGCGIILQRGGSEPALPV

SEQ ID NO: 22613 - protein, 121 aa, Methyloversatilis sp.
  misc_feature (1)..(121): tr|A0A1B3LQM1|A0A1B3LQM1_9PROT 6-carboxy-5,6,7,8-tetrah ydropterin synthase OS=Methyloversatilis sp. RAC08 OX=1 842540 GN=BSY238_1605 PE=3 SV=1
MVVELSQRFYFEAAHTLRRKVDADSSLRIHGHTYHAEVMLRGEPDPVSGMLVDLALLRAALAGVRDALDHRFLDEVAGLGPATLENLCQFIWRALAPQLPQLARVTVERQASGDKCALCAA

SEQ ID NO: 22614 - protein, 121 aa, Methyloversatilis universalis
  misc_feature (1)..(121): tr|F5RFC0|F5RFC0_METUF 6-carboxy-5,6,7,8-tetrahydropter in synthase OS=Methyloversatilis universalis (strain AT CC BAA-1314 / JCM 13912 / FAM5) OX=1000565 GN=METUNv1_0 3046 PE=3 SV=1
MVVELSQRFFFEAAHTLRRKVETESSLRIHGHTYHAEVSLRGEPDPASGMLMDLAVFRAALAEVRAKLDHRFLDEVEGIGPATLENLCHYLWRELAPQLPQLARVTVERQASGDKCTLSAC

SEQ ID NO: 22615 - protein, 118 aa, Methylovirgula ligni
  misc_feature (1)..(118): tr|A0A3D9Z5Q4|A0A3D9Z5Q4_9RHIZ 6-carboxy-5,6,7,8-tetrah ydropterin synthase OS=Methylovirgula ligni OX=569860 G N=DES32_2553 PE=3 SV=1
MKITQAFTFEAAHFLPKVAPSHRCRNLHGHSYRVELRLEGPVDSGTGFVIDFFDIEKAFAPLHAQLDHHCLNEIAGLENPTAENIAVWIYEKIRPALPQLAAVTVFETRDCYAEYEGR

SEQ ID NO: 22616 - protein, 132 aa, Methylovirgula sp.
  misc_feature (1)..(132): tr|A0A371WQZ8|A0A371WQZ8_9RHIZ 6-carboxytetrahydropteri n synthase OS=Methylovirgula sp. 4M-Z18 OX=2293567 GN=D YH55_12215 PE=4 SV=1
MFAVEVRDHIMIAHSFKGDLFGPAQNLHGATFVVDVAFFRETLTVDNVVVDIGRAHEALKKTLAPLNYQNLDTLPQFAGQLTTTEFLCKHIFDTMAAAARNGALGPGGEGISRIKVSLHESHVARAWYEGAL

SEQ ID NO: 22617 - protein, 118 aa, Methylovirgula sp.
  misc_feature (1)..(118): tr|A0A371WTS0|A0A371WTS0_9RHIZ 6-carboxy-5,6,7,8-tetrah ydropterin synthase OS=Methylovirgula sp. 4M-Z18 OX=229 3567 GN=queD PE=3 SV=1
MKITQGFTFEAAHQLPKVPQTHRCYRMHGHSYRVEVCLEGPVDPETGFVVDFFEVEAAFDPLLRRLDHYCLNDIAGLENPTAENIAVWIWERTKPLLPLLQKITVYETPHSWAEYQGV

SEQ ID NO: 22618 - protein, 146 aa, Methylovorus glucosetrophus
  misc_feature (1)..(146): tr|C6XDR3|C6XDR3_METGS 6-carboxy-5,6,7,8-tetrahydropter in synthase OS=Methylovorus glucosetrophus (strain SIP3 -4) OX=582744 GN=Msip34_1443 PE=3 SV=1
MQITTRLEFDAGHRIPCHKSQCRNLHGHRYAMEITLSGDIIQQDGSSDNGMVMDFSDVKAIARESVVDVWDHAFLVYKGDADVLNFLNSLPNHKTVVMESVPTAENMAAEAFRILNSRYQDVYGNHLKLERVRLYETPNSWADALA

SEQ ID NO: 22619 - protein, 146 aa, Methylovorus sp.
  misc_feature (1)..(146): tr|A0A1A9T4K8|A0A1A9T4K8_9PROT 6-carboxytetrahydropteri n synthase QueD OS=Methylovorus sp. MM2 OX=1848038 GN=A 7981_05865 PE=4 SV=1
MQITTRLEFDAGHRIPCHKSQCRNLHGHRYAIEITLSGDIIQKEDASENGMVMDFSDVKSIARQAVVDVWDHAFLVYKDDKEVLTFLNSLPDHKTVVMNSVPTAENMAAEAFKILNSYYQDTYGNHLKLERVRLYETPNSWADALA

SEQ ID NO: 22620 - protein, 134 aa, Methylovulum psychrotolerans
  misc_feature (1)..(134): tr|A0A2S5CT18|A0A2S5CT18_9GAMM 6-carboxy-5,6,7,8-tetrah ydropterin synthase OS=Methylovulum psychrotolerans OX= 1704499 GN=AADEFJLK_01013 PE=3 SV=1
MFTITKEVYFCYGHRLMNHAGKCRHLHGHSVKASISIQQEQLNADGMVCDFADIRACVESYVDEYLDHNFLLHKNDPIIPMLTAQNERFMALDEHPTAEVLSKMLYHHIKQAGFNVAQVTLWETASAYASYRED

SEQ ID NO: 22621 - protein, 134 aa, Methylovulum psychrotolerans
  misc_feature (1)..(134): tr|A0A1Z4BUQ8|A0A1Z4BUQ8_9GAMM 6-carboxy-5,6,7,8-tetrah ydropterin synthase OS=Methylovulum psychrotolerans OX= 1704499 GN=CEK71_02020 PE=3 SV=1
MFTITKEVYFCYGHRLMNHAGKCRHLHGHSVKASISIQQEQLNADGMVCDFADIRACVESYVDEYLDHNFLLHKNDPIIPMLTAQNERFMALDEHPTAEVLSKMLYRHIKQAGFNVAQVTLWETASAYASYRED

SEQ ID NO: 22622 - protein, 134 aa, Methylovulum sp.
  misc_feature (1)..(134): tr|A0A522E5A1|A0A522E5A1_9GAMM 6-carboxy-5,6,7,8-tetrah ydropterin synthase OS=Methylovulum sp. OX=1916980 GN=E PN89_05885 PE=3 SV=1
MFTITKEVYFCYGHRLMNHAGKCRNLHGHSVKASISIQQEQLNDQGMVCDFADIKDCVEAYIDRYLDHNFLLHKDDPIIPVLIEGNEQFLALDEHPTAEVLSKMIYRHLQQSGFNVAQVALWETASAYACYSED

SEQ ID NO: 22623 - protein, 118 aa, Micavibrio sp.
  misc_feature (1)..(118): tr|A0A1Z8KQX0|A0A1Z8KQX0_9PROT 6-carboxy-5,6,7,8-tetrah ydropterin synthase OS=Micavibrio sp. TMED2 OX=1986633 GN=CBB62_11840 PE=3 SV=1
MYRIWKEFHFSASHQLTGVPEGHPCARLHGHNYVVEVELQSETLDSAGFVRDYLELGAFKAYVDDTLDHRHLNEVLGDHMVTAEQLARHFYDWCHARWPEVCAVRVKETPKTTAEYRP

SEQ ID NO: 22624 - protein, 121 aa, Micavibrio sp.
  misc_feature (1)..(121): tr|A0A2D5Y333|A0A2D5Y333_9PROT 6-carboxy-5,6,7,8-tetrah ydropterin synthase OS=Micavibrio sp. OX=2024841 GN=CMH 27_05920 PE=3 SV=1
MYIIKKEFSFSASHLIHGLPDTHPCSRLHGHNYRVEVVLGSDTLDSVGFVRDYRELGAFKDYLDQNLDHRHLNDVLGDENVTAERMAKLFYDWCRSRWPEVCAVRVSETPKTWAEYRAEHE

SEQ ID NO: 22625 - protein, 131 aa, Microbacteriaceae bacterium
  misc_feature (1)..(131): tr|A0A522P048|A0A522P048_9MICO 6-carboxytetrahydropteri n synthase OS=Microbacteriaceae bacterium OX=1873462 GN =EPN48_07035 PE=4 SV=1
MPFSTTVRDHMMIAHSFAGETFGPAQRLHGATFIVDATFGADELDEDGVVVDIGRAAAALSEITGSLNYRNLDDEPDFVGMNTTTERLCQVIADRLAARVEDGSLGGKRLTSVTVTLHESHIAWASFSRPL

SEQ ID NO: 22626 - protein, 131 aa, Microbacterium azadirachtae
  misc_feature (1)..(131): tr|A0A0F0LEP9|A0A0F0LEP9_9MICO 6-pyruvoyl tetrahydropte rin synthase OS=Microbacterium azadirachtae OX=582680 G N=RS86_02947 PE=4 SV=1
MTFAVTVRDHLMIAHSLRGEVFGPAQRLHGATYVVDASFRAAALDPHGIVVDIGRASEALREIVGALSYRNLDDEPDLEGVNTTTERLCQIIGDRLAERVRDGGLGDARLTGIAVTLHESHIAWASYEVTM

SEQ ID NO: 22627 - protein, 129 aa, Microbacterium chocolatum
  misc_feature (1)..(129): tr|A0A0M9VM27|A0A0M9VM27_9MICO 6-pyruvoyl tetrahydrobio pterin synthase OS=Microbacterium chocolatum OX=84292 G N=XI38_02995 PE=4 SV=1
MFGLTVRDHVMIAHSLPDEFFGPAQGLHGATLVVEATWRSPRLDDHAVVIDIGEASRHLSEVLDPLRYANLDEHPAFAGTLSTTEAVAAHIARALAERLDPAAGITGIGIVVREHPDAWVTYDLDVAGR

SEQ ID NO: 22628 - protein, 131 aa, Microbacterium kyungheense
  misc_feature (1)..(131): tr|A0A543EDY4|A0A543EDY4_9MICO 6-pyruvoyl-tetrahydropte rin synthase OS=Microbacterium kyungheense OX=1263636 G N=FB391_3642 PE=4 SV=1
MTFTVTVRDHLMIAHSLRGKFFGPAQRLHGATYVVDAAFRADVLDEHGVVVDIGKASDEVRAIVGALSYRNLDDEPDLQGVNTTTERLCQVIGDRLAARVRDGAFGAAALTGIAVTLHESHIAWASYEVAL

SEQ ID NO: 22629 - protein, 145 aa, Microbacterium mangrovi
  misc_feature (1)..(145): tr|A0A0B2A290|A0A0B2A290_9MICO 6-pyruvoyl tetrahydropte rin synthase OS=Microbacterium mangrovi OX=1348253 GN=L K09_18600 PE=4 SV=1
MTDPRPSRFSVTVRDHLMVAHSLRGEVFGPAQRLHGATFVVDAAFRADDLDADGLVVDIGRASGVLAGIVAALSYRNLDDEPGLQGVNTTTERLCQIIGDRLADAVRAGDLGDAALTGIGVTLHESHVAWASYEVVLPAADGGSR

SEQ ID NO: 22630 - protein, 131 aa, Microbacterium sp.
  misc_feature (1)..(131): tr|A0A2S8ZMS3|A0A2S8ZMS3_9MICO Uncharacterized protein OS=Microbacterium sp. MYb64 OX=1848691 GN=CQ044_15220 P E=4 SV=1
MTFAVTVRDHLMIAHSLRGEVFGPAQRLHGATYVVDASFRAAALDPNGIVVDIGRASDALREIVGALSYRNLDDEPDLEGVNTTTERLCQIIGDRLAERVRDGGLGDARLTGIAVTLHESHIAWASYEVTM

SEQ ID NO: 22631 - protein, 129 aa, Microbacterium sp.; identical to SEQ ID NO: 22627
  misc_feature (1)..(129): tr|A0A1E4BKY8|A0A1E4BKY8_9MICO 6-pyruvoyl tetrahydrobio pterin synthase OS=Microbacterium sp. SCN 70-18 OX=1660 112 GN=ABS61_10155 PE=4 SV=1

SEQ ID NO: 22632 - protein, 131 aa, Microbacterium trichothecenolyticum
  misc_feature (1)..(131): tr|A0A0M2H5K0|A0A0M2H5K0_9MICO 6-pyruvoyl tetrahydropte rin synthase OS=Microbacterium trichothecenolyticum OX= 69370 GN=RS82_02841 PE=4 SV=1
MSFSVTVRDHIMIAHSLRGDVFGPAQQLHGATFLVDATFRADELDGHGVVVDIGRASEVLRDIASALTYRNLDEEPDLQGMNTTTERLCQIIGDRLAARVKDGGVGEANLSGIVVTLHESHVAWASYEVTL

SEQ ID NO: 22633 - protein, 131 aa, Microbacterium trichothecenolyticum
  misc_feature (1)..(131): tr|A0A3D9U4J1|A0A3D9U4J1_9MICO 6-pyruvoyl-tetrahydropte rin synthase OS=Microbacterium trichothecenolyticum OX= 69370 GN=C7321_3647 PE=4 SV=1
MSFSVTVRDHLMIAHSLRGDVFGPAQQLHGATFLVDATFRADELDEHGVVVDIGRASDVLREIVGALTYRNLDDEPDLQGVNTTTERLCQIIGDRLATRVRDGDVGEAHLSGIVVTLHESHVAWASYEVAL

SEQ ID NO: 22634 - protein, 81 aa, Microbispora rosea
  misc_feature (1)..(81): tr|A0A1N7HHP2|A0A1N7HHP2_9ACTN 6-pyruvoyltetrahydropter in/6-carboxytetrahydropterin synthase OS=Microbispora r osea OX=58117 GN=SAMN05421833_15110 PE=4 SV=1
MQGDVDSATGWVMDFAEIKAAFKPVLDQLDHYYLNEVPGLENPTSEVLARWVWDRLSGELPLSAIHVRETCTSGCIYRGEN

SEQ ID NO: 22635 - protein, 118 aa, Microbispora triticiradicis
  misc_feature (1)..(118): tr|A0A372PCF8|A0A372PCF8_9ACTN 6-carboxy-5,6,7,8-tetrah ydropterin synthase OS=Microbispora triticiradicis OX=2 200763 GN=queD PE=3 SV=1
MEIFREFTFEAAHRLPNVPAGHKCARLHGHSYRIQVHLQGTVDPHAGWLMDFGDIKAAFRPIKEQLDHYYLNDIPGLENPTSEVLAKWIWDRLADQLPLTAIQVMETCTSGCIYRGEG

SEQ ID NO: 22636 - protein, 136 aa, Microbispora triticiradicis
  misc_feature (1)..(136): tr|A0A372PC69|A0A372PC69_9ACTN 6-carboxy-5,6,7,8-tetrah ydropterin synthase OS=Microbispora triticiradicis OX=2 200763 GN=DI270_014755 PE=3 SV=1
MDFSSVSLPPGKHTIGKLFDFEAGHRLPSLAPEHKCSRQHGHSYEVEVILTAAALESPGFVTDFGDLAPFRRFLDTELDHHNLHEIMPVEPTSEHLAQFLAGWFIQNVEPGIPGRLVAVQVRETEHSWARFDVEER

SEQ ID NO: 22637 - protein, 165 aa, Microbulbifer agarilyticus
  misc_feature (1)..(165): tr|A0A1Q2M214|A0A1Q2M214_9GAMM Uncharacterized protein OS=Microbulbifer agarilyticus OX=260552 GN=Mag101_00360 PE=4 SV=1
MAYKITKTFKLDMGHRTWSQDMRKGRGKEFYTDDMPYPYNKCANLHGHSLLVSVTLTSDTVDQQNFVMDTDLFKAPFQKIIDQMDHSFIIDKHDPLFPDIKNIVEKDNLRLYVVDFSPSFEGLSKYFFECMCEIIGRTEHAEDIEVSEVTVTGEHMAVEARYNAA

SEQ ID NO: 22638 - protein, 284 aa, Microbulbifer agarilyticus
  misc_feature (1)..(284): tr|A0A1Q2M7Q7|A0A1Q2M7Q7_9GAMM Uncharacterized protein OS=Microbulbifer agarilyticus OX=260552 GN=Mag101_12295 PE=4 SV=1
MHLFVDSLTNVDFSYLHHTRGVVGETWLANAALDGALDHQGMVCDFGIVKKTLRNWLDHELDHRLLVPTRSPHLTMQQDGDQIQLTWALPDGEHITVGGPAQAFALVAVESITPKSVAAWCVNELDGIFPTSVDKLSLSFSVESIDSPFYHYSHGLKKHDGNCQRIAHGHRSRIRIDIDSERSPALESQWAERWADIYLGTREDLTGEDTQGQTTQLHFAYKAQQGEFTLTIPASRCEILDCDTTVEQLAQYIADVLAAENAGKQITVRAYEGIGKGAVAFAGR

SEQ ID NO: 22639 - protein, 281 aa, Microbulbifer aggregans
  misc_feature (1)..(281): tr|A0A1C9W8C4|A0A1C9W8C4_9GAMM 6-pyruvoyl tetrahydropte rin synthase OS=Microbulbifer aggregans OX=1769779 GN=A UP74_01977 PE=4 SV=1
MHLFVDNLTNVDFSYLDHARGLVGETWLASAALDGALDDQGMVCDFGIVKKTLRNWLDDEVDHRLLVPVQSPHLELQRSGDTLALTWKLKDGGEITVGGPEQAFALVEAEEIFEESAAAWCVTQLSGAFPGSVAKLQLKFCSEHIDDPYYHYSHGLKKHDGNCQRIAHGHRSRIQIFVDGTRDPEWEERWAERWRDIYLGTREDLHGSEGGDQLGFAYTARQGKFTLTLPASRCELVTCDTTVEQLAQYIAETIAEEEKGRIVRVRAYEGLGKGAEASASR

SEQ ID NO: 22640 - protein, 281 aa, Microbulbifer donghaiensis
  misc_feature (1)..(281): tr|A0A1M5G047|A0A1M5G047_9GAMM 6-pyruvoyl tetrahydropte rin synthase OS=Microbulbifer donghaiensis OX=494016 GN =SAMN04487965_3033 PE=4 SV=1
MHLFVDNLTNVDFSYLDHRRGVVGETWLANAALDGALDSQGMVCDFGVVKKTLRHWLDDQLDHRLLVPTRSPHLTLKQDGEQTALTWQLDDDEVISIAGPEQAFALVEAELISADSVARWSVQQLASAFPTSVERLSLSFTSEEIADPYYHYSHGLKKHDGNCQRIAHGHRSRIQIFLDGERSPEWERNWAERWRDIYLGTREDLLDESDGNTLRFAYRAQQGQFSLGIPAQRCELVDCDTTVEQLAQYIATTIATELPNTEVQVRAYEGIGKGAVAKAKG

SEQ ID NO: 22641 - protein, 281 aa, Microbulbifer marinus
  misc_feature (1)..(281): tr|A0A1H4A3S7|A0A1H4A3S7_9GAMM 6-pyruvoyl-tetrahydropte rin synthase OS=Microbulbifer marinus OX=658218 GN=SAMN 05216562_2510 PE=4 SV=1
MHLFVDNLTNVDFSYLDYRRGLVGETWLANAALDGALDSQGMVCDFGVVKKTLRHWLDDQLDHRLLVPTRSPHLKLERNPQGVGITWQVQSGEVIAVSGPEQAFAFVEAESVTADSVAAWSVQQLASAFPTSVEQLQLSFTCEEIASPYYHYSHGLKKHEGNCQRIAHGHRSRIQIFLDGERSGEWESNWADRWRDIYLGTREDLQVESDEQTLHFAYQAQQGRFTLAIPANHCELVDCDTTVEQLAQYIAETISAERPGTEVRVRAYEGIGKGAVASAKS

SEQ ID NO: 22642 - protein, 286 aa, Microbulbifer sp.
  misc_feature (1)..(286): tr|A0A2S1JPP7|A0A2S1JPP7_9GAMM Uncharacterized protein OS=Microbulbifer sp. A4B17 OX=359370 GN=BTJ40_05900 PE= 4 SV=1
MHLFVDNLTNVDFSYLDHKRGIVGETWLANAALDGALDEQGMVCDFGIVKKTLRHWLDDQVDHRLLVPTRSPQLTLEHTEDQVNMTWLLESGASISVSGPEQAFALVDAEAITAESVATWCVLQLASHFPDSVEKLKLSFHCEVIEDAFYHYSHGLKKHLGNCQRIAHGHRSRIQITTGDQRDIELEKYWAERWEDIYLGTREDLVSTTTDNRGEQIHNFAYSAQQGNFTLSIPAAACEILDCDTTVEQLAQYIANNLAAKEQGKAITVRAYEGIGKGAIASAQTS

SEQ ID NO: 22643 - protein, 281 aa, Microbulbifer sp.
  misc_feature (1)..(281): tr|A0A0X3U0Q2|A0A0X3U0Q2_9GAMM Uncharacterized protein OS=Microbulbifer sp. ZGT114 OX=1685377 GN=AVO43_13750 P E=4 SV=1
MHLFVDNLINVDFSYLDHTRGLVGETWLASAALDGALDEQGMVCDFGIVKKTLRNWLDSELDHRLLVPVQSPHLELQRSDDKLSLTWSLADGGQITVSGPEQAFALVEAEEIFEESVAAWCVTQLDSAFPSSVARLQLRFRSESIDDAYYHYSHGLKKHDGNCQRIAHGHRSRIQIFIDGTRDPDWEARWAERWRDIYLGTGEDLVGGSNSNQFEFAYRARQGEFTLGLPASRCELVQCDTTVEQLAQYIADTIAAEEQGRIVRVRAYEGLGKGAEASTSS

SEQ ID NO: 22644 - protein, 281 aa, Microbulbifer thermotolerans
  misc_feature (1)..(281): tr|A0A143HNB2|A0A143HNB2_9GAMM 6-pyruvoyl tetrahydropte rin synthase OS=Microbulbifer thermotolerans OX=252514 GN=A3224_10770 PE=4 SV=1
MHLFVDNLTNVDFSYLDHQRGLVGETWLASASLDGALDSQGMVCDFGIVKKTLRRWLDEQLDHRLLVPILSPHLQLQKNAGGIALTWALHSGGQICVSGPEQAFALVEAEAINADSVAAWSIRQLTIAFPASIERLNLCFASEKISTPYYHYSHGLKKHAGNCQRIAHGHRSRIEIYLDGERCPEWERRWAERWRDIYLGTREDLCNDSSEQVLHFAYSAQQGEFSLEIPAERCELVECDTTVEQLAQHIADTIARAQPDTEVRVRAYEGLGKGAVAAAKI

SEQ ID NO: 22645 - protein, 281 aa, Microbulbifer yueqingensis
  misc_feature (1)..(281): tr|A0A1G9E029|A0A1G9E029_9GAMM 6-pyruvoyl tetrahydropte rin synthase OS=Microbulbifer yueqingensis OX=658219 GN =SAMN05216212_2963 PE=4 SV=1
MHLFVDNLINIDFSFLDHRRGLVGETWLANAALDGALDEQGMVCDFGVVKKTLRHWLDEELDHRLLVPRHSPHLELKEENGSVSLKWHLADGGRISVSGPRQAFALVDTETIEMESVAAWSVAQLASAFPTRVEKLQLSFSCEEITDAFYHYSHGLKKHDGNCQRIAHGHRSRIQVSINGERSALWEERWAERWRDIYLGTREDLQSGGDEAQLRFAYQARQGEFGLEIPATRCELLDCDTTVEQLATHIATTIATEEPGHEVQVRAFEGLGKGAVASARR

SEQ ID NO: 22646 - protein, 112 aa, Micrococcales bacterium
  misc_feature (1)..(112): tr|A0A1Q4A0Z9|A0A1Q4A0Z9_9MICO 6-carboxy-5,6,7,8-tetrah ydropterin synthase OS=Micrococcales bacterium 72-143 O X=1895790 GN=BGO94_08320 PE=3 SV=1
MTYEFEFQAAHQLHWHPGPCRSMHGHSYRCELTFGGELNENGVIVDFDEVAVFVNDTLMPRLDHTYLNDVLDNPTAERIAALVFEDVETAALPIVSARLWETRTSSAVVSRT

SEQ ID NO: 22647 - protein, 126 aa, Micrococcus endophyticus; identical to SEQ ID NO: 21464
  misc_feature (1)..(126): tr|A0A4Y8ZJV5|A0A4Y8ZJV5_9MICC 6-carboxytetrahydropteri n synthase OS=Micrococcus endophyticus OX=455343 GN=E4A 41_00020 PE=4 SV=1

SEQ ID NO: 22648 - protein, 127 aa, Micrococcus luteus
  misc_feature (1)..(127): tr|A0A378NH03|A0A378NH03_MICLU 6-pyruvoyl tetrahydropte rin synthase OS=Micrococcus luteus OX=1270 GN=NCTC7563_ 00134 PE=4 SV=1
MFGLTVNDHVMIAHSLPDEFFGPAQGLHGATLEVSATFTRASLDEHSVVLDIGEAMSLLDAALTPLRYANLDEHPDFSERLSTTEAVAEYIGRKLAESLTERPEIGISIELRENPRAAITYTVPERT

SEQ ID NO: 22649 - protein, 137 aa, Micrococcus lylae; identical to SEQ ID NO: 22108
  misc_feature (1)..(137): tr|A0A378P0J8|A0A378P0J8_9MICC 6-carboxy-5,6,7,8-tetrah ydropterin synthase OS=Micrococcus lylae OX=1273 GN=que D PE=3 SV=1

SEQ ID NO: 22650 - protein, 135 aa, Micrococcus sp.
  misc_feature (1)..(135): tr|A0A2J9ILF2|A0A2J9ILF2_9MICC 6-carboxy-5,6,7,8-tetrah ydropterin synthase OS=Micrococcus sp. FDAARGOS_333 OX= 1930558 GN=CEQ11_005240 PE=3 SV=1
MYAEISKDFDFSASHRLDGLPGDHQCSRLHGHNYRVRLSIAGSIVAPGFVVDYGELAFFKGWIDQTLDHRHLNDVMDGNPTAENLAAWMISLVSERLQAMGHENVAVVKVAVSETPKTWAIVTRTLAPHTLEEQR

SEQ ID NO: 22651 - protein, 126 aa, Micrococcus sp.; identical to SEQ ID NO: 21464
  misc_feature (1)..(126): tr|A0A229HCA6|A0A229HCA6_9MICC 6-carboxytetrahydropteri n synthase OS=Micrococcus sp. KBS0714 OX=1179670 GN=B1A 86_00004195 PE=4 SV=1

SEQ ID NO: 22652 - protein, 127 aa, Micrococcus terreus
  misc_feature (1)..(127): tr|A0A1I7MJ22|A0A1I7MJ22_9MICC 6-pyruvoyltetrahydropter in/6-carboxytetrahydropterin synthase OS=Micrococcus te rreus OX=574650 GN=SAMN04487966_103110 PE=4 SV=1
MYSLTVNDHVMIAHSLPNEFFGPAQGMHGATLAVEATFSRAELDEHAVVLDIGAATEMLDEALSPLRYANLDEHPDFAGRLSTTEATAEYIGSRLEDALADQPDVGITVTLTENPRAKVSYTVPGRP

SEQ ID NO: 22653 - protein, 290 aa, Microcoleaceae bacterium
  misc_feature (1)..(290): tr|A0A3D5GCB5|A0A3D5GCB5_9CYAN 6-pyruvoyl tetrahydropte rin synthase OS=Microcoleaceae bacterium UBA9251 OX=205 5794 GN=DGO89_18595 PE=4 SV=1
MQCIINRRAQFSASHRYWLPELSEAENFERFGPTARAPGHGHNYVVYVSMVGELDEYGMVLNLSDVKHVIKREVTNHLDFSYLNEAWPEFEQTLPTTENIARQIWLRLAPHLPLSKIQLFEHPELWAEYLGNGMEAYLTLSTHFSAAHRLARPDLSFAENSEIYGKCARPHGHGHNYHLEVTVKGEIDARTGMIADLGALQKAVDDYVVEPLDHTFLNKDIAYFEKIVPTAENIAVYIGQLLRSPIRELGAQLHKIKLTESPNNSCEIYCADLESAATENQQLAAILAAV

SEQ ID NO: 22654 - protein, 129 aa, Microcoleus sp.
  misc_feature (1)..(129): tr|K9WQ89|K9WQ89_9CYAN 6-carboxy-5,6,7,8-tetrahydropter in synthase OS=Microcoleus sp. PCC 7113 OX=1173027 GN=M ic7113_6783 PE=3 SV=1
MPKWKLVTEFTFDSAHFIKDYDGSCGRMHGHTYKVRVEATSSKLHPSQYCPHPIMVADFRSLRWAKQDMTKGGLDHSVLNEVLPEGYETTAEMIAQYIYEETKKRVPDDVRLKVVVSETPNSWVEYEGD

SEQ ID NO: 22655 - protein, 290 aa, Microcoleus sp.
  misc_feature (1)..(290): tr|K9WNM8|K9WNM8_9CYAN 6-pyruvoyl-tetrahydropterin synt hase OS=Microcoleus sp. PCC 7113 OX=1173027 GN=Mic7113_ 5480 PE=4 SV=1
MECIINRRAQFSASHRYWLPELSEAENSQQFGLGSRFPGHGHNYVLFVSLVGELDEYGMVQNLSEVKKVIKREVTSQLDSAYLNQTWPEFQQTLPTTENIARVIWHRLIPHLPIVRIQLFEHPELWADYQGNGMEAHLTISTHFSAAHRLAHPDLSYEENSEIYGKCARPNGHGHNYHLEVTVTGEIDPRTGMIVDLGALHQVVEDYVVEPFDHTFLNKDIPYFSQVVPTAENIAIHIRQLLQQPIQELGAQLYKVKLVESPNNSCEVYCSQATSSSALTQESQALVTSV

SEQ ID NO: 22656 - protein, 290 aa, Microcoleus vaginatus
  misc_feature (1)..(290): tr|F5UNH9|F5UNH9_9CYAN Uncharacterized protein OS=Micro coleus vaginatus FGP-2 OX=756067 GN=MicvaDRAFT_0354 PE= 4 SV=1
MQCIINRRAQFSASHRYWLPELSEAENFERFGPTARAPGHGHNYLLYVSMIGELDEYGMVLNLSDVKHVIKREVIKELDFSYLNEAWPEFEQTLPTTENIARQIWLRLAPHLPVSKIQLFEHPELWAEYLGNGMEAYLTLSTHFSAAHRLARPDLSFEENSEIYGKCARPNGHGHNYHLEVTVKGEIDARTGMIADLGALQKAVDDYVVEPFDHTFLNKDIAYFENVVPTAENIAVRIGQLLRSPVRELGAELHKIKLIESPNNSCEIYGADLEEVVAELQQPQAILAGV

SEQ ID NO: 22657 - protein, 288 aa, Microcystis aeruginosa
  misc_feature (1)..(288): tr|A0A552DM89|A0A552DM89_MICAE 6-carboxytetrahydropteri n synthase OS=Microcystis aeruginosa Ma_QC_B_20070730_S 2 OX=2486256 GN=EWV80_13030 PE=4 SV=1
MDCIINRRARFSASHRYYLPEWDEAENQRLFGLGSRFPGHGHNYELYVSLYKELNLYGMVENLSTVKQVIKREITSQLDYSYLNQVWPEFQQTLPTTENIARVIWQRLAPYLPLVKIQLFEHPELWAEYQGKDMEATLTIKTHFSAAHRLALPQLTLEQNSEIYGKCARVNGHGHNYHLEVSVAGEIDPRTGMIVDLGDLQKAIDELVVEPFDHTFLNNDIPYFAEVVPTAENIALHIAQLLEEPIRQLGAELDKVKLIESPNNSAEIHCRGSVQAPRQLLEKTLTAV

SEQ ID NO: 22658 - protein, 144 aa, Microcystis aeruginosa
  misc_feature (1)..(144): tr|A0A5A5SI11|A0A5A5SI11_MICAE 6-carboxy-5,6,7,8-tetrah ydropterin synthase OS=Microcystis aeruginosa NIES-2522 OX=2303984 GN=queD_2 PE=3 SV=1
MTIGGQINKADLTDSIDGLTMAEWIIYKEFRFEAAHHLPHYEGKCRRLHGHSWLGRVYVKSNHLQPQGSQQGMVMDFGEIKQYLQPLLDNFLDHHYLNETTGLENPTSEELSRWIYEKLAKAGLPNLHAVEICETCTSGCTYYP

SEQ ID NO: 22659 - protein, 288 aa, Microcystis flosaquae
  misc_feature (1)..(288): tr|A0A552KTN7|A0A552KTN7_9CHRO 6-carboxytetrahydropteri n synthase OS=Microcystis flos-aquae Mf_QC_C_20070823_S 10D OX=2486236 GN=EWV45_11575 PE=4 SV=1
MDCIINRRARFSASHRYYLPEWDEAENQRLFGLGSRFPGHGHNYELYVSLYKELNLYGMVENLSTVKQVIKREITSQLDYSYLNQVWPEFQQTLPTTENIARVIWQRLAPYLPLVKIQLFEHPELWAEYQGKDMEATLTVKTHFSAAHRLALPQLTLEQNSEIYGKCARVNGHGHNYHLEVSVAGEIDPRTGMIVDLGDLQKAIDELVVEPFDHAFLNKDIPYFAEVVPTAENIALHIAQLLEERIRQLGAELDKVKLIESPNNSAEIHCRGSVQAPRQLLEKTLTAV

SEQ ID NO: 22660 - protein, 124 aa, Microcystis flosaquae
  misc_feature (1)..(124): tr|A0A552M1M7|A0A552M1M7_9CHRO 6-carboxy-5,6,7,8-tetrah ydropterin synthase OS=Microcystis flos-aquae Mf_WU_F_1 9750830_S460 OX=2486237 GN=queD PE=3 SV=1
MAEWIIYKEFRFEAAHHLPHYEGKCRRLHGHSWLGRVYVKSNHLQSQGSQQGMVMDFGEIKQYLQPLLDNFLDHHYLNETTGLENPTSEELSRWIYEKLAKAGLPNLHAVEICETCTSGCTYYP

SEQ ID NO: 22661 - protein, 124 aa, Microcystis novacekii
  misc_feature (1)..(124): tr|A0A552IVL8|A0A552IVL8_9CHRO 6-carboxy-5,6,7,8-tetrah ydropterin synthase OS=Microcystis novacekii Mn_MB_F_20 050700_S1D OX=2486266 GN=queD PE=3 SV=1
MAEWIIYKEFRFEAAHRLPHYEGKCHRLHGHSWLGRVYVKGNHLQSQGSQEGMVMDFGEIKQYLQPLLDNFLDHHYLNETTGLENPTSEELSRWIYEKLAKAGLPGLHAVEIRETCTSGCTYYP

SEQ ID NO: 22662 - protein, 288 aa, Microcystis novacekii
  misc_feature (1)..(288): tr|A0A552IHI6|A0A552IHI6_9CHRO 6-carboxytetrahydropteri n synthase OS=Microcystis novacekii Mn_MB_F_20050700_S1 D OX=2486266 GN=EWV54_21105 PE=4 SV=1
MDCIINRRARFSASHRYYLPEWDEAENQRLFGLGSRFPGHGHNYELYVSLYKELNLYGMVENLSTVKQVIKREITSQLDYSYLNQVWPEFQQTLPTTENIARVIWQRLAPYLPLVKIQLFEHPELWAEYQGKDMEATLTIKTHFSAAHRLALPQLTLEQNSEIYGKCARVNGHGHNYHLEVSVAGEIDPRTGMIVDLGDLQKAIDELVVEPFDHAFLNKDIPYFAEVVPTAENIALHIAQLLEERIRQLGAQLDKVKLIESPNNSAEIHCRGSVQTPRQLLEKTLTAV

SEQ ID NO: 22663 - protein, 288 aa, Microcystis panniformis
  misc_feature (1)..(288): tr|A0A0K1S2H5|A0A0K1S2H5_9CHRO 6-pyruvoyl tetrahydrobio pterin synthase OS=Microcystis panniformis FACHB-1757 O X=1638788 GN=VL20_3345 PE=4 SV=1
MDCIINRRARFSASHRYYLPEWDEAENQRLFGLGSRFPGHGHNYELYVSLHKELNPYGMVENLSTVKQVIKREITSQLDYSYLNQVWPEFQQTLPTTENIARVIWQRLAPYLPLVKIQLFEHPELWAEYQGKDMEATLTVKTHFSAAHRLALPQLTLEQNSEIYGKCARVNGHGHNYHLEVSVAGEIDPRTGMIVDLGDLQKAIDELVVEPFDHAFLNKDIPYFAEVVPTAENIALHIAQLLGERIRQLGAELDKVKLIESPNNSAEIHCRGLVQAPRQLLEKTLTAV

SEQ ID NO: 22664 - protein, 288 aa, Microcystis panniformis
  misc_feature (1)..(288): tr|A0A552Q5M1|A0A552Q5M1_9CHRO 6-carboxytetrahydropteri n synthase OS=Microcystis panniformis Mp_MB_F_20051200_ S9 OX=2486223 GN=EWV53_06350 PE=4 SV=1
MDCIINRRARFSASHRYYLPEWDEAENQRLFGLGSRFPGHGHNYELYVSLYKELNLYGMVENLSTVKQVIKREITSQLDYSYLNQVWPEFQQTLPTTENIARVIWQRLAPHLPLVKIQLFEHPELWAEYQGKDMEATLTIKTHFSAAHRLALPQLTLEQNSEIYGKCARVNGHGHNYHLEVSVAGEIDPRTGMIVDLGDLQKAIDELVVEPFDHTFLNKDIPYFAEVVPTAENIALHIAQLLGERIRQLGAELDKVKLIESPNNSAEIHCRGSVQAPRQLLEKTLTAV

SEQ ID NO: 22665 - protein, 307 aa, Microcystis sp.
  misc_feature (1)..(307): tr|A0A2L2XTS0|A0A2L2XTS0_9CHRO 6-pyruvoyl tetrahydrobio pterin synthase OS=Microcystis sp. 0824 OX=1502726 GN=N 0824_03614 PE=4 SV=1
MLERVTLNVTLQSHRSPTFMDCIINRRARFSASHRYYLPEWDEAENQRLFGLGSRFPGHGHNYELYVSLYKELNLYGMVENLSTVKQVIKREITSQLDYSYLNQVWPEFQQTLPTTENIARVIWQRLAPYLPLVKIQLFEHPELWAEYQGKDMEATLTIKTHFSAAHRLALPQLTLEQNSEIYGKCARVNGHGHNYHLEVSVAGEIDPRTGMIVDLGDLQKAVDELVVEPFDHAFLNKDIPYFAEVVPTAENIALYIAQLLEERIRQLGAELDKVKLIESPNNSAEIHCRGSVQAPRQLLEKTLTAV

SEQ ID NO: 22666 - protein, 288 aa, Microcystis sp.
  misc_feature (1)..(288): tr|A0A552CZR7|A0A552CZR7_9CHRO 6-carboxytetrahydropteri n synthase OS=Microcystis sp. Msp_OC_L_20101000_S702 OX =2486218 GN=EWV60_00915 PE=4 SV=1
MDCIINRRARFSASHRYYLPEWDEAENQRLFGLGSRFPGHGHNYELYVSLYKELNLYGMVENLSTVKQVIKREITSQLDYSYLNQVWPEFQQTLPTTENIARVIWQRLAPYLPLVKIQLFEHPELWAEYQGKDMEATLTIKTHFSAAHRLALPQLTLEQNSEIYGKCARVNGHGHNYHLEVSVAGEIDPRTGMIVDLGDLQKAIDELVVEPFDHTFLNKDIPYFAEVVPTAENIALHIAQLLEEPIRQLGAELDKVKLIESPNNSAEIHCRGSVQAPRQLLEKTLTAV

SEQ ID NO: 22667 - protein, 307 aa, Microcystis viridis
  misc_feature (1)..(307): tr|A0A3G9K116|A0A3G9K116_MICVR Uncharacterized protein OS=Microcystis viridis NIES-102 OX=213615 GN=myaer102_4 6140 PE=4 SV=1
MLERVALNVTLQSHRSPTFMDCIINRRARFSASHRYYLPEWDEAENQRRFGLGSRFPGHGHNYELYVSLHKELNPYGMVENLSTVKQVIKREITSQLDYSYLNQVWPEFQQTLPTTENIARVIWQRLAPYLPLVKIQLFEHPELWAEYQGKDMEATLTIKTHFSAAHRLALPQLTLEQNSEIYGKCARVNGHGHNYHLEVSVAGEIDPRTGMIVDLGDLQKAIDELVVEPFDHAFLNKDIPYFAEVVPTAENIALHIAQLLGERIRQLGAELDKVKLIESPNNSAEIHCRGLVQAPRQLLEKTLTAV

SEQ ID NO: 22668 - protein, 288 aa, Microcystis viridis
  misc_feature (1)..(288): tr|A0A552HDK3|A0A552HDK3_MICVR 6-carboxytetrahydropteri n synthase OS=Microcystis viridis Mv_BB_P_19951000_S68D OX=2486270 GN=EWV77_18830 PE=4 SV=1
MDCIINRRARFSASHRYYLPEWDEAENQRLFGLGSRFPGHGHNYELYVSLYKELNLYGMVENLSTVKQVIKREITSQLDYSYLNQVWPEFQQTLPTTENIARVIWQRLAPYLPLVKIQLFEHPELWAEYQGKDMEATLTIKTHFSAAHRLALPQLTLEQNSEIYGKCARVNGHGHNYHLEVSVAGEIDPRTGMIVDLGDLQKAIDELVVEPFDHTFLNNDIPYFAEVVPTAENIALHIAQLLEERIRQLGAQLDKVKLIESPNNSAEIHCRGSVQAPRQLLEKTLTAV

SEQ ID NO: 22669 - protein, 288 aa, Microcystis wesenbergii
  misc_feature (1)..(288): tr|A0A552M8D3|A0A552M8D3_9CHRO 6-carboxytetrahydropteri n synthase OS=Microcystis wesenbergii Mw_MB_S_20031200_ S109D OX=2486241 GN=EWV88_02695 PE=4 SV=1
MDCIINRRARFSASHRYYLPEWDEAENQRLFGLGSRFPGHGHNYELYVSLYQELNLYGMVENLSTVKQVIKREITSQLDYSYLNQVWPEFQQTLPTTENIARVIWQRLAPYLPLVKIQLFEHPELWAEYQGKDMEATLTIKTHFSAAHRLALPQLTLEQNAEIYGKCARVNGHGHNYHLEVSVAGEIDPRTGMIVDLGDLQKAIDELVVEPFDHAFLNKDIPYFAEVVPTAENIALHIAQLLEERIRQLGAQLDKVKLIESPNNSAEIHCRGSVQAPRQLLEKTLTAV

SEQ ID NO: 22670 - protein, 288 aa, Microcystis wesenbergii
  misc_feature (1)..(288): tr|A0A3E0LWL3|A0A3E0LWL3_9CHRO 6-carboxytetrahydropteri n synthase OS=Microcystis wesenbergii TW10 OX=2060474 G N=DWQ51_12755 PE=4 SV=1
MDCIINRRARFSASHRYYLPEWDEAENQRRFGLGSRFPGHGHNYELYVSLYKELNPYGMVENLSTVKQVIKREITSQLDYSYLNQVWPEFQQTLPTTENIARVIWQRLAPYLPLVKIQLFEHPELWAEYQGKDMEATLTIKTHFSAAHRLALPQLTLEQNSEIYGKCARVNGHGHNYHLEVSVAGEIDPRTGMIVDLGDLQKAIDELVVEPFDHAFLNKDIPYFAEVVPTAENIALHIAQLLEEPIRQLGAELDKVKLIESPNNSAEIHCRGSVQAPRQLLEKTLTAV

SEQ ID NO: 22671 - protein, 132 aa, Microlunatus phosphovorus
  misc_feature (1)..(132): tr|F5XHJ3|F5XHJ3_MICPN Uncharacterized protein OS=Micro lunatus phosphovorus (strain ATCC 700054 / DSM 10555 / JCM 9379 / NBRC 101784 / NCIMB 13414 / VKM Ac-1990 / NM -1) OX=1032480 GN=MLP_01240 PE=4 SV=1
MFTVTVRDHLMVAHSLRGEAFGPAQRLHGATYVIDATFHAADLDDNGIVLDIGLASAELHRIAEGLSYRNLDDEPAFAGQNTTTEVLAQAIADRLADRLHAGALGRPASEIARIGVTLHESPVASAGYEREP

SEQ ID NO: 22672 - protein, 132 aa, Micromonospora arborensis
  misc_feature (1)..(132): tr|A0A318NET1|A0A318NET1_9ACTN Uncharacterized protein OS=Micromonospora arborensis OX=2116518 GN=C7C45_31065 PE=4 SV=1
MFSVTVRDHMMIAHSFRGDVFGPAQRLHGATFVVDATFRRADLDSDGIVVDIGLATEQLRAVLGELTYRNLDEEPAFAGVNTTTEVLARTVADRLAERVHAGELGAGARELAGITVTLHESHVAWASYERSL

SEQ ID NO: 22673 - protein, 132 aa, Micromonospora arida
  misc_feature (1)..(132): tr|A0A3N9XN49|A0A3N9XN49_9ACTN Uncharacterized protein OS=Micromonospora arida OX=2203715 GN=DLJ58_19475 PE=4 SV=1
MFSVTVRDHMMIAHSFRGEVFGPAQRLHGATFVVDATFRRPDLDADGIVVDIGLATEQLRAVLSELTYRNLDDEAAFAGVNTTTEVLARTVADRLVERVHAGELGAGARDLAGITVTLHESHIAWASYERSL

SEQ ID NO: 22674 - protein, 132 aa, Micromonospora aurantiaca
  misc_feature (1)..(132): tr|D9SZ04|D9SZ04_MICAI Uncharacterized protein OS=Micro monospora aurantiaca (strain ATCC 27029 / DSM 43813 / B CRC 12538 / CBS 129.76 / JCM 10878 / NBRC 16125 / NRRL B-16091 / INA 9442) OX=644283 GN=Micau_3614 PE=4
MFSVTVRDHMMVAHSFRGEVFGPAQRLHGATFVVDATFRRAELDDDGIVVDIGLATEQLKAVLAELNYRNLDDEPAFAGVNTTTEVLARTIADRLADAVHAGRLGEGARGLAGITVTLHESHIAWASYERSL

SEQ ID NO: 22675 - protein, 132 aa, Micromonospora aurantiaca; identical to SEQ ID NO: 22674
  misc_feature (1)..(132): tr|A0A1C6S334|A0A1C6S334_9ACTN 6-carboxytetrahydropteri n synthase OS=Micromonospora aurantiaca OX=47850 GN=EEZ 25_01020 PE=4 SV=1

SEQ ID NO: 22676 - protein, 132 aa, Micromonospora auratinigra
  misc_feature (1)..(132): tr|A0A1A8ZFL6|A0A1A8ZFL6_9ACTN 6-pyruvoyl-tetrahydropte rin synthase OS=Micromonospora auratinigra OX=261654 GN =GA0070611_2054 PE=4 SV=1
MFSVTVRDHIMIAHSFRGEVFGPAQRLHGATFVVDATFRRPELDADGIVVDIGLATEQLKAVLGELNYRNLDDEPAFAGTNTTTEVLCRTIADRLAEAVHGGRLGDGARGLAGIAVTLHESHVAWASYERAL

SEQ ID NO: 22677 - protein, 132 aa, Micromonospora avicenniae
  misc_feature (1)..(132): tr|A0A1N6V7S1|A0A1N6V7S1_9ACTN 6-pyruvoyl-tetrahydropte rin synthase OS=Micromonospora avicenniae OX=1198245 GN =SAMN05444858_10410 PE=4 SV=1
MFSVTVRDHMMIAHSFRGEVFGPAQRLHGATFVVDATFRRAELDGDGIVVDIGLATDQLKAVLGELTYRNLDDEPAFAGVNTTTEVLARTIADRLVERVHAGQLGAGARHLAGITVTLHESHVAWASYERAL

SEQ ID NO: 22678 - protein, 132 aa, Micromonospora carbonacea
  misc_feature (1)..(132): tr|A0A1C5AWX8|A0A1C5AWX8_9ACTN 6-pyruvoyl-tetrahydropte rin synthase OS=Micromonospora carbonacea OX=47853 GN=G A0070563_12362 PE=4 SV=1
MFSVTVRDHMMIAHSFRGDVFGPAQRLHGATFVVDATFRRPDLDADGIVVDIGLATEQLRAVLGELTYRNLDDEPAFAGVNTTTEVLARTVADRLADRVHAGDLGAGAQGLAGITVTLHESHVAWASYERPL

SEQ ID NO: 22679 - protein, 132 aa, Micromonospora chaiyaphumensis
  misc_feature (1)..(132): tr|A0A1C4UL83|A0A1C4UL83_9ACTN 6-pyruvoyl-tetrahydropte rin synthase OS=Micromonospora chaiyaphumensis OX=30711 9 GN=GA0070214_101800 PE=4 SV=1
MFSVTVRDHMMVAHSFRGEVFGPAQRLHGATFVVDATFRRPELDADGIVVDIGLATEQLKAVLGALTYRNLDDEPDFAGVNTTTEVLARTVADRLAEAVHDGRLGEGARGLAGITVTLHESHVAWASYERSL

SEQ ID NO: 22680 - protein, 132 aa, Micromonospora chalcea
  misc_feature (1)..(132): tr|A0A365USH4|A0A365USH4_MICCH 6-carboxytetrahydropteri n synthase OS=Micromonospora chalcea OX=1874 GN=DRA43_2 6625 PE=4 SV=1
MFSVTVRDHMMVAHSFRGEVFGPAQRLHGATFVVDAGFRRAELDDDGIVVDIGLATEQLRAVLAELNYRNLDDEPAFAGVNTTTEVLARTIADRLADAVHDGRLGEGARGLAGITVTLHESHIAWASYERSL

SEQ ID NO: 22681 - protein, 132 aa, Micromonospora chersina
  misc_feature (1)..(132): tr|A0A1C6TWM0|A0A1C6TWM0_9ACTN 6-pyruvoyl-tetrahydropte rin synthase OS=Micromonospora chersina OX=47854 GN=GA0 070603_0109 PE=4 SV=1
MFSVTVRDHMMVAHSFRGEVFGPAQRLHGATFVVDATFRRPDLDADGIVVDIGLATEQLKAVLGALTYRNLDDEPDFAGVNTTTEVLARTVADRLADAVHAGRLGEGARGLAGITVTLHESHVAWASYERSL

SEQ ID NO: 22682 - protein, 118 aa, Micromonospora chokoriensis
  misc_feature (1)..(118): tr|A0A1C4UQ09|A0A1C4UQ09_9ACTN 6-carboxy-5,6,7,8-tetrah ydropterin synthase OS=Micromonospora chokoriensis OX=3 56851 GN=GA0070612_0635 PE=3 SV=1
MEIFREFTFEAAHRLPNVPVGHKCARLHGHSYRVQVHVHGDVDPEAGWVMDFGELKKAFQPLLDQLDHYYLNEVPGLENPTSEVLARWIWDRLIDQLPLSTVMVRETCTSGCIYRGER

SEQ ID NO: 22683 - protein, 132 aa, Micromonospora chokoriensis
  misc_feature (1)..(132): tr|A0A1C4XVW3|A0A1C4XVW3_9ACTN 6-pyruvoyl-tetrahydropte rin synthase OS=Micromonospora chokoriensis OX=356851 G N=GA0070612_3982 PE=4 SV=1
MFSVTVRDHIMIAHSFRGEVFGPAQRLHGATFVVDATFRRPDLDADGIVVDIGLATEQLRAVLGELTYRNLDDEPAFAGLNTTTEVLARTIADRLVERVQAGDLGAGARDLTGITVTLHESHIAWASYERSL

SEQ ID NO: 22684 - protein, 132 aa, Micromonospora citrea
  misc_feature (1)..(132): tr|A0A1C6TXC2|A0A1C6TXC2_9ACTN 6-pyruvoyl-tetrahydropte rin synthase OS=Micromonospora citrea OX=47855 GN=GA007 0606_0967 PE=4 SV=1
MFSVTVRDHMMIAHSFRGEVFGPAQRLHGATFVVDATFRRADLDADGVVVDIGLATEQLRAVLGELTYRNLDDEPAFAGVNTTTEVLARTVADRLAERARGGDLGAGARALAGITVTLHESHVAWASCERSL

SEQ ID NO: 22685 - protein, 132 aa, Micromonospora coriariae
  misc_feature (1)..(132): tr|A0A1C4XKH6|A0A1C4XKH6_9ACTN 6-pyruvoyl-tetrahydropte rin synthase OS=Micromonospora coriariae OX=285665 GN=G A0070607_5399 PE=4 SV=1
MFSVTVRDHMMIAHSFRGEVFGPAQRLHGATFVVDATFRRPDLDADGIVVDIGLATEQLRAVVGELSYRNLDDEPAFAGVNTTTEVLARTVADRLAERVHAGELGDGARELVGITVTLHESHVAWASYERAL

SEQ ID NO: 22686 - protein, 132 aa, Micromonospora costi
  misc_feature (1)..(132): tr|A0A3B0A078|A0A3B0A078_9ACTN 6-carboxytetrahydropteri n synthase OS=Micromonospora costi OX=1530042 GN=D7193_ 23145 PE=4 SV=1
MFSVTVRDHMMIAHSFRGDVFGPAQRLHGATFVVDATFRRAEVDADGIVVDIGLATEQLKAVLGDLTYRNLDDEPAFAGVNTTTEVLARTVADRLVERVHAGQLGEGARQLAGITVTLHESHVAWASYERTL

SEQ ID NO: 22687 - protein, 132 aa, Micromonospora coxensis
  misc_feature (1)..(132): tr|A0A1C5HBJ2|A0A1C5HBJ2_9ACTN 6-pyruvoyl-tetrahydropte rin synthase OS=Micromonospora coxensis OX=356852 GN=GA 0070614_1079 PE=4 SV=1
MFSVTVRDHIMIAHSFRGEVFGPAQKLHGATFVVDATFRRADLDADGIVVDIGLATTELKAVLAELNYRNLDDEPAFAGVNTTTEVLCRTIADRLAERVHAGSLGEGARQLAGITVTLHESHVAWAAYERSL

SEQ ID NO: 22688 - protein, 132 aa, Micromonospora cremea
  misc_feature (1)..(132): tr|A0A1N5W332|A0A1N5W332_9ACTN 6-pyruvoyl-tetrahydropte rin synthase OS=Micromonospora cremea OX=709881 GN=SAMN 04489832_2035 PE=4 SV=1
MFSVTVRDHMMIAHSFRGEVFGPAQRLHGATFVVDATFRRPDLDADGIVVDIGLATEQLRAVLGELTYRNLDDEAAFAGVNTTTEVLARTVADRLAERVHAGELGAGARGLAGITVTLHESHVAWASYERSL

SEQ ID NO: 22689 - protein, 146 aa, Micromonospora deserti
  misc_feature (1)..(146): tr|A0A2W2C0N4|A0A2W2C0N4_9ACTN Uncharacterized protein OS=Micromonospora deserti OX=2070366 GN=C1I99_31865 PE= 4 SV=1
MSWVTVYETGSSGANFNGQSYRIWKEMTLDSAVRLRHAPGGHPLAGTHGHTFTLRLHLAAPLDAVMGWTVDFGDVKALFNPIFKRLDHHPLYEIANLPDGDAASIAAWVLREGGAVLPAIDRVDLYETRGCGAIVSRADSEELIPV

SEQ ID NO: 22690 - protein, 132 aa, Micromonospora deserti
  misc_feature (1)..(132): tr|A0A2W2C6I5|A0A2W2C6I5_9ACTN Uncharacterized protein OS=Micromonospora deserti OX=2070366 GN=C1I99_19600 PE= 4 SV=1
MFNVTVRDHMMVAHSFRGEVFGPAQRLHGATFVVDATFRRADLDADGVVVDIGRATEQLKAVLGELTYRNLDDDPAFAGVNTTTEVLARAVADRLAERVHAGELGANAREMAGITVTLHESHVAWASYERSL

SEQ ID NO: 22691 - protein, 132 aa, Micromonospora eburnea
  misc_feature (1)..(132): tr|A0A1C6UI41|A0A1C6UI41_9ACTN 6-pyruvoyl-tetrahydropte rin synthase OS=Micromonospora eburnea OX=227316 GN=GA0 070604_2794 PE=4 SV=1
MFSVTVRDHMMVAHSFRGEVFGPAQRLHGATFVVDATFRRPELDADGIVVDIGLATEQLKAVLGALTYRNLDDEPAFAGVNTTTEVLARTVADRLAEAVHAGRLGAGAHGLAGITVTLHESHVAWASYERSL

SEQ ID NO: 22692 - protein, 132 aa, Micromonospora echinaurantiaca
  misc_feature (1)..(132): tr|A0A1C5HKH7|A0A1C5HKH7_9ACTN 6-pyruvoyl-tetrahydropte rin synthase OS=Micromonospora echinaurantiaca OX=47857 GN=GA0070609_1788 PE=4 SV=1
MFSVTVRDHMMIAHSFRGEVFGPAQRLHGATFVVDATFRRADLDADGIVVDIGLATEQLKAVLAELTYRNLDDEPAFAGVNTTTEVLARTVADRLADRVRAGDLGPGARGLAGITVTLHESHIAWASYERSL

SEQ ID NO: 22693 - protein, 132 aa, Micromonospora echinofusca
  misc_feature (1)..(132): tr|A0A1C5G7P2|A0A1C5G7P2_9ACTN 6-pyruvoyl-tetrahydropte rin synthase OS=Micromonospora echinofusca OX=47858 GN= GA0070610_2145 PE=4 SV=1
MFSVTVRDHMMIAHSFRGEVFGPAQRLHGATFVVDATFRRRELDADGVVVDIGLATAQLRAVLGELTYRNLDDDPAFAGVNTTTEVLARAVADRLAARVRAGDLGAGARALAGITVTLHESHVAWASYERSL

SEQ ID NO: 22694 - protein, 117 aa, Micromonospora echinospora
  misc_feature (1)..(117): tr|A0A0K0K539|A0A0K0K539_MICEC 6-carboxy-5,6,7,8-tetrah ydropterin synthase OS=Micromonospora echinospora OX=18 77 GN=genG PE=3 SV=1
MEIFREFTFEAAHRLPNVPEGHKCARLHGHSYRVAVHVSGDVDPQAGWVMDFGDLKQAFEPVRDQLDHHYLNEVPGLENPTSETLARWIWDRLADRLPLSAVSVRETCTSGCVYRGD

SEQ ID NO: 22695 - protein, 117 aa, Micromonospora echinospora
  misc_feature (1)..(117): tr|Q2MG77|Q2MG77_MICEC 6-carboxy-5,6,7,8-tetrahydropter in synthase OS=Micromonospora echinospora OX=1877 GN=ge nG PE=3 SV=1
MEIFREFTFEAAHRLPNVPEGHKCARLHGHSYRVAVHVSGDVDPQAGWVMDFGDLKRAFEPVRDQLDHHYLNEVPGLENPTSETLARWIWDRLADRLPLSAVSVRETCTSGCVYRGD

SEQ ID NO: 22696 - protein, 132 aa, Micromonospora endolithica
  misc_feature (1)..(132): tr|A0A3A9ZJA3|A0A3A9ZJA3_9ACTN 6-carboxytetrahydropteri n synthase OS=Micromonospora endolithica OX=230091 GN=D 7223_14075 PE=4 SV=1
MFSVTVRDHMMIAHSFRGEVFGPAQRLHGATFVVDATFRRADLDADGIVVDIGRATEQLRAVLGELSYRNLDEEPAFAGVNTTTEVLARTVADRLADRVHAGDLGDGARGLAGITVTLHESHVAWASYERPL

SEQ ID NO: 22697 - protein, 132 aa, Micromonospora globbae
  misc_feature (1)..(132): tr|A0A420F843|A0A420F843_9ACTN 6-carboxytetrahydropteri n synthase OS=Micromonospora globbae OX=1894969 GN=D7I4 3_00490 PE=4 SV=1
MFSVTVRDHMMIAHSFRGEVFGPAQRLHGATFVVDATFRRAELDADGIVVDIGLATEQLKEILGELTYRNLDEEPAFAGMNTTTEVLARTVADRLAERVHAGRLGEGARGLAGLTVTLHESHVAWASYERTL

SEQ ID NO: 22698 - protein, 132 aa, Micromonospora globispora
  misc_feature (1)..(132): tr|A0A317KDL5|A0A317KDL5_9ACTN Uncharacterized protein OS=Micromonospora globispora OX=1450148 GN=DKL51_28890 PE=4 SV=1
MFSVTVRDHMMVAHSFRGEVFGPAQRLHGATFVVDATFRRPDLDADGIVVDIGLATTQLKAVLGELTYRNLDDEPAFAGVNTTTEVLARTVADRLAERVHAGELGNGARGLAGITVTLHESHVAWASYERSL

SEQ ID NO: 22699 - protein, 132 aa, Micromonospora haikouensis
  misc_feature (1)..(132): tr|A0A0D0W0U0|A0A0D0W0U0_9ACTN 6-pyruvoyl-tetrahydropte rin synthase OS=Micromonospora haikouensis OX=686309 GN =GA0070558_1319 PE=4 SV=1
MFSVTVRDHMMIAHSFRGDVFGPAQRLHGATFVVDATFRRPDLDADGIVVDIGLATEQLRAVLGELTYRNLDDEPAFAGVNTTTEVLARTVADRLADRVHAGDLGAGARGLAGITVTLHESHVAWASYERPL

SEQ ID NO: 22700 - protein, 118 aa, Micromonospora haikouensis
  misc_feature (1)..(118): tr|A0A1C4YJL0|A0A1C4YJL0_9ACTN 6-carboxy-5,6,7,8-tetrah ydropterin synthase OS=Micromonospora haikouensis OX=68 6309 GN=GA0070558_15110 PE=3 SV=1
MEIFREFTFEAAHRLPNVPVGHKCARLHGHSYRVQVHVRGDVDPEAGWVMDFGELKKAFQPLLDQLDHYYLNEVPGLENPTSEVLARWIWDRLIGRLPLSTVMVRETCTSGCIYRGER

SEQ ID NO: 22701 - protein, 132 aa, Micromonospora halophytica; identical to SEQ ID NO: 22687
  misc_feature (1)..(132): tr|A0A1C5HJL9|A0A1C5HJL9_9ACTN 6-pyruvoyl-tetrahydropte rin synthase OS=Micromonospora halophytica OX=47864 GN= GA0070560_104287 PE=4 SV=1

SEQ ID NO: 22702 - protein, 132 aa, Micromonospora humi
  misc_feature (1)..(132): tr|A0A1C5GMR7|A0A1C5GMR7_9ACTN 6-pyruvoyl-tetrahydropte rin synthase OS=Micromonospora humi OX=745366 GN=GA0070 213_101218 PE=4 SV=1
MFSVTVRDHMMVAHSFRGEVFGPAQRLHGATFVVDATFRRTELDDDGIVVDIGLATEQLKAVLGELTYRNLDDEPAFAGVNTTTEMLARTVADRLADAVHAGRLGEGARGLAGITVTLHESHVAWASYERSL

SEQ ID NO: 22703 - protein, 132 aa, Micromonospora inaquosa
  misc_feature (1)..(132): tr|A0A3N9W8L0|A0A3N9W8L0_9ACTN Uncharacterized protein OS=Micromonospora inaquosa OX=2203716 GN=DLJ59_29635 PE =4 SV=1
MFSVTVRDHMMIAHSFRGEVFGPAQRLHGATFVVDATFRRPDLDADGIVVDIGLATEQLRAVLSELTYRNLDDEPAFAGVNTTTEVLARTVADRLVDRVHAGELGPGARDLTGITITLHESHIAWASYERSL

SEQ ID NO: 22704 - protein, 132 aa, Micromonospora inositola
  misc_feature (1)..(132): tr|A0A1C5J8B0|A0A1C5J8B0_9ACTN 6-pyruvoyl-tetrahydropte rin synthase OS=Micromonospora inositola OX=47865 GN=GA 0070613_4208 PE=4 SV=1
MFSVTVRDHMMVAHSFTGEVFGPAQRLHGATFVVDATFRRADLDADGIVVDIGLATEQLKAVLGELTYRNLDDEPDFAGVNTTTEVLARTVADRLAERVHAGRLGDGARGLAGITVTLHESHVAWASYERSL

SEQ ID NO: 22705 - protein, 118 aa, Micromonospora inyonensis
  misc_feature (1)..(118): tr|A0A1C6RDY7|A0A1C6RDY7_9ACTN 6-carboxy-5,6,7,8-tetrah ydropterin synthase OS=Micromonospora inyonensis OX=478 66 GN=GA0074694_1133 PE=3 SV=1
MEIFREFTFEAAHRLPNVPEGHKCARLHGHSYRVAVHVSGDVDPRTGWVMDFGDLKRAFEPVRDELDHYYLNDVPGLENPTSEVLARWIWHRLADRLPLSAVSVRETCTSGCVYRGEG

SEQ ID NO: 22706 - protein, 132 aa, Micromonospora kangleipakensis
  misc_feature (1)..(132): tr|A0A4Q8BF87|A0A4Q8BF87_9ACTN 6-pyruvoyl-tetrahydropte rin synthase OS=Micromonospora kangleipakensis OX=10779 42 GN=EV384_5288 PE=4 SV=1
MFSVTVRDHMMVAHSFTGEVFGPAQRLHGATFVVDATFRRPDLDADGIVVDIGLATEQLKAVLAELTYRNLDDEPDFAGVNTTTEVLARTVADRLAERMHAGRLGDGARGLAGITVTLHESHVAWASYERPL

SEQ ID NO: 22707 - protein, 132 aa, Micromonospora krabiensis
  misc_feature (1)..(132): tr|A0A1C3MYQ6|A0A1C3MYQ6_9ACTN 6-pyruvoyl-tetrahydropte rin synthase OS=Micromonospora krabiensis OX=307121 GN= GA0070620_0948 PE=4 SV=1
MFSVTVRDHMMIAHSFRGEVFGPAQRLHGATFVVDATFRRAELDADGIVVDIGLATEQLKAVLGELTYRNLDDEPAFAGVNTTTEVLARTVADRLAEAVHAGRLGEGARGLAGITVTLHESHVAWAGYERAL

SEQ ID NO: 22708 - protein, 132 aa, Micromonospora lupini
  misc_feature (1)..(132): tr|I0L5T3|I0L5T3_9ACTN Uncharacterized protein OS=Micro monospora lupini str. Lupac 08 OX=1150864 GN=MILUP08_44 098 PE=4 SV=1
MFSVTVRDHMMIAHSFRGEVFGPAQRLHGATFVVDAMFRRPDLDADGIVVDIGLATEQLRAVVGELSYRNLDDEPAFAGMNTTTEVLARTVADRLAERVHAGELGPGARELAGITVTLHESHVAWASYERSL

SEQ ID NO: 22709 - protein, 126 aa, Micromonospora lupini
  misc_feature (1)..(126): tr|I0L1T7|I0L1T7_9ACTN 6-carboxy-5,6,7,8-tetrahydropter in synthase OS=Micromonospora lupini str. Lupac 08 OX=1 150864 GN=queD PE=3 SV=1
MFRIGKQFRFEAAHSLPDLSEGHQCARVHGHSYTVEVHLVSDGELTRPGFVVDFAELGPFSAHIRDHFDHRDLNTVLDAPPTSEHLAAYFYKWCRDHLRLPEPVRVEKVRVSETASTFAEYGPDLP
